United States Patent Application Publication US 2024/0066114 A1 - sequence listing, part 9

SEQ ID NO: 12447 - RNA, 3806 nt, Artificial Sequence
  SARS-CoV-2/Wuhan/WIV05/2019__EPI_ISL_402128 spike protein mRNA gc (1-1147)(K986P_V987P_ H1048Q_H1064N_ H1083N_H1101N) Foldon construct
aggagagucccgcagucggcguccagcggcucugcuuguucgugugugugucguugcaggccuuauucaagcuuaccauguucguguuccugguccuccugccccuggugagcucccagugcgugaaccucaccacccgcacgcagcugccgcccgccuacaccaacagcuucacccggggcgucuacuaccccgacaagguguuccgcuccagcgugcugcacuccacccaggaccucuuccugcccuucuucagcaacgucacgugguuccacgccauccacguguccgggaccaacggcaccaagcgguucgacaacccggugcugcccuucaacgacggggucuacuucgcgagcaccgagaaguccaacaucauccgcggcuggaucuucgggacgacccucgacagcaagacccagucccugcugaucgugaacaacgccaccaacguggucaucaaggugugcgaguuccaguucugcaacgaccccuuccucggcguguacuaccacaagaacaacaagagcuggauggaguccgaguuccgggucuacagcuccgccaacaacugcacguucgaguacgugagccagcccuuccugauggaccuggagggcaagcaggggaacuucaagaaccuccgcgaguucguguucaagaacaucgacggcuacuucaagaucuacuccaagcacaccccgaucaaccugguccgggaccugccccagggguucagcgcccucgagccccugguggaccugcccaucggcaucaacaucacccgcuuccagacccuccuggcccugcaccgguccuaccucacgccgggggacagcagcuccggcuggaccgcgggcgccgccgccuacuacgugggguaccugcagccccgcaccuuccugcucaaguacaacgagaacggcaccaucacggacgcggucgacugcgcccuggacccccugagcgagaccaagugcacccucaaguccuucaccguggagaaggggaucuaccagacgagcaacuuccgggugcagcccaccgaguccaucguccgcuucccgaacaucaccaaccugugccccuucggcgagguguucaacgccacccgguucgccagcgucuacgccuggaaccgcaagcggaucuccaacugcguggcggacuacagcgugcuguacaacuccgccagcuucuccacguucaagugcuacggcgucagccccaccaagcucaacgaccugugcuucaccaacguguacgccgacuccuucgugauccgcggggacgagguccggcagaucgcccccggccagaccgggaagaucgccgacuacaacuacaagcugccggacgacuucacgggcugcgugaucgcguggaacagcaacaaccucgacuccaaggucgggggcaacuacaacuaccuguaccgccuguuccgcaagagcaaccucaagcccuucgagcgggacaucuccaccgagaucuaccaggccggcagcacccccugcaacgggguggagggcuucaacugcuacuucccccugcaguccuacggguuccagccgaccaacggcgugggguaccagcccuaccggguggucgugcugagcuucgagcuccugcacgcccccgccacggugugcggccccaagaaguccaccaaccuggucaagaacaagugcgugaacuucaacuucaacggccucaccgggaccggcgugcugaccgagagcaacaagaaguuccugccguuccagcaguucgggcgcgacaucgccgacacgaccgacgcgguccgcgacccccagacccuggagauccucgacaucacccccugcagcuucggcgggguguccgugaucacgccgggcaccaacaccagcaaccaggucgccgugcuguaccaggacgugaacugcaccgagguccccguggccauccacgccgaccagcugacgcccaccuggcggguguacuccaccggcagcaacgucuuccagacccgcgccgggugccucaucggcgcggagcacgugaacaacuccuacgagugcgacauccccaucggggccggcaucugcgccagcuaccagacgcagaccaacuccccgcggcgcgcccggagcguggcgucccagagcaucaucgccuacaccaugucccugggcgccgagaacagcgucgccuacuccaacaacagcaucgccauccccaccaacuucacgaucuccgugaccaccgagauccugcccgugagcaugaccaagacgagcgucgacugcaccauguacaucugcggggacuccaccgagugcagcaaccuccugcugcaguacggcuccuucugcacccagcucaaccgcgcgcugacggggaucgccguggagcaggacaagaacacccaggagguguucgcccaggucaagcagaucuacaagacgcccccgaucaaggacuucggcggguucaacuucagccagauccugcccgaccccuccaagcccagcaagcgguccuucaucgaggaccuccuguucaacaaggugacccuggccgacgccggcuucaucaagcaguacggcgacugccucggggacaucgcggcccgcgaccugaucugcgcccagaaguucaacggccugaccgugcucccgccccugcugaccgacgagaugaucgcccaguacaccagcgcccuccuggcggggaccaucacguccggcuggaccuucggggccggcgccgcccugcagauccccuucgcgaugcagauggccuaccgguucaacggcaucggggucacccagaacgugcucuacgagaaccagaagcugaucgccaaccaguucaacagcgccaucggcaagauccaggacucccugagcuccaccgccagcgcgcucgggaagcugcaggacguggucaaccagaacgcccaggcccugaacacgcucgugaagcagcuguccagcaacuucggcgccaucuccagcgugcugaacgacauccucucccgccuggacccgcccgaggccgaggugcagaucgaccggcugaucaccgggcgccuccagagccugcagaccuacgugacccagcagcugauccgggcggccgagauccgcgccagcgccaaccucgccgcgaccaagauguccgagugcguccugggccagagcaagcggguggacuucugcggcaagggguaccagcugauguccuucccccagagcgccccgcacggcguggucuuccucaacgugacguacguccccgcccaggagaagaacuucaccaccgcccccgcgaucugcaacgacgggaaggcccacuucccccgcgagggcguguucguguccaacgggaccaacugguucgucacgcagcggaacuucuacgagccgcagaucaucaccaccgacaacaccuucgugagcggcaacugcgacguggucaucggcaucgugaacaacacgguguacgacccccugcagcccgagcuggacuccggcgggagcggcuacauccccgaggccccgcgcgacgggcaggccuacgugcggaaggacggcgaguggguccugcucagcaccuuccugugaggacuagucccuguucccagagcccacuuuuuuuucuuuuuuugaaauaaaauagccugucuuucagaucucaaaggcucuuuucagagccaccaaaaaaaaaaaaaaaaaaaaaaaaaaaaaaaaaaaaaaaaaaaaaaaaaaaaaaaaaaaaaaaaaaaaaaaaaaaaaaaaaaaaaaaaaaaaaaaaaaaaa

SEQ ID NO: 12448 - RNA, 3806 nt, Artificial Sequence
  SARS-CoV-2/Wuhan/WIV05/2019__EPI_ISL_402128 spike protein mRNA gc (1-1147)(I712C_T1077C) Foldon construct
aggagagucccgcagucggcguccagcggcucugcuuguucgugugugugucguugcaggccuuauucaagcuuaccauguucguguuccugguccuccugccccuggugagcucccagugcgugaaccucaccacccgcacgcagcugccgcccgccuacaccaacagcuucacccggggcgucuacuaccccgacaagguguuccgcuccagcgugcugcacuccacccaggaccucuuccugcccuucuucagcaacgucacgugguuccacgccauccacguguccgggaccaacggcaccaagcgguucgacaacccggugcugcccuucaacgacggggucuacuucgcgagcaccgagaaguccaacaucauccgcggcuggaucuucgggacgacccucgacagcaagacccagucccugcugaucgugaacaacgccaccaacguggucaucaaggugugcgaguuccaguucugcaacgaccccuuccucggcguguacuaccacaagaacaacaagagcuggauggaguccgaguuccgggucuacagcuccgccaacaacugcacguucgaguacgugagccagcccuuccugauggaccuggagggcaagcaggggaacuucaagaaccuccgcgaguucguguucaagaacaucgacggcuacuucaagaucuacuccaagcacaccccgaucaaccugguccgggaccugccccagggguucagcgcccucgagccccugguggaccugcccaucggcaucaacaucacccgcuuccagacccuccuggcccugcaccgguccuaccucacgccgggggacagcagcuccggcuggaccgcgggcgccgccgccuacuacgugggguaccugcagccccgcaccuuccugcucaaguacaacgagaacggcaccaucacggacgcggucgacugcgcccuggacccccugagcgagaccaagugcacccucaaguccuucaccguggagaaggggaucuaccagacgagcaacuuccgggugcagcccaccgaguccaucguccgcuucccgaacaucaccaaccugugccccuucggcgagguguucaacgccacccgguucgccagcgucuacgccuggaaccgcaagcggaucuccaacugcguggcggacuacagcgugcuguacaacuccgccagcuucuccacguucaagugcuacggcgucagccccaccaagcucaacgaccugugcuucaccaacguguacgccgacuccuucgugauccgcggggacgagguccggcagaucgcccccggccagaccgggaagaucgccgacuacaacuacaagcugccggacgacuucacgggcugcgugaucgcguggaacagcaacaaccucgacuccaaggucgggggcaacuacaacuaccuguaccgccuguuccgcaagagcaaccucaagcccuucgagcgggacaucuccaccgagaucuaccaggccggcagcacccccugcaacgggguggagggcuucaacugcuacuucccccugcaguccuacggguuccagccgaccaacggcgugggguaccagcccuaccggguggucgugcugagcuucgagcuccugcacgcccccgccacggugugcggccccaagaaguccaccaaccuggucaagaacaagugcgugaacuucaacuucaacggccucaccgggaccggcgugcugaccgagagcaacaagaaguuccugccguuccagcaguucgggcgcgacaucgccgacacgaccgacgcgguccgcgacccccagacccuggagauccucgacaucacccccugcagcuucggcgggguguccgugaucacgccgggcaccaacaccagcaaccaggucgccgugcuguaccaggacgugaacugcaccgagguccccguggccauccacgccgaccagcugacgcccaccuggcggguguacuccaccggcagcaacgucuuccagacccgcgccgggugccucaucggcgcggagcacgugaacaacuccuacgagugcgacauccccaucggggccggcaucugcgccagcuaccagacgcagaccaacuccccgcggcgcgcccggagcguggcgucccagagcaucaucgccuacaccaugucccugggcgccgagaacagcgucgccuacuccaacaacagcugcgccauccccaccaacuucacgaucuccgugaccaccgagauccugcccgugagcaugaccaagacgagcgucgacugcaccauguacaucugcggggacuccaccgagugcagcaaccuccugcugcaguacggcuccuucugcacccagcucaaccgcgcgcugacggggaucgccguggagcaggacaagaacacccaggagguguucgcccaggucaagcagaucuacaagacgcccccgaucaaggacuucggcggguucaacuucagccagauccugcccgaccccuccaagcccagcaagcgguccuucaucgaggaccuccuguucaacaaggugacccuggccgacgccggcuucaucaagcaguacggcgacugccucggggacaucgcggcccgcgaccugaucugcgcccagaaguucaacggccugaccgugcucccgccccugcugaccgacgagaugaucgcccaguacaccagcgcccuccuggcggggaccaucacguccggcuggaccuucggggccggcgccgcccugcagauccccuucgcgaugcagauggccuaccgguucaacggcaucggggucacccagaacgugcucuacgagaaccagaagcugaucgccaaccaguucaacagcgccaucggcaagauccaggacucccugagcuccaccgccagcgcgcucgggaagcugcaggacguggucaaccagaacgcccaggcccugaacacgcucgugaagcagcuguccagcaacuucggcgccaucuccagcgugcugaacgacauccucucccgccuggacaaggucgaggccgaggugcagaucgaccggcugaucaccgggcgccuccagagccugcagaccuacgugacccagcagcugauccgggcggccgagauccgcgccagcgccaaccucgccgcgaccaagauguccgagugcguccugggccagagcaagcggguggacuucugcggcaagggguaccaccugauguccuucccccagagcgccccgcacggcguggucuuccuccacgugacguacguccccgcccaggagaagaacuucaccugcgcccccgcgaucugccacgacgggaaggcccacuucccccgcgagggcguguucguguccaacgggacccacugguucgucacgcagcggaacuucuacgagccgcagaucaucaccaccgacaacaccuucgugagcggcaacugcgacguggucaucggcaucgugaacaacacgguguacgacccccugcagcccgagcuggacuccggcgggagcggcuacauccccgaggccccgcgcgacgggcaggccuacgugcggaaggacggcgaguggguccugcucagcaccuuccugugaggacuagucccuguucccagagcccacuuuuuuuucuuuuuuugaaauaaaauagccugucuuucagaucucaaaggcucuuuucagagccaccaaaaaaaaaaaaaaaaaaaaaaaaaaaaaaaaaaaaaaaaaaaaaaaaaaaaaaaaaaaaaaaaaaaaaaaaaaaaaaaaaaaaaaaaaaaaaaaaaaaaa

SEQ ID NO: 12449 - RNA, 3806 nt, Artificial Sequence
  SARS-CoV-2/Wuhan/WIV05/2019__EPI_ISL_402128 spike protein mRNA gc (1-1147)(I714C_Y1110C) Foldon construct
aggagagucccgcagucggcguccagcggcucugcuuguucgugugugugucguugcaggccuuauucaagcuuaccauguucguguuccugguccuccugccccuggugagcucccagugcgugaaccucaccacccgcacgcagcugccgcccgccuacaccaacagcuucacccggggcgucuacuaccccgacaagguguuccgcuccagcgugcugcacuccacccaggaccucuuccugcccuucuucagcaacgucacgugguuccacgccauccacguguccgggaccaacggcaccaagcgguucgacaacccggugcugcccuucaacgacggggucuacuucgcgagcaccgagaaguccaacaucauccgcggcuggaucuucgggacgacccucgacagcaagacccagucccugcugaucgugaacaacgccaccaacguggucaucaaggugugcgaguuccaguucugcaacgaccccuuccucggcguguacuaccacaagaacaacaagagcuggauggaguccgaguuccgggucuacagcuccgccaacaacugcacguucgaguacgugagccagcccuuccugauggaccuggagggcaagcaggggaacuucaagaaccuccgcgaguucguguucaagaacaucgacggcuacuucaagaucuacuccaagcacaccccgaucaaccugguccgggaccugccccagggguucagcgcccucgagccccugguggaccugcccaucggcaucaacaucacccgcuuccagacccuccuggcccugcaccgguccuaccucacgccgggggacagcagcuccggcuggaccgcgggcgccgccgccuacuacgugggguaccugcagccccgcaccuuccugcucaaguacaacgagaacggcaccaucacggacgcggucgacugcgcccuggacccccugagcgagaccaagugcacccucaaguccuucaccguggagaaggggaucuaccagacgagcaacuuccgggugcagcccaccgaguccaucguccgcuucccgaacaucaccaaccugugccccuucggcgagguguucaacgccacccgguucgccagcgucuacgccuggaaccgcaagcggaucuccaacugcguggcggacuacagcgugcuguacaacuccgccagcuucuccacguucaagugcuacggcgucagccccaccaagcucaacgaccugugcuucaccaacguguacgccgacuccuucgugauccgcggggacgagguccggcagaucgcccccggccagaccgggaagaucgccgacuacaacuacaagcugccggacgacuucacgggcugcgugaucgcguggaacagcaacaaccucgacuccaaggucgggggcaacuacaacuaccuguaccgccuguuccgcaagagcaaccucaagcccuucgagcgggacaucuccaccgagaucuaccaggccggcagcacccccugcaacgggguggagggcuucaacugcuacuucccccugcaguccuacggguuccagccgaccaacggcgugggguaccagcccuaccggguggucgugcugagcuucgagcuccugcacgcccccgccacggugugcggccccaagaaguccaccaaccuggucaagaacaagugcgugaacuucaacuucaacggccucaccgggaccggcgugcugaccgagagcaacaagaaguuccugccguuccagcaguucgggcgcgacaucgccgacacgaccgacgcgguccgcgacccccagacccuggagauccucgacaucacccccugcagcuucggcgggguguccgugaucacgccgggcaccaacaccagcaaccaggucgccgugcuguaccaggacgugaacugcaccgagguccccguggccauccacgccgaccagcugacgcccaccuggcggguguacuccaccggcagcaacgucuuccagacccgcgccgggugccucaucggcgcggagcacgugaacaacuccuacgagugcgacauccccaucggggccggcaucugcgccagcuaccagacgcagaccaacuccccgcggcgcgcccggagcguggcgucccagagcaucaucgccuacaccaugucccugggcgccgagaacagcgucgccuacuccaacaacagcaucgccugccccaccaacuucacgaucuccgugaccaccgagauccugcccgugagcaugaccaagacgagcgucgacugcaccauguacaucugcggggacuccaccgagugcagcaaccuccugcugcaguacggcuccuucugcacccagcucaaccgcgcgcugacggggaucgccguggagcaggacaagaacacccaggagguguucgcccaggucaagcagaucuacaagacgcccccgaucaaggacuucggcggguucaacuucagccagauccugcccgaccccuccaagcccagcaagcgguccuucaucgaggaccuccuguucaacaaggugacccuggccgacgccggcuucaucaagcaguacggcgacugccucggggacaucgcggcccgcgaccugaucugcgcccagaaguucaacggccugaccgugcucccgccccugcugaccgacgagaugaucgcccaguacaccagcgcccuccuggcggggaccaucacguccggcuggaccuucggggccggcgccgcccugcagauccccuucgcgaugcagauggccuaccgguucaacggcaucggggucacccagaacgugcucuacgagaaccagaagcugaucgccaaccaguucaacagcgccaucggcaagauccaggacucccugagcuccaccgccagcgcgcucgggaagcugcaggacguggucaaccagaacgcccaggcccugaacacgcucgugaagcagcuguccagcaacuucggcgccaucuccagcgugcugaacgacauccucucccgccuggacaaggucgaggccgaggugcagaucgaccggcugaucaccgggcgccuccagagccugcagaccuacgugacccagcagcugauccgggcggccgagauccgcgccagcgccaaccucgccgcgaccaagauguccgagugcguccugggccagagcaagcggguggacuucugcggcaagggguaccaccugauguccuucccccagagcgccccgcacggcguggucuuccuccacgugacguacguccccgcccaggagaagaacuucaccaccgcccccgcgaucugccacgacgggaaggcccacuucccccgcgagggcguguucguguccaacgggacccacugguucgucacgcagcggaacuucugcgagccgcagaucaucaccaccgacaacaccuucgugagcggcaacugcgacguggucaucggcaucgugaacaacacgguguacgacccccugcagcccgagcuggacuccggcgggagcggcuacauccccgaggccccgcgcgacgggcaggccuacgugcggaaggacggcgaguggguccugcucagcaccuuccugugaggacuagucccuguucccagagcccacuuuuuuuucuuuuuuugaaauaaaauagccugucuuucagaucucaaaggcucuuuucagagccaccaaaaaaaaaaaaaaaaaaaaaaaaaaaaaaaaaaaaaaaaaaaaaaaaaaaaaaaaaaaaaaaaaaaaaaaaaaaaaaaaaaaaaaaaaaaaaaaaaaaaa

SEQ ID NO: 12450 - RNA, 3806 nt, Artificial Sequence
  SARS-CoV-2/Wuhan/WIV05/2019__EPI_ISL_402128 spike protein mRNA gc (1-1147)(P715C_P1069C) Foldon construct
aggagagucccgcagucggcguccagcggcucugcuuguucgugugugugucguugcaggccuuauucaagcuuaccauguucguguuccugguccuccugccccuggugagcucccagugcgugaaccucaccacccgcacgcagcugccgcccgccuacaccaacagcuucacccggggcgucuacuaccccgacaagguguuccgcuccagcgugcugcacuccacccaggaccucuuccugcccuucuucagcaacgucacgugguuccacgccauccacguguccgggaccaacggcaccaagcgguucgacaacccggugcugcccuucaacgacggggucuacuucgcgagcaccgagaaguccaacaucauccgcggcuggaucuucgggacgacccucgacagcaagacccagucccugcugaucgugaacaacgccaccaacguggucaucaaggugugcgaguuccaguucugcaacgaccccuuccucggcguguacuaccacaagaacaacaagagcuggauggaguccgaguuccgggucuacagcuccgccaacaacugcacguucgaguacgugagccagcccuuccugauggaccuggagggcaagcaggggaacuucaagaaccuccgcgaguucguguucaagaacaucgacggcuacuucaagaucuacuccaagcacaccccgaucaaccugguccgggaccugccccagggguucagcgcccucgagccccugguggaccugcccaucggcaucaacaucacccgcuuccagacccuccuggcccugcaccgguccuaccucacgccgggggacagcagcuccggcuggaccgcgggcgccgccgccuacuacgugggguaccugcagccccgcaccuuccugcucaaguacaacgagaacggcaccaucacggacgcggucgacugcgcccuggacccccugagcgagaccaagugcacccucaaguccuucaccguggagaaggggaucuaccagacgagcaacuuccgggugcagcccaccgaguccaucguccgcuucccgaacaucaccaaccugugccccuucggcgagguguucaacgccacccgguucgccagcgucuacgccuggaaccgcaagcggaucuccaacugcguggcggacuacagcgugcuguacaacuccgccagcuucuccacguucaagugcuacggcgucagccccaccaagcucaacgaccugugcuucaccaacguguacgccgacuccuucgugauccgcggggacgagguccggcagaucgcccccggccagaccgggaagaucgccgacuacaacuacaagcugccggacgacuucacgggcugcgugaucgcguggaacagcaacaaccucgacuccaaggucgggggcaacuacaacuaccuguaccgccuguuccgcaagagcaaccucaagcccuucgagcgggacaucuccaccgagaucuaccaggccggcagcacccccugcaacgggguggagggcuucaacugcuacuucccccugcaguccuacggguuccagccgaccaacggcgugggguaccagcccuaccggguggucgugcugagcuucgagcuccugcacgcccccgccacggugugcggccccaagaaguccaccaaccuggucaagaacaagugcgugaacuucaacuucaacggccucaccgggaccggcgugcugaccgagagcaacaagaaguuccugccguuccagcaguucgggcgcgacaucgccgacacgaccgacgcgguccgcgacccccagacccuggagauccucgacaucacccccugcagcuucggcgggguguccgugaucacgccgggcaccaacaccagcaaccaggucgccgugcuguaccaggacgugaacugcaccgagguccccguggccauccacgccgaccagcugacgcccaccuggcggguguacuccaccggcagcaacgucuuccagacccgcgccgggugccucaucggcgcggagcacgugaacaacuccuacgagugcgacauccccaucggggccggcaucugcgccagcuaccagacgcagaccaacuccccgcggcgcgcccggagcguggcgucccagagcaucaucgccuacaccaugucccugggcgccgagaacagcgucgccuacuccaacaacagcaucgccaucugcaccaacuucacgaucuccgugaccaccgagauccugcccgugagcaugaccaagacgagcgucgacugcaccauguacaucugcggggacuccaccgagugcagcaaccuccugcugcaguacggcuccuucugcacccagcucaaccgcgcgcugacggggaucgccguggagcaggacaagaacacccaggagguguucgcccaggucaagcagaucuacaagacgcccccgaucaaggacuucggcggguucaacuucagccagauccugcccgaccccuccaagcccagcaagcgguccuucaucgaggaccuccuguucaacaaggugacccuggccgacgccggcuucaucaagcaguacggcgacugccucggggacaucgcggcccgcgaccugaucugcgcccagaaguucaacggccugaccgugcucccgccccugcugaccgacgagaugaucgcccaguacaccagcgcccuccuggcggggaccaucacguccggcuggaccuucggggccggcgccgcccugcagauccccuucgcgaugcagauggccuaccgguucaacggcaucggggucacccagaacgugcucuacgagaaccagaagcugaucgccaaccaguucaacagcgccaucggcaagauccaggacucccugagcuccaccgccagcgcgcucgggaagcugcaggacguggucaaccagaacgcccaggcccugaacacgcucgugaagcagcuguccagcaacuucggcgccaucuccagcgugcugaacgacauccucucccgccuggacaaggucgaggccgaggugcagaucgaccggcugaucaccgggcgccuccagagccugcagaccuacgugacccagcagcugauccgggcggccgagauccgcgccagcgccaaccucgccgcgaccaagauguccgagugcguccugggccagagcaagcggguggacuucugcggcaagggguaccaccugauguccuucccccagagcgccccgcacggcguggucuuccuccacgugacguacgucugcgcccaggagaagaacuucaccaccgcccccgcgaucugccacgacgggaaggcccacuucccccgcgagggcguguucguguccaacgggacccacugguucgucacgcagcggaacuucuacgagccgcagaucaucaccaccgacaacaccuucgugagcggcaacugcgacguggucaucggcaucgugaacaacacgguguacgacccccugcagcccgagcuggacuccggcgggagcggcuacauccccgaggccccgcgcgacgggcaggccuacgugcggaaggacggcgaguggguccugcucagcaccuuccugugaggacuagucccuguucccagagcccacuuuuuuuucuuuuuuugaaauaaaauagccugucuuucagaucucaaaggcucuuuucagagccaccaaaaaaaaaaaaaaaaaaaaaaaaaaaaaaaaaaaaaaaaaaaaaaaaaaaaaaaaaaaaaaaaaaaaaaaaaaaaaaaaaaaaaaaaaaaaaaaaaaaaa

SEQ ID NO: 12451 - RNA, 3806 nt, Artificial Sequence
  SARS-CoV-2/Wuhan/WIV05/2019__EPI_ISL_402128 spike protein mRNA gc (1-1147)(G889C_L1034C) Foldon construct
aggagagucccgcagucggcguccagcggcucugcuuguucgugugugugucguugcaggccuuauucaagcuuaccauguucguguuccugguccuccugccccuggugagcucccagugcgugaaccucaccacccgcacgcagcugccgcccgccuacaccaacagcuucacccggggcgucuacuaccccgacaagguguuccgcuccagcgugcugcacuccacccaggaccucuuccugcccuucuucagcaacgucacgugguuccacgccauccacguguccgggaccaacggcaccaagcgguucgacaacccggugcugcccuucaacgacggggucuacuucgcgagcaccgagaaguccaacaucauccgcggcuggaucuucgggacgacccucgacagcaagacccagucccugcugaucgugaacaacgccaccaacguggucaucaaggugugcgaguuccaguucugcaacgaccccuuccucggcguguacuaccacaagaacaacaagagcuggauggaguccgaguuccgggucuacagcuccgccaacaacugcacguucgaguacgugagccagcccuuccugauggaccuggagggcaagcaggggaacuucaagaaccuccgcgaguucguguucaagaacaucgacggcuacuucaagaucuacuccaagcacaccccgaucaaccugguccgggaccugccccagggguucagcgcccucgagccccugguggaccugcccaucggcaucaacaucacccgcuuccagacccuccuggcccugcaccgguccuaccucacgccgggggacagcagcuccggcuggaccgcgggcgccgccgccuacuacgugggguaccugcagccccgcaccuuccugcucaaguacaacgagaacggcaccaucacggacgcggucgacugcgcccuggacccccugagcgagaccaagugcacccucaaguccuucaccguggagaaggggaucuaccagacgagcaacuuccgggugcagcccaccgaguccaucguccgcuucccgaacaucaccaaccugugccccuucggcgagguguucaacgccacccgguucgccagcgucuacgccuggaaccgcaagcggaucuccaacugcguggcggacuacagcgugcuguacaacuccgccagcuucuccacguucaagugcuacggcgucagccccaccaagcucaacgaccugugcuucaccaacguguacgccgacuccuucgugauccgcggggacgagguccggcagaucgcccccggccagaccgggaagaucgccgacuacaacuacaagcugccggacgacuucacgggcugcgugaucgcguggaacagcaacaaccucgacuccaaggucgggggcaacuacaacuaccuguaccgccuguuccgcaagagcaaccucaagcccuucgagcgggacaucuccaccgagaucuaccaggccggcagcacccccugcaacgggguggagggcuucaacugcuacuucccccugcaguccuacggguuccagccgaccaacggcgugggguaccagcccuaccggguggucgugcugagcuucgagcuccugcacgcccccgccacggugugcggccccaagaaguccaccaaccuggucaagaacaagugcgugaacuucaacuucaacggccucaccgggaccggcgugcugaccgagagcaacaagaaguuccugccguuccagcaguucgggcgcgacaucgccgacacgaccgacgcgguccgcgacccccagacccuggagauccucgacaucacccccugcagcuucggcgggguguccgugaucacgccgggcaccaacaccagcaaccaggucgccgugcuguaccaggacgugaacugcaccgagguccccguggccauccacgccgaccagcugacgcccaccuggcggguguacuccaccggcagcaacgucuuccagacccgcgccgggugccucaucggcgcggagcacgugaacaacuccuacgagugcgacauccccaucggggccggcaucugcgccagcuaccagacgcagaccaacuccccgcggcgcgcccggagcguggcgucccagagcaucaucgccuacaccaugucccugggcgccgagaacagcgucgccuacuccaacaacagcaucgccauccccaccaacuucacgaucuccgugaccaccgagauccugcccgugagcaugaccaagacgagcgucgacugcaccauguacaucugcggggacuccaccgagugcagcaaccuccugcugcaguacggcuccuucugcacccagcucaaccgcgcgcugacggggaucgccguggagcaggacaagaacacccaggagguguucgcccaggucaagcagaucuacaagacgcccccgaucaaggacuucggcggguucaacuucagccagauccugcccgaccccuccaagcccagcaagcgguccuucaucgaggaccuccuguucaacaaggugacccuggccgacgccggcuucaucaagcaguacggcgacugccucggggacaucgcggcccgcgaccugaucugcgcccagaaguucaacggccugaccgugcucccgccccugcugaccgacgagaugaucgcccaguacaccagcgcccuccuggcggggaccaucacguccggcuggaccuucugcgccggcgccgcccugcagauccccuucgcgaugcagauggccuaccgguucaacggcaucggggucacccagaacgugcucuacgagaaccagaagcugaucgccaaccaguucaacagcgccaucggcaagauccaggacucccugagcuccaccgccagcgcgcucgggaagcugcaggacguggucaaccagaacgcccaggcccugaacacgcucgugaagcagcuguccagcaacuucggcgccaucuccagcgugcugaacgacauccucucccgccuggacaaggucgaggccgaggugcagaucgaccggcugaucaccgggcgccuccagagccugcagaccuacgugacccagcagcugauccgggcggccgagauccgcgccagcgccaaccucgccgcgaccaagauguccgagugcgucugcggccagagcaagcggguggacuucugcggcaagggguaccaccugauguccuucccccagagcgccccgcacggcguggucuuccuccacgugacguacguccccgcccaggagaagaacuucaccaccgcccccgcgaucugccacgacgggaaggcccacuucccccgcgagggcguguucguguccaacgggacccacugguucgucacgcagcggaacuucuacgagccgcagaucaucaccaccgacaacaccuucgugagcggcaacugcgacguggucaucggcaucgugaacaacacgguguacgacccccugcagcccgagcuggacuccggcgggagcggcuacauccccgaggccccgcgcgacgggcaggccuacgugcggaaggacggcgaguggguccugcucagcaccuuccugugaggacuagucccuguucccagagcccacuuuuuuuucuuuuuuugaaauaaaauagccugucuuucagaucucaaaggcucuuuucagagccaccaaaaaaaaaaaaaaaaaaaaaaaaaaaaaaaaaaaaaaaaaaaaaaaaaaaaaaaaaaaaaaaaaaaaaaaaaaaaaaaaaaaaaaaaaaaaaaaaaaaaa

SEQ ID NO: 12452 - RNA, 3806 nt, Artificial Sequence
  SARS-CoV-2/Wuhan/WIV05/2019__EPI_ISL_402128 spike protein mRNA gc (1-1147)(I909C_Y1047C) Foldon construct
aggagagucccgcagucggcguccagcggcucugcuuguucgugugugugucguugcaggccuuauucaagcuuaccauguucguguuccugguccuccugccccuggugagcucccagugcgugaaccucaccacccgcacgcagcugccgcccgccuacaccaacagcuucacccggggcgucuacuaccccgacaagguguuccgcuccagcgugcugcacuccacccaggaccucuuccugcccuucuucagcaacgucacgugguuccacgccauccacguguccgggaccaacggcaccaagcgguucgacaacccggugcugcccuucaacgacggggucuacuucgcgagcaccgagaaguccaacaucauccgcggcuggaucuucgggacgacccucgacagcaagacccagucccugcugaucgugaacaacgccaccaacguggucaucaaggugugcgaguuccaguucugcaacgaccccuuccucggcguguacuaccacaagaacaacaagagcuggauggaguccgaguuccgggucuacagcuccgccaacaacugcacguucgaguacgugagccagcccuuccugauggaccuggagggcaagcaggggaacuucaagaaccuccgcgaguucguguucaagaacaucgacggcuacuucaagaucuacuccaagcacaccccgaucaaccugguccgggaccugccccagggguucagcgcccucgagccccugguggaccugcccaucggcaucaacaucacccgcuuccagacccuccuggcccugcaccgguccuaccucacgccgggggacagcagcuccggcuggaccgcgggcgccgccgccuacuacgugggguaccugcagccccgcaccuuccugcucaaguacaacgagaacggcaccaucacggacgcggucgacugcgcccuggacccccugagcgagaccaagugcacccucaaguccuucaccguggagaaggggaucuaccagacgagcaacuuccgggugcagcccaccgaguccaucguccgcuucccgaacaucaccaaccugugccccuucggcgagguguucaacgccacccgguucgccagcgucuacgccuggaaccgcaagcggaucuccaacugcguggcggacuacagcgugcuguacaacuccgccagcuucuccacguucaagugcuacggcgucagccccaccaagcucaacgaccugugcuucaccaacguguacgccgacuccuucgugauccgcggggacgagguccggcagaucgcccccggccagaccgggaagaucgccgacuacaacuacaagcugccggacgacuucacgggcugcgugaucgcguggaacagcaacaaccucgacuccaaggucgggggcaacuacaacuaccuguaccgccuguuccgcaagagcaaccucaagcccuucgagcgggacaucuccaccgagaucuaccaggccggcagcacccccugcaacgggguggagggcuucaacugcuacuucccccugcaguccuacggguuccagccgaccaacggcgugggguaccagcccuaccggguggucgugcugagcuucgagcuccugcacgcccccgccacggugugcggccccaagaaguccaccaaccuggucaagaacaagugcgugaacuucaacuucaacggccucaccgggaccggcgugcugaccgagagcaacaagaaguuccugccguuccagcaguucgggcgcgacaucgccgacacgaccgacgcgguccgcgacccccagacccuggagauccucgacaucacccccugcagcuucggcgggguguccgugaucacgccgggcaccaacaccagcaaccaggucgccgugcuguaccaggacgugaacugcaccgagguccccguggccauccacgccgaccagcugacgcccaccuggcggguguacuccaccggcagcaacgucuuccagacccgcgccgggugccucaucggcgcggagcacgugaacaacuccuacgagugcgacauccccaucggggccggcaucugcgccagcuaccagacgcagaccaacuccccgcggcgcgcccggagcguggcgucccagagcaucaucgccuacaccaugucccugggcgccgagaacagcgucgccuacuccaacaacagcaucgccauccccaccaacuucacgaucuccgugaccaccgagauccugcccgugagcaugaccaagacgagcgucgacugcaccauguacaucugcggggacuccaccgagugcagcaaccuccugcugcaguacggcuccuucugcacccagcucaaccgcgcgcugacggggaucgccguggagcaggacaagaacacccaggagguguucgcccaggucaagcagaucuacaagacgcccccgaucaaggacuucggcggguucaacuucagccagauccugcccgaccccuccaagcccagcaagcgguccuucaucgaggaccuccuguucaacaaggugacccuggccgacgccggcuucaucaagcaguacggcgacugccucggggacaucgcggcccgcgaccugaucugcgcccagaaguucaacggccugaccgugcucccgccccugcugaccgacgagaugaucgcccaguacaccagcgcccuccuggcggggaccaucacguccggcuggaccuucggggccggcgccgcccugcagauccccuucgcgaugcagauggccuaccgguucaacggcugcggggucacccagaacgugcucuacgagaaccagaagcugaucgccaaccaguucaacagcgccaucggcaagauccaggacucccugagcuccaccgccagcgcgcucgggaagcugcaggacguggucaaccagaacgcccaggcccugaacacgcucgugaagcagcuguccagcaacuucggcgccaucuccagcgugcugaacgacauccucucccgccuggacaaggucgaggccgaggugcagaucgaccggcugaucaccgggcgccuccagagccugcagaccuacgugacccagcagcugauccgggcggccgagauccgcgccagcgccaaccucgccgcgaccaagauguccgagugcguccugggccagagcaagcggguggacuucugcggcaaggggugccaccugauguccuucccccagagcgccccgcacggcguggucuuccuccacgugacguacguccccgcccaggagaagaacuucaccaccgcccccgcgaucugccacgacgggaaggcccacuucccccgcgagggcguguucguguccaacgggacccacugguucgucacgcagcggaacuucuacgagccgcagaucaucaccaccgacaacaccuucgugagcggcaacugcgacguggucaucggcaucgugaacaacacgguguacgacccccugcagcccgagcuggacuccggcgggagcggcuacauccccgaggccccgcgcgacgggcaggccuacgugcggaaggacggcgaguggguccugcucagcaccuuccugugaggacuagucccuguucccagagcccacuuuuuuuucuuuuuuugaaauaaaauagccugucuuucagaucucaaaggcucuuuucagagccaccaaaaaaaaaaaaaaaaaaaaaaaaaaaaaaaaaaaaaaaaaaaaaaaaaaaaaaaaaaaaaaaaaaaaaaaaaaaaaaaaaaaaaaaaaaaaaaaaaaaaa

SEQ ID NO: 12453 - RNA, 3806 nt, Artificial Sequence
  SARS-CoV-2/Wuhan/WIV05/2019__EPI_ISL_402128 spike protein mRNA gc (1-1147)(Q965C_S1003C) Foldon construct
aggagagucccgcagucggcguccagcggcucugcuuguucgugugugugucguugcaggccuuauucaagcuuaccauguucguguuccugguccuccugccccuggugagcucccagugcgugaaccucaccacccgcacgcagcugccgcccgccuacaccaacagcuucacccggggcgucuacuaccccgacaagguguuccgcuccagcgugcugcacuccacccaggaccucuuccugcccuucuucagcaacgucacgugguuccacgccauccacguguccgggaccaacggcaccaagcgguucgacaacccggugcugcccuucaacgacggggucuacuucgcgagcaccgagaaguccaacaucauccgcggcuggaucuucgggacgacccucgacagcaagacccagucccugcugaucgugaacaacgccaccaacguggucaucaaggugugcgaguuccaguucugcaacgaccccuuccucggcguguacuaccacaagaacaacaagagcuggauggaguccgaguuccgggucuacagcuccgccaacaacugcacguucgaguacgugagccagcccuuccugauggaccuggagggcaagcaggggaacuucaagaaccuccgcgaguucguguucaagaacaucgacggcuacuucaagaucuacuccaagcacaccccgaucaaccugguccgggaccugccccagggguucagcgcccucgagccccugguggaccugcccaucggcaucaacaucacccgcuuccagacccuccuggcccugcaccgguccuaccucacgccgggggacagcagcuccggcuggaccgcgggcgccgccgccuacuacgugggguaccugcagccccgcaccuuccugcucaaguacaacgagaacggcaccaucacggacgcggucgacugcgcccuggacccccugagcgagaccaagugcacccucaaguccuucaccguggagaaggggaucuaccagacgagcaacuuccgggugcagcccaccgaguccaucguccgcuucccgaacaucaccaaccugugccccuucggcgagguguucaacgccacccgguucgccagcgucuacgccuggaaccgcaagcggaucuccaacugcguggcggacuacagcgugcuguacaacuccgccagcuucuccacguucaagugcuacggcgucagccccaccaagcucaacgaccugugcuucaccaacguguacgccgacuccuucgugauccgcggggacgagguccggcagaucgcccccggccagaccgggaagaucgccgacuacaacuacaagcugccggacgacuucacgggcugcgugaucgcguggaacagcaacaaccucgacuccaaggucgggggcaacuacaacuaccuguaccgccuguuccgcaagagcaaccucaagcccuucgagcgggacaucuccaccgagaucuaccaggccggcagcacccccugcaacgggguggagggcuucaacugcuacuucccccugcaguccuacggguuccagccgaccaacggcgugggguaccagcccuaccggguggucgugcugagcuucgagcuccugcacgcccccgccacggugugcggccccaagaaguccaccaaccuggucaagaacaagugcgugaacuucaacuucaacggccucaccgggaccggcgugcugaccgagagcaacaagaaguuccugccguuccagcaguucgggcgcgacaucgccgacacgaccgacgcgguccgcgacccccagacccuggagauccucgacaucacccccugcagcuucggcgggguguccgugaucacgccgggcaccaacaccagcaaccaggucgccgugcuguaccaggacgugaacugcaccgagguccccguggccauccacgccgaccagcugacgcccaccuggcggguguacuccaccggcagcaacgucuuccagacccgcgccgggugccucaucggcgcggagcacgugaacaacuccuacgagugcgacauccccaucggggccggcaucugcgccagcuaccagacgcagaccaacuccccgcggcgcgcccggagcguggcgucccagagcaucaucgccuacaccaugucccugggcgccgagaacagcgucgccuacuccaacaacagcaucgccauccccaccaacuucacgaucuccgugaccaccgagauccugcccgugagcaugaccaagacgagcgucgacugcaccauguacaucugcggggacuccaccgagugcagcaaccuccugcugcaguacggcuccuucugcacccagcucaaccgcgcgcugacggggaucgccguggagcaggacaagaacacccaggagguguucgcccaggucaagcagaucuacaagacgcccccgaucaaggacuucggcggguucaacuucagccagauccugcccgaccccuccaagcccagcaagcgguccuucaucgaggaccuccuguucaacaaggugacccuggccgacgccggcuucaucaagcaguacggcgacugccucggggacaucgcggcccgcgaccugaucugcgcccagaaguucaacggccugaccgugcucccgccccugcugaccgacgagaugaucgcccaguacaccagcgcccuccuggcggggaccaucacguccggcuggaccuucggggccggcgccgcccugcagauccccuucgcgaugcagauggccuaccgguucaacggcaucggggucacccagaacgugcucuacgagaaccagaagcugaucgccaaccaguucaacagcgccaucggcaagauccaggacucccugagcuccaccgccagcgcgcucgggaagcugcaggacguggucaaccagaacgcccaggcccugaacacgcucgugaagugccuguccagcaacuucggcgccaucuccagcgugcugaacgacauccucucccgccuggacaaggucgaggccgaggugcagaucgaccggcugaucaccgggcgccuccagugccugcagaccuacgugacccagcagcugauccgggcggccgagauccgcgccagcgccaaccucgccgcgaccaagauguccgagugcguccugggccagagcaagcggguggacuucugcggcaagggguaccaccugauguccuucccccagagcgccccgcacggcguggucuuccuccacgugacguacguccccgcccaggagaagaacuucaccaccgcccccgcgaucugccacgacgggaaggcccacuucccccgcgagggcguguucguguccaacgggacccacugguucgucacgcagcggaacuucuacgagccgcagaucaucaccaccgacaacaccuucgugagcggcaacugcgacguggucaucggcaucgugaacaacacgguguacgacccccugcagcccgagcuggacuccggcgggagcggcuacauccccgaggccccgcgcgacgggcaggccuacgugcggaaggacggcgaguggguccugcucagcaccuuccugugaggacuagucccuguucccagagcccacuuuuuuuucuuuuuuugaaauaaaauagccugucuuucagaucucaaaggcucuuuucagagccaccaaaaaaaaaaaaaaaaaaaaaaaaaaaaaaaaaaaaaaaaaaaaaaaaaaaaaaaaaaaaaaaaaaaaaaaaaaaaaaaaaaaaaaaaaaaaaaaaaaaaa

SEQ ID NO: 12454 - RNA, 3806 nt, Artificial Sequence
  SARS-CoV-2/Wuhan/WIV05/2019__EPI_ISL_402128 spike protein mRNA gc (1-1147)(F970C_G999C) Foldon construct
aggagagucccgcagucggcguccagcggcucugcuuguucgugugugugucguugcaggccuuauucaagcuuaccauguucguguuccugguccuccugccccuggugagcucccagugcgugaaccucaccacccgcacgcagcugccgcccgccuacaccaacagcuucacccggggcgucuacuaccccgacaagguguuccgcuccagcgugcugcacuccacccaggaccucuuccugcccuucuucagcaacgucacgugguuccacgccauccacguguccgggaccaacggcaccaagcgguucgacaacccggugcugcccuucaacgacggggucuacuucgcgagcaccgagaaguccaacaucauccgcggcuggaucuucgggacgacccucgacagcaagacccagucccugcugaucgugaacaacgccaccaacguggucaucaaggugugcgaguuccaguucugcaacgaccccuuccucggcguguacuaccacaagaacaacaagagcuggauggaguccgaguuccgggucuacagcuccgccaacaacugcacguucgaguacgugagccagcccuuccugauggaccuggagggcaagcaggggaacuucaagaaccuccgcgaguucguguucaagaacaucgacggcuacuucaagaucuacuccaagcacaccccgaucaaccugguccgggaccugccccagggguucagcgcccucgagccccugguggaccugcccaucggcaucaacaucacccgcuuccagacccuccuggcccugcaccgguccuaccucacgccgggggacagcagcuccggcuggaccgcgggcgccgccgccuacuacgugggguaccugcagccccgcaccuuccugcucaaguacaacgagaacggcaccaucacggacgcggucgacugcgcccuggacccccugagcgagaccaagugcacccucaaguccuucaccguggagaaggggaucuaccagacgagcaacuuccgggugcagcccaccgaguccaucguccgcuucccgaacaucaccaaccugugccccuucggcgagguguucaacgccacccgguucgccagcgucuacgccuggaaccgcaagcggaucuccaacugcguggcggacuacagcgugcuguacaacuccgccagcuucuccacguucaagugcuacggcgucagccccaccaagcucaacgaccugugcuucaccaacguguacgccgacuccuucgugauccgcggggacgagguccggcagaucgcccccggccagaccgggaagaucgccgacuacaacuacaagcugccggacgacuucacgggcugcgugaucgcguggaacagcaacaaccucgacuccaaggucgggggcaacuacaacuaccuguaccgccuguuccgcaagagcaaccucaagcccuucgagcgggacaucuccaccgagaucuaccaggccggcagcacccccugcaacgggguggagggcuucaacugcuacuucccccugcaguccuacggguuccagccgaccaacggcgugggguaccagcccuaccggguggucgugcugagcuucgagcuccugcacgcccccgccacggugugcggccccaagaaguccaccaaccuggucaagaacaagugcgugaacuucaacuucaacggccucaccgggaccggcgugcugaccgagagcaacaagaaguuccugccguuccagcaguucgggcgcgacaucgccgacacgaccgacgcgguccgcgacccccagacccuggagauccucgacaucacccccugcagcuucggcgggguguccgugaucacgccgggcaccaacaccagcaaccaggucgccgugcuguaccaggacgugaacugcaccgagguccccguggccauccacgccgaccagcugacgcccaccuggcggguguacuccaccggcagcaacgucuuccagacccgcgccgggugccucaucggcgcggagcacgugaacaacuccuacgagugcgacauccccaucggggccggcaucugcgccagcuaccagacgcagaccaacuccccgcggcgcgcccggagcguggcgucccagagcaucaucgccuacaccaugucccugggcgccgagaacagcgucgccuacuccaacaacagcaucgccauccccaccaacuucacgaucuccgugaccaccgagauccugcccgugagcaugaccaagacgagcgucgacugcaccauguacaucugcggggacuccaccgagugcagcaaccuccugcugcaguacggcuccuucugcacccagcucaaccgcgcgcugacggggaucgccguggagcaggacaagaacacccaggagguguucgcccaggucaagcagaucuacaagacgcccccgaucaaggacuucggcggguucaacuucagccagauccugcccgaccccuccaagcccagcaagcgguccuucaucgaggaccuccuguucaacaaggugacccuggccgacgccggcuucaucaagcaguacggcgacugccucggggacaucgcggcccgcgaccugaucugcgcccagaaguucaacggccugaccgugcucccgccccugcugaccgacgagaugaucgcccaguacaccagcgcccuccuggcggggaccaucacguccggcuggaccuucggggccggcgccgcccugcagauccccuucgcgaugcagauggccuaccgguucaacggcaucggggucacccagaacgugcucuacgagaaccagaagcugaucgccaaccaguucaacagcgccaucggcaagauccaggacucccugagcuccaccgccagcgcgcucgggaagcugcaggacguggucaaccagaacgcccaggcccugaacacgcucgugaagcagcuguccagcaacugcggcgccaucuccagcgugcugaacgacauccucucccgccuggacaaggucgaggccgaggugcagaucgaccggcugaucaccugucgccuccagagccugcagaccuacgugacccagcagcugauccgggcggccgagauccgcgccagcgccaaccucgccgcgaccaagauguccgagugcguccugggccagagcaagcggguggacuucugcggcaagggguaccaccugauguccuucccccagagcgccccgcacggcguggucuuccuccacgugacguacguccccgcccaggagaagaacuucaccaccgcccccgcgaucugccacgacgggaaggcccacuucccccgcgagggcguguucguguccaacgggacccacugguucgucacgcagcggaacuucuacgagccgcagaucaucaccaccgacaacaccuucgugagcggcaacugcgacguggucaucggcaucgugaacaacacgguguacgacccccugcagcccgagcuggacuccggcgggagcggcuacauccccgaggccccgcgcgacgggcaggccuacgugcggaaggacggcgaguggguccugcucagcaccuuccugugaggacuagucccuguucccagagcccacuuuuuuuucuuuuuuugaaauaaaauagccugucuuucagaucucaaaggcucuuuucagagccaccaaaaaaaaaaaaaaaaaaaaaaaaaaaaaaaaaaaaaaaaaaaaaaaaaaaaaaaaaaaaaaaaaaaaaaaaaaaaaaaaaaaaaaaaaaaaaaaaaaaaa

SEQ ID NO: 12455 - RNA, 3806 nt, Artificial Sequence
  SARS-CoV-2/Wuhan/WIV05/2019__EPI_ISL_402128 spike protein mRNA gc (1-1147)(A972C_R995C) Foldon construct
aggagagucccgcagucggcguccagcggcucugcuuguucgugugugugucguugcaggccuuauucaagcuuaccauguucguguuccugguccuccugccccuggugagcucccagugcgugaaccucaccacccgcacgcagcugccgcccgccuacaccaacagcuucacccggggcgucuacuaccccgacaagguguuccgcuccagcgugcugcacuccacccaggaccucuuccugcccuucuucagcaacgucacgugguuccacgccauccacguguccgggaccaacggcaccaagcgguucgacaacccggugcugcccuucaacgacggggucuacuucgcgagcaccgagaaguccaacaucauccgcggcuggaucuucgggacgacccucgacagcaagacccagucccugcugaucgugaacaacgccaccaacguggucaucaaggugugcgaguuccaguucugcaacgaccccuuccucggcguguacuaccacaagaacaacaagagcuggauggaguccgaguuccgggucuacagcuccgccaacaacugcacguucgaguacgugagccagcccuuccugauggaccuggagggcaagcaggggaacuucaagaaccuccgcgaguucguguucaagaacaucgacggcuacuucaagaucuacuccaagcacaccccgaucaaccugguccgggaccugccccagggguucagcgcccucgagccccugguggaccugcccaucggcaucaacaucacccgcuuccagacccuccuggcccugcaccgguccuaccucacgccgggggacagcagcuccggcuggaccgcgggcgccgccgccuacuacgugggguaccugcagccccgcaccuuccugcucaaguacaacgagaacggcaccaucacggacgcggucgacugcgcccuggacccccugagcgagaccaagugcacccucaaguccuucaccguggagaaggggaucuaccagacgagcaacuuccgggugcagcccaccgaguccaucguccgcuucccgaacaucaccaaccugugccccuucggcgagguguucaacgccacccgguucgccagcgucuacgccuggaaccgcaagcggaucuccaacugcguggcggacuacagcgugcuguacaacuccgccagcuucuccacguucaagugcuacggcgucagccccaccaagcucaacgaccugugcuucaccaacguguacgccgacuccuucgugauccgcggggacgagguccggcagaucgcccccggccagaccgggaagaucgccgacuacaacuacaagcugccggacgacuucacgggcugcgugaucgcguggaacagcaacaaccucgacuccaaggucgggggcaacuacaacuaccuguaccgccuguuccgcaagagcaaccucaagcccuucgagcgggacaucuccaccgagaucuaccaggccggcagcacccccugcaacgggguggagggcuucaacugcuacuucccccugcaguccuacggguuccagccgaccaacggcgugggguaccagcccuaccggguggucgugcugagcuucgagcuccugcacgcccccgccacggugugcggccccaagaaguccaccaaccuggucaagaacaagugcgugaacuucaacuucaacggccucaccgggaccggcgugcugaccgagagcaacaagaaguuccugccguuccagcaguucgggcgcgacaucgccgacacgaccgacgcgguccgcgacccccagacccuggagauccucgacaucacccccugcagcuucggcgggguguccgugaucacgccgggcaccaacaccagcaaccaggucgccgugcuguaccaggacgugaacugcaccgagguccccguggccauccacgccgaccagcugacgcccaccuggcggguguacuccaccggcagcaacgucuuccagacccgcgccgggugccucaucggcgcggagcacgugaacaacuccuacgagugcgacauccccaucggggccggcaucugcgccagcuaccagacgcagaccaacuccccgcggcgcgcccggagcguggcgucccagagcaucaucgccuacaccaugucccugggcgccgagaacagcgucgccuacuccaacaacagcaucgccauccccaccaacuucacgaucuccgugaccaccgagauccugcccgugagcaugaccaagacgagcgucgacugcaccauguacaucugcggggacuccaccgagugcagcaaccuccugcugcaguacggcuccuucugcacccagcucaaccgcgcgcugacggggaucgccguggagcaggacaagaacacccaggagguguucgcccaggucaagcagaucuacaagacgcccccgaucaaggacuucggcggguucaacuucagccagauccugcccgaccccuccaagcccagcaagcgguccuucaucgaggaccuccuguucaacaaggugacccuggccgacgccggcuucaucaagcaguacggcgacugccucggggacaucgcggcccgcgaccugaucugcgcccagaaguucaacggccugaccgugcucccgccccugcugaccgacgagaugaucgcccaguacaccagcgcccuccuggcggggaccaucacguccggcuggaccuucggggccggcgccgcccugcagauccccuucgcgaugcagauggccuaccgguucaacggcaucggggucacccagaacgugcucuacgagaaccagaagcugaucgccaaccaguucaacagcgccaucggcaagauccaggacucccugagcuccaccgccagcgcgcucgggaagcugcaggacguggucaaccagaacgcccaggcccugaacacgcucgugaagcagcuguccagcaacuucggcugcaucuccagcgugcugaacgacauccucucccgccuggacaaggucgaggccgaggugcagaucgacugccugaucaccgggcgccuccagagccugcagaccuacgugacccagcagcugauccgggcggccgagauccgcgccagcgccaaccucgccgcgaccaagauguccgagugcguccugggccagagcaagcggguggacuucugcggcaagggguaccaccugauguccuucccccagagcgccccgcacggcguggucuuccuccacgugacguacguccccgcccaggagaagaacuucaccaccgcccccgcgaucugccacgacgggaaggcccacuucccccgcgagggcguguucguguccaacgggacccacugguucgucacgcagcggaacuucuacgagccgcagaucaucaccaccgacaacaccuucgugagcggcaacugcgacguggucaucggcaucgugaacaacacgguguacgacccccugcagcccgagcuggacuccggcgggagcggcuacauccccgaggccccgcgcgacgggcaggccuacgugcggaaggacggcgaguggguccugcucagcaccuuccugugaggacuagucccuguucccagagcccacuuuuuuuucuuuuuuugaaauaaaauagccugucuuucagaucucaaaggcucuuuucagagccaccaaaaaaaaaaaaaaaaaaaaaaaaaaaaaaaaaaaaaaaaaaaaaaaaaaaaaaaaaaaaaaaaaaaaaaaaaaaaaaaaaaaaaaaaaaaaaaaaaaaaa

SEQ ID NO: 12456 - RNA, 3806 nt, Artificial Sequence
  SARS-CoV-2/Wuhan/WIV05/2019__EPI_ISL_402128 spike protein mRNA gc (1-1147)(A890C_V1040C) Foldon construct
aggagagucccgcagucggcguccagcggcucugcuuguucgugugugugucguugcaggccuuauucaagcuuaccauguucguguuccugguccuccugccccuggugagcucccagugcgugaaccucaccacccgcacgcagcugccgcccgccuacaccaacagcuucacccggggcgucuacuaccccgacaagguguuccgcuccagcgugcugcacuccacccaggaccucuuccugcccuucuucagcaacgucacgugguuccacgccauccacguguccgggaccaacggcaccaagcgguucgacaacccggugcugcccuucaacgacggggucuacuucgcgagcaccgagaaguccaacaucauccgcggcuggaucuucgggacgacccucgacagcaagacccagucccugcugaucgugaacaacgccaccaacguggucaucaaggugugcgaguuccaguucugcaacgaccccuuccucggcguguacuaccacaagaacaacaagagcuggauggaguccgaguuccgggucuacagcuccgccaacaacugcacguucgaguacgugagccagcccuuccugauggaccuggagggcaagcaggggaacuucaagaaccuccgcgaguucguguucaagaacaucgacggcuacuucaagaucuacuccaagcacaccccgaucaaccugguccgggaccugccccagggguucagcgcccucgagccccugguggaccugcccaucggcaucaacaucacccgcuuccagacccuccuggcccugcaccgguccuaccucacgccgggggacagcagcuccggcuggaccgcgggcgccgccgccuacuacgugggguaccugcagccccgcaccuuccugcucaaguacaacgagaacggcaccaucacggacgcggucgacugcgcccuggacccccugagcgagaccaagugcacccucaaguccuucaccguggagaaggggaucuaccagacgagcaacuuccgggugcagcccaccgaguccaucguccgcuucccgaacaucaccaaccugugccccuucggcgagguguucaacgccacccgguucgccagcgucuacgccuggaaccgcaagcggaucuccaacugcguggcggacuacagcgugcuguacaacuccgccagcuucuccacguucaagugcuacggcgucagccccaccaagcucaacgaccugugcuucaccaacguguacgccgacuccuucgugauccgcggggacgagguccggcagaucgcccccggccagaccgggaagaucgccgacuacaacuacaagcugccggacgacuucacgggcugcgugaucgcguggaacagcaacaaccucgacuccaaggucgggggcaacuacaacuaccuguaccgccuguuccgcaagagcaaccucaagcccuucgagcgggacaucuccaccgagaucuaccaggccggcagcacccccugcaacgggguggagggcuucaacugcuacuucccccugcaguccuacggguuccagccgaccaacggcgugggguaccagcccuaccggguggucgugcugagcuucgagcuccugcacgcccccgccacggugugcggccccaagaaguccaccaaccuggucaagaacaagugcgugaacuucaacuucaacggccucaccgggaccggcgugcugaccgagagcaacaagaaguuccugccguuccagcaguucgggcgcgacaucgccgacacgaccgacgcgguccgcgacccccagacccuggagauccucgacaucacccccugcagcuucggcgggguguccgugaucacgccgggcaccaacaccagcaaccaggucgccgugcuguaccaggacgugaacugcaccgagguccccguggccauccacgccgaccagcugacgcccaccuggcggguguacuccaccggcagcaacgucuuccagacccgcgccgggugccucaucggcgcggagcacgugaacaacuccuacgagugcgacauccccaucggggccggcaucugcgccagcuaccagacgcagaccaacuccccgcggcgcgcccggagcguggcgucccagagcaucaucgccuacaccaugucccugggcgccgagaacagcgucgccuacuccaacaacagcaucgccauccccaccaacuucacgaucuccgugaccaccgagauccugcccgugagcaugaccaagacgagcgucgacugcaccauguacaucugcggggacuccaccgagugcagcaaccuccugcugcaguacggcuccuucugcacccagcucaaccgcgcgcugacggggaucgccguggagcaggacaagaacacccaggagguguucgcccaggucaagcagaucuacaagacgcccccgaucaaggacuucggcggguucaacuucagccagauccugcccgaccccuccaagcccagcaagcgguccuucaucgaggaccuccuguucaacaaggugacccuggccgacgccggcuucaucaagcaguacggcgacugccucggggacaucgcggcccgcgaccugaucugcgcccagaaguucaacggccugaccgugcucccgccccugcugaccgacgagaugaucgcccaguacaccagcgcccuccuggcggggaccaucacguccggcuggaccuucgggugcggcgccgcccugcagauccccuucgcgaugcagauggccuaccgguucaacggcaucggggucacccagaacgugcucuacgagaaccagaagcugaucgccaaccaguucaacagcgccaucggcaagauccaggacucccugagcuccaccgccagcgcgcucgggaagcugcaggacguggucaaccagaacgcccaggcccugaacacgcucgugaagcagcuguccagcaacuucggcgccaucuccagcgugcugaacgacauccucucccgccuggacaaggucgaggccgaggugcagaucgaccggcugaucaccgggcgccuccagagccugcagaccuacgugacccagcagcugauccgggcggccgagauccgcgccagcgccaaccucgccgcgaccaagauguccgagugcguccugggccagagcaagcggugcgacuucugcggcaagggguaccaccugauguccuucccccagagcgccccgcacggcguggucuuccuccacgugacguacguccccgcccaggagaagaacuucaccaccgcccccgcgaucugccacgacgggaaggcccacuucccccgcgagggcguguucguguccaacgggacccacugguucgucacgcagcggaacuucuacgagccgcagaucaucaccaccgacaacaccuucgugagcggcaacugcgacguggucaucggcaucgugaacaacacgguguacgacccccugcagcccgagcuggacuccggcgggagcggcuacauccccgaggccccgcgcgacgggcaggccuacgugcggaaggacggcgaguggguccugcucagcaccuuccugugaggacuagucccuguucccagagcccacuuuuuuuucuuuuuuugaaauaaaauagccugucuuucagaucucaaaggcucuuuucagagccaccaaaaaaaaaaaaaaaaaaaaaaaaaaaaaaaaaaaaaaaaaaaaaaaaaaaaaaaaaaaaaaaaaaaaaaaaaaaaaaaaaaaaaaaaaaaaaaaaaaaaa

SEQ ID NO: 12457 - RNA, 3806 nt, Artificial Sequence
  SARS-CoV-2/Wuhan/WIV05/2019__EPI_ISL_402128 spike protein mRNA gc (1-1147)(T874C_S1055C) Foldon construct
aggagagucccgcagucggcguccagcggcucugcuuguucgugugugugucguugcaggccuuauucaagcuuaccauguucguguuccugguccuccugccccuggugagcucccagugcgugaaccucaccacccgcacgcagcugccgcccgccuacaccaacagcuucacccggggcgucuacuaccccgacaagguguuccgcuccagcgugcugcacuccacccaggaccucuuccugcccuucuucagcaacgucacgugguuccacgccauccacguguccgggaccaacggcaccaagcgguucgacaacccggugcugcccuucaacgacggggucuacuucgcgagcaccgagaaguccaacaucauccgcggcuggaucuucgggacgacccucgacagcaagacccagucccugcugaucgugaacaacgccaccaacguggucaucaaggugugcgaguuccaguucugcaacgaccccuuccucggcguguacuaccacaagaacaacaagagcuggauggaguccgaguuccgggucuacagcuccgccaacaacugcacguucgaguacgugagccagcccuuccugauggaccuggagggcaagcaggggaacuucaagaaccuccgcgaguucguguucaagaacaucgacggcuacuucaagaucuacuccaagcacaccccgaucaaccugguccgggaccugccccagggguucagcgcccucgagccccugguggaccugcccaucggcaucaacaucacccgcuuccagacccuccuggcccugcaccgguccuaccucacgccgggggacagcagcuccggcuggaccgcgggcgccgccgccuacuacgugggguaccugcagccccgcaccuuccugcucaaguacaacgagaacggcaccaucacggacgcggucgacugcgcccuggacccccugagcgagaccaagugcacccucaaguccuucaccguggagaaggggaucuaccagacgagcaacuuccgggugcagcccaccgaguccaucguccgcuucccgaacaucaccaaccugugccccuucggcgagguguucaacgccacccgguucgccagcgucuacgccuggaaccgcaagcggaucuccaacugcguggcggacuacagcgugcuguacaacuccgccagcuucuccacguucaagugcuacggcgucagccccaccaagcucaacgaccugugcuucaccaacguguacgccgacuccuucgugauccgcggggacgagguccggcagaucgcccccggccagaccgggaagaucgccgacuacaacuacaagcugccggacgacuucacgggcugcgugaucgcguggaacagcaacaaccucgacuccaaggucgggggcaacuacaacuaccuguaccgccuguuccgcaagagcaaccucaagcccuucgagcgggacaucuccaccgagaucuaccaggccggcagcacccccugcaacgggguggagggcuucaacugcuacuucccccugcaguccuacggguuccagccgaccaacggcgugggguaccagcccuaccggguggucgugcugagcuucgagcuccugcacgcccccgccacggugugcggccccaagaaguccaccaaccuggucaagaacaagugcgugaacuucaacuucaacggccucaccgggaccggcgugcugaccgagagcaacaagaaguuccugccguuccagcaguucgggcgcgacaucgccgacacgaccgacgcgguccgcgacccccagacccuggagauccucgacaucacccccugcagcuucggcgggguguccgugaucacgccgggcaccaacaccagcaaccaggucgccgugcuguaccaggacgugaacugcaccgagguccccguggccauccacgccgaccagcugacgcccaccuggcggguguacuccaccggcagcaacgucuuccagacccgcgccgggugccucaucggcgcggagcacgugaacaacuccuacgagugcgacauccccaucggggccggcaucugcgccagcuaccagacgcagaccaacuccccgcggcgcgcccggagcguggcgucccagagcaucaucgccuacaccaugucccugggcgccgagaacagcgucgccuacuccaacaacagcaucgccauccccaccaacuucacgaucuccgugaccaccgagauccugcccgugagcaugaccaagacgagcgucgacugcaccauguacaucugcggggacuccaccgagugcagcaaccuccugcugcaguacggcuccuucugcacccagcucaaccgcgcgcugacggggaucgccguggagcaggacaagaacacccaggagguguucgcccaggucaagcagaucuacaagacgcccccgaucaaggacuucggcggguucaacuucagccagauccugcccgaccccuccaagcccagcaagcgguccuucaucgaggaccuccuguucaacaaggugacccuggccgacgccggcuucaucaagcaguacggcgacugccucggggacaucgcggcccgcgaccugaucugcgcccagaaguucaacggccugaccgugcucccgccccugcugaccgacgagaugaucgcccaguacugcagcgcccuccuggcggggaccaucacguccggcuggaccuucggggccggcgccgcccugcagauccccuucgcgaugcagauggccuaccgguucaacggcaucggggucacccagaacgugcucuacgagaaccagaagcugaucgccaaccaguucaacagcgccaucggcaagauccaggacucccugagcuccaccgccagcgcgcucgggaagcugcaggacguggucaaccagaacgcccaggcccugaacacgcucgugaagcagcuguccagcaacuucggcgccaucuccagcgugcugaacgacauccucucccgccuggacaaggucgaggccgaggugcagaucgaccggcugaucaccgggcgccuccagagccugcagaccuacgugacccagcagcugauccgggcggccgagauccgcgccagcgccaaccucgccgcgaccaagauguccgagugcguccugggccagagcaagcggguggacuucugcggcaagggguaccaccugauguccuucccccagugcgccccgcacggcguggucuuccuccacgugacguacguccccgcccaggagaagaacuucaccaccgcccccgcgaucugccacgacgggaaggcccacuucccccgcgagggcguguucguguccaacgggacccacugguucgucacgcagcggaacuucuacgagccgcagaucaucaccaccgacaacaccuucgugagcggcaacugcgacguggucaucggcaucgugaacaacacgguguacgacccccugcagcccgagcuggacuccggcgggagcggcuacauccccgaggccccgcgcgacgggcaggccuacgugcggaaggacggcgaguggguccugcucagcaccuuccugugaggacuagucccuguucccagagcccacuuuuuuuucuuuuuuugaaauaaaauagccugucuuucagaucucaaaggcucuuuucagagccaccaaaaaaaaaaaaaaaaaaaaaaaaaaaaaaaaaaaaaaaaaaaaaaaaaaaaaaaaaaaaaaaaaaaaaaaaaaaaaaaaaaaaaaaaaaaaaaaaaaaaa

SEQ ID NO: 12458 - RNA, 4178 nt, Artificial Sequence
  SARS-CoV-2/Wuhan/WIV05/2019__EPI_ISL_402128 spike protein mRNA gc (1-1147) WhcAg construct
aggagagucccgcagucggcguccagcggcucugcuuguucgugugugugucguugcaggccuuauucaagcuuaccauguucguguuccugguccuccugccccuggugagcucccagugcgugaaccucaccacccgcacgcagcugccgcccgccuacaccaacagcuucacccggggcgucuacuaccccgacaagguguuccgcuccagcgugcugcacuccacccaggaccucuuccugcccuucuucagcaacgucacgugguuccacgccauccacguguccgggaccaacggcaccaagcgguucgacaacccggugcugcccuucaacgacggggucuacuucgcgagcaccgagaaguccaacaucauccgcggcuggaucuucgggacgacccucgacagcaagacccagucccugcugaucgugaacaacgccaccaacguggucaucaaggugugcgaguuccaguucugcaacgaccccuuccucggcguguacuaccacaagaacaacaagagcuggauggaguccgaguuccgggucuacagcuccgccaacaacugcacguucgaguacgugagccagcccuuccugauggaccuggagggcaagcaggggaacuucaagaaccuccgcgaguucguguucaagaacaucgacggcuacuucaagaucuacuccaagcacaccccgaucaaccugguccgggaccugccccagggguucagcgcccucgagccccugguggaccugcccaucggcaucaacaucacccgcuuccagacccuccuggcccugcaccgguccuaccucacgccgggggacagcagcuccggcuggaccgcgggcgccgccgccuacuacgugggguaccugcagccccgcaccuuccugcucaaguacaacgagaacggcaccaucacggacgcggucgacugcgcccuggacccccugagcgagaccaagugcacccucaaguccuucaccguggagaaggggaucuaccagacgagcaacuuccgggugcagcccaccgaguccaucguccgcuucccgaacaucaccaaccugugccccuucggcgagguguucaacgccacccgguucgccagcgucuacgccuggaaccgcaagcggaucuccaacugcguggcggacuacagcgugcuguacaacuccgccagcuucuccacguucaagugcuacggcgucagccccaccaagcucaacgaccugugcuucaccaacguguacgccgacuccuucgugauccgcggggacgagguccggcagaucgcccccggccagaccgggaagaucgccgacuacaacuacaagcugccggacgacuucacgggcugcgugaucgcguggaacagcaacaaccucgacuccaaggucgggggcaacuacaacuaccuguaccgccuguuccgcaagagcaaccucaagcccuucgagcgggacaucuccaccgagaucuaccaggccggcagcacccccugcaacgggguggagggcuucaacugcuacuucccccugcaguccuacggguuccagccgaccaacggcgugggguaccagcccuaccggguggucgugcugagcuucgagcuccugcacgcccccgccacggugugcggccccaagaaguccaccaaccuggucaagaacaagugcgugaacuucaacuucaacggccucaccgggaccggcgugcugaccgagagcaacaagaaguuccugccguuccagcaguucgggcgcgacaucgccgacacgaccgacgcgguccgcgacccccagacccuggagauccucgacaucacccccugcagcuucggcgggguguccgugaucacgccgggcaccaacaccagcaaccaggucgccgugcuguaccaggacgugaacugcaccgagguccccguggccauccacgccgaccagcugacgcccaccuggcggguguacuccaccggcagcaacgucuuccagacccgcgccgggugccucaucggcgcggagcacgugaacaacuccuacgagugcgacauccccaucggggccggcaucugcgccagcuaccagacgcagaccaacuccccgcggcgcgcccggagcguggcgucccagagcaucaucgccuacaccaugucccugggcgccgagaacagcgucgccuacuccaacaacagcaucgccauccccaccaacuucacgaucuccgugaccaccgagauccugcccgugagcaugaccaagacgagcgucgacugcaccauguacaucugcggggacuccaccgagugcagcaaccuccugcugcaguacggcuccuucugcacccagcucaaccgcgcgcugacggggaucgccguggagcaggacaagaacacccaggagguguucgcccaggucaagcagaucuacaagacgcccccgaucaaggacuucggcggguucaacuucagccagauccugcccgaccccuccaagcccagcaagcgguccuucaucgaggaccuccuguucaacaaggugacccuggccgacgccggcuucaucaagcaguacggcgacugccucggggacaucgcggcccgcgaccugaucugcgcccagaaguucaacggccugaccgugcucccgccccugcugaccgacgagaugaucgcccaguacaccagcgcccuccuggcggggaccaucacguccggcuggaccuucggggccggcgccgcccugcagauccccuucgcgaugcagauggccuaccgguucaacggcaucggggucacccagaacgugcucuacgagaaccagaagcugaucgccaaccaguucaacagcgccaucggcaagauccaggacucccugagcuccaccgccagcgcgcucgggaagcugcaggacguggucaaccagaacgcccaggcccugaacacgcucgugaagcagcuguccagcaacuucggcgccaucuccagcgugcugaacgacauccucucccgccuggacaaggucgaggccgaggugcagaucgaccggcugaucaccgggcgccuccagagccugcagaccuacgugacccagcagcugauccgggcggccgagauccgcgccagcgccaaccucgccgcgaccaagauguccgagugcguccugggccagagcaagcggguggacuucugcggcaagggguaccaccugauguccuucccccagagcgccccgcacggcguggucuuccuccacgugacguacguccccgcccaggagaagaacuucaccaccgcccccgcgaucugccacgacgggaaggcccacuucccccgcgagggcguguucguguccaacgggacccacugguucgucacgcagcggaacuucuacgagccgcagaucaucaccaccgacaacaccuucgugagcggcaacugcgacguggucaucggcaucgugaacaacacgguguacgacccccugcagcccgagcuggacuccggcgggggcgggagcgacaucgaccccuacaaggaguucggcagcuccuaccagcugcucaacuuccugccccuggacuucuuccccgaccucaacgcccugguggacaccgccaccgcgcuguacgaggaggagcucacggggcgcgagcacugcagcccccaccacaccgccauccggcaggcccuggucugcugggacgagcugaccaagcucaucgccuggauguccagcaacaucaccuccgagcagguccgcacgaucaucgugaaccacgucaacgacaccuggggccugaaggugcggcagagccugugguuccaccucuccugccugaccuucgggcagcacaccgugcaggaguuccuggucagcuucggcguguggauccgcacgcccgccccguaccggccgcccaacgcgccgauccucuccacccugccggagcacaccgugaucugcugaggacuagucccuguucccagagcccacuuuuuuuucuuuuuuugaaauaaaauagccugucuuucagaucucaaaggcucuuuucagagccaccaaaaaaaaaaaaaaaaaaaaaaaaaaaaaaaaaaaaaaaaaaaaaaaaaaaaaaaaaaaaaaaaaaaaaaaaaaaaaaaaaaaaaaaaaaaaaaaaaaaaa

SEQ ID NO: 12459 - RNA, 4178 nt, Artificial Sequence
  SARS-CoV-2/Wuhan/WIV05/2019__EPI_ISL_402128 spike protein mRNA gc (1-1147)(K986P_V987P) WhcAg construct
aggagagucccgcagucggcguccagcggcucugcuuguucgugugugugucguugcaggccuuauucaagcuuaccauguucguguuccugguccuccugccccuggugagcucccagugcgugaaccucaccacccgcacgcagcugccgcccgccuacaccaacagcuucacccggggcgucuacuaccccgacaagguguuccgcuccagcgugcugcacuccacccaggaccucuuccugcccuucuucagcaacgucacgugguuccacgccauccacguguccgggaccaacggcaccaagcgguucgacaacccggugcugcccuucaacgacggggucuacuucgcgagcaccgagaaguccaacaucauccgcggcuggaucuucgggacgacccucgacagcaagacccagucccugcugaucgugaacaacgccaccaacguggucaucaaggugugcgaguuccaguucugcaacgaccccuuccucggcguguacuaccacaagaacaacaagagcuggauggaguccgaguuccgggucuacagcuccgccaacaacugcacguucgaguacgugagccagcccuuccugauggaccuggagggcaagcaggggaacuucaagaaccuccgcgaguucguguucaagaacaucgacggcuacuucaagaucuacuccaagcacaccccgaucaaccugguccgggaccugccccagggguucagcgcccucgagccccugguggaccugcccaucggcaucaacaucacccgcuuccagacccuccuggcccugcaccgguccuaccucacgccgggggacagcagcuccggcuggaccgcgggcgccgccgccuacuacgugggguaccugcagccccgcaccuuccugcucaaguacaacgagaacggcaccaucacggacgcggucgacugcgcccuggacccccugagcgagaccaagugcacccucaaguccuucaccguggagaaggggaucuaccagacgagcaacuuccgggugcagcccaccgaguccaucguccgcuucccgaacaucaccaaccugugccccuucggcgagguguucaacgccacccgguucgccagcgucuacgccuggaaccgcaagcggaucuccaacugcguggcggacuacagcgugcuguacaacuccgccagcuucuccacguucaagugcuacggcgucagccccaccaagcucaacgaccugugcuucaccaacguguacgccgacuccuucgugauccgcggggacgagguccggcagaucgcccccggccagaccgggaagaucgccgacuacaacuacaagcugccggacgacuucacgggcugcgugaucgcguggaacagcaacaaccucgacuccaaggucgggggcaacuacaacuaccuguaccgccuguuccgcaagagcaaccucaagcccuucgagcgggacaucuccaccgagaucuaccaggccggcagcacccccugcaacgggguggagggcuucaacugcuacuucccccugcaguccuacggguuccagccgaccaacggcgugggguaccagcccuaccggguggucgugcugagcuucgagcuccugcacgcccccgccacggugugcggccccaagaaguccaccaaccuggucaagaacaagugcgugaacuucaacuucaacggccucaccgggaccggcgugcugaccgagagcaacaagaaguuccugccguuccagcaguucgggcgcgacaucgccgacacgaccgacgcgguccgcgacccccagacccuggagauccucgacaucacccccugcagcuucggcgggguguccgugaucacgccgggcaccaacaccagcaaccaggucgccgugcuguaccaggacgugaacugcaccgagguccccguggccauccacgccgaccagcugacgcccaccuggcggguguacuccaccggcagcaacgucuuccagacccgcgccgggugccucaucggcgcggagcacgugaacaacuccuacgagugcgacauccccaucggggccggcaucugcgccagcuaccagacgcagaccaacuccccgcggcgcgcccggagcguggcgucccagagcaucaucgccuacaccaugucccugggcgccgagaacagcgucgccuacuccaacaacagcaucgccauccccaccaacuucacgaucuccgugaccaccgagauccugcccgugagcaugaccaagacgagcgucgacugcaccauguacaucugcggggacuccaccgagugcagcaaccuccugcugcaguacggcuccuucugcacccagcucaaccgcgcgcugacggggaucgccguggagcaggacaagaacacccaggagguguucgcccaggucaagcagaucuacaagacgcccccgaucaaggacuucggcggguucaacuucagccagauccugcccgaccccuccaagcccagcaagcgguccuucaucgaggaccuccuguucaacaaggugacccuggccgacgccggcuucaucaagcaguacggcgacugccucggggacaucgcggcccgcgaccugaucugcgcccagaaguucaacggccugaccgugcucccgccccugcugaccgacgagaugaucgcccaguacaccagcgcccuccuggcggggaccaucacguccggcuggaccuucggggccggcgccgcccugcagauccccuucgcgaugcagauggccuaccgguucaacggcaucggggucacccagaacgugcucuacgagaaccagaagcugaucgccaaccaguucaacagcgccaucggcaagauccaggacucccugagcuccaccgccagcgcgcucgggaagcugcaggacguggucaaccagaacgcccaggcccugaacacgcucgugaagcagcuguccagcaacuucggcgccaucuccagcgugcugaacgacauccucucccgccuggacccgcccgaggccgaggugcagaucgaccggcugaucaccgggcgccuccagagccugcagaccuacgugacccagcagcugauccgggcggccgagauccgcgccagcgccaaccucgccgcgaccaagauguccgagugcguccugggccagagcaagcggguggacuucugcggcaagggguaccaccugauguccuucccccagagcgccccgcacggcguggucuuccuccacgugacguacguccccgcccaggagaagaacuucaccaccgcccccgcgaucugccacgacgggaaggcccacuucccccgcgagggcguguucguguccaacgggacccacugguucgucacgcagcggaacuucuacgagccgcagaucaucaccaccgacaacaccuucgugagcggcaacugcgacguggucaucggcaucgugaacaacacgguguacgacccccugcagcccgagcuggacuccggcgggggcgggagcgacaucgaccccuacaaggaguucggcagcuccuaccagcugcucaacuuccugccccuggacuucuuccccgaccucaacgcccugguggacaccgccaccgcgcuguacgaggaggagcucacggggcgcgagcacugcagcccccaccacaccgccauccggcaggcccuggucugcugggacgagcugaccaagcucaucgccuggauguccagcaacaucaccuccgagcagguccgcacgaucaucgugaaccacgucaacgacaccuggggccugaaggugcggcagagccugugguuccaccucuccugccugaccuucgggcagcacaccgugcaggaguuccuggucagcuucggcguguggauccgcacgcccgccccguaccggccgcccaacgcgccgauccucuccacccugccggagcacaccgugaucugcugaggacuagucccuguucccagagcccacuuuuuuuucuuuuuuugaaauaaaauagccugucuuucagaucucaaaggcucuuuucagagccaccaaaaaaaaaaaaaaaaaaaaaaaaaaaaaaaaaaaaaaaaaaaaaaaaaaaaaaaaaaaaaaaaaaaaaaaaaaaaaaaaaaaaaaaaaaaaaaaaaaaaa

SEQ ID NO: 12460 - RNA, 4178 nt, Artificial Sequence
  SARS-CoV-2/Wuhan/WIV05/2019__EPI_ISL_402128 spike protein mRNA gc (1-1147)(K986P_V987P_T887WN_A1020W) WhcAg construct
aggagagucccgcagucggcguccagcggcucugcuuguucgugugugugucguugcaggccuuauucaagcuuaccauguucguguuccugguccuccugccccuggugagcucccagugcgugaaccucaccacccgcacgcagcugccgcccgccuacaccaacagcuucacccggggcgucuacuaccccgacaagguguuccgcuccagcgugcugcacuccacccaggaccucuuccugcccuucuucagcaacgucacgugguuccacgccauccacguguccgggaccaacggcaccaagcgguucgacaacccggugcugcccuucaacgacggggucuacuucgcgagcaccgagaaguccaacaucauccgcggcuggaucuucgggacgacccucgacagcaagacccagucccugcugaucgugaacaacgccaccaacguggucaucaaggugugcgaguuccaguucugcaacgaccccuuccucggcguguacuaccacaagaacaacaagagcuggauggaguccgaguuccgggucuacagcuccgccaacaacugcacguucgaguacgugagccagcccuuccugauggaccuggagggcaagcaggggaacuucaagaaccuccgcgaguucguguucaagaacaucgacggcuacuucaagaucuacuccaagcacaccccgaucaaccugguccgggaccugccccagggguucagcgcccucgagccccugguggaccugcccaucggcaucaacaucacccgcuuccagacccuccuggcccugcaccgguccuaccucacgccgggggacagcagcuccggcuggaccgcgggcgccgccgccuacuacgugggguaccugcagccccgcaccuuccugcucaaguacaacgagaacggcaccaucacggacgcggucgacugcgcccuggacccccugagcgagaccaagugcacccucaaguccuucaccguggagaaggggaucuaccagacgagcaacuuccgggugcagcccaccgaguccaucguccgcuucccgaacaucaccaaccugugccccuucggcgagguguucaacgccacccgguucgccagcgucuacgccuggaaccgcaagcggaucuccaacugcguggcggacuacagcgugcuguacaacuccgccagcuucuccacguucaagugcuacggcgucagccccaccaagcucaacgaccugugcuucaccaacguguacgccgacuccuucgugauccgcggggacgagguccggcagaucgcccccggccagaccgggaagaucgccgacuacaacuacaagcugccggacgacuucacgggcugcgugaucgcguggaacagcaacaaccucgacuccaaggucgggggcaacuacaacuaccuguaccgccuguuccgcaagagcaaccucaagcccuucgagcgggacaucuccaccgagaucuaccaggccggcagcacccccugcaacgggguggagggcuucaacugcuacuucccccugcaguccuacggguuccagccgaccaacggcgugggguaccagcccuaccggguggucgugcugagcuucgagcuccugcacgcccccgccacggugugcggccccaagaaguccaccaaccuggucaagaacaagugcgugaacuucaacuucaacggccucaccgggaccggcgugcugaccgagagcaacaagaaguuccugccguuccagcaguucgggcgcgacaucgccgacacgaccgacgcgguccgcgacccccagacccuggagauccucgacaucacccccugcagcuucggcgggguguccgugaucacgccgggcaccaacaccagcaaccaggucgccgugcuguaccaggacgugaacugcaccgagguccccguggccauccacgccgaccagcugacgcccaccuggcggguguacuccaccggcagcaacgucuuccagacccgcgccgggugccucaucggcgcggagcacgugaacaacuccuacgagugcgacauccccaucggggccggcaucugcgccagcuaccagacgcagaccaacuccccgcggcgcgcccggagcguggcgucccagagcaucaucgccuacaccaugucccugggcgccgagaacagcgucgccuacuccaacaacagcaucgccauccccaccaacuucacgaucuccgugaccaccgagauccugcccgugagcaugaccaagacgagcgucgacugcaccauguacaucugcggggacuccaccgagugcagcaaccuccugcugcaguacggcuccuucugcacccagcucaaccgcgcgcugacggggaucgccguggagcaggacaagaacacccaggagguguucgcccaggucaagcagaucuacaagacgcccccgaucaaggacuucggcggguucaacuucagccagauccugcccgaccccuccaagcccagcaagcgguccuucaucgaggaccuccuguucaacaaggugacccuggccgacgccggcuucaucaagcaguacggcgacugccucggggacaucgcggcccgcgaccugaucugcgcccagaaguucaacggccugaccgugcucccgccccugcugaccgacgagaugaucgcccaguacaccagcgcccuccuggcggggaccaucacguccggcuggugguucggggccggcgccgcccugcagauccccuucgcgaugcagauggccuaccgguucaacggcaucggggucacccagaacgugcucuacgagaaccagaagcugaucgccaaccaguucaacagcgccaucggcaagauccaggacucccugagcuccaccgccagcgcgcucgggaagcugcaggacguggucaaccagaacgcccaggcccugaacacgcucgugaagcagcuguccagcaacuucggcgccaucuccagcgugcugaacgacauccucucccgccuggacccgcccgaggccgaggugcagaucgaccggcugaucaccgggcgccuccagagccugcagaccuacgugacccagcagcugauccgggcggccgagauccgcuggagcgccaaccucgccgcgaccaagauguccgagugcguccugggccagagcaagcggguggacuucugcggcaagggguaccaccugauguccuucccccagagcgccccgcacggcguggucuuccuccacgugacguacguccccgcccaggagaagaacuucaccaccgcccccgcgaucugccacgacgggaaggcccacuucccccgcgagggcguguucguguccaacgggacccacugguucgucacgcagcggaacuucuacgagccgcagaucaucaccaccgacaacaccuucgugagcggcaacugcgacguggucaucggcaucgugaacaacacgguguacgacccccugcagcccgagcuggacuccggcgggggcgggagcgacaucgaccccuacaaggaguucggcagcuccuaccagcugcucaacuuccugccccuggacuucuuccccgaccucaacgcccugguggacaccgccaccgcgcuguacgaggaggagcucacggggcgcgagcacugcagcccccaccacaccgccauccggcaggcccuggucugcugggacgagcugaccaagcucaucgccuggauguccagcaacaucaccuccgagcagguccgcacgaucaucgugaaccacgucaacgacaccuggggccugaaggugcggcagagccugugguuccaccucuccugccugaccuucgggcagcacaccgugcaggaguuccuggucagcuucggcguguggauccgcacgcccgccccguaccggccgcccaacgcgccgauccucuccacccugccggagcacaccgugaucugcugaggacuagucccuguucccagagcccacuuuuuuuucuuuuuuugaaauaaaauagccugucuuucagaucucaaaggcucuuuucagagccaccaaaaaaaaaaaaaaaaaaaaaaaaaaaaaaaaaaaaaaaaaaaaaaaaaaaaaaaaaaaaaaaaaaaaaaaaaaaaaaaaaaaaaaaaaaaaaaaaaaaaa

SEQ ID NO: 12461 - RNA, 4178 nt, Artificial Sequence
  SARS-CoV-2/Wuhan/WIV05/2019__EPI_ISL_402128 spike protein mRNA gc (1-1147)(K986P_V987P_P1069F) WhcAg construct
aggagagucccgcagucggcguccagcggcucugcuuguucgugugugugucguugcaggccuuauucaagcuuaccauguucguguuccugguccuccugccccuggugagcucccagugcgugaaccucaccacccgcacgcagcugccgcccgccuacaccaacagcuucacccggggcgucuacuaccccgacaagguguuccgcuccagcgugcugcacuccacccaggaccucuuccugcccuucuucagcaacgucacgugguuccacgccauccacguguccgggaccaacggcaccaagcgguucgacaacccggugcugcccuucaacgacggggucuacuucgcgagcaccgagaaguccaacaucauccgcggcuggaucuucgggacgacccucgacagcaagacccagucccugcugaucgugaacaacgccaccaacguggucaucaaggugugcgaguuccaguucugcaacgaccccuuccucggcguguacuaccacaagaacaacaagagcuggauggaguccgaguuccgggucuacagcuccgccaacaacugcacguucgaguacgugagccagcccuuccugauggaccuggagggcaagcaggggaacuucaagaaccuccgcgaguucguguucaagaacaucgacggcuacuucaagaucuacuccaagcacaccccgaucaaccugguccgggaccugccccagggguucagcgcccucgagccccugguggaccugcccaucggcaucaacaucacccgcuuccagacccuccuggcccugcaccgguccuaccucacgccgggggacagcagcuccggcuggaccgcgggcgccgccgccuacuacgugggguaccugcagccccgcaccuuccugcucaaguacaacgagaacggcaccaucacggacgcggucgacugcgcccuggacccccugagcgagaccaagugcacccucaaguccuucaccguggagaaggggaucuaccagacgagcaacuuccgggugcagcccaccgaguccaucguccgcuucccgaacaucaccaaccugugccccuucggcgagguguucaacgccacccgguucgccagcgucuacgccuggaaccgcaagcggaucuccaacugcguggcggacuacagcgugcuguacaacuccgccagcuucuccacguucaagugcuacggcgucagccccaccaagcucaacgaccugugcuucaccaacguguacgccgacuccuucgugauccgcggggacgagguccggcagaucgcccccggccagaccgggaagaucgccgacuacaacuacaagcugccggacgacuucacgggcugcgugaucgcguggaacagcaacaaccucgacuccaaggucgggggcaacuacaacuaccuguaccgccuguuccgcaagagcaaccucaagcccuucgagcgggacaucuccaccgagaucuaccaggccggcagcacccccugcaacgggguggagggcuucaacugcuacuucccccugcaguccuacggguuccagccgaccaacggcgugggguaccagcccuaccggguggucgugcugagcuucgagcuccugcacgcccccgccacggugugcggccccaagaaguccaccaaccuggucaagaacaagugcgugaacuucaacuucaacggccucaccgggaccggcgugcugaccgagagcaacaagaaguuccugccguuccagcaguucgggcgcgacaucgccgacacgaccgacgcgguccgcgacccccagacccuggagauccucgacaucacccccugcagcuucggcgggguguccgugaucacgccgggcaccaacaccagcaaccaggucgccgugcuguaccaggacgugaacugcaccgagguccccguggccauccacgccgaccagcugacgcccaccuggcggguguacuccaccggcagcaacgucuuccagacccgcgccgggugccucaucggcgcggagcacgugaacaacuccuacgagugcgacauccccaucggggccggcaucugcgccagcuaccagacgcagaccaacuccccgcggcgcgcccggagcguggcgucccagagcaucaucgccuacaccaugucccugggcgccgagaacagcgucgccuacuccaacaacagcaucgccauccccaccaacuucacgaucuccgugaccaccgagauccugcccgugagcaugaccaagacgagcgucgacugcaccauguacaucugcggggacuccaccgagugcagcaaccuccugcugcaguacggcuccuucugcacccagcucaaccgcgcgcugacggggaucgccguggagcaggacaagaacacccaggagguguucgcccaggucaagcagaucuacaagacgcccccgaucaaggacuucggcggguucaacuucagccagauccugcccgaccccuccaagcccagcaagcgguccuucaucgaggaccuccuguucaacaaggugacccuggccgacgccggcuucaucaagcaguacggcgacugccucggggacaucgcggcccgcgaccugaucugcgcccagaaguucaacggccugaccgugcucccgccccugcugaccgacgagaugaucgcccaguacaccagcgcccuccuggcggggaccaucacguccggcuggaccuucggggccggcgccgcccugcagauccccuucgcgaugcagauggccuaccgguucaacggcaucggggucacccagaacgugcucuacgagaaccagaagcugaucgccaaccaguucaacagcgccaucggcaagauccaggacucccugagcuccaccgccagcgcgcucgggaagcugcaggacguggucaaccagaacgcccaggcccugaacacgcucgugaagcagcuguccagcaacuucggcgccaucuccagcgugcugaacgacauccucucccgccuggacccgcccgaggccgaggugcagaucgaccggcugaucaccgggcgccuccagagccugcagaccuacgugacccagcagcugauccgggcggccgagauccgcgccagcgccaaccucgccgcgaccaagauguccgagugcguccugggccagagcaagcggguggacuucugcggcaagggguaccaccugauguccuucccccagagcgccccgcacggcguggucuuccuccacgugacguacgucuucgcccaggagaagaacuucaccaccgcccccgcgaucugccacgacgggaaggcccacuucccccgcgagggcguguucguguccaacgggacccacugguucgucacgcagcggaacuucuacgagccgcagaucaucaccaccgacaacaccuucgugagcggcaacugcgacguggucaucggcaucgugaacaacacgguguacgacccccugcagcccgagcuggacuccggcgggggcgggagcgacaucgaccccuacaaggaguucggcagcuccuaccagcugcucaacuuccugccccuggacuucuuccccgaccucaacgcccugguggacaccgccaccgcgcuguacgaggaggagcucacggggcgcgagcacugcagcccccaccacaccgccauccggcaggcccuggucugcugggacgagcugaccaagcucaucgccuggauguccagcaacaucaccuccgagcagguccgcacgaucaucgugaaccacgucaacgacaccuggggccugaaggugcggcagagccugugguuccaccucuccugccugaccuucgggcagcacaccgugcaggaguuccuggucagcuucggcguguggauccgcacgcccgccccguaccggccgcccaacgcgccgauccucuccacccugccggagcacaccgugaucugcugaggacuagucccuguucccagagcccacuuuuuuuucuuuuuuugaaauaaaauagccugucuuucagaucucaaaggcucuuuucagagccaccaaaaaaaaaaaaaaaaaaaaaaaaaaaaaaaaaaaaaaaaaaaaaaaaaaaaaaaaaaaaaaaaaaaaaaaaaaaaaaaaaaaaaaaaaaaaaaaaaaaaa

SEQ ID NO: 12462 - RNA, 4178 nt, Artificial Sequence
  SARS-CoV-2/Wuhan/WIV05/2019__EPI_ISL_402128 spike protein mRNA gc (1-1147)(K986P_V987P_ H1048Q_H1064N_ H1083N_H1101N) WhcAg construct
aggagagucccgcagucggcguccagcggcucugcuuguucgugugugugucguugcaggccuuauucaagcuuaccauguucguguuccugguccuccugccccuggugagcucccagugcgugaaccucaccacccgcacgcagcugccgcccgccuacaccaacagcuucacccggggcgucuacuaccccgacaagguguuccgcuccagcgugcugcacuccacccaggaccucuuccugcccuucuucagcaacgucacgugguuccacgccauccacguguccgggaccaacggcaccaagcgguucgacaacccggugcugcccuucaacgacggggucuacuucgcgagcaccgagaaguccaacaucauccgcggcuggaucuucgggacgacccucgacagcaagacccagucccugcugaucgugaacaacgccaccaacguggucaucaaggugugcgaguuccaguucugcaacgaccccuuccucggcguguacuaccacaagaacaacaagagcuggauggaguccgaguuccgggucuacagcuccgccaacaacugcacguucgaguacgugagccagcccuuccugauggaccuggagggcaagcaggggaacuucaagaaccuccgcgaguucguguucaagaacaucgacggcuacuucaagaucuacuccaagcacaccccgaucaaccugguccgggaccugccccagggguucagcgcccucgagccccugguggaccugcccaucggcaucaacaucacccgcuuccagacccuccuggcccugcaccgguccuaccucacgccgggggacagcagcuccggcuggaccgcgggcgccgccgccuacuacgugggguaccugcagccccgcaccuuccugcucaaguacaacgagaacggcaccaucacggacgcggucgacugcgcccuggacccccugagcgagaccaagugcacccucaaguccuucaccguggagaaggggaucuaccagacgagcaacuuccgggugcagcccaccgaguccaucguccgcuucccgaacaucaccaaccugugccccuucggcgagguguucaacgccacccgguucgccagcgucuacgccuggaaccgcaagcggaucuccaacugcguggcggacuacagcgugcuguacaacuccgccagcuucuccacguucaagugcuacggcgucagccccaccaagcucaacgaccugugcuucaccaacguguacgccgacuccuucgugauccgcggggacgagguccggcagaucgcccccggccagaccgggaagaucgccgacuacaacuacaagcugccggacgacuucacgggcugcgugaucgcguggaacagcaacaaccucgacuccaaggucgggggcaacuacaacuaccuguaccgccuguuccgcaagagcaaccucaagcccuucgagcgggacaucuccaccgagaucuaccaggccggcagcacccccugcaacgggguggagggcuucaacugcuacuucccccugcaguccuacggguuccagccgaccaacggcgugggguaccagcccuaccggguggucgugcugagcuucgagcuccugcacgcccccgccacggugugcggccccaagaaguccaccaaccuggucaagaacaagugcgugaacuucaacuucaacggccucaccgggaccggcgugcugaccgagagcaacaagaaguuccugccguuccagcaguucgggcgcgacaucgccgacacgaccgacgcgguccgcgacccccagacccuggagauccucgacaucacccccugcagcuucggcgggguguccgugaucacgccgggcaccaacaccagcaaccaggucgccgugcuguaccaggacgugaacugcaccgagguccccguggccauccacgccgaccagcugacgcccaccuggcggguguacuccaccggcagcaacgucuuccagacccgcgccgggugccucaucggcgcggagcacgugaacaacuccuacgagugcgacauccccaucggggccggcaucugcgccagcuaccagacgcagaccaacuccccgcggcgcgcccggagcguggcgucccagagcaucaucgccuacaccaugucccugggcgccgagaacagcgucgccuacuccaacaacagcaucgccauccccaccaacuucacgaucuccgugaccaccgagauccugcccgugagcaugaccaagacgagcgucgacugcaccauguacaucugcggggacuccaccgagugcagcaaccuccugcugcaguacggcuccuucugcacccagcucaaccgcgcgcugacggggaucgccguggagcaggacaagaacacccaggagguguucgcccaggucaagcagaucuacaagacgcccccgaucaaggacuucggcggguucaacuucagccagauccugcccgaccccuccaagcccagcaagcgguccuucaucgaggaccuccuguucaacaaggugacccuggccgacgccggcuucaucaagcaguacggcgacugccucggggacaucgcggcccgcgaccugaucugcgcccagaaguucaacggccugaccgugcucccgccccugcugaccgacgagaugaucgcccaguacaccagcgcccuccuggcggggaccaucacguccggcuggaccuucggggccggcgccgcccugcagauccccuucgcgaugcagauggccuaccgguucaacggcaucggggucacccagaacgugcucuacgagaaccagaagcugaucgccaaccaguucaacagcgccaucggcaagauccaggacucccugagcuccaccgccagcgcgcucgggaagcugcaggacguggucaaccagaacgcccaggcccugaacacgcucgugaagcagcuguccagcaacuucggcgccaucuccagcgugcugaacgacauccucucccgccuggacccgcccgaggccgaggugcagaucgaccggcugaucaccgggcgccuccagagccugcagaccuacgugacccagcagcugauccgggcggccgagauccgcgccagcgccaaccucgccgcgaccaagauguccgagugcguccugggccagagcaagcggguggacuucugcggcaagggguaccagcugauguccuucccccagagcgccccgcacggcguggucuuccucaacgugacguacguccccgcccaggagaagaacuucaccaccgcccccgcgaucugcaacgacgggaaggcccacuucccccgcgagggcguguucguguccaacgggaccaacugguucgucacgcagcggaacuucuacgagccgcagaucaucaccaccgacaacaccuucgugagcggcaacugcgacguggucaucggcaucgugaacaacacgguguacgacccccugcagcccgagcuggacuccggcgggggcgggagcgacaucgaccccuacaaggaguucggcagcuccuaccagcugcucaacuuccugccccuggacuucuuccccgaccucaacgcccugguggacaccgccaccgcgcuguacgaggaggagcucacggggcgcgagcacugcagcccccaccacaccgccauccggcaggcccuggucugcugggacgagcugaccaagcucaucgccuggauguccagcaacaucaccuccgagcagguccgcacgaucaucgugaaccacgucaacgacaccuggggccugaaggugcggcagagccugugguuccaccucuccugccugaccuucgggcagcacaccgugcaggaguuccuggucagcuucggcguguggauccgcacgcccgccccguaccggccgcccaacgcgccgauccucuccacccugccggagcacaccgugaucugcugaggacuagucccuguucccagagcccacuuuuuuuucuuuuuuugaaauaaaauagccugucuuucagaucucaaaggcucuuuucagagccaccaaaaaaaaaaaaaaaaaaaaaaaaaaaaaaaaaaaaaaaaaaaaaaaaaaaaaaaaaaaaaaaaaaaaaaaaaaaaaaaaaaaaaaaaaaaaaaaaaaaaa

SEQ ID NO: 12463 - RNA, 4178 nt, Artificial Sequence
  SARS-CoV-2/Wuhan/WIV05/2019__EPI_ISL_402128 spike protein mRNA gc (1-1147)(I712C_T1077C) WhcAg construct
aggagagucccgcagucggcguccagcggcucugcuuguucgugugugugucguugcaggccuuauucaagcuuaccauguucguguuccugguccuccugccccuggugagcucccagugcgugaaccucaccacccgcacgcagcugccgcccgccuacaccaacagcuucacccggggcgucuacuaccccgacaagguguuccgcuccagcgugcugcacuccacccaggaccucuuccugcccuucuucagcaacgucacgugguuccacgccauccacguguccgggaccaacggcaccaagcgguucgacaacccggugcugcccuucaacgacggggucuacuucgcgagcaccgagaaguccaacaucauccgcggcuggaucuucgggacgacccucgacagcaagacccagucccugcugaucgugaacaacgccaccaacguggucaucaaggugugcgaguuccaguucugcaacgaccccuuccucggcguguacuaccacaagaacaacaagagcuggauggaguccgaguuccgggucuacagcuccgccaacaacugcacguucgaguacgugagccagcccuuccugauggaccuggagggcaagcaggggaacuucaagaaccuccgcgaguucguguucaagaacaucgacggcuacuucaagaucuacuccaagcacaccccgaucaaccugguccgggaccugccccagggguucagcgcccucgagccccugguggaccugcccaucggcaucaacaucacccgcuuccagacccuccuggcccugcaccgguccuaccucacgccgggggacagcagcuccggcuggaccgcgggcgccgccgccuacuacgugggguaccugcagccccgcaccuuccugcucaaguacaacgagaacggcaccaucacggacgcggucgacugcgcccuggacccccugagcgagaccaagugcacccucaaguccuucaccguggagaaggggaucuaccagacgagcaacuuccgggugcagcccaccgaguccaucguccgcuucccgaacaucaccaaccugugccccuucggcgagguguucaacgccacccgguucgccagcgucuacgccuggaaccgcaagcggaucuccaacugcguggcggacuacagcgugcuguacaacuccgccagcuucuccacguucaagugcuacggcgucagccccaccaagcucaacgaccugugcuucaccaacguguacgccgacuccuucgugauccgcggggacgagguccggcagaucgcccccggccagaccgggaagaucgccgacuacaacuacaagcugccggacgacuucacgggcugcgugaucgcguggaacagcaacaaccucgacuccaaggucgggggcaacuacaacuaccuguaccgccuguuccgcaagagcaaccucaagcccuucgagcgggacaucuccaccgagaucuaccaggccggcagcacccccugcaacgggguggagggcuucaacugcuacuucccccugcaguccuacggguuccagccgaccaacggcgugggguaccagcccuaccggguggucgugcugagcuucgagcuccugcacgcccccgccacggugugcggccccaagaaguccaccaaccuggucaagaacaagugcgugaacuucaacuucaacggccucaccgggaccggcgugcugaccgagagcaacaagaaguuccugccguuccagcaguucgggcgcgacaucgccgacacgaccgacgcgguccgcgacccccagacccuggagauccucgacaucacccccugcagcuucggcgggguguccgugaucacgccgggcaccaacaccagcaaccaggucgccgugcuguaccaggacgugaacugcaccgagguccccguggccauccacgccgaccagcugacgcccaccuggcggguguacuccaccggcagcaacgucuuccagacccgcgccgggugccucaucggcgcggagcacgugaacaacuccuacgagugcgacauccccaucggggccggcaucugcgccagcuaccagacgcagaccaacuccccgcggcgcgcccggagcguggcgucccagagcaucaucgccuacaccaugucccugggcgccgagaacagcgucgccuacuccaacaacagcugcgccauccccaccaacuucacgaucuccgugaccaccgagauccugcccgugagcaugaccaagacgagcgucgacugcaccauguacaucugcggggacuccaccgagugcagcaaccuccugcugcaguacggcuccuucugcacccagcucaaccgcgcgcugacggggaucgccguggagcaggacaagaacacccaggagguguucgcccaggucaagcagaucuacaagacgcccccgaucaaggacuucggcggguucaacuucagccagauccugcccgaccccuccaagcccagcaagcgguccuucaucgaggaccuccuguucaacaaggugacccuggccgacgccggcuucaucaagcaguacggcgacugccucggggacaucgcggcccgcgaccugaucugcgcccagaaguucaacggccugaccgugcucccgccccugcugaccgacgagaugaucgcccaguacaccagcgcccuccuggcggggaccaucacguccggcuggaccuucggggccggcgccgcccugcagauccccuucgcgaugcagauggccuaccgguucaacggcaucggggucacccagaacgugcucuacgagaaccagaagcugaucgccaaccaguucaacagcgccaucggcaagauccaggacucccugagcuccaccgccagcgcgcucgggaagcugcaggacguggucaaccagaacgcccaggcccugaacacgcucgugaagcagcuguccagcaacuucggcgccaucuccagcgugcugaacgacauccucucccgccuggacaaggucgaggccgaggugcagaucgaccggcugaucaccgggcgccuccagagccugcagaccuacgugacccagcagcugauccgggcggccgagauccgcgccagcgccaaccucgccgcgaccaagauguccgagugcguccugggccagagcaagcggguggacuucugcggcaagggguaccaccugauguccuucccccagagcgccccgcacggcguggucuuccuccacgugacguacguccccgcccaggagaagaacuucaccugcgcccccgcgaucugccacgacgggaaggcccacuucccccgcgagggcguguucguguccaacgggacccacugguucgucacgcagcggaacuucuacgagccgcagaucaucaccaccgacaacaccuucgugagcggcaacugcgacguggucaucggcaucgugaacaacacgguguacgacccccugcagcccgagcuggacuccggcgggggcgggagcgacaucgaccccuacaaggaguucggcagcuccuaccagcugcucaacuuccugccccuggacuucuuccccgaccucaacgcccugguggacaccgccaccgcgcuguacgaggaggagcucacggggcgcgagcacugcagcccccaccacaccgccauccggcaggcccuggucugcugggacgagcugaccaagcucaucgccuggauguccagcaacaucaccuccgagcagguccgcacgaucaucgugaaccacgucaacgacaccuggggccugaaggugcggcagagccugugguuccaccucuccugccugaccuucgggcagcacaccgugcaggaguuccuggucagcuucggcguguggauccgcacgcccgccccguaccggccgcccaacgcgccgauccucuccacccugccggagcacaccgugaucugcugaggacuagucccuguucccagagcccacuuuuuuuucuuuuuuugaaauaaaauagccugucuuucagaucucaaaggcucuuuucagagccaccaaaaaaaaaaaaaaaaaaaaaaaaaaaaaaaaaaaaaaaaaaaaaaaaaaaaaaaaaaaaaaaaaaaaaaaaaaaaaaaaaaaaaaaaaaaaaaaaaaaaa

SEQ ID NO: 12464 - RNA, 4178 nt, Artificial Sequence
  SARS-CoV-2/Wuhan/WIV05/2019__EPI_ISL_402128 spike protein mRNA gc (1-1147)(I714C_Y1110C) WhcAg construct
aggagagucccgcagucggcguccagcggcucugcuuguucgugugugugucguugcaggccuuauucaagcuuaccauguucguguuccugguccuccugccccuggugagcucccagugcgugaaccucaccacccgcacgcagcugccgcccgccuacaccaacagcuucacccggggcgucuacuaccccgacaagguguuccgcuccagcgugcugcacuccacccaggaccucuuccugcccuucuucagcaacgucacgugguuccacgccauccacguguccgggaccaacggcaccaagcgguucgacaacccggugcugcccuucaacgacggggucuacuucgcgagcaccgagaaguccaacaucauccgcggcuggaucuucgggacgacccucgacagcaagacccagucccugcugaucgugaacaacgccaccaacguggucaucaaggugugcgaguuccaguucugcaacgaccccuuccucggcguguacuaccacaagaacaacaagagcuggauggaguccgaguuccgggucuacagcuccgccaacaacugcacguucgaguacgugagccagcccuuccugauggaccuggagggcaagcaggggaacuucaagaaccuccgcgaguucguguucaagaacaucgacggcuacuucaagaucuacuccaagcacaccccgaucaaccugguccgggaccugccccagggguucagcgcccucgagccccugguggaccugcccaucggcaucaacaucacccgcuuccagacccuccuggcccugcaccgguccuaccucacgccgggggacagcagcuccggcuggaccgcgggcgccgccgccuacuacgugggguaccugcagccccgcaccuuccugcucaaguacaacgagaacggcaccaucacggacgcggucgacugcgcccuggacccccugagcgagaccaagugcacccucaaguccuucaccguggagaaggggaucuaccagacgagcaacuuccgggugcagcccaccgaguccaucguccgcuucccgaacaucaccaaccugugccccuucggcgagguguucaacgccacccgguucgccagcgucuacgccuggaaccgcaagcggaucuccaacugcguggcggacuacagcgugcuguacaacuccgccagcuucuccacguucaagugcuacggcgucagccccaccaagcucaacgaccugugcuucaccaacguguacgccgacuccuucgugauccgcggggacgagguccggcagaucgcccccggccagaccgggaagaucgccgacuacaacuacaagcugccggacgacuucacgggcugcgugaucgcguggaacagcaacaaccucgacuccaaggucgggggcaacuacaacuaccuguaccgccuguuccgcaagagcaaccucaagcccuucgagcgggacaucuccaccgagaucuaccaggccggcagcacccccugcaacgggguggagggcuucaacugcuacuucccccugcaguccuacggguuccagccgaccaacggcgugggguaccagcccuaccggguggucgugcugagcuucgagcuccugcacgcccccgccacggugugcggccccaagaaguccaccaaccuggucaagaacaagugcgugaacuucaacuucaacggccucaccgggaccggcgugcugaccgagagcaacaagaaguuccugccguuccagcaguucgggcgcgacaucgccgacacgaccgacgcgguccgcgacccccagacccuggagauccucgacaucacccccugcagcuucggcgggguguccgugaucacgccgggcaccaacaccagcaaccaggucgccgugcuguaccaggacgugaacugcaccgagguccccguggccauccacgccgaccagcugacgcccaccuggcggguguacuccaccggcagcaacgucuuccagacccgcgccgggugccucaucggcgcggagcacgugaacaacuccuacgagugcgacauccccaucggggccggcaucugcgccagcuaccagacgcagaccaacuccccgcggcgcgcccggagcguggcgucccagagcaucaucgccuacaccaugucccugggcgccgagaacagcgucgccuacuccaacaacagcaucgccugccccaccaacuucacgaucuccgugaccaccgagauccugcccgugagcaugaccaagacgagcgucgacugcaccauguacaucugcggggacuccaccgagugcagcaaccuccugcugcaguacggcuccuucugcacccagcucaaccgcgcgcugacggggaucgccguggagcaggacaagaacacccaggagguguucgcccaggucaagcagaucuacaagacgcccccgaucaaggacuucggcggguucaacuucagccagauccugcccgaccccuccaagcccagcaagcgguccuucaucgaggaccuccuguucaacaaggugacccuggccgacgccggcuucaucaagcaguacggcgacugccucggggacaucgcggcccgcgaccugaucugcgcccagaaguucaacggccugaccgugcucccgccccugcugaccgacgagaugaucgcccaguacaccagcgcccuccuggcggggaccaucacguccggcuggaccuucggggccggcgccgcccugcagauccccuucgcgaugcagauggccuaccgguucaacggcaucggggucacccagaacgugcucuacgagaaccagaagcugaucgccaaccaguucaacagcgccaucggcaagauccaggacucccugagcuccaccgccagcgcgcucgggaagcugcaggacguggucaaccagaacgcccaggcccugaacacgcucgugaagcagcuguccagcaacuucggcgccaucuccagcgugcugaacgacauccucucccgccuggacaaggucgaggccgaggugcagaucgaccggcugaucaccgggcgccuccagagccugcagaccuacgugacccagcagcugauccgggcggccgagauccgcgccagcgccaaccucgccgcgaccaagauguccgagugcguccugggccagagcaagcggguggacuucugcggcaagggguaccaccugauguccuucccccagagcgccccgcacggcguggucuuccuccacgugacguacguccccgcccaggagaagaacuucaccaccgcccccgcgaucugccacgacgggaaggcccacuucccccgcgagggcguguucguguccaacgggacccacugguucgucacgcagcggaacuucugcgagccgcagaucaucaccaccgacaacaccuucgugagcggcaacugcgacguggucaucggcaucgugaacaacacgguguacgacccccugcagcccgagcuggacuccggcgggggcgggagcgacaucgaccccuacaaggaguucggcagcuccuaccagcugcucaacuuccugccccuggacuucuuccccgaccucaacgcccugguggacaccgccaccgcgcuguacgaggaggagcucacggggcgcgagcacugcagcccccaccacaccgccauccggcaggcccuggucugcugggacgagcugaccaagcucaucgccuggauguccagcaacaucaccuccgagcagguccgcacgaucaucgugaaccacgucaacgacaccuggggccugaaggugcggcagagccugugguuccaccucuccugccugaccuucgggcagcacaccgugcaggaguuccuggucagcuucggcguguggauccgcacgcccgccccguaccggccgcccaacgcgccgauccucuccacccugccggagcacaccgugaucugcugaggacuagucccuguucccagagcccacuuuuuuuucuuuuuuugaaauaaaauagccugucuuucagaucucaaaggcucuuuucagagccaccaaaaaaaaaaaaaaaaaaaaaaaaaaaaaaaaaaaaaaaaaaaaaaaaaaaaaaaaaaaaaaaaaaaaaaaaaaaaaaaaaaaaaaaaaaaaaaaaaaaaa

SEQ ID NO: 12465 - RNA, 4178 nt, Artificial Sequence
  SARS-CoV-2/Wuhan/WIV05/2019__EPI_ISL_402128 spike protein mRNA gc (1-1147)(P715C_P1069C) WhcAg construct
aggagagucccgcagucggcguccagcggcucugcuuguucgugugugugucguugcaggccuuauucaagcuuaccauguucguguuccugguccuccugccccuggugagcucccagugcgugaaccucaccacccgcacgcagcugccgcccgccuacaccaacagcuucacccggggcgucuacuaccccgacaagguguuccgcuccagcgugcugcacuccacccaggaccucuuccugcccuucuucagcaacgucacgugguuccacgccauccacguguccgggaccaacggcaccaagcgguucgacaacccggugcugcccuucaacgacggggucuacuucgcgagcaccgagaaguccaacaucauccgcggcuggaucuucgggacgacccucgacagcaagacccagucccugcugaucgugaacaacgccaccaacguggucaucaaggugugcgaguuccaguucugcaacgaccccuuccucggcguguacuaccacaagaacaacaagagcuggauggaguccgaguuccgggucuacagcuccgccaacaacugcacguucgaguacgugagccagcccuuccugauggaccuggagggcaagcaggggaacuucaagaaccuccgcgaguucguguucaagaacaucgacggcuacuucaagaucuacuccaagcacaccccgaucaaccugguccgggaccugccccagggguucagcgcccucgagccccugguggaccugcccaucggcaucaacaucacccgcuuccagacccuccuggcccugcaccgguccuaccucacgccgggggacagcagcuccggcuggaccgcgggcgccgccgccuacuacgugggguaccugcagccccgcaccuuccugcucaaguacaacgagaacggcaccaucacggacgcggucgacugcgcccuggacccccugagcgagaccaagugcacccucaaguccuucaccguggagaaggggaucuaccagacgagcaacuuccgggugcagcccaccgaguccaucguccgcuucccgaacaucaccaaccugugccccuucggcgagguguucaacgccacccgguucgccagcgucuacgccuggaaccgcaagcggaucuccaacugcguggcggacuacagcgugcuguacaacuccgccagcuucuccacguucaagugcuacggcgucagccccaccaagcucaacgaccugugcuucaccaacguguacgccgacuccuucgugauccgcggggacgagguccggcagaucgcccccggccagaccgggaagaucgccgacuacaacuacaagcugccggacgacuucacgggcugcgugaucgcguggaacagcaacaaccucgacuccaaggucgggggcaacuacaacuaccuguaccgccuguuccgcaagagcaaccucaagcccuucgagcgggacaucuccaccgagaucuaccaggccggcagcacccccugcaacgggguggagggcuucaacugcuacuucccccugcaguccuacggguuccagccgaccaacggcgugggguaccagcccuaccggguggucgugcugagcuucgagcuccugcacgcccccgccacggugugcggccccaagaaguccaccaaccuggucaagaacaagugcgugaacuucaacuucaacggccucaccgggaccggcgugcugaccgagagcaacaagaaguuccugccguuccagcaguucgggcgcgacaucgccgacacgaccgacgcgguccgcgacccccagacccuggagauccucgacaucacccccugcagcuucggcgggguguccgugaucacgccgggcaccaacaccagcaaccaggucgccgugcuguaccaggacgugaacugcaccgagguccccguggccauccacgccgaccagcugacgcccaccuggcggguguacuccaccggcagcaacgucuuccagacccgcgccgggugccucaucggcgcggagcacgugaacaacuccuacgagugcgacauccccaucggggccggcaucugcgccagcuaccagacgcagaccaacuccccgcggcgcgcccggagcguggcgucccagagcaucaucgccuacaccaugucccugggcgccgagaacagcgucgccuacuccaacaacagcaucgccaucugcaccaacuucacgaucuccgugaccaccgagauccugcccgugagcaugaccaagacgagcgucgacugcaccauguacaucugcggggacuccaccgagugcagcaaccuccugcugcaguacggcuccuucugcacccagcucaaccgcgcgcugacggggaucgccguggagcaggacaagaacacccaggagguguucgcccaggucaagcagaucuacaagacgcccccgaucaaggacuucggcggguucaacuucagccagauccugcccgaccccuccaagcccagcaagcgguccuucaucgaggaccuccuguucaacaaggugacccuggccgacgccggcuucaucaagcaguacggcgacugccucggggacaucgcggcccgcgaccugaucugcgcccagaaguucaacggccugaccgugcucccgccccugcugaccgacgagaugaucgcccaguacaccagcgcccuccuggcggggaccaucacguccggcuggaccuucggggccggcgccgcccugcagauccccuucgcgaugcagauggccuaccgguucaacggcaucggggucacccagaacgugcucuacgagaaccagaagcugaucgccaaccaguucaacagcgccaucggcaagauccaggacucccugagcuccaccgccagcgcgcucgggaagcugcaggacguggucaaccagaacgcccaggcccugaacacgcucgugaagcagcuguccagcaacuucggcgccaucuccagcgugcugaacgacauccucucccgccuggacaaggucgaggccgaggugcagaucgaccggcugaucaccgggcgccuccagagccugcagaccuacgugacccagcagcugauccgggcggccgagauccgcgccagcgccaaccucgccgcgaccaagauguccgagugcguccugggccagagcaagcggguggacuucugcggcaagggguaccaccugauguccuucccccagagcgccccgcacggcguggucuuccuccacgugacguacgucugcgcccaggagaagaacuucaccaccgcccccgcgaucugccacgacgggaaggcccacuucccccgcgagggcguguucguguccaacgggacccacugguucgucacgcagcggaacuucuacgagccgcagaucaucaccaccgacaacaccuucgugagcggcaacugcgacguggucaucggcaucgugaacaacacgguguacgacccccugcagcccgagcuggacuccggcgggggcgggagcgacaucgaccccuacaaggaguucggcagcuccuaccagcugcucaacuuccugccccuggacuucuuccccgaccucaacgcccugguggacaccgccaccgcgcuguacgaggaggagcucacggggcgcgagcacugcagcccccaccacaccgccauccggcaggcccuggucugcugggacgagcugaccaagcucaucgccuggauguccagcaacaucaccuccgagcagguccgcacgaucaucgugaaccacgucaacgacaccuggggccugaaggugcggcagagccugugguuccaccucuccugccugaccuucgggcagcacaccgugcaggaguuccuggucagcuucggcguguggauccgcacgcccgccccguaccggccgcccaacgcgccgauccucuccacccugccggagcacaccgugaucugcugaggacuagucccuguucccagagcccacuuuuuuuucuuuuuuugaaauaaaauagccugucuuucagaucucaaaggcucuuuucagagccaccaaaaaaaaaaaaaaaaaaaaaaaaaaaaaaaaaaaaaaaaaaaaaaaaaaaaaaaaaaaaaaaaaaaaaaaaaaaaaaaaaaaaaaaaaaaaaaaaaaaaa

SEQ ID NO: 12466 - RNA, 4178 nt, Artificial Sequence
  SARS-CoV-2/Wuhan/WIV05/2019__EPI_ISL_402128 spike protein mRNA gc (1-1147)(G889C_L1034C) WhcAg construct
aggagagucccgcagucggcguccagcggcucugcuuguucgugugugugucguugcaggccuuauucaagcuuaccauguucguguuccugguccuccugccccuggugagcucccagugcgugaaccucaccacccgcacgcagcugccgcccgccuacaccaacagcuucacccggggcgucuacuaccccgacaagguguuccgcuccagcgugcugcacuccacccaggaccucuuccugcccuucuucagcaacgucacgugguuccacgccauccacguguccgggaccaacggcaccaagcgguucgacaacccggugcugcccuucaacgacggggucuacuucgcgagcaccgagaaguccaacaucauccgcggcuggaucuucgggacgacccucgacagcaagacccagucccugcugaucgugaacaacgccaccaacguggucaucaaggugugcgaguuccaguucugcaacgaccccuuccucggcguguacuaccacaagaacaacaagagcuggauggaguccgaguuccgggucuacagcuccgccaacaacugcacguucgaguacgugagccagcccuuccugauggaccuggagggcaagcaggggaacuucaagaaccuccgcgaguucguguucaagaacaucgacggcuacuucaagaucuacuccaagcacaccccgaucaaccugguccgggaccugccccagggguucagcgcccucgagccccugguggaccugcccaucggcaucaacaucacccgcuuccagacccuccuggcccugcaccgguccuaccucacgccgggggacagcagcuccggcuggaccgcgggcgccgccgccuacuacgugggguaccugcagccccgcaccuuccugcucaaguacaacgagaacggcaccaucacggacgcggucgacugcgcccuggacccccugagcgagaccaagugcacccucaaguccuucaccguggagaaggggaucuaccagacgagcaacuuccgggugcagcccaccgaguccaucguccgcuucccgaacaucaccaaccugugccccuucggcgagguguucaacgccacccgguucgccagcgucuacgccuggaaccgcaagcggaucuccaacugcguggcggacuacagcgugcuguacaacuccgccagcuucuccacguucaagugcuacggcgucagccccaccaagcucaacgaccugugcuucaccaacguguacgccgacuccuucgugauccgcggggacgagguccggcagaucgcccccggccagaccgggaagaucgccgacuacaacuacaagcugccggacgacuucacgggcugcgugaucgcguggaacagcaacaaccucgacuccaaggucgggggcaacuacaacuaccuguaccgccuguuccgcaagagcaaccucaagcccuucgagcgggacaucuccaccgagaucuaccaggccggcagcacccccugcaacgggguggagggcuucaacugcuacuucccccugcaguccuacggguuccagccgaccaacggcgugggguaccagcccuaccggguggucgugcugagcuucgagcuccugcacgcccccgccacggugugcggccccaagaaguccaccaaccuggucaagaacaagugcgugaacuucaacuucaacggccucaccgggaccggcgugcugaccgagagcaacaagaaguuccugccguuccagcaguucgggcgcgacaucgccgacacgaccgacgcgguccgcgacccccagacccuggagauccucgacaucacccccugcagcuucggcgggguguccgugaucacgccgggcaccaacaccagcaaccaggucgccgugcuguaccaggacgugaacugcaccgagguccccguggccauccacgccgaccagcugacgcccaccuggcggguguacuccaccggcagcaacgucuuccagacccgcgccgggugccucaucggcgcggagcacgugaacaacuccuacgagugcgacauccccaucggggccggcaucugcgccagcuaccagacgcagaccaacuccccgcggcgcgcccggagcguggcgucccagagcaucaucgccuacaccaugucccugggcgccgagaacagcgucgccuacuccaacaacagcaucgccauccccaccaacuucacgaucuccgugaccaccgagauccugcccgugagcaugaccaagacgagcgucgacugcaccauguacaucugcggggacuccaccgagugcagcaaccuccugcugcaguacggcuccuucugcacccagcucaaccgcgcgcugacggggaucgccguggagcaggacaagaacacccaggagguguucgcccaggucaagcagaucuacaagacgcccccgaucaaggacuucggcggguucaacuucagccagauccugcccgaccccuccaagcccagcaagcgguccuucaucgaggaccuccuguucaacaaggugacccuggccgacgccggcuucaucaagcaguacggcgacugccucggggacaucgcggcccgcgaccugaucugcgcccagaaguucaacggccugaccgugcucccgccccugcugaccgacgagaugaucgcccaguacaccagcgcccuccuggcggggaccaucacguccggcuggaccuucugcgccggcgccgcccugcagauccccuucgcgaugcagauggccuaccgguucaacggcaucggggucacccagaacgugcucuacgagaaccagaagcugaucgccaaccaguucaacagcgccaucggcaagauccaggacucccugagcuccaccgccagcgcgcucgggaagcugcaggacguggucaaccagaacgcccaggcccugaacacgcucgugaagcagcuguccagcaacuucggcgccaucuccagcgugcugaacgacauccucucccgccuggacaaggucgaggccgaggugcagaucgaccggcugaucaccgggcgccuccagagccugcagaccuacgugacccagcagcugauccgggcggccgagauccgcgccagcgccaaccucgccgcgaccaagauguccgagugcgucugcggccagagcaagcggguggacuucugcggcaagggguaccaccugauguccuucccccagagcgccccgcacggcguggucuuccuccacgugacguacguccccgcccaggagaagaacuucaccaccgcccccgcgaucugccacgacgggaaggcccacuucccccgcgagggcguguucguguccaacgggacccacugguucgucacgcagcggaacuucuacgagccgcagaucaucaccaccgacaacaccuucgugagcggcaacugcgacguggucaucggcaucgugaacaacacgguguacgacccccugcagcccgagcuggacuccggcgggggcgggagcgacaucgaccccuacaaggaguucggcagcuccuaccagcugcucaacuuccugccccuggacuucuuccccgaccucaacgcccugguggacaccgccaccgcgcuguacgaggaggagcucacggggcgcgagcacugcagcccccaccacaccgccauccggcaggcccuggucugcugggacgagcugaccaagcucaucgccuggauguccagcaacaucaccuccgagcagguccgcacgaucaucgugaaccacgucaacgacaccuggggccugaaggugcggcagagccugugguuccaccucuccugccugaccuucgggcagcacaccgugcaggaguuccuggucagcuucggcguguggauccgcacgcccgccccguaccggccgcccaacgcgccgauccucuccacccugccggagcacaccgugaucugcugaggacuagucccuguucccagagcccacuuuuuuuucuuuuuuugaaauaaaauagccugucuuucagaucucaaaggcucuuuucagagccaccaaaaaaaaaaaaaaaaaaaaaaaaaaaaaaaaaaaaaaaaaaaaaaaaaaaaaaaaaaaaaaaaaaaaaaaaaaaaaaaaaaaaaaaaaaaaaaaaaaaaa

SEQ ID NO: 12467 - RNA, 4178 nt, Artificial Sequence
  SARS-CoV-2/Wuhan/WIV05/2019__EPI_ISL_402128 spike protein mRNA gc (1-1147)(I909C_Y1047C) WhcAg construct
aggagagucccgcagucggcguccagcggcucugcuuguucgugugugugucguugcaggccuuauucaagcuuaccauguucguguuccugguccuccugccccuggugagcucccagugcgugaaccucaccacccgcacgcagcugccgcccgccuacaccaacagcuucacccggggcgucuacuaccccgacaagguguuccgcuccagcgugcugcacuccacccaggaccucuuccugcccuucuucagcaacgucacgugguuccacgccauccacguguccgggaccaacggcaccaagcgguucgacaacccggugcugcccuucaacgacggggucuacuucgcgagcaccgagaaguccaacaucauccgcggcuggaucuucgggacgacccucgacagcaagacccagucccugcugaucgugaacaacgccaccaacguggucaucaaggugugcgaguuccaguucugcaacgaccccuuccucggcguguacuaccacaagaacaacaagagcuggauggaguccgaguuccgggucuacagcuccgccaacaacugcacguucgaguacgugagccagcccuuccugauggaccuggagggcaagcaggggaacuucaagaaccuccgcgaguucguguucaagaacaucgacggcuacuucaagaucuacuccaagcacaccccgaucaaccugguccgggaccugccccagggguucagcgcccucgagccccugguggaccugcccaucggcaucaacaucacccgcuuccagacccuccuggcccugcaccgguccuaccucacgccgggggacagcagcuccggcuggaccgcgggcgccgccgccuacuacgugggguaccugcagccccgcaccuuccugcucaaguacaacgagaacggcaccaucacggacgcggucgacugcgcccuggacccccugagcgagaccaagugcacccucaaguccuucaccguggagaaggggaucuaccagacgagcaacuuccgggugcagcccaccgaguccaucguccgcuucccgaacaucaccaaccugugccccuucggcgagguguucaacgccacccgguucgccagcgucuacgccuggaaccgcaagcggaucuccaacugcguggcggacuacagcgugcuguacaacuccgccagcuucuccacguucaagugcuacggcgucagccccaccaagcucaacgaccugugcuucaccaacguguacgccgacuccuucgugauccgcggggacgagguccggcagaucgcccccggccagaccgggaagaucgccgacuacaacuacaagcugccggacgacuucacgggcugcgugaucgcguggaacagcaacaaccucgacuccaaggucgggggcaacuacaacuaccuguaccgccuguuccgcaagagcaaccucaagcccuucgagcgggacaucuccaccgagaucuaccaggccggcagcacccccugcaacgggguggagggcuucaacugcuacuucccccugcaguccuacggguuccagccgaccaacggcgugggguaccagcccuaccggguggucgugcugagcuucgagcuccugcacgcccccgccacggugugcggccccaagaaguccaccaaccuggucaagaacaagugcgugaacuucaacuucaacggccucaccgggaccggcgugcugaccgagagcaacaagaaguuccugccguuccagcaguucgggcgcgacaucgccgacacgaccgacgcgguccgcgacccccagacccuggagauccucgacaucacccccugcagcuucggcgggguguccgugaucacgccgggcaccaacaccagcaaccaggucgccgugcuguaccaggacgugaacugcaccgagguccccguggccauccacgccgaccagcugacgcccaccuggcggguguacuccaccggcagcaacgucuuccagacccgcgccgggugccucaucggcgcggagcacgugaacaacuccuacgagugcgacauccccaucggggccggcaucugcgccagcuaccagacgcagaccaacuccccgcggcgcgcccggagcguggcgucccagagcaucaucgccuacaccaugucccugggcgccgagaacagcgucgccuacuccaacaacagcaucgccauccccaccaacuucacgaucuccgugaccaccgagauccugcccgugagcaugaccaagacgagcgucgacugcaccauguacaucugcggggacuccaccgagugcagcaaccuccugcugcaguacggcuccuucugcacccagcucaaccgcgcgcugacggggaucgccguggagcaggacaagaacacccaggagguguucgcccaggucaagcagaucuacaagacgcccccgaucaaggacuucggcggguucaacuucagccagauccugcccgaccccuccaagcccagcaagcgguccuucaucgaggaccuccuguucaacaaggugacccuggccgacgccggcuucaucaagcaguacggcgacugccucggggacaucgcggcccgcgaccugaucugcgcccagaaguucaacggccugaccgugcucccgccccugcugaccgacgagaugaucgcccaguacaccagcgcccuccuggcggggaccaucacguccggcuggaccuucggggccggcgccgcccugcagauccccuucgcgaugcagauggccuaccgguucaacggcugcggggucacccagaacgugcucuacgagaaccagaagcugaucgccaaccaguucaacagcgccaucggcaagauccaggacucccugagcuccaccgccagcgcgcucgggaagcugcaggacguggucaaccagaacgcccaggcccugaacacgcucgugaagcagcuguccagcaacuucggcgccaucuccagcgugcugaacgacauccucucccgccuggacaaggucgaggccgaggugcagaucgaccggcugaucaccgggcgccuccagagccugcagaccuacgugacccagcagcugauccgggcggccgagauccgcgccagcgccaaccucgccgcgaccaagauguccgagugcguccugggccagagcaagcggguggacuucugcggcaaggggugccaccugauguccuucccccagagcgccccgcacggcguggucuuccuccacgugacguacguccccgcccaggagaagaacuucaccaccgcccccgcgaucugccacgacgggaaggcccacuucccccgcgagggcguguucguguccaacgggacccacugguucgucacgcagcggaacuucuacgagccgcagaucaucaccaccgacaacaccuucgugagcggcaacugcgacguggucaucggcaucgugaacaacacgguguacgacccccugcagcccgagcuggacuccggcgggggcgggagcgacaucgaccccuacaaggaguucggcagcuccuaccagcugcucaacuuccugccccuggacuucuuccccgaccucaacgcccugguggacaccgccaccgcgcuguacgaggaggagcucacggggcgcgagcacugcagcccccaccacaccgccauccggcaggcccuggucugcugggacgagcugaccaagcucaucgccuggauguccagcaacaucaccuccgagcagguccgcacgaucaucgugaaccacgucaacgacaccuggggccugaaggugcggcagagccugugguuccaccucuccugccugaccuucgggcagcacaccgugcaggaguuccuggucagcuucggcguguggauccgcacgcccgccccguaccggccgcccaacgcgccgauccucuccacccugccggagcacaccgugaucugcugaggacuagucccuguucccagagcccacuuuuuuuucuuuuuuugaaauaaaauagccugucuuucagaucucaaaggcucuuuucagagccaccaaaaaaaaaaaaaaaaaaaaaaaaaaaaaaaaaaaaaaaaaaaaaaaaaaaaaaaaaaaaaaaaaaaaaaaaaaaaaaaaaaaaaaaaaaaaaaaaaaaaa

SEQ ID NO: 12468 - RNA, 4178 nt, Artificial Sequence
  SARS-CoV-2/Wuhan/WIV05/2019__EPI_ISL_402128 spike protein mRNA gc (1-1147)(Q965C_S1003C) WhcAg construct
aggagagucccgcagucggcguccagcggcucugcuuguucgugugugugucguugcaggccuuauucaagcuuaccauguucguguuccugguccuccugccccuggugagcucccagugcgugaaccucaccacccgcacgcagcugccgcccgccuacaccaacagcuucacccggggcgucuacuaccccgacaagguguuccgcuccagcgugcugcacuccacccaggaccucuuccugcccuucuucagcaacgucacgugguuccacgccauccacguguccgggaccaacggcaccaagcgguucgacaacccggugcugcccuucaacgacggggucuacuucgcgagcaccgagaaguccaacaucauccgcggcuggaucuucgggacgacccucgacagcaagacccagucccugcugaucgugaacaacgccaccaacguggucaucaaggugugcgaguuccaguucugcaacgaccccuuccucggcguguacuaccacaagaacaacaagagcuggauggaguccgaguuccgggucuacagcuccgccaacaacugcacguucgaguacgugagccagcccuuccugauggaccuggagggcaagcaggggaacuucaagaaccuccgcgaguucguguucaagaacaucgacggcuacuucaagaucuacuccaagcacaccccgaucaaccugguccgggaccugccccagggguucagcgcccucgagccccugguggaccugcccaucggcaucaacaucacccgcuuccagacccuccuggcccugcaccgguccuaccucacgccgggggacagcagcuccggcuggaccgcgggcgccgccgccuacuacgugggguaccugcagccccgcaccuuccugcucaaguacaacgagaacggcaccaucacggacgcggucgacugcgcccuggacccccugagcgagaccaagugcacccucaaguccuucaccguggagaaggggaucuaccagacgagcaacuuccgggugcagcccaccgaguccaucguccgcuucccgaacaucaccaaccugugccccuucggcgagguguucaacgccacccgguucgccagcgucuacgccuggaaccgcaagcggaucuccaacugcguggcggacuacagcgugcuguacaacuccgccagcuucuccacguucaagugcuacggcgucagccccaccaagcucaacgaccugugcuucaccaacguguacgccgacuccuucgugauccgcggggacgagguccggcagaucgcccccggccagaccgggaagaucgccgacuacaacuacaagcugccggacgacuucacgggcugcgugaucgcguggaacagcaacaaccucgacuccaaggucgggggcaacuacaacuaccuguaccgccuguuccgcaagagcaaccucaagcccuucgagcgggacaucuccaccgagaucuaccaggccggcagcacccccugcaacgggguggagggcuucaacugcuacuucccccugcaguccuacggguuccagccgaccaacggcgugggguaccagcccuaccggguggucgugcugagcuucgagcuccugcacgcccccgccacggugugcggccccaagaaguccaccaaccuggucaagaacaagugcgugaacuucaacuucaacggccucaccgggaccggcgugcugaccgagagcaacaagaaguuccugccguuccagcaguucgggcgcgacaucgccgacacgaccgacgcgguccgcgacccccagacccuggagauccucgacaucacccccugcagcuucggcgggguguccgugaucacgccgggcaccaacaccagcaaccaggucgccgugcuguaccaggacgugaacugcaccgagguccccguggccauccacgccgaccagcugacgcccaccuggcggguguacuccaccggcagcaacgucuuccagacccgcgccgggugccucaucggcgcggagcacgugaacaacuccuacgagugcgacauccccaucggggccggcaucugcgccagcuaccagacgcagaccaacuccccgcggcgcgcccggagcguggcgucccagagcaucaucgccuacaccaugucccugggcgccgagaacagcgucgccuacuccaacaacagcaucgccauccccaccaacuucacgaucuccgugaccaccgagauccugcccgugagcaugaccaagacgagcgucgacugcaccauguacaucugcggggacuccaccgagugcagcaaccuccugcugcaguacggcuccuucugcacccagcucaaccgcgcgcugacggggaucgccguggagcaggacaagaacacccaggagguguucgcccaggucaagcagaucuacaagacgcccccgaucaaggacuucggcggguucaacuucagccagauccugcccgaccccuccaagcccagcaagcgguccuucaucgaggaccuccuguucaacaaggugacccuggccgacgccggcuucaucaagcaguacggcgacugccucggggacaucgcggcccgcgaccugaucugcgcccagaaguucaacggccugaccgugcucccgccccugcugaccgacgagaugaucgcccaguacaccagcgcccuccuggcggggaccaucacguccggcuggaccuucggggccggcgccgcccugcagauccccuucgcgaugcagauggccuaccgguucaacggcaucggggucacccagaacgugcucuacgagaaccagaagcugaucgccaaccaguucaacagcgccaucggcaagauccaggacucccugagcuccaccgccagcgcgcucgggaagcugcaggacguggucaaccagaacgcccaggcccugaacacgcucgugaagugccuguccagcaacuucggcgccaucuccagcgugcugaacgacauccucucccgccuggacaaggucgaggccgaggugcagaucgaccggcugaucaccgggcgccuccagugccugcagaccuacgugacccagcagcugauccgggcggccgagauccgcgccagcgccaaccucgccgcgaccaagauguccgagugcguccugggccagagcaagcggguggacuucugcggcaagggguaccaccugauguccuucccccagagcgccccgcacggcguggucuuccuccacgugacguacguccccgcccaggagaagaacuucaccaccgcccccgcgaucugccacgacgggaaggcccacuucccccgcgagggcguguucguguccaacgggacccacugguucgucacgcagcggaacuucuacgagccgcagaucaucaccaccgacaacaccuucgugagcggcaacugcgacguggucaucggcaucgugaacaacacgguguacgacccccugcagcccgagcuggacuccggcgggggcgggagcgacaucgaccccuacaaggaguucggcagcuccuaccagcugcucaacuuccugccccuggacuucuuccccgaccucaacgcccugguggacaccgccaccgcgcuguacgaggaggagcucacggggcgcgagcacugcagcccccaccacaccgccauccggcaggcccuggucugcugggacgagcugaccaagcucaucgccuggauguccagcaacaucaccuccgagcagguccgcacgaucaucgugaaccacgucaacgacaccuggggccugaaggugcggcagagccugugguuccaccucuccugccugaccuucgggcagcacaccgugcaggaguuccuggucagcuucggcguguggauccgcacgcccgccccguaccggccgcccaacgcgccgauccucuccacccugccggagcacaccgugaucugcugaggacuagucccuguucccagagcccacuuuuuuuucuuuuuuugaaauaaaauagccugucuuucagaucucaaaggcucuuuucagagccaccaaaaaaaaaaaaaaaaaaaaaaaaaaaaaaaaaaaaaaaaaaaaaaaaaaaaaaaaaaaaaaaaaaaaaaaaaaaaaaaaaaaaaaaaaaaaaaaaaaaaa

SEQ ID NO: 12469 - RNA, 4178 nt, Artificial Sequence
  SARS-CoV-2/Wuhan/WIV05/2019__EPI_ISL_402128 spike protein mRNA gc (1-1147)(F970C_G999C) WhcAg construct
aggagagucccgcagucggcguccagcggcucugcuuguucgugugugugucguugcaggccuuauucaagcuuaccauguucguguuccugguccuccugccccuggugagcucccagugcgugaaccucaccacccgcacgcagcugccgcccgccuacaccaacagcuucacccggggcgucuacuaccccgacaagguguuccgcuccagcgugcugcacuccacccaggaccucuuccugcccuucuucagcaacgucacgugguuccacgccauccacguguccgggaccaacggcaccaagcgguucgacaacccggugcugcccuucaacgacggggucuacuucgcgagcaccgagaaguccaacaucauccgcggcuggaucuucgggacgacccucgacagcaagacccagucccugcugaucgugaacaacgccaccaacguggucaucaaggugugcgaguuccaguucugcaacgaccccuuccucggcguguacuaccacaagaacaacaagagcuggauggaguccgaguuccgggucuacagcuccgccaacaacugcacguucgaguacgugagccagcccuuccugauggaccuggagggcaagcaggggaacuucaagaaccuccgcgaguucguguucaagaacaucgacggcuacuucaagaucuacuccaagcacaccccgaucaaccugguccgggaccugccccagggguucagcgcccucgagccccugguggaccugcccaucggcaucaacaucacccgcuuccagacccuccuggcccugcaccgguccuaccucacgccgggggacagcagcuccggcuggaccgcgggcgccgccgccuacuacgugggguaccugcagccccgcaccuuccugcucaaguacaacgagaacggcaccaucacggacgcggucgacugcgcccuggacccccugagcgagaccaagugcacccucaaguccuucaccguggagaaggggaucuaccagacgagcaacuuccgggugcagcccaccgaguccaucguccgcuucccgaacaucaccaaccugugccccuucggcgagguguucaacgccacccgguucgccagcgucuacgccuggaaccgcaagcggaucuccaacugcguggcggacuacagcgugcuguacaacuccgccagcuucuccacguucaagugcuacggcgucagccccaccaagcucaacgaccugugcuucaccaacguguacgccgacuccuucgugauccgcggggacgagguccggcagaucgcccccggccagaccgggaagaucgccgacuacaacuacaagcugccggacgacuucacgggcugcgugaucgcguggaacagcaacaaccucgacuccaaggucgggggcaacuacaacuaccuguaccgccuguuccgcaagagcaaccucaagcccuucgagcgggacaucuccaccgagaucuaccaggccggcagcacccccugcaacgggguggagggcuucaacugcuacuucccccugcaguccuacggguuccagccgaccaacggcgugggguaccagcccuaccggguggucgugcugagcuucgagcuccugcacgcccccgccacggugugcggccccaagaaguccaccaaccuggucaagaacaagugcgugaacuucaacuucaacggccucaccgggaccggcgugcugaccgagagcaacaagaaguuccugccguuccagcaguucgggcgcgacaucgccgacacgaccgacgcgguccgcgacccccagacccuggagauccucgacaucacccccugcagcuucggcgggguguccgugaucacgccgggcaccaacaccagcaaccaggucgccgugcuguaccaggacgugaacugcaccgagguccccguggccauccacgccgaccagcugacgcccaccuggcggguguacuccaccggcagcaacgucuuccagacccgcgccgggugccucaucggcgcggagcacgugaacaacuccuacgagugcgacauccccaucggggccggcaucugcgccagcuaccagacgcagaccaacuccccgcggcgcgcccggagcguggcgucccagagcaucaucgccuacaccaugucccugggcgccgagaacagcgucgccuacuccaacaacagcaucgccauccccaccaacuucacgaucuccgugaccaccgagauccugcccgugagcaugaccaagacgagcgucgacugcaccauguacaucugcggggacuccaccgagugcagcaaccuccugcugcaguacggcuccuucugcacccagcucaaccgcgcgcugacggggaucgccguggagcaggacaagaacacccaggagguguucgcccaggucaagcagaucuacaagacgcccccgaucaaggacuucggcggguucaacuucagccagauccugcccgaccccuccaagcccagcaagcgguccuucaucgaggaccuccuguucaacaaggugacccuggccgacgccggcuucaucaagcaguacggcgacugccucggggacaucgcggcccgcgaccugaucugcgcccagaaguucaacggccugaccgugcucccgccccugcugaccgacgagaugaucgcccaguacaccagcgcccuccuggcggggaccaucacguccggcuggaccuucggggccggcgccgcccugcagauccccuucgcgaugcagauggccuaccgguucaacggcaucggggucacccagaacgugcucuacgagaaccagaagcugaucgccaaccaguucaacagcgccaucggcaagauccaggacucccugagcuccaccgccagcgcgcucgggaagcugcaggacguggucaaccagaacgcccaggcccugaacacgcucgugaagcagcuguccagcaacugcggcgccaucuccagcgugcugaacgacauccucucccgccuggacaaggucgaggccgaggugcagaucgaccggcugaucaccugucgccuccagagccugcagaccuacgugacccagcagcugauccgggcggccgagauccgcgccagcgccaaccucgccgcgaccaagauguccgagugcguccugggccagagcaagcggguggacuucugcggcaagggguaccaccugauguccuucccccagagcgccccgcacggcguggucuuccuccacgugacguacguccccgcccaggagaagaacuucaccaccgcccccgcgaucugccacgacgggaaggcccacuucccccgcgagggcguguucguguccaacgggacccacugguucgucacgcagcggaacuucuacgagccgcagaucaucaccaccgacaacaccuucgugagcggcaacugcgacguggucaucggcaucgugaacaacacgguguacgacccccugcagcccgagcuggacuccggcgggggcgggagcgacaucgaccccuacaaggaguucggcagcuccuaccagcugcucaacuuccugccccuggacuucuuccccgaccucaacgcccugguggacaccgccaccgcgcuguacgaggaggagcucacggggcgcgagcacugcagcccccaccacaccgccauccggcaggcccuggucugcugggacgagcugaccaagcucaucgccuggauguccagcaacaucaccuccgagcagguccgcacgaucaucgugaaccacgucaacgacaccuggggccugaaggugcggcagagccugugguuccaccucuccugccugaccuucgggcagcacaccgugcaggaguuccuggucagcuucggcguguggauccgcacgcccgccccguaccggccgcccaacgcgccgauccucuccacccugccggagcacaccgugaucugcugaggacuagucccuguucccagagcccacuuuuuuuucuuuuuuugaaauaaaauagccugucuuucagaucucaaaggcucuuuucagagccaccaaaaaaaaaaaaaaaaaaaaaaaaaaaaaaaaaaaaaaaaaaaaaaaaaaaaaaaaaaaaaaaaaaaaaaaaaaaaaaaaaaaaaaaaaaaaaaaaaaaaa

SEQ ID NO: 12470 - RNA, 4178 nt, Artificial Sequence
  SARS-CoV-2/Wuhan/WIV05/2019__EPI_ISL_402128 spike protein mRNA gc (1-1147)(A972C_R995C) WhcAg construct
aggagagucccgcagucggcguccagcggcucugcuuguucgugugugugucguugcaggccuuauucaagcuuaccauguucguguuccugguccuccugccccuggugagcucccagugcgugaaccucaccacccgcacgcagcugccgcccgccuacaccaacagcuucacccggggcgucuacuaccccgacaagguguuccgcuccagcgugcugcacuccacccaggaccucuuccugcccuucuucagcaacgucacgugguuccacgccauccacguguccgggaccaacggcaccaagcgguucgacaacccggugcugcccuucaacgacggggucuacuucgcgagcaccgagaaguccaacaucauccgcggcuggaucuucgggacgacccucgacagcaagacccagucccugcugaucgugaacaacgccaccaacguggucaucaaggugugcgaguuccaguucugcaacgaccccuuccucggcguguacuaccacaagaacaacaagagcuggauggaguccgaguuccgggucuacagcuccgccaacaacugcacguucgaguacgugagccagcccuuccugauggaccuggagggcaagcaggggaacuucaagaaccuccgcgaguucguguucaagaacaucgacggcuacuucaagaucuacuccaagcacaccccgaucaaccugguccgggaccugccccagggguucagcgcccucgagccccugguggaccugcccaucggcaucaacaucacccgcuuccagacccuccuggcccugcaccgguccuaccucacgccgggggacagcagcuccggcuggaccgcgggcgccgccgccuacuacgugggguaccugcagccccgcaccuuccugcucaaguacaacgagaacggcaccaucacggacgcggucgacugcgcccuggacccccugagcgagaccaagugcacccucaaguccuucaccguggagaaggggaucuaccagacgagcaacuuccgggugcagcccaccgaguccaucguccgcuucccgaacaucaccaaccugugccccuucggcgagguguucaacgccacccgguucgccagcgucuacgccuggaaccgcaagcggaucuccaacugcguggcggacuacagcgugcuguacaacuccgccagcuucuccacguucaagugcuacggcgucagccccaccaagcucaacgaccugugcuucaccaacguguacgccgacuccuucgugauccgcggggacgagguccggcagaucgcccccggccagaccgggaagaucgccgacuacaacuacaagcugccggacgacuucacgggcugcgugaucgcguggaacagcaacaaccucgacuccaaggucgggggcaacuacaacuaccuguaccgccuguuccgcaagagcaaccucaagcccuucgagcgggacaucuccaccgagaucuaccaggccggcagcacccccugcaacgggguggagggcuucaacugcuacuucccccugcaguccuacggguuccagccgaccaacggcgugggguaccagcccuaccggguggucgugcugagcuucgagcuccugcacgcccccgccacggugugcggccccaagaaguccaccaaccuggucaagaacaagugcgugaacuucaacuucaacggccucaccgggaccggcgugcugaccgagagcaacaagaaguuccugccguuccagcaguucgggcgcgacaucgccgacacgaccgacgcgguccgcgacccccagacccuggagauccucgacaucacccccugcagcuucggcgggguguccgugaucacgccgggcaccaacaccagcaaccaggucgccgugcuguaccaggacgugaacugcaccgagguccccguggccauccacgccgaccagcugacgcccaccuggcggguguacuccaccggcagcaacgucuuccagacccgcgccgggugccucaucggcgcggagcacgugaacaacuccuacgagugcgacauccccaucggggccggcaucugcgccagcuaccagacgcagaccaacuccccgcggcgcgcccggagcguggcgucccagagcaucaucgccuacaccaugucccugggcgccgagaacagcgucgccuacuccaacaacagcaucgccauccccaccaacuucacgaucuccgugaccaccgagauccugcccgugagcaugaccaagacgagcgucgacugcaccauguacaucugcggggacuccaccgagugcagcaaccuccugcugcaguacggcuccuucugcacccagcucaaccgcgcgcugacggggaucgccguggagcaggacaagaacacccaggagguguucgcccaggucaagcagaucuacaagacgcccccgaucaaggacuucggcggguucaacuucagccagauccugcccgaccccuccaagcccagcaagcgguccuucaucgaggaccuccuguucaacaaggugacccuggccgacgccggcuucaucaagcaguacggcgacugccucggggacaucgcggcccgcgaccugaucugcgcccagaaguucaacggccugaccgugcucccgccccugcugaccgacgagaugaucgcccaguacaccagcgcccuccuggcggggaccaucacguccggcuggaccuucggggccggcgccgcccugcagauccccuucgcgaugcagauggccuaccgguucaacggcaucggggucacccagaacgugcucuacgagaaccagaagcugaucgccaaccaguucaacagcgccaucggcaagauccaggacucccugagcuccaccgccagcgcgcucgggaagcugcaggacguggucaaccagaacgcccaggcccugaacacgcucgugaagcagcuguccagcaacuucggcugcaucuccagcgugcugaacgacauccucucccgccuggacaaggucgaggccgaggugcagaucgacugccugaucaccgggcgccuccagagccugcagaccuacgugacccagcagcugauccgggcggccgagauccgcgccagcgccaaccucgccgcgaccaagauguccgagugcguccugggccagagcaagcggguggacuucugcggcaagggguaccaccugauguccuucccccagagcgccccgcacggcguggucuuccuccacgugacguacguccccgcccaggagaagaacuucaccaccgcccccgcgaucugccacgacgggaaggcccacuucccccgcgagggcguguucguguccaacgggacccacugguucgucacgcagcggaacuucuacgagccgcagaucaucaccaccgacaacaccuucgugagcggcaacugcgacguggucaucggcaucgugaacaacacgguguacgacccccugcagcccgagcuggacuccggcgggggcgggagcgacaucgaccccuacaaggaguucggcagcuccuaccagcugcucaacuuccugccccuggacuucuuccccgaccucaacgcccugguggacaccgccaccgcgcuguacgaggaggagcucacggggcgcgagcacugcagcccccaccacaccgccauccggcaggcccuggucugcugggacgagcugaccaagcucaucgccuggauguccagcaacaucaccuccgagcagguccgcacgaucaucgugaaccacgucaacgacaccuggggccugaaggugcggcagagccugugguuccaccucuccugccugaccuucgggcagcacaccgugcaggaguuccuggucagcuucggcguguggauccgcacgcccgccccguaccggccgcccaacgcgccgauccucuccacccugccggagcacaccgugaucugcugaggacuagucccuguucccagagcccacuuuuuuuucuuuuuuugaaauaaaauagccugucuuucagaucucaaaggcucuuuucagagccaccaaaaaaaaaaaaaaaaaaaaaaaaaaaaaaaaaaaaaaaaaaaaaaaaaaaaaaaaaaaaaaaaaaaaaaaaaaaaaaaaaaaaaaaaaaaaaaaaaaaaa

SEQ ID NO: 12471 - RNA, 4178 nt, Artificial Sequence
  SARS-CoV-2/Wuhan/WIV05/2019__EPI_ISL_402128 spike protein mRNA gc (1-1147)(A890C_V1040C) WhcAg construct
aggagagucccgcagucggcguccagcggcucugcuuguucgugugugugucguugcaggccuuauucaagcuuaccauguucguguuccugguccuccugccccuggugagcucccagugcgugaaccucaccacccgcacgcagcugccgcccgccuacaccaacagcuucacccggggcgucuacuaccccgacaagguguuccgcuccagcgugcugcacuccacccaggaccucuuccugcccuucuucagcaacgucacgugguuccacgccauccacguguccgggaccaacggcaccaagcgguucgacaacccggugcugcccuucaacgacggggucuacuucgcgagcaccgagaaguccaacaucauccgcggcuggaucuucgggacgacccucgacagcaagacccagucccugcugaucgugaacaacgccaccaacguggucaucaaggugugcgaguuccaguucugcaacgaccccuuccucggcguguacuaccacaagaacaacaagagcuggauggaguccgaguuccgggucuacagcuccgccaacaacugcacguucgaguacgugagccagcccuuccugauggaccuggagggcaagcaggggaacuucaagaaccuccgcgaguucguguucaagaacaucgacggcuacuucaagaucuacuccaagcacaccccgaucaaccugguccgggaccugccccagggguucagcgcccucgagccccugguggaccugcccaucggcaucaacaucacccgcuuccagacccuccuggcccugcaccgguccuaccucacgccgggggacagcagcuccggcuggaccgcgggcgccgccgccuacuacgugggguaccugcagccccgcaccuuccugcucaaguacaacgagaacggcaccaucacggacgcggucgacugcgcccuggacccccugagcgagaccaagugcacccucaaguccuucaccguggagaaggggaucuaccagacgagcaacuuccgggugcagcccaccgaguccaucguccgcuucccgaacaucaccaaccugugccccuucggcgagguguucaacgccacccgguucgccagcgucuacgccuggaaccgcaagcggaucuccaacugcguggcggacuacagcgugcuguacaacuccgccagcuucuccacguucaagugcuacggcgucagccccaccaagcucaacgaccugugcuucaccaacguguacgccgacuccuucgugauccgcggggacgagguccggcagaucgcccccggccagaccgggaagaucgccgacuacaacuacaagcugccggacgacuucacgggcugcgugaucgcguggaacagcaacaaccucgacuccaaggucgggggcaacuacaacuaccuguaccgccuguuccgcaagagcaaccucaagcccuucgagcgggacaucuccaccgagaucuaccaggccggcagcacccccugcaacgggguggagggcuucaacugcuacuucccccugcaguccuacggguuccagccgaccaacggcgugggguaccagcccuaccggguggucgugcugagcuucgagcuccugcacgcccccgccacggugugcggccccaagaaguccaccaaccuggucaagaacaagugcgugaacuucaacuucaacggccucaccgggaccggcgugcugaccgagagcaacaagaaguuccugccguuccagcaguucgggcgcgacaucgccgacacgaccgacgcgguccgcgacccccagacccuggagauccucgacaucacccccugcagcuucggcgggguguccgugaucacgccgggcaccaacaccagcaaccaggucgccgugcuguaccaggacgugaacugcaccgagguccccguggccauccacgccgaccagcugacgcccaccuggcggguguacuccaccggcagcaacgucuuccagacccgcgccgggugccucaucggcgcggagcacgugaacaacuccuacgagugcgacauccccaucggggccggcaucugcgccagcuaccagacgcagaccaacuccccgcggcgcgcccggagcguggcgucccagagcaucaucgccuacaccaugucccugggcgccgagaacagcgucgccuacuccaacaacagcaucgccauccccaccaacuucacgaucuccgugaccaccgagauccugcccgugagcaugaccaagacgagcgucgacugcaccauguacaucugcggggacuccaccgagugcagcaaccuccugcugcaguacggcuccuucugcacccagcucaaccgcgcgcugacggggaucgccguggagcaggacaagaacacccaggagguguucgcccaggucaagcagaucuacaagacgcccccgaucaaggacuucggcggguucaacuucagccagauccugcccgaccccuccaagcccagcaagcgguccuucaucgaggaccuccuguucaacaaggugacccuggccgacgccggcuucaucaagcaguacggcgacugccucggggacaucgcggcccgcgaccugaucugcgcccagaaguucaacggccugaccgugcucccgccccugcugaccgacgagaugaucgcccaguacaccagcgcccuccuggcggggaccaucacguccggcuggaccuucgggugcggcgccgcccugcagauccccuucgcgaugcagauggccuaccgguucaacggcaucggggucacccagaacgugcucuacgagaaccagaagcugaucgccaaccaguucaacagcgccaucggcaagauccaggacucccugagcuccaccgccagcgcgcucgggaagcugcaggacguggucaaccagaacgcccaggcccugaacacgcucgugaagcagcuguccagcaacuucggcgccaucuccagcgugcugaacgacauccucucccgccuggacaaggucgaggccgaggugcagaucgaccggcugaucaccgggcgccuccagagccugcagaccuacgugacccagcagcugauccgggcggccgagauccgcgccagcgccaaccucgccgcgaccaagauguccgagugcguccugggccagagcaagcggugcgacuucugcggcaagggguaccaccugauguccuucccccagagcgccccgcacggcguggucuuccuccacgugacguacguccccgcccaggagaagaacuucaccaccgcccccgcgaucugccacgacgggaaggcccacuucccccgcgagggcguguucguguccaacgggacccacugguucgucacgcagcggaacuucuacgagccgcagaucaucaccaccgacaacaccuucgugagcggcaacugcgacguggucaucggcaucgugaacaacacgguguacgacccccugcagcccgagcuggacuccggcgggggcgggagcgacaucgaccccuacaaggaguucggcagcuccuaccagcugcucaacuuccugccccuggacuucuuccccgaccucaacgcccugguggacaccgccaccgcgcuguacgaggaggagcucacggggcgcgagcacugcagcccccaccacaccgccauccggcaggcccuggucugcugggacgagcugaccaagcucaucgccuggauguccagcaacaucaccuccgagcagguccgcacgaucaucgugaaccacgucaacgacaccuggggccugaaggugcggcagagccugugguuccaccucuccugccugaccuucgggcagcacaccgugcaggaguuccuggucagcuucggcguguggauccgcacgcccgccccguaccggccgcccaacgcgccgauccucuccacccugccggagcacaccgugaucugcugaggacuagucccuguucccagagcccacuuuuuuuucuuuuuuugaaauaaaauagccugucuuucagaucucaaaggcucuuuucagagccaccaaaaaaaaaaaaaaaaaaaaaaaaaaaaaaaaaaaaaaaaaaaaaaaaaaaaaaaaaaaaaaaaaaaaaaaaaaaaaaaaaaaaaaaaaaaaaaaaaaaaa

SEQ ID NO: 12472 - RNA, 4178 nt, Artificial Sequence
  SARS-CoV-2/Wuhan/WIV05/2019__EPI_ISL_402128 spike protein mRNA gc (1-1147)(T874C_S1055C) WhcAg construct
aggagagucccgcagucggcguccagcggcucugcuuguucgugugugugucguugcaggccuuauucaagcuuaccauguucguguuccugguccuccugccccuggugagcucccagugcgugaaccucaccacccgcacgcagcugccgcccgccuacaccaacagcuucacccggggcgucuacuaccccgacaagguguuccgcuccagcgugcugcacuccacccaggaccucuuccugcccuucuucagcaacgucacgugguuccacgccauccacguguccgggaccaacggcaccaagcgguucgacaacccggugcugcccuucaacgacggggucuacuucgcgagcaccgagaaguccaacaucauccgcggcuggaucuucgggacgacccucgacagcaagacccagucccugcugaucgugaacaacgccaccaacguggucaucaaggugugcgaguuccaguucugcaacgaccccuuccucggcguguacuaccacaagaacaacaagagcuggauggaguccgaguuccgggucuacagcuccgccaacaacugcacguucgaguacgugagccagcccuuccugauggaccuggagggcaagcaggggaacuucaagaaccuccgcgaguucguguucaagaacaucgacggcuacuucaagaucuacuccaagcacaccccgaucaaccugguccgggaccugccccagggguucagcgcccucgagccccugguggaccugcccaucggcaucaacaucacccgcuuccagacccuccuggcccugcaccgguccuaccucacgccgggggacagcagcuccggcuggaccgcgggcgccgccgccuacuacgugggguaccugcagccccgcaccuuccugcucaaguacaacgagaacggcaccaucacggacgcggucgacugcgcccuggacccccugagcgagaccaagugcacccucaaguccuucaccguggagaaggggaucuaccagacgagcaacuuccgggugcagcccaccgaguccaucguccgcuucccgaacaucaccaaccugugccccuucggcgagguguucaacgccacccgguucgccagcgucuacgccuggaaccgcaagcggaucuccaacugcguggcggacuacagcgugcuguacaacuccgccagcuucuccacguucaagugcuacggcgucagccccaccaagcucaacgaccugugcuucaccaacguguacgccgacuccuucgugauccgcggggacgagguccggcagaucgcccccggccagaccgggaagaucgccgacuacaacuacaagcugccggacgacuucacgggcugcgugaucgcguggaacagcaacaaccucgacuccaaggucgggggcaacuacaacuaccuguaccgccuguuccgcaagagcaaccucaagcccuucgagcgggacaucuccaccgagaucuaccaggccggcagcacccccugcaacgggguggagggcuucaacugcuacuucccccugcaguccuacggguuccagccgaccaacggcgugggguaccagcccuaccggguggucgugcugagcuucgagcuccugcacgcccccgccacggugugcggccccaagaaguccaccaaccuggucaagaacaagugcgugaacuucaacuucaacggccucaccgggaccggcgugcugaccgagagcaacaagaaguuccugccguuccagcaguucgggcgcgacaucgccgacacgaccgacgcgguccgcgacccccagacccuggagauccucgacaucacccccugcagcuucggcgggguguccgugaucacgccgggcaccaacaccagcaaccaggucgccgugcuguaccaggacgugaacugcaccgagguccccguggccauccacgccgaccagcugacgcccaccuggcggguguacuccaccggcagcaacgucuuccagacccgcgccgggugccucaucggcgcggagcacgugaacaacuccuacgagugcgacauccccaucggggccggcaucugcgccagcuaccagacgcagaccaacuccccgcggcgcgcccggagcguggcgucccagagcaucaucgccuacaccaugucccugggcgccgagaacagcgucgccuacuccaacaacagcaucgccauccccaccaacuucacgaucuccgugaccaccgagauccugcccgugagcaugaccaagacgagcgucgacugcaccauguacaucugcggggacuccaccgagugcagcaaccuccugcugcaguacggcuccuucugcacccagcucaaccgcgcgcugacggggaucgccguggagcaggacaagaacacccaggagguguucgcccaggucaagcagaucuacaagacgcccccgaucaaggacuucggcggguucaacuucagccagauccugcccgaccccuccaagcccagcaagcgguccuucaucgaggaccuccuguucaacaaggugacccuggccgacgccggcuucaucaagcaguacggcgacugccucggggacaucgcggcccgcgaccugaucugcgcccagaaguucaacggccugaccgugcucccgccccugcugaccgacgagaugaucgcccaguacugcagcgcccuccuggcggggaccaucacguccggcuggaccuucggggccggcgccgcccugcagauccccuucgcgaugcagauggccuaccgguucaacggcaucggggucacccagaacgugcucuacgagaaccagaagcugaucgccaaccaguucaacagcgccaucggcaagauccaggacucccugagcuccaccgccagcgcgcucgggaagcugcaggacguggucaaccagaacgcccaggcccugaacacgcucgugaagcagcuguccagcaacuucggcgccaucuccagcgugcugaacgacauccucucccgccuggacaaggucgaggccgaggugcagaucgaccggcugaucaccgggcgccuccagagccugcagaccuacgugacccagcagcugauccgggcggccgagauccgcgccagcgccaaccucgccgcgaccaagauguccgagugcguccugggccagagcaagcggguggacuucugcggcaagggguaccaccugauguccuucccccagugcgccccgcacggcguggucuuccuccacgugacguacguccccgcccaggagaagaacuucaccaccgcccccgcgaucugccacgacgggaaggcccacuucccccgcgagggcguguucguguccaacgggacccacugguucgucacgcagcggaacuucuacgagccgcagaucaucaccaccgacaacaccuucgugagcggcaacugcgacguggucaucggcaucgugaacaacacgguguacgacccccugcagcccgagcuggacuccggcgggggcgggagcgacaucgaccccuacaaggaguucggcagcuccuaccagcugcucaacuuccugccccuggacuucuuccccgaccucaacgcccugguggacaccgccaccgcgcuguacgaggaggagcucacggggcgcgagcacugcagcccccaccacaccgccauccggcaggcccuggucugcugggacgagcugaccaagcucaucgccuggauguccagcaacaucaccuccgagcagguccgcacgaucaucgugaaccacgucaacgacaccuggggccugaaggugcggcagagccugugguuccaccucuccugccugaccuucgggcagcacaccgugcaggaguuccuggucagcuucggcguguggauccgcacgcccgccccguaccggccgcccaacgcgccgauccucuccacccugccggagcacaccgugaucugcugaggacuagucccuguucccagagcccacuuuuuuuucuuuuuuugaaauaaaauagccugucuuucagaucucaaaggcucuuuucagagccaccaaaaaaaaaaaaaaaaaaaaaaaaaaaaaaaaaaaaaaaaaaaaaaaaaaaaaaaaaaaaaaaaaaaaaaaaaaaaaaaaaaaaaaaaaaaaaaaaaaaaa

SEQ ID NO: 12473 - RNA, 4094 nt, Artificial Sequence
  SARS-CoV-2/Wuhan/WIV05/2019__EPI_ISL_402128 spike protein mRNA human (1-1273)
aggagagucccgcagucggcguccagcggcucugcuuguucgugugugugucguugcaggccuuauucaagcuuaccauguucguguuucugguccuccuuccccugguuagcucccagugcgugaacuugaccacaagaacucaauuaccuccagccuacacuaauucuuucaccaggggcguauauuacccggacaagguguuucggucaaguguccugcacagcacacaggaucuauuccuccccuuuuucuccaacgugacuugguuucaugcuauccacguuucugggaccaauggaacaaaacgcuucgacaacccugugcugccauuuaaugauggugucuauuucgcaucgaccgagaagucaaacauuauacgaggcuggaucuuugggacuacacuugacagcaaaacccagagucuguugauugugaauaacgccacgaauguaguuaucaaggugugugaguuccaguuuugcaacgaucccuuccucggagucuacuaucauaaaaauaacaaguccuggauggagucugaguuccguguguacagcuccgcgaauaacuguacuuuugaauaugugucacaaccuuuccugauggaccuggaaggcaagcaggguaauuuuaaaaaccucagagaguucgucuuuaagaacauugauggguacuucaaaaucuacaguaagcacaccccaauaaauuuaguuagggaccugccccagggauuuagcgcucuugagccuuugguggaucugccaaucggcauuaacaucacacgguuccagacucuacucgcccugcaucgcucuuaucuuaccccgggcgacuccucaagcggguggacagcaggagccgcugcauacuauguagguuaccugcaacccagaaccuuuuugcucaaauauaaugaaaacggcacgauuacugaugccguggacugcgcucuggauccuuuaagugagacaaaguguacccugaagucuuucacugucgaaaaagggaucuaccagacauccaauuuuagggugcagccaaccgagagcauaguucgguuccccaacauuacgaaucucugcccuuuuggagagguguucaacgccacccgcuucgcgucggucuaugcauggaaucgaaagagaaucucuaacuguguggccgacuacuccguacuuuacaauucagcuaguuuuagcacauucaaaugcuauggcguuuccccaacuaagcugaacgacuuguguuuuaccaauguguacgccgauucuuucgucauuaggggugacgaagugcggcagaucgcacccgggcaaacaggaaaaaucgcugauuauaacuacaagcuaccggacgauuuuacuggcugcgucauugccuggaauagcaacaaccuggacucaaaagugggcgggaauuauaacuaccucuaucgucuguuccgcaagaguaaucuuaagccuuuugagagagauauauccaccgaaaucuaccaggcgggaagcacacccuguaacgguguugagggcuucaauugcuacuuuccacugcagucuuauggguuccaaccuaccaacggagugggcuaccagcccuauaggguagucguguugucauuugaacuccugcacgccccagcaacuguuugcggucccaaaaagaguacgaauuuagugaaaaacaagugugucaauuucaacuuuaaugggcugacaggcaccggagugcuaacugagagcaacaaaaaguuccucccuuuccagcaguuuggccgggacauugcugauaccacagacgccguacgagauccacaaacccuggagauccuugacauaacuccgugcuccuucgggggagugucuguuauuacacccgguacgaauaccucgaaccaggucgcuguguuguaccaggacgugaauuguacugaagucccuguugccauccacgcagaucagcugacaccaaccuggcgcguguauagcacaggcuccaacguguuucaaacuagagccgggugccucaucggagcugagcauguaaacaauucauacgaaugugacauucccaucggcgcggguauuugcgcaaguuaucagacccagacgaacucuccuaggcgggcccgcagcgucgcuucccagucaauaaucgccuacaccaugagccugggggcagaaaauucuguggccuacuccaacaauaguauugcuaucccaacaaacuucacuaucagcguuaccacagaaauucuucccgugucuaugacuaagaccuccgucgauuguacgauguauauaugcggcgacucaacagaguguaguaaucuguugcuccaauacggcagcuuuugcacccagcugaacagagccuuaacuggaaucgcaguggagcaggauaaaaauacacaggaaguuuucgcgcaagugaagcagauuuauaaaaccccgccuaucaaggacuuugggggauucaacuuuucgcagauucugccagaucccuccaaaccuucuaagaggagcuucaucgaggaccuacucuuuaauaagguaacucuggcugaugccgguuucauaaaacaauacggcgacugucuuggggauaucgcagcccgugacuugauuugcgcucagaaguucaacggacugaccguccugcccccacucuuaacagaugaaaugaucgcccaguauacgucagcacugcuugcuggcaccauuacgagugguuggacauuuggggccggcgcggccuugcagaucccuuucgcuaugcaaauggcauaccgguuuaauggaauaggcgugacccagaacgugcucuaugagaaucagaaacugauugccaaccaguucaacuccgcuaucgggaagauucaagacucucuaagcuccacagccucagcacugggaaaacuccaggacgucguuaaucagaacgcgcaggcccugaauacucuugugaagcaauugagcaguaacuuuggcgcuaucucuuccguacugaaugauauauuaagccgacucgacaagguggaagccgagguccagaucgauagacugauuaccgguaggcuucagucgcugcaaacguacgugacacagcaguugauccgcgcagcugagauucgggccucagcaaaccucgccgcuaccaaaaugucugaaugcguucuggggcagaguaagagaguggacuucuguggaaaaggcuaccaccuaauguccuuuccccaaagcgcgccacauggugucguguuccugcacguuacuuaugugccggcccaggagaagaauuuuaccacagcuccugcaaucugccacgauggcaaagcccauuuccccagggaaggggucuuuguaucuaacggaacucacugguucgugacccagcgcaauuuuuacgagccacagauaauuacaacggacaacaccuucguuagcggcaauugugauguggucaucgggaucgugaacaauacuguauaugacccccuccaaccugagcuggauuccuucaaggaggaacuugacaaauacuuuaagaaccauacaucaccagauguggacuugggagauauuaguggcaucaaugccagcgucguuaacauucagaaggaaauagaccgacugaaugagguggcuaaaaacuuaaacgaaucucucaucgaccugcaggagcuugguaaguaugagcaguacauuaaauggcccugguauaucuggcugggguucauugcaggacuaaucgccauagugauggucaccaucaugcucugcuguaugacuuccugcuguucaugccugaagggcuguugcaguugugguagcugcugcaaauuugaugaagacgauuccgagccuguguugaagggcguuaagcugcacuacacaugaggacuagucccuguucccagagcccacuuuuuuuucuuuuuuugaaauaaaauagccugucuuucagaucucaaaggcucuuuucagagccaccaaaaaaaaaaaaaaaaaaaaaaaaaaaaaaaaaaaaaaaaaaaaaaaaaaaaaaaaaaaaaaaaaaaaaaaaaaaaaaaaaaaaaaaaaaaaaaaaaaaaa

SEQ ID NO: 12474 - RNA, 4082 nt, Artificial Sequence
  SARS-CoV-2/bat/Yunnan/RaTG13/2013__EPI_ISL_402131 spike protein mRNA human (1-1269)
aggagagucccgcagucggcguccagcggcucugcuuguucgugugugugucguugcaggccuuauucaagcuuaccauguucguguuucugguccuccuuccccugguuagcucccagugcgugaacuugaccacaagaacucaauuaccuccagccuacaccaauucuucaacgaggggcguauauuacccggacaagguguuccggaguagcguccugcaccuaacacaggaucucuuucugcccuucuuuuccaacgugacuugguuccaugcuauccacguuucugggaccaauggaauuaaacgcuuugacaacccugugcuuccauucaaugauggugucuauuuugcaucgacagagaagucaaacauaauccgaggcuggauuuucgggaccacucuggacagcaaaacacagaguuugcucaucgugaauaacgccaccaauguaguuauuaaggugugugaauuucaguucugcaacgaucccuuucugggagucuacuaucauaaaaauaacaaguccuggauggagucugaguuccguguguacagcuccgcgaauaacuguacguucgaauaugugucacaaccuuuucugauggaccucgaaggcaagcaggguaauuucaaaaacuuaagagaguuugucuucaagaacaucgauggguacuuuaaaauauacaguaagcacacuccaaucaaucugguuagggaccuucccccuggauucagcgcuuuggagccacugguggaucuaccgauuggcaucaacauuacccgguuucagacacuccuggcccuucaucgcucuuaucugacucccggcgacuccucaagcggguggaccgcaggagccgcugcauacuauguagguuacuugcagccuagaacauuccuccugaaauauaaugaaaacggcaccaucacggaugccguggacugcgcuuuagauccacugagugagacuaaguguacacucaagucuuuuaccgucgaaaaagggauauaccaaacuuccaauuucagggugcagcccacagacagcauuguucgguuuccuaacaucaccaaucuuugcccauucggagagguguuuaacgccacgaccuucgcgucggucuaugcauggaaucgcaagcgaauuucuaacuguguggccgacuacuccguacuguacaauucaacaaguuucagcacuuuuaaaugcuauggcguuucccccaccaaguugaacgaucuauguuucacaaauguguacgcugacucuuuugucaucacuggugaugaggugagacagaucgccccggggcagaccggaaaaauugcagacuauaacuacaagcugccugaugacuucacaggcugcgucauagcuuggaauagcaaacacaucgaugccaaggaaggcgggaacuuuaacuaucucuacaggcuguuccggaaggcgaaucuuaaacccuuugagcgugacauuucaaccgaaaucuaucaagccggaaguaagccauguaacggucagacuggccugaauugcuacuacccuuuguaucgcuacggguucuaucccacggauggagugggccaccagccauacagaguugugguacucuccuuugagcuguuaaacgcacccgcuacagucugcgguccuaaaaagagcaccaaucuggugaaaaacaaguguguuaauuucaacuuuaaugggcuaacuggcaccggagugcucacagaaucuaacaagaaauuccugccauuucaacaguucggcagggacauagccgauaccacugacgcuguccgggacccgcagacacuugagauuuuggauaucacgcccugcucauucgggggagugaguguaaucaccccugguacuaaugccagcaaccagguggcaguucuguaucaagacgucaauuguacagaggugccaguggccauucaugcugaucagcucacccccacauggcgagucuacuccacuggcucuaacguuuuucagacccgcgcggggugccugaucggagcagaacacgugaauaacucguaugagugugacauuccuauaggcgccgguaucugcgcuagcuaccagacgcaaaccaacuccagaucaguggccagucagucuauuaucgcauacacaaugagccuuggggccgaaaauuccguagcuuauucaaacaauagcaucgccauuccaacuaacuucaccauaucugucacaacugagauccugcccguguccaugaccaagacgaguguugauuguacaauguacauuugcggcgacagcaccgaauguucuaauuugcuccugcaguauggauccuuuugcacucaguuaaacagggcacugacaggcaucgcgguggagcaagauaaaaauacccaggaggucuucgcucaggugaagcagauuuacaaaacuccgccuaucaaggacuuugggggauucaacuuuucacaaauacuaccagaucccaguaagccuagcaaacggucguucaucgaagaccuccuguuuaauaagguuacccuugccgaugcagguuucauuaaacaguauggcgacuguuugggggauaucgccgcucgcgaccugauuugcgcccagaaguuuaacggacucacagugcugcccccauuacugacggacgagaugaucgcacaauacaccuccgcucuuuuggccggcacuauaacaucugguuggaccuucggggcgggcgccgcucuccagauuccuuucgcaaugcagauggccuauagauuuaauggaaucggcguaacacagaacguccuguacgaaaaucaaaaacuaauugcuaaccaguucaauagcgccaucgggaagauacaggauucacugaguuccacugcaucugcgcucggaaagcugcaggacguggugaaccaaaacgcccaggcucuuaauaccuuggucaaacagcugagcuccaacuuuggcgccaucucaagcguuuuaaaugauauucucaguaggcuggacaagguggaggcagaaguacagaucgaucgucuuauuacgggucggcugcaaucuuugcagacauacgugacccagcaacucauccgagcugccgagauaagagcauccgccaaccuggcugcgacuaaaaugagcgagugcguccuagggcagucgaagaggguggacuucuguggaaaaggcuaucaucugaugucauuuccccagucugccccacacgguguuguguuccuccacgucaccuacgugccggcacaggaaaagaauuuuacaacugcuccugccauuugccaugauggcaaagcccacuucccccgcgaggggguuuuugugaguaacggaacccauugguucgucacacaacggaauuuuuaugaaccacagaucaucacgaccgacaacacuuucguauccggcagcugugaugugguuauugggaucgugaauaacacagucuacgacccccugcagccugagcuugauucuuuuaaggaggaauuggacaaguauuucaaaaaucacaccagcccagauguggaccugggagacauuuccggcauaaacgcuucaguagugaauauccagaaggagauugauagauuaaacgaagucgccaaaaaucucaacgagagucugaucgaccuucaagaacuggguaaguacgagcaguauauuaaauggcccugguacaucuggcuaggguucauagcaggacucaucgcgauuaucaugguuacuauuaugcugugcuguaugacaagcugcuguucuugcuugaagggcuguugcuccugugguucaugcugcaaguuugaugaggacgauagugaaccugugcugaaaggcgugaaguuacauuacaccugaggacuagucccuguucccagagcccacuuuuuuuucuuuuuuugaaauaaaauagccugucuuucagaucucaaaggcucuuuucagagccaccaaaaaaaaaaaaaaaaaaaaaaaaaaaaaaaaaaaaaaaaaaaaaaaaaaaaaaaaaaaaaaaaaaaaaaaaaaaaaaaaaaaaaaaaaaaaaaaaaaaaa

SEQ ID NO: 12475 - RNA, 4094 nt, Artificial Sequence
  SARS-CoV-2/Wuhan/HBCDC-HB-01/2019__EPI_ISL_402132 spike protein mRNA human (1-1273)
aggagagucccgcagucggcguccagcggcucugcuuguucgugugugugucguugcaggccuuauucaagcuuaccauguucguguuucugguccuccuuccccugguuagcucccagugcgugaacuugaccacaagaacucaauuaccuccagccuacacuaauucuaucaccaggggcguauauuacccggacaagguguuccggucaaguguccugcacagcacacaggaucuauuucuccccuucuuuuccaacgugacuugguuccaugcuauucacguuucugggaccaauggaacaaaacgcuuugacaacccugugcugccauucaaugauggugucuauuuugcaucgaccgagaagucaaacauaauccgaggcuggauuuucgggacuacacuugacagcaaaacccagagucuguugaucgugaauaacgccacgaauguaguuauuaaggugugugaauuucaguucugcaacgaucccuuucucggagucuacuaucauaaaaauaacaaguccuggauggagucugaguuccguguguacagcuccgcgaauaacuguacuuucgaguaugugucacaaccuuuucugauggaccuggaaggcaagcaggguaauuucaaaaaccucagagaguuugucuucaagaacaucgauggguacuuuaaaauauacaguaagcacaccccaaucaauuuaguuagggaccugccccagggauucagcgcucuugagccuuugguggaucugccaauuggcaucaacauuacacgguuucagacucuacucgcccugcaucgcucuuaucuuaccccgggcgacuccucaagcggguggacagcaggagccgcugcauacuauguagguuaccugcaacccagaaccuucuugcucaaauauaaugaaaacggcacgaucacugaugccguggacugcgcucuggauccuuuaagugagacaaaguguacccugaagucuuuuacugucgaaaaagggauauaccagacauccaauuucagggugcagccaaccgagagcauuguucgguuucccaacaucacgaaucucugcccuuucggagagguguuuaacgccacccgcuucgcgucggucuaugcauggaaucgaaagagaauuucuaacuguguggccgacuacuccguacuuuacaauucagcuaguuucagcacauuuaaaugcuauggcguuuccccaacuaagcugaacgacuuguguuucaccaauguguacgccgauucuuuugucaucaggggugacgaagugcggcagaucgcacccgggcaaacaggaaaaauugcugauuauaacuacaagcuaccggacgauuucacuggcugcgucauagccuggaauagcaacaaccuggacucaaaagugggcgggaauuauaacuaccucuaucgucuguuucgcaagaguaaucuuaagccuuucgagagagauaucuccaccgaaauuuaccaggcgggaagcacacccuguaacgguguugagggcuuuaauugcuacuucccacugcagucuuauggguuucaaccuaccaacggagugggcuaccagcccuauaggguagucguguugucauucgaacuccugcacgccccagcaacuguuugcggucccaaaaagaguacgaauuuagugaaaaacaagugugucaauuuuaacuucaaugggcugacaggcaccggagugcuaacugagagcaacaaaaaguuucucccuuuccagcaguucggccgggacaucgcugauaccacagacgccguacgagauccacaaacccuggagauacuugacauuacuccgugcuccuuugggggagugucuguuaucacacccgguacgaauaccucgaaccaggucgcuguguuguaccaggacgugaauuguacugaagucccuguugccauccacgcagaucagcugacaccaaccuggcgcguguauagcacaggcuccaacguguuccaaacuagagccgggugccucauuggagcugagcauguaaacaauucauacgaaugugacauccccauuggcgcggguauaugcgcaaguuaucagacccagacgaacucuccuaggcgggcccgcagcgucgcuucccagucaaucauugccuacaccaugagccugggggcagaaaauucuguggccuacuccaacaauaguaucgcuaucccaacaaacuuuacuauuagcguuaccacagaaauacuucccgugucuaugacuaagaccuccgucgauuguacgauguauaucugcggcgacucaacagaguguaguaaucuguugcuccaauacggcagcuucugcacccagcugaacagagccuuaacuggaauugcaguggagcaggauaaaaauacacaggaaguuuuugcgcaagugaagcagaucuauaaaaccccgccuauuaaggacuucgggggauuuaacuucucgcagauccugccagaucccuccaaaccuucuaagaggagcuuuauagaggaccuacucuucaauaagguaacucuggcugaugccgguuuuaucaaacaauacggcgacugucuuggggauauugcagcccgugacuugaucugcgcucagaaguucaacggacugaccguccugcccccacucuuaacagaugaaaugauugcccaguauacgucagcacugcuugcuggcaccaucacgagugguuggacauucggggccggcgcggccuugcagauaccuuuugcuaugcaaauggcauaccgguucaauggaauuggcgugacccagaacgugcucuaugagaaucagaaacugaucgccaaccaguuuaacuccgcuauugggaagauccaagacucucuaagcuccacagccucagcacugggaaaacuccaggacgucguuaaucagaacgcgcaggcccugaauacucuugugaagcaauugagcaguaacuucggcgcuauaucuuccguacugaaugauaucuuaagccgacucgacaagguggaagccgagguccagauugauagacugaucaccgguaggcuucagucgcugcaaacguacgugacacagcaguugauucgcgcagcugagauccgggccucagcaaaccucgccgcuaccaaaaugucugaaugcguucuggggcagaguaagagaguggacuuuuguggaaaaggcuaccaccuaauguccuucccccaaagcgcgccacauggugucguguuucugcacguuacuuaugugccggcccaggagaagaauuucaccacagcuccugcaauaugccacgauggcaaagcccauuuucccagggaaggggucuucguaucuaacggaacucacugguuugugacccagcgcaauuucuacgagccacagauuaucacaacggacaacaccuuuguuagcggcaauugugauguggucaucgggauugugaacaauacuguauaugacccccuccaaccugagcuggauuccuucaaggaggaacuugacaaauacuucaagaaccauacaucaccagauguggacuugggagauaucaguggcauuaaugccagcgucguuaacauacagaaggaaaucgaccgacugaaugagguggcuaaaaacuuaaacgaaucucucauugaccugcaggagcuugguaaguaugagcaguacaucaaauggcccugguauauuuggcugggguuuaucgcaggacuaauagccaucgugauggucaccauuaugcucugcuguaugacuuccugcuguucaugccugaagggcuguugcaguugugguagcugcugcaaauucgaugaagacgauuccgagccuguguugaagggcguuaagcugcacuacacaugaggacuagucccuguucccagagcccacuuuuuuuucuuuuuuugaaauaaaauagccugucuuucagaucucaaaggcucuuuucagagccaccaaaaaaaaaaaaaaaaaaaaaaaaaaaaaaaaaaaaaaaaaaaaaaaaaaaaaaaaaaaaaaaaaaaaaaaaaaaaaaaaaaaaaaaaaaaaaaaaaaaaa

SEQ ID NO: 12476 - RNA, 4094 nt, Artificial Sequence
  SARS-CoV-2/Guangdong/20SF028/2020__EPI_ISL_403936 spike protein mRNA human (1-1273)
aggagagucccgcagucggcguccagcggcucugcuuguucgugugugugucguugcaggccuuauucaagcuuaccauguucguguuucugguccuccuuccccugguuagcucccagugcgugaacuugaccacaagaacucaauuaccuccagccuacacuaauucuuucaccaggggcguauauuacccggacaagguguuucggucaaguguccuguauagcacacaggaucuauuccuccccuuuuucuccaacgugacuugguuucacgcuauccauguuucugggaccaauggaacaaaacgcuucgacaacccugugcugccauuuaaugauggugucuacuucgcaucgaccgagaagucaaacauuauacgaggcuggaucuuugggacuacacuugacagcaaaacccagagucuguugauugugaauaacgccacgaauguaguuaucaaggugugugaguuccaguuuugcaacgaucccuuccucggagucuauuaccacaaaaauaacaaguccuggauggagucugaguuccguguguauagcuccgcgaauaacuguacuuuugaauacgugucacaaccuuuccugauggaccuggaaggcaagcaggguaauuuuaaaaaccucagagaguucgucuuuaagaacauugauggguacuucaaaaucuauaguaagcauaccccaauaaauuuaguuagggaccugccccagggauuuagcgcucuugagccuuugguggaucugccaaucggcauuaacaucacacgguuccagacucuacucgcccugcaccgcucuuaccuuaccccgggcgacuccucaagcggguggacagcaggagccgcugcauauuacguagguuaucugcaacccagaaccuuuuugcucaaauacaaugaaaacggcacgauuacugaugccguggacugcgcucuggauccuuuaagugagacaaaguguacccugaagucuuucacugucgaaaaagggaucuaucagacauccaauuuuagggugcagccaaccgagagcauaguucgguuccccaacauuacgaaucucugcccuuuuggagagguguucaacgccacccgcuucgcgucggucuacgcauggaaucgaaagagaaucucuaacuguguggccgacuacuccguacuuuauaauucagcuaguuuuagcacauucaaaugcuacggcguuuccccaacuaagcugaacgacuuguguuuuaccaauguguaugccgauucuuucgucauuaggggugacgaagugcggcagaucgcacccgggcaaacaggaaaaaucgcugauuacaacuauaagcuaccggacgauuuuacuggcugcgucauugccuggaauagcaacaaccuggacucaaaagugggcgggaauuacaacuaucucuaccgucuguuccgcaagaguaaucuuaagccuuuugagagagauauauccaccgaaaucuaccaggcgggaagcacacccuguaacgguguugagggcuucaauugcuauuuuccacugcagucuuacggguuccaaccuaccaacggagugggcuaucagcccuacaggguagucguguugucauuugaacuccugcaugccccagcaacuguuugcggucccaaaaagaguacgaauuuagugaaaaacaagugugucaauuucaacuuuaaugggcugacaggcaccggagugcuaacugagagcaacaaaaaguuccucccuuuccagcaguuuggccgggacauugcugauaccacagacgccguacgagauccacaaacccuggagauccuugacauaacuccgugcuccuucgggggagugucuguuauuacacccgguacgaauaccucgaaccaggucgcuguguuguaucaggacgugaauuguacugaagucccuguugccauccacgcagaucagcugacaccaaccuggcgcguguacagcacaggcuccaacguguuucaaacuagagccgggugccucaucggagcugagcacguaaacaauucauaugaaugugacauucccaucggcgcggguauuugcgcaaguuaccagacccagacgaacucuccuaggcgggcccgcagcgucgcuucccagucaauaaucgccuacaccaugagccugggggcagaaaauucuguggccuauuccaacaauaguauugcuaucccaacaaacuucacuaucagcguuaccacagaaauucuucccgugucuaugacuaagaccuccgucgauuguacgauguacauaugcggcgacucaacagaguguaguaaucuguugcuccaauauggcagcuuuugcacccagcugaacagagccuuaacuggaaucgcaguggagcaggauaaaaauacacaggaaguuuucgcgcaagugaagcagauuuacaaaaccccgccuaucaaggacuuugggggauucaacuuuucgcagauucugccagaucccuccaaaccuucuaagaggagcuucaucgaggaccuacucuuuaauaagguaacucuggcugaugccgguuucauaaaacaauauggcgacugucuuggggauaucgcagcccgugacuugauuugcgcucagaaguucaacggacugaccguccugcccccacucuuaacagaugaaaugaucgcccaguacacgucagcacugcuugcuggcaccauuacgagugguuggacauuuggggccggcgcggccuugcagaucccuuucgcuaugcaaauggcauaucgguuuaauggaauaggcgugacccagaacgugcucuacgagaaucagaaacugauugccaaccaguucaacuccgcuaucgggaagauucaagacucucuaagcuccacagccucagcacugggaaaacuccaggacgucguuaaucagaacgcgcaggcccugaauacucuugugaagcaauugagcaguaacuuuggcgcuaucucuuccguacugaaugauauauuaagccgacucgacaagguggaagccgagguccagaucgauagacugauuaccgguaggcuucagucgcugcaaacguacgugacacagcaguugauccgcgcagcugagauucgggccucagcaaaccucgccgcuaccaaaaugucugaaugcguucuggggcagaguaagagaguggacuucuguggaaaaggcuaucaucuaauguccuuuccccaaagcgcgccacacggugucguguuccugcauguuacuuacgugccggcccaggagaagaauuuuaccacagcuccugcaaucugccacgauggcaaagcccacuuccccagggaaggggucuuuguaucuaacggaacucauugguucgugacccagcgcaauuuuuaugagccacagauaauuacaacggacaacaccuucguuagcggcaauugugauguggucaucgggaucgugaacaauacuguauacgacccccuccaaccugagcuggauuccuucaaggaggaacuugacaaauauuuuaagaaccacacaucaccagauguggacuugggagauauuaguggcaucaaugccagcgucguuaacauucagaaggaaauagaccgacugaaugagguggcuaaaaacuuaaacgaaucucucaucgaccugcaggagcuugguaaguacgagcaguauauuaaauggcccugguacaucuggcugggguucauugcaggacuaaucgccauagugauggucaccaucaugcucugcuguaugacuuccugcuguucaugccugaagggcuguugcaguugugguagcugcugcaaauuugaugaagacgauuccgagccuguguugaagggcguuaagcugcauuacacaugaggacuagucccuguucccagagcccacuuuuuuuucuuuuuuugaaauaaaauagccugucuuucagaucucaaaggcucuuuucagagccaccaaaaaaaaaaaaaaaaaaaaaaaaaaaaaaaaaaaaaaaaaaaaaaaaaaaaaaaaaaaaaaaaaaaaaaaaaaaaaaaaaaaaaaaaaaaaaaaaaaaaa

SEQ ID NO: 12477 - RNA, 4094 nt, Artificial Sequence
  SARS-CoV-2/Shenzhen/SZTH-001/2020__EPI_ISL_406592 spike protein mRNA human (1-1273)
aggagagucccgcagucggcguccagcggcucugcuuguucgugugugugucguugcaggccuuauucaagcuuaccauguucguguuucugguccuccuuccccugguuagcucccagugcgugaacuugaccacaagaacucaauuaccuccagccuacacuaauucuuucaccaggggcguauauuacccggacaagguguuucggucaaguguccugcacagcacacaggaucuauuccuccccuuuuucuccaacgugacuugguuucaugcuauccacguuucugggaccaauggaacaaaacgcuucgacaacccugugcugccauuuaaugauggugucuauuucgcaucgaccgagaagucaaacauuauacgaggcuggaucuuugggacuacacuugacagcaaaacccagagucuguugauugugaauaacgccacgaauguaguuaucaaggugugugaguuccaguuuugcaacgaucccuuccucggagucuacuaucauaaaaauaacaaguccuggauggagucugaguuccguguguacagcuccgcgaauaacuguacuuuugaauaugugucacaaccuuuccugauggaccuggaaggcaagcaggguaauuuuaaaaaccucagagaguucgucuuuaagaacauugauggguacuucaaaaucuacaguaagcacaccccaauaaauuuaguuagggaccugccccagggauuuagcgcucuugagccuuugguggaucugccaaucggcauuaacaucacacgguuccagacucuacucgcccugcaucgcucuuaucuuaccccgggcgacuccucaagcggguggacagcaggagccgcugcauacuauguagguuaccugcaacccagaaccuuuuugcucaaauauaaugaaaacggcacgauuacugaugccguggacugcgcucuggauccuuuaagugagacaaaguguacccugaagucuuucacugucgaaaaagggaucuaccagacauccaauuuuagggugcagccaaccgagagcauaguucgguuccccaacauuacgaaucucugcccuuuuggagagguguucaacgccacccgcuucgcgucggucuaugcauggaaucgaaagagaaucucuaacuguguggccgacuacuccguacuuuacaauucagcuaguuuuagcacauucaaaugcuauggcguuuccccaacuaagcugaacgacuuguguuuuaccaauguguacgccgauucuuucgucauuaggggugacgaagugcggcagaucgcacccgggcaaacaggaaaaaucgcugauuauaacuacaagcuaccggacgauuuuacuggcugcgucauugccuggaauagcaacaaccuggacucaaaagugggcgggaauuauaacuaccucuaucgucuguuccgcaagaguaaucuuaagccuuuugagagagauauauccaccgaaaucuaccaggcgggaagcacacccuguaacgguguugagggcuucaauugcuacuuuccacugcagucuuauggguuccaaccuaccaacggagugggcuaccagcccuauaggguagucguguugucauuugaacuccugcacgccccagcaacuguuugcggucccaaaaagaguacgaauuuagugaaaaacaagugugucaauuucaacuuuaaugggcugacaggcaccggagugcuaacugagagcaacaaaaaguuccucccuuuccagcaguuuggccgggacauugcugauaccacagacgccguacgagauccacaaacccuggagauccuugacauaacuccgugcuccuucgggggagugucuguuauuacacccgguacgaauaccucgaaccaggucgcuguguuguaccaggacgugaauuguacugaagucccuguugccauccacgcagaucagcugacaccaaccuggcgcguguauagcacaggcuccaacguguuucaaacuagagccgggugccucaucggagcugagcauguaaacaauucauacgaaugugacauucccaucggcgcggguauuugcgcaaguuaucagacccagacgaacucuccuaggcgggcccgcagcgucgcuucccagucaauaaucgccuacaccaugagccugggggcagaaaauucuguggccuacuccaacaauaguauugcuaucccaacaaacuucacuaucagcguuaccacagaaauucuucccgugucuaugacuaagaccuccgucgauuguacgauguauauaugcggcgacucaacagaguguaguaaucuguugcuccaauacggcagcuuuugcacccagcugaacagagccuuaacuggaaucgcaguggagcaggauaaaaauacacaggaaguuuucgcgcaagugaagcagauuuauaaaaccccgccuaucaaggacuuugggggauucaacuuuucgcagauucugccagaucccuccaaaccuucuaagaggagcuucaucgaggaccuacucuuuaauaagguaacucuggcugaugccgguuucauaaaacaauacggcgacugucuuggggauaucgcagcccgugacuugauuugcgcucagaaguucaacggacugaccguccugcccccacucuuaacagaugaaaugaucgcccaguauacgucagcacugcuugcuggcaccauuacgagugguuggacauuuggggccggcgcggccuugcagaucccuuucgcuaugcaaauggcauaccgguuuaauggaauaggcgugacccagaacgugcucuaugagaaucagaaacugauugccaaccaguucaacuccgcuaucgggaagauucaagacucucuaagcuccacagccucagcacugggaaaacuccaggacgucguuaaucagaacgcgcaggcccugaauacucuugugaagcaauugagcaguaacuuuggcgcuaucucuuccguacugaaugauauauuaagccgacucgacaagguggaagccgagguccagaucgauagacugauuaccgguaggcuucagucgcugcaaacguacgugacacagcaguugauccgcgcagcugagauucgggccucagcaaaccucgccgcuaccaaaaugucugaaugcguucuggggcagaguaagagaguggacuucuguggaaaaggcuaccaccuaauguccuuuccccaaagcgcgccacauggugucguguuccugcacguuacuuaugugccggcccaggagaagaauuuuaccacagcuccugcaaucugccacgauggcaaagcccauuuccccagggaaggggucuuuguaucuaacggaacucacugguucgugacccagcgcaauuuuuacgagccacagauaauuacaacggacaacaccuucguuagcggcaauugugaugugcucaucgggaucgucaacaauacuguguaugacccccugcaaccugagcuugauuccuucaaggaagaguuggacaaauacuuuaagaaccauacaucaccagauguagaccugggagauauuaguggcaucaaugccagcguggucaacauucagaaggaaauagaccgauuaaaugagguugcuaaaaaccucaacgaaucucugaucgaccuucaggagcuggguaaguaugagcaguacauuaaauggcccugguauaucuggcuaggguucauugcaggacucaucgccauagugauggugaccaucaugcugugcuguaugacuuccugcuguucaugcuugaagggcuguugcaguugugguagcugcugcaaauuugaugaagacgauuccggcccuguccugaagggggugaaguuacacuacacaugaggacuagucccuguucccagagcccacuuuuuuuucuuuuuuugaaauaaaauagccugucuuucagaucucaaaggcucuuuucagagccaccaaaaaaaaaaaaaaaaaaaaaaaaaaaaaaaaaaaaaaaaaaaaaaaaaaaaaaaaaaaaaaaaaaaaaaaaaaaaaaaaaaaaaaaaaaaaaaaaaaaaa

SEQ ID NO: 12478 - RNA, 4094 nt, Artificial Sequence
  SARS-CoV-2/Shenzhen/SZTH-004/2020__EPI_ISL_406595 spike protein mRNA human (1-1273)
aggagagucccgcagucggcguccagcggcucugcuuguucgugugugugucguugcaggccuuauucaagcuuaccauguucguguuucugguccuccuuccccugguuagcucccagugcgugaacuugaccacaagaacucaauuaccuccagccuacacgaauagcuucaccaggggcguauauuacccggacaagguguuucggucaaguguccugcacagcacacaggaucuauuccuccccuuuuucuccaacgugacuugguuucaugcuauccacguuucugggaccaauggaacaaaacgcuucgacaacccugugcugccauuuaaugauggugucuauuucgcaucgaccgagaagucaaacauuauacgaggcuggaucuuugggacuacacuugacagcaaaacccagagucuguugauugugaauaacgccacgaauguaguuaucaaggugugugaguuccaguuuugcaacgaucccuuccucggagucuacuaucauaaaaauaacaaguccuggauggagucugaguuccguguguacagcuccgcgaauaacuguacuuuugaauaugugucacaaccuuuccugauggaccuggaaggcaagcaggguaauuuuaaaaaccucagagaguucgucuuuaagaacauugauggguacuucaaaaucuacaguaagcacaccccaauaaauuuaguuagggaccugccccagggauuuagcgcucuugagccuuugguggaucugccaaucggcauuaacaucacacgguuccagacucuacucgcccugcaucgcucuuaucuuaccccgggcgacuccucaagcggguggacagcaggagccgcugcauacuauguagguuaccugcaacccagaaccuuuuugcucaaauauaaugaaaacggcacgauuacugaugccguggacugcgcucuggauccuuuaagugagacaaaguguacccugaagucuuucacugucgaaaaagggaucuaccagacauccaauuuuagggugcagccaaccgagagcauaguucgguuccccaacauuacgaaucucugcccuuuuggagagguguucaacgccacccgcuucgcgucggucuaugcaugggaccgaaagagaaucucuaauuguguggccuacuacuccguacuuuauaacucagcuaguuuuagcacauucaaaugcuacggcguuuccccaacuaagcugaaugacuuguguuuuaccaacguguaugccgauucuuucgucauuaggggugacgaagugcggcagaucgcacccgggcaaacaggaaaaaucgcugauuacaauuauaagcuaccggacgauuuuacuggcugcgucauugccuggaacagcaauaaccuggacucaaaagugggcgggaacuacaauuaucucuaccgucuguuccgcaagaguaaccuuaagccuuuugagagagauauauccaccgaaaucuaccaggcgggaagcacacccuguaaugguguugagggcuucaacugcuauuuuccacugcagucuuacggguuccaaccuaccaauggagugggcuaucagcccuacaggguagucguguugucauuugaacuccugcacgccccagcaacuguuugcggucccaaaaagaguacgaacuuagugaaaaauaagugugucaacuucaauuuuaacgggcugacaggcaccggagugcuaacugagagcaauaaaaaguuccucccuuuccagcaguuuggccgggacauugcugauaccacagacgccguacgagauccacaaacccuggagauccuugacauaacuccgugcuccuucgggggagugucuguuauuacacccgguacgaacaccucgaaucaggucgcuguguuguaucaggacgugaacuguacugaagucccuguugccauccacgcagaucagcugacaccaaccuggcgcguguacagcacaggcuccaauguguuucaaacuagagccgggugccucaucggagcugagcauguaaacaacucauaugaaugugacauucccaucggcgcggguauuugcgcaaguuaccagacccagacuaauucuccuaggcgggcccgcagcgucgcuucccagucaauaaucgccuacaccaugagccugggggcagagaacucuguggccuauuccaauaacaguauugcuaucccaacaaauuucacuaucagcguuaccacagaaauucuucccgugucuaugacuaagaccuccgucgauuguacgauguacauaugcggcgacucaacagaguguaguaaccuguugcuccaauauggaucuuuuugcacccagcugaauagagccuuaacuggcaucgcaguggagcaggauaaaaacacacaggaaguuuucgcgcaagugaagcagauuuacaaaaccccgccuaucaaggacuuugggggauucaauuuuucgcagauucugccagaucccuccaaaccuucuaagaggagcuucaucgaggaccuacucuuuaacaagguaacucuggcugaugccgguuucauaaaacaauauggcgacugucuuggggauaucgcagcccgugacuugauuugcgcucagaaguucaauggacugaccguccugcccccacucuuaacagaugaaaugaucgcccaguacacgucagcacugcuugcuggcaccauuacgagugguuggacauuuggggccggcgcggccuugcagaucccuuucgcuaugcaaauggcauaucgguuuaacggaauaggcgugacccagaaugugcucuacgagaaccagaaacugauugccaaucaguucaacuccgcuaucgggaagauucaagacucucuaagcuccacagccucagcacugggaaaacuccaggacgucguuaaccagaaugcgcaggcccugaacacucuugugaagcaauugagcaguaauuuuggcgcuaucucuuccguacugaacgauauauuaagccgacucgacaagguggaagccgagguccagaucgauagacugauuaccgguaggcuucagucgcugcaaacguacgugacacagcaguugauccgcgcagcugagauucgggccucagcaaaucucgccgcuaccaaaaugucugaaugcguucuggggcagaguaagagaguggacuucuguggaaaaggcuaucaccuaauguccuuuccccaaagcgcgccacauggugucguguuccugcacguuacuuacgugccggcccaggagaagaacuuuaccacagcuccugcaaucugccacgauggcaaagcccauuuccccagggaaggggucuuuguaucuaauggaacucacugguucgugacccagcgcaacuuuuaugagccacagauaauuacaacggacaauaccuucguuagcggcaacugugauguggucaucgggaucgugaauaacacuguauacgacccccuccaaccugagcuggauuccuucaaggaagaacuugacaaauauuuuaagaaucauacaucaccagauguggacuugggagauauuaguggcaucaacgccagcgucguuaauauucagaaggaaauagaccgacugaacgagguggcuaaaaauuuaaacgaaucucucaucgaccugcaggagcuugguaaguacgagcaguauauuaaauggcccugguacaucuggcugggguucauugcaggacuaaucgccauagugauggucaccaucaugcucugcuguaugacuuccugcuguucaugccugaagggcuguugcaguugugguagcugcugcaaauuugaugaagacgauuccgagccuguguugaagggcguuaagcugcacuacacaugaggacuagucccuguucccagagcccacuuuuuuuucuuuuuuugaaauaaaauagccugucuuucagaucucaaaggcucuuuucagagccaccaaaaaaaaaaaaaaaaaaaaaaaaaaaaaaaaaaaaaaaaaaaaaaaaaaaaaaaaaaaaaaaaaaaaaaaaaaaaaaaaaaaaaaaaaaaaaaaaaaaaa

SEQ ID NO: 12479 - RNA, 4094 nt, Artificial Sequence
  SARS-CoV-2/France/IDF0372/2020__EPI_ISL_406596 spike protein mRNA human (1-1273)
aggagagucccgcagucggcguccagcggcucugcuuguucgugugugugucguugcaggccuuauucaagcuuaccauguucguguuucugguccuccuuccccugguuagcucccagugcgugaacuugaccacaagaacucaauuaccuccagccuacacuaauucuuucaccaggggcguauauuacccggacaagguguuucggucaaguguccugcacagcacacaggaucuauuccuccccuuuuucuccaacgugacuugguuucaugcuauccacguuucugggaccaauggaacaaaacgcuucgacaacccugugcugccauuuaaugauggugucuauuucgcaucgaccgagaagucaaacauuauacgaggcuggaucuuugggacuacacuugacagcaaaacccagagucuguugauugugaauaacgccacgaauguaguuaucaaggugugugaguuccaguuuugcaacgaucccuuccucggagucuacuaucauaaaaauaacaaguccuggauggagucugaguuccguguguacagcuccgcgaauaacuguacuuuugaauaugugucacaaccuuuccugauggaccuggaaggcaagcaggguaauuuuaaaaaccucagagaguucgucuuuaagaacauugauggguacuucaaaaucuacaguaagcacaccccaauaaauuuaguuagggaccugccccagggauuuagcgcucuugagccuuugguggaucugccaaucggcauuaacaucacacgguuccagacucuacucgcccugcaucgcucuuaucuuaccccgggcgacuccucaagcggguggacagcaggagccgcugcauacuauguagguuaccugcaacccagaaccuuuuugcucaaauauaaugaaaacggcacgauuacugaugccguggacugcgcucuggauccuuuaagugagacaaaguguacccugaagucuuucacugucgaaaaagggaucuaccagacauccaauuuuagggugcagccaaccgagagcauaguucgguuccccaacauuacgaaucucugcccuuuuggagagguguucaacgccacccgcuucgcgucggucuaugcauggaaucgaaagagaaucucuaacuguguggccgacuacuccuuucuuuacaauucagcuaguuucagcacauuuaaaugcuauggcguauccccaacuaagcugaacgacuuguguuucaccaauguuuacgccgauucuuuugugauuaggggugacgaaguccggcagaucgcacccgggcaaacaggaaaaaucgcugauuauaacuacaagcuaccggacgauuucacuggcugcgugauugccuggaauagcaacaaccuggacucaaaagucggcgggaauuauaacuaccucuaucgucuguuucgcaagaguaaucuuaagccuuucgagagagauauauccaccgaaaucuaccaggcgggaagcacacccuguaacgguguggagggcuuuaauugcuacuucccacugcagucuuauggguuucaaccuaccaacggaguuggcuaccagcccuauagggugguagucuugucauucgaacuccugcacgccccagcaacugugugcggucccaaaaagaguacgaauuuaguuaaaaacaagugugugaauuuuaacuucaaugggcugacaggcaccggaguccuaacugagagcaacaaaaaguuccucccuuuucagcaguucggccgggacauugcugauaccacagacgccgugcgagauccacaaacccuggagauccuugacauaacuccgugcuccuuugggggaguaucugugauuacacccgguacgaauaccucgaaccagguugcugucuuguaccaggacgugaauuguacugaagugccugucgccauccacgcagaucagcugacaccaaccuggcgcguuuauagcacaggcuccaacguguuccaaacuagagccgggugccucaucggagcugagcaugugaacaauucauacgaaugugacauucccaucggcgcggguauuugcgcaaguuaucagacccagacgaacucuccuaggcgggcccgcagcguagcuucccagucaauaaucgccuacaccaugagccugggggcagaaaauucugucgccuacuccaacaauaguauugcuaucccaacaaacuuuacuaucagcgugaccacagaaauucuucccguuucuaugacuaagaccuccguggauuguacgauguauauaugcggcgacucaacagaguguaguaaucuguugcuccaauacggcagcuucugcacccagcugaacagagccuuaacuggaaucgcagucgagcaggauaaaaauacacaggaaguguuugcgcaaguuaagcagauuuauaaaaccccgccuaucaaggacuucgggggauuuaacuucucgcagauucugccagaucccuccaaaccuucuaagaggagcuuuaucgaggaccuacucuucaauaaggugacucuggcugaugccgguuucauaaaacaauacggcgacugucuuggggauaucgcagcccgugacuugauuugcgcucagaaguuuaacggacugaccguacugcccccacucuuaacagaugaaaugaucgcccaguauacgucagcacugcuugcuggcaccauuacgagugguuggacauucggggccggcgcggccuugcagaucccuuuugcuaugcaaauggcauaccgguucaauggaauaggcgucacccagaacgugcucuaugagaaucagaaacugauugccaaccaguuuaacuccgcuaucgggaagauucaagacucucuaagcuccacagccucagcacugggaaaacuccaggacguggucaaucagaacgcgcaggcccugaauacucuuguuaagcaauugagcaguaacuucggcgcuaucucuuccgugcugaaugauauauuaagccgacucgacaagguagaagccgaggugcagaucgauagacugauuaccgguaggcuucagucgcugcaaacguacgucacacagcaguugauccgcgcagcugagauucgggccucagcaaaccucgccgcuaccaaaaugucugaaugcgugcuggggcagaguaagagaguugacuuuuguggaaaaggcuaccaccuaauguccuucccccaaagcgcgccacaugguguggucuuucugcacgugacuuauguuccggcccaggagaagaauuucaccacagcuccugcaaucugccacgauggcaaagcccauuuucccagggaagggguguucgucucuaacggaacucacugguuuguaacccagcgcaauuucuacgagccacagauaauuacaacggacaacaccuucgugagcggcaauugugauguugugaucgggaucgucaacaauacuguguaugacccccuccaaccugagcuggauuccuuuaaggaggaacuugacaaauacuucaagaaccauacaucaccagauguagacuugggagauauuaguggcaucaaugccagcguggucaacauucagaaggaaauagaccgacugaaugagguugcuaaaaacuuaaacgaaucucucaucgaccugcaggagcuugguaaguaugagcaguacauuaaauggcccugguauaucuggcugggguuuauugcaggacuaaucgccauagugauggugaccaucaugcucugcuguaugacuuccugcuguucaugccugaagggcuguugcaguugugguagcugcugcaaauucgaugaagacgauuccgagccugucuugaagggcgugaagcugcacuacacaugaggacuagucccuguucccagagcccacuuuuuuuucuuuuuuugaaauaaaauagccugucuuucagaucucaaaggcucuuuucagagccaccaaaaaaaaaaaaaaaaaaaaaaaaaaaaaaaaaaaaaaaaaaaaaaaaaaaaaaaaaaaaaaaaaaaaaaaaaaaaaaaaaaaaaaaaaaaaaaaaaaaaa

SEQ ID NO: 12480 - RNA, 4094 nt, Artificial Sequence
  SARS-CoV-2/Australia/VIC01/2020__EPI_ISL_406844 spike protein mRNA human (1-1273)
aggagagucccgcagucggcguccagcggcucugcuuguucgugugugugucguugcaggccuuauucaagcuuaccauguucguguuucugguccuccuuccccugguuagcucccagugcgugaacuugaccacaagaacucaauuaccuccagccuacaccaauucuuucacgaggggcguauauuacccggacaagguguuucggucaaguguccugcacagcacacaggaucuauuccuccccuuuuucuccaacgugacuugguuucaugcuauccacguuucugggaccaauggaacaaaacgcuucgacaacccugugcugccauuuaaugauggugucuauuucgcaucgaccgagaagucaaacauuauacgaggcuggaucuuugggacuacacuugacagcaaaacccagagucuguugauugugaauaacgccacgaauguaguuaucaaggugugugaguuccaguuuugcaacgaucccuuccucggagucuacuaucauaaaaauaacaaguccuggauggagucugaguuccguguguacagcuccgcgaauaacuguacuuuugaauaugugucacaaccuuuccugauggaccuggaaggcaagcaggguaauuuuaaaaaccucagagaguucgucuuuaagaacauugauggguacuucaaaaucuacaguaagcacaccccaauaaauuuaguuagggaccugccccagggauuuagcgcucuugagccuuugguggaucugccaaucggcauuaacaucacacgguuccagacucuacucgcccugcaucgcagauaucuuaccccgggcgacucuuccucaggguggacagcaggagccgcugcauacuauguagguuaccugcaacccaggaccuuuuugcucaaauauaaugaaaacggcacgauuacugaugccguggacugcgcucuggauccuuuaagcgagacaaaguguacccugaagaguuucacugucgaaaaagggaucuaccagacaucuaauuuucgggugcagccaaccgaguccauaguucgcuuccccaacauuacgaaucucugcccuuuuggagagguguucaacgccacccgauucgcgagcgucuaugcauggaauagaaagaggaucucgaacuguguggccgacuacucuguacuuuacaauuccgcuucauuuaguacauucaaaugcuauggcguuagcccaacuaagcugaacgacuuguguuuuaccaauguguacgccgauuccuucgucauucggggugacgaagugcgucagaucgcacccgggcaaacaggaaaaaucgcugauuauaacuacaagcuaccggacgauuuuacuggcugcgucauugccuggaacucuaauaaccuggacagcaaagugggcgggaauuauaacuaccucuaucgccuguucagaaagucaaaucuuaagccuuuugagagggauauaaguaccgaaaucuaccaggcgggauccacacccuguaacgguguugagggcuucaauugcuacuuuccacugcagagcuauggguuccaaccuaccaacggagugggcuaccagcccuaucggguagucguguugucuuuugaacuccugcacgccccagcaacuguuugcggucccaaaaagucaacgaauuuagugaaaaacaagugugucaauuucaacuuuaaugggcugacaggcaccggagugcuaacugagaguaacaaaaaguuccucccuuuccagcaguuuggccgagacauugcugauaccacagacgccguacgcgauccacaaacccuggagauccuugacauaacuccgugcagcuucgggggaguguccguuauuacacccgguacgaauaccucuaaccaggucgcuguguuguaccaggacgugaauuguacugaagucccuguugccauccacgcagaucagcugacaccaaccuggagaguguauucgacaggcagcaacguguuucaaacuagggccgggugccucaucggagcugagcauguaaacaauuccuacgaaugugacauucccaucggcgcggguauuugcgcaucauaucagacccagacgaacaguccucggcgcgccagaucugucgcuagccaguccauaaucgccuacaccaugucacugggggcagagaauagcguggccuacucuaacaauuccauugcuaucccaacaaacuucacuaucaguguuaccacagaaauucuucccgugagcaugacuaagaccucugucgauuguacgauguauauaugcggcgacuccacagaguguucaaaucuguugcuccaauacggaaguuuuugcacccagcugaacagggccuuaacuggcaucgcaguggagcaggauaaaaauacacaggaaguuuucgcgcaagugaagcagauuuauaaaaccccgccuaucaaggacuuugggggauucaacuuuagccagauucugccagaucccucgaaaccuuccaagcguucuuucaucgaggaccuacucuuuaauaagguaacucuggcugaugccgguuucauaaaacaauacggcgacugucuuggggauaucgcagcccgggacuugauuugcgcucagaaguucaacggacugaccguccucccuccacuguuaacagaugaaaugaucgcccaguauacgagcgcacugcuugcuggcaccauuacuucagguuggacauuuggggccggcgcggccuugcagaucccuuucgcuaugcaaauggcauaccgauuuaauggaauaggcgugacccagaacgugcucuaugagaaucagaaacugauugccaaccaguucaacagugcuaucgggaagauucaagacucccuaucuagcacagccuccgcacugggaaaacuccaggacgucguuaaucagaacgcgcaggcccugaauacucuugugaagcaauugucaagcaacuuuggcgcuaucaguucuguacugaaugauauauuauccagacucgacaagguggaagccgagguccagaucgauaggcugauuaccggucgccuucagagccugcaaacguacgugacacagcaguugauccgggcagcugagauuagagccucggcaaaccucgccgcuaccaaaaugucagaaugcguucuggggcagucuaagaggguggacuucuguggaaaaggcuaccaccuaaugaguuuuccccaauccgcgccacauggugucguguuccugcacguuacuuaugugccggcccaggagaagaauuuuaccacagcacccgcuaucugccacgauggcaaagcccauuucccccgcgaaggggucuuuguaagcaacggaacucacugguucgugacccagcgaaauuuuuacgagccacagauaauuacaacggacaacaccuucguuucuggcaauugugauguggucaucgggaucgugaacaauacuguauaugacccccuccaaccugagcuggauagcuucaaggaagaacuugacaaauacuuuaagaaccauacauccccagauguggacuugggagauauuucaggcaucaaugccagugucguuaacauucagaaggaaauagaccggcugaaugagguggcuaaaaacuuaaacgaaagccucaucgaccugcaggagcuugguaaguaugagcaguacauuaaauggcccugguauaucuggcugggguucauugcaggacuaaucgccauagugauggucaccaucaugcucugcuguaugacuucuugcuguuccugccugaagggcuguugcucaugugguaguugcugcaaauuugaugaagacgauagcgagccuguguugaagggcguuaagcugcacuacacaugaggacuagucccuguucccagagcccacuuuuuuuucuuuuuuugaaauaaaauagccugucuuucagaucucaaaggcucuuuucagagccaccaaaaaaaaaaaaaaaaaaaaaaaaaaaaaaaaaaaaaaaaaaaaaaaaaaaaaaaaaaaaaaaaaaaaaaaaaaaaaaaaaaaaaaaaaaaaaaaaaaaaa

SEQ ID NO: 12481 - RNA, 4094 nt, Artificial Sequence
  SARS-CoV-2/Germany/BavPat1/2020__EPI_ISL_406862 spike protein mRNA human (1-1273)
aggagagucccgcagucggcguccagcggcucugcuuguucgugugugugucguugcaggccuuauucaagcuuaccauguucguguuucugguccuccuuccccugguuagcucccagugcgugaacuugaccacaagaacucaauuaccuccagccuacacuaauucuuucaccaggggcguauauuacccggacaagguguuucggucaaguguccugcacagcacacaggaucuauuccuccccuuuuucuccaacgugacuugguuucaugcuauccacguuucugggaccaauggaacaaaacgcuucgacaacccugugcugccauuuaaugauggugucuauuucgcaucgaccgagaagucaaacauuauacgaggcuggaucuuugggacuacacuugacagcaaaacccagagucuguugauugugaauaacgccacgaauguaguuaucaaggugugugaguuccaguuuugcaacgaucccuuccucggagucuacuaucauaaaaauaacaaguccuggauggagucugaguuccguguguacagcuccgcgaauaacuguacuuuugaguaugugucacaaccuuuccugauggaccuggaaggcaagcaggguaauuuuaaaaaccucagagaguucgucuuuaagaacauugauggguacuucaaaaucuacaguaagcacaccccaauaaauuuaguuagggaccugccccagggauuuagcgcucuugagccuuugguggaucugccaaucggcauuaacaucacacgguuccagacucuacucgcccugcaucgcucuuaucuuaccccgggcgacuccucaagcggguggacagcaggagccgcugcauacuauguagguuaccugcaacccagaaccuuuuugcucaaauauaaugaaaacggcacgauuacugaugccguggacugcgcucuggauccuuuaagugagacaaaguguacccugaagucuuucacugucgaaaaagggaucuaccagacauccaauuuuagggugcagccaaccgagagcauaguucgguuccccaacauuacgaaucucugcccuuuuggagagguguucaacgccacccgcuucgcgucggucuaugcauggaaucgaaagagaaucucuaacuguguggccgacuacuccguacuuuacaauucagcuaguuuuagcacauucaaaugcuauggcguuuccccaacuaagcugaacgacuuguguuuuaccaauguguacgccgauucuuucgucauuaggggugacgaagugcggcagaucgcacccgggcaaacaggaaaaaucgcugauuauaacuacaagcuaccggacgauuuuacuggcugcgucauugccuggaauagcaacaaccuggacucaaaagugggcgggaauuauaacuaccucuaucgucuguuccgcaagaguaaucuuaagccuuuugagagagauauauccaccgaaaucuaccaggcgggaagcacacccuguaacgguguugagggcuucaauugcuacuuuccacugcagucuuauggguuccaaccuaccaacggagugggcuaccagcccuauaggguagucguguugucauuugaacuccugcacgccccagcaacuguuugcggucccaaaaagaguacgaauuuagugaaaaacaagugugucaauuucaacuuuaaugggcugacaggcaccggagugcuaacugagagcaacaaaaaguuccucccuuuccagcaguuuggccgggacauugcugauaccacagacgccguacgagauccacaaacccuggagauccuugacauaacuccgugcuccuucgggggagugucuguuauuacacccgguacgaauaccucgaaccaggucgcuguguuguaccagggcgugaauuguacugaagucccuguugccauccacgcagaccagcugacaccaaccuggcgcguguauagcacaggguccaacguguuucaaacuagagccggaugccucaucggcgcugagcauguaaacaauucauacgaaugugauauucccaucggugcggggauuugcgcaaguuaucagacccagacgaacucuccuaggcgggcccgcagcgucgcuucccagucaauaaucgccuacaccaugagccugggcgcagaaaauucuguggccuacuccaacaauaguauugcuaucccaacaaacuucacuaucagcguuaccacagaaauucuucccgugucuaugacuaagaccuccgucgacuguacgauguauauaugcggagauucaacagaguguaguaaucuguugcuccaauacggcagcuuuugcacccagcugaacagagccuuaacugggaucgcaguggagcaggacaaaaauacacaggaaguuuucgcgcaagugaagcagauuuauaaaaccccgccuaucaaggauuuuggagguuucaacuuuucgcagauucugccagaccccuccaaaccuucuaagaggagcuucaucgaggaucuacucuuuaauaagguaacucuggcugacgccggcuucauaaaacaauacggggauugucuuggagacaucgcagcccgugauuugauuugcgcucagaaguucaacggccugaccguccugcccccacucuuaacagacgaaaugaucgcccaguauacgucagcacugcuugcugguaccauuacgaguggguggacauuuggcgccggagcggccuugcagaucccuuucgcuaugcaaauggcauaccgguuuaauggcauaggggugacccagaacgugcucuaugagaaucagaaacugauugccaaccaguucaacuccgcuaucggaaagauucaagauucucuaagcuccacagccucagcacugggcaaacuccaggacgucguuaaucagaacgcgcaggcccugaauacucuugugaagcaauugagcaguaacuuuggugcuaucucuuccguacugaaugacauauuaagccgacucgauaagguggaagccgagguccagaucgacagacugauuaccgggaggcuucagucgcugcaaacguacgugacacagcaguugauccgcgcagcugagauucgggccucagcaaaccucgccgcuaccaaaaugucugaaugcguucugggacagaguaagagaguggauuucuguggcaaagguuaccaccuaauguccuuuccccaaagcgcgccacauggcgucguguuccugcacguuacuuaugugccggcccaggagaagaauuuuaccacagcuccugcaaucugccacgacgggaaagcccauuuccccagggaaggagucuuuguaucuaacggcacucacugguucgugacccagcgcaauuuuuacgagccacagauaauuacaacggauaacaccuucguuagcgggaauugugacguggucaucggaaucgugaacaauacuguauaugauccccuccaaccugagcuggacuccuucaaggaagaacuugauaaauacuuuaagaaccauacaucaccagacguggauuugggcgacauuagugguaucaaugccagcgucguuaacauucagaaggaaauagaucgacugaaugagguggcuaaaaacuuaaacgaaucucucaucgaccugcaggagcuugggaaguaugagcaguacauuaaauggcccugguauaucuggcugggauucauugcaggccuaaucgccauagugauggucaccaucaugcucugcuguaugacuuccugcuguucaugccugaaggguuguugcaguuguggcagcugcugcaaauuugacgaagaugacuccgagccuguguugaaggggguuaagcugcacuacacaugaggacuagucccuguucccagagcccacuuuuuuuucuuuuuuugaaauaaaauagccugucuuucagaucucaaaggcucuuuucagagccaccaaaaaaaaaaaaaaaaaaaaaaaaaaaaaaaaaaaaaaaaaaaaaaaaaaaaaaaaaaaaaaaaaaaaaaaaaaaaaaaaaaaaaaaaaaaaaaaaaaaaa

SEQ ID NO: 12482 - RNA, 4094 nt, Artificial Sequence
  SARS-CoV-2/Wuhan/HBCDC-HB-02/2020__EPI_ISL_412978 spike protein mRNA human (1-1273)
aggagagucccgcagucggcguccagcggcucugcuuguucgugugugugucguugcaggccuuauucaagcuuaccauguucguguuucugguccuccuuccccugguuagcucccagugcgugaacuugaccacaagaacucaauuaccuccagccuacacuaauucuuucaccaggggcguauauuacccggacaagguguuucggucaaguguccugcacagcacacaggaucuauuccuccccuuuuucuccaacgugacuugguuucaugcuauccacguuucugggaccaauggaacaaaacgcuucgacaacccugugcugccauuuaaugauggugucuauuucgcaucgaccgagaagucaaacauuauacgaggcuggaucuuugggacuacacuugacagcaaaacccagagucuguugauugugaauaacgccacgaauguaguuaucaaggugugugaguuccaguuuugcaacgaucccuuccucggagucuacuaucauaaaaauaacaaguccuggauggagucugaguuccguguguacagcuccgcgaauaacuguacuuuugaguaugugucacaaccuuuccugauggaccuggaaggcaagcaggguaauuuuaaaaaccucagagaguucgucuuuaagaacauugauggguacuucaaaaucuacaguaagcacaccccaauaaauuuaguuagggaccugccccagggauuuagcgcucuugagccuuugguggaucugccaaucggcauuaacaucacacgguuccagacucuacucgcccugcaucgcucuuaucuuaccccgggcgacuccucaagcggguggacagcaggagccgcugcauacuauguagguuaccugcaacccagaaccuuuuugcucaaauauaaugaaaacggcacgauuacugaugccguggacugcgcucuggauccuuuaagugagacaaaguguacccugaagucuuucacugucgaaaaagggaucuaccagacauccaauuuuagggugcagccaaccgagagcauaguucgguuccccaacauuacgaaucucugcccuuuuggagagguguucaacgccacccgcuucgcgucggucuaugcauggaaucgaaagagaaucucuaacuguguggccgacuacuccguacuuuacaauucagcuaguuuuagcacauucaaaugcuauggcguuuccccaacuaagcugaacgacuuguguuuuaccaauguguacgccgauucuuucgucauuaggggugacgaagugcggcagaucgcacccgggcaaacaggaaaaaucgcugauuauaacuacaagcuaccggacgauuuuacuggcugcgucauugccuggaauagcaacaaccuggacucaaaagugggcgggaauuauaacuaccucuaucgucuguuccgcaagaguaaucuuaagccuuuugagagagauauauccaccgaaaucuaccaggcgggaagcacacccuguaacgguguugagggcuucaauugcuacuuuccacugcagucuuauggguuccaaccuaccaacggagugggcuaccagcccuauaggguagucguguugucauuugaacuccugcacgccccagcaacuguuugcggucccaaaaagaguacgaauuuagugaaaaacaagugugucaauuucaacuuuaaugggcugacaggcaccggagugcuaacugagagcaacaaaaaguuccucccuuuccagcaguuuggccgggacauugcugauaccacagacgccguacgagauccacaaacccuggagauccuugacauaacuccgugcuccuucgggggagugucuguuauuacacccgguacgaauaccucgaaccaggucgcuguguuguaccaggacgugaauuguacugaagucccuguugccauccacgcagaucagcugacaccaaccuggcgcguguauagcacaggcuccaacguguuucaaacuagagccgggugccucaucggagcugagcauguaaacaauucauacgaaugugacauucccaucggcgcggguauuugcgcaaguuaucagacccagacgaacucuccuaggcgggcccgcagcgucgcuucccagucaauaaucgccuacaccaugagccugggggcagaaaauucuguggccuacuccaacaauaguauugcuaucccaacaaacuucacuaucagcguuaccacagaaauucuucccgugucuaugacuaagaccuccgucgauuguacgauguauauaugcggcgacucaacagaguguaguaauuuucuguugcaauacggcagcuucugcacccagcucaacagagcccugacuggaaucgcaguggagcaggauaaaaauacacaggaaguuuuugcgcaagugaagcagauuuauaaaaccccgccuaucaaggacuucgggggauuuaacuucucgcagauuuuaccagaucccuccaaaccuucuaagaggagcuuuaucgaggaccugcuauucaauaagguaacucucgcugaugccgguuucauaaaacaauacggcgacugucugggggauaucgcagcccgugaccuuauuugcgcucagaaguuuaacggauugaccguccugcccccacuccugacagaugaaaugaucgcccaguauacgucagcauuacuggcuggcaccauuacgagugguuggacauucggggccggcgcggcccuucagaucccuuuugcuaugcaaauggcauaccgguucaauggaauaggcgugacccagaacguguuguaugagaaucagaaacucauugccaaccaguuuaacuccgcuaucgggaagauucaagacucucugagcuccacagccucagcacuaggaaaacugcaggacgucguuaaucagaacgcgcaggcccucaauacucuggugaagcaacuuagcaguaacuucggcgcuaucucuuccguauugaaugauauacugagccgauuagacaagguggaagccgagguccagaucgauagacucauuaccgguaggcugcagucgcuucaaacguacgugacacagcagcugauccgcgcagcugagauucgggccucagcaaacuuggccgcuaccaaaaugucugaaugcguucucgggcagaguaagagaguggacuuuuguggaaaaggcuaccaccugauguccuucccccaaagcgcgccacauggugucguguuucuacacguuacuuaugugccggcccaggagaagaauuucaccacagcuccugcaaucugccacgauggcaaagcccauuuucccagggaaggggucuucguaucuaacggaacucacugguuugugacccagcgcaauuucuacgagccacagauaauuacaacggacaacaccuucguuagcggcaauugugauguggucaucgggaucgugaacaauacuguauaugacccccugcaaccugagcucgauuccuuuaaggaagaacuggacaaauacuucaagaaccauacaucaccagauguggaccuuggagauauuaguggcaucaaugccagcgucguuaacauucagaaggaaauagaccgauugaaugagguggcuaaaaaccugaacgaaucuuuaaucgaccuccaggagcuggguaaguaugagcaguacauuaaauggcccugguauaucuggcuuggguuuauugcaggacugaucgccauagugauggucaccaucaugcuaugcuguaugacuuccugcuguucaugccucaagggcuguugcaguugugguagcugcugcaaauucgaugaagacgauuccgagccugugcugaagggcguuaaguugcacuacacaugaggacuagucccuguucccagagcccacuuuuuuuucuuuuuuugaaauaaaauagccugucuuucagaucucaaaggcucuuuucagagccaccaaaaaaaaaaaaaaaaaaaaaaaaaaaaaaaaaaaaaaaaaaaaaaaaaaaaaaaaaaaaaaaaaaaaaaaaaaaaaaaaaaaaaaaaaaaaaaaaaaaaa

SEQ ID NO: 12483 - RNA, 4094 nt, Artificial Sequence
  SARS-CoV-2/Australia/QLD02/2020__EPI_ISL_407896 spike protein mRNA human (1-1273)
aggagagucccgcagucggcguccagcggcucugcuuguucgugugugugucguugcaggccuuauucaagcuuaccauguucguguuucugguccuccuuccccugguuagcucccagugcgugaacuugaccacaagaacucaauuaccuccagccuacacuaauucuuucaccaggggcguauauuacccggacaagguguuucggucaaguguccugcacagcacacaggaucuauuccuccccuuuuucuccaacgugacuugguuucaugcuauccacguuucugggaccaauggaacaaaacgcuucgacaacccugugcugccauuuaaugauggugucuauuucgcaucgaccgagaagucaaacauuauacgaggcuggaucuuugggacuacacuugacagcaaaacccagagucuguugauugugaauaacgccacgaauguaguuaucaaggugugugaguuccaguuuugcaacgaucccuuccucggagucuacuaucauaaaaauaacaaguccuggauggagucugaguuccguguguacagcuccgcgaauaacuguacuuuugaauaugugucacaaccuuuccugauggaccuggaaggcaagcaggguaauuuuaaaaaccucagagaguucgucuuuaagaacauugauggguacuucaaaaucuacaguaagcacaccccaauaaauuuaguuagggaccugccccagggauuuagcgcucuugagccuuugguggaucugccaaucggcauuaacaucacacgguuccagacucuacucgcccugcaucgcucuuaucuuaccccgggcgacuccucaagcggguggacagcaggagccgcugcauacuauguagguuaccugcaacccagaaccuuuuugcucaaauauaaugaaaacggcacgauuacugaugccguggacugcgcucuggauccuuuaagugagacaaaguguacccugaagucuuucacugucgaaaaagggaucuaccagacauccaauuuuagggugcagccaaccgagagcauaguucgguuccccaacauuacgaaucucugcccuuuuggagagguguucaacgccacccgcuucgcgucggucuaugcauggaaucgaaagagaaucucuaacuguguggccgacuacuccguacuuuacaauucagcuaguuuuagcacauucaaaugcuauggcguuuccccaacuaagcugaacgacuuguguuuuaccaauguguacgccgauucuuucgucauuaggggugacgaagugcggcagaucgcacccgggcaaacaggaaaaaucgcugauuauaacuacaagcuaccggacgauuuuacuggcugcgucauugccuggaauagcaacaaccuggacucaaaagugggcgggaauuauaacuaccucuaucgucuguuccgcaagaguaaucuuaagccuuuugagagagauauauccaccgaaaucuaccaggcgggaagcacacccuguaacgguguugagggcuucaauugcuacuuuccacugcagucuuauggguuccaaccuaccaacggagugggcuaccagcccuauaggguagucguguugucauuugaacuccugcacgccccagcaacuguuugcggucccaaaaagaguacgaauuuagugaaaaacaagugugucaauuucaacuuuaaugggcugacaggcaccggagugcuaacugagagcaacaaaaaguuccucccuuuccagcaguuuggccgggacauugcugauaccacagacgccguacgagauccacaaacccuggagauccuugacauaacuccgugcuccuucgggggagugucuguuauuacacccgguacgaauaccucgaaccaggucgcuguguuguaccaggacgugaauuguacugaagucccuguugccauccacgcagaucagcugacaccaaccuggcgcguguauagcacaggcuccaacguguuucaaacuagagccgggugccucaucggagcugagcauguaaacaauucauacgaaugugacauucccaucggcgcggguauuugcgcaaguuaucagacccagacgaacucuccuaggcgggcccgcagcgucgcuucccagucaauaaucgccuacaccaugagccugggggcagaaaauucuguggccuacuccaacaauaguauugcuaucccaacaaacuucacuaucagcguuaccacagaaauucuucccgugucuaugacuaagaccuccgucgauuguacgauguauauaugcggcgacucaacagaguguaguaaucuguugcuccaauacggcagcuuuugcacccagcugaacagagccuuaacuggaaucgcaguggagcaggauaaaaauacacaggaaguuuucgcgcaagugaagcagauuuauaaaaccccgccuaucaaggacuuugggggauucaacuuuucgcagauucugccagaucccuccaaaccuucuaagaggagcuucaucgaggaccuacucuuuaauaagguaacucuggcugaugccgguuucauaaaacaauacggcgacugucuuggggauaucgcagcccgugacuugauuugcgcucagaaguucaacggacugaccguccugcccccacucuuaacagaugaaaugaucgcccaguauacgucagcacugcuugcuggcaccauuacgagugguuggacauuuggggccggcgcggccuugcagaucccuuucgcuaugcaaauggcauaccgguuuaauggaauaggcgugacccagaacgugcucuaugagaaucagaaacugauugccaaccaguucaacuccgcuaucgggaagauucaagacucucuaagcuccacagccucagcacugggaaaacuccaggacgucguuaaucagaacgcgcaggcccugaauacucuugugaagcaauugagcaguaacuuuggcgcuaucucuuccguacugaaugauauauuaagccgacucgacaagguggaagccgagguccagaucgauagacugauuaccgguaggcuucagucgcugcaaacguacgugacacagcaguugauccgcgcagcugagauucgggccucagcaaaccucgccgcuaccaaaaugucugaaugcguucuggggcagaguaagagaguggacuucuguggaaaaggcuaccaccuaauguccuuuccccaaagcgcgccacauggugucguguuccugcacguuacuuaugugccggcccaggagaagaauuuuaccacagcuccugcaaucugccacgauggcaaagcccauuuccccagggaaggggucuuuguaucuaacggaacucacugguucgugacccagcgcaauuuuuacgagccacagauaauuacaacggacaacaccuucguuagcggcaauugugauguggucaucgggaucgugaacaauacuguauaugacccccuccaacuggagcuugauuccuucaaggaagaguuggacaaauacuuuaagaaccauacaucaccugauguggaccugggagauauuaguggcaucaaugccagcgucguuaacauucagaaggaaauagaccgauuaaaugagguggcuaaaaaccucaacgaaucucugaucgaccuucaggagcuggguaaguaugagcaguacauuaaauggccaugguauaucuggcuaggguucauugcaggacucaucgccauagugauggucaccaucaugcugugcuguaugacuuccugcuguucaugcuugaagggcuguugcaguugugguagcugcugcaaauuugaugaagacgauuccgagcccgugcugaagggcguuaaguuacacuacacaugaggacuagucccuguucccagagcccacuuuuuuuucuuuuuuugaaauaaaauagccugucuuucagaucucaaaggcucuuuucagagccaccaaaaaaaaaaaaaaaaaaaaaaaaaaaaaaaaaaaaaaaaaaaaaaaaaaaaaaaaaaaaaaaaaaaaaaaaaaaaaaaaaaaaaaaaaaaaaaaaaaaaa

SEQ ID NO: 12484 - RNA, 4094 nt, Artificial Sequence
  SARS-CoV-2/India/1-31/2020__EPI_ISL_413523 spike protein mRNA human (1-1273)
aggagagucccgcagucggcguccagcggcucugcuuguucgugugugugucguugcaggccuuauucaagcuuaccauguucguguuucugguccuccuuccccugguuagcucccagugcgugaacuugaccacaagaacucaauuaccuccagccuacacuaauucuuucaccaggggcguauauuacccggacaagguguuucggucaaguguccugcacagcacacaggaucuauuccuccccuuuuucuccaacgugacuugguuucaugcuauccacguuucugggaccaauggaacaaaacgcuucgacaacccugugcugccauuuaaugauggugucuauuucgcaucgaccgagaagucaaacauuauacgaggcuggaucuuugggacuacacuugacagcaaaacccagagucuguugauugugaauaacgccacgaauguaguuaucaaggugugugaguuccaguuuugcaacgaucccuuccucggagucuacuaucauaaaaauaacaaguccuggauggagucugaguuccguguguacagcuccgcgaauaacuguacuuuugaauaugugucacaaccuuuccugauggaccuggaaggcaagcaggguaauuuuaaaaaccucagagaguucgucuuuaagaacauugauggguacuucaaaaucuacaguaagcacaccccaauaaauuuaguuagggaccugccccagggauuuagcgcucuugagccuuugguggaucugccaaucggcauuaacaucacacgguuccagacucuacucgcccugcaucgcucuuaucuuaccccgggcgacuccucaagcggguggacagcaggagccgcugcauacuauguagguuaccugcaacccagaaccuuuuugcucaaauauaaugaaaacggcacgauuacugaugccguggacugcgcucuggauccuuuaagugagacaaaguguacccugaagucuuucacugucgaaaaagggaucuaccagacauccaauuuuagggugcagccaaccgagagcauaguucgguuccccaacauuacgaaucucugcccuuuuggagagguguucaacgccacccgcuucgcgucggucuaugcauggaaucgaaagagaaucucuaacuguguggccgacuacuccguacuuuacaauucagcuaguuuuagcacauucaaaugcuauggcguuuccccaacuaagcugaacgacuuguguuuuaccaauguguacgccgauucuuucgucauuaggggugacgaagugcggcagaucgcacccgggcaaacaggaaaaaucgcugauuauaacuacaagcuaccggacgauuuuacuggcugcgucauugccuggaauagcaacaaccuggacucaaaagugggcgggaauuauaacuaccucuaucgucuguuccgcaagaguaaucuuaagccuuuugagagagauauauccaccgaaaucuaccaggcgggaagcacacccuguaacgguguugagggcuucaauugcuacuuuccacugcagucuuauggguuccaaccuaccaacggagugggcuaccagcccuauaggguagucguguugucauuugaacuccugcacgccccagcaacuguuugcggucccaaaaagaguacgaauuuagugaaaaacaagugugucaauuucaacuuuaaugggcugacaggcaccggagugcuaacugagagcaacaaaaaguuccucccuuuccagcaguuuggccgggacauugcugauaccacagacgccguacgagauccacaaacccuggagauccuugacauaacuccgugcuccuucgggggagugucuguuauuacacccgguacgaauaccucgaaccaggucgcuguguuguaccaggacgugaauuguacugaagucccuguugccauccacgcagaucagcugacaccaaccuggcgcguguauagcacaggcuccaacguguuucaaacuagagccgggugccucaucggagcugagcauguaaacaauucauacgaaugugacauucccaucggcgcggguauuugcgcaaguuaucagacccagacgaacucuccuaggcgggcccgcagcgucgcuucccagucaauaaucgccuacaccaugagccugggggcagaaaauucuguggccuacuccaacaauaguauugcuaucccaacaaacuucacuaucagcguuaccacagaaauucuucccgugucuaugacuaagaccuccgucgauuguacgauguauauaugcggcgacucaacagaguguaguaaucuguugcuccaauacggcagcuuuugcacccagcugaacagagccuuaacuggaaucgcaguggagcaggauaaaaauacacaggaaguuuucgcgcaagugaagcagauuuauaaaaccccgccuaucaaggacuuugggggauucaacuuuucgcagauucugccagaucccuccaaaccuucuaagaggagcuucaucgaggaccuacucuuuaauaagguaacucuggcugaugccgguuucauaaaacaauacggcgacugucuuggggauaucgcagcccgugacuugauuugcgcucagaaguucaacggacugaccguccugcccccacucuuaacagaugaaaugaucgcccaguauacgucagcacugcuugcuggcaccauuacgagugguuggacauuuggggccggcgcggccuugcagaucccuuucgcuaugcaaauggcauaccgguuuaauggaauaggcgugacccagaacgugcucuaugagaaucagaaacugauugccaaccaguucaacuccgucaucgggaagauucaagacucucuaagcuccacagcuucagcccugggaaaacuccaggacguugugaaucagaacgcacaggcgcugaauacucuuguaaagcaauugagcaguaacuuuggcgccaucucuuccgugcugaaugauauauuaagccgacucgacaaggucgaagcugaggugcagaucgauagacugauuaccgguaggcuucagucgcugcaaacguacguuacacagcaguugauccgcgccgcagagauucgggcuucagccaaccucgcagccaccaaaaugucugaaugcgugcuggggcagaguaagagagucgacuucuguggaaaaggcuaccaccuaauguccuuuccccaaagcgcuccacauggugugguuuuccugcacgugacuuaugucccggcgcaggagaagaauuuuaccacagccccugcaaucugccacgauggcaaagcucauuuccccagggaagggguauuugugucuaacggaacucacugguucguuacccagcgcaauuuuuacgagccacagauaauuacaacggacaacaccuucgugagcggcaauugugaugucgugaucgggaucguaaacaauacuguguaugacccccuccaaccugagcuggauuccuucaaggaggaacuugacaaauacuuuaagaaccauacaucaccagaugucgacuugggagauauuaguggcaucaaugccagcguugugaacauucagaaggaaauagaccgacugaaugagguggccaaaaacuuaaacgaaucucucaucgaccugcaggagcuugguaaguaugagcaguacauuaaauggcccugguauaucuggcugggguucauugcuggacuaaucgcaauagucauggugaccaucaugcucugcuguaugacuuccugcuguucaugccugaagggcuguugcaguugugguagcugcugcaaauuugaugaagacgauuccgagccuguuuugaagggcguaaagcugcacuacacaugaggacuagucccuguucccagagcccacuuuuuuuucuuuuuuugaaauaaaauagccugucuuucagaucucaaaggcucuuuucagagccaccaaaaaaaaaaaaaaaaaaaaaaaaaaaaaaaaaaaaaaaaaaaaaaaaaaaaaaaaaaaaaaaaaaaaaaaaaaaaaaaaaaaaaaaaaaaaaaaaaaaaa

SEQ ID NO: 12485 - RNA, 4094 nt, Artificial Sequence
  SARS-CoV-2/Guangdong/GD2020087-P0008/2020__EPI_ISL_413863 spike protein mRNA human (1-1273)
aggagagucccgcagucggcguccagcggcucugcuuguucgugugugugucguugcaggccuuauucaagcuuaccauguucguguuucugguccuccuuccccugguuagcucccagugcgugaacuugaccacaagaacucaauuaccuccagccuacacuaauucuuucaccaggggcguauauuacccggacaagguguuucggucaaguguccugcacagcacacaggaucuauuccuccccuuuuucuccaacgugacuugguuucaugcuauccacguuucugggaccaauggaacaaaacgcuucgacaacccugugcugccauuuaaugauggugucuauuucgcaucgaccgagaagucaaacauuauacgaggcuggaucuuugggacuacacuugacagcaaaacccagagucuguugauugugaauaacgccacgaauguaguuaucaaggugugugaguuccaguuuugcaacgaucccuuccucggagucuacuaucauaaaaauaacaaguccuggauggaaucugaguuccguguguacagcuccgcgaauaacuguacuuuugaauaugugucacaaccuuuccugauggaccuggaaggcaagcaggguaauuuuaaaaaccucagagaguucgucuuuaagaacauugauggguacuucaaaaucuacaguaagcacaccccaauaaauuuaguuagggaccugccccagggauuuagcgcucuugagccuuugguggaucugccaaucggcauuaacaucacacgguuccagacucuacucgcccugcaucgcucuuaucuuaccccgggcgacuccucaagcggguggacagcaggagccgcugcauacuauguagguuaccugcaacccagaaccuuuuugcucaaauauaaugaaaacggcacgauuacugaugccguggacugcgcucuggauccuuuaagugagacaaaguguacccugaagucuuucacugucgaaaaagggaucuaccagacauccaauuuuagggugcagccaaccgagagcauaguucgguuccccaacauuacgaaucucugcccuuuuggagagguguucaacgccacccgcuucgcgucggucuaugcauggaaucgaaagagaaucucuaacuguguggccgacuacuccguacuuuacaauucagcuaguuuuagcacauucaaaugcuauggcguuuccccaacuaagcugaacgacuuguguuuuaccaauguguacgccgauucuuucgucauuaggggugacgaagugcgggagaucgcacccgggcagacaggaaaaaucgcugauuauaacuacaagcuaccggacgauuuuacuggcugcgucauugccuggaauagcaacaaccuggacucaaaagugggcgggaauuauaacuaccucuaucgucuguuccgcaagaguaaucuuaagccuuuugaaagagauauauccaccgagaucuaccaagcgggaagcacacccuguaacgguguugaaggcuucaauugcuacuuuccacugcagucuuauggguuccagccuaccaacggagugggcuaccaacccuauaggguagucguguugucauuugagcuccugcacgccccagcaacuguuugcggucccaaaaagaguacgaauuuagugaaaaacaagugugucaauuucaacuuuaaugggcugacaggcaccggagugcuaacugagagcaacaaaaaguuccucccuuuccagcaguuuggccgggacauugcugauaccacagacgccguacgagauccacagacccuggaaauccuugacauaacuccgugcuccuucgggggagugucuguuauuacacccgguacgaauaccucgaaccaagucgcuguguuguaccaggacgugaauuguacugaggucccuguugccauccacgcagaucagcugacaccaaccuggcgcguguauagcacaggcuccaacguguuucagacuagagccgggugccucaucggagcugaacauguaaacaauucauacgagugugacauucccaucggcgcggguauuugcgcaaguuaucaaacccagacgaacucuccuaggcgggcccgcagcgucgcuucccagucaauaaucgccuacaccaugagccugggggcagaaaauucuguggccuacuccaacaauaguauugcuaucccaacaaacuucacuaucagcguuaccacagagauucuucccgugucuaugacuaagaccuccgucgauuguacgauguauauaugcggcgacucaacagaguguaguaaucuguugcuccaguacggcagcuuuugcacccaacugaacagagccuuaacuggaaucgcaguggaacaggauaaaaauacacaggagguuuucgcacaggugaagcaaauuuauaaaaccccgccuaucaaggacuuugggggauucaacuuuucgcagauucugccagaucccuccaaaccuucuaagaggagcuucaucgaagaccuacucuuuaauaagguaacucuggcugaugccgguuucauaaaacaguacggcgacugucuuggggauaucgcagcccgugacuugauuugcgcucaaaaguucaacggacugaccguccugcccccacucuuaacagaugagaugaucgcccaguauacgucagcacugcuugcuggcaccauuacgagugguuggacauuuggggccggcgcggccuugcagaucccuuucgcuaugcagauggcauaccgguuuaauggaauaggcgugacccaaaacgugcucuaugaaaaucagaaacugauugccaaccaguucaacuccgcuaucgggaagauucaggacucucuaagcuccacagccucagcacugggaaaacuccaagacgucguuaaucagaacgcgcaggcccugaauacucuugugaagcaguugagcaguaacuuuggcgcuaucucuuccguacugaaugauauauuaagccgacucgacaagguggaggccgagguccaaaucgauagacugauuaccgguaggcuucagucgcugcagacguacgugacacaacaguugauccgcgcagcugaaauucgggccucagcaaaccucgccgcuaccaaaaugucugagugcguucuggggcagaguaagagaguggacuucuguggaaaaggcuaccaccuaauguccuuuccccagagcgcgccacauggugucguguuccugcacguuacuuaugugccggcccaagaaaagaauuuuaccacagcgccugcuaucugccacgauggcaaagcccauuuccccagggagggggucuuuguaucuaacggaacucacugguucgugacccagcgcaauuuuuacgagccacagauaauuacaacggacaacaccuucguuagcggcaauugugauguggucaucgggaucgugaacaauacuguauaugacccccuccagccugaacuggauuccuucaaggaggaacuugacaaauacuuuaagaaccauacaucaccagauguggacuugggagauauuaguggcaucaaugccagcgucguuaacauucaaaaggagauagaccgacugaaugaaguggcuaaaaacuuaaacgagucucucaucgaccugcaggagcuugguaaguaugaacaguacauuaaauggcccugguauaucuggcugggguucauugcaggacuaaucgccauagugauggucaccaucaugcucugcuguaugacuuccugcuguucaugccugaagggcuguugcaguugugguagcugcugcaaauuugaugaggacgauuccgaaccuguguugaagggcguuaagcugcacuacacaugaggacuagucccuguucccagagcccacuuuuuuuucuuuuuuugaaauaaaauagccugucuuucagaucucaaaggcucuuuucagagccaccaaaaaaaaaaaaaaaaaaaaaaaaaaaaaaaaaaaaaaaaaaaaaaaaaaaaaaaaaaaaaaaaaaaaaaaaaaaaaaaaaaaaaaaaaaaaaaaaaaaaa

SEQ ID NO: 12486 - RNA, 4094 nt, Artificial Sequence
  SARS-CoV-2/Sweden/01/2020__EPI_ISL_411951 spike protein mRNA human (1-1273)
aggagagucccgcagucggcguccagcggcucugcuuguucgugugugugucguugcaggccuuauucaagcuuaccauguucguguuucugguccuccuuccccugguuagcucccagugcgugaacuugaccacaagaacucaauuaccuccagccuacacuaauucuuucaccaggggcguauauuacccggacaagguguuucggucaaguguccugcacagcacacaggaucuauuccuccccuuuuucuccaacgugacuugguuucaugcuauccacguuucugggaccaauggaacaaaacgcuucgacaacccugugcugccauuuaaugauggugucuauuucgcaucgaccgagaagucaaacauuauacgaggcuggaucuuugggacuacacuugacagcaaaacccagagucuguugauugugaauaacgccacgaauguaguuaucaaggugugugaguuccaguuuugcaacgaucccuuccucggagucuacuaucauaaaaauaacaaguccuggauggagucugaguuccguguguacagcuccgcgaauaacuguacuuuugaauaugugucacaaccuuuccugauggaccuggaaggcaagcaggguaauuuuaaaaaccucagagaguucgucuuuaagaacauugauggguacuucaaaaucuacaguaagcacaccccaauaaauuuaguuagggaccugccccagggauuuagcgcucuugagccuuugguggaucugccaaucggcauuaacaucacacgguuccagacucuacucgcccugcaucgcucuuaucuuaccccgggcgacuccucaagcggguggacagcaggagccgcugcauacuauguagguuaccugcaacccagaaccuuuuugcucaaauauaaugaaaacggcacgauuacugaugccguggacugcgcucuggauccuuuaagugagacaaaguguacccugaagucuuucacugucgaaaaagggaucuaccagacauccaauuuuagggugcagccaaccgagagcauaguucgguuccccaacauuacgaaucucugcccuuuuggagagguguucaacgccacccgcuucgcgucggucuaugcauggaaucgaaagagaaucucuaacuguguggccgacuacuccguacuuuacaauucagcuaguuuuagcacauucaaaugcuauggcguuuccccaacuaagcugaacgacuuguguuuuaccaauguguacgccgauucuuucgucauuaggggugacgaagugcggcagaucgcacccgggcaaacaggaaaaaucgcugauuauaacuacaagcuaccggacgauuuuacuggcugcgucauugccuggaauagcaacaaccuggacucaaaagugggcgggaauuauaacuaccucuaucgucuguuccgcaagaguaaucuuaagccuuuugagagagauauauccaccgaaaucuaccaggcgggaagcacacccuguaacgguguugagggcuucaauugcuacuuuccacugcagucuuauggguuccaaccuaccaacggagugggcuaccagcccuauaggguagucguguugucauuugaacuccugcacgccccagcaacuguuugcggucccaaaaagaguacgaauuuagugaaaaacaagugugucaauuucaacuuuaaugggcugacaggcaccggagugcuaacugagagcaacaaaaaguuccucccuuuccagcaguuuggccgggacauugcugauaccacagacgccguacgagauccacaaacccuggagauccuugacauaacuccgugcuccuucgggggagugucuguuauuacacccgguacgaauaccucgaaccaggucgcuguguuguaccaggacgugaauuguacugaagucccuguugccauccacgcagaucagcugacaccaaccuggcgcguguauagcacaggcuccaacguguuucaaacuagagccgggugccucaucggagcugagcauguaaacaauucauacgaaugugacauucccaucggcgcggguauuugcgcaaguuaucagacccagacgaacucuccuaggcgggcccgcagcgucgcuucccagucaauaaucgccuacaccaugagccugggggcagaaaauucuguggccuacuccaacaauaguauugcuaucccaacaaacuucacuaucagcguuaccacagaaauucuucccgugucuaugacuaagaccuccgucgauuguacgauguauauaugcggcgacucaacagaguguaguaaucuguugcuccaauacggcagcuuuugcacccagcugaacagagccuuaacuggaaucgcaguggagcaggauaaaaauacacaggaaguuuucgcgcaagugaagcagauuuauaaaaccccgccuaucaaggacugugggggauuuaacuucucgcagauucugccagaucccuccaaaccuucuaagaggagcuuuaucgaggaccuacucuucaauaagguaacucuggcugaugccgguuuuauaaaacaauacggcgacugccuuggggauaucgcagcccgugacuugauuugcgcucagaaguucaacggacugaccguccugcccccacucuuaacagaugaaaugaucgcccaguauacgucagcacugcuugcuggcaccauuacgagugguuggacauucggggccggcgcggccuugcagaucccuuuugcuaugcaaauggcauaccgguucaauggaauaggcgugacccagaacgugcucuaugagaaucagaaacugauugccaaccaguuuaacuccgcuaucgggaagauucaagacucucuaagcuccacagccucagcacugggaaaacuccaggacgucguuaaucagaacgcgcaggcccugaauacucuugugaagcaauugagcaguaacuucggcgcuaucucuuccguacugaaugauauauuaagccgacucgacaagguggaagccgagguccagaucgauagacugauuaccgguaggcuucagucgcugcaaacguacgugacacagcaguugauccgcgcagcugagauucgggccucagcaaaccucgccgcuaccaaaaugucugaauguguucuggggcagaguaagagaguggacuuuugcggaaaaggcuaccaccuaauguccuucccccaaagcgcgccacauggugucguguuucugcacguuacuuaugugccggcccaggagaagaauuucaccacagcuccugcaaucugucacgauggcaaagcccauuuucccagggaaggggucuucguaucuaacggaacucacugguuugugacccagcgcaauuucuacgagccacagauaauuacaacggacaacaccuuuguuagcggcaauugcgauguggucaucgggaucgugaacaauacuguauaugacccccuccaaccugagcuggauuccuucaaggaggaacuugacaaauacuucaagaaccauacaucaccagauguggacuugggagauauuaguggcaucaaugccagcgucguuaacauucagaaggaaauagaccgacugaaugagguggcuaaaaacuuaaacgaaucucucaucgaccugcaggagcuugguaaguaugagcaguacauuaaauggcccugguauaucuggcugggguuuauugcaggacuaaucgccauagugauggucaccaucaugcucuguugcaugacuuccuguugcucaugucugaagggcugcuguaguugcgguagcugcuguaaauucgaugaagacgauuccgagccuguguugaagggcguuaagcugcacuacacaugaggacuagucccuguucccagagcccacuuuuuuuucuuuuuuugaaauaaaauagccugucuuucagaucucaaaggcucuuuucagagccaccaaaaaaaaaaaaaaaaaaaaaaaaaaaaaaaaaaaaaaaaaaaaaaaaaaaaaaaaaaaaaaaaaaaaaaaaaaaaaaaaaaaaaaaaaaaaaaaaaaaaa

SEQ ID NO: 12487 - RNA, 4094 nt, Artificial Sequence
  SARS-CoV-2/Tianmen/HBCDC-HB-07/2020__EPI_ISL_412983 spike protein mRNA human (1-1273)
aggagagucccgcagucggcguccagcggcucugcuuguucgugugugugucguugcaggccuuauucaagcuuaccauguucguguuucugguccuccuuccccugguuagcucccagugcgugaacuugaccacaagaacucaauuaccuccagccuacacuaauucuuucaccaggggcguauauuacccggacaagguguuucggucaaguguccugcacagcacacaggaucuauuccuccccuuuuucuccaacgugacuugguuucaugcuauccacguuucugggaccaauggaacaaaacgcuucgacaacccugugcugccauuuaaugauggugucuauuucgcaucgaccgagaagucaaacauuauacgaggcuggaucuuugggacuacacuugacagcaaaacccagagucuguugauugugaauaacgccacgaauguaguuaucaaggugugugaguuccaguuuugcaacgaucccuuccucggagucuacuaucauaaaaauaacaaguccuggauggagucugaguuccguguguacagcuccgcgaauaacuguacuuuugaauaugugucacaaccuuuccugauggaccuggaaggcaagcaggguaauuuuaaaaaccucagagaguucgucuuuaagaacauugauggguacuucaaaaucuacaguaagcacaccccaauaaauuuaguuagggaccugccccagggauuuagcgcucuugagccuuugguggaucugccaaucggcauuaacaucacacgguuccagacucuacucgcccugcaucgcucuuaucuuaccccgggcgacuccucaagcggguggacagcaggagccgcugcauacuauguagguuaccugcaacccagaaccuuuuugcucaaauauaaugaaaacggcacgauuacugaugccguggacugcgcucuggauccuuuaagugagacaaaguguacccugaagucuuucacugucgaaaaagggaucuaccagacauccaauuuuagggugcagccaaccgagagcauaguucgguuccccaacauuacgaaucucugcccuuuuggagagguguucaacgccacccgcuucgcgucggucuaugcauggaaucgaaagagaaucucuaacuguguggccgacuacuccguacuuuacaauucagcuaguuuuagcacauucaaaugcuauggcguuuccccaacuaagcugaacgacuuguguuuuaccaauguguacgccgauucuuucgucauuaggggugacgaagugcggcagaucgcacccgggcaaacaggaaaaaucgcugauuauaacuacaagcuaccggacgauuuuacuggcugcgucauugccuggaauagcaacaaccuggacucaaaagugggcgggaauuauaacuaccucuaucgucuguuccgcaagaguaaucuuaagccuuuugagagagauauauccaccgaaaucuaccaggcgggaagcacacccuguaacgguguugagggcuucaauugcuacuuuccacugcagucuuauggguuccaaccuaccaacggagugggcuaccagcccuauaggguagucguguugucauuugaacuccugcacgccccagcaacuguuugcggucccaaaaagaguacgaauuuagugaaaaacaagugugucaauuucaacuuuaaugggcugacaggcaccggagugcuaacugagagcaacaaaaaguuccucccuuuccagcaguuuggccgggacauugcugauaccacagacgccguacgagauccacaaacccuggagauccuugacauaacuccgugcuccuucgggggagugucuguuauuacacccgguacgaauaccucgaaccaggucgcuguguuguaccaggaccugaauuguacugaagugccugucgccauccacgcagaucagcucacaccaaccuggcgcguuuauagcacaggcuccaacguguuucaaacuagagccgggugccugaucggagcugagcaugugaacaauucauacgaaugugacauucccaucggcgcggguauuugcgcaaguuaucagacccagacgaacucuccuaggcgggcccgcagcguagcuucccagucaauaaucgccuacaccaugagccuuggggcagaaaauucugucgccuacuccaacaauaguauugcuaucccaacaaacuucacuaucagcgugaccacagaaauucugcccguuucuaugacuaagaccuccguggauuguacgauguauauaugcggcgacucaacagaguguaguaauuugcuccugcaauacggcagcuuuugcacccaguuaaacagagcccugacuggaaucgcagucgagcaggauaaaaauacacaggaaguguucgcgcaaguuaagcagauuuauaaaaccccgccuaucaaggacuuugggggauucaacuuuucgcagauucuaccagaucccuccaaaccuucuaagaggagcuucaucgaggaccuccuguuuaauaaggugacucuugcugaugccgguuucauaaaacaauacggcgacuguuugggggauaucgcagcccgugaccugauuugcgcucagaaguucaacggacucaccguacugcccccauuacugacagaugaaaugaucgcccaguauacgucagcacuuuuggcuggcaccauuacgagugguuggacauuuggggccggcgcggcccuccagaucccuuucgcuaugcaaauggcauaccgguuuaauggaauaggcgucacccagaacgugcuguaugagaaucagaaacuaauugccaaccaguucaacuccgcuaucgggaagauucaagacucucugagcuccacagccucagcacucggaaaacugcaggacguggucaaucagaacgcgcaggcccuuaauacuuugguuaagcaacugagcaguaacuuuggcgcuaucucuuccguguuaaaugauauacucagccgacuggacaagguagaagccgaggugcagaucgauagacuuauuaccgguaggcugcagucguugcaaacguacgucacacagcagcucauccgcgcagcugagauucgggccucagcaaaccuggccgcuaccaaaaugucugaaugcgugcuagggcagaguaagagaguugacuucuguggaaaaggcuaccaccugauguccuuuccccaaagcgcgccacaugguguggucuuccuccacgugacuuauguuccggcccaggagaagaauuuuaccacagcuccugcaaucugccacgauggcaaagcccauuuccccagggaagggguguuugucucuaacggaacucacugguucguaacccagcgcaauuuuuacgagccacagauaauuacaacggacaacaccuucgugagcggcaauugugauguugugaucgggaucgucaacaauacuguguaugacccccugcaaccugagcuugauuccuucaaggaagaguuggacaaauacuuuaagaaccauacaucaccagauguagaccugggagauauuaguggcaucaaugccagcguggucaacauucagaaggaaauagaccgauuaaaugagguugcuaaaaaccucaacgaaucucugaucgaccuucaggagcuggguaaguaugagcaguacauuaaauggcccugguauaucuggcuaggguucauugcaggacucaucgccauagugauggugaccaucaugcugugcuguaugacuuccugcuguucaugcuugaagggcuguugcaguugugguagcugcugcaaauuugaugaagacgauuccgagccuguccugaagggcgugaaguuacacuacacaugaggacuagucccuguucccagagcccacuuuuuuuucuuuuuuugaaauaaaauagccugucuuucagaucucaaaggcucuuuucagagccaccaaaaaaaaaaaaaaaaaaaaaaaaaaaaaaaaaaaaaaaaaaaaaaaaaaaaaaaaaaaaaaaaaaaaaaaaaaaaaaaaaaaaaaaaaaaaaaaaaaaaa

SEQ ID NO: 12488 - RNA, 4094 nt, Artificial Sequence
  SARS-CoV-2/Hong Kong/case42_VM20002493/2020__EPI_ISL_414527 spike protein mRNA human (1-1273)
aggagagucccgcagucggcguccagcggcucugcuuguucgugugugugucguugcaggccuuauucaagcuuaccauguucguguuucugguccuccuuccccugguuagcucccagugcgugaacuugaccacaagaacucaauuaccuccagccuacacgaauagcuucaccaggggcguauauuacccggacaagguguuucggucaaguguccugcacagcacacaggaucuauuccuccccuuuuucuccaacgugacuugguuucaugcuauccacguuucugggaccaauggaacaaaacgcuucgacaacccugugcugccauuuaaugauggugucuauuucgcaucgaccgagaagucaaacauuauacgaggcuggaucuuugggacuacacuugacagcaaaacccagagucuguugauugugaauaacgccacgaauguaguuaucaaggugugugaguuccaguuuugcaacgaucccuuccucggagucuacuaucauaaaaauaacaaguccuggauggagucugaguuccguguguacagcuccgcgaauaacuguacuuuugaauaugugucacaaccuuuccugauggaccuggaaggcaagcaggguaauuuuaaaaaccucagagaguucgucuuuaagaacauugauggguacuucaaaaucuacaguaagcacaccccaauaaauuuaguuagggaccugccccagggauuuagcgcucuugagccuuugguggaucugccaaucggcauuaacaucacacgguuccagacucuacucgcccugcaucgcucuuaucuuaccccgggcgacuccucaagcggguggacagcaggagccgcugcauacuauguagguuaccugcaacccagaaccuuuuugcucaaauauaaugaaaacggcacgauuacugaugccguggacugcgcucuggauccuuuaagugagacaaaguguacccugaagucuuucacugucgaaaaagggaucuaccagacauccaauuuuagggugcagccaaccgagagcauaguucgguuccccaacauuacgaaucucugcccuuuuggagagguguucaacgccacccgcuucgcgucggucuaugcauggaaucgaaagagaaucucuaacuguguggccgacuacuccguacuuuacaauucagcuaguuuuagcacauucaaaugcuauggcguuuccccaacuaagcugaacgacuuguguuuuaccaauguguacgccgauucuuucgucauuaggggugacgaagugcggcagaucgcacccgggcaaacaggaaaaaucgcugauuauaacuacaagcuaccggacgauuuuacuggcugcgucauugccuggaauagcaacaaccuggacucaaaagugggcgggaauuauaacuaccucuaucgucuguuccgcaagaguaaucuuaagccuuuugagagagauauauccaccgaaaucuaccaggcgggaagcacacccuguaacgguguugagggcuucaauugcuacuuuccacugcagucuuauggguuccaaccuaccaacggagugggcuaccagcccuauaggguagucguguugucauuugaacuccugcacgccccagcaacuguuugcggucccaaaaagaguacgaauuuagugaaaaacaagugugucaauuucaacuuuaaugggcugacaggcaccggagugcuaacugagagcaacaaaaaguuccucccuuuccagcaguuuggccgggacauugcugauaccacagacgccguacgagauccacaaacccuggagauccuugacauaacuccgugcuccuucgggggagugucuguuauuacacccgguacgaauaccucgaaccaggucgcuguguuguaccaggacgugaauuguacugaagucccuguugccauccacgcagaucagcugacaccaaccuggcgcguguauagcacaggcuccaacguguuucaaacuagagccgggugccucaucggagcugagcauguaaacaauucauacgaaugugacauucccaucggcgcggguauuugcgcaaguuaucagacccagacgaacucuccuaggcgggcccgcagcgucgcuucccagucaauaaucgccuacaccaugagccugggggcagaaaauucuguggccuacuccaacaauaguauugcuaucccaacaaacuucgccaucagcguuacuaccgaaauucuucccgugucuaugacaaagacuuccgucgauuguaccauguauauaugcggcgacucaacggaguguaguaaucuguugcuccaauacggaucuuuuugcacacagcugaacagagcauuaaccggcaucgcgguggagcaggauaaaaauacucaggaaguuuucgcucaagugaagcagauuuauaaaacaccgccuaucaaggacuuugggggauucaacuuuucgcagauucugccagaucccuccaaaccuucuaagaggagcuucaucgaggaccuacucuuuaauaagguaacccuggccgaugcagguuucauaaaacaauacggcgacugucuuggggauaucgccgcucgugacuugauuugcgcccagaaguucaacggacugacuguccugcccccacucuuaaccgaugaaaugaucgcacaguauacaucagcucugcuugccggcacgauuaccagugguuggacuuuuggggcgggcgccgcuuugcagaucccuuucgcaaugcaaauggccuaccgguuuaauggaauaggcgugacacagaacgugcucuaugagaaucagaaacugauugcuaaccaguucaacuccgccaucgggaagauucaagacucucuaagcuccaccgcaucagcgcugggaaaacuccaggacgucguuaaucagaacgcccaggcucugaauacacuugugaagcaauugagcaguaacuuuggcgccaucucuuccguacugaaugauauauuaagccgacucgacaagguggaagcagagguccagaucgauagacugauuacugguaggcuucagucgcugcaaaccuacgugacgcagcaguugauccgcgcugccgagauucgggcaucagccaaccucgcugcgacaaaaaugucugaaugcguucuggggcagaguaagagaguggacuucuguggaaaaggcuaccaccuaauguccuuuccccaaagcgccccacauggugucguguuccugcacguuaccuaugugccggcacaggagaagaauuuuacuaccgcuccugccaucugccacgauggcaaagcccauuuccccagggaaggggucuuuguaucuaacggaacacacugguucgugacucagcgcaauuuuuacgagccacagauaauuaccacagacaacacguucguuagcggcaauugugauguggucaucgggaucgugaacaauaccguauaugacccccuccaaccugagcuggauuccuucaaggaggaacuugacaaauacuuuaagaaccauacuucaccagauguggacuugggagauauuaguggcaucaaugcuagcgucguuaacauucagaaggaaauagaccgacugaaugagguggccaaaaacuuaaacgaaucucucaucgaccugcaggagcuugguaaguaugagcaguacauuaaauggcccugguauaucuggcugggguucauugcaggacuaaucgcgauagugauggucacaaucaugcucugcuguaugaccuccugcuguucaugccugaagggcuguugcaguugugguagcugcugcaaauuugaugaagacgauuccgagccuguguugaagggcguuaagcugcacuacacuugaggacuagucccuguucccagagcccacuuuuuuuucuuuuuuugaaauaaaauagccugucuuucagaucucaaaggcucuuuucagagccaccaaaaaaaaaaaaaaaaaaaaaaaaaaaaaaaaaaaaaaaaaaaaaaaaaaaaaaaaaaaaaaaaaaaaaaaaaaaaaaaaaaaaaaaaaaaaaaaaaaaaa

SEQ ID NO: 12489 - RNA, 4094 nt, Artificial Sequence
  SARS-CoV-2/USA/CruiseA-23/2020__EPI_ISL_414482 spike protein mRNA human (1-1273)
aggagagucccgcagucggcguccagcggcucugcuuguucgugugugugucguugcaggccuuauucaagcuuaccauguucguguuucugguccuccuuccccugguuagcucccagugcgugaacuugaccacaagaacucaauuaccuccagccuacacuaauucuuucaccaggggcguauauuacccggacaagguguuucggucaaguguccugcacagcacacaggaucuauuccuccccuuuuucuccaacgugacuugguuucaugcuauccacguuucugggaccaauggaacaaaacgcuucgacaacccugugcugccauuuaaugauggugucuauuucgcaucgaccgagaagucaaacauuauacgaggcuggaucuuugggacuacacuugacagcaaaacccagagucuguugauugugaauaacgccacgaauguaguuaucaaggugugugaguuccaguuuugcaacgaucccuuccucggagucuacuaucauaaaaauaacaaguccuggauggagucugaguuccguguguacagcuccgcgaauaacuguacuuuugaguaugugucacaaccuuuccugauggaccuggaagucaagcagggcaauuuuaaaaaccucagagaguucguuuuuaagaacauugaugguuacuucaaaaucuacaguaagcacaccccaauaaauuuagugagggaccugccccagggguuuagcgcucuugagccuuugguagaucugccaaucggaauuaacaucacacgguuccagacucuacucgcccugcaucgcucuuaucuuaccccgggcgacuccucaagcggcuggacagcaggggccgcugcauacuaugugggauaccugcaacccagaaccuuuuugcucaaauauaaugaaaacgguacgauuacugaugccgucgacugcgcucuggauccuuuaagugagacaaaguguacccugaagucuuucacuguggaaaaaggcaucuaccagacauccaauuuuaggguucagccaaccgagagcauagugcgguuccccaacauuacgaaucucugcccuuuuggggaggucuucaacgccacccgcuucgcgucgguguaugcauggaaucgaaagagaaucucuaacuguguagccgacuacuccguucuuuacaauucagcuaguuuuagcacauucaaaugcuauggaguguccccaacuaagcugaacgacuuguguuuuaccaaugucuacgccgauucuuucgugauuaggggcgacgaaguccggcagaucgcacccggucaaacagggaaaaucgcugauuauaacuacaagcuaccggacgauuuuacuggaugcgugauugccuggaauagcaacaaccuggacucaaaaguuggcggcaauuauaacuaccucuaucgucuguuccgcaagaguaaucuuaagccuuuugagagagauauauccaccgaaaucuaccaggcggggagcacacccuguaacggaguggaggguuucaauugcuacuuuccacugcagucuuauggcuuccaaccuaccaacgggguaggauaccagcccuauagggucgugguuuugucauuugaacuccugcacgccccagcaacugugugcggccccaaaaagaguacgaauuuagucaaaaacaagugugugaauuucaacuuuaauggucugacagggaccggcguacuaacugagagcaacaaaaaguuccucccuuuccagcaguuuggacgggacauugcugauaccacagacgccgugcgagauccacaaacccuggagauccuugacauaacuccgugcuccuucggcgggguuucugucauuacacccggaacgaauaccucgaaccagguggcuguguuguaccaggacgucaauuguacugaaguuccuguggccauccacgcagaucagcugacaccaaccuggcgcguguauagcacagguuccaacguauuucaaacuagagccggcugccucaucggggcugagcaugucaacaauucauacgaaugugacauucccaucggagcgggcauuugcgcaaguuaucagacccagacgaacucuccuaggcgggcccgcagcguggcuucccagucaauaaucgccuacaccaugagccugggugcagaaaauucuguugccuacuccaacaauaguauugcuaucccaacaaacuucacuaucagcgugaccacagaaauucuucccgucucuaugacuaagaccuccguggauuguacgauguauauaugcggggacucaacagaguguaguaaucuguugcuccaauacggcagcuuuugcacccagcugaacagagccuuaacuggaaucgcaguugagcaggauaaaaauacacaggaaguguucgcgcaaguaaagcagauuuauaaaaccccgccuaucaaggacuuuggcggguucaacuuuucgcagauucugccagaucccuccaaaccuucuaagaggagcuucaucgaggaccuacucuuuaauaaggucacucuggcugaugccggauucauaaaacaauacggugacugucuuggcgauaucgcagcccgugacuugauuugcgcucagaaguucaacgggcugaccgugcugcccccacucuuaacagaugaaaugaucgcccaguauacgucagcacugcuugcuggaaccauuacgaguggcuggacauuuggugccggggcggccuugcagaucccuuucgcuaugcaaauggcauaccgguuuaauggcauaggagugacccagaacguccucuaugagaaucagaaacugauugccaaccaguucaacuccgcuaucggcaagauucaagacucucuaagcuccacagccucagcacuggggaaacuccaggacguugugaaucagaacgcgcaggcccugaauacucuuguaaagcaauugagcaguaacuuuggagcuaucucuuccgugcugaaugauauauuaagccgacucgacaaggucgaagccgaggugcagaucgauagacugauuaccggcaggcuucagucgcugcaaacguacguuacacagcaguugauccgcgcagcugagauucgggccucagcaaaccucgccgcuaccaaaaugucugaaugcgugcugggucagaguaagagagucgacuucugugggaaaggauaccaccuaauguccuuuccccaaagcgcgccacauggcgugguuuuccugcacgugacuuaugucccggcccaggagaagaauuuuaccacagcuccugcaaucugccacgaugguaaagcccauuuccccagggaaggcguauuugugucuaacgggacucacugguucguuacccagcgcaauuuuuacgagccacagauaauuacaacggacaacaccuucgugagcggaaauugugaugucgugaucggcaucguaaacaauacuguguaugacccccuccaaccugagcuggauuccuucaaggaagaacuugacaaauacuuuaagaaccauacaucaccagaugucgacuugggggauauuaguggaaucaaugccagcguugugaacauucagaaggaaauagaccgacugaaugagguggcuaaaaacuuaaacgaaucucucaucgaccugcaggagcuuggcaaguaugagcaguacauuaaauggcccugguauaucuggcuggguuucauugcagggcuaaucgccauagucauggugaccaucaugcucugcuguaugacuuccugcuguucaugccugaagggauguugcaguuguggcagcugcugcaaauuugaugaagacgauuccgagccuguuuugaaggguguaaagcugcacuacacaugaggacuagucccuguucccagagcccacuuuuuuuucuuuuuuugaaauaaaauagccugucuuucagaucucaaaggcucuuuucagagccaccaaaaaaaaaaaaaaaaaaaaaaaaaaaaaaaaaaaaaaaaaaaaaaaaaaaaaaaaaaaaaaaaaaaaaaaaaaaaaaaaaaaaaaaaaaaaaaaaaaaaa

SEQ ID NO: 12490 - RNA, 4094 nt, Artificial Sequence
  SARS-CoV-2/Hong Kong/case85_VM20002868/2020__EPI_ISL_414519 spike protein mRNA human (1-1273)
aggagagucccgcagucggcguccagcggcucugcuuguucgugugugugucguugcaggccuuauucaagcuuaccauguucguguuucugguccucguuccccuugugagcucccagugcguaaaccugaccacaagaacucaauugccuccagccuacacuaauucuuucaccaggggcguguauuacccggacaaggucuuucggucaaguguguuacacagcacacaggaucuguuccuacccuuuuucuccaacguuacuugguuucaugcuauccacgugucugggaccaauggaacaaaacgcuucgacaacccuguccucccauuuaaugaugguguguauuucgcaucgaccgagaagucaaacauuauacgaggcuggaucuuugggacuacacuggacagcaaaacccagagucuucugauuguaaauaacgccacgaauguugugaucaaggucugugaguuccaguuuugcaacgaucccuucuugggaguguacuaucauaaaaauaacaaguccuggauggagucugaguuccguguguacagcuccgcgaauaacuguacuuuugaauaugucucacaaccuuuccucauggaccuggaaggcaagcaggguaauuuuaaaaaccugagagaguucguuuuuaagaacauugauggguacuucaaaaucuacaguaagcacaccccaauaaaucucgugagggacuuaccccagggauuuagcgcucuggagccucuuguagauuugccaaucggcauuaacaucacacgguuccagacucugcuagcccuccaucgcucuuaucugaccccgggcgacuccucaagcggguggacagcaggagccgcugcauacuauguggguuaccuucaacccagaaccuuucuguugaaauauaaugaaaacggcacgauuacugaugccgucgacugcgcucucgauccucugagugagacaaaguguaccuuaaagucuuucacuguggaaaaagggaucuaccagacauccaauuuuaggguucagccaaccgagagcauagugcgguuccccaacauuacgaaucugugcccuuuuggagaggucuucaacgccacccgcuucgcgucgguguaugcauggaaucgaaagagaaucucuaacuguguagccgacuacuccguucucuacaauucagcuaguuuuagcacauucaaaugcuauggcguguccccaacuaaacuuaacgaccuguguuuuaccaaugucuacgccgauucuuucgugauuaggggugacgaaguccggcagaucgcacccgggcaaacaggaaagaucgcugauuauaacuacaaguugccggacgauuuuacuggcugcgugauugccuggaauagcaacaaccuagacucaaaaguuggcgggaauuauaacuaccuguaucgucucuuccgcaagaguaaucugaagccuuuugagagagauauauccaccgaaaucuaccaggcgggaagcacacccuguaacgguguggagggcuucaauugcuacuuuccacuucagucuuauggguuccaaccuaccaacggaguaggcuaccagcccuauagggucgugguucugucauuugaauugcuccacgccccagcaacugugugcggucccaaaaagaguacgaaucuggucaaaaacaagugugugaauuucaacuuuaauggguuaacaggcaccggaguacugacugagagcaacaaaaaguuccuaccuuuccagcaguuuggccgggacauugcugauaccacagacgccgugcgagauccacaaacccucgagauccuggacauaacuccgugcuccuucgggggaguuucugucauuacacccgguacgaauaccucgaaccagguggcugugcuuuaccaggacgucaauuguacugaaguuccuguggccauccacgcagaucaguugacaccaaccuggcgcguguauagcacaggcuccaacguauuucaaacuagagccgggugccugaucggagcugagcaugucaacaauucauacgaaugugacauucccaucggcgcggguauuugcgcaaguuaucagacccagacgaacucuccuaggcgggcccgcagcguggcuucccagucaauaaucgccuacaccaugagccucggggcagaaaauucuguugccuacuccaacaauaguauugcuaucccaacaaacuucacuaucagcgugaccacagaaauucugcccgucucuaugacuaagaccuccguggauuguacgauguauauaugcggcgacucaacagaguguaguaaucuucuguugcaauacggcagcuuuugcacccagcucaacagagcccugacuggaaucgcaguugagcaggauaaaaauacacaggaaguguucgcgcaaguaaagcagauuuauaaaaccccgccuaucaaggacuuugggggauucaacuuuucgcagauuuuaccagaucccuccaaaccuucuaagaggagcuucaucgaggaccugcuauuuaauaaggucacucucgcugaugccgguuucauaaaacaauacggcgacugucugggggauaucgcagcccgugaccuuauuugcgcucagaaguucaacggauugaccgugcugcccccacuccugacagaugaaaugaucgcccaguauacgucagcauuacuggcuggcaccauuacgagugguuggacauuuggggccggcgcggcccuucagaucccuuucgcuaugcaaauggcauaccgguuuaauggaauaggcgugacccagaacgucuuguaugagaaucagaaacucauugccaaccaguucaacuccgcuaucgggaagauucaagacucucugagcuccacagccucagcacuaggaaaacugcaggacguugugaaucagaacgcgcaggcccucaauacucugguaaagcaacuuagcaguaacuuuggcgcuaucucuuccguguugaaugauauacugagccgauuagacaaggucgaagccgaggugcagaucgauagacucauuaccgguaggcugcagucgcuucaaacguacguuacacagcagcugauccgcgcagcugagauucgggccucagcaaacuuggccgcuaccaaaaugucugaaugcgugcucgggcagaguaagagagucgacuucuguggaaaaggcuaccaccugauguccuuuccccaaagcgcgccacauggugugguuuuccuacacgugacuuaugucccggcccaggagaagaauuuuaccacagcuccugcaaucugccacgauggcaaagcccauuuccccagggaagggguauuugugucuaacggaacucacugguucguuacccagcgcaauuuuuacgagccacagauaauuacaacggacaacaccuucgugagcggcaauugugaugucgugaucgggaucguaaacaauacuguguaugacccccugcaaccugagcucgauuccuucaaggaggaacuggacaaauacuuuaagaaccauacaucaccagaugucgaccuuggagauauuaguggcaucaaugccagcguugugaacauucagaaggaaauagaccgauugaaugagguggcuaaaaaccugaacgaaucuuuaaucgaccuccaggagcuggguaaguaugagcaguacauuaaauggcccugguauaucuggcuuggguucauugcaggacugaucgccauagucauggugaccaucaugcuaugcuguaugacuuccugcuguucaugccucaagggcuguugcaguugugguagcugcugcaaauuugaugaagacgauuccgagccuguucugaagggcguaaaguugcacuacacaugaggacuagucccuguucccagagcccacuuuuuuuucuuuuuuugaaauaaaauagccugucuuucagaucucaaaggcucuuuucagagccaccaaaaaaaaaaaaaaaaaaaaaaaaaaaaaaaaaaaaaaaaaaaaaaaaaaaaaaaaaaaaaaaaaaaaaaaaaaaaaaaaaaaaaaaaaaaaaaaaaaaaa

SEQ ID NO: 12491 - RNA, 4094 nt, Artificial Sequence
  SARS-CoV-2/England/200990660/2020__EPI_ISL_414523 spike protein mRNA human (1-1273)
aggagagucccgcagucggcguccagcggcucugcuuguucgugugugugucguugcaggccuuauucaagcuuaccauguucguguuucugguccuccuuccccugguuagcucccagugcgugaacuugaccacaagaacucaauuaccuccagccuacacuaauucuuucaccaggggcguauauuacccggacaagguguuucggucaaguguccugcacagcacacaggaucuauuccuccccuuuuucuccaacgugacuugguuucaugcuauccacguuucugggaccaauggaacaaaacgcuucgacaacccugugcugccauuuaaugauggugucuauuucgcaucgaccgagaagucaaacauuauacgaggcuggaucuuugggacuacacuugacagcaaaacccagagucuguugauugugaauaacgccacgaauguaguuaucaaggugugugaguuccaguuuugcaacgaucccuuccucggagucuacuaucauaaaaauaacaaguccuggauggagucugaguuccguguguacagcuccgcgaauaacuguacuuuugaguaugugucacaaccuuuccugauggaccuggaaggcaagcaggguaauuuuaaaaaccucagagaguucgucuuuaagaacauugauggguacuucaaaaucuacaguaagcacaccccaauaaauuuaguuagggaccugccccagggauuuagcgcucuugagccuuugguggaucugccaaucggcauuaacaucacacgguuccagacucuacucgcccugcaucgcucuuaucuuaccccgggcgacuccucaagcggguggacagcaggagccgcugcauacuauguagguuaccugcaacccagaaccuuuuugcucaaauauaaugaaaacggcacgauuacugaugccguggacugcgcucuggauccuuuaagugagacaaaguguacccugaagucuuucacugucgaaaaagggaucuaccagacauccaauuuuagggugcagccaaccgagagcauaguucgguuccccaacauuacgaaucucugcccuuuuggagagguguucaacgccacccgcuucgcgucggucuaugcauggaaucgaaagagaaucucuaacuguguggccgacuacuccguacuuuacaauucagcuaguuuuagcacauucaaaugcuauggcguuuccccaacuaagcugaacgacuuguguuuuaccaauguguacgccgauucuuucgucauuaggggugacgaagugcggcagaucgcacccgggcaaacaggaaaaaucgcugauuauaacuacaagcuaccggacgauuuuacuggcugcgucauugccuggaauagcaacaaccuggacucaaaagugggcgggaauuauaacuaccucuaucgucuguuccgcaagaguaaucuuaagccuuuugagagagauauauccaccgaaaucuaccaggcgggaagcacacccuguaacgguguugagggcuucaauugcuacuuuccacugcagucuuauggguuccaaccuaccaacggagugggcuaccagcccuauaggguagucguguugucauuugaacuccugcacgccccagcaacuguuugcggucccaaaaagaguacgaauuuagugaaaaacaagugugucaauuucaacuuuaaugggcugacaggcaccggagugcuaacugagagcaacaaaaaguuccucccuuuccagcaguuuggccgggacauugcugauaccacagacgccguacgagauccacaaacccuggagauccuugacauaacuccgugcuccuucgggggagugucuguuauuacacccgguacgaauaccucgaaccaggucgcuguguuguaccagggcgugaauuguacugaagucccuguugccauccacgcagaccagcugacaccaaccuggcgcguguauagcacaggguccaacguguuucaaacuagagccggaugccucaucggcgcugagcauguaaacaauucauacgaaugugauauucccaucggugcggggauuugcgcaaguuaucagacccagacgaacucuccuaggcgggcccgcagcgucgcuucccagucaauaaucgccuacaccaugagccugggcgcagaaaauucuguggccuacuccaacaauaguauugcuaucccaacaaacuucacuaucagcguuaccacagaaauucuucccgugucuaugacuaagaccuccgucgacuguacgauguauauaugcggagauucaacagaguguaguaaucuguugcuccaauacggcagcuuuugcacccagcugaacagagccuuaacugggaucgcaguggagcaggacaaaaauacacaggaaguuuucgcgcaagugaagcagauuuauaaaaccccgccuaucaaggauuuuggagguuucaacuuuucgcagauucugccagaccccuccaaaccuucuaagaggagcuucaucgaggaucuacucuuuaauaagguaacucuggcugacgccggcuucauaaaacaauacggggauugucuuggagacaucgcagcccgugauuugauuugcgcucagaaguucaacggccugaccguccugcccccacucuuaacagacgaaaugaucgcccaguauacgucagcacugcuugcugguaccauuacgaguggguggacauuuggcgccggagcggccuugcagaucccuuucgcuaugcaaauggcauaccgguuuaauggcauaggggugacccagaacgugcucuaugagaaucagaaacugauugccaaccaguucaacuccgcuaucggaaagauucaagauucucuaagcuccacagccucagcacugggcaaacuccaggacgucguuaaucagaacgcgcaggcccugaauacucuugugaagcaauugagcaguaacuuuggugcuaucucuuccguacugaaugacauauuaagccgacucgauaagguggaagccgagguccagaucgacagacugauuaccgggaggcuucagucgcugcaaacguacgugacacagcaguugauccgcgcagcugagauucgggccucagcaaaccucgccgcuaccaaaaugucugaaugcguucugggacagaguaagagaguggauuucuguggcaaagguuaccaccuaauguccuuuccccaaagcgcgccacauggcgucguguuccugcacguuacuuaugugccggcccaggagaagaauuuuaccacagcuccugcaaucugccacgacgggaaagcccauuuccccagggaaggagucuuuguaucuaacggcacucacugguucgugacccagcgcaauuuuuacgagccacagauaauuacaacggauaacaccuucguuagcgggaauugugacguggucaucggaaucgugaacaauacuguauaugauccccuccaaccugagcuggacuccuucaaggaagaacuugauaaauacuuuaagaaccauacaucaccagacguggauuugggcgacauuagugguaucaaugccagcgucguuaacauucagaaggaaauagaucgacugaaugagguggcuaaaaacuuaaacgaaucucucaucgaccugcaggagcuugggaaguaugagcaguacauuaaauggcccugguauaucuggcugggauucauugcaggccuaaucgccauagugauggucaccaucaugcucugcuguaugacuuccugcuguucaugccugaaggguuguugcaguuguggcagcugcugcaaauuugacgaagaugacuccgaguuggugcugaaggggguuaaguuacacuacacaugaggacuagucccuguucccagagcccacuuuuuuuucuuuuuuugaaauaaaauagccugucuuucagaucucaaaggcucuuuucagagccaccaaaaaaaaaaaaaaaaaaaaaaaaaaaaaaaaaaaaaaaaaaaaaaaaaaaaaaaaaaaaaaaaaaaaaaaaaaaaaaaaaaaaaaaaaaaaaaaaaaaaa

SEQ ID NO: 12492 - RNA, 4094 nt, Artificial Sequence
  SARS-CoV-2/Australia/NSW09/2020__EPI_ISL_413595 spike protein mRNA human (1-1273)
aggagagucccgcagucggcguccagcggcucugcuuguucgugugugugucguugcaggccuuauucaagcuuaccauguucguguuucugguccuccuuccccugguuagcucccagugcgugaacuugaccacaagaacucaauuaccuccagccuacacuaauucuuucaccaggggcguauauuacccggacaagguguuucggucaaguguccugcacagcacacaggaucuauuccuccccuuuuucuccaacgugacuugguuucaugcuauccacguuucugggaccaauggaacaaaacgcuucgacaacccugugcugccauuuaaugauggugucuauuucgcaucgaccgagaagucaaacauuauacgaggcuggaucuuugggacuacacuugacagcaaaacccagagucuguugauugugaauaacgccacgaauguaguuaucaaggugugugaguuccaguuuugcaacgaucccuuccucggagucuacuaucauaaaaauaacaaguccuggauggagucugaguuccguguguacagcuccgcgaauaacuguacuuuugaauaugugucacaaccuuuccugauggaccuggaaggcaagcaggguaauuuuaaaaaccucagagaguucgucuuuaagaacauugauggguacuucaaaaucuacaguaagcacaccccaauaaauuuaguuagggaccugccccagggauuuagcgcucuugagccuuugguggaucugccaaucggcauuaacaucacacgguuccagacucuacucgcccugcaucgcucuuaucuuaccccgggcgacuccucaagcggguggacagcaggagccgcugcauacuauguagguuaccugcaacccagaaccuuuuugcucaaauauaaugaaaacggcacgauuacugaugccguggacugcgcucuggauccuuuaagugagacaaaguguacccugaagucuuucacugucgaaaaagggaucuaccagacauccaauuuuagggugcagccaaccgagagcauaguucgguuccccaacauuacgaaucucugcccuuuuggagagguguucaacgccacccgcuucgcgucggucuaugcauggaaucgaaagagaaucucuaacuguguggccgacuacuccguacuuuacaauucagcuaguuuuagcacauucaaaugcuauggcguuuccccaacuaagcugaacgacuuguguuuuaccaauguguacgccgauucuuucgucauuaggggugacgaagugcggcagaucgcacccgggcaaacaggaaaaaucgcugauuauaacuacaagcuaccggacgauuuuacuggcugcgucauugccuggaauagcaacaaccuggacucaaaagugggcgggaauuauaacuaccucuaucgucuguuccgcaagaguaaucuuaagccuuuugagagagauauauccaccgaaaucuaccaggcgggaagcacacccuguaacgguguugagggcuucaauugcuacuuuccacugcagucuuauggguuccaaccuaccaacggagugggcuaccagcccuauaggguagucguguugucauuugaacuccugcacgccccagcaacuguuugcggucccaaaaagaguacgaauuuagugaaaaacaagugugucaauuucaacuuuaaugggcugacaggcaccggagugcuaacugagagcaacaaaaaguuccucccuuuccagcaguuuggccgggacauugcugauaccacagacgccguacgagauccacaaacccuggagauccuugacauaacuccgugcuccuucgggggagugucuguuauuacacccgguacgaauaccucgaaccaggucgcuguguuguaccaggacgugaauuguacugaagucccuguugccauccacgcagaucagcugacaccaaccuggcgcguguauagcacaggcuccaacguguuucaaacuagagccgggugccucaucggagcugagcauguaaacaauucauacgaaugugacauucccaucggcgcggguauuugcgcaaguuaucagacccagacgaacucuccuaggcgggcccgcagcgucgcuucccagucaauaaucgccuacaccaugagccugggggcagaaaauucuguggccuacuccaacaauaguauugcuaucccaacaaacuucacuaucagcguuaccacagaaauucuucccgugucuaugacuaagaccuccgucgauuguacgauguauauaugcggcgacucaacagaguguaguaaucuguugcuccaauacggcagcuuuugcacccagcugaacagagccuuaacuggaaucgcaguggagcaggauaaaaauacacaggaaguuuucgcgcaagugaagcagauuuauaaaaccccgccuaucaaggacuuugggggauucaacuuuucgcagauucugccagaucccuccaaaccuucuaagaggagcuucaucgaggaccuacucuuuaauaagguaacucuggcugaugccgguuucauaaaacaauacggcgacugucuuggggauaucgcagcccgugacuugauuugcgcucagaaguucaacggacugaccguccuacccccacuguuaacagaugaaaugaucgcccaguauacgucagcacugcuugcuggcaccauuacgagugguuggacauuuggggccggcgcggccuugcagaucccuuucgcuaugcaaauggcauaccgguuuaauggaauaggcgugacccagaacgugcucuaugagaaucagaaacugauugccaaccaguucaacuccgcuaucgggaagauucaagacucucucagcuuuacagccuccgcacugggaaaacuccaggacgucguuaaucagaacgcgcaggcccugaauacucuugugaagcaauugucaagcaacuucggcgcuaucaguucuguacugaaugauauauuaucccgacucgacaagguggaagccgagguccagaucgauagacugauuaccgguaggcuucagagccugcaaacguacgugacacagcaguugauccgcgcagcugagauucgggccucggcaaaccucgccgcuaccaaaaugucagaaugcguucuggggcagucuaagagaguggacuuuuguggaaaaggcuaccaccuaaugaguuucccccaauccgcgccacauggugucguguuucugcacguuacuuaugugccggcccaggagaagaauuucaccacagcuccugcaaucugccacgauggcaaagcccauuuucccagggaaggggucuucguaagcaacggaacucacugguuugugacccagcgcaauuucuacgagccacagauaauuacaacggacaacaccuucguuucuggcaauugugauguggucaucgggaucgugaacaauacuguauaugacccccuccaaccugagcuggauagcuuuaaggaggaacuugacaaauacuucaagaaccauacauccccagauguggacuugggagauauuucaggcaucaaugccagugucguuaacauucagaaggaaauagaccgacugaaugagguggcuaaaaacuuaaacgaaagccucaucgaccugcaggagcuugguaaguaugagcaguacauuaaauggcccugguauaucuggcugggguuuauugcaggacuaaucgccauagugauggucaccaucaugcucugcuguaugacuucuugcuguuccugccugaagggcuguugcucaugugguaguugcugcaaauucgaugaagacgauagcgagccuguguugaagggcguuaagcugcacuacacaugaggacuagucccuguucccagagcccacuuuuuuuucuuuuuuugaaauaaaauagccugucuuucagaucucaaaggcucuuuucagagccaccaaaaaaaaaaaaaaaaaaaaaaaaaaaaaaaaaaaaaaaaaaaaaaaaaaaaaaaaaaaaaaaaaaaaaaaaaaaaaaaaaaaaaaaaaaaaaaaaaaaaa

SEQ ID NO: 12493 - RNA, 4094 nt, Artificial Sequence
  SARS-CoV-2/Australia/NSW10/2020__EPI_ISL_413596 spike protein mRNA human (1-1273)
aggagagucccgcagucggcguccagcggcucugcuuguucgugugugugucguugcaggccuuauucaagcuuaccauguucguguuucugguccuccuuccccugguuagcucccagugcgugaacuugaccacaagaacucaauuaccuccagccuacacuaauucuuucaccaggggcguauauuacccggacaagguguuucggucaaguguccugcacagcacacaggaucuauuccuccccuuuuucuccaacgugacuugguuucaugcuauccacguuucugggaccaauggaacaaaacgcuucgacaacccugugcugccauuuaaugauggugucuauuucgcaucgaccgagaagucaaacauuauacgaggcuggaucuuugggacuacacuugacagcaaaacccagagucuguugauugugaauaacgccacgaauguaguuaucaaggugugugaguuccaguuuugcaacgaucccuuccucggagucuacuaucauaaaaauaacaaguccuggauggagucugaguuccguguguacagcuccgcgaauaacuguacuuuugaauaugugucacaaccuuuccugauggaccuggaaggcaagcaggguaauuuuaaaaaccucagagaguucgucuuuaagaacauugauggguacuucaaaaucuacaguaagcacaccccaauaaauuuaguuagggaccugccccagggauuuagcgcucuugagccuuugguggaucugccaaucggcauuaacaucacacgguuccagacucuacucgcccugcaucgcucuuaucuuaccccgggcgacuccucaagcggguggacagcaggagccgcugcauacuauguagguuaccugcaacccagaaccuuuuugcucaaauauaaugaaaacggcacgauuacugaugccguggacugcgcucuggauccuuuaagugagacaaaguguacccugaagucuuucacugucgaaaaagggaucuaccagacauccaauuuuagggugcagccaaccgagagcauaguucgguuccccaacauuacgaaucucugcccuuuuggagagguguucaacgccacccgcuucgcgucggucuaugcauggaaucgaaagagaaucucuaacuguguggccgacuacuccguacuuuacaauucagcuaguuuuagcacauucaaaugcuauggcguuuccccaacuaagcugaacgacuuguguuuuaccaauguguacgccgauucuuucgucauuaggggugacgaagugcggcagaucgcacccgggcaaacaggaaaaaucgcugauuauaacuacaagcuaccggacgauuuuacuggcugcgucauugccuggaauagcaacaaccuggacucaaaagugggcgggaauuauaacuaccucuaucgucuguuccgcaagaguaaucuuaagccuuuugagagagauauauccaccgaaaucuaccaggcgggaagcacacccuguaacgguguugagggcuucaauugcuacuuuccacugcagucuuauggguuccaaccuaccaacggagugggcuaccagcccuauaggguagucguguugucauuugaacuccugcacgccccagcaacuguuugcggucccaaaaagaguacgaauuuagugaaaaacaagugugucaauuucaacuuuaaugggcugacaggcaccggagugcuaacugagagcaacaaaaaguuccucccuuuccagcaguuuggccgggacauugcugauaccacagacgccguacgagauccacaaacccuggagauccuugacauaacuccgugcuccuucgggggagugucuguuauuacacccgguacgaauaccucgaaccaggucgcuguguuguaccaggacgugaauuguacugaagucccuguugccauccacgcagaucagcugacaccaaccuggcgcguguauagcacaggcuccaacguguuucaaacuagagccgggugccucaucggagcugagcauguaaacaauucauacgaaugugacauucccaucggcgcggguauuugcgcaaguuaucagacccagacgaacucuccuaggcgggcccgcagcgucgcuucccagucaauaaucgccuacaccaugagccugggggcagaaaauucuguggccuacuccaacaauaguauugcuaucccaacaaacuucacuaucagcguuaccacagaaauucuucccgugucuaugacuaagaccuccgucgauuguacgauguauauaugcggcgacucaacagaguguaguaaucuguugcuccaauacggcagcuuuugcacccagcugaacagagccuuaacuggaaucgcaguggagcaggauaaaaauacacaggaaguuuucgcgcaagugaagcagauuuauaaaaccccgccuaucaaggacuuugggggauucaacuuuucgcagauucugccagaucccuccaaaccuucuaagaggagcuucaucgaggaccuacucuuuaauaagguaacucuggcugaugccgguuucauaaaacaauacggcgacugucuuggggauaucgcagcccgugacuugauuugcgcucagaaguucaacggacugaccguccugcccccacucuuaacagaugaaaugaucgcccaguauacgucagcacugcuugcuggcaccauuacgagugguuggacauuuggggccggcgcggccuugcagaucccuuucgcuaugcaaauggcauaccgguuuaauggaauaggcgugacccagaacgugcucuaugagaaucagaaacugauugccaaccaguucaacuccgcuaucgggaagauucaagacucucuaagcuccacagccucagcacugggaaaacuccaggacgucguuaaucagaacgcgcaggcccugaauacucuugugaagcaauugagcaguaacuuuggcgcuaucucuuccguacugaaugauauauuaagccgacucgacaagguggaagccgagguccagaucgauagacugauuaccgguaggcuucagucgcugcaaacguacgugacacagcaguugauccgcgcagcugagauucgggccucagcaaaccucgccgcuaccaaaaugucugaaugcguucuggggcagaguaagagaguggacuucuguggaaaaggcuaccaccuaauguccuuuccccaaagcgcgccacauggugucguguuccugcacguuacuuaugugccggcccaggagaagaauuuuaccacagcuccugcaaucugccacgauggcaaagcccauuuccccagggaaggggucuuuguaucuaacggaacucacugguucgugacccagcgcaauuuuuacgagccacagauaauuacaacggacaacaccuucguuagcggcaauugugauguggucaucgggaucgugaacaauacuguauaugacccccuccaaccugagcuggauuccuucaaggaggaacuugacaaauacuuuaagaaccauacaucaccagauguggacuugggagauauuaguggcaucaaugccagcgucguuaacauucagaaggaaauagaccgacugaaugagguggcuaaaaacuuaaacgaaucucucaucgaccugcaggagcuugguaaguaugagcaguacauuaaauggcccugguauaucuggcugggguucauugcaggacuaaucgccauagugauggucaccaucaugcucugcuguaugacuuccugcuguucaugccugaagggcuguugcaguugugguagcugcuuuaaauucgaugaagacgauuccgagccuguguugaagggcguuaagcugcacuacacaugaggacuagucccuguucccagagcccacuuuuuuuucuuuuuuugaaauaaaauagccugucuuucagaucucaaaggcucuuuucagagccaccaaaaaaaaaaaaaaaaaaaaaaaaaaaaaaaaaaaaaaaaaaaaaaaaaaaaaaaaaaaaaaaaaaaaaaaaaaaaaaaaaaaaaaaaaaaaaaaaaaaaa

SEQ ID NO: 12494 - RNA, 4094 nt, Artificial Sequence
  SARS-CoV-2/Switzerland/1000477797/2020__EPI_ISL_413023 spike protein mRNA human (1-1273)
aggagagucccgcagucggcguccagcggcucugcuuguucgugugugugucguugcaggccuuauucaagcuuaccauguucguguuucugguccuccuuccccugguuagcucccagugcgugaacuugaccacaagaacucaauuaccuccagccuacacuaauucuuucaccaggggcguauauuacccggacaagguguuucggucaaguguccugcacagcacacaggaucuauuccuccccuuuuucuccaacgugacuugguuucaugcuauccacguuucugggaccaauggaacaaaacgcuucgacaacccugugcugccauuuaaugauggugucuauuucgcaucgaccgagaagucaaacauuauacgaggcuggaucuuugggacuacacuugacagcaaaacccagagucuguugauugugaauaacgccacgaauguaguuaucaaggugugugaguuccaguuuugcaacgaucccuuccucggagucuacuaucauaaaaauaacaaguccuggauggagucugaguuccguguguacagcuccgcgaauaacuguacuuuugaauaugugucacaaccuuuccugauggaccuggaaggcaagcaggguaauuuuaaaaaccucagagaguucgucuuuaagaacauugauggguacuucaauaucuacaguaaacacaccccaauaaacuuaguuagggaccugccccagggauuuagcgcucuugagccuuugguggaucugccaaucggcauuaauaucacacgguuccagacucuacucgcccugcaucgcucuuaucuuaccccgggcgacuccucaagcggguggacagcaggagccgcugcauacuauguagguuaccugcaacccagaaccuuuuugcucaaguauaacgaaaauggcacgauuacugaugccguggacugcgcucuggauccuuuaagugagacaaaauguacccugaagucuuucacugucgaaaaggggaucuaccagacauccaacuuuagggugcagccaaccgagagcauaguucgguuccccaauauuacgaaccucugcccuuuuggagagguguucaaugccacccgcuucgcgucggucuaugcauggaaccgaaaaagaaucucuaauuguguggccgacuacuccguacuuuacaacucagcuaguuuuagcacauucaagugcuauggcguuuccccaacuaaacugaaugacuuguguuuuaccaacguguacgccgauucuuucgucauuaggggugacgaagugcggcagaucgcacccgggcaaacaggaaagaucgcugauuauaauuacaaacuaccggacgauuuuacuggcugcgucauugccuggaacagcaacaaucuggacucaaaggugggcgggaacuauaauuaccucuaucgucuguuccgcaaaaguaaccuuaagccuuuugagagagauauauccaccgaaaucuaccaggcgggaagcacacccuguaaugguguugagggcuucaacugcuacuuuccacugcagucuuauggguuccaaccuaccaauggagugggcuaccagcccuauaggguagucguguugucauuugaacuccugcacgccccagcaacuguuugcggucccaagaaaaguacgaacuuagugaagaauaaaugugucaacuucaauuuuaacgggcugacaggcaccggagugcuaacugagagcaauaagaaauuccucccuuuccagcaguuuggccgggacauugcugauaccacagacgccguacgagauccacaaacccuggagauccuugacauaacuccgugcuccuucgggggagugucuguuauuacacccgguacgaacaccucgaaucaggucgcuguguuguaccagggcgugaacuguacugaagucccuguugccauccacgcagaccagcugacaccaaccuggcgcguguauagcacaggguccaacguguuucaaacuagagccggaugccucaucggcgcugagcauguaaauaacucauacgaaugugauauucccaucggugcggggauuugcgcaaguuaucagacccagaccaauucuccuaggcgggcccgcagcgucgcuucccagucaauaaucgccuacacgaugagccugggcgcagagaacucuguggccuacuccaauaacaguauugcuaucccaacaaauuucacuaucagcguuaccacagaaauucuucccgugucuaugacuaagaccuccgucgacuguacgauguauauaugcggagauucaacagaguguaguaaccuguugcuccaauacggcagcuuuugcacccagcugaauagagccuuaacugggaucgcaguggagcaggacaagaacacacaggaaguuuucgcgcaagugaaacagauuuauaagaccccgccuaucaaagauuuuggagguuucaauuuuucgcagauucugccagaccccuccaagccuucuaaaaggagcuucaucgaggaucuacucuuuaacaagguaacucuggcugacgccggcuucauaaagcaauacggggauugucuuggagacaucgcagcccgugauuugauuugcgcucagaaauucaauggccugaccguccugcccccacucuuaacagacgaaaugaucgcccaguauacgucagcacugcuugcugguaccauuacgaguggguggacauuuggcgccggagcggccuugcagaucccuuucgcuaugcaaauggcauaccgguuuaacggcauaggggugacccagaaugugcucuaugagaaccagaagcugauugccaaccaguucaauuccgcuaucggaaaaauucaagauucucuaagcuccacagccucagcacugggcaagcuccaggacgucguuaaccagaaugcgcaggcccugaacacucuugugaaacaauugagcaguaauuuuggugcuaucucuuccguacugaacgacauauuaagccgacucgauaagguggaagccgagguccagaucgacagacugauuaccgggaggcuucagucgcugcaaacguacgugacacagcaguugauccgcgcagcugagauucgggccucagcaaaucucgccgcuaccaagaugucugaaugcguucugggacagaguaaaagaguggauuucuguggcaaggguuaccaccuaauguccuuuccccaaagcgcgccacauggcgucguguuccugcacguuacuuaugugccggcccaggagaaaaacuuuaccacagcuccugcaaucugccacgacgggaaggcccauuuccccagggaaggagucuuuguaucuaauggcacucacugguucgugacccagcgcaacuuuuacgagccacagauaauuacaacggauaauaccuucguuagcgggaacugugacguggucaucggaaucgugaauaacacuguauaugauccccuccaaccugagcuggacuccuucaaagaagaacuugauaaguacuuuaaaaaucauacaucaccagacguggauuugggcgacauuagugguaucaacgccagcgucguuaauauucagaaggaaauagaucgacugaacgagguggcuaagaacuuaaaugaaucucucaucgaccugcaggagcuugggaaauaugagcaguacauuaaguggcccugguauaucuggcugggauucauugcaggccuaaucgccauagugauggucaccaucaugcucugcuguaugacuuccugcuguucaugccugaaagguuguugcaguuguggcagcugcugcaaguuugacgaagaugacuccgagccuguguugaaagggguuaagcugcacuacacaugaggacuagucccuguucccagagcccacuuuuuuuucuuuuuuugaaauaaaauagccugucuuucagaucucaaaggcucuuuucagagccaccaaaaaaaaaaaaaaaaaaaaaaaaaaaaaaaaaaaaaaaaaaaaaaaaaaaaaaaaaaaaaaaaaaaaaaaaaaaaaaaaaaaaaaaaaaaaaaaaaaaaa

SEQ ID NO: 12495 - RNA, 4094 nt, Artificial Sequence
  SARS-CoV-2/Belgium/BA-02291/2020__EPI_ISL_415159 spike protein mRNA human (1-1273)
aggagagucccgcagucggcguccagcggcucugcuuguucgugugugugucguugcaggccuuauucaagcuuaccauguucguguuucugguccuccuuccccugguuagcucccagugcgugaacuugaccacaagaacucaauuaccuccagccuacacuaauucuuucaccaggggcguauauuacccggacaagguguuucggucaaguguccugcacagcacacaggaucuauuccuccccuuuuucuccaacgugacuugguuucaugcuauccacguuucugggaccaauggaacaaaacgcuucgacaacccugugcugccauuuaaugauggugucuauuucgcaucgaccgagaagucaaacauuauacgaggcuggaucuuugggacuacacuugacagcaaaacccagagucuguugauugugaauaacgccacgaauguaguuaucaaggugugugaguuccaguuuugcaacgaucccuuccucggagucuacuaucauaaaaauaacaaguccuggauggagucugaguuccguguguacagcuccgcgaauaacuguacuuuugaguaugugucacaaccuuuccugauggaccuggaaggcaagcaggguaauuuuaaaaaccucagagaguucgucuuuaagaacauugauggguacuucaaaaucuacaguaagcacaccccaauaaauuuaguuagggaccugccccagggauuuagcgcucuugagccuuugguggaucugccaaucggcauuaacaucacacgguuccagacucuacucgcccugcaucgcucuuaucuuaccccgggcgacuccucaagcggguggacagcaggagccgcugcauacuauguagguuaccugcaacccagaaccuuuuugcucaaauauaaugaaaacggcacgauuacugaugccguggacugcgcucuggauccuuuaagugagacaaaguguacccugaagucuuucacugucgaaaaagggaucuaccagacauccaauuuuagggugcagccaaccgagagcauaguucgguuccccaacauuacgaaucucugcccuuuuggagagguguucaacgccacccgcuucgcgucggucuaugcauggaaucgaaagagaaucucuaacuguguggccgacuacuccguacuuuacaauucagcuaguuuuagcacauucaaaugcuauggcguuuccccaacuaagcugaacgacuuguguuuuaccaauguguacgccgauucuuucgucauuaggggugacgaagugcggcagaucgcacccgggcaaacaggaaaaaucgcugauuauaacuacaagcuaccggacgauuuuacuggcugcgucauugccuggaauagcaacaaccuggacucaaaagugggcgggaauuauaacuaccucuaucgucuguuccgcagaaguaaucuuaagccuuuugagagggauauauccaccgaaaucuaccaggcgggaagcacacccuguaacgguguugagggcuucaauugcuacuuuccacugcagucuuauggguuccaaccuaccaacggagugggcuaccagcccuaucggguagucguguugucauuugaacuccugccagcccccgcaacuguuugcgguccuaagaaaaguacgaauuuagugaagaacaaaugugucaauuucaacuuuaaugggcugacaggcaccggagugcuaacugagagcaacaagaaauuccucccauuccagcaguuuggccgagacauugcugauaccacagacgccguacgcgauccgcaaacccuggagauccuugacauaacucccugcuccuucgggggagugucuguuauuacaccugguacgaauaccucgaaccaggucgcuguguuguaccagggcgugaauuguacugaagucccaguugccauccacgcagaccagcugacacccaccuggagaguguauagcacaggguccaacguguuucaaacuagggccggaugccucaucggcgcugagcacguaaacaauucauacgaaugugauauuccuaucggugcggggauuugcgcaaguuaucagacccagacgaacucuccacggcgcgccagaagcgucgcuucccagucaauaaucgccuacaccaugagccugggcgcagaaaauucuguggccuacuccaacaauaguauugcuauccccacaaacuucacuaucagcguuaccacagaaauucuuccggugucuaugacuaagaccuccgucgacuguacgauguauauaugcggagauucaacagaguguaguaaucuguugcuccaauacggcagcuuuugcacccagcugaacagggccuuaacugggaucgcaguggagcaggacaagaauacacaggaaguuuucgcgcaagugaaacagauuuauaagaccccuccaaucaaagauuuuggagguuucaacuuuucgcagauucugcccgacccuuccaagcccucuaaacguagcuucaucgaggaucuacucuuuaauaagguaacucuggcugacgccggcuucauaaagcaauacggggauugucuuggagacaucgcagcccgggauuugauuugcgcucagaaauucaacggccugaccguccucccaccucuguuaacagacgaaaugaucgcccaguauacgucagcacugcuugcugguaccauuacgaguggguggacauuuggcgccggagcggccuugcagauccccuucgcuaugcaaauggcauaccgauuuaauggcauaggggugacccagaacgugcucuaugagaaucagaagcugauugccaaccaguucaacuccgcuaucggaaaaauucaagauucucuaagcuccgccgcaccagcgcugggcaagcuccaggacgucguuaaucagaacgcccaggcucugaauacacuugugaaacaauugucaagcaacuuuggugccaucaguucuguacugaaugacauauuauccagacucgauaagguggaagcagagguccagaucgacaggcugauuacugggcgccuucagagccugcaaaccuacgugacgcagcaguugauccgggcugccgagauuagagcaucggccaaccucgcugcgacaaagaugucagaaugcguucugggacagucuaaaaggguggauuucuguggcaaggguuaccaucuaaugaguuuuccgcaauccgccccucacggcgucguguuccugcauguuaccuaugugcccgcacaggagaaaaauuuuacuaccgcuccagccaucugccacgacgggaaggcccacuucccccgcgaaggagucuuuguaagcaacggcacacauugguucgugacucagcgaaauuuuuacgagccucagauaauuaccacagauaacacguucguuucugggaauugugacguggucaucggaaucgugaacaauaccguauaugauccacuccaacccgagcuggacagcuucaaagaagaacuugauaaguacuuuaaaaaccacacuuccccugacguggauuugggcgacauuucagguaucaaugcuagugucguuaacauucagaaggaaauagaucggcugaaugagguggcaaagaacuuaaacgaaagccucaucgaccugcaggagcuugggaaauaugagcaguacauuaaguggccgugguauaucuggcugggauucauugccggccuaaucgcgauagugauggucacaaucaugcucugcuguaugaccucuugcuguuccugccugaaagguuguugcucauguggcaguugcugcaaguuugacgaagaugacagcgagccaguguugaaagggguuaagcugcauuacacuugaggacuagucccuguucccagagcccacuuuuuuuucuuuuuuugaaauaaaauagccugucuuucagaucucaaaggcucuuuucagagccaccaaaaaaaaaaaaaaaaaaaaaaaaaaaaaaaaaaaaaaaaaaaaaaaaaaaaaaaaaaaaaaaaaaaaaaaaaaaaaaaaaaaaaaaaaaaaaaaaaaaaa

SEQ ID NO: 12496 - RNA, 4094 nt, Artificial Sequence
  SARS-CoV-2/USA/WA8-UW5/2020__EPI_ISL_413486 spike protein mRNA human (1-1273)
aggagagucccgcagucggcguccagcggcucugcuuguucgugugugugucguugcaggccuuauucaagcuuaccauguucguguuucugguccuccuuccccugguuagcucccagugcgugaacuugaccacaagaacucaauuaccuccagccuacacuaauucuuucaccaggggcguauauuacccggacaagguguuucggucaaguguccugcacagcacacaggaucuauuccuccccuuuuucuccaacgugacuugguuucaugcuauccacguuucugggaccaauggaacaaaacgcuucgacaacccugugcugccauuuaaugauggugucuauuucgcaucgaccgagaagucaaacauuauacgaggcuggaucuuugggacuacacuugacagcaaaacccagagucuguugauugugaauaacgccacgaauguaguuaucaaggugugugaguuccaguuuugcaacgaucccuuccucggagucuacuaucauaaaaauaacaaguccuggauggagucugaguuccguguguacagcuccgcgaauaacuguacuuuugaauaugugucacaaccuuuccugauggaccuggaaggcaagcaggguaauuuuaaaaaccucagagaguucgucuuuaagaacauugauggguacuucaaaaucuacaguaagcacaccccaauaaauuuaguuagggaccugccccagggauuuagcgcucuugagccuuugguggaucugccaaucggcauuaacaucacacgguuccagacucuacucgcccugcaucgcucuuaucuuaccccgggcgacuccucaagcggguggacagcaggagccgcugcauacuauguagguuaccugcaacccagaaccuuuuugcucaaauauaaugaaaacggcacgauuacugaugccguggacugcgcucuggauccuuuaagugagacaaaguguacccugaagucuuucacugucgaaaaagggaucuaccagacauccaauuuuagggugcagccaaccgagagcauaguucgguuccccaacauuacgaaucucugcccuuuuggagagguguucaacgccacccgcuucgcgucggucuaugcauggaaucgaaagagaaucucuaacuguguggccgacuacuccguacuuuacaauucagcuaguuuuagcacauucaaaugcuauggcguuuccccaacuaagcugaacgacuuguguuuuaccaauguguacgccgauucuuucgucauuaggggugacgaagugcggcagaucgcacccgggcaaacaggaaaaaucgcugauuauaacuacaagcuaccggacgauuuuacuggcugcgucauugccuggaauagcaacaaccuggacucaaaagugggcgggaauuauaacuaccucuaucgucuguuccgcaagaguaaucuuaagccuuuugagagagauauauccaccgaaaucuaccaggcgggaagcacacccuguaacgguguugagggcuucaauugcuacuuuccacugcagucuuauggguuccaaccuaccaacggagugggcuaccagcccuauaggguagucguguugucauuugaacuccugcacgccccagcaacuguuugcggucccaaaaagaguacgaauuuagugaaaaacaagugugucaauuucaacuuuaaugggcugacaggcaccggagugcuaacugagagcaacaaaaaguuccucccuuuccagcaguuuggccgggacauugcugauaccacagacgccguacgagauccacaaacccuggagauccuugacauaacuccgugcuccuucgggggagugucuguuauuacacccgguacgaauaccucgaaccaggucgcuguguuguaccaggacgugaauuguacugaagucccuguugccauccacgcagaucagcugacaccaaccuggcgcguguauagcacaggcuccaacguguuucaaacuagagccgggugccucaucggagcugaguacguaaacaauucauaugaaugugacauucccaucggcgcggguauuugcgcaaguuaccagacccagacgaacucuccuaggcgggcccgcagcgucgcuucccagucaauaaucgccuacaccaugagccugggggcagaaaauucuguggccuauuccaacaauaguauugcuaucccaacaaacuucacuaucagcguuaccacagaaauucuucccgugucuaugacuaagaccuccgucgauuguacgauguacauaugcggcgacucaacagaguguaguaaucuguugcuccaauauggcagcuuuugcacccagcugaacagagccuuaacuggaaucgcaguggagcaggauaaaaauacacaggaaguuuucgcgcaagugaagcagauuuacaaaaccccgccuaucaaggacuuugggggauucaacuuuucgcagauucugccagaucccuccaaaccuucuaagaggagcuucaucgaggaccuacucuuuaauaagguaacucuggcugaugccgguuucauaaaacaauauggcgacugucuuggggauaucgcagcccgugacuugauuugcgcucagaaguucaacggacugaccguccugcccccacucuuaacagaugaaaugaucgcccaguacacgucagcacugcuugcuggcaccauuacgagugguuggacauuuggggccggcgcggccuugcagaucccuuucgcuaugcaaauggcauaucgguuuaauggaauaggcgugacccagaacgugcucuacgagaaucagaaacugauugccaaccaguucaacuccgcuaucgggaagauucaagacucucuaagcuccacagccucagcacugggaaaacuccaggacgucguuaaucagaacgcgcaggcccugaauacucuugugaagcaauugagcaguaacuuuggcgcuaucucuuccguacugaaugauauauuaagccgacucgacaagguggaagccgagguccagaucgauagacugauuaccgguaggcuucagucgcugcaaacguacgugacacagcaguugauccgcgcagcugagauucgggccucagcaaaccucgccgcuaccaaaaugucugaaugcguucuggggcagaguaagagaguggacuucuguggaaaaggcuaucaucuaauguccuuuccccaaagcgcgccacacggugucguguuccugcauguuacuuacgugccggcccaggagaagaauuuuaccacagcuccugcaaucugccacgauggcaaagcccacuuccccagggaaggggucuuuguaucuaacggaacucauugguucgugacccagcgcaauuuuuaugagccacagauaauuacaacggacaacaccuucguuagcggcaauugugauguggucaucgggaucgugaacaauacuguauacgacccccuccaaccugagcuggauuccuucaaggaggaacuugacaaauauuuuaagaaccacacaucaccagauguggacuugggagauauuaguggcaucaaugccagcgucguuaacauucagaaggaaauagaccgacugaaugagguggcuaaaaacuuaaacgaaucucucaucgaccugcaggagcuugguaaguacgagcaguauauuaaauggcccugguacaucuggcugggguucauugcaggacuaaucgccauagugauggucaccaucaugcucugcuguaugacuuccugcuguucaugccugaagggcuguugcaguugugguagcugcugcaaauuugaugaagacgauuccgagccuguguugaagggcguuaagcugcauuacacaugaggacuagucccuguucccagagcccacuuuuuuuucuuuuuuugaaauaaaauagccugucuuucagaucucaaaggcucuuuucagagccaccaaaaaaaaaaaaaaaaaaaaaaaaaaaaaaaaaaaaaaaaaaaaaaaaaaaaaaaaaaaaaaaaaaaaaaaaaaaaaaaaaaaaaaaaaaaaaaaaaaaaa

SEQ ID NO: 12497 - RNA, 4094 nt, Artificial Sequence
  SARS-CoV-2/England/20102000506/2020__EPI_ISL_415147 spike protein mRNA human (1-1273)
aggagagucccgcagucggcguccagcggcucugcuuguucgugugugugucguugcaggccuuauucaagcuuaccauguucguguuucugguccuccuuccccugguuagcucccagugcgugaacuugaccacaagaacucaauuaccuccagccuacacuaauucuuucaccaggggcguauauuacccggacaagguguuucggucaaguguccugcacagcacacaggaucuauuccuccccuuuuucuccaacgugacuugguuucaugcuauccacguuucugggaccaauggaacaaaacgcuucgacaacccugugcugccauuuaaugauggugucuauuucgcaucgaccgagaagucaaacauuauacgaggcuggaucuuugggacuacacuugacagcaaaacccagagucuguugauugugaauaacgccacgaauguaguuaucaaggugugugaguuccaguuuugcaacgaucccuuccucggagucuacuaucauaaaaauaacaaguccuggauggagucugaguuccguguguacagcuccgcgaauaacuguacuuuugaguaugugucacaaccuuuccugauggaccuggaaggcaagcaggguaauuuuaaaaaccucagagaguucgucuuuaagaacauugauggguacuucaaaaucuacaguaagcacaccccaauaaauuuaguuagggaccugccccagggauuuagcgcucuugagccuuugguggaucugccaaucggcauuaacaucacacgguuccagacucuacucgcccugcaucgcucuuaucuuaccccgggcgacuccucaagcggguggacagcaggagccgcugcauacuauguagguuaccugcaacccagaaccuuuuugcucaaauauaaugaaaacggcacgauuacugaugccguggacugcgcucuggauccuuuaagugagacaaaguguacccugaagucuuucacugucgaaaaagggaucuaccagacauccaauuuuagggugcagccaaccgagagcauaguucgguuccccaacauuacgaaucucugcccuuuuggagagguguucaacgccacccgcuucgcgucggucuaugcauggaaucgaaagagaaucucuaacuguguggccgacuacuccguacuuuacaauucagcuaguuuuagcacauucaaaugcuauggcguuuccccaacuaagcugaacgacuuguguuuuaccaauguguacgccgauucuuucgucauuaggggugacgaagugcggcagaucgcacccgggcaaacaggaaaaaucgcugauuauaacuacaagcuaccggacgauuuuacuggcugcgucauugccuggaauagcaacaaccuggacucaaaagugggcgggaauuauaacuaccucuaucgucuguuccgcaagaguaaucuuaagccuuuugagagagauauauccaccgaaaucuaccaggcgggaagcacacccuguaacgguguugagggcuucaauugcuacuuuccacugcagucuuauggguuccaaccuaccaacggagugggcuaccagcccuauaggguagucguguugucauuugaacuccugcacgccccagcaacuguuugcggucccaaaaagaguacgaauuuagugaaaaacaagugugucaauuucaacuuuaaugggcugacaggcaccggagugcuaacugagagcaacaaaaaguuccucccuuuccagcaguuuggccgggacauugcugauaccacagacgccguacgagauccacaaacccuggagauccuugacauaacuccgugcuccuucgggggagugucuguuauuacacccgguacgaauaccucgaaccaggucgcuguguuguaccagggcgugaauuguacugaagucccuguugccauccacgcagaccagcugacaccaaccuggcgcguguauagcacaggguccaacguguuucaaacuagagccggaugccucaucggcgcugagcauguaaacaauucauacgaaugugauauucccaucggugcggggauuugcgcaaguuaucagacccagacgaacucuccuaggcgggcccgcagcgucgcuucccagucaauaaucgccuacaccaugagccugggcgcagaaaauucuguggccuacuccaacaauaguauugcuaucccaacaaacuucacuaucagcguuaccacagaaauucuucccgugucuaugacuaagaccuccgucgacuguacgauguauauaugcggagauucaacagaguguaguaaucuguugcuccaauacggcagcuuuugcacccagcugaacagagccuuaacugggaucgcaguggagcaggacaaaaauacacaggaaguuuucgcgcaagugaagcagauuuauaaaaccccgccuaucaaggauuuuggagguuucaacuuuucgcagauucugccagaccccuccaaaccuucuaagaggagcuucaucgaggaucuacucuuuaauaagguaacucuggcugacgccggcuucauaaaacaauacggguauugucuuggagauaucgcagcccgugacuugauuugcgcucagaaguucaacggccugaccguccugcccccacucuuaacagaugaaaugaucgcccaguacacgucagcacugcuugcugguaccauuacgaguggguggacauuuggcgccggagcggccuugcagaucccuuucgcuaugcaaauggcauaucgguuuaauggcauaggggugacccagaacgugcucuacgagaaucagaaacugauugccaaccaguucaacuccgcuaucggaaagauucaagacucucuaagcuccacagccucagcacugggcaaacuccaggaugucguuaaucagaacgcgcaggcccugaauacucuugugaagcaauugagcaguaacuuuggugcuaucucuuccguacugaaugacauauuaagccgacucgacaagguggaagccgagguccagaucgauagacugauuaccgggaggcuucagucgcugcaaacguacgugacacagcaguugauccgcgcagcugagauucgggccucagcaaaccucgccgcuaccaaaaugucugaaugcguucugggacagaguaagagaguggacuucuguggcaaagguuaucaccuaauguccuuuccccaaagcgcgccacauggcgucguguuccugcacguuacuuacgugccggcccaggagaagaauuuuaccacagcuccugcaaucugccacgaugggaaagcccauuuccccagggaaggagucuuuguaucuaacggcacucacugguucgugacccagcgcaauuuuuaugagccacagauaauuacaacggacaacaccuucguuagcgggaauugugauguggucaucggaaucgugaacaauacuguauacgacccccuccaaccugagcuggauuccuucaaggaagaacuugacaaauauuuuaagaaccauacaucaccagauguggacuugggcgauauuagugguaucaaugccagcgucguuaacauucagaaggaaauagaccgacugaaugagguggcuaaaaacuuaaacgaaucucucaucgaucugcaggagcuugggaaguacgagcaguauauuaaauggcccugguacaucuggcugggauucauugcaggccuaaucgccauagugauggucaccaucaugcucugcuguaugacuuccugcuguucaugccugaaggguuguugcaguuguggcagcugcugcaaauuugacgaagacgauuccgagccuguguugaaggggguuaagcugcacuacacaugaggacuagucccuguucccagagcccacuuuuuuuucuuuuuuugaaauaaaauagccugucuuucagaucucaaaggcucuuuucagagccaccaaaaaaaaaaaaaaaaaaaaaaaaaaaaaaaaaaaaaaaaaaaaaaaaaaaaaaaaaaaaaaaaaaaaaaaaaaaaaaaaaaaaaaaaaaaaaaaaaaaaa

SEQ ID NO: 12498 - RNA, 4094 nt, Artificial Sequence
  SARS-CoV-2/Belgium/VAG-03013/2020__EPI_ISL_415155 spike protein mRNA human (1-1273)
aggagagucccgcagucggcguccagcggcucugcuuguucgugugugugucguugcaggccuuauucaagcuuaccauguucguguuucugguccuccuuccccugguuagcucccagugcgugaacuugaccacaagaacucaauuaccuccagccuacacuaauucuuucaccaggggcguauauuacccggacaagguguuucggucaaguguccugcacagcacacaggaucuauuccuccccuuuuucuccaacgugacuugguuucaugcuauccacguuucugggaccaauggaacaaaacgcuucgacaacccugugcugccauuuaaugauggugucuauuucgcaucgaccgagaagucaaacauuauacgaggcuggaucuuugggacuacacuugacagcaaaacccagagucuguugauugugaauaacgccacgaauguaguuaucaaggugugugaguuccaguuuugcaacgaucccuuccucggagucuacuaucauaaaaauaacaaguccuggauggagucugaguuccguguguacagcuccgcgaauaacuguacuuuugaguaugugucacaaccuuuccugauggaccuggaaggcaagcaggguaauuuuaaaaaccucagagaguucgucuuuaagaacauugauggguacuucaaaaucuacaguaagcacaccccaauaaauuuaguuagggaccugccccagggauuuagcgcucuugagccuuugguggaucugccaaucggcauuaacaucacacgguuccagacucuacucgcccugcaucgcucuuaucuuaccccgggcgacuccucaagcggguggacagcaggagccgcugcauacuauguagguuaccugcaacccagaaccuuuuugcucaaauauaaugaaaacggcacgauuacugaugccguggacugcgcucuggauccuuuaagugagacaaaguguacccugaagucuuucacugucgaaaaagggaucuaccagacauccaauuuuagggugcagccaaccgagagcauaguucgguuccccaacauuacgaaucucugcccuuuuggagagguguucaacgccacccgcuucgcgucggucuaugcauggaaucgaaagagaaucucuaacuguguggccgacuacuccguacuuuacaauucagcuaguuuuagcacauucaaaugcuauggcguuuccccaacuaagcugaacgacuuguguuuuaccaauguguacgccgauucuuucgucauuaggggugacgaagugcggcagaucgcacccgggcaaacaggaaaaaucgcugauuauaacuacaagcuaccggacgauuuuacuggcugcgucauugccuggaauagcaacaaccuggacucaaaagugggcgggaauuauaacuaccucuaucgucuguuccgcaagaguaaucuuaagccuuuugagagagauauauccaccgaaaucuaccaggcgggaagcacacccuguaacgguguugagggcuucaauugcuacuuuccacugcagucuuauggguuccaaccuaccaacggagugggcuaccagcccuauaggguagucguguugucauuugaacuccugcacgccccagcaacuguuugcggucccaaaaagaguacgaauuuagugaaaaacaagugugucaauuucaacuuuaaugggcugacaggcaccggagugcuaacugagagcaacaaaaaguuccucccuuuccagcaguuuggccgggacauugcugauaccacagacgccguacgagauccacaaacccuggagauccuugacauaacuccgugcuccuucgggggagugucuguuauuacacccgguacgaauaccucgaaccaggucgcuguguuguaccagggcgugaauuguacugaagucccuguugccauccacgcagaccagcugacaccaaccuggcgcguguauagcacaggguccaacguguuucaaacuagagccggaugccucaucggcgcugagcauguaaacaauucauacgaaugugauauucccaucggugcggggauuugcgcaaguuaucagacccagacgaacucuccuaggcgggcccgcagcgucgcuucccagucaauaaucgccuacaccaugagccugggcgcagaaaauucuguggccuacuccaacaauaguauugcuaucccaacaaacuucacuaucagcguuaccacagaaauucuucccgugucuaugacuaagaccuccgucgacuguacgauguauauaugcggagauucaacagaguguaguaaucuguugcuccaauacggcagcuuuugcacccagcugaacagagccuuaacugggaucgcaguggagcaggacaaaaauacacaggaaguuuucgcgcaagugaagcagauuuauaaaaccccgccuaucaaggauuuuggagguuucaacuuuucgcagauucugccagaccccuccaaaccuucuaagaggagcuucaucgaggaucuacucuuuaauaagguaacucuggcugacgccggcuucauaaaacaauacggggauugucuuggagacaucgcagcccgugauuugauuugcgcucagaaguucaacggccugaccguccugcccccacucuuaacagacgaaaugaucgcccaguauacgucagcacugcuugcugguaccauuacgaguggguggacauuuggcgccggagcggccuugcagaucccuuucgcuaugcaaauggcauaccgguuuaauggcauaggggugacccagaacgugcucuaugagaaucagaaacugauugccaaccaguucaacuccgcuaucggaaagauucaagauucucuaagcuccacagccacugcacugggcaaacuccaggacgucguuaaucagaacgcgcaggcccugaauacccuugugaagcaauugucaagcaacuuuggugcuaucaguucuguacugaaugacauauuaucccgacucgauaagguggaagccgagguccagaucgacagacugauuacggggaggcuucagagccugcaaacauacgugacccagcaguugauccgcgcagcugagauucgggccucggcaaaccucgccgcuacuaaaaugucagaaugcguucugggacagucuaagagaguggauuucuguggcaaagguuaccaccuaaugaguuuuccccaauccgcgccacauggcgucguguuccugcacguuaccuaugugccggcccaggagaagaauuuuacaacugcuccugcaaucugccacgacgggaaagcccauuuccccagggaaggagucuuuguaagcaacggcacccacugguucgugacacagcgcaauuuuuacgagccacagauaauuacgaccgauaacacuuucguuucugggaauugugacguggucaucggaaucgugaacaauacaguauaugauccccuccaaccugagcuggacagcuucaaggaagaacuugauaaauacuuuaagaaccauaccuccccagacguggauuugggcgacauuucagguaucaaugccagugucguuaacauucagaaggaaauagaucgacugaaugagguggcuaaaaacuuaaacgaaagccucaucgaccugcaggagcuugggaaguaugagcaguacauuaaauggcccugguauaucuggcugggauucauugcaggccuaaucgccauagugauggucacuaucaugcucugcuguaugacaucuugcuguuccugccugaaggguuguugcucauguggcaguugcugcaaauuugacgaagaugacagcgagccuguguugaaggggguuaagcugcacuacaccugaggacuagucccuguucccagagcccacuuuuuuuucuuuuuuugaaauaaaauagccugucuuucagaucucaaaggcucuuuucagagccaccaaaaaaaaaaaaaaaaaaaaaaaaaaaaaaaaaaaaaaaaaaaaaaaaaaaaaaaaaaaaaaaaaaaaaaaaaaaaaaaaaaaaaaaaaaaaaaaaaaaaa

SEQ ID NO: 12499 - RNA, 4094 nt, Artificial Sequence
  SARS-CoV-2/Belgium/BC-03016/2020__EPI_ISL_415157 spike protein mRNA human (1-1273)
aggagagucccgcagucggcguccagcggcucugcuuguucgugugugugucguugcaggccuuauucaagcuuaccauguucguguuucugguccuccuuccccugguuagcucccagugcgugaacuugaccacaagaacucaauuaccuccagccuacacuaauucuuucaccaggggcguauauuacccggacaagguguuucggucaaguguccugcacagcacacaggaucuauuccuccccuuuuucuccaacgugacuugguuucaugcuauccacguuucugggaccaauggaacaaaacgcuucgacaacccugugcugccauuuaaugauggugucuauuucgcaucgaccgagaagucaaacauuauacgaggcuggaucuuugggacuacacuugacagcaaaacccagagucuguugauugugaauaacgccacgaauguaguuaucaaggugugugaguuccaguuuugcaacgaucccuuccucggagucuacuaucauaaaaauaacaaguccuggauggagucugaguuccguguguacagcuccgcgaauaacuguacuuuugaguaugugucacaaccuuuccugauggaccuggaaggcaagcaggguaauuuuaaaaaccucagagaguucgucuuuaagaacauugauggguacuucaaaaucuacaguaagcacaccccaauaaauuuaguuagggaccugccccagggauuuagcgcucuugagccuuugguggaucugccaaucggcauuaacaucacacgguuccagacucuacucgcccugcaucgcucuuaucuuaccccgggcgacuccucaagcggguggacagcaggagccgcugcauacuauguagguuaccugcaacccagaaccuuuuugcucaaauauaaugaaaacggcacgauuacugaugccguggacugcgcucuggauccuuuaagugagacaaaguguacccugaagucuuucacugucgaaaaagggaucuaccagacauccaauuuuagggugcagccaaccgagagcauaguucgguuccccaacauuacgaaucucugcccuuuuggagagguguucaacgccacccgcuucgcgucggucuaugcauggaaucgaaagagaaucucuaacuguguggccgacuacuccguacuuuacaauucagcuaguuuuagcacauucaaaugcuauggcguuuccccaacuaagcugaacgacuuguguuuuaccaauguguacgccgauucuuucgucauuaggggugacgaagugcggcagaucgcacccgggcaaacaggaaaaaucgcugauuauaacuacaagcuaccggacgauuuuacuggcugcgucauugccuggaauagcaacaaccuggacucaaaagugggcgggaauuauaacuaccucuaucgucuguuccgcaagaguaaucuuaagccuuuugagagagauauauccaccgaaaucuaccaggcgggaagcacacccuguaacgguguugagggcuucaauugcuacuuuccacugcagucuuauggguuccaaccuaccaacggagugggcuaccagcccuauaggguagucguguugucauuugaacuccugcacgccccagcaacuguuugcggucccaaaaagaguacgaauuuagugaaaaacaagugugucaauuucaacuuuaaugggcugacaggcaccggagugcuaacugagagcaacaaaaaguuccucccuuuccagcaguuuggccgggacauugcugauaccacagacgccguacgagauccacaaacccuggagauccuugacauaacuccgugcuccuucgggggagugucuguuauuacacccgguacgaauaccucgaaccaggucgcuguguuguaccagggcgugaauuguacugaagucccuguugccauccacgcagaccagcugacaccaaccuggcgcguguauagcacaggguccaacguguuucaaacuagagccggaugccucaucggcgcugagcauguaaacaauucauacgaaugugauauucccaucggugcggggauuugcgcaaguuaucagacccagacgaacucuccuaggcgggcccgcagcgucgcuucccagucaauaaucgccuacaccaugagccugggcgcagaaaauucuguggccuacuccaacaauaguauugcuaucccaacaaacuucacuaucagcguuaccacagaaauucuucccgugucuaugacuaagaccuccgucgacuguacgauguauauaugcggagauucaacagaguguaguaaucuguugcuccaauacggcagcuuuugcacccagcugaacagagccuuaacugggaucgcaguggagcaggacaaaaauacacaggaaguuuucgcgcaagugaagcagauuuauaaaaccccgccuaucaaggauuuuggagguuucaacuuuucgcagauucugccagaccccuccaaaccuucuaagaggagcuucaucgaggaucuacucuuuaauaagguaacucuggcugacgccggcuucauaaaacaauacggggauugucuuggagacaucgcagcccgugauuugauuugcgcucagaaguucaacggccugaccguccugcccccacucuuaacagacgaaaugaucgcccaguauacgucagcacugcuugcugguaccauuacgaguggguggacauuuggcgccggagcggccuugcagaucccuuucgcuaugcaaauggcauaccgguuuaauggcauaggggugacccagaacgugcucuaugagaaucagaaacugauugccaaccaguucaacuccgcuaucggaaagauucaagauucucuaagcuccacagcccccgcacugggcaaacuccaggacgucguuaaucagaacgcgcaggcccugaauacucuugugaagcaauugucaagcaacuuuggugcuaucaguucuguacugaaugacauauuaucccgacucgauaagguggaagccgagguccagaucgacagacugauuaccgggaggcuucagagccugcaaacguacgugacacagcaguugauccgcgcagcugagauucgggccucggcaaaccucgccgcuaccaaaaugucagaaugcguucugggacagucuaagagaguggauuucuguggcaaagguuaccaccuaaugaguuuuccacaauccgcgccgcauggcgucguguuccugcacguuacuuaugugccugcccaggagaagaauuuuaccacagcacccgcuaucugccacgacgggaaagcccauuucccaagggaaggagucuuuguaagcaacggcacucacugguucgugacccagcgcaauuuuuacgagccccagauaauuacaacggauaacaccuucguuucugggaauugugacguggucaucggaaucgugaacaauacuguauaugauccucuccaaccagagcuggacagcuucaaggaagaacuugauaaauacuuuaagaaccauacaucccccgacguggauuugggcgacauuucagguaucaaugccagugucguuaacauucagaaggaaauagaucgacugaaugagguggcuaaaaacuuaaacgaaagccucaucgaccugcaggagcuugggaaguaugagcaguacauuaaauggccuugguauaucuggcugggauucauugcaggccuaaucgccauagugauggucaccaucaugcucugcuguaugacuucuugcuguuccugccugaaggguuguugcucauguggcaguugcugcaaauuugacgaagaugacagcgagccgguguugaaggggguuaagcugcacuacacaugaggacuagucccuguucccagagcccacuuuuuuuucuuuuuuugaaauaaaauagccugucuuucagaucucaaaggcucuuuucagagccaccaaaaaaaaaaaaaaaaaaaaaaaaaaaaaaaaaaaaaaaaaaaaaaaaaaaaaaaaaaaaaaaaaaaaaaaaaaaaaaaaaaaaaaaaaaaaaaaaaaaaa

SEQ ID NO: 12500 - RNA, 4094 nt, Artificial Sequence
  SARS-CoV-2/Germany/BavPat3/2020__EPI_ISL_414521 spike protein mRNA human (1-1273)
aggagagucccgcagucggcguccagcggcucugcuuguucgugugugugucguugcaggccuuauucaagcuuaccauguucguguuucugguccuccuuccccugguuagcucccagugcgugaacuugaccacaagaacucaauuaccuccagccuacacuaauucuuucaccaggggcguauauuacccggacaagguguuucggucaaguguccugcacagcacacaggaucuauuccuccccuuuuucuccaacgugacuugguuucaugcuauccacguuucugggaccaauggaacaaaacgcuucgacaacccugugcugccauuuaaugauggugucuauuucgcaucgaccgagaagucaaacauuauacgaggcuggaucuuugggacuacacuugacagcaaaacccagagucuguugauugugaauaacgccacgaauguaguuaucaaggugugugaguuccaguuuugcaacgaucccuuccucggagucuacuaucauaaaaauaacaaguccuggauggagucugaguuccguguguacagcuccgcgaauaacuguacuuuugaauaugugucacaaccuuuccugauggaccuggaaggcaagcaggguaauuuuaaaaaccucagagaguucgucuuuaagaacauugauggguacuucaaaaucuacaguaagcacaccccaauaaauuuaguuagggaccugccccagggauuuagcgcucuugagccuuugguggaucugccaaucggcauuaacaucacacgguuccagacucuacucgcccugcaucgcucuuaucuuaccccgggcgacuccucaagcggguggacagcaggagccgcugcauacuauguagguuaccugcaacccagaaccuuuuugcucaaauauaaugaaaacggcacgauuacugaugccguggacugcgcucuggauccuuuaagugagacaaaguguacccugaagucuuucacugucgaaaaagggaucuaccagacauccaauuuuagggugcagccaaccgagagcauaguucgguuccccaacauuacgaaucucugcccuuuuggagagguguucaacgccacccgcuucgcgucggucuaugcauggaaucgaaagagaaucucuaacuguguggccgacuacuccguacuuuacaauucagcuaguuuuagcacauucaaaugcuauggcguuuccccaacuaagcugaacgacuuguguuuuaccaauguguacgccgauucuuucgucauuaggggugacgaagugcggcagaucgcacccgggcaaacaggaaaaaucgcugauuauaacuacaagcuaccggacgauuuuacuggcugcgucauugccuggaauagcaacaaccuggacucaaaagugggcgggaauuauaacuaccucuaucgucuguuccgcaagaguaaucuuaagccuuuugagagagauauauccaccgaaaucuaccaggcgggaagcacacccuguaacgguguugagggcuucaauugcuacuuuccacugcagucuuauggguuccaaccuaccaacggagugggcuaccagcccuauaggguagucguguugucauuugaacuccugcacgccccagcaacuguuugcggucccaaaaagaguacgaauuuagugaaaaacaagugugucaauuucaacuuuaaugggcugacaggcaccggagugcuaacugagagcaacaaaaaguuccucccuuuccagcaguuuggccgggacauugcugauaccacagacgccguacgagauccacaaacccuggagauccuugacauaacuccgugcuccuucgggggagugucuguuauuacacccgguacgaauaccucgaaccaggucgcuguguuguaccaggacgugaauuguacugaagucccuguugccauccacgcagaucagcugacaccaaccuggcgcguguauagcacaggcuccaacguguuucaaacuagagccgggugccucaucggagcugagcauguaaacaauucauacgaaugugacauucccaucggcgcggguauuugcgcaaguuaucagacccagacgaacucuccuaggcgggcccgcagcgucgcuucccagucaauaaucgccuacaccaugagccugggggcagaaaauucuguggccuacuccaacaauaguauugcuaucccaacaaacuucacuaucagcguuaccacagaaauucuucccgugucuaugacuaagaccuccgucgauuguacgauguauauaugcggcgacucaacagaguguaguaaucuguugcuccaauacggcagcuuuugcacccagcugaacagagccuuaacuggaaucgcaguggagcaggauaaaaauacacagcaaguuuucgcacaggugaagcagauuuauaaaaccccgccuaucaaggacuuugggggauucaacuuuucgcaaauucugccagaucccuccaaaccuucuaagaggagcuucaucgaagaccuacucuuuaauaagguaacucuggcugaugccgguuucauaaaacaguacggcgacugucuuggggauaucgcagcccgugacuugauuugcgcucagaaguucaacggacugaccguccugcccccacucuuaacagaugagaugaucgcccaguauacgucagcacugcuugcuggcaccauuacgagugguuggacauuuggggccggcgcggccuugcaaaucccuuucgcuaugcagauggcauaccgguuuaauggaauaggcgugacccagaacgugcucuaugaaaaucagaaacugauugccaaccaauucaacuccgcuaucgggaagauucaggacucucuaagcuccacagccucagcacugggaaaacuccaggacgucguuaaucagaacgcgcaagcccugaauacucuugugaagcaguugagcaguaacuuuggcgcuaucucuuccguacugaaugauauauuaagccgacucgacaagguggaggccgaaguccagaucgauagacugauuaccgguaggcuucaaucgcugcagacguacgugacacagcaguugauccgcgcagcugagauucgggccucagcaaaccucgccgcuaccaaaaugucugagugcguucuggggcaaaguaagagaguggacuucuguggaaaaggcuaccaccuaauguccuuuccccagagcgcgccacauggugucguguuccugcacguuacuuaugugccggcccaggaaaagaauuuuaccacagcgccugcuaucugccacgauggcaaagcccauuuccccagggagggggucuuuguaucuaacggaacucacugguucgugacccagcgcaauuuuuacgaaccacaaauaauuacaacggacaacaccuucguuagcggcaauugugauguggucaucgggaucgugaacaauacuguauaugacccccuccagccugagcuggauuccuucaaggaggaacuugacaaauacuuuaagaaccauacaucaccagauguggacuugggagauauuaguggcaucaaugccagcgucguuaacauucagaaggagauagaccgacugaaugaaguggcuaaaaacuuaaacgagucucucaucgaccugcaggaacuugguaaguaugagcaauacauuaaauggcccugguauaucuggcugggguucauugcaggacuaaucgccauagugauggucaccaucaugcucugcuguaugacuuccugcuguucaugccugaagggcuguugcaguugugguagcugcugcaaauuugaugaggacgauuccgaaccuguguugaagggcguuaagcugcacuacacaugaggacuagucccuguucccagagcccacuuuuuuuucuuuuuuugaaauaaaauagccugucuuucagaucucaaaggcucuuuucagagccaccaaaaaaaaaaaaaaaaaaaaaaaaaaaaaaaaaaaaaaaaaaaaaaaaaaaaaaaaaaaaaaaaaaaaaaaaaaaaaaaaaaaaaaaaaaaaaaaaaaaaa

SEQ ID NO: 12501 - RNA, 4094 nt, Artificial Sequence
  SARS-CoV-2/France/HF1805/2020__EPI_ISL_414628 spike protein mRNA human (1-1273)
aggagagucccgcagucggcguccagcggcucugcuuguucgugugugugucguugcaggccuuauucaagcuuaccauguucguguuucugguccuccuuccccugguuagcucccagugcgugaacuugaccacaagaacucaauuaccuccagccuacacuaauucuuucaccaggggcguauauuacccggacaagguguuucggucaaguguccugcacagcacacaggaucuauuccuccccuuuuucuccaacgugacuugguuucaugcuauccacguuucugggaccaauggaacaaaacgcuucgacaacccugugcugccauuuaaugauggugucuauuucgcaucgaccgagaagucaaacauuauacgaggcuggaucuuugggacuacacuugacagcaaaacccagagucuguugauugugaauaacgccacgaauguaguuaucaaggugugugaguuccaguuuugcaacgaucccuuccucggagucuacuaucauaaaaauaacaaguccuggauggagucugaguuccguguguacagcuccgcgaauaacuguacuuuugaguaugugucacaaccuuuccugauggaccuggaaggcaagcaggguaauuuuaaaaaccucagagaguucgucuuuaagaacauugauggguacuucaaaaucuacaguaagcacaccccaauaaauuuaguuagggaccugccccagggauuuagcgcucuugagccuuugguggaucugccaaucggcauuaacaucacacgguuccagacucuacucgcccugcaucgcucuuaucuuaccccgggcgacuccucaagcggguggacagcaggagccgcugcauacuauguagguuaccugcaacccagaaccuuuuugcucaaauauaaugaaaacggcacgauuacugaugccguggacugcgcucuggauccuuuaagugagacaaaguguacccugaagucuuucacugucgaaaaagggaucuaccagacauccaauuuuagggugcagccaaccgagagcauaguucgguuccccaacauuacgaaucucugcccuuuuggagagguguucaacgccacccgcuucgcgucggucuaugcauggaaucgaaagagaaucucuaacuguguggccgacuacuccguacuuuacaauucagcuaguuuuagcacauucaaaugcuauggcguuuccccaacuaagcugaacgacuuguguuuuaccaauguguacgccgauucuuucgucauuaggggugacgaagugcggcagaucgcacccgggcaaacaggaaaaaucgcugauuauaacuacaagcuaccggacgauuuuacuggcugcgucauugccuggaauagcaacaaccuggacucaaaagugggcgggaauuauaacuaccucuaucgucuguuccgcaagaguaaucuuaagccuuuugagagagauauauccaccgaaaucuaccaggcgggaagcacacccuguaacgguguugagggcuucaauugcuacuuuccacugcagucuuauggguuccaaccuaccaacggagugggcuaccagcccuauaggguagucguguugucauuugaacuccugcacgccccagcaacuguuugcggucccaaaaagaguacgaauuuagugaaaaacaagugugucaauuucaacuuuaaugggcugacaggcaccggagugcuaacugagagcaacaaaaaguuccucccuuuccagcaguuuggccgggacauugcugauaccacagacgccguacgagauccacaaacccuggagauccuugacauaacuccgugcuccuucgggggagugucuguuauuacacccgguacgaauaccucgaaccaggucgcuguguuguaccagggcgugaauuguacugaagucccuguugccauccacgcagaccagcugacaccaaccuggcgcguguauagcacaggguccaacguguuucaaacuagagccggaugccucaucggcgcugagcauguaaacaauucauacgaaugugauauucccaucggugcggggauuugcgcaaguuaucagacccagacgaacucuccuaggcgggcccgcagcgucgcuucccagucaauaaucgccuacaccaugagccugggcgcagaaaauucuguggccuacuccaacaauaguauugcuaucccaacaaacuucacuaucagcguuaccacagaaauucuucccgugucuaugacuaagaccuccgucgacuguacgauguauauaugcggagauucaacagaguguaguaaucuguugcuccaauacggcagcuuuugcacccagcugaacagagccuuaacugggaucgcaguggagcaggacaaaaauacacaggaaguuuucgcgcaagugaagcagauuuauaaaaccccgccuaucaaggauuuuggagguuucaacuuuucgcagauucugccagaccccuccaaaccuucuaagaggagcuucaucgaggaucuacucuuuaauaagguaacucuggcugacgccggcuucauaaaacaauacggggauugucuuggagacaucgcagcccgugauuugauuugcgcucagaaguucaacggccugaccguccugcccccacucuuaacagacgaaaugaucgcccaguauacgucagcacugcuugcugguaccauuacgaguggguggacauuuggcgccggagcggccuugcagaucccuuucgcuaugcaaauggcauaccgguuuaauggcauaggggugacccagaacgugcucuaugagaaucagaaacugauugccaaccaguucaacuccgcuaucggaaagauucaagauucucuaagcuccacagccucagcacugggcaaacuccaggacgucguuaaucagaacgcgcaggcccugaauacucuugugaagcaauugagcaguaacuuuggugcuaucucuuccguacugaaugacauauuaagccgacucgauaagguggaagccgagguccagaucgacagacugauuaccgggaggcuucagucgcugcaaacguacgugacacagcaguugauccgcgcagcugagauucgggccucagcaaaccucgccgcuaccaaaaugucugaaugcguucugggacagaguaagagaguggauuucuguggcaaagguuaccaccuaauguccuuuccccaaagcgcgccacauggcgucguguuccugcacguuacuuaugugccggcccaggagaagaauuuuaccacagcuccugcaaucugccacgacgggaaagcccauuuccccagggaaggagucuuuguaucuaacggcacucacugguucgugacccagcgcaauuuuuacgagccacagauaauuacaacggauaacaccuucguuagcgggaauugugacguggucaucggagugguaaacaauacuguguaugauccccuccaaccugagcuggacuccuucaaggaagaacuugauaaauacuuuaagaaccauacaucaccagacgucgauuugggcgacaucagugguauuaaugccagcguugugaacauccagaaggaaauugaucgacugaaugagguggcuaaaaacuuaaacgaaucucucauagaccugcaggagcuugggaaguaugagcaguacaucaaauggcccugguauauuuggcugggauucaucgcaggccuaauugccaucgucauggugaccauaaugcucugcuguaugacuuccugcuguucaugccugaaggguuguugcaguuguggcagcugcugcaaauuugacgaagaugacuccgagccuguuuugaaggggguaaagcugcacuacacaugaggacuagucccuguucccagagcccacuuuuuuuucuuuuuuugaaauaaaauagccugucuuucagaucucaaaggcucuuuucagagccaccaaaaaaaaaaaaaaaaaaaaaaaaaaaaaaaaaaaaaaaaaaaaaaaaaaaaaaaaaaaaaaaaaaaaaaaaaaaaaaaaaaaaaaaaaaaaaaaaaaaaa

SEQ ID NO: 12502 - RNA, 4094 nt, Artificial Sequence
  SARS-CoV-2/Netherlands/ZuidHolland_9/2020__EPI_ISL_414445 spike protein mRNA human (1-1273)
aggagagucccgcagucggcguccagcggcucugcuuguucgugugugugucguugcaggccuuauucaagcuuaccauguucguguuucugguccuccuuccccugguuagcucccagugcgugaacuugaccacaagaacucaauuaccuccagccuacacuaauucuuucaccaggggcguauauuacccggacaagguguuucggucaaguguccugcacagcacacaggaucuauuccuccccuuuuucuccaacgugacuugguuucaugcuauccacguuucugggaccaauggaacaaaacgcuucgacaacccugugcugccauuuaaugauggugucuauuucgcaucgaccgagaagucaaacauuauacgaggcuggaucuuugggacuacacuugacagcaaaacccagagucuguugauugugaauaacgccacgaauguaguuaucaaggugugugaguuccaguuuugcaacgaucccuuccucggagucuacuaucauaaaaauaacaaguccuggauggagucugaguuccguguguacagcuccgcgaauaacuguacuuuugaguaugugucacaaccuuuccugauggaccuggaaggcaagcaggguaauuuuaaaaaccucagagaguucgucuuuaagaacauugauggguacuucaaaaucuacaguaagcacaccccaauaaauuuaguuagggaccugccccagggauuuagcgcucuugagccuuugguggaucugccaaucggcauuaacaucacacgguuccagacucuacucgcccugcaucgcucuuaucuuaccccgggcgacuccucaagcggguggacagcaggagccgcugcauacuauguagguuaccugcaacccagaaccuuuuugcucaaauauaaugaaaacggcacgauuacugaugccguggacugcgcucuggauccuuuaagugagacaaaguguacccugaagucuuucacugucgaaaaagggaucuaccagacauccaauuuuagggugcagccaaccgagagcauaguucgguuccccaacauuacgaaucucugcccuuuuggagagguguucaacgccacccgcuucgcgucggucuaugcauggaaucgaaagagaaucucuaacuguguggccgacuacuccguacuuuacaauucagcuaguuuuagcacauucaaaugcuauggcguuuccccaacuaagcugaacgacuuguguuuuaccaauguguacgccgauucuuucgucauuaggggugacgaagugcggcagaucgcacccgggcaaacaggaaaaaucgcugauuauaacuacaagcuaccggacgauuuuacuggcugcgucauugccuggaauagcaacaaccuggacucaaaagugggcgggaauuauaacuaccucuaucgucuguuccgcaagaguaaucuuaagccuuuugagagagauauauccaccgaaaucuaccaggcgggaagcacacccuguaacgguguugagggcuucaauugcuacuuuccacugcagucuuauggguuccaaccuaccaacggagugggcuaccagcccuauaggguagucguguugucauuugaacuccugcacgccccagcaacuguuugcggucccaaaaagaguacgaauuuagugaaaaacaagugugucaauuucaacuuuaaugggcugacaggcaccggagugcuaacugagagcaacaaaaaguuccucccuuuccagcaguuuggccgggacauugcugauaccacagacgccguacgagauccacaaacccuggagauccuugacauaacuccgugcuccuucgggggagugucuguuauuacacccgguacgaauaccucgaaccaggucgcuguguuguaccagggcgugaauuguacugaagucccuguugccauccacgcagaccagcugacaccaaccuggcgcguguauagcacaggguccaacguguuucaaacuagagccggaugccucaucggcgcugagcauguaaacaauucauacgaaugugauauucccaucggugcggggauuugcgcaaguuaucagacccagacgaacucuccuaggcgggcccgcagcgucgcuucccagucaauaaucgccuacaccaugagccugggcgcagaaaauucuguggccuacuccaacaauaguauugcuaucccaacaaacuucacuaucagcguuaccacagaaauucuucccgugucuaugacuaagaccuccgucgacuguacgauguauauaugcggagauucaacagaguguaguaaucuguugcuccaauacggcagcuuuugcacccagcugaacagagccuuaacugggaucgcaguggagcaggacaaaaauacacaggaaguuuucgcgcaagugaagcagauuuauaaaaccccgccuaucaaggauuuuggagguuucaacuuuucgcagauucugccagaccccuccaaaccuucuaagaggagcuucaucgaggaucuacucuuuaauaagguaacucuggcugacgccggcuucauaaaacaauacggggauugucuuggagacaucgcagcccgugauuugauuugcguccagaaguucaacggccugaccgugcugcccccacucuuaacagacgaaaugaucgcucaguauacgucagcccugcuugcagguaccauuacgaguggguggacauuuggcgcuggagccgcguugcagaucccuuucgccaugcaaauggcuuaccgguuuaauggcauaggggugacccagaacguccucuaugagaaucagaaacugauugcaaaccaguucaacuccgccaucggaaagauucaagauucucuaagcuccacagcuucagcccugggcaaacuccaggacguugugaaucagaacgcacaggcgcugaauacucuuguaaagcaauugagcaguaacuuuggugccaucucuuccgugcugaaugacauauuaagccgacucgauaaggucgaagcugaggugcagaucgacagacugauuaccgggaggcuucagucgcugcaaacguacguuacacagcaguugauccgcgccgcagagauucgggcuucagccaaccucgcagccaccaaaaugucugaaugcgugcugggacagaguaagagagucgauuucuguggcaaagguuaccaccuaauguccuuuccccaaagcgcuccacauggcgugguuuuccugcacgugacuuaugucccggcgcaggagaagaauuuuaccacagccccugcaaucugccacgacgggaaagcucauuuccccagggaaggaguauuugugucuaacggcacucacugguucguuacccagcgcaauuuuuacgagccacagauaauuacaacggauaacaccuucgugagcgggaauugugacgucgugaucggaaucguaaacaauacuguguaugauccccuccaaccugagcuggacuccuucaaggaagaacuugauaaauacuuuaagaaccauacaucaccagacgucgauuugggcgacauuagugguaucaaugccagcguugugaacauucagaaggaaauagaucgacugaaugagguggccaaaaacuuaaacgaaucucucaucgaccugcaggagcuugggaaguaugagcaguacauuaaauggcccugguauaucuggcugggauucauugcuggccuaaucgcaauagucauggugaccaucaugcucugcuguaugacuuccugcuguucaugccugaaggguuguugcaguuguggcagcugcugcaaauuugacgaagaugacuccgagccuguuuugaaggggguaaagcugcacuacacaugaggacuagucccuguucccagagcccacuuuuuuuucuuuuuuugaaauaaaauagccugucuuucagaucucaaaggcucuuuucagagccaccaaaaaaaaaaaaaaaaaaaaaaaaaaaaaaaaaaaaaaaaaaaaaaaaaaaaaaaaaaaaaaaaaaaaaaaaaaaaaaaaaaaaaaaaaaaaaaaaaaaaa

SEQ ID NO: 12503 - RNA, 4094 nt, Artificial Sequence
  SARS-CoV-2/Finland/FIN03032020A/2020__EPI_ISL_413602 spike protein mRNA human (1-1273)
aggagagucccgcagucggcguccagcggcucugcuuguucgugugugugucguugcaggccuuauucaagcuuaccauguucguguuucugguccuccuuccccugguuagcucccagugcgugaacuugaccacaagaacucaauuaccuccagccuacaccaauucuuucacgaggggcguauauuacccggacaagguguuucggucaaguguccugcacagcacacaggaucuauuccuccccuuuuucuccaacgugacuugguuucaugcuauccacguuucugggaccaauggaacaaaacgcuucgacaacccugugcugccauuuaaugauggugucuauuucgcaucgaccgagaagucaaacauuauacgaggcuggaucuuugggacuacacuugacagcaaaacccagagucuguugauugugaauaacgccacgaauguaguuaucaaggugugugaguuccaguuuugcaacgaucccuuccucggagucuacuaucauaaaaauaacaaguccuggauggagucugaguuccguguguacagcuccgcgaauaacuguacuuuugaguaugugucacaaccuuuccugauggaccuggaaggcaagcaggguaauuuuaaaaaccucagagaguucgucuuuaagaacauugauggguacuucaaaaucuacaguaagcacaccccaauaaauuuaguuagggaccugccccagggauuuagcgcucuugagccuuugguggaucugccaaucggcauuaacaucacacgguuccagacucuacucgcccugcaucgcucuuaucuuaccccgggcgacuccucaagcggguggacagcaggagccgcugcauacuauguagguuaccugcaacccagaaccuuuuugcucaaauauaaugaaaacggcacgauuacugaugccguggacugcgcucuggauccuuuaagugagacaaaguguacccugaagucuuucacugucgaaaaagggaucuaccagacauccaauuuuagggugcagccaaccgagagcauaguucgguuccccaacauuacgaaucucugcccuuuuggagagguguucaacgccacccgcuucgcgucggucuaugcauggaaucgaaagagaaucucuaacuguguggccgacuacuccguacuuuacaauucagcuaguuuuagcacauucaaaugcuauggcguuuccccaacuaagcugaacgacuuguguuuuaccaauguguacgccgauucuuucgucauuaggggugacgaagugcggcagaucgcacccgggcaaacaggaaaaaucgcugauuauaacuacaagcuaccggacgauuuuacuggcugcgucauuagcuggaacucaaauaaccuggacaguaaagugggcgggaauuauaacuaccucuaucgucuguuccgcaaguccaaucuuaagccuuuugagagagauauaagcaccgaaaucuaccaggccggaucuacacccuguaacgguguugagggcuucaauugcuacuuuccacugcagucauauggguuccaaccuaccaacggagugggcuaccagcccuauaggguagucguguugaguuuugaacuccugcacgcgccagccacuguuugcggucccaaaaagagcacgaauuuagugaaaaacaagugugucaauuucaacuuuaaugggcugacaggcaccggagugcuaacugaguccaacaaaaaguuccucccuuuccagcaguuuggccgggacauugcagauaccacagacgcuguacgagauccacaaacccuggagauccuugacauaacuccgugcucuuucgggggagugucgguuauuacacccgguacgaauaccagcaaccaggucgccguguuguaccagggcgugaauuguacugaagucccuguugcuauccacgccgaccagcugacaccaaccuggcgcguguauuccacagggucaaacguguuucaaacuagagcaggaugccucaucggcgccgagcauguaaacaauaguuacgaaugugauauucccaucggugcugggauuugcgcgucuuaucagacccagacgaacagcccuaggcgggcacgcuccgucgccucacagagcauaaucgcuuacaccaugucucugggcgccgaaaauuccguggcauacaguaacaauagcauugccaucccaacaaacuucacuaucucuguuaccacagaaauucuucccguguccaugacuaagaccucagucgacuguacgauguauauaugcggagauaguacagaguguagcaaucuguugcuccaauacggcucguuuugcacccagcugaacagagcuuuaacugggaucgccguggagcaggacaaaaauacacaggaaguuuucgcacaagugaagcagauuuauaaaaccccgccuaucaaggauuuuggagguuucaacuuuucccagauucugccagaccccucuaaaccuagcaagaggucauucaucgaggaucuacucuuuaauaagguaacucuggcggacgcuggcuucauaaaacaauacggggauugucuuggagacaucgccgcacgugauuugauuugcgcccagaaguucaacggccugaccguccugcccccacucuuaacagacgaaaugaucgcucaguauacgagugcccugcuugcagguaccauuacuuccggguggacauuuggcgcuggagccgcguugcagaucccuuucgccaugcaaauggcuuaccgguuuaauggcauaggggugacccagaacgugcucuaugagaaucagaaacugauugcaaaccaguucaacucugccaucggaaagauucaagauagccuauccucaacagcuagcgcccugggcaaacuccaggacgucguuaaucagaacgcacaggcgcugaauacucuugugaagcaauugaguucuaacuuuggugccaucuccagcguacugaaugacauauuaucgcgacucgauaagguggaagcugagguccagaucgacagacugauuaccgggaggcuucagucacugcaaacguacgugacacagcaguugauccgcgccgcagagauucgggcuucugccaaccucgcagccaccaaaaugagugaaugcguucugggacaguccaagagaguggauuucuguggcaaagguuaccaccuaaugagcuuuccccaaucugcuccacauggcgucguguuccugcacguuacuuaugugccggcgcaggagaagaauuuuaccacagccccugcaaucugccacgacgggaaagcucauuuccccagggaaggagucuuuguaagcaacggcacucacugguucgugacccagcgcaauuuuuacgagccacagauaauuacaacggauaacaccuucguuuccgggaauugugacguggucaucggaaucgugaacaauacuguauaugauccccuccaaccugagcuggacucauucaaggaagaacuugauaaauacuuuaagaaccauacaaguccagacguggauuugggcgacauuagcgguaucaaugccucugucguuaacauucagaaggaaauagaucgacugaaugagguggccaaaaacuuaaacgaaucccucaucgaccugcaggagcuugggaaguaugagcaguacauuaaauggcccugguauaucuggcugggauucauugcuggccuaaucgcaauagugauggucaccaucaugcucugcuguaugacuucaugcuguaguugccugaaggguuguugcagcuguggcuccugcugcaaauuugacgaagaugacucugagccuguguugaaggggguuaagcugcacuacacaugaggacuagucccuguucccagagcccacuuuuuuuucuuuuuuugaaauaaaauagccugucuuucagaucucaaaggcucuuuucagagccaccaaaaaaaaaaaaaaaaaaaaaaaaaaaaaaaaaaaaaaaaaaaaaaaaaaaaaaaaaaaaaaaaaaaaaaaaaaaaaaaaaaaaaaaaaaaaaaaaaaaaa

SEQ ID NO: 12504 - RNA, 4094 nt, Artificial Sequence
  SARS-CoV-2/France/GE1977/2020__EPI_ISL_414632 spike protein mRNA human (1-1273)
aggagagucccgcagucggcguccagcggcucugcuuguucgugugugugucguugcaggccuuauucaagcuuaccauguucguguuucugguccuccuuccccugguuagcucccagugcgugaacuugaccacaagaacucaauuaccuccagccuacacuaauucuuucaccaggggcguauauuacccggacaagguguuucggucaaguguccugcacagcacacaggaucuauuccuccccuuuuucuccaacgugacuugguuucaugcuauccacguuucugggaccaauggaacaaaacgcuucgacaacccugugcugccauuuaaugauggugucuauuucgcaucgaccgagaagucaaacauuauacgaggcuggaucuuugggacuacacuugacagcaaaacccagagucuguugauugugaauaacgccacgaauguaguuaucaaggugugugaguuccaguuuugcaacgaucccuuccucggagucuacuaucauaaaaauaacaaguccuggauggagucugaguuccguguguacagcuccgcgaauaacuguacuuuugaguaugugucacaaccuuuccugauggaccuggaaggcaagcaggguaauuuuaaaaaccucagagaguucgucuuuaagaacauugauggguacuucaaaaucuacaguaagcacaccccaauaaauuuaguuagggaccugccccagggauuuagcgcucuugagccuuugguggaucugccaaucggcauuaacaucacacgguuccagacucuacucgcccugcaucgcucuuaucuuaccccgggcgacuccucaagcggguggacagcaggagccgcugcauacuauguagguuaccugcaacccagaaccuuuuugcucaaauauaaugaaaacggcacgauuacugaugccguggacugcgcucuggauccuuuaagugagacaaaguguacccugaagucuuucacugucgaaaaagggaucuaccagacauccaauuuuagggugcagccaaccgagagcauaguucgguuccccaacauuacgaaucucugcccuuuuggagagguguucaacgccacccgcuucgcgucggucuaugcauggaaucgaaagagaaucucuaacuguguggccgacuacuccguacuuuacaauucagcuaguuuuagcacauucaaaugcuauggcguuuccccaacuaagcugaacgacuuguguuuuaccaauguguacgccgauucuuucgucauuaggggugacgaagugcggcagaucgcacccgggcaaacaggaaaaaucgcugauuauaacuacaagcuaccggacgauuuuacuggcugcgucauugccuggaauagcaacaaccuggacucaaaagugggcgggaauuauaacuaccucuaucgucuguuccgcaagaguaaucuuaagccuuuugagagagauauauccaccgaaaucuaccaggcgggaagcacacccuguaacgguguugagggcuucaauugcuacuuuccacugcagucuuauggguuccaaccuaccaacggagugggcuaccagcccuauaggguagucguguugucauuugaacuccugcacgccccagcaacuguuugcggucccaaaaagaguacgaauuuagugaaaaacaagugugucaauuucaacuuuaaugggcugacaggcaccggagugcuaacugagagcaacaaaaaguuccucccuuuccagcaguuuggccgggacauugcugauaccacagacgccguacgagauccacaaacccuggagauccuugacauaacuccgugcuccuucgggggagugucuguuauuacacccgguacgaauaccucgaaccaggucgcuguguuguaccagggcgugaauuguacugaagucccuguugccauccacgcagaccagcugacaccaaccuggcgcguguauagcacaggguccaacguguuucaaacuagagccggaugccucaucggcgcugagcauguaaacaauucauacgaaugugauauucccaucggugcggggauuugcgcaaguuaucagacccagacgaacucuccuaggcgggcccgcagcgucgcuucccagucaauaaucgccuacaccaugagccugggcgcagaaaauucuguggccuacuccaacaauaguauugcuaucccaacaaacuucacuaucagcguuaccacagaaauucuucccgugucuaugacuaagaccuccgucgacuguacgauguauauaugcggagauucaacagaguguaguaaucuguugcuccaauacggcagcuuuugcacccagcugaacagagccuuaacugggaucgcaguggagcaggacaaaaauacacaggaaguuuucgcgcaagugaagcagauuuauaaaaccccgccuaucaaggauuuuggagguuucaacuuuucgcagauucugccagaccccuccaaaccuucuaagaggagcuucaucgaggaucuacucuuuaauaagguaacucuggcugacgccggcuucauaaaacaauacggggauugucuuggagacaucgcagcccgugauuugauuugcgcucagaaguucaacggccugaccguccugcccccacucuuaacagacgaaaugaucgcccaguauacgucagcacugcuugcugguaccauuacgaguggguggacauuuggcgccggagcggccuugcagaucccuuucgcuaugcaaauggcauaccgguuuaauggcauaggggugacccagaacgugcucuaugagaaucagaaacugauugccaaccaguucaacuccgcuaucggaaagauucaagauucucuauuuagcacagccuccgcacugggcaaacuccaggacgucguuaaucagaacgcgcaggcccugaauacucuugugaagcaauugucaagcaacuucggugcuaucaguucuguacugaaugacauauuaucccgacucgauaagguggaagccgagguccagaucgacagacugauuaccgggaggcuucagagccugcaaacguacgugacacagcaguugauccgcgcagcugagauucgggccucggcaaaccucgccgcuaccaaaaugucagaaugcguucugggacagucuaagagaguggauuuuuguggcaaagguuaccaccuaaugaguuucccccaauccgcgccacauggcgucguguuucugcacguuacuuaugugccggcccaggagaagaauuucaccacagcuccugcaaucugccacgacgggaaagcccauuuucccagggaaggagucuucguaagcaacggcacucacugguuugugacccagcgcaauuucuacgagccacagauaauuacaacggauaacaccuucguuucugggaauugugacguggucaucggaaucgugaacaauacuguauaugauccccuccaaccugagcuggacagcuuuaaggaagaacuugauaaauacuucaagaaccauacauccccagacguggauuugggcgacauuucagguaucaaugccagugucguuaacauucagaaggaaauagaucgacugaaugagguggcuaaaaacuuaaacgaaagccucaucgaccugcaggagcuugggaaguaugagcaguacauuaaauggcccugguauaucuggcugggauuuauugcaggccuaaucgccauagugauggucaccaucaugcucugcuguaugacuucuugcuguuccugccugaaggguuguugcucauguggcaguugcugcaaauucgacgaagaugacagcgagccuguguugaaggggguuaagcugcacuacacaugaggacuagucccuguucccagagcccacuuuuuuuucuuuuuuugaaauaaaauagccugucuuucagaucucaaaggcucuuuucagagccaccaaaaaaaaaaaaaaaaaaaaaaaaaaaaaaaaaaaaaaaaaaaaaaaaaaaaaaaaaaaaaaaaaaaaaaaaaaaaaaaaaaaaaaaaaaaaaaaaaaaaa

SEQ ID NO: 12505 - RNA, 4094 nt, Artificial Sequence
  SARS-CoV-2/Finland/FIN-313/2020__EPI_ISL_414641 spike protein mRNA human (1-1273)
aggagagucccgcagucggcguccagcggcucugcuuguucgugugugugucguugcaggccuuauucaagcuuaccauguucguguuucugguccuccuuccccugguuagcucccagugcgugaacuugaccacaagaacucaauuaccuccagccuacacuaauucuuucaccaggggcguauauuacccggacaagguguuucggucaaguguccugcacagcacacaggaucuauuccuccccuuuuucuccaacgugacuugguuucaugcuauccacguuucugggaccaauggaacaaaacgcuucgacaacccugugcugccauuuaaugauggugucuauuucgcaucgaccgagaagucaaacauuauacgaggcuggaucuuugggacuacacuugacagcaaaacccagagucuguugauugugaauaacgccacgaauguaguuaucaaggugugugaguuccaguuuugcaacgaucccuuccucggagucuacuaucauaaaaauaacaaguccuggauggagucugaguuccguguguacagcuccgcgaauaacuguacuuuugaguaugugucacaaccuuuccugauggaccuggaaggcaagcaggguaauuuuaaaaaccucagagaguucgucuuuaagaacauugauggguacuucaaaaucuacaguaagcacaccccaauaaauuuaguuagggaccugccccagggauuuagcgcucuugagccuuugguggaucugccaaucggcauuaacaucacacgguucaaaacucuacucgcccugcaucgcucuuaucuuaccccgggcgacuccucaagcggguggacagcaggagccgcugcauacuauguagguuaccugcagcccagaaccuuuuugcucaaguauaaugaaaacggcacgauuacugaugccguggacugcgcucuggauccuuuaagugagacaaaguguacccugaaaucuuucacugucgaaaaggggaucuaccaaacauccaauuuuagggugcagccaaccgagagcauaguucgguuccccaacauuacgaaucucugcccuuuuggagagguguucaacgccacccgcuucgcgucggucuaugcauggaaucgaaaaagaaucucuaacuguguggccgacuacuccguacuuuacaauucagcuaguuuuagcacauucaagugcuauggcguuuccccaacuaaacugaacgacuuguguuuuaccaauguguacgccgauucuuucgucauuaggggugacgaagugcggcagaucgcacccgggcagacaggaaagaucgcugauuauaacuacaaacuaccggacgauuuuacuggcugcgucauugccuggaauagcaacaaccuggacucaaaggugggcgggaauuauaacuaccucuaucgucuguuccgcaagaguaaucuuaaaccuuuugagagagauauauccaccgaaaucuaccaagcgggaagcacacccuguaacgguguugagggcuucaauugcuacuuuccacugcagucuuauggguuccagccuaccaacggagugggcuaccaacccuauaggguagucguguugucauuugaacuccugcacgccccagcaacuguuugcggucccaagaaaaguacgaauuuagugaagaacaaaugugucaauuucaacuuuaaugggcugacaggcaccggagugcuaacugagagcaacaagaaguuccucccuuuccagcaguuuggccgggacauugcugauaccacagacgccguacgagauccacagacccuggagauccuugacauaacuccgugcuccuucgggggagugucuguuauuacacccgguacgaauaccucgaaccaagucgcuguguuguaccagggcgugaauuguacugaagucccuguugccauccacgcagaccagcugacaccaaccuggcgcguguauagcacaggguccaacguguuucagacuagagccggaugccucaucggcgcugagcauguaaacaauucauacgaaugugauauucccaucggugcggggauuugcgcaaguuaucaaacccagacgaacucuccuaggcgggcccgcagcgucgcuucccagucaauaaucgccuacaccaugagccugggcgcagaaaauucuguggccuacuccaacaauaguauugcuaucccaacaaacuucacuaucagcguuaccacagaaauucuucccgugucuaugacuaaaaccuccgucgacuguacgauguauauaugcggagauucaacagaguguaguaaucuguugcuccaguacggcagcuuuugcacccaacugaacagagccuuaacugggaucgcaguggagcaggacaagaauacacaggaaguuuucgcacaggugaaacaaauuuauaagaccccgccuaucaaagauuuuggagguuucaacuuuucgcagauucugccagaccccuccaagccuucuaagaggagcuucaucgaggaucuacucuuuaauaaaguaacucuggcugacgccggcuucauaaagcaguacggggauugucuuggagacaucgcagcccgugauuugauuugcgcucaaaaauucaacggccugaccguccugcccccacucuuaacagacgaaaugaucgcccaguauacgucagcacugcuugcugguaccauuacgaguggguggacauuuggcgccggagcggccuugcagaucccuuucgcuaugcagauggcauaccgguuuaauggcauaggggugacccaaaacgugcucuaugagaaucagaagcugauugccaaccaguucaacuccgcuaucggaaaaauucaggauucucuaagcuccacagccucagcacugggcaagcuccaagacgucguuaaucagaacgcgcaggcccugaauacucuugugaagcaguugagcaguaacuuuggugcuaucucuuccguacugaaugacauauuaagccgacucgauaaaguggaagccgagguccaaaucgacagacugauuaccgggaggcuucagucgcugcagacguacgugacacaacaguugauccgcgcagcugagauucgggccucagcaaaccucgccgcuaccaagaugucugaaugcguucugggacagaguaaaagaguggauuucuguggcaaggguuaccaccuaauguccuuuccccagagcgcgccacauggcgucguguuccugcacguuacuuaugugccggcccaagagaaaaauuuuaccacagcgccugcuaucugccacgacgggaaggcccauuuccccagggaaggagucuuuguaucuaacggcacucacugguucgugacccagcgcaauuuuuacgagccacagauaauuacaacggauaacaccuucguuagcgggaauugugacguggucaucggaaucgugaacaauacuguauaugauccccuccagccugagcuggacuccuucaaagaagaacuugauaaguacuuuaagaaccauacaucaccagacguggauuugggcgacauuagugguaucaaugccagcgucguuaacauucaaaaagaaauagaucgacugaaugagguggcuaagaacuuaaacgaaucucucaucgaccugcaggagcuugggaaauaugagcaguacauuaaguggcccugguauaucuggcugggauucauugcaggccuaaucgccauagugauggucaccaucaugcucugcuguaugacuuccugcuguucaugccugaaagguuguugcaguuguggcagcugcugcaaguuugacgaagaugacuccgagccuguguugaaggggguuaaacugcacuacacaugaggacuagucccuguucccagagcccacuuuuuuuucuuuuuuugaaauaaaauagccugucuuucagaucucaaaggcucuuuucagagccaccaaaaaaaaaaaaaaaaaaaaaaaaaaaaaaaaaaaaaaaaaaaaaaaaaaaaaaaaaaaaaaaaaaaaaaaaaaaaaaaaaaaaaaaaaaaaaaaaaaaaa

SEQ ID NO: 12506 - RNA, 4094 nt, Artificial Sequence
  SARS-CoV-2/Netherlands/ZuidHolland_2/2020__EPI_ISL_414556 spike protein mRNA human (1-1273)
aggagagucccgcagucggcguccagcggcucugcuuguucgugugugugucguugcaggccuuauucaagcuuaccauguucguguuucugguccuccuuccccugguuagcucccagugcgugaacuugaccacaagaacucaauuaccuccagccuacacuaauucuuucaccaggggcguauauuacccggacaagguguuucggucaaguguccugcacagcacacaggaucuauuccuccccuuuuucuccaacgugacuugguuucaugcuauccacguuucugggaccaauggaacaaaacgcuucgacaacccugugcugccauuuaaugauggugucuauuucgcaucgaccgagaagucaaacauuauacgaggcuggaucuuugggacuacacuugacagcaaaacccagagucuguugauugugaauaacgccacgaauguaguuaucaaggugugugaguuccaguuuugcaacgaucccuuccucggagucuacuaucauaaaaauaacaaguccuggauggagucugaguuccguguguacagcuccgcgaauaacuguacuuuugaauaugugucacaaccuuuccugauggaccuggaaggcaagcaggguaauuuuaaaaaccucagagaguucgucuuuaagaacauugauggguacuucaaaaucuacaguaagcacaccccaauaaauuuaguuagggaccugccccagggauuuagcgcucuugagccuuugguggaucugccaaucggcauuaacaucacacgguuccagacucuacucgcccugcaucgcucuuaucuuaccccgggcgacuccucaagcggguggacagcaggagccgcugcauacuauguagguuaccugcaacccagaaccuuuuugcucaaauauaaugaaaacggcacgauuacugaugccguggacugcgcucuggauccuuuaagugagacaaaguguacccugaagucuuucacugucgaaaaagggaucuaccagacauccaauuuuagggugcagccaaccgagagcauaguucgguuccccaacauuacgaaucucugcccuuuuggagagguguucaacgccacccgcuucgcgucggucuaugcauggaaucgaaagagaaucucuaacuguguggccgacuacuccguacuuuacaauucagcuaguuuuagcacauucaaaugcuauggcguuuccccaacuaagcugaacgacuuguguuuuaccaauguguacgccgauucuuucgucauuaggggugacgaagugcggcagaucgcacccgggcaaacaggaaaaaucgcugauuauaacuacaagcuaccggacgauuuuacuggcugcgucauugccuggaauagcaacaaccuggacucaaaagugggcgggaauuauaacuaccucuaucgucuguuccgcaagaguaaucuuaagccuuuugagagagauauauccaccgaaaucuaccaggcgggaagcacacccuguaacgguguugagggcuucaauugcuacuuuccacugcagucuuauggguuccaaccuaccaacggagugggcuaccagcccuauaggguagucguguugucauuugaacuccugcacgccccagcaacuguuugcggucccaaaaagaguacgaauuuagugaaaaacaagugugucaauuucaacuuuaaugggcugacaggcaccggagugcuaacugagagcaacaaaaaguuccucccuuuccagcaguuuggccgggacauugcugauaccacagacgccguacgagauccacaaacccuggagauccuugacauaacuccgugcuccuucgggggagugucuguuauuacacccgguacgaauaccucgaaccaggucgcuguguuguaccagggcgugaauuguacugaagucccuguugccauccacgcagaccagcugacaccaaccuggcgcguguauagcacaggguccaacguguuucaaacuagagccggaugccucaucggcgcugagcauguaaacaauucauacgaaugugauauucccaucggugcggggauuugcgcaaguuaucagacccagacgaacucuccuaggcgggcccgcagcgucgcuucccagucaauaaucgccuacaccaugagccugggcgcagaaaauucuguggccuacuccaacaauaguauugcuaucccaacaaacuucacuaucagcguuaccacagaaauucuucccgugucuaugacuaagaccuccgucgacuguacgauguauauaugcggagauucaacagaguguaguaaucuguugcuccaauacggcagcuuuugcacccagcugaacagagccuuaacugggaucgcacuggagcaggacaaaaauacacaggaaguguucgcgcaaguuaagcagauuuauaaaaccccgccuaucaaggauuuuggagguuucaacuuuucgcagauucuaccagaccccuccaaaccuucuaagaggagcuucaucgaggaucuccuguuuaauaaggugacucuugcugacgccggcuucauaaaacaauacggggauuguuugggagacaucgcagcccgugaucugauuugcgcucagaaguucaacggccucaccguacugcccccauuacugacagacgaaaugaucgcccaguauacgucagcacuuuuggcugguaccauuacgaguggguggacauuuggcgccggagcggcccuccagaucccuuucgcuaugcaaauggcauaccgguuuaauggcauaggggucacccagaacgugcuguaugagaaucagaaacuaauugccaaccaguucaacuccgcuaucggaaagauucaagauucucugagcuccacagccucagcacucggcaaacugcaggacguggucaaucagaacgcgcaggcccuuaauacuuugguuaagcaacugagcaguaacuuuggugcuaucucuuccguguuaaaugacauacucagccgacuggauaagguagaagccgaggugcagaucgacagacuuauuaccgggaggcugcagucguugcaaacguacgucacacagcagcucauccgcgcagcugagauucgggccucagcaaaccuggccgcuaccaaaaugucugaaugcgugcuaggacagaguaagagaguugauuucuguggcaaagguuaccaccugauguccuuuccccaaagcgcgccacauggcguggucuuccuccacgugacuuauguuccggcccaggagaagaauuuuaccacagcuccugcaaucugccacgacgggaaagcccauuuccccagggaaggaguguuugucucuaacggcacucacugguucguaacccagcgcaauuuuuacgagccacagauaauuacaacggauaacaccuucgugagcgggaauugugacguugugaucggaaucgucaacaauacuguguaugauccccugcaaccugagcuugacuccuucaaggaagaguuggauaaauacuuuaagaaccauacaucaccagacguagaucugggcgacauuagugguaucaaugccagcguggucaacauucagaaggaaauagaucgauuaaaugagguugcuaaaaaccucaacgaaucucugaucgaccuucaggagcuggggaaguaugagcaguacauuaaauggcccugguauaucuggcuaggauucauugcaggccucaucgccauagugauggugaccaucaugcugugcuguaugacuuccugcuguucaugcuugaaggguuguugcaguuguggcagcugcugcaaauuugacgaagaugacuccgagccuguccugaagggggugaaguuacacuacacaugaggacuagucccuguucccagagcccacuuuuuuuucuuuuuuugaaauaaaauagccugucuuucagaucucaaaggcucuuuucagagccaccaaaaaaaaaaaaaaaaaaaaaaaaaaaaaaaaaaaaaaaaaaaaaaaaaaaaaaaaaaaaaaaaaaaaaaaaaaaaaaaaaaaaaaaaaaaaaaaaaaaaa

SEQ ID NO: 12507 - RNA, 4094 nt, Artificial Sequence
  SARS-CoV-2/USA/WA-UW31/2020__EPI_ISL_414618 spike protein mRNA human (1-1273)
aggagagucccgcagucggcguccagcggcucugcuuguucgugugugugucguugcaggccuuauucaagcuuaccauguucguguuucugguccuccuuccccugguuagcucccagugcgugaacuugaccacaagaacucaauuaccuccagccuacacuaauucuuucaccaggggcguauauuacccggacaagguguuucggucaaguguccugcacagcacacaggaucuauuccuccccuuuuucuccaacgugacuugguuucaugcuauccacguuucugggaccaauggaacaaaacgcuucgacaacccugugcugccauuuaaugauggugucuauuucgcaucgaccgagaagucaaacauuauacgaggcuggaucuuugggacuacacuugacagcaaaacccagagucuguugauugugaauaacgccacgaauguaguuaucaaggugugugaguuccaguuuugcaacgaucccuuccucggagucuacuaucauaaaaauaacaaguccuggauggagucugaguuccguguguacagcuccgcgaauaacuguacuuuugaauaugugucacaaccuuuccugauggaccuggaaggcaagcaggguaauuuuaaaaaccucagagaguucgucuuuaagaacauugauggguacuucaaaaucuacaguaagcacaccccaauaaauuuaguuagggaccugccccagggauuuagcgcucuugagccuuugguggaucugccaaucggcauuaacaucacacgguuccagacucuacucgcccugcaucgcucuuaucuuaccccgggcgacuccucaagcggguggacagcaggagccgcugcauacuauguagguuaccugcaacccagaaccuuuuugcucaaauauaaugaaaacggcacgauuacugaugccguggacugcgcucuggauccuuuaagugagacaaaguguacccugaagucuuucacugucgaaaaagggaucuaccagacauccaauuuuagggugcagccaaccgagagcauaguucgguuccccaacauuacgaaucucugcccuuuuggagagguguucaacgccacccgcuucgcgucggucuaugcauggaaucgaaagagaaucucuaacuguguggccgacuacuccguacuuuacaauucagcuaguuuuagcacauucaaaugcuauggcguuuccccaacuaagcugaacgacuuguguuuuaccaauguguacgccgauucuuucgucauuaggggugacgaagugcggcagaucgcacccgggcaaacaggaaaaaucgcugauuauaacuacaagcuaccggacgauuuuacuggcugcgucauugccuggaauagcaacaaccuggacucaaaagugggcgggaauuauaacuaccucuaucgucuguuccgcaagaguaaucuuaagccuuuugagagagauauauccaccgaaaucuaccaggcgggaagcacacccuguaacggugccgagggcuucaauugcuacuuuccacugcagucuuauggguuccaaccuaccaacggaguuggcuaccagcccuauagggugguagucuugucauuugaacuccugcacgcaccagcuacugugugcggucccaaaaagaguacgaauuuaguuaaaaacaagugugugaauuucaacuuuaaugggcugacaggcaccggaguccuaacugagagcaacaaaaaguuccucccuuuccagcaguuuggccgggacauugccgauaccacagacgcugugcgagauccacaaacccuggagauccuugacauaacuccgugcuccuucgggggaguaucugugauuacacccgguacgaauaccucgaaccagguugccgucuuguaccaggacgugaauuguacugaagugccugucgcaauccacgccgaucagcugacaccaaccuggcgcguuuauagcacaggcuccaacguguuucaaacuagagcugggugccucaucggagcggagcaugugaacaauucauacgaaugugacauucccaucggcgcagguauuugcgccaguuaucagacccagacgaacucuccuaggcgggcucgcagcguagccucccagucaauaaucgcauacaccaugagccugggggccgaaaauucugucgcuuacuccaacaauaguauugccaucccaacaaacuucacuaucagcgugaccacagaaauucuucccguuucuaugacuaagaccuccguggauuguacgauguauauaugcggcgacucaacagaguguaguaaucuguugcuccaauacggcagcuuuugcacccagcugaacagagcauuaacuggaaucgcggucgagcaggauaaaaauacacaggaaguguucgcucaaguuaagcagauuuauaaaaccccgccuaucaaggacuuugggggauucaacuuuucgcagauucugccagaucccuccaaaccuucuaagaggagcuucaucgaggaccuacucuuuaauaaggugacucuggccgaugcagguuucauaaaacaauacggcgacugucuuggggauaucgccgcucgugacuugauuugcgcccagaaguucaacggacugaccguacugcccccacucuuaacagaugaaaugaucgcacaguauacgucagcucugcuugccggcaccauuacgagugguuggacauuuggggcgggcgccgcuuugcagaucccuuucgcaaugcaaauggccuaccgguuuaauggaauaggcgucacccagaacgugcucuaugagaaucagaaacugauugcuaaccaguucaacuccgccaucgggaagauucaagacucucuaagcuccacagcaucagcgcugggaaaacuccaggacguggucaaucagaacgcccaggcucugaauacucuuguuaagcaauugagcaguaacuuuggcgccaucucuuccgugcugaaugauauauuaagccgacucgacaagguagaagcagaggugcagaucgauagacugauuaccgguaggcuucagucgcugcaaacguacgucacacagcaguugauccgcgcugccgagauucgggcaucagccaaccucgcugcgaccaaaaugucugaaugcgugcuggggcagaguaagagaguugacuucuguggaaaaggcuaccaccuaauguccuuuccccaaagcgccccacaugguguggucuuccugcacgugacuuauguuccggcacaggagaagaauuuuaccacagcuccugccaucugccacgauggcaaagcccauuuccccagggaagggguguuugucucuaacggaacucacugguucguaacccagcgcaauuuuuacgagccacagauaauuacaacggacaacaccuucgugagcggcaauugugauguugugaucgggaucgucaacaauacuguguaugacccccuccaaccugagcuggauuccuucaaggaggaacuugacaaauacuuuaagaaccauacaucaccagauguagacuugggagauauuaguggcaucaaugcuagcguggucaacauucagaaggaaauagaccgacugaaugagguugccaaaaacuuaaacgaaucucucaucgaccugcaggagcuugguaaguaugagcaguacauuaaauggcccugguauaucuggcugggguucauugcaggacuaaucgcgauagugauggugaccaucaugcucugcuguaugacuuccugcuguucaugccugaagggcuguugcaguugugguagcugcugcaaauuugaugaagacgauuccgagccugucuugaagggcgugaagcugcacuacacaugaggacuagucccuguucccagagcccacuuuuuuuucuuuuuuugaaauaaaauagccugucuuucagaucucaaaggcucuuuucagagccaccaaaaaaaaaaaaaaaaaaaaaaaaaaaaaaaaaaaaaaaaaaaaaaaaaaaaaaaaaaaaaaaaaaaaaaaaaaaaaaaaaaaaaaaaaaaaaaaaaaaaa

SEQ ID NO: 12508 - RNA, 4094 nt, Artificial Sequence
  SARS-CoV-2/South Korea/SNU01/2020__EPI_ISL_411929 spike protein mRNA human (1-1273)
aggagagucccgcagucggcguccagcggcucugcuuguucgugugugugucguugcaggccuuauucaagcuuaccauguucguguuucugguccuccuuccccugguuagcucccagugcgugaacuugaccacaagaacucaauuaccuccagccuacaccaauucuuucacgaggggcguauauuacccggacaagguguuucggucaaguguccugcacagcacacaggaucuauuccuccccuuuuucuccaacgugacuugguuucaugcuauccacguuucugggaccaauggaacaaaacgcuucgacaacccugugcugccauuuaaugauggugucuauuucgcaucgaccgagaagucaaacauuauacgaggcuggaucuuugggacuacacuugacagcaaaacccagagucuguugauugugaauaacgccacgaauguaguuaucaaggugugugaguuccaguuuugcaacgaucccuuccucggagucuacuaucauaaaaauaacaaguccuggauggagucugaguuccguguguacagcuccgcgaauaacuguacuuuugaauaugugucacaaccuuuccugauggaccuggaaggcaagcaggguaauuuuaaaaaccucagagaguucgucuuuaagaacauugauggguacuucaaaaucuacaguaagcacaccccaauaaauuuaguuagggaccugccccagggauuuugggcucuugagccuuugguggaucugccaaucggcauuaacaucacacgguuccagacucuacucgcccugcaucgcagcuaucuuaccccgggcgacucuuccucaggguggacagcaggagccgcugcauacuauguagguuaccugcaacccagaaccuuuuugcucaaauauaaugaaaacggcacgauuacugaugccguggacugcgcucuggauccuuuaagcgagacaaaguguacccugaagaguuucacugucgaaaaagggaucuaccagacaucuaauuuuagggugcagccaaccgaguccauaguucgguuccccaacauuacgaaucucugcccuuuuggagagguguucaacgccacccgcuucgcgagcgucuaugcauggaaucgaaagagaaucucgaacuguguggccgacuacucuguacuuuacaauuccgcuucauuuaguacauucaaaugcuauggcguuagcccaacuaagcugaacgacuuguguuuuaccaauguguacgccgauuccuucgucauuaggggugacgaagugcggcagaucgcacccgggcaaacaggaaaaaucgcugauuauaacuacaagcuaccggacgauuuuacuggcugcgucauugccuggaacucuaauaaccuggacagcaaagugggcgggaauuauaacuaccucuaucgucuguuccgcaagucaaaucuuaagccuuuugagagagauauaaguaccgaaaucuaccaggcgggauccacacccuguaacgguguugagggcuucaauugcuacuuuccacugcagagcuauggguuccaaccuaccaacggagugggcuaccagcccuauaggguagucguguugucuuuugaacuccugcacgccccagcaacuguuugcggucccaaaaagucaacgaauuuagugaaaaacaagugugucaauuucaacuuuaaugggcugacaggcaccggagugcuaacugagaguaacaaaaaguuccucccuuuccagcaguuuggccgggacauugcugauaccacagacgccguacgagauccacaaacccuggagauccuugacauaacuccgugcagcuucgggggaguguccguuauuacacccgguacgaauaccucuaaccaggucgcuguguuguaccaggacgugaauuguacugaagucccuguugccauccacgcagaucagcugacaccaaccuggcgcguguauucgacaggcagcaacguguuucaaacuagagccgggugccucaucggagcugagcauguaaacaauuccuacgaaugugacauucccaucggcgcggguauuugcgcaucauaucagacccagacgaacaguccuaggcgggcccgcucugucgcuagccaguccauaaucgccuacaccaugucacugggggcagagaauagcguggccuacucuaacaauuccauugcuaucccaacaaacuucacuaucaguguuaccacagaaauucuucccgugagcaugacuaagaccucugucgauuguacgauguauauaugcggcgacuccacagaguguucaaaucuguugcuccaauacggaaguuuuugcacccagcugaacagagccuuaacuggcaucgcaguggagcaggauaaaaauacacaggaaguuuucgcgcaagugaagcagauuuauaaaaccccgccuaucaaggacuuugggggauucaacuuuagccagauucugccagaucccucgaaaccuuccaagaggucuuucaucgaggaccuacucuuuaauaagguaacucuggcugaugccgguuucauaaaacaauacggcgacugucuuggggauaucgcagcccgugacuugauuugcgcucagaaguucaacggacugaccguccucccuccacuguuaacagaugaaaugaucgcccaguauacgagcgcacugcuugcuggcaccauuacuucagguuggacauuuggggccggcgcggccuugcagaucccuuucgcuaugcaaauggcauaccgguuuaauggaauaggcgugacccagaacgugcucuaugagaaucagaaacugauugccaaccaguucaacagugcuaucgggaagauucaagacucccuaucuagcacagccuccgcacugggaaaacuccaggacgucguuaaucagaacgcgcaggcccugaauacucuugugaagcaauugucaagcaacuuuggcgcuaucaguucuguacugaaugauauauuaucccgacucgacaagguggaagccgagguccagaucgauagacugauuaccgguaggcuucagagccugcaaacguacgugacacagcaguugauccgcgcagcugagauucgggccucggcaaaccucgccgcuaccaaaaugucagaaugcguucuggggcagucuaagagaguggacuucuguggaaaaggcuaccaccuaaugaguuuuccccaauccgcgccacauggugucguguuccugcacguuacuuaugugccggcccaggagaagaauuuuaccacagcacccgcuaucugccacgauggcaaagcccauuuccccagggaaggggucuuuguaagcaacggaacucacugguucgugacccagcgcaauuuuuacgagccacagauaauuacaacggacaacaccuucguuucuggcaauugugauguggucaucgggaucgugaacaauacuguauaugacccccuccaaccugagcuggauagcuucaaggaagaacuugacaaauacuuuaagaaccauacauccccagauguggacuugggagauauuucaggcaucaaugccagugucguuaacauucagaaggaaauagaccgacugaaugagguggcuaaaaacuuaaacgaaagccucaucgaccugcaggagcuugguaaguaugagcaguacauuaaauggcccugguauaucuggcugggguucauugcaggacuaaucgccauagugauggucaccaucaugcucugcuguaugacuucuugcuguuccugccugaagggcuguugcucaugugguaguugcugcaaauuugaugaagacgauagcgagccuguguugaagggcguuaagcugcacuacacaugaggacuagucccuguucccagagcccacuuuuuuuucuuuuuuugaaauaaaauagccugucuuucagaucucaaaggcucuuuucagagccaccaaaaaaaaaaaaaaaaaaaaaaaaaaaaaaaaaaaaaaaaaaaaaaaaaaaaaaaaaaaaaaaaaaaaaaaaaaaaaaaaaaaaaaaaaaaaaaaaaaaaa

SEQ ID NO: 12509 - RNA, 4094 nt, Artificial Sequence
  SARS-CoV-2/China/WF0004/2020__EPI_ISL_413694 spike protein mRNA human (1-1273)
aggagagucccgcagucggcguccagcggcucugcuuguucgugugugugucguugcaggccuuauucaagcuuaccauguucguguuucugguccuccuuccccugguuagcucccagugcgugaacuugaccacaagaacucaauuaccuccagccuacacgaauagcuucaccaggggcguauauuacccggacaagguguuucggucaaguguccugcacagcacacaggaucuauuccuccccuuuuucuccaacgugacuugguuucaugcuauccacguuucugggaccaauggaacaaaacgcuucgacaacccugugcugccauuuaaugauggugucuauuucgcaucgaccgagaagucaaacauuauacgaggcuggaucuuugggacuacacuugacagcaaaacccagagucuguugauugugaauaacgccacgaauguaguuaucaaggugugugaguuccaguuuugcaacgaucccuuccucggagucuacuaucauaaaaauaacaaguccuggacugagucugaguuccguguguacagcuccgcgaauaacuguaccuuugaguaugugucacaaccuuuccugauggaccuggaaggcaagcaggguaauuuuaaaaaccucagagaguucgucuuuaagaacauugauggguacuucaaaaucuacaguaagcacacaccaauaaauuuaguuagggaccugccccagggauuuagcgcucuugagccuuugguggaucugccaaucggcauuaacaucacucgguuccagacccuacucgcccugcaucgcucuuaucuuacaccgggcgacuccucaagcggguggaccgcaggagccgcugcauacuauguagguuaccugcaacccagaacguuuuugcucaaauauaaugaaaacggcacuauuacagaugccguggacugcgcucuggauccuuuaagugagaccaaguguacucugaagucuuucacagucgaaaaagggaucuaccagaccuccaauuuuagggugcagccaacggagagcauaguucgguuccccaacauuaccaaucucugcccuuuuggagagguguucaacgccacacgcuucgcgucggucuaugcauggaaucgaaagagaaucucuaacuguguggccgacuacuccguacuuuacaauucagcuaguuuuagcacuuucaaaugcuauggcguuuccccaaccaagcugaacgacuuguguuuuacaaauguguacgccgauucuuucgucauuaggggugacgaagugcggcagaucgcacccgggcaaacuggaaaaaucgcugauuauaacuacaagcuaccggacgauuuuaccggcugcgucauugccuggaauagcaacaaccuggacucaaaagugggcgggaauuauaacuaccucuaucgucuguuccgcaagaguaaucuuaagccuuuugagagagauauauccacagaaaucuaccaggcgggaagcacccccuguaacgguguugagggcuucaauugcuacuuuccacugcagucuuauggguuccaaccuacuaacggagugggcuaccagcccuauaggguagucguguugucauuugaacuccugcacgccccagcaacgguuugcggucccaaaaagaguacaaauuuagugaaaaacaagugugucaauuucaacuuuaaugggcugaccggcacuggagugcuaaccgagagcaacaaaaaguuccucccuuuccagcaguuuggccgggacauugcugauacaaccgacgccguacgagauccacaaacucuggagauccuugacauaacaccgugcuccuucgggggagugucuguuauuacgcccgguaccaauacuucgaaccaggucgcuguguuguaccaggacgugaauuguacagaagucccuguugccauccacgcagaucagcugaccccaacauggcgcguguauagcacuggcuccaacguguuucaaaccagagccgggugccucaucggagcugagcauguaaacaauucauacgaaugugacauucccaucggcgcggguauuugcgcaaguuaucagacgcagaccaacucuccuaggcgggcccgcagcgucgcuucccagucaauaaucgccuacacaaugagccugggggcagaaaauucuguggccuacuccaacaauaguauugcuaucccaacuaacuucaccaucagcguuacaacugaaauucuucccgugucuaugaccaagacguccgucgauuguacaauguauauaugcggcgacucaaccgaguguaguaaucuguugcuccaauacggaucuuuuugcacucagcugaacagagccuuaacaggcaucgcaguggagcaggauaaaaauacccaggaaguuuucgcgcaagugaagcagauuuauaaaacuccgccuaucaaggacuuugggggauucaacuuuucgcagauucugccagaucccuccaaaccuucuaagaggagcuucaucgaggaccuacucuuuaauaagguaacccuggcugaugccgguuucauaaaacaauacggcgacugucuuggggauaucgcagcccgugacuugauuugcgcucagaaguucaacggacugacaguccugcccccacucuuaacggaugaaaugaucgcccaguauaccucagcacugcuugcuggcacuauuacaagugguuggaccuuuggggccggcgcggccuugcagaucccuuucgcuaugcaaauggcauaccgguuuaauggaauaggcgugacacagaacgugcucuaugagaaucagaaacugauugccaaccaguucaacuccgcuaucgggaagauucaagacucucuaagcuccacugccucagcacugggaaaacuccaggacgucguuaaucagaacgcgcaggcccugaauacccuugugaagcaauugagcaguaacuuuggcgcuaucucuuccguacugaaugauauauuaagccgacucgacaagguggaagccgagguccagaucgauagacugauuacggguaggcuucagucgcugcaaacauacgugacccagcaguugauccgcgcagcugagauucgggccucagcaaaccucgccgcuacuaaaaugucugaaugcguucuggggcagaguaagagauucgacuuuuguggaaaaggcuaccaccuaauguccuucccccaaagcgcgccacaugguguggucuuucugcacgugaccuauguuccggcccaggagaagaauuucacaacugcuccugcaaucugccacgauggcaaagcccauuuucccagggaagggguguucgucucuaacggaacccacugguuuguaacacagcgcaauuucuacgagccacagauaauuacgaccgacaacacuuucgugagcggcaauugugauguugugaucgggaucgucaacaauacaguguaugacccccuccaaccugagcuggauuccuuuaaggaagaacuugacaaauacuucaagaaccauaccucaccagauguagacuugggagauauuaguggcaucaaugccagcguggucaacauucagaaggaaauagaccgacugaaugagguugcuaaaaacuuaaacgaaucucucaucgaccugcaggagcuugguaaguaugagcaguacauuaaauggcccugguauaucuggcugggguuuauugcaggacuaaucgccauagugauggugacuaucaugcucugcuguaugacauccugcuguucaugccugaagggcuguugcaguugugguagcugcugcaaauucgaugaagacgauuccgagccugucuugaagggcgugaagcugcacuacaccugaggacuagucccuguucccagagcccacuuuuuuuucuuuuuuugaaauaaaauagccugucuuucagaucucaaaggcucuuuucagagccaccaaaaaaaaaaaaaaaaaaaaaaaaaaaaaaaaaaaaaaaaaaaaaaaaaaaaaaaaaaaaaaaaaaaaaaaaaaaaaaaaaaaaaaaaaaaaaaaaaaaaa

SEQ ID NO: 12510 - RNA, 4094 nt, Artificial Sequence
  SARS-CoV-2/China/WF0028/2020__EPI_ISL_413791 spike protein mRNA human (1-1273)
aggagagucccgcagucggcguccagcggcucugcuuguucgugugugugucguugcaggccuuauucaagcuuaccauguucguguuucugguccuccuuccccugguuagcucccagugcgugaacuugaccacaagaacucaauuaccuccagccuacacuaauucuuucaccaggggcguauauuacccggacaagguguuucggucaaguguccugcacagcacacaggaucuauuccuccccuuuuucuccaacgugacuugguuucaugcuauccacguuucugggaccaauggaacaaaacgcuucgacaacccugugcugccauuuaaugauggugucuauuucgcaucgaccgagaagucaaacauuauacgaggcuggaucuuugggacuacacuugacagcaaaacccagagucuguugauugugaauaacgccacgaauguaguuaucaaggugugugaguuccaguuuugcaacgaucccuuccucggagucuacuaucauaaaaauaacaaguccuggauggagucugaguuccguguguacagcuccgcgaauaacuguacuuuugaauaugugucacaaccuuuccugauggaccuggaaggcaagcaggguaauuuuaaaaaccucagagaguucgucuuuaagaacauugauggguacuucaaaaucuacaguaagcacaccccaauaaauuuaguuagggaccugccccagggauuuagcgcucuugagccuuugguggaucugccaaucggcauuaacaucacacgguuccagacucuacucgcccugcaucgcucuuaucuuaccccgggcgacuccucaagcggguggacagcaggagccgcugcauacuauguagguuaccugcaacccagaaccuuuuugcucaaauauaaugaaaacggcacgauuacugaugccguggacugcgcucuggauccuuuaagugagacaaaguguacccugaagucuuucacugucgaaaaagggaucuaccagacauccaauuuuagggugcagccaaccgagagcauaguucgguuccccaacauuacgaaucucugcccuuuuggagagguguucaacgccacccgcuucgcgucggucuaugcauggaaucgaaagagaaucucuaacuguguggccgacuacuccguacuuuacaauucagcuaguuuuagcacauucaaaugcuauggcguuuccccaacuaagcugaacgacuuguguuuuaccaauguguacgccgauucuuucgucauuaggggugacgaagugcggcagaucgcacccgggcaaacaggaaaaaucgcugauuauaacuacaagcuaccggacgauuuuacuggcugcgucauugccuggaauagcaacaaccuggacucaaaagugggcgggaauuauaacuaccucuaucgucuguuccgcaagaguaaucuuaagccuuuugagagagauauauccaccgaaaucuaccaggcgggaagcacacccuguaacgguguugagggcuucaauugcuacuuuccacugcagucuuauggguuccaaccuaccaacggagugggcuaccagcccuauaggguagucguguugucauuugaacuccugcacgccccagcaacuguuugcggucccaaaaagaguacgaauuuagugaaaaacaagugugucaauuucaacuuuaaugggcugacaggcaccggagugcuaacugagagcaacaaaaaguuccucccuuuccagcaguuuggccgggacauugcugauaccacagacgccguacgagauccacaaacccuggagauccuugacauaacuccgugcuccuucgggggagugucuguuauuacacccgguacgaauaccucgaaccaggucgcuguguuguaccaggacgugaauuguacugaagucccuguugccauccacgcagaucagcugacaccaaccuggcgcguguauagcacaggcuccaacguguuucaaacuagagccgggugccucaucggagcugagcauguaaacaauucauacgaaugugacauucccaucggcgcggguauuugcgcaaguuaucagacccagacgaacucuccuaggcgggcccgcagcgucgcuucccagucaauaaucgccuacaccaugagccugggggcagaaaauucuguggccuacuccaacaauaguauugcuaucccaacaaacuucacuaucagcguuaccacagaaauucuucccgugucuaugacuaagaccuccgucgauuguacgauguauauaugcggcgacucaacagaguguaguaaucuguugcuccaauacggcagcuuuugcacccagcugaacagagccuuaacuggaaucgcaguggagcaggauaaaaauacacaggaaguuuucgcgcaagugaagcagauuuauaaaaccccgccuaucaaggacuuugggggauucaacuuuucgcagauucugccagaucccuccaaaccuucuaagaggagcuucaucgaggaccuacucuuuaauaagguaacucuggcugaugccgguuucauaaaacaauacggcgacugucuuggggauaucgcagcccgugacuugauuugcgcucagaaguucaacggacugaccguccugcccccacucuuaacagaugaaaugaucgcccaguauacgucagcacugcuugcuggcaccauuacgagugguuggacauuuggggccggcgcggccuugcagaucccuuucgcuaugcaaauggcauaccgguuuaauggaauaggcgugacccagaacgugcucuaugagaaucagaaacugauugccaaccaguucaacuccgcuaucgggaagauucaagacucucuaagcuccacagccucagcacugggaaaacuccaggacgucguuaaucagaacgcgcaggcccugaauacucuugugaagcaauugagcaguaacuuuggcgcuaucucuuccguacugaaugauauauuaagccgacucgacaagguggaagccgagguccagaucgauagacugauuaccgguaggcuucagucgcugcaaacguacgugacacagcaguugauccgcgcagcugagauucgggccucagcaaaccucgccgcuaccaaaaugucugaaugcguucuggggcagaguaagagaguggacuucuguggaaaaggcuaccaccuaauguccuuuccccaaagcgcgccacauggugucguguuccugcacguuacuuaugugccggcccaggagaagaauuuuaccacagcuccugcaaucugccacgauggcaaagcccauuuccccagggaaggggucuuuguaucuaacggaacucacugguucgugacccagcgcaauuuuuacgagccacagauaauuacaacggacaacaccuucguuagcggcaauugugauguggucaucgggaucgugaacaauacuguauaugacccccuccaaccugagcuggaauccuucaaggaggaacuugauaaauacuuuaagaaccauacaucaccagacguggauuugggagacauuaguggcaucaaugccagcgucguuaacauucagaaggagauagaucgacugaaugaaguggcuaaaaacuuaaacgagucucucaucgaccugcaggagcuugguaaguaugaacaguacauuaaauggcccugguauaucuggcugggguucauugcaggacuaaucgccauagugauggucaccaucaugcucugcuguaugacuuccugcuguucaugccugaagggcuguugcaguugugguagcugcugcaaauuugacgaggaugacuccgaaccuguguugaagggcguuaagcugcacuacacaugaggacuagucccuguucccagagcccacuuuuuuuucuuuuuuugaaauaaaauagccugucuuucagaucucaaaggcucuuuucagagccaccaaaaaaaaaaaaaaaaaaaaaaaaaaaaaaaaaaaaaaaaaaaaaaaaaaaaaaaaaaaaaaaaaaaaaaaaaaaaaaaaaaaaaaaaaaaaaaaaaaaaa

SEQ ID NO: 12511 - RNA, 4094 nt, Artificial Sequence
  SARS-CoV-2/2019-nCoV/USA-CruiseA-18/2020__MT159716.1 spike protein mRNA human (1-1273)
aggagagucccgcagucggcguccagcggcucugcuuguucgugugugugucguugcaggccuuauucaagcuuaccauguucguguuucugguccuccuuccccugguuagcucccagugcgugaacuugaccacaagaacucaauuaccuccagccuacacuaauucuuucaccaggggcguauauuacccggacaagguguuucggucaaguguccugcacagcacacaggaucuauuccuccccuuuuucuccaacgugacuugguuucaugcuauccacguuucugggaccaauggaacaaaacgcuucgacaacccugugcugccauuuaaugauggugucuauuucgcaucgaccgagaagucaaacauuauacgaggcuggaucuuugggacuacacuugacagcaaaacccagagucuguugauugugaauaacgccacgaauguaguuaucaaggugugugaguuccaguuuugcaacgaucccuuccucggagucuacuaucauaaaaauaacaaguccuggauggagucugaacugcguguguacagcuccgcgaauaacuguacuuucgaguaugugucacaaccuuuucugauggaccucgaaggcaagcaggguaauuucaaaaacuuaagagaguuugucuucaagaacauugauggguacuuuaaaaucuacaguaagcacaccccaauaaaucugguuagggaccuuccccagggauucagcgcuuuggagccucugguggaucuaccaaucggcauuaacaucacacgguuucagacucuccuggcccuucaucgcucuuaucugaccccgggcgacuccucaagcggguggacagcaggagccgcugcauacuauguagguuacuugcaacccagaaccuuccuccugaaauauaaugaaaacggcacgauuacugaugccguggacugcgcuuuagauccucugagugagacaaaguguacccucaagucuuuuacugucgaaaaagggaucuaccagacauccaauuucagggugcagccaaccgagagcauaguucgguuucccaacauuacgaaucuuugcccuuucggagagguguuuaacgccacccgcuucgcgucggucuaugcauggaaucgaaagagaaucucuaacuguguggccgacuacuccguacuguacaauucagcuaguuucagcacauuuaaaugcuauggcguuuccccaacuaaguugaacgaccuauguuucaccaauguguacgccgauucuuuugucauuaggggugacgaagugcggcagaucgcacccgggcaaacaggaaaaaucgcugauuauaacuacaagcugccggacgauuucacuggcugcgucauugccuggaauagcaacaaccucgacucaaaagugggcgggaauuauaacuaccuguaucgucuuuuucgcaagaguaaucugaagccuuucgagagagauauauccaccgaaaucuaccaggcgggaagcacacccuguaacgguguugagggcuuuaauugcuacuucccauugcagucuuauggguuucaaccuaccaacggagugggcuaccagcccuauaggguagucgugcucucauucgaacuguuacacgccccagcaacuguuugcggucccaaaaagaguacgaaucuggugaaaaacaagugugucaauuuuaacuucaaugggcuaacaggcaccggagugcucacugagagcaacaaaaaguuucugccuuuccagcaguucggccgggacauugcugauaccacagacgccguacgagauccacaaacccuugagaucuuggacauaacuccgugcuccuuugggggagugucuguuauuacacccgguacgaauaccucgaaccaggucgcugugcuguaccaggacgugaauuguacugaagucccuguugccauccacgcagaucagcucacaccaaccuggcgcguguauagcacaggcuccaacguguuccaaacuagagccgggugccugaucggagcugagcauguaaacaauucauacgaaugugacauucccaucggcgcggguauuugcgcaaguuaucagacccagacgaacucuccuaggcgggcccgcagcgucgcuucccagucaauaaucgccuacaccaugagccuuggggcagaaaauucuguggccuacuccaacaauaguauugcuaucccaacaaacuuuacuaucagcguuaccacagaaauucugcccgugucuaugacuaagaccuccgucgauuguacgauguauauaugcggcgacucaacagaguguaguaauuugcuccugcaauacggcagcuucugcacccaguuaaacagagcccugacuggaaucgcaguggagcaggauaaaaauacacaggaaguuuuugcgcaagugaagcagauuuauaaaaccccgccuaucaaggacuucgggggauuuaacuucucgcagauucuaccagaucccuccaaaccuucuaagaggagcuuuaucgaggaccuccuguucaauaagguaacucuugcugaugccgguuuuauaaaacaauacggcgacuguuugggggauaucgcagcccgugaccugauuugcgcucagaaguucaacggacucaccguccugcccccauuacugacagaugaaaugaucgcccaguauacgucagcacuuuuggcuggcaccauuacgagugguuggacauucggggccggcgcggcccuccagaucccuuuugcuaugcaaauggcauaccgguucaauggaauaggcgugacccagaacgugcuguaugagaaucagaaacuaauugccaaccaguuuaacuccgcuaucgggaagauucaagacucucugagcuccacagccucagcacucggaaaacugcaggacgucguuaaucagaacgcgcaggcccuuaauacuuuggugaagcaacugagcaguaacuucggcgcuaucucuuccguauuaaaugauauacucagccgacuggacaagguggaagccgagguccagaucgauagacuuauuaccgguaggcugcagucguugcaaacguacgugacacagcagcucauccgcgcagcugagauucgggccucagcaaaccuggccgcuaccaaaaugucugaaugcguucuagggcagaguaagagaguggacuuuuguggaaaaggcuaccaccugauguccuucccccaaagcgcgccacauggugucguguuucuccacguuacuuaugugccggcccaggagaagaauuucaccacagcuccugcaaucugccacgauggcaaagcccauuuucccagggaaggggucuucguaucuaacggaacucacugguuugugacccagcgcaauuucuacgagccacagauaauuacaacggacaacaccuuuguuagcggcaauugugauguggucaucgggaucgugaacaauacuguauaugacccccugcaaccugagcuugauuccuucaaggaagaguuggacaaauacuucaagaaccauacaucaccagauguggaccugggagauauuaguggcaucaaugccagcgucguuaacauucagaaggaaauagaccgauuaaaugagguggcuaaaaaccucaacgaaucucugaucgaccuucaggagcuggguaaguaugagcaguacauuaaauggcccugguauaucuggcuaggguuuauugcaggacucaucgccauagugauggucaccaucaugcugugcuguaugacuuccugcuguucaugcuugaagggcuguugcaguugugguagcugcugcaaauucgaugaagacgauuccgagccugugcugaagggcguuaaguuacacuacacaugaggacuagucccuguucccagagcccacuuuuuuuucuuuuuuugaaauaaaauagccugucuuucagaucucaaaggcucuuuucagagccaccaaaaaaaaaaaaaaaaaaaaaaaaaaaaaaaaaaaaaaaaaaaaaaaaaaaaaaaaaaaaaaaaaaaaaaaaaaaaaaaaaaaaaaaaaaaaaaaaaaaaa

SEQ ID NO: 12512 - RNA, 4094 nt, Artificial Sequence
  SARS-CoV-2/SARS-CoV-2/Yunnan-01/human/2020/CHN__MT049951.1 spike protein mRNA human (1-1273)
aggagagucccgcagucggcguccagcggcucugcuuguucgugugugugucguugcaggccuuauucaagcuuaccauguucguguuucugguccuccuuccccugguuagcucccagugcgugaacuugaccacaagaacucaauuaccuccagccaauacgaacucuuucaccaggggcguauacuauccggacaagguguuucggucaaguguccugcacagcacacaggaucuauuccuccccuuuuucuccaaugugacuugguuucaugcuauccacguuucugggaccaacggaacaaaacgcuucgacaauccugugcugccauuuaacgauggugucuacuucgcaucgaccgagaagucaaauauuauacgaggcuggaucuuugggacuacacuugacagcaaaacccagagucuguugauugugaacaaugccacgaacguaguuaucaaggugugugaguuccaguuuugcaaugaucccuuccucggagucuauuaccauaaaaacaauaaguccuggauggagucugaguuccguguguauagcuccgcgaacaauuguacuuuugaauacgugucacaaccuuuccugauggaccuggaaggcaagcaggguaacuuuaaaaaccucagagaguucgucuuuaagaauauugauggguauuucaaaaucuacaguaagcacaccccaauaaacuuaguuagggaccugccccagggauuuagcgcucuugagccuuugguggaucugccaaucggcauuaauaucacacgguuccagacucuacucgcccugcaucgcucuuaccuuaccccgggcgacuccucaagcggguggacagcaggagccgcugcauauuacguagguuaucugcaacccagaaccuuuuugcucaaauacaacgaaaauggcacgauuacugaugccguggacugcgcucuggauccuuuaagugagacaaaguguacccugaagucuuucacugucgaaaaagggaucuaucagacauccaacuuuagggugcagccaaccgagagcauaguucgguuccccaauauuacgaaccucugcccuuuuggagagguguucaaugccacccgcuucgcgucggucuacgcauggaaccgaaagagaaucucuaauuguguggccgacuauuccguacuuuacaacucagcuaguuuuagcacauucaaaugcuacggcguuuccccaacuaagcugaaugacuuguguuuuaccaacguguaugccgauucuuucgucauuaggggugacgaagugcggcagaucgcacccgggcaaacaggaaaaaucgcugauuacaauuauaagcuaccggacgauuuuacuggcugcgucauugccuggaacagcaacaaucuggacucaaaagugggcgggaacuacaauuaucucuaccgucuguuccgcaagaguaaccuuaagccuuuugagagagauauauccaccgaaaucuaucaggcgggaagcacacccuguaaugguguugagggcuucaacugcuacuuuccacugcagucuuacggguuccaaccuaccaauggagugggcuaucagcccuacaggguagucguguugucauuugaacuccugcacgccccagcaacuguuugcggucccaaaaagaguacgaacuuagugaaaaauaagugugucaacuucaauuuuaacgggcugacaggcaccggagugcuaacugagagcaauaaaaaguuccucccuuuccagcaguuuggccgggacauugcugauaccacagacgccguacgagauccacaaacccuggagauccuugacauaacuccgugcuccuucgggggagugucuguuauuacacccgguacgaacaccucgaaucaggucgcuguguuguaucaggacgugaacuguacugaagucccuguugccauccacgcagaucagcugacaccaaccuggcgcguguacagcacaggcuccaacguguuucaaacuagagccgggugccucaucggagcugagcauguaaauaacucauaugaaugugacauucccaucggcgcggguauuugcgcaaguuaccagacccagacuaauucuccuaggcgggcccgcagcgucgcuucccagucaauaaucgccuauaccaugagccugggggcagagaacucuguggccuacuccaauaacaguauugcuaucccaacaaauuucacuaucagcguuaccacagaaauucuucccgugucuaugacuaagaccuccgucgauuguacgauguacauaugcggcgacucaacagaguguaguaaccuguugcuccaauauggcagcuuuugcacccagcugaauagagccuuaacuggaaucgcaguggagcaggauaaaaacacacaggaaguuuucgcgcaagugaagcagauuuacaaaaccccgccuaucaaggacuuugggggauucaauuuuucgcagauucugccagaucccuccaaaccuucuaagaggagcuucaucgaggaccuacucuuuaacaagguaacucuggcugaugccgguuucauaaaacaauauggcgacugucuuggggauaucgcagcccgugacuugauuugcgcucagaaguucaauggacugaccguccugcccccacucuuaacagaugaaaugaucgcccaguacacgucagcacugcuugcuggcaccauuacgagugguuggacauuuggggccggcgcggccuugcagaucccuuucgcuaugcaaauggcauaucgguuuaacggaauaggcgugacccagaaugugcucuacgagaaccagaaacugauugccaaccaguucaauuccgcuaucgggaagauucaagacucucuaagcuccacagccucagcacugggaaaacuccaggacgucguuaaccagaaugcgcaggcccugaacacucuugugaagcaauugagcaguaauuuuggcgcuaucucuuccguacugaacgauauauuaagccgacucgacaagguggaagccgagguccagaucgauagacugauuaccgguaggcuucagucgcugcaaacguaugugacacagcaguugauccgcgcagcugagauucgggccucagcaaaucucgccgcuaccaaaaugucugaaugcguucuggggcagaguaagagaguggacuucuguggaaaaggcuaccaccuaauguccuuuccccaaagcgcgccacauggugucguguuccugcacguuacuuacgugccggcccaggagaagaacuuuaccacagcuccugcaaucugccacgauggcaaagcccauuuccccagggaaggggucuuuguaucuaauggaacucacugguucgugacccagcgcaacuuuuaugagccacagauaauuacaacggacaauaccuucguuagcggcaacugugauguggucaucgggaucgugaauaacacuguauacgacccccuccaaccugagcuggauuccuucaaggaagaacuugacaaauauuuuaagaaucauacaucaccagauguggacuugggagauauuaguggcaucaacgccagcgucguuaauauucagaaggaaauagaccgacugaacgagguggcuaaaaacuuaaaugaaucucucaucgaccugcaggagcuugguaaguacgagcaguauauuaaauggcccugguacaucuggcugggguucauugcaggacuaaucgccauagugauggucaccaucaugcucugcuguaugacuuccugcuguucaugccugaagggcuguugcaguugugguagcugcugcaaauuugaugaagacgauuccgagccuguguugaagggcguuaagcugcacuauacaugaggacuagucccuguucccagagcccacuuuuuuuucuuuuuuugaaauaaaauagccugucuuucagaucucaaaggcucuuuucagagccaccaaaaaaaaaaaaaaaaaaaaaaaaaaaaaaaaaaaaaaaaaaaaaaaaaaaaaaaaaaaaaaaaaaaaaaaaaaaaaaaaaaaaaaaaaaaaaaaaaaaaa

SEQ ID NO: 12513 - RNA, 4094 nt, Artificial Sequence
  SARS-CoV-2/USA/WA-UW292/2020__EPI_ISL_418077 spike protein mRNA human (1-1273)
aggagagucccgcagucggcguccagcggcucugcuuguucgugugugugucguugcaggccuuauucaagcuuaccauguucguguuucugguccuccuuccccugguuagcucccagugcgugaacuugaccacaagaacucaauuaccuccagccuacaccaauucuuucacgaggggcguauauuacccggacaagguguuucggucaaguguccugcacagcacacaggaucuauuccuccccuuuuucuccaacgugacuugguuucaugcuauccacguuucugggaccaauggaacaaaacgcuucgacaacccugugcugccauuuaaugauggugucuauuucgcaucgaccgagaagucaaacauuauacgaggcuggaucuuugggacuacacuugacagcaaaacccagagucuguugauugugaauaacgccacgaauguaguuaucaaggugugugaguuccaguuuugcaacgaucccuuccucggagucuacuaucauaaaaauaacaaguccuggauggagucugaguuccguguguacagcuccgcgaauaacuguacuuuugaguaugugucacaaccuuuccugauggaccuggaaggcaagcaggguaauuuuaaaaaccucagagaguucgucuuuaagaacauugauggguacuucaaaaucuacaguaagcacaccccaauaaauuuaguuagggaccugccccagggauuuagcgcucuugagccuuugguggaucugccaaucggcauuaacaucacacgguuccagacucuacucgcccugcaucgcucuuaucuuaccccgggcgacuccucaagcggguggacagcaggagccgcugcauacuauguagguuaccugcaacccagaaccuuuuugcucaaauauaaugaaaacggcacgauuacugaugccguggacugcgcucuggauccuuuaagugagacaaaguguacccugaagucuuucacugucgaaaaagggaucuaccagacauccaauuuuagggugcagccaaccgagagcauaguucgguuccccaacauuacgaaucucugcccuuuuggagagguguucaacgccacccgcuucgcgucggucuaugcauggaaucgaaagagaaucucuaacuguguggccgacuacuccguacuuuacaauucagcuaguuuuagcacauucaaaugcuauggcguuuccccaacuaagcugaacgacuuguguuuuaccaauguguacgccgauucuuucgucauuaggggugacgaagugcggcagaucgcacccgggcaaacaggaaaaaucgcugauuauaacuacaagcuaccggacgauuuuacuggcugcgucauugccuggaauagcaacaaccuggacucaaaagugggcgggaauuauaacuaccucuaucgucuguuccgcaagaguaaucuuaagccuuuugagagagauauauccaccgaaaucuaccaggcgagcucuacacccuguaacggaguugaggguuucaauugcuacuuuccacugcagucauauggcuuccaaccuaccaacggggugggauaccagcccuauaggguagucguguugaguuuugaacuccugcacgccccagcaacuguuugcggccccaaaaagagcacgaauuuagugaaaaacaagugugucaauuucaacuuuaauggucugacagggaccggcgugcuaacugaguccaacaaaaaguuccucccuuuccagcaguuuggacgggacauugcugauaccacagacgccguacgagauccacaaacccuggagauccuugacauaacuccgugcucuuucggcggggugucgguuauuacacccggaacgaauaccagcaaccaggucgcuguguuguaccaggacgugaauuguacugaagucccuguugccauccacgcagaucagcugacaccaaccuggcgcguguauuccacagguucaaacguguuucaaacuagagccggcugccucaucggggcugagcauguaaacaauaguuacgaaugugacauucccaucggagcgggcauuugcgcaucuuaucagacccagacgaacagcccuaggcgggcccgcuccgucgcuucacagagcauaaucgccuacaccaugucucugggugcagaaaauuccguggccuacaguaacaauagcauugcuaucccaacaaacuucacuaucucuguuaccacagaaauucuucccguguccaugacuaagaccucagucgauuguacgauguauauaugcggggacaguacagaguguagcaaucuguugcuccaauacggcucguuuugcacccagcugaacagagccuuaacuggaaucgcaguggagcaggauaaaaauacacaggaaguuuucgcgcaagugaagcagauuuauaaaaccccgccuaucaaggacuuuggcggguucaacuuuucccagauucugccagaucccucuaaaccuagcaagaggucauucaucgaggaccuacucuuuaauaagguaacucuggcugaugccggauucauaaaacaauacggugacugucuuggcgauaucgcagcccgugacuugauuugcgcucagaaguucaacgggcugaccguccucccuccacuguuaacagaugaaaugaucgcccaguauacgagugcacugcuugcuggaaccauuacuuccggcuggacauuuggugccggggcggccuugcagaucccuuucgcuaugcaaauggcauaccgguuuaauggcauaggagugacccagaacgugcucuaugagaaucagaaacugauugccaaccaguucaacucugcuaucggcaagauucaagacagccuauccucaacagccagcgcacuggggaaacuccaggacgucguuaaucagaacgcgcaggcccugaauacucuugugaagcaauugaguucuaacuuuggagcuaucuccagcguacugaaugauauauuaucgcgacucgacaagguggaagccgagguccagaucgauagacugauuaccggcaggcuucagucacugcaaacguacgugacacagcaguugauccgcgcagcugagauucgggccucugcaaaccucgccgcuaccaaaaugagugaaugcguucugggucaguccaagagaguggacuucugugggaaaggauaccaccuaaugagcuuuccccaaucugcgccacauggcgucguguuccugcacguuacuuaugugccggcccaggagaagaauuuuaccacagcacccgcuaucugccacgaugguaaagcccauuuccccagggaaggcgucuuuguaagcaacgggacucacugguucgugacccagcgcaauuuuuacgagccacagauaauuacaacggacaacaccuucguuuccggaaauugugauguggucaucggcaucgugaacaauacuguauaugacccccuccaaccugagcuggauucauucaaggaagaacuugacaaauacuuuaagaaccauacaaguccagauguggacuugggggauauuagcggaaucaaugccucugucguuaacauucagaaggaaauagaccgacugaaugagguggcuaaaaacuuaaacgaaucccucaucgaccugcaggagcuuggcaaguaugagcaguacauuaaauggcccugguauaucuggcuggguuucauugcagggcuaaucgccauagugauggucaccaucaugcucugcuguaugacuucaugcuguaguugccugaagggauguugcagcuguggcuccugcugcaaauuugaugaagacgauucugagccuguguugaaggguguuaagcugcacuacacaugaggacuagucccuguucccagagcccacuuuuuuuucuuuuuuugaaauaaaauagccugucuuucagaucucaaaggcucuuuucagagccaccaaaaaaaaaaaaaaaaaaaaaaaaaaaaaaaaaaaaaaaaaaaaaaaaaaaaaaaaaaaaaaaaaaaaaaaaaaaaaaaaaaaaaaaaaaaaaaaaaaaaa

SEQ ID NO: 12514 - RNA, 4094 nt, Artificial Sequence
  SARS-CoV-2/Iceland/192/2020__EPI_ISL_417819 spike protein mRNA human (1-1273)
aggagagucccgcagucggcguccagcggcucugcuuguucgugugugugucguugcaggccuuauucaagcuuaccauguucguguuuuucguccugcucccccuuguuagcucccagugcgugaaccugaccacaagaacucaauugccuccagccuacacuaauucuuuuaccaggggcguauauuacccggacaagguguuccggucaagugucuuacacagcacacaggaucuguuucuacccuucuuuuccaacgugacuugguuccaugcuauccacguuucugggaccaauggaacaaaacgcuuugacaacccugugcucccauucaaugauggugucuauuuugcaucgaccgagaagucaaacauuauacgaggcuggaucuucgggacuacacuggacagcaaaacccagagucuucugauugugaauaacgccacgaauguaguuaucaaggugugugaauuucaguucugcaacgaucccuucuugggagucuacuaucauaaaaauaacaaguccuggauggagucugaauuucguguguacagcuccgcgaauaacuguacuuucgaguaugugucacaaccuuuucucauggaccuggaaggcaagcaggguaauuucaaaaaccugagagaguuugucuucaagaacauugauggguacuuuaaaaucuacaguaagcacaccccaauaaaucucguuagggacuuaccccagggauucagcgcucuggagccucuuguggauuugccaaucggcauuaacaucacacgguuucagacucugcuagcccuccaucgcucuuaucugaccccgggcgacuccucaagcggguggacagcaggagccgcugcauacuauguagguuaccuucaacccagaaccuuccuguugaaauauaaugaaaacggcacgauuacugaugccguggacugcgcucucgauccucugagugagacaaaguguaccuuaaagucuuuuacugucgaaaaagggaucuaccagacauccaauuucagggugcagccaaccgagagcauaguucgguuucccaacauuacgaaucugugcccuuucggagagguguucaacgccacccgcuuugcgucggucuaugcauggaaucgaaagagaaucucuaacuguguggccgacuacuccguacucuacaauucagcuaguuucagcacauuuaaaugcuauggcguuuccccaacuaaacuuaacgaccuguguuucaccaauguguacgccgauucuuuugucauuaggggugacgaagugcggcagaucgcacccgggcaaacaggaaagaucgcugauuauaacuacaaguugccggacgauuucacuggcugcgucauugccuggaauagcaacaaccuagacucaaaagugggcgggaauuauaacuaccuguaucgucucuuucgcaagaguaaucugaagccuuucgagagagauauauccaccgaaaucuaccaggcgggaagcacacccuguaacgguguugagggcuuuaauugcuacuucccacuucagucuuauggguuucaaccuaccaacggagugggcuaccagcccuauaggguagucgugcugucauucgaauugcuccacgccccagcaacuguuugcggucccaaaaagaguacgaaucuggugaaaaacaagugugucaauuuuaacuucaauggguuaacaggcaccggagugcugacugagagcaacaaaaaguuccuaccuuuucagcaguucggccgggacauugcugauaccacagacgccguacgagauccacaaacccucgagauccuggacauaacuccgugcuccuuugggggagugucuguuauuacacccgguacgaauaccucgaaccaggucgcugugcuuuaccagggcgugaauuguacugaagucccuguugccauccacgcagaccaguugacaccaaccuggcgcguguauagcacaggguccaacguguuccaaacuagagccggaugccugaucggcgcugagcauguaaacaauucauacgaaugugauauucccaucggugcggggauuugcgcaaguuaucagacccagacgaacucuccuaggcgggcccgcagcgucgcuucccagucaauaaucgccuacaccaugagccucggcgcagaaaauucuguggccuacuccaacaauaguauugcuaucccaacaaacuuuacuaucagcguuaccacagaaauucugcccgugucuaugacuaagaccuccgucgacuguacgauguauauaugcggagauucaacagaguguaguaaucuucuguugcaauacggcagcuucugcacccagcucaacagagcccugacugggaucgcaguggagcaggacaaaaauacacaggaaguuuuugcgcaagugaagcagauuuauaaaaccccgccuaucaaggauuucggagguuuuaacuucucgcagauuuuaccagaccccuccaaaccuucuaagaggagcuuuaucgaggaucugcuauucaauaagguaacucucgcugacgccggcuucauaaaacaauacggggauugucugggagacaucgcagcccgugaucuuauuugcgcucagaaguuuaacggcuugaccguccugcccccacuccugacagacgaaaugaucgcccaguauacgucagcauuacuggcugguaccauuacgaguggguggacauucggcgccggagcggcccuucagaucccuuuugcuaugcaaauggcauaccgguucaauggcauaggggugacccagaacguguuguaugagaaucagaaacucauugccaaccaguuuaacuccgcuaucggaaagauucaagauucucugagcuccacagccucagcacuaggcaaacugcaggacgucguuaaucagaacgcgcaggcccucaauacucuggugaagcaacuuagcaguaacuucggugcuaucucuuccguauugaaugacauacugagccgauuagauaagguggaagccgagguccagaucgacagacucauuaccgggaggcugcagucgcuucaaacguacgugacacagcagcugauccgcgcagcugagauucgggccucagcaaacuuggccgcuaccaaaaugucugaaugcguucucggacagaguaagagaguggauuuuuguggcaaagguuaccaccugauguccuucccccaaagcgcgccacauggcgucguguuucuacacguuacuuaugugccggcccaggagaagaauuucaccacagcuccugcaaucugccacgacgggaaagcccauuuucccagggaaggagucuucguaucuaacggcacucacugguuugugacccagcgcaauuucuacgagccacagauaauuacaacggauaacaccuucguuagcgggaauugugacguggucaucggaaucgugaacaauacuguauaugauccccugcaaccugagcucgacuccuuuaaggaggagcuggauaaauacuucaagaaccauacaucaccagacguggaucuuggcgacauuagugguaucaaugccagcgucguuaacauucagaaggaaauagaucgauugaaugagguggcuaaaaaccugaacgaaucuuuaaucgaccuccaggagcuggggaaguaugagcaguacauuaaauggcccugguauaucuggcuuggauuuauugcaggccugaucgccauagugauggucaccaucaugcuaugcuguaugacuuccugcuguucaugccucaaggguuguugcaguuguggcagcugcugcaaauucgacgaagaugacuccgagccugugcugaaggggguuaaguugcacuacacaugaggacuagucccuguucccagagcccacuuuuuuuucuuuuuuugaaauaaaauagccugucuuucagaucucaaaggcucuuuucagagccaccaaaaaaaaaaaaaaaaaaaaaaaaaaaaaaaaaaaaaaaaaaaaaaaaaaaaaaaaaaaaaaaaaaaaaaaaaaaaaaaaaaaaaaaaaaaaaaaaaaaaa

SEQ ID NO: 12515 - RNA, 4094 nt, Artificial Sequence
  SARS-CoV-2/Belgium/ULG-6939/2020__EPI_ISL_417020 spike protein mRNA human (1-1273)
aggagagucccgcagucggcguccagcggcucugcuuguucgugugugugucguugcaggccuuauucaagcuuaccauguucguguuucugguccuccuuccccugguuagcucccagugcgugaacuugaccacaagaacucaauuaccuccagccuacacuaauucuuucaccaggggcguauauuacccggacaagguguuucggucaaguguccugcacagcacacaggaucuauuccuccccuuuuucuccaacgugacuugguuucaugcuauccacguuucugggaccaauggaacaaaacgcuucgacaacccugugcugccauuuaaugauggugucuauuucgcaucgaccgagaagucaaacauuauacgaggcuggaucuuugggacuacacuugacagcaaaacccagagucuguugauugugaauaacgccacgaauguaguuaucaaggugugugaguuccaguuuugcaacgaucccuuccucggagucuacuaucauaaaaauaacaaguccuggauggagucugaguuccguguguacagcuccgcgaauaacuguacuuuugaguaugugucacaaccuuuccugauggaccuggaaggcaagcaggguaauuuuaaaaaccucagagaguucgucuuuaagaacauugauggguacuucaaaaucuacaguaagcacaccccaauaaauuuaguuagggaccugccccagggauuuagcgcucuugagccuuugguggaucugccaaucggcauuaacaucacacgguuccagacucuacucgcccugcaucgcucuuaucuuaccccgggcgacuccucaagcggguggacagcaggagccgcugcauacuauguagguuaccugcaacccagaaccuuuuugcucaaauauaaugaaaacggcacgauuacugaugccguggacugcgcucuggauccuuuaagugagacaaaguguacccugaagucuuucacugucgaaaaagggaucuaccagacauccaauuuuagggugcagccaaccgagagcauaguucgguuccccaacauuacgaaucucugcccuuuuggagagguguucaacgccacccgcuucgcgucggucuaugcauggaaucgaaagagaaucucuaacuguguggccgacuacuccguacuuuacaauucagcuaguuuuagcacauucaaaugcuauggcguuuccccaacuaagcugaacgacuuguguuuuaccaauguguacgccgauucuuucgucauuaggggugacgaagugcggcagaucgcacccgggcaaacaggaaaaaucgcugauuauaacuacaagcuaccggacgauuuuacuggcugcgucauugccuggaauagcaacaaccuggacucaaaagugggcgggaauuauaacuaccucuaucgucuguuccgcaagaguaaucuuaagccuuuugagagagauauauccaccgaaaucuaccaggcgggaagcacacccuguaacgguguugagggcuucaauugcuacuuuccacugcagucuuauggguuccaaccuaccaacggagugggcuaccagcccuauaggguagucguguugucauuugaacuccugcacgccccagcaacuguuugcggucccaaaaagaguacgaauuuagugaaaaacaagugugucaauuucaacuuuaaugggcugacaggcaccggagugcuaacugagagcaacaaaaaguuccucccuuuccagcaguuuggccgggacauugcugauaccacagacgccguacgagauccacaaacccuggagauccuugacauaacuccgugcuccuucgggggagugucuguuauuacacccgguacgaauaccucgaaccaggucgcuguguuguaccagggcgugaauuguacugaagucccuguugccauccacgcagaccagcugacaccaaccuggcgcguguauagcacaggguccaacguguuucaaacuagagccggaugccucaucggcgcugagcauguaaacaauucauacgaaugugauauucccaucggugcggggauuugcgcaaguuaucagacccagacgaacucuccuaggcgggcccgcagcgucgcuucccagucaauaaucgccuacaccaugagccugggcgcagaaaauucugugguuuacuccaacaauaguauugccaucccaacaaacuucacuaucagcgugaccacagaaauucuucccgucucuaugacuaagaccuccguggacuguacgauguauauaugcggagauucaacagaguguaguaaucuguugcuccaauacggcagcuuuugcacccagcugaacagagcuuuaacugggaucgccguugagcaggacaaaaauacacaggaaguguucgcacaaguaaagcagauuuauaaaaccccgccuaucaaggauuuuggagguuucaacuuuucgcagauucugccagaccccuccaaaccuucuaagaggagcuucaucgaggaucuacucuuuaauaaggucacucuggcggacgcuggcuucauaaaacaauacggggauugucuuggagacaucgccgcacgugauuugauuugcgcccagaaguucaacggccugaccgugcugcccccacucuuaacagacgaaaugaucgcucaguauacgucagcccugcuugcagguaccauuacgaguggguggacauuuggcgcuggagccgcguugcagaucccuuucgccaugcaaauggcuuaccgguuuaauggcauaggggugacccagaacguccucuaugagaaucagaaacugauugcaaaccaguucaacuccgccaucggaaagauucaagauucucuaagcuccacagcuucagcccugggcaaacuccaggacguugugaaucagaacgcacaggcgcugaauacucuuguaaagcaauugagcaguaacuuuggugccaucucuuccgugcugaaugacauauuaagccgacucgauaaggucgaagcugaggugcagaucgacagacugauuaccgggaggcuucagucgcugcaaacguacguuacacagcaguugauccgcgccgcagagauucgggcuucagccaaccucgcagccaccaaaaugucugaaugcgugcugggacagaguaagagagucgauuucuguggcaaagguuaccaccuaauguccuuuccccaaagcgcuccacauggcgugguuuuccugcacgugacuuaugucccggcgcaggagaagaauuuuaccacagccccugcaaucugccacgacgggaaagcucauuuccccagggaaggaguauuugugucuaacggcacucacugguucguuacccagcgcaauuuuuacgagccacagauaauuacaacggauaacaccuucgugagcgggaauugugacgucgugaucggaaucguaaacaauacuguguaugauccccuccaaccugagcuggacuccuucaaggaagaacuugauaaauacuuuaagaaccauacaucaccagacgucgauuugggcgacauuagugguaucaaugccagcguugugaacauucagaaggaaauagaucgacugaaugagguggccaaaaacuuaaacgaaucucucaucgaccugcaggagcuugggaaguaugagcaguacauuaaauggcccugguauaucuggcugggauucauugcuggccuaaucgcaauagucauggugaccaucaugcucugcuguaugacuuccugcuguucaugccugaaggguuguugcaguuguggcagcugcugcaaauuugacgaagaugacuccgagccuguuuugaaggggguaaagcugcacuacacaugaggacuagucccuguucccagagcccacuuuuuuuucuuuuuuugaaauaaaauagccugucuuucagaucucaaaggcucuuuucagagccaccaaaaaaaaaaaaaaaaaaaaaaaaaaaaaaaaaaaaaaaaaaaaaaaaaaaaaaaaaaaaaaaaaaaaaaaaaaaaaaaaaaaaaaaaaaaaaaaaaaaaa

SEQ ID NO: 12516 - RNA, 4094 nt, Artificial Sequence
  SARS-CoV-2/France/HF2496/2020__EPI_ISL_418231 spike protein mRNA human (1-1273)
aggagagucccgcagucggcguccagcggcucugcuuguucgugugugugucguugcaggccuuauucaagcuuaccauguucguguuucugguccuccuuccccugguuagcucccagugcgugaacuugaccacaagaacucaauuaccuccagccuacacuaauucuuucaccaggggcguauauuacccggacaagguguuucggucaaguguccugcacagcacacaggaucuauuccuccccuuuuucuccaacgugacuugguuucaugcuauccacguuucugggaccaauggaacaaaacgcuucgacaacccugugcugccauuuaaugauggugucuauuucgcaucgaccgagaagucaaacauuauacgaggcuggaucuuugggacuacacuugacagcaaaacccagagucuguugauugugaauaacgccacgaauguaguuaucaaggugugugaguuccaguuuugcaacgaucccuuccucggagucuacuaucauaaaaauaacaaguccuggauggagucugaguuccguguguacagcuccgcgaauaacuguacuuuugaguaugugucacaaccuuuccugauggaccuggaaggcaagcaggguaauuuuaaaaaccucagagaguucgucuuuaagaacauugauggguacuucaaaaucuacaguaagcacaccccaauaaauuuaguuagggaccugccccagggauuuagcgcucuugagccuuugguggaucugccaaucggcauuaacaucacacgguuccagacucuacucgcccugcaucgcucuuaucuuaccccgggcgacuccucaagcggguggacagcaggagccgcugcauacuauguagguuaccugcaacccagaaccuuuuugcucaaauauaaugaaaacggcacgauuacugaugccguggacugcgcucuggauccuuuaagugagacaaaguguacccugaagucuuucacugucgaaaaagggaucuaccagacauccaauuuuagggugcagccaaccgagagcauaguucgguuccccaacauuacgaaucucugcccuuuuggagagguguucaacgccacccgcuucgcgucggucuaugcauggaaucgaaagagaaucucuaacuguguggccgacuacuccguacuuuacaauucagcuaguuuuagcacauucaaaugcuauggcguuuccccaacuaagcugaacgacuuguguuuuaccaauguguacgccgauucuuucgucauuaggggugacgaagugcggcagaucgcacccgggcaaacaggaaaaaucgcugauuauaacuacaagcuaccggacgauuuuacuggcugcgucauugccuggaauagcaacaaccuggacucaaaagugggcgggaauuauaacuaccucuaucgucuguuccgcaagaguaaucuuaagccuuuugagagagauauauccaccgaaaucuaccaggcgggaagcacacccuguaacgguguugagggcuucaauugcuacuuuccacugcagucuuauggguuccaaccuaccaacggagugggcuaccagcccuauaggguagucguguugucauuugaacuccugcacgccccagcaacuguuugcggucccaaaaagaguacgaauuuagugaaaaacaagugugucaauuucaacuuuaaugggcugacaggcaccggagugcuaacugagagcaacaaaaaguuccucccuuuccagcaguuuggccgggacauugcugauaccacagacgccguacgagauccacaaacccuggagauccuugacauaacuccgugcuccuucgggggagugucuguuauuacacccgguacgaauaccucgaaccaggucgcuguguuguaccagggcgugaauuguacugaagucccuguugccauccacgcagaccagcugacaccaaccuggcgcguguauagcacaggguccaacguguuucaaacuagagccggaugccucaucggcgcugagcauguaaacaauucauacgaaugugauauucccaucggugcggggauuugcgcaaguuaucagacccagacgaacucuccuaggcgggcccgcagcgucgcuucccagucaauaaucgccuacaccaugagccugggcgcagaaaauucuguggccuacuccaacaauaguauugcuaucccaacaaacuucacuaucagcguuaccacagaaauucuucccgugucuaugacuaagaccuccgucgacuguacgauguauauaugcggagauucaacagaguguaguaaucuguugcuccaauacggcagcuuuugcacccagcugaacagagccuuaacugggaucgcaguggagcaggacaaaaauacacaggaaguuuucgcgcaagugaagcagauuuauaaaaccccgccuaucaaggauuuuggagguuucaacuuuucgcagauucugccagaccccuccaaaccuucuaagaggagcuucaucgaggaucuacucuuuaauaagguaacucuggcugacgccggcuucauaaaacaauacggggauugucuuggagacaucgucgcacgugauuugauuugcgcccagaaguucaacggccugaccgugcugcccccacucuuaacagacgaaaugaucgcucaguauacgucagcccugcuugcagguaccauuacgaguggguggacauuuggcgcuggagccgcguugcagaucccuuucgccaugcaaauggcuuaccgguuuaauggcauaggggugacccagaacguccucuaugagaaucagaaacugauugcaaaccaguucaacuccgccaucggaaagauucaagauucucuaagcuccacagcuucagcccugggcaaacuccaggacguugugaaucagaacgcacaggcgcugaauacucuuguaaagcaauugagcaguaacuuuggugccaucucuuccgugcugaaugacauauuaagccgacucgauaaggucgaagcugaggugcagaucgacagacugauuaccgggaggcuucagucgcugcaaacguacguuacacagcaguugauccgcgccgcagagauucgggcuucagccaaccucgcagccaccaaaaugucugaaugcgugcugggacagaguaagagagucgauuucuguggcaaagguuaccaccuaauguccuuuccccaaagcgcuccacauggcgugguuuuccugcacgugacuuaugucccggcgcaggagaagaauuuuaccacagccccugcaaucugccacgacgggaaagcucauuuccccagggaaggaguauuugugucuaacggcacucacugguucguuacccagcgcaauuuuuacgagccacagauaauuacaacggauaacaccuucgugagcgggaauugugacgucgugaucggaaucguaaacaauacuguguaugauccccuccaaccugagcuggacuccuucaaggaagaacuugauaaauacuuuaagaaccauacaucaccagacgucgauuugggcgacauuagugguaucaaugccagcguugugaacauucagaaggaaauagaucgacugaaugagguggccaaaaacuuaaacgaaucucucaucgaccugcaggagcuugggaaguaugagcaguacauuaaauggcccugguauaucuggcugggauucauugcuggccuaaucgcaauagucauggugaccaucaugcucugcuguaugacuuccugcuguucaugccugaaggguuguugcaguuguggcagcugcugcaaauuugacgaagaugacuccgagccuguuuugaaggggguaaagcugcacuacacaugaggacuagucccuguucccagagcccacuuuuuuuucuuuuuuugaaauaaaauagccugucuuucagaucucaaaggcucuuuucagagccaccaaaaaaaaaaaaaaaaaaaaaaaaaaaaaaaaaaaaaaaaaaaaaaaaaaaaaaaaaaaaaaaaaaaaaaaaaaaaaaaaaaaaaaaaaaaaaaaaaaaaa

SEQ ID NO: 12517 - RNA, 4094 nt, Artificial Sequence
  SARS-CoV-2/USA/WA-UW291/2020__EPI_ISL_418076 spike protein mRNA human (1-1273)
aggagagucccgcagucggcguccagcggcucugcuuguucgugugugugucguugcaggccuuauucaagcuuaccauguucguguuucugguccuccuuccccugguuagcucccagugcgugaacuugaccacaagaacucaauuaccuccagccuacacuaauucuuucaccaggggcguauauuacccggacaagguguuucggucaaguguccugcacagcacacaggaucuauuccuccccuuuuucuccaacgugacuugguuucaugcuauccacguuucugggaccaauggaacaaaacgcuucgacaacccugugcugccauuuaaugauggugucuauuucgcaucgaccgagaagucaaacauuauacgaggcuggaucuuugggacuacacuugacagcaaaacccagagucuguugauugugaauaacgccacgaauguaguuaucaaggugugugaguuccaguuuugcaacgaucccuuccucggagucuacuaucauaaaaauaacaaguccuggauggagucugaguuccguguguacagcuccgcgaauaacuguacuuuugaguaugugucacaaccuuuccugauggaccuggaaggcaagcaggguaauuuuaaaaaccucagagaguucgucuuuaagaacauugauggguacuucaaaaucuacaguaagcacaccccaauaaauuuaguuagggaccugccccagggauuuagcgcucuugagccuuugguggaucugccaaucggcauuaacaucacacgguuccagacucuacucgcccugcaucgcucuuaucuuaccccgggcgacuccucaagcggguggacagcaggagccgcugcauacuauguagguuaccugcaacccagaaccuuuuugcucaaauauaaugaaaacggcacgauuacugaugccguggacugcgcucuggauccuuuaagugagacaaaguguacccugaagucuuucacugucgaaaaagggaucuaccagacauccaauuuuagggugcagccaaccgagagcauaguucgguuccccaacauuacgaaucucugcccuuuuggagagguguucaacgccacccgcuucgcgucggucuaugcauggaaucgaaagagaaucucuaacuguguggccgacuacuccguacuuuacaauucagcuaguuuuagcacauucaaaugcuauggcguuuccccaacuaagcugaacgacuuguguuuuaccaauguguacgccgauucuuucgucauuaggggugacgaagugcggcagaucgcacccgggcaaacaggaaaaaucgcugauuauaacuacaagcuaccggacgauuuuacuggcugcgucauugccuggaauagcaacaaccuggacucaaaagugggcgggaauuauaacuaccucuaucgucuguuccgcaagaguaaucuuaagccuuuugagagagauauauccaccgaaaucuaccaggcgggaagcacacccuguaacgguguugagggcuucaauugcuacuuuccacugcagucuuauggguuccaaccuaccaacggagugggcuaccagcccuauaggguagucguguugucauuugaacuccugcacgccccagcaacuguuugcggucccaaaaagaguacgaauuuagugaaaaacaagugugucaauuucaacuuuaaugggcugacaggcaccggagugcuaacugagagcaacaaaaaguuccucccuuuccagcaguuuggccgggacauugcugauaccacagacgccguacgagauccacaaacccuggagauccuugacauaacuccgugcuccuucgggggagugucuguuauuacacccgguacgaauaccucgaaccaggucgcuguguuguaccagggcgugaauuguacugaagucccuguugccauccacgcagaccagcugacaccaaccuggcgcguguauagcacaggguccaacguguuucaaacuagagccggaugccucaucggcgcugagcauguaaacaauucauacgaaugugauauucccaucggugcggggauuugcgcaaguuaucagacccagacgaacucuccuaggcgggcccgcagcgucgcuucccagucaauaaucgccuacaccaugagccugggcgcagaaaauucuguggccuacuccaacaauaguauugcuaucccaacaaacuucacuaucagcguuaccacagaaauucuucccgugucuaugacuaagaccuccgucgacuguacgauguauauaugcggagauucaacagaguguaguaaucuguugcuccaauacggcagcuuuugcacccagcugaacagagccuuaacugggaucgcaguggagcaggacaaaaauacacaggaaguuuucgcgcaagugaagcagauuuauaaaaccccgccuaucaaggauuuuggagguuucaacuuuucgcagauucugccagaccccuccaaaccuucuaagaggagcuucaucgaggaucuacucuuuaauaagguaacucuggcugacgccggcuucauaaaacaauacggggauugucuuggagacaucgcagcccgugauuugauuugcgcucagaaguucaacggccugaccguccugcccccacucuuaacagacgaaaugaucgcccaguauacgucagcacugcuugcugguaccauuacgaguggguggacauuuggcgccggagcggccuugcagaucccuuucgcuaugcaaauggcauaccgguuuaauggcauaggggugacccagaacgugcucuaugagaaucagaaacugauugccaaccaguucaacuccgcuaucggaaagauucaauacucucuaagcuccacagccucagcacugggcaaacuccaggaugucguuaaucagaacgcgcaggcccugaauacucuugugaagcaauugagcaguaacuuuggugcuaucucuuccguacugaaugacauauuaagccgacucgacaagguggaagccgagguccagaucgauagacugauuaccgggaggcuucagucgcugcaaacguacgugacacagcaguugauccgcgcagcugagauucgggccucagcaaaccucgccgcuaccaaaaugucugaaugcguucugggacagaguaagagaguggacuucuguggcaaagguuaucaccuaauguccuuuccccaaagcgcgccacauggcgucguguuccugcacguuacuuacgugccggcccaggagaagaauuuuaccacagcuccugcaaucugccacgaugggaaagcccauuuccccagggaaggagucuuuguaucuaacggcacucacugguucgugacccagcgcaauuuuuaugagccacagauaauuacaacggacaacaccuucguuagcgggaauugugauguggucaucggaaucgugaacaauacuguauacgacccccuccaaccugagcuggauuccuucaaggaagaacuugacaaauauuuuaagaaccauacaucaccagauguggacuugggcgauauuagugguaucaaugccagcgucguuaacauucagaaggaaauagaccgacugaaugagguggcuaaaaacuuaaacgaaucucucaucgaucugcaggagcuugggaaguacgagcaguauauuaaauggcccugguacaucuggcugggauucauugcaggccuaaucgccauagugauggucaccaucaugcucugcuguaugacuuccugcuguucaugccugaaggguuguugcaguuguggcagcugcugcaaauuugacgaagacgauuccgagccuguguugaaggggguuaagcugcacuacacaugaggacuagucccuguucccagagcccacuuuuuuuucuuuuuuugaaauaaaauagccugucuuucagaucucaaaggcucuuuucagagccaccaaaaaaaaaaaaaaaaaaaaaaaaaaaaaaaaaaaaaaaaaaaaaaaaaaaaaaaaaaaaaaaaaaaaaaaaaaaaaaaaaaaaaaaaaaaaaaaaaaaaa

SEQ ID NO: 12518 - RNA, 4094 nt, Artificial Sequence
  SARS-CoV-2/Portugal/PT0034/2020__EPI_ISL_418019 spike protein mRNA human (1-1273)
aggagagucccgcagucggcguccagcggcucugcuuguucgugugugugucguugcaggccuuauucaagcuuaccauguucguguuucugguccuccuuccccugguuagcucccagugcgugaacuugaccacaagaacucaauuaccuccagccuacacuaauucuuucaccaggggcguauauuacccggacaagguguuucggucaaguguccugcacagcacacaggaucuauuccuccccuuuuucuccaacgugacuugguuucaugcuauccacguuucugggaccaauggaacaaaacgcuucgacaacccugugcugccauuuaaugauggugucuauuucgcaucgaccgagaagucaaacauuauacgaggcuggaucuuugggacuacacuugacagcaaaacccagagucuguugauugugaauaacgccacgaauguaguuaucaaggugugugaguuccaguuuugcaacgaucccuuccucggagucuacuaucauaaaaauaacaaguccuggauggagucugaguuccguguguacagcuccgcgaauaacuguacuuuugaguaugugucacaaccuuuccugauggaccuggaaggcaagcaggguaauuuuaaaaaccucagagaguucgucuuuaagaacauugauggguacuucaaaaucuacaguaagcacaccccaauaaauuuaguuagggaccugccccagggauuuagcgcucuugagccuuugguggaucugccaaucggcauuaacaucacacgguuccagacucuacucgcccugcaucgcucuuaucuuaccccgggcgacuccucaagcggguggacagcaggagccgcugcauacuauguagguuaccugcaacccagaaccuuuuugcucaaauauaaugaaaacggcacgauuacugaugccguggacugcgcucuggauccuuuaagugagacaaaguguacccugaagucuuucacugucgaaaaagggaucuaccagacauccaauuuuagggugcagccaaccgagagcauaguucgguuccccaacauuacgaaucucugcccuuuuggagagguguucaacgccacccgcuucgcgucggucuaugcauggaaucgaaagagaaucucuaacuguguggccgacuacuccguacuuuacaauucagcuaguuuuagcacauucaaaugcuauggcguuuccccaacuaagcugaacgacuuguguuuuaccaauguguacgccgauucuuucgucauuaggggugacgaagugcggcagaucgcacccgggcaaacaggaaaaaucgcugauuauaacuacaagcuaccggacgauuuuacuggcugcgucauugccuggaauagcaacaaccuggacucaaaagugggcgggaauuauaacuaccucuaucgucuguuccgcaagaguaaucuuaagccuuuugagagagauauauccaccgaaaucuaccaggcgggaagcacacccuguaacgguguugagggcuucaauugcuacuuuccacugcagucuuauggguuccaaccuaccaacggagugggcuaccagcccuauaggguagucguguugucauuugaacuccugcacgccccagcaacuguuugcggucccaaaaagaguacgaauuuagugaaaaacaagugugucaauuucaacuuuaaugggcugacaggcaccggagugcuaacugagagcaacaaaaaguuccucccuuuccagcaguuuggccgggacauugcugauaccacagacgccguacgagauccacaaacccuggagauccuugacauaacuccgugcuccuucgggggagugucuguuauuacacccgguacgaauaccucgaaccaggucgcuguguuguaccagggcgugaauuguacugaagucccuguugccauccacgcagaccagcugacaccaaccuggcgcguguauagcacaggguccaacguguuucaaacuagagccggaugccucaucggcgcugagcauguaaacaauucauacgaaugugauauucccaucggugcggggauuugcgcaaguuaucagacccagacgaacucuccuaggcgggcccgcagcgucgcuucccagucaauaaucgccuacaccaugagccugggcgcagaaaauucuguggccuacuccaacaauaguauugcuaucccaacaaacuucacuaucagcguuaccacagaaauucuucccgugucuaugacuaagaccuccgucgacuguacgauguauauaugcggagauucaacagaguguaguaaucuguugcuccaauacggcagcuuuugcacccagcugaacagagccuuaacugggaucgcaguggagcaggacaaaaauacacaggaaguuuucgcgcaagugaagcagauuuauaaaaccccgccuaucaaggauuuuggagguuucaacuuuucgcagauucugccagaccccuccaaaccuucuaagaggagcuucaucgaggaucuacucuuuaauaagguaacucuggcugacgccggcuucauaaaacaauacggggauugucuuggagacaucgcagcccgugauuugauuugcgcucagaaguucaacggccugaccguccugcccccacucuuaacagacgaaaugaucgcccaguauacgucagcacugcuugcugguaccauuacgaguggguggacauuuggcgccggagcggccuugcagaucccuuucgcuaugcaaauggcauaccgguuuaauggcauaggggugacccagaacgugcucuaugagaaucagaaacugauugccaaccaguucaacuccgcuaucggaaagauucaagauucucuaagcuccacagccucagcacugggcaaacuccaggacgucguuaaucagaacgcgcaggcccugaauacucuugugaagcaauugagcaguaacuuuggugcuaucucuuccguacugaaugacauauuaagccgacucgauaagguggaagccgagguccagaucgacagacugauuaccgggaggcuucagucgcugcaaacguacgugacacagcaguugauccgcgcagcugagauucgggccucagcaaaccucgccgcuaccaaaaugucugaaugcguucugggacagaguaagagaguggauuucuguggcaaagguuaccaccuaauguccuuuccccaaagcgcgccacauggcgucguguuccugcacguuacuuaugugccggcccaggagaagaauuuuaccacagcuccugcaaucugccacgacgggaaagcccauuuccccagggaaggagucuuuguaucuaacggcacucacugguucgugacccagcgcaauuuuuacgagccacagauaauuacaacggauaacaccuucguuagcgggaauugugacguggucaucggaaucgugaacaauacuguauaugauccccuccaaccugagcuggacuccuucaaggaagaacuugauaaauacuuuaagaaccauacaucaccagacguggauuugggcgacauuagugguaucaaugccagcgucguuaacauucagaaggaaauagaucgacugaaugagguggcuaaaaacuuaaacgaaucucucaucgaccugcaggagcuugggaaguaugagcaguacauuaaauggcccugguauaucuggcugggauucauugcaggccuaaucgccauagugauggucaccaucaugcucugcuguauuacuuccugcuguucaugccugaaggguuguugcaguuguggcagcugcugcaaauuugacgaagaugacuccgagccuguguugaaggggguuaagcugcacuacacaugaggacuagucccuguucccagagcccacuuuuuuuucuuuuuuugaaauaaaauagccugucuuucagaucucaaaggcucuuuucagagccaccaaaaaaaaaaaaaaaaaaaaaaaaaaaaaaaaaaaaaaaaaaaaaaaaaaaaaaaaaaaaaaaaaaaaaaaaaaaaaaaaaaaaaaaaaaaaaaaaaaaaa

SEQ ID NO: 12519 - RNA, 4094 nt, Artificial Sequence
  SARS-CoV-2/Iceland/202/2020__EPI_ISL_417750 spike protein mRNA human (1-1273)
aggagagucccgcagucggcguccagcggcucugcuuguucgugugugugucguugcaggccuuauucaagcuuaccauguucguguuucugguccuccuuccccugguuagcucccagugcgugaacuugaccacaagaacucaauuaccuccagccuacacuaauucuuucaccaggggcguauauuacccggacaagguguuucggucaaguguccugcacagcacacaggaucuauuccuccccuuuuucuccaacgugacuugguuucaugcuauccacguuucugggaccaauggaacaaaacgcuucgacaacccugugcugccauuuaaugauggugucuauuucgcaucgaccgagaagucaaacauuauacgaggcuggaucuuugggacuacacuugacagcaaaacccagagucuguugauugugaauaacgccacgaauguaguuaucaaggugugugaguuccaguuuugcaacgaucccuuccucggagucuacuaucauaaaaauaacaaguccuggauggagucugaguuccguguguacagcuccgcgaauaacuguacuuuugaauaugugucacaaccuuuccugauggaccuggaaggcaagcaggguaauuuuaaaaaccucagagaguucgucuuuaagaacauugauggguacuucaaaaucuacaguaagcacaccccaauaaauuuaguuagggaccugccccagggauuuagcgcucuugagccuuugguggaucugccaaucggcauuaacaucacacgguuccagacucuacucgcccugcaucgcucuuaucuuaccccgggcgacuccucaagcggguggacagcaggagccgcugcauacuauguagguuaccugcaacccagaaccuuuuugcucaaauauaaugaaaacggcacgauuacugaugccguggacugcgcucuggauccuuuaagugagacaaaguguacccugaagucuuucacugucgaaaaagggaucuaccagacauccaauuuuagggugcagccaaccgagagcauaguucgguuccccaacauuacgaaucucugcccuuuuggagagguguucaacgccacccgcuucgcgucggucuaugcauggaaucgaaagagaaucucuaacuguguggccgacuacuccguacuuuacaauucagcuaguuuuagcacauucaaaugcuauggcguuuccccaacuaagcugaacgacuuguguuuuaccaauguguacgccgauucuuucgucauuaggggugacgaagugcggcagaucgcacccgggcaaacaggaaaaaucgcugauuauaacuacaagcuaccggacgauuuuacuggcugcgucauugccuggaauagcaacaaccuggacucaaaagugggcgggaauuauaacuaccucuaucgucuguuccgcaagaguaaucuuaagccuuuugagagagauauauccaccgaaaucuaccaggcgggaagcacacccuguaacgguguugagggcuucaauugcuacuuuccacugcagucuuauggguuccaaccuaccaacggagugggcuaccagcccuauaggguagucguguugucauuugaacuccugcacgccccagcaacuguuugcggucccaaaaagaguacgaauuuagugaaaaacaagugugucaauuucaacuuuaaugggcugacaggcaccggagugcuaacugagagcaacaaaaaguuccucccuuuccagcaguuuggccgggacauugcugauaccacagacgccguacgagauccacaaacccuggagauccuugacauaacuccgugcuccuucgggggagugucuguuauuacacccgguacgaauaccucgaaccaggucgcuguguuguaccaggacgugaauuguacugaagucccuguugccauccacgcagaucagcugacaccaaccuggcgcguguauagcacaggcuccaacguguuucaaacuagagccgggugccucaucggagcugagcauguaaacaauucauacgaaugugacauucccaucggcgcggguauuugcgcaaguuaucagacccagacgaacucuccuaggcgggcccgcagcgucgcuucccagucaauaaucgccuacaccaugagccugggggcagaaaauucuguggccuacuccaacaauaguauugcuaucccaacaaacuucacuaucagcguuaccacagaaauucuucccgugucuaugacuaagaccuccgucgauuguacgauguauauaugcggcgacucaacagaguguaguaaucuguugcuccaauacggcagcuuuugcacccagcugaacagagccuuaacuggaaucgcaguggagcaggauaaaaauacacaggaaguuuucgcgcaagugaagcagauuuauaaaaccccgccuaucaaggacuuugggggauucaacuuuucgcagauucugccagaucccuccaaaccuucuaagaggagcuucaucgaggaccuacucuuuaauaagguaacucuggcugaugccgguuucauaaaacaauacggcgacugucuuggggauaucgcagcccgugacuugauuugcgcucagaaguucaacggacugaccguccugcccccacucuuaacagaugaaaugaucgcccaguauacgucagcacugcuugcuggcaccauuacgagugguuggacauuuggggccggcgcggccuugcagaucccuuucgcuaugcaaauggcauaccgguuuaauggaauaggcgugacccagaacgugcucuaugagaaucagaaacugauugccaaccaguucaacuccgcuaucgggaagauucaagacucucuaagcuccacagccucagcacugggaaaacuccaggacgucguuaaucagaacgcgcaggcccugaauacucuugugaagcaauugagcaguaacuuuggcgcuaucucuuccguacugaaugauauauuaagccgacucgacaagguggaagccgagguccagaucgauagacugauuaccgguaggcuucagucgcugcaaacguacgugacacagcaguugauccgcgcagcugagauucgggccucagcaaaccucgccgcuaccaaaaugucugaaugcguucuggggcagaguaagagaguggacuucuguggaaaaggcuaccaccuaauguccuuuccccaaagcgcgccacauggugucguguuccugcacguuacuuaugugccggcccaggagaagaauuuuaccacagcuccugcaaucugccacgauggcaaagcccauuuccccagggaaggggucuuuguaucuaacggaacucacugguucgugacccagcgcaauuuuuacgagccacagauaauuacaacggacaacaccuucguuagcggcaauugugauguggucaucgggaucgugaacaauacuguauaugacccccuccaaccugagcuggauuccuucaaggaggaacuugacaaauacuuuaagaaccauacaucaccagauguggacuugggagauauucccggcaucaaugccagugucguuaacauucagaaggaaauagaccgacugaaugagguggcuaaaaacuuaaacgaaagccucaucgaccugcaggagcuugguaaguaugagcaguacauuaaauggccuugguauaucuggcugggguucauugcaggacuaaucgccauagugauggucaccaucaugcucugcuguaugacuucuugcuguuccugccugaagggcuguugcucaugugguaguugcugcaaauuugaugaagacgauagcgagccgguguugaagggcguuaagcugcacuacacaugaggacuagucccuguucccagagcccacuuuuuuuucuuuuuuugaaauaaaauagccugucuuucagaucucaaaggcucuuuucagagccaccaaaaaaaaaaaaaaaaaaaaaaaaaaaaaaaaaaaaaaaaaaaaaaaaaaaaaaaaaaaaaaaaaaaaaaaaaaaaaaaaaaaaaaaaaaaaaaaaaaaaa

SEQ ID NO: 12520 - RNA, 4094 nt, Artificial Sequence
  SARS-CoV-2/USA/WA-UW261/2020__EPI_ISL_418046 spike protein mRNA human (1-1273)
aggagagucccgcagucggcguccagcggcucugcuuguucgugugugugucguugcaggccuuauucaagcuuaccauguucguguuucugguccuccuuccccugguuagcucccagugcgugaacuugaccacaagaacucaauuaccuccagccuacacgaauagcuucaccaggggcguauauuacccggacaagguguuucggucaaguguccugcacagcacacaggaucuauuccuccccuuuuucuccaacgugacuugguuucaugcuauccacguuucugggaccaauggaacaaaacgcuucgacaacccugugcugccauuuaaugauggugucuauuucgcaucgaccgagaagucaaacauuauacgaggcuggaucuuugggacuacacuugacagcaaaacccagagucuguugauugugaauaacgccacgaauguaguuaucaaggugugugaguuccaguuuugcaacgaucccuuccucggagucuacuaucauaaaaauaacaaguccuggauggagucugaguuccguguguacagcuccgcgaauaacuguacuuuugaguaugugucacaaccuuuccugauggaccuggaaggcaagcaggguaauuuuaaaaaccucagagaguucgucuuuaagaacauugauggguacuucaaaaucuacaguaagcacaccccaauaaauuuaguuagggaccugccccagggauuuagcgcucuugagccuuugguggaucugccaaucggcauuaacaucacacgguuccagacucuacucgcccugcaucgcucuuaucuuaccccgggcgacuccucaagcggguggacagcaggagccgcugcauacuauguagguuaccugcaacccagaaccuuuuugcucaaauauaaugaaaacggcacgauuacugaugccguggacugcgcucuggauccuuuaagugagacaaaguguacccugaagucuuucacugucgaaaaagggaucuaccagacauccaauuuuagggugcagccaaccgagagcauaguucgguuccccaacauuacgaaucucugcccuuuuggagagguguucaacgccacccgcuucacaucggucuaugcguggaaucgaaagagaaucucuaacuguguggcagacuacuccguacuuuacaauucagccaguuuuagcacuuucaaaugcuauggcguuuccccaaccaagcugaacgacuuguguuuuacaaauguguacgcugauucuuucgucauuaggggugacgaagugcggcagaucgcccccgggcaaacuggaaaaaucgcagauuauaacuacaagcuaccggacgauuuuaccggcugcgucauugcuuggaauagcaacaaccuggacucaaaagugggcgggaauuauaacuaccucuaucgucuguuccgcaagaguaaucuuaagccuuuugagagagauauauccacagaaaucuaccaggccggaagcacccccuguaacgguguugagggcuucaauugcuacuuuccacugcagucuuauggguuccaaccuacuaacggagugggcuaccagcccuauaggguagucguguugucauuugaacuccugcacgcgccagccacgguuugcggucccaaaaagaguacaaauuuagugaaaaacaagugugucaauuucaacuuuaaugggcugaccggcacuggagugcuaaccgagagcaacaaaaaguuccucccuuuccagcaguuuggccgggacauugcagauacaaccgacgcuguacgagauccacaaacucuggagauccuugacauaacaccgugcuccuucgggggagugucuguuauuacgcccgguaccaauacuucgaaccaggucgccguguuguaccaggacgugaauuguacagaagucccuguugcuauccacgccgaucagcugaccccaacauggcgcguguauagcacuggcuccaacguguuucaaaccagagcagggugccucaucggagccgagcauguaaacaauucauacgaaugugacauucccaucggcgcugguauuugcgcgaguuaucagacgcagaccaacucuccuaggcgggcacgcagcgucgccucccagucaauaaucgcuuacacaaugagccugggggccgaaaauucuguggcauacuccaacaauaguauugccaucccaacuaacuucaccaucagcguuacaacugaaauucuucccgugucuaugaccaagacguccgucgauuguacaauguauauaugcggcgacucaaccgaguguaguaaucuguugcuccaauacggaucuuuuugcacucagcugaacagagcuuuaacaggcaucgccguggagcaggauaaaaauacccaggaaguuuucgcacaagugaagcagauuuauaaaacuccgccuaucaaggacuuugggggauucaacuuuucgcagauucugccagaucccuccaaaccuucuaagaggagcuucaucgaggaccuacucuuuaauaagguaacccuggcggaugcugguuucauaaaacaauacggcgacugucuuggggauaucgccgcacgugacuugauuugcgcccagaaguucaacggacugacaguccugcccccacucuuaacggaugaaaugaucgcucaguauaccucagcccugcuugcaggcacuauuacaagugguuggaccuuuggggcuggcgccgcguugcagaucccuuucgccaugcaaauggcuuaccgguuuaauggaauaggcgugacacagaacgugcucuaugagaaucagaaacugauugcaaaccaguucaacuccgccaucgggaagauucaagacucucuaagcuccacugcuucagcccugggaaaacuccaggacgucguuaaucagaacgcacaggcgcugaauacccuugugaagcaauugagcaguaacuuuggcgccaucucuuccguacugaaugauauauuaagccgacucgacaagguggaagcugagguccagaucgauagacugauuacggguaggcuucagucgcugcaaacauacgugacccagcaguugauccgcgccgcagagauucgggcuucagccaaccucgcagccacuaaaaugucugaaugcguucuggggcagaguaagagaguggacuucuguggaaaaggcuaccaccuaauguccuuuccccaaagcgcuccacauggugucguguuccugcacguuaccuaugugccggcgcaggagaagaauuuuacaacugccccugcaaucugccacgauggcaaagcucauuuccccagggaaggggucuuuguaucuaacggaacccacugguucgugacacagcgcaauuuuuacgagccacagauaauuacgaccgacaacacuuucguuagcggcaauugugauguggucaucgggaucgugaacaauacaguauaugacccccuccaaccugagcuggauuccuucaaggaagaacuugacaaauacuuuaagaaccauaccucaccagauguggacuugggagauauuaguggcaucaaugccagcgucguuaacauucagaaggaaauagaccgacugaaugagguggccaaaaacuuaaacgaaucucucaucgaccugcaggagcuugguaaguaugagcaguacauuaaauggcccugguauaucuggcugggguucauugcuggacuaaucgcaauagugauggucacuaucaugcucugcuguaugacauccugcuguucaugccugaagggcuguugcaguugugguagcugcugcaaauuugaugaagacgauuccgagccuguguugaagggcguuaagcugcacuacaccugaggacuagucccuguucccagagcccacuuuuuuuucuuuuuuugaaauaaaauagccugucuuucagaucucaaaggcucuuuucagagccaccaaaaaaaaaaaaaaaaaaaaaaaaaaaaaaaaaaaaaaaaaaaaaaaaaaaaaaaaaaaaaaaaaaaaaaaaaaaaaaaaaaaaaaaaaaaaaaaaaaaaa

SEQ ID NO: 12521 - RNA, 4094 nt, Artificial Sequence
  SARS-CoV-2/Portugal/PT0035/2020__EPI_ISL_418020 spike protein mRNA human (1-1273)
aggagagucccgcagucggcguccagcggcucugcuuguucgugugugugucguugcaggccuuauucaagcuuaccauguucguguuucugguccuccuuccccugguuagcucccagugcgugaacuugaccacaagaacucaauuaccuccagccuacacgaauagcuucaccaggggcguauauuacccggacaagguguuucggucaaguguccugcacagcacacaggaucuauuccuccccuuuuucuccaacgugacuugguuucaugcuauccacguuucugggaccaauggaacaaaacgcuucgacaacccugugcugccauuuaaugauggugucuauuucgcaucgaccgagaagucaaacauuauacgaggcuggaucuuugggacuacacuugacagcaaaacccagagucuguugauugugaauaacgccacgaauguaguuaucaaggugugugaguuccaguuuugcaacgaucccuuccucggagucuacuaucauaaaaauaacaaguccuggauggagucugaguuccguguguacagcuccgcgaauaacuguacuuuugaguaugugucacaaccuuuccugauggaccuggaaggcaagcaggguaauuuuaaaaaccucagagaguucgucuuuaagaacauugauggguacuucaaaaucuacaguaagcacaccccaauaaauuuaguuagggaccugccccagggauuuagcgcucuugagccuuugguggaucugccaaucggcauuaacaucacacgguuccagacucuacucgcccugcaucgcucuuaucuuaccccgggcgacuccucaagcggguggacagcaggagccgcugcauacuauguagguuaccugcaacccagaaccuuuuugcucaaauauaaugaaaacggcacgauuacugaugccguggacugcgcucuggauccuuuaagugagacaaaguguacccugaagucuuucacugucgaaaaagggaucuaccagacauccaauuuuagggugcagccaaccgagagcauaguucgguuccccaacauuacgaaucucugcccuuuuggagagguguucaacgccacccgcuucgcgucggucuaugcauggaaucgaaagagaaucucuaacuguguggccgacuacuccguacuuuacaauucagcuaguuuuagcacauucaaaugcuauggcguuuccccaacuaagcugaacgacuuguguuuuaccaauguguacgccgauucuuucgucauuaggggugacgaagugcggcagaucgcacccgggcaaacaggaaaaaucgcugauuauaacuacaagcuaccggacgauuuuacuggcugcgucauugccuggaauagcaacaaccuggacucaaaagugggcgggaauuauaacuaccucuaucgucuguuccgcaagaguaaucuuaagccuuuugagagagauauauccaccgaaaucuaccaggcgggaagcacacccuguaacgguguugagggcuucaauugcuacuuuccacugcagucuuauggguuccaaccuaccaacggagugggcuaccagcccuauaggguagucguguugucauuugaacuccugcacgccccagcaacuguuugcggucccaaaaagaguacgaauuuagugaaaaacaagugugucaauuucaacuuuaaugggcugacaggcaccggagugcuaacugagagcaacaaaaaguuccucccuuuccagcaguuuggccgggacauugcugauaccacagacgccguacgagauccacaaacccuggagauccuugacauaacuccgugcuccuucgggggagugucuguuauuacacccgguacgaauaccucgaaccaggucgcuguguuguaccaggacgugaauuguacugaagucccuguugccauccacgcagaucagcugacaccaaccuggcgcguguauagcacaggcuccaacguguuucaaacuagagccgggugccucaucggagcugagcauguaaacaauucauacgaaugugacauucccaucggcgcggguauuugcgcaaguuaucagacccagacgaacucuccuaggcgggcccgcagcgucgcuucccagucaauaaucgccuacaccaugagccugggggcagaaaauucuguggccuacuccaacaauaguauugcuaucccaacaaacuucacuaucagcguuaccacagaaauucuucccgugucuaugacuaagaccuccgucgauuguacgauguauauaugcggcgacucaacagaguguaguaaucuguugcuccaauacggaucuuuuugcacccagcugaacagagccuuaacuggcaucgcaguggagcaggauaaaaauacacaggaaguuuucgcgcaagugaagcagauuuauaaaaccccgccuaucaaggacuuugggggauucaacuuuucgcagauucugccagaucccuccaaaccuucuaagaggagcuucaucgaggaccuacucuuuaauaagguaacucuggcugaugccgguuucauaaaacaauacggcgacugucuuggggauaucucagcacgugacuugauuugcgcccagaaguucaacggacugaccguccugcccccacucuuaacagaugaaaugaucgcucaguauacgagugcccugcuugcaggcaccauuacuuccgguuggacauuuggggcuggcgccgcguugcagaucccuuucgccaugcaaauggcuuaccgguuuaauggaauaggcgugacccagaacgugcucuaugagaaucagaaacugauugcaaaccaguucaacucugccaucgggaagauucaagacagccuauccucaacagcuagcgcccugggaaaacuccaggacgucguuaaucagaacgcacaggcgcugaauacucuugugaagcaauugaguucuaacuuuggcgccaucuccagcguacugaaugauauauuaucgcgacucgacaagguggaagcugagguccagaucgauagacugauuaccgguaggcuucagucacugcaaacguacgugacacagcaguugauccgcgccgcagagauucgggcuucugccaaccucgcagccaccaaaaugagugaaugcguucuggggcaguccaagagaguggacuucuguggaaaaggcuaccaccuaaugagcuuuccccaaucugcuccacauggugucguguuccugcacguuacuuaugugccggcgcaggagaagaauuuuaccacagccccugcaaucugccacgauggcaaagcucauuuccccagggaaggggucuuuguaagcaacggaacucacugguucgugacccagcgcaauuuuuacgagccacagauaauuacaacggacaacaccuucguuuccggcaauugugauguggucaucgggaucgugaacaauacuguauaugacccccuccaaccugagcuggauucauucaaggaagaacuugacaaauacuuuaagaaccauacaaguccagauguggacuugggagauauuagcggcaucaaugccucugucguuaacauucagaaggaaauagaccgacugaaugagguggccaaaaacuuaaacgaaucccucaucgaccugcaggagcuugguaaguaugagcaguacauuaaauggcccugguauaucuggcugggguucauugcuggacuaaucgcaauagugauggucaccaucaugcucugcuguaugacuucaugcuguaguugccugaagggcuguugcagcugugguuccugcugcaaauuugaugaagacgauucugagccuguguugaagggcguuaagcugcacuacacaugaggacuagucccuguucccagagcccacuuuuuuuucuuuuuuugaaauaaaauagccugucuuucagaucucaaaggcucuuuucagagccaccaaaaaaaaaaaaaaaaaaaaaaaaaaaaaaaaaaaaaaaaaaaaaaaaaaaaaaaaaaaaaaaaaaaaaaaaaaaaaaaaaaaaaaaaaaaaaaaaaaaaa

SEQ ID NO: 12522 - RNA, 4094 nt, Artificial Sequence
  SARS-CoV-2/USA/NY-NYUMC7/2020__EPI_ISL_418192 spike protein mRNA human (1-1273)
aggagagucccgcagucggcguccagcggcucugcuuguucgugugugugucguugcaggccuuauucaagcuuaccauguucguguuucugguccuccuuccccugguuagcucccagugcgugaacuugaccacaagaacucaauuaccuccagccuacacuaauucuuucaccaggggcguauauuacccggacaagguguuucggucaaguguccugcacagcacacaggaucuauuccuccccuuuuucuccaacgugacuugguuucaugcuauccacguuucugggaccaauggaacaaaacgcuucgacaacccugugcugccauuuaaugauggugucuauuucgcaucgaccgagaagucaaacauuauacgaggcuggaucuuugggacuacacuugacagcaaaacccagagucuguugauugugaauaacgccacgaauguaguuaucaaggugugugaguuccaguuuugcaacgaucccuuccucggagucuaccaucacaaaaauaacaaguccuggauggagucugaguuccguguguauagcuccgcgaauaacuguacuuuugaguacgugucacaaccuuuccugauggaccuggaaggcaagcaggguaauuuuaaaaaccucagagaguucgucuuuaagaacauugauggguauuucaaaaucuacaguaagcauaccccaauaaauuuaguuagggaccugccccagggauuuagcgcucuugagccuuugguggaucugccaaucggcauuaacaucacacgguuccagacucuacucgcccugcaccgcucuuaccuuaccccgggcgacuccucaagcggguggacagcaggagccgcugcauauuacguagguuaucugcaacccagaaccuuuuugcucaaauacaaugaaaacggcacgauuacugaugccguggacugcgcucuggauccuuuaagugagacaaaguguacccugaagucuuucacugucgaaaaagggaucuaucagacauccaauuuuagggugcagccaaccgagagcauaguucgguuccccaacauuacgaaucucugcccuuuuggagagguguucaacgccacccgcuucgcgucggucuacgcauggaaucgaaagagaaucucuaacuguguggccgacuauuccguacuuuacaauucagcuaguuuuagcacauucaaaugcuacggcguuuccccaacuaagcugaacgacuuguguuuuaccaauguguaugccgauucuuucgucauuaggggugacgaagugcggcagaucgcacccgggcaaacaggaaaaaucgcugauuacaacuauaagcuaccggacgauuuuacuggcugcgucauugccuggaauagcaacaaccuggacucaaaagugggcgggaauuacaacuaucucuaccgucuguuccgcaagaguaaucuuaagccuuuugagagagauauauccaccgaaaucuaucaggcgggaagcacacccuguaacgguguugagggcuucaauugcuacuuuccacugcagucuuacggguuccaaccuaccaacggagugggcuaucagcccuacaggguagucguguugucauuugaacuccugcacgccccagcaacuguuugcggucccaaaaagaguacgaauuuagugaaaaacaagugugucaauuucaacuuuaaugggcugacaggcaccggagugcuaacugagagcaacaaaaaguuccucccuuuccagcaguuuggccgggacauugcugauaccacagacgccguacgagauccacaaacccuggagauccuugacauaacuccgugcuccuucgggggagugucuguuauuacacccgguacgaauaccucgaaccaggucgcuguguuguaucagggcgugaauuguacugaagucccuguugccauccaugcagaccagcugacaccaaccuggcgcguguacagcacaggguccaacguguuucaaacuagagccggaugccucaucggcgcugagcacguaaacaauucauaugaaugugauauucccaucggugcggggauuugcgcaaguuaccagacccagacgaacucuccuaggcgggcccgcagcgucgcuucccagucaauaaucgccuauaccaugagccugggcgcagaaaauucuguggccuacuccaacaauaguauugcuaucccaacaaacuucacuaucagcguuaccacagaaauucuucccgugucuaugacuaagaccuccgucgacuguacgauguacauaugcggagauucaacagaguguaguaaucuguugcuccaauauggcagcuuuugcacccagcugaacagagccuuaacugggaucgcaguggagcaggacaaaaauacacaggaaguuuucgcgcaagugaagcagauuuacaaaaccccgccuaucaaggauuuuggagguuucaacuuuucgcagauucugccagaccccuccaaaccuucuaagaggagcuucaucgaggaucuacucuuuaauaagguaacucuggcugacgccggcuucauaaaacaauauggggauugucuuggagacaucgcagcccgugauuugauuugcgcucagaaguucaacggccugaccguccugcccccacucuuaacagacgaaaugaucgcccaguacacgucagcacugcuugcugguaccauuacgaguggguggacauuuggcgccggagcggccuugcagaucccuuucgcuaugcaaauggcauaucgguuuaauggcauaggggugacccagaacgugcucuacgagaaucagaaacugauugccaaccaguucaacuccgcuaucggaaagauucaagauucucuaagcuccacagccucagcacugggcaaacuccaggacgucguuaaucagaacgcgcaggcccugaauacucuugugaagcaauugagcaguaacuuuggugcuaucucuuccguacugaaugacauauuaagccgacucgauaagguggaagccgagguccagaucgacagacugauuaccgggaggcuucagucgcugcaaacguaugugacacagcaguugauccgcgcagcugagauucgggccucagcaaaccucgccgcuaccaaaaugucugaaugcguucugggacagaguaagagaguggauuucuguggcaaagguuaccaucuaauguccuuuccccaaagcgcgccacacggcgucguguuccugcacguuacuuacgugccggcccaggagaagaauuuuaccacagcuccugcaaucugccaugacgggaaagcccacuuccccagggaaggagucuuuguaucuaacggcacucauugguucgugacccagcgcaauuuuuaugagccacagauaauuacaacggauaacaccuucguuagcgggaauugugacguggucaucggaaucgugaacaauacuguauacgauccccuccaaccugagcuggacuccuucaaggaagaacuugauaaauauuuuaagaaccacacaucaccagacguggauuugggcgacauuagugguaucaaugccagcgucguuaacauucagaaggaaauagaucgacugaaugagguggcuaaaaacuuaaacgaaucucucaucgaccugcaggagcuugggaaguacgagcaguauauuaaauggcccugguacaucuggcugggauucauugcaggccuaaucgccauagugauggucaccaucaugcucugcuguaugacuuccugcuguucaugccugaaggguuguugcaguuguggcagcugcugcaaauuugacgaagaugacuccgagccuguguugaaggggguuaagcugcauuauacaugaggacuagucccuguucccagagcccacuuuuuuuucuuuuuuugaaauaaaauagccugucuuucagaucucaaaggcucuuuucagagccaccaaaaaaaaaaaaaaaaaaaaaaaaaaaaaaaaaaaaaaaaaaaaaaaaaaaaaaaaaaaaaaaaaaaaaaaaaaaaaaaaaaaaaaaaaaaaaaaaaaaaa

SEQ ID NO: 12523 - RNA, 4094 nt, Artificial Sequence
  SARS-CoV-2/Iceland/189/2020__EPI_ISL_417709 spike protein mRNA human (1-1273)
aggagagucccgcagucggcguccagcggcucugcuuguucgugugugugucguugcaggccuuauucaagcuuaccauguucguguuucugguccuccuuccccugguuagcucccagugcgugaacuugaccacaagaacucaauuaccuccagccuacaccaauucuuucacgaggggcguauauuacccggacaagguguuucggucaaguguccugcacagcacacaggaucuauuccuccccuuuuucuccaacgugacuugguuucaugcuauccacguuucugggaccaauggaacaaaacgcuucgacaacccugugcugccauuuaaugauggugucuauuucgcaucgaccgagaagucaaacauuauacgaggcuggaucuuugggacuacacuugacagcaaaacccagagucuguugauugugaauaacgccacgaauguaguuaucaaggugugugaguuccaguuuugcaacgaucccuuccucggagucuacuaucauaaaaauaacaaguccuggauggagucugaguuccguguguacagcuccgcgaauaacuguacuuuugaguaugugucacaaccuuuccugauggaccuggaaggcaagcaggguaauuuuaaaaaccucagagaguucgucuuuaagaacauugauggguacuucaaaaucuacaguaagcacaccccaauaaauuuaguuagggaccugccccagggauuuagcgcucuugagccuuugguggaucugccaaucggcauuaacaucacacgguuccagacucuacucgcccugcaucgcucuuaucuuaccccgggcgacuccucaagcggguggacagcaggagccgcugcauacuauguagguuaccugcaacccagaaccuuuuugcucaaauauaaugaaaacggcacgauuacugaugccguggacugcgcucuggauccuuuaagugagacaaaguguacccugaagucuuucacugucgaaaaagggaucuaccagacauccaauuuuagggugcagccaaccgagagcauaguucgguuccccaacauuacgaaucucugcccuuuuggagagguguucaacgccacccgcuucgcgucggucuaugcauggaaucgaaagagaaucucuaacuguguggccgacuacuccguacuuuacaauucagcuaguuuuagcacauucaaaugcuauggcguuuccccaacuaagcugaacgacuuguguuuuaccaauguguacgccgauucuuucgucauuaggggugacgaagugcggcagaucgcacccgggcaaacaggaaaaaucgcugauuauaacuacaagcuaccggacgauuuuacuggcugcgucauugccuggaauagcaacaaccuggacucaaaagugggcgggaauuauaacuaccucuaucgucuguuccgcaagaguaaucuuaagccuuuugagagagauauauccaccgaaaucuaccaggcgggaagcacacccuguaacgguguugagggcuucaauugcuacuuuccacugcagucuuauggguuccaaccuaccaacggagugggcuaccagcccuauaggguagucguguugucauuugaacuccugcacgccccagcaacuguuugcggucccaaaaagaguacgaauuuagugaaaaacaagugugucaauuucaacuuuaaugggcugacaggcaccggagugcuaacugagagcaacaaaaaguuccucccuuuccagcaguuuggccgggacauugcugauaccacagacgccguacgagauccacaaacccuggagauccuugacauaacuccgugcuccuucgggggagugucuguuauuacacccgguacgaauaccucgaaccaggucgcuguguuguaccagggcgugaauuguacugaagucccuguugccauccacgcagaccagcugacaccaaccuggcgcguguauagcacaggguccaacguguuucaaacuagagccggaugccucaucggcgcugagcauguaaacaauucauacgaaugugauauucccaucggugcggggauuugcgcaaguuaucagacccagacgaacucuccuaggcgggcccgcagcgucgcuucccagucaauaaucgccuacaccaugagccugggcgcagaaaauucuguggccuacuccaacaauaguauugcuaucccaacaaacuucacuaucagcguuaccacagaaauucuucccgugucuaugacuaagaccuccgucgacuguacgauguauauaugcggagauucaacagaguguaguaaucuguugcuccaauacggcagcuuuugcacccagcugaacagagccuuaacugggaucgcaguggagcaggacaaaaauacacaggaaguuuucgcgcaagugaagcagauuuauaaaaccccgccuaucaaggauuuuggagguuucaacuuuucgcagauucugccagaccccuccaaaccuucuaagaggagcuucaucgaggaucuacucuuuaauaagguaacucuggcugacgccggcuucaccaaacaauacggggauugucuuggagacauagcagcccgugauuugaucugcgcucagaaguucaacggccugacaguccucccuccacuguuaacggacgaaaugauugcccaguauaccucagcacugcuugcugguacuaucacaaguggguggaccuuuggcgccggagcggccuugcagauuccuuucgcuaugcaaauggcauaccgguuuaauggcaucggggugacacagaacgugcucuaugagaaucagaaacugauagccaaccaguucaacuccgcuauuggaaagauccaagauucucuaagcuccacugccucagcacugggcaaacuccaggacgucguuaaucagaacgcgcaggcccugaauacccuugugaagcaauugagcaguaacuuuggugcuauuucuuccguacugaaugacaucuuaagccgacucgauaagguggaagccgagguccagauagacagacugaucacggggaggcuucagucgcugcaaacauacgugacccagcaguugauucgcgcagcugagauccgggccucagcaaaccucgccgcuacuaaaaugucugaaugcguucugggacagaguaagagaguggauuucuguggcaaagguuaccaccuaauguccuuuccccaaagcgcgccacauggcgucguguuccugcacguuaccuaugugccggcccaggagaagaauuuuacaacugcacccgcuauuugccacgacgggaaagcccauuuccccagggaaggagucuuuguaucuaacggcacccacugguucgugacacagcgcaauuuuuacgagccacagaucauaacgaccgauaacacuuucguuagcgggaauugugacguggucauuggaaucgugaacaauacaguauaugauccccuccaaccugagcuggacuccuucaaggaagaacuugauaaauacuuuaagaaccauaccucaccagacguggauuugggcgacaucagugguauuaaugccagcgucguuaacauccagaaggaaauugaucgacugaaugagguggcuaaaaacuuaaacgaaucucucauagaccugcaggagcuugggaaguaugagcaguacaucaaauggcccugguauauuuggcugggauucaucgcaggccuaauugccaucgugauggucacuauaaugcucugcuguaugacauccugcuguucaugccugaaggguuguugcaguuguggcagcugcugcaaauuugacgaagaugacuccgagccuguguugaaggggguuaagcugcacuacaccugaggacuagucccuguucccagagcccacuuuuuuuucuuuuuuugaaauaaaauagccugucuuucagaucucaaaggcucuuuucagagccaccaaaaaaaaaaaaaaaaaaaaaaaaaaaaaaaaaaaaaaaaaaaaaaaaaaaaaaaaaaaaaaaaaaaaaaaaaaaaaaaaaaaaaaaaaaaaaaaaaaaaa

SEQ ID NO: 12524 - RNA, 4094 nt, Artificial Sequence
  SARS-CoV-2/Australia/NSW56/2020__EPI_ISL_417408 spike protein mRNA human (1-1273)
aggagagucccgcagucggcguccagcggcucugcuuguucgugugugugucguugcaggccuuauucaagcuuaccauguucguguuucugguccuccuuccccugguuagcucccagugcgugaacuugaccacaagaacucaauuaccuccagccuacacgaauagcuucaccaggggcguauauuacccggacaagguguuucggucaaguguccugcacagcacacaggaucuauuccuccccuuuuucuccaacgugacuugguuucaugcuauccacguuucugggaccaauggaacaaaacgcuucgacaacccugugcugccauuuaaugauggugucuauuucgcaucgaccgagaagucaaacauuauacgaggcuggaucuuugggacuacacuugacagcaaaacccagagucuguugauugugaauaacgccacgaauguaguuaucaaggugugugaguuccaguuuugcaacgaucccuuccucggagucuacuaucauaaaaauaacaaguccuggauggagucugaguuccguguguacagcuccgcgaauaacuguacuuuugaguaugugucacaaccuuuccugauggaccuggaaggcaagcaggguaauuuuaaaaaccucagagaguucgucuuuaagaacauugauggguacuucaaaaucuacaguaagcacaccccaauaaauuuaguuagggaccugccccagggauuuagcgcucuugagccuuugguggaucugccaaucggcauuaacaucacacgguuccagacucuacucgcccugcaucgcucuuaucuuaccccgggcgacuccucaagcggguggacagcaggagccgcugcauacuauguagguuaccugcaacccagaaccuuuuugcucaaauauaaugaaaacggcacgauuacugaugccguggacugcgcucuggauccuuuaagugagacaaaguguacccugaagucuuucacugucgaaaaagggaucuaccagacauccaauuuuagggugcagccaaccgagagcauaguucgguuccccaacauuacgaaucucugcccuuuuggagagguguucaacgccacccgcuucgcgucggucuaugcauggaaucgaaagagaaucucuaacuguguggccgacuacuccguacuuuacaauucagcuaguuuuagcacauucaaaugcuauggcguuuccccaacuaagcugaacgacuuguguuuuaccaauguguacgccgauucuuucgucauuaggggugacgaagugcggcagaucgcacccgggcaaacaggaaaaaucgcugauuauaacuacaagcuaccggacgauuuuacuggcugcgucauugccuggaauagcaacaaccuggacucaaaagugggcgggaauuauaacuaccucuaucgucuguuccgcaagaguaaucuuaagccuuuugagagagauauauccaccgaaaucuaccaggcgggaagcacacccuguaacgguguugagggcuucaauugcuacuuuccacugcagucuuauggguuccaaccuaccaacggagugggcuaccagcccuauaggguagucguguugucauuugaacuccugcacgccccagcaacuguuugcggucccaaaaagaguacgaauuuagugaaaaacaagugugucaauuucaacuuuaaugggcugacaggcaccggagugcuaacugagagcaacaaaaaguuccucccuuuccagcaguuuggccgggacauugcugauaccacagacgccguacgagauccacaaacccuggagauccuugacauaacuccgugcuccuucgggggagugucuguuauuacacccgguacgaauaccucgaaccaggucgcuguguuguaccaggacgugaauuguacugaagucccuguugccauccacgcagaucagcugacaccaaccuggcgcguguauagcacaggcuccaacguguuucaaacuagagccgggugccucaucggagcugagcauguaaacaauucauacgaaugugacauucccaucggcgcggguauuugcgcaaguuaucagacccagacgaacucuccuaggcgggcccgcagcgucgcuucccagucaauaaucgccuacaccaugagccugggggcagaaaauucuguggccuacuccaacaauaguauugcuaucccaacaaacuucacuaucagcguuaccacagaaauucuucccgugucuaugacuaagaccuccgucgauuguacgauguauauaugcggcgacucaacagaguguaguaaucuguugcuccaauacggaucuuuuugcacccagcugaacagagccuuaacuggcaucgcaguggagcaggauaaaaauacacaggaaguuuucgcgcaagugaagcagauuuauaaaaccccgccuaucaaggacuuugggggauucaacuuuucgcagauucugccagauuccucuaaacccagcaagaggucauucaucgaggaccuacucuuuaauaagguaacucuggcugaugccgguuucauaaaacaauacggcgacugucuuggggauaucgcagcccgugacuugauuugcgcucagaaguucaacggacugaccguccucccuccccuguuaacagaugaaaugaucgcccaguauacgagugcacugcuugcuggcaccauuacuuccgguuggacauuuggggccggcgcggccuugcagaucccauucgcuaugcaaauggcauaccgguuuaauggaauaggcgugacccagaacgugcucuaugagaaucagaaacugauugccaaccaguucaacucugcuaucgggaagauucaagacagccuauccucaacagccagcgcacugggaaaacuccaggacgucguuaaucagaacgcgcaggcccugaauacucuugugaagcaauugaguucuaacuuuggcgcuaucuccagcguacugaaugauauauuaucgcgacucgacaagguggaagccgagguccagaucgauagacugauuaccgguaggcuucagucacugcaaacguacgugacacagcaguugauccgcgcagcugagauucgggccucugcaaaccucgccgcuaccaaaaugagugaaugcguucuggggcaguccaagagaguggacuucuguggaaaaggcuaccaccuaaugagcuuuccucaaucugcgccccauggugucguguuccugcacguuacuuaugugccagcccaggagaagaauuuuaccacagcaccggcuaucugccacgauggcaaagcccauuucccuagggaaggggucuuuguaagcaacggaacucacugguucgugacccagcgcaauuuuuacgagccccagauaauuacaacggacaacaccuucguuuccggcaauugugauguggucaucgggaucgugaacaauacuguauaugacccacuccaacccgagcuggauucauucaaggaagaacuugacaaauacuuuaagaaccauacaaguccugauguggacuugggagauauuagcggcaucaaugccucugucguuaacauucagaaggaaauagaccgacugaaugagguggcuaaaaacuuaaacgaaucccucaucgaccugcaggagcuugguaaguaugagcaguacauuaaauggccaugguauaucuggcugggguucauugcaggacuaaucgccauagugauggucaccaucaugcucugcuguaugacuucaugcuguaguugccugaagggcuguugcagcugugguuccugcugcaaauuugaugaagacgauucugagcccguguugaagggcguuaagcugcacuacacaugaggacuagucccuguucccagagcccacuuuuuuuucuuuuuuugaaauaaaauagccugucuuucagaucucaaaggcucuuuucagagccaccaaaaaaaaaaaaaaaaaaaaaaaaaaaaaaaaaaaaaaaaaaaaaaaaaaaaaaaaaaaaaaaaaaaaaaaaaaaaaaaaaaaaaaaaaaaaaaaaaaaaa

SEQ ID NO: 12525 - RNA, 4094 nt, Artificial Sequence
  SARS-CoV-2/Iceland/280/2020__EPI_ISL_417608 spike protein mRNA human (1-1273)
aggagagucccgcagucggcguccagcggcucugcuuguucgugugugugucguugcaggccuuauucaagcuuaccauguucguguuucugguccuccuuccccugguuagcucccagugcgugaacuugaccacaagaacucaauuaccuccagccuacacuaauucuuucaccaggggcguauauuacccggacaagguguuucggucaaguguccugcacagcacacaggaucuauuccuccccuuuuucuccaacgugacuugguuucaugcuauccacguuucugggaccaauggaacaaaacgcuucgacaacccugugcugccauuuaaugauggugucuauuucgcaucgaccgagaagucaaacauuauacgaggcuggaucuuugggacuacacuugacagcaaaacccagagucuguugauugugaauaacgccacgaauguaguuaucaaggugugugaguuccaguuuugcaacgaucccuuccucggagucuacuaucauaaaaauaacaaguccuggauggagucugaguuccguguguacagcuccgcgaauaacuguacuuuugaguaugugucacaaccuuuccugauggaccuggaaggcaagcaggguaauuuuaaaaaccucagagaguucgucuuuaagaacauugauggguacuucaaaaucuacaguaagcacaccccaauaaauuuaguuagggaccugccccagggauuuagcgcucuugagccuuugguggaucugccaaucggcauuaacaucacacgguuccagacucuacucgcccugcaucgcucuuaucuuaccccgggcgacuccucaagcggguggacagcaggagccgcugcauacuauguagguuaccugcaacccagaaccuuuuugcucaaauauaaugaaaacggcacgauuacugaugccguggacugcgcucuggauccuuuaagugagacaaaguguacccugaagucuuucacugucgaaaaagggaucuaccagacauccaauuuuagggugcagccaaccgagagcauaguucgguuccccaacauuacgaaucucugcccuuuuggagagguguucaacgccacccgcuucgcgucggucuaugcauggaaucgaaagagaaucucuaacuguguggccgacuacuccguacuuuacaauucagcuaguuuuagcacauucaaaugcuauggcguuuccccaacuaagcugaacgacuuguguuuuaccaauguguacgccgauucuuucgucauuaggggugacgaagugcggcagaucgcacccgggcaaacaggaaaaaucgcugauuauaacuacaagcuaccggacgauuuuacuggcugcgucauugccuggaauagcaacaaccuggacucaaaagugggcgggaauuauaacuaccucuaucgucuguuccgcaagaguaaucuuaagccuuuugagagagauauauccaccgaaaucuaccaggcgggaagcacacccuguaacgguguugagggcuucaauugcuacuuuccacugcagucuuauggguuccaaccuaccaacggagugggcuaccagcccuauaggguagucguguugucauuugaacuccugcacgccccagcaacuguuugcggucccaaaaagaguacgaauuuagugaaaaacaagugugucaauuucaacuuuaaugggcugacaggcaccggagugcuaacugagagcaacaaaaaguuccucccuuuccagcaguuuggccgggacauugcugauaccacagacgccguacgagauccacaaacccuggagauccuugacauaacuccgugcuccuucgggggagugucuguuauuacacccgguacgaauaccucgaaccaggucgcuguguuguaccagggcgugaauuguacugaagucccuguugccauccacgcagaccagcugacaccaaccuggcgcguguauagcacaggguccaacguguuucaaacuagagccggaugccucaucggcgcugagcauguaaacaauucauacgaaugugauauucccaucggugcggggauuugcgcaaguuaucacacccagacgaacucuccuaggcgggcccgcagcgucgcuucccagucaauaaucgccuacaccaugagccugggcgcagaaaauucuguggccuacuccaacaauaguauugcuaucccaacaaacuucacuaucagcguuaccacagaaauucuucccgugucuaugacuaagaccuccgucgacuguacgauguauauaugcggagauucaacagaguguaguaaucuguugcuccaguacggcagcuuuugcacccaacugaacagagccuuaacugggaucgcaguggagcaggacaaaaauacacaggaaguuuucgcacaggugaagcaaauuuauaaaaccccgccuaucaaggauuuuggagguuucaacuuuucgcagauucugccagaccccuccaaaccuucuaagaggagcuucaucgaggaucuacucuuuaauaagguaacucuggcugacgccggcuucauaaaacaguacggggauugucuuggagacaucgcagcccgugauuugauuugcgcucaaaaguucaacggccugaccguccugcccccacucuuaacagacgaaaugaucgcccaguauacgucagcacugcuugcugguaccauuacgaguggguggacauuuggcgccggagcggccuugcagaucccuuucgcuaugcagauggcauaccgguuuaauggcauaggggugacccaaaacgugcucuaugagaaucagaaacugauugccaaccaguucaacuccgcuaucggaaagauucaggauucucuaagcuccacagccucagcacugggcaaacuccaagacgucguuaaucagaacgcgcaggcccugaauacucuugugaagcaguugagcaguaacuuuggugcuaucucuuccguacugaaugacauauuaagccgacucgauaagguggaagccgagguccaaaucgacagacugauuaccgggaggcuucagucgcugcagacguacgugacacaacaguugauccgcgcagcugagauucgggccucagcaaaccucgccgcuaccaaaaugucugaaugcguucugggacagaguaagagaguggauuucuguggcaaagguuaccaucuaauguccuuuccccagagcgcgccacacggcgucguguuccugcacguuacuuaugugccggcccaagagaagaauuuuaccacagcgccugcuaucugccaugacgggaaagcccacuuccccagggaaggagucuuuguaucuaacggcacucauugguucgugacccagcgcaauuuuuacgagccacagauaauuacaacggauaacaccuucguuagcgggaauugugacguggucaucggaaucgugaacaauacuguauaugauccccuccagccugagcuggacuccuucaaggaagaacuugauaaauacuuuaagaaccacacaucaccagacguggauuugggcgacauuagugguaucaaugccagcgucguuaacauucaaaaggaaauagaucgacugaaugagguggcuaaaaacuuaaacgaaucucucaucgaccugcaggagcuugggaaguaugagcaguacauuaaauggcccugguauaucuggcugggauucauugcaggccuaaucgccauagugauggucaccaucaugcucugcuguaugacuuccugcuguucaugccugaaggguuguugcaguuguggcagcugcugcaaauuugacgaagaugacuccgagccuguguugaaggggguuaagcugcauuacacaugaggacuagucccuguucccagagcccacuuuuuuuucuuuuuuugaaauaaaauagccugucuuucagaucucaaaggcucuuuucagagccaccaaaaaaaaaaaaaaaaaaaaaaaaaaaaaaaaaaaaaaaaaaaaaaaaaaaaaaaaaaaaaaaaaaaaaaaaaaaaaaaaaaaaaaaaaaaaaaaaaaaaa

SEQ ID NO: 12526 - RNA, 4094 nt, Artificial Sequence
  SARS-CoV-2/Iceland/247/2020__EPI_ISL_417575 spike protein mRNA human (1-1273)
aggagagucccgcagucggcguccagcggcucugcuuguucgugugugugucguugcaggccuuauucaagcuuaccauguucguguuucugguccuccuuccccugguuagcucccagugcgugaacuugaccacaagaacucaauuaccuccagccuacacuaauucuuucaccaggggcguauauuacccggacaagguguuucggucaaguguccugcacagcacacaggaucuauuccuccccuuuuucuccaacgugacuugguuucaugcuauccacguuucugggaccaauggaacaaaacgcuucgacaacccugugcugccauuuaaugauggugucuauuucgcaucgaccgagaagucaaacauuauacgaggcuggaucuuugggacuacacuugacagcaaaacccagagucuguugauugugaauaacgccacgaauguaguuaucaaggugugugaguuccaguuuugcaacgaucccuuccucggagucuacuaucauaaaaauaacaaguccuggauggagucugaguuccguguguacagcuccgcgaauaacuguacuuuugaguaugugucacaaccuuuccugauggaccuggaaggcaagcaggguaauuuuaaaaaccucagagaguucgucuuuaagaacauugauggguacuucaaaaucuacaguaagcacaccccaauaaauuuaguuagggaccugccccagggauuuagcgcucuugagccuuugguggaucugccaaucggcauuaacaucacacgguuccagacucuacucgcccugcaucgcucuuaucuuaccccgggcgacuccucaagcggguggacagcaggagccgcugcauacuauguagguuaccugcaacccagaaccuuuuugcucaaauauaaugaaaacggcacgauuacugaugccguggacugcgcucuggauccuuuaagugagacaaaguguacccugaagucuuucacugucgaaaaagggaucuaccagacauccaauuuuagggugcagccaaccgagagcauaguucgguuccccaacauuacgaaucucugcccuuuuggagagguguucaacgccacccgcuucgcgucggucuaugcauggaaucgaaagagaaucucuaacuguguggccgacuacuccguacuuuacaauucagcuaguuuuagcacauucaaaugcuauggcguuuccccaacuaagcugaacgacuuguguuuuaccaauguguacgccgauucuuucgucauuaggggugacgaagugcggcagaucgcacccgggcaaacaggaaaaaucgcugauuauaacuacaagcuaccggacgauuuuacuggcugcgucauugccuggaauagcaacaaccuggacucaaaagugggcgggaauuauaacuaccucuaucgucuguuccgcaagaguaaucuuaagccuuuugagagagauauauccaccgaaaucuaccaggcgggaagcacacccuguaacgguguugagggcuucaauugcuacuuuccacugcagucuuauggguuccaaccuaccaacggagugggcuaccagcccuauaggguagucguguugucauuugaacuccugcacgccccagcaacuguuugcggucccaaaaagaguacgaauuuagugaaaaacaagugugucaauuucaacuuuaaugggcugacaggcaccggagugcuaacugagagcaacaaaaaguuccucccuuuccagcaguuuggccgggacauugcugauaccacagacgccguacgagauccacaaacccuggagauccuugacauaacuccgugcuccuucgggggagugucuguuauuacacccgguacgaauaccucgaaccaggucgcuguguuguaccagggcgugaauuguacugaagucccuguugccauccacgcagaccagcugacaccaaccuggcgcguguauagcacaggguccaacguguuucaaacuagagccggaugccucaucggcgcugagcauguaaacaauucauacgaaugugauauucccaucggugcggggauuugcgcaaguuaucagacccagacgaacucuccuaggcgggcccgcagcgucgcuucccagucaauaaucgccuacaccaugagccugggcgcagaaaauucuguggccuacuccaacaauaguauugcuaucccaacaaacuucacuaucagcguuaccacagaaauucuucccgugucuaugacuaagaccuccgucgacuguacgauguauauaugcggagauucaacagaguguaguaaucuguugcuccaauacggcagcuuuugcacccagcugaacagagccuuaacugggaucgcaguggagcaggacaaaaauacacaggaaguuuucgcgcaagugaagcagauuuauaaaaccccgccuaucaaggauuuuggagguuucaacuuuucgcagauucugccagaccccuccaaaccuucuaagaggagcuucaucgaggaucuacucuuuaauaagguaacucuggcugacgccggcuucauaaaacaauacggggauugucuuggagacaucgcagcccgugauuugauuugcgcucagaaguucaacggccugaccguccugcccccacucuuaacagacgaaaugaucgcccaguauacgucagcacugcuugcugguaccauuacgaguggguggacauuuggcgccggagcggccuugcagaucccuuucgcuaugcaaauggcauaccgguuuaauggcauaggggugacccagaacgugcucuaugagaaucagaaacugauugccaaccaguucaacuccgcuaucggaaagauucaagauucucuaagcuccacagccucagcacugggcaaacuccaggacgucguuaaucagaacgcgcaggcccugaauacucuugugaagcaauugagcaguaacuuuggugcuaucucuuccguacugaaugacauauuaagccgacucgauaagguggaagccgagguccagaucgacagacugauuaccgggaggcuucagucgcugcaaacguacgugacacagcaguugauccgcgcagcugagauucgggccucagcaaaccucgccgcuaccaaaaugucugaaugcguucugggacagaguaagagaguggauuucuguggcaaagguuaccaccuaauguccuuuccccaaagcgcgccacauggcgucguguuccugcacguuacuuaugugccggcccaggagaagaauuuuaccacagcuccugcaaucugccacgacgggaaagcccauuuccccagggaaggagucuuuguaucuaacggcacucacugguucgugacccagcgcaauuuuuacgagccacagauaauuacaacggauaacaccuucguuagcgggaauugugacguggucaucggaaucgugaacaauacuguauaugauccccuccaaccugagcuggacuccuucaaggaagaacuugauaaauacuuuaagaaccauacaucaccagacguggauuugggcgacauuagugguaucaaugccagcgucguuaacauucagaaggaaauagaucgacugaaugagguggcuaaaaacuuaaacgaaucucucaucgaccugcaggagcuugggaaguaugagcaguacauuaaauggcccugguauaucuggcugggauucauugcaggccuaaucgccauagugaucgucaccauuaugcucugcuguaugacuuccugcuguucaugccugaaggguuguugcaguuguggcagcugcugcaaauuugacgaagaugacuccgagccuguguugaaggggguuaagcugcacuacacaugaggacuagucccuguucccagagcccacuuuuuuuucuuuuuuugaaauaaaauagccugucuuucagaucucaaaggcucuuuucagagccaccaaaaaaaaaaaaaaaaaaaaaaaaaaaaaaaaaaaaaaaaaaaaaaaaaaaaaaaaaaaaaaaaaaaaaaaaaaaaaaaaaaaaaaaaaaaaaaaaaaaaa

SEQ ID NO: 12527 - RNA, 4094 nt, Artificial Sequence
  SARS-CoV-2/Iceland/238/2020__EPI_ISL_417566 spike protein mRNA human (1-1273)
aggagagucccgcagucggcguccagcggcucugcuuguucgugugugugucguugcaggccuuauucaagcuuaccauguucguguuucugguccuccuuccccugguuagcucccagugcgugaacuugaccacaagaacucaauuaccuccagccuacacuaauucuuucaccaggggcguauauuacccggacaagguguuucggucaaguguccugcacagcacacaggaucuauuccuccccuuuuucuccaacgugacuugguuucaugcuauccacguuucugggaccaauggaacaaaacgcuucgacaacccugugcugccauuuaaugauggugucuauuucgcaucgaccgagaagucaaacauuauacgaggcuggaucuuugggacuacacuugacagcaaaacccagagucuguugauugugaauaacgccacgaauguaguuaucaaggugugugaguuccaguuuugcaacgaucccuuccucggagucuacuaucauaaaaauaacaaguccuggauggagucugaguuccguguguacagcuccgcgaauaacuguacuuuugaguaugugucacaaccuuuccugauggaccuggaaggcaagcaggguaauuuuaaaaaccucagagaguucgucuuuaagaacauugauggguacuucaaaaucuacaguaagcacaccccaauaaauuuaguuagggaccugccccagggauuuagcgcucuugagccuuugguggaucugccaaucggcauuaacaucacacgguuccagacucuacucgcccugcaucgcucuuaucuuaccccgggcgacuccucaagcggguggacagcaggagccgcugcauacuauguagguuaccugcaacccagaaccuuuuugcucaaauauaaugaaaacggcacgauuacugaugccguggacugcgcucuggauccuuuaagugagacaaaguguacccugaagucuuucacugucgaaaaagggaucuaccagacauccaauuuuagggugcagccaaccgagagcauaguucgguuccccaacauuacgaaucucugcccuuuuggagagguguucaacgccacccgcuucgcgucggucuaugcauggaaucgaaagagaaucucuaacuguguggccgacuacuccguacuuuacaauucagcuaguuuuagcacauucaaaugcuauggcguuuccccaacuaagcugaacgacuuguguuuuaccaauguguacgccgauucuuucgucauuaggggugacgaagugcggcagaucgcacccgggcaaacaggaaaaaucgcugauuauaacuacaagcuaccggacgauuuuacuggcugcgucauugccuggaauagcaacaaccuggacucaaaagugggcgggaauuauaacuaccucuaucgucuguuccgcaagaguaaucuuaagccuuuugagagagauauauccaccgaaaucuaccaggcgggaagcacacccuguaacgguguugagggcuucaauugcuacuuuccacugcagucuuauggguuccaaccuaccaacggagugggcuaccagcccuauaggguagucguguugucauuugaacuccugcacgccccagcaacuguuugcggucccaaaaagaguacgaauuuagugaaaaacaagugugucaauuucaacuuuaaugggcugacaggcaccggagugcuaacugagagcaacaaaaaguuccucccuuuccagcaguuuggccgggacauugcugauaccacagacgccguacgagauccacaaacccuggagauccuugacauaacuccgugcuccuucgggggagugucuguuauuacacccgguacgaauaccucgaaccaggucgcuguguuguaccagggcgugaauuguacugaagucccuguugccauccacgcagaccagcugacaccaaccuggcgcguguauagcacaggguccaacguguuucaaacuagagccggaugccucaucggcgcugagcauguaaacaauucauacgaaugugauauucccaucggugcggggauuugcgcaaguuaucagacccagacgaacucuccuaggcgggcccgcagcgucgcuucccagucaauaaucgccuacaccaugagccugggcgcagaaaauucuguggccuacuccaacaauaguauugcuaucccaacaaacuucacuaucagcguuaccacagaaauucuucccgugucuaugacuaagaccuccgucgacuguacgauguauauaugcggagauucaacagaguguaguaaucuguugcuccaauacggcagcuuuugcacccagcugaacagagccuuaacugggaucgcaguggagcaggacaaaaauacacaggaaguuuucgcgcaagugaagcagauuuauaaaaccccgccuaucaaggauuuuggagguuucaacuuuucgcagauucugccagaccccuccaaaccuucuaagaggagcuucaucgaggaucuacucuuuaauaagguaacucuggcugacgucggcuucauaaaacaauacggggauugucuuggagacaucgccgcacgugauuugauuugcgcccagaaguucaacggccugaccgugcugcccccacucuuaacagacgaaaugaucgcucaguauacgucagcccugcuugcagguaccauuacgaguggguggacauuuggcgcuggagccgcguugcagaucccuuucgccaugcaaauggcuuaccgguuuaauggcauaggggugacccagaacguccucuaugagaaucagaaacugauugcaaaccaguucaacuccgccaucggaaagauucaagauucucuaagcuccacagcuucagcccugggcaaacuccaggacguugugaaucagaacgcacaggcgcugaauacucuuguaaagcaauugagcaguaacuuuggugccaucucuuccgugcugaaugacauauuaagccgacucgauaaggucgaagcugaggugcagaucgacagacugauuaccgggaggcuucagucgcugcaaacguacguuacacagcaguugauccgcgccgcagagauucgggcuucagccaaccucgcagccaccaaaaugucugaaugcgugcugggacagaguaagagagucgauuucuguggcaaagguuaccaccuaauguccuuuccccaaagcgcuccacauggcgugguuuuccugcacgugacuuaugucccggcgcaggagaagaauuuuaccacagccccugcaaucugccacgacgggaaagcucauuuccccagggaaggaguauuugugucuaacggcacucacugguucguuacccagcgcaauuuuuacgagccacagauaauuacaacggauaacaccuucgugagcgggaauugugacgucgugaucggaaucguaaacaauacuguguaugauccccuccaaccugagcuggacuccuucaaggaagaacuugauaaauacuuuaagaaccauacaucaccagacgucgauuugggcgacauuagugguaucaaugccagcguugugaacauucagaaggaaauagaucgacugaaugagguggccaaaaacuuaaacgaaucucucaucgaccugcaggagcuugggaaguaugagcaguacauuaaauggcccugguauaucuggcugggauucauugcuggccuaaucgcaauagucauggugaccaucaugcucugcuguaugacuuccugcuguucaugccugaaggguuguugcaguuguggcagcugcugcaaauuugacgaagaugacuccgagccuguuuugaaggggguaaagcugcacuacacaugaggacuagucccuguucccagagcccacuuuuuuuucuuuuuuugaaauaaaauagccugucuuucagaucucaaaggcucuuuucagagccaccaaaaaaaaaaaaaaaaaaaaaaaaaaaaaaaaaaaaaaaaaaaaaaaaaaaaaaaaaaaaaaaaaaaaaaaaaaaaaaaaaaaaaaaaaaaaaaaaaaaaa

SEQ ID NO: 12528 - RNA, 4094 nt, Artificial Sequence
  SARS-CoV-2/Greece/16/2020__EPI_ISL_418265 spike protein mRNA human (1-1273)
aggagagucccgcagucggcguccagcggcucugcuuguucgugugugugucguugcaggccuuauucaagcuuaccauguucguguuucugguccuccuuccccugguuagcucccagugcgugaacuugaccacaagaacucaauuaccuccagccuacacuaauucuuucaccaggggcguauauuacccggacaagguguuucggucaaguguccugcacagcacacaggaucuauuccuccccuuuuucuccaacgugacuugguuucaugcuauccacguuucugggaccaauggaacaaaacgcuucgacaacccugugcugccauuuaaugauggugucuauuucgcaucgaccgagaagucaaacauuauacgaggcuggaucuuugggacuacacuugacagcaaaacccagagucuguugauugugaauaacgccacgaauguaguuaucaaggugugugaguuccaguuuugcaacgaucccuuccucggagucuacuaucauaaaaauaacaaguccuggauggagucugaguuccguguguacagcuccgcgaauaacuguacuuuugaauaugugucacaaccuuuccugauggaccuggaaggcaagcaggguaauuuuaaaaaccucagagaguucgucuuuaagaacguugauggguacuucaaaauuuacaguaagcacaccccaaucaauuuagugagggaccugccccagggauuuagcgcucuugagccuuugguagaucugccaauaggcaucaacauuacacgguuccagacucuacucgcccugcaucgcucuuaucuuaccccgggcgacuccucaagcggguggacagcaggagccgcugcauacuauguggguuaccugcaacccagaaccuuuuugcucaaauauaaugaaaacggcacgaucacugaugccgucgacugcgcucuggauccuuuaagugagacaaaguguacccugaagucuuucacuguggaaaaagggauuuaccagacauccaauuuuaggguucagccaaccgagagcaucgugcgguuccccaacauaacgaaucucugcccuuuuggagaggucuucaacgccacccgcuucgcgucgguguaugcauggaaucgaaagagaauuucuaacuguguagccgacuacuccguucuuuacaauucagcuaguuuuagcacauucaaaugcuauggcguguccccaacuaagcugaacgacuuguguuuuaccaaugucuacgccgauucuuucgugaucaggggugacgaaguccggcagauugcacccgggcaaacaggaaaaaucgcugauuauaacuacaagcuaccggacgauuuuacuggcugcgugaucgccuggaauagcaacaaccuggacucaaaaguuggcgggaauuauaacuaccucuaucgucuguuccgcaagaguaaucuuaagccuuuugagagagauauuuccaccgaaauauaccaggcgggaagcacacccuguaacgguguggagggcuucaauugcuacuuuccacugcagucuuauggguuccaaccuaccaacggaguaggcuaccagcccuauagggucgugguuuugucauuugaacuccugcacgccccagcaacugugugcggucccaaaaagaguacgaauuuagucaaaaacaagugugugaauuucaacuuuaaugggcugacaggcaccggaguacuaacugagagcaacaaaaaguuccucccuuuccagcaguuuggccgggacaucgcugauaccacagacgccgugcgagauccacaaacccuggagauucuugacaucacuccgugcuccuucgggggaguuucugucauaacacccgguacgaauaccucgaaccagguggcuguguuguaccaggacgucaauuguacugaaguuccuguggccauucacgcagaucagcugacaccaaccuggcgcguguauagcacaggcuccaacguauuucaaacuagagccgggugccucaucggagcugagcaugucaacaauucauacgaaugugacauccccauuggcgcggguaucugcgcaaguuaucagacccagacgaacucuccuaggcgggcccgcagcguggcuucccagucaauuauagccuacaccaugagccugggggcagaaaauucuguugccuacuccaacaauaguaucgcuauuccaacaaacuucacuaucagcgugaccacagaaauccuucccgucucuaugacuaagaccuccguggauuguacgauguauauuugcggcgacucaacagaguguaguaaucuguugcuccaauacggcagcuuuugcacccagcugaacagagccuuaacuggaauagcaguugagcaggauaaaaauacacaggaaguguucgcgcaaguaaagcagaucuauaaaaccccgccuauuaaggacuuugggggauucaacuuuucgcagauccugccagaucccuccaaaccuucuaagaggagcuucauugaggaccuacucuuuaauaaggucacucuggcugaugccgguuucaucaaacaauacggcgacugucuuggggauauagcagcccgugacuugaucugcgcucagaaguucaacggacugaccgugcugcccccacucuuaacagaugaaaugauugcccaguauacgucagcacugcuugcuggcaccaucacgagugguuggacauuuggggccggcgcggccuugcagauuccuuucgcuaugcaaauggcauaccgguuuaauggaaucggcgugacccagaacguccucuaugagaaucagaaacugauagccaaccaguucaacuccgcuauugggaagauccaagacucucuaagcuccacagccucagcacugggaaaacuccaggacguugugaaucagaacgcgcaggcccugaauacucuuguaaagcaauugagcaguaacuuuggcgcuauuucuuccgugcugaaugauaucuuaagccgacucgacaaggucgaagccgaggugcagauagauagacugaucaccgguaggcuucagucgcugcaaacguacguuacacagcaguugauucgcgcagcugagauccgggccucagcaaaccucgccgcuaccaaaaugucugaaugcgugcuggggcagaguaagagagucgacuucuguggaaaaggcuaccaccuaauguccuuuccccaaagcgcgccacauggugugguuuuccugcacgugacuuaugucccggcccaggagaagaauuuuaccacagcuccugcaauuugccacgauggcaaagcccauuuccccagggaagggguauuugugucuaacggaacucacugguucguuacccagcgcaauuuuuacgagccacagaucauaacaacggacaacaccuucgugagcggcaauugugaugucgugauugggaucguaaacaauacuguguaugacccccuccaaccugagcuggauuccuucaaggaggaacuugacaaauacuuuaagaaccauacaucaccagaugucgacuugggagauaucaguggcauuaaugccagcguugugaacauccagaaggaaauugaccgacugaaugagguggcuaaaaacuuaaacgaaucucucauagaccugcaggagcuugguaaguaugagcaguacaucaaauggcccugguauauuuggcugggguucaucgcaggacuaauugccaucgucauggugaccauaaugcucugcuguaugacuuccugcuguucaugccugaagggcuguugcaguugugguagcugcugcaaauuugaugaagacgauuccgagccuguuuugaagggcguaaagcugcacuacacaugaggacuagucccuguucccagagcccacuuuuuuuucuuuuuuugaaauaaaauagccugucuuucagaucucaaaggcucuuuucagagccaccaaaaaaaaaaaaaaaaaaaaaaaaaaaaaaaaaaaaaaaaaaaaaaaaaaaaaaaaaaaaaaaaaaaaaaaaaaaaaaaaaaaaaaaaaaaaaaaaaaaaa

SEQ ID NO: 12529 - RNA, 4094 nt, Artificial Sequence
  SARS-CoV-2/Iceland/319/2020__EPI_ISL_417648 spike protein mRNA human (1-1273)
aggagagucccgcagucggcguccagcggcucugcuuguucgugugugugucguugcaggccuuauucaagcuuaccauguucguguuucugguccuccuuccccugguuagcucccagugcgugaacuugaccacaagaacucaauuaccuccagccuacacuaauucuuucaccaggggcguauauuacccggacaagguguuucggucaaguguccugcacagcacacaggaucuauuccuccccuuuuucuccaacgugacuugguuucaugcuauccacguuucugggaccaauggaacaaaacgcuucgacaacccugugcugccauuuaaugauggugucuauuucgcaucgaccgagaagucaaacauuauacgaggcuggaucuuugggacuacacuugacagcaaaacccagagucuguugauugugaauaacgccacgaauguaguuaucaaggugugugaguuccaguuuugcaacgaucccuuccucggagucuacuaucauaaaaauaacaaguccuggauggagucugaguuccguguguacagcuccgcgaauaacuguacuuuugaguaugugucacaaccuuuccugauugaccuggaaggcaagcaggguaauuuuaaaaaccucagagaguucgucuuuaagaacaucgauggguacuucaaaauauacaguaagcacaccccaaucaauuuaguuagggaccugccccagggauuuagcgcucuugagccuuugguggaucugccaauuggcaucaacauuacacgguuccagacucuacucgcccugcaucgcucuuaucuuaccccgggcgacuccucaagcggguggacagcaggagccgcugcauacuauguagguuaccugcaacccagaaccuuuuugcucaaauauaaugaaaacggcacgaucacugaugccguggacugcgcucuggauccuuuaagugagacaaaguguacccugaagucuuucacugucgaaaaagggauauaccagacauccaauuuuagggugcagccaaccgagagcauuguucgguuccccaacaucacgaaucucugcccuuuuggagagguguucaacgccacccgcuucgcgucggucuaugcauggaaucgaaagagaauuucuaacuguguggccgacuacuccguacuuuacaauucagcuaguuuuagcacauucaaaugcuauggcguuuccccaacuaagcugaacgacuuguguuuuaccaauguguacgccgauucuuucgucaucaggggugacgaagugcggcagaucgcacccgggcaaacaggaaaaauugcugauuauaacuacaagcuaccggacgauuuuacuggcugcgucauagccuggaauagcaacaaccuggacucaaaagugggcgggaauuauaacuaccucuaucgucuguuccgcaagaguaaucuuaagccuuuugagagagauaucuccaccgaaauuuaccaggcgggaagcacacccuguaacgguguugagggcuucaauugcuacuuuccacugcagucuuauggguuccaaccuaccaacggagugggcuaccagcccuauaggguagucguguugucauuugaacuccugcacgccccagcaacuguuugcggucccaaaaagaguacgaauuuagugaaaaacaagugugucaauuucaacuuuaaugggcugacaggcaccggagugcuaacugagagcaacaaaaaguuccucccuuuccagcaguuuggccgggacaucgcugauaccacagacgccguacgagauccacaaacccuggagauacuugacauuacuccgugcuccuucgggggagugucuguuaucacacccgguacgaauaccucgaaccaggucgcuguguuguaccagggcgugaauuguacugaagucccuguugccauccacgcagaccagcugacaccaaccuggcgcguguauagcacaggguccaacguguuucaaacuagagccggaugccucauuggcgcugagcauguaaacaauucauacgaaugugauauccccauuggugcggggauaugcgcaaguuaucagacccagacgaacucuccuaggcgggcccgcagcgucgcuucccagucaaucauugccuacaccaugagccugggcgcagaaaauucuguggccuacuccaacaauaguaucgcuaucccaacaaacuucacuauuagcguuaccacagaaauacuucccgugucuaugacuaagaccuccgucgacuguacgauguauaucugcggagauucaacagaguguaguaaucuguugcuccaauacggcagcuuuugcacccagcugaacagagccuuaacugggauugcaguggagcaggacaaaaauacacaggaaguuuucgcgcaagugaagcagaucuauaaaaccccgccuauuaaggauuuuggagguuucaacuuuucgcagauccugccagaccccuccaaaccuucuaagaggagcuucauagaggaucuacucuuuaauaagguaacucuggcugacgccggcuucaucaaacaauacggggauugucuuggagacauugcagcccgugauuugaucugcgcucagaaguucaacggccugaccguccugcccccacucuuaacagacgaaaugauugcccaguauacgucagcacugcuugcugguaccaucacgaguggguggacauuuggcgccggagcggccuugcagauaccuuucgcuaugcaaauggcauaccgguuuaauggcauuggggugacccagaacgugcucuaugagaaucagaaacugaucgccaaccaguucaacuccgcuauuggaaagauccaagauucucuaagcuccacagccucagcacugggcaaacuccaggacgucguuaaucagaacgcgcaggcccugaauacucuugugaagcaauugagcaguaacuuuggugcuauaucuuccguacugaaugacaucuuaagccgacucgauaagguggaagccgagguccagauugacagacugaucaccgggaggcuucagucgcugcaaacguacgugacacagcaguugauucgcgcagcugagauccgggccucagcaaaccucgccgcuaccaaaaugucugaaugcguucugggacagaguaagagaguggauuucuguggcaaagguuaccaccuaauguccuuuccccaaagcgcgccacauggcgucguguuccugcacguuacuuaugugccggcccaggagaagaauuuuaccacagcuccugcaauaugccacgacgggaaagcccauuuccccagggaaggagucuuuguaucuaacggcacucacugguucgugacccagcgcaauuuuuacgagccacagauuaucacaacggauaacaccuucguuagcgggaauugugacguggucaucggaauugugaacaauacuguauaugauccccuccaaccugagcuggacuccuucaaggaagaacuugauaaauacuuuaagaaccauacaucaccagacguggauuugggcgacaucagugguauuaaugccagcgucguuaacauacagaaggaaaucgaucgacugaaugagguggcuaaaaacuuaaacgaaucucucauugaccugcaggagcuugggaaguaugagcaguacaucaaauggcccugguauauuuggcugggauucaucgcaggccuaauagccaucgugauggucaccauuaugcucugcuguaugacuuccugcuguucaugccugaaggguuguugcaguuguggcagcugcugcaaauuugacgaagaugacuccgagccuguguugaaggggguuaagcugcacuacacaugaggacuagucccuguucccagagcccacuuuuuuuucuuuuuuugaaauaaaauagccugucuuucagaucucaaaggcucuuuucagagccaccaaaaaaaaaaaaaaaaaaaaaaaaaaaaaaaaaaaaaaaaaaaaaaaaaaaaaaaaaaaaaaaaaaaaaaaaaaaaaaaaaaaaaaaaaaaaaaaaaaaaa

SEQ ID NO: 12530 - RNA, 4094 nt, Artificial Sequence
  SARS-CoV-2/Congo/94/2020__EPI_ISL_417947 spike protein mRNA human (1-1273)
aggagagucccgcagucggcguccagcggcucugcuuguucgugugugugucguugcaggccuuauucaagcuuaccauguucguguuucugguccuccuuccccugguuagcucccagugcgugaacuugaccacaagaacucaauuaccuccagccuacacuaauucuuucaccaggggcguauauuacccggacaagguguuucggucaaguguccugcacagcacacaggaucuauuccuccccuuuuucuccaacgugacuugguuucaugcuauccacguuucugggaccaauggaacaaaacgcuucgacaacccugugcugccauuuaaugauggugucuauuucgcaucgaccgagaagucaaacauuauacgaggcuggaucuuugggacuacacuugacagcaaaacccagagucuguugauugugaauaacgccacgaauguaguuaucaaggugugugaguuccaguuuugcaacgaucccuuccucggagucuacuaucauaaaaauaacaaguccuggauggagucugaguuccguguguacagcuccgcgaauaacuguacuuuugaguaugugucacaaccuuuccugauggaccuggaaggcaagcaggguaauuuuaaaaaccucagagaguucgucuuuaagaacauugauggguacuucaaaaucuacaguaagcacaccccaauaaauuuaguuagggaccugccccagggauuuagcgcucuugagccuuugguggaucugccaaucggcauuaacaucacacgguuccagacucuacucgcccugcaucgcucuuaucuuaccccgggcgacuccucaagcggguggacagcaggagccgcugcauacuauguagguuaccugcaacccagaaccuuuuugcucaaauauaaugaaaacggcacgauuacugaugccguggacugcgcucuggauccuuuaagugagacaaaguguacccugaagucuuucacugucgaaaaagggaucuaccagacauccaauuuuagggugcagccaaccgagagcauaguucgguuccccaacauuacgaaucucugcccuuuuggagagguguucaacgccacccgcuucgcgucggucuaugcauggaaucgaaagagaaucucuaacuguguggccgacuacuccguacuuuacaauucagcuaguuuuagcacauucaaaugcuauggcguuuccccaacuaagcugaacgacuuguguuuuaccaauguguacgccgauucuuucgucauuaggggugacgaagugcggcagaucgcacccgggcaaacaggaaaaaucgcugauuauaacuacaagcuaccggacgauuuuacuggcugcgucauugccuggaauagcaacaaccuggacucaaaagugggcgggaauuauaacuaccucuaucgucuguuccgcaagaguaaucuuaagccuuuugagagagauauauccaccgaaaucuaccaggcgggaagcacacccuguaacgguguugagggcuucaauugcuacuuuccacugcagucuuauggguuccaaccuaccaacggagugggcuaccagcccuauaggguagucguguugucauuugaacuccugcacgccccagcaacuguuugcggucccaaaaagaguacgaauuuagugaaaaacaagugugucaauuucaacuuuaaugggcugacaggcaccggagugcuaacugagagcaacaaaaaguuccucccuuuccagcaguuuggccgggacauugcugauaccacagacgccguacgagauccacaaacccuggagauccuugacauaacuccgugcuccuucgggggagugucuguuauuacacccgguacgaauaccucgaaccaggucgcuguguuguaccagggcgugaauuguacugaagucccuguugccauccacgcagaccagcugacaccaaccuggcgcguguauagcacaggguccaacguguuucaaacuagagccggaugccucaucggcgcugagcauguaaacaauucauacgaaugugauauucccaucggugcggggauuugcgcaaguuaucagacccagacgaacucuccuaggcgggcccgcagcgucgcuucccagucaauaaucgccuacaccaugagccugggcgcagaaaauucuguggccuacuccaacaauaguauugcuaucccaacaaacuucacuaucagcguuaccacagaaauucuucccgugucuaugacuaagaccuccgucgacuguacgauguauauaugcggagauucaacagaguguaguaaucuguugcuccaauacggcagcuuuugcacccagcugaacagagccuuaacugggaucgcaguggagcaggacaaaaauacacaggaaguuuucgcgcaagugaagcagauuuauaaaaccccgccuaucaaggauuuuggagguuucaacuuuucgcagauucugccagaccccuccaaaccuucuaagaggagcuucaucgaggauauacuauuuaauaagguaacucucgcugacgccggcuucaucaaacaauacggggauugucugggagacauugcagcccgugaucuuaucugcgcucagaaguucaacggcuugaccguccugcccccacuccugacagacgaaaugauugcccaguauacgucagcauuacuggcugguaccaucacgaguggguggacauuuggcgccggagcggcccuucagauaccuuucgcuaugcaaauggcauaccgguuuaauggcauuggggugacccagaacguguuguaugagaaucagaaacucaucgccaaccaguucaacuccgcuauuggaaagauccaagauucucugagcuccacagccucagcacuaggcaaacugcaggacgucguuaaucagaacgcgcaggcccucaauacucuggugaagcaacuuagcaguaacuuuggugcuauaucuuccguauugaaugacauccugagccgauuagauaagguggaagccgagguccagauugacagacucaucaccgggaggcugcagucgcuucaaacguacgugacacagcagcugauucgcgcagcugagauccgggccucagcaaacuuggccgcuaccaaaaugucugaaugcguucucggacagaguaagagaguggauuucuguggcaaagguuaccaccugauguccuuuccccaaagcgcgccacauggcgucguguuccuacacguuacuuaugugccggcccaggagaagaauuuuaccacagcuccugcaauaugccacgacgggaaagcccauuuccccagggaaggagucuuuguaucuaacggcacucacugguucgugacccagcgcaauuuuuacgagccacagauuaucacaacggauaacaccuucguuagcgggaauugugacguggucaucggaauugugaacaauacuguauaugauccccugcaaccugagcucgacuccuucaaggaagaacuggauaaauacuuuaagaaccauacaucaccagacguggaucuuggcgacaucagugguauuaaugccagcgucguuaacauacagaaggaaaucgaucgauugaaugagguggcuaaaaaccugaacgaaucuuuaauugaccuccaggagcuggggaaguaugagcaguacaucaaauggcccugguauauuuggcuuggauucaucgcaggccugauagccaucgugauggucaccauuaugcuaugcuguaugacuuccugcuguucaugccucaaggguuguugcaguuguggcagcugcugcaaauuugacgaagaugacuccgagccugugcugaaggggguuaaguugcacuacacaugaggacuagucccuguucccagagcccacuuuuuuuucuuuuuuugaaauaaaauagccugucuuucagaucucaaaggcucuuuucagagccaccaaaaaaaaaaaaaaaaaaaaaaaaaaaaaaaaaaaaaaaaaaaaaaaaaaaaaaaaaaaaaaaaaaaaaaaaaaaaaaaaaaaaaaaaaaaaaaaaaaaaa

SEQ ID NO: 12531 - RNA, 4094 nt, Artificial Sequence
  SARS-CoV-2/Congo/158/2020__EPI_ISL_417950 spike protein mRNA human (1-1273)
aggagagucccgcagucggcguccagcggcucugcuuguucgugugugugucguugcaggccuuauucaagcuuaccauguucguguuucugguccuccuuccccugguuagcucccagugcgugaacuugaccacaagaacucaauuaccuccagccuacacuaauucuuucaccaggggcguauauuacccggacaagguguuucggucaaguguccugcacagcacacaggaucuauuccuccccuuuuucuccaacgugacuugguuucaugcuauccacguuucugggaccaauggaacaaaacgcuucgacaacccugugcugccauuuaaugauggugucuauuucgcaucgaccgagaagucaaacauuauacgaggcuggaucuuugggacuacacuugacagcaaaacccagagucuguugauugugaauaacgccacgaauguaguuaucaaggugugugaguuccaguuuugcaacgaucccuuccucggagucuacuaucauaaaaauaacaaguccuggauggagucugaguuccguguguacagcuccgcgaauaacuguacuuuugaauaugugucacaaccuuuccugauggaccuggaaggcaagcaggguaauuuuaaaaaccucagagaguucgucuuuaagaacauugauggguacuucaaaaucuacaguaagcacaccccaauaaauuuaguuagggaccugccccagggauuuagcgcucuugagccuuugguggaucugccaaucggcauuaacaucacacgguuccagacucuacucgcccugcaucgcucuuaucuuaccccgggcgacuccucaagcggguggacagcaggagccgcugcauacuauguagguuaccugcaacccagaaccuuuuugcucaaauauaaugaaaacggcacgauuacugaugccguggacugcgcucuggauccuuuaagugagacaaaguguacccugaagucuuucacugucgaaaaagggaucuaccagacauccaauuuuagggugcagccaaccgagagcauaguucgguuccccaacauuacgaaucucugcccuuuuggagagguguucaacgccacccgcuucgcgucggucuaugcauggaaucgaaagagaaucucuaacuguguggccgacuacuccguacuuuacaauucagcuaguuuuagcacauucaaaugcuauggcguuuccccaacuaagcugaacgacuuguguuuuaccaauguguacgccgauucuuucgucauuaggggugacgaagugcggcagaucgcacccgggcaaacaggaaaaaucgcugauuauaacuacaagcuaccggacgauuuuacuggcugcgucauugccuggaauagcaacaaccuggacucaaaagugggcgggaauuauaacuaccucuaucgucuguuccgcaagaguaaucuuaagccuuuugagagagauauauccaccgaaaucuaccaggcgggaagcacacccuguaacgguguugagggcuucaauugcuacuuuccacugcagucuuauggguuccaaccuaccaacggagugggcuaccagcccuauaggguagucguguugucauuugaacuccugcacgccccagcaacuguuugcggucccaaaaagaguacgaauuuagugaaaaacaagugugucaauuucaacuuuaaugggcugacaggcaccggagugcuaacugagagcaacaaaaaguuccucccuuuccagcaguuuggccgggacauugcugauaccacagacgccguacgagauccacaaacccuggagauccuugacauaacuccgugcuccuucgggggagugucuguuauuacacccgguacgaauaccucgaaccaggucgcuguguuguaccaggacgugaauuguacugaagucccuguugccauccacgcagaucagcugacaccaaccuggcgcguguauagcacaggcuccaacguguuucaaacuagagccgggugccucaucggagcugagcauguaaacaauucauacgaaugugacauucccaucggcgcggguauuugcgcaaguuaucagacccagacgaacucuccuaggcgggcccgcagcgucgcuucccagucaauaaucgccuacaccaugagccugggggcagaaaauucuguggccuacuccaacaauaguauugcuaucccaacaaacuucacuaucagcguuaccacagaaauucuucccgugucuaugacuaagaccuccgucgauuguacgauguauauaugcggcgacucaacagaguguaguaaucuguugcuccaauacggcagcuuuugcacccagcugaacagagccuuaacuggaaucgcaguggagcaggauaaaaauacacaggaaguuuucgcgcaagugaagcagauuuauaaaaccccgccuaucaaggacuuugggggauucaacuuuucgcagauucugccagaucccuccaaaccuucuaagaggagcuucaucgaggaccuacucuuuaauaagguaacucuggcugaugccgguuucauaaaacaauacggcgacugucuuggggauaucgcagcccgugacuugauuugcgcucagaaguucaacggacugaccguccugcccccacucuuaacagaugaaaugaucgcccaguauacgucagcacugcuugcuggcaccauuacgagugguuggacauuuggggccggcgcggccuugcagaucccuuucgcuaugcaaauggcauaccgguuuaauggaauaggcgugacccagaacgugcucuaugagaaucagaaacugauugccaaccaguucaacuccgcuaucgggaagauucaagacucucuaagcuccacagccucagcacugggaaaacuccaggacgucguuaaucagaacgcgcaggcccugaauacucuugugaagcaauugagcaguaacuuuggcgcuaucucuuccguacugaaugauauauuaagccgacucgacaagguggaagccgagguccagaucgauagacugauuaccgguaggcuucagucgcugcaaacguacgugacacagcaguugauccgcgcagcugagauucgggccucagcaaaccucgccgcuaccaaaaugucugaaugcguucuggggcagaguaagagaguggacuucuguggaaaaggcuaccaccuaauguccuuuccccaaagcgcgccacauggugucguguuccugcacguuacuuaugugccggcccaggagaagaauuuuaccacagcuccugcaaucugccacgauggcaaagcccauuuccccagggaaggggucuuuguaucuaacggaacucacugguucgugacccagcgcaauuuuuacgagccacagauaauuacaacggacaacaccuuccucagcggcaauugugauguugugaucgggaucgucaacaauacuguguaugacccccugcaaccugagcuugauuccuucaaggaagaguuggacaaauacuuuaagaaccauacaucaccagauguagaccugggagauauuaguggcaucaaugccagcguggucaacauucagaaggaaauagaccgauuaaaugagguugcuaaaaaccucaacgaaucucugaucgaccuucaggagcuggguaaguaugagcaguacauuaaauggcccugguauaucuggcuaggguucauugcaggacucaucgccauagugauggugaccaucaugcugugcuguaugacuuccugcuguucaugcuugaagggcuguugcaguugugguagcugcugcaaauuugaugaagacgauuccgagccuguccugaagggcgugaaguuacacuacacaugaggacuagucccuguucccagagcccacuuuuuuuucuuuuuuugaaauaaaauagccugucuuucagaucucaaaggcucuuuucagagccaccaaaaaaaaaaaaaaaaaaaaaaaaaaaaaaaaaaaaaaaaaaaaaaaaaaaaaaaaaaaaaaaaaaaaaaaaaaaaaaaaaaaaaaaaaaaaaaaaaaaaa

SEQ ID NO: 12532 - RNA, 4094 nt, Artificial Sequence
  SARS-CoV-2/USA/UT-00034/2020__EPI_ISL_417977 spike protein mRNA human (1-1273)
aggagagucccgcagucggcguccagcggcucugcuuguucgugugugugucguugcaggccuuauucaagcuuaccauguucguguuucugguccuccuuccccugguuagcucccagugcgugaacuugaccacaagaacucaauuaccuccagccuacacuaauucuuucaccaggggcguauauuacccggacaagguguuucggucaaguguccugcacagcacacaggaucuauuccuccccuuuuucuccaacgugacuugguuucaugcuauccacguuucugggaccaauggaacaaaacgcuucgacaacccugugcugccauuuaaugauggugucuauuucgcaucgaccgagaagucaaacauuauacgaggcuggaucuuugggacuacacuugacagcaaaacccagagucuguugauugugaauaacgccacgaauguaguuaucaaggugugugaguuccaguuuugcaacgaucccuuccucggagucuacuauuacaaaaauaacaaguccuggauggagucugaguuccguguguauagcuccgcgaauaacuguacuuuugaguacgugucacaaccuuuccugauggaccuggaaggcaagcaggguaauuuuaaaaaccucagagaguucgucuuuaagaacauugauggguacuucaaaaucuauaguaagcauaccccaauaaauuuaguuagggaccugccccagggauuuagcgcucuugagccuuugguggaucugccaaucggcauuaacaucacacgguuccagacucuacucgcccugcaccgcucuuaccuuaccccgggcgacuccucaagcggguggacagcaggagccgcugcauauuacguagguuaucugcaacccagaaccuuuuugcucaaauacaaugaaaacggcacgauuacugaugccguggacugcgcucuggauccuuuaagugagacaaaguguacccugaagucuuucacugucgaaaaagggaucuaucagacauccaauuuuagggugcagccaaccgagagcauaguucgguuccccaacauuacgaaucucugcccuuuuggagagguguucaacgccacccgcuucgcgucggucuacgcauggaaucgaaagagaaucucuaacuguguggccgacuacuccguacuuuauaauucagcuaguuuuagcacauucaaaugcuacggcguuuccccaacuaagcugaacgacuuguguuuuaccaauguguaugccgauucuuucgucauuaggggugacgaagugcggcagaucgcacccgggcaaacaggaaaaaucgcugauuacaacuauaagcuaccggacgauuuuacuggcugcgucauugccuggaauagcaacaaccuggacucaaaagugggcgggaauuacaacuaucucuaccgucuguuccgcaagaguaaucuuaagccuuuugagagagauauauccaccgaaaucuaccaggcgggaagcacacccuguaacgguguugagggcuucaauugcuauuuuccacugcagucuuacggguuccaaccuaccaacggagugggcuaucagcccuacaggguagucguguugucauuugaacuccugcaugccccagcaacuguuugcggucccaaaaagaguacgaauuuagugaaaaacaagugugucaauuucaacuuuaaugggcugacaggcaccggagugcuaacugagagcaacaaaaaguuccucccuuuccagcaguuuggccgggacauugcugauaccacagacgccguacgagauccacaaacccuggagauccuugacauaacuccgugcuccuucgggggagugucuguuauuacacccgguacgaauaccucgaaccaggucgcuguguuguaucagggcgugaauuguacugaagucccuguugccauccacgcagaccagcugacaccaaccuggcgcguguacagcacaggguccaacguguuucaaacuagagccggaugccucaucggcgcugagcacguaaacaauucauaugaaugugauauucccaucggugcggggauuugcgcaaguuaccagacccagacgaacucuccuaggcgggcccgcagcgucgcuucccagucaauaaucgccuacaccaugagccugggcgcagaaaauucuguggccuauuccaacaauaguauugcuaucccaacaaacuucacuaucagcguuaccacagaaauucuucccgugucuaugacuaagaccuccgucgacuguacgauguacauaugcggagauucaacagaguguaguaaucuguugcuccaauauggcagcuuuugcacccagcugaacagagccuuaacugggaucgcaguggagcaggacaaaaauacacaggaaguuuucgcgcaagugaagcagauuuacaaaaccccgccuaucaaggauuuuggagguuucaacuuuucgcagauucugccagaccccuccaaaccuucuaagaggagcuucaucgaggaucuacucuuuaauaagguaacucuggcugacgccggcuucauaaaacaauauggggauugucuuggagacaucgcagcccgugauuugauuugcgcucagaaguucaacggccugaccguccugcccccacucuuaacagacgaaaugaucgcccaguacacgucagcacugcuugcugguaccauuacgaguggguggacauuuggcgccggagcggccuugcagaucccuuucgcuaugcaaauggcauaucgguuuaauggcauaggggugacccagaacgugcucuacgagaaucagaaacugauugccaaccaguucaacuccgcuaucggaaagauucaagauucucuaagcuccacagccucagcacugggcaaacuccaggacgucguuaaucagaacgcgcaggcccugaauacucuugugaagcaauugagcaguaacuuuggugcuaucucuuccguacugaaugacauauuaagccgacucgauaagguggaagccgagguccagaucgacagacugauuaccgggaggcuucagucgcugcaaacguacgugacacagcaguugauccgcgcagcugagauucgggccucagcaaaccucgccgcuaccaaaaugucugaaugcguucugggacagaguaagagaguggauuucuguggcaaagguuaucaucuaauguccuuuccccaaagcgcgccacacggcgucguguuccugcauguuacuuacgugccggcccaggagaagaauuuuaccacagcuccugcaaucugccacgacgggaaagcccacuuccccagggaaggagucuuuguaucuaacggcacucauugguucgugacccagcgcaauuuuuaugagccacagauaauuacaacggauaacaccuucguuagcgggaauugugacguggucaucggaaucgugaacaauacuguauacgauccccuccaaccugagcuggacuccuucaaggaagaacuugauaaauauuuuaagaaccacacaucaccagacguggauuugggcgacauuagugguaucaaugccagcgucguuaacauucagaaggaaauagaucgacugaaugagguggcuaaaaacuuaaacgaaucucucaucgaccugcaggagcuugggaaguacgagcaguauauuaaauggcccugguacaucuggcugggauucauugcaggccuaaucgccauagugauggucaccaucaugcucugcuguaugacuuccugcuguucaugccugaaggguuguugcaguuguggcagcugcugcaaauuugacgaagaugacuccgagccuguguugaaggggguuaagcugcauuacacaugaggacuagucccuguucccagagcccacuuuuuuuucuuuuuuugaaauaaaauagccugucuuucagaucucaaaggcucuuuucagagccaccaaaaaaaaaaaaaaaaaaaaaaaaaaaaaaaaaaaaaaaaaaaaaaaaaaaaaaaaaaaaaaaaaaaaaaaaaaaaaaaaaaaaaaaaaaaaaaaaaaaaa

SEQ ID NO: 12533 - RNA, 4094 nt, Artificial Sequence
  SARS-CoV-2/USA/UT-00033/2020__EPI_ISL_417976 spike protein mRNA human (1-1273)
aggagagucccgcagucggcguccagcggcucugcuuguucgugugugugucguugcaggccuuauucaagcuuaccauguucguguuucugguccuccuuccccugguuagcucccagugcgugaacuugaccacaagaacucaauuaccuccagccuacacuaauucuuucaccaggggcguauauuacccggacaagguguuucggucaaguguccugcacagcacacaggaucuauuccuccccuuuuucuccaacgugacuugguuucaugcuauccacguuucugggaccaauggaacaaaacgcuucgacaacccugugcugccauuuaaugauggugucuauuucgcaucgaccgagaagucaaacauuauacgaggcuggaucuuugggacuacacuugacagcaaaacccagagucuguugauugugaauaacgccacgaauguaguuaucaaggugugugaguuccaguuuugcaacgaucccuuccucggagucuacuaucauaaaaauaacaaguccuggauggagucugaguuccguguguacagcuccgcgaauaacuguacuuuugaauaugugucacaaccuuuccugauggaccuggaaggcaagcaggguaauuuuaaaaaccucagagaguucgucuuuaagaacauugauggguacuucaaaaucuacaguaagcacaccccaauaaauuuaguuagggaccugccccagggauuuagcgcucuugagccuuugguggaucugccaaucggcauuaacaucacacgguuccagacucuacucgcccugcaucgcucuuaucuuaccccgggcgacuccucaagcgggcugacagcaggagccgcugcauacuauguagguuacuugcaacccagaaccuuucuccugaaauauaaugaaaacggcacgauuacugaugccguggacugcgcuuuagauccucugagugagacaaaguguacccucaagucuuucacugucgaaaaagggaucuaccagacauccaauuuuagggugcagccaaccgagagcauaguucgguuccccaacauuacgaaucuuugcccuuuuggagagguguucaacgccacccgcuucgcgucggucuaugcauggaaucgaaagagaaucucuaacuguguggccgacuacuccguacuguacaauucagcuaguuuuagcacauucaaaugcuauggcguuuccccaacuaaguugaacgaccuauguuuuaccaauguguacgccgauucuuucgucauuaggggugacgaagugcggcagaucgcacccgggcaaacaggaaaaaucgcugauuauaacuacaagcugccggacgauuuuacuggcugcgucauugccuggaauagcaacaaccucgacucaaaagugggcgggaauuauaacuaccuguaucgucuuuuccgcaagaguaaucugaagccuuuugagagagauauauccaccgaaaucuaccaggcgggaagcacacccuguaacgguguugagggcuucaauugcuacuuuccauugcagucuuauggguuccaaccuaccaacggagugggcuaccagcccuauaggguagucgugcucucauuugaacuguuacacgccccagcaacuguuugcggucccaaaaagaguacgaaucuggugaaaaacaagugugucaauuucaacuuuaaugggcuaacaggcaccggagugcucacugagagcaacaaaaaguuccugccuuuccagcaguuuggccgggacauugcugauaccacagacgccguacgagauccacaaacccuugagaucuuggacauaacuccgugcuccuucgggggagugucuguuauuacacccgguacgaauaccucgaaccaggucgcugugcuguaccagggcgugaauuguacugaagucccuguugccauccacgcagaccagcucacaccaaccuggcgcguguauagcacaggguccaacguguuucaaacuagagccggaugccugaucggcgcugagcauguaaacaauucauacgaaugugauauucccaucggugcggggauuugcgcaaguuaucagacccagacgaacucuccuaggcgggcccgcagcgucgcuucccagucaauaaucgccuacaccaugagccuuggcgcagaaaauucuguggccuacuccaacaauaguauugcuaucccaacaaacuucacuaucagcguuaccacagaaauucugcccgugucuaugacuaagaccuccgucgacuguacgauguauauaugcggagauucaacagaguguaguaauuugcuccugcaauacggcagcuuuugcacccaguuaaacagagcccugacugggaucgcaguggagcaggacaaaaauacacaggaaguuuucgcgcaagugaagcagauuuauaaaaccccgccuaucaaggauuuuggagguuucaacuuuucgcagauucuaccagaccccuccaaaccuucuaagaggagcuucaucgaggaucuccuguuuaauaagguaacucuugcugacgccggcuucauaaaacaauacggggauuguuugggagacaucgcagcccgugaucugauuugcgcucagaaguucaacggccucaccguccugcccccauuacugacagacgaaaugaucgcccaguauacgucagcacuuuuggcugguaccauuacgaguggguggacauuuggcgccggagcggcccuccagaucccuuucgcuaugcaaauggcauaccgguuuaauggcauaggggugacccagaacgugcuguaugagaaucagaaacuaauugccaaccaguucaacuccgcuaucggaaagauucaagauucucugagcuccacagccucagcacucggcaaacugcaggacgucguuaaucagaacgcgcaggcccuuaauacuuuggugaagcaacugagcaguaacuuuggugcuaucucuuccguauuaaaugacauacucagccgacuggauaagguggaagccgagguccagaucgacagacuuauuaccgggaggcugcagucguugcaaacguacgugacacagcagcucauccgcgcagcugagauucgggccucagcaaaccuggccgcuaccaaaaugucugaaugcguucuaggacagaguaagagaguggauuucuguggcaaagguuaccaccugauguccuuuccccaaagcgcgccacauggcgucguguuccuccacguuacuuaugugccggcccaggagaagaauuuuaccacagcuccugcaaucugccacgacgggaaagcccauuuccccagggaaggagucuuuguaucuaacggcacucacugguucgugacccagcgcaauuuuuacgagccacagauaauuacaacggauaacaccuucguuagcgggaauugugacguggucaucggaaucgugaacaauacuguauaugauccccugcaaccugagcuugacuccuucaaggaagaguuggauaaauacuuuaagaaccauacaucaccagacguggaucugggcgacauuagugguaucaaugccagcgucguuaacauucagaaggaaauagaucgauuaaaugagguggcuaaaaaccucaacgaaucucugaucgaccuucaggagcuggggaaguaugagcaguacauuaaauggcccugguauaucuggcuaggauucauugcaggccucaucgccauagugauggucaccaucaugcugugcuguaugacuuccugcuguucaugcuugaaggguuguugcaguuguggcagcugcugcaaauuugacgaagaugacuccgagccugugcugaaggggguuaaguuacacuacacaugaggacuagucccuguucccagagcccacuuuuuuuucuuuuuuugaaauaaaauagccugucuuucagaucucaaaggcucuuuucagagccaccaaaaaaaaaaaaaaaaaaaaaaaaaaaaaaaaaaaaaaaaaaaaaaaaaaaaaaaaaaaaaaaaaaaaaaaaaaaaaaaaaaaaaaaaaaaaaaaaaaaaa

SEQ ID NO: 12534 - RNA, 4094 nt, Artificial Sequence
  SARS-CoV-2/USA/WI-13/2020__EPI_ISL_417516 spike protein mRNA human (1-1273)
aggagagucccgcagucggcguccagcggcucugcuuguucgugugugugucguugcaggccuuauucaagcuuaccauguucguguuucugguccuccuuccccugguuagcucccagugcgugaacuugaccacaagaacucaauuaccuccagccuacacuaauucuuucaccaggggcguauauuacccggacaagguguuucggucaaguguccugcacagcacacaggaucuauuccuccccuuuuucuccaacgugacuugguuucaugcuauccacguuucugggaccaauggaacaaaacgcuucgacaacccugugcugccauuuaaugauggugucuauuucgcaucgaccgagaagucaaacauuauacgaggcuggaucuuugggacuacacuugacagcaaaacccagagucuguugauugugaauaacgccacgaauguaguuaucaaggugugugaguuccaguuuugcaacgaucccuuccucggagucuacuaucauaaaaauaacaaguccuggauggagucugaguuccguguguacagcuccgcgaauaacuguacuuuugaauaugugucacaaccuuuccugauggaccuggaaggcaagcaggguaauuuuaaaaaccucagagaguucgucuuuaagaacauugauggguacuucaaaaucuacaguaagcacaccccaauaaauuuaguuagggaccugccccagggauuuagcgcucuugagccuuugguggaucugccaaucggcauuaacaucacacgguuccagacucuacucgcccugcaucgcucuuaucuuaccccgggcgacuccucaagcggguggacagcaggagccgcugcauacuauguagguuaccugcaacccagaaccuuuuugcucaaauauaaugaaaacggcacgauuacugaugccguggacugcgcucuggauccuuuaagugagacaaaguguacccugaagucuuucacugucgaaaaagggaucuaccagacauccaauuuuagggugcucccaaccgagagcauaguucgguuccccaacauuacgaaucuuugcccuuuuggagagguguucaacgccacccgcuucgcgucggucuaugcauggaaucgaaagagaaucucuaacuguguggccgacuacuccguacuguacaauucagcuaguuuuagcacauucaaaugcuauggcguuuccccaacuaaguugaacgaccuauguuuuaccaauguguacgccgauucuuucgucauuaggggugacgaagugcggcagaucgcacccgggcagacaggaaaaaucgcugauuauaacuacaagcugccggacgauuuuacuggcugcgucauugccuggaauagcaacaaccucgacucaaaagugggcgggaauuauaacuaccuguaucgucuuuuccgcaagaguaaucugaagccuuuugagagagauauauccaccgaaaucuaccaagcgggaagcacacccuguaacgguguugagggcuucaauugcuacuuuccauugcagucuuauggguuccagccuaccaacggagugggcuaccaacccuauaggguagucgugcucucauuugaacuguuacacgccccagcaacuguuugcggucccaaaaagaguacgaaucuggugaaaaacaagugugucaauuucaacuuuaaugggcuaacaggcaccggagugcucacugagagcaacaaaaaguuccugccuuuccagcaguuuggccgggacauugcugauaccacagacgccguacgagauccacagacccuugagaucuuggacauaacuccgugcuccuucgggggagugucuguuauuacacccgguacgaauaccucgaaccaagucgcugugcuguaccagggcgugaauuguacugaagucccuguugccauccacgcagaccagcucacaccaaccuggcgcguguauagcacaggguccaacguguuucagacuagagccggaugccugaucggcgcugagcauguaaacaauucauacgaaugugauauucccaucggugcggggauuugcgcaaguuaucaaacccagacgaacucuccuaggcgggcccgcagcgucgcuucccagucaauaaucgccuacaccaugagccuuggcgcagaaaauucuguggccuacuccaacaauaguauugcuaucccaacaaacuucacuaucagcguuaccacagaaauucugcccgugucuaugacuaagaccuccgucgacuguacgauguauauaugcggagauucaacagaguguaguaauuugcuccugcaguacggcagcuuuugcacccaauuaaacagagcccugacugggaucgcaguggagcaggacaaaaauacacaggaaguuuucgcacaggugaagcaaauuuauaaaaccccgccuaucaaggauuuuggagguuucaacuuuucgcagauucuaccagaccccuccaaaccuucuaagaggagcuucaucgaggaucuccuguuuaauaagguaacucuugcugacgccggcuucauaaaacaguacggggauuguuugggagacaucgcagcccgugaucugauuugcgcucaaaaguucaacggccucaccguccugcccccauuacugacagacgaaaugaucgcccaguauacgucagcacuuuuggcugguaccauuacgaguggguggacauuuggcgccggagcggcccuccagaucccuuucgcuaugcagauggcauaccgguuuaauggcauaggggugacccaaaacgugcuguaugagaaucagaaacuaauugccaaccaguucaacuccgcuaucggaaagauucaggauucucugagcuccacagccucagcacucggcaaacugcaagacgucguuaaucagaacgcgcaggcccuuaauacuuuggugaagcagcugagcaguaacuuuggugcuaucucuuccguauuaaaugacauacucagccgacuggauaagguggaagccgagguccaaaucgacagacuuauuaccgggaggcugcagucguugcagacguacgugacacaacagcucauccgcgcagcugagauucgggccucagcaaaccuggccgcuaccaaaaugucugaaugcguucuaggacagaguaagagaguggauuucuguggcaaagguuaccaccugauguccuuuccccagagcgcgccacauggcgucguguuccuccacguuacuuaugugccggcccaagagaagaauuuuaccacagcgccugcuaucugccacgacgggaaagcccauuuccccagggaaggagucuuuguaucuaacggcacucacugguucgugacccagcgcaauuuuuacgagccacagauaauuacaacggauaacaccuucguuagcgggaauugugacguggucaucggaaucgugaacaauacuguauaugauccccugcagccugagcuugacuccuucaaggaagaguuggauaaauacuuuaagaaccauacaucaccagacguggaucugggcgacauuagugguaucaaugccagcgucguuaacauucaaaaggaaauagaucgauuaaaugagguggcuaaaaaccucaacgaaucucugaucgaccuucaggagcuggggaaguaugagcaguacauuaaauggcccugguauaucuggcuaggauucauugcaggccucaucgccauagugauggucaccaucaugcugugcuguaugacuuccugcuguucaugcuugaaggguuguugcaguuguggcagcugcugcaaauuugacgaagaugacuccgagccugugcugaaggggguuaaguuacacuacacaugaggacuagucccuguucccagagcccacuuuuuuuucuuuuuuugaaauaaaauagccugucuuucagaucucaaaggcucuuuucagagccaccaaaaaaaaaaaaaaaaaaaaaaaaaaaaaaaaaaaaaaaaaaaaaaaaaaaaaaaaaaaaaaaaaaaaaaaaaaaaaaaaaaaaaaaaaaaaaaaaaaaaa

SEQ ID NO: 12535 - RNA, 4091 nt, Artificial Sequence
  SARS-CoV-2/India/1-27/2020__EPI_ISL_413522 spike protein mRNA human (1-1272)
aggagagucccgcagucggcguccagcggcucugcuuguucgugugugugucguugcaggccuuauucaagcuuaccauguucguguuucugguccuccuuccccugguuagcucccagugcgugaacuugaccacaagaacucaauuaccuccagccuacacgaauagcuucaccaggggcguauauuacccggacaagguguuucggucaaguguccugcacagcacacaggaucuauuccuccccuuuuucuccaacgugacuugguuucaugcuauccacguuucugggaccaauggaacaaaacgcuucgacaacccugugcugccauuuaaugauggugucuauuucgcaucgaccgagaagucaaacauuauacgaggcuggaucuuugggacuacacuugacagcaaaacccagagucuguugauugugaauaacgccacgaauguaguuaucaaggugugugaguuccaguuuugcaacgaucccuuccucggagucuaccauaaaaauaacaaguccuggauggagucugaguuccguguguauagcuccgcgaauaacuguacuuuugaauacgugucacaaccuuuccugauggaccuggaaggcaagcaggguaauuuuaaaaaccucagagaguucgucuuuaagaacauugauggguauuucaaaaucuacaguaagcacaccccaauaaauuuaguuagggaccugccccagggauuuagcgcucuugagccuuugguggaucugccaaucggcauuaacaucacacgguuccagacucuacucgcccugcaucgcucuuaccuuaccccgggcgacuccucaagcggguggacagcaggagccgcugcauauuacguagguuaucugcaacccagaaccuuuuugcucaaauacaaugaaaacggcacgauuacugaugccguggacugcgcucuggauccuuuaagugagacaaaguguacccugaagucuuucacugucgaaaaagggaucuaucagacauccaauuuuagggugcagccaaccgagagcauaguucgguuccccaacauuacgaaucucugcccuuuuggagagguguucaacgccacccgcuucgcgucggucuacgcauggaaucgaaagagaaucucuaacuguguggccgacuauuccguacuuuacaauucagcuaguuuuagcacauucaaaugcuacggcguuuccccaacuaagcugaacgacuuguguuuuaccaauguguaugccgauucuuucgucauuaggggugacgaagugauccagaucgcacccgggcaaacaggaaaaauugcugauuacaacuauaagcuaccggacgauuuuacuggcugcgucauagccuggaauagcaacaaccuggacucaaaagugggcgggaauuacaacuaucucuaccggcuguuccguaagaguaaucuuaagccuuuugagcgcgauaucuccaccgaaauuuaucaggcgggaagcacacccuguaacgguguugagggcuucaauugcuacuuuccacugcagucuuacggguuccaaccuaccaacggagugggcuaucagcccuacagaguagucguguugucauuugaacuccugcacgccccagcaacuguuugcggucccaaaaagaguacgaauuuagugaaaaacaagugugucaauuucaacuuuaaugggcugacaggcaccggagugcuaacugagagcaacaaaaaguuccucccuuuccagcaguuuggcagggacaucgcugauaccacagacgccguacgggauccacaaacccuggagauacuugacauuacuccgugcuccuucgggggagugucuguuaucacacccgguacgaauaccucgaaccaggucgcuguguuguaucaggacgugaauuguacugaagucccuguugccauccacgcagaucagcugacaccaaccuggcgaguguacagcacaggcuccaacguguuucaaacucgcgccgggugccucauuggagcugagcauguaaacaauucauaugaaugugacauccccauuggcgcggguauaugcgcaaguuaccagacccagacgaacucuccuagaagggcccggagcgucgcuucccagucaaucauugccuauaccaugagccugggggcagaaaauucuguggccuacuccaacaauaguaucgcuaucccaacaaacuucacuauuagcguuaccacagaaauacuucccgugucuaugacuaagaccuccgucgauuguacgauguacaucugcggcgacucaacagaguguaguaaucuguugcuccaauauggaucuuuuugcacccagcugaaccgcgccuuaacuggcauugcaguggagcaggauaaaaauacacaggaaguuuucgcgcaagugaagcagaucuacaaaaccccgccuauuaaggacuuugggggauucaacuuuucgcagauccugccagaucccuccaaaccuucuaagagaaguuucauagaggaccuacucuuuaauaagguaacucuggcugaugccgguuucaucaaacaauauggcgacugucuuggggauauugcagccagggacuugaucugcgcucagaaguucaacggacugaccguccugcccccacucuuaacagaugaaaugauugcccaguacacgucagcacugcuugcuggcaccaucacuagcgguuggacauuuggggccggcgcggccuugcagauaccuuucgcuaugcaaauggcauaucguuuuaauggaauuggcgugacccagaacgugcucuacgagaaucagaaacugaucgccaaccaguucaacuccgcuauugggaagauccaagacucucuaagcuccacagccucagcacugggaaaacuccaggacgucguuaaucagaacgcgcaggcccugaauacucuugugaagcaauugagcaguaacuuuggcgcuauaucuuccguacugaaugauaucuuaagccggcucgacaagguggaagccgagguccagauugaucgacugaucaccgguagacuucagucgcugcaaacguaugugacacagcaguugauuagggcagcugagauccgcgccucagcaaaccucgccgcuaccaaaaugucugaaugcguucuggggcagaguaagcggguggacuucuguggaaaaggcuaccaccuaauguccuuuccccaaagcgcgccacauggugucguguuccugcacguuacuuacgugccggcccaggagaagaauuuuaccacagcuccugcaauaugccacgauggcaaagcccauuuccccagagaaggggucuuuguaucuaacggaacucacugguucgugacccagaggaauuuuuaugagccacagauuaucacaacggacaacaccuucguuagcggcaauugugauguggucaucgggauugugaacaauacuguauacgacccccuccaaccugagcuggauuccuucaaggaggaacuugacaaauauuuuaagaaccauacaucaccagauguggacuugggagauaucaguggcauuaaugccagcgucguuaacauacagaaggaaaucgaccgccugaaugagguggcuaaaaacuuaaacgaaucucucauugaccugcaggagcuugguaaguacgagcaguauaucaaauggcccugguacauuuggcugggguucaucgcaggacuaauagccaucgugauggucaccauuaugcucugcuguaugacuuccugcuguucaugccugaagggcuguugcaguugugguagcugcugcaaauuugaugaagacgauuccgagccuguguugaagggcguuaagcugcacuauacaugaggacuagucccuguucccagagcccacuuuuuuuucuuuuuuugaaauaaaauagccugucuuucagaucucaaaggcucuuuucagagccaccaaaaaaaaaaaaaaaaaaaaaaaaaaaaaaaaaaaaaaaaaaaaaaaaaaaaaaaaaaaaaaaaaaaaaaaaaaaaaaaaaaaaaaaaaaaaaaaaaaaaa

SEQ ID NO: 12536 - RNA, 4076 nt, Artificial Sequence
  SARS-CoV-2/pangolin/Guangxi/P4L/2017__EPI_ISL_410538 spike protein mRNA human (1-1267)
aggagagucccgcagucggcguccagcggcucugcuuguucgugugugugucguugcaggccuuauucaagcuuaccauguucguguuucuguucguccucccccuuguuagcucccagugcgugaaccugaccacaagaacuggcaucccuccaggguacacgaauagcucaaccaggggaguauauuacccggacaagguguuucggaguagcauuuugcacuuaacacaagaucuguuccuacccuuuuucuccaacgucacuugguuuaauaccauaaacuaucaggguggcuucaaaaaguuugacaauccugugcucccauucaacgaugggguuuacuuugccucuacagagaaaucgaauaucauucgcggauggaucuucggcaccacucuggacgcucgaacacagucacuucugauugugaacaaugcaaccaacgucgugaucaagguaugugaauuucaguucugcacggaucccuucuuggguguuuauuaccauaauaacaauaaaacuuggguggagaacgaauuucgugucuauagcagugccaauaacuguaccuucgaguacauaucccaaccuuuucucauggaccuggaagggaagcagggaaacuucaagaaucugagagaguuuguguucaaaaacguggauggcuacuuuaagaucuauucuaaacacacaccaauugaccucgucagggauuuaccccggggcuucgcggcucuggagccucuuguugacuugccaaucgggauuaauaucacucgcuuucagacccugcuagcccuccauagaagcuaccugacaccgggaaaccuugaauccgguuggaccacgggcgcagccgcuuauuacgugggguaucugcagcaaaggacuuucuugcucucauacaaucagaacggaacaauaaccgaugcaguagacugcagucuggaucccuuaagcgagacuaaguguacacugaaaucucucaccguggaaaagggcauuuaucagacguccaauuuucggguccagccuaccaucucaauugugcgcuucccaaacaucacaaaucuuugccccuuuggugagguuuucaacgccagcaaguucgcuaguguguacgccuggaaucgaaaaagaaucucuaacugugucgcggacuacuccgugcuguauaauagcacuucguuuucuaccuucaagugcuacgggguauccccuacaaaauugaacgaccuauguuuuacuaauguuuaugcagauucauucguggucaagggagacgaggugaggcaaauugccccaggccagaccggcgucauagcugauuacaacuauaaacugcccgacgauuuuacagggugcgugaucgccuggaacaguguuaagcaggacgcacucaccggagguaauuacggcuaucuguaccggcuuuuccguaaaagcaagcugaagccguuugaacgcgauauuuccacugagaucuaccaagcugggucuacgccuuguaacggacaggugggcuugaauugcuauuacccccucgaaagauaugguuuccacccaacaaccgggguaaacuaccagccuuuuagggucgugguucugagcuucgaguuacugaauggccccgccacugugugcggaccaaaacuaucaaccacacucgucaaggacaaaugugugaacuuuaauuucaacggccugaccgggacuggaguacuuacaacgaguaagaaacaguuuuugcccuuccaacaguucggucgggauauauccgacaccacugaugcggugcgagacccucagacacuggaaauucucgacaucaccccaugcagcuuuggcgggguuucugucaucacaccgggaacuaauaccucaaaccagguggccgugcuguaucaagaugucaauuguacggagguucccauggcaauucaugcugagcagcuuaccccugccuggcgcguguacagugcuggcgccaacguguuccagacaagagcagguugccugguaggggccgaacacgucaauaacagcuaugagugugacaucccagugggcgcuggaauuugcgcguccuaccacucuaugucgagcuugagguccguuaaucagcggucaauaaucgcauacacuaugagucucggcgccgaaaacucuguggcuuauagcaacaauuccauugccauccccaccaacuuuacaaucucagucacuaccgagauucugccugugagcaugacgaagacaucuguugauuguaccauguacauaugcggggacuccaucgaauguaguaauuuacugcuacaauauggaucuuucugcacucagcucaaccgcgcacugacagguauugccguggagcaggauaagaauacccaggagguauuugcucaagucaaacagaucuacaagacuccacccauuaaagacuucggcggguuuaacuucucucagauccuuccggauccuuccaagccaucaaaaagaaguuuuauagaagacuugcuguucaauaaggugacccucgccgaugcaggauuuaucaagcaauauggcgacugucugggugauauugcggcuagggacuuaaucugcgcccagaaauucaacgggcugacagugcuucccccuuugcucacggaugagaugauugcacaguacaccagcgcccugcuagcuggcacuaucacaucgggauggaccuucggcgccggggcagcucugcagauacccuuugccaugcaaauggcguaucguuucaauggaauuggcgucacacagaacguucucuacgaaaaucagaagcugaucgccaaccaguuuaauuccgcuauugguaaaauccaagacucucuuagcucaacugcaagugccuuggggaagcugcaggacgugguaaaccagaaugcucaggccuuaaacacccucgugaaacaacuguccucuaacuucggagcaauaagcuccguccuuaaugauauccugucacgguuggacaagguggaggcggaaguucagauugaucgacucaucacgggcagacugcagagccuacaaacauacgugacccagcagcugauuagggccgcugagauccgcgccagugcaaaccucgcugccacuaagaugucugagugcguccugggucaguccaaacggguggacuuuuguggcaagggguaucaucuuaugagcuucccacaaucggcaccucacggaguuguguuuuugcaugucaccuacguacccgcccaggagaaaaauuucacaacugcuccagcgauaugccacgagggcaaggcccacuuuccgagagaagggguguucguuucaaacggaacccauugguuuauuacacagaggaauuucuaugagccucagaucaucacgaccgauaacacuuuugugucuggcaguugugacgucgugauugguaucguaaauaacacaguguacgauccccugcaaccagaguuagacuccuucaaagaagaacucgauaaguauuucaaaaaucacaccagccccgacgucgaucugggggacauuucuggaauaaacgcaagcguugugaauauccagaaggaaauugaucgccuuaacgagguggcuaagaaucugaacgaauccccuaucgaccuacaggagcucggcaaauacgagcaguauauuaaguggccaugguacaucuggcuggguuuuauagccggcuugaucgccauuaucauggucacuauuaugcugugcuguaugacaucaugcuguaguugcuuaaaaggguguugcagcuguggaucuugcugcaaguucgacgaagaugacuccgagcccgugcucaaaggcguuaagcugcauuacaccugaggacuagucccuguucccagagcccacuuuuuuuucuuuuuuugaaauaaaauagccugucuuucagaucucaaaggcucuuuucagagccaccaaaaaaaaaaaaaaaaaaaaaaaaaaaaaaaaaaaaaaaaaaaaaaaaaaaaaaaaaaaaaaaaaaaaaaaaaaaaaaaaaaaaaaaaaaaaaaaaaaaaa

SEQ ID NO: 12537 - RNA, 4076 nt, Artificial Sequence
  SARS-CoV-2/pangolin/Guangxi/P5L/2017__EPI_ISL_410540 spike protein mRNA human (1-1267)
aggagagucccgcagucggcguccagcggcucugcuuguucgugugugugucguugcaggccuuauucaagcuuaccauguucguguuucuguucguccucccccuuguuagcucccagugcgugaaccugaccacaagaacuggcaucccuccaggguacacgaauagcucaaccaggggaguauauuacccggacaagguguuucggaguagcauuuugcacuuaacacaagaucuguuccuacccuuuuucuccaacgucacuugguuuaauaccauaaacuaucaggguggcuucaaaaaguuugacaauccugugcucccauucaacgaugggguuuacuuugccucuacagagaaaucgaauaucauucgcggauggaucuucggcaccacucuggacgcucgaacacagucacuucugauugugaacaaugcaaccaacgucgugaucaagguaugugaauuucaguucugcacggaucccuucuuggguguuuauuaccauaauaacaauaaaacuuggguggagaacgaauuucgugucuauagcagugccaauaacuguaccuucgaguacauaucccaaccuuuucucauggaccuggaagggaagcagggaaacuucaagaaucugagagaguuuguguucaaaaacguggauggcuacuuuaagaucuauucuaaacacacaccaauugaccucgucagggauuuaccccggggcuucgcggcucuggagccucuuguugacuugccaaucgggauuaauaucacucgcuuucagacccugcuagcccuccauagaagcuaccugacaccgggaaaacuugaauccgguuggaccacgggcgcagccgcuuauuacgugggguaucugcagcaaaggacuuucuugcucucauacaaccagaauggaacaauaaccgaugcaguagacugcagucuggaucccuuaagcgagacuaaguguacacugaagucucucaccguggaaaagggcauuuaucagacguccaacuuucggguccagccuaccaucucaauugugcgcuucccaaauaucacaaaccuuugccccuuuggugagguuuucaaugccagcaaauucgcuaguguguacgccuggaaccgaaagagaaucucuaauugugucgcggacuacuccgugcuguauaacagcacuucguuuucuaccuucaaaugcuacgggguauccccuacaaaguugaaugaccuauguuuuacuaacguuuaugcagauucauucguggucaaaggagacgaggugaggcaaauugccccaggccagaccggcgucauagcugauuacaauuauaagcugcccgacgauuuuacagggugcgugaucgccuggaacaguguuaaacaggacgcacucaccggagguaacuacggcuaucuguaccggcuuuuccguaagagcaagcugaaaccguuugaacgcgauauuuccacugagaucuaccaagcugggucuacgccuuguaauggacaggugggcuugaacugcuauuacccccucgaaagauaugguuuccacccaacaaccgggguaaauuaccagccuuuuagggucgugguucugagcuucgaguuacugaacggccccgccacugugugcggaccaaagcuaucaaccacacucgucaaagacaagugugugaauuuuaacuucaauggccugaccgggacuggaguacuuacaacgaguaaaaagcaguuuuugcccuuccaacaguucggucgggauauauccgacaccacugaugcggugcgagacccucagacacuggaaauucucgacaucaccccaugcagcuuuggcgggguuucugucaucacaccgggaacuaacaccucaaaucagguggccgugcuguaucaagaugucaacuguacggagguucccauggcaauucaugcugagcagcuuaccccugccuggcgcguguacagugcuggcgccaauguguuccagacaagagcagguugccugguaggggccgaacacgucaacaauagcuaugagugugacaucccagugggcgcuggaauuugcgcguccuaccacucuaugucgagcuuuagguccguuaaccagcggucaauaaucgcauacacuaugaguuugggcgccgaaaauucuguggcuuauagcaacaacuccauugccauccccaccaauuucacaaucucagucacuaccgagauucucccugugagcaugacgaagacaucuguugauuguaccauguacauaugcggggacuccaucgaauguaguaaccuguuacugcaauauggaucuuuuugcacucagcuaaaucgcgcacucacagguauugccguggagcaggauaaaaacacccaggagguauucgcucaagucaagcagaucuacaaaacuccacccauuaaggacuuuggcggguucaauuuuucucagauccugccggauccuuccaaaccaucaaagagaaguuucauagaagaccuuuuguuuaacaaggugacccuggccgaugcaggauucaucaaacaauauggcgacugucucggugauauugcggcuagggaccugaucugcgcccagaaguucaauggguuaacagugcugcccccucuuuugacggaugagaugauugcacaguacaccagcgcccuccuggcuggcacuaucacaucgggauggaccuuuggcgccggggcagcucuacagauacccuucgccaugcaaauggcguaucguuuuaacggaauuggcgucacacagaauguucuguacgaaaaccagaaacucaucgccaaucaguucaacuccgcuauugguaagauccaagacucucugagcucaacugcaagugcccuugggaaauugcaggacgugguaaaucagaacgcucaggcccugaauaccuuagugaagcaacucuccucuaacuuuggagcaauaagcuccguccugaacgauauccuuucacggcuggacaagguggaggcggaaguucagauugaucgauugaucacgggcagacuccagagccugcaaacauacgugacccagcagcuaauuagggccgcugagauccgcgccagugcaaaucuggcugccacuaaaaugucugagugcguccucggucaguccaagcggguggacuucuguggcaaaggguaucaucugaugagcuuuccacaaucggcaccucacggaguuguguuccuucaugucaccuacguacccgcccaggaaaagaacuuuacaacugcuccagcgauaugccacgagggcaaagcccacuucccgagagaagggguguuuguuucaaauggaacccauugguucauuacacagaggaacuuuuaugagccucagaucaucacgaccgauaauacuuucgugucuggcaguugugacgucgugauugguaucguaaacaauacaguguacgaucccuugcaaccagagcuggacuccuucaaggaagaguuagauaaauauuuuaagaaccacaccagccccgacgucgaucucggggacauuucuggaauaaaugcaagcguugugaacauccagaaggaaauugaucgccugaaugagguggcuaaaaaccuuaaugaaucccugaucgaccuacaggagcucggcaaguacgagcaguauauuaaauggccuugguacaucuggcuggguuucauagccggcuugaucgccauuaucauggucacuauuaugcugugcuguaugacaucaugcuguaguugcuuaaagggguguugcagcuguggaucuugcugcaaauuugacgaagaugacuccgagccagugcucaagggcguuaagcugcauuacaccugaggacuagucccuguucccagagcccacuuuuuuuucuuuuuuugaaauaaaauagccugucuuucagaucucaaaggcucuuuucagagccaccaaaaaaaaaaaaaaaaaaaaaaaaaaaaaaaaaaaaaaaaaaaaaaaaaaaaaaaaaaaaaaaaaaaaaaaaaaaaaaaaaaaaaaaaaaaaaaaaaaaaa

SEQ ID NO: 12538 - RNA, 4076 nt, Artificial Sequence
  SARS-CoV-2/pangolin/Guangxi/P5E/2017__EPI_ISL_410541 spike protein mRNA human (1-1267)
aggagagucccgcagucggcguccagcggcucugcuuguucgugugugugucguugcaggccuuauucaagcuuaccauguucguguuucuguucguccucccccuuguuagcucccagugcgugaaccugaccacaagaacuggcaucccuccaggguacacaaauucuucaaccaggggaguauauuacccggacaagguguuucggaguagcauuuugcacuuaacacaagaucuguuccuacccuuuuucuccaacgucacuugguuuaauaccauaacauaucaggguggcucuaaaaaguucgacaacccugugcucccauuuaaugaugggguuuacuucgccucgaccgagaaaucaaacaucauucgcggauggaucuuuggcacuacacuggacgcucgaacccagagccuucugauugugaauaacgcaacgaaugucgugaucaagguaugugaguuccaguuuugcacugaucccuucuuggguguuuauuaccauaacaauaacaaaaccuggguggaaaaugaguuccgugucuauaguuccgccaacaauuguacauuugaauacauaucucaaccuuuccucauggaccuggaagggaagcagggaaacuuuaagaaccugagagaguucguguuuaaaaauguggauggcuacuucaagaucuauagcaaacacacuccaauugaccucgucagggauuuaccccggggcuuugcggcucuggagccucuuguugacuugccaaucgggauuaacaucacccgcuuccagacacugcuagcccuccauagauccuaccugaccccgggaaaacuugaaucagguuggacgacuggcgcagccgcuuauuacgugggguaucugcagcaaaggacauuuuugcucaguuacaaucagaacggaaccauaacugaugcaguagacugcagccuggaucccuuaucugagacaaaguguacccugaagucccucacgguggaaaagggcauuuaucagaccucaaauuuccggguccagccuacaaucagcauugugcgcuuuccaaacaucacuaaucuuugccccuucggugagguuuuuaacgccaguaaauucgcuucuguguacgccuggaaucgaaagagaaucuccaacugugucgcggacuacagcgugcuguauaauucgaccucuuucuccacauuuaaaugcuacgggguaucaccuacuaaguugaacgaccuauguuucaccaauguuuaugcagauaguuuuguggucaaaggagacgaggugaggcaaauugccccaggccagacaggcgucauagcugauuacaacuauaagcugcccgacgauuucaccgggugcgugaucgccuggaauagcguuaaacaggacgcacucacuggagauaacuacgguuaucuguaccggcuuuuucguaaguccaagcugaaaccguucgaacgcgacauuucuacggagaucuaccaagcuggcagcacaccuuguaacggacaggugggguugaauugcuauuacccccucgaaagauauggcuuucacccaaccacugguguaaacuaccagccuuucagggucgugguucugucauuugaguuacugaaugggcccgccaccgugugcggcccaaagcuaaguacaacccucgucaaagauaagugugugaacuucaauuuuaacggacugacuggcacagggguacuuacgaccuccaaaaagcaguucuugcccuuucaacaguucggacgggacauaagcgauacuacagacgcggugcgagacccucagacccuggaaauucucgauaucacaccaugcucuuucgguggcguuucagucaucacuccggggaccaauacgaguaaccagguggccgugcuguaucaagacgucaauuguaccgagguucccauggcaauucaugcugagcagcuuacgccugccuggcgcguguacagcgcuggagccaacguguuucagacuagagcaggcugccugguaggugccgaacacgucaauaacuccuaugagugugauaucccagugggggcuggcauuugcgcgucuuaccacucgaugagcuccuucaggucaguuaaucagcggaguauaaucgcauacaccaugucuuugggagccgaaaacagcguggcuuauuccaauaacucaauugccauccccacaaacuuuacuaucagcgucaccacggagauucucccugugucuaugacaaagaccuccguugacuguacuauguacauaugcggcgauaguaucgaauguagcaaucuguuacugcaauaugggucuuucugcacacagcuaaaccgcgcacucaccggaauugccguggagcaggacaaaaauacucaggagguauuugcucaagucaagcagaucuacaaaaccccacccauuaaggauuucgguggcuuuaacuucucccagauccugccggacccuucaaaaccaaguaagaggagcuuuauagaagaucuuuuguucaauaaggugacacuggccgacgcaggguuuaucaaacaauauggagauugucucggcgacauugcggcuagagaucugaucugcgcccagaaguucaacgguuuaacggugcugcccccucuuuugaccgacgagaugauugcacaguacacuucggcccuccuggcugggacaaucaccuccggcuggacauucggagccggcgcagcucuacagauacccuuugccaugcaaauggcguaucguuucaaugggauuggagucacucagaacguucuguacgaaaaucagaaacucaucgccaaccaguuuaauucugcuauuggcaagauccaagacagccugucaaguaccgcauccgcccuugguaaauugcaggaugugguaaaccagaaugcucaggcccugaacacguuagugaagcaacucucuagcaauuucggggcaauauccucaguccugaacgacauccuuagccggcuggauaagguggaggcggaaguucagauugaccgauugaucacaggaagacuccagagucugcaaaccuacgugacucagcagcuaauuagggccgcugagauccgcgccucugcaaaccuggcugccaccaaaauguccgagugcguccucggccagagcaagcggguggauuuuugugguaaaggcuaucaucugaugucguucccacaaucagcaccucacgggguuguguuucuucaugucacauacguacccgcccaggaaaagaauuucacuaccgcuccagcgauaugccacgagggaaaagcccacuuuccgagagaaggcguguucguuucuaacgggacacauugguuuauuacgcagaggaauuucuaugagccucagaucaucaccacugacaacacauuugugaguggauccugugaugucgugauuggcaucguaaauaacaccguguacgaccccuugcaaccagagcuggauagcuucaaggaagaguuagacaaauauuucaagaaucacacuucucccgaugucgaccucggugauauuagcgggauaaacgcauccguugugaauauccagaaggaaauugaccgccugaacgagguggcuaaaaaucuuaacgaaucacugaucgaccuacaggagcucggaaaguacgagcaguauauuaaauggccuugguacaucuggcugggcuuuauagccgguuugaucgccauuaucauggucacaauuaugcugugcuguaugaccaguugcuguagcugcuuaaagggcuguugcucuuguggguccugcugcaaauucgaugaagacgauucagagccagugcucaagggaguuaagcugcauuacacgugaggacuagucccuguucccagagcccacuuuuuuuucuuuuuuugaaauaaaauagccugucuuucagaucucaaaggcucuuuucagagccaccaaaaaaaaaaaaaaaaaaaaaaaaaaaaaaaaaaaaaaaaaaaaaaaaaaaaaaaaaaaaaaaaaaaaaaaaaaaaaaaaaaaaaaaaaaaaaaaaaaaaa

SEQ ID NO: 12539 - RNA, 4070 nt, Artificial Sequence
  SARS-CoV-2/pangolin/Guangxi/P1E/2017__EPI_ISL_410539 spike protein mRNA human (1-1265)
aggagagucccgcagucggcguccagcggcucugcuuguucgugugugugucguugcaggccuuauucaagcuuaccauguucguguuucuguucguccucccccuuguuagcucccagugcgugaaccugaccacaagaacuggcauccaaccuggguacaccaauucuucaacgaggggaguauauuacccagacaagguguuucggaguagcauuuugcacuuaacacaggaucuguuccuaccguuuuucuccaacgucacuugguuuaauaccauaaacuaucaggguggcuucaagaaguuugacaaucccgugcucccuuucaacgaugggguuuacuuugccucuacagagaaaucgaauaucauucgcggauggaucuucggcaccacucuggacgcucgaacacagucacuucugauugugaacaaugcaaccaacgucgugaucaagguaugugaauuucaauucugcacggauccauucuuggguguuuauuaccauaauaacaauaaaacuuggguggagaacgaauuucgugucuauagcagugccaauaacuguaccuucgaguacauaucccagcccuuucucauggaccuggaagggaagcagggaaacuucaagaaucugagagaguuuguguucaaaaacguggauggcuacuuuaagaucuauucuaaacacacaccuauugaccucgucagggauuuaccacggggcuucgcggcucuggagccccuuguugacuugccuaucgggauuaauaucacucgcuuucagacccugcuagcccuccauagaagcuaccugacaccaggaaaacuugaauccgguuggaccacgggcgcagccgcuuauuacgugggguaucugcaacagaggacuuucuugcucucauacaaccagaauggaacaauaaccgaugcaguagacugcagucuggauccguuaagcgagacuaaguguacacugaagucucucaccguggaaaagggcauuuaucagacguccaacuuucggguccaacccaccaucucaauugugcgcuucccuaauaucacaaaccuuugcccauuuggugagguuuucaaugccagcaaauucgcuaguguguacgccuggaaccgaaagagaaucucuaauugugucgcggacuacuccgugcuguauaacagcacuucguuuucuaccuucaaaugcuacgggguaucccccacaaaguugaaugaccuauguuuuacuaacguuuaugcagauucauucguggucaaaggagacgaggugaggcagauugccccuggccagaccggcgucauagcugauuacaauuauaagcugccagacgauuuuacagggugcgugaucgccuggaacaguguuaaacaagacgcacucaccggagguaacuaccuguaucggcuuuuccguaagagcaagcugaaacccuuugaacgcgauauuuccacugagaucuaccaggcuggcucuacgccguguaauggacaggugggguugaacugcuacuauccucucgaaagauacggcuuccaccccacaaccgguguaaauuaucagccauuuagggucgugguucugagcuucgaguuacugaacgggccugccacugugugcggccccaagcuaucaaccacacucgucaaagacaagugugugaauuuuaacuucaauggacugaccggcacugggguacuuacaacgaguaaaaagcaauuuuugccauuccagcaguucggacgggauauauccgacaccacugaugcggugcgagacccccagacacuggaaauucucgacaucaccccuugcagcuuugguggcguuucugucaucacaccagggacuaacaccucaaaucaaguggccgugcuguaccaggaugucaacuguacggagguuccgauggcaauucaugcugagcagcuuacccccgccuggcgcguguauagugcuggagccaauguguuccagacaagagcaggcugccugguaggugccgaacacgucaacaauagcuacgagugugacaucccugugggggcuggcauuugcgcguccuaucacucuaugucgagcuugagguccguuaaccaacggucaauaaucgcauacacuaugagucucggagccgaaaauucuguggcuuacagcaacaacuccauugccaucccaaccaauuuuacaaucucagucacuaccgagauucugcccgugagcaugacgaagacaucuguugauuguaccauguauauaugcggcgacuccaucgaauguaguaacuuacugcuacaguacgggagcuucugcacucagcucaaucgcgcacugacaggaauugccguggagcaggauaaaaacacccaagagguauuugcucaggucaagcagaucuauaaaacuccuccaauuaaggacuucgguggcuuuaauuucucucaaauccuucccgauccguccaaaccuucaaagagaaguuuuauagaagacuugcuguucaacaaggugacccucgccgaugcaggguuuaucaaacaguacggagacugucugggcgauauugcggcuagggacuuaaucugcgcccagaaguucaauggucugacagugcuuccacccuugcucacggaugagaugauugcacaguauaccagcgcccugcuagcugggacuaucacaucgggcuggaccuucggagccggcgcagcucugcaaauaccuuuugccaugcagauggcguaccguuucaacgggauuggagucacacagaauguucucuaugaaaaccagaaacugaucgccaaucaauuuaacuccgcuauuggcaagauccaggacucucuuagcucaacugcaagugccuuggguaaacugcaggacgugguaaaucagaacgcucaagccuuaaauacccucgugaagcagcuguccucuaacuucggggcaauaagcuccguccuuaacgauauccugucacgguuggacaagguggaggcggaaguucagauugaucgacucaucacgggaagacugcaaagccuacagacauacgugacccagcagcugauuagggccgcugagauccgcgccagugcaaaucucgcugccacuaaaaugucugagugcguccugggccaauccaagcggguggacuuuugugguaaaggcuaccaucuuaugagcuucccccagucggcaccacacgggguuguguuuuugcaugucaccuauguaccugcccaggaaaagaacuucacaacugcucccgcgauaugccacgagggaaaagcccacuuuccaagagaaggcguguucguuucaaaugggacccauugguuuauuacacagaggaacuucuacgagccgcaaaucaucacgaccgauaauacuuuugugucuggaaguugugacgucgugauuggcaucguaaacaauacaguguaugauccucugcagcccgaguuagacuccuucaaggaggaacucgauaaauacuucaagaaccacaccagcccagacgucgaucugggugacauuucugggauaaaugcaagcguugugaacauccagaaggaaauugaucgccuuaaugagguggcuaaaaaccugaaugaaucccuaaucgaccuccaggagcugggaaaguaugagcaauacauuaaauggcccugguauaucugguugggcuuuauagccggucugaucgccauuaucauggucacuauuauguuaugcuguaugacaucaugcuguaguugccucaagggcuguugcagcugugggucuugcugcaaauucgacgaagaugacuccgagccugugcugaagggaguuaaacuucauuacaccugaggacuagucccuguucccagagcccacuuuuuuuucuuuuuuugaaauaaaauagccugucuuucagaucucaaaggcucuuuucagagccaccaaaaaaaaaaaaaaaaaaaaaaaaaaaaaaaaaaaaaaaaaaaaaaaaaaaaaaaaaaaaaaaaaaaaaaaaaaaaaaaaaaaaaaaaaaaaaaaaaaaaa

SEQ ID NO: 12540 - RNA, 4094 nt, Artificial Sequence
  SARS-CoV-2/Wuhan/WIV05/2019__EPI_ISL_402128 spike protein mRNA gc mod (1-1273)
aggagagucccgcagucggcguccagcggcucugcuuguucgugugugugucguugcaggccuuauucaagcuuaccauguucguguuucuggugcugcugccccugguguccagccagugugugaaccugaccaccagaacacagcugccuccagccuacaccaacagcuucaccagaggcguguacuaccccgacaagguguucagauccagcgugcugcacucuacccaggaccuguuccugccuuucuucagcaacgugaccugguuccacgccauccacguguccggcaccaauggcaccaagagauucgacaaccccgugcugcccuucaacgacgggguguacuuugccagcaccgagaaguccaacaucaucagaggcuggaucuucggcaccacacuggacagcaagacccagagccugcugaucgugaacaacgccaccaacguggucaucaaagugugcgaguuccaguucugcaacgaccccuuccugggcgucuacuaccacaagaacaacaagagcuggauggaaagcgaguuccggguguacagcagcgccaacaacugcaccuucgaguacgugucccagccuuuccugauggaccuggaaggcaagcagggcaacuucaagaaccugcgcgaguucguguucaagaacaucgacggcuacuucaaaaucuacagcaagcacaccccuaucaaccucgugcgggaucugccucagggcuucucugcucuggaaccccugguggaucugcccaucggcaucaacaucacccgguuucagacacugcuggcccugcacagaagcuaccugacaccuggcgauagcagcagcggauggacagcuggugccgccgcuuacuaugugggcuaccugcagccuagaaccuuccugcugaaguacaacgagaacggcaccaucaccgacgccguggauugugcucuggauccucugagcgagacaaagugcacccugaaguccuucaccguggaaaagggcaucuaccagaccagcaacuuccgggugcagcccaccgaauccaucgugcgguuccccaauaucaccaaucugugccccuucggcgagguguucaaugccaccagauucgccucuguguacgccuggaaccggaagcggaucagcaauugcguggccgacuacuccgugcuguacaacuccgccagcuucagcaccuucaagugcuacggcguguccccuaccaagcugaacgaccugugcuucacaaacguguacgccgacagcuucgugauccggggagaugaagugcggcagauugccccuggacagacaggcaagaucgccgacuacaacuacaagcugcccgacgacuucaccggcugugugauugccuggaacagcaacaaccuggacuccaaagucggcggcaacuacaauuaccuguaccggcuguuccggaaguccaaucugaagcccuucgagcgggacaucagcaccgaaaucuaucaggccggcagcaccccuugcaacggcguggaaggcuucaacugcuacuucccacugcaguccuacggcuuucagcccacaaauggcgugggcuaucagcccuacagagugguggugcugagcuucgaacugcugcaugcuccugccacagugugcggcccuaagaaaagcaccaaucucgugaagaacaaaugcgugaacuucaacuucaacggccugaccggcaccggcgugcugacagagagcaacaagaaguuccugccauuccagcaguuuggccgggauaucgccgauaccacagacgccguuagagauccccagacacuggaaauccuggacaucaccccaugcagcuucggcggagugucugugaucaccccuggcaccaacaccagcaaucagguggcagugcuguaccaggacgugaacuguaccgaagugcccguggccauucacgccgaucagcugacaccuacauggcggguguacuccaccggcagcaauguguuucagaccagagccggcugucugaucggagccgagcacgugaacaauagcuacgagugcgacauccccaucggcgcuggcaucugugccagcuaccagacacagacaaacagccccagacgggcuagaagcguggccagccagagcaucauugccuacacaaugucucugggcgccgagaacagcguggccuacuccaacaacucuaucgcuauccccaccaacuucaccaucagcgugaccaccgagauccugccuguguccaugaccaagaccagcguggacugcaccauguacaucugcggcgauuccaccgagugcuccaaccugcugcugcaguacggcagcuucugcacccagcugaauagagcccugacagggaucgccguggaacaggacaagaacacccaagagguguucgcccaagugaagcaaaucuacaagaccccuccuaucaaggacuucggcggcuucaauuucagccagauucugcccgauccuagcaagcccagcaagcggagcuucaucgaggaccugcuguucaacaaagugacacuggccgacgccggcuucaucaagcaguauggcgauugucugggcgacauugccgccagggaucugauuugcgcccagaaguuuaacggacugacagugcugccuccucugcugaccgaugagaugaucgcccaguacacaucugcccugcuggccggcacaaucacaagcggcuggacauuuggagcuggcgccgcucugcagauccccuuugcuaugcagauggccuaccgguucaacggcaucggagugacccagaaugugcuguacgagaaccagaagcugaucgccaaccaguucaacagcgccaucggcaagauccaggacagccugagcagcacagcaagcgcccugggaaagcugcaggacguggucaaccagaaugcccaggcacugaacacccuggucaagcagcuguccuccaacuucggcgccaucagcucugugcugaacgauauccugagcagacuggacaaggucgaggccgaggugcagaucgacagacugaucacaggcagacugcagagccuccagacauacgugacccagcagcugaucagagccgccgagauuagagccucugccaaucuggccgccaccaagaugucugagugugugcugggccagagcaagagaguggacuuuugcggcaagggcuaccaccugaugagcuucccucagucugccccucacggcgugguguuucugcacgugacauaugugcccgcucaagagaagaauuucaccaccgcuccagccaucugccacgacggcaaagcccacuuuccuagagaaggcguguucguguccaacggcacccauugguucgugacacagcggaacuucuacgagccccagaucaucaccaccgacaacaccuucgugucuggcaacugcgacguugugaucggcauugugaacaauaccguguacgacccucugcagcccgagcuggacagcuucaaagaggaacuggacaaguacuuuaagaaccacacaagccccgacguggaccugggcgauaucagcggaaucaaugccagcgucgugaacauccagaaagagaucgaccggcugaacgagguggccaagaaucugaacgagagccugaucgaccugcaagaacuggggaaguacgagcaguacaucaaguggcccugguacaucuggcugggcuuuaucgccggacugauugccaucgugauggucacaaucaugcuguguugcaugaccagcugcuguagcugccugaagggcuguuguagcuguggcagcugcugcaaguucgacgaggacgauucugagcccgugcugaagggcgugaaacugcacuacaccugaggacuagucccuguucccagagcccacuuuuuuuucuuuuuuugaaauaaaauagccugucuuucagaucucaaaggcucuuuucagagccaccaaaaaaaaaaaaaaaaaaaaaaaaaaaaaaaaaaaaaaaaaaaaaaaaaaaaaaaaaaaaaaaaaaaaaaaaaaaaaaaaaaaaaaaaaaaaaaaaaaaaa

SEQ ID NO: 12541 - RNA, 4094 nt, Artificial Sequence; identical to SEQ ID NO: 151
  SARS-CoV-2/Wuhan/WIV05/2019__EPI_ISL_402128 spike protein mRNA gc mod (1-1273)(K986P_V987P) R10162

SEQ ID NO: 12542 - RNA, 4094 nt, Artificial Sequence
  SARS-CoV-2/Wuhan/WIV05/2019__EPI_ISL_402128 spike protein mRNA gc mod (1-1273)(K986P_V987P_T887WN_A1020W)
aggagagucccgcagucggcguccagcggcucugcuuguucgugugugugucguugcaggccuuauucaagcuuaccauguucguguuucuggugcugcugccccugguguccagccagugugugaaccugaccaccagaacacagcugccuccagccuacaccaacagcuucaccagaggcguguacuaccccgacaagguguucagauccagcgugcugcacucuacccaggaccuguuccugccuuucuucagcaacgugaccugguuccacgccauccacguguccggcaccaauggcaccaagagauucgacaaccccgugcugcccuucaacgacgggguguacuuugccagcaccgagaaguccaacaucaucagaggcuggaucuucggcaccacacuggacagcaagacccagagccugcugaucgugaacaacgccaccaacguggucaucaaagugugcgaguuccaguucugcaacgaccccuuccugggcgucuacuaccacaagaacaacaagagcuggauggaaagcgaguuccggguguacagcagcgccaacaacugcaccuucgaguacgugucccagccuuuccugauggaccuggaaggcaagcagggcaacuucaagaaccugcgcgaguucguguucaagaacaucgacggcuacuucaaaaucuacagcaagcacaccccuaucaaccucgugcgggaucugccucagggcuucucugcucuggaaccccugguggaucugcccaucggcaucaacaucacccgguuucagacacugcuggcccugcacagaagcuaccugacaccuggcgauagcagcagcggauggacagcuggugccgccgcuuacuaugugggcuaccugcagccuagaaccuuccugcugaaguacaacgagaacggcaccaucaccgacgccguggauugugcucuggauccucugagcgagacaaagugcacccugaaguccuucaccguggaaaagggcaucuaccagaccagcaacuuccgggugcagcccaccgaauccaucgugcgguuccccaauaucaccaaucugugccccuucggcgagguguucaaugccaccagauucgccucuguguacgccuggaaccggaagcggaucagcaauugcguggccgacuacuccgugcuguacaacuccgccagcuucagcaccuucaagugcuacggcguguccccuaccaagcugaacgaccugugcuucacaaacguguacgccgacagcuucgugauccggggagaugaagugcggcagauugccccuggacagacaggcaagaucgccgacuacaacuacaagcugcccgacgacuucaccggcugugugauugccuggaacagcaacaaccuggacuccaaagucggcggcaacuacaauuaccuguaccggcuguuccggaaguccaaucugaagcccuucgagcgggacaucagcaccgaaaucuaucaggccggcagcaccccuugcaacggcguggaaggcuucaacugcuacuucccacugcaguccuacggcuuucagcccacaaauggcgugggcuaucagcccuacagagugguggugcugagcuucgaacugcugcaugcuccugccacagugugcggcccuaagaaaagcaccaaucucgugaagaacaaaugcgugaacuucaacuucaacggccugaccggcaccggcgugcugacagagagcaacaagaaguuccugccauuccagcaguuuggccgggauaucgccgauaccacagacgccguuagagauccccagacacuggaaauccuggacaucaccccaugcagcuucggcggagugucugugaucaccccuggcaccaacaccagcaaucagguggcagugcuguaccaggacgugaacuguaccgaagugcccguggccauucacgccgaucagcugacaccuacauggcggguguacuccaccggcagcaauguguuucagaccagagccggcugucugaucggagccgagcacgugaacaauagcuacgagugcgacauccccaucggcgcuggcaucugugccagcuaccagacacagacaaacagccccagacgggcuagaagcguggccagccagagcaucauugccuacacaaugucucugggcgccgagaacagcguggccuacuccaacaacucuaucgcuauccccaccaacuucaccaucagcgugaccaccgagauccugccuguguccaugaccaagaccagcguggacugcaccauguacaucugcggcgauuccaccgagugcuccaaccugcugcugcaguacggcagcuucugcacccagcugaauagagcccugacagggaucgccguggaacaggacaagaacacccaagagguguucgcccaagugaagcaaaucuacaagaccccuccuaucaaggacuucggcggcuucaauuucagccagauucugcccgauccuagcaagcccagcaagcggagcuucaucgaggaccugcuguucaacaaagugacacuggccgacgccggcuucaucaagcaguauggcgauugucugggcgacauugccgccagggaucugauuugcgcccagaaguuuaacggacugacagugcugccuccucugcugaccgaugagaugaucgcccaguacacaucugcccugcuggccggcacaaucacaagcggcuggugguuuggagcuggcgccgcucugcagauccccuuugcuaugcagauggccuaccgguucaacggcaucggagugacccagaaugugcuguacgagaaccagaagcugaucgccaaccaguucaacagcgccaucggcaagauccaggacagccugagcagcacagcaagcgcccugggaaagcugcaggacguggucaaccagaaugcccaggcacugaacacccuggucaagcagcuguccuccaacuucggcgccaucagcucugugcugaacgauauccugagcagacuggacccuccugaggccgaggugcagaucgacagacugaucacaggcagacugcagagccuccagacauacgugacccagcagcugaucagagccgccgagauuagauggucugccaaucuggccgccaccaagaugucugagugugugcugggccagagcaagagaguggacuuuugcggcaagggcuaccaccugaugagcuucccucagucugccccucacggcgugguguuucugcacgugacauaugugcccgcucaagagaagaauuucaccaccgcuccagccaucugccacgacggcaaagcccacuuuccuagagaaggcguguucguguccaacggcacccauugguucgugacacagcggaacuucuacgagccccagaucaucaccaccgacaacaccuucgugucuggcaacugcgacguugugaucggcauugugaacaauaccguguacgacccucugcagcccgagcuggacagcuucaaagaggaacuggacaaguacuuuaagaaccacacaagccccgacguggaccugggcgauaucagcggaaucaaugccagcgucgugaacauccagaaagagaucgaccggcugaacgagguggccaagaaucugaacgagagccugaucgaccugcaagaacuggggaaguacgagcaguacaucaaguggcccugguacaucuggcugggcuuuaucgccggacugauugccaucgugauggucacaaucaugcuguguugcaugaccagcugcuguagcugccugaagggcuguuguagcuguggcagcugcugcaaguucgacgaggacgauucugagcccgugcugaagggcgugaaacugcacuacaccugaggacuagucccuguucccagagcccacuuuuuuuucuuuuuuugaaauaaaauagccugucuuucagaucucaaaggcucuuuucagagccaccaaaaaaaaaaaaaaaaaaaaaaaaaaaaaaaaaaaaaaaaaaaaaaaaaaaaaaaaaaaaaaaaaaaaaaaaaaaaaaaaaaaaaaaaaaaaaaaaaaaaa

SEQ ID NO: 12543 - RNA, 4094 nt, Artificial Sequence
  SARS-CoV-2/Wuhan/WIV05/2019__EPI_ISL_402128 spike protein mRNA gc mod (1-1273)(K986P_V987P_P1069F)
aggagagucccgcagucggcguccagcggcucugcuuguucgugugugugucguugcaggccuuauucaagcuuaccauguucguguuucuggugcugcugccccugguguccagccagugugugaaccugaccaccagaacacagcugccuccagccuacaccaacagcuucaccagaggcguguacuaccccgacaagguguucagauccagcgugcugcacucuacccaggaccuguuccugccuuucuucagcaacgugaccugguuccacgccauccacguguccggcaccaauggcaccaagagauucgacaaccccgugcugcccuucaacgacgggguguacuuugccagcaccgagaaguccaacaucaucagaggcuggaucuucggcaccacacuggacagcaagacccagagccugcugaucgugaacaacgccaccaacguggucaucaaagugugcgaguuccaguucugcaacgaccccuuccugggcgucuacuaccacaagaacaacaagagcuggauggaaagcgaguuccggguguacagcagcgccaacaacugcaccuucgaguacgugucccagccuuuccugauggaccuggaaggcaagcagggcaacuucaagaaccugcgcgaguucguguucaagaacaucgacggcuacuucaaaaucuacagcaagcacaccccuaucaaccucgugcgggaucugccucagggcuucucugcucuggaaccccugguggaucugcccaucggcaucaacaucacccgguuucagacacugcuggcccugcacagaagcuaccugacaccuggcgauagcagcagcggauggacagcuggugccgccgcuuacuaugugggcuaccugcagccuagaaccuuccugcugaaguacaacgagaacggcaccaucaccgacgccguggauugugcucuggauccucugagcgagacaaagugcacccugaaguccuucaccguggaaaagggcaucuaccagaccagcaacuuccgggugcagcccaccgaauccaucgugcgguuccccaauaucaccaaucugugccccuucggcgagguguucaaugccaccagauucgccucuguguacgccuggaaccggaagcggaucagcaauugcguggccgacuacuccgugcuguacaacuccgccagcuucagcaccuucaagugcuacggcguguccccuaccaagcugaacgaccugugcuucacaaacguguacgccgacagcuucgugauccggggagaugaagugcggcagauugccccuggacagacaggcaagaucgccgacuacaacuacaagcugcccgacgacuucaccggcugugugauugccuggaacagcaacaaccuggacuccaaagucggcggcaacuacaauuaccuguaccggcuguuccggaaguccaaucugaagcccuucgagcgggacaucagcaccgaaaucuaucaggccggcagcaccccuugcaacggcguggaaggcuucaacugcuacuucccacugcaguccuacggcuuucagcccacaaauggcgugggcuaucagcccuacagagugguggugcugagcuucgaacugcugcaugcuccugccacagugugcggcccuaagaaaagcaccaaucucgugaagaacaaaugcgugaacuucaacuucaacggccugaccggcaccggcgugcugacagagagcaacaagaaguuccugccauuccagcaguuuggccgggauaucgccgauaccacagacgccguuagagauccccagacacuggaaauccuggacaucaccccaugcagcuucggcggagugucugugaucaccccuggcaccaacaccagcaaucagguggcagugcuguaccaggacgugaacuguaccgaagugcccguggccauucacgccgaucagcugacaccuacauggcggguguacuccaccggcagcaauguguuucagaccagagccggcugucugaucggagccgagcacgugaacaauagcuacgagugcgacauccccaucggcgcuggcaucugugccagcuaccagacacagacaaacagccccagacgggcuagaagcguggccagccagagcaucauugccuacacaaugucucugggcgccgagaacagcguggccuacuccaacaacucuaucgcuauccccaccaacuucaccaucagcgugaccaccgagauccugccuguguccaugaccaagaccagcguggacugcaccauguacaucugcggcgauuccaccgagugcuccaaccugcugcugcaguacggcagcuucugcacccagcugaauagagcccugacagggaucgccguggaacaggacaagaacacccaagagguguucgcccaagugaagcaaaucuacaagaccccuccuaucaaggacuucggcggcuucaauuucagccagauucugcccgauccuagcaagcccagcaagcggagcuucaucgaggaccugcuguucaacaaagugacacuggccgacgccggcuucaucaagcaguauggcgauugucugggcgacauugccgccagggaucugauuugcgcccagaaguuuaacggacugacagugcugccuccucugcugaccgaugagaugaucgcccaguacacaucugcccugcuggccggcacaaucacaagcggcuggacauuuggagcuggcgccgcucugcagauccccuuugcuaugcagauggccuaccgguucaacggcaucggagugacccagaaugugcuguacgagaaccagaagcugaucgccaaccaguucaacagcgccaucggcaagauccaggacagccugagcagcacagcaagcgcccugggaaagcugcaggacguggucaaccagaaugcccaggcacugaacacccuggucaagcagcuguccuccaacuucggcgccaucagcucugugcugaacgauauccugagcagacuggacccuccugaggccgaggugcagaucgacagacugaucacaggcagacugcagagccuccagacauacgugacccagcagcugaucagagccgccgagauuagagccucugccaaucuggccgccaccaagaugucugagugugugcugggccagagcaagagaguggacuuuugcggcaagggcuaccaccugaugagcuucccucagucugccccucacggcgugguguuucugcacgugacauauguguucgcucaagagaagaauuucaccaccgcuccagccaucugccacgacggcaaagcccacuuuccuagagaaggcguguucguguccaacggcacccauugguucgugacacagcggaacuucuacgagccccagaucaucaccaccgacaacaccuucgugucuggcaacugcgacguugugaucggcauugugaacaauaccguguacgacccucugcagcccgagcuggacagcuucaaagaggaacuggacaaguacuuuaagaaccacacaagccccgacguggaccugggcgauaucagcggaaucaaugccagcgucgugaacauccagaaagagaucgaccggcugaacgagguggccaagaaucugaacgagagccugaucgaccugcaagaacuggggaaguacgagcaguacaucaaguggcccugguacaucuggcugggcuuuaucgccggacugauugccaucgugauggucacaaucaugcuguguugcaugaccagcugcuguagcugccugaagggcuguuguagcuguggcagcugcugcaaguucgacgaggacgauucugagcccgugcugaagggcgugaaacugcacuacaccugaggacuagucccuguucccagagcccacuuuuuuuucuuuuuuugaaauaaaauagccugucuuucagaucucaaaggcucuuuucagagccaccaaaaaaaaaaaaaaaaaaaaaaaaaaaaaaaaaaaaaaaaaaaaaaaaaaaaaaaaaaaaaaaaaaaaaaaaaaaaaaaaaaaaaaaaaaaaaaaaaaaaa

SEQ ID NO: 12544 - RNA, 4094 nt, Artificial Sequence
  SARS-CoV-2/Wuhan/WIV05/2019__EPI_ISL_402128 spike protein mRNA gc mod (1-1273)(K986P_V987P_ H1048Q_H1064N_ H1083N_H1101N)
aggagagucccgcagucggcguccagcggcucugcuuguucgugugugugucguugcaggccuuauucaagcuuaccauguucguguuucuggugcugcugccccugguguccagccagugugugaaccugaccaccagaacacagcugccuccagccuacaccaacagcuucaccagaggcguguacuaccccgacaagguguucagauccagcgugcugcacucuacccaggaccuguuccugccuuucuucagcaacgugaccugguuccacgccauccacguguccggcaccaauggcaccaagagauucgacaaccccgugcugcccuucaacgacgggguguacuuugccagcaccgagaaguccaacaucaucagaggcuggaucuucggcaccacacuggacagcaagacccagagccugcugaucgugaacaacgccaccaacguggucaucaaagugugcgaguuccaguucugcaacgaccccuuccugggcgucuacuaccacaagaacaacaagagcuggauggaaagcgaguuccggguguacagcagcgccaacaacugcaccuucgaguacgugucccagccuuuccugauggaccuggaaggcaagcagggcaacuucaagaaccugcgcgaguucguguucaagaacaucgacggcuacuucaaaaucuacagcaagcacaccccuaucaaccucgugcgggaucugccucagggcuucucugcucuggaaccccugguggaucugcccaucggcaucaacaucacccgguuucagacacugcuggcccugcacagaagcuaccugacaccuggcgauagcagcagcggauggacagcuggugccgccgcuuacuaugugggcuaccugcagccuagaaccuuccugcugaaguacaacgagaacggcaccaucaccgacgccguggauugugcucuggauccucugagcgagacaaagugcacccugaaguccuucaccguggaaaagggcaucuaccagaccagcaacuuccgggugcagcccaccgaauccaucgugcgguuccccaauaucaccaaucugugccccuucggcgagguguucaaugccaccagauucgccucuguguacgccuggaaccggaagcggaucagcaauugcguggccgacuacuccgugcuguacaacuccgccagcuucagcaccuucaagugcuacggcguguccccuaccaagcugaacgaccugugcuucacaaacguguacgccgacagcuucgugauccggggagaugaagugcggcagauugccccuggacagacaggcaagaucgccgacuacaacuacaagcugcccgacgacuucaccggcugugugauugccuggaacagcaacaaccuggacuccaaagucggcggcaacuacaauuaccuguaccggcuguuccggaaguccaaucugaagcccuucgagcgggacaucagcaccgaaaucuaucaggccggcagcaccccuugcaacggcguggaaggcuucaacugcuacuucccacugcaguccuacggcuuucagcccacaaauggcgugggcuaucagcccuacagagugguggugcugagcuucgaacugcugcaugcuccugccacagugugcggcccuaagaaaagcaccaaucucgugaagaacaaaugcgugaacuucaacuucaacggccugaccggcaccggcgugcugacagagagcaacaagaaguuccugccauuccagcaguuuggccgggauaucgccgauaccacagacgccguuagagauccccagacacuggaaauccuggacaucaccccaugcagcuucggcggagugucugugaucaccccuggcaccaacaccagcaaucagguggcagugcuguaccaggacgugaacuguaccgaagugcccguggccauucacgccgaucagcugacaccuacauggcggguguacuccaccggcagcaauguguuucagaccagagccggcugucugaucggagccgagcacgugaacaauagcuacgagugcgacauccccaucggcgcuggcaucugugccagcuaccagacacagacaaacagccccagacgggcuagaagcguggccagccagagcaucauugccuacacaaugucucugggcgccgagaacagcguggccuacuccaacaacucuaucgcuauccccaccaacuucaccaucagcgugaccaccgagauccugccuguguccaugaccaagaccagcguggacugcaccauguacaucugcggcgauuccaccgagugcuccaaccugcugcugcaguacggcagcuucugcacccagcugaauagagcccugacagggaucgccguggaacaggacaagaacacccaagagguguucgcccaagugaagcaaaucuacaagaccccuccuaucaaggacuucggcggcuucaauuucagccagauucugcccgauccuagcaagcccagcaagcggagcuucaucgaggaccugcuguucaacaaagugacacuggccgacgccggcuucaucaagcaguauggcgauugucugggcgacauugccgccagggaucugauuugcgcccagaaguuuaacggacugacagugcugccuccucugcugaccgaugagaugaucgcccaguacacaucugcccugcuggccggcacaaucacaagcggcuggacauuuggagcuggcgccgcucugcagauccccuuugcuaugcagauggccuaccgguucaacggcaucggagugacccagaaugugcuguacgagaaccagaagcugaucgccaaccaguucaacagcgccaucggcaagauccaggacagccugagcagcacagcaagcgcccugggaaagcugcaggacguggucaaccagaaugcccaggcacugaacacccuggucaagcagcuguccuccaacuucggcgccaucagcucugugcugaacgauauccugagcagacuggacccuccugaggccgaggugcagaucgacagacugaucacaggcagacugcagagccuccagacauacgugacccagcagcugaucagagccgccgagauuagagccucugccaaucuggccgccaccaagaugucugagugugugcugggccagagcaagagaguggacuuuugcggcaagggcuaccagcugaugagcuucccucagucugccccucacggcgugguguuucugaacgugacauaugugcccgcucaagagaagaauuucaccaccgcuccagccaucugcaacgacggcaaagcccacuuuccuagagaaggcguguucguguccaacggcaccaacugguucgugacacagcggaacuucuacgagccccagaucaucaccaccgacaacaccuucgugucuggcaacugcgacguugugaucggcauugugaacaauaccguguacgacccucugcagcccgagcuggacagcuucaaagaggaacuggacaaguacuuuaagaaccacacaagccccgacguggaccugggcgauaucagcggaaucaaugccagcgucgugaacauccagaaagagaucgaccggcugaacgagguggccaagaaucugaacgagagccugaucgaccugcaagaacuggggaaguacgagcaguacaucaaguggcccugguacaucuggcugggcuuuaucgccggacugauugccaucgugauggucacaaucaugcuguguugcaugaccagcugcuguagcugccugaagggcuguuguagcuguggcagcugcugcaaguucgacgaggacgauucugagcccgugcugaagggcgugaaacugcacuacaccugaggacuagucccuguucccagagcccacuuuuuuuucuuuuuuugaaauaaaauagccugucuuucagaucucaaaggcucuuuucagagccaccaaaaaaaaaaaaaaaaaaaaaaaaaaaaaaaaaaaaaaaaaaaaaaaaaaaaaaaaaaaaaaaaaaaaaaaaaaaaaaaaaaaaaaaaaaaaaaaaaaaaa

SEQ ID NO: 12545 - RNA, 4094 nt, Artificial Sequence
  SARS-CoV-2/Wuhan/WIV05/2019__EPI_ISL_402128 spike protein mRNA gc mod (1-1273)(I712C_T1077C)
aggagagucccgcagucggcguccagcggcucugcuuguucgugugugugucguugcaggccuuauucaagcuuaccauguucguguuucuggugcugcugccccugguguccagccagugugugaaccugaccaccagaacacagcugccuccagccuacaccaacagcuucaccagaggcguguacuaccccgacaagguguucagauccagcgugcugcacucuacccaggaccuguuccugccuuucuucagcaacgugaccugguuccacgccauccacguguccggcaccaauggcaccaagagauucgacaaccccgugcugcccuucaacgacgggguguacuuugccagcaccgagaaguccaacaucaucagaggcuggaucuucggcaccacacuggacagcaagacccagagccugcugaucgugaacaacgccaccaacguggucaucaaagugugcgaguuccaguucugcaacgaccccuuccugggcgucuacuaccacaagaacaacaagagcuggauggaaagcgaguuccggguguacagcagcgccaacaacugcaccuucgaguacgugucccagccuuuccugauggaccuggaaggcaagcagggcaacuucaagaaccugcgcgaguucguguucaagaacaucgacggcuacuucaaaaucuacagcaagcacaccccuaucaaccucgugcgggaucugccucagggcuucucugcucuggaaccccugguggaucugcccaucggcaucaacaucacccgguuucagacacugcuggcccugcacagaagcuaccugacaccuggcgauagcagcagcggauggacagcuggugccgccgcuuacuaugugggcuaccugcagccuagaaccuuccugcugaaguacaacgagaacggcaccaucaccgacgccguggauugugcucuggauccucugagcgagacaaagugcacccugaaguccuucaccguggaaaagggcaucuaccagaccagcaacuuccgggugcagcccaccgaauccaucgugcgguuccccaauaucaccaaucugugccccuucggcgagguguucaaugccaccagauucgccucuguguacgccuggaaccggaagcggaucagcaauugcguggccgacuacuccgugcuguacaacuccgccagcuucagcaccuucaagugcuacggcguguccccuaccaagcugaacgaccugugcuucacaaacguguacgccgacagcuucgugauccggggagaugaagugcggcagauugccccuggacagacaggcaagaucgccgacuacaacuacaagcugcccgacgacuucaccggcugugugauugccuggaacagcaacaaccuggacuccaaagucggcggcaacuacaauuaccuguaccggcuguuccggaaguccaaucugaagcccuucgagcgggacaucagcaccgaaaucuaucaggccggcagcaccccuugcaacggcguggaaggcuucaacugcuacuucccacugcaguccuacggcuuucagcccacaaauggcgugggcuaucagcccuacagagugguggugcugagcuucgaacugcugcaugcuccugccacagugugcggcccuaagaaaagcaccaaucucgugaagaacaaaugcgugaacuucaacuucaacggccugaccggcaccggcgugcugacagagagcaacaagaaguuccugccauuccagcaguuuggccgggauaucgccgauaccacagacgccguuagagauccccagacacuggaaauccuggacaucaccccaugcagcuucggcggagugucugugaucaccccuggcaccaacaccagcaaucagguggcagugcuguaccaggacgugaacuguaccgaagugcccguggccauucacgccgaucagcugacaccuacauggcggguguacuccaccggcagcaauguguuucagaccagagccggcugucugaucggagccgagcacgugaacaauagcuacgagugcgacauccccaucggcgcuggcaucugugccagcuaccagacacagacaaacagccccagacgggcuagaagcguggccagccagagcaucauugccuacacaaugucucugggcgccgagaacagcguggccuacuccaacaacucuugcgcuauccccaccaacuucaccaucagcgugaccaccgagauccugccuguguccaugaccaagaccagcguggacugcaccauguacaucugcggcgauuccaccgagugcuccaaccugcugcugcaguacggcagcuucugcacccagcugaauagagcccugacagggaucgccguggaacaggacaagaacacccaagagguguucgcccaagugaagcaaaucuacaagaccccuccuaucaaggacuucggcggcuucaauuucagccagauucugcccgauccuagcaagcccagcaagcggagcuucaucgaggaccugcuguucaacaaagugacacuggccgacgccggcuucaucaagcaguauggcgauugucugggcgacauugccgccagggaucugauuugcgcccagaaguuuaacggacugacagugcugccuccucugcugaccgaugagaugaucgcccaguacacaucugcccugcuggccggcacaaucacaagcggcuggacauuuggagcuggcgccgcucugcagauccccuuugcuaugcagauggccuaccgguucaacggcaucggagugacccagaaugugcuguacgagaaccagaagcugaucgccaaccaguucaacagcgccaucggcaagauccaggacagccugagcagcacagcaagcgcccugggaaagcugcaggacguggucaaccagaaugcccaggcacugaacacccuggucaagcagcuguccuccaacuucggcgccaucagcucugugcugaacgauauccugagcagacuggacaaggucgaggccgaggugcagaucgacagacugaucacaggcagacugcagagccuccagacauacgugacccagcagcugaucagagccgccgagauuagagccucugccaaucuggccgccaccaagaugucugagugugugcugggccagagcaagagaguggacuuuugcggcaagggcuaccaccugaugagcuucccucagucugccccucacggcgugguguuucugcacgugacauaugugcccgcucaagagaagaauuucaccugugcuccagccaucugccacgacggcaaagcccacuuuccuagagaaggcguguucguguccaacggcacccauugguucgugacacagcggaacuucuacgagccccagaucaucaccaccgacaacaccuucgugucuggcaacugcgacguugugaucggcauugugaacaauaccguguacgacccucugcagcccgagcuggacagcuucaaagaggaacuggacaaguacuuuaagaaccacacaagccccgacguggaccugggcgauaucagcggaaucaaugccagcgucgugaacauccagaaagagaucgaccggcugaacgagguggccaagaaucugaacgagagccugaucgaccugcaagaacuggggaaguacgagcaguacaucaaguggcccugguacaucuggcugggcuuuaucgccggacugauugccaucgugauggucacaaucaugcuguguugcaugaccagcugcuguagcugccugaagggcuguuguagcuguggcagcugcugcaaguucgacgaggacgauucugagcccgugcugaagggcgugaaacugcacuacaccugaggacuagucccuguucccagagcccacuuuuuuuucuuuuuuugaaauaaaauagccugucuuucagaucucaaaggcucuuuucagagccaccaaaaaaaaaaaaaaaaaaaaaaaaaaaaaaaaaaaaaaaaaaaaaaaaaaaaaaaaaaaaaaaaaaaaaaaaaaaaaaaaaaaaaaaaaaaaaaaaaaaaa

SEQ ID NO: 12546 - RNA, 4094 nt, Artificial Sequence
  SARS-CoV-2/Wuhan/WIV05/2019__EPI_ISL_402128 spike protein mRNA gc mod (1-1273)(I714C_Y1110C)
aggagagucccgcagucggcguccagcggcucugcuuguucgugugugugucguugcaggccuuauucaagcuuaccauguucguguuucuggugcugcugccccugguguccagccagugugugaaccugaccaccagaacacagcugccuccagccuacaccaacagcuucaccagaggcguguacuaccccgacaagguguucagauccagcgugcugcacucuacccaggaccuguuccugccuuucuucagcaacgugaccugguuccacgccauccacguguccggcaccaauggcaccaagagauucgacaaccccgugcugcccuucaacgacgggguguacuuugccagcaccgagaaguccaacaucaucagaggcuggaucuucggcaccacacuggacagcaagacccagagccugcugaucgugaacaacgccaccaacguggucaucaaagugugcgaguuccaguucugcaacgaccccuuccugggcgucuacuaccacaagaacaacaagagcuggauggaaagcgaguuccggguguacagcagcgccaacaacugcaccuucgaguacgugucccagccuuuccugauggaccuggaaggcaagcagggcaacuucaagaaccugcgcgaguucguguucaagaacaucgacggcuacuucaaaaucuacagcaagcacaccccuaucaaccucgugcgggaucugccucagggcuucucugcucuggaaccccugguggaucugcccaucggcaucaacaucacccgguuucagacacugcuggcccugcacagaagcuaccugacaccuggcgauagcagcagcggauggacagcuggugccgccgcuuacuaugugggcuaccugcagccuagaaccuuccugcugaaguacaacgagaacggcaccaucaccgacgccguggauugugcucuggauccucugagcgagacaaagugcacccugaaguccuucaccguggaaaagggcaucuaccagaccagcaacuuccgggugcagcccaccgaauccaucgugcgguuccccaauaucaccaaucugugccccuucggcgagguguucaaugccaccagauucgccucuguguacgccuggaaccggaagcggaucagcaauugcguggccgacuacuccgugcuguacaacuccgccagcuucagcaccuucaagugcuacggcguguccccuaccaagcugaacgaccugugcuucacaaacguguacgccgacagcuucgugauccggggagaugaagugcggcagauugccccuggacagacaggcaagaucgccgacuacaacuacaagcugcccgacgacuucaccggcugugugauugccuggaacagcaacaaccuggacuccaaagucggcggcaacuacaauuaccuguaccggcuguuccggaaguccaaucugaagcccuucgagcgggacaucagcaccgaaaucuaucaggccggcagcaccccuugcaacggcguggaaggcuucaacugcuacuucccacugcaguccuacggcuuucagcccacaaauggcgugggcuaucagcccuacagagugguggugcugagcuucgaacugcugcaugcuccugccacagugugcggcccuaagaaaagcaccaaucucgugaagaacaaaugcgugaacuucaacuucaacggccugaccggcaccggcgugcugacagagagcaacaagaaguuccugccauuccagcaguuuggccgggauaucgccgauaccacagacgccguuagagauccccagacacuggaaauccuggacaucaccccaugcagcuucggcggagugucugugaucaccccuggcaccaacaccagcaaucagguggcagugcuguaccaggacgugaacuguaccgaagugcccguggccauucacgccgaucagcugacaccuacauggcggguguacuccaccggcagcaauguguuucagaccagagccggcugucugaucggagccgagcacgugaacaauagcuacgagugcgacauccccaucggcgcuggcaucugugccagcuaccagacacagacaaacagccccagacgggcuagaagcguggccagccagagcaucauugccuacacaaugucucugggcgccgagaacagcguggccuacuccaacaacucuaucgcuugccccaccaacuucaccaucagcgugaccaccgagauccugccuguguccaugaccaagaccagcguggacugcaccauguacaucugcggcgauuccaccgagugcuccaaccugcugcugcaguacggcagcuucugcacccagcugaauagagcccugacagggaucgccguggaacaggacaagaacacccaagagguguucgcccaagugaagcaaaucuacaagaccccuccuaucaaggacuucggcggcuucaauuucagccagauucugcccgauccuagcaagcccagcaagcggagcuucaucgaggaccugcuguucaacaaagugacacuggccgacgccggcuucaucaagcaguauggcgauugucugggcgacauugccgccagggaucugauuugcgcccagaaguuuaacggacugacagugcugccuccucugcugaccgaugagaugaucgcccaguacacaucugcccugcuggccggcacaaucacaagcggcuggacauuuggagcuggcgccgcucugcagauccccuuugcuaugcagauggccuaccgguucaacggcaucggagugacccagaaugugcuguacgagaaccagaagcugaucgccaaccaguucaacagcgccaucggcaagauccaggacagccugagcagcacagcaagcgcccugggaaagcugcaggacguggucaaccagaaugcccaggcacugaacacccuggucaagcagcuguccuccaacuucggcgccaucagcucugugcugaacgauauccugagcagacuggacaaggucgaggccgaggugcagaucgacagacugaucacaggcagacugcagagccuccagacauacgugacccagcagcugaucagagccgccgagauuagagccucugccaaucuggccgccaccaagaugucugagugugugcugggccagagcaagagaguggacuuuugcggcaagggcuaccaccugaugagcuucccucagucugccccucacggcgugguguuucugcacgugacauaugugcccgcucaagagaagaauuucaccaccgcuccagccaucugccacgacggcaaagcccacuuuccuagagaaggcguguucguguccaacggcacccauugguucgugacacagcggaacuucugugagccccagaucaucaccaccgacaacaccuucgugucuggcaacugcgacguugugaucggcauugugaacaauaccguguacgacccucugcagcccgagcuggacagcuucaaagaggaacuggacaaguacuuuaagaaccacacaagccccgacguggaccugggcgauaucagcggaaucaaugccagcgucgugaacauccagaaagagaucgaccggcugaacgagguggccaagaaucugaacgagagccugaucgaccugcaagaacuggggaaguacgagcaguacaucaaguggcccugguacaucuggcugggcuuuaucgccggacugauugccaucgugauggucacaaucaugcuguguugcaugaccagcugcuguagcugccugaagggcuguuguagcuguggcagcugcugcaaguucgacgaggacgauucugagcccgugcugaagggcgugaaacugcacuacaccugaggacuagucccuguucccagagcccacuuuuuuuucuuuuuuugaaauaaaauagccugucuuucagaucucaaaggcucuuuucagagccaccaaaaaaaaaaaaaaaaaaaaaaaaaaaaaaaaaaaaaaaaaaaaaaaaaaaaaaaaaaaaaaaaaaaaaaaaaaaaaaaaaaaaaaaaaaaaaaaaaaaaa

SEQ ID NO: 12547 - RNA, 4094 nt, Artificial Sequence
  SARS-CoV-2/Wuhan/WIV05/2019__EPI_ISL_402128 spike protein mRNA gc mod (1-1273)(P715C_P1069C)
aggagagucccgcagucggcguccagcggcucugcuuguucgugugugugucguugcaggccuuauucaagcuuaccauguucguguuucuggugcugcugccccugguguccagccagugugugaaccugaccaccagaacacagcugccuccagccuacaccaacagcuucaccagaggcguguacuaccccgacaagguguucagauccagcgugcugcacucuacccaggaccuguuccugccuuucuucagcaacgugaccugguuccacgccauccacguguccggcaccaauggcaccaagagauucgacaaccccgugcugcccuucaacgacgggguguacuuugccagcaccgagaaguccaacaucaucagaggcuggaucuucggcaccacacuggacagcaagacccagagccugcugaucgugaacaacgccaccaacguggucaucaaagugugcgaguuccaguucugcaacgaccccuuccugggcgucuacuaccacaagaacaacaagagcuggauggaaagcgaguuccggguguacagcagcgccaacaacugcaccuucgaguacgugucccagccuuuccugauggaccuggaaggcaagcagggcaacuucaagaaccugcgcgaguucguguucaagaacaucgacggcuacuucaaaaucuacagcaagcacaccccuaucaaccucgugcgggaucugccucagggcuucucugcucuggaaccccugguggaucugcccaucggcaucaacaucacccgguuucagacacugcuggcccugcacagaagcuaccugacaccuggcgauagcagcagcggauggacagcuggugccgccgcuuacuaugugggcuaccugcagccuagaaccuuccugcugaaguacaacgagaacggcaccaucaccgacgccguggauugugcucuggauccucugagcgagacaaagugcacccugaaguccuucaccguggaaaagggcaucuaccagaccagcaacuuccgggugcagcccaccgaauccaucgugcgguuccccaauaucaccaaucugugccccuucggcgagguguucaaugccaccagauucgccucuguguacgccuggaaccggaagcggaucagcaauugcguggccgacuacuccgugcuguacaacuccgccagcuucagcaccuucaagugcuacggcguguccccuaccaagcugaacgaccugugcuucacaaacguguacgccgacagcuucgugauccggggagaugaagugcggcagauugccccuggacagacaggcaagaucgccgacuacaacuacaagcugcccgacgacuucaccggcugugugauugccuggaacagcaacaaccuggacuccaaagucggcggcaacuacaauuaccuguaccggcuguuccggaaguccaaucugaagcccuucgagcgggacaucagcaccgaaaucuaucaggccggcagcaccccuugcaacggcguggaaggcuucaacugcuacuucccacugcaguccuacggcuuucagcccacaaauggcgugggcuaucagcccuacagagugguggugcugagcuucgaacugcugcaugcuccugccacagugugcggcccuaagaaaagcaccaaucucgugaagaacaaaugcgugaacuucaacuucaacggccugaccggcaccggcgugcugacagagagcaacaagaaguuccugccauuccagcaguuuggccgggauaucgccgauaccacagacgccguuagagauccccagacacuggaaauccuggacaucaccccaugcagcuucggcggagugucugugaucaccccuggcaccaacaccagcaaucagguggcagugcuguaccaggacgugaacuguaccgaagugcccguggccauucacgccgaucagcugacaccuacauggcggguguacuccaccggcagcaauguguuucagaccagagccggcugucugaucggagccgagcacgugaacaauagcuacgagugcgacauccccaucggcgcuggcaucugugccagcuaccagacacagacaaacagccccagacgggcuagaagcguggccagccagagcaucauugccuacacaaugucucugggcgccgagaacagcguggccuacuccaacaacucuaucgcuaucugcaccaacuucaccaucagcgugaccaccgagauccugccuguguccaugaccaagaccagcguggacugcaccauguacaucugcggcgauuccaccgagugcuccaaccugcugcugcaguacggcagcuucugcacccagcugaauagagcccugacagggaucgccguggaacaggacaagaacacccaagagguguucgcccaagugaagcaaaucuacaagaccccuccuaucaaggacuucggcggcuucaauuucagccagauucugcccgauccuagcaagcccagcaagcggagcuucaucgaggaccugcuguucaacaaagugacacuggccgacgccggcuucaucaagcaguauggcgauugucugggcgacauugccgccagggaucugauuugcgcccagaaguuuaacggacugacagugcugccuccucugcugaccgaugagaugaucgcccaguacacaucugcccugcuggccggcacaaucacaagcggcuggacauuuggagcuggcgccgcucugcagauccccuuugcuaugcagauggccuaccgguucaacggcaucggagugacccagaaugugcuguacgagaaccagaagcugaucgccaaccaguucaacagcgccaucggcaagauccaggacagccugagcagcacagcaagcgcccugggaaagcugcaggacguggucaaccagaaugcccaggcacugaacacccuggucaagcagcuguccuccaacuucggcgccaucagcucugugcugaacgauauccugagcagacuggacaaggucgaggccgaggugcagaucgacagacugaucacaggcagacugcagagccuccagacauacgugacccagcagcugaucagagccgccgagauuagagccucugccaaucuggccgccaccaagaugucugagugugugcugggccagagcaagagaguggacuuuugcggcaagggcuaccaccugaugagcuucccucagucugccccucacggcgugguguuucugcacgugacauaugugugugcucaagagaagaauuucaccaccgcuccagccaucugccacgacggcaaagcccacuuuccuagagaaggcguguucguguccaacggcacccauugguucgugacacagcggaacuucuacgagccccagaucaucaccaccgacaacaccuucgugucuggcaacugcgacguugugaucggcauugugaacaauaccguguacgacccucugcagcccgagcuggacagcuucaaagaggaacuggacaaguacuuuaagaaccacacaagccccgacguggaccugggcgauaucagcggaaucaaugccagcgucgugaacauccagaaagagaucgaccggcugaacgagguggccaagaaucugaacgagagccugaucgaccugcaagaacuggggaaguacgagcaguacaucaaguggcccugguacaucuggcugggcuuuaucgccggacugauugccaucgugauggucacaaucaugcuguguugcaugaccagcugcuguagcugccugaagggcuguuguagcuguggcagcugcugcaaguucgacgaggacgauucugagcccgugcugaagggcgugaaacugcacuacaccugaggacuagucccuguucccagagcccacuuuuuuuucuuuuuuugaaauaaaauagccugucuuucagaucucaaaggcucuuuucagagccaccaaaaaaaaaaaaaaaaaaaaaaaaaaaaaaaaaaaaaaaaaaaaaaaaaaaaaaaaaaaaaaaaaaaaaaaaaaaaaaaaaaaaaaaaaaaaaaaaaaaaa

SEQ ID NO: 12548 - RNA, 4094 nt, Artificial Sequence
  SARS-CoV-2/Wuhan/WIV05/2019__EPI_ISL_402128 spike protein mRNA gc mod (1-1273)(G889C_L1034C)
aggagagucccgcagucggcguccagcggcucugcuuguucgugugugugucguugcaggccuuauucaagcuuaccauguucguguuucuggugcugcugccccugguguccagccagugugugaaccugaccaccagaacacagcugccuccagccuacaccaacagcuucaccagaggcguguacuaccccgacaagguguucagauccagcgugcugcacucuacccaggaccuguuccugccuuucuucagcaacgugaccugguuccacgccauccacguguccggcaccaauggcaccaagagauucgacaaccccgugcugcccuucaacgacgggguguacuuugccagcaccgagaaguccaacaucaucagaggcuggaucuucggcaccacacuggacagcaagacccagagccugcugaucgugaacaacgccaccaacguggucaucaaagugugcgaguuccaguucugcaacgaccccuuccugggcgucuacuaccacaagaacaacaagagcuggauggaaagcgaguuccggguguacagcagcgccaacaacugcaccuucgaguacgugucccagccuuuccugauggaccuggaaggcaagcagggcaacuucaagaaccugcgcgaguucguguucaagaacaucgacggcuacuucaaaaucuacagcaagcacaccccuaucaaccucgugcgggaucugccucagggcuucucugcucuggaaccccugguggaucugcccaucggcaucaacaucacccgguuucagacacugcuggcccugcacagaagcuaccugacaccuggcgauagcagcagcggauggacagcuggugccgccgcuuacuaugugggcuaccugcagccuagaaccuuccugcugaaguacaacgagaacggcaccaucaccgacgccguggauugugcucuggauccucugagcgagacaaagugcacccugaaguccuucaccguggaaaagggcaucuaccagaccagcaacuuccgggugcagcccaccgaauccaucgugcgguuccccaauaucaccaaucugugccccuucggcgagguguucaaugccaccagauucgccucuguguacgccuggaaccggaagcggaucagcaauugcguggccgacuacuccgugcuguacaacuccgccagcuucagcaccuucaagugcuacggcguguccccuaccaagcugaacgaccugugcuucacaaacguguacgccgacagcuucgugauccggggagaugaagugcggcagauugccccuggacagacaggcaagaucgccgacuacaacuacaagcugcccgacgacuucaccggcugugugauugccuggaacagcaacaaccuggacuccaaagucggcggcaacuacaauuaccuguaccggcuguuccggaaguccaaucugaagcccuucgagcgggacaucagcaccgaaaucuaucaggccggcagcaccccuugcaacggcguggaaggcuucaacugcuacuucccacugcaguccuacggcuuucagcccacaaauggcgugggcuaucagcccuacagagugguggugcugagcuucgaacugcugcaugcuccugccacagugugcggcccuaagaaaagcaccaaucucgugaagaacaaaugcgugaacuucaacuucaacggccugaccggcaccggcgugcugacagagagcaacaagaaguuccugccauuccagcaguuuggccgggauaucgccgauaccacagacgccguuagagauccccagacacuggaaauccuggacaucaccccaugcagcuucggcggagugucugugaucaccccuggcaccaacaccagcaaucagguggcagugcuguaccaggacgugaacuguaccgaagugcccguggccauucacgccgaucagcugacaccuacauggcggguguacuccaccggcagcaauguguuucagaccagagccggcugucugaucggagccgagcacgugaacaauagcuacgagugcgacauccccaucggcgcuggcaucugugccagcuaccagacacagacaaacagccccagacgggcuagaagcguggccagccagagcaucauugccuacacaaugucucugggcgccgagaacagcguggccuacuccaacaacucuaucgcuauccccaccaacuucaccaucagcgugaccaccgagauccugccuguguccaugaccaagaccagcguggacugcaccauguacaucugcggcgauuccaccgagugcuccaaccugcugcugcaguacggcagcuucugcacccagcugaauagagcccugacagggaucgccguggaacaggacaagaacacccaagagguguucgcccaagugaagcaaaucuacaagaccccuccuaucaaggacuucggcggcuucaauuucagccagauucugcccgauccuagcaagcccagcaagcggagcuucaucgaggaccugcuguucaacaaagugacacuggccgacgccggcuucaucaagcaguauggcgauugucugggcgacauugccgccagggaucugauuugcgcccagaaguuuaacggacugacagugcugccuccucugcugaccgaugagaugaucgcccaguacacaucugcccugcuggccggcacaaucacaagcggcuggacauuuugcgcuggcgccgcucugcagauccccuuugcuaugcagauggccuaccgguucaacggcaucggagugacccagaaugugcuguacgagaaccagaagcugaucgccaaccaguucaacagcgccaucggcaagauccaggacagccugagcagcacagcaagcgcccugggaaagcugcaggacguggucaaccagaaugcccaggcacugaacacccuggucaagcagcuguccuccaacuucggcgccaucagcucugugcugaacgauauccugagcagacuggacaaggucgaggccgaggugcagaucgacagacugaucacaggcagacugcagagccuccagacauacgugacccagcagcugaucagagccgccgagauuagagccucugccaaucuggccgccaccaagaugucugaguguguguguggccagagcaagagaguggacuuuugcggcaagggcuaccaccugaugagcuucccucagucugccccucacggcgugguguuucugcacgugacauaugugcccgcucaagagaagaauuucaccaccgcuccagccaucugccacgacggcaaagcccacuuuccuagagaaggcguguucguguccaacggcacccauugguucgugacacagcggaacuucuacgagccccagaucaucaccaccgacaacaccuucgugucuggcaacugcgacguugugaucggcauugugaacaauaccguguacgacccucugcagcccgagcuggacagcuucaaagaggaacuggacaaguacuuuaagaaccacacaagccccgacguggaccugggcgauaucagcggaaucaaugccagcgucgugaacauccagaaagagaucgaccggcugaacgagguggccaagaaucugaacgagagccugaucgaccugcaagaacuggggaaguacgagcaguacaucaaguggcccugguacaucuggcugggcuuuaucgccggacugauugccaucgugauggucacaaucaugcuguguugcaugaccagcugcuguagcugccugaagggcuguuguagcuguggcagcugcugcaaguucgacgaggacgauucugagcccgugcugaagggcgugaaacugcacuacaccugaggacuagucccuguucccagagcccacuuuuuuuucuuuuuuugaaauaaaauagccugucuuucagaucucaaaggcucuuuucagagccaccaaaaaaaaaaaaaaaaaaaaaaaaaaaaaaaaaaaaaaaaaaaaaaaaaaaaaaaaaaaaaaaaaaaaaaaaaaaaaaaaaaaaaaaaaaaaaaaaaaaaa

SEQ ID NO: 12549 - RNA, 4094 nt, Artificial Sequence
  SARS-CoV-2/Wuhan/WIV05/2019__EPI_ISL_402128 spike protein mRNA gc mod (1-1273)(I909C_Y1047C)
aggagagucccgcagucggcguccagcggcucugcuuguucgugugugugucguugcaggccuuauucaagcuuaccauguucguguuucuggugcugcugccccugguguccagccagugugugaaccugaccaccagaacacagcugccuccagccuacaccaacagcuucaccagaggcguguacuaccccgacaagguguucagauccagcgugcugcacucuacccaggaccuguuccugccuuucuucagcaacgugaccugguuccacgccauccacguguccggcaccaauggcaccaagagauucgacaaccccgugcugcccuucaacgacgggguguacuuugccagcaccgagaaguccaacaucaucagaggcuggaucuucggcaccacacuggacagcaagacccagagccugcugaucgugaacaacgccaccaacguggucaucaaagugugcgaguuccaguucugcaacgaccccuuccugggcgucuacuaccacaagaacaacaagagcuggauggaaagcgaguuccggguguacagcagcgccaacaacugcaccuucgaguacgugucccagccuuuccugauggaccuggaaggcaagcagggcaacuucaagaaccugcgcgaguucguguucaagaacaucgacggcuacuucaaaaucuacagcaagcacaccccuaucaaccucgugcgggaucugccucagggcuucucugcucuggaaccccugguggaucugcccaucggcaucaacaucacccgguuucagacacugcuggcccugcacagaagcuaccugacaccuggcgauagcagcagcggauggacagcuggugccgccgcuuacuaugugggcuaccugcagccuagaaccuuccugcugaaguacaacgagaacggcaccaucaccgacgccguggauugugcucuggauccucugagcgagacaaagugcacccugaaguccuucaccguggaaaagggcaucuaccagaccagcaacuuccgggugcagcccaccgaauccaucgugcgguuccccaauaucaccaaucugugccccuucggcgagguguucaaugccaccagauucgccucuguguacgccuggaaccggaagcggaucagcaauugcguggccgacuacuccgugcuguacaacuccgccagcuucagcaccuucaagugcuacggcguguccccuaccaagcugaacgaccugugcuucacaaacguguacgccgacagcuucgugauccggggagaugaagugcggcagauugccccuggacagacaggcaagaucgccgacuacaacuacaagcugcccgacgacuucaccggcugugugauugccuggaacagcaacaaccuggacuccaaagucggcggcaacuacaauuaccuguaccggcuguuccggaaguccaaucugaagcccuucgagcgggacaucagcaccgaaaucuaucaggccggcagcaccccuugcaacggcguggaaggcuucaacugcuacuucccacugcaguccuacggcuuucagcccacaaauggcgugggcuaucagcccuacagagugguggugcugagcuucgaacugcugcaugcuccugccacagugugcggcccuaagaaaagcaccaaucucgugaagaacaaaugcgugaacuucaacuucaacggccugaccggcaccggcgugcugacagagagcaacaagaaguuccugccauuccagcaguuuggccgggauaucgccgauaccacagacgccguuagagauccccagacacuggaaauccuggacaucaccccaugcagcuucggcggagugucugugaucaccccuggcaccaacaccagcaaucagguggcagugcuguaccaggacgugaacuguaccgaagugcccguggccauucacgccgaucagcugacaccuacauggcggguguacuccaccggcagcaauguguuucagaccagagccggcugucugaucggagccgagcacgugaacaauagcuacgagugcgacauccccaucggcgcuggcaucugugccagcuaccagacacagacaaacagccccagacgggcuagaagcguggccagccagagcaucauugccuacacaaugucucugggcgccgagaacagcguggccuacuccaacaacucuaucgcuauccccaccaacuucaccaucagcgugaccaccgagauccugccuguguccaugaccaagaccagcguggacugcaccauguacaucugcggcgauuccaccgagugcuccaaccugcugcugcaguacggcagcuucugcacccagcugaauagagcccugacagggaucgccguggaacaggacaagaacacccaagagguguucgcccaagugaagcaaaucuacaagaccccuccuaucaaggacuucggcggcuucaauuucagccagauucugcccgauccuagcaagcccagcaagcggagcuucaucgaggaccugcuguucaacaaagugacacuggccgacgccggcuucaucaagcaguauggcgauugucugggcgacauugccgccagggaucugauuugcgcccagaaguuuaacggacugacagugcugccuccucugcugaccgaugagaugaucgcccaguacacaucugcccugcuggccggcacaaucacaagcggcuggacauuuggagcuggcgccgcucugcagauccccuuugcuaugcagauggccuaccgguucaacggcugcggagugacccagaaugugcuguacgagaaccagaagcugaucgccaaccaguucaacagcgccaucggcaagauccaggacagccugagcagcacagcaagcgcccugggaaagcugcaggacguggucaaccagaaugcccaggcacugaacacccuggucaagcagcuguccuccaacuucggcgccaucagcucugugcugaacgauauccugagcagacuggacaaggucgaggccgaggugcagaucgacagacugaucacaggcagacugcagagccuccagacauacgugacccagcagcugaucagagccgccgagauuagagccucugccaaucuggccgccaccaagaugucugagugugugcugggccagagcaagagaguggacuuuugcggcaagggcugucaccugaugagcuucccucagucugccccucacggcgugguguuucugcacgugacauaugugcccgcucaagagaagaauuucaccaccgcuccagccaucugccacgacggcaaagcccacuuuccuagagaaggcguguucguguccaacggcacccauugguucgugacacagcggaacuucuacgagccccagaucaucaccaccgacaacaccuucgugucuggcaacugcgacguugugaucggcauugugaacaauaccguguacgacccucugcagcccgagcuggacagcuucaaagaggaacuggacaaguacuuuaagaaccacacaagccccgacguggaccugggcgauaucagcggaaucaaugccagcgucgugaacauccagaaagagaucgaccggcugaacgagguggccaagaaucugaacgagagccugaucgaccugcaagaacuggggaaguacgagcaguacaucaaguggcccugguacaucuggcugggcuuuaucgccggacugauugccaucgugauggucacaaucaugcuguguugcaugaccagcugcuguagcugccugaagggcuguuguagcuguggcagcugcugcaaguucgacgaggacgauucugagcccgugcugaagggcgugaaacugcacuacaccugaggacuagucccuguucccagagcccacuuuuuuuucuuuuuuugaaauaaaauagccugucuuucagaucucaaaggcucuuuucagagccaccaaaaaaaaaaaaaaaaaaaaaaaaaaaaaaaaaaaaaaaaaaaaaaaaaaaaaaaaaaaaaaaaaaaaaaaaaaaaaaaaaaaaaaaaaaaaaaaaaaaaa

SEQ ID NO: 12550 - RNA, 4094 nt, Artificial Sequence
  SARS-CoV-2/Wuhan/WIV05/2019__EPI_ISL_402128 spike protein mRNA gc mod (1-1273)(Q965C_S1003C)
aggagagucccgcagucggcguccagcggcucugcuuguucgugugugugucguugcaggccuuauucaagcuuaccauguucguguuucuggugcugcugccccugguguccagccagugugugaaccugaccaccagaacacagcugccuccagccuacaccaacagcuucaccagaggcguguacuaccccgacaagguguucagauccagcgugcugcacucuacccaggaccuguuccugccuuucuucagcaacgugaccugguuccacgccauccacguguccggcaccaauggcaccaagagauucgacaaccccgugcugcccuucaacgacgggguguacuuugccagcaccgagaaguccaacaucaucagaggcuggaucuucggcaccacacuggacagcaagacccagagccugcugaucgugaacaacgccaccaacguggucaucaaagugugcgaguuccaguucugcaacgaccccuuccugggcgucuacuaccacaagaacaacaagagcuggauggaaagcgaguuccggguguacagcagcgccaacaacugcaccuucgaguacgugucccagccuuuccugauggaccuggaaggcaagcagggcaacuucaagaaccugcgcgaguucguguucaagaacaucgacggcuacuucaaaaucuacagcaagcacaccccuaucaaccucgugcgggaucugccucagggcuucucugcucuggaaccccugguggaucugcccaucggcaucaacaucacccgguuucagacacugcuggcccugcacagaagcuaccugacaccuggcgauagcagcagcggauggacagcuggugccgccgcuuacuaugugggcuaccugcagccuagaaccuuccugcugaaguacaacgagaacggcaccaucaccgacgccguggauugugcucuggauccucugagcgagacaaagugcacccugaaguccuucaccguggaaaagggcaucuaccagaccagcaacuuccgggugcagcccaccgaauccaucgugcgguuccccaauaucaccaaucugugccccuucggcgagguguucaaugccaccagauucgccucuguguacgccuggaaccggaagcggaucagcaauugcguggccgacuacuccgugcuguacaacuccgccagcuucagcaccuucaagugcuacggcguguccccuaccaagcugaacgaccugugcuucacaaacguguacgccgacagcuucgugauccggggagaugaagugcggcagauugccccuggacagacaggcaagaucgccgacuacaacuacaagcugcccgacgacuucaccggcugugugauugccuggaacagcaacaaccuggacuccaaagucggcggcaacuacaauuaccuguaccggcuguuccggaaguccaaucugaagcccuucgagcgggacaucagcaccgaaaucuaucaggccggcagcaccccuugcaacggcguggaaggcuucaacugcuacuucccacugcaguccuacggcuuucagcccacaaauggcgugggcuaucagcccuacagagugguggugcugagcuucgaacugcugcaugcuccugccacagugugcggcccuaagaaaagcaccaaucucgugaagaacaaaugcgugaacuucaacuucaacggccugaccggcaccggcgugcugacagagagcaacaagaaguuccugccauuccagcaguuuggccgggauaucgccgauaccacagacgccguuagagauccccagacacuggaaauccuggacaucaccccaugcagcuucggcggagugucugugaucaccccuggcaccaacaccagcaaucagguggcagugcuguaccaggacgugaacuguaccgaagugcccguggccauucacgccgaucagcugacaccuacauggcggguguacuccaccggcagcaauguguuucagaccagagccggcugucugaucggagccgagcacgugaacaauagcuacgagugcgacauccccaucggcgcuggcaucugugccagcuaccagacacagacaaacagccccagacgggcuagaagcguggccagccagagcaucauugccuacacaaugucucugggcgccgagaacagcguggccuacuccaacaacucuaucgcuauccccaccaacuucaccaucagcgugaccaccgagauccugccuguguccaugaccaagaccagcguggacugcaccauguacaucugcggcgauuccaccgagugcuccaaccugcugcugcaguacggcagcuucugcacccagcugaauagagcccugacagggaucgccguggaacaggacaagaacacccaagagguguucgcccaagugaagcaaaucuacaagaccccuccuaucaaggacuucggcggcuucaauuucagccagauucugcccgauccuagcaagcccagcaagcggagcuucaucgaggaccugcuguucaacaaagugacacuggccgacgccggcuucaucaagcaguauggcgauugucugggcgacauugccgccagggaucugauuugcgcccagaaguuuaacggacugacagugcugccuccucugcugaccgaugagaugaucgcccaguacacaucugcccugcuggccggcacaaucacaagcggcuggacauuuggagcuggcgccgcucugcagauccccuuugcuaugcagauggccuaccgguucaacggcaucggagugacccagaaugugcuguacgagaaccagaagcugaucgccaaccaguucaacagcgccaucggcaagauccaggacagccugagcagcacagcaagcgcccugggaaagcugcaggacguggucaaccagaaugcccaggcacugaacacccuggucaagugccuguccuccaacuucggcgccaucagcucugugcugaacgauauccugagcagacuggacaaggucgaggccgaggugcagaucgacagacugaucacaggcagacugcagugucuccagacauacgugacccagcagcugaucagagccgccgagauuagagccucugccaaucuggccgccaccaagaugucugagugugugcugggccagagcaagagaguggacuuuugcggcaagggcuaccaccugaugagcuucccucagucugccccucacggcgugguguuucugcacgugacauaugugcccgcucaagagaagaauuucaccaccgcuccagccaucugccacgacggcaaagcccacuuuccuagagaaggcguguucguguccaacggcacccauugguucgugacacagcggaacuucuacgagccccagaucaucaccaccgacaacaccuucgugucuggcaacugcgacguugugaucggcauugugaacaauaccguguacgacccucugcagcccgagcuggacagcuucaaagaggaacuggacaaguacuuuaagaaccacacaagccccgacguggaccugggcgauaucagcggaaucaaugccagcgucgugaacauccagaaagagaucgaccggcugaacgagguggccaagaaucugaacgagagccugaucgaccugcaagaacuggggaaguacgagcaguacaucaaguggcccugguacaucuggcugggcuuuaucgccggacugauugccaucgugauggucacaaucaugcuguguugcaugaccagcugcuguagcugccugaagggcuguuguagcuguggcagcugcugcaaguucgacgaggacgauucugagcccgugcugaagggcgugaaacugcacuacaccugaggacuagucccuguucccagagcccacuuuuuuuucuuuuuuugaaauaaaauagccugucuuucagaucucaaaggcucuuuucagagccaccaaaaaaaaaaaaaaaaaaaaaaaaaaaaaaaaaaaaaaaaaaaaaaaaaaaaaaaaaaaaaaaaaaaaaaaaaaaaaaaaaaaaaaaaaaaaaaaaaaaaa

SEQ ID NO: 12551 - RNA, 4094 nt, Artificial Sequence
  SARS-CoV-2/Wuhan/WIV05/2019__EPI_ISL_402128 spike protein mRNA gc mod (1-1273)(F970C_G999C)
aggagagucccgcagucggcguccagcggcucugcuuguucgugugugugucguugcaggccuuauucaagcuuaccauguucguguuucuggugcugcugccccugguguccagccagugugugaaccugaccaccagaacacagcugccuccagccuacaccaacagcuucaccagaggcguguacuaccccgacaagguguucagauccagcgugcugcacucuacccaggaccuguuccugccuuucuucagcaacgugaccugguuccacgccauccacguguccggcaccaauggcaccaagagauucgacaaccccgugcugcccuucaacgacgggguguacuuugccagcaccgagaaguccaacaucaucagaggcuggaucuucggcaccacacuggacagcaagacccagagccugcugaucgugaacaacgccaccaacguggucaucaaagugugcgaguuccaguucugcaacgaccccuuccugggcgucuacuaccacaagaacaacaagagcuggauggaaagcgaguuccggguguacagcagcgccaacaacugcaccuucgaguacgugucccagccuuuccugauggaccuggaaggcaagcagggcaacuucaagaaccugcgcgaguucguguucaagaacaucgacggcuacuucaaaaucuacagcaagcacaccccuaucaaccucgugcgggaucugccucagggcuucucugcucuggaaccccugguggaucugcccaucggcaucaacaucacccgguuucagacacugcuggcccugcacagaagcuaccugacaccuggcgauagcagcagcggauggacagcuggugccgccgcuuacuaugugggcuaccugcagccuagaaccuuccugcugaaguacaacgagaacggcaccaucaccgacgccguggauugugcucuggauccucugagcgagacaaagugcacccugaaguccuucaccguggaaaagggcaucuaccagaccagcaacuuccgggugcagcccaccgaauccaucgugcgguuccccaauaucaccaaucugugccccuucggcgagguguucaaugccaccagauucgccucuguguacgccuggaaccggaagcggaucagcaauugcguggccgacuacuccgugcuguacaacuccgccagcuucagcaccuucaagugcuacggcguguccccuaccaagcugaacgaccugugcuucacaaacguguacgccgacagcuucgugauccggggagaugaagugcggcagauugccccuggacagacaggcaagaucgccgacuacaacuacaagcugcccgacgacuucaccggcugugugauugccuggaacagcaacaaccuggacuccaaagucggcggcaacuacaauuaccuguaccggcuguuccggaaguccaaucugaagcccuucgagcgggacaucagcaccgaaaucuaucaggccggcagcaccccuugcaacggcguggaaggcuucaacugcuacuucccacugcaguccuacggcuuucagcccacaaauggcgugggcuaucagcccuacagagugguggugcugagcuucgaacugcugcaugcuccugccacagugugcggcccuaagaaaagcaccaaucucgugaagaacaaaugcgugaacuucaacuucaacggccugaccggcaccggcgugcugacagagagcaacaagaaguuccugccauuccagcaguuuggccgggauaucgccgauaccacagacgccguuagagauccccagacacuggaaauccuggacaucaccccaugcagcuucggcggagugucugugaucaccccuggcaccaacaccagcaaucagguggcagugcuguaccaggacgugaacuguaccgaagugcccguggccauucacgccgaucagcugacaccuacauggcggguguacuccaccggcagcaauguguuucagaccagagccggcugucugaucggagccgagcacgugaacaauagcuacgagugcgacauccccaucggcgcuggcaucugugccagcuaccagacacagacaaacagccccagacgggcuagaagcguggccagccagagcaucauugccuacacaaugucucugggcgccgagaacagcguggccuacuccaacaacucuaucgcuauccccaccaacuucaccaucagcgugaccaccgagauccugccuguguccaugaccaagaccagcguggacugcaccauguacaucugcggcgauuccaccgagugcuccaaccugcugcugcaguacggcagcuucugcacccagcugaauagagcccugacagggaucgccguggaacaggacaagaacacccaagagguguucgcccaagugaagcaaaucuacaagaccccuccuaucaaggacuucggcggcuucaauuucagccagauucugcccgauccuagcaagcccagcaagcggagcuucaucgaggaccugcuguucaacaaagugacacuggccgacgccggcuucaucaagcaguauggcgauugucugggcgacauugccgccagggaucugauuugcgcccagaaguuuaacggacugacagugcugccuccucugcugaccgaugagaugaucgcccaguacacaucugcccugcuggccggcacaaucacaagcggcuggacauuuggagcuggcgccgcucugcagauccccuuugcuaugcagauggccuaccgguucaacggcaucggagugacccagaaugugcuguacgagaaccagaagcugaucgccaaccaguucaacagcgccaucggcaagauccaggacagccugagcagcacagcaagcgcccugggaaagcugcaggacguggucaaccagaaugcccaggcacugaacacccuggucaagcagcuguccuccaacugcggcgccaucagcucugugcugaacgauauccugagcagacuggacaaggucgaggccgaggugcagaucgacagacugaucacauguagacugcagagccuccagacauacgugacccagcagcugaucagagccgccgagauuagagccucugccaaucuggccgccaccaagaugucugagugugugcugggccagagcaagagaguggacuuuugcggcaagggcuaccaccugaugagcuucccucagucugccccucacggcgugguguuucugcacgugacauaugugcccgcucaagagaagaauuucaccaccgcuccagccaucugccacgacggcaaagcccacuuuccuagagaaggcguguucguguccaacggcacccauugguucgugacacagcggaacuucuacgagccccagaucaucaccaccgacaacaccuucgugucuggcaacugcgacguugugaucggcauugugaacaauaccguguacgacccucugcagcccgagcuggacagcuucaaagaggaacuggacaaguacuuuaagaaccacacaagccccgacguggaccugggcgauaucagcggaaucaaugccagcgucgugaacauccagaaagagaucgaccggcugaacgagguggccaagaaucugaacgagagccugaucgaccugcaagaacuggggaaguacgagcaguacaucaaguggcccugguacaucuggcugggcuuuaucgccggacugauugccaucgugauggucacaaucaugcuguguugcaugaccagcugcuguagcugccugaagggcuguuguagcuguggcagcugcugcaaguucgacgaggacgauucugagcccgugcugaagggcgugaaacugcacuacaccugaggacuagucccuguucccagagcccacuuuuuuuucuuuuuuugaaauaaaauagccugucuuucagaucucaaaggcucuuuucagagccaccaaaaaaaaaaaaaaaaaaaaaaaaaaaaaaaaaaaaaaaaaaaaaaaaaaaaaaaaaaaaaaaaaaaaaaaaaaaaaaaaaaaaaaaaaaaaaaaaaaaaa

SEQ ID NO: 12552 - RNA, 4094 nt, Artificial Sequence
  SARS-CoV-2/Wuhan/WIV05/2019__EPI_ISL_402128 spike protein mRNA gc mod (1-1273)(A972C_R995C)
aggagagucccgcagucggcguccagcggcucugcuuguucgugugugugucguugcaggccuuauucaagcuuaccauguucguguuucuggugcugcugccccugguguccagccagugugugaaccugaccaccagaacacagcugccuccagccuacaccaacagcuucaccagaggcguguacuaccccgacaagguguucagauccagcgugcugcacucuacccaggaccuguuccugccuuucuucagcaacgugaccugguuccacgccauccacguguccggcaccaauggcaccaagagauucgacaaccccgugcugcccuucaacgacgggguguacuuugccagcaccgagaaguccaacaucaucagaggcuggaucuucggcaccacacuggacagcaagacccagagccugcugaucgugaacaacgccaccaacguggucaucaaagugugcgaguuccaguucugcaacgaccccuuccugggcgucuacuaccacaagaacaacaagagcuggauggaaagcgaguuccggguguacagcagcgccaacaacugcaccuucgaguacgugucccagccuuuccugauggaccuggaaggcaagcagggcaacuucaagaaccugcgcgaguucguguucaagaacaucgacggcuacuucaaaaucuacagcaagcacaccccuaucaaccucgugcgggaucugccucagggcuucucugcucuggaaccccugguggaucugcccaucggcaucaacaucacccgguuucagacacugcuggcccugcacagaagcuaccugacaccuggcgauagcagcagcggauggacagcuggugccgccgcuuacuaugugggcuaccugcagccuagaaccuuccugcugaaguacaacgagaacggcaccaucaccgacgccguggauugugcucuggauccucugagcgagacaaagugcacccugaaguccuucaccguggaaaagggcaucuaccagaccagcaacuuccgggugcagcccaccgaauccaucgugcgguuccccaauaucaccaaucugugccccuucggcgagguguucaaugccaccagauucgccucuguguacgccuggaaccggaagcggaucagcaauugcguggccgacuacuccgugcuguacaacuccgccagcuucagcaccuucaagugcuacggcguguccccuaccaagcugaacgaccugugcuucacaaacguguacgccgacagcuucgugauccggggagaugaagugcggcagauugccccuggacagacaggcaagaucgccgacuacaacuacaagcugcccgacgacuucaccggcugugugauugccuggaacagcaacaaccuggacuccaaagucggcggcaacuacaauuaccuguaccggcuguuccggaaguccaaucugaagcccuucgagcgggacaucagcaccgaaaucuaucaggccggcagcaccccuugcaacggcguggaaggcuucaacugcuacuucccacugcaguccuacggcuuucagcccacaaauggcgugggcuaucagcccuacagagugguggugcugagcuucgaacugcugcaugcuccugccacagugugcggcccuaagaaaagcaccaaucucgugaagaacaaaugcgugaacuucaacuucaacggccugaccggcaccggcgugcugacagagagcaacaagaaguuccugccauuccagcaguuuggccgggauaucgccgauaccacagacgccguuagagauccccagacacuggaaauccuggacaucaccccaugcagcuucggcggagugucugugaucaccccuggcaccaacaccagcaaucagguggcagugcuguaccaggacgugaacuguaccgaagugcccguggccauucacgccgaucagcugacaccuacauggcggguguacuccaccggcagcaauguguuucagaccagagccggcugucugaucggagccgagcacgugaacaauagcuacgagugcgacauccccaucggcgcuggcaucugugccagcuaccagacacagacaaacagccccagacgggcuagaagcguggccagccagagcaucauugccuacacaaugucucugggcgccgagaacagcguggccuacuccaacaacucuaucgcuauccccaccaacuucaccaucagcgugaccaccgagauccugccuguguccaugaccaagaccagcguggacugcaccauguacaucugcggcgauuccaccgagugcuccaaccugcugcugcaguacggcagcuucugcacccagcugaauagagcccugacagggaucgccguggaacaggacaagaacacccaagagguguucgcccaagugaagcaaaucuacaagaccccuccuaucaaggacuucggcggcuucaauuucagccagauucugcccgauccuagcaagcccagcaagcggagcuucaucgaggaccugcuguucaacaaagugacacuggccgacgccggcuucaucaagcaguauggcgauugucugggcgacauugccgccagggaucugauuugcgcccagaaguuuaacggacugacagugcugccuccucugcugaccgaugagaugaucgcccaguacacaucugcccugcuggccggcacaaucacaagcggcuggacauuuggagcuggcgccgcucugcagauccccuuugcuaugcagauggccuaccgguucaacggcaucggagugacccagaaugugcuguacgagaaccagaagcugaucgccaaccaguucaacagcgccaucggcaagauccaggacagccugagcagcacagcaagcgcccugggaaagcugcaggacguggucaaccagaaugcccaggcacugaacacccuggucaagcagcuguccuccaacuucggcugcaucagcucugugcugaacgauauccugagcagacuggacaaggucgaggccgaggugcagaucgacugucugaucacaggcagacugcagagccuccagacauacgugacccagcagcugaucagagccgccgagauuagagccucugccaaucuggccgccaccaagaugucugagugugugcugggccagagcaagagaguggacuuuugcggcaagggcuaccaccugaugagcuucccucagucugccccucacggcgugguguuucugcacgugacauaugugcccgcucaagagaagaauuucaccaccgcuccagccaucugccacgacggcaaagcccacuuuccuagagaaggcguguucguguccaacggcacccauugguucgugacacagcggaacuucuacgagccccagaucaucaccaccgacaacaccuucgugucuggcaacugcgacguugugaucggcauugugaacaauaccguguacgacccucugcagcccgagcuggacagcuucaaagaggaacuggacaaguacuuuaagaaccacacaagccccgacguggaccugggcgauaucagcggaaucaaugccagcgucgugaacauccagaaagagaucgaccggcugaacgagguggccaagaaucugaacgagagccugaucgaccugcaagaacuggggaaguacgagcaguacaucaaguggcccugguacaucuggcugggcuuuaucgccggacugauugccaucgugauggucacaaucaugcuguguugcaugaccagcugcuguagcugccugaagggcuguuguagcuguggcagcugcugcaaguucgacgaggacgauucugagcccgugcugaagggcgugaaacugcacuacaccugaggacuagucccuguucccagagcccacuuuuuuuucuuuuuuugaaauaaaauagccugucuuucagaucucaaaggcucuuuucagagccaccaaaaaaaaaaaaaaaaaaaaaaaaaaaaaaaaaaaaaaaaaaaaaaaaaaaaaaaaaaaaaaaaaaaaaaaaaaaaaaaaaaaaaaaaaaaaaaaaaaaaa

SEQ ID NO: 12553 - RNA, 4094 nt, Artificial Sequence
  SARS-CoV-2/Wuhan/WIV05/2019__EPI_ISL_402128 spike protein mRNA gc mod (1-1273)(A890C_V1040C)
aggagagucccgcagucggcguccagcggcucugcuuguucgugugugugucguugcaggccuuauucaagcuuaccauguucguguuucuggugcugcugccccugguguccagccagugugugaaccugaccaccagaacacagcugccuccagccuacaccaacagcuucaccagaggcguguacuaccccgacaagguguucagauccagcgugcugcacucuacccaggaccuguuccugccuuucuucagcaacgugaccugguuccacgccauccacguguccggcaccaauggcaccaagagauucgacaaccccgugcugcccuucaacgacgggguguacuuugccagcaccgagaaguccaacaucaucagaggcuggaucuucggcaccacacuggacagcaagacccagagccugcugaucgugaacaacgccaccaacguggucaucaaagugugcgaguuccaguucugcaacgaccccuuccugggcgucuacuaccacaagaacaacaagagcuggauggaaagcgaguuccggguguacagcagcgccaacaacugcaccuucgaguacgugucccagccuuuccugauggaccuggaaggcaagcagggcaacuucaagaaccugcgcgaguucguguucaagaacaucgacggcuacuucaaaaucuacagcaagcacaccccuaucaaccucgugcgggaucugccucagggcuucucugcucuggaaccccugguggaucugcccaucggcaucaacaucacccgguuucagacacugcuggcccugcacagaagcuaccugacaccuggcgauagcagcagcggauggacagcuggugccgccgcuuacuaugugggcuaccugcagccuagaaccuuccugcugaaguacaacgagaacggcaccaucaccgacgccguggauugugcucuggauccucugagcgagacaaagugcacccugaaguccuucaccguggaaaagggcaucuaccagaccagcaacuuccgggugcagcccaccgaauccaucgugcgguuccccaauaucaccaaucugugccccuucggcgagguguucaaugccaccagauucgccucuguguacgccuggaaccggaagcggaucagcaauugcguggccgacuacuccgugcuguacaacuccgccagcuucagcaccuucaagugcuacggcguguccccuaccaagcugaacgaccugugcuucacaaacguguacgccgacagcuucgugauccggggagaugaagugcggcagauugccccuggacagacaggcaagaucgccgacuacaacuacaagcugcccgacgacuucaccggcugugugauugccuggaacagcaacaaccuggacuccaaagucggcggcaacuacaauuaccuguaccggcuguuccggaaguccaaucugaagcccuucgagcgggacaucagcaccgaaaucuaucaggccggcagcaccccuugcaacggcguggaaggcuucaacugcuacuucccacugcaguccuacggcuuucagcccacaaauggcgugggcuaucagcccuacagagugguggugcugagcuucgaacugcugcaugcuccugccacagugugcggcccuaagaaaagcaccaaucucgugaagaacaaaugcgugaacuucaacuucaacggccugaccggcaccggcgugcugacagagagcaacaagaaguuccugccauuccagcaguuuggccgggauaucgccgauaccacagacgccguuagagauccccagacacuggaaauccuggacaucaccccaugcagcuucggcggagugucugugaucaccccuggcaccaacaccagcaaucagguggcagugcuguaccaggacgugaacuguaccgaagugcccguggccauucacgccgaucagcugacaccuacauggcggguguacuccaccggcagcaauguguuucagaccagagccggcugucugaucggagccgagcacgugaacaauagcuacgagugcgacauccccaucggcgcuggcaucugugccagcuaccagacacagacaaacagccccagacgggcuagaagcguggccagccagagcaucauugccuacacaaugucucugggcgccgagaacagcguggccuacuccaacaacucuaucgcuauccccaccaacuucaccaucagcgugaccaccgagauccugccuguguccaugaccaagaccagcguggacugcaccauguacaucugcggcgauuccaccgagugcuccaaccugcugcugcaguacggcagcuucugcacccagcugaauagagcccugacagggaucgccguggaacaggacaagaacacccaagagguguucgcccaagugaagcaaaucuacaagaccccuccuaucaaggacuucggcggcuucaauuucagccagauucugcccgauccuagcaagcccagcaagcggagcuucaucgaggaccugcuguucaacaaagugacacuggccgacgccggcuucaucaagcaguauggcgauugucugggcgacauugccgccagggaucugauuugcgcccagaaguuuaacggacugacagugcugccuccucugcugaccgaugagaugaucgcccaguacacaucugcccugcuggccggcacaaucacaagcggcuggacauuuggaugcggcgccgcucugcagauccccuuugcuaugcagauggccuaccgguucaacggcaucggagugacccagaaugugcuguacgagaaccagaagcugaucgccaaccaguucaacagcgccaucggcaagauccaggacagccugagcagcacagcaagcgcccugggaaagcugcaggacguggucaaccagaaugcccaggcacugaacacccuggucaagcagcuguccuccaacuucggcgccaucagcucugugcugaacgauauccugagcagacuggacaaggucgaggccgaggugcagaucgacagacugaucacaggcagacugcagagccuccagacauacgugacccagcagcugaucagagccgccgagauuagagccucugccaaucuggccgccaccaagaugucugagugugugcugggccagagcaagagaugugacuuuugcggcaagggcuaccaccugaugagcuucccucagucugccccucacggcgugguguuucugcacgugacauaugugcccgcucaagagaagaauuucaccaccgcuccagccaucugccacgacggcaaagcccacuuuccuagagaaggcguguucguguccaacggcacccauugguucgugacacagcggaacuucuacgagccccagaucaucaccaccgacaacaccuucgugucuggcaacugcgacguugugaucggcauugugaacaauaccguguacgacccucugcagcccgagcuggacagcuucaaagaggaacuggacaaguacuuuaagaaccacacaagccccgacguggaccugggcgauaucagcggaaucaaugccagcgucgugaacauccagaaagagaucgaccggcugaacgagguggccaagaaucugaacgagagccugaucgaccugcaagaacuggggaaguacgagcaguacaucaaguggcccugguacaucuggcugggcuuuaucgccggacugauugccaucgugauggucacaaucaugcuguguugcaugaccagcugcuguagcugccugaagggcuguuguagcuguggcagcugcugcaaguucgacgaggacgauucugagcccgugcugaagggcgugaaacugcacuacaccugaggacuagucccuguucccagagcccacuuuuuuuucuuuuuuugaaauaaaauagccugucuuucagaucucaaaggcucuuuucagagccaccaaaaaaaaaaaaaaaaaaaaaaaaaaaaaaaaaaaaaaaaaaaaaaaaaaaaaaaaaaaaaaaaaaaaaaaaaaaaaaaaaaaaaaaaaaaaaaaaaaaaa

SEQ ID NO: 12554 - RNA, 4094 nt, Artificial Sequence
  SARS-CoV-2/Wuhan/WIV05/2019__EPI_ISL_402128 spike protein mRNA gc mod (1-1273)(T874C_S1055C)
aggagagucccgcagucggcguccagcggcucugcuuguucgugugugugucguugcaggccuuauucaagcuuaccauguucguguuucuggugcugcugccccugguguccagccagugugugaaccugaccaccagaacacagcugccuccagccuacaccaacagcuucaccagaggcguguacuaccccgacaagguguucagauccagcgugcugcacucuacccaggaccuguuccugccuuucuucagcaacgugaccugguuccacgccauccacguguccggcaccaauggcaccaagagauucgacaaccccgugcugcccuucaacgacgggguguacuuugccagcaccgagaaguccaacaucaucagaggcuggaucuucggcaccacacuggacagcaagacccagagccugcugaucgugaacaacgccaccaacguggucaucaaagugugcgaguuccaguucugcaacgaccccuuccugggcgucuacuaccacaagaacaacaagagcuggauggaaagcgaguuccggguguacagcagcgccaacaacugcaccuucgaguacgugucccagccuuuccugauggaccuggaaggcaagcagggcaacuucaagaaccugcgcgaguucguguucaagaacaucgacggcuacuucaaaaucuacagcaagcacaccccuaucaaccucgugcgggaucugccucagggcuucucugcucuggaaccccugguggaucugcccaucggcaucaacaucacccgguuucagacacugcuggcccugcacagaagcuaccugacaccuggcgauagcagcagcggauggacagcuggugccgccgcuuacuaugugggcuaccugcagccuagaaccuuccugcugaaguacaacgagaacggcaccaucaccgacgccguggauugugcucuggauccucugagcgagacaaagugcacccugaaguccuucaccguggaaaagggcaucuaccagaccagcaacuuccgggugcagcccaccgaauccaucgugcgguuccccaauaucaccaaucugugccccuucggcgagguguucaaugccaccagauucgccucuguguacgccuggaaccggaagcggaucagcaauugcguggccgacuacuccgugcuguacaacuccgccagcuucagcaccuucaagugcuacggcguguccccuaccaagcugaacgaccugugcuucacaaacguguacgccgacagcuucgugauccggggagaugaagugcggcagauugccccuggacagacaggcaagaucgccgacuacaacuacaagcugcccgacgacuucaccggcugugugauugccuggaacagcaacaaccuggacuccaaagucggcggcaacuacaauuaccuguaccggcuguuccggaaguccaaucugaagcccuucgagcgggacaucagcaccgaaaucuaucaggccggcagcaccccuugcaacggcguggaaggcuucaacugcuacuucccacugcaguccuacggcuuucagcccacaaauggcgugggcuaucagcccuacagagugguggugcugagcuucgaacugcugcaugcuccugccacagugugcggcccuaagaaaagcaccaaucucgugaagaacaaaugcgugaacuucaacuucaacggccugaccggcaccggcgugcugacagagagcaacaagaaguuccugccauuccagcaguuuggccgggauaucgccgauaccacagacgccguuagagauccccagacacuggaaauccuggacaucaccccaugcagcuucggcggagugucugugaucaccccuggcaccaacaccagcaaucagguggcagugcuguaccaggacgugaacuguaccgaagugcccguggccauucacgccgaucagcugacaccuacauggcggguguacuccaccggcagcaauguguuucagaccagagccggcugucugaucggagccgagcacgugaacaauagcuacgagugcgacauccccaucggcgcuggcaucugugccagcuaccagacacagacaaacagccccagacgggcuagaagcguggccagccagagcaucauugccuacacaaugucucugggcgccgagaacagcguggccuacuccaacaacucuaucgcuauccccaccaacuucaccaucagcgugaccaccgagauccugccuguguccaugaccaagaccagcguggacugcaccauguacaucugcggcgauuccaccgagugcuccaaccugcugcugcaguacggcagcuucugcacccagcugaauagagcccugacagggaucgccguggaacaggacaagaacacccaagagguguucgcccaagugaagcaaaucuacaagaccccuccuaucaaggacuucggcggcuucaauuucagccagauucugcccgauccuagcaagcccagcaagcggagcuucaucgaggaccugcuguucaacaaagugacacuggccgacgccggcuucaucaagcaguauggcgauugucugggcgacauugccgccagggaucugauuugcgcccagaaguuuaacggacugacagugcugccuccucugcugaccgaugagaugaucgcccaguacugcucugcccugcuggccggcacaaucacaagcggcuggacauuuggagcuggcgccgcucugcagauccccuuugcuaugcagauggccuaccgguucaacggcaucggagugacccagaaugugcuguacgagaaccagaagcugaucgccaaccaguucaacagcgccaucggcaagauccaggacagccugagcagcacagcaagcgcccugggaaagcugcaggacguggucaaccagaaugcccaggcacugaacacccuggucaagcagcuguccuccaacuucggcgccaucagcucugugcugaacgauauccugagcagacuggacaaggucgaggccgaggugcagaucgacagacugaucacaggcagacugcagagccuccagacauacgugacccagcagcugaucagagccgccgagauuagagccucugccaaucuggccgccaccaagaugucugagugugugcugggccagagcaagagaguggacuuuugcggcaagggcuaccaccugaugagcuucccucagugcgccccucacggcgugguguuucugcacgugacauaugugcccgcucaagagaagaauuucaccaccgcuccagccaucugccacgacggcaaagcccacuuuccuagagaaggcguguucguguccaacggcacccauugguucgugacacagcggaacuucuacgagccccagaucaucaccaccgacaacaccuucgugucuggcaacugcgacguugugaucggcauugugaacaauaccguguacgacccucugcagcccgagcuggacagcuucaaagaggaacuggacaaguacuuuaagaaccacacaagccccgacguggaccugggcgauaucagcggaaucaaugccagcgucgugaacauccagaaagagaucgaccggcugaacgagguggccaagaaucugaacgagagccugaucgaccugcaagaacuggggaaguacgagcaguacaucaaguggcccugguacaucuggcugggcuuuaucgccggacugauugccaucgugauggucacaaucaugcuguguugcaugaccagcugcuguagcugccugaagggcuguuguagcuguggcagcugcugcaaguucgacgaggacgauucugagcccgugcugaagggcgugaaacugcacuacaccugaggacuagucccuguucccagagcccacuuuuuuuucuuuuuuugaaauaaaauagccugucuuucagaucucaaaggcucuuuucagagccaccaaaaaaaaaaaaaaaaaaaaaaaaaaaaaaaaaaaaaaaaaaaaaaaaaaaaaaaaaaaaaaaaaaaaaaaaaaaaaaaaaaaaaaaaaaaaaaaaaaaaa

SEQ ID NO: 12555 - RNA, 2318 nt, Artificial Sequence; identical to SEQ ID NO: 154
  SARS-CoV-2/Wuhan/WIV05/2019__EPI_ISL_402128 spike protein mRNA gc mod (1-681)

SEQ ID NO: 12556 - RNA, 4388 nt, Artificial Sequence
  SARS-CoV-2/Wuhan/WIV05/2019__EPI_ISL_402128 spike protein mRNA gc mod (1-1211) LumSynth construct
aggagagucccgcagucggcguccagcggcucugcuuguucgugugugugucguugcaggccuuauucaagcuuaccauguucguguuucuggugcugcugccccugguguccagccagugugugaaccugaccaccagaacacagcugccuccagccuacaccaacagcuucaccagaggcguguacuaccccgacaagguguucagauccagcgugcugcacucuacccaggaccuguuccugccuuucuucagcaacgugaccugguuccacgccauccacguguccggcaccaauggcaccaagagauucgacaaccccgugcugcccuucaacgacgggguguacuuugccagcaccgagaaguccaacaucaucagaggcuggaucuucggcaccacacuggacagcaagacccagagccugcugaucgugaacaacgccaccaacguggucaucaaagugugcgaguuccaguucugcaacgaccccuuccugggcgucuacuaccacaagaacaacaagagcuggauggaaagcgaguuccggguguacagcagcgccaacaacugcaccuucgaguacgugucccagccuuuccugauggaccuggaaggcaagcagggcaacuucaagaaccugcgcgaguucguguucaagaacaucgacggcuacuucaaaaucuacagcaagcacaccccuaucaaccucgugcgggaucugccucagggcuucucugcucuggaaccccugguggaucugcccaucggcaucaacaucacccgguuucagacacugcuggcccugcacagaagcuaccugacaccuggcgauagcagcagcggauggacagcuggugccgccgcuuacuaugugggcuaccugcagccuagaaccuuccugcugaaguacaacgagaacggcaccaucaccgacgccguggauugugcucuggauccucugagcgagacaaagugcacccugaaguccuucaccguggaaaagggcaucuaccagaccagcaacuuccgggugcagcccaccgaauccaucgugcgguuccccaauaucaccaaucugugccccuucggcgagguguucaaugccaccagauucgccucuguguacgccuggaaccggaagcggaucagcaauugcguggccgacuacuccgugcuguacaacuccgccagcuucagcaccuucaagugcuacggcguguccccuaccaagcugaacgaccugugcuucacaaacguguacgccgacagcuucgugauccggggagaugaagugcggcagauugccccuggacagacaggcaagaucgccgacuacaacuacaagcugcccgacgacuucaccggcugugugauugccuggaacagcaacaaccuggacuccaaagucggcggcaacuacaauuaccuguaccggcuguuccggaaguccaaucugaagcccuucgagcgggacaucagcaccgaaaucuaucaggccggcagcaccccuugcaacggcguggaaggcuucaacugcuacuucccacugcaguccuacggcuuucagcccacaaauggcgugggcuaucagcccuacagagugguggugcugagcuucgaacugcugcaugcuccugccacagugugcggcccuaagaaaagcaccaaucucgugaagaacaaaugcgugaacuucaacuucaacggccugaccggcaccggcgugcugacagagagcaacaagaaguuccugccauuccagcaguuuggccgggauaucgccgauaccacagacgccguuagagauccccagacacuggaaauccuggacaucaccccaugcagcuucggcggagugucugugaucaccccuggcaccaacaccagcaaucagguggcagugcuguaccaggacgugaacuguaccgaagugcccguggccauucacgccgaucagcugacaccuacauggcggguguacuccaccggcagcaauguguuucagaccagagccggcugucugaucggagccgagcacgugaacaauagcuacgagugcgacauccccaucggcgcuggcaucugugccagcuaccagacacagacaaacagccccagacgggcuagaagcguggccagccagagcaucauugccuacacaaugucucugggcgccgagaacagcguggccuacuccaacaacucuaucgcuauccccaccaacuucaccaucagcgugaccaccgagauccugccuguguccaugaccaagaccagcguggacugcaccauguacaucugcggcgauuccaccgagugcuccaaccugcugcugcaguacggcagcuucugcacccagcugaauagagcccugacagggaucgccguggaacaggacaagaacacccaagagguguucgcccaagugaagcaaaucuacaagaccccuccuaucaaggacuucggcggcuucaauuucagccagauucugcccgauccuagcaagcccagcaagcggagcuucaucgaggaccugcuguucaacaaagugacacuggccgacgccggcuucaucaagcaguauggcgauugucugggcgacauugccgccagggaucugauuugcgcccagaaguuuaacggacugacagugcugccuccucugcugaccgaugagaugaucgcccaguacacaucugcccugcuggccggcacaaucacaagcggcuggacauuuggagcuggcgccgcucugcagauccccuuugcuaugcagauggccuaccgguucaacggcaucggagugacccagaaugugcuguacgagaaccagaagcugaucgccaaccaguucaacagcgccaucggcaagauccaggacagccugagcagcacagcaagcgcccugggaaagcugcaggacguggucaaccagaaugcccaggcacugaacacccuggucaagcagcuguccuccaacuucggcgccaucagcucugugcugaacgauauccugagcagacuggacaaggucgaggccgaggugcagaucgacagacugaucacaggcagacugcagagccuccagacauacgugacccagcagcugaucagagccgccgagauuagagccucugccaaucuggccgccaccaagaugucugagugugugcugggccagagcaagagaguggacuuuugcggcaagggcuaccaccugaugagcuucccucagucugccccucacggcgugguguuucugcacgugacauaugugcccgcucaagagaagaauuucaccaccgcuccagccaucugccacgacggcaaagcccacuuuccuagagaaggcguguucguguccaacggcacccauugguucgugacacagcggaacuucuacgagccccagaucaucaccaccgacaacaccuucgugucuggcaacugcgacguugugaucggcauugugaacaauaccguguacgacccucugcagcccgagcuggacagcuucaaagaggaacuggacaaguacuuuaagaaccacacaagccccgacguggaccugggcgauaucagcggaaucaaugccagcgucgugaacauccagaaagagaucgaccggcugaacgagguggccaagaaucugaacgagagccugaucgaccugcaagaacuggggaaguacgagcaguacaucaagggcggaggaucuggcggaggacagaucuacgagggcaagcugacagccgagggccugagauuuggaaucguggccagccgguucaaucacgcccugguggauagacugguggaaggcgccaucgaugccauugucagacacggcggcagagaagaggacaucacccucguuagagugcccggcucuugggagauuccuguggcugcuggcgagcuggcccggaaagaagauaucgacgccguuaucgccaucggcgugcugaucagaggcgccacaccucacuucgacuauaucgccagcgagguguccaaaggccuggccgaucugagccuggaacugagaaagcccaucaccuucggcgugaucaccgcugacacacuggaacaggccauugagagagccggcaccaagcacggcaacaaaggaugggaagccgcucuguccgccaucgagauggccaaccuguucaagagccugcggugaggacuagucccuguucccagagcccacuuuuuuuucuuuuuuugaaauaaaauagccugucuuucagaucucaaaggcucuuuucagagccaccaaaaaaaaaaaaaaaaaaaaaaaaaaaaaaaaaaaaaaaaaaaaaaaaaaaaaaaaaaaaaaaaaaaaaaaaaaaaaaaaaaaaaaaaaaaaaaaaaaaaa

SEQ ID NO: 12557 - RNA, 4388 nt, Artificial Sequence
  SARS-CoV-2/Wuhan/WIV05/2019__EPI_ISL_402128 spike protein mRNA gc mod (1-1211)(K986P_V987P) LumSynth construct
aggagagucccgcagucggcguccagcggcucugcuuguucgugugugugucguugcaggccuuauucaagcuuaccauguucguguuucuggugcugcugccccugguguccagccagugugugaaccugaccaccagaacacagcugccuccagccuacaccaacagcuucaccagaggcguguacuaccccgacaagguguucagauccagcgugcugcacucuacccaggaccuguuccugccuuucuucagcaacgugaccugguuccacgccauccacguguccggcaccaauggcaccaagagauucgacaaccccgugcugcccuucaacgacgggguguacuuugccagcaccgagaaguccaacaucaucagaggcuggaucuucggcaccacacuggacagcaagacccagagccugcugaucgugaacaacgccaccaacguggucaucaaagugugcgaguuccaguucugcaacgaccccuuccugggcgucuacuaccacaagaacaacaagagcuggauggaaagcgaguuccggguguacagcagcgccaacaacugcaccuucgaguacgugucccagccuuuccugauggaccuggaaggcaagcagggcaacuucaagaaccugcgcgaguucguguucaagaacaucgacggcuacuucaaaaucuacagcaagcacaccccuaucaaccucgugcgggaucugccucagggcuucucugcucuggaaccccugguggaucugcccaucggcaucaacaucacccgguuucagacacugcuggcccugcacagaagcuaccugacaccuggcgauagcagcagcggauggacagcuggugccgccgcuuacuaugugggcuaccugcagccuagaaccuuccugcugaaguacaacgagaacggcaccaucaccgacgccguggauugugcucuggauccucugagcgagacaaagugcacccugaaguccuucaccguggaaaagggcaucuaccagaccagcaacuuccgggugcagcccaccgaauccaucgugcgguuccccaauaucaccaaucugugccccuucggcgagguguucaaugccaccagauucgccucuguguacgccuggaaccggaagcggaucagcaauugcguggccgacuacuccgugcuguacaacuccgccagcuucagcaccuucaagugcuacggcguguccccuaccaagcugaacgaccugugcuucacaaacguguacgccgacagcuucgugauccggggagaugaagugcggcagauugccccuggacagacaggcaagaucgccgacuacaacuacaagcugcccgacgacuucaccggcugugugauugccuggaacagcaacaaccuggacuccaaagucggcggcaacuacaauuaccuguaccggcuguuccggaaguccaaucugaagcccuucgagcgggacaucagcaccgaaaucuaucaggccggcagcaccccuugcaacggcguggaaggcuucaacugcuacuucccacugcaguccuacggcuuucagcccacaaauggcgugggcuaucagcccuacagagugguggugcugagcuucgaacugcugcaugcuccugccacagugugcggcccuaagaaaagcaccaaucucgugaagaacaaaugcgugaacuucaacuucaacggccugaccggcaccggcgugcugacagagagcaacaagaaguuccugccauuccagcaguuuggccgggauaucgccgauaccacagacgccguuagagauccccagacacuggaaauccuggacaucaccccaugcagcuucggcggagugucugugaucaccccuggcaccaacaccagcaaucagguggcagugcuguaccaggacgugaacuguaccgaagugcccguggccauucacgccgaucagcugacaccuacauggcggguguacuccaccggcagcaauguguuucagaccagagccggcugucugaucggagccgagcacgugaacaauagcuacgagugcgacauccccaucggcgcuggcaucugugccagcuaccagacacagacaaacagccccagacgggcuagaagcguggccagccagagcaucauugccuacacaaugucucugggcgccgagaacagcguggccuacuccaacaacucuaucgcuauccccaccaacuucaccaucagcgugaccaccgagauccugccuguguccaugaccaagaccagcguggacugcaccauguacaucugcggcgauuccaccgagugcuccaaccugcugcugcaguacggcagcuucugcacccagcugaauagagcccugacagggaucgccguggaacaggacaagaacacccaagagguguucgcccaagugaagcaaaucuacaagaccccuccuaucaaggacuucggcggcuucaauuucagccagauucugcccgauccuagcaagcccagcaagcggagcuucaucgaggaccugcuguucaacaaagugacacuggccgacgccggcuucaucaagcaguauggcgauugucugggcgacauugccgccagggaucugauuugcgcccagaaguuuaacggacugacagugcugccuccucugcugaccgaugagaugaucgcccaguacacaucugcccugcuggccggcacaaucacaagcggcuggacauuuggagcuggcgccgcucugcagauccccuuugcuaugcagauggccuaccgguucaacggcaucggagugacccagaaugugcuguacgagaaccagaagcugaucgccaaccaguucaacagcgccaucggcaagauccaggacagccugagcagcacagcaagcgcccugggaaagcugcaggacguggucaaccagaaugcccaggcacugaacacccuggucaagcagcuguccuccaacuucggcgccaucagcucugugcugaacgauauccugagcagacuggacccuccugaggccgaggugcagaucgacagacugaucacaggcagacugcagagccuccagacauacgugacccagcagcugaucagagccgccgagauuagagccucugccaaucuggccgccaccaagaugucugagugugugcugggccagagcaagagaguggacuuuugcggcaagggcuaccaccugaugagcuucccucagucugccccucacggcgugguguuucugcacgugacauaugugcccgcucaagagaagaauuucaccaccgcuccagccaucugccacgacggcaaagcccacuuuccuagagaaggcguguucguguccaacggcacccauugguucgugacacagcggaacuucuacgagccccagaucaucaccaccgacaacaccuucgugucuggcaacugcgacguugugaucggcauugugaacaauaccguguacgacccucugcagcccgagcuggacagcuucaaagaggaacuggacaaguacuuuaagaaccacacaagccccgacguggaccugggcgauaucagcggaaucaaugccagcgucgugaacauccagaaagagaucgaccggcugaacgagguggccaagaaucugaacgagagccugaucgaccugcaagaacuggggaaguacgagcaguacaucaagggcggaggaucuggcggaggacagaucuacgagggcaagcugacagccgagggccugagauuuggaaucguggccagccgguucaaucacgcccugguggauagacugguggaaggcgccaucgaugccauugucagacacggcggcagagaagaggacaucacccucguuagagugcccggcucuugggagauuccuguggcugcuggcgagcuggcccggaaagaagauaucgacgccguuaucgccaucggcgugcugaucagaggcgccacaccucacuucgacuauaucgccagcgagguguccaaaggccuggccgaucugagccuggaacugagaaagcccaucaccuucggcgugaucaccgcugacacacuggaacaggccauugagagagccggcaccaagcacggcaacaaaggaugggaagccgcucuguccgccaucgagauggccaaccuguucaagagccugcggugaggacuagucccuguucccagagcccacuuuuuuuucuuuuuuugaaauaaaauagccugucuuucagaucucaaaggcucuuuucagagccaccaaaaaaaaaaaaaaaaaaaaaaaaaaaaaaaaaaaaaaaaaaaaaaaaaaaaaaaaaaaaaaaaaaaaaaaaaaaaaaaaaaaaaaaaaaaaaaaaaaaaa

SEQ ID NO: 12558 - RNA, 4388 nt, Artificial Sequence
  SARS-CoV-2/Wuhan/WIV05/2019__EPI_ISL_402128 spike protein mRNA gc mod (1-1211)(K986P_V987P_T887WN_A1020W) LumSynth construct
aggagagucccgcagucggcguccagcggcucugcuuguucgugugugugucguugcaggccuuauucaagcuuaccauguucguguuucuggugcugcugccccugguguccagccagugugugaaccugaccaccagaacacagcugccuccagccuacaccaacagcuucaccagaggcguguacuaccccgacaagguguucagauccagcgugcugcacucuacccaggaccuguuccugccuuucuucagcaacgugaccugguuccacgccauccacguguccggcaccaauggcaccaagagauucgacaaccccgugcugcccuucaacgacgggguguacuuugccagcaccgagaaguccaacaucaucagaggcuggaucuucggcaccacacuggacagcaagacccagagccugcugaucgugaacaacgccaccaacguggucaucaaagugugcgaguuccaguucugcaacgaccccuuccugggcgucuacuaccacaagaacaacaagagcuggauggaaagcgaguuccggguguacagcagcgccaacaacugcaccuucgaguacgugucccagccuuuccugauggaccuggaaggcaagcagggcaacuucaagaaccugcgcgaguucguguucaagaacaucgacggcuacuucaaaaucuacagcaagcacaccccuaucaaccucgugcgggaucugccucagggcuucucugcucuggaaccccugguggaucugcccaucggcaucaacaucacccgguuucagacacugcuggcccugcacagaagcuaccugacaccuggcgauagcagcagcggauggacagcuggugccgccgcuuacuaugugggcuaccugcagccuagaaccuuccugcugaaguacaacgagaacggcaccaucaccgacgccguggauugugcucuggauccucugagcgagacaaagugcacccugaaguccuucaccguggaaaagggcaucuaccagaccagcaacuuccgggugcagcccaccgaauccaucgugcgguuccccaauaucaccaaucugugccccuucggcgagguguucaaugccaccagauucgccucuguguacgccuggaaccggaagcggaucagcaauugcguggccgacuacuccgugcuguacaacuccgccagcuucagcaccuucaagugcuacggcguguccccuaccaagcugaacgaccugugcuucacaaacguguacgccgacagcuucgugauccggggagaugaagugcggcagauugccccuggacagacaggcaagaucgccgacuacaacuacaagcugcccgacgacuucaccggcugugugauugccuggaacagcaacaaccuggacuccaaagucggcggcaacuacaauuaccuguaccggcuguuccggaaguccaaucugaagcccuucgagcgggacaucagcaccgaaaucuaucaggccggcagcaccccuugcaacggcguggaaggcuucaacugcuacuucccacugcaguccuacggcuuucagcccacaaauggcgugggcuaucagcccuacagagugguggugcugagcuucgaacugcugcaugcuccugccacagugugcggcccuaagaaaagcaccaaucucgugaagaacaaaugcgugaacuucaacuucaacggccugaccggcaccggcgugcugacagagagcaacaagaaguuccugccauuccagcaguuuggccgggauaucgccgauaccacagacgccguuagagauccccagacacuggaaauccuggacaucaccccaugcagcuucggcggagugucugugaucaccccuggcaccaacaccagcaaucagguggcagugcuguaccaggacgugaacuguaccgaagugcccguggccauucacgccgaucagcugacaccuacauggcggguguacuccaccggcagcaauguguuucagaccagagccggcugucugaucggagccgagcacgugaacaauagcuacgagugcgacauccccaucggcgcuggcaucugugccagcuaccagacacagacaaacagccccagacgggcuagaagcguggccagccagagcaucauugccuacacaaugucucugggcgccgagaacagcguggccuacuccaacaacucuaucgcuauccccaccaacuucaccaucagcgugaccaccgagauccugccuguguccaugaccaagaccagcguggacugcaccauguacaucugcggcgauuccaccgagugcuccaaccugcugcugcaguacggcagcuucugcacccagcugaauagagcccugacagggaucgccguggaacaggacaagaacacccaagagguguucgcccaagugaagcaaaucuacaagaccccuccuaucaaggacuucggcggcuucaauuucagccagauucugcccgauccuagcaagcccagcaagcggagcuucaucgaggaccugcuguucaacaaagugacacuggccgacgccggcuucaucaagcaguauggcgauugucugggcgacauugccgccagggaucugauuugcgcccagaaguuuaacggacugacagugcugccuccucugcugaccgaugagaugaucgcccaguacacaucugcccugcuggccggcacaaucacaagcggcuggugguuuggagcuggcgccgcucugcagauccccuuugcuaugcagauggccuaccgguucaacggcaucggagugacccagaaugugcuguacgagaaccagaagcugaucgccaaccaguucaacagcgccaucggcaagauccaggacagccugagcagcacagcaagcgcccugggaaagcugcaggacguggucaaccagaaugcccaggcacugaacacccuggucaagcagcuguccuccaacuucggcgccaucagcucugugcugaacgauauccugagcagacuggacccuccugaggccgaggugcagaucgacagacugaucacaggcagacugcagagccuccagacauacgugacccagcagcugaucagagccgccgagauuagauggucugccaaucuggccgccaccaagaugucugagugugugcugggccagagcaagagaguggacuuuugcggcaagggcuaccaccugaugagcuucccucagucugccccucacggcgugguguuucugcacgugacauaugugcccgcucaagagaagaauuucaccaccgcuccagccaucugccacgacggcaaagcccacuuuccuagagaaggcguguucguguccaacggcacccauugguucgugacacagcggaacuucuacgagccccagaucaucaccaccgacaacaccuucgugucuggcaacugcgacguugugaucggcauugugaacaauaccguguacgacccucugcagcccgagcuggacagcuucaaagaggaacuggacaaguacuuuaagaaccacacaagccccgacguggaccugggcgauaucagcggaaucaaugccagcgucgugaacauccagaaagagaucgaccggcugaacgagguggccaagaaucugaacgagagccugaucgaccugcaagaacuggggaaguacgagcaguacaucaagggcggaggaucuggcggaggacagaucuacgagggcaagcugacagccgagggccugagauuuggaaucguggccagccgguucaaucacgcccugguggauagacugguggaaggcgccaucgaugccauugucagacacggcggcagagaagaggacaucacccucguuagagugcccggcucuugggagauuccuguggcugcuggcgagcuggcccggaaagaagauaucgacgccguuaucgccaucggcgugcugaucagaggcgccacaccucacuucgacuauaucgccagcgagguguccaaaggccuggccgaucugagccuggaacugagaaagcccaucaccuucggcgugaucaccgcugacacacuggaacaggccauugagagagccggcaccaagcacggcaacaaaggaugggaagccgcucuguccgccaucgagauggccaaccuguucaagagccugcggugaggacuagucccuguucccagagcccacuuuuuuuucuuuuuuugaaauaaaauagccugucuuucagaucucaaaggcucuuuucagagccaccaaaaaaaaaaaaaaaaaaaaaaaaaaaaaaaaaaaaaaaaaaaaaaaaaaaaaaaaaaaaaaaaaaaaaaaaaaaaaaaaaaaaaaaaaaaaaaaaaaaaa

SEQ ID NO: 12559 - RNA, 4388 nt, Artificial Sequence
  SARS-CoV-2/Wuhan/WIV05/2019__EPI_ISL_402128 spike protein mRNA gc mod (1-1211)(K986P_V987P_P1069F) LumSynth construct
aggagagucccgcagucggcguccagcggcucugcuuguucgugugugugucguugcaggccuuauucaagcuuaccauguucguguuucuggugcugcugccccugguguccagccagugugugaaccugaccaccagaacacagcugccuccagccuacaccaacagcuucaccagaggcguguacuaccccgacaagguguucagauccagcgugcugcacucuacccaggaccuguuccugccuuucuucagcaacgugaccugguuccacgccauccacguguccggcaccaauggcaccaagagauucgacaaccccgugcugcccuucaacgacgggguguacuuugccagcaccgagaaguccaacaucaucagaggcuggaucuucggcaccacacuggacagcaagacccagagccugcugaucgugaacaacgccaccaacguggucaucaaagugugcgaguuccaguucugcaacgaccccuuccugggcgucuacuaccacaagaacaacaagagcuggauggaaagcgaguuccggguguacagcagcgccaacaacugcaccuucgaguacgugucccagccuuuccugauggaccuggaaggcaagcagggcaacuucaagaaccugcgcgaguucguguucaagaacaucgacggcuacuucaaaaucuacagcaagcacaccccuaucaaccucgugcgggaucugccucagggcuucucugcucuggaaccccugguggaucugcccaucggcaucaacaucacccgguuucagacacugcuggcccugcacagaagcuaccugacaccuggcgauagcagcagcggauggacagcuggugccgccgcuuacuaugugggcuaccugcagccuagaaccuuccugcugaaguacaacgagaacggcaccaucaccgacgccguggauugugcucuggauccucugagcgagacaaagugcacccugaaguccuucaccguggaaaagggcaucuaccagaccagcaacuuccgggugcagcccaccgaauccaucgugcgguuccccaauaucaccaaucugugccccuucggcgagguguucaaugccaccagauucgccucuguguacgccuggaaccggaagcggaucagcaauugcguggccgacuacuccgugcuguacaacuccgccagcuucagcaccuucaagugcuacggcguguccccuaccaagcugaacgaccugugcuucacaaacguguacgccgacagcuucgugauccggggagaugaagugcggcagauugccccuggacagacaggcaagaucgccgacuacaacuacaagcugcccgacgacuucaccggcugugugauugccuggaacagcaacaaccuggacuccaaagucggcggcaacuacaauuaccuguaccggcuguuccggaaguccaaucugaagcccuucgagcgggacaucagcaccgaaaucuaucaggccggcagcaccccuugcaacggcguggaaggcuucaacugcuacuucccacugcaguccuacggcuuucagcccacaaauggcgugggcuaucagcccuacagagugguggugcugagcuucgaacugcugcaugcuccugccacagugugcggcccuaagaaaagcaccaaucucgugaagaacaaaugcgugaacuucaacuucaacggccugaccggcaccggcgugcugacagagagcaacaagaaguuccugccauuccagcaguuuggccgggauaucgccgauaccacagacgccguuagagauccccagacacuggaaauccuggacaucaccccaugcagcuucggcggagugucugugaucaccccuggcaccaacaccagcaaucagguggcagugcuguaccaggacgugaacuguaccgaagugcccguggccauucacgccgaucagcugacaccuacauggcggguguacuccaccggcagcaauguguuucagaccagagccggcugucugaucggagccgagcacgugaacaauagcuacgagugcgacauccccaucggcgcuggcaucugugccagcuaccagacacagacaaacagccccagacgggcuagaagcguggccagccagagcaucauugccuacacaaugucucugggcgccgagaacagcguggccuacuccaacaacucuaucgcuauccccaccaacuucaccaucagcgugaccaccgagauccugccuguguccaugaccaagaccagcguggacugcaccauguacaucugcggcgauuccaccgagugcuccaaccugcugcugcaguacggcagcuucugcacccagcugaauagagcccugacagggaucgccguggaacaggacaagaacacccaagagguguucgcccaagugaagcaaaucuacaagaccccuccuaucaaggacuucggcggcuucaauuucagccagauucugcccgauccuagcaagcccagcaagcggagcuucaucgaggaccugcuguucaacaaagugacacuggccgacgccggcuucaucaagcaguauggcgauugucugggcgacauugccgccagggaucugauuugcgcccagaaguuuaacggacugacagugcugccuccucugcugaccgaugagaugaucgcccaguacacaucugcccugcuggccggcacaaucacaagcggcuggacauuuggagcuggcgccgcucugcagauccccuuugcuaugcagauggccuaccgguucaacggcaucggagugacccagaaugugcuguacgagaaccagaagcugaucgccaaccaguucaacagcgccaucggcaagauccaggacagccugagcagcacagcaagcgcccugggaaagcugcaggacguggucaaccagaaugcccaggcacugaacacccuggucaagcagcuguccuccaacuucggcgccaucagcucugugcugaacgauauccugagcagacuggacccuccugaggccgaggugcagaucgacagacugaucacaggcagacugcagagccuccagacauacgugacccagcagcugaucagagccgccgagauuagagccucugccaaucuggccgccaccaagaugucugagugugugcugggccagagcaagagaguggacuuuugcggcaagggcuaccaccugaugagcuucccucagucugccccucacggcgugguguuucugcacgugacauauguguucgcucaagagaagaauuucaccaccgcuccagccaucugccacgacggcaaagcccacuuuccuagagaaggcguguucguguccaacggcacccauugguucgugacacagcggaacuucuacgagccccagaucaucaccaccgacaacaccuucgugucuggcaacugcgacguugugaucggcauugugaacaauaccguguacgacccucugcagcccgagcuggacagcuucaaagaggaacuggacaaguacuuuaagaaccacacaagccccgacguggaccugggcgauaucagcggaaucaaugccagcgucgugaacauccagaaagagaucgaccggcugaacgagguggccaagaaucugaacgagagccugaucgaccugcaagaacuggggaaguacgagcaguacaucaagggcggaggaucuggcggaggacagaucuacgagggcaagcugacagccgagggccugagauuuggaaucguggccagccgguucaaucacgcccugguggauagacugguggaaggcgccaucgaugccauugucagacacggcggcagagaagaggacaucacccucguuagagugcccggcucuugggagauuccuguggcugcuggcgagcuggcccggaaagaagauaucgacgccguuaucgccaucggcgugcugaucagaggcgccacaccucacuucgacuauaucgccagcgagguguccaaaggccuggccgaucugagccuggaacugagaaagcccaucaccuucggcgugaucaccgcugacacacuggaacaggccauugagagagccggcaccaagcacggcaacaaaggaugggaagccgcucuguccgccaucgagauggccaaccuguucaagagccugcggugaggacuagucccuguucccagagcccacuuuuuuuucuuuuuuugaaauaaaauagccugucuuucagaucucaaaggcucuuuucagagccaccaaaaaaaaaaaaaaaaaaaaaaaaaaaaaaaaaaaaaaaaaaaaaaaaaaaaaaaaaaaaaaaaaaaaaaaaaaaaaaaaaaaaaaaaaaaaaaaaaaaaa

SEQ ID NO: 12560 - RNA, 4388 nt, Artificial Sequence
  SARS-CoV-2/Wuhan/WIV05/2019__EPI_ISL_402128 spike protein mRNA gc mod (1-1211)(K986P_V987P_ H1048Q_H1064N_ H1083N_H1101N) LumSynth construct
aggagagucccgcagucggcguccagcggcucugcuuguucgugugugugucguugcaggccuuauucaagcuuaccauguucguguuucuggugcugcugccccugguguccagccagugugugaaccugaccaccagaacacagcugccuccagccuacaccaacagcuucaccagaggcguguacuaccccgacaagguguucagauccagcgugcugcacucuacccaggaccuguuccugccuuucuucagcaacgugaccugguuccacgccauccacguguccggcaccaauggcaccaagagauucgacaaccccgugcugcccuucaacgacgggguguacuuugccagcaccgagaaguccaacaucaucagaggcuggaucuucggcaccacacuggacagcaagacccagagccugcugaucgugaacaacgccaccaacguggucaucaaagugugcgaguuccaguucugcaacgaccccuuccugggcgucuacuaccacaagaacaacaagagcuggauggaaagcgaguuccggguguacagcagcgccaacaacugcaccuucgaguacgugucccagccuuuccugauggaccuggaaggcaagcagggcaacuucaagaaccugcgcgaguucguguucaagaacaucgacggcuacuucaaaaucuacagcaagcacaccccuaucaaccucgugcgggaucugccucagggcuucucugcucuggaaccccugguggaucugcccaucggcaucaacaucacccgguuucagacacugcuggcccugcacagaagcuaccugacaccuggcgauagcagcagcggauggacagcuggugccgccgcuuacuaugugggcuaccugcagccuagaaccuuccugcugaaguacaacgagaacggcaccaucaccgacgccguggauugugcucuggauccucugagcgagacaaagugcacccugaaguccuucaccguggaaaagggcaucuaccagaccagcaacuuccgggugcagcccaccgaauccaucgugcgguuccccaauaucaccaaucugugccccuucggcgagguguucaaugccaccagauucgccucuguguacgccuggaaccggaagcggaucagcaauugcguggccgacuacuccgugcuguacaacuccgccagcuucagcaccuucaagugcuacggcguguccccuaccaagcugaacgaccugugcuucacaaacguguacgccgacagcuucgugauccggggagaugaagugcggcagauugccccuggacagacaggcaagaucgccgacuacaacuacaagcugcccgacgacuucaccggcugugugauugccuggaacagcaacaaccuggacuccaaagucggcggcaacuacaauuaccuguaccggcuguuccggaaguccaaucugaagcccuucgagcgggacaucagcaccgaaaucuaucaggccggcagcaccccuugcaacggcguggaaggcuucaacugcuacuucccacugcaguccuacggcuuucagcccacaaauggcgugggcuaucagcccuacagagugguggugcugagcuucgaacugcugcaugcuccugccacagugugcggcccuaagaaaagcaccaaucucgugaagaacaaaugcgugaacuucaacuucaacggccugaccggcaccggcgugcugacagagagcaacaagaaguuccugccauuccagcaguuuggccgggauaucgccgauaccacagacgccguuagagauccccagacacuggaaauccuggacaucaccccaugcagcuucggcggagugucugugaucaccccuggcaccaacaccagcaaucagguggcagugcuguaccaggacgugaacuguaccgaagugcccguggccauucacgccgaucagcugacaccuacauggcggguguacuccaccggcagcaauguguuucagaccagagccggcugucugaucggagccgagcacgugaacaauagcuacgagugcgacauccccaucggcgcuggcaucugugccagcuaccagacacagacaaacagccccagacgggcuagaagcguggccagccagagcaucauugccuacacaaugucucugggcgccgagaacagcguggccuacuccaacaacucuaucgcuauccccaccaacuucaccaucagcgugaccaccgagauccugccuguguccaugaccaagaccagcguggacugcaccauguacaucugcggcgauuccaccgagugcuccaaccugcugcugcaguacggcagcuucugcacccagcugaauagagcccugacagggaucgccguggaacaggacaagaacacccaagagguguucgcccaagugaagcaaaucuacaagaccccuccuaucaaggacuucggcggcuucaauuucagccagauucugcccgauccuagcaagcccagcaagcggagcuucaucgaggaccugcuguucaacaaagugacacuggccgacgccggcuucaucaagcaguauggcgauugucugggcgacauugccgccagggaucugauuugcgcccagaaguuuaacggacugacagugcugccuccucugcugaccgaugagaugaucgcccaguacacaucugcccugcuggccggcacaaucacaagcggcuggacauuuggagcuggcgccgcucugcagauccccuuugcuaugcagauggccuaccgguucaacggcaucggagugacccagaaugugcuguacgagaaccagaagcugaucgccaaccaguucaacagcgccaucggcaagauccaggacagccugagcagcacagcaagcgcccugggaaagcugcaggacguggucaaccagaaugcccaggcacugaacacccuggucaagcagcuguccuccaacuucggcgccaucagcucugugcugaacgauauccugagcagacuggacccuccugaggccgaggugcagaucgacagacugaucacaggcagacugcagagccuccagacauacgugacccagcagcugaucagagccgccgagauuagagccucugccaaucuggccgccaccaagaugucugagugugugcugggccagagcaagagaguggacuuuugcggcaagggcuaccagcugaugagcuucccucagucugccccucacggcgugguguuucugaacgugacauaugugcccgcucaagagaagaauuucaccaccgcuccagccaucugcaacgacggcaaagcccacuuuccuagagaaggcguguucguguccaacggcaccaacugguucgugacacagcggaacuucuacgagccccagaucaucaccaccgacaacaccuucgugucuggcaacugcgacguugugaucggcauugugaacaauaccguguacgacccucugcagcccgagcuggacagcuucaaagaggaacuggacaaguacuuuaagaaccacacaagccccgacguggaccugggcgauaucagcggaaucaaugccagcgucgugaacauccagaaagagaucgaccggcugaacgagguggccaagaaucugaacgagagccugaucgaccugcaagaacuggggaaguacgagcaguacaucaagggcggaggaucuggcggaggacagaucuacgagggcaagcugacagccgagggccugagauuuggaaucguggccagccgguucaaucacgcccugguggauagacugguggaaggcgccaucgaugccauugucagacacggcggcagagaagaggacaucacccucguuagagugcccggcucuugggagauuccuguggcugcuggcgagcuggcccggaaagaagauaucgacgccguuaucgccaucggcgugcugaucagaggcgccacaccucacuucgacuauaucgccagcgagguguccaaaggccuggccgaucugagccuggaacugagaaagcccaucaccuucggcgugaucaccgcugacacacuggaacaggccauugagagagccggcaccaagcacggcaacaaaggaugggaagccgcucuguccgccaucgagauggccaaccuguucaagagccugcggugaggacuagucccuguucccagagcccacuuuuuuuucuuuuuuugaaauaaaauagccugucuuucagaucucaaaggcucuuuucagagccaccaaaaaaaaaaaaaaaaaaaaaaaaaaaaaaaaaaaaaaaaaaaaaaaaaaaaaaaaaaaaaaaaaaaaaaaaaaaaaaaaaaaaaaaaaaaaaaaaaaaaa

SEQ ID NO: 12561 - RNA, 4388 nt, Artificial Sequence
  SARS-CoV-2/Wuhan/WIV05/2019__EPI_ISL_402128 spike protein mRNA gc mod (1-1211)(I712C_T1077C) LumSynth construct
aggagagucccgcagucggcguccagcggcucugcuuguucgugugugugucguugcaggccuuauucaagcuuaccauguucguguuucuggugcugcugccccugguguccagccagugugugaaccugaccaccagaacacagcugccuccagccuacaccaacagcuucaccagaggcguguacuaccccgacaagguguucagauccagcgugcugcacucuacccaggaccuguuccugccuuucuucagcaacgugaccugguuccacgccauccacguguccggcaccaauggcaccaagagauucgacaaccccgugcugcccuucaacgacgggguguacuuugccagcaccgagaaguccaacaucaucagaggcuggaucuucggcaccacacuggacagcaagacccagagccugcugaucgugaacaacgccaccaacguggucaucaaagugugcgaguuccaguucugcaacgaccccuuccugggcgucuacuaccacaagaacaacaagagcuggauggaaagcgaguuccggguguacagcagcgccaacaacugcaccuucgaguacgugucccagccuuuccugauggaccuggaaggcaagcagggcaacuucaagaaccugcgcgaguucguguucaagaacaucgacggcuacuucaaaaucuacagcaagcacaccccuaucaaccucgugcgggaucugccucagggcuucucugcucuggaaccccugguggaucugcccaucggcaucaacaucacccgguuucagacacugcuggcccugcacagaagcuaccugacaccuggcgauagcagcagcggauggacagcuggugccgccgcuuacuaugugggcuaccugcagccuagaaccuuccugcugaaguacaacgagaacggcaccaucaccgacgccguggauugugcucuggauccucugagcgagacaaagugcacccugaaguccuucaccguggaaaagggcaucuaccagaccagcaacuuccgggugcagcccaccgaauccaucgugcgguuccccaauaucaccaaucugugccccuucggcgagguguucaaugccaccagauucgccucuguguacgccuggaaccggaagcggaucagcaauugcguggccgacuacuccgugcuguacaacuccgccagcuucagcaccuucaagugcuacggcguguccccuaccaagcugaacgaccugugcuucacaaacguguacgccgacagcuucgugauccggggagaugaagugcggcagauugccccuggacagacaggcaagaucgccgacuacaacuacaagcugcccgacgacuucaccggcugugugauugccuggaacagcaacaaccuggacuccaaagucggcggcaacuacaauuaccuguaccggcuguuccggaaguccaaucugaagcccuucgagcgggacaucagcaccgaaaucuaucaggccggcagcaccccuugcaacggcguggaaggcuucaacugcuacuucccacugcaguccuacggcuuucagcccacaaauggcgugggcuaucagcccuacagagugguggugcugagcuucgaacugcugcaugcuccugccacagugugcggcccuaagaaaagcaccaaucucgugaagaacaaaugcgugaacuucaacuucaacggccugaccggcaccggcgugcugacagagagcaacaagaaguuccugccauuccagcaguuuggccgggauaucgccgauaccacagacgccguuagagauccccagacacuggaaauccuggacaucaccccaugcagcuucggcggagugucugugaucaccccuggcaccaacaccagcaaucagguggcagugcuguaccaggacgugaacuguaccgaagugcccguggccauucacgccgaucagcugacaccuacauggcggguguacuccaccggcagcaauguguuucagaccagagccggcugucugaucggagccgagcacgugaacaauagcuacgagugcgacauccccaucggcgcuggcaucugugccagcuaccagacacagacaaacagccccagacgggcuagaagcguggccagccagagcaucauugccuacacaaugucucugggcgccgagaacagcguggccuacuccaacaacucuugcgcuauccccaccaacuucaccaucagcgugaccaccgagauccugccuguguccaugaccaagaccagcguggacugcaccauguacaucugcggcgauuccaccgagugcuccaaccugcugcugcaguacggcagcuucugcacccagcugaauagagcccugacagggaucgccguggaacaggacaagaacacccaagagguguucgcccaagugaagcaaaucuacaagaccccuccuaucaaggacuucggcggcuucaauuucagccagauucugcccgauccuagcaagcccagcaagcggagcuucaucgaggaccugcuguucaacaaagugacacuggccgacgccggcuucaucaagcaguauggcgauugucugggcgacauugccgccagggaucugauuugcgcccagaaguuuaacggacugacagugcugccuccucugcugaccgaugagaugaucgcccaguacacaucugcccugcuggccggcacaaucacaagcggcuggacauuuggagcuggcgccgcucugcagauccccuuugcuaugcagauggccuaccgguucaacggcaucggagugacccagaaugugcuguacgagaaccagaagcugaucgccaaccaguucaacagcgccaucggcaagauccaggacagccugagcagcacagcaagcgcccugggaaagcugcaggacguggucaaccagaaugcccaggcacugaacacccuggucaagcagcuguccuccaacuucggcgccaucagcucugugcugaacgauauccugagcagacuggacaaggucgaggccgaggugcagaucgacagacugaucacaggcagacugcagagccuccagacauacgugacccagcagcugaucagagccgccgagauuagagccucugccaaucuggccgccaccaagaugucugagugugugcugggccagagcaagagaguggacuuuugcggcaagggcuaccaccugaugagcuucccucagucugccccucacggcgugguguuucugcacgugacauaugugcccgcucaagagaagaauuucaccugugcuccagccaucugccacgacggcaaagcccacuuuccuagagaaggcguguucguguccaacggcacccauugguucgugacacagcggaacuucuacgagccccagaucaucaccaccgacaacaccuucgugucuggcaacugcgacguugugaucggcauugugaacaauaccguguacgacccucugcagcccgagcuggacagcuucaaagaggaacuggacaaguacuuuaagaaccacacaagccccgacguggaccugggcgauaucagcggaaucaaugccagcgucgugaacauccagaaagagaucgaccggcugaacgagguggccaagaaucugaacgagagccugaucgaccugcaagaacuggggaaguacgagcaguacaucaagggcggaggaucuggcggaggacagaucuacgagggcaagcugacagccgagggccugagauuuggaaucguggccagccgguucaaucacgcccugguggauagacugguggaaggcgccaucgaugccauugucagacacggcggcagagaagaggacaucacccucguuagagugcccggcucuugggagauuccuguggcugcuggcgagcuggcccggaaagaagauaucgacgccguuaucgccaucggcgugcugaucagaggcgccacaccucacuucgacuauaucgccagcgagguguccaaaggccuggccgaucugagccuggaacugagaaagcccaucaccuucggcgugaucaccgcugacacacuggaacaggccauugagagagccggcaccaagcacggcaacaaaggaugggaagccgcucuguccgccaucgagauggccaaccuguucaagagccugcggugaggacuagucccuguucccagagcccacuuuuuuuucuuuuuuugaaauaaaauagccugucuuucagaucucaaaggcucuuuucagagccaccaaaaaaaaaaaaaaaaaaaaaaaaaaaaaaaaaaaaaaaaaaaaaaaaaaaaaaaaaaaaaaaaaaaaaaaaaaaaaaaaaaaaaaaaaaaaaaaaaaaaa

SEQ ID NO: 12562 - RNA, 4388 nt, Artificial Sequence
  SARS-CoV-2/Wuhan/WIV05/2019__EPI_ISL_402128 spike protein mRNA gc mod (1-1211)(I714C_Y1110C) LumSynth construct
aggagagucccgcagucggcguccagcggcucugcuuguucgugugugugucguugcaggccuuauucaagcuuaccauguucguguuucuggugcugcugccccugguguccagccagugugugaaccugaccaccagaacacagcugccuccagccuacaccaacagcuucaccagaggcguguacuaccccgacaagguguucagauccagcgugcugcacucuacccaggaccuguuccugccuuucuucagcaacgugaccugguuccacgccauccacguguccggcaccaauggcaccaagagauucgacaaccccgugcugcccuucaacgacgggguguacuuugccagcaccgagaaguccaacaucaucagaggcuggaucuucggcaccacacuggacagcaagacccagagccugcugaucgugaacaacgccaccaacguggucaucaaagugugcgaguuccaguucugcaacgaccccuuccugggcgucuacuaccacaagaacaacaagagcuggauggaaagcgaguuccggguguacagcagcgccaacaacugcaccuucgaguacgugucccagccuuuccugauggaccuggaaggcaagcagggcaacuucaagaaccugcgcgaguucguguucaagaacaucgacggcuacuucaaaaucuacagcaagcacaccccuaucaaccucgugcgggaucugccucagggcuucucugcucuggaaccccugguggaucugcccaucggcaucaacaucacccgguuucagacacugcuggcccugcacagaagcuaccugacaccuggcgauagcagcagcggauggacagcuggugccgccgcuuacuaugugggcuaccugcagccuagaaccuuccugcugaaguacaacgagaacggcaccaucaccgacgccguggauugugcucuggauccucugagcgagacaaagugcacccugaaguccuucaccguggaaaagggcaucuaccagaccagcaacuuccgggugcagcccaccgaauccaucgugcgguuccccaauaucaccaaucugugccccuucggcgagguguucaaugccaccagauucgccucuguguacgccuggaaccggaagcggaucagcaauugcguggccgacuacuccgugcuguacaacuccgccagcuucagcaccuucaagugcuacggcguguccccuaccaagcugaacgaccugugcuucacaaacguguacgccgacagcuucgugauccggggagaugaagugcggcagauugccccuggacagacaggcaagaucgccgacuacaacuacaagcugcccgacgacuucaccggcugugugauugccuggaacagcaacaaccuggacuccaaagucggcggcaacuacaauuaccuguaccggcuguuccggaaguccaaucugaagcccuucgagcgggacaucagcaccgaaaucuaucaggccggcagcaccccuugcaacggcguggaaggcuucaacugcuacuucccacugcaguccuacggcuuucagcccacaaauggcgugggcuaucagcccuacagagugguggugcugagcuucgaacugcugcaugcuccugccacagugugcggcccuaagaaaagcaccaaucucgugaagaacaaaugcgugaacuucaacuucaacggccugaccggcaccggcgugcugacagagagcaacaagaaguuccugccauuccagcaguuuggccgggauaucgccgauaccacagacgccguuagagauccccagacacuggaaauccuggacaucaccccaugcagcuucggcggagugucugugaucaccccuggcaccaacaccagcaaucagguggcagugcuguaccaggacgugaacuguaccgaagugcccguggccauucacgccgaucagcugacaccuacauggcggguguacuccaccggcagcaauguguuucagaccagagccggcugucugaucggagccgagcacgugaacaauagcuacgagugcgacauccccaucggcgcuggcaucugugccagcuaccagacacagacaaacagccccagacgggcuagaagcguggccagccagagcaucauugccuacacaaugucucugggcgccgagaacagcguggccuacuccaacaacucuaucgcuugccccaccaacuucaccaucagcgugaccaccgagauccugccuguguccaugaccaagaccagcguggacugcaccauguacaucugcggcgauuccaccgagugcuccaaccugcugcugcaguacggcagcuucugcacccagcugaauagagcccugacagggaucgccguggaacaggacaagaacacccaagagguguucgcccaagugaagcaaaucuacaagaccccuccuaucaaggacuucggcggcuucaauuucagccagauucugcccgauccuagcaagcccagcaagcggagcuucaucgaggaccugcuguucaacaaagugacacuggccgacgccggcuucaucaagcaguauggcgauugucugggcgacauugccgccagggaucugauuugcgcccagaaguuuaacggacugacagugcugccuccucugcugaccgaugagaugaucgcccaguacacaucugcccugcuggccggcacaaucacaagcggcuggacauuuggagcuggcgccgcucugcagauccccuuugcuaugcagauggccuaccgguucaacggcaucggagugacccagaaugugcuguacgagaaccagaagcugaucgccaaccaguucaacagcgccaucggcaagauccaggacagccugagcagcacagcaagcgcccugggaaagcugcaggacguggucaaccagaaugcccaggcacugaacacccuggucaagcagcuguccuccaacuucggcgccaucagcucugugcugaacgauauccugagcagacuggacaaggucgaggccgaggugcagaucgacagacugaucacaggcagacugcagagccuccagacauacgugacccagcagcugaucagagccgccgagauuagagccucugccaaucuggccgccaccaagaugucugagugugugcugggccagagcaagagaguggacuuuugcggcaagggcuaccaccugaugagcuucccucagucugccccucacggcgugguguuucugcacgugacauaugugcccgcucaagagaagaauuucaccaccgcuccagccaucugccacgacggcaaagcccacuuuccuagagaaggcguguucguguccaacggcacccauugguucgugacacagcggaacuucugugagccccagaucaucaccaccgacaacaccuucgugucuggcaacugcgacguugugaucggcauugugaacaauaccguguacgacccucugcagcccgagcuggacagcuucaaagaggaacuggacaaguacuuuaagaaccacacaagccccgacguggaccugggcgauaucagcggaaucaaugccagcgucgugaacauccagaaagagaucgaccggcugaacgagguggccaagaaucugaacgagagccugaucgaccugcaagaacuggggaaguacgagcaguacaucaagggcggaggaucuggcggaggacagaucuacgagggcaagcugacagccgagggccugagauuuggaaucguggccagccgguucaaucacgcccugguggauagacugguggaaggcgccaucgaugccauugucagacacggcggcagagaagaggacaucacccucguuagagugcccggcucuugggagauuccuguggcugcuggcgagcuggcccggaaagaagauaucgacgccguuaucgccaucggcgugcugaucagaggcgccacaccucacuucgacuauaucgccagcgagguguccaaaggccuggccgaucugagccuggaacugagaaagcccaucaccuucggcgugaucaccgcugacacacuggaacaggccauugagagagccggcaccaagcacggcaacaaaggaugggaagccgcucuguccgccaucgagauggccaaccuguucaagagccugcggugaggacuagucccuguucccagagcccacuuuuuuuucuuuuuuugaaauaaaauagccugucuuucagaucucaaaggcucuuuucagagccaccaaaaaaaaaaaaaaaaaaaaaaaaaaaaaaaaaaaaaaaaaaaaaaaaaaaaaaaaaaaaaaaaaaaaaaaaaaaaaaaaaaaaaaaaaaaaaaaaaaaaa

SEQ ID NO: 12563 - RNA, 4388 nt, Artificial Sequence
  SARS-CoV-2/Wuhan/WIV05/2019__EPI_ISL_402128 spike protein mRNA gc mod (1-1211)(P715C_P1069C) LumSynth construct
aggagagucccgcagucggcguccagcggcucugcuuguucgugugugugucguugcaggccuuauucaagcuuaccauguucguguuucuggugcugcugccccugguguccagccagugugugaaccugaccaccagaacacagcugccuccagccuacaccaacagcuucaccagaggcguguacuaccccgacaagguguucagauccagcgugcugcacucuacccaggaccuguuccugccuuucuucagcaacgugaccugguuccacgccauccacguguccggcaccaauggcaccaagagauucgacaaccccgugcugcccuucaacgacgggguguacuuugccagcaccgagaaguccaacaucaucagaggcuggaucuucggcaccacacuggacagcaagacccagagccugcugaucgugaacaacgccaccaacguggucaucaaagugugcgaguuccaguucugcaacgaccccuuccugggcgucuacuaccacaagaacaacaagagcuggauggaaagcgaguuccggguguacagcagcgccaacaacugcaccuucgaguacgugucccagccuuuccugauggaccuggaaggcaagcagggcaacuucaagaaccugcgcgaguucguguucaagaacaucgacggcuacuucaaaaucuacagcaagcacaccccuaucaaccucgugcgggaucugccucagggcuucucugcucuggaaccccugguggaucugcccaucggcaucaacaucacccgguuucagacacugcuggcccugcacagaagcuaccugacaccuggcgauagcagcagcggauggacagcuggugccgccgcuuacuaugugggcuaccugcagccuagaaccuuccugcugaaguacaacgagaacggcaccaucaccgacgccguggauugugcucuggauccucugagcgagacaaagugcacccugaaguccuucaccguggaaaagggcaucuaccagaccagcaacuuccgggugcagcccaccgaauccaucgugcgguuccccaauaucaccaaucugugccccuucggcgagguguucaaugccaccagauucgccucuguguacgccuggaaccggaagcggaucagcaauugcguggccgacuacuccgugcuguacaacuccgccagcuucagcaccuucaagugcuacggcguguccccuaccaagcugaacgaccugugcuucacaaacguguacgccgacagcuucgugauccggggagaugaagugcggcagauugccccuggacagacaggcaagaucgccgacuacaacuacaagcugcccgacgacuucaccggcugugugauugccuggaacagcaacaaccuggacuccaaagucggcggcaacuacaauuaccuguaccggcuguuccggaaguccaaucugaagcccuucgagcgggacaucagcaccgaaaucuaucaggccggcagcaccccuugcaacggcguggaaggcuucaacugcuacuucccacugcaguccuacggcuuucagcccacaaauggcgugggcuaucagcccuacagagugguggugcugagcuucgaacugcugcaugcuccugccacagugugcggcccuaagaaaagcaccaaucucgugaagaacaaaugcgugaacuucaacuucaacggccugaccggcaccggcgugcugacagagagcaacaagaaguuccugccauuccagcaguuuggccgggauaucgccgauaccacagacgccguuagagauccccagacacuggaaauccuggacaucaccccaugcagcuucggcggagugucugugaucaccccuggcaccaacaccagcaaucagguggcagugcuguaccaggacgugaacuguaccgaagugcccguggccauucacgccgaucagcugacaccuacauggcggguguacuccaccggcagcaauguguuucagaccagagccggcugucugaucggagccgagcacgugaacaauagcuacgagugcgacauccccaucggcgcuggcaucugugccagcuaccagacacagacaaacagccccagacgggcuagaagcguggccagccagagcaucauugccuacacaaugucucugggcgccgagaacagcguggccuacuccaacaacucuaucgcuaucugcaccaacuucaccaucagcgugaccaccgagauccugccuguguccaugaccaagaccagcguggacugcaccauguacaucugcggcgauuccaccgagugcuccaaccugcugcugcaguacggcagcuucugcacccagcugaauagagcccugacagggaucgccguggaacaggacaagaacacccaagagguguucgcccaagugaagcaaaucuacaagaccccuccuaucaaggacuucggcggcuucaauuucagccagauucugcccgauccuagcaagcccagcaagcggagcuucaucgaggaccugcuguucaacaaagugacacuggccgacgccggcuucaucaagcaguauggcgauugucugggcgacauugccgccagggaucugauuugcgcccagaaguuuaacggacugacagugcugccuccucugcugaccgaugagaugaucgcccaguacacaucugcccugcuggccggcacaaucacaagcggcuggacauuuggagcuggcgccgcucugcagauccccuuugcuaugcagauggccuaccgguucaacggcaucggagugacccagaaugugcuguacgagaaccagaagcugaucgccaaccaguucaacagcgccaucggcaagauccaggacagccugagcagcacagcaagcgcccugggaaagcugcaggacguggucaaccagaaugcccaggcacugaacacccuggucaagcagcuguccuccaacuucggcgccaucagcucugugcugaacgauauccugagcagacuggacaaggucgaggccgaggugcagaucgacagacugaucacaggcagacugcagagccuccagacauacgugacccagcagcugaucagagccgccgagauuagagccucugccaaucuggccgccaccaagaugucugagugugugcugggccagagcaagagaguggacuuuugcggcaagggcuaccaccugaugagcuucccucagucugccccucacggcgugguguuucugcacgugacauaugugugugcucaagagaagaauuucaccaccgcuccagccaucugccacgacggcaaagcccacuuuccuagagaaggcguguucguguccaacggcacccauugguucgugacacagcggaacuucuacgagccccagaucaucaccaccgacaacaccuucgugucuggcaacugcgacguugugaucggcauugugaacaauaccguguacgacccucugcagcccgagcuggacagcuucaaagaggaacuggacaaguacuuuaagaaccacacaagccccgacguggaccugggcgauaucagcggaaucaaugccagcgucgugaacauccagaaagagaucgaccggcugaacgagguggccaagaaucugaacgagagccugaucgaccugcaagaacuggggaaguacgagcaguacaucaagggcggaggaucuggcggaggacagaucuacgagggcaagcugacagccgagggccugagauuuggaaucguggccagccgguucaaucacgcccugguggauagacugguggaaggcgccaucgaugccauugucagacacggcggcagagaagaggacaucacccucguuagagugcccggcucuugggagauuccuguggcugcuggcgagcuggcccggaaagaagauaucgacgccguuaucgccaucggcgugcugaucagaggcgccacaccucacuucgacuauaucgccagcgagguguccaaaggccuggccgaucugagccuggaacugagaaagcccaucaccuucggcgugaucaccgcugacacacuggaacaggccauugagagagccggcaccaagcacggcaacaaaggaugggaagccgcucuguccgccaucgagauggccaaccuguucaagagccugcggugaggacuagucccuguucccagagcccacuuuuuuuucuuuuuuugaaauaaaauagccugucuuucagaucucaaaggcucuuuucagagccaccaaaaaaaaaaaaaaaaaaaaaaaaaaaaaaaaaaaaaaaaaaaaaaaaaaaaaaaaaaaaaaaaaaaaaaaaaaaaaaaaaaaaaaaaaaaaaaaaaaaaa

SEQ ID NO: 12564 - RNA, 4388 nt, Artificial Sequence
  SARS-CoV-2/Wuhan/WIV05/2019__EPI_ISL_402128 spike protein mRNA gc mod (1-1211)(G889C_L1034C) LumSynth construct
aggagagucccgcagucggcguccagcggcucugcuuguucgugugugugucguugcaggccuuauucaagcuuaccauguucguguuucuggugcugcugccccugguguccagccagugugugaaccugaccaccagaacacagcugccuccagccuacaccaacagcuucaccagaggcguguacuaccccgacaagguguucagauccagcgugcugcacucuacccaggaccuguuccugccuuucuucagcaacgugaccugguuccacgccauccacguguccggcaccaauggcaccaagagauucgacaaccccgugcugcccuucaacgacgggguguacuuugccagcaccgagaaguccaacaucaucagaggcuggaucuucggcaccacacuggacagcaagacccagagccugcugaucgugaacaacgccaccaacguggucaucaaagugugcgaguuccaguucugcaacgaccccuuccugggcgucuacuaccacaagaacaacaagagcuggauggaaagcgaguuccggguguacagcagcgccaacaacugcaccuucgaguacgugucccagccuuuccugauggaccuggaaggcaagcagggcaacuucaagaaccugcgcgaguucguguucaagaacaucgacggcuacuucaaaaucuacagcaagcacaccccuaucaaccucgugcgggaucugccucagggcuucucugcucuggaaccccugguggaucugcccaucggcaucaacaucacccgguuucagacacugcuggcccugcacagaagcuaccugacaccuggcgauagcagcagcggauggacagcuggugccgccgcuuacuaugugggcuaccugcagccuagaaccuuccugcugaaguacaacgagaacggcaccaucaccgacgccguggauugugcucuggauccucugagcgagacaaagugcacccugaaguccuucaccguggaaaagggcaucuaccagaccagcaacuuccgggugcagcccaccgaauccaucgugcgguuccccaauaucaccaaucugugccccuucggcgagguguucaaugccaccagauucgccucuguguacgccuggaaccggaagcggaucagcaauugcguggccgacuacuccgugcuguacaacuccgccagcuucagcaccuucaagugcuacggcguguccccuaccaagcugaacgaccugugcuucacaaacguguacgccgacagcuucgugauccggggagaugaagugcggcagauugccccuggacagacaggcaagaucgccgacuacaacuacaagcugcccgacgacuucaccggcugugugauugccuggaacagcaacaaccuggacuccaaagucggcggcaacuacaauuaccuguaccggcuguuccggaaguccaaucugaagcccuucgagcgggacaucagcaccgaaaucuaucaggccggcagcaccccuugcaacggcguggaaggcuucaacugcuacuucccacugcaguccuacggcuuucagcccacaaauggcgugggcuaucagcccuacagagugguggugcugagcuucgaacugcugcaugcuccugccacagugugcggcccuaagaaaagcaccaaucucgugaagaacaaaugcgugaacuucaacuucaacggccugaccggcaccggcgugcugacagagagcaacaagaaguuccugccauuccagcaguuuggccgggauaucgccgauaccacagacgccguuagagauccccagacacuggaaauccuggacaucaccccaugcagcuucggcggagugucugugaucaccccuggcaccaacaccagcaaucagguggcagugcuguaccaggacgugaacuguaccgaagugcccguggccauucacgccgaucagcugacaccuacauggcggguguacuccaccggcagcaauguguuucagaccagagccggcugucugaucggagccgagcacgugaacaauagcuacgagugcgacauccccaucggcgcuggcaucugugccagcuaccagacacagacaaacagccccagacgggcuagaagcguggccagccagagcaucauugccuacacaaugucucugggcgccgagaacagcguggccuacuccaacaacucuaucgcuauccccaccaacuucaccaucagcgugaccaccgagauccugccuguguccaugaccaagaccagcguggacugcaccauguacaucugcggcgauuccaccgagugcuccaaccugcugcugcaguacggcagcuucugcacccagcugaauagagcccugacagggaucgccguggaacaggacaagaacacccaagagguguucgcccaagugaagcaaaucuacaagaccccuccuaucaaggacuucggcggcuucaauuucagccagauucugcccgauccuagcaagcccagcaagcggagcuucaucgaggaccugcuguucaacaaagugacacuggccgacgccggcuucaucaagcaguauggcgauugucugggcgacauugccgccagggaucugauuugcgcccagaaguuuaacggacugacagugcugccuccucugcugaccgaugagaugaucgcccaguacacaucugcccugcuggccggcacaaucacaagcggcuggacauuuugcgcuggcgccgcucugcagauccccuuugcuaugcagauggccuaccgguucaacggcaucggagugacccagaaugugcuguacgagaaccagaagcugaucgccaaccaguucaacagcgccaucggcaagauccaggacagccugagcagcacagcaagcgcccugggaaagcugcaggacguggucaaccagaaugcccaggcacugaacacccuggucaagcagcuguccuccaacuucggcgccaucagcucugugcugaacgauauccugagcagacuggacaaggucgaggccgaggugcagaucgacagacugaucacaggcagacugcagagccuccagacauacgugacccagcagcugaucagagccgccgagauuagagccucugccaaucuggccgccaccaagaugucugaguguguguguggccagagcaagagaguggacuuuugcggcaagggcuaccaccugaugagcuucccucagucugccccucacggcgugguguuucugcacgugacauaugugcccgcucaagagaagaauuucaccaccgcuccagccaucugccacgacggcaaagcccacuuuccuagagaaggcguguucguguccaacggcacccauugguucgugacacagcggaacuucuacgagccccagaucaucaccaccgacaacaccuucgugucuggcaacugcgacguugugaucggcauugugaacaauaccguguacgacccucugcagcccgagcuggacagcuucaaagaggaacuggacaaguacuuuaagaaccacacaagccccgacguggaccugggcgauaucagcggaaucaaugccagcgucgugaacauccagaaagagaucgaccggcugaacgagguggccaagaaucugaacgagagccugaucgaccugcaagaacuggggaaguacgagcaguacaucaagggcggaggaucuggcggaggacagaucuacgagggcaagcugacagccgagggccugagauuuggaaucguggccagccgguucaaucacgcccugguggauagacugguggaaggcgccaucgaugccauugucagacacggcggcagagaagaggacaucacccucguuagagugcccggcucuugggagauuccuguggcugcuggcgagcuggcccggaaagaagauaucgacgccguuaucgccaucggcgugcugaucagaggcgccacaccucacuucgacuauaucgccagcgagguguccaaaggccuggccgaucugagccuggaacugagaaagcccaucaccuucggcgugaucaccgcugacacacuggaacaggccauugagagagccggcaccaagcacggcaacaaaggaugggaagccgcucuguccgccaucgagauggccaaccuguucaagagccugcggugaggacuagucccuguucccagagcccacuuuuuuuucuuuuuuugaaauaaaauagccugucuuucagaucucaaaggcucuuuucagagccaccaaaaaaaaaaaaaaaaaaaaaaaaaaaaaaaaaaaaaaaaaaaaaaaaaaaaaaaaaaaaaaaaaaaaaaaaaaaaaaaaaaaaaaaaaaaaaaaaaaaaa

SEQ ID NO: 12565 - RNA, 4388 nt, Artificial Sequence
  SARS-CoV-2/Wuhan/WIV05/2019__EPI_ISL_402128 spike protein mRNA gc mod (1-1211)(I909C_Y1047C) LumSynth construct
aggagagucccgcagucggcguccagcggcucugcuuguucgugugugugucguugcaggccuuauucaagcuuaccauguucguguuucuggugcugcugccccugguguccagccagugugugaaccugaccaccagaacacagcugccuccagccuacaccaacagcuucaccagaggcguguacuaccccgacaagguguucagauccagcgugcugcacucuacccaggaccuguuccugccuuucuucagcaacgugaccugguuccacgccauccacguguccggcaccaauggcaccaagagauucgacaaccccgugcugcccuucaacgacgggguguacuuugccagcaccgagaaguccaacaucaucagaggcuggaucuucggcaccacacuggacagcaagacccagagccugcugaucgugaacaacgccaccaacguggucaucaaagugugcgaguuccaguucugcaacgaccccuuccugggcgucuacuaccacaagaacaacaagagcuggauggaaagcgaguuccggguguacagcagcgccaacaacugcaccuucgaguacgugucccagccuuuccugauggaccuggaaggcaagcagggcaacuucaagaaccugcgcgaguucguguucaagaacaucgacggcuacuucaaaaucuacagcaagcacaccccuaucaaccucgugcgggaucugccucagggcuucucugcucuggaaccccugguggaucugcccaucggcaucaacaucacccgguuucagacacugcuggcccugcacagaagcuaccugacaccuggcgauagcagcagcggauggacagcuggugccgccgcuuacuaugugggcuaccugcagccuagaaccuuccugcugaaguacaacgagaacggcaccaucaccgacgccguggauugugcucuggauccucugagcgagacaaagugcacccugaaguccuucaccguggaaaagggcaucuaccagaccagcaacuuccgggugcagcccaccgaauccaucgugcgguuccccaauaucaccaaucugugccccuucggcgagguguucaaugccaccagauucgccucuguguacgccuggaaccggaagcggaucagcaauugcguggccgacuacuccgugcuguacaacuccgccagcuucagcaccuucaagugcuacggcguguccccuaccaagcugaacgaccugugcuucacaaacguguacgccgacagcuucgugauccggggagaugaagugcggcagauugccccuggacagacaggcaagaucgccgacuacaacuacaagcugcccgacgacuucaccggcugugugauugccuggaacagcaacaaccuggacuccaaagucggcggcaacuacaauuaccuguaccggcuguuccggaaguccaaucugaagcccuucgagcgggacaucagcaccgaaaucuaucaggccggcagcaccccuugcaacggcguggaaggcuucaacugcuacuucccacugcaguccuacggcuuucagcccacaaauggcgugggcuaucagcccuacagagugguggugcugagcuucgaacugcugcaugcuccugccacagugugcggcccuaagaaaagcaccaaucucgugaagaacaaaugcgugaacuucaacuucaacggccugaccggcaccggcgugcugacagagagcaacaagaaguuccugccauuccagcaguuuggccgggauaucgccgauaccacagacgccguuagagauccccagacacuggaaauccuggacaucaccccaugcagcuucggcggagugucugugaucaccccuggcaccaacaccagcaaucagguggcagugcuguaccaggacgugaacuguaccgaagugcccguggccauucacgccgaucagcugacaccuacauggcggguguacuccaccggcagcaauguguuucagaccagagccggcugucugaucggagccgagcacgugaacaauagcuacgagugcgacauccccaucggcgcuggcaucugugccagcuaccagacacagacaaacagccccagacgggcuagaagcguggccagccagagcaucauugccuacacaaugucucugggcgccgagaacagcguggccuacuccaacaacucuaucgcuauccccaccaacuucaccaucagcgugaccaccgagauccugccuguguccaugaccaagaccagcguggacugcaccauguacaucugcggcgauuccaccgagugcuccaaccugcugcugcaguacggcagcuucugcacccagcugaauagagcccugacagggaucgccguggaacaggacaagaacacccaagagguguucgcccaagugaagcaaaucuacaagaccccuccuaucaaggacuucggcggcuucaauuucagccagauucugcccgauccuagcaagcccagcaagcggagcuucaucgaggaccugcuguucaacaaagugacacuggccgacgccggcuucaucaagcaguauggcgauugucugggcgacauugccgccagggaucugauuugcgcccagaaguuuaacggacugacagugcugccuccucugcugaccgaugagaugaucgcccaguacacaucugcccugcuggccggcacaaucacaagcggcuggacauuuggagcuggcgccgcucugcagauccccuuugcuaugcagauggccuaccgguucaacggcugcggagugacccagaaugugcuguacgagaaccagaagcugaucgccaaccaguucaacagcgccaucggcaagauccaggacagccugagcagcacagcaagcgcccugggaaagcugcaggacguggucaaccagaaugcccaggcacugaacacccuggucaagcagcuguccuccaacuucggcgccaucagcucugugcugaacgauauccugagcagacuggacaaggucgaggccgaggugcagaucgacagacugaucacaggcagacugcagagccuccagacauacgugacccagcagcugaucagagccgccgagauuagagccucugccaaucuggccgccaccaagaugucugagugugugcugggccagagcaagagaguggacuuuugcggcaagggcugucaccugaugagcuucccucagucugccccucacggcgugguguuucugcacgugacauaugugcccgcucaagagaagaauuucaccaccgcuccagccaucugccacgacggcaaagcccacuuuccuagagaaggcguguucguguccaacggcacccauugguucgugacacagcggaacuucuacgagccccagaucaucaccaccgacaacaccuucgugucuggcaacugcgacguugugaucggcauugugaacaauaccguguacgacccucugcagcccgagcuggacagcuucaaagaggaacuggacaaguacuuuaagaaccacacaagccccgacguggaccugggcgauaucagcggaaucaaugccagcgucgugaacauccagaaagagaucgaccggcugaacgagguggccaagaaucugaacgagagccugaucgaccugcaagaacuggggaaguacgagcaguacaucaagggcggaggaucuggcggaggacagaucuacgagggcaagcugacagccgagggccugagauuuggaaucguggccagccgguucaaucacgcccugguggauagacugguggaaggcgccaucgaugccauugucagacacggcggcagagaagaggacaucacccucguuagagugcccggcucuugggagauuccuguggcugcuggcgagcuggcccggaaagaagauaucgacgccguuaucgccaucggcgugcugaucagaggcgccacaccucacuucgacuauaucgccagcgagguguccaaaggccuggccgaucugagccuggaacugagaaagcccaucaccuucggcgugaucaccgcugacacacuggaacaggccauugagagagccggcaccaagcacggcaacaaaggaugggaagccgcucuguccgccaucgagauggccaaccuguucaagagccugcggugaggacuagucccuguucccagagcccacuuuuuuuucuuuuuuugaaauaaaauagccugucuuucagaucucaaaggcucuuuucagagccaccaaaaaaaaaaaaaaaaaaaaaaaaaaaaaaaaaaaaaaaaaaaaaaaaaaaaaaaaaaaaaaaaaaaaaaaaaaaaaaaaaaaaaaaaaaaaaaaaaaaaa

SEQ ID NO: 12566 - RNA, 4388 nt, Artificial Sequence
  SARS-CoV-2/Wuhan/WIV05/2019__EPI_ISL_402128 spike protein mRNA gc mod (1-1211)(Q965C_S1003C) LumSynth construct
aggagagucccgcagucggcguccagcggcucugcuuguucgugugugugucguugcaggccuuauucaagcuuaccauguucguguuucuggugcugcugccccugguguccagccagugugugaaccugaccaccagaacacagcugccuccagccuacaccaacagcuucaccagaggcguguacuaccccgacaagguguucagauccagcgugcugcacucuacccaggaccuguuccugccuuucuucagcaacgugaccugguuccacgccauccacguguccggcaccaauggcaccaagagauucgacaaccccgugcugcccuucaacgacgggguguacuuugccagcaccgagaaguccaacaucaucagaggcuggaucuucggcaccacacuggacagcaagacccagagccugcugaucgugaacaacgccaccaacguggucaucaaagugugcgaguuccaguucugcaacgaccccuuccugggcgucuacuaccacaagaacaacaagagcuggauggaaagcgaguuccggguguacagcagcgccaacaacugcaccuucgaguacgugucccagccuuuccugauggaccuggaaggcaagcagggcaacuucaagaaccugcgcgaguucguguucaagaacaucgacggcuacuucaaaaucuacagcaagcacaccccuaucaaccucgugcgggaucugccucagggcuucucugcucuggaaccccugguggaucugcccaucggcaucaacaucacccgguuucagacacugcuggcccugcacagaagcuaccugacaccuggcgauagcagcagcggauggacagcuggugccgccgcuuacuaugugggcuaccugcagccuagaaccuuccugcugaaguacaacgagaacggcaccaucaccgacgccguggauugugcucuggauccucugagcgagacaaagugcacccugaaguccuucaccguggaaaagggcaucuaccagaccagcaacuuccgggugcagcccaccgaauccaucgugcgguuccccaauaucaccaaucugugccccuucggcgagguguucaaugccaccagauucgccucuguguacgccuggaaccggaagcggaucagcaauugcguggccgacuacuccgugcuguacaacuccgccagcuucagcaccuucaagugcuacggcguguccccuaccaagcugaacgaccugugcuucacaaacguguacgccgacagcuucgugauccggggagaugaagugcggcagauugccccuggacagacaggcaagaucgccgacuacaacuacaagcugcccgacgacuucaccggcugugugauugccuggaacagcaacaaccuggacuccaaagucggcggcaacuacaauuaccuguaccggcuguuccggaaguccaaucugaagcccuucgagcgggacaucagcaccgaaaucuaucaggccggcagcaccccuugcaacggcguggaaggcuucaacugcuacuucccacugcaguccuacggcuuucagcccacaaauggcgugggcuaucagcccuacagagugguggugcugagcuucgaacugcugcaugcuccugccacagugugcggcccuaagaaaagcaccaaucucgugaagaacaaaugcgugaacuucaacuucaacggccugaccggcaccggcgugcugacagagagcaacaagaaguuccugccauuccagcaguuuggccgggauaucgccgauaccacagacgccguuagagauccccagacacuggaaauccuggacaucaccccaugcagcuucggcggagugucugugaucaccccuggcaccaacaccagcaaucagguggcagugcuguaccaggacgugaacuguaccgaagugcccguggccauucacgccgaucagcugacaccuacauggcggguguacuccaccggcagcaauguguuucagaccagagccggcugucugaucggagccgagcacgugaacaauagcuacgagugcgacauccccaucggcgcuggcaucugugccagcuaccagacacagacaaacagccccagacgggcuagaagcguggccagccagagcaucauugccuacacaaugucucugggcgccgagaacagcguggccuacuccaacaacucuaucgcuauccccaccaacuucaccaucagcgugaccaccgagauccugccuguguccaugaccaagaccagcguggacugcaccauguacaucugcggcgauuccaccgagugcuccaaccugcugcugcaguacggcagcuucugcacccagcugaauagagcccugacagggaucgccguggaacaggacaagaacacccaagagguguucgcccaagugaagcaaaucuacaagaccccuccuaucaaggacuucggcggcuucaauuucagccagauucugcccgauccuagcaagcccagcaagcggagcuucaucgaggaccugcuguucaacaaagugacacuggccgacgccggcuucaucaagcaguauggcgauugucugggcgacauugccgccagggaucugauuugcgcccagaaguuuaacggacugacagugcugccuccucugcugaccgaugagaugaucgcccaguacacaucugcccugcuggccggcacaaucacaagcggcuggacauuuggagcuggcgccgcucugcagauccccuuugcuaugcagauggccuaccgguucaacggcaucggagugacccagaaugugcuguacgagaaccagaagcugaucgccaaccaguucaacagcgccaucggcaagauccaggacagccugagcagcacagcaagcgcccugggaaagcugcaggacguggucaaccagaaugcccaggcacugaacacccuggucaagugccuguccuccaacuucggcgccaucagcucugugcugaacgauauccugagcagacuggacaaggucgaggccgaggugcagaucgacagacugaucacaggcagacugcagugucuccagacauacgugacccagcagcugaucagagccgccgagauuagagccucugccaaucuggccgccaccaagaugucugagugugugcugggccagagcaagagaguggacuuuugcggcaagggcuaccaccugaugagcuucccucagucugccccucacggcgugguguuucugcacgugacauaugugcccgcucaagagaagaauuucaccaccgcuccagccaucugccacgacggcaaagcccacuuuccuagagaaggcguguucguguccaacggcacccauugguucgugacacagcggaacuucuacgagccccagaucaucaccaccgacaacaccuucgugucuggcaacugcgacguugugaucggcauugugaacaauaccguguacgacccucugcagcccgagcuggacagcuucaaagaggaacuggacaaguacuuuaagaaccacacaagccccgacguggaccugggcgauaucagcggaaucaaugccagcgucgugaacauccagaaagagaucgaccggcugaacgagguggccaagaaucugaacgagagccugaucgaccugcaagaacuggggaaguacgagcaguacaucaagggcggaggaucuggcggaggacagaucuacgagggcaagcugacagccgagggccugagauuuggaaucguggccagccgguucaaucacgcccugguggauagacugguggaaggcgccaucgaugccauugucagacacggcggcagagaagaggacaucacccucguuagagugcccggcucuugggagauuccuguggcugcuggcgagcuggcccggaaagaagauaucgacgccguuaucgccaucggcgugcugaucagaggcgccacaccucacuucgacuauaucgccagcgagguguccaaaggccuggccgaucugagccuggaacugagaaagcccaucaccuucggcgugaucaccgcugacacacuggaacaggccauugagagagccggcaccaagcacggcaacaaaggaugggaagccgcucuguccgccaucgagauggccaaccuguucaagagccugcggugaggacuagucccuguucccagagcccacuuuuuuuucuuuuuuugaaauaaaauagccugucuuucagaucucaaaggcucuuuucagagccaccaaaaaaaaaaaaaaaaaaaaaaaaaaaaaaaaaaaaaaaaaaaaaaaaaaaaaaaaaaaaaaaaaaaaaaaaaaaaaaaaaaaaaaaaaaaaaaaaaaaaa

SEQ ID NO: 12567 - RNA, 4388 nt, Artificial Sequence
  SARS-CoV-2/Wuhan/WIV05/2019__EPI_ISL_402128 spike protein mRNA gc mod (1-1211)(F970C_G999C) LumSynth construct
aggagagucccgcagucggcguccagcggcucugcuuguucgugugugugucguugcaggccuuauucaagcuuaccauguucguguuucuggugcugcugccccugguguccagccagugugugaaccugaccaccagaacacagcugccuccagccuacaccaacagcuucaccagaggcguguacuaccccgacaagguguucagauccagcgugcugcacucuacccaggaccuguuccugccuuucuucagcaacgugaccugguuccacgccauccacguguccggcaccaauggcaccaagagauucgacaaccccgugcugcccuucaacgacgggguguacuuugccagcaccgagaaguccaacaucaucagaggcuggaucuucggcaccacacuggacagcaagacccagagccugcugaucgugaacaacgccaccaacguggucaucaaagugugcgaguuccaguucugcaacgaccccuuccugggcgucuacuaccacaagaacaacaagagcuggauggaaagcgaguuccggguguacagcagcgccaacaacugcaccuucgaguacgugucccagccuuuccugauggaccuggaaggcaagcagggcaacuucaagaaccugcgcgaguucguguucaagaacaucgacggcuacuucaaaaucuacagcaagcacaccccuaucaaccucgugcgggaucugccucagggcuucucugcucuggaaccccugguggaucugcccaucggcaucaacaucacccgguuucagacacugcuggcccugcacagaagcuaccugacaccuggcgauagcagcagcggauggacagcuggugccgccgcuuacuaugugggcuaccugcagccuagaaccuuccugcugaaguacaacgagaacggcaccaucaccgacgccguggauugugcucuggauccucugagcgagacaaagugcacccugaaguccuucaccguggaaaagggcaucuaccagaccagcaacuuccgggugcagcccaccgaauccaucgugcgguuccccaauaucaccaaucugugccccuucggcgagguguucaaugccaccagauucgccucuguguacgccuggaaccggaagcggaucagcaauugcguggccgacuacuccgugcuguacaacuccgccagcuucagcaccuucaagugcuacggcguguccccuaccaagcugaacgaccugugcuucacaaacguguacgccgacagcuucgugauccggggagaugaagugcggcagauugccccuggacagacaggcaagaucgccgacuacaacuacaagcugcccgacgacuucaccggcugugugauugccuggaacagcaacaaccuggacuccaaagucggcggcaacuacaauuaccuguaccggcuguuccggaaguccaaucugaagcccuucgagcgggacaucagcaccgaaaucuaucaggccggcagcaccccuugcaacggcguggaaggcuucaacugcuacuucccacugcaguccuacggcuuucagcccacaaauggcgugggcuaucagcccuacagagugguggugcugagcuucgaacugcugcaugcuccugccacagugugcggcccuaagaaaagcaccaaucucgugaagaacaaaugcgugaacuucaacuucaacggccugaccggcaccggcgugcugacagagagcaacaagaaguuccugccauuccagcaguuuggccgggauaucgccgauaccacagacgccguuagagauccccagacacuggaaauccuggacaucaccccaugcagcuucggcggagugucugugaucaccccuggcaccaacaccagcaaucagguggcagugcuguaccaggacgugaacuguaccgaagugcccguggccauucacgccgaucagcugacaccuacauggcggguguacuccaccggcagcaauguguuucagaccagagccggcugucugaucggagccgagcacgugaacaauagcuacgagugcgacauccccaucggcgcuggcaucugugccagcuaccagacacagacaaacagccccagacgggcuagaagcguggccagccagagcaucauugccuacacaaugucucugggcgccgagaacagcguggccuacuccaacaacucuaucgcuauccccaccaacuucaccaucagcgugaccaccgagauccugccuguguccaugaccaagaccagcguggacugcaccauguacaucugcggcgauuccaccgagugcuccaaccugcugcugcaguacggcagcuucugcacccagcugaauagagcccugacagggaucgccguggaacaggacaagaacacccaagagguguucgcccaagugaagcaaaucuacaagaccccuccuaucaaggacuucggcggcuucaauuucagccagauucugcccgauccuagcaagcccagcaagcggagcuucaucgaggaccugcuguucaacaaagugacacuggccgacgccggcuucaucaagcaguauggcgauugucugggcgacauugccgccagggaucugauuugcgcccagaaguuuaacggacugacagugcugccuccucugcugaccgaugagaugaucgcccaguacacaucugcccugcuggccggcacaaucacaagcggcuggacauuuggagcuggcgccgcucugcagauccccuuugcuaugcagauggccuaccgguucaacggcaucggagugacccagaaugugcuguacgagaaccagaagcugaucgccaaccaguucaacagcgccaucggcaagauccaggacagccugagcagcacagcaagcgcccugggaaagcugcaggacguggucaaccagaaugcccaggcacugaacacccuggucaagcagcuguccuccaacugcggcgccaucagcucugugcugaacgauauccugagcagacuggacaaggucgaggccgaggugcagaucgacagacugaucacauguagacugcagagccuccagacauacgugacccagcagcugaucagagccgccgagauuagagccucugccaaucuggccgccaccaagaugucugagugugugcugggccagagcaagagaguggacuuuugcggcaagggcuaccaccugaugagcuucccucagucugccccucacggcgugguguuucugcacgugacauaugugcccgcucaagagaagaauuucaccaccgcuccagccaucugccacgacggcaaagcccacuuuccuagagaaggcguguucguguccaacggcacccauugguucgugacacagcggaacuucuacgagccccagaucaucaccaccgacaacaccuucgugucuggcaacugcgacguugugaucggcauugugaacaauaccguguacgacccucugcagcccgagcuggacagcuucaaagaggaacuggacaaguacuuuaagaaccacacaagccccgacguggaccugggcgauaucagcggaaucaaugccagcgucgugaacauccagaaagagaucgaccggcugaacgagguggccaagaaucugaacgagagccugaucgaccugcaagaacuggggaaguacgagcaguacaucaagggcggaggaucuggcggaggacagaucuacgagggcaagcugacagccgagggccugagauuuggaaucguggccagccgguucaaucacgcccugguggauagacugguggaaggcgccaucgaugccauugucagacacggcggcagagaagaggacaucacccucguuagagugcccggcucuugggagauuccuguggcugcuggcgagcuggcccggaaagaagauaucgacgccguuaucgccaucggcgugcugaucagaggcgccacaccucacuucgacuauaucgccagcgagguguccaaaggccuggccgaucugagccuggaacugagaaagcccaucaccuucggcgugaucaccgcugacacacuggaacaggccauugagagagccggcaccaagcacggcaacaaaggaugggaagccgcucuguccgccaucgagauggccaaccuguucaagagccugcggugaggacuagucccuguucccagagcccacuuuuuuuucuuuuuuugaaauaaaauagccugucuuucagaucucaaaggcucuuuucagagccaccaaaaaaaaaaaaaaaaaaaaaaaaaaaaaaaaaaaaaaaaaaaaaaaaaaaaaaaaaaaaaaaaaaaaaaaaaaaaaaaaaaaaaaaaaaaaaaaaaaaaa

SEQ ID NO: 12568 - RNA, 4388 nt, Artificial Sequence
  SARS-CoV-2/Wuhan/WIV05/2019__EPI_ISL_402128 spike protein mRNA gc mod (1-1211)(A972C_R995C) LumSynth construct
aggagagucccgcagucggcguccagcggcucugcuuguucgugugugugucguugcaggccuuauucaagcuuaccauguucguguuucuggugcugcugccccugguguccagccagugugugaaccugaccaccagaacacagcugccuccagccuacaccaacagcuucaccagaggcguguacuaccccgacaagguguucagauccagcgugcugcacucuacccaggaccuguuccugccuuucuucagcaacgugaccugguuccacgccauccacguguccggcaccaauggcaccaagagauucgacaaccccgugcugcccuucaacgacgggguguacuuugccagcaccgagaaguccaacaucaucagaggcuggaucuucggcaccacacuggacagcaagacccagagccugcugaucgugaacaacgccaccaacguggucaucaaagugugcgaguuccaguucugcaacgaccccuuccugggcgucuacuaccacaagaacaacaagagcuggauggaaagcgaguuccggguguacagcagcgccaacaacugcaccuucgaguacgugucccagccuuuccugauggaccuggaaggcaagcagggcaacuucaagaaccugcgcgaguucguguucaagaacaucgacggcuacuucaaaaucuacagcaagcacaccccuaucaaccucgugcgggaucugccucagggcuucucugcucuggaaccccugguggaucugcccaucggcaucaacaucacccgguuucagacacugcuggcccugcacagaagcuaccugacaccuggcgauagcagcagcggauggacagcuggugccgccgcuuacuaugugggcuaccugcagccuagaaccuuccugcugaaguacaacgagaacggcaccaucaccgacgccguggauugugcucuggauccucugagcgagacaaagugcacccugaaguccuucaccguggaaaagggcaucuaccagaccagcaacuuccgggugcagcccaccgaauccaucgugcgguuccccaauaucaccaaucugugccccuucggcgagguguucaaugccaccagauucgccucuguguacgccuggaaccggaagcggaucagcaauugcguggccgacuacuccgugcuguacaacuccgccagcuucagcaccuucaagugcuacggcguguccccuaccaagcugaacgaccugugcuucacaaacguguacgccgacagcuucgugauccggggagaugaagugcggcagauugccccuggacagacaggcaagaucgccgacuacaacuacaagcugcccgacgacuucaccggcugugugauugccuggaacagcaacaaccuggacuccaaagucggcggcaacuacaauuaccuguaccggcuguuccggaaguccaaucugaagcccuucgagcgggacaucagcaccgaaaucuaucaggccggcagcaccccuugcaacggcguggaaggcuucaacugcuacuucccacugcaguccuacggcuuucagcccacaaauggcgugggcuaucagcccuacagagugguggugcugagcuucgaacugcugcaugcuccugccacagugugcggcccuaagaaaagcaccaaucucgugaagaacaaaugcgugaacuucaacuucaacggccugaccggcaccggcgugcugacagagagcaacaagaaguuccugccauuccagcaguuuggccgggauaucgccgauaccacagacgccguuagagauccccagacacuggaaauccuggacaucaccccaugcagcuucggcggagugucugugaucaccccuggcaccaacaccagcaaucagguggcagugcuguaccaggacgugaacuguaccgaagugcccguggccauucacgccgaucagcugacaccuacauggcggguguacuccaccggcagcaauguguuucagaccagagccggcugucugaucggagccgagcacgugaacaauagcuacgagugcgacauccccaucggcgcuggcaucugugccagcuaccagacacagacaaacagccccagacgggcuagaagcguggccagccagagcaucauugccuacacaaugucucugggcgccgagaacagcguggccuacuccaacaacucuaucgcuauccccaccaacuucaccaucagcgugaccaccgagauccugccuguguccaugaccaagaccagcguggacugcaccauguacaucugcggcgauuccaccgagugcuccaaccugcugcugcaguacggcagcuucugcacccagcugaauagagcccugacagggaucgccguggaacaggacaagaacacccaagagguguucgcccaagugaagcaaaucuacaagaccccuccuaucaaggacuucggcggcuucaauuucagccagauucugcccgauccuagcaagcccagcaagcggagcuucaucgaggaccugcuguucaacaaagugacacuggccgacgccggcuucaucaagcaguauggcgauugucugggcgacauugccgccagggaucugauuugcgcccagaaguuuaacggacugacagugcugccuccucugcugaccgaugagaugaucgcccaguacacaucugcccugcuggccggcacaaucacaagcggcuggacauuuggagcuggcgccgcucugcagauccccuuugcuaugcagauggccuaccgguucaacggcaucggagugacccagaaugugcuguacgagaaccagaagcugaucgccaaccaguucaacagcgccaucggcaagauccaggacagccugagcagcacagcaagcgcccugggaaagcugcaggacguggucaaccagaaugcccaggcacugaacacccuggucaagcagcuguccuccaacuucggcugcaucagcucugugcugaacgauauccugagcagacuggacaaggucgaggccgaggugcagaucgacugucugaucacaggcagacugcagagccuccagacauacgugacccagcagcugaucagagccgccgagauuagagccucugccaaucuggccgccaccaagaugucugagugugugcugggccagagcaagagaguggacuuuugcggcaagggcuaccaccugaugagcuucccucagucugccccucacggcgugguguuucugcacgugacauaugugcccgcucaagagaagaauuucaccaccgcuccagccaucugccacgacggcaaagcccacuuuccuagagaaggcguguucguguccaacggcacccauugguucgugacacagcggaacuucuacgagccccagaucaucaccaccgacaacaccuucgugucuggcaacugcgacguugugaucggcauugugaacaauaccguguacgacccucugcagcccgagcuggacagcuucaaagaggaacuggacaaguacuuuaagaaccacacaagccccgacguggaccugggcgauaucagcggaaucaaugccagcgucgugaacauccagaaagagaucgaccggcugaacgagguggccaagaaucugaacgagagccugaucgaccugcaagaacuggggaaguacgagcaguacaucaagggcggaggaucuggcggaggacagaucuacgagggcaagcugacagccgagggccugagauuuggaaucguggccagccgguucaaucacgcccugguggauagacugguggaaggcgccaucgaugccauugucagacacggcggcagagaagaggacaucacccucguuagagugcccggcucuugggagauuccuguggcugcuggcgagcuggcccggaaagaagauaucgacgccguuaucgccaucggcgugcugaucagaggcgccacaccucacuucgacuauaucgccagcgagguguccaaaggccuggccgaucugagccuggaacugagaaagcccaucaccuucggcgugaucaccgcugacacacuggaacaggccauugagagagccggcaccaagcacggcaacaaaggaugggaagccgcucuguccgccaucgagauggccaaccuguucaagagccugcggugaggacuagucccuguucccagagcccacuuuuuuuucuuuuuuugaaauaaaauagccugucuuucagaucucaaaggcucuuuucagagccaccaaaaaaaaaaaaaaaaaaaaaaaaaaaaaaaaaaaaaaaaaaaaaaaaaaaaaaaaaaaaaaaaaaaaaaaaaaaaaaaaaaaaaaaaaaaaaaaaaaaaa

SEQ ID NO: 12569 - RNA, 4388 nt, Artificial Sequence
  SARS-CoV-2/Wuhan/WIV05/2019__EPI_ISL_402128 spike protein mRNA gc mod (1-1211)(A890C_V1040C) LumSynth construct
aggagagucccgcagucggcguccagcggcucugcuuguucgugugugugucguugcaggccuuauucaagcuuaccauguucguguuucuggugcugcugccccugguguccagccagugugugaaccugaccaccagaacacagcugccuccagccuacaccaacagcuucaccagaggcguguacuaccccgacaagguguucagauccagcgugcugcacucuacccaggaccuguuccugccuuucuucagcaacgugaccugguuccacgccauccacguguccggcaccaauggcaccaagagauucgacaaccccgugcugcccuucaacgacgggguguacuuugccagcaccgagaaguccaacaucaucagaggcuggaucuucggcaccacacuggacagcaagacccagagccugcugaucgugaacaacgccaccaacguggucaucaaagugugcgaguuccaguucugcaacgaccccuuccugggcgucuacuaccacaagaacaacaagagcuggauggaaagcgaguuccggguguacagcagcgccaacaacugcaccuucgaguacgugucccagccuuuccugauggaccuggaaggcaagcagggcaacuucaagaaccugcgcgaguucguguucaagaacaucgacggcuacuucaaaaucuacagcaagcacaccccuaucaaccucgugcgggaucugccucagggcuucucugcucuggaaccccugguggaucugcccaucggcaucaacaucacccgguuucagacacugcuggcccugcacagaagcuaccugacaccuggcgauagcagcagcggauggacagcuggugccgccgcuuacuaugugggcuaccugcagccuagaaccuuccugcugaaguacaacgagaacggcaccaucaccgacgccguggauugugcucuggauccucugagcgagacaaagugcacccugaaguccuucaccguggaaaagggcaucuaccagaccagcaacuuccgggugcagcccaccgaauccaucgugcgguuccccaauaucaccaaucugugccccuucggcgagguguucaaugccaccagauucgccucuguguacgccuggaaccggaagcggaucagcaauugcguggccgacuacuccgugcuguacaacuccgccagcuucagcaccuucaagugcuacggcguguccccuaccaagcugaacgaccugugcuucacaaacguguacgccgacagcuucgugauccggggagaugaagugcggcagauugccccuggacagacaggcaagaucgccgacuacaacuacaagcugcccgacgacuucaccggcugugugauugccuggaacagcaacaaccuggacuccaaagucggcggcaacuacaauuaccuguaccggcuguuccggaaguccaaucugaagcccuucgagcgggacaucagcaccgaaaucuaucaggccggcagcaccccuugcaacggcguggaaggcuucaacugcuacuucccacugcaguccuacggcuuucagcccacaaauggcgugggcuaucagcccuacagagugguggugcugagcuucgaacugcugcaugcuccugccacagugugcggcccuaagaaaagcaccaaucucgugaagaacaaaugcgugaacuucaacuucaacggccugaccggcaccggcgugcugacagagagcaacaagaaguuccugccauuccagcaguuuggccgggauaucgccgauaccacagacgccguuagagauccccagacacuggaaauccuggacaucaccccaugcagcuucggcggagugucugugaucaccccuggcaccaacaccagcaaucagguggcagugcuguaccaggacgugaacuguaccgaagugcccguggccauucacgccgaucagcugacaccuacauggcggguguacuccaccggcagcaauguguuucagaccagagccggcugucugaucggagccgagcacgugaacaauagcuacgagugcgacauccccaucggcgcuggcaucugugccagcuaccagacacagacaaacagccccagacgggcuagaagcguggccagccagagcaucauugccuacacaaugucucugggcgccgagaacagcguggccuacuccaacaacucuaucgcuauccccaccaacuucaccaucagcgugaccaccgagauccugccuguguccaugaccaagaccagcguggacugcaccauguacaucugcggcgauuccaccgagugcuccaaccugcugcugcaguacggcagcuucugcacccagcugaauagagcccugacagggaucgccguggaacaggacaagaacacccaagagguguucgcccaagugaagcaaaucuacaagaccccuccuaucaaggacuucggcggcuucaauuucagccagauucugcccgauccuagcaagcccagcaagcggagcuucaucgaggaccugcuguucaacaaagugacacuggccgacgccggcuucaucaagcaguauggcgauugucugggcgacauugccgccagggaucugauuugcgcccagaaguuuaacggacugacagugcugccuccucugcugaccgaugagaugaucgcccaguacacaucugcccugcuggccggcacaaucacaagcggcuggacauuuggaugcggcgccgcucugcagauccccuuugcuaugcagauggccuaccgguucaacggcaucggagugacccagaaugugcuguacgagaaccagaagcugaucgccaaccaguucaacagcgccaucggcaagauccaggacagccugagcagcacagcaagcgcccugggaaagcugcaggacguggucaaccagaaugcccaggcacugaacacccuggucaagcagcuguccuccaacuucggcgccaucagcucugugcugaacgauauccugagcagacuggacaaggucgaggccgaggugcagaucgacagacugaucacaggcagacugcagagccuccagacauacgugacccagcagcugaucagagccgccgagauuagagccucugccaaucuggccgccaccaagaugucugagugugugcugggccagagcaagagaugugacuuuugcggcaagggcuaccaccugaugagcuucccucagucugccccucacggcgugguguuucugcacgugacauaugugcccgcucaagagaagaauuucaccaccgcuccagccaucugccacgacggcaaagcccacuuuccuagagaaggcguguucguguccaacggcacccauugguucgugacacagcggaacuucuacgagccccagaucaucaccaccgacaacaccuucgugucuggcaacugcgacguugugaucggcauugugaacaauaccguguacgacccucugcagcccgagcuggacagcuucaaagaggaacuggacaaguacuuuaagaaccacacaagccccgacguggaccugggcgauaucagcggaaucaaugccagcgucgugaacauccagaaagagaucgaccggcugaacgagguggccaagaaucugaacgagagccugaucgaccugcaagaacuggggaaguacgagcaguacaucaagggcggaggaucuggcggaggacagaucuacgagggcaagcugacagccgagggccugagauuuggaaucguggccagccgguucaaucacgcccugguggauagacugguggaaggcgccaucgaugccauugucagacacggcggcagagaagaggacaucacccucguuagagugcccggcucuugggagauuccuguggcugcuggcgagcuggcccggaaagaagauaucgacgccguuaucgccaucggcgugcugaucagaggcgccacaccucacuucgacuauaucgccagcgagguguccaaaggccuggccgaucugagccuggaacugagaaagcccaucaccuucggcgugaucaccgcugacacacuggaacaggccauugagagagccggcaccaagcacggcaacaaaggaugggaagccgcucuguccgccaucgagauggccaaccuguucaagagccugcggugaggacuagucccuguucccagagcccacuuuuuuuucuuuuuuugaaauaaaauagccugucuuucagaucucaaaggcucuuuucagagccaccaaaaaaaaaaaaaaaaaaaaaaaaaaaaaaaaaaaaaaaaaaaaaaaaaaaaaaaaaaaaaaaaaaaaaaaaaaaaaaaaaaaaaaaaaaaaaaaaaaaaa

SEQ ID NO: 12570 - RNA, 4388 nt, Artificial Sequence
  SARS-CoV-2/Wuhan/WIV05/2019__EPI_ISL_402128 spike protein mRNA gc mod (1-1211)(T874C_S1055C) LumSynth construct
aggagagucccgcagucggcguccagcggcucugcuuguucgugugugugucguugcaggccuuauucaagcuuaccauguucguguuucuggugcugcugccccugguguccagccagugugugaaccugaccaccagaacacagcugccuccagccuacaccaacagcuucaccagaggcguguacuaccccgacaagguguucagauccagcgugcugcacucuacccaggaccuguuccugccuuucuucagcaacgugaccugguuccacgccauccacguguccggcaccaauggcaccaagagauucgacaaccccgugcugcccuucaacgacgggguguacuuugccagcaccgagaaguccaacaucaucagaggcuggaucuucggcaccacacuggacagcaagacccagagccugcugaucgugaacaacgccaccaacguggucaucaaagugugcgaguuccaguucugcaacgaccccuuccugggcgucuacuaccacaagaacaacaagagcuggauggaaagcgaguuccggguguacagcagcgccaacaacugcaccuucgaguacgugucccagccuuuccugauggaccuggaaggcaagcagggcaacuucaagaaccugcgcgaguucguguucaagaacaucgacggcuacuucaaaaucuacagcaagcacaccccuaucaaccucgugcgggaucugccucagggcuucucugcucuggaaccccugguggaucugcccaucggcaucaacaucacccgguuucagacacugcuggcccugcacagaagcuaccugacaccuggcgauagcagcagcggauggacagcuggugccgccgcuuacuaugugggcuaccugcagccuagaaccuuccugcugaaguacaacgagaacggcaccaucaccgacgccguggauugugcucuggauccucugagcgagacaaagugcacccugaaguccuucaccguggaaaagggcaucuaccagaccagcaacuuccgggugcagcccaccgaauccaucgugcgguuccccaauaucaccaaucugugccccuucggcgagguguucaaugccaccagauucgccucuguguacgccuggaaccggaagcggaucagcaauugcguggccgacuacuccgugcuguacaacuccgccagcuucagcaccuucaagugcuacggcguguccccuaccaagcugaacgaccugugcuucacaaacguguacgccgacagcuucgugauccggggagaugaagugcggcagauugccccuggacagacaggcaagaucgccgacuacaacuacaagcugcccgacgacuucaccggcugugugauugccuggaacagcaacaaccuggacuccaaagucggcggcaacuacaauuaccuguaccggcuguuccggaaguccaaucugaagcccuucgagcgggacaucagcaccgaaaucuaucaggccggcagcaccccuugcaacggcguggaaggcuucaacugcuacuucccacugcaguccuacggcuuucagcccacaaauggcgugggcuaucagcccuacagagugguggugcugagcuucgaacugcugcaugcuccugccacagugugcggcccuaagaaaagcaccaaucucgugaagaacaaaugcgugaacuucaacuucaacggccugaccggcaccggcgugcugacagagagcaacaagaaguuccugccauuccagcaguuuggccgggauaucgccgauaccacagacgccguuagagauccccagacacuggaaauccuggacaucaccccaugcagcuucggcggagugucugugaucaccccuggcaccaacaccagcaaucagguggcagugcuguaccaggacgugaacuguaccgaagugcccguggccauucacgccgaucagcugacaccuacauggcggguguacuccaccggcagcaauguguuucagaccagagccggcugucugaucggagccgagcacgugaacaauagcuacgagugcgacauccccaucggcgcuggcaucugugccagcuaccagacacagacaaacagccccagacgggcuagaagcguggccagccagagcaucauugccuacacaaugucucugggcgccgagaacagcguggccuacuccaacaacucuaucgcuauccccaccaacuucaccaucagcgugaccaccgagauccugccuguguccaugaccaagaccagcguggacugcaccauguacaucugcggcgauuccaccgagugcuccaaccugcugcugcaguacggcagcuucugcacccagcugaauagagcccugacagggaucgccguggaacaggacaagaacacccaagagguguucgcccaagugaagcaaaucuacaagaccccuccuaucaaggacuucggcggcuucaauuucagccagauucugcccgauccuagcaagcccagcaagcggagcuucaucgaggaccugcuguucaacaaagugacacuggccgacgccggcuucaucaagcaguauggcgauugucugggcgacauugccgccagggaucugauuugcgcccagaaguuuaacggacugacagugcugccuccucugcugaccgaugagaugaucgcccaguacugcucugcccugcuggccggcacaaucacaagcggcuggacauuuggagcuggcgccgcucugcagauccccuuugcuaugcagauggccuaccgguucaacggcaucggagugacccagaaugugcuguacgagaaccagaagcugaucgccaaccaguucaacagcgccaucggcaagauccaggacagccugagcagcacagcaagcgcccugggaaagcugcaggacguggucaaccagaaugcccaggcacugaacacccuggucaagcagcuguccuccaacuucggcgccaucagcucugugcugaacgauauccugagcagacuggacaaggucgaggccgaggugcagaucgacagacugaucacaggcagacugcagagccuccagacauacgugacccagcagcugaucagagccgccgagauuagagccucugccaaucuggccgccaccaagaugucugagugugugcugggccagagcaagagaguggacuuuugcggcaagggcuaccaccugaugagcuucccucagugcgccccucacggcgugguguuucugcacgugacauaugugcccgcucaagagaagaauuucaccaccgcuccagccaucugccacgacggcaaagcccacuuuccuagagaaggcguguucguguccaacggcacccauugguucgugacacagcggaacuucuacgagccccagaucaucaccaccgacaacaccuucgugucuggcaacugcgacguugugaucggcauugugaacaauaccguguacgacccucugcagcccgagcuggacagcuucaaagaggaacuggacaaguacuuuaagaaccacacaagccccgacguggaccugggcgauaucagcggaaucaaugccagcgucgugaacauccagaaagagaucgaccggcugaacgagguggccaagaaucugaacgagagccugaucgaccugcaagaacuggggaaguacgagcaguacaucaagggcggaggaucuggcggaggacagaucuacgagggcaagcugacagccgagggccugagauuuggaaucguggccagccgguucaaucacgcccugguggauagacugguggaaggcgccaucgaugccauugucagacacggcggcagagaagaggacaucacccucguuagagugcccggcucuugggagauuccuguggcugcuggcgagcuggcccggaaagaagauaucgacgccguuaucgccaucggcgugcugaucagaggcgccacaccucacuucgacuauaucgccagcgagguguccaaaggccuggccgaucugagccuggaacugagaaagcccaucaccuucggcgugaucaccgcugacacacuggaacaggccauugagagagccggcaccaagcacggcaacaaaggaugggaagccgcucuguccgccaucgagauggccaaccuguucaagagccugcggugaggacuagucccuguucccagagcccacuuuuuuuucuuuuuuugaaauaaaauagccugucuuucagaucucaaaggcucuuuucagagccaccaaaaaaaaaaaaaaaaaaaaaaaaaaaaaaaaaaaaaaaaaaaaaaaaaaaaaaaaaaaaaaaaaaaaaaaaaaaaaaaaaaaaaaaaaaaaaaaaaaaaa

SEQ ID NO: 12571 - RNA, 4412 nt, Artificial Sequence
  SARS-CoV-2/Wuhan/WIV05/2019__EPI_ISL_402128 spike protein mRNA gc mod (1-1211) Ferritin construct
aggagagucccgcagucggcguccagcggcucugcuuguucgugugugugucguugcaggccuuauucaagcuuaccauguucguguuucuggugcugcugccccugguguccagccagugugugaaccugaccaccagaacacagcugccuccagccuacaccaacagcuucaccagaggcguguacuaccccgacaagguguucagauccagcgugcugcacucuacccaggaccuguuccugccuuucuucagcaacgugaccugguuccacgccauccacguguccggcaccaauggcaccaagagauucgacaaccccgugcugcccuucaacgacgggguguacuuugccagcaccgagaaguccaacaucaucagaggcuggaucuucggcaccacacuggacagcaagacccagagccugcugaucgugaacaacgccaccaacguggucaucaaagugugcgaguuccaguucugcaacgaccccuuccugggcgucuacuaccacaagaacaacaagagcuggauggaaagcgaguuccggguguacagcagcgccaacaacugcaccuucgaguacgugucccagccuuuccugauggaccuggaaggcaagcagggcaacuucaagaaccugcgcgaguucguguucaagaacaucgacggcuacuucaaaaucuacagcaagcacaccccuaucaaccucgugcgggaucugccucagggcuucucugcucuggaaccccugguggaucugcccaucggcaucaacaucacccgguuucagacacugcuggcccugcacagaagcuaccugacaccuggcgauagcagcagcggauggacagcuggugccgccgcuuacuaugugggcuaccugcagccuagaaccuuccugcugaaguacaacgagaacggcaccaucaccgacgccguggauugugcucuggauccucugagcgagacaaagugcacccugaaguccuucaccguggaaaagggcaucuaccagaccagcaacuuccgggugcagcccaccgaauccaucgugcgguuccccaauaucaccaaucugugccccuucggcgagguguucaaugccaccagauucgccucuguguacgccuggaaccggaagcggaucagcaauugcguggccgacuacuccgugcuguacaacuccgccagcuucagcaccuucaagugcuacggcguguccccuaccaagcugaacgaccugugcuucacaaacguguacgccgacagcuucgugauccggggagaugaagugcggcagauugccccuggacagacaggcaagaucgccgacuacaacuacaagcugcccgacgacuucaccggcugugugauugccuggaacagcaacaaccuggacuccaaagucggcggcaacuacaauuaccuguaccggcuguuccggaaguccaaucugaagcccuucgagcgggacaucagcaccgaaaucuaucaggccggcagcaccccuugcaacggcguggaaggcuucaacugcuacuucccacugcaguccuacggcuuucagcccacaaauggcgugggcuaucagcccuacagagugguggugcugagcuucgaacugcugcaugcuccugccacagugugcggcccuaagaaaagcaccaaucucgugaagaacaaaugcgugaacuucaacuucaacggccugaccggcaccggcgugcugacagagagcaacaagaaguuccugccauuccagcaguuuggccgggauaucgccgauaccacagacgccguuagagauccccagacacuggaaauccuggacaucaccccaugcagcuucggcggagugucugugaucaccccuggcaccaacaccagcaaucagguggcagugcuguaccaggacgugaacuguaccgaagugcccguggccauucacgccgaucagcugacaccuacauggcggguguacuccaccggcagcaauguguuucagaccagagccggcugucugaucggagccgagcacgugaacaauagcuacgagugcgacauccccaucggcgcuggcaucugugccagcuaccagacacagacaaacagccccagacgggcuagaagcguggccagccagagcaucauugccuacacaaugucucugggcgccgagaacagcguggccuacuccaacaacucuaucgcuauccccaccaacuucaccaucagcgugaccaccgagauccugccuguguccaugaccaagaccagcguggacugcaccauguacaucugcggcgauuccaccgagugcuccaaccugcugcugcaguacggcagcuucugcacccagcugaauagagcccugacagggaucgccguggaacaggacaagaacacccaagagguguucgcccaagugaagcaaaucuacaagaccccuccuaucaaggacuucggcggcuucaauuucagccagauucugcccgauccuagcaagcccagcaagcggagcuucaucgaggaccugcuguucaacaaagugacacuggccgacgccggcuucaucaagcaguauggcgauugucugggcgacauugccgccagggaucugauuugcgcccagaaguuuaacggacugacagugcugccuccucugcugaccgaugagaugaucgcccaguacacaucugcccugcuggccggcacaaucacaagcggcuggacauuuggagcuggcgccgcucugcagauccccuuugcuaugcagauggccuaccgguucaacggcaucggagugacccagaaugugcuguacgagaaccagaagcugaucgccaaccaguucaacagcgccaucggcaagauccaggacagccugagcagcacagcaagcgcccugggaaagcugcaggacguggucaaccagaaugcccaggcacugaacacccuggucaagcagcuguccuccaacuucggcgccaucagcucugugcugaacgauauccugagcagacuggacaaggucgaggccgaggugcagaucgacagacugaucacaggcagacugcagagccuccagacauacgugacccagcagcugaucagagccgccgagauuagagccucugccaaucuggccgccaccaagaugucugagugugugcugggccagagcaagagaguggacuuuugcggcaagggcuaccaccugaugagcuucccucagucugccccucacggcgugguguuucugcacgugacauaugugcccgcucaagagaagaauuucaccaccgcuccagccaucugccacgacggcaaagcccacuuuccuagagaaggcguguucguguccaacggcacccauugguucgugacacagcggaacuucuacgagccccagaucaucaccaccgacaacaccuucgugucuggcaacugcgacguugugaucggcauugugaacaauaccguguacgacccucugcagcccgagcuggacagcuucaaagaggaacuggacaaguacuuuaagaaccacacaagccccgacguggaccugggcgauaucagcggaaucaaugccagcgucgugaacauccagaaagagaucgaccggcugaacgagguggccaagaaucugaacgagagccugaucgaccugcaagaacuggggaaguacgagcaguacaucaagggaggcggaggaucugacaucaucaagcugcugaacgagcaagugaacaaagagaugcagagcagcaaccuguacaugagcaugagcagcuggugcuacacccacagccuugauggcgccggacuguuccuguuugaucacgccgccgaggaauacgagcacgccaagaagcugaucaucuuccugaacgagaacaacgugcccgugcagcugaccagcauuucugccccugagcacaaguucgagggccugacacagaucuuccagaaggccuacgaacacgagcagcacaucagcgagagcaucaacaacaucguggaccacgccauuaagagcaaggaucacgccaccuucaacuuucugcagugguacguggccgaacagcacgaggaagaggugcuguucaaggacauccuggacaagaucgagcugaucggcaacgagaaccacggccuguaucuggccgaccaguacgugaagggaaucgccaagagcagaaagagcugaggacuagucccuguucccagagcccacuuuuuuuucuuuuuuugaaauaaaauagccugucuuucagaucucaaaggcucuuuucagagccaccaaaaaaaaaaaaaaaaaaaaaaaaaaaaaaaaaaaaaaaaaaaaaaaaaaaaaaaaaaaaaaaaaaaaaaaaaaaaaaaaaaaaaaaaaaaaaaaaaaaaa

SEQ ID NO: 12572 - RNA, 4412 nt, Artificial Sequence
  SARS-CoV-2/Wuhan/WIV05/2019__EPI_ISL_402128 spike protein mRNA gc mod (1-1211)(K986P_V987P) Ferritin construct
aggagagucccgcagucggcguccagcggcucugcuuguucgugugugugucguugcaggccuuauucaagcuuaccauguucguguuucuggugcugcugccccugguguccagccagugugugaaccugaccaccagaacacagcugccuccagccuacaccaacagcuucaccagaggcguguacuaccccgacaagguguucagauccagcgugcugcacucuacccaggaccuguuccugccuuucuucagcaacgugaccugguuccacgccauccacguguccggcaccaauggcaccaagagauucgacaaccccgugcugcccuucaacgacgggguguacuuugccagcaccgagaaguccaacaucaucagaggcuggaucuucggcaccacacuggacagcaagacccagagccugcugaucgugaacaacgccaccaacguggucaucaaagugugcgaguuccaguucugcaacgaccccuuccugggcgucuacuaccacaagaacaacaagagcuggauggaaagcgaguuccggguguacagcagcgccaacaacugcaccuucgaguacgugucccagccuuuccugauggaccuggaaggcaagcagggcaacuucaagaaccugcgcgaguucguguucaagaacaucgacggcuacuucaaaaucuacagcaagcacaccccuaucaaccucgugcgggaucugccucagggcuucucugcucuggaaccccugguggaucugcccaucggcaucaacaucacccgguuucagacacugcuggcccugcacagaagcuaccugacaccuggcgauagcagcagcggauggacagcuggugccgccgcuuacuaugugggcuaccugcagccuagaaccuuccugcugaaguacaacgagaacggcaccaucaccgacgccguggauugugcucuggauccucugagcgagacaaagugcacccugaaguccuucaccguggaaaagggcaucuaccagaccagcaacuuccgggugcagcccaccgaauccaucgugcgguuccccaauaucaccaaucugugccccuucggcgagguguucaaugccaccagauucgccucuguguacgccuggaaccggaagcggaucagcaauugcguggccgacuacuccgugcuguacaacuccgccagcuucagcaccuucaagugcuacggcguguccccuaccaagcugaacgaccugugcuucacaaacguguacgccgacagcuucgugauccggggagaugaagugcggcagauugccccuggacagacaggcaagaucgccgacuacaacuacaagcugcccgacgacuucaccggcugugugauugccuggaacagcaacaaccuggacuccaaagucggcggcaacuacaauuaccuguaccggcuguuccggaaguccaaucugaagcccuucgagcgggacaucagcaccgaaaucuaucaggccggcagcaccccuugcaacggcguggaaggcuucaacugcuacuucccacugcaguccuacggcuuucagcccacaaauggcgugggcuaucagcccuacagagugguggugcugagcuucgaacugcugcaugcuccugccacagugugcggcccuaagaaaagcaccaaucucgugaagaacaaaugcgugaacuucaacuucaacggccugaccggcaccggcgugcugacagagagcaacaagaaguuccugccauuccagcaguuuggccgggauaucgccgauaccacagacgccguuagagauccccagacacuggaaauccuggacaucaccccaugcagcuucggcggagugucugugaucaccccuggcaccaacaccagcaaucagguggcagugcuguaccaggacgugaacuguaccgaagugcccguggccauucacgccgaucagcugacaccuacauggcggguguacuccaccggcagcaauguguuucagaccagagccggcugucugaucggagccgagcacgugaacaauagcuacgagugcgacauccccaucggcgcuggcaucugugccagcuaccagacacagacaaacagccccagacgggcuagaagcguggccagccagagcaucauugccuacacaaugucucugggcgccgagaacagcguggccuacuccaacaacucuaucgcuauccccaccaacuucaccaucagcgugaccaccgagauccugccuguguccaugaccaagaccagcguggacugcaccauguacaucugcggcgauuccaccgagugcuccaaccugcugcugcaguacggcagcuucugcacccagcugaauagagcccugacagggaucgccguggaacaggacaagaacacccaagagguguucgcccaagugaagcaaaucuacaagaccccuccuaucaaggacuucggcggcuucaauuucagccagauucugcccgauccuagcaagcccagcaagcggagcuucaucgaggaccugcuguucaacaaagugacacuggccgacgccggcuucaucaagcaguauggcgauugucugggcgacauugccgccagggaucugauuugcgcccagaaguuuaacggacugacagugcugccuccucugcugaccgaugagaugaucgcccaguacacaucugcccugcuggccggcacaaucacaagcggcuggacauuuggagcuggcgccgcucugcagauccccuuugcuaugcagauggccuaccgguucaacggcaucggagugacccagaaugugcuguacgagaaccagaagcugaucgccaaccaguucaacagcgccaucggcaagauccaggacagccugagcagcacagcaagcgcccugggaaagcugcaggacguggucaaccagaaugcccaggcacugaacacccuggucaagcagcuguccuccaacuucggcgccaucagcucugugcugaacgauauccugagcagacuggacccuccugaggccgaggugcagaucgacagacugaucacaggcagacugcagagccuccagacauacgugacccagcagcugaucagagccgccgagauuagagccucugccaaucuggccgccaccaagaugucugagugugugcugggccagagcaagagaguggacuuuugcggcaagggcuaccaccugaugagcuucccucagucugccccucacggcgugguguuucugcacgugacauaugugcccgcucaagagaagaauuucaccaccgcuccagccaucugccacgacggcaaagcccacuuuccuagagaaggcguguucguguccaacggcacccauugguucgugacacagcggaacuucuacgagccccagaucaucaccaccgacaacaccuucgugucuggcaacugcgacguugugaucggcauugugaacaauaccguguacgacccucugcagcccgagcuggacagcuucaaagaggaacuggacaaguacuuuaagaaccacacaagccccgacguggaccugggcgauaucagcggaaucaaugccagcgucgugaacauccagaaagagaucgaccggcugaacgagguggccaagaaucugaacgagagccugaucgaccugcaagaacuggggaaguacgagcaguacaucaagggaggcggaggaucugacaucaucaagcugcugaacgagcaagugaacaaagagaugcagagcagcaaccuguacaugagcaugagcagcuggugcuacacccacagccuugauggcgccggacuguuccuguuugaucacgccgccgaggaauacgagcacgccaagaagcugaucaucuuccugaacgagaacaacgugcccgugcagcugaccagcauuucugccccugagcacaaguucgagggccugacacagaucuuccagaaggccuacgaacacgagcagcacaucagcgagagcaucaacaacaucguggaccacgccauuaagagcaaggaucacgccaccuucaacuuucugcagugguacguggccgaacagcacgaggaagaggugcuguucaaggacauccuggacaagaucgagcugaucggcaacgagaaccacggccuguaucuggccgaccaguacgugaagggaaucgccaagagcagaaagagcugaggacuagucccuguucccagagcccacuuuuuuuucuuuuuuugaaauaaaauagccugucuuucagaucucaaaggcucuuuucagagccaccaaaaaaaaaaaaaaaaaaaaaaaaaaaaaaaaaaaaaaaaaaaaaaaaaaaaaaaaaaaaaaaaaaaaaaaaaaaaaaaaaaaaaaaaaaaaaaaaaaaaa

SEQ ID NO: 12573 - RNA, 4412 nt, Artificial Sequence
  SARS-CoV-2/Wuhan/WIV05/2019__EPI_ISL_402128 spike protein mRNA gc mod (1-1211)(K986P_V987P_T887WN_A1020W) Ferritin construct
aggagagucccgcagucggcguccagcggcucugcuuguucgugugugugucguugcaggccuuauucaagcuuaccauguucguguuucuggugcugcugccccugguguccagccagugugugaaccugaccaccagaacacagcugccuccagccuacaccaacagcuucaccagaggcguguacuaccccgacaagguguucagauccagcgugcugcacucuacccaggaccuguuccugccuuucuucagcaacgugaccugguuccacgccauccacguguccggcaccaauggcaccaagagauucgacaaccccgugcugcccuucaacgacgggguguacuuugccagcaccgagaaguccaacaucaucagaggcuggaucuucggcaccacacuggacagcaagacccagagccugcugaucgugaacaacgccaccaacguggucaucaaagugugcgaguuccaguucugcaacgaccccuuccugggcgucuacuaccacaagaacaacaagagcuggauggaaagcgaguuccggguguacagcagcgccaacaacugcaccuucgaguacgugucccagccuuuccugauggaccuggaaggcaagcagggcaacuucaagaaccugcgcgaguucguguucaagaacaucgacggcuacuucaaaaucuacagcaagcacaccccuaucaaccucgugcgggaucugccucagggcuucucugcucuggaaccccugguggaucugcccaucggcaucaacaucacccgguuucagacacugcuggcccugcacagaagcuaccugacaccuggcgauagcagcagcggauggacagcuggugccgccgcuuacuaugugggcuaccugcagccuagaaccuuccugcugaaguacaacgagaacggcaccaucaccgacgccguggauugugcucuggauccucugagcgagacaaagugcacccugaaguccuucaccguggaaaagggcaucuaccagaccagcaacuuccgggugcagcccaccgaauccaucgugcgguuccccaauaucaccaaucugugccccuucggcgagguguucaaugccaccagauucgccucuguguacgccuggaaccggaagcggaucagcaauugcguggccgacuacuccgugcuguacaacuccgccagcuucagcaccuucaagugcuacggcguguccccuaccaagcugaacgaccugugcuucacaaacguguacgccgacagcuucgugauccggggagaugaagugcggcagauugccccuggacagacaggcaagaucgccgacuacaacuacaagcugcccgacgacuucaccggcugugugauugccuggaacagcaacaaccuggacuccaaagucggcggcaacuacaauuaccuguaccggcuguuccggaaguccaaucugaagcccuucgagcgggacaucagcaccgaaaucuaucaggccggcagcaccccuugcaacggcguggaaggcuucaacugcuacuucccacugcaguccuacggcuuucagcccacaaauggcgugggcuaucagcccuacagagugguggugcugagcuucgaacugcugcaugcuccugccacagugugcggcccuaagaaaagcaccaaucucgugaagaacaaaugcgugaacuucaacuucaacggccugaccggcaccggcgugcugacagagagcaacaagaaguuccugccauuccagcaguuuggccgggauaucgccgauaccacagacgccguuagagauccccagacacuggaaauccuggacaucaccccaugcagcuucggcggagugucugugaucaccccuggcaccaacaccagcaaucagguggcagugcuguaccaggacgugaacuguaccgaagugcccguggccauucacgccgaucagcugacaccuacauggcggguguacuccaccggcagcaauguguuucagaccagagccggcugucugaucggagccgagcacgugaacaauagcuacgagugcgacauccccaucggcgcuggcaucugugccagcuaccagacacagacaaacagccccagacgggcuagaagcguggccagccagagcaucauugccuacacaaugucucugggcgccgagaacagcguggccuacuccaacaacucuaucgcuauccccaccaacuucaccaucagcgugaccaccgagauccugccuguguccaugaccaagaccagcguggacugcaccauguacaucugcggcgauuccaccgagugcuccaaccugcugcugcaguacggcagcuucugcacccagcugaauagagcccugacagggaucgccguggaacaggacaagaacacccaagagguguucgcccaagugaagcaaaucuacaagaccccuccuaucaaggacuucggcggcuucaauuucagccagauucugcccgauccuagcaagcccagcaagcggagcuucaucgaggaccugcuguucaacaaagugacacuggccgacgccggcuucaucaagcaguauggcgauugucugggcgacauugccgccagggaucugauuugcgcccagaaguuuaacggacugacagugcugccuccucugcugaccgaugagaugaucgcccaguacacaucugcccugcuggccggcacaaucacaagcggcuggugguuuggagcuggcgccgcucugcagauccccuuugcuaugcagauggccuaccgguucaacggcaucggagugacccagaaugugcuguacgagaaccagaagcugaucgccaaccaguucaacagcgccaucggcaagauccaggacagccugagcagcacagcaagcgcccugggaaagcugcaggacguggucaaccagaaugcccaggcacugaacacccuggucaagcagcuguccuccaacuucggcgccaucagcucugugcugaacgauauccugagcagacuggacccuccugaggccgaggugcagaucgacagacugaucacaggcagacugcagagccuccagacauacgugacccagcagcugaucagagccgccgagauuagauggucugccaaucuggccgccaccaagaugucugagugugugcugggccagagcaagagaguggacuuuugcggcaagggcuaccaccugaugagcuucccucagucugccccucacggcgugguguuucugcacgugacauaugugcccgcucaagagaagaauuucaccaccgcuccagccaucugccacgacggcaaagcccacuuuccuagagaaggcguguucguguccaacggcacccauugguucgugacacagcggaacuucuacgagccccagaucaucaccaccgacaacaccuucgugucuggcaacugcgacguugugaucggcauugugaacaauaccguguacgacccucugcagcccgagcuggacagcuucaaagaggaacuggacaaguacuuuaagaaccacacaagccccgacguggaccugggcgauaucagcggaaucaaugccagcgucgugaacauccagaaagagaucgaccggcugaacgagguggccaagaaucugaacgagagccugaucgaccugcaagaacuggggaaguacgagcaguacaucaagggaggcggaggaucugacaucaucaagcugcugaacgagcaagugaacaaagagaugcagagcagcaaccuguacaugagcaugagcagcuggugcuacacccacagccuugauggcgccggacuguuccuguuugaucacgccgccgaggaauacgagcacgccaagaagcugaucaucuuccugaacgagaacaacgugcccgugcagcugaccagcauuucugccccugagcacaaguucgagggccugacacagaucuuccagaaggccuacgaacacgagcagcacaucagcgagagcaucaacaacaucguggaccacgccauuaagagcaaggaucacgccaccuucaacuuucugcagugguacguggccgaacagcacgaggaagaggugcuguucaaggacauccuggacaagaucgagcugaucggcaacgagaaccacggccuguaucuggccgaccaguacgugaagggaaucgccaagagcagaaagagcugaggacuagucccuguucccagagcccacuuuuuuuucuuuuuuugaaauaaaauagccugucuuucagaucucaaaggcucuuuucagagccaccaaaaaaaaaaaaaaaaaaaaaaaaaaaaaaaaaaaaaaaaaaaaaaaaaaaaaaaaaaaaaaaaaaaaaaaaaaaaaaaaaaaaaaaaaaaaaaaaaaaaa

SEQ ID NO: 12574 - RNA, 4412 nt, Artificial Sequence
  SARS-CoV-2/Wuhan/WIV05/2019__EPI_ISL_402128 spike protein mRNA gc mod (1-1211)(K986P_V987P_P1069F) Ferritin construct
aggagagucccgcagucggcguccagcggcucugcuuguucgugugugugucguugcaggccuuauucaagcuuaccauguucguguuucuggugcugcugccccugguguccagccagugugugaaccugaccaccagaacacagcugccuccagccuacaccaacagcuucaccagaggcguguacuaccccgacaagguguucagauccagcgugcugcacucuacccaggaccuguuccugccuuucuucagcaacgugaccugguuccacgccauccacguguccggcaccaauggcaccaagagauucgacaaccccgugcugcccuucaacgacgggguguacuuugccagcaccgagaaguccaacaucaucagaggcuggaucuucggcaccacacuggacagcaagacccagagccugcugaucgugaacaacgccaccaacguggucaucaaagugugcgaguuccaguucugcaacgaccccuuccugggcgucuacuaccacaagaacaacaagagcuggauggaaagcgaguuccggguguacagcagcgccaacaacugcaccuucgaguacgugucccagccuuuccugauggaccuggaaggcaagcagggcaacuucaagaaccugcgcgaguucguguucaagaacaucgacggcuacuucaaaaucuacagcaagcacaccccuaucaaccucgugcgggaucugccucagggcuucucugcucuggaaccccugguggaucugcccaucggcaucaacaucacccgguuucagacacugcuggcccugcacagaagcuaccugacaccuggcgauagcagcagcggauggacagcuggugccgccgcuuacuaugugggcuaccugcagccuagaaccuuccugcugaaguacaacgagaacggcaccaucaccgacgccguggauugugcucuggauccucugagcgagacaaagugcacccugaaguccuucaccguggaaaagggcaucuaccagaccagcaacuuccgggugcagcccaccgaauccaucgugcgguuccccaauaucaccaaucugugccccuucggcgagguguucaaugccaccagauucgccucuguguacgccuggaaccggaagcggaucagcaauugcguggccgacuacuccgugcuguacaacuccgccagcuucagcaccuucaagugcuacggcguguccccuaccaagcugaacgaccugugcuucacaaacguguacgccgacagcuucgugauccggggagaugaagugcggcagauugccccuggacagacaggcaagaucgccgacuacaacuacaagcugcccgacgacuucaccggcugugugauugccuggaacagcaacaaccuggacuccaaagucggcggcaacuacaauuaccuguaccggcuguuccggaaguccaaucugaagcccuucgagcgggacaucagcaccgaaaucuaucaggccggcagcaccccuugcaacggcguggaaggcuucaacugcuacuucccacugcaguccuacggcuuucagcccacaaauggcgugggcuaucagcccuacagagugguggugcugagcuucgaacugcugcaugcuccugccacagugugcggcccuaagaaaagcaccaaucucgugaagaacaaaugcgugaacuucaacuucaacggccugaccggcaccggcgugcugacagagagcaacaagaaguuccugccauuccagcaguuuggccgggauaucgccgauaccacagacgccguuagagauccccagacacuggaaauccuggacaucaccccaugcagcuucggcggagugucugugaucaccccuggcaccaacaccagcaaucagguggcagugcuguaccaggacgugaacuguaccgaagugcccguggccauucacgccgaucagcugacaccuacauggcggguguacuccaccggcagcaauguguuucagaccagagccggcugucugaucggagccgagcacgugaacaauagcuacgagugcgacauccccaucggcgcuggcaucugugccagcuaccagacacagacaaacagccccagacgggcuagaagcguggccagccagagcaucauugccuacacaaugucucugggcgccgagaacagcguggccuacuccaacaacucuaucgcuauccccaccaacuucaccaucagcgugaccaccgagauccugccuguguccaugaccaagaccagcguggacugcaccauguacaucugcggcgauuccaccgagugcuccaaccugcugcugcaguacggcagcuucugcacccagcugaauagagcccugacagggaucgccguggaacaggacaagaacacccaagagguguucgcccaagugaagcaaaucuacaagaccccuccuaucaaggacuucggcggcuucaauuucagccagauucugcccgauccuagcaagcccagcaagcggagcuucaucgaggaccugcuguucaacaaagugacacuggccgacgccggcuucaucaagcaguauggcgauugucugggcgacauugccgccagggaucugauuugcgcccagaaguuuaacggacugacagugcugccuccucugcugaccgaugagaugaucgcccaguacacaucugcccugcuggccggcacaaucacaagcggcuggacauuuggagcuggcgccgcucugcagauccccuuugcuaugcagauggccuaccgguucaacggcaucggagugacccagaaugugcuguacgagaaccagaagcugaucgccaaccaguucaacagcgccaucggcaagauccaggacagccugagcagcacagcaagcgcccugggaaagcugcaggacguggucaaccagaaugcccaggcacugaacacccuggucaagcagcuguccuccaacuucggcgccaucagcucugugcugaacgauauccugagcagacuggacccuccugaggccgaggugcagaucgacagacugaucacaggcagacugcagagccuccagacauacgugacccagcagcugaucagagccgccgagauuagagccucugccaaucuggccgccaccaagaugucugagugugugcugggccagagcaagagaguggacuuuugcggcaagggcuaccaccugaugagcuucccucagucugccccucacggcgugguguuucugcacgugacauauguguucgcucaagagaagaauuucaccaccgcuccagccaucugccacgacggcaaagcccacuuuccuagagaaggcguguucguguccaacggcacccauugguucgugacacagcggaacuucuacgagccccagaucaucaccaccgacaacaccuucgugucuggcaacugcgacguugugaucggcauugugaacaauaccguguacgacccucugcagcccgagcuggacagcuucaaagaggaacuggacaaguacuuuaagaaccacacaagccccgacguggaccugggcgauaucagcggaaucaaugccagcgucgugaacauccagaaagagaucgaccggcugaacgagguggccaagaaucugaacgagagccugaucgaccugcaagaacuggggaaguacgagcaguacaucaagggaggcggaggaucugacaucaucaagcugcugaacgagcaagugaacaaagagaugcagagcagcaaccuguacaugagcaugagcagcuggugcuacacccacagccuugauggcgccggacuguuccuguuugaucacgccgccgaggaauacgagcacgccaagaagcugaucaucuuccugaacgagaacaacgugcccgugcagcugaccagcauuucugccccugagcacaaguucgagggccugacacagaucuuccagaaggccuacgaacacgagcagcacaucagcgagagcaucaacaacaucguggaccacgccauuaagagcaaggaucacgccaccuucaacuuucugcagugguacguggccgaacagcacgaggaagaggugcuguucaaggacauccuggacaagaucgagcugaucggcaacgagaaccacggccuguaucuggccgaccaguacgugaagggaaucgccaagagcagaaagagcugaggacuagucccuguucccagagcccacuuuuuuuucuuuuuuugaaauaaaauagccugucuuucagaucucaaaggcucuuuucagagccaccaaaaaaaaaaaaaaaaaaaaaaaaaaaaaaaaaaaaaaaaaaaaaaaaaaaaaaaaaaaaaaaaaaaaaaaaaaaaaaaaaaaaaaaaaaaaaaaaaaaaa

SEQ ID NO: 12575 - RNA, 4412 nt, Artificial Sequence
  SARS-CoV-2/Wuhan/WIV05/2019__EPI_ISL_402128 spike protein mRNA gc mod (1-1211)(K986P_V987P_ H1048Q_H1064N_ H1083N_H1101N) Ferritin construct
aggagagucccgcagucggcguccagcggcucugcuuguucgugugugugucguugcaggccuuauucaagcuuaccauguucguguuucuggugcugcugccccugguguccagccagugugugaaccugaccaccagaacacagcugccuccagccuacaccaacagcuucaccagaggcguguacuaccccgacaagguguucagauccagcgugcugcacucuacccaggaccuguuccugccuuucuucagcaacgugaccugguuccacgccauccacguguccggcaccaauggcaccaagagauucgacaaccccgugcugcccuucaacgacgggguguacuuugccagcaccgagaaguccaacaucaucagaggcuggaucuucggcaccacacuggacagcaagacccagagccugcugaucgugaacaacgccaccaacguggucaucaaagugugcgaguuccaguucugcaacgaccccuuccugggcgucuacuaccacaagaacaacaagagcuggauggaaagcgaguuccggguguacagcagcgccaacaacugcaccuucgaguacgugucccagccuuuccugauggaccuggaaggcaagcagggcaacuucaagaaccugcgcgaguucguguucaagaacaucgacggcuacuucaaaaucuacagcaagcacaccccuaucaaccucgugcgggaucugccucagggcuucucugcucuggaaccccugguggaucugcccaucggcaucaacaucacccgguuucagacacugcuggcccugcacagaagcuaccugacaccuggcgauagcagcagcggauggacagcuggugccgccgcuuacuaugugggcuaccugcagccuagaaccuuccugcugaaguacaacgagaacggcaccaucaccgacgccguggauugugcucuggauccucugagcgagacaaagugcacccugaaguccuucaccguggaaaagggcaucuaccagaccagcaacuuccgggugcagcccaccgaauccaucgugcgguuccccaauaucaccaaucugugccccuucggcgagguguucaaugccaccagauucgccucuguguacgccuggaaccggaagcggaucagcaauugcguggccgacuacuccgugcuguacaacuccgccagcuucagcaccuucaagugcuacggcguguccccuaccaagcugaacgaccugugcuucacaaacguguacgccgacagcuucgugauccggggagaugaagugcggcagauugccccuggacagacaggcaagaucgccgacuacaacuacaagcugcccgacgacuucaccggcugugugauugccuggaacagcaacaaccuggacuccaaagucggcggcaacuacaauuaccuguaccggcuguuccggaaguccaaucugaagcccuucgagcgggacaucagcaccgaaaucuaucaggccggcagcaccccuugcaacggcguggaaggcuucaacugcuacuucccacugcaguccuacggcuuucagcccacaaauggcgugggcuaucagcccuacagagugguggugcugagcuucgaacugcugcaugcuccugccacagugugcggcccuaagaaaagcaccaaucucgugaagaacaaaugcgugaacuucaacuucaacggccugaccggcaccggcgugcugacagagagcaacaagaaguuccugccauuccagcaguuuggccgggauaucgccgauaccacagacgccguuagagauccccagacacuggaaauccuggacaucaccccaugcagcuucggcggagugucugugaucaccccuggcaccaacaccagcaaucagguggcagugcuguaccaggacgugaacuguaccgaagugcccguggccauucacgccgaucagcugacaccuacauggcggguguacuccaccggcagcaauguguuucagaccagagccggcugucugaucggagccgagcacgugaacaauagcuacgagugcgacauccccaucggcgcuggcaucugugccagcuaccagacacagacaaacagccccagacgggcuagaagcguggccagccagagcaucauugccuacacaaugucucugggcgccgagaacagcguggccuacuccaacaacucuaucgcuauccccaccaacuucaccaucagcgugaccaccgagauccugccuguguccaugaccaagaccagcguggacugcaccauguacaucugcggcgauuccaccgagugcuccaaccugcugcugcaguacggcagcuucugcacccagcugaauagagcccugacagggaucgccguggaacaggacaagaacacccaagagguguucgcccaagugaagcaaaucuacaagaccccuccuaucaaggacuucggcggcuucaauuucagccagauucugcccgauccuagcaagcccagcaagcggagcuucaucgaggaccugcuguucaacaaagugacacuggccgacgccggcuucaucaagcaguauggcgauugucugggcgacauugccgccagggaucugauuugcgcccagaaguuuaacggacugacagugcugccuccucugcugaccgaugagaugaucgcccaguacacaucugcccugcuggccggcacaaucacaagcggcuggacauuuggagcuggcgccgcucugcagauccccuuugcuaugcagauggccuaccgguucaacggcaucggagugacccagaaugugcuguacgagaaccagaagcugaucgccaaccaguucaacagcgccaucggcaagauccaggacagccugagcagcacagcaagcgcccugggaaagcugcaggacguggucaaccagaaugcccaggcacugaacacccuggucaagcagcuguccuccaacuucggcgccaucagcucugugcugaacgauauccugagcagacuggacccuccugaggccgaggugcagaucgacagacugaucacaggcagacugcagagccuccagacauacgugacccagcagcugaucagagccgccgagauuagagccucugccaaucuggccgccaccaagaugucugagugugugcugggccagagcaagagaguggacuuuugcggcaagggcuaccagcugaugagcuucccucagucugccccucacggcgugguguuucugaacgugacauaugugcccgcucaagagaagaauuucaccaccgcuccagccaucugcaacgacggcaaagcccacuuuccuagagaaggcguguucguguccaacggcaccaacugguucgugacacagcggaacuucuacgagccccagaucaucaccaccgacaacaccuucgugucuggcaacugcgacguugugaucggcauugugaacaauaccguguacgacccucugcagcccgagcuggacagcuucaaagaggaacuggacaaguacuuuaagaaccacacaagccccgacguggaccugggcgauaucagcggaaucaaugccagcgucgugaacauccagaaagagaucgaccggcugaacgagguggccaagaaucugaacgagagccugaucgaccugcaagaacuggggaaguacgagcaguacaucaagggaggcggaggaucugacaucaucaagcugcugaacgagcaagugaacaaagagaugcagagcagcaaccuguacaugagcaugagcagcuggugcuacacccacagccuugauggcgccggacuguuccuguuugaucacgccgccgaggaauacgagcacgccaagaagcugaucaucuuccugaacgagaacaacgugcccgugcagcugaccagcauuucugccccugagcacaaguucgagggccugacacagaucuuccagaaggccuacgaacacgagcagcacaucagcgagagcaucaacaacaucguggaccacgccauuaagagcaaggaucacgccaccuucaacuuucugcagugguacguggccgaacagcacgaggaagaggugcuguucaaggacauccuggacaagaucgagcugaucggcaacgagaaccacggccuguaucuggccgaccaguacgugaagggaaucgccaagagcagaaagagcugaggacuagucccuguucccagagcccacuuuuuuuucuuuuuuugaaauaaaauagccugucuuucagaucucaaaggcucuuuucagagccaccaaaaaaaaaaaaaaaaaaaaaaaaaaaaaaaaaaaaaaaaaaaaaaaaaaaaaaaaaaaaaaaaaaaaaaaaaaaaaaaaaaaaaaaaaaaaaaaaaaaaa

SEQ ID NO: 12576 - RNA, 4412 nt, Artificial Sequence
  SARS-CoV-2/Wuhan/WIV05/2019__EPI_ISL_402128 spike protein mRNA gc mod (1-1211)(I712C_T1077C) Ferritin construct
aggagagucccgcagucggcguccagcggcucugcuuguucgugugugugucguugcaggccuuauucaagcuuaccauguucguguuucuggugcugcugccccugguguccagccagugugugaaccugaccaccagaacacagcugccuccagccuacaccaacagcuucaccagaggcguguacuaccccgacaagguguucagauccagcgugcugcacucuacccaggaccuguuccugccuuucuucagcaacgugaccugguuccacgccauccacguguccggcaccaauggcaccaagagauucgacaaccccgugcugcccuucaacgacgggguguacuuugccagcaccgagaaguccaacaucaucagaggcuggaucuucggcaccacacuggacagcaagacccagagccugcugaucgugaacaacgccaccaacguggucaucaaagugugcgaguuccaguucugcaacgaccccuuccugggcgucuacuaccacaagaacaacaagagcuggauggaaagcgaguuccggguguacagcagcgccaacaacugcaccuucgaguacgugucccagccuuuccugauggaccuggaaggcaagcagggcaacuucaagaaccugcgcgaguucguguucaagaacaucgacggcuacuucaaaaucuacagcaagcacaccccuaucaaccucgugcgggaucugccucagggcuucucugcucuggaaccccugguggaucugcccaucggcaucaacaucacccgguuucagacacugcuggcccugcacagaagcuaccugacaccuggcgauagcagcagcggauggacagcuggugccgccgcuuacuaugugggcuaccugcagccuagaaccuuccugcugaaguacaacgagaacggcaccaucaccgacgccguggauugugcucuggauccucugagcgagacaaagugcacccugaaguccuucaccguggaaaagggcaucuaccagaccagcaacuuccgggugcagcccaccgaauccaucgugcgguuccccaauaucaccaaucugugccccuucggcgagguguucaaugccaccagauucgccucuguguacgccuggaaccggaagcggaucagcaauugcguggccgacuacuccgugcuguacaacuccgccagcuucagcaccuucaagugcuacggcguguccccuaccaagcugaacgaccugugcuucacaaacguguacgccgacagcuucgugauccggggagaugaagugcggcagauugccccuggacagacaggcaagaucgccgacuacaacuacaagcugcccgacgacuucaccggcugugugauugccuggaacagcaacaaccuggacuccaaagucggcggcaacuacaauuaccuguaccggcuguuccggaaguccaaucugaagcccuucgagcgggacaucagcaccgaaaucuaucaggccggcagcaccccuugcaacggcguggaaggcuucaacugcuacuucccacugcaguccuacggcuuucagcccacaaauggcgugggcuaucagcccuacagagugguggugcugagcuucgaacugcugcaugcuccugccacagugugcggcccuaagaaaagcaccaaucucgugaagaacaaaugcgugaacuucaacuucaacggccugaccggcaccggcgugcugacagagagcaacaagaaguuccugccauuccagcaguuuggccgggauaucgccgauaccacagacgccguuagagauccccagacacuggaaauccuggacaucaccccaugcagcuucggcggagugucugugaucaccccuggcaccaacaccagcaaucagguggcagugcuguaccaggacgugaacuguaccgaagugcccguggccauucacgccgaucagcugacaccuacauggcggguguacuccaccggcagcaauguguuucagaccagagccggcugucugaucggagccgagcacgugaacaauagcuacgagugcgacauccccaucggcgcuggcaucugugccagcuaccagacacagacaaacagccccagacgggcuagaagcguggccagccagagcaucauugccuacacaaugucucugggcgccgagaacagcguggccuacuccaacaacucuugcgcuauccccaccaacuucaccaucagcgugaccaccgagauccugccuguguccaugaccaagaccagcguggacugcaccauguacaucugcggcgauuccaccgagugcuccaaccugcugcugcaguacggcagcuucugcacccagcugaauagagcccugacagggaucgccguggaacaggacaagaacacccaagagguguucgcccaagugaagcaaaucuacaagaccccuccuaucaaggacuucggcggcuucaauuucagccagauucugcccgauccuagcaagcccagcaagcggagcuucaucgaggaccugcuguucaacaaagugacacuggccgacgccggcuucaucaagcaguauggcgauugucugggcgacauugccgccagggaucugauuugcgcccagaaguuuaacggacugacagugcugccuccucugcugaccgaugagaugaucgcccaguacacaucugcccugcuggccggcacaaucacaagcggcuggacauuuggagcuggcgccgcucugcagauccccuuugcuaugcagauggccuaccgguucaacggcaucggagugacccagaaugugcuguacgagaaccagaagcugaucgccaaccaguucaacagcgccaucggcaagauccaggacagccugagcagcacagcaagcgcccugggaaagcugcaggacguggucaaccagaaugcccaggcacugaacacccuggucaagcagcuguccuccaacuucggcgccaucagcucugugcugaacgauauccugagcagacuggacaaggucgaggccgaggugcagaucgacagacugaucacaggcagacugcagagccuccagacauacgugacccagcagcugaucagagccgccgagauuagagccucugccaaucuggccgccaccaagaugucugagugugugcugggccagagcaagagaguggacuuuugcggcaagggcuaccaccugaugagcuucccucagucugccccucacggcgugguguuucugcacgugacauaugugcccgcucaagagaagaauuucaccugugcuccagccaucugccacgacggcaaagcccacuuuccuagagaaggcguguucguguccaacggcacccauugguucgugacacagcggaacuucuacgagccccagaucaucaccaccgacaacaccuucgugucuggcaacugcgacguugugaucggcauugugaacaauaccguguacgacccucugcagcccgagcuggacagcuucaaagaggaacuggacaaguacuuuaagaaccacacaagccccgacguggaccugggcgauaucagcggaaucaaugccagcgucgugaacauccagaaagagaucgaccggcugaacgagguggccaagaaucugaacgagagccugaucgaccugcaagaacuggggaaguacgagcaguacaucaagggaggcggaggaucugacaucaucaagcugcugaacgagcaagugaacaaagagaugcagagcagcaaccuguacaugagcaugagcagcuggugcuacacccacagccuugauggcgccggacuguuccuguuugaucacgccgccgaggaauacgagcacgccaagaagcugaucaucuuccugaacgagaacaacgugcccgugcagcugaccagcauuucugccccugagcacaaguucgagggccugacacagaucuuccagaaggccuacgaacacgagcagcacaucagcgagagcaucaacaacaucguggaccacgccauuaagagcaaggaucacgccaccuucaacuuucugcagugguacguggccgaacagcacgaggaagaggugcuguucaaggacauccuggacaagaucgagcugaucggcaacgagaaccacggccuguaucuggccgaccaguacgugaagggaaucgccaagagcagaaagagcugaggacuagucccuguucccagagcccacuuuuuuuucuuuuuuugaaauaaaauagccugucuuucagaucucaaaggcucuuuucagagccaccaaaaaaaaaaaaaaaaaaaaaaaaaaaaaaaaaaaaaaaaaaaaaaaaaaaaaaaaaaaaaaaaaaaaaaaaaaaaaaaaaaaaaaaaaaaaaaaaaaaaa

SEQ ID NO: 12577 - RNA, 4412 nt, Artificial Sequence
  SARS-CoV-2/Wuhan/WIV05/2019__EPI_ISL_402128 spike protein mRNA gc mod (1-1211)(I714C_Y1110C) Ferritin construct
aggagagucccgcagucggcguccagcggcucugcuuguucgugugugugucguugcaggccuuauucaagcuuaccauguucguguuucuggugcugcugccccugguguccagccagugugugaaccugaccaccagaacacagcugccuccagccuacaccaacagcuucaccagaggcguguacuaccccgacaagguguucagauccagcgugcugcacucuacccaggaccuguuccugccuuucuucagcaacgugaccugguuccacgccauccacguguccggcaccaauggcaccaagagauucgacaaccccgugcugcccuucaacgacgggguguacuuugccagcaccgagaaguccaacaucaucagaggcuggaucuucggcaccacacuggacagcaagacccagagccugcugaucgugaacaacgccaccaacguggucaucaaagugugcgaguuccaguucugcaacgaccccuuccugggcgucuacuaccacaagaacaacaagagcuggauggaaagcgaguuccggguguacagcagcgccaacaacugcaccuucgaguacgugucccagccuuuccugauggaccuggaaggcaagcagggcaacuucaagaaccugcgcgaguucguguucaagaacaucgacggcuacuucaaaaucuacagcaagcacaccccuaucaaccucgugcgggaucugccucagggcuucucugcucuggaaccccugguggaucugcccaucggcaucaacaucacccgguuucagacacugcuggcccugcacagaagcuaccugacaccuggcgauagcagcagcggauggacagcuggugccgccgcuuacuaugugggcuaccugcagccuagaaccuuccugcugaaguacaacgagaacggcaccaucaccgacgccguggauugugcucuggauccucugagcgagacaaagugcacccugaaguccuucaccguggaaaagggcaucuaccagaccagcaacuuccgggugcagcccaccgaauccaucgugcgguuccccaauaucaccaaucugugccccuucggcgagguguucaaugccaccagauucgccucuguguacgccuggaaccggaagcggaucagcaauugcguggccgacuacuccgugcuguacaacuccgccagcuucagcaccuucaagugcuacggcguguccccuaccaagcugaacgaccugugcuucacaaacguguacgccgacagcuucgugauccggggagaugaagugcggcagauugccccuggacagacaggcaagaucgccgacuacaacuacaagcugcccgacgacuucaccggcugugugauugccuggaacagcaacaaccuggacuccaaagucggcggcaacuacaauuaccuguaccggcuguuccggaaguccaaucugaagcccuucgagcgggacaucagcaccgaaaucuaucaggccggcagcaccccuugcaacggcguggaaggcuucaacugcuacuucccacugcaguccuacggcuuucagcccacaaauggcgugggcuaucagcccuacagagugguggugcugagcuucgaacugcugcaugcuccugccacagugugcggcccuaagaaaagcaccaaucucgugaagaacaaaugcgugaacuucaacuucaacggccugaccggcaccggcgugcugacagagagcaacaagaaguuccugccauuccagcaguuuggccgggauaucgccgauaccacagacgccguuagagauccccagacacuggaaauccuggacaucaccccaugcagcuucggcggagugucugugaucaccccuggcaccaacaccagcaaucagguggcagugcuguaccaggacgugaacuguaccgaagugcccguggccauucacgccgaucagcugacaccuacauggcggguguacuccaccggcagcaauguguuucagaccagagccggcugucugaucggagccgagcacgugaacaauagcuacgagugcgacauccccaucggcgcuggcaucugugccagcuaccagacacagacaaacagccccagacgggcuagaagcguggccagccagagcaucauugccuacacaaugucucugggcgccgagaacagcguggccuacuccaacaacucuaucgcuugccccaccaacuucaccaucagcgugaccaccgagauccugccuguguccaugaccaagaccagcguggacugcaccauguacaucugcggcgauuccaccgagugcuccaaccugcugcugcaguacggcagcuucugcacccagcugaauagagcccugacagggaucgccguggaacaggacaagaacacccaagagguguucgcccaagugaagcaaaucuacaagaccccuccuaucaaggacuucggcggcuucaauuucagccagauucugcccgauccuagcaagcccagcaagcggagcuucaucgaggaccugcuguucaacaaagugacacuggccgacgccggcuucaucaagcaguauggcgauugucugggcgacauugccgccagggaucugauuugcgcccagaaguuuaacggacugacagugcugccuccucugcugaccgaugagaugaucgcccaguacacaucugcccugcuggccggcacaaucacaagcggcuggacauuuggagcuggcgccgcucugcagauccccuuugcuaugcagauggccuaccgguucaacggcaucggagugacccagaaugugcuguacgagaaccagaagcugaucgccaaccaguucaacagcgccaucggcaagauccaggacagccugagcagcacagcaagcgcccugggaaagcugcaggacguggucaaccagaaugcccaggcacugaacacccuggucaagcagcuguccuccaacuucggcgccaucagcucugugcugaacgauauccugagcagacuggacaaggucgaggccgaggugcagaucgacagacugaucacaggcagacugcagagccuccagacauacgugacccagcagcugaucagagccgccgagauuagagccucugccaaucuggccgccaccaagaugucugagugugugcugggccagagcaagagaguggacuuuugcggcaagggcuaccaccugaugagcuucccucagucugccccucacggcgugguguuucugcacgugacauaugugcccgcucaagagaagaauuucaccaccgcuccagccaucugccacgacggcaaagcccacuuuccuagagaaggcguguucguguccaacggcacccauugguucgugacacagcggaacuucugugagccccagaucaucaccaccgacaacaccuucgugucuggcaacugcgacguugugaucggcauugugaacaauaccguguacgacccucugcagcccgagcuggacagcuucaaagaggaacuggacaaguacuuuaagaaccacacaagccccgacguggaccugggcgauaucagcggaaucaaugccagcgucgugaacauccagaaagagaucgaccggcugaacgagguggccaagaaucugaacgagagccugaucgaccugcaagaacuggggaaguacgagcaguacaucaagggaggcggaggaucugacaucaucaagcugcugaacgagcaagugaacaaagagaugcagagcagcaaccuguacaugagcaugagcagcuggugcuacacccacagccuugauggcgccggacuguuccuguuugaucacgccgccgaggaauacgagcacgccaagaagcugaucaucuuccugaacgagaacaacgugcccgugcagcugaccagcauuucugccccugagcacaaguucgagggccugacacagaucuuccagaaggccuacgaacacgagcagcacaucagcgagagcaucaacaacaucguggaccacgccauuaagagcaaggaucacgccaccuucaacuuucugcagugguacguggccgaacagcacgaggaagaggugcuguucaaggacauccuggacaagaucgagcugaucggcaacgagaaccacggccuguaucuggccgaccaguacgugaagggaaucgccaagagcagaaagagcugaggacuagucccuguucccagagcccacuuuuuuuucuuuuuuugaaauaaaauagccugucuuucagaucucaaaggcucuuuucagagccaccaaaaaaaaaaaaaaaaaaaaaaaaaaaaaaaaaaaaaaaaaaaaaaaaaaaaaaaaaaaaaaaaaaaaaaaaaaaaaaaaaaaaaaaaaaaaaaaaaaaaa

SEQ ID NO: 12578 - RNA, 4412 nt, Artificial Sequence
  SARS-CoV-2/Wuhan/WIV05/2019__EPI_ISL_402128 spike protein mRNA gc mod (1-1211)(P715C_P1069C) Ferritin construct
aggagagucccgcagucggcguccagcggcucugcuuguucgugugugugucguugcaggccuuauucaagcuuaccauguucguguuucuggugcugcugccccugguguccagccagugugugaaccugaccaccagaacacagcugccuccagccuacaccaacagcuucaccagaggcguguacuaccccgacaagguguucagauccagcgugcugcacucuacccaggaccuguuccugccuuucuucagcaacgugaccugguuccacgccauccacguguccggcaccaauggcaccaagagauucgacaaccccgugcugcccuucaacgacgggguguacuuugccagcaccgagaaguccaacaucaucagaggcuggaucuucggcaccacacuggacagcaagacccagagccugcugaucgugaacaacgccaccaacguggucaucaaagugugcgaguuccaguucugcaacgaccccuuccugggcgucuacuaccacaagaacaacaagagcuggauggaaagcgaguuccggguguacagcagcgccaacaacugcaccuucgaguacgugucccagccuuuccugauggaccuggaaggcaagcagggcaacuucaagaaccugcgcgaguucguguucaagaacaucgacggcuacuucaaaaucuacagcaagcacaccccuaucaaccucgugcgggaucugccucagggcuucucugcucuggaaccccugguggaucugcccaucggcaucaacaucacccgguuucagacacugcuggcccugcacagaagcuaccugacaccuggcgauagcagcagcggauggacagcuggugccgccgcuuacuaugugggcuaccugcagccuagaaccuuccugcugaaguacaacgagaacggcaccaucaccgacgccguggauugugcucuggauccucugagcgagacaaagugcacccugaaguccuucaccguggaaaagggcaucuaccagaccagcaacuuccgggugcagcccaccgaauccaucgugcgguuccccaauaucaccaaucugugccccuucggcgagguguucaaugccaccagauucgccucuguguacgccuggaaccggaagcggaucagcaauugcguggccgacuacuccgugcuguacaacuccgccagcuucagcaccuucaagugcuacggcguguccccuaccaagcugaacgaccugugcuucacaaacguguacgccgacagcuucgugauccggggagaugaagugcggcagauugccccuggacagacaggcaagaucgccgacuacaacuacaagcugcccgacgacuucaccggcugugugauugccuggaacagcaacaaccuggacuccaaagucggcggcaacuacaauuaccuguaccggcuguuccggaaguccaaucugaagcccuucgagcgggacaucagcaccgaaaucuaucaggccggcagcaccccuugcaacggcguggaaggcuucaacugcuacuucccacugcaguccuacggcuuucagcccacaaauggcgugggcuaucagcccuacagagugguggugcugagcuucgaacugcugcaugcuccugccacagugugcggcccuaagaaaagcaccaaucucgugaagaacaaaugcgugaacuucaacuucaacggccugaccggcaccggcgugcugacagagagcaacaagaaguuccugccauuccagcaguuuggccgggauaucgccgauaccacagacgccguuagagauccccagacacuggaaauccuggacaucaccccaugcagcuucggcggagugucugugaucaccccuggcaccaacaccagcaaucagguggcagugcuguaccaggacgugaacuguaccgaagugcccguggccauucacgccgaucagcugacaccuacauggcggguguacuccaccggcagcaauguguuucagaccagagccggcugucugaucggagccgagcacgugaacaauagcuacgagugcgacauccccaucggcgcuggcaucugugccagcuaccagacacagacaaacagccccagacgggcuagaagcguggccagccagagcaucauugccuacacaaugucucugggcgccgagaacagcguggccuacuccaacaacucuaucgcuaucugcaccaacuucaccaucagcgugaccaccgagauccugccuguguccaugaccaagaccagcguggacugcaccauguacaucugcggcgauuccaccgagugcuccaaccugcugcugcaguacggcagcuucugcacccagcugaauagagcccugacagggaucgccguggaacaggacaagaacacccaagagguguucgcccaagugaagcaaaucuacaagaccccuccuaucaaggacuucggcggcuucaauuucagccagauucugcccgauccuagcaagcccagcaagcggagcuucaucgaggaccugcuguucaacaaagugacacuggccgacgccggcuucaucaagcaguauggcgauugucugggcgacauugccgccagggaucugauuugcgcccagaaguuuaacggacugacagugcugccuccucugcugaccgaugagaugaucgcccaguacacaucugcccugcuggccggcacaaucacaagcggcuggacauuuggagcuggcgccgcucugcagauccccuuugcuaugcagauggccuaccgguucaacggcaucggagugacccagaaugugcuguacgagaaccagaagcugaucgccaaccaguucaacagcgccaucggcaagauccaggacagccugagcagcacagcaagcgcccugggaaagcugcaggacguggucaaccagaaugcccaggcacugaacacccuggucaagcagcuguccuccaacuucggcgccaucagcucugugcugaacgauauccugagcagacuggacaaggucgaggccgaggugcagaucgacagacugaucacaggcagacugcagagccuccagacauacgugacccagcagcugaucagagccgccgagauuagagccucugccaaucuggccgccaccaagaugucugagugugugcugggccagagcaagagaguggacuuuugcggcaagggcuaccaccugaugagcuucccucagucugccccucacggcgugguguuucugcacgugacauaugugugugcucaagagaagaauuucaccaccgcuccagccaucugccacgacggcaaagcccacuuuccuagagaaggcguguucguguccaacggcacccauugguucgugacacagcggaacuucuacgagccccagaucaucaccaccgacaacaccuucgugucuggcaacugcgacguugugaucggcauugugaacaauaccguguacgacccucugcagcccgagcuggacagcuucaaagaggaacuggacaaguacuuuaagaaccacacaagccccgacguggaccugggcgauaucagcggaaucaaugccagcgucgugaacauccagaaagagaucgaccggcugaacgagguggccaagaaucugaacgagagccugaucgaccugcaagaacuggggaaguacgagcaguacaucaagggaggcggaggaucugacaucaucaagcugcugaacgagcaagugaacaaagagaugcagagcagcaaccuguacaugagcaugagcagcuggugcuacacccacagccuugauggcgccggacuguuccuguuugaucacgccgccgaggaauacgagcacgccaagaagcugaucaucuuccugaacgagaacaacgugcccgugcagcugaccagcauuucugccccugagcacaaguucgagggccugacacagaucuuccagaaggccuacgaacacgagcagcacaucagcgagagcaucaacaacaucguggaccacgccauuaagagcaaggaucacgccaccuucaacuuucugcagugguacguggccgaacagcacgaggaagaggugcuguucaaggacauccuggacaagaucgagcugaucggcaacgagaaccacggccuguaucuggccgaccaguacgugaagggaaucgccaagagcagaaagagcugaggacuagucccuguucccagagcccacuuuuuuuucuuuuuuugaaauaaaauagccugucuuucagaucucaaaggcucuuuucagagccaccaaaaaaaaaaaaaaaaaaaaaaaaaaaaaaaaaaaaaaaaaaaaaaaaaaaaaaaaaaaaaaaaaaaaaaaaaaaaaaaaaaaaaaaaaaaaaaaaaaaaa

SEQ ID NO: 12579 - RNA, 4412 nt, Artificial Sequence
  SARS-CoV-2/Wuhan/WIV05/2019__EPI_ISL_402128 spike protein mRNA gc mod (1-1211)(G889C_L1034C) Ferritin construct
aggagagucccgcagucggcguccagcggcucugcuuguucgugugugugucguugcaggccuuauucaagcuuaccauguucguguuucuggugcugcugccccugguguccagccagugugugaaccugaccaccagaacacagcugccuccagccuacaccaacagcuucaccagaggcguguacuaccccgacaagguguucagauccagcgugcugcacucuacccaggaccuguuccugccuuucuucagcaacgugaccugguuccacgccauccacguguccggcaccaauggcaccaagagauucgacaaccccgugcugcccuucaacgacgggguguacuuugccagcaccgagaaguccaacaucaucagaggcuggaucuucggcaccacacuggacagcaagacccagagccugcugaucgugaacaacgccaccaacguggucaucaaagugugcgaguuccaguucugcaacgaccccuuccugggcgucuacuaccacaagaacaacaagagcuggauggaaagcgaguuccggguguacagcagcgccaacaacugcaccuucgaguacgugucccagccuuuccugauggaccuggaaggcaagcagggcaacuucaagaaccugcgcgaguucguguucaagaacaucgacggcuacuucaaaaucuacagcaagcacaccccuaucaaccucgugcgggaucugccucagggcuucucugcucuggaaccccugguggaucugcccaucggcaucaacaucacccgguuucagacacugcuggcccugcacagaagcuaccugacaccuggcgauagcagcagcggauggacagcuggugccgccgcuuacuaugugggcuaccugcagccuagaaccuuccugcugaaguacaacgagaacggcaccaucaccgacgccguggauugugcucuggauccucugagcgagacaaagugcacccugaaguccuucaccguggaaaagggcaucuaccagaccagcaacuuccgggugcagcccaccgaauccaucgugcgguuccccaauaucaccaaucugugccccuucggcgagguguucaaugccaccagauucgccucuguguacgccuggaaccggaagcggaucagcaauugcguggccgacuacuccgugcuguacaacuccgccagcuucagcaccuucaagugcuacggcguguccccuaccaagcugaacgaccugugcuucacaaacguguacgccgacagcuucgugauccggggagaugaagugcggcagauugccccuggacagacaggcaagaucgccgacuacaacuacaagcugcccgacgacuucaccggcugugugauugccuggaacagcaacaaccuggacuccaaagucggcggcaacuacaauuaccuguaccggcuguuccggaaguccaaucugaagcccuucgagcgggacaucagcaccgaaaucuaucaggccggcagcaccccuugcaacggcguggaaggcuucaacugcuacuucccacugcaguccuacggcuuucagcccacaaauggcgugggcuaucagcccuacagagugguggugcugagcuucgaacugcugcaugcuccugccacagugugcggcccuaagaaaagcaccaaucucgugaagaacaaaugcgugaacuucaacuucaacggccugaccggcaccggcgugcugacagagagcaacaagaaguuccugccauuccagcaguuuggccgggauaucgccgauaccacagacgccguuagagauccccagacacuggaaauccuggacaucaccccaugcagcuucggcggagugucugugaucaccccuggcaccaacaccagcaaucagguggcagugcuguaccaggacgugaacuguaccgaagugcccguggccauucacgccgaucagcugacaccuacauggcggguguacuccaccggcagcaauguguuucagaccagagccggcugucugaucggagccgagcacgugaacaauagcuacgagugcgacauccccaucggcgcuggcaucugugccagcuaccagacacagacaaacagccccagacgggcuagaagcguggccagccagagcaucauugccuacacaaugucucugggcgccgagaacagcguggccuacuccaacaacucuaucgcuauccccaccaacuucaccaucagcgugaccaccgagauccugccuguguccaugaccaagaccagcguggacugcaccauguacaucugcggcgauuccaccgagugcuccaaccugcugcugcaguacggcagcuucugcacccagcugaauagagcccugacagggaucgccguggaacaggacaagaacacccaagagguguucgcccaagugaagcaaaucuacaagaccccuccuaucaaggacuucggcggcuucaauuucagccagauucugcccgauccuagcaagcccagcaagcggagcuucaucgaggaccugcuguucaacaaagugacacuggccgacgccggcuucaucaagcaguauggcgauugucugggcgacauugccgccagggaucugauuugcgcccagaaguuuaacggacugacagugcugccuccucugcugaccgaugagaugaucgcccaguacacaucugcccugcuggccggcacaaucacaagcggcuggacauuuugcgcuggcgccgcucugcagauccccuuugcuaugcagauggccuaccgguucaacggcaucggagugacccagaaugugcuguacgagaaccagaagcugaucgccaaccaguucaacagcgccaucggcaagauccaggacagccugagcagcacagcaagcgcccugggaaagcugcaggacguggucaaccagaaugcccaggcacugaacacccuggucaagcagcuguccuccaacuucggcgccaucagcucugugcugaacgauauccugagcagacuggacaaggucgaggccgaggugcagaucgacagacugaucacaggcagacugcagagccuccagacauacgugacccagcagcugaucagagccgccgagauuagagccucugccaaucuggccgccaccaagaugucugaguguguguguggccagagcaagagaguggacuuuugcggcaagggcuaccaccugaugagcuucccucagucugccccucacggcgugguguuucugcacgugacauaugugcccgcucaagagaagaauuucaccaccgcuccagccaucugccacgacggcaaagcccacuuuccuagagaaggcguguucguguccaacggcacccauugguucgugacacagcggaacuucuacgagccccagaucaucaccaccgacaacaccuucgugucuggcaacugcgacguugugaucggcauugugaacaauaccguguacgacccucugcagcccgagcuggacagcuucaaagaggaacuggacaaguacuuuaagaaccacacaagccccgacguggaccugggcgauaucagcggaaucaaugccagcgucgugaacauccagaaagagaucgaccggcugaacgagguggccaagaaucugaacgagagccugaucgaccugcaagaacuggggaaguacgagcaguacaucaagggaggcggaggaucugacaucaucaagcugcugaacgagcaagugaacaaagagaugcagagcagcaaccuguacaugagcaugagcagcuggugcuacacccacagccuugauggcgccggacuguuccuguuugaucacgccgccgaggaauacgagcacgccaagaagcugaucaucuuccugaacgagaacaacgugcccgugcagcugaccagcauuucugccccugagcacaaguucgagggccugacacagaucuuccagaaggccuacgaacacgagcagcacaucagcgagagcaucaacaacaucguggaccacgccauuaagagcaaggaucacgccaccuucaacuuucugcagugguacguggccgaacagcacgaggaagaggugcuguucaaggacauccuggacaagaucgagcugaucggcaacgagaaccacggccuguaucuggccgaccaguacgugaagggaaucgccaagagcagaaagagcugaggacuagucccuguucccagagcccacuuuuuuuucuuuuuuugaaauaaaauagccugucuuucagaucucaaaggcucuuuucagagccaccaaaaaaaaaaaaaaaaaaaaaaaaaaaaaaaaaaaaaaaaaaaaaaaaaaaaaaaaaaaaaaaaaaaaaaaaaaaaaaaaaaaaaaaaaaaaaaaaaaaaa

SEQ ID NO: 12580 - RNA, 4412 nt, Artificial Sequence
  SARS-CoV-2/Wuhan/WIV05/2019__EPI_ISL_402128 spike protein mRNA gc mod (1-1211)(I909C_Y1047C) Ferritin construct
aggagagucccgcagucggcguccagcggcucugcuuguucgugugugugucguugcaggccuuauucaagcuuaccauguucguguuucuggugcugcugccccugguguccagccagugugugaaccugaccaccagaacacagcugccuccagccuacaccaacagcuucaccagaggcguguacuaccccgacaagguguucagauccagcgugcugcacucuacccaggaccuguuccugccuuucuucagcaacgugaccugguuccacgccauccacguguccggcaccaauggcaccaagagauucgacaaccccgugcugcccuucaacgacgggguguacuuugccagcaccgagaaguccaacaucaucagaggcuggaucuucggcaccacacuggacagcaagacccagagccugcugaucgugaacaacgccaccaacguggucaucaaagugugcgaguuccaguucugcaacgaccccuuccugggcgucuacuaccacaagaacaacaagagcuggauggaaagcgaguuccggguguacagcagcgccaacaacugcaccuucgaguacgugucccagccuuuccugauggaccuggaaggcaagcagggcaacuucaagaaccugcgcgaguucguguucaagaacaucgacggcuacuucaaaaucuacagcaagcacaccccuaucaaccucgugcgggaucugccucagggcuucucugcucuggaaccccugguggaucugcccaucggcaucaacaucacccgguuucagacacugcuggcccugcacagaagcuaccugacaccuggcgauagcagcagcggauggacagcuggugccgccgcuuacuaugugggcuaccugcagccuagaaccuuccugcugaaguacaacgagaacggcaccaucaccgacgccguggauugugcucuggauccucugagcgagacaaagugcacccugaaguccuucaccguggaaaagggcaucuaccagaccagcaacuuccgggugcagcccaccgaauccaucgugcgguuccccaauaucaccaaucugugccccuucggcgagguguucaaugccaccagauucgccucuguguacgccuggaaccggaagcggaucagcaauugcguggccgacuacuccgugcuguacaacuccgccagcuucagcaccuucaagugcuacggcguguccccuaccaagcugaacgaccugugcuucacaaacguguacgccgacagcuucgugauccggggagaugaagugcggcagauugccccuggacagacaggcaagaucgccgacuacaacuacaagcugcccgacgacuucaccggcugugugauugccuggaacagcaacaaccuggacuccaaagucggcggcaacuacaauuaccuguaccggcuguuccggaaguccaaucugaagcccuucgagcgggacaucagcaccgaaaucuaucaggccggcagcaccccuugcaacggcguggaaggcuucaacugcuacuucccacugcaguccuacggcuuucagcccacaaauggcgugggcuaucagcccuacagagugguggugcugagcuucgaacugcugcaugcuccugccacagugugcggcccuaagaaaagcaccaaucucgugaagaacaaaugcgugaacuucaacuucaacggccugaccggcaccggcgugcugacagagagcaacaagaaguuccugccauuccagcaguuuggccgggauaucgccgauaccacagacgccguuagagauccccagacacuggaaauccuggacaucaccccaugcagcuucggcggagugucugugaucaccccuggcaccaacaccagcaaucagguggcagugcuguaccaggacgugaacuguaccgaagugcccguggccauucacgccgaucagcugacaccuacauggcggguguacuccaccggcagcaauguguuucagaccagagccggcugucugaucggagccgagcacgugaacaauagcuacgagugcgacauccccaucggcgcuggcaucugugccagcuaccagacacagacaaacagccccagacgggcuagaagcguggccagccagagcaucauugccuacacaaugucucugggcgccgagaacagcguggccuacuccaacaacucuaucgcuauccccaccaacuucaccaucagcgugaccaccgagauccugccuguguccaugaccaagaccagcguggacugcaccauguacaucugcggcgauuccaccgagugcuccaaccugcugcugcaguacggcagcuucugcacccagcugaauagagcccugacagggaucgccguggaacaggacaagaacacccaagagguguucgcccaagugaagcaaaucuacaagaccccuccuaucaaggacuucggcggcuucaauuucagccagauucugcccgauccuagcaagcccagcaagcggagcuucaucgaggaccugcuguucaacaaagugacacuggccgacgccggcuucaucaagcaguauggcgauugucugggcgacauugccgccagggaucugauuugcgcccagaaguuuaacggacugacagugcugccuccucugcugaccgaugagaugaucgcccaguacacaucugcccugcuggccggcacaaucacaagcggcuggacauuuggagcuggcgccgcucugcagauccccuuugcuaugcagauggccuaccgguucaacggcugcggagugacccagaaugugcuguacgagaaccagaagcugaucgccaaccaguucaacagcgccaucggcaagauccaggacagccugagcagcacagcaagcgcccugggaaagcugcaggacguggucaaccagaaugcccaggcacugaacacccuggucaagcagcuguccuccaacuucggcgccaucagcucugugcugaacgauauccugagcagacuggacaaggucgaggccgaggugcagaucgacagacugaucacaggcagacugcagagccuccagacauacgugacccagcagcugaucagagccgccgagauuagagccucugccaaucuggccgccaccaagaugucugagugugugcugggccagagcaagagaguggacuuuugcggcaagggcugucaccugaugagcuucccucagucugccccucacggcgugguguuucugcacgugacauaugugcccgcucaagagaagaauuucaccaccgcuccagccaucugccacgacggcaaagcccacuuuccuagagaaggcguguucguguccaacggcacccauugguucgugacacagcggaacuucuacgagccccagaucaucaccaccgacaacaccuucgugucuggcaacugcgacguugugaucggcauugugaacaauaccguguacgacccucugcagcccgagcuggacagcuucaaagaggaacuggacaaguacuuuaagaaccacacaagccccgacguggaccugggcgauaucagcggaaucaaugccagcgucgugaacauccagaaagagaucgaccggcugaacgagguggccaagaaucugaacgagagccugaucgaccugcaagaacuggggaaguacgagcaguacaucaagggaggcggaggaucugacaucaucaagcugcugaacgagcaagugaacaaagagaugcagagcagcaaccuguacaugagcaugagcagcuggugcuacacccacagccuugauggcgccggacuguuccuguuugaucacgccgccgaggaauacgagcacgccaagaagcugaucaucuuccugaacgagaacaacgugcccgugcagcugaccagcauuucugccccugagcacaaguucgagggccugacacagaucuuccagaaggccuacgaacacgagcagcacaucagcgagagcaucaacaacaucguggaccacgccauuaagagcaaggaucacgccaccuucaacuuucugcagugguacguggccgaacagcacgaggaagaggugcuguucaaggacauccuggacaagaucgagcugaucggcaacgagaaccacggccuguaucuggccgaccaguacgugaagggaaucgccaagagcagaaagagcugaggacuagucccuguucccagagcccacuuuuuuuucuuuuuuugaaauaaaauagccugucuuucagaucucaaaggcucuuuucagagccaccaaaaaaaaaaaaaaaaaaaaaaaaaaaaaaaaaaaaaaaaaaaaaaaaaaaaaaaaaaaaaaaaaaaaaaaaaaaaaaaaaaaaaaaaaaaaaaaaaaaaa

SEQ ID NO: 12581 - RNA, 4412 nt, Artificial Sequence
  SARS-CoV-2/Wuhan/WIV05/2019__EPI_ISL_402128 spike protein mRNA gc mod (1-1211)(Q965C_S1003C) Ferritin construct
aggagagucccgcagucggcguccagcggcucugcuuguucgugugugugucguugcaggccuuauucaagcuuaccauguucguguuucuggugcugcugccccugguguccagccagugugugaaccugaccaccagaacacagcugccuccagccuacaccaacagcuucaccagaggcguguacuaccccgacaagguguucagauccagcgugcugcacucuacccaggaccuguuccugccuuucuucagcaacgugaccugguuccacgccauccacguguccggcaccaauggcaccaagagauucgacaaccccgugcugcccuucaacgacgggguguacuuugccagcaccgagaaguccaacaucaucagaggcuggaucuucggcaccacacuggacagcaagacccagagccugcugaucgugaacaacgccaccaacguggucaucaaagugugcgaguuccaguucugcaacgaccccuuccugggcgucuacuaccacaagaacaacaagagcuggauggaaagcgaguuccggguguacagcagcgccaacaacugcaccuucgaguacgugucccagccuuuccugauggaccuggaaggcaagcagggcaacuucaagaaccugcgcgaguucguguucaagaacaucgacggcuacuucaaaaucuacagcaagcacaccccuaucaaccucgugcgggaucugccucagggcuucucugcucuggaaccccugguggaucugcccaucggcaucaacaucacccgguuucagacacugcuggcccugcacagaagcuaccugacaccuggcgauagcagcagcggauggacagcuggugccgccgcuuacuaugugggcuaccugcagccuagaaccuuccugcugaaguacaacgagaacggcaccaucaccgacgccguggauugugcucuggauccucugagcgagacaaagugcacccugaaguccuucaccguggaaaagggcaucuaccagaccagcaacuuccgggugcagcccaccgaauccaucgugcgguuccccaauaucaccaaucugugccccuucggcgagguguucaaugccaccagauucgccucuguguacgccuggaaccggaagcggaucagcaauugcguggccgacuacuccgugcuguacaacuccgccagcuucagcaccuucaagugcuacggcguguccccuaccaagcugaacgaccugugcuucacaaacguguacgccgacagcuucgugauccggggagaugaagugcggcagauugccccuggacagacaggcaagaucgccgacuacaacuacaagcugcccgacgacuucaccggcugugugauugccuggaacagcaacaaccuggacuccaaagucggcggcaacuacaauuaccuguaccggcuguuccggaaguccaaucugaagcccuucgagcgggacaucagcaccgaaaucuaucaggccggcagcaccccuugcaacggcguggaaggcuucaacugcuacuucccacugcaguccuacggcuuucagcccacaaauggcgugggcuaucagcccuacagagugguggugcugagcuucgaacugcugcaugcuccugccacagugugcggcccuaagaaaagcaccaaucucgugaagaacaaaugcgugaacuucaacuucaacggccugaccggcaccggcgugcugacagagagcaacaagaaguuccugccauuccagcaguuuggccgggauaucgccgauaccacagacgccguuagagauccccagacacuggaaauccuggacaucaccccaugcagcuucggcggagugucugugaucaccccuggcaccaacaccagcaaucagguggcagugcuguaccaggacgugaacuguaccgaagugcccguggccauucacgccgaucagcugacaccuacauggcggguguacuccaccggcagcaauguguuucagaccagagccggcugucugaucggagccgagcacgugaacaauagcuacgagugcgacauccccaucggcgcuggcaucugugccagcuaccagacacagacaaacagccccagacgggcuagaagcguggccagccagagcaucauugccuacacaaugucucugggcgccgagaacagcguggccuacuccaacaacucuaucgcuauccccaccaacuucaccaucagcgugaccaccgagauccugccuguguccaugaccaagaccagcguggacugcaccauguacaucugcggcgauuccaccgagugcuccaaccugcugcugcaguacggcagcuucugcacccagcugaauagagcccugacagggaucgccguggaacaggacaagaacacccaagagguguucgcccaagugaagcaaaucuacaagaccccuccuaucaaggacuucggcggcuucaauuucagccagauucugcccgauccuagcaagcccagcaagcggagcuucaucgaggaccugcuguucaacaaagugacacuggccgacgccggcuucaucaagcaguauggcgauugucugggcgacauugccgccagggaucugauuugcgcccagaaguuuaacggacugacagugcugccuccucugcugaccgaugagaugaucgcccaguacacaucugcccugcuggccggcacaaucacaagcggcuggacauuuggagcuggcgccgcucugcagauccccuuugcuaugcagauggccuaccgguucaacggcaucggagugacccagaaugugcuguacgagaaccagaagcugaucgccaaccaguucaacagcgccaucggcaagauccaggacagccugagcagcacagcaagcgcccugggaaagcugcaggacguggucaaccagaaugcccaggcacugaacacccuggucaagugccuguccuccaacuucggcgccaucagcucugugcugaacgauauccugagcagacuggacaaggucgaggccgaggugcagaucgacagacugaucacaggcagacugcagugucuccagacauacgugacccagcagcugaucagagccgccgagauuagagccucugccaaucuggccgccaccaagaugucugagugugugcugggccagagcaagagaguggacuuuugcggcaagggcuaccaccugaugagcuucccucagucugccccucacggcgugguguuucugcacgugacauaugugcccgcucaagagaagaauuucaccaccgcuccagccaucugccacgacggcaaagcccacuuuccuagagaaggcguguucguguccaacggcacccauugguucgugacacagcggaacuucuacgagccccagaucaucaccaccgacaacaccuucgugucuggcaacugcgacguugugaucggcauugugaacaauaccguguacgacccucugcagcccgagcuggacagcuucaaagaggaacuggacaaguacuuuaagaaccacacaagccccgacguggaccugggcgauaucagcggaaucaaugccagcgucgugaacauccagaaagagaucgaccggcugaacgagguggccaagaaucugaacgagagccugaucgaccugcaagaacuggggaaguacgagcaguacaucaagggaggcggaggaucugacaucaucaagcugcugaacgagcaagugaacaaagagaugcagagcagcaaccuguacaugagcaugagcagcuggugcuacacccacagccuugauggcgccggacuguuccuguuugaucacgccgccgaggaauacgagcacgccaagaagcugaucaucuuccugaacgagaacaacgugcccgugcagcugaccagcauuucugccccugagcacaaguucgagggccugacacagaucuuccagaaggccuacgaacacgagcagcacaucagcgagagcaucaacaacaucguggaccacgccauuaagagcaaggaucacgccaccuucaacuuucugcagugguacguggccgaacagcacgaggaagaggugcuguucaaggacauccuggacaagaucgagcugaucggcaacgagaaccacggccuguaucuggccgaccaguacgugaagggaaucgccaagagcagaaagagcugaggacuagucccuguucccagagcccacuuuuuuuucuuuuuuugaaauaaaauagccugucuuucagaucucaaaggcucuuuucagagccaccaaaaaaaaaaaaaaaaaaaaaaaaaaaaaaaaaaaaaaaaaaaaaaaaaaaaaaaaaaaaaaaaaaaaaaaaaaaaaaaaaaaaaaaaaaaaaaaaaaaaa

SEQ ID NO: 12582 - RNA, 4412 nt, Artificial Sequence
  SARS-CoV-2/Wuhan/WIV05/2019__EPI_ISL_402128 spike protein mRNA gc mod (1-1211)(F970C_G999C) Ferritin construct
aggagagucccgcagucggcguccagcggcucugcuuguucgugugugugucguugcaggccuuauucaagcuuaccauguucguguuucuggugcugcugccccugguguccagccagugugugaaccugaccaccagaacacagcugccuccagccuacaccaacagcuucaccagaggcguguacuaccccgacaagguguucagauccagcgugcugcacucuacccaggaccuguuccugccuuucuucagcaacgugaccugguuccacgccauccacguguccggcaccaauggcaccaagagauucgacaaccccgugcugcccuucaacgacgggguguacuuugccagcaccgagaaguccaacaucaucagaggcuggaucuucggcaccacacuggacagcaagacccagagccugcugaucgugaacaacgccaccaacguggucaucaaagugugcgaguuccaguucugcaacgaccccuuccugggcgucuacuaccacaagaacaacaagagcuggauggaaagcgaguuccggguguacagcagcgccaacaacugcaccuucgaguacgugucccagccuuuccugauggaccuggaaggcaagcagggcaacuucaagaaccugcgcgaguucguguucaagaacaucgacggcuacuucaaaaucuacagcaagcacaccccuaucaaccucgugcgggaucugccucagggcuucucugcucuggaaccccugguggaucugcccaucggcaucaacaucacccgguuucagacacugcuggcccugcacagaagcuaccugacaccuggcgauagcagcagcggauggacagcuggugccgccgcuuacuaugugggcuaccugcagccuagaaccuuccugcugaaguacaacgagaacggcaccaucaccgacgccguggauugugcucuggauccucugagcgagacaaagugcacccugaaguccuucaccguggaaaagggcaucuaccagaccagcaacuuccgggugcagcccaccgaauccaucgugcgguuccccaauaucaccaaucugugccccuucggcgagguguucaaugccaccagauucgccucuguguacgccuggaaccggaagcggaucagcaauugcguggccgacuacuccgugcuguacaacuccgccagcuucagcaccuucaagugcuacggcguguccccuaccaagcugaacgaccugugcuucacaaacguguacgccgacagcuucgugauccggggagaugaagugcggcagauugccccuggacagacaggcaagaucgccgacuacaacuacaagcugcccgacgacuucaccggcugugugauugccuggaacagcaacaaccuggacuccaaagucggcggcaacuacaauuaccuguaccggcuguuccggaaguccaaucugaagcccuucgagcgggacaucagcaccgaaaucuaucaggccggcagcaccccuugcaacggcguggaaggcuucaacugcuacuucccacugcaguccuacggcuuucagcccacaaauggcgugggcuaucagcccuacagagugguggugcugagcuucgaacugcugcaugcuccugccacagugugcggcccuaagaaaagcaccaaucucgugaagaacaaaugcgugaacuucaacuucaacggccugaccggcaccggcgugcugacagagagcaacaagaaguuccugccauuccagcaguuuggccgggauaucgccgauaccacagacgccguuagagauccccagacacuggaaauccuggacaucaccccaugcagcuucggcggagugucugugaucaccccuggcaccaacaccagcaaucagguggcagugcuguaccaggacgugaacuguaccgaagugcccguggccauucacgccgaucagcugacaccuacauggcggguguacuccaccggcagcaauguguuucagaccagagccggcugucugaucggagccgagcacgugaacaauagcuacgagugcgacauccccaucggcgcuggcaucugugccagcuaccagacacagacaaacagccccagacgggcuagaagcguggccagccagagcaucauugccuacacaaugucucugggcgccgagaacagcguggccuacuccaacaacucuaucgcuauccccaccaacuucaccaucagcgugaccaccgagauccugccuguguccaugaccaagaccagcguggacugcaccauguacaucugcggcgauuccaccgagugcuccaaccugcugcugcaguacggcagcuucugcacccagcugaauagagcccugacagggaucgccguggaacaggacaagaacacccaagagguguucgcccaagugaagcaaaucuacaagaccccuccuaucaaggacuucggcggcuucaauuucagccagauucugcccgauccuagcaagcccagcaagcggagcuucaucgaggaccugcuguucaacaaagugacacuggccgacgccggcuucaucaagcaguauggcgauugucugggcgacauugccgccagggaucugauuugcgcccagaaguuuaacggacugacagugcugccuccucugcugaccgaugagaugaucgcccaguacacaucugcccugcuggccggcacaaucacaagcggcuggacauuuggagcuggcgccgcucugcagauccccuuugcuaugcagauggccuaccgguucaacggcaucggagugacccagaaugugcuguacgagaaccagaagcugaucgccaaccaguucaacagcgccaucggcaagauccaggacagccugagcagcacagcaagcgcccugggaaagcugcaggacguggucaaccagaaugcccaggcacugaacacccuggucaagcagcuguccuccaacugcggcgccaucagcucugugcugaacgauauccugagcagacuggacaaggucgaggccgaggugcagaucgacagacugaucacauguagacugcagagccuccagacauacgugacccagcagcugaucagagccgccgagauuagagccucugccaaucuggccgccaccaagaugucugagugugugcugggccagagcaagagaguggacuuuugcggcaagggcuaccaccugaugagcuucccucagucugccccucacggcgugguguuucugcacgugacauaugugcccgcucaagagaagaauuucaccaccgcuccagccaucugccacgacggcaaagcccacuuuccuagagaaggcguguucguguccaacggcacccauugguucgugacacagcggaacuucuacgagccccagaucaucaccaccgacaacaccuucgugucuggcaacugcgacguugugaucggcauugugaacaauaccguguacgacccucugcagcccgagcuggacagcuucaaagaggaacuggacaaguacuuuaagaaccacacaagccccgacguggaccugggcgauaucagcggaaucaaugccagcgucgugaacauccagaaagagaucgaccggcugaacgagguggccaagaaucugaacgagagccugaucgaccugcaagaacuggggaaguacgagcaguacaucaagggaggcggaggaucugacaucaucaagcugcugaacgagcaagugaacaaagagaugcagagcagcaaccuguacaugagcaugagcagcuggugcuacacccacagccuugauggcgccggacuguuccuguuugaucacgccgccgaggaauacgagcacgccaagaagcugaucaucuuccugaacgagaacaacgugcccgugcagcugaccagcauuucugccccugagcacaaguucgagggccugacacagaucuuccagaaggccuacgaacacgagcagcacaucagcgagagcaucaacaacaucguggaccacgccauuaagagcaaggaucacgccaccuucaacuuucugcagugguacguggccgaacagcacgaggaagaggugcuguucaaggacauccuggacaagaucgagcugaucggcaacgagaaccacggccuguaucuggccgaccaguacgugaagggaaucgccaagagcagaaagagcugaggacuagucccuguucccagagcccacuuuuuuuucuuuuuuugaaauaaaauagccugucuuucagaucucaaaggcucuuuucagagccaccaaaaaaaaaaaaaaaaaaaaaaaaaaaaaaaaaaaaaaaaaaaaaaaaaaaaaaaaaaaaaaaaaaaaaaaaaaaaaaaaaaaaaaaaaaaaaaaaaaaaa

SEQ ID NO: 12583 - RNA, 4412 nt, Artificial Sequence
  SARS-CoV-2/Wuhan/WIV05/2019__EPI_ISL_402128 spike protein mRNA gc mod (1-1211)(A972C_R995C) Ferritin construct
aggagagucccgcagucggcguccagcggcucugcuuguucgugugugugucguugcaggccuuauucaagcuuaccauguucguguuucuggugcugcugccccugguguccagccagugugugaaccugaccaccagaacacagcugccuccagccuacaccaacagcuucaccagaggcguguacuaccccgacaagguguucagauccagcgugcugcacucuacccaggaccuguuccugccuuucuucagcaacgugaccugguuccacgccauccacguguccggcaccaauggcaccaagagauucgacaaccccgugcugcccuucaacgacgggguguacuuugccagcaccgagaaguccaacaucaucagaggcuggaucuucggcaccacacuggacagcaagacccagagccugcugaucgugaacaacgccaccaacguggucaucaaagugugcgaguuccaguucugcaacgaccccuuccugggcgucuacuaccacaagaacaacaagagcuggauggaaagcgaguuccggguguacagcagcgccaacaacugcaccuucgaguacgugucccagccuuuccugauggaccuggaaggcaagcagggcaacuucaagaaccugcgcgaguucguguucaagaacaucgacggcuacuucaaaaucuacagcaagcacaccccuaucaaccucgugcgggaucugccucagggcuucucugcucuggaaccccugguggaucugcccaucggcaucaacaucacccgguuucagacacugcuggcccugcacagaagcuaccugacaccuggcgauagcagcagcggauggacagcuggugccgccgcuuacuaugugggcuaccugcagccuagaaccuuccugcugaaguacaacgagaacggcaccaucaccgacgccguggauugugcucuggauccucugagcgagacaaagugcacccugaaguccuucaccguggaaaagggcaucuaccagaccagcaacuuccgggugcagcccaccgaauccaucgugcgguuccccaauaucaccaaucugugccccuucggcgagguguucaaugccaccagauucgccucuguguacgccuggaaccggaagcggaucagcaauugcguggccgacuacuccgugcuguacaacuccgccagcuucagcaccuucaagugcuacggcguguccccuaccaagcugaacgaccugugcuucacaaacguguacgccgacagcuucgugauccggggagaugaagugcggcagauugccccuggacagacaggcaagaucgccgacuacaacuacaagcugcccgacgacuucaccggcugugugauugccuggaacagcaacaaccuggacuccaaagucggcggcaacuacaauuaccuguaccggcuguuccggaaguccaaucugaagcccuucgagcgggacaucagcaccgaaaucuaucaggccggcagcaccccuugcaacggcguggaaggcuucaacugcuacuucccacugcaguccuacggcuuucagcccacaaauggcgugggcuaucagcccuacagagugguggugcugagcuucgaacugcugcaugcuccugccacagugugcggcccuaagaaaagcaccaaucucgugaagaacaaaugcgugaacuucaacuucaacggccugaccggcaccggcgugcugacagagagcaacaagaaguuccugccauuccagcaguuuggccgggauaucgccgauaccacagacgccguuagagauccccagacacuggaaauccuggacaucaccccaugcagcuucggcggagugucugugaucaccccuggcaccaacaccagcaaucagguggcagugcuguaccaggacgugaacuguaccgaagugcccguggccauucacgccgaucagcugacaccuacauggcggguguacuccaccggcagcaauguguuucagaccagagccggcugucugaucggagccgagcacgugaacaauagcuacgagugcgacauccccaucggcgcuggcaucugugccagcuaccagacacagacaaacagccccagacgggcuagaagcguggccagccagagcaucauugccuacacaaugucucugggcgccgagaacagcguggccuacuccaacaacucuaucgcuauccccaccaacuucaccaucagcgugaccaccgagauccugccuguguccaugaccaagaccagcguggacugcaccauguacaucugcggcgauuccaccgagugcuccaaccugcugcugcaguacggcagcuucugcacccagcugaauagagcccugacagggaucgccguggaacaggacaagaacacccaagagguguucgcccaagugaagcaaaucuacaagaccccuccuaucaaggacuucggcggcuucaauuucagccagauucugcccgauccuagcaagcccagcaagcggagcuucaucgaggaccugcuguucaacaaagugacacuggccgacgccggcuucaucaagcaguauggcgauugucugggcgacauugccgccagggaucugauuugcgcccagaaguuuaacggacugacagugcugccuccucugcugaccgaugagaugaucgcccaguacacaucugcccugcuggccggcacaaucacaagcggcuggacauuuggagcuggcgccgcucugcagauccccuuugcuaugcagauggccuaccgguucaacggcaucggagugacccagaaugugcuguacgagaaccagaagcugaucgccaaccaguucaacagcgccaucggcaagauccaggacagccugagcagcacagcaagcgcccugggaaagcugcaggacguggucaaccagaaugcccaggcacugaacacccuggucaagcagcuguccuccaacuucggcugcaucagcucugugcugaacgauauccugagcagacuggacaaggucgaggccgaggugcagaucgacugucugaucacaggcagacugcagagccuccagacauacgugacccagcagcugaucagagccgccgagauuagagccucugccaaucuggccgccaccaagaugucugagugugugcugggccagagcaagagaguggacuuuugcggcaagggcuaccaccugaugagcuucccucagucugccccucacggcgugguguuucugcacgugacauaugugcccgcucaagagaagaauuucaccaccgcuccagccaucugccacgacggcaaagcccacuuuccuagagaaggcguguucguguccaacggcacccauugguucgugacacagcggaacuucuacgagccccagaucaucaccaccgacaacaccuucgugucuggcaacugcgacguugugaucggcauugugaacaauaccguguacgacccucugcagcccgagcuggacagcuucaaagaggaacuggacaaguacuuuaagaaccacacaagccccgacguggaccugggcgauaucagcggaaucaaugccagcgucgugaacauccagaaagagaucgaccggcugaacgagguggccaagaaucugaacgagagccugaucgaccugcaagaacuggggaaguacgagcaguacaucaagggaggcggaggaucugacaucaucaagcugcugaacgagcaagugaacaaagagaugcagagcagcaaccuguacaugagcaugagcagcuggugcuacacccacagccuugauggcgccggacuguuccuguuugaucacgccgccgaggaauacgagcacgccaagaagcugaucaucuuccugaacgagaacaacgugcccgugcagcugaccagcauuucugccccugagcacaaguucgagggccugacacagaucuuccagaaggccuacgaacacgagcagcacaucagcgagagcaucaacaacaucguggaccacgccauuaagagcaaggaucacgccaccuucaacuuucugcagugguacguggccgaacagcacgaggaagaggugcuguucaaggacauccuggacaagaucgagcugaucggcaacgagaaccacggccuguaucuggccgaccaguacgugaagggaaucgccaagagcagaaagagcugaggacuagucccuguucccagagcccacuuuuuuuucuuuuuuugaaauaaaauagccugucuuucagaucucaaaggcucuuuucagagccaccaaaaaaaaaaaaaaaaaaaaaaaaaaaaaaaaaaaaaaaaaaaaaaaaaaaaaaaaaaaaaaaaaaaaaaaaaaaaaaaaaaaaaaaaaaaaaaaaaaaaa

SEQ ID NO: 12584 - RNA, 4412 nt, Artificial Sequence
  SARS-CoV-2/Wuhan/WIV05/2019__EPI_ISL_402128 spike protein mRNA gc mod (1-1211)(A890C_V1040C) Ferritin construct
aggagagucccgcagucggcguccagcggcucugcuuguucgugugugugucguugcaggccuuauucaagcuuaccauguucguguuucuggugcugcugccccugguguccagccagugugugaaccugaccaccagaacacagcugccuccagccuacaccaacagcuucaccagaggcguguacuaccccgacaagguguucagauccagcgugcugcacucuacccaggaccuguuccugccuuucuucagcaacgugaccugguuccacgccauccacguguccggcaccaauggcaccaagagauucgacaaccccgugcugcccuucaacgacgggguguacuuugccagcaccgagaaguccaacaucaucagaggcuggaucuucggcaccacacuggacagcaagacccagagccugcugaucgugaacaacgccaccaacguggucaucaaagugugcgaguuccaguucugcaacgaccccuuccugggcgucuacuaccacaagaacaacaagagcuggauggaaagcgaguuccggguguacagcagcgccaacaacugcaccuucgaguacgugucccagccuuuccugauggaccuggaaggcaagcagggcaacuucaagaaccugcgcgaguucguguucaagaacaucgacggcuacuucaaaaucuacagcaagcacaccccuaucaaccucgugcgggaucugccucagggcuucucugcucuggaaccccugguggaucugcccaucggcaucaacaucacccgguuucagacacugcuggcccugcacagaagcuaccugacaccuggcgauagcagcagcggauggacagcuggugccgccgcuuacuaugugggcuaccugcagccuagaaccuuccugcugaaguacaacgagaacggcaccaucaccgacgccguggauugugcucuggauccucugagcgagacaaagugcacccugaaguccuucaccguggaaaagggcaucuaccagaccagcaacuuccgggugcagcccaccgaauccaucgugcgguuccccaauaucaccaaucugugccccuucggcgagguguucaaugccaccagauucgccucuguguacgccuggaaccggaagcggaucagcaauugcguggccgacuacuccgugcuguacaacuccgccagcuucagcaccuucaagugcuacggcguguccccuaccaagcugaacgaccugugcuucacaaacguguacgccgacagcuucgugauccggggagaugaagugcggcagauugccccuggacagacaggcaagaucgccgacuacaacuacaagcugcccgacgacuucaccggcugugugauugccuggaacagcaacaaccuggacuccaaagucggcggcaacuacaauuaccuguaccggcuguuccggaaguccaaucugaagcccuucgagcgggacaucagcaccgaaaucuaucaggccggcagcaccccuugcaacggcguggaaggcuucaacugcuacuucccacugcaguccuacggcuuucagcccacaaauggcgugggcuaucagcccuacagagugguggugcugagcuucgaacugcugcaugcuccugccacagugugcggcccuaagaaaagcaccaaucucgugaagaacaaaugcgugaacuucaacuucaacggccugaccggcaccggcgugcugacagagagcaacaagaaguuccugccauuccagcaguuuggccgggauaucgccgauaccacagacgccguuagagauccccagacacuggaaauccuggacaucaccccaugcagcuucggcggagugucugugaucaccccuggcaccaacaccagcaaucagguggcagugcuguaccaggacgugaacuguaccgaagugcccguggccauucacgccgaucagcugacaccuacauggcggguguacuccaccggcagcaauguguuucagaccagagccggcugucugaucggagccgagcacgugaacaauagcuacgagugcgacauccccaucggcgcuggcaucugugccagcuaccagacacagacaaacagccccagacgggcuagaagcguggccagccagagcaucauugccuacacaaugucucugggcgccgagaacagcguggccuacuccaacaacucuaucgcuauccccaccaacuucaccaucagcgugaccaccgagauccugccuguguccaugaccaagaccagcguggacugcaccauguacaucugcggcgauuccaccgagugcuccaaccugcugcugcaguacggcagcuucugcacccagcugaauagagcccugacagggaucgccguggaacaggacaagaacacccaagagguguucgcccaagugaagcaaaucuacaagaccccuccuaucaaggacuucggcggcuucaauuucagccagauucugcccgauccuagcaagcccagcaagcggagcuucaucgaggaccugcuguucaacaaagugacacuggccgacgccggcuucaucaagcaguauggcgauugucugggcgacauugccgccagggaucugauuugcgcccagaaguuuaacggacugacagugcugccuccucugcugaccgaugagaugaucgcccaguacacaucugcccugcuggccggcacaaucacaagcggcuggacauuuggaugcggcgccgcucugcagauccccuuugcuaugcagauggccuaccgguucaacggcaucggagugacccagaaugugcuguacgagaaccagaagcugaucgccaaccaguucaacagcgccaucggcaagauccaggacagccugagcagcacagcaagcgcccugggaaagcugcaggacguggucaaccagaaugcccaggcacugaacacccuggucaagcagcuguccuccaacuucggcgccaucagcucugugcugaacgauauccugagcagacuggacaaggucgaggccgaggugcagaucgacagacugaucacaggcagacugcagagccuccagacauacgugacccagcagcugaucagagccgccgagauuagagccucugccaaucuggccgccaccaagaugucugagugugugcugggccagagcaagagaugugacuuuugcggcaagggcuaccaccugaugagcuucccucagucugccccucacggcgugguguuucugcacgugacauaugugcccgcucaagagaagaauuucaccaccgcuccagccaucugccacgacggcaaagcccacuuuccuagagaaggcguguucguguccaacggcacccauugguucgugacacagcggaacuucuacgagccccagaucaucaccaccgacaacaccuucgugucuggcaacugcgacguugugaucggcauugugaacaauaccguguacgacccucugcagcccgagcuggacagcuucaaagaggaacuggacaaguacuuuaagaaccacacaagccccgacguggaccugggcgauaucagcggaaucaaugccagcgucgugaacauccagaaagagaucgaccggcugaacgagguggccaagaaucugaacgagagccugaucgaccugcaagaacuggggaaguacgagcaguacaucaagggaggcggaggaucugacaucaucaagcugcugaacgagcaagugaacaaagagaugcagagcagcaaccuguacaugagcaugagcagcuggugcuacacccacagccuugauggcgccggacuguuccuguuugaucacgccgccgaggaauacgagcacgccaagaagcugaucaucuuccugaacgagaacaacgugcccgugcagcugaccagcauuucugccccugagcacaaguucgagggccugacacagaucuuccagaaggccuacgaacacgagcagcacaucagcgagagcaucaacaacaucguggaccacgccauuaagagcaaggaucacgccaccuucaacuuucugcagugguacguggccgaacagcacgaggaagaggugcuguucaaggacauccuggacaagaucgagcugaucggcaacgagaaccacggccuguaucuggccgaccaguacgugaagggaaucgccaagagcagaaagagcugaggacuagucccuguucccagagcccacuuuuuuuucuuuuuuugaaauaaaauagccugucuuucagaucucaaaggcucuuuucagagccaccaaaaaaaaaaaaaaaaaaaaaaaaaaaaaaaaaaaaaaaaaaaaaaaaaaaaaaaaaaaaaaaaaaaaaaaaaaaaaaaaaaaaaaaaaaaaaaaaaaaaa

SEQ ID NO: 12585 - RNA, 4412 nt, Artificial Sequence
  SARS-CoV-2/Wuhan/WIV05/2019__EPI_ISL_402128 spike protein mRNA gc mod (1-1211)(T874C_S1055C) Ferritin construct
aggagagucccgcagucggcguccagcggcucugcuuguucgugugugugucguugcaggccuuauucaagcuuaccauguucguguuucuggugcugcugccccugguguccagccagugugugaaccugaccaccagaacacagcugccuccagccuacaccaacagcuucaccagaggcguguacuaccccgacaagguguucagauccagcgugcugcacucuacccaggaccuguuccugccuuucuucagcaacgugaccugguuccacgccauccacguguccggcaccaauggcaccaagagauucgacaaccccgugcugcccuucaacgacgggguguacuuugccagcaccgagaaguccaacaucaucagaggcuggaucuucggcaccacacuggacagcaagacccagagccugcugaucgugaacaacgccaccaacguggucaucaaagugugcgaguuccaguucugcaacgaccccuuccugggcgucuacuaccacaagaacaacaagagcuggauggaaagcgaguuccggguguacagcagcgccaacaacugcaccuucgaguacgugucccagccuuuccugauggaccuggaaggcaagcagggcaacuucaagaaccugcgcgaguucguguucaagaacaucgacggcuacuucaaaaucuacagcaagcacaccccuaucaaccucgugcgggaucugccucagggcuucucugcucuggaaccccugguggaucugcccaucggcaucaacaucacccgguuucagacacugcuggcccugcacagaagcuaccugacaccuggcgauagcagcagcggauggacagcuggugccgccgcuuacuaugugggcuaccugcagccuagaaccuuccugcugaaguacaacgagaacggcaccaucaccgacgccguggauugugcucuggauccucugagcgagacaaagugcacccugaaguccuucaccguggaaaagggcaucuaccagaccagcaacuuccgggugcagcccaccgaauccaucgugcgguuccccaauaucaccaaucugugccccuucggcgagguguucaaugccaccagauucgccucuguguacgccuggaaccggaagcggaucagcaauugcguggccgacuacuccgugcuguacaacuccgccagcuucagcaccuucaagugcuacggcguguccccuaccaagcugaacgaccugugcuucacaaacguguacgccgacagcuucgugauccggggagaugaagugcggcagauugccccuggacagacaggcaagaucgccgacuacaacuacaagcugcccgacgacuucaccggcugugugauugccuggaacagcaacaaccuggacuccaaagucggcggcaacuacaauuaccuguaccggcuguuccggaaguccaaucugaagcccuucgagcgggacaucagcaccgaaaucuaucaggccggcagcaccccuugcaacggcguggaaggcuucaacugcuacuucccacugcaguccuacggcuuucagcccacaaauggcgugggcuaucagcccuacagagugguggugcugagcuucgaacugcugcaugcuccugccacagugugcggcccuaagaaaagcaccaaucucgugaagaacaaaugcgugaacuucaacuucaacggccugaccggcaccggcgugcugacagagagcaacaagaaguuccugccauuccagcaguuuggccgggauaucgccgauaccacagacgccguuagagauccccagacacuggaaauccuggacaucaccccaugcagcuucggcggagugucugugaucaccccuggcaccaacaccagcaaucagguggcagugcuguaccaggacgugaacuguaccgaagugcccguggccauucacgccgaucagcugacaccuacauggcggguguacuccaccggcagcaauguguuucagaccagagccggcugucugaucggagccgagcacgugaacaauagcuacgagugcgacauccccaucggcgcuggcaucugugccagcuaccagacacagacaaacagccccagacgggcuagaagcguggccagccagagcaucauugccuacacaaugucucugggcgccgagaacagcguggccuacuccaacaacucuaucgcuauccccaccaacuucaccaucagcgugaccaccgagauccugccuguguccaugaccaagaccagcguggacugcaccauguacaucugcggcgauuccaccgagugcuccaaccugcugcugcaguacggcagcuucugcacccagcugaauagagcccugacagggaucgccguggaacaggacaagaacacccaagagguguucgcccaagugaagcaaaucuacaagaccccuccuaucaaggacuucggcggcuucaauuucagccagauucugcccgauccuagcaagcccagcaagcggagcuucaucgaggaccugcuguucaacaaagugacacuggccgacgccggcuucaucaagcaguauggcgauugucugggcgacauugccgccagggaucugauuugcgcccagaaguuuaacggacugacagugcugccuccucugcugaccgaugagaugaucgcccaguacugcucugcccugcuggccggcacaaucacaagcggcuggacauuuggagcuggcgccgcucugcagauccccuuugcuaugcagauggccuaccgguucaacggcaucggagugacccagaaugugcuguacgagaaccagaagcugaucgccaaccaguucaacagcgccaucggcaagauccaggacagccugagcagcacagcaagcgcccugggaaagcugcaggacguggucaaccagaaugcccaggcacugaacacccuggucaagcagcuguccuccaacuucggcgccaucagcucugugcugaacgauauccugagcagacuggacaaggucgaggccgaggugcagaucgacagacugaucacaggcagacugcagagccuccagacauacgugacccagcagcugaucagagccgccgagauuagagccucugccaaucuggccgccaccaagaugucugagugugugcugggccagagcaagagaguggacuuuugcggcaagggcuaccaccugaugagcuucccucagugcgccccucacggcgugguguuucugcacgugacauaugugcccgcucaagagaagaauuucaccaccgcuccagccaucugccacgacggcaaagcccacuuuccuagagaaggcguguucguguccaacggcacccauugguucgugacacagcggaacuucuacgagccccagaucaucaccaccgacaacaccuucgugucuggcaacugcgacguugugaucggcauugugaacaauaccguguacgacccucugcagcccgagcuggacagcuucaaagaggaacuggacaaguacuuuaagaaccacacaagccccgacguggaccugggcgauaucagcggaaucaaugccagcgucgugaacauccagaaagagaucgaccggcugaacgagguggccaagaaucugaacgagagccugaucgaccugcaagaacuggggaaguacgagcaguacaucaagggaggcggaggaucugacaucaucaagcugcugaacgagcaagugaacaaagagaugcagagcagcaaccuguacaugagcaugagcagcuggugcuacacccacagccuugauggcgccggacuguuccuguuugaucacgccgccgaggaauacgagcacgccaagaagcugaucaucuuccugaacgagaacaacgugcccgugcagcugaccagcauuucugccccugagcacaaguucgagggccugacacagaucuuccagaaggccuacgaacacgagcagcacaucagcgagagcaucaacaacaucguggaccacgccauuaagagcaaggaucacgccaccuucaacuuucugcagugguacguggccgaacagcacgaggaagaggugcuguucaaggacauccuggacaagaucgagcugaucggcaacgagaaccacggccuguaucuggccgaccaguacgugaagggaaucgccaagagcagaaagagcugaggacuagucccuguucccagagcccacuuuuuuuucuuuuuuugaaauaaaauagccugucuuucagaucucaaaggcucuuuucagagccaccaaaaaaaaaaaaaaaaaaaaaaaaaaaaaaaaaaaaaaaaaaaaaaaaaaaaaaaaaaaaaaaaaaaaaaaaaaaaaaaaaaaaaaaaaaaaaaaaaaaaa

SEQ ID NO: 12586 - RNA, 3998 nt, Artificial Sequence
  SARS-CoV-2/Wuhan/WIV05/2019__EPI_ISL_402128 spike protein mRNA gc mod (1-1211) Foldon construct
aggagagucccgcagucggcguccagcggcucugcuuguucgugugugugucguugcaggccuuauucaagcuuaccauguucguguuucuggugcugcugccccugguguccagccagugugugaaccugaccaccagaacacagcugccuccagccuacaccaacagcuucaccagaggcguguacuaccccgacaagguguucagauccagcgugcugcacucuacccaggaccuguuccugccuuucuucagcaacgugaccugguuccacgccauccacguguccggcaccaauggcaccaagagauucgacaaccccgugcugcccuucaacgacgggguguacuuugccagcaccgagaaguccaacaucaucagaggcuggaucuucggcaccacacuggacagcaagacccagagccugcugaucgugaacaacgccaccaacguggucaucaaagugugcgaguuccaguucugcaacgaccccuuccugggcgucuacuaccacaagaacaacaagagcuggauggaaagcgaguuccggguguacagcagcgccaacaacugcaccuucgaguacgugucccagccuuuccugauggaccuggaaggcaagcagggcaacuucaagaaccugcgcgaguucguguucaagaacaucgacggcuacuucaaaaucuacagcaagcacaccccuaucaaccucgugcgggaucugccucagggcuucucugcucuggaaccccugguggaucugcccaucggcaucaacaucacccgguuucagacacugcuggcccugcacagaagcuaccugacaccuggcgauagcagcagcggauggacagcuggugccgccgcuuacuaugugggcuaccugcagccuagaaccuuccugcugaaguacaacgagaacggcaccaucaccgacgccguggauugugcucuggauccucugagcgagacaaagugcacccugaaguccuucaccguggaaaagggcaucuaccagaccagcaacuuccgggugcagcccaccgaauccaucgugcgguuccccaauaucaccaaucugugccccuucggcgagguguucaaugccaccagauucgccucuguguacgccuggaaccggaagcggaucagcaauugcguggccgacuacuccgugcuguacaacuccgccagcuucagcaccuucaagugcuacggcguguccccuaccaagcugaacgaccugugcuucacaaacguguacgccgacagcuucgugauccggggagaugaagugcggcagauugccccuggacagacaggcaagaucgccgacuacaacuacaagcugcccgacgacuucaccggcugugugauugccuggaacagcaacaaccuggacuccaaagucggcggcaacuacaauuaccuguaccggcuguuccggaaguccaaucugaagcccuucgagcgggacaucagcaccgaaaucuaucaggccggcagcaccccuugcaacggcguggaaggcuucaacugcuacuucccacugcaguccuacggcuuucagcccacaaauggcgugggcuaucagcccuacagagugguggugcugagcuucgaacugcugcaugcuccugccacagugugcggcccuaagaaaagcaccaaucucgugaagaacaaaugcgugaacuucaacuucaacggccugaccggcaccggcgugcugacagagagcaacaagaaguuccugccauuccagcaguuuggccgggauaucgccgauaccacagacgccguuagagauccccagacacuggaaauccuggacaucaccccaugcagcuucggcggagugucugugaucaccccuggcaccaacaccagcaaucagguggcagugcuguaccaggacgugaacuguaccgaagugcccguggccauucacgccgaucagcugacaccuacauggcggguguacuccaccggcagcaauguguuucagaccagagccggcugucugaucggagccgagcacgugaacaauagcuacgagugcgacauccccaucggcgcuggcaucugugccagcuaccagacacagacaaacagccccagacgggcuagaagcguggccagccagagcaucauugccuacacaaugucucugggcgccgagaacagcguggccuacuccaacaacucuaucgcuauccccaccaacuucaccaucagcgugaccaccgagauccugccuguguccaugaccaagaccagcguggacugcaccauguacaucugcggcgauuccaccgagugcuccaaccugcugcugcaguacggcagcuucugcacccagcugaauagagcccugacagggaucgccguggaacaggacaagaacacccaagagguguucgcccaagugaagcaaaucuacaagaccccuccuaucaaggacuucggcggcuucaauuucagccagauucugcccgauccuagcaagcccagcaagcggagcuucaucgaggaccugcuguucaacaaagugacacuggccgacgccggcuucaucaagcaguauggcgauugucugggcgacauugccgccagggaucugauuugcgcccagaaguuuaacggacugacagugcugccuccucugcugaccgaugagaugaucgcccaguacacaucugcccugcuggccggcacaaucacaagcggcuggacauuuggagcuggcgccgcucugcagauccccuuugcuaugcagauggccuaccgguucaacggcaucggagugacccagaaugugcuguacgagaaccagaagcugaucgccaaccaguucaacagcgccaucggcaagauccaggacagccugagcagcacagcaagcgcccugggaaagcugcaggacguggucaaccagaaugcccaggcacugaacacccuggucaagcagcuguccuccaacuucggcgccaucagcucugugcugaacgauauccugagcagacuggacaaggucgaggccgaggugcagaucgacagacugaucacaggcagacugcagagccuccagacauacgugacccagcagcugaucagagccgccgagauuagagccucugccaaucuggccgccaccaagaugucugagugugugcugggccagagcaagagaguggacuuuugcggcaagggcuaccaccugaugagcuucccucagucugccccucacggcgugguguuucugcacgugacauaugugcccgcucaagagaagaauuucaccaccgcuccagccaucugccacgacggcaaagcccacuuuccuagagaaggcguguucguguccaacggcacccauugguucgugacacagcggaacuucuacgagccccagaucaucaccaccgacaacaccuucgugucuggcaacugcgacguugugaucggcauugugaacaauaccguguacgacccucugcagcccgagcuggacagcuucaaagaggaacuggacaaguacuuuaagaaccacacaagccccgacguggaccugggcgauaucagcggaaucaaugccagcgucgugaacauccagaaagagaucgaccggcugaacgagguggccaagaaucugaacgagagccugaucgaccugcaagaacuggggaaguacgagcaguacaucaagggaggaucuggcuauauccccgaggcuccuagagauggccaggccuauguucggaaggauggcgaaugggugcugcugagcaccuuccuuugaggacuagucccuguucccagagcccacuuuuuuuucuuuuuuugaaauaaaauagccugucuuucagaucucaaaggcucuuuucagagccaccaaaaaaaaaaaaaaaaaaaaaaaaaaaaaaaaaaaaaaaaaaaaaaaaaaaaaaaaaaaaaaaaaaaaaaaaaaaaaaaaaaaaaaaaaaaaaaaaaaaaa

SEQ ID NO: 12587 - RNA, 3998 nt, Artificial Sequence
  SARS-CoV-2/Wuhan/WIV05/2019__EPI_ISL_402128 spike protein mRNA gc mod (1-1211)(K986P_V987P) Foldon construct
aggagagucccgcagucggcguccagcggcucugcuuguucgugugugugucguugcaggccuuauucaagcuuaccauguucguguuucuggugcugcugccccugguguccagccagugugugaaccugaccaccagaacacagcugccuccagccuacaccaacagcuucaccagaggcguguacuaccccgacaagguguucagauccagcgugcugcacucuacccaggaccuguuccugccuuucuucagcaacgugaccugguuccacgccauccacguguccggcaccaauggcaccaagagauucgacaaccccgugcugcccuucaacgacgggguguacuuugccagcaccgagaaguccaacaucaucagaggcuggaucuucggcaccacacuggacagcaagacccagagccugcugaucgugaacaacgccaccaacguggucaucaaagugugcgaguuccaguucugcaacgaccccuuccugggcgucuacuaccacaagaacaacaagagcuggauggaaagcgaguuccggguguacagcagcgccaacaacugcaccuucgaguacgugucccagccuuuccugauggaccuggaaggcaagcagggcaacuucaagaaccugcgcgaguucguguucaagaacaucgacggcuacuucaaaaucuacagcaagcacaccccuaucaaccucgugcgggaucugccucagggcuucucugcucuggaaccccugguggaucugcccaucggcaucaacaucacccgguuucagacacugcuggcccugcacagaagcuaccugacaccuggcgauagcagcagcggauggacagcuggugccgccgcuuacuaugugggcuaccugcagccuagaaccuuccugcugaaguacaacgagaacggcaccaucaccgacgccguggauugugcucuggauccucugagcgagacaaagugcacccugaaguccuucaccguggaaaagggcaucuaccagaccagcaacuuccgggugcagcccaccgaauccaucgugcgguuccccaauaucaccaaucugugccccuucggcgagguguucaaugccaccagauucgccucuguguacgccuggaaccggaagcggaucagcaauugcguggccgacuacuccgugcuguacaacuccgccagcuucagcaccuucaagugcuacggcguguccccuaccaagcugaacgaccugugcuucacaaacguguacgccgacagcuucgugauccggggagaugaagugcggcagauugccccuggacagacaggcaagaucgccgacuacaacuacaagcugcccgacgacuucaccggcugugugauugccuggaacagcaacaaccuggacuccaaagucggcggcaacuacaauuaccuguaccggcuguuccggaaguccaaucugaagcccuucgagcgggacaucagcaccgaaaucuaucaggccggcagcaccccuugcaacggcguggaaggcuucaacugcuacuucccacugcaguccuacggcuuucagcccacaaauggcgugggcuaucagcccuacagagugguggugcugagcuucgaacugcugcaugcuccugccacagugugcggcccuaagaaaagcaccaaucucgugaagaacaaaugcgugaacuucaacuucaacggccugaccggcaccggcgugcugacagagagcaacaagaaguuccugccauuccagcaguuuggccgggauaucgccgauaccacagacgccguuagagauccccagacacuggaaauccuggacaucaccccaugcagcuucggcggagugucugugaucaccccuggcaccaacaccagcaaucagguggcagugcuguaccaggacgugaacuguaccgaagugcccguggccauucacgccgaucagcugacaccuacauggcggguguacuccaccggcagcaauguguuucagaccagagccggcugucugaucggagccgagcacgugaacaauagcuacgagugcgacauccccaucggcgcuggcaucugugccagcuaccagacacagacaaacagccccagacgggcuagaagcguggccagccagagcaucauugccuacacaaugucucugggcgccgagaacagcguggccuacuccaacaacucuaucgcuauccccaccaacuucaccaucagcgugaccaccgagauccugccuguguccaugaccaagaccagcguggacugcaccauguacaucugcggcgauuccaccgagugcuccaaccugcugcugcaguacggcagcuucugcacccagcugaauagagcccugacagggaucgccguggaacaggacaagaacacccaagagguguucgcccaagugaagcaaaucuacaagaccccuccuaucaaggacuucggcggcuucaauuucagccagauucugcccgauccuagcaagcccagcaagcggagcuucaucgaggaccugcuguucaacaaagugacacuggccgacgccggcuucaucaagcaguauggcgauugucugggcgacauugccgccagggaucugauuugcgcccagaaguuuaacggacugacagugcugccuccucugcugaccgaugagaugaucgcccaguacacaucugcccugcuggccggcacaaucacaagcggcuggacauuuggagcuggcgccgcucugcagauccccuuugcuaugcagauggccuaccgguucaacggcaucggagugacccagaaugugcuguacgagaaccagaagcugaucgccaaccaguucaacagcgccaucggcaagauccaggacagccugagcagcacagcaagcgcccugggaaagcugcaggacguggucaaccagaaugcccaggcacugaacacccuggucaagcagcuguccuccaacuucggcgccaucagcucugugcugaacgauauccugagcagacuggacccuccugaggccgaggugcagaucgacagacugaucacaggcagacugcagagccuccagacauacgugacccagcagcugaucagagccgccgagauuagagccucugccaaucuggccgccaccaagaugucugagugugugcugggccagagcaagagaguggacuuuugcggcaagggcuaccaccugaugagcuucccucagucugccccucacggcgugguguuucugcacgugacauaugugcccgcucaagagaagaauuucaccaccgcuccagccaucugccacgacggcaaagcccacuuuccuagagaaggcguguucguguccaacggcacccauugguucgugacacagcggaacuucuacgagccccagaucaucaccaccgacaacaccuucgugucuggcaacugcgacguugugaucggcauugugaacaauaccguguacgacccucugcagcccgagcuggacagcuucaaagaggaacuggacaaguacuuuaagaaccacacaagccccgacguggaccugggcgauaucagcggaaucaaugccagcgucgugaacauccagaaagagaucgaccggcugaacgagguggccaagaaucugaacgagagccugaucgaccugcaagaacuggggaaguacgagcaguacaucaagggaggaucuggcuauauccccgaggcuccuagagauggccaggccuauguucggaaggauggcgaaugggugcugcugagcaccuuccuuugaggacuagucccuguucccagagcccacuuuuuuuucuuuuuuugaaauaaaauagccugucuuucagaucucaaaggcucuuuucagagccaccaaaaaaaaaaaaaaaaaaaaaaaaaaaaaaaaaaaaaaaaaaaaaaaaaaaaaaaaaaaaaaaaaaaaaaaaaaaaaaaaaaaaaaaaaaaaaaaaaaaaa

SEQ ID NO: 12588 - RNA, 3998 nt, Artificial Sequence
  SARS-CoV-2/Wuhan/WIV05/2019__EPI_ISL_402128 spike protein mRNA gc mod (1-1211)(K986P_V987P_T887WN_A1020W) Foldon construct
aggagagucccgcagucggcguccagcggcucugcuuguucgugugugugucguugcaggccuuauucaagcuuaccauguucguguuucuggugcugcugccccugguguccagccagugugugaaccugaccaccagaacacagcugccuccagccuacaccaacagcuucaccagaggcguguacuaccccgacaagguguucagauccagcgugcugcacucuacccaggaccuguuccugccuuucuucagcaacgugaccugguuccacgccauccacguguccggcaccaauggcaccaagagauucgacaaccccgugcugcccuucaacgacgggguguacuuugccagcaccgagaaguccaacaucaucagaggcuggaucuucggcaccacacuggacagcaagacccagagccugcugaucgugaacaacgccaccaacguggucaucaaagugugcgaguuccaguucugcaacgaccccuuccugggcgucuacuaccacaagaacaacaagagcuggauggaaagcgaguuccggguguacagcagcgccaacaacugcaccuucgaguacgugucccagccuuuccugauggaccuggaaggcaagcagggcaacuucaagaaccugcgcgaguucguguucaagaacaucgacggcuacuucaaaaucuacagcaagcacaccccuaucaaccucgugcgggaucugccucagggcuucucugcucuggaaccccugguggaucugcccaucggcaucaacaucacccgguuucagacacugcuggcccugcacagaagcuaccugacaccuggcgauagcagcagcggauggacagcuggugccgccgcuuacuaugugggcuaccugcagccuagaaccuuccugcugaaguacaacgagaacggcaccaucaccgacgccguggauugugcucuggauccucugagcgagacaaagugcacccugaaguccuucaccguggaaaagggcaucuaccagaccagcaacuuccgggugcagcccaccgaauccaucgugcgguuccccaauaucaccaaucugugccccuucggcgagguguucaaugccaccagauucgccucuguguacgccuggaaccggaagcggaucagcaauugcguggccgacuacuccgugcuguacaacuccgccagcuucagcaccuucaagugcuacggcguguccccuaccaagcugaacgaccugugcuucacaaacguguacgccgacagcuucgugauccggggagaugaagugcggcagauugccccuggacagacaggcaagaucgccgacuacaacuacaagcugcccgacgacuucaccggcugugugauugccuggaacagcaacaaccuggacuccaaagucggcggcaacuacaauuaccuguaccggcuguuccggaaguccaaucugaagcccuucgagcgggacaucagcaccgaaaucuaucaggccggcagcaccccuugcaacggcguggaaggcuucaacugcuacuucccacugcaguccuacggcuuucagcccacaaauggcgugggcuaucagcccuacagagugguggugcugagcuucgaacugcugcaugcuccugccacagugugcggcccuaagaaaagcaccaaucucgugaagaacaaaugcgugaacuucaacuucaacggccugaccggcaccggcgugcugacagagagcaacaagaaguuccugccauuccagcaguuuggccgggauaucgccgauaccacagacgccguuagagauccccagacacuggaaauccuggacaucaccccaugcagcuucggcggagugucugugaucaccccuggcaccaacaccagcaaucagguggcagugcuguaccaggacgugaacuguaccgaagugcccguggccauucacgccgaucagcugacaccuacauggcggguguacuccaccggcagcaauguguuucagaccagagccggcugucugaucggagccgagcacgugaacaauagcuacgagugcgacauccccaucggcgcuggcaucugugccagcuaccagacacagacaaacagccccagacgggcuagaagcguggccagccagagcaucauugccuacacaaugucucugggcgccgagaacagcguggccuacuccaacaacucuaucgcuauccccaccaacuucaccaucagcgugaccaccgagauccugccuguguccaugaccaagaccagcguggacugcaccauguacaucugcggcgauuccaccgagugcuccaaccugcugcugcaguacggcagcuucugcacccagcugaauagagcccugacagggaucgccguggaacaggacaagaacacccaagagguguucgcccaagugaagcaaaucuacaagaccccuccuaucaaggacuucggcggcuucaauuucagccagauucugcccgauccuagcaagcccagcaagcggagcuucaucgaggaccugcuguucaacaaagugacacuggccgacgccggcuucaucaagcaguauggcgauugucugggcgacauugccgccagggaucugauuugcgcccagaaguuuaacggacugacagugcugccuccucugcugaccgaugagaugaucgcccaguacacaucugcccugcuggccggcacaaucacaagcggcuggugguuuggagcuggcgccgcucugcagauccccuuugcuaugcagauggccuaccgguucaacggcaucggagugacccagaaugugcuguacgagaaccagaagcugaucgccaaccaguucaacagcgccaucggcaagauccaggacagccugagcagcacagcaagcgcccugggaaagcugcaggacguggucaaccagaaugcccaggcacugaacacccuggucaagcagcuguccuccaacuucggcgccaucagcucugugcugaacgauauccugagcagacuggacccuccugaggccgaggugcagaucgacagacugaucacaggcagacugcagagccuccagacauacgugacccagcagcugaucagagccgccgagauuagauggucugccaaucuggccgccaccaagaugucugagugugugcugggccagagcaagagaguggacuuuugcggcaagggcuaccaccugaugagcuucccucagucugccccucacggcgugguguuucugcacgugacauaugugcccgcucaagagaagaauuucaccaccgcuccagccaucugccacgacggcaaagcccacuuuccuagagaaggcguguucguguccaacggcacccauugguucgugacacagcggaacuucuacgagccccagaucaucaccaccgacaacaccuucgugucuggcaacugcgacguugugaucggcauugugaacaauaccguguacgacccucugcagcccgagcuggacagcuucaaagaggaacuggacaaguacuuuaagaaccacacaagccccgacguggaccugggcgauaucagcggaaucaaugccagcgucgugaacauccagaaagagaucgaccggcugaacgagguggccaagaaucugaacgagagccugaucgaccugcaagaacuggggaaguacgagcaguacaucaagggaggaucuggcuauauccccgaggcuccuagagauggccaggccuauguucggaaggauggcgaaugggugcugcugagcaccuuccuuugaggacuagucccuguucccagagcccacuuuuuuuucuuuuuuugaaauaaaauagccugucuuucagaucucaaaggcucuuuucagagccaccaaaaaaaaaaaaaaaaaaaaaaaaaaaaaaaaaaaaaaaaaaaaaaaaaaaaaaaaaaaaaaaaaaaaaaaaaaaaaaaaaaaaaaaaaaaaaaaaaaaaa

SEQ ID NO: 12589 - RNA, 3998 nt, Artificial Sequence
  SARS-CoV-2/Wuhan/WIV05/2019__EPI_ISL_402128 spike protein mRNA gc mod (1-1211)(K986P_V987P_P1069F) Foldon construct
aggagagucccgcagucggcguccagcggcucugcuuguucgugugugugucguugcaggccuuauucaagcuuaccauguucguguuucuggugcugcugccccugguguccagccagugugugaaccugaccaccagaacacagcugccuccagccuacaccaacagcuucaccagaggcguguacuaccccgacaagguguucagauccagcgugcugcacucuacccaggaccuguuccugccuuucuucagcaacgugaccugguuccacgccauccacguguccggcaccaauggcaccaagagauucgacaaccccgugcugcccuucaacgacgggguguacuuugccagcaccgagaaguccaacaucaucagaggcuggaucuucggcaccacacuggacagcaagacccagagccugcugaucgugaacaacgccaccaacguggucaucaaagugugcgaguuccaguucugcaacgaccccuuccugggcgucuacuaccacaagaacaacaagagcuggauggaaagcgaguuccggguguacagcagcgccaacaacugcaccuucgaguacgugucccagccuuuccugauggaccuggaaggcaagcagggcaacuucaagaaccugcgcgaguucguguucaagaacaucgacggcuacuucaaaaucuacagcaagcacaccccuaucaaccucgugcgggaucugccucagggcuucucugcucuggaaccccugguggaucugcccaucggcaucaacaucacccgguuucagacacugcuggcccugcacagaagcuaccugacaccuggcgauagcagcagcggauggacagcuggugccgccgcuuacuaugugggcuaccugcagccuagaaccuuccugcugaaguacaacgagaacggcaccaucaccgacgccguggauugugcucuggauccucugagcgagacaaagugcacccugaaguccuucaccguggaaaagggcaucuaccagaccagcaacuuccgggugcagcccaccgaauccaucgugcgguuccccaauaucaccaaucugugccccuucggcgagguguucaaugccaccagauucgccucuguguacgccuggaaccggaagcggaucagcaauugcguggccgacuacuccgugcuguacaacuccgccagcuucagcaccuucaagugcuacggcguguccccuaccaagcugaacgaccugugcuucacaaacguguacgccgacagcuucgugauccggggagaugaagugcggcagauugccccuggacagacaggcaagaucgccgacuacaacuacaagcugcccgacgacuucaccggcugugugauugccuggaacagcaacaaccuggacuccaaagucggcggcaacuacaauuaccuguaccggcuguuccggaaguccaaucugaagcccuucgagcgggacaucagcaccgaaaucuaucaggccggcagcaccccuugcaacggcguggaaggcuucaacugcuacuucccacugcaguccuacggcuuucagcccacaaauggcgugggcuaucagcccuacagagugguggugcugagcuucgaacugcugcaugcuccugccacagugugcggcccuaagaaaagcaccaaucucgugaagaacaaaugcgugaacuucaacuucaacggccugaccggcaccggcgugcugacagagagcaacaagaaguuccugccauuccagcaguuuggccgggauaucgccgauaccacagacgccguuagagauccccagacacuggaaauccuggacaucaccccaugcagcuucggcggagugucugugaucaccccuggcaccaacaccagcaaucagguggcagugcuguaccaggacgugaacuguaccgaagugcccguggccauucacgccgaucagcugacaccuacauggcggguguacuccaccggcagcaauguguuucagaccagagccggcugucugaucggagccgagcacgugaacaauagcuacgagugcgacauccccaucggcgcuggcaucugugccagcuaccagacacagacaaacagccccagacgggcuagaagcguggccagccagagcaucauugccuacacaaugucucugggcgccgagaacagcguggccuacuccaacaacucuaucgcuauccccaccaacuucaccaucagcgugaccaccgagauccugccuguguccaugaccaagaccagcguggacugcaccauguacaucugcggcgauuccaccgagugcuccaaccugcugcugcaguacggcagcuucugcacccagcugaauagagcccugacagggaucgccguggaacaggacaagaacacccaagagguguucgcccaagugaagcaaaucuacaagaccccuccuaucaaggacuucggcggcuucaauuucagccagauucugcccgauccuagcaagcccagcaagcggagcuucaucgaggaccugcuguucaacaaagugacacuggccgacgccggcuucaucaagcaguauggcgauugucugggcgacauugccgccagggaucugauuugcgcccagaaguuuaacggacugacagugcugccuccucugcugaccgaugagaugaucgcccaguacacaucugcccugcuggccggcacaaucacaagcggcuggacauuuggagcuggcgccgcucugcagauccccuuugcuaugcagauggccuaccgguucaacggcaucggagugacccagaaugugcuguacgagaaccagaagcugaucgccaaccaguucaacagcgccaucggcaagauccaggacagccugagcagcacagcaagcgcccugggaaagcugcaggacguggucaaccagaaugcccaggcacugaacacccuggucaagcagcuguccuccaacuucggcgccaucagcucugugcugaacgauauccugagcagacuggacccuccugaggccgaggugcagaucgacagacugaucacaggcagacugcagagccuccagacauacgugacccagcagcugaucagagccgccgagauuagagccucugccaaucuggccgccaccaagaugucugagugugugcugggccagagcaagagaguggacuuuugcggcaagggcuaccaccugaugagcuucccucagucugccccucacggcgugguguuucugcacgugacauauguguucgcucaagagaagaauuucaccaccgcuccagccaucugccacgacggcaaagcccacuuuccuagagaaggcguguucguguccaacggcacccauugguucgugacacagcggaacuucuacgagccccagaucaucaccaccgacaacaccuucgugucuggcaacugcgacguugugaucggcauugugaacaauaccguguacgacccucugcagcccgagcuggacagcuucaaagaggaacuggacaaguacuuuaagaaccacacaagccccgacguggaccugggcgauaucagcggaaucaaugccagcgucgugaacauccagaaagagaucgaccggcugaacgagguggccaagaaucugaacgagagccugaucgaccugcaagaacuggggaaguacgagcaguacaucaagggaggaucuggcuauauccccgaggcuccuagagauggccaggccuauguucggaaggauggcgaaugggugcugcugagcaccuuccuuugaggacuagucccuguucccagagcccacuuuuuuuucuuuuuuugaaauaaaauagccugucuuucagaucucaaaggcucuuuucagagccaccaaaaaaaaaaaaaaaaaaaaaaaaaaaaaaaaaaaaaaaaaaaaaaaaaaaaaaaaaaaaaaaaaaaaaaaaaaaaaaaaaaaaaaaaaaaaaaaaaaaaa

SEQ ID NO: 12590 - RNA, 3998 nt, Artificial Sequence
  SARS-CoV-2/Wuhan/WIV05/2019__EPI_ISL_402128 spike protein mRNA gc mod (1-1211)(K986P_V987P_ H1048Q_H1064N_ H1083N_H1101N) Foldon construct
aggagagucccgcagucggcguccagcggcucugcuuguucgugugugugucguugcaggccuuauucaagcuuaccauguucguguuucuggugcugcugccccugguguccagccagugugugaaccugaccaccagaacacagcugccuccagccuacaccaacagcuucaccagaggcguguacuaccccgacaagguguucagauccagcgugcugcacucuacccaggaccuguuccugccuuucuucagcaacgugaccugguuccacgccauccacguguccggcaccaauggcaccaagagauucgacaaccccgugcugcccuucaacgacgggguguacuuugccagcaccgagaaguccaacaucaucagaggcuggaucuucggcaccacacuggacagcaagacccagagccugcugaucgugaacaacgccaccaacguggucaucaaagugugcgaguuccaguucugcaacgaccccuuccugggcgucuacuaccacaagaacaacaagagcuggauggaaagcgaguuccggguguacagcagcgccaacaacugcaccuucgaguacgugucccagccuuuccugauggaccuggaaggcaagcagggcaacuucaagaaccugcgcgaguucguguucaagaacaucgacggcuacuucaaaaucuacagcaagcacaccccuaucaaccucgugcgggaucugccucagggcuucucugcucuggaaccccugguggaucugcccaucggcaucaacaucacccgguuucagacacugcuggcccugcacagaagcuaccugacaccuggcgauagcagcagcggauggacagcuggugccgccgcuuacuaugugggcuaccugcagccuagaaccuuccugcugaaguacaacgagaacggcaccaucaccgacgccguggauugugcucuggauccucugagcgagacaaagugcacccugaaguccuucaccguggaaaagggcaucuaccagaccagcaacuuccgggugcagcccaccgaauccaucgugcgguuccccaauaucaccaaucugugccccuucggcgagguguucaaugccaccagauucgccucuguguacgccuggaaccggaagcggaucagcaauugcguggccgacuacuccgugcuguacaacuccgccagcuucagcaccuucaagugcuacggcguguccccuaccaagcugaacgaccugugcuucacaaacguguacgccgacagcuucgugauccggggagaugaagugcggcagauugccccuggacagacaggcaagaucgccgacuacaacuacaagcugcccgacgacuucaccggcugugugauugccuggaacagcaacaaccuggacuccaaagucggcggcaacuacaauuaccuguaccggcuguuccggaaguccaaucugaagcccuucgagcgggacaucagcaccgaaaucuaucaggccggcagcaccccuugcaacggcguggaaggcuucaacugcuacuucccacugcaguccuacggcuuucagcccacaaauggcgugggcuaucagcccuacagagugguggugcugagcuucgaacugcugcaugcuccugccacagugugcggcccuaagaaaagcaccaaucucgugaagaacaaaugcgugaacuucaacuucaacggccugaccggcaccggcgugcugacagagagcaacaagaaguuccugccauuccagcaguuuggccgggauaucgccgauaccacagacgccguuagagauccccagacacuggaaauccuggacaucaccccaugcagcuucggcggagugucugugaucaccccuggcaccaacaccagcaaucagguggcagugcuguaccaggacgugaacuguaccgaagugcccguggccauucacgccgaucagcugacaccuacauggcggguguacuccaccggcagcaauguguuucagaccagagccggcugucugaucggagccgagcacgugaacaauagcuacgagugcgacauccccaucggcgcuggcaucugugccagcuaccagacacagacaaacagccccagacgggcuagaagcguggccagccagagcaucauugccuacacaaugucucugggcgccgagaacagcguggccuacuccaacaacucuaucgcuauccccaccaacuucaccaucagcgugaccaccgagauccugccuguguccaugaccaagaccagcguggacugcaccauguacaucugcggcgauuccaccgagugcuccaaccugcugcugcaguacggcagcuucugcacccagcugaauagagcccugacagggaucgccguggaacaggacaagaacacccaagagguguucgcccaagugaagcaaaucuacaagaccccuccuaucaaggacuucggcggcuucaauuucagccagauucugcccgauccuagcaagcccagcaagcggagcuucaucgaggaccugcuguucaacaaagugacacuggccgacgccggcuucaucaagcaguauggcgauugucugggcgacauugccgccagggaucugauuugcgcccagaaguuuaacggacugacagugcugccuccucugcugaccgaugagaugaucgcccaguacacaucugcccugcuggccggcacaaucacaagcggcuggacauuuggagcuggcgccgcucugcagauccccuuugcuaugcagauggccuaccgguucaacggcaucggagugacccagaaugugcuguacgagaaccagaagcugaucgccaaccaguucaacagcgccaucggcaagauccaggacagccugagcagcacagcaagcgcccugggaaagcugcaggacguggucaaccagaaugcccaggcacugaacacccuggucaagcagcuguccuccaacuucggcgccaucagcucugugcugaacgauauccugagcagacuggacccuccugaggccgaggugcagaucgacagacugaucacaggcagacugcagagccuccagacauacgugacccagcagcugaucagagccgccgagauuagagccucugccaaucuggccgccaccaagaugucugagugugugcugggccagagcaagagaguggacuuuugcggcaagggcuaccagcugaugagcuucccucagucugccccucacggcgugguguuucugaacgugacauaugugcccgcucaagagaagaauuucaccaccgcuccagccaucugcaacgacggcaaagcccacuuuccuagagaaggcguguucguguccaacggcaccaacugguucgugacacagcggaacuucuacgagccccagaucaucaccaccgacaacaccuucgugucuggcaacugcgacguugugaucggcauugugaacaauaccguguacgacccucugcagcccgagcuggacagcuucaaagaggaacuggacaaguacuuuaagaaccacacaagccccgacguggaccugggcgauaucagcggaaucaaugccagcgucgugaacauccagaaagagaucgaccggcugaacgagguggccaagaaucugaacgagagccugaucgaccugcaagaacuggggaaguacgagcaguacaucaagggaggaucuggcuauauccccgaggcuccuagagauggccaggccuauguucggaaggauggcgaaugggugcugcugagcaccuuccuuugaggacuagucccuguucccagagcccacuuuuuuuucuuuuuuugaaauaaaauagccugucuuucagaucucaaaggcucuuuucagagccaccaaaaaaaaaaaaaaaaaaaaaaaaaaaaaaaaaaaaaaaaaaaaaaaaaaaaaaaaaaaaaaaaaaaaaaaaaaaaaaaaaaaaaaaaaaaaaaaaaaaaa

SEQ ID NO: 12591 - RNA, 3998 nt, Artificial Sequence
  SARS-CoV-2/Wuhan/WIV05/2019__EPI_ISL_402128 spike protein mRNA gc mod (1-1211)(I712C_T1077C) Foldon construct
aggagagucccgcagucggcguccagcggcucugcuuguucgugugugugucguugcaggccuuauucaagcuuaccauguucguguuucuggugcugcugccccugguguccagccagugugugaaccugaccaccagaacacagcugccuccagccuacaccaacagcuucaccagaggcguguacuaccccgacaagguguucagauccagcgugcugcacucuacccaggaccuguuccugccuuucuucagcaacgugaccugguuccacgccauccacguguccggcaccaauggcaccaagagauucgacaaccccgugcugcccuucaacgacgggguguacuuugccagcaccgagaaguccaacaucaucagaggcuggaucuucggcaccacacuggacagcaagacccagagccugcugaucgugaacaacgccaccaacguggucaucaaagugugcgaguuccaguucugcaacgaccccuuccugggcgucuacuaccacaagaacaacaagagcuggauggaaagcgaguuccggguguacagcagcgccaacaacugcaccuucgaguacgugucccagccuuuccugauggaccuggaaggcaagcagggcaacuucaagaaccugcgcgaguucguguucaagaacaucgacggcuacuucaaaaucuacagcaagcacaccccuaucaaccucgugcgggaucugccucagggcuucucugcucuggaaccccugguggaucugcccaucggcaucaacaucacccgguuucagacacugcuggcccugcacagaagcuaccugacaccuggcgauagcagcagcggauggacagcuggugccgccgcuuacuaugugggcuaccugcagccuagaaccuuccugcugaaguacaacgagaacggcaccaucaccgacgccguggauugugcucuggauccucugagcgagacaaagugcacccugaaguccuucaccguggaaaagggcaucuaccagaccagcaacuuccgggugcagcccaccgaauccaucgugcgguuccccaauaucaccaaucugugccccuucggcgagguguucaaugccaccagauucgccucuguguacgccuggaaccggaagcggaucagcaauugcguggccgacuacuccgugcuguacaacuccgccagcuucagcaccuucaagugcuacggcguguccccuaccaagcugaacgaccugugcuucacaaacguguacgccgacagcuucgugauccggggagaugaagugcggcagauugccccuggacagacaggcaagaucgccgacuacaacuacaagcugcccgacgacuucaccggcugugugauugccuggaacagcaacaaccuggacuccaaagucggcggcaacuacaauuaccuguaccggcuguuccggaaguccaaucugaagcccuucgagcgggacaucagcaccgaaaucuaucaggccggcagcaccccuugcaacggcguggaaggcuucaacugcuacuucccacugcaguccuacggcuuucagcccacaaauggcgugggcuaucagcccuacagagugguggugcugagcuucgaacugcugcaugcuccugccacagugugcggcccuaagaaaagcaccaaucucgugaagaacaaaugcgugaacuucaacuucaacggccugaccggcaccggcgugcugacagagagcaacaagaaguuccugccauuccagcaguuuggccgggauaucgccgauaccacagacgccguuagagauccccagacacuggaaauccuggacaucaccccaugcagcuucggcggagugucugugaucaccccuggcaccaacaccagcaaucagguggcagugcuguaccaggacgugaacuguaccgaagugcccguggccauucacgccgaucagcugacaccuacauggcggguguacuccaccggcagcaauguguuucagaccagagccggcugucugaucggagccgagcacgugaacaauagcuacgagugcgacauccccaucggcgcuggcaucugugccagcuaccagacacagacaaacagccccagacgggcuagaagcguggccagccagagcaucauugccuacacaaugucucugggcgccgagaacagcguggccuacuccaacaacucuugcgcuauccccaccaacuucaccaucagcgugaccaccgagauccugccuguguccaugaccaagaccagcguggacugcaccauguacaucugcggcgauuccaccgagugcuccaaccugcugcugcaguacggcagcuucugcacccagcugaauagagcccugacagggaucgccguggaacaggacaagaacacccaagagguguucgcccaagugaagcaaaucuacaagaccccuccuaucaaggacuucggcggcuucaauuucagccagauucugcccgauccuagcaagcccagcaagcggagcuucaucgaggaccugcuguucaacaaagugacacuggccgacgccggcuucaucaagcaguauggcgauugucugggcgacauugccgccagggaucugauuugcgcccagaaguuuaacggacugacagugcugccuccucugcugaccgaugagaugaucgcccaguacacaucugcccugcuggccggcacaaucacaagcggcuggacauuuggagcuggcgccgcucugcagauccccuuugcuaugcagauggccuaccgguucaacggcaucggagugacccagaaugugcuguacgagaaccagaagcugaucgccaaccaguucaacagcgccaucggcaagauccaggacagccugagcagcacagcaagcgcccugggaaagcugcaggacguggucaaccagaaugcccaggcacugaacacccuggucaagcagcuguccuccaacuucggcgccaucagcucugugcugaacgauauccugagcagacuggacaaggucgaggccgaggugcagaucgacagacugaucacaggcagacugcagagccuccagacauacgugacccagcagcugaucagagccgccgagauuagagccucugccaaucuggccgccaccaagaugucugagugugugcugggccagagcaagagaguggacuuuugcggcaagggcuaccaccugaugagcuucccucagucugccccucacggcgugguguuucugcacgugacauaugugcccgcucaagagaagaauuucaccugugcuccagccaucugccacgacggcaaagcccacuuuccuagagaaggcguguucguguccaacggcacccauugguucgugacacagcggaacuucuacgagccccagaucaucaccaccgacaacaccuucgugucuggcaacugcgacguugugaucggcauugugaacaauaccguguacgacccucugcagcccgagcuggacagcuucaaagaggaacuggacaaguacuuuaagaaccacacaagccccgacguggaccugggcgauaucagcggaaucaaugccagcgucgugaacauccagaaagagaucgaccggcugaacgagguggccaagaaucugaacgagagccugaucgaccugcaagaacuggggaaguacgagcaguacaucaagggaggaucuggcuauauccccgaggcuccuagagauggccaggccuauguucggaaggauggcgaaugggugcugcugagcaccuuccuuugaggacuagucccuguucccagagcccacuuuuuuuucuuuuuuugaaauaaaauagccugucuuucagaucucaaaggcucuuuucagagccaccaaaaaaaaaaaaaaaaaaaaaaaaaaaaaaaaaaaaaaaaaaaaaaaaaaaaaaaaaaaaaaaaaaaaaaaaaaaaaaaaaaaaaaaaaaaaaaaaaaaaa

SEQ ID NO: 12592 - RNA, 3998 nt, Artificial Sequence
  SARS-CoV-2/Wuhan/WIV05/2019__EPI_ISL_402128 spike protein mRNA gc mod (1-1211)(I714C_Y1110C) Foldon construct
aggagagucccgcagucggcguccagcggcucugcuuguucgugugugugucguugcaggccuuauucaagcuuaccauguucguguuucuggugcugcugccccugguguccagccagugugugaaccugaccaccagaacacagcugccuccagccuacaccaacagcuucaccagaggcguguacuaccccgacaagguguucagauccagcgugcugcacucuacccaggaccuguuccugccuuucuucagcaacgugaccugguuccacgccauccacguguccggcaccaauggcaccaagagauucgacaaccccgugcugcccuucaacgacgggguguacuuugccagcaccgagaaguccaacaucaucagaggcuggaucuucggcaccacacuggacagcaagacccagagccugcugaucgugaacaacgccaccaacguggucaucaaagugugcgaguuccaguucugcaacgaccccuuccugggcgucuacuaccacaagaacaacaagagcuggauggaaagcgaguuccggguguacagcagcgccaacaacugcaccuucgaguacgugucccagccuuuccugauggaccuggaaggcaagcagggcaacuucaagaaccugcgcgaguucguguucaagaacaucgacggcuacuucaaaaucuacagcaagcacaccccuaucaaccucgugcgggaucugccucagggcuucucugcucuggaaccccugguggaucugcccaucggcaucaacaucacccgguuucagacacugcuggcccugcacagaagcuaccugacaccuggcgauagcagcagcggauggacagcuggugccgccgcuuacuaugugggcuaccugcagccuagaaccuuccugcugaaguacaacgagaacggcaccaucaccgacgccguggauugugcucuggauccucugagcgagacaaagugcacccugaaguccuucaccguggaaaagggcaucuaccagaccagcaacuuccgggugcagcccaccgaauccaucgugcgguuccccaauaucaccaaucugugccccuucggcgagguguucaaugccaccagauucgccucuguguacgccuggaaccggaagcggaucagcaauugcguggccgacuacuccgugcuguacaacuccgccagcuucagcaccuucaagugcuacggcguguccccuaccaagcugaacgaccugugcuucacaaacguguacgccgacagcuucgugauccggggagaugaagugcggcagauugccccuggacagacaggcaagaucgccgacuacaacuacaagcugcccgacgacuucaccggcugugugauugccuggaacagcaacaaccuggacuccaaagucggcggcaacuacaauuaccuguaccggcuguuccggaaguccaaucugaagcccuucgagcgggacaucagcaccgaaaucuaucaggccggcagcaccccuugcaacggcguggaaggcuucaacugcuacuucccacugcaguccuacggcuuucagcccacaaauggcgugggcuaucagcccuacagagugguggugcugagcuucgaacugcugcaugcuccugccacagugugcggcccuaagaaaagcaccaaucucgugaagaacaaaugcgugaacuucaacuucaacggccugaccggcaccggcgugcugacagagagcaacaagaaguuccugccauuccagcaguuuggccgggauaucgccgauaccacagacgccguuagagauccccagacacuggaaauccuggacaucaccccaugcagcuucggcggagugucugugaucaccccuggcaccaacaccagcaaucagguggcagugcuguaccaggacgugaacuguaccgaagugcccguggccauucacgccgaucagcugacaccuacauggcggguguacuccaccggcagcaauguguuucagaccagagccggcugucugaucggagccgagcacgugaacaauagcuacgagugcgacauccccaucggcgcuggcaucugugccagcuaccagacacagacaaacagccccagacgggcuagaagcguggccagccagagcaucauugccuacacaaugucucugggcgccgagaacagcguggccuacuccaacaacucuaucgcuugccccaccaacuucaccaucagcgugaccaccgagauccugccuguguccaugaccaagaccagcguggacugcaccauguacaucugcggcgauuccaccgagugcuccaaccugcugcugcaguacggcagcuucugcacccagcugaauagagcccugacagggaucgccguggaacaggacaagaacacccaagagguguucgcccaagugaagcaaaucuacaagaccccuccuaucaaggacuucggcggcuucaauuucagccagauucugcccgauccuagcaagcccagcaagcggagcuucaucgaggaccugcuguucaacaaagugacacuggccgacgccggcuucaucaagcaguauggcgauugucugggcgacauugccgccagggaucugauuugcgcccagaaguuuaacggacugacagugcugccuccucugcugaccgaugagaugaucgcccaguacacaucugcccugcuggccggcacaaucacaagcggcuggacauuuggagcuggcgccgcucugcagauccccuuugcuaugcagauggccuaccgguucaacggcaucggagugacccagaaugugcuguacgagaaccagaagcugaucgccaaccaguucaacagcgccaucggcaagauccaggacagccugagcagcacagcaagcgcccugggaaagcugcaggacguggucaaccagaaugcccaggcacugaacacccuggucaagcagcuguccuccaacuucggcgccaucagcucugugcugaacgauauccugagcagacuggacaaggucgaggccgaggugcagaucgacagacugaucacaggcagacugcagagccuccagacauacgugacccagcagcugaucagagccgccgagauuagagccucugccaaucuggccgccaccaagaugucugagugugugcugggccagagcaagagaguggacuuuugcggcaagggcuaccaccugaugagcuucccucagucugccccucacggcgugguguuucugcacgugacauaugugcccgcucaagagaagaauuucaccaccgcuccagccaucugccacgacggcaaagcccacuuuccuagagaaggcguguucguguccaacggcacccauugguucgugacacagcggaacuucugugagccccagaucaucaccaccgacaacaccuucgugucuggcaacugcgacguugugaucggcauugugaacaauaccguguacgacccucugcagcccgagcuggacagcuucaaagaggaacuggacaaguacuuuaagaaccacacaagccccgacguggaccugggcgauaucagcggaaucaaugccagcgucgugaacauccagaaagagaucgaccggcugaacgagguggccaagaaucugaacgagagccugaucgaccugcaagaacuggggaaguacgagcaguacaucaagggaggaucuggcuauauccccgaggcuccuagagauggccaggccuauguucggaaggauggcgaaugggugcugcugagcaccuuccuuugaggacuagucccuguucccagagcccacuuuuuuuucuuuuuuugaaauaaaauagccugucuuucagaucucaaaggcucuuuucagagccaccaaaaaaaaaaaaaaaaaaaaaaaaaaaaaaaaaaaaaaaaaaaaaaaaaaaaaaaaaaaaaaaaaaaaaaaaaaaaaaaaaaaaaaaaaaaaaaaaaaaaa

SEQ ID NO: 12593 - RNA, 3998 nt, Artificial Sequence
  SARS-CoV-2/Wuhan/WIV05/2019__EPI_ISL_402128 spike protein mRNA gc mod (1-1211)(P715C_P1069C) Foldon construct
aggagagucccgcagucggcguccagcggcucugcuuguucgugugugugucguugcaggccuuauucaagcuuaccauguucguguuucuggugcugcugccccugguguccagccagugugugaaccugaccaccagaacacagcugccuccagccuacaccaacagcuucaccagaggcguguacuaccccgacaagguguucagauccagcgugcugcacucuacccaggaccuguuccugccuuucuucagcaacgugaccugguuccacgccauccacguguccggcaccaauggcaccaagagauucgacaaccccgugcugcccuucaacgacgggguguacuuugccagcaccgagaaguccaacaucaucagaggcuggaucuucggcaccacacuggacagcaagacccagagccugcugaucgugaacaacgccaccaacguggucaucaaagugugcgaguuccaguucugcaacgaccccuuccugggcgucuacuaccacaagaacaacaagagcuggauggaaagcgaguuccggguguacagcagcgccaacaacugcaccuucgaguacgugucccagccuuuccugauggaccuggaaggcaagcagggcaacuucaagaaccugcgcgaguucguguucaagaacaucgacggcuacuucaaaaucuacagcaagcacaccccuaucaaccucgugcgggaucugccucagggcuucucugcucuggaaccccugguggaucugcccaucggcaucaacaucacccgguuucagacacugcuggcccugcacagaagcuaccugacaccuggcgauagcagcagcggauggacagcuggugccgccgcuuacuaugugggcuaccugcagccuagaaccuuccugcugaaguacaacgagaacggcaccaucaccgacgccguggauugugcucuggauccucugagcgagacaaagugcacccugaaguccuucaccguggaaaagggcaucuaccagaccagcaacuuccgggugcagcccaccgaauccaucgugcgguuccccaauaucaccaaucugugccccuucggcgagguguucaaugccaccagauucgccucuguguacgccuggaaccggaagcggaucagcaauugcguggccgacuacuccgugcuguacaacuccgccagcuucagcaccuucaagugcuacggcguguccccuaccaagcugaacgaccugugcuucacaaacguguacgccgacagcuucgugauccggggagaugaagugcggcagauugccccuggacagacaggcaagaucgccgacuacaacuacaagcugcccgacgacuucaccggcugugugauugccuggaacagcaacaaccuggacuccaaagucggcggcaacuacaauuaccuguaccggcuguuccggaaguccaaucugaagcccuucgagcgggacaucagcaccgaaaucuaucaggccggcagcaccccuugcaacggcguggaaggcuucaacugcuacuucccacugcaguccuacggcuuucagcccacaaauggcgugggcuaucagcccuacagagugguggugcugagcuucgaacugcugcaugcuccugccacagugugcggcccuaagaaaagcaccaaucucgugaagaacaaaugcgugaacuucaacuucaacggccugaccggcaccggcgugcugacagagagcaacaagaaguuccugccauuccagcaguuuggccgggauaucgccgauaccacagacgccguuagagauccccagacacuggaaauccuggacaucaccccaugcagcuucggcggagugucugugaucaccccuggcaccaacaccagcaaucagguggcagugcuguaccaggacgugaacuguaccgaagugcccguggccauucacgccgaucagcugacaccuacauggcggguguacuccaccggcagcaauguguuucagaccagagccggcugucugaucggagccgagcacgugaacaauagcuacgagugcgacauccccaucggcgcuggcaucugugccagcuaccagacacagacaaacagccccagacgggcuagaagcguggccagccagagcaucauugccuacacaaugucucugggcgccgagaacagcguggccuacuccaacaacucuaucgcuaucugcaccaacuucaccaucagcgugaccaccgagauccugccuguguccaugaccaagaccagcguggacugcaccauguacaucugcggcgauuccaccgagugcuccaaccugcugcugcaguacggcagcuucugcacccagcugaauagagcccugacagggaucgccguggaacaggacaagaacacccaagagguguucgcccaagugaagcaaaucuacaagaccccuccuaucaaggacuucggcggcuucaauuucagccagauucugcccgauccuagcaagcccagcaagcggagcuucaucgaggaccugcuguucaacaaagugacacuggccgacgccggcuucaucaagcaguauggcgauugucugggcgacauugccgccagggaucugauuugcgcccagaaguuuaacggacugacagugcugccuccucugcugaccgaugagaugaucgcccaguacacaucugcccugcuggccggcacaaucacaagcggcuggacauuuggagcuggcgccgcucugcagauccccuuugcuaugcagauggccuaccgguucaacggcaucggagugacccagaaugugcuguacgagaaccagaagcugaucgccaaccaguucaacagcgccaucggcaagauccaggacagccugagcagcacagcaagcgcccugggaaagcugcaggacguggucaaccagaaugcccaggcacugaacacccuggucaagcagcuguccuccaacuucggcgccaucagcucugugcugaacgauauccugagcagacuggacaaggucgaggccgaggugcagaucgacagacugaucacaggcagacugcagagccuccagacauacgugacccagcagcugaucagagccgccgagauuagagccucugccaaucuggccgccaccaagaugucugagugugugcugggccagagcaagagaguggacuuuugcggcaagggcuaccaccugaugagcuucccucagucugccccucacggcgugguguuucugcacgugacauaugugugugcucaagagaagaauuucaccaccgcuccagccaucugccacgacggcaaagcccacuuuccuagagaaggcguguucguguccaacggcacccauugguucgugacacagcggaacuucuacgagccccagaucaucaccaccgacaacaccuucgugucuggcaacugcgacguugugaucggcauugugaacaauaccguguacgacccucugcagcccgagcuggacagcuucaaagaggaacuggacaaguacuuuaagaaccacacaagccccgacguggaccugggcgauaucagcggaaucaaugccagcgucgugaacauccagaaagagaucgaccggcugaacgagguggccaagaaucugaacgagagccugaucgaccugcaagaacuggggaaguacgagcaguacaucaagggaggaucuggcuauauccccgaggcuccuagagauggccaggccuauguucggaaggauggcgaaugggugcugcugagcaccuuccuuugaggacuagucccuguucccagagcccacuuuuuuuucuuuuuuugaaauaaaauagccugucuuucagaucucaaaggcucuuuucagagccaccaaaaaaaaaaaaaaaaaaaaaaaaaaaaaaaaaaaaaaaaaaaaaaaaaaaaaaaaaaaaaaaaaaaaaaaaaaaaaaaaaaaaaaaaaaaaaaaaaaaaa

SEQ ID NO: 12594 - RNA, 3998 nt, Artificial Sequence
  SARS-CoV-2/Wuhan/WIV05/2019__EPI_ISL_402128 spike protein mRNA gc mod (1-1211)(G889C_L1034C) Foldon construct
aggagagucccgcagucggcguccagcggcucugcuuguucgugugugugucguugcaggccuuauucaagcuuaccauguucguguuucuggugcugcugccccugguguccagccagugugugaaccugaccaccagaacacagcugccuccagccuacaccaacagcuucaccagaggcguguacuaccccgacaagguguucagauccagcgugcugcacucuacccaggaccuguuccugccuuucuucagcaacgugaccugguuccacgccauccacguguccggcaccaauggcaccaagagauucgacaaccccgugcugcccuucaacgacgggguguacuuugccagcaccgagaaguccaacaucaucagaggcuggaucuucggcaccacacuggacagcaagacccagagccugcugaucgugaacaacgccaccaacguggucaucaaagugugcgaguuccaguucugcaacgaccccuuccugggcgucuacuaccacaagaacaacaagagcuggauggaaagcgaguuccggguguacagcagcgccaacaacugcaccuucgaguacgugucccagccuuuccugauggaccuggaaggcaagcagggcaacuucaagaaccugcgcgaguucguguucaagaacaucgacggcuacuucaaaaucuacagcaagcacaccccuaucaaccucgugcgggaucugccucagggcuucucugcucuggaaccccugguggaucugcccaucggcaucaacaucacccgguuucagacacugcuggcccugcacagaagcuaccugacaccuggcgauagcagcagcggauggacagcuggugccgccgcuuacuaugugggcuaccugcagccuagaaccuuccugcugaaguacaacgagaacggcaccaucaccgacgccguggauugugcucuggauccucugagcgagacaaagugcacccugaaguccuucaccguggaaaagggcaucuaccagaccagcaacuuccgggugcagcccaccgaauccaucgugcgguuccccaauaucaccaaucugugccccuucggcgagguguucaaugccaccagauucgccucuguguacgccuggaaccggaagcggaucagcaauugcguggccgacuacuccgugcuguacaacuccgccagcuucagcaccuucaagugcuacggcguguccccuaccaagcugaacgaccugugcuucacaaacguguacgccgacagcuucgugauccggggagaugaagugcggcagauugccccuggacagacaggcaagaucgccgacuacaacuacaagcugcccgacgacuucaccggcugugugauugccuggaacagcaacaaccuggacuccaaagucggcggcaacuacaauuaccuguaccggcuguuccggaaguccaaucugaagcccuucgagcgggacaucagcaccgaaaucuaucaggccggcagcaccccuugcaacggcguggaaggcuucaacugcuacuucccacugcaguccuacggcuuucagcccacaaauggcgugggcuaucagcccuacagagugguggugcugagcuucgaacugcugcaugcuccugccacagugugcggcccuaagaaaagcaccaaucucgugaagaacaaaugcgugaacuucaacuucaacggccugaccggcaccggcgugcugacagagagcaacaagaaguuccugccauuccagcaguuuggccgggauaucgccgauaccacagacgccguuagagauccccagacacuggaaauccuggacaucaccccaugcagcuucggcggagugucugugaucaccccuggcaccaacaccagcaaucagguggcagugcuguaccaggacgugaacuguaccgaagugcccguggccauucacgccgaucagcugacaccuacauggcggguguacuccaccggcagcaauguguuucagaccagagccggcugucugaucggagccgagcacgugaacaauagcuacgagugcgacauccccaucggcgcuggcaucugugccagcuaccagacacagacaaacagccccagacgggcuagaagcguggccagccagagcaucauugccuacacaaugucucugggcgccgagaacagcguggccuacuccaacaacucuaucgcuauccccaccaacuucaccaucagcgugaccaccgagauccugccuguguccaugaccaagaccagcguggacugcaccauguacaucugcggcgauuccaccgagugcuccaaccugcugcugcaguacggcagcuucugcacccagcugaauagagcccugacagggaucgccguggaacaggacaagaacacccaagagguguucgcccaagugaagcaaaucuacaagaccccuccuaucaaggacuucggcggcuucaauuucagccagauucugcccgauccuagcaagcccagcaagcggagcuucaucgaggaccugcuguucaacaaagugacacuggccgacgccggcuucaucaagcaguauggcgauugucugggcgacauugccgccagggaucugauuugcgcccagaaguuuaacggacugacagugcugccuccucugcugaccgaugagaugaucgcccaguacacaucugcccugcuggccggcacaaucacaagcggcuggacauuuugcgcuggcgccgcucugcagauccccuuugcuaugcagauggccuaccgguucaacggcaucggagugacccagaaugugcuguacgagaaccagaagcugaucgccaaccaguucaacagcgccaucggcaagauccaggacagccugagcagcacagcaagcgcccugggaaagcugcaggacguggucaaccagaaugcccaggcacugaacacccuggucaagcagcuguccuccaacuucggcgccaucagcucugugcugaacgauauccugagcagacuggacaaggucgaggccgaggugcagaucgacagacugaucacaggcagacugcagagccuccagacauacgugacccagcagcugaucagagccgccgagauuagagccucugccaaucuggccgccaccaagaugucugaguguguguguggccagagcaagagaguggacuuuugcggcaagggcuaccaccugaugagcuucccucagucugccccucacggcgugguguuucugcacgugacauaugugcccgcucaagagaagaauuucaccaccgcuccagccaucugccacgacggcaaagcccacuuuccuagagaaggcguguucguguccaacggcacccauugguucgugacacagcggaacuucuacgagccccagaucaucaccaccgacaacaccuucgugucuggcaacugcgacguugugaucggcauugugaacaauaccguguacgacccucugcagcccgagcuggacagcuucaaagaggaacuggacaaguacuuuaagaaccacacaagccccgacguggaccugggcgauaucagcggaaucaaugccagcgucgugaacauccagaaagagaucgaccggcugaacgagguggccaagaaucugaacgagagccugaucgaccugcaagaacuggggaaguacgagcaguacaucaagggaggaucuggcuauauccccgaggcuccuagagauggccaggccuauguucggaaggauggcgaaugggugcugcugagcaccuuccuuugaggacuagucccuguucccagagcccacuuuuuuuucuuuuuuugaaauaaaauagccugucuuucagaucucaaaggcucuuuucagagccaccaaaaaaaaaaaaaaaaaaaaaaaaaaaaaaaaaaaaaaaaaaaaaaaaaaaaaaaaaaaaaaaaaaaaaaaaaaaaaaaaaaaaaaaaaaaaaaaaaaaaa

SEQ ID NO: 12595 - RNA, 3998 nt, Artificial Sequence
  SARS-CoV-2/Wuhan/WIV05/2019__EPI_ISL_402128 spike protein mRNA gc mod (1-1211)(I909C_Y1047C) Foldon construct
aggagagucccgcagucggcguccagcggcucugcuuguucgugugugugucguugcaggccuuauucaagcuuaccauguucguguuucuggugcugcugccccugguguccagccagugugugaaccugaccaccagaacacagcugccuccagccuacaccaacagcuucaccagaggcguguacuaccccgacaagguguucagauccagcgugcugcacucuacccaggaccuguuccugccuuucuucagcaacgugaccugguuccacgccauccacguguccggcaccaauggcaccaagagauucgacaaccccgugcugcccuucaacgacgggguguacuuugccagcaccgagaaguccaacaucaucagaggcuggaucuucggcaccacacuggacagcaagacccagagccugcugaucgugaacaacgccaccaacguggucaucaaagugugcgaguuccaguucugcaacgaccccuuccugggcgucuacuaccacaagaacaacaagagcuggauggaaagcgaguuccggguguacagcagcgccaacaacugcaccuucgaguacgugucccagccuuuccugauggaccuggaaggcaagcagggcaacuucaagaaccugcgcgaguucguguucaagaacaucgacggcuacuucaaaaucuacagcaagcacaccccuaucaaccucgugcgggaucugccucagggcuucucugcucuggaaccccugguggaucugcccaucggcaucaacaucacccgguuucagacacugcuggcccugcacagaagcuaccugacaccuggcgauagcagcagcggauggacagcuggugccgccgcuuacuaugugggcuaccugcagccuagaaccuuccugcugaaguacaacgagaacggcaccaucaccgacgccguggauugugcucuggauccucugagcgagacaaagugcacccugaaguccuucaccguggaaaagggcaucuaccagaccagcaacuuccgggugcagcccaccgaauccaucgugcgguuccccaauaucaccaaucugugccccuucggcgagguguucaaugccaccagauucgccucuguguacgccuggaaccggaagcggaucagcaauugcguggccgacuacuccgugcuguacaacuccgccagcuucagcaccuucaagugcuacggcguguccccuaccaagcugaacgaccugugcuucacaaacguguacgccgacagcuucgugauccggggagaugaagugcggcagauugccccuggacagacaggcaagaucgccgacuacaacuacaagcugcccgacgacuucaccggcugugugauugccuggaacagcaacaaccuggacuccaaagucggcggcaacuacaauuaccuguaccggcuguuccggaaguccaaucugaagcccuucgagcgggacaucagcaccgaaaucuaucaggccggcagcaccccuugcaacggcguggaaggcuucaacugcuacuucccacugcaguccuacggcuuucagcccacaaauggcgugggcuaucagcccuacagagugguggugcugagcuucgaacugcugcaugcuccugccacagugugcggcccuaagaaaagcaccaaucucgugaagaacaaaugcgugaacuucaacuucaacggccugaccggcaccggcgugcugacagagagcaacaagaaguuccugccauuccagcaguuuggccgggauaucgccgauaccacagacgccguuagagauccccagacacuggaaauccuggacaucaccccaugcagcuucggcggagugucugugaucaccccuggcaccaacaccagcaaucagguggcagugcuguaccaggacgugaacuguaccgaagugcccguggccauucacgccgaucagcugacaccuacauggcggguguacuccaccggcagcaauguguuucagaccagagccggcugucugaucggagccgagcacgugaacaauagcuacgagugcgacauccccaucggcgcuggcaucugugccagcuaccagacacagacaaacagccccagacgggcuagaagcguggccagccagagcaucauugccuacacaaugucucugggcgccgagaacagcguggccuacuccaacaacucuaucgcuauccccaccaacuucaccaucagcgugaccaccgagauccugccuguguccaugaccaagaccagcguggacugcaccauguacaucugcggcgauuccaccgagugcuccaaccugcugcugcaguacggcagcuucugcacccagcugaauagagcccugacagggaucgccguggaacaggacaagaacacccaagagguguucgcccaagugaagcaaaucuacaagaccccuccuaucaaggacuucggcggcuucaauuucagccagauucugcccgauccuagcaagcccagcaagcggagcuucaucgaggaccugcuguucaacaaagugacacuggccgacgccggcuucaucaagcaguauggcgauugucugggcgacauugccgccagggaucugauuugcgcccagaaguuuaacggacugacagugcugccuccucugcugaccgaugagaugaucgcccaguacacaucugcccugcuggccggcacaaucacaagcggcuggacauuuggagcuggcgccgcucugcagauccccuuugcuaugcagauggccuaccgguucaacggcugcggagugacccagaaugugcuguacgagaaccagaagcugaucgccaaccaguucaacagcgccaucggcaagauccaggacagccugagcagcacagcaagcgcccugggaaagcugcaggacguggucaaccagaaugcccaggcacugaacacccuggucaagcagcuguccuccaacuucggcgccaucagcucugugcugaacgauauccugagcagacuggacaaggucgaggccgaggugcagaucgacagacugaucacaggcagacugcagagccuccagacauacgugacccagcagcugaucagagccgccgagauuagagccucugccaaucuggccgccaccaagaugucugagugugugcugggccagagcaagagaguggacuuuugcggcaagggcugucaccugaugagcuucccucagucugccccucacggcgugguguuucugcacgugacauaugugcccgcucaagagaagaauuucaccaccgcuccagccaucugccacgacggcaaagcccacuuuccuagagaaggcguguucguguccaacggcacccauugguucgugacacagcggaacuucuacgagccccagaucaucaccaccgacaacaccuucgugucuggcaacugcgacguugugaucggcauugugaacaauaccguguacgacccucugcagcccgagcuggacagcuucaaagaggaacuggacaaguacuuuaagaaccacacaagccccgacguggaccugggcgauaucagcggaaucaaugccagcgucgugaacauccagaaagagaucgaccggcugaacgagguggccaagaaucugaacgagagccugaucgaccugcaagaacuggggaaguacgagcaguacaucaagggaggaucuggcuauauccccgaggcuccuagagauggccaggccuauguucggaaggauggcgaaugggugcugcugagcaccuuccuuugaggacuagucccuguucccagagcccacuuuuuuuucuuuuuuugaaauaaaauagccugucuuucagaucucaaaggcucuuuucagagccaccaaaaaaaaaaaaaaaaaaaaaaaaaaaaaaaaaaaaaaaaaaaaaaaaaaaaaaaaaaaaaaaaaaaaaaaaaaaaaaaaaaaaaaaaaaaaaaaaaaaaa

SEQ ID NO: 12596 - RNA, 3998 nt, Artificial Sequence
  SARS-CoV-2/Wuhan/WIV05/2019__EPI_ISL_402128 spike protein mRNA gc mod (1-1211)(Q965C_S1003C) Foldon construct
aggagagucccgcagucggcguccagcggcucugcuuguucgugugugugucguugcaggccuuauucaagcuuaccauguucguguuucuggugcugcugccccugguguccagccagugugugaaccugaccaccagaacacagcugccuccagccuacaccaacagcuucaccagaggcguguacuaccccgacaagguguucagauccagcgugcugcacucuacccaggaccuguuccugccuuucuucagcaacgugaccugguuccacgccauccacguguccggcaccaauggcaccaagagauucgacaaccccgugcugcccuucaacgacgggguguacuuugccagcaccgagaaguccaacaucaucagaggcuggaucuucggcaccacacuggacagcaagacccagagccugcugaucgugaacaacgccaccaacguggucaucaaagugugcgaguuccaguucugcaacgaccccuuccugggcgucuacuaccacaagaacaacaagagcuggauggaaagcgaguuccggguguacagcagcgccaacaacugcaccuucgaguacgugucccagccuuuccugauggaccuggaaggcaagcagggcaacuucaagaaccugcgcgaguucguguucaagaacaucgacggcuacuucaaaaucuacagcaagcacaccccuaucaaccucgugcgggaucugccucagggcuucucugcucuggaaccccugguggaucugcccaucggcaucaacaucacccgguuucagacacugcuggcccugcacagaagcuaccugacaccuggcgauagcagcagcggauggacagcuggugccgccgcuuacuaugugggcuaccugcagccuagaaccuuccugcugaaguacaacgagaacggcaccaucaccgacgccguggauugugcucuggauccucugagcgagacaaagugcacccugaaguccuucaccguggaaaagggcaucuaccagaccagcaacuuccgggugcagcccaccgaauccaucgugcgguuccccaauaucaccaaucugugccccuucggcgagguguucaaugccaccagauucgccucuguguacgccuggaaccggaagcggaucagcaauugcguggccgacuacuccgugcuguacaacuccgccagcuucagcaccuucaagugcuacggcguguccccuaccaagcugaacgaccugugcuucacaaacguguacgccgacagcuucgugauccggggagaugaagugcggcagauugccccuggacagacaggcaagaucgccgacuacaacuacaagcugcccgacgacuucaccggcugugugauugccuggaacagcaacaaccuggacuccaaagucggcggcaacuacaauuaccuguaccggcuguuccggaaguccaaucugaagcccuucgagcgggacaucagcaccgaaaucuaucaggccggcagcaccccuugcaacggcguggaaggcuucaacugcuacuucccacugcaguccuacggcuuucagcccacaaauggcgugggcuaucagcccuacagagugguggugcugagcuucgaacugcugcaugcuccugccacagugugcggcccuaagaaaagcaccaaucucgugaagaacaaaugcgugaacuucaacuucaacggccugaccggcaccggcgugcugacagagagcaacaagaaguuccugccauuccagcaguuuggccgggauaucgccgauaccacagacgccguuagagauccccagacacuggaaauccuggacaucaccccaugcagcuucggcggagugucugugaucaccccuggcaccaacaccagcaaucagguggcagugcuguaccaggacgugaacuguaccgaagugcccguggccauucacgccgaucagcugacaccuacauggcggguguacuccaccggcagcaauguguuucagaccagagccggcugucugaucggagccgagcacgugaacaauagcuacgagugcgacauccccaucggcgcuggcaucugugccagcuaccagacacagacaaacagccccagacgggcuagaagcguggccagccagagcaucauugccuacacaaugucucugggcgccgagaacagcguggccuacuccaacaacucuaucgcuauccccaccaacuucaccaucagcgugaccaccgagauccugccuguguccaugaccaagaccagcguggacugcaccauguacaucugcggcgauuccaccgagugcuccaaccugcugcugcaguacggcagcuucugcacccagcugaauagagcccugacagggaucgccguggaacaggacaagaacacccaagagguguucgcccaagugaagcaaaucuacaagaccccuccuaucaaggacuucggcggcuucaauuucagccagauucugcccgauccuagcaagcccagcaagcggagcuucaucgaggaccugcuguucaacaaagugacacuggccgacgccggcuucaucaagcaguauggcgauugucugggcgacauugccgccagggaucugauuugcgcccagaaguuuaacggacugacagugcugccuccucugcugaccgaugagaugaucgcccaguacacaucugcccugcuggccggcacaaucacaagcggcuggacauuuggagcuggcgccgcucugcagauccccuuugcuaugcagauggccuaccgguucaacggcaucggagugacccagaaugugcuguacgagaaccagaagcugaucgccaaccaguucaacagcgccaucggcaagauccaggacagccugagcagcacagcaagcgcccugggaaagcugcaggacguggucaaccagaaugcccaggcacugaacacccuggucaagugccuguccuccaacuucggcgccaucagcucugugcugaacgauauccugagcagacuggacaaggucgaggccgaggugcagaucgacagacugaucacaggcagacugcagugucuccagacauacgugacccagcagcugaucagagccgccgagauuagagccucugccaaucuggccgccaccaagaugucugagugugugcugggccagagcaagagaguggacuuuugcggcaagggcuaccaccugaugagcuucccucagucugccccucacggcgugguguuucugcacgugacauaugugcccgcucaagagaagaauuucaccaccgcuccagccaucugccacgacggcaaagcccacuuuccuagagaaggcguguucguguccaacggcacccauugguucgugacacagcggaacuucuacgagccccagaucaucaccaccgacaacaccuucgugucuggcaacugcgacguugugaucggcauugugaacaauaccguguacgacccucugcagcccgagcuggacagcuucaaagaggaacuggacaaguacuuuaagaaccacacaagccccgacguggaccugggcgauaucagcggaaucaaugccagcgucgugaacauccagaaagagaucgaccggcugaacgagguggccaagaaucugaacgagagccugaucgaccugcaagaacuggggaaguacgagcaguacaucaagggaggaucuggcuauauccccgaggcuccuagagauggccaggccuauguucggaaggauggcgaaugggugcugcugagcaccuuccuuugaggacuagucccuguucccagagcccacuuuuuuuucuuuuuuugaaauaaaauagccugucuuucagaucucaaaggcucuuuucagagccaccaaaaaaaaaaaaaaaaaaaaaaaaaaaaaaaaaaaaaaaaaaaaaaaaaaaaaaaaaaaaaaaaaaaaaaaaaaaaaaaaaaaaaaaaaaaaaaaaaaaaa

SEQ ID NO: 12597 - RNA, 3998 nt, Artificial Sequence
  SARS-CoV-2/Wuhan/WIV05/2019__EPI_ISL_402128 spike protein mRNA gc mod (1-1211)(F970C_G999C) Foldon construct
aggagagucccgcagucggcguccagcggcucugcuuguucgugugugugucguugcaggccuuauucaagcuuaccauguucguguuucuggugcugcugccccugguguccagccagugugugaaccugaccaccagaacacagcugccuccagccuacaccaacagcuucaccagaggcguguacuaccccgacaagguguucagauccagcgugcugcacucuacccaggaccuguuccugccuuucuucagcaacgugaccugguuccacgccauccacguguccggcaccaauggcaccaagagauucgacaaccccgugcugcccuucaacgacgggguguacuuugccagcaccgagaaguccaacaucaucagaggcuggaucuucggcaccacacuggacagcaagacccagagccugcugaucgugaacaacgccaccaacguggucaucaaagugugcgaguuccaguucugcaacgaccccuuccugggcgucuacuaccacaagaacaacaagagcuggauggaaagcgaguuccggguguacagcagcgccaacaacugcaccuucgaguacgugucccagccuuuccugauggaccuggaaggcaagcagggcaacuucaagaaccugcgcgaguucguguucaagaacaucgacggcuacuucaaaaucuacagcaagcacaccccuaucaaccucgugcgggaucugccucagggcuucucugcucuggaaccccugguggaucugcccaucggcaucaacaucacccgguuucagacacugcuggcccugcacagaagcuaccugacaccuggcgauagcagcagcggauggacagcuggugccgccgcuuacuaugugggcuaccugcagccuagaaccuuccugcugaaguacaacgagaacggcaccaucaccgacgccguggauugugcucuggauccucugagcgagacaaagugcacccugaaguccuucaccguggaaaagggcaucuaccagaccagcaacuuccgggugcagcccaccgaauccaucgugcgguuccccaauaucaccaaucugugccccuucggcgagguguucaaugccaccagauucgccucuguguacgccuggaaccggaagcggaucagcaauugcguggccgacuacuccgugcuguacaacuccgccagcuucagcaccuucaagugcuacggcguguccccuaccaagcugaacgaccugugcuucacaaacguguacgccgacagcuucgugauccggggagaugaagugcggcagauugccccuggacagacaggcaagaucgccgacuacaacuacaagcugcccgacgacuucaccggcugugugauugccuggaacagcaacaaccuggacuccaaagucggcggcaacuacaauuaccuguaccggcuguuccggaaguccaaucugaagcccuucgagcgggacaucagcaccgaaaucuaucaggccggcagcaccccuugcaacggcguggaaggcuucaacugcuacuucccacugcaguccuacggcuuucagcccacaaauggcgugggcuaucagcccuacagagugguggugcugagcuucgaacugcugcaugcuccugccacagugugcggcccuaagaaaagcaccaaucucgugaagaacaaaugcgugaacuucaacuucaacggccugaccggcaccggcgugcugacagagagcaacaagaaguuccugccauuccagcaguuuggccgggauaucgccgauaccacagacgccguuagagauccccagacacuggaaauccuggacaucaccccaugcagcuucggcggagugucugugaucaccccuggcaccaacaccagcaaucagguggcagugcuguaccaggacgugaacuguaccgaagugcccguggccauucacgccgaucagcugacaccuacauggcggguguacuccaccggcagcaauguguuucagaccagagccggcugucugaucggagccgagcacgugaacaauagcuacgagugcgacauccccaucggcgcuggcaucugugccagcuaccagacacagacaaacagccccagacgggcuagaagcguggccagccagagcaucauugccuacacaaugucucugggcgccgagaacagcguggccuacuccaacaacucuaucgcuauccccaccaacuucaccaucagcgugaccaccgagauccugccuguguccaugaccaagaccagcguggacugcaccauguacaucugcggcgauuccaccgagugcuccaaccugcugcugcaguacggcagcuucugcacccagcugaauagagcccugacagggaucgccguggaacaggacaagaacacccaagagguguucgcccaagugaagcaaaucuacaagaccccuccuaucaaggacuucggcggcuucaauuucagccagauucugcccgauccuagcaagcccagcaagcggagcuucaucgaggaccugcuguucaacaaagugacacuggccgacgccggcuucaucaagcaguauggcgauugucugggcgacauugccgccagggaucugauuugcgcccagaaguuuaacggacugacagugcugccuccucugcugaccgaugagaugaucgcccaguacacaucugcccugcuggccggcacaaucacaagcggcuggacauuuggagcuggcgccgcucugcagauccccuuugcuaugcagauggccuaccgguucaacggcaucggagugacccagaaugugcuguacgagaaccagaagcugaucgccaaccaguucaacagcgccaucggcaagauccaggacagccugagcagcacagcaagcgcccugggaaagcugcaggacguggucaaccagaaugcccaggcacugaacacccuggucaagcagcuguccuccaacugcggcgccaucagcucugugcugaacgauauccugagcagacuggacaaggucgaggccgaggugcagaucgacagacugaucacauguagacugcagagccuccagacauacgugacccagcagcugaucagagccgccgagauuagagccucugccaaucuggccgccaccaagaugucugagugugugcugggccagagcaagagaguggacuuuugcggcaagggcuaccaccugaugagcuucccucagucugccccucacggcgugguguuucugcacgugacauaugugcccgcucaagagaagaauuucaccaccgcuccagccaucugccacgacggcaaagcccacuuuccuagagaaggcguguucguguccaacggcacccauugguucgugacacagcggaacuucuacgagccccagaucaucaccaccgacaacaccuucgugucuggcaacugcgacguugugaucggcauugugaacaauaccguguacgacccucugcagcccgagcuggacagcuucaaagaggaacuggacaaguacuuuaagaaccacacaagccccgacguggaccugggcgauaucagcggaaucaaugccagcgucgugaacauccagaaagagaucgaccggcugaacgagguggccaagaaucugaacgagagccugaucgaccugcaagaacuggggaaguacgagcaguacaucaagggaggaucuggcuauauccccgaggcuccuagagauggccaggccuauguucggaaggauggcgaaugggugcugcugagcaccuuccuuugaggacuagucccuguucccagagcccacuuuuuuuucuuuuuuugaaauaaaauagccugucuuucagaucucaaaggcucuuuucagagccaccaaaaaaaaaaaaaaaaaaaaaaaaaaaaaaaaaaaaaaaaaaaaaaaaaaaaaaaaaaaaaaaaaaaaaaaaaaaaaaaaaaaaaaaaaaaaaaaaaaaaa

SEQ ID NO: 12598 - RNA, 3998 nt, Artificial Sequence
  SARS-CoV-2/Wuhan/WIV05/2019__EPI_ISL_402128 spike protein mRNA gc mod (1-1211)(A972C_R995C) Foldon construct
aggagagucccgcagucggcguccagcggcucugcuuguucgugugugugucguugcaggccuuauucaagcuuaccauguucguguuucuggugcugcugccccugguguccagccagugugugaaccugaccaccagaacacagcugccuccagccuacaccaacagcuucaccagaggcguguacuaccccgacaagguguucagauccagcgugcugcacucuacccaggaccuguuccugccuuucuucagcaacgugaccugguuccacgccauccacguguccggcaccaauggcaccaagagauucgacaaccccgugcugcccuucaacgacgggguguacuuugccagcaccgagaaguccaacaucaucagaggcuggaucuucggcaccacacuggacagcaagacccagagccugcugaucgugaacaacgccaccaacguggucaucaaagugugcgaguuccaguucugcaacgaccccuuccugggcgucuacuaccacaagaacaacaagagcuggauggaaagcgaguuccggguguacagcagcgccaacaacugcaccuucgaguacgugucccagccuuuccugauggaccuggaaggcaagcagggcaacuucaagaaccugcgcgaguucguguucaagaacaucgacggcuacuucaaaaucuacagcaagcacaccccuaucaaccucgugcgggaucugccucagggcuucucugcucuggaaccccugguggaucugcccaucggcaucaacaucacccgguuucagacacugcuggcccugcacagaagcuaccugacaccuggcgauagcagcagcggauggacagcuggugccgccgcuuacuaugugggcuaccugcagccuagaaccuuccugcugaaguacaacgagaacggcaccaucaccgacgccguggauugugcucuggauccucugagcgagacaaagugcacccugaaguccuucaccguggaaaagggcaucuaccagaccagcaacuuccgggugcagcccaccgaauccaucgugcgguuccccaauaucaccaaucugugccccuucggcgagguguucaaugccaccagauucgccucuguguacgccuggaaccggaagcggaucagcaauugcguggccgacuacuccgugcuguacaacuccgccagcuucagcaccuucaagugcuacggcguguccccuaccaagcugaacgaccugugcuucacaaacguguacgccgacagcuucgugauccggggagaugaagugcggcagauugccccuggacagacaggcaagaucgccgacuacaacuacaagcugcccgacgacuucaccggcugugugauugccuggaacagcaacaaccuggacuccaaagucggcggcaacuacaauuaccuguaccggcuguuccggaaguccaaucugaagcccuucgagcgggacaucagcaccgaaaucuaucaggccggcagcaccccuugcaacggcguggaaggcuucaacugcuacuucccacugcaguccuacggcuuucagcccacaaauggcgugggcuaucagcccuacagagugguggugcugagcuucgaacugcugcaugcuccugccacagugugcggcccuaagaaaagcaccaaucucgugaagaacaaaugcgugaacuucaacuucaacggccugaccggcaccggcgugcugacagagagcaacaagaaguuccugccauuccagcaguuuggccgggauaucgccgauaccacagacgccguuagagauccccagacacuggaaauccuggacaucaccccaugcagcuucggcggagugucugugaucaccccuggcaccaacaccagcaaucagguggcagugcuguaccaggacgugaacuguaccgaagugcccguggccauucacgccgaucagcugacaccuacauggcggguguacuccaccggcagcaauguguuucagaccagagccggcugucugaucggagccgagcacgugaacaauagcuacgagugcgacauccccaucggcgcuggcaucugugccagcuaccagacacagacaaacagccccagacgggcuagaagcguggccagccagagcaucauugccuacacaaugucucugggcgccgagaacagcguggccuacuccaacaacucuaucgcuauccccaccaacuucaccaucagcgugaccaccgagauccugccuguguccaugaccaagaccagcguggacugcaccauguacaucugcggcgauuccaccgagugcuccaaccugcugcugcaguacggcagcuucugcacccagcugaauagagcccugacagggaucgccguggaacaggacaagaacacccaagagguguucgcccaagugaagcaaaucuacaagaccccuccuaucaaggacuucggcggcuucaauuucagccagauucugcccgauccuagcaagcccagcaagcggagcuucaucgaggaccugcuguucaacaaagugacacuggccgacgccggcuucaucaagcaguauggcgauugucugggcgacauugccgccagggaucugauuugcgcccagaaguuuaacggacugacagugcugccuccucugcugaccgaugagaugaucgcccaguacacaucugcccugcuggccggcacaaucacaagcggcuggacauuuggagcuggcgccgcucugcagauccccuuugcuaugcagauggccuaccgguucaacggcaucggagugacccagaaugugcuguacgagaaccagaagcugaucgccaaccaguucaacagcgccaucggcaagauccaggacagccugagcagcacagcaagcgcccugggaaagcugcaggacguggucaaccagaaugcccaggcacugaacacccuggucaagcagcuguccuccaacuucggcugcaucagcucugugcugaacgauauccugagcagacuggacaaggucgaggccgaggugcagaucgacugucugaucacaggcagacugcagagccuccagacauacgugacccagcagcugaucagagccgccgagauuagagccucugccaaucuggccgccaccaagaugucugagugugugcugggccagagcaagagaguggacuuuugcggcaagggcuaccaccugaugagcuucccucagucugccccucacggcgugguguuucugcacgugacauaugugcccgcucaagagaagaauuucaccaccgcuccagccaucugccacgacggcaaagcccacuuuccuagagaaggcguguucguguccaacggcacccauugguucgugacacagcggaacuucuacgagccccagaucaucaccaccgacaacaccuucgugucuggcaacugcgacguugugaucggcauugugaacaauaccguguacgacccucugcagcccgagcuggacagcuucaaagaggaacuggacaaguacuuuaagaaccacacaagccccgacguggaccugggcgauaucagcggaaucaaugccagcgucgugaacauccagaaagagaucgaccggcugaacgagguggccaagaaucugaacgagagccugaucgaccugcaagaacuggggaaguacgagcaguacaucaagggaggaucuggcuauauccccgaggcuccuagagauggccaggccuauguucggaaggauggcgaaugggugcugcugagcaccuuccuuugaggacuagucccuguucccagagcccacuuuuuuuucuuuuuuugaaauaaaauagccugucuuucagaucucaaaggcucuuuucagagccaccaaaaaaaaaaaaaaaaaaaaaaaaaaaaaaaaaaaaaaaaaaaaaaaaaaaaaaaaaaaaaaaaaaaaaaaaaaaaaaaaaaaaaaaaaaaaaaaaaaaaa

SEQ ID NO: 12599 - RNA, 3998 nt, Artificial Sequence
  SARS-CoV-2/Wuhan/WIV05/2019__EPI_ISL_402128 spike protein mRNA gc mod (1-1211)(A890C_V1040C) Foldon construct
aggagagucccgcagucggcguccagcggcucugcuuguucgugugugugucguugcaggccuuauucaagcuuaccauguucguguuucuggugcugcugccccugguguccagccagugugugaaccugaccaccagaacacagcugccuccagccuacaccaacagcuucaccagaggcguguacuaccccgacaagguguucagauccagcgugcugcacucuacccaggaccuguuccugccuuucuucagcaacgugaccugguuccacgccauccacguguccggcaccaauggcaccaagagauucgacaaccccgugcugcccuucaacgacgggguguacuuugccagcaccgagaaguccaacaucaucagaggcuggaucuucggcaccacacuggacagcaagacccagagccugcugaucgugaacaacgccaccaacguggucaucaaagugugcgaguuccaguucugcaacgaccccuuccugggcgucuacuaccacaagaacaacaagagcuggauggaaagcgaguuccggguguacagcagcgccaacaacugcaccuucgaguacgugucccagccuuuccugauggaccuggaaggcaagcagggcaacuucaagaaccugcgcgaguucguguucaagaacaucgacggcuacuucaaaaucuacagcaagcacaccccuaucaaccucgugcgggaucugccucagggcuucucugcucuggaaccccugguggaucugcccaucggcaucaacaucacccgguuucagacacugcuggcccugcacagaagcuaccugacaccuggcgauagcagcagcggauggacagcuggugccgccgcuuacuaugugggcuaccugcagccuagaaccuuccugcugaaguacaacgagaacggcaccaucaccgacgccguggauugugcucuggauccucugagcgagacaaagugcacccugaaguccuucaccguggaaaagggcaucuaccagaccagcaacuuccgggugcagcccaccgaauccaucgugcgguuccccaauaucaccaaucugugccccuucggcgagguguucaaugccaccagauucgccucuguguacgccuggaaccggaagcggaucagcaauugcguggccgacuacuccgugcuguacaacuccgccagcuucagcaccuucaagugcuacggcguguccccuaccaagcugaacgaccugugcuucacaaacguguacgccgacagcuucgugauccggggagaugaagugcggcagauugccccuggacagacaggcaagaucgccgacuacaacuacaagcugcccgacgacuucaccggcugugugauugccuggaacagcaacaaccuggacuccaaagucggcggcaacuacaauuaccuguaccggcuguuccggaaguccaaucugaagcccuucgagcgggacaucagcaccgaaaucuaucaggccggcagcaccccuugcaacggcguggaaggcuucaacugcuacuucccacugcaguccuacggcuuucagcccacaaauggcgugggcuaucagcccuacagagugguggugcugagcuucgaacugcugcaugcuccugccacagugugcggcccuaagaaaagcaccaaucucgugaagaacaaaugcgugaacuucaacuucaacggccugaccggcaccggcgugcugacagagagcaacaagaaguuccugccauuccagcaguuuggccgggauaucgccgauaccacagacgccguuagagauccccagacacuggaaauccuggacaucaccccaugcagcuucggcggagugucugugaucaccccuggcaccaacaccagcaaucagguggcagugcuguaccaggacgugaacuguaccgaagugcccguggccauucacgccgaucagcugacaccuacauggcggguguacuccaccggcagcaauguguuucagaccagagccggcugucugaucggagccgagcacgugaacaauagcuacgagugcgacauccccaucggcgcuggcaucugugccagcuaccagacacagacaaacagccccagacgggcuagaagcguggccagccagagcaucauugccuacacaaugucucugggcgccgagaacagcguggccuacuccaacaacucuaucgcuauccccaccaacuucaccaucagcgugaccaccgagauccugccuguguccaugaccaagaccagcguggacugcaccauguacaucugcggcgauuccaccgagugcuccaaccugcugcugcaguacggcagcuucugcacccagcugaauagagcccugacagggaucgccguggaacaggacaagaacacccaagagguguucgcccaagugaagcaaaucuacaagaccccuccuaucaaggacuucggcggcuucaauuucagccagauucugcccgauccuagcaagcccagcaagcggagcuucaucgaggaccugcuguucaacaaagugacacuggccgacgccggcuucaucaagcaguauggcgauugucugggcgacauugccgccagggaucugauuugcgcccagaaguuuaacggacugacagugcugccuccucugcugaccgaugagaugaucgcccaguacacaucugcccugcuggccggcacaaucacaagcggcuggacauuuggaugcggcgccgcucugcagauccccuuugcuaugcagauggccuaccgguucaacggcaucggagugacccagaaugugcuguacgagaaccagaagcugaucgccaaccaguucaacagcgccaucggcaagauccaggacagccugagcagcacagcaagcgcccugggaaagcugcaggacguggucaaccagaaugcccaggcacugaacacccuggucaagcagcuguccuccaacuucggcgccaucagcucugugcugaacgauauccugagcagacuggacaaggucgaggccgaggugcagaucgacagacugaucacaggcagacugcagagccuccagacauacgugacccagcagcugaucagagccgccgagauuagagccucugccaaucuggccgccaccaagaugucugagugugugcugggccagagcaagagaugugacuuuugcggcaagggcuaccaccugaugagcuucccucagucugccccucacggcgugguguuucugcacgugacauaugugcccgcucaagagaagaauuucaccaccgcuccagccaucugccacgacggcaaagcccacuuuccuagagaaggcguguucguguccaacggcacccauugguucgugacacagcggaacuucuacgagccccagaucaucaccaccgacaacaccuucgugucuggcaacugcgacguugugaucggcauugugaacaauaccguguacgacccucugcagcccgagcuggacagcuucaaagaggaacuggacaaguacuuuaagaaccacacaagccccgacguggaccugggcgauaucagcggaaucaaugccagcgucgugaacauccagaaagagaucgaccggcugaacgagguggccaagaaucugaacgagagccugaucgaccugcaagaacuggggaaguacgagcaguacaucaagggaggaucuggcuauauccccgaggcuccuagagauggccaggccuauguucggaaggauggcgaaugggugcugcugagcaccuuccuuugaggacuagucccuguucccagagcccacuuuuuuuucuuuuuuugaaauaaaauagccugucuuucagaucucaaaggcucuuuucagagccaccaaaaaaaaaaaaaaaaaaaaaaaaaaaaaaaaaaaaaaaaaaaaaaaaaaaaaaaaaaaaaaaaaaaaaaaaaaaaaaaaaaaaaaaaaaaaaaaaaaaaa

SEQ ID NO: 12600 - RNA, 3998 nt, Artificial Sequence
  SARS-CoV-2/Wuhan/WIV05/2019__EPI_ISL_402128 spike protein mRNA gc mod (1-1211)(T874C_S1055C) Foldon construct
aggagagucccgcagucggcguccagcggcucugcuuguucgugugugugucguugcaggccuuauucaagcuuaccauguucguguuucuggugcugcugccccugguguccagccagugugugaaccugaccaccagaacacagcugccuccagccuacaccaacagcuucaccagaggcguguacuaccccgacaagguguucagauccagcgugcugcacucuacccaggaccuguuccugccuuucuucagcaacgugaccugguuccacgccauccacguguccggcaccaauggcaccaagagauucgacaaccccgugcugcccuucaacgacgggguguacuuugccagcaccgagaaguccaacaucaucagaggcuggaucuucggcaccacacuggacagcaagacccagagccugcugaucgugaacaacgccaccaacguggucaucaaagugugcgaguuccaguucugcaacgaccccuuccugggcgucuacuaccacaagaacaacaagagcuggauggaaagcgaguuccggguguacagcagcgccaacaacugcaccuucgaguacgugucccagccuuuccugauggaccuggaaggcaagcagggcaacuucaagaaccugcgcgaguucguguucaagaacaucgacggcuacuucaaaaucuacagcaagcacaccccuaucaaccucgugcgggaucugccucagggcuucucugcucuggaaccccugguggaucugcccaucggcaucaacaucacccgguuucagacacugcuggcccugcacagaagcuaccugacaccuggcgauagcagcagcggauggacagcuggugccgccgcuuacuaugugggcuaccugcagccuagaaccuuccugcugaaguacaacgagaacggcaccaucaccgacgccguggauugugcucuggauccucugagcgagacaaagugcacccugaaguccuucaccguggaaaagggcaucuaccagaccagcaacuuccgggugcagcccaccgaauccaucgugcgguuccccaauaucaccaaucugugccccuucggcgagguguucaaugccaccagauucgccucuguguacgccuggaaccggaagcggaucagcaauugcguggccgacuacuccgugcuguacaacuccgccagcuucagcaccuucaagugcuacggcguguccccuaccaagcugaacgaccugugcuucacaaacguguacgccgacagcuucgugauccggggagaugaagugcggcagauugccccuggacagacaggcaagaucgccgacuacaacuacaagcugcccgacgacuucaccggcugugugauugccuggaacagcaacaaccuggacuccaaagucggcggcaacuacaauuaccuguaccggcuguuccggaaguccaaucugaagcccuucgagcgggacaucagcaccgaaaucuaucaggccggcagcaccccuugcaacggcguggaaggcuucaacugcuacuucccacugcaguccuacggcuuucagcccacaaauggcgugggcuaucagcccuacagagugguggugcugagcuucgaacugcugcaugcuccugccacagugugcggcccuaagaaaagcaccaaucucgugaagaacaaaugcgugaacuucaacuucaacggccugaccggcaccggcgugcugacagagagcaacaagaaguuccugccauuccagcaguuuggccgggauaucgccgauaccacagacgccguuagagauccccagacacuggaaauccuggacaucaccccaugcagcuucggcggagugucugugaucaccccuggcaccaacaccagcaaucagguggcagugcuguaccaggacgugaacuguaccgaagugcccguggccauucacgccgaucagcugacaccuacauggcggguguacuccaccggcagcaauguguuucagaccagagccggcugucugaucggagccgagcacgugaacaauagcuacgagugcgacauccccaucggcgcuggcaucugugccagcuaccagacacagacaaacagccccagacgggcuagaagcguggccagccagagcaucauugccuacacaaugucucugggcgccgagaacagcguggccuacuccaacaacucuaucgcuauccccaccaacuucaccaucagcgugaccaccgagauccugccuguguccaugaccaagaccagcguggacugcaccauguacaucugcggcgauuccaccgagugcuccaaccugcugcugcaguacggcagcuucugcacccagcugaauagagcccugacagggaucgccguggaacaggacaagaacacccaagagguguucgcccaagugaagcaaaucuacaagaccccuccuaucaaggacuucggcggcuucaauuucagccagauucugcccgauccuagcaagcccagcaagcggagcuucaucgaggaccugcuguucaacaaagugacacuggccgacgccggcuucaucaagcaguauggcgauugucugggcgacauugccgccagggaucugauuugcgcccagaaguuuaacggacugacagugcugccuccucugcugaccgaugagaugaucgcccaguacugcucugcccugcuggccggcacaaucacaagcggcuggacauuuggagcuggcgccgcucugcagauccccuuugcuaugcagauggccuaccgguucaacggcaucggagugacccagaaugugcuguacgagaaccagaagcugaucgccaaccaguucaacagcgccaucggcaagauccaggacagccugagcagcacagcaagcgcccugggaaagcugcaggacguggucaaccagaaugcccaggcacugaacacccuggucaagcagcuguccuccaacuucggcgccaucagcucugugcugaacgauauccugagcagacuggacaaggucgaggccgaggugcagaucgacagacugaucacaggcagacugcagagccuccagacauacgugacccagcagcugaucagagccgccgagauuagagccucugccaaucuggccgccaccaagaugucugagugugugcugggccagagcaagagaguggacuuuugcggcaagggcuaccaccugaugagcuucccucagugcgccccucacggcgugguguuucugcacgugacauaugugcccgcucaagagaagaauuucaccaccgcuccagccaucugccacgacggcaaagcccacuuuccuagagaaggcguguucguguccaacggcacccauugguucgugacacagcggaacuucuacgagccccagaucaucaccaccgacaacaccuucgugucuggcaacugcgacguugugaucggcauugugaacaauaccguguacgacccucugcagcccgagcuggacagcuucaaagaggaacuggacaaguacuuuaagaaccacacaagccccgacguggaccugggcgauaucagcggaaucaaugccagcgucgugaacauccagaaagagaucgaccggcugaacgagguggccaagaaucugaacgagagccugaucgaccugcaagaacuggggaaguacgagcaguacaucaagggaggaucuggcuauauccccgaggcuccuagagauggccaggccuauguucggaaggauggcgaaugggugcugcugagcaccuuccuuugaggacuagucccuguucccagagcccacuuuuuuuucuuuuuuugaaauaaaauagccugucuuucagaucucaaaggcucuuuucagagccaccaaaaaaaaaaaaaaaaaaaaaaaaaaaaaaaaaaaaaaaaaaaaaaaaaaaaaaaaaaaaaaaaaaaaaaaaaaaaaaaaaaaaaaaaaaaaaaaaaaaaa

SEQ ID NO: 12601 - RNA, 4370 nt, Artificial Sequence
  SARS-CoV-2/Wuhan/WIV05/2019__EPI_ISL_402128 spike protein mRNA gc mod (1-1211) WhcAg construct
aggagagucccgcagucggcguccagcggcucugcuuguucgugugugugucguugcaggccuuauucaagcuuaccauguucguguuucuggugcugcugccccugguguccagccagugugugaaccugaccaccagaacacagcugccuccagccuacaccaacagcuucaccagaggcguguacuaccccgacaagguguucagauccagcgugcugcacucuacccaggaccuguuccugccuuucuucagcaacgugaccugguuccacgccauccacguguccggcaccaauggcaccaagagauucgacaaccccgugcugcccuucaacgacgggguguacuuugccagcaccgagaaguccaacaucaucagaggcuggaucuucggcaccacacuggacagcaagacccagagccugcugaucgugaacaacgccaccaacguggucaucaaagugugcgaguuccaguucugcaacgaccccuuccugggcgucuacuaccacaagaacaacaagagcuggauggaaagcgaguuccggguguacagcagcgccaacaacugcaccuucgaguacgugucccagccuuuccugauggaccuggaaggcaagcagggcaacuucaagaaccugcgcgaguucguguucaagaacaucgacggcuacuucaaaaucuacagcaagcacaccccuaucaaccucgugcgggaucugccucagggcuucucugcucuggaaccccugguggaucugcccaucggcaucaacaucacccgguuucagacacugcuggcccugcacagaagcuaccugacaccuggcgauagcagcagcggauggacagcuggugccgccgcuuacuaugugggcuaccugcagccuagaaccuuccugcugaaguacaacgagaacggcaccaucaccgacgccguggauugugcucuggauccucugagcgagacaaagugcacccugaaguccuucaccguggaaaagggcaucuaccagaccagcaacuuccgggugcagcccaccgaauccaucgugcgguuccccaauaucaccaaucugugccccuucggcgagguguucaaugccaccagauucgccucuguguacgccuggaaccggaagcggaucagcaauugcguggccgacuacuccgugcuguacaacuccgccagcuucagcaccuucaagugcuacggcguguccccuaccaagcugaacgaccugugcuucacaaacguguacgccgacagcuucgugauccggggagaugaagugcggcagauugccccuggacagacaggcaagaucgccgacuacaacuacaagcugcccgacgacuucaccggcugugugauugccuggaacagcaacaaccuggacuccaaagucggcggcaacuacaauuaccuguaccggcuguuccggaaguccaaucugaagcccuucgagcgggacaucagcaccgaaaucuaucaggccggcagcaccccuugcaacggcguggaaggcuucaacugcuacuucccacugcaguccuacggcuuucagcccacaaauggcgugggcuaucagcccuacagagugguggugcugagcuucgaacugcugcaugcuccugccacagugugcggcccuaagaaaagcaccaaucucgugaagaacaaaugcgugaacuucaacuucaacggccugaccggcaccggcgugcugacagagagcaacaagaaguuccugccauuccagcaguuuggccgggauaucgccgauaccacagacgccguuagagauccccagacacuggaaauccuggacaucaccccaugcagcuucggcggagugucugugaucaccccuggcaccaacaccagcaaucagguggcagugcuguaccaggacgugaacuguaccgaagugcccguggccauucacgccgaucagcugacaccuacauggcggguguacuccaccggcagcaauguguuucagaccagagccggcugucugaucggagccgagcacgugaacaauagcuacgagugcgacauccccaucggcgcuggcaucugugccagcuaccagacacagacaaacagccccagacgggcuagaagcguggccagccagagcaucauugccuacacaaugucucugggcgccgagaacagcguggccuacuccaacaacucuaucgcuauccccaccaacuucaccaucagcgugaccaccgagauccugccuguguccaugaccaagaccagcguggacugcaccauguacaucugcggcgauuccaccgagugcuccaaccugcugcugcaguacggcagcuucugcacccagcugaauagagcccugacagggaucgccguggaacaggacaagaacacccaagagguguucgcccaagugaagcaaaucuacaagaccccuccuaucaaggacuucggcggcuucaauuucagccagauucugcccgauccuagcaagcccagcaagcggagcuucaucgaggaccugcuguucaacaaagugacacuggccgacgccggcuucaucaagcaguauggcgauugucugggcgacauugccgccagggaucugauuugcgcccagaaguuuaacggacugacagugcugccuccucugcugaccgaugagaugaucgcccaguacacaucugcccugcuggccggcacaaucacaagcggcuggacauuuggagcuggcgccgcucugcagauccccuuugcuaugcagauggccuaccgguucaacggcaucggagugacccagaaugugcuguacgagaaccagaagcugaucgccaaccaguucaacagcgccaucggcaagauccaggacagccugagcagcacagcaagcgcccugggaaagcugcaggacguggucaaccagaaugcccaggcacugaacacccuggucaagcagcuguccuccaacuucggcgccaucagcucugugcugaacgauauccugagcagacuggacaaggucgaggccgaggugcagaucgacagacugaucacaggcagacugcagagccuccagacauacgugacccagcagcugaucagagccgccgagauuagagccucugccaaucuggccgccaccaagaugucugagugugugcugggccagagcaagagaguggacuuuugcggcaagggcuaccaccugaugagcuucccucagucugccccucacggcgugguguuucugcacgugacauaugugcccgcucaagagaagaauuucaccaccgcuccagccaucugccacgacggcaaagcccacuuuccuagagaaggcguguucguguccaacggcacccauugguucgugacacagcggaacuucuacgagccccagaucaucaccaccgacaacaccuucgugucuggcaacugcgacguugugaucggcauugugaacaauaccguguacgacccucugcagcccgagcuggacagcuucaaagaggaacuggacaaguacuuuaagaaccacacaagccccgacguggaccugggcgauaucagcggaaucaaugccagcgucgugaacauccagaaagagaucgaccggcugaacgagguggccaagaaucugaacgagagccugaucgaccugcaagaacuggggaaguacgagcaguacaucaagggaggcggaggaucugacaucgaccccuacaaagaguucggcagcagcuaccagcugcugaacuuccugccucuggacuucuuccccgaccugaacgcccugguggauacagccacagcucuguacgaggaagaacugaccggcagagagcacugcagcccucaccacacagccauuagacaggcccucgugugcugggacgagcugacaaaacugaucgccuggaugagcagcaacaucaccagcgagcaagugcggaccaucaucgugaaccacgugaacgauaccuggggccugaaagugcggcagagccugugguuucaccugagcugucugaccuucggccagcacaccgugcaagaguuucugguguccuucggcguguggaucagaaccccugcuccauacagaccuccaaacgcucccauccugagcacccugccugagcacacagugaucuguugaggacuagucccuguucccagagcccacuuuuuuuucuuuuuuugaaauaaaauagccugucuuucagaucucaaaggcucuuuucagagccaccaaaaaaaaaaaaaaaaaaaaaaaaaaaaaaaaaaaaaaaaaaaaaaaaaaaaaaaaaaaaaaaaaaaaaaaaaaaaaaaaaaaaaaaaaaaaaaaaaaaaa

SEQ ID NO: 12602 - RNA, 4370 nt, Artificial Sequence
  SARS-CoV-2/Wuhan/WIV05/2019__EPI_ISL_402128 spike protein mRNA gc mod (1-1211)(K986P_V987P) WhcAg construct
aggagagucccgcagucggcguccagcggcucugcuuguucgugugugugucguugcaggccuuauucaagcuuaccauguucguguuucuggugcugcugccccugguguccagccagugugugaaccugaccaccagaacacagcugccuccagccuacaccaacagcuucaccagaggcguguacuaccccgacaagguguucagauccagcgugcugcacucuacccaggaccuguuccugccuuucuucagcaacgugaccugguuccacgccauccacguguccggcaccaauggcaccaagagauucgacaaccccgugcugcccuucaacgacgggguguacuuugccagcaccgagaaguccaacaucaucagaggcuggaucuucggcaccacacuggacagcaagacccagagccugcugaucgugaacaacgccaccaacguggucaucaaagugugcgaguuccaguucugcaacgaccccuuccugggcgucuacuaccacaagaacaacaagagcuggauggaaagcgaguuccggguguacagcagcgccaacaacugcaccuucgaguacgugucccagccuuuccugauggaccuggaaggcaagcagggcaacuucaagaaccugcgcgaguucguguucaagaacaucgacggcuacuucaaaaucuacagcaagcacaccccuaucaaccucgugcgggaucugccucagggcuucucugcucuggaaccccugguggaucugcccaucggcaucaacaucacccgguuucagacacugcuggcccugcacagaagcuaccugacaccuggcgauagcagcagcggauggacagcuggugccgccgcuuacuaugugggcuaccugcagccuagaaccuuccugcugaaguacaacgagaacggcaccaucaccgacgccguggauugugcucuggauccucugagcgagacaaagugcacccugaaguccuucaccguggaaaagggcaucuaccagaccagcaacuuccgggugcagcccaccgaauccaucgugcgguuccccaauaucaccaaucugugccccuucggcgagguguucaaugccaccagauucgccucuguguacgccuggaaccggaagcggaucagcaauugcguggccgacuacuccgugcuguacaacuccgccagcuucagcaccuucaagugcuacggcguguccccuaccaagcugaacgaccugugcuucacaaacguguacgccgacagcuucgugauccggggagaugaagugcggcagauugccccuggacagacaggcaagaucgccgacuacaacuacaagcugcccgacgacuucaccggcugugugauugccuggaacagcaacaaccuggacuccaaagucggcggcaacuacaauuaccuguaccggcuguuccggaaguccaaucugaagcccuucgagcgggacaucagcaccgaaaucuaucaggccggcagcaccccuugcaacggcguggaaggcuucaacugcuacuucccacugcaguccuacggcuuucagcccacaaauggcgugggcuaucagcccuacagagugguggugcugagcuucgaacugcugcaugcuccugccacagugugcggcccuaagaaaagcaccaaucucgugaagaacaaaugcgugaacuucaacuucaacggccugaccggcaccggcgugcugacagagagcaacaagaaguuccugccauuccagcaguuuggccgggauaucgccgauaccacagacgccguuagagauccccagacacuggaaauccuggacaucaccccaugcagcuucggcggagugucugugaucaccccuggcaccaacaccagcaaucagguggcagugcuguaccaggacgugaacuguaccgaagugcccguggccauucacgccgaucagcugacaccuacauggcggguguacuccaccggcagcaauguguuucagaccagagccggcugucugaucggagccgagcacgugaacaauagcuacgagugcgacauccccaucggcgcuggcaucugugccagcuaccagacacagacaaacagccccagacgggcuagaagcguggccagccagagcaucauugccuacacaaugucucugggcgccgagaacagcguggccuacuccaacaacucuaucgcuauccccaccaacuucaccaucagcgugaccaccgagauccugccuguguccaugaccaagaccagcguggacugcaccauguacaucugcggcgauuccaccgagugcuccaaccugcugcugcaguacggcagcuucugcacccagcugaauagagcccugacagggaucgccguggaacaggacaagaacacccaagagguguucgcccaagugaagcaaaucuacaagaccccuccuaucaaggacuucggcggcuucaauuucagccagauucugcccgauccuagcaagcccagcaagcggagcuucaucgaggaccugcuguucaacaaagugacacuggccgacgccggcuucaucaagcaguauggcgauugucugggcgacauugccgccagggaucugauuugcgcccagaaguuuaacggacugacagugcugccuccucugcugaccgaugagaugaucgcccaguacacaucugcccugcuggccggcacaaucacaagcggcuggacauuuggagcuggcgccgcucugcagauccccuuugcuaugcagauggccuaccgguucaacggcaucggagugacccagaaugugcuguacgagaaccagaagcugaucgccaaccaguucaacagcgccaucggcaagauccaggacagccugagcagcacagcaagcgcccugggaaagcugcaggacguggucaaccagaaugcccaggcacugaacacccuggucaagcagcuguccuccaacuucggcgccaucagcucugugcugaacgauauccugagcagacuggacccuccugaggccgaggugcagaucgacagacugaucacaggcagacugcagagccuccagacauacgugacccagcagcugaucagagccgccgagauuagagccucugccaaucuggccgccaccaagaugucugagugugugcugggccagagcaagagaguggacuuuugcggcaagggcuaccaccugaugagcuucccucagucugccccucacggcgugguguuucugcacgugacauaugugcccgcucaagagaagaauuucaccaccgcuccagccaucugccacgacggcaaagcccacuuuccuagagaaggcguguucguguccaacggcacccauugguucgugacacagcggaacuucuacgagccccagaucaucaccaccgacaacaccuucgugucuggcaacugcgacguugugaucggcauugugaacaauaccguguacgacccucugcagcccgagcuggacagcuucaaagaggaacuggacaaguacuuuaagaaccacacaagccccgacguggaccugggcgauaucagcggaaucaaugccagcgucgugaacauccagaaagagaucgaccggcugaacgagguggccaagaaucugaacgagagccugaucgaccugcaagaacuggggaaguacgagcaguacaucaagggaggcggaggaucugacaucgaccccuacaaagaguucggcagcagcuaccagcugcugaacuuccugccucuggacuucuuccccgaccugaacgcccugguggauacagccacagcucuguacgaggaagaacugaccggcagagagcacugcagcccucaccacacagccauuagacaggcccucgugugcugggacgagcugacaaaacugaucgccuggaugagcagcaacaucaccagcgagcaagugcggaccaucaucgugaaccacgugaacgauaccuggggccugaaagugcggcagagccugugguuucaccugagcugucugaccuucggccagcacaccgugcaagaguuucugguguccuucggcguguggaucagaaccccugcuccauacagaccuccaaacgcucccauccugagcacccugccugagcacacagugaucuguugaggacuagucccuguucccagagcccacuuuuuuuucuuuuuuugaaauaaaauagccugucuuucagaucucaaaggcucuuuucagagccaccaaaaaaaaaaaaaaaaaaaaaaaaaaaaaaaaaaaaaaaaaaaaaaaaaaaaaaaaaaaaaaaaaaaaaaaaaaaaaaaaaaaaaaaaaaaaaaaaaaaaa

SEQ ID NO: 12603 - RNA, 4370 nt, Artificial Sequence
  SARS-CoV-2/Wuhan/WIV05/2019__EPI_ISL_402128 spike protein mRNA gc mod (1-1211)(K986P_V987P_T887WN_A1020W) WhcAg construct
aggagagucccgcagucggcguccagcggcucugcuuguucgugugugugucguugcaggccuuauucaagcuuaccauguucguguuucuggugcugcugccccugguguccagccagugugugaaccugaccaccagaacacagcugccuccagccuacaccaacagcuucaccagaggcguguacuaccccgacaagguguucagauccagcgugcugcacucuacccaggaccuguuccugccuuucuucagcaacgugaccugguuccacgccauccacguguccggcaccaauggcaccaagagauucgacaaccccgugcugcccuucaacgacgggguguacuuugccagcaccgagaaguccaacaucaucagaggcuggaucuucggcaccacacuggacagcaagacccagagccugcugaucgugaacaacgccaccaacguggucaucaaagugugcgaguuccaguucugcaacgaccccuuccugggcgucuacuaccacaagaacaacaagagcuggauggaaagcgaguuccggguguacagcagcgccaacaacugcaccuucgaguacgugucccagccuuuccugauggaccuggaaggcaagcagggcaacuucaagaaccugcgcgaguucguguucaagaacaucgacggcuacuucaaaaucuacagcaagcacaccccuaucaaccucgugcgggaucugccucagggcuucucugcucuggaaccccugguggaucugcccaucggcaucaacaucacccgguuucagacacugcuggcccugcacagaagcuaccugacaccuggcgauagcagcagcggauggacagcuggugccgccgcuuacuaugugggcuaccugcagccuagaaccuuccugcugaaguacaacgagaacggcaccaucaccgacgccguggauugugcucuggauccucugagcgagacaaagugcacccugaaguccuucaccguggaaaagggcaucuaccagaccagcaacuuccgggugcagcccaccgaauccaucgugcgguuccccaauaucaccaaucugugccccuucggcgagguguucaaugccaccagauucgccucuguguacgccuggaaccggaagcggaucagcaauugcguggccgacuacuccgugcuguacaacuccgccagcuucagcaccuucaagugcuacggcguguccccuaccaagcugaacgaccugugcuucacaaacguguacgccgacagcuucgugauccggggagaugaagugcggcagauugccccuggacagacaggcaagaucgccgacuacaacuacaagcugcccgacgacuucaccggcugugugauugccuggaacagcaacaaccuggacuccaaagucggcggcaacuacaauuaccuguaccggcuguuccggaaguccaaucugaagcccuucgagcgggacaucagcaccgaaaucuaucaggccggcagcaccccuugcaacggcguggaaggcuucaacugcuacuucccacugcaguccuacggcuuucagcccacaaauggcgugggcuaucagcccuacagagugguggugcugagcuucgaacugcugcaugcuccugccacagugugcggcccuaagaaaagcaccaaucucgugaagaacaaaugcgugaacuucaacuucaacggccugaccggcaccggcgugcugacagagagcaacaagaaguuccugccauuccagcaguuuggccgggauaucgccgauaccacagacgccguuagagauccccagacacuggaaauccuggacaucaccccaugcagcuucggcggagugucugugaucaccccuggcaccaacaccagcaaucagguggcagugcuguaccaggacgugaacuguaccgaagugcccguggccauucacgccgaucagcugacaccuacauggcggguguacuccaccggcagcaauguguuucagaccagagccggcugucugaucggagccgagcacgugaacaauagcuacgagugcgacauccccaucggcgcuggcaucugugccagcuaccagacacagacaaacagccccagacgggcuagaagcguggccagccagagcaucauugccuacacaaugucucugggcgccgagaacagcguggccuacuccaacaacucuaucgcuauccccaccaacuucaccaucagcgugaccaccgagauccugccuguguccaugaccaagaccagcguggacugcaccauguacaucugcggcgauuccaccgagugcuccaaccugcugcugcaguacggcagcuucugcacccagcugaauagagcccugacagggaucgccguggaacaggacaagaacacccaagagguguucgcccaagugaagcaaaucuacaagaccccuccuaucaaggacuucggcggcuucaauuucagccagauucugcccgauccuagcaagcccagcaagcggagcuucaucgaggaccugcuguucaacaaagugacacuggccgacgccggcuucaucaagcaguauggcgauugucugggcgacauugccgccagggaucugauuugcgcccagaaguuuaacggacugacagugcugccuccucugcugaccgaugagaugaucgcccaguacacaucugcccugcuggccggcacaaucacaagcggcuggugguuuggagcuggcgccgcucugcagauccccuuugcuaugcagauggccuaccgguucaacggcaucggagugacccagaaugugcuguacgagaaccagaagcugaucgccaaccaguucaacagcgccaucggcaagauccaggacagccugagcagcacagcaagcgcccugggaaagcugcaggacguggucaaccagaaugcccaggcacugaacacccuggucaagcagcuguccuccaacuucggcgccaucagcucugugcugaacgauauccugagcagacuggacccuccugaggccgaggugcagaucgacagacugaucacaggcagacugcagagccuccagacauacgugacccagcagcugaucagagccgccgagauuagauggucugccaaucuggccgccaccaagaugucugagugugugcugggccagagcaagagaguggacuuuugcggcaagggcuaccaccugaugagcuucccucagucugccccucacggcgugguguuucugcacgugacauaugugcccgcucaagagaagaauuucaccaccgcuccagccaucugccacgacggcaaagcccacuuuccuagagaaggcguguucguguccaacggcacccauugguucgugacacagcggaacuucuacgagccccagaucaucaccaccgacaacaccuucgugucuggcaacugcgacguugugaucggcauugugaacaauaccguguacgacccucugcagcccgagcuggacagcuucaaagaggaacuggacaaguacuuuaagaaccacacaagccccgacguggaccugggcgauaucagcggaaucaaugccagcgucgugaacauccagaaagagaucgaccggcugaacgagguggccaagaaucugaacgagagccugaucgaccugcaagaacuggggaaguacgagcaguacaucaagggaggcggaggaucugacaucgaccccuacaaagaguucggcagcagcuaccagcugcugaacuuccugccucuggacuucuuccccgaccugaacgcccugguggauacagccacagcucuguacgaggaagaacugaccggcagagagcacugcagcccucaccacacagccauuagacaggcccucgugugcugggacgagcugacaaaacugaucgccuggaugagcagcaacaucaccagcgagcaagugcggaccaucaucgugaaccacgugaacgauaccuggggccugaaagugcggcagagccugugguuucaccugagcugucugaccuucggccagcacaccgugcaagaguuucugguguccuucggcguguggaucagaaccccugcuccauacagaccuccaaacgcucccauccugagcacccugccugagcacacagugaucuguugaggacuagucccuguucccagagcccacuuuuuuuucuuuuuuugaaauaaaauagccugucuuucagaucucaaaggcucuuuucagagccaccaaaaaaaaaaaaaaaaaaaaaaaaaaaaaaaaaaaaaaaaaaaaaaaaaaaaaaaaaaaaaaaaaaaaaaaaaaaaaaaaaaaaaaaaaaaaaaaaaaaaa

SEQ ID NO: 12604 - RNA, 4370 nt, Artificial Sequence
  SARS-CoV-2/Wuhan/WIV05/2019__EPI_ISL_402128 spike protein mRNA gc mod (1-1211)(K986P_V987P_P1069F) WhcAg construct
aggagagucccgcagucggcguccagcggcucugcuuguucgugugugugucguugcaggccuuauucaagcuuaccauguucguguuucuggugcugcugccccugguguccagccagugugugaaccugaccaccagaacacagcugccuccagccuacaccaacagcuucaccagaggcguguacuaccccgacaagguguucagauccagcgugcugcacucuacccaggaccuguuccugccuuucuucagcaacgugaccugguuccacgccauccacguguccggcaccaauggcaccaagagauucgacaaccccgugcugcccuucaacgacgggguguacuuugccagcaccgagaaguccaacaucaucagaggcuggaucuucggcaccacacuggacagcaagacccagagccugcugaucgugaacaacgccaccaacguggucaucaaagugugcgaguuccaguucugcaacgaccccuuccugggcgucuacuaccacaagaacaacaagagcuggauggaaagcgaguuccggguguacagcagcgccaacaacugcaccuucgaguacgugucccagccuuuccugauggaccuggaaggcaagcagggcaacuucaagaaccugcgcgaguucguguucaagaacaucgacggcuacuucaaaaucuacagcaagcacaccccuaucaaccucgugcgggaucugccucagggcuucucugcucuggaaccccugguggaucugcccaucggcaucaacaucacccgguuucagacacugcuggcccugcacagaagcuaccugacaccuggcgauagcagcagcggauggacagcuggugccgccgcuuacuaugugggcuaccugcagccuagaaccuuccugcugaaguacaacgagaacggcaccaucaccgacgccguggauugugcucuggauccucugagcgagacaaagugcacccugaaguccuucaccguggaaaagggcaucuaccagaccagcaacuuccgggugcagcccaccgaauccaucgugcgguuccccaauaucaccaaucugugccccuucggcgagguguucaaugccaccagauucgccucuguguacgccuggaaccggaagcggaucagcaauugcguggccgacuacuccgugcuguacaacuccgccagcuucagcaccuucaagugcuacggcguguccccuaccaagcugaacgaccugugcuucacaaacguguacgccgacagcuucgugauccggggagaugaagugcggcagauugccccuggacagacaggcaagaucgccgacuacaacuacaagcugcccgacgacuucaccggcugugugauugccuggaacagcaacaaccuggacuccaaagucggcggcaacuacaauuaccuguaccggcuguuccggaaguccaaucugaagcccuucgagcgggacaucagcaccgaaaucuaucaggccggcagcaccccuugcaacggcguggaaggcuucaacugcuacuucccacugcaguccuacggcuuucagcccacaaauggcgugggcuaucagcccuacagagugguggugcugagcuucgaacugcugcaugcuccugccacagugugcggcccuaagaaaagcaccaaucucgugaagaacaaaugcgugaacuucaacuucaacggccugaccggcaccggcgugcugacagagagcaacaagaaguuccugccauuccagcaguuuggccgggauaucgccgauaccacagacgccguuagagauccccagacacuggaaauccuggacaucaccccaugcagcuucggcggagugucugugaucaccccuggcaccaacaccagcaaucagguggcagugcuguaccaggacgugaacuguaccgaagugcccguggccauucacgccgaucagcugacaccuacauggcggguguacuccaccggcagcaauguguuucagaccagagccggcugucugaucggagccgagcacgugaacaauagcuacgagugcgacauccccaucggcgcuggcaucugugccagcuaccagacacagacaaacagccccagacgggcuagaagcguggccagccagagcaucauugccuacacaaugucucugggcgccgagaacagcguggccuacuccaacaacucuaucgcuauccccaccaacuucaccaucagcgugaccaccgagauccugccuguguccaugaccaagaccagcguggacugcaccauguacaucugcggcgauuccaccgagugcuccaaccugcugcugcaguacggcagcuucugcacccagcugaauagagcccugacagggaucgccguggaacaggacaagaacacccaagagguguucgcccaagugaagcaaaucuacaagaccccuccuaucaaggacuucggcggcuucaauuucagccagauucugcccgauccuagcaagcccagcaagcggagcuucaucgaggaccugcuguucaacaaagugacacuggccgacgccggcuucaucaagcaguauggcgauugucugggcgacauugccgccagggaucugauuugcgcccagaaguuuaacggacugacagugcugccuccucugcugaccgaugagaugaucgcccaguacacaucugcccugcuggccggcacaaucacaagcggcuggacauuuggagcuggcgccgcucugcagauccccuuugcuaugcagauggccuaccgguucaacggcaucggagugacccagaaugugcuguacgagaaccagaagcugaucgccaaccaguucaacagcgccaucggcaagauccaggacagccugagcagcacagcaagcgcccugggaaagcugcaggacguggucaaccagaaugcccaggcacugaacacccuggucaagcagcuguccuccaacuucggcgccaucagcucugugcugaacgauauccugagcagacuggacccuccugaggccgaggugcagaucgacagacugaucacaggcagacugcagagccuccagacauacgugacccagcagcugaucagagccgccgagauuagagccucugccaaucuggccgccaccaagaugucugagugugugcugggccagagcaagagaguggacuuuugcggcaagggcuaccaccugaugagcuucccucagucugccccucacggcgugguguuucugcacgugacauauguguucgcucaagagaagaauuucaccaccgcuccagccaucugccacgacggcaaagcccacuuuccuagagaaggcguguucguguccaacggcacccauugguucgugacacagcggaacuucuacgagccccagaucaucaccaccgacaacaccuucgugucuggcaacugcgacguugugaucggcauugugaacaauaccguguacgacccucugcagcccgagcuggacagcuucaaagaggaacuggacaaguacuuuaagaaccacacaagccccgacguggaccugggcgauaucagcggaaucaaugccagcgucgugaacauccagaaagagaucgaccggcugaacgagguggccaagaaucugaacgagagccugaucgaccugcaagaacuggggaaguacgagcaguacaucaagggaggcggaggaucugacaucgaccccuacaaagaguucggcagcagcuaccagcugcugaacuuccugccucuggacuucuuccccgaccugaacgcccugguggauacagccacagcucuguacgaggaagaacugaccggcagagagcacugcagcccucaccacacagccauuagacaggcccucgugugcugggacgagcugacaaaacugaucgccuggaugagcagcaacaucaccagcgagcaagugcggaccaucaucgugaaccacgugaacgauaccuggggccugaaagugcggcagagccugugguuucaccugagcugucugaccuucggccagcacaccgugcaagaguuucugguguccuucggcguguggaucagaaccccugcuccauacagaccuccaaacgcucccauccugagcacccugccugagcacacagugaucuguugaggacuagucccuguucccagagcccacuuuuuuuucuuuuuuugaaauaaaauagccugucuuucagaucucaaaggcucuuuucagagccaccaaaaaaaaaaaaaaaaaaaaaaaaaaaaaaaaaaaaaaaaaaaaaaaaaaaaaaaaaaaaaaaaaaaaaaaaaaaaaaaaaaaaaaaaaaaaaaaaaaaaa

SEQ ID NO: 12605 - RNA, 4370 nt, Artificial Sequence
  SARS-CoV-2/Wuhan/WIV05/2019__EPI_ISL_402128 spike protein mRNA gc mod (1-1211)(K986P_V987P_ H1048Q_H1064N_ H1083N_H1101N) WhcAg construct
aggagagucccgcagucggcguccagcggcucugcuuguucgugugugugucguugcaggccuuauucaagcuuaccauguucguguuucuggugcugcugccccugguguccagccagugugugaaccugaccaccagaacacagcugccuccagccuacaccaacagcuucaccagaggcguguacuaccccgacaagguguucagauccagcgugcugcacucuacccaggaccuguuccugccuuucuucagcaacgugaccugguuccacgccauccacguguccggcaccaauggcaccaagagauucgacaaccccgugcugcccuucaacgacgggguguacuuugccagcaccgagaaguccaacaucaucagaggcuggaucuucggcaccacacuggacagcaagacccagagccugcugaucgugaacaacgccaccaacguggucaucaaagugugcgaguuccaguucugcaacgaccccuuccugggcgucuacuaccacaagaacaacaagagcuggauggaaagcgaguuccggguguacagcagcgccaacaacugcaccuucgaguacgugucccagccuuuccugauggaccuggaaggcaagcagggcaacuucaagaaccugcgcgaguucguguucaagaacaucgacggcuacuucaaaaucuacagcaagcacaccccuaucaaccucgugcgggaucugccucagggcuucucugcucuggaaccccugguggaucugcccaucggcaucaacaucacccgguuucagacacugcuggcccugcacagaagcuaccugacaccuggcgauagcagcagcggauggacagcuggugccgccgcuuacuaugugggcuaccugcagccuagaaccuuccugcugaaguacaacgagaacggcaccaucaccgacgccguggauugugcucuggauccucugagcgagacaaagugcacccugaaguccuucaccguggaaaagggcaucuaccagaccagcaacuuccgggugcagcccaccgaauccaucgugcgguuccccaauaucaccaaucugugccccuucggcgagguguucaaugccaccagauucgccucuguguacgccuggaaccggaagcggaucagcaauugcguggccgacuacuccgugcuguacaacuccgccagcuucagcaccuucaagugcuacggcguguccccuaccaagcugaacgaccugugcuucacaaacguguacgccgacagcuucgugauccggggagaugaagugcggcagauugccccuggacagacaggcaagaucgccgacuacaacuacaagcugcccgacgacuucaccggcugugugauugccuggaacagcaacaaccuggacuccaaagucggcggcaacuacaauuaccuguaccggcuguuccggaaguccaaucugaagcccuucgagcgggacaucagcaccgaaaucuaucaggccggcagcaccccuugcaacggcguggaaggcuucaacugcuacuucccacugcaguccuacggcuuucagcccacaaauggcgugggcuaucagcccuacagagugguggugcugagcuucgaacugcugcaugcuccugccacagugugcggcccuaagaaaagcaccaaucucgugaagaacaaaugcgugaacuucaacuucaacggccugaccggcaccggcgugcugacagagagcaacaagaaguuccugccauuccagcaguuuggccgggauaucgccgauaccacagacgccguuagagauccccagacacuggaaauccuggacaucaccccaugcagcuucggcggagugucugugaucaccccuggcaccaacaccagcaaucagguggcagugcuguaccaggacgugaacuguaccgaagugcccguggccauucacgccgaucagcugacaccuacauggcggguguacuccaccggcagcaauguguuucagaccagagccggcugucugaucggagccgagcacgugaacaauagcuacgagugcgacauccccaucggcgcuggcaucugugccagcuaccagacacagacaaacagccccagacgggcuagaagcguggccagccagagcaucauugccuacacaaugucucugggcgccgagaacagcguggccuacuccaacaacucuaucgcuauccccaccaacuucaccaucagcgugaccaccgagauccugccuguguccaugaccaagaccagcguggacugcaccauguacaucugcggcgauuccaccgagugcuccaaccugcugcugcaguacggcagcuucugcacccagcugaauagagcccugacagggaucgccguggaacaggacaagaacacccaagagguguucgcccaagugaagcaaaucuacaagaccccuccuaucaaggacuucggcggcuucaauuucagccagauucugcccgauccuagcaagcccagcaagcggagcuucaucgaggaccugcuguucaacaaagugacacuggccgacgccggcuucaucaagcaguauggcgauugucugggcgacauugccgccagggaucugauuugcgcccagaaguuuaacggacugacagugcugccuccucugcugaccgaugagaugaucgcccaguacacaucugcccugcuggccggcacaaucacaagcggcuggacauuuggagcuggcgccgcucugcagauccccuuugcuaugcagauggccuaccgguucaacggcaucggagugacccagaaugugcuguacgagaaccagaagcugaucgccaaccaguucaacagcgccaucggcaagauccaggacagccugagcagcacagcaagcgcccugggaaagcugcaggacguggucaaccagaaugcccaggcacugaacacccuggucaagcagcuguccuccaacuucggcgccaucagcucugugcugaacgauauccugagcagacuggacccuccugaggccgaggugcagaucgacagacugaucacaggcagacugcagagccuccagacauacgugacccagcagcugaucagagccgccgagauuagagccucugccaaucuggccgccaccaagaugucugagugugugcugggccagagcaagagaguggacuuuugcggcaagggcuaccagcugaugagcuucccucagucugccccucacggcgugguguuucugaacgugacauaugugcccgcucaagagaagaauuucaccaccgcuccagccaucugcaacgacggcaaagcccacuuuccuagagaaggcguguucguguccaacggcaccaacugguucgugacacagcggaacuucuacgagccccagaucaucaccaccgacaacaccuucgugucuggcaacugcgacguugugaucggcauugugaacaauaccguguacgacccucugcagcccgagcuggacagcuucaaagaggaacuggacaaguacuuuaagaaccacacaagccccgacguggaccugggcgauaucagcggaaucaaugccagcgucgugaacauccagaaagagaucgaccggcugaacgagguggccaagaaucugaacgagagccugaucgaccugcaagaacuggggaaguacgagcaguacaucaagggaggcggaggaucugacaucgaccccuacaaagaguucggcagcagcuaccagcugcugaacuuccugccucuggacuucuuccccgaccugaacgcccugguggauacagccacagcucuguacgaggaagaacugaccggcagagagcacugcagcccucaccacacagccauuagacaggcccucgugugcugggacgagcugacaaaacugaucgccuggaugagcagcaacaucaccagcgagcaagugcggaccaucaucgugaaccacgugaacgauaccuggggccugaaagugcggcagagccugugguuucaccugagcugucugaccuucggccagcacaccgugcaagaguuucugguguccuucggcguguggaucagaaccccugcuccauacagaccuccaaacgcucccauccugagcacccugccugagcacacagugaucuguugaggacuagucccuguucccagagcccacuuuuuuuucuuuuuuugaaauaaaauagccugucuuucagaucucaaaggcucuuuucagagccaccaaaaaaaaaaaaaaaaaaaaaaaaaaaaaaaaaaaaaaaaaaaaaaaaaaaaaaaaaaaaaaaaaaaaaaaaaaaaaaaaaaaaaaaaaaaaaaaaaaaaa

SEQ ID NO: 12606 - RNA, 4370 nt, Artificial Sequence
  SARS-CoV-2/Wuhan/WIV05/2019__EPI_ISL_402128 spike protein mRNA gc mod (1-1211)(I712C_T1077C) WhcAg construct
aggagagucccgcagucggcguccagcggcucugcuuguucgugugugugucguugcaggccuuauucaagcuuaccauguucguguuucuggugcugcugccccugguguccagccagugugugaaccugaccaccagaacacagcugccuccagccuacaccaacagcuucaccagaggcguguacuaccccgacaagguguucagauccagcgugcugcacucuacccaggaccuguuccugccuuucuucagcaacgugaccugguuccacgccauccacguguccggcaccaauggcaccaagagauucgacaaccccgugcugcccuucaacgacgggguguacuuugccagcaccgagaaguccaacaucaucagaggcuggaucuucggcaccacacuggacagcaagacccagagccugcugaucgugaacaacgccaccaacguggucaucaaagugugcgaguuccaguucugcaacgaccccuuccugggcgucuacuaccacaagaacaacaagagcuggauggaaagcgaguuccggguguacagcagcgccaacaacugcaccuucgaguacgugucccagccuuuccugauggaccuggaaggcaagcagggcaacuucaagaaccugcgcgaguucguguucaagaacaucgacggcuacuucaaaaucuacagcaagcacaccccuaucaaccucgugcgggaucugccucagggcuucucugcucuggaaccccugguggaucugcccaucggcaucaacaucacccgguuucagacacugcuggcccugcacagaagcuaccugacaccuggcgauagcagcagcggauggacagcuggugccgccgcuuacuaugugggcuaccugcagccuagaaccuuccugcugaaguacaacgagaacggcaccaucaccgacgccguggauugugcucuggauccucugagcgagacaaagugcacccugaaguccuucaccguggaaaagggcaucuaccagaccagcaacuuccgggugcagcccaccgaauccaucgugcgguuccccaauaucaccaaucugugccccuucggcgagguguucaaugccaccagauucgccucuguguacgccuggaaccggaagcggaucagcaauugcguggccgacuacuccgugcuguacaacuccgccagcuucagcaccuucaagugcuacggcguguccccuaccaagcugaacgaccugugcuucacaaacguguacgccgacagcuucgugauccggggagaugaagugcggcagauugccccuggacagacaggcaagaucgccgacuacaacuacaagcugcccgacgacuucaccggcugugugauugccuggaacagcaacaaccuggacuccaaagucggcggcaacuacaauuaccuguaccggcuguuccggaaguccaaucugaagcccuucgagcgggacaucagcaccgaaaucuaucaggccggcagcaccccuugcaacggcguggaaggcuucaacugcuacuucccacugcaguccuacggcuuucagcccacaaauggcgugggcuaucagcccuacagagugguggugcugagcuucgaacugcugcaugcuccugccacagugugcggcccuaagaaaagcaccaaucucgugaagaacaaaugcgugaacuucaacuucaacggccugaccggcaccggcgugcugacagagagcaacaagaaguuccugccauuccagcaguuuggccgggauaucgccgauaccacagacgccguuagagauccccagacacuggaaauccuggacaucaccccaugcagcuucggcggagugucugugaucaccccuggcaccaacaccagcaaucagguggcagugcuguaccaggacgugaacuguaccgaagugcccguggccauucacgccgaucagcugacaccuacauggcggguguacuccaccggcagcaauguguuucagaccagagccggcugucugaucggagccgagcacgugaacaauagcuacgagugcgacauccccaucggcgcuggcaucugugccagcuaccagacacagacaaacagccccagacgggcuagaagcguggccagccagagcaucauugccuacacaaugucucugggcgccgagaacagcguggccuacuccaacaacucuugcgcuauccccaccaacuucaccaucagcgugaccaccgagauccugccuguguccaugaccaagaccagcguggacugcaccauguacaucugcggcgauuccaccgagugcuccaaccugcugcugcaguacggcagcuucugcacccagcugaauagagcccugacagggaucgccguggaacaggacaagaacacccaagagguguucgcccaagugaagcaaaucuacaagaccccuccuaucaaggacuucggcggcuucaauuucagccagauucugcccgauccuagcaagcccagcaagcggagcuucaucgaggaccugcuguucaacaaagugacacuggccgacgccggcuucaucaagcaguauggcgauugucugggcgacauugccgccagggaucugauuugcgcccagaaguuuaacggacugacagugcugccuccucugcugaccgaugagaugaucgcccaguacacaucugcccugcuggccggcacaaucacaagcggcuggacauuuggagcuggcgccgcucugcagauccccuuugcuaugcagauggccuaccgguucaacggcaucggagugacccagaaugugcuguacgagaaccagaagcugaucgccaaccaguucaacagcgccaucggcaagauccaggacagccugagcagcacagcaagcgcccugggaaagcugcaggacguggucaaccagaaugcccaggcacugaacacccuggucaagcagcuguccuccaacuucggcgccaucagcucugugcugaacgauauccugagcagacuggacaaggucgaggccgaggugcagaucgacagacugaucacaggcagacugcagagccuccagacauacgugacccagcagcugaucagagccgccgagauuagagccucugccaaucuggccgccaccaagaugucugagugugugcugggccagagcaagagaguggacuuuugcggcaagggcuaccaccugaugagcuucccucagucugccccucacggcgugguguuucugcacgugacauaugugcccgcucaagagaagaauuucaccugugcuccagccaucugccacgacggcaaagcccacuuuccuagagaaggcguguucguguccaacggcacccauugguucgugacacagcggaacuucuacgagccccagaucaucaccaccgacaacaccuucgugucuggcaacugcgacguugugaucggcauugugaacaauaccguguacgacccucugcagcccgagcuggacagcuucaaagaggaacuggacaaguacuuuaagaaccacacaagccccgacguggaccugggcgauaucagcggaaucaaugccagcgucgugaacauccagaaagagaucgaccggcugaacgagguggccaagaaucugaacgagagccugaucgaccugcaagaacuggggaaguacgagcaguacaucaagggaggcggaggaucugacaucgaccccuacaaagaguucggcagcagcuaccagcugcugaacuuccugccucuggacuucuuccccgaccugaacgcccugguggauacagccacagcucuguacgaggaagaacugaccggcagagagcacugcagcccucaccacacagccauuagacaggcccucgugugcugggacgagcugacaaaacugaucgccuggaugagcagcaacaucaccagcgagcaagugcggaccaucaucgugaaccacgugaacgauaccuggggccugaaagugcggcagagccugugguuucaccugagcugucugaccuucggccagcacaccgugcaagaguuucugguguccuucggcguguggaucagaaccccugcuccauacagaccuccaaacgcucccauccugagcacccugccugagcacacagugaucuguugaggacuagucccuguucccagagcccacuuuuuuuucuuuuuuugaaauaaaauagccugucuuucagaucucaaaggcucuuuucagagccaccaaaaaaaaaaaaaaaaaaaaaaaaaaaaaaaaaaaaaaaaaaaaaaaaaaaaaaaaaaaaaaaaaaaaaaaaaaaaaaaaaaaaaaaaaaaaaaaaaaaaa

SEQ ID NO: 12607 - RNA, 4370 nt, Artificial Sequence
  SARS-CoV-2/Wuhan/WIV05/2019__EPI_ISL_402128 spike protein mRNA gc mod (1-1211)(I714C_Y1110C) WhcAg construct
aggagagucccgcagucggcguccagcggcucugcuuguucgugugugugucguugcaggccuuauucaagcuuaccauguucguguuucuggugcugcugccccugguguccagccagugugugaaccugaccaccagaacacagcugccuccagccuacaccaacagcuucaccagaggcguguacuaccccgacaagguguucagauccagcgugcugcacucuacccaggaccuguuccugccuuucuucagcaacgugaccugguuccacgccauccacguguccggcaccaauggcaccaagagauucgacaaccccgugcugcccuucaacgacgggguguacuuugccagcaccgagaaguccaacaucaucagaggcuggaucuucggcaccacacuggacagcaagacccagagccugcugaucgugaacaacgccaccaacguggucaucaaagugugcgaguuccaguucugcaacgaccccuuccugggcgucuacuaccacaagaacaacaagagcuggauggaaagcgaguuccggguguacagcagcgccaacaacugcaccuucgaguacgugucccagccuuuccugauggaccuggaaggcaagcagggcaacuucaagaaccugcgcgaguucguguucaagaacaucgacggcuacuucaaaaucuacagcaagcacaccccuaucaaccucgugcgggaucugccucagggcuucucugcucuggaaccccugguggaucugcccaucggcaucaacaucacccgguuucagacacugcuggcccugcacagaagcuaccugacaccuggcgauagcagcagcggauggacagcuggugccgccgcuuacuaugugggcuaccugcagccuagaaccuuccugcugaaguacaacgagaacggcaccaucaccgacgccguggauugugcucuggauccucugagcgagacaaagugcacccugaaguccuucaccguggaaaagggcaucuaccagaccagcaacuuccgggugcagcccaccgaauccaucgugcgguuccccaauaucaccaaucugugccccuucggcgagguguucaaugccaccagauucgccucuguguacgccuggaaccggaagcggaucagcaauugcguggccgacuacuccgugcuguacaacuccgccagcuucagcaccuucaagugcuacggcguguccccuaccaagcugaacgaccugugcuucacaaacguguacgccgacagcuucgugauccggggagaugaagugcggcagauugccccuggacagacaggcaagaucgccgacuacaacuacaagcugcccgacgacuucaccggcugugugauugccuggaacagcaacaaccuggacuccaaagucggcggcaacuacaauuaccuguaccggcuguuccggaaguccaaucugaagcccuucgagcgggacaucagcaccgaaaucuaucaggccggcagcaccccuugcaacggcguggaaggcuucaacugcuacuucccacugcaguccuacggcuuucagcccacaaauggcgugggcuaucagcccuacagagugguggugcugagcuucgaacugcugcaugcuccugccacagugugcggcccuaagaaaagcaccaaucucgugaagaacaaaugcgugaacuucaacuucaacggccugaccggcaccggcgugcugacagagagcaacaagaaguuccugccauuccagcaguuuggccgggauaucgccgauaccacagacgccguuagagauccccagacacuggaaauccuggacaucaccccaugcagcuucggcggagugucugugaucaccccuggcaccaacaccagcaaucagguggcagugcuguaccaggacgugaacuguaccgaagugcccguggccauucacgccgaucagcugacaccuacauggcggguguacuccaccggcagcaauguguuucagaccagagccggcugucugaucggagccgagcacgugaacaauagcuacgagugcgacauccccaucggcgcuggcaucugugccagcuaccagacacagacaaacagccccagacgggcuagaagcguggccagccagagcaucauugccuacacaaugucucugggcgccgagaacagcguggccuacuccaacaacucuaucgcuugccccaccaacuucaccaucagcgugaccaccgagauccugccuguguccaugaccaagaccagcguggacugcaccauguacaucugcggcgauuccaccgagugcuccaaccugcugcugcaguacggcagcuucugcacccagcugaauagagcccugacagggaucgccguggaacaggacaagaacacccaagagguguucgcccaagugaagcaaaucuacaagaccccuccuaucaaggacuucggcggcuucaauuucagccagauucugcccgauccuagcaagcccagcaagcggagcuucaucgaggaccugcuguucaacaaagugacacuggccgacgccggcuucaucaagcaguauggcgauugucugggcgacauugccgccagggaucugauuugcgcccagaaguuuaacggacugacagugcugccuccucugcugaccgaugagaugaucgcccaguacacaucugcccugcuggccggcacaaucacaagcggcuggacauuuggagcuggcgccgcucugcagauccccuuugcuaugcagauggccuaccgguucaacggcaucggagugacccagaaugugcuguacgagaaccagaagcugaucgccaaccaguucaacagcgccaucggcaagauccaggacagccugagcagcacagcaagcgcccugggaaagcugcaggacguggucaaccagaaugcccaggcacugaacacccuggucaagcagcuguccuccaacuucggcgccaucagcucugugcugaacgauauccugagcagacuggacaaggucgaggccgaggugcagaucgacagacugaucacaggcagacugcagagccuccagacauacgugacccagcagcugaucagagccgccgagauuagagccucugccaaucuggccgccaccaagaugucugagugugugcugggccagagcaagagaguggacuuuugcggcaagggcuaccaccugaugagcuucccucagucugccccucacggcgugguguuucugcacgugacauaugugcccgcucaagagaagaauuucaccaccgcuccagccaucugccacgacggcaaagcccacuuuccuagagaaggcguguucguguccaacggcacccauugguucgugacacagcggaacuucugugagccccagaucaucaccaccgacaacaccuucgugucuggcaacugcgacguugugaucggcauugugaacaauaccguguacgacccucugcagcccgagcuggacagcuucaaagaggaacuggacaaguacuuuaagaaccacacaagccccgacguggaccugggcgauaucagcggaaucaaugccagcgucgugaacauccagaaagagaucgaccggcugaacgagguggccaagaaucugaacgagagccugaucgaccugcaagaacuggggaaguacgagcaguacaucaagggaggcggaggaucugacaucgaccccuacaaagaguucggcagcagcuaccagcugcugaacuuccugccucuggacuucuuccccgaccugaacgcccugguggauacagccacagcucuguacgaggaagaacugaccggcagagagcacugcagcccucaccacacagccauuagacaggcccucgugugcugggacgagcugacaaaacugaucgccuggaugagcagcaacaucaccagcgagcaagugcggaccaucaucgugaaccacgugaacgauaccuggggccugaaagugcggcagagccugugguuucaccugagcugucugaccuucggccagcacaccgugcaagaguuucugguguccuucggcguguggaucagaaccccugcuccauacagaccuccaaacgcucccauccugagcacccugccugagcacacagugaucuguugaggacuagucccuguucccagagcccacuuuuuuuucuuuuuuugaaauaaaauagccugucuuucagaucucaaaggcucuuuucagagccaccaaaaaaaaaaaaaaaaaaaaaaaaaaaaaaaaaaaaaaaaaaaaaaaaaaaaaaaaaaaaaaaaaaaaaaaaaaaaaaaaaaaaaaaaaaaaaaaaaaaaa

SEQ ID NO: 12608 - RNA, 4370 nt, Artificial Sequence
  SARS-CoV-2/Wuhan/WIV05/2019__EPI_ISL_402128 spike protein mRNA gc mod (1-1211)(P715C_P1069C) WhcAg construct
aggagagucccgcagucggcguccagcggcucugcuuguucgugugugugucguugcaggccuuauucaagcuuaccauguucguguuucuggugcugcugccccugguguccagccagugugugaaccugaccaccagaacacagcugccuccagccuacaccaacagcuucaccagaggcguguacuaccccgacaagguguucagauccagcgugcugcacucuacccaggaccuguuccugccuuucuucagcaacgugaccugguuccacgccauccacguguccggcaccaauggcaccaagagauucgacaaccccgugcugcccuucaacgacgggguguacuuugccagcaccgagaaguccaacaucaucagaggcuggaucuucggcaccacacuggacagcaagacccagagccugcugaucgugaacaacgccaccaacguggucaucaaagugugcgaguuccaguucugcaacgaccccuuccugggcgucuacuaccacaagaacaacaagagcuggauggaaagcgaguuccggguguacagcagcgccaacaacugcaccuucgaguacgugucccagccuuuccugauggaccuggaaggcaagcagggcaacuucaagaaccugcgcgaguucguguucaagaacaucgacggcuacuucaaaaucuacagcaagcacaccccuaucaaccucgugcgggaucugccucagggcuucucugcucuggaaccccugguggaucugcccaucggcaucaacaucacccgguuucagacacugcuggcccugcacagaagcuaccugacaccuggcgauagcagcagcggauggacagcuggugccgccgcuuacuaugugggcuaccugcagccuagaaccuuccugcugaaguacaacgagaacggcaccaucaccgacgccguggauugugcucuggauccucugagcgagacaaagugcacccugaaguccuucaccguggaaaagggcaucuaccagaccagcaacuuccgggugcagcccaccgaauccaucgugcgguuccccaauaucaccaaucugugccccuucggcgagguguucaaugccaccagauucgccucuguguacgccuggaaccggaagcggaucagcaauugcguggccgacuacuccgugcuguacaacuccgccagcuucagcaccuucaagugcuacggcguguccccuaccaagcugaacgaccugugcuucacaaacguguacgccgacagcuucgugauccggggagaugaagugcggcagauugccccuggacagacaggcaagaucgccgacuacaacuacaagcugcccgacgacuucaccggcugugugauugccuggaacagcaacaaccuggacuccaaagucggcggcaacuacaauuaccuguaccggcuguuccggaaguccaaucugaagcccuucgagcgggacaucagcaccgaaaucuaucaggccggcagcaccccuugcaacggcguggaaggcuucaacugcuacuucccacugcaguccuacggcuuucagcccacaaauggcgugggcuaucagcccuacagagugguggugcugagcuucgaacugcugcaugcuccugccacagugugcggcccuaagaaaagcaccaaucucgugaagaacaaaugcgugaacuucaacuucaacggccugaccggcaccggcgugcugacagagagcaacaagaaguuccugccauuccagcaguuuggccgggauaucgccgauaccacagacgccguuagagauccccagacacuggaaauccuggacaucaccccaugcagcuucggcggagugucugugaucaccccuggcaccaacaccagcaaucagguggcagugcuguaccaggacgugaacuguaccgaagugcccguggccauucacgccgaucagcugacaccuacauggcggguguacuccaccggcagcaauguguuucagaccagagccggcugucugaucggagccgagcacgugaacaauagcuacgagugcgacauccccaucggcgcuggcaucugugccagcuaccagacacagacaaacagccccagacgggcuagaagcguggccagccagagcaucauugccuacacaaugucucugggcgccgagaacagcguggccuacuccaacaacucuaucgcuaucugcaccaacuucaccaucagcgugaccaccgagauccugccuguguccaugaccaagaccagcguggacugcaccauguacaucugcggcgauuccaccgagugcuccaaccugcugcugcaguacggcagcuucugcacccagcugaauagagcccugacagggaucgccguggaacaggacaagaacacccaagagguguucgcccaagugaagcaaaucuacaagaccccuccuaucaaggacuucggcggcuucaauuucagccagauucugcccgauccuagcaagcccagcaagcggagcuucaucgaggaccugcuguucaacaaagugacacuggccgacgccggcuucaucaagcaguauggcgauugucugggcgacauugccgccagggaucugauuugcgcccagaaguuuaacggacugacagugcugccuccucugcugaccgaugagaugaucgcccaguacacaucugcccugcuggccggcacaaucacaagcggcuggacauuuggagcuggcgccgcucugcagauccccuuugcuaugcagauggccuaccgguucaacggcaucggagugacccagaaugugcuguacgagaaccagaagcugaucgccaaccaguucaacagcgccaucggcaagauccaggacagccugagcagcacagcaagcgcccugggaaagcugcaggacguggucaaccagaaugcccaggcacugaacacccuggucaagcagcuguccuccaacuucggcgccaucagcucugugcugaacgauauccugagcagacuggacaaggucgaggccgaggugcagaucgacagacugaucacaggcagacugcagagccuccagacauacgugacccagcagcugaucagagccgccgagauuagagccucugccaaucuggccgccaccaagaugucugagugugugcugggccagagcaagagaguggacuuuugcggcaagggcuaccaccugaugagcuucccucagucugccccucacggcgugguguuucugcacgugacauaugugugugcucaagagaagaauuucaccaccgcuccagccaucugccacgacggcaaagcccacuuuccuagagaaggcguguucguguccaacggcacccauugguucgugacacagcggaacuucuacgagccccagaucaucaccaccgacaacaccuucgugucuggcaacugcgacguugugaucggcauugugaacaauaccguguacgacccucugcagcccgagcuggacagcuucaaagaggaacuggacaaguacuuuaagaaccacacaagccccgacguggaccugggcgauaucagcggaaucaaugccagcgucgugaacauccagaaagagaucgaccggcugaacgagguggccaagaaucugaacgagagccugaucgaccugcaagaacuggggaaguacgagcaguacaucaagggaggcggaggaucugacaucgaccccuacaaagaguucggcagcagcuaccagcugcugaacuuccugccucuggacuucuuccccgaccugaacgcccugguggauacagccacagcucuguacgaggaagaacugaccggcagagagcacugcagcccucaccacacagccauuagacaggcccucgugugcugggacgagcugacaaaacugaucgccuggaugagcagcaacaucaccagcgagcaagugcggaccaucaucgugaaccacgugaacgauaccuggggccugaaagugcggcagagccugugguuucaccugagcugucugaccuucggccagcacaccgugcaagaguuucugguguccuucggcguguggaucagaaccccugcuccauacagaccuccaaacgcucccauccugagcacccugccugagcacacagugaucuguugaggacuagucccuguucccagagcccacuuuuuuuucuuuuuuugaaauaaaauagccugucuuucagaucucaaaggcucuuuucagagccaccaaaaaaaaaaaaaaaaaaaaaaaaaaaaaaaaaaaaaaaaaaaaaaaaaaaaaaaaaaaaaaaaaaaaaaaaaaaaaaaaaaaaaaaaaaaaaaaaaaaaa

SEQ ID NO: 12609 - RNA, 4370 nt, Artificial Sequence
  SARS-CoV-2/Wuhan/WIV05/2019__EPI_ISL_402128 spike protein mRNA gc mod (1-1211)(G889C_L1034C) WhcAg construct
aggagagucccgcagucggcguccagcggcucugcuuguucgugugugugucguugcaggccuuauucaagcuuaccauguucguguuucuggugcugcugccccugguguccagccagugugugaaccugaccaccagaacacagcugccuccagccuacaccaacagcuucaccagaggcguguacuaccccgacaagguguucagauccagcgugcugcacucuacccaggaccuguuccugccuuucuucagcaacgugaccugguuccacgccauccacguguccggcaccaauggcaccaagagauucgacaaccccgugcugcccuucaacgacgggguguacuuugccagcaccgagaaguccaacaucaucagaggcuggaucuucggcaccacacuggacagcaagacccagagccugcugaucgugaacaacgccaccaacguggucaucaaagugugcgaguuccaguucugcaacgaccccuuccugggcgucuacuaccacaagaacaacaagagcuggauggaaagcgaguuccggguguacagcagcgccaacaacugcaccuucgaguacgugucccagccuuuccugauggaccuggaaggcaagcagggcaacuucaagaaccugcgcgaguucguguucaagaacaucgacggcuacuucaaaaucuacagcaagcacaccccuaucaaccucgugcgggaucugccucagggcuucucugcucuggaaccccugguggaucugcccaucggcaucaacaucacccgguuucagacacugcuggcccugcacagaagcuaccugacaccuggcgauagcagcagcggauggacagcuggugccgccgcuuacuaugugggcuaccugcagccuagaaccuuccugcugaaguacaacgagaacggcaccaucaccgacgccguggauugugcucuggauccucugagcgagacaaagugcacccugaaguccuucaccguggaaaagggcaucuaccagaccagcaacuuccgggugcagcccaccgaauccaucgugcgguuccccaauaucaccaaucugugccccuucggcgagguguucaaugccaccagauucgccucuguguacgccuggaaccggaagcggaucagcaauugcguggccgacuacuccgugcuguacaacuccgccagcuucagcaccuucaagugcuacggcguguccccuaccaagcugaacgaccugugcuucacaaacguguacgccgacagcuucgugauccggggagaugaagugcggcagauugccccuggacagacaggcaagaucgccgacuacaacuacaagcugcccgacgacuucaccggcugugugauugccuggaacagcaacaaccuggacuccaaagucggcggcaacuacaauuaccuguaccggcuguuccggaaguccaaucugaagcccuucgagcgggacaucagcaccgaaaucuaucaggccggcagcaccccuugcaacggcguggaaggcuucaacugcuacuucccacugcaguccuacggcuuucagcccacaaauggcgugggcuaucagcccuacagagugguggugcugagcuucgaacugcugcaugcuccugccacagugugcggcccuaagaaaagcaccaaucucgugaagaacaaaugcgugaacuucaacuucaacggccugaccggcaccggcgugcugacagagagcaacaagaaguuccugccauuccagcaguuuggccgggauaucgccgauaccacagacgccguuagagauccccagacacuggaaauccuggacaucaccccaugcagcuucggcggagugucugugaucaccccuggcaccaacaccagcaaucagguggcagugcuguaccaggacgugaacuguaccgaagugcccguggccauucacgccgaucagcugacaccuacauggcggguguacuccaccggcagcaauguguuucagaccagagccggcugucugaucggagccgagcacgugaacaauagcuacgagugcgacauccccaucggcgcuggcaucugugccagcuaccagacacagacaaacagccccagacgggcuagaagcguggccagccagagcaucauugccuacacaaugucucugggcgccgagaacagcguggccuacuccaacaacucuaucgcuauccccaccaacuucaccaucagcgugaccaccgagauccugccuguguccaugaccaagaccagcguggacugcaccauguacaucugcggcgauuccaccgagugcuccaaccugcugcugcaguacggcagcuucugcacccagcugaauagagcccugacagggaucgccguggaacaggacaagaacacccaagagguguucgcccaagugaagcaaaucuacaagaccccuccuaucaaggacuucggcggcuucaauuucagccagauucugcccgauccuagcaagcccagcaagcggagcuucaucgaggaccugcuguucaacaaagugacacuggccgacgccggcuucaucaagcaguauggcgauugucugggcgacauugccgccagggaucugauuugcgcccagaaguuuaacggacugacagugcugccuccucugcugaccgaugagaugaucgcccaguacacaucugcccugcuggccggcacaaucacaagcggcuggacauuuugcgcuggcgccgcucugcagauccccuuugcuaugcagauggccuaccgguucaacggcaucggagugacccagaaugugcuguacgagaaccagaagcugaucgccaaccaguucaacagcgccaucggcaagauccaggacagccugagcagcacagcaagcgcccugggaaagcugcaggacguggucaaccagaaugcccaggcacugaacacccuggucaagcagcuguccuccaacuucggcgccaucagcucugugcugaacgauauccugagcagacuggacaaggucgaggccgaggugcagaucgacagacugaucacaggcagacugcagagccuccagacauacgugacccagcagcugaucagagccgccgagauuagagccucugccaaucuggccgccaccaagaugucugaguguguguguggccagagcaagagaguggacuuuugcggcaagggcuaccaccugaugagcuucccucagucugccccucacggcgugguguuucugcacgugacauaugugcccgcucaagagaagaauuucaccaccgcuccagccaucugccacgacggcaaagcccacuuuccuagagaaggcguguucguguccaacggcacccauugguucgugacacagcggaacuucuacgagccccagaucaucaccaccgacaacaccuucgugucuggcaacugcgacguugugaucggcauugugaacaauaccguguacgacccucugcagcccgagcuggacagcuucaaagaggaacuggacaaguacuuuaagaaccacacaagccccgacguggaccugggcgauaucagcggaaucaaugccagcgucgugaacauccagaaagagaucgaccggcugaacgagguggccaagaaucugaacgagagccugaucgaccugcaagaacuggggaaguacgagcaguacaucaagggaggcggaggaucugacaucgaccccuacaaagaguucggcagcagcuaccagcugcugaacuuccugccucuggacuucuuccccgaccugaacgcccugguggauacagccacagcucuguacgaggaagaacugaccggcagagagcacugcagcccucaccacacagccauuagacaggcccucgugugcugggacgagcugacaaaacugaucgccuggaugagcagcaacaucaccagcgagcaagugcggaccaucaucgugaaccacgugaacgauaccuggggccugaaagugcggcagagccugugguuucaccugagcugucugaccuucggccagcacaccgugcaagaguuucugguguccuucggcguguggaucagaaccccugcuccauacagaccuccaaacgcucccauccugagcacccugccugagcacacagugaucuguugaggacuagucccuguucccagagcccacuuuuuuuucuuuuuuugaaauaaaauagccugucuuucagaucucaaaggcucuuuucagagccaccaaaaaaaaaaaaaaaaaaaaaaaaaaaaaaaaaaaaaaaaaaaaaaaaaaaaaaaaaaaaaaaaaaaaaaaaaaaaaaaaaaaaaaaaaaaaaaaaaaaaa

SEQ ID NO: 12610 - RNA, 4370 nt, Artificial Sequence
  SARS-CoV-2/Wuhan/WIV05/2019__EPI_ISL_402128 spike protein mRNA gc mod (1-1211)(I909C_Y1047C) WhcAg construct
aggagagucccgcagucggcguccagcggcucugcuuguucgugugugugucguugcaggccuuauucaagcuuaccauguucguguuucuggugcugcugccccugguguccagccagugugugaaccugaccaccagaacacagcugccuccagccuacaccaacagcuucaccagaggcguguacuaccccgacaagguguucagauccagcgugcugcacucuacccaggaccuguuccugccuuucuucagcaacgugaccugguuccacgccauccacguguccggcaccaauggcaccaagagauucgacaaccccgugcugcccuucaacgacgggguguacuuugccagcaccgagaaguccaacaucaucagaggcuggaucuucggcaccacacuggacagcaagacccagagccugcugaucgugaacaacgccaccaacguggucaucaaagugugcgaguuccaguucugcaacgaccccuuccugggcgucuacuaccacaagaacaacaagagcuggauggaaagcgaguuccggguguacagcagcgccaacaacugcaccuucgaguacgugucccagccuuuccugauggaccuggaaggcaagcagggcaacuucaagaaccugcgcgaguucguguucaagaacaucgacggcuacuucaaaaucuacagcaagcacaccccuaucaaccucgugcgggaucugccucagggcuucucugcucuggaaccccugguggaucugcccaucggcaucaacaucacccgguuucagacacugcuggcccugcacagaagcuaccugacaccuggcgauagcagcagcggauggacagcuggugccgccgcuuacuaugugggcuaccugcagccuagaaccuuccugcugaaguacaacgagaacggcaccaucaccgacgccguggauugugcucuggauccucugagcgagacaaagugcacccugaaguccuucaccguggaaaagggcaucuaccagaccagcaacuuccgggugcagcccaccgaauccaucgugcgguuccccaauaucaccaaucugugccccuucggcgagguguucaaugccaccagauucgccucuguguacgccuggaaccggaagcggaucagcaauugcguggccgacuacuccgugcuguacaacuccgccagcuucagcaccuucaagugcuacggcguguccccuaccaagcugaacgaccugugcuucacaaacguguacgccgacagcuucgugauccggggagaugaagugcggcagauugccccuggacagacaggcaagaucgccgacuacaacuacaagcugcccgacgacuucaccggcugugugauugccuggaacagcaacaaccuggacuccaaagucggcggcaacuacaauuaccuguaccggcuguuccggaaguccaaucugaagcccuucgagcgggacaucagcaccgaaaucuaucaggccggcagcaccccuugcaacggcguggaaggcuucaacugcuacuucccacugcaguccuacggcuuucagcccacaaauggcgugggcuaucagcccuacagagugguggugcugagcuucgaacugcugcaugcuccugccacagugugcggcccuaagaaaagcaccaaucucgugaagaacaaaugcgugaacuucaacuucaacggccugaccggcaccggcgugcugacagagagcaacaagaaguuccugccauuccagcaguuuggccgggauaucgccgauaccacagacgccguuagagauccccagacacuggaaauccuggacaucaccccaugcagcuucggcggagugucugugaucaccccuggcaccaacaccagcaaucagguggcagugcuguaccaggacgugaacuguaccgaagugcccguggccauucacgccgaucagcugacaccuacauggcggguguacuccaccggcagcaauguguuucagaccagagccggcugucugaucggagccgagcacgugaacaauagcuacgagugcgacauccccaucggcgcuggcaucugugccagcuaccagacacagacaaacagccccagacgggcuagaagcguggccagccagagcaucauugccuacacaaugucucugggcgccgagaacagcguggccuacuccaacaacucuaucgcuauccccaccaacuucaccaucagcgugaccaccgagauccugccuguguccaugaccaagaccagcguggacugcaccauguacaucugcggcgauuccaccgagugcuccaaccugcugcugcaguacggcagcuucugcacccagcugaauagagcccugacagggaucgccguggaacaggacaagaacacccaagagguguucgcccaagugaagcaaaucuacaagaccccuccuaucaaggacuucggcggcuucaauuucagccagauucugcccgauccuagcaagcccagcaagcggagcuucaucgaggaccugcuguucaacaaagugacacuggccgacgccggcuucaucaagcaguauggcgauugucugggcgacauugccgccagggaucugauuugcgcccagaaguuuaacggacugacagugcugccuccucugcugaccgaugagaugaucgcccaguacacaucugcccugcuggccggcacaaucacaagcggcuggacauuuggagcuggcgccgcucugcagauccccuuugcuaugcagauggccuaccgguucaacggcugcggagugacccagaaugugcuguacgagaaccagaagcugaucgccaaccaguucaacagcgccaucggcaagauccaggacagccugagcagcacagcaagcgcccugggaaagcugcaggacguggucaaccagaaugcccaggcacugaacacccuggucaagcagcuguccuccaacuucggcgccaucagcucugugcugaacgauauccugagcagacuggacaaggucgaggccgaggugcagaucgacagacugaucacaggcagacugcagagccuccagacauacgugacccagcagcugaucagagccgccgagauuagagccucugccaaucuggccgccaccaagaugucugagugugugcugggccagagcaagagaguggacuuuugcggcaagggcugucaccugaugagcuucccucagucugccccucacggcgugguguuucugcacgugacauaugugcccgcucaagagaagaauuucaccaccgcuccagccaucugccacgacggcaaagcccacuuuccuagagaaggcguguucguguccaacggcacccauugguucgugacacagcggaacuucuacgagccccagaucaucaccaccgacaacaccuucgugucuggcaacugcgacguugugaucggcauugugaacaauaccguguacgacccucugcagcccgagcuggacagcuucaaagaggaacuggacaaguacuuuaagaaccacacaagccccgacguggaccugggcgauaucagcggaaucaaugccagcgucgugaacauccagaaagagaucgaccggcugaacgagguggccaagaaucugaacgagagccugaucgaccugcaagaacuggggaaguacgagcaguacaucaagggaggcggaggaucugacaucgaccccuacaaagaguucggcagcagcuaccagcugcugaacuuccugccucuggacuucuuccccgaccugaacgcccugguggauacagccacagcucuguacgaggaagaacugaccggcagagagcacugcagcccucaccacacagccauuagacaggcccucgugugcugggacgagcugacaaaacugaucgccuggaugagcagcaacaucaccagcgagcaagugcggaccaucaucgugaaccacgugaacgauaccuggggccugaaagugcggcagagccugugguuucaccugagcugucugaccuucggccagcacaccgugcaagaguuucugguguccuucggcguguggaucagaaccccugcuccauacagaccuccaaacgcucccauccugagcacccugccugagcacacagugaucuguugaggacuagucccuguucccagagcccacuuuuuuuucuuuuuuugaaauaaaauagccugucuuucagaucucaaaggcucuuuucagagccaccaaaaaaaaaaaaaaaaaaaaaaaaaaaaaaaaaaaaaaaaaaaaaaaaaaaaaaaaaaaaaaaaaaaaaaaaaaaaaaaaaaaaaaaaaaaaaaaaaaaaa

SEQ ID NO: 12611 - RNA, 4370 nt, Artificial Sequence
  SARS-CoV-2/Wuhan/WIV05/2019__EPI_ISL_402128 spike protein mRNA gc mod (1-1211)(Q965C_S1003C) WhcAg construct
aggagagucccgcagucggcguccagcggcucugcuuguucgugugugugucguugcaggccuuauucaagcuuaccauguucguguuucuggugcugcugccccugguguccagccagugugugaaccugaccaccagaacacagcugccuccagccuacaccaacagcuucaccagaggcguguacuaccccgacaagguguucagauccagcgugcugcacucuacccaggaccuguuccugccuuucuucagcaacgugaccugguuccacgccauccacguguccggcaccaauggcaccaagagauucgacaaccccgugcugcccuucaacgacgggguguacuuugccagcaccgagaaguccaacaucaucagaggcuggaucuucggcaccacacuggacagcaagacccagagccugcugaucgugaacaacgccaccaacguggucaucaaagugugcgaguuccaguucugcaacgaccccuuccugggcgucuacuaccacaagaacaacaagagcuggauggaaagcgaguuccggguguacagcagcgccaacaacugcaccuucgaguacgugucccagccuuuccugauggaccuggaaggcaagcagggcaacuucaagaaccugcgcgaguucguguucaagaacaucgacggcuacuucaaaaucuacagcaagcacaccccuaucaaccucgugcgggaucugccucagggcuucucugcucuggaaccccugguggaucugcccaucggcaucaacaucacccgguuucagacacugcuggcccugcacagaagcuaccugacaccuggcgauagcagcagcggauggacagcuggugccgccgcuuacuaugugggcuaccugcagccuagaaccuuccugcugaaguacaacgagaacggcaccaucaccgacgccguggauugugcucuggauccucugagcgagacaaagugcacccugaaguccuucaccguggaaaagggcaucuaccagaccagcaacuuccgggugcagcccaccgaauccaucgugcgguuccccaauaucaccaaucugugccccuucggcgagguguucaaugccaccagauucgccucuguguacgccuggaaccggaagcggaucagcaauugcguggccgacuacuccgugcuguacaacuccgccagcuucagcaccuucaagugcuacggcguguccccuaccaagcugaacgaccugugcuucacaaacguguacgccgacagcuucgugauccggggagaugaagugcggcagauugccccuggacagacaggcaagaucgccgacuacaacuacaagcugcccgacgacuucaccggcugugugauugccuggaacagcaacaaccuggacuccaaagucggcggcaacuacaauuaccuguaccggcuguuccggaaguccaaucugaagcccuucgagcgggacaucagcaccgaaaucuaucaggccggcagcaccccuugcaacggcguggaaggcuucaacugcuacuucccacugcaguccuacggcuuucagcccacaaauggcgugggcuaucagcccuacagagugguggugcugagcuucgaacugcugcaugcuccugccacagugugcggcccuaagaaaagcaccaaucucgugaagaacaaaugcgugaacuucaacuucaacggccugaccggcaccggcgugcugacagagagcaacaagaaguuccugccauuccagcaguuuggccgggauaucgccgauaccacagacgccguuagagauccccagacacuggaaauccuggacaucaccccaugcagcuucggcggagugucugugaucaccccuggcaccaacaccagcaaucagguggcagugcuguaccaggacgugaacuguaccgaagugcccguggccauucacgccgaucagcugacaccuacauggcggguguacuccaccggcagcaauguguuucagaccagagccggcugucugaucggagccgagcacgugaacaauagcuacgagugcgacauccccaucggcgcuggcaucugugccagcuaccagacacagacaaacagccccagacgggcuagaagcguggccagccagagcaucauugccuacacaaugucucugggcgccgagaacagcguggccuacuccaacaacucuaucgcuauccccaccaacuucaccaucagcgugaccaccgagauccugccuguguccaugaccaagaccagcguggacugcaccauguacaucugcggcgauuccaccgagugcuccaaccugcugcugcaguacggcagcuucugcacccagcugaauagagcccugacagggaucgccguggaacaggacaagaacacccaagagguguucgcccaagugaagcaaaucuacaagaccccuccuaucaaggacuucggcggcuucaauuucagccagauucugcccgauccuagcaagcccagcaagcggagcuucaucgaggaccugcuguucaacaaagugacacuggccgacgccggcuucaucaagcaguauggcgauugucugggcgacauugccgccagggaucugauuugcgcccagaaguuuaacggacugacagugcugccuccucugcugaccgaugagaugaucgcccaguacacaucugcccugcuggccggcacaaucacaagcggcuggacauuuggagcuggcgccgcucugcagauccccuuugcuaugcagauggccuaccgguucaacggcaucggagugacccagaaugugcuguacgagaaccagaagcugaucgccaaccaguucaacagcgccaucggcaagauccaggacagccugagcagcacagcaagcgcccugggaaagcugcaggacguggucaaccagaaugcccaggcacugaacacccuggucaagugccuguccuccaacuucggcgccaucagcucugugcugaacgauauccugagcagacuggacaaggucgaggccgaggugcagaucgacagacugaucacaggcagacugcagugucuccagacauacgugacccagcagcugaucagagccgccgagauuagagccucugccaaucuggccgccaccaagaugucugagugugugcugggccagagcaagagaguggacuuuugcggcaagggcuaccaccugaugagcuucccucagucugccccucacggcgugguguuucugcacgugacauaugugcccgcucaagagaagaauuucaccaccgcuccagccaucugccacgacggcaaagcccacuuuccuagagaaggcguguucguguccaacggcacccauugguucgugacacagcggaacuucuacgagccccagaucaucaccaccgacaacaccuucgugucuggcaacugcgacguugugaucggcauugugaacaauaccguguacgacccucugcagcccgagcuggacagcuucaaagaggaacuggacaaguacuuuaagaaccacacaagccccgacguggaccugggcgauaucagcggaaucaaugccagcgucgugaacauccagaaagagaucgaccggcugaacgagguggccaagaaucugaacgagagccugaucgaccugcaagaacuggggaaguacgagcaguacaucaagggaggcggaggaucugacaucgaccccuacaaagaguucggcagcagcuaccagcugcugaacuuccugccucuggacuucuuccccgaccugaacgcccugguggauacagccacagcucuguacgaggaagaacugaccggcagagagcacugcagcccucaccacacagccauuagacaggcccucgugugcugggacgagcugacaaaacugaucgccuggaugagcagcaacaucaccagcgagcaagugcggaccaucaucgugaaccacgugaacgauaccuggggccugaaagugcggcagagccugugguuucaccugagcugucugaccuucggccagcacaccgugcaagaguuucugguguccuucggcguguggaucagaaccccugcuccauacagaccuccaaacgcucccauccugagcacccugccugagcacacagugaucuguugaggacuagucccuguucccagagcccacuuuuuuuucuuuuuuugaaauaaaauagccugucuuucagaucucaaaggcucuuuucagagccaccaaaaaaaaaaaaaaaaaaaaaaaaaaaaaaaaaaaaaaaaaaaaaaaaaaaaaaaaaaaaaaaaaaaaaaaaaaaaaaaaaaaaaaaaaaaaaaaaaaaaa

SEQ ID NO: 12612 - RNA, 4370 nt, Artificial Sequence
  SARS-CoV-2/Wuhan/WIV05/2019__EPI_ISL_402128 spike protein mRNA gc mod (1-1211)(F970C_G999C) WhcAg construct
aggagagucccgcagucggcguccagcggcucugcuuguucgugugugugucguugcaggccuuauucaagcuuaccauguucguguuucuggugcugcugccccugguguccagccagugugugaaccugaccaccagaacacagcugccuccagccuacaccaacagcuucaccagaggcguguacuaccccgacaagguguucagauccagcgugcugcacucuacccaggaccuguuccugccuuucuucagcaacgugaccugguuccacgccauccacguguccggcaccaauggcaccaagagauucgacaaccccgugcugcccuucaacgacgggguguacuuugccagcaccgagaaguccaacaucaucagaggcuggaucuucggcaccacacuggacagcaagacccagagccugcugaucgugaacaacgccaccaacguggucaucaaagugugcgaguuccaguucugcaacgaccccuuccugggcgucuacuaccacaagaacaacaagagcuggauggaaagcgaguuccggguguacagcagcgccaacaacugcaccuucgaguacgugucccagccuuuccugauggaccuggaaggcaagcagggcaacuucaagaaccugcgcgaguucguguucaagaacaucgacggcuacuucaaaaucuacagcaagcacaccccuaucaaccucgugcgggaucugccucagggcuucucugcucuggaaccccugguggaucugcccaucggcaucaacaucacccgguuucagacacugcuggcccugcacagaagcuaccugacaccuggcgauagcagcagcggauggacagcuggugccgccgcuuacuaugugggcuaccugcagccuagaaccuuccugcugaaguacaacgagaacggcaccaucaccgacgccguggauugugcucuggauccucugagcgagacaaagugcacccugaaguccuucaccguggaaaagggcaucuaccagaccagcaacuuccgggugcagcccaccgaauccaucgugcgguuccccaauaucaccaaucugugccccuucggcgagguguucaaugccaccagauucgccucuguguacgccuggaaccggaagcggaucagcaauugcguggccgacuacuccgugcuguacaacuccgccagcuucagcaccuucaagugcuacggcguguccccuaccaagcugaacgaccugugcuucacaaacguguacgccgacagcuucgugauccggggagaugaagugcggcagauugccccuggacagacaggcaagaucgccgacuacaacuacaagcugcccgacgacuucaccggcugugugauugccuggaacagcaacaaccuggacuccaaagucggcggcaacuacaauuaccuguaccggcuguuccggaaguccaaucugaagcccuucgagcgggacaucagcaccgaaaucuaucaggccggcagcaccccuugcaacggcguggaaggcuucaacugcuacuucccacugcaguccuacggcuuucagcccacaaauggcgugggcuaucagcccuacagagugguggugcugagcuucgaacugcugcaugcuccugccacagugugcggcccuaagaaaagcaccaaucucgugaagaacaaaugcgugaacuucaacuucaacggccugaccggcaccggcgugcugacagagagcaacaagaaguuccugccauuccagcaguuuggccgggauaucgccgauaccacagacgccguuagagauccccagacacuggaaauccuggacaucaccccaugcagcuucggcggagugucugugaucaccccuggcaccaacaccagcaaucagguggcagugcuguaccaggacgugaacuguaccgaagugcccguggccauucacgccgaucagcugacaccuacauggcggguguacuccaccggcagcaauguguuucagaccagagccggcugucugaucggagccgagcacgugaacaauagcuacgagugcgacauccccaucggcgcuggcaucugugccagcuaccagacacagacaaacagccccagacgggcuagaagcguggccagccagagcaucauugccuacacaaugucucugggcgccgagaacagcguggccuacuccaacaacucuaucgcuauccccaccaacuucaccaucagcgugaccaccgagauccugccuguguccaugaccaagaccagcguggacugcaccauguacaucugcggcgauuccaccgagugcuccaaccugcugcugcaguacggcagcuucugcacccagcugaauagagcccugacagggaucgccguggaacaggacaagaacacccaagagguguucgcccaagugaagcaaaucuacaagaccccuccuaucaaggacuucggcggcuucaauuucagccagauucugcccgauccuagcaagcccagcaagcggagcuucaucgaggaccugcuguucaacaaagugacacuggccgacgccggcuucaucaagcaguauggcgauugucugggcgacauugccgccagggaucugauuugcgcccagaaguuuaacggacugacagugcugccuccucugcugaccgaugagaugaucgcccaguacacaucugcccugcuggccggcacaaucacaagcggcuggacauuuggagcuggcgccgcucugcagauccccuuugcuaugcagauggccuaccgguucaacggcaucggagugacccagaaugugcuguacgagaaccagaagcugaucgccaaccaguucaacagcgccaucggcaagauccaggacagccugagcagcacagcaagcgcccugggaaagcugcaggacguggucaaccagaaugcccaggcacugaacacccuggucaagcagcuguccuccaacugcggcgccaucagcucugugcugaacgauauccugagcagacuggacaaggucgaggccgaggugcagaucgacagacugaucacauguagacugcagagccuccagacauacgugacccagcagcugaucagagccgccgagauuagagccucugccaaucuggccgccaccaagaugucugagugugugcugggccagagcaagagaguggacuuuugcggcaagggcuaccaccugaugagcuucccucagucugccccucacggcgugguguuucugcacgugacauaugugcccgcucaagagaagaauuucaccaccgcuccagccaucugccacgacggcaaagcccacuuuccuagagaaggcguguucguguccaacggcacccauugguucgugacacagcggaacuucuacgagccccagaucaucaccaccgacaacaccuucgugucuggcaacugcgacguugugaucggcauugugaacaauaccguguacgacccucugcagcccgagcuggacagcuucaaagaggaacuggacaaguacuuuaagaaccacacaagccccgacguggaccugggcgauaucagcggaaucaaugccagcgucgugaacauccagaaagagaucgaccggcugaacgagguggccaagaaucugaacgagagccugaucgaccugcaagaacuggggaaguacgagcaguacaucaagggaggcggaggaucugacaucgaccccuacaaagaguucggcagcagcuaccagcugcugaacuuccugccucuggacuucuuccccgaccugaacgcccugguggauacagccacagcucuguacgaggaagaacugaccggcagagagcacugcagcccucaccacacagccauuagacaggcccucgugugcugggacgagcugacaaaacugaucgccuggaugagcagcaacaucaccagcgagcaagugcggaccaucaucgugaaccacgugaacgauaccuggggccugaaagugcggcagagccugugguuucaccugagcugucugaccuucggccagcacaccgugcaagaguuucugguguccuucggcguguggaucagaaccccugcuccauacagaccuccaaacgcucccauccugagcacccugccugagcacacagugaucuguugaggacuagucccuguucccagagcccacuuuuuuuucuuuuuuugaaauaaaauagccugucuuucagaucucaaaggcucuuuucagagccaccaaaaaaaaaaaaaaaaaaaaaaaaaaaaaaaaaaaaaaaaaaaaaaaaaaaaaaaaaaaaaaaaaaaaaaaaaaaaaaaaaaaaaaaaaaaaaaaaaaaaa

SEQ ID NO: 12613 - RNA, 4370 nt, Artificial Sequence
  SARS-CoV-2/Wuhan/WIV05/2019__EPI_ISL_402128 spike protein mRNA gc mod (1-1211)(A972C_R995C) WhcAg construct
aggagagucccgcagucggcguccagcggcucugcuuguucgugugugugucguugcaggccuuauucaagcuuaccauguucguguuucuggugcugcugccccugguguccagccagugugugaaccugaccaccagaacacagcugccuccagccuacaccaacagcuucaccagaggcguguacuaccccgacaagguguucagauccagcgugcugcacucuacccaggaccuguuccugccuuucuucagcaacgugaccugguuccacgccauccacguguccggcaccaauggcaccaagagauucgacaaccccgugcugcccuucaacgacgggguguacuuugccagcaccgagaaguccaacaucaucagaggcuggaucuucggcaccacacuggacagcaagacccagagccugcugaucgugaacaacgccaccaacguggucaucaaagugugcgaguuccaguucugcaacgaccccuuccugggcgucuacuaccacaagaacaacaagagcuggauggaaagcgaguuccggguguacagcagcgccaacaacugcaccuucgaguacgugucccagccuuuccugauggaccuggaaggcaagcagggcaacuucaagaaccugcgcgaguucguguucaagaacaucgacggcuacuucaaaaucuacagcaagcacaccccuaucaaccucgugcgggaucugccucagggcuucucugcucuggaaccccugguggaucugcccaucggcaucaacaucacccgguuucagacacugcuggcccugcacagaagcuaccugacaccuggcgauagcagcagcggauggacagcuggugccgccgcuuacuaugugggcuaccugcagccuagaaccuuccugcugaaguacaacgagaacggcaccaucaccgacgccguggauugugcucuggauccucugagcgagacaaagugcacccugaaguccuucaccguggaaaagggcaucuaccagaccagcaacuuccgggugcagcccaccgaauccaucgugcgguuccccaauaucaccaaucugugccccuucggcgagguguucaaugccaccagauucgccucuguguacgccuggaaccggaagcggaucagcaauugcguggccgacuacuccgugcuguacaacuccgccagcuucagcaccuucaagugcuacggcguguccccuaccaagcugaacgaccugugcuucacaaacguguacgccgacagcuucgugauccggggagaugaagugcggcagauugccccuggacagacaggcaagaucgccgacuacaacuacaagcugcccgacgacuucaccggcugugugauugccuggaacagcaacaaccuggacuccaaagucggcggcaacuacaauuaccuguaccggcuguuccggaaguccaaucugaagcccuucgagcgggacaucagcaccgaaaucuaucaggccggcagcaccccuugcaacggcguggaaggcuucaacugcuacuucccacugcaguccuacggcuuucagcccacaaauggcgugggcuaucagcccuacagagugguggugcugagcuucgaacugcugcaugcuccugccacagugugcggcccuaagaaaagcaccaaucucgugaagaacaaaugcgugaacuucaacuucaacggccugaccggcaccggcgugcugacagagagcaacaagaaguuccugccauuccagcaguuuggccgggauaucgccgauaccacagacgccguuagagauccccagacacuggaaauccuggacaucaccccaugcagcuucggcggagugucugugaucaccccuggcaccaacaccagcaaucagguggcagugcuguaccaggacgugaacuguaccgaagugcccguggccauucacgccgaucagcugacaccuacauggcggguguacuccaccggcagcaauguguuucagaccagagccggcugucugaucggagccgagcacgugaacaauagcuacgagugcgacauccccaucggcgcuggcaucugugccagcuaccagacacagacaaacagccccagacgggcuagaagcguggccagccagagcaucauugccuacacaaugucucugggcgccgagaacagcguggccuacuccaacaacucuaucgcuauccccaccaacuucaccaucagcgugaccaccgagauccugccuguguccaugaccaagaccagcguggacugcaccauguacaucugcggcgauuccaccgagugcuccaaccugcugcugcaguacggcagcuucugcacccagcugaauagagcccugacagggaucgccguggaacaggacaagaacacccaagagguguucgcccaagugaagcaaaucuacaagaccccuccuaucaaggacuucggcggcuucaauuucagccagauucugcccgauccuagcaagcccagcaagcggagcuucaucgaggaccugcuguucaacaaagugacacuggccgacgccggcuucaucaagcaguauggcgauugucugggcgacauugccgccagggaucugauuugcgcccagaaguuuaacggacugacagugcugccuccucugcugaccgaugagaugaucgcccaguacacaucugcccugcuggccggcacaaucacaagcggcuggacauuuggagcuggcgccgcucugcagauccccuuugcuaugcagauggccuaccgguucaacggcaucggagugacccagaaugugcuguacgagaaccagaagcugaucgccaaccaguucaacagcgccaucggcaagauccaggacagccugagcagcacagcaagcgcccugggaaagcugcaggacguggucaaccagaaugcccaggcacugaacacccuggucaagcagcuguccuccaacuucggcugcaucagcucugugcugaacgauauccugagcagacuggacaaggucgaggccgaggugcagaucgacugucugaucacaggcagacugcagagccuccagacauacgugacccagcagcugaucagagccgccgagauuagagccucugccaaucuggccgccaccaagaugucugagugugugcugggccagagcaagagaguggacuuuugcggcaagggcuaccaccugaugagcuucccucagucugccccucacggcgugguguuucugcacgugacauaugugcccgcucaagagaagaauuucaccaccgcuccagccaucugccacgacggcaaagcccacuuuccuagagaaggcguguucguguccaacggcacccauugguucgugacacagcggaacuucuacgagccccagaucaucaccaccgacaacaccuucgugucuggcaacugcgacguugugaucggcauugugaacaauaccguguacgacccucugcagcccgagcuggacagcuucaaagaggaacuggacaaguacuuuaagaaccacacaagccccgacguggaccugggcgauaucagcggaaucaaugccagcgucgugaacauccagaaagagaucgaccggcugaacgagguggccaagaaucugaacgagagccugaucgaccugcaagaacuggggaaguacgagcaguacaucaagggaggcggaggaucugacaucgaccccuacaaagaguucggcagcagcuaccagcugcugaacuuccugccucuggacuucuuccccgaccugaacgcccugguggauacagccacagcucuguacgaggaagaacugaccggcagagagcacugcagcccucaccacacagccauuagacaggcccucgugugcugggacgagcugacaaaacugaucgccuggaugagcagcaacaucaccagcgagcaagugcggaccaucaucgugaaccacgugaacgauaccuggggccugaaagugcggcagagccugugguuucaccugagcugucugaccuucggccagcacaccgugcaagaguuucugguguccuucggcguguggaucagaaccccugcuccauacagaccuccaaacgcucccauccugagcacccugccugagcacacagugaucuguugaggacuagucccuguucccagagcccacuuuuuuuucuuuuuuugaaauaaaauagccugucuuucagaucucaaaggcucuuuucagagccaccaaaaaaaaaaaaaaaaaaaaaaaaaaaaaaaaaaaaaaaaaaaaaaaaaaaaaaaaaaaaaaaaaaaaaaaaaaaaaaaaaaaaaaaaaaaaaaaaaaaaa

SEQ ID NO: 12614 - RNA, 4370 nt, Artificial Sequence
  SARS-CoV-2/Wuhan/WIV05/2019__EPI_ISL_402128 spike protein mRNA gc mod (1-1211)(A890C_V1040C) WhcAg construct
aggagagucccgcagucggcguccagcggcucugcuuguucgugugugugucguugcaggccuuauucaagcuuaccauguucguguuucuggugcugcugccccugguguccagccagugugugaaccugaccaccagaacacagcugccuccagccuacaccaacagcuucaccagaggcguguacuaccccgacaagguguucagauccagcgugcugcacucuacccaggaccuguuccugccuuucuucagcaacgugaccugguuccacgccauccacguguccggcaccaauggcaccaagagauucgacaaccccgugcugcccuucaacgacgggguguacuuugccagcaccgagaaguccaacaucaucagaggcuggaucuucggcaccacacuggacagcaagacccagagccugcugaucgugaacaacgccaccaacguggucaucaaagugugcgaguuccaguucugcaacgaccccuuccugggcgucuacuaccacaagaacaacaagagcuggauggaaagcgaguuccggguguacagcagcgccaacaacugcaccuucgaguacgugucccagccuuuccugauggaccuggaaggcaagcagggcaacuucaagaaccugcgcgaguucguguucaagaacaucgacggcuacuucaaaaucuacagcaagcacaccccuaucaaccucgugcgggaucugccucagggcuucucugcucuggaaccccugguggaucugcccaucggcaucaacaucacccgguuucagacacugcuggcccugcacagaagcuaccugacaccuggcgauagcagcagcggauggacagcuggugccgccgcuuacuaugugggcuaccugcagccuagaaccuuccugcugaaguacaacgagaacggcaccaucaccgacgccguggauugugcucuggauccucugagcgagacaaagugcacccugaaguccuucaccguggaaaagggcaucuaccagaccagcaacuuccgggugcagcccaccgaauccaucgugcgguuccccaauaucaccaaucugugccccuucggcgagguguucaaugccaccagauucgccucuguguacgccuggaaccggaagcggaucagcaauugcguggccgacuacuccgugcuguacaacuccgccagcuucagcaccuucaagugcuacggcguguccccuaccaagcugaacgaccugugcuucacaaacguguacgccgacagcuucgugauccggggagaugaagugcggcagauugccccuggacagacaggcaagaucgccgacuacaacuacaagcugcccgacgacuucaccggcugugugauugccuggaacagcaacaaccuggacuccaaagucggcggcaacuacaauuaccuguaccggcuguuccggaaguccaaucugaagcccuucgagcgggacaucagcaccgaaaucuaucaggccggcagcaccccuugcaacggcguggaaggcuucaacugcuacuucccacugcaguccuacggcuuucagcccacaaauggcgugggcuaucagcccuacagagugguggugcugagcuucgaacugcugcaugcuccugccacagugugcggcccuaagaaaagcaccaaucucgugaagaacaaaugcgugaacuucaacuucaacggccugaccggcaccggcgugcugacagagagcaacaagaaguuccugccauuccagcaguuuggccgggauaucgccgauaccacagacgccguuagagauccccagacacuggaaauccuggacaucaccccaugcagcuucggcggagugucugugaucaccccuggcaccaacaccagcaaucagguggcagugcuguaccaggacgugaacuguaccgaagugcccguggccauucacgccgaucagcugacaccuacauggcggguguacuccaccggcagcaauguguuucagaccagagccggcugucugaucggagccgagcacgugaacaauagcuacgagugcgacauccccaucggcgcuggcaucugugccagcuaccagacacagacaaacagccccagacgggcuagaagcguggccagccagagcaucauugccuacacaaugucucugggcgccgagaacagcguggccuacuccaacaacucuaucgcuauccccaccaacuucaccaucagcgugaccaccgagauccugccuguguccaugaccaagaccagcguggacugcaccauguacaucugcggcgauuccaccgagugcuccaaccugcugcugcaguacggcagcuucugcacccagcugaauagagcccugacagggaucgccguggaacaggacaagaacacccaagagguguucgcccaagugaagcaaaucuacaagaccccuccuaucaaggacuucggcggcuucaauuucagccagauucugcccgauccuagcaagcccagcaagcggagcuucaucgaggaccugcuguucaacaaagugacacuggccgacgccggcuucaucaagcaguauggcgauugucugggcgacauugccgccagggaucugauuugcgcccagaaguuuaacggacugacagugcugccuccucugcugaccgaugagaugaucgcccaguacacaucugcccugcuggccggcacaaucacaagcggcuggacauuuggaugcggcgccgcucugcagauccccuuugcuaugcagauggccuaccgguucaacggcaucggagugacccagaaugugcuguacgagaaccagaagcugaucgccaaccaguucaacagcgccaucggcaagauccaggacagccugagcagcacagcaagcgcccugggaaagcugcaggacguggucaaccagaaugcccaggcacugaacacccuggucaagcagcuguccuccaacuucggcgccaucagcucugugcugaacgauauccugagcagacuggacaaggucgaggccgaggugcagaucgacagacugaucacaggcagacugcagagccuccagacauacgugacccagcagcugaucagagccgccgagauuagagccucugccaaucuggccgccaccaagaugucugagugugugcugggccagagcaagagaugugacuuuugcggcaagggcuaccaccugaugagcuucccucagucugccccucacggcgugguguuucugcacgugacauaugugcccgcucaagagaagaauuucaccaccgcuccagccaucugccacgacggcaaagcccacuuuccuagagaaggcguguucguguccaacggcacccauugguucgugacacagcggaacuucuacgagccccagaucaucaccaccgacaacaccuucgugucuggcaacugcgacguugugaucggcauugugaacaauaccguguacgacccucugcagcccgagcuggacagcuucaaagaggaacuggacaaguacuuuaagaaccacacaagccccgacguggaccugggcgauaucagcggaaucaaugccagcgucgugaacauccagaaagagaucgaccggcugaacgagguggccaagaaucugaacgagagccugaucgaccugcaagaacuggggaaguacgagcaguacaucaagggaggcggaggaucugacaucgaccccuacaaagaguucggcagcagcuaccagcugcugaacuuccugccucuggacuucuuccccgaccugaacgcccugguggauacagccacagcucuguacgaggaagaacugaccggcagagagcacugcagcccucaccacacagccauuagacaggcccucgugugcugggacgagcugacaaaacugaucgccuggaugagcagcaacaucaccagcgagcaagugcggaccaucaucgugaaccacgugaacgauaccuggggccugaaagugcggcagagccugugguuucaccugagcugucugaccuucggccagcacaccgugcaagaguuucugguguccuucggcguguggaucagaaccccugcuccauacagaccuccaaacgcucccauccugagcacccugccugagcacacagugaucuguugaggacuagucccuguucccagagcccacuuuuuuuucuuuuuuugaaauaaaauagccugucuuucagaucucaaaggcucuuuucagagccaccaaaaaaaaaaaaaaaaaaaaaaaaaaaaaaaaaaaaaaaaaaaaaaaaaaaaaaaaaaaaaaaaaaaaaaaaaaaaaaaaaaaaaaaaaaaaaaaaaaaaa

SEQ ID NO: 12615 - RNA, 4370 nt, Artificial Sequence
  SARS-CoV-2/Wuhan/WIV05/2019__EPI_ISL_402128 spike protein mRNA gc mod (1-1211)(T874C_S1055C) WhcAg construct
aggagagucccgcagucggcguccagcggcucugcuuguucgugugugugucguugcaggccuuauucaagcuuaccauguucguguuucuggugcugcugccccugguguccagccagugugugaaccugaccaccagaacacagcugccuccagccuacaccaacagcuucaccagaggcguguacuaccccgacaagguguucagauccagcgugcugcacucuacccaggaccuguuccugccuuucuucagcaacgugaccugguuccacgccauccacguguccggcaccaauggcaccaagagauucgacaaccccgugcugcccuucaacgacgggguguacuuugccagcaccgagaaguccaacaucaucagaggcuggaucuucggcaccacacuggacagcaagacccagagccugcugaucgugaacaacgccaccaacguggucaucaaagugugcgaguuccaguucugcaacgaccccuuccugggcgucuacuaccacaagaacaacaagagcuggauggaaagcgaguuccggguguacagcagcgccaacaacugcaccuucgaguacgugucccagccuuuccugauggaccuggaaggcaagcagggcaacuucaagaaccugcgcgaguucguguucaagaacaucgacggcuacuucaaaaucuacagcaagcacaccccuaucaaccucgugcgggaucugccucagggcuucucugcucuggaaccccugguggaucugcccaucggcaucaacaucacccgguuucagacacugcuggcccugcacagaagcuaccugacaccuggcgauagcagcagcggauggacagcuggugccgccgcuuacuaugugggcuaccugcagccuagaaccuuccugcugaaguacaacgagaacggcaccaucaccgacgccguggauugugcucuggauccucugagcgagacaaagugcacccugaaguccuucaccguggaaaagggcaucuaccagaccagcaacuuccgggugcagcccaccgaauccaucgugcgguuccccaauaucaccaaucugugccccuucggcgagguguucaaugccaccagauucgccucuguguacgccuggaaccggaagcggaucagcaauugcguggccgacuacuccgugcuguacaacuccgccagcuucagcaccuucaagugcuacggcguguccccuaccaagcugaacgaccugugcuucacaaacguguacgccgacagcuucgugauccggggagaugaagugcggcagauugccccuggacagacaggcaagaucgccgacuacaacuacaagcugcccgacgacuucaccggcugugugauugccuggaacagcaacaaccuggacuccaaagucggcggcaacuacaauuaccuguaccggcuguuccggaaguccaaucugaagcccuucgagcgggacaucagcaccgaaaucuaucaggccggcagcaccccuugcaacggcguggaaggcuucaacugcuacuucccacugcaguccuacggcuuucagcccacaaauggcgugggcuaucagcccuacagagugguggugcugagcuucgaacugcugcaugcuccugccacagugugcggcccuaagaaaagcaccaaucucgugaagaacaaaugcgugaacuucaacuucaacggccugaccggcaccggcgugcugacagagagcaacaagaaguuccugccauuccagcaguuuggccgggauaucgccgauaccacagacgccguuagagauccccagacacuggaaauccuggacaucaccccaugcagcuucggcggagugucugugaucaccccuggcaccaacaccagcaaucagguggcagugcuguaccaggacgugaacuguaccgaagugcccguggccauucacgccgaucagcugacaccuacauggcggguguacuccaccggcagcaauguguuucagaccagagccggcugucugaucggagccgagcacgugaacaauagcuacgagugcgacauccccaucggcgcuggcaucugugccagcuaccagacacagacaaacagccccagacgggcuagaagcguggccagccagagcaucauugccuacacaaugucucugggcgccgagaacagcguggccuacuccaacaacucuaucgcuauccccaccaacuucaccaucagcgugaccaccgagauccugccuguguccaugaccaagaccagcguggacugcaccauguacaucugcggcgauuccaccgagugcuccaaccugcugcugcaguacggcagcuucugcacccagcugaauagagcccugacagggaucgccguggaacaggacaagaacacccaagagguguucgcccaagugaagcaaaucuacaagaccccuccuaucaaggacuucggcggcuucaauuucagccagauucugcccgauccuagcaagcccagcaagcggagcuucaucgaggaccugcuguucaacaaagugacacuggccgacgccggcuucaucaagcaguauggcgauugucugggcgacauugccgccagggaucugauuugcgcccagaaguuuaacggacugacagugcugccuccucugcugaccgaugagaugaucgcccaguacugcucugcccugcuggccggcacaaucacaagcggcuggacauuuggagcuggcgccgcucugcagauccccuuugcuaugcagauggccuaccgguucaacggcaucggagugacccagaaugugcuguacgagaaccagaagcugaucgccaaccaguucaacagcgccaucggcaagauccaggacagccugagcagcacagcaagcgcccugggaaagcugcaggacguggucaaccagaaugcccaggcacugaacacccuggucaagcagcuguccuccaacuucggcgccaucagcucugugcugaacgauauccugagcagacuggacaaggucgaggccgaggugcagaucgacagacugaucacaggcagacugcagagccuccagacauacgugacccagcagcugaucagagccgccgagauuagagccucugccaaucuggccgccaccaagaugucugagugugugcugggccagagcaagagaguggacuuuugcggcaagggcuaccaccugaugagcuucccucagugcgccccucacggcgugguguuucugcacgugacauaugugcccgcucaagagaagaauuucaccaccgcuccagccaucugccacgacggcaaagcccacuuuccuagagaaggcguguucguguccaacggcacccauugguucgugacacagcggaacuucuacgagccccagaucaucaccaccgacaacaccuucgugucuggcaacugcgacguugugaucggcauugugaacaauaccguguacgacccucugcagcccgagcuggacagcuucaaagaggaacuggacaaguacuuuaagaaccacacaagccccgacguggaccugggcgauaucagcggaaucaaugccagcgucgugaacauccagaaagagaucgaccggcugaacgagguggccaagaaucugaacgagagccugaucgaccugcaagaacuggggaaguacgagcaguacaucaagggaggcggaggaucugacaucgaccccuacaaagaguucggcagcagcuaccagcugcugaacuuccugccucuggacuucuuccccgaccugaacgcccugguggauacagccacagcucuguacgaggaagaacugaccggcagagagcacugcagcccucaccacacagccauuagacaggcccucgugugcugggacgagcugacaaaacugaucgccuggaugagcagcaacaucaccagcgagcaagugcggaccaucaucgugaaccacgugaacgauaccuggggccugaaagugcggcagagccugugguuucaccugagcugucugaccuucggccagcacaccgugcaagaguuucugguguccuucggcguguggaucagaaccccugcuccauacagaccuccaaacgcucccauccugagcacccugccugagcacacagugaucuguugaggacuagucccuguucccagagcccacuuuuuuuucuuuuuuugaaauaaaauagccugucuuucagaucucaaaggcucuuuucagagccaccaaaaaaaaaaaaaaaaaaaaaaaaaaaaaaaaaaaaaaaaaaaaaaaaaaaaaaaaaaaaaaaaaaaaaaaaaaaaaaaaaaaaaaaaaaaaaaaaaaaaa

SEQ ID NO: 12616 - RNA, 4196 nt, Artificial Sequence
  SARS-CoV-2/Wuhan/WIV05/2019__EPI_ISL_402128 spike protein mRNA gc mod (1-1147) LumSynth construct
aggagagucccgcagucggcguccagcggcucugcuuguucgugugugugucguugcaggccuuauucaagcuuaccauguucguguuucuggugcugcugccccugguguccagccagugugugaaccugaccaccagaacacagcugccuccagccuacaccaacagcuucaccagaggcguguacuaccccgacaagguguucagauccagcgugcugcacucuacccaggaccuguuccugccuuucuucagcaacgugaccugguuccacgccauccacguguccggcaccaauggcaccaagagauucgacaaccccgugcugcccuucaacgacgggguguacuuugccagcaccgagaaguccaacaucaucagaggcuggaucuucggcaccacacuggacagcaagacccagagccugcugaucgugaacaacgccaccaacguggucaucaaagugugcgaguuccaguucugcaacgaccccuuccugggcgucuacuaccacaagaacaacaagagcuggauggaaagcgaguuccggguguacagcagcgccaacaacugcaccuucgaguacgugucccagccuuuccugauggaccuggaaggcaagcagggcaacuucaagaaccugcgcgaguucguguucaagaacaucgacggcuacuucaaaaucuacagcaagcacaccccuaucaaccucgugcgggaucugccucagggcuucucugcucuggaaccccugguggaucugcccaucggcaucaacaucacccgguuucagacacugcuggcccugcacagaagcuaccugacaccuggcgauagcagcagcggauggacagcuggugccgccgcuuacuaugugggcuaccugcagccuagaaccuuccugcugaaguacaacgagaacggcaccaucaccgacgccguggauugugcucuggauccucugagcgagacaaagugcacccugaaguccuucaccguggaaaagggcaucuaccagaccagcaacuuccgggugcagcccaccgaauccaucgugcgguuccccaauaucaccaaucugugccccuucggcgagguguucaaugccaccagauucgccucuguguacgccuggaaccggaagcggaucagcaauugcguggccgacuacuccgugcuguacaacuccgccagcuucagcaccuucaagugcuacggcguguccccuaccaagcugaacgaccugugcuucacaaacguguacgccgacagcuucgugauccggggagaugaagugcggcagauugccccuggacagacaggcaagaucgccgacuacaacuacaagcugcccgacgacuucaccggcugugugauugccuggaacagcaacaaccuggacuccaaagucggcggcaacuacaauuaccuguaccggcuguuccggaaguccaaucugaagcccuucgagcgggacaucagcaccgaaaucuaucaggccggcagcaccccuugcaacggcguggaaggcuucaacugcuacuucccacugcaguccuacggcuuucagcccacaaauggcgugggcuaucagcccuacagagugguggugcugagcuucgaacugcugcaugcuccugccacagugugcggcccuaagaaaagcaccaaucucgugaagaacaaaugcgugaacuucaacuucaacggccugaccggcaccggcgugcugacagagagcaacaagaaguuccugccauuccagcaguuuggccgggauaucgccgauaccacagacgccguuagagauccccagacacuggaaauccuggacaucaccccaugcagcuucggcggagugucugugaucaccccuggcaccaacaccagcaaucagguggcagugcuguaccaggacgugaacuguaccgaagugcccguggccauucacgccgaucagcugacaccuacauggcggguguacuccaccggcagcaauguguuucagaccagagccggcugucugaucggagccgagcacgugaacaauagcuacgagugcgacauccccaucggcgcuggcaucugugccagcuaccagacacagacaaacagccccagacgggcuagaagcguggccagccagagcaucauugccuacacaaugucucugggcgccgagaacagcguggccuacuccaacaacucuaucgcuauccccaccaacuucaccaucagcgugaccaccgagauccugccuguguccaugaccaagaccagcguggacugcaccauguacaucugcggcgauuccaccgagugcuccaaccugcugcugcaguacggcagcuucugcacccagcugaauagagcccugacagggaucgccguggaacaggacaagaacacccaagagguguucgcccaagugaagcaaaucuacaagaccccuccuaucaaggacuucggcggcuucaauuucagccagauucugcccgauccuagcaagcccagcaagcggagcuucaucgaggaccugcuguucaacaaagugacacuggccgacgccggcuucaucaagcaguauggcgauugucugggcgacauugccgccagggaucugauuugcgcccagaaguuuaacggacugacagugcugccuccucugcugaccgaugagaugaucgcccaguacacaucugcccugcuggccggcacaaucacaagcggcuggacauuuggagcuggcgccgcucugcagauccccuuugcuaugcagauggccuaccgguucaacggcaucggagugacccagaaugugcuguacgagaaccagaagcugaucgccaaccaguucaacagcgccaucggcaagauccaggacagccugagcagcacagcaagcgcccugggaaagcugcaggacguggucaaccagaaugcccaggcacugaacacccuggucaagcagcuguccuccaacuucggcgccaucagcucugugcugaacgauauccugagcagacuggacaaggucgaggccgaggugcagaucgacagacugaucacaggcagacugcagagccuccagacauacgugacccagcagcugaucagagccgccgagauuagagccucugccaaucuggccgccaccaagaugucugagugugugcugggccagagcaagagaguggacuuuugcggcaagggcuaccaccugaugagcuucccucagucugccccucacggcgugguguuucugcacgugacauaugugcccgcucaagagaagaauuucaccaccgcuccagccaucugccacgacggcaaagcccacuuuccuagagaaggcguguucguguccaacggcacccauugguucgugacacagcggaacuucuacgagccccagaucaucaccaccgacaacaccuucgugucuggcaacugcgacguugugaucggcauugugaacaauaccguguacgacccucugcagcccgagcuggacagcggcggaggaucuggcggaggacagaucuacgagggcaagcugacagccgagggccugagauuuggaaucguggccagccgguucaaucacgcccugguggauagacugguggaaggcgccaucgaugccauugucagacacggcggcagagaagaggacaucacccucguuagagugcccggcucuugggagauuccuguggcugcuggcgagcuggcccggaaagaagauaucgacgccguuaucgccaucggcgugcugaucagaggcgccacaccucacuucgacuauaucgccagcgagguguccaaaggccuggccgaucugagccuggaacugagaaagcccaucaccuucggcgugaucaccgcugacacacuggaacaggccauugagagagccggcaccaagcacggcaacaaaggaugggaagccgcucuguccgccaucgagauggccaaccuguucaagagccugcggugaggacuagucccuguucccagagcccacuuuuuuuucuuuuuuugaaauaaaauagccugucuuucagaucucaaaggcucuuuucagagccaccaaaaaaaaaaaaaaaaaaaaaaaaaaaaaaaaaaaaaaaaaaaaaaaaaaaaaaaaaaaaaaaaaaaaaaaaaaaaaaaaaaaaaaaaaaaaaaaaaaaaa

SEQ ID NO: 12617 - RNA, 4196 nt, Artificial Sequence
  SARS-CoV-2/Wuhan/WIV05/2019__EPI_ISL_402128 spike protein mRNA gc mod (1-1147)(K986P_V987P) LumSynth construct
aggagagucccgcagucggcguccagcggcucugcuuguucgugugugugucguugcaggccuuauucaagcuuaccauguucguguuucuggugcugcugccccugguguccagccagugugugaaccugaccaccagaacacagcugccuccagccuacaccaacagcuucaccagaggcguguacuaccccgacaagguguucagauccagcgugcugcacucuacccaggaccuguuccugccuuucuucagcaacgugaccugguuccacgccauccacguguccggcaccaauggcaccaagagauucgacaaccccgugcugcccuucaacgacgggguguacuuugccagcaccgagaaguccaacaucaucagaggcuggaucuucggcaccacacuggacagcaagacccagagccugcugaucgugaacaacgccaccaacguggucaucaaagugugcgaguuccaguucugcaacgaccccuuccugggcgucuacuaccacaagaacaacaagagcuggauggaaagcgaguuccggguguacagcagcgccaacaacugcaccuucgaguacgugucccagccuuuccugauggaccuggaaggcaagcagggcaacuucaagaaccugcgcgaguucguguucaagaacaucgacggcuacuucaaaaucuacagcaagcacaccccuaucaaccucgugcgggaucugccucagggcuucucugcucuggaaccccugguggaucugcccaucggcaucaacaucacccgguuucagacacugcuggcccugcacagaagcuaccugacaccuggcgauagcagcagcggauggacagcuggugccgccgcuuacuaugugggcuaccugcagccuagaaccuuccugcugaaguacaacgagaacggcaccaucaccgacgccguggauugugcucuggauccucugagcgagacaaagugcacccugaaguccuucaccguggaaaagggcaucuaccagaccagcaacuuccgggugcagcccaccgaauccaucgugcgguuccccaauaucaccaaucugugccccuucggcgagguguucaaugccaccagauucgccucuguguacgccuggaaccggaagcggaucagcaauugcguggccgacuacuccgugcuguacaacuccgccagcuucagcaccuucaagugcuacggcguguccccuaccaagcugaacgaccugugcuucacaaacguguacgccgacagcuucgugauccggggagaugaagugcggcagauugccccuggacagacaggcaagaucgccgacuacaacuacaagcugcccgacgacuucaccggcugugugauugccuggaacagcaacaaccuggacuccaaagucggcggcaacuacaauuaccuguaccggcuguuccggaaguccaaucugaagcccuucgagcgggacaucagcaccgaaaucuaucaggccggcagcaccccuugcaacggcguggaaggcuucaacugcuacuucccacugcaguccuacggcuuucagcccacaaauggcgugggcuaucagcccuacagagugguggugcugagcuucgaacugcugcaugcuccugccacagugugcggcccuaagaaaagcaccaaucucgugaagaacaaaugcgugaacuucaacuucaacggccugaccggcaccggcgugcugacagagagcaacaagaaguuccugccauuccagcaguuuggccgggauaucgccgauaccacagacgccguuagagauccccagacacuggaaauccuggacaucaccccaugcagcuucggcggagugucugugaucaccccuggcaccaacaccagcaaucagguggcagugcuguaccaggacgugaacuguaccgaagugcccguggccauucacgccgaucagcugacaccuacauggcggguguacuccaccggcagcaauguguuucagaccagagccggcugucugaucggagccgagcacgugaacaauagcuacgagugcgacauccccaucggcgcuggcaucugugccagcuaccagacacagacaaacagccccagacgggcuagaagcguggccagccagagcaucauugccuacacaaugucucugggcgccgagaacagcguggccuacuccaacaacucuaucgcuauccccaccaacuucaccaucagcgugaccaccgagauccugccuguguccaugaccaagaccagcguggacugcaccauguacaucugcggcgauuccaccgagugcuccaaccugcugcugcaguacggcagcuucugcacccagcugaauagagcccugacagggaucgccguggaacaggacaagaacacccaagagguguucgcccaagugaagcaaaucuacaagaccccuccuaucaaggacuucggcggcuucaauuucagccagauucugcccgauccuagcaagcccagcaagcggagcuucaucgaggaccugcuguucaacaaagugacacuggccgacgccggcuucaucaagcaguauggcgauugucugggcgacauugccgccagggaucugauuugcgcccagaaguuuaacggacugacagugcugccuccucugcugaccgaugagaugaucgcccaguacacaucugcccugcuggccggcacaaucacaagcggcuggacauuuggagcuggcgccgcucugcagauccccuuugcuaugcagauggccuaccgguucaacggcaucggagugacccagaaugugcuguacgagaaccagaagcugaucgccaaccaguucaacagcgccaucggcaagauccaggacagccugagcagcacagcaagcgcccugggaaagcugcaggacguggucaaccagaaugcccaggcacugaacacccuggucaagcagcuguccuccaacuucggcgccaucagcucugugcugaacgauauccugagcagacuggacccuccugaggccgaggugcagaucgacagacugaucacaggcagacugcagagccuccagacauacgugacccagcagcugaucagagccgccgagauuagagccucugccaaucuggccgccaccaagaugucugagugugugcugggccagagcaagagaguggacuuuugcggcaagggcuaccaccugaugagcuucccucagucugccccucacggcgugguguuucugcacgugacauaugugcccgcucaagagaagaauuucaccaccgcuccagccaucugccacgacggcaaagcccacuuuccuagagaaggcguguucguguccaacggcacccauugguucgugacacagcggaacuucuacgagccccagaucaucaccaccgacaacaccuucgugucuggcaacugcgacguugugaucggcauugugaacaauaccguguacgacccucugcagcccgagcuggacagcggcggaggaucuggcggaggacagaucuacgagggcaagcugacagccgagggccugagauuuggaaucguggccagccgguucaaucacgcccugguggauagacugguggaaggcgccaucgaugccauugucagacacggcggcagagaagaggacaucacccucguuagagugcccggcucuugggagauuccuguggcugcuggcgagcuggcccggaaagaagauaucgacgccguuaucgccaucggcgugcugaucagaggcgccacaccucacuucgacuauaucgccagcgagguguccaaaggccuggccgaucugagccuggaacugagaaagcccaucaccuucggcgugaucaccgcugacacacuggaacaggccauugagagagccggcaccaagcacggcaacaaaggaugggaagccgcucuguccgccaucgagauggccaaccuguucaagagccugcggugaggacuagucccuguucccagagcccacuuuuuuuucuuuuuuugaaauaaaauagccugucuuucagaucucaaaggcucuuuucagagccaccaaaaaaaaaaaaaaaaaaaaaaaaaaaaaaaaaaaaaaaaaaaaaaaaaaaaaaaaaaaaaaaaaaaaaaaaaaaaaaaaaaaaaaaaaaaaaaaaaaaaa

SEQ ID NO: 12618 - RNA, 4196 nt, Artificial Sequence
  SARS-CoV-2/Wuhan/WIV05/2019__EPI_ISL_402128 spike protein mRNA gc mod (1-1147)(K986P_V987P_T887WN_A1020W) LumSynth construct
aggagagucccgcagucggcguccagcggcucugcuuguucgugugugugucguugcaggccuuauucaagcuuaccauguucguguuucuggugcugcugccccugguguccagccagugugugaaccugaccaccagaacacagcugccuccagccuacaccaacagcuucaccagaggcguguacuaccccgacaagguguucagauccagcgugcugcacucuacccaggaccuguuccugccuuucuucagcaacgugaccugguuccacgccauccacguguccggcaccaauggcaccaagagauucgacaaccccgugcugcccuucaacgacgggguguacuuugccagcaccgagaaguccaacaucaucagaggcuggaucuucggcaccacacuggacagcaagacccagagccugcugaucgugaacaacgccaccaacguggucaucaaagugugcgaguuccaguucugcaacgaccccuuccugggcgucuacuaccacaagaacaacaagagcuggauggaaagcgaguuccggguguacagcagcgccaacaacugcaccuucgaguacgugucccagccuuuccugauggaccuggaaggcaagcagggcaacuucaagaaccugcgcgaguucguguucaagaacaucgacggcuacuucaaaaucuacagcaagcacaccccuaucaaccucgugcgggaucugccucagggcuucucugcucuggaaccccugguggaucugcccaucggcaucaacaucacccgguuucagacacugcuggcccugcacagaagcuaccugacaccuggcgauagcagcagcggauggacagcuggugccgccgcuuacuaugugggcuaccugcagccuagaaccuuccugcugaaguacaacgagaacggcaccaucaccgacgccguggauugugcucuggauccucugagcgagacaaagugcacccugaaguccuucaccguggaaaagggcaucuaccagaccagcaacuuccgggugcagcccaccgaauccaucgugcgguuccccaauaucaccaaucugugccccuucggcgagguguucaaugccaccagauucgccucuguguacgccuggaaccggaagcggaucagcaauugcguggccgacuacuccgugcuguacaacuccgccagcuucagcaccuucaagugcuacggcguguccccuaccaagcugaacgaccugugcuucacaaacguguacgccgacagcuucgugauccggggagaugaagugcggcagauugccccuggacagacaggcaagaucgccgacuacaacuacaagcugcccgacgacuucaccggcugugugauugccuggaacagcaacaaccuggacuccaaagucggcggcaacuacaauuaccuguaccggcuguuccggaaguccaaucugaagcccuucgagcgggacaucagcaccgaaaucuaucaggccggcagcaccccuugcaacggcguggaaggcuucaacugcuacuucccacugcaguccuacggcuuucagcccacaaauggcgugggcuaucagcccuacagagugguggugcugagcuucgaacugcugcaugcuccugccacagugugcggcccuaagaaaagcaccaaucucgugaagaacaaaugcgugaacuucaacuucaacggccugaccggcaccggcgugcugacagagagcaacaagaaguuccugccauuccagcaguuuggccgggauaucgccgauaccacagacgccguuagagauccccagacacuggaaauccuggacaucaccccaugcagcuucggcggagugucugugaucaccccuggcaccaacaccagcaaucagguggcagugcuguaccaggacgugaacuguaccgaagugcccguggccauucacgccgaucagcugacaccuacauggcggguguacuccaccggcagcaauguguuucagaccagagccggcugucugaucggagccgagcacgugaacaauagcuacgagugcgacauccccaucggcgcuggcaucugugccagcuaccagacacagacaaacagccccagacgggcuagaagcguggccagccagagcaucauugccuacacaaugucucugggcgccgagaacagcguggccuacuccaacaacucuaucgcuauccccaccaacuucaccaucagcgugaccaccgagauccugccuguguccaugaccaagaccagcguggacugcaccauguacaucugcggcgauuccaccgagugcuccaaccugcugcugcaguacggcagcuucugcacccagcugaauagagcccugacagggaucgccguggaacaggacaagaacacccaagagguguucgcccaagugaagcaaaucuacaagaccccuccuaucaaggacuucggcggcuucaauuucagccagauucugcccgauccuagcaagcccagcaagcggagcuucaucgaggaccugcuguucaacaaagugacacuggccgacgccggcuucaucaagcaguauggcgauugucugggcgacauugccgccagggaucugauuugcgcccagaaguuuaacggacugacagugcugccuccucugcugaccgaugagaugaucgcccaguacacaucugcccugcuggccggcacaaucacaagcggcuggugguuuggagcuggcgccgcucugcagauccccuuugcuaugcagauggccuaccgguucaacggcaucggagugacccagaaugugcuguacgagaaccagaagcugaucgccaaccaguucaacagcgccaucggcaagauccaggacagccugagcagcacagcaagcgcccugggaaagcugcaggacguggucaaccagaaugcccaggcacugaacacccuggucaagcagcuguccuccaacuucggcgccaucagcucugugcugaacgauauccugagcagacuggacccuccugaggccgaggugcagaucgacagacugaucacaggcagacugcagagccuccagacauacgugacccagcagcugaucagagccgccgagauuagauggucugccaaucuggccgccaccaagaugucugagugugugcugggccagagcaagagaguggacuuuugcggcaagggcuaccaccugaugagcuucccucagucugccccucacggcgugguguuucugcacgugacauaugugcccgcucaagagaagaauuucaccaccgcuccagccaucugccacgacggcaaagcccacuuuccuagagaaggcguguucguguccaacggcacccauugguucgugacacagcggaacuucuacgagccccagaucaucaccaccgacaacaccuucgugucuggcaacugcgacguugugaucggcauugugaacaauaccguguacgacccucugcagcccgagcuggacagcggcggaggaucuggcggaggacagaucuacgagggcaagcugacagccgagggccugagauuuggaaucguggccagccgguucaaucacgcccugguggauagacugguggaaggcgccaucgaugccauugucagacacggcggcagagaagaggacaucacccucguuagagugcccggcucuugggagauuccuguggcugcuggcgagcuggcccggaaagaagauaucgacgccguuaucgccaucggcgugcugaucagaggcgccacaccucacuucgacuauaucgccagcgagguguccaaaggccuggccgaucugagccuggaacugagaaagcccaucaccuucggcgugaucaccgcugacacacuggaacaggccauugagagagccggcaccaagcacggcaacaaaggaugggaagccgcucuguccgccaucgagauggccaaccuguucaagagccugcggugaggacuagucccuguucccagagcccacuuuuuuuucuuuuuuugaaauaaaauagccugucuuucagaucucaaaggcucuuuucagagccaccaaaaaaaaaaaaaaaaaaaaaaaaaaaaaaaaaaaaaaaaaaaaaaaaaaaaaaaaaaaaaaaaaaaaaaaaaaaaaaaaaaaaaaaaaaaaaaaaaaaaa

SEQ ID NO: 12619 - RNA, 4196 nt, Artificial Sequence
  SARS-CoV-2/Wuhan/WIV05/2019__EPI_ISL_402128 spike protein mRNA gc mod (1-1147)(K986P_V987P_P1069F) LumSynth construct
aggagagucccgcagucggcguccagcggcucugcuuguucgugugugugucguugcaggccuuauucaagcuuaccauguucguguuucuggugcugcugccccugguguccagccagugugugaaccugaccaccagaacacagcugccuccagccuacaccaacagcuucaccagaggcguguacuaccccgacaagguguucagauccagcgugcugcacucuacccaggaccuguuccugccuuucuucagcaacgugaccugguuccacgccauccacguguccggcaccaauggcaccaagagauucgacaaccccgugcugcccuucaacgacgggguguacuuugccagcaccgagaaguccaacaucaucagaggcuggaucuucggcaccacacuggacagcaagacccagagccugcugaucgugaacaacgccaccaacguggucaucaaagugugcgaguuccaguucugcaacgaccccuuccugggcgucuacuaccacaagaacaacaagagcuggauggaaagcgaguuccggguguacagcagcgccaacaacugcaccuucgaguacgugucccagccuuuccugauggaccuggaaggcaagcagggcaacuucaagaaccugcgcgaguucguguucaagaacaucgacggcuacuucaaaaucuacagcaagcacaccccuaucaaccucgugcgggaucugccucagggcuucucugcucuggaaccccugguggaucugcccaucggcaucaacaucacccgguuucagacacugcuggcccugcacagaagcuaccugacaccuggcgauagcagcagcggauggacagcuggugccgccgcuuacuaugugggcuaccugcagccuagaaccuuccugcugaaguacaacgagaacggcaccaucaccgacgccguggauugugcucuggauccucugagcgagacaaagugcacccugaaguccuucaccguggaaaagggcaucuaccagaccagcaacuuccgggugcagcccaccgaauccaucgugcgguuccccaauaucaccaaucugugccccuucggcgagguguucaaugccaccagauucgccucuguguacgccuggaaccggaagcggaucagcaauugcguggccgacuacuccgugcuguacaacuccgccagcuucagcaccuucaagugcuacggcguguccccuaccaagcugaacgaccugugcuucacaaacguguacgccgacagcuucgugauccggggagaugaagugcggcagauugccccuggacagacaggcaagaucgccgacuacaacuacaagcugcccgacgacuucaccggcugugugauugccuggaacagcaacaaccuggacuccaaagucggcggcaacuacaauuaccuguaccggcuguuccggaaguccaaucugaagcccuucgagcgggacaucagcaccgaaaucuaucaggccggcagcaccccuugcaacggcguggaaggcuucaacugcuacuucccacugcaguccuacggcuuucagcccacaaauggcgugggcuaucagcccuacagagugguggugcugagcuucgaacugcugcaugcuccugccacagugugcggcccuaagaaaagcaccaaucucgugaagaacaaaugcgugaacuucaacuucaacggccugaccggcaccggcgugcugacagagagcaacaagaaguuccugccauuccagcaguuuggccgggauaucgccgauaccacagacgccguuagagauccccagacacuggaaauccuggacaucaccccaugcagcuucggcggagugucugugaucaccccuggcaccaacaccagcaaucagguggcagugcuguaccaggacgugaacuguaccgaagugcccguggccauucacgccgaucagcugacaccuacauggcggguguacuccaccggcagcaauguguuucagaccagagccggcugucugaucggagccgagcacgugaacaauagcuacgagugcgacauccccaucggcgcuggcaucugugccagcuaccagacacagacaaacagccccagacgggcuagaagcguggccagccagagcaucauugccuacacaaugucucugggcgccgagaacagcguggccuacuccaacaacucuaucgcuauccccaccaacuucaccaucagcgugaccaccgagauccugccuguguccaugaccaagaccagcguggacugcaccauguacaucugcggcgauuccaccgagugcuccaaccugcugcugcaguacggcagcuucugcacccagcugaauagagcccugacagggaucgccguggaacaggacaagaacacccaagagguguucgcccaagugaagcaaaucuacaagaccccuccuaucaaggacuucggcggcuucaauuucagccagauucugcccgauccuagcaagcccagcaagcggagcuucaucgaggaccugcuguucaacaaagugacacuggccgacgccggcuucaucaagcaguauggcgauugucugggcgacauugccgccagggaucugauuugcgcccagaaguuuaacggacugacagugcugccuccucugcugaccgaugagaugaucgcccaguacacaucugcccugcuggccggcacaaucacaagcggcuggacauuuggagcuggcgccgcucugcagauccccuuugcuaugcagauggccuaccgguucaacggcaucggagugacccagaaugugcuguacgagaaccagaagcugaucgccaaccaguucaacagcgccaucggcaagauccaggacagccugagcagcacagcaagcgcccugggaaagcugcaggacguggucaaccagaaugcccaggcacugaacacccuggucaagcagcuguccuccaacuucggcgccaucagcucugugcugaacgauauccugagcagacuggacccuccugaggccgaggugcagaucgacagacugaucacaggcagacugcagagccuccagacauacgugacccagcagcugaucagagccgccgagauuagagccucugccaaucuggccgccaccaagaugucugagugugugcugggccagagcaagagaguggacuuuugcggcaagggcuaccaccugaugagcuucccucagucugccccucacggcgugguguuucugcacgugacauauguguucgcucaagagaagaauuucaccaccgcuccagccaucugccacgacggcaaagcccacuuuccuagagaaggcguguucguguccaacggcacccauugguucgugacacagcggaacuucuacgagccccagaucaucaccaccgacaacaccuucgugucuggcaacugcgacguugugaucggcauugugaacaauaccguguacgacccucugcagcccgagcuggacagcggcggaggaucuggcggaggacagaucuacgagggcaagcugacagccgagggccugagauuuggaaucguggccagccgguucaaucacgcccugguggauagacugguggaaggcgccaucgaugccauugucagacacggcggcagagaagaggacaucacccucguuagagugcccggcucuugggagauuccuguggcugcuggcgagcuggcccggaaagaagauaucgacgccguuaucgccaucggcgugcugaucagaggcgccacaccucacuucgacuauaucgccagcgagguguccaaaggccuggccgaucugagccuggaacugagaaagcccaucaccuucggcgugaucaccgcugacacacuggaacaggccauugagagagccggcaccaagcacggcaacaaaggaugggaagccgcucuguccgccaucgagauggccaaccuguucaagagccugcggugaggacuagucccuguucccagagcccacuuuuuuuucuuuuuuugaaauaaaauagccugucuuucagaucucaaaggcucuuuucagagccaccaaaaaaaaaaaaaaaaaaaaaaaaaaaaaaaaaaaaaaaaaaaaaaaaaaaaaaaaaaaaaaaaaaaaaaaaaaaaaaaaaaaaaaaaaaaaaaaaaaaaa

SEQ ID NO: 12620 - RNA, 4196 nt, Artificial Sequence
  SARS-CoV-2/Wuhan/WIV05/2019__EPI_ISL_402128 spike protein mRNA gc mod (1-1147)(K986P_V987P_ H1048Q_H1064N_ H1083N_H1101N) LumSynth construct
aggagagucccgcagucggcguccagcggcucugcuuguucgugugugugucguugcaggccuuauucaagcuuaccauguucguguuucuggugcugcugccccugguguccagccagugugugaaccugaccaccagaacacagcugccuccagccuacaccaacagcuucaccagaggcguguacuaccccgacaagguguucagauccagcgugcugcacucuacccaggaccuguuccugccuuucuucagcaacgugaccugguuccacgccauccacguguccggcaccaauggcaccaagagauucgacaaccccgugcugcccuucaacgacgggguguacuuugccagcaccgagaaguccaacaucaucagaggcuggaucuucggcaccacacuggacagcaagacccagagccugcugaucgugaacaacgccaccaacguggucaucaaagugugcgaguuccaguucugcaacgaccccuuccugggcgucuacuaccacaagaacaacaagagcuggauggaaagcgaguuccggguguacagcagcgccaacaacugcaccuucgaguacgugucccagccuuuccugauggaccuggaaggcaagcagggcaacuucaagaaccugcgcgaguucguguucaagaacaucgacggcuacuucaaaaucuacagcaagcacaccccuaucaaccucgugcgggaucugccucagggcuucucugcucuggaaccccugguggaucugcccaucggcaucaacaucacccgguuucagacacugcuggcccugcacagaagcuaccugacaccuggcgauagcagcagcggauggacagcuggugccgccgcuuacuaugugggcuaccugcagccuagaaccuuccugcugaaguacaacgagaacggcaccaucaccgacgccguggauugugcucuggauccucugagcgagacaaagugcacccugaaguccuucaccguggaaaagggcaucuaccagaccagcaacuuccgggugcagcccaccgaauccaucgugcgguuccccaauaucaccaaucugugccccuucggcgagguguucaaugccaccagauucgccucuguguacgccuggaaccggaagcggaucagcaauugcguggccgacuacuccgugcuguacaacuccgccagcuucagcaccuucaagugcuacggcguguccccuaccaagcugaacgaccugugcuucacaaacguguacgccgacagcuucgugauccggggagaugaagugcggcagauugccccuggacagacaggcaagaucgccgacuacaacuacaagcugcccgacgacuucaccggcugugugauugccuggaacagcaacaaccuggacuccaaagucggcggcaacuacaauuaccuguaccggcuguuccggaaguccaaucugaagcccuucgagcgggacaucagcaccgaaaucuaucaggccggcagcaccccuugcaacggcguggaaggcuucaacugcuacuucccacugcaguccuacggcuuucagcccacaaauggcgugggcuaucagcccuacagagugguggugcugagcuucgaacugcugcaugcuccugccacagugugcggcccuaagaaaagcaccaaucucgugaagaacaaaugcgugaacuucaacuucaacggccugaccggcaccggcgugcugacagagagcaacaagaaguuccugccauuccagcaguuuggccgggauaucgccgauaccacagacgccguuagagauccccagacacuggaaauccuggacaucaccccaugcagcuucggcggagugucugugaucaccccuggcaccaacaccagcaaucagguggcagugcuguaccaggacgugaacuguaccgaagugcccguggccauucacgccgaucagcugacaccuacauggcggguguacuccaccggcagcaauguguuucagaccagagccggcugucugaucggagccgagcacgugaacaauagcuacgagugcgacauccccaucggcgcuggcaucugugccagcuaccagacacagacaaacagccccagacgggcuagaagcguggccagccagagcaucauugccuacacaaugucucugggcgccgagaacagcguggccuacuccaacaacucuaucgcuauccccaccaacuucaccaucagcgugaccaccgagauccugccuguguccaugaccaagaccagcguggacugcaccauguacaucugcggcgauuccaccgagugcuccaaccugcugcugcaguacggcagcuucugcacccagcugaauagagcccugacagggaucgccguggaacaggacaagaacacccaagagguguucgcccaagugaagcaaaucuacaagaccccuccuaucaaggacuucggcggcuucaauuucagccagauucugcccgauccuagcaagcccagcaagcggagcuucaucgaggaccugcuguucaacaaagugacacuggccgacgccggcuucaucaagcaguauggcgauugucugggcgacauugccgccagggaucugauuugcgcccagaaguuuaacggacugacagugcugccuccucugcugaccgaugagaugaucgcccaguacacaucugcccugcuggccggcacaaucacaagcggcuggacauuuggagcuggcgccgcucugcagauccccuuugcuaugcagauggccuaccgguucaacggcaucggagugacccagaaugugcuguacgagaaccagaagcugaucgccaaccaguucaacagcgccaucggcaagauccaggacagccugagcagcacagcaagcgcccugggaaagcugcaggacguggucaaccagaaugcccaggcacugaacacccuggucaagcagcuguccuccaacuucggcgccaucagcucugugcugaacgauauccugagcagacuggacccuccugaggccgaggugcagaucgacagacugaucacaggcagacugcagagccuccagacauacgugacccagcagcugaucagagccgccgagauuagagccucugccaaucuggccgccaccaagaugucugagugugugcugggccagagcaagagaguggacuuuugcggcaagggcuaccagcugaugagcuucccucagucugccccucacggcgugguguuucugaacgugacauaugugcccgcucaagagaagaauuucaccaccgcuccagccaucugcaacgacggcaaagcccacuuuccuagagaaggcguguucguguccaacggcaccaacugguucgugacacagcggaacuucuacgagccccagaucaucaccaccgacaacaccuucgugucuggcaacugcgacguugugaucggcauugugaacaauaccguguacgacccucugcagcccgagcuggacagcggcggaggaucuggcggaggacagaucuacgagggcaagcugacagccgagggccugagauuuggaaucguggccagccgguucaaucacgcccugguggauagacugguggaaggcgccaucgaugccauugucagacacggcggcagagaagaggacaucacccucguuagagugcccggcucuugggagauuccuguggcugcuggcgagcuggcccggaaagaagauaucgacgccguuaucgccaucggcgugcugaucagaggcgccacaccucacuucgacuauaucgccagcgagguguccaaaggccuggccgaucugagccuggaacugagaaagcccaucaccuucggcgugaucaccgcugacacacuggaacaggccauugagagagccggcaccaagcacggcaacaaaggaugggaagccgcucuguccgccaucgagauggccaaccuguucaagagccugcggugaggacuagucccuguucccagagcccacuuuuuuuucuuuuuuugaaauaaaauagccugucuuucagaucucaaaggcucuuuucagagccaccaaaaaaaaaaaaaaaaaaaaaaaaaaaaaaaaaaaaaaaaaaaaaaaaaaaaaaaaaaaaaaaaaaaaaaaaaaaaaaaaaaaaaaaaaaaaaaaaaaaaa

SEQ ID NO: 12621 - RNA, 4196 nt, Artificial Sequence
  SARS-CoV-2/Wuhan/WIV05/2019__EPI_ISL_402128 spike protein mRNA gc mod (1-1147)(I712C_T1077C) LumSynth construct
aggagagucccgcagucggcguccagcggcucugcuuguucgugugugugucguugcaggccuuauucaagcuuaccauguucguguuucuggugcugcugccccugguguccagccagugugugaaccugaccaccagaacacagcugccuccagccuacaccaacagcuucaccagaggcguguacuaccccgacaagguguucagauccagcgugcugcacucuacccaggaccuguuccugccuuucuucagcaacgugaccugguuccacgccauccacguguccggcaccaauggcaccaagagauucgacaaccccgugcugcccuucaacgacgggguguacuuugccagcaccgagaaguccaacaucaucagaggcuggaucuucggcaccacacuggacagcaagacccagagccugcugaucgugaacaacgccaccaacguggucaucaaagugugcgaguuccaguucugcaacgaccccuuccugggcgucuacuaccacaagaacaacaagagcuggauggaaagcgaguuccggguguacagcagcgccaacaacugcaccuucgaguacgugucccagccuuuccugauggaccuggaaggcaagcagggcaacuucaagaaccugcgcgaguucguguucaagaacaucgacggcuacuucaaaaucuacagcaagcacaccccuaucaaccucgugcgggaucugccucagggcuucucugcucuggaaccccugguggaucugcccaucggcaucaacaucacccgguuucagacacugcuggcccugcacagaagcuaccugacaccuggcgauagcagcagcggauggacagcuggugccgccgcuuacuaugugggcuaccugcagccuagaaccuuccugcugaaguacaacgagaacggcaccaucaccgacgccguggauugugcucuggauccucugagcgagacaaagugcacccugaaguccuucaccguggaaaagggcaucuaccagaccagcaacuuccgggugcagcccaccgaauccaucgugcgguuccccaauaucaccaaucugugccccuucggcgagguguucaaugccaccagauucgccucuguguacgccuggaaccggaagcggaucagcaauugcguggccgacuacuccgugcuguacaacuccgccagcuucagcaccuucaagugcuacggcguguccccuaccaagcugaacgaccugugcuucacaaacguguacgccgacagcuucgugauccggggagaugaagugcggcagauugccccuggacagacaggcaagaucgccgacuacaacuacaagcugcccgacgacuucaccggcugugugauugccuggaacagcaacaaccuggacuccaaagucggcggcaacuacaauuaccuguaccggcuguuccggaaguccaaucugaagcccuucgagcgggacaucagcaccgaaaucuaucaggccggcagcaccccuugcaacggcguggaaggcuucaacugcuacuucccacugcaguccuacggcuuucagcccacaaauggcgugggcuaucagcccuacagagugguggugcugagcuucgaacugcugcaugcuccugccacagugugcggcccuaagaaaagcaccaaucucgugaagaacaaaugcgugaacuucaacuucaacggccugaccggcaccggcgugcugacagagagcaacaagaaguuccugccauuccagcaguuuggccgggauaucgccgauaccacagacgccguuagagauccccagacacuggaaauccuggacaucaccccaugcagcuucggcggagugucugugaucaccccuggcaccaacaccagcaaucagguggcagugcuguaccaggacgugaacuguaccgaagugcccguggccauucacgccgaucagcugacaccuacauggcggguguacuccaccggcagcaauguguuucagaccagagccggcugucugaucggagccgagcacgugaacaauagcuacgagugcgacauccccaucggcgcuggcaucugugccagcuaccagacacagacaaacagccccagacgggcuagaagcguggccagccagagcaucauugccuacacaaugucucugggcgccgagaacagcguggccuacuccaacaacucuugcgcuauccccaccaacuucaccaucagcgugaccaccgagauccugccuguguccaugaccaagaccagcguggacugcaccauguacaucugcggcgauuccaccgagugcuccaaccugcugcugcaguacggcagcuucugcacccagcugaauagagcccugacagggaucgccguggaacaggacaagaacacccaagagguguucgcccaagugaagcaaaucuacaagaccccuccuaucaaggacuucggcggcuucaauuucagccagauucugcccgauccuagcaagcccagcaagcggagcuucaucgaggaccugcuguucaacaaagugacacuggccgacgccggcuucaucaagcaguauggcgauugucugggcgacauugccgccagggaucugauuugcgcccagaaguuuaacggacugacagugcugccuccucugcugaccgaugagaugaucgcccaguacacaucugcccugcuggccggcacaaucacaagcggcuggacauuuggagcuggcgccgcucugcagauccccuuugcuaugcagauggccuaccgguucaacggcaucggagugacccagaaugugcuguacgagaaccagaagcugaucgccaaccaguucaacagcgccaucggcaagauccaggacagccugagcagcacagcaagcgcccugggaaagcugcaggacguggucaaccagaaugcccaggcacugaacacccuggucaagcagcuguccuccaacuucggcgccaucagcucugugcugaacgauauccugagcagacuggacaaggucgaggccgaggugcagaucgacagacugaucacaggcagacugcagagccuccagacauacgugacccagcagcugaucagagccgccgagauuagagccucugccaaucuggccgccaccaagaugucugagugugugcugggccagagcaagagaguggacuuuugcggcaagggcuaccaccugaugagcuucccucagucugccccucacggcgugguguuucugcacgugacauaugugcccgcucaagagaagaauuucaccugugcuccagccaucugccacgacggcaaagcccacuuuccuagagaaggcguguucguguccaacggcacccauugguucgugacacagcggaacuucuacgagccccagaucaucaccaccgacaacaccuucgugucuggcaacugcgacguugugaucggcauugugaacaauaccguguacgacccucugcagcccgagcuggacagcggcggaggaucuggcggaggacagaucuacgagggcaagcugacagccgagggccugagauuuggaaucguggccagccgguucaaucacgcccugguggauagacugguggaaggcgccaucgaugccauugucagacacggcggcagagaagaggacaucacccucguuagagugcccggcucuugggagauuccuguggcugcuggcgagcuggcccggaaagaagauaucgacgccguuaucgccaucggcgugcugaucagaggcgccacaccucacuucgacuauaucgccagcgagguguccaaaggccuggccgaucugagccuggaacugagaaagcccaucaccuucggcgugaucaccgcugacacacuggaacaggccauugagagagccggcaccaagcacggcaacaaaggaugggaagccgcucuguccgccaucgagauggccaaccuguucaagagccugcggugaggacuagucccuguucccagagcccacuuuuuuuucuuuuuuugaaauaaaauagccugucuuucagaucucaaaggcucuuuucagagccaccaaaaaaaaaaaaaaaaaaaaaaaaaaaaaaaaaaaaaaaaaaaaaaaaaaaaaaaaaaaaaaaaaaaaaaaaaaaaaaaaaaaaaaaaaaaaaaaaaaaaa

SEQ ID NO: 12622 - RNA, 4196 nt, Artificial Sequence
  SARS-CoV-2/Wuhan/WIV05/2019__EPI_ISL_402128 spike protein mRNA gc mod (1-1147)(I714C_Y1110C) LumSynth construct
aggagagucccgcagucggcguccagcggcucugcuuguucgugugugugucguugcaggccuuauucaagcuuaccauguucguguuucuggugcugcugccccugguguccagccagugugugaaccugaccaccagaacacagcugccuccagccuacaccaacagcuucaccagaggcguguacuaccccgacaagguguucagauccagcgugcugcacucuacccaggaccuguuccugccuuucuucagcaacgugaccugguuccacgccauccacguguccggcaccaauggcaccaagagauucgacaaccccgugcugcccuucaacgacgggguguacuuugccagcaccgagaaguccaacaucaucagaggcuggaucuucggcaccacacuggacagcaagacccagagccugcugaucgugaacaacgccaccaacguggucaucaaagugugcgaguuccaguucugcaacgaccccuuccugggcgucuacuaccacaagaacaacaagagcuggauggaaagcgaguuccggguguacagcagcgccaacaacugcaccuucgaguacgugucccagccuuuccugauggaccuggaaggcaagcagggcaacuucaagaaccugcgcgaguucguguucaagaacaucgacggcuacuucaaaaucuacagcaagcacaccccuaucaaccucgugcgggaucugccucagggcuucucugcucuggaaccccugguggaucugcccaucggcaucaacaucacccgguuucagacacugcuggcccugcacagaagcuaccugacaccuggcgauagcagcagcggauggacagcuggugccgccgcuuacuaugugggcuaccugcagccuagaaccuuccugcugaaguacaacgagaacggcaccaucaccgacgccguggauugugcucuggauccucugagcgagacaaagugcacccugaaguccuucaccguggaaaagggcaucuaccagaccagcaacuuccgggugcagcccaccgaauccaucgugcgguuccccaauaucaccaaucugugccccuucggcgagguguucaaugccaccagauucgccucuguguacgccuggaaccggaagcggaucagcaauugcguggccgacuacuccgugcuguacaacuccgccagcuucagcaccuucaagugcuacggcguguccccuaccaagcugaacgaccugugcuucacaaacguguacgccgacagcuucgugauccggggagaugaagugcggcagauugccccuggacagacaggcaagaucgccgacuacaacuacaagcugcccgacgacuucaccggcugugugauugccuggaacagcaacaaccuggacuccaaagucggcggcaacuacaauuaccuguaccggcuguuccggaaguccaaucugaagcccuucgagcgggacaucagcaccgaaaucuaucaggccggcagcaccccuugcaacggcguggaaggcuucaacugcuacuucccacugcaguccuacggcuuucagcccacaaauggcgugggcuaucagcccuacagagugguggugcugagcuucgaacugcugcaugcuccugccacagugugcggcccuaagaaaagcaccaaucucgugaagaacaaaugcgugaacuucaacuucaacggccugaccggcaccggcgugcugacagagagcaacaagaaguuccugccauuccagcaguuuggccgggauaucgccgauaccacagacgccguuagagauccccagacacuggaaauccuggacaucaccccaugcagcuucggcggagugucugugaucaccccuggcaccaacaccagcaaucagguggcagugcuguaccaggacgugaacuguaccgaagugcccguggccauucacgccgaucagcugacaccuacauggcggguguacuccaccggcagcaauguguuucagaccagagccggcugucugaucggagccgagcacgugaacaauagcuacgagugcgacauccccaucggcgcuggcaucugugccagcuaccagacacagacaaacagccccagacgggcuagaagcguggccagccagagcaucauugccuacacaaugucucugggcgccgagaacagcguggccuacuccaacaacucuaucgcuugccccaccaacuucaccaucagcgugaccaccgagauccugccuguguccaugaccaagaccagcguggacugcaccauguacaucugcggcgauuccaccgagugcuccaaccugcugcugcaguacggcagcuucugcacccagcugaauagagcccugacagggaucgccguggaacaggacaagaacacccaagagguguucgcccaagugaagcaaaucuacaagaccccuccuaucaaggacuucggcggcuucaauuucagccagauucugcccgauccuagcaagcccagcaagcggagcuucaucgaggaccugcuguucaacaaagugacacuggccgacgccggcuucaucaagcaguauggcgauugucugggcgacauugccgccagggaucugauuugcgcccagaaguuuaacggacugacagugcugccuccucugcugaccgaugagaugaucgcccaguacacaucugcccugcuggccggcacaaucacaagcggcuggacauuuggagcuggcgccgcucugcagauccccuuugcuaugcagauggccuaccgguucaacggcaucggagugacccagaaugugcuguacgagaaccagaagcugaucgccaaccaguucaacagcgccaucggcaagauccaggacagccugagcagcacagcaagcgcccugggaaagcugcaggacguggucaaccagaaugcccaggcacugaacacccuggucaagcagcuguccuccaacuucggcgccaucagcucugugcugaacgauauccugagcagacuggacaaggucgaggccgaggugcagaucgacagacugaucacaggcagacugcagagccuccagacauacgugacccagcagcugaucagagccgccgagauuagagccucugccaaucuggccgccaccaagaugucugagugugugcugggccagagcaagagaguggacuuuugcggcaagggcuaccaccugaugagcuucccucagucugccccucacggcgugguguuucugcacgugacauaugugcccgcucaagagaagaauuucaccaccgcuccagccaucugccacgacggcaaagcccacuuuccuagagaaggcguguucguguccaacggcacccauugguucgugacacagcggaacuucugugagccccagaucaucaccaccgacaacaccuucgugucuggcaacugcgacguugugaucggcauugugaacaauaccguguacgacccucugcagcccgagcuggacagcggcggaggaucuggcggaggacagaucuacgagggcaagcugacagccgagggccugagauuuggaaucguggccagccgguucaaucacgcccugguggauagacugguggaaggcgccaucgaugccauugucagacacggcggcagagaagaggacaucacccucguuagagugcccggcucuugggagauuccuguggcugcuggcgagcuggcccggaaagaagauaucgacgccguuaucgccaucggcgugcugaucagaggcgccacaccucacuucgacuauaucgccagcgagguguccaaaggccuggccgaucugagccuggaacugagaaagcccaucaccuucggcgugaucaccgcugacacacuggaacaggccauugagagagccggcaccaagcacggcaacaaaggaugggaagccgcucuguccgccaucgagauggccaaccuguucaagagccugcggugaggacuagucccuguucccagagcccacuuuuuuuucuuuuuuugaaauaaaauagccugucuuucagaucucaaaggcucuuuucagagccaccaaaaaaaaaaaaaaaaaaaaaaaaaaaaaaaaaaaaaaaaaaaaaaaaaaaaaaaaaaaaaaaaaaaaaaaaaaaaaaaaaaaaaaaaaaaaaaaaaaaaa

SEQ ID NO: 12623 - RNA, 4196 nt, Artificial Sequence
  SARS-CoV-2/Wuhan/WIV05/2019__EPI_ISL_402128 spike protein mRNA gc mod (1-1147)(P715C_P1069C) LumSynth construct
aggagagucccgcagucggcguccagcggcucugcuuguucgugugugugucguugcaggccuuauucaagcuuaccauguucguguuucuggugcugcugccccugguguccagccagugugugaaccugaccaccagaacacagcugccuccagccuacaccaacagcuucaccagaggcguguacuaccccgacaagguguucagauccagcgugcugcacucuacccaggaccuguuccugccuuucuucagcaacgugaccugguuccacgccauccacguguccggcaccaauggcaccaagagauucgacaaccccgugcugcccuucaacgacgggguguacuuugccagcaccgagaaguccaacaucaucagaggcuggaucuucggcaccacacuggacagcaagacccagagccugcugaucgugaacaacgccaccaacguggucaucaaagugugcgaguuccaguucugcaacgaccccuuccugggcgucuacuaccacaagaacaacaagagcuggauggaaagcgaguuccggguguacagcagcgccaacaacugcaccuucgaguacgugucccagccuuuccugauggaccuggaaggcaagcagggcaacuucaagaaccugcgcgaguucguguucaagaacaucgacggcuacuucaaaaucuacagcaagcacaccccuaucaaccucgugcgggaucugccucagggcuucucugcucuggaaccccugguggaucugcccaucggcaucaacaucacccgguuucagacacugcuggcccugcacagaagcuaccugacaccuggcgauagcagcagcggauggacagcuggugccgccgcuuacuaugugggcuaccugcagccuagaaccuuccugcugaaguacaacgagaacggcaccaucaccgacgccguggauugugcucuggauccucugagcgagacaaagugcacccugaaguccuucaccguggaaaagggcaucuaccagaccagcaacuuccgggugcagcccaccgaauccaucgugcgguuccccaauaucaccaaucugugccccuucggcgagguguucaaugccaccagauucgccucuguguacgccuggaaccggaagcggaucagcaauugcguggccgacuacuccgugcuguacaacuccgccagcuucagcaccuucaagugcuacggcguguccccuaccaagcugaacgaccugugcuucacaaacguguacgccgacagcuucgugauccggggagaugaagugcggcagauugccccuggacagacaggcaagaucgccgacuacaacuacaagcugcccgacgacuucaccggcugugugauugccuggaacagcaacaaccuggacuccaaagucggcggcaacuacaauuaccuguaccggcuguuccggaaguccaaucugaagcccuucgagcgggacaucagcaccgaaaucuaucaggccggcagcaccccuugcaacggcguggaaggcuucaacugcuacuucccacugcaguccuacggcuuucagcccacaaauggcgugggcuaucagcccuacagagugguggugcugagcuucgaacugcugcaugcuccugccacagugugcggcccuaagaaaagcaccaaucucgugaagaacaaaugcgugaacuucaacuucaacggccugaccggcaccggcgugcugacagagagcaacaagaaguuccugccauuccagcaguuuggccgggauaucgccgauaccacagacgccguuagagauccccagacacuggaaauccuggacaucaccccaugcagcuucggcggagugucugugaucaccccuggcaccaacaccagcaaucagguggcagugcuguaccaggacgugaacuguaccgaagugcccguggccauucacgccgaucagcugacaccuacauggcggguguacuccaccggcagcaauguguuucagaccagagccggcugucugaucggagccgagcacgugaacaauagcuacgagugcgacauccccaucggcgcuggcaucugugccagcuaccagacacagacaaacagccccagacgggcuagaagcguggccagccagagcaucauugccuacacaaugucucugggcgccgagaacagcguggccuacuccaacaacucuaucgcuaucugcaccaacuucaccaucagcgugaccaccgagauccugccuguguccaugaccaagaccagcguggacugcaccauguacaucugcggcgauuccaccgagugcuccaaccugcugcugcaguacggcagcuucugcacccagcugaauagagcccugacagggaucgccguggaacaggacaagaacacccaagagguguucgcccaagugaagcaaaucuacaagaccccuccuaucaaggacuucggcggcuucaauuucagccagauucugcccgauccuagcaagcccagcaagcggagcuucaucgaggaccugcuguucaacaaagugacacuggccgacgccggcuucaucaagcaguauggcgauugucugggcgacauugccgccagggaucugauuugcgcccagaaguuuaacggacugacagugcugccuccucugcugaccgaugagaugaucgcccaguacacaucugcccugcuggccggcacaaucacaagcggcuggacauuuggagcuggcgccgcucugcagauccccuuugcuaugcagauggccuaccgguucaacggcaucggagugacccagaaugugcuguacgagaaccagaagcugaucgccaaccaguucaacagcgccaucggcaagauccaggacagccugagcagcacagcaagcgcccugggaaagcugcaggacguggucaaccagaaugcccaggcacugaacacccuggucaagcagcuguccuccaacuucggcgccaucagcucugugcugaacgauauccugagcagacuggacaaggucgaggccgaggugcagaucgacagacugaucacaggcagacugcagagccuccagacauacgugacccagcagcugaucagagccgccgagauuagagccucugccaaucuggccgccaccaagaugucugagugugugcugggccagagcaagagaguggacuuuugcggcaagggcuaccaccugaugagcuucccucagucugccccucacggcgugguguuucugcacgugacauaugugugugcucaagagaagaauuucaccaccgcuccagccaucugccacgacggcaaagcccacuuuccuagagaaggcguguucguguccaacggcacccauugguucgugacacagcggaacuucuacgagccccagaucaucaccaccgacaacaccuucgugucuggcaacugcgacguugugaucggcauugugaacaauaccguguacgacccucugcagcccgagcuggacagcggcggaggaucuggcggaggacagaucuacgagggcaagcugacagccgagggccugagauuuggaaucguggccagccgguucaaucacgcccugguggauagacugguggaaggcgccaucgaugccauugucagacacggcggcagagaagaggacaucacccucguuagagugcccggcucuugggagauuccuguggcugcuggcgagcuggcccggaaagaagauaucgacgccguuaucgccaucggcgugcugaucagaggcgccacaccucacuucgacuauaucgccagcgagguguccaaaggccuggccgaucugagccuggaacugagaaagcccaucaccuucggcgugaucaccgcugacacacuggaacaggccauugagagagccggcaccaagcacggcaacaaaggaugggaagccgcucuguccgccaucgagauggccaaccuguucaagagccugcggugaggacuagucccuguucccagagcccacuuuuuuuucuuuuuuugaaauaaaauagccugucuuucagaucucaaaggcucuuuucagagccaccaaaaaaaaaaaaaaaaaaaaaaaaaaaaaaaaaaaaaaaaaaaaaaaaaaaaaaaaaaaaaaaaaaaaaaaaaaaaaaaaaaaaaaaaaaaaaaaaaaaaa

SEQ ID NO: 12624 - RNA, 4196 nt, Artificial Sequence
  SARS-CoV-2/Wuhan/WIV05/2019__EPI_ISL_402128 spike protein mRNA gc mod (1-1147)(G889C_L1034C) LumSynth construct
aggagagucccgcagucggcguccagcggcucugcuuguucgugugugugucguugcaggccuuauucaagcuuaccauguucguguuucuggugcugcugccccugguguccagccagugugugaaccugaccaccagaacacagcugccuccagccuacaccaacagcuucaccagaggcguguacuaccccgacaagguguucagauccagcgugcugcacucuacccaggaccuguuccugccuuucuucagcaacgugaccugguuccacgccauccacguguccggcaccaauggcaccaagagauucgacaaccccgugcugcccuucaacgacgggguguacuuugccagcaccgagaaguccaacaucaucagaggcuggaucuucggcaccacacuggacagcaagacccagagccugcugaucgugaacaacgccaccaacguggucaucaaagugugcgaguuccaguucugcaacgaccccuuccugggcgucuacuaccacaagaacaacaagagcuggauggaaagcgaguuccggguguacagcagcgccaacaacugcaccuucgaguacgugucccagccuuuccugauggaccuggaaggcaagcagggcaacuucaagaaccugcgcgaguucguguucaagaacaucgacggcuacuucaaaaucuacagcaagcacaccccuaucaaccucgugcgggaucugccucagggcuucucugcucuggaaccccugguggaucugcccaucggcaucaacaucacccgguuucagacacugcuggcccugcacagaagcuaccugacaccuggcgauagcagcagcggauggacagcuggugccgccgcuuacuaugugggcuaccugcagccuagaaccuuccugcugaaguacaacgagaacggcaccaucaccgacgccguggauugugcucuggauccucugagcgagacaaagugcacccugaaguccuucaccguggaaaagggcaucuaccagaccagcaacuuccgggugcagcccaccgaauccaucgugcgguuccccaauaucaccaaucugugccccuucggcgagguguucaaugccaccagauucgccucuguguacgccuggaaccggaagcggaucagcaauugcguggccgacuacuccgugcuguacaacuccgccagcuucagcaccuucaagugcuacggcguguccccuaccaagcugaacgaccugugcuucacaaacguguacgccgacagcuucgugauccggggagaugaagugcggcagauugccccuggacagacaggcaagaucgccgacuacaacuacaagcugcccgacgacuucaccggcugugugauugccuggaacagcaacaaccuggacuccaaagucggcggcaacuacaauuaccuguaccggcuguuccggaaguccaaucugaagcccuucgagcgggacaucagcaccgaaaucuaucaggccggcagcaccccuugcaacggcguggaaggcuucaacugcuacuucccacugcaguccuacggcuuucagcccacaaauggcgugggcuaucagcccuacagagugguggugcugagcuucgaacugcugcaugcuccugccacagugugcggcccuaagaaaagcaccaaucucgugaagaacaaaugcgugaacuucaacuucaacggccugaccggcaccggcgugcugacagagagcaacaagaaguuccugccauuccagcaguuuggccgggauaucgccgauaccacagacgccguuagagauccccagacacuggaaauccuggacaucaccccaugcagcuucggcggagugucugugaucaccccuggcaccaacaccagcaaucagguggcagugcuguaccaggacgugaacuguaccgaagugcccguggccauucacgccgaucagcugacaccuacauggcggguguacuccaccggcagcaauguguuucagaccagagccggcugucugaucggagccgagcacgugaacaauagcuacgagugcgacauccccaucggcgcuggcaucugugccagcuaccagacacagacaaacagccccagacgggcuagaagcguggccagccagagcaucauugccuacacaaugucucugggcgccgagaacagcguggccuacuccaacaacucuaucgcuauccccaccaacuucaccaucagcgugaccaccgagauccugccuguguccaugaccaagaccagcguggacugcaccauguacaucugcggcgauuccaccgagugcuccaaccugcugcugcaguacggcagcuucugcacccagcugaauagagcccugacagggaucgccguggaacaggacaagaacacccaagagguguucgcccaagugaagcaaaucuacaagaccccuccuaucaaggacuucggcggcuucaauuucagccagauucugcccgauccuagcaagcccagcaagcggagcuucaucgaggaccugcuguucaacaaagugacacuggccgacgccggcuucaucaagcaguauggcgauugucugggcgacauugccgccagggaucugauuugcgcccagaaguuuaacggacugacagugcugccuccucugcugaccgaugagaugaucgcccaguacacaucugcccugcuggccggcacaaucacaagcggcuggacauuuugcgcuggcgccgcucugcagauccccuuugcuaugcagauggccuaccgguucaacggcaucggagugacccagaaugugcuguacgagaaccagaagcugaucgccaaccaguucaacagcgccaucggcaagauccaggacagccugagcagcacagcaagcgcccugggaaagcugcaggacguggucaaccagaaugcccaggcacugaacacccuggucaagcagcuguccuccaacuucggcgccaucagcucugugcugaacgauauccugagcagacuggacaaggucgaggccgaggugcagaucgacagacugaucacaggcagacugcagagccuccagacauacgugacccagcagcugaucagagccgccgagauuagagccucugccaaucuggccgccaccaagaugucugaguguguguguggccagagcaagagaguggacuuuugcggcaagggcuaccaccugaugagcuucccucagucugccccucacggcgugguguuucugcacgugacauaugugcccgcucaagagaagaauuucaccaccgcuccagccaucugccacgacggcaaagcccacuuuccuagagaaggcguguucguguccaacggcacccauugguucgugacacagcggaacuucuacgagccccagaucaucaccaccgacaacaccuucgugucuggcaacugcgacguugugaucggcauugugaacaauaccguguacgacccucugcagcccgagcuggacagcggcggaggaucuggcggaggacagaucuacgagggcaagcugacagccgagggccugagauuuggaaucguggccagccgguucaaucacgcccugguggauagacugguggaaggcgccaucgaugccauugucagacacggcggcagagaagaggacaucacccucguuagagugcccggcucuugggagauuccuguggcugcuggcgagcuggcccggaaagaagauaucgacgccguuaucgccaucggcgugcugaucagaggcgccacaccucacuucgacuauaucgccagcgagguguccaaaggccuggccgaucugagccuggaacugagaaagcccaucaccuucggcgugaucaccgcugacacacuggaacaggccauugagagagccggcaccaagcacggcaacaaaggaugggaagccgcucuguccgccaucgagauggccaaccuguucaagagccugcggugaggacuagucccuguucccagagcccacuuuuuuuucuuuuuuugaaauaaaauagccugucuuucagaucucaaaggcucuuuucagagccaccaaaaaaaaaaaaaaaaaaaaaaaaaaaaaaaaaaaaaaaaaaaaaaaaaaaaaaaaaaaaaaaaaaaaaaaaaaaaaaaaaaaaaaaaaaaaaaaaaaaaa

SEQ ID NO: 12625 - RNA, 4196 nt, Artificial Sequence
  SARS-CoV-2/Wuhan/WIV05/2019__EPI_ISL_402128 spike protein mRNA gc mod (1-1147)(I909C_Y1047C) LumSynth construct
aggagagucccgcagucggcguccagcggcucugcuuguucgugugugugucguugcaggccuuauucaagcuuaccauguucguguuucuggugcugcugccccugguguccagccagugugugaaccugaccaccagaacacagcugccuccagccuacaccaacagcuucaccagaggcguguacuaccccgacaagguguucagauccagcgugcugcacucuacccaggaccuguuccugccuuucuucagcaacgugaccugguuccacgccauccacguguccggcaccaauggcaccaagagauucgacaaccccgugcugcccuucaacgacgggguguacuuugccagcaccgagaaguccaacaucaucagaggcuggaucuucggcaccacacuggacagcaagacccagagccugcugaucgugaacaacgccaccaacguggucaucaaagugugcgaguuccaguucugcaacgaccccuuccugggcgucuacuaccacaagaacaacaagagcuggauggaaagcgaguuccggguguacagcagcgccaacaacugcaccuucgaguacgugucccagccuuuccugauggaccuggaaggcaagcagggcaacuucaagaaccugcgcgaguucguguucaagaacaucgacggcuacuucaaaaucuacagcaagcacaccccuaucaaccucgugcgggaucugccucagggcuucucugcucuggaaccccugguggaucugcccaucggcaucaacaucacccgguuucagacacugcuggcccugcacagaagcuaccugacaccuggcgauagcagcagcggauggacagcuggugccgccgcuuacuaugugggcuaccugcagccuagaaccuuccugcugaaguacaacgagaacggcaccaucaccgacgccguggauugugcucuggauccucugagcgagacaaagugcacccugaaguccuucaccguggaaaagggcaucuaccagaccagcaacuuccgggugcagcccaccgaauccaucgugcgguuccccaauaucaccaaucugugccccuucggcgagguguucaaugccaccagauucgccucuguguacgccuggaaccggaagcggaucagcaauugcguggccgacuacuccgugcuguacaacuccgccagcuucagcaccuucaagugcuacggcguguccccuaccaagcugaacgaccugugcuucacaaacguguacgccgacagcuucgugauccggggagaugaagugcggcagauugccccuggacagacaggcaagaucgccgacuacaacuacaagcugcccgacgacuucaccggcugugugauugccuggaacagcaacaaccuggacuccaaagucggcggcaacuacaauuaccuguaccggcuguuccggaaguccaaucugaagcccuucgagcgggacaucagcaccgaaaucuaucaggccggcagcaccccuugcaacggcguggaaggcuucaacugcuacuucccacugcaguccuacggcuuucagcccacaaauggcgugggcuaucagcccuacagagugguggugcugagcuucgaacugcugcaugcuccugccacagugugcggcccuaagaaaagcaccaaucucgugaagaacaaaugcgugaacuucaacuucaacggccugaccggcaccggcgugcugacagagagcaacaagaaguuccugccauuccagcaguuuggccgggauaucgccgauaccacagacgccguuagagauccccagacacuggaaauccuggacaucaccccaugcagcuucggcggagugucugugaucaccccuggcaccaacaccagcaaucagguggcagugcuguaccaggacgugaacuguaccgaagugcccguggccauucacgccgaucagcugacaccuacauggcggguguacuccaccggcagcaauguguuucagaccagagccggcugucugaucggagccgagcacgugaacaauagcuacgagugcgacauccccaucggcgcuggcaucugugccagcuaccagacacagacaaacagccccagacgggcuagaagcguggccagccagagcaucauugccuacacaaugucucugggcgccgagaacagcguggccuacuccaacaacucuaucgcuauccccaccaacuucaccaucagcgugaccaccgagauccugccuguguccaugaccaagaccagcguggacugcaccauguacaucugcggcgauuccaccgagugcuccaaccugcugcugcaguacggcagcuucugcacccagcugaauagagcccugacagggaucgccguggaacaggacaagaacacccaagagguguucgcccaagugaagcaaaucuacaagaccccuccuaucaaggacuucggcggcuucaauuucagccagauucugcccgauccuagcaagcccagcaagcggagcuucaucgaggaccugcuguucaacaaagugacacuggccgacgccggcuucaucaagcaguauggcgauugucugggcgacauugccgccagggaucugauuugcgcccagaaguuuaacggacugacagugcugccuccucugcugaccgaugagaugaucgcccaguacacaucugcccugcuggccggcacaaucacaagcggcuggacauuuggagcuggcgccgcucugcagauccccuuugcuaugcagauggccuaccgguucaacggcugcggagugacccagaaugugcuguacgagaaccagaagcugaucgccaaccaguucaacagcgccaucggcaagauccaggacagccugagcagcacagcaagcgcccugggaaagcugcaggacguggucaaccagaaugcccaggcacugaacacccuggucaagcagcuguccuccaacuucggcgccaucagcucugugcugaacgauauccugagcagacuggacaaggucgaggccgaggugcagaucgacagacugaucacaggcagacugcagagccuccagacauacgugacccagcagcugaucagagccgccgagauuagagccucugccaaucuggccgccaccaagaugucugagugugugcugggccagagcaagagaguggacuuuugcggcaagggcugucaccugaugagcuucccucagucugccccucacggcgugguguuucugcacgugacauaugugcccgcucaagagaagaauuucaccaccgcuccagccaucugccacgacggcaaagcccacuuuccuagagaaggcguguucguguccaacggcacccauugguucgugacacagcggaacuucuacgagccccagaucaucaccaccgacaacaccuucgugucuggcaacugcgacguugugaucggcauugugaacaauaccguguacgacccucugcagcccgagcuggacagcggcggaggaucuggcggaggacagaucuacgagggcaagcugacagccgagggccugagauuuggaaucguggccagccgguucaaucacgcccugguggauagacugguggaaggcgccaucgaugccauugucagacacggcggcagagaagaggacaucacccucguuagagugcccggcucuugggagauuccuguggcugcuggcgagcuggcccggaaagaagauaucgacgccguuaucgccaucggcgugcugaucagaggcgccacaccucacuucgacuauaucgccagcgagguguccaaaggccuggccgaucugagccuggaacugagaaagcccaucaccuucggcgugaucaccgcugacacacuggaacaggccauugagagagccggcaccaagcacggcaacaaaggaugggaagccgcucuguccgccaucgagauggccaaccuguucaagagccugcggugaggacuagucccuguucccagagcccacuuuuuuuucuuuuuuugaaauaaaauagccugucuuucagaucucaaaggcucuuuucagagccaccaaaaaaaaaaaaaaaaaaaaaaaaaaaaaaaaaaaaaaaaaaaaaaaaaaaaaaaaaaaaaaaaaaaaaaaaaaaaaaaaaaaaaaaaaaaaaaaaaaaaa

SEQ ID NO: 12626 - RNA, 4196 nt, Artificial Sequence
  SARS-CoV-2/Wuhan/WIV05/2019__EPI_ISL_402128 spike protein mRNA gc mod (1-1147)(Q965C_S1003C) LumSynth construct
aggagagucccgcagucggcguccagcggcucugcuuguucgugugugugucguugcaggccuuauucaagcuuaccauguucguguuucuggugcugcugccccugguguccagccagugugugaaccugaccaccagaacacagcugccuccagccuacaccaacagcuucaccagaggcguguacuaccccgacaagguguucagauccagcgugcugcacucuacccaggaccuguuccugccuuucuucagcaacgugaccugguuccacgccauccacguguccggcaccaauggcaccaagagauucgacaaccccgugcugcccuucaacgacgggguguacuuugccagcaccgagaaguccaacaucaucagaggcuggaucuucggcaccacacuggacagcaagacccagagccugcugaucgugaacaacgccaccaacguggucaucaaagugugcgaguuccaguucugcaacgaccccuuccugggcgucuacuaccacaagaacaacaagagcuggauggaaagcgaguuccggguguacagcagcgccaacaacugcaccuucgaguacgugucccagccuuuccugauggaccuggaaggcaagcagggcaacuucaagaaccugcgcgaguucguguucaagaacaucgacggcuacuucaaaaucuacagcaagcacaccccuaucaaccucgugcgggaucugccucagggcuucucugcucuggaaccccugguggaucugcccaucggcaucaacaucacccgguuucagacacugcuggcccugcacagaagcuaccugacaccuggcgauagcagcagcggauggacagcuggugccgccgcuuacuaugugggcuaccugcagccuagaaccuuccugcugaaguacaacgagaacggcaccaucaccgacgccguggauugugcucuggauccucugagcgagacaaagugcacccugaaguccuucaccguggaaaagggcaucuaccagaccagcaacuuccgggugcagcccaccgaauccaucgugcgguuccccaauaucaccaaucugugccccuucggcgagguguucaaugccaccagauucgccucuguguacgccuggaaccggaagcggaucagcaauugcguggccgacuacuccgugcuguacaacuccgccagcuucagcaccuucaagugcuacggcguguccccuaccaagcugaacgaccugugcuucacaaacguguacgccgacagcuucgugauccggggagaugaagugcggcagauugccccuggacagacaggcaagaucgccgacuacaacuacaagcugcccgacgacuucaccggcugugugauugccuggaacagcaacaaccuggacuccaaagucggcggcaacuacaauuaccuguaccggcuguuccggaaguccaaucugaagcccuucgagcgggacaucagcaccgaaaucuaucaggccggcagcaccccuugcaacggcguggaaggcuucaacugcuacuucccacugcaguccuacggcuuucagcccacaaauggcgugggcuaucagcccuacagagugguggugcugagcuucgaacugcugcaugcuccugccacagugugcggcccuaagaaaagcaccaaucucgugaagaacaaaugcgugaacuucaacuucaacggccugaccggcaccggcgugcugacagagagcaacaagaaguuccugccauuccagcaguuuggccgggauaucgccgauaccacagacgccguuagagauccccagacacuggaaauccuggacaucaccccaugcagcuucggcggagugucugugaucaccccuggcaccaacaccagcaaucagguggcagugcuguaccaggacgugaacuguaccgaagugcccguggccauucacgccgaucagcugacaccuacauggcggguguacuccaccggcagcaauguguuucagaccagagccggcugucugaucggagccgagcacgugaacaauagcuacgagugcgacauccccaucggcgcuggcaucugugccagcuaccagacacagacaaacagccccagacgggcuagaagcguggccagccagagcaucauugccuacacaaugucucugggcgccgagaacagcguggccuacuccaacaacucuaucgcuauccccaccaacuucaccaucagcgugaccaccgagauccugccuguguccaugaccaagaccagcguggacugcaccauguacaucugcggcgauuccaccgagugcuccaaccugcugcugcaguacggcagcuucugcacccagcugaauagagcccugacagggaucgccguggaacaggacaagaacacccaagagguguucgcccaagugaagcaaaucuacaagaccccuccuaucaaggacuucggcggcuucaauuucagccagauucugcccgauccuagcaagcccagcaagcggagcuucaucgaggaccugcuguucaacaaagugacacuggccgacgccggcuucaucaagcaguauggcgauugucugggcgacauugccgccagggaucugauuugcgcccagaaguuuaacggacugacagugcugccuccucugcugaccgaugagaugaucgcccaguacacaucugcccugcuggccggcacaaucacaagcggcuggacauuuggagcuggcgccgcucugcagauccccuuugcuaugcagauggccuaccgguucaacggcaucggagugacccagaaugugcuguacgagaaccagaagcugaucgccaaccaguucaacagcgccaucggcaagauccaggacagccugagcagcacagcaagcgcccugggaaagcugcaggacguggucaaccagaaugcccaggcacugaacacccuggucaagugccuguccuccaacuucggcgccaucagcucugugcugaacgauauccugagcagacuggacaaggucgaggccgaggugcagaucgacagacugaucacaggcagacugcagugucuccagacauacgugacccagcagcugaucagagccgccgagauuagagccucugccaaucuggccgccaccaagaugucugagugugugcugggccagagcaagagaguggacuuuugcggcaagggcuaccaccugaugagcuucccucagucugccccucacggcgugguguuucugcacgugacauaugugcccgcucaagagaagaauuucaccaccgcuccagccaucugccacgacggcaaagcccacuuuccuagagaaggcguguucguguccaacggcacccauugguucgugacacagcggaacuucuacgagccccagaucaucaccaccgacaacaccuucgugucuggcaacugcgacguugugaucggcauugugaacaauaccguguacgacccucugcagcccgagcuggacagcggcggaggaucuggcggaggacagaucuacgagggcaagcugacagccgagggccugagauuuggaaucguggccagccgguucaaucacgcccugguggauagacugguggaaggcgccaucgaugccauugucagacacggcggcagagaagaggacaucacccucguuagagugcccggcucuugggagauuccuguggcugcuggcgagcuggcccggaaagaagauaucgacgccguuaucgccaucggcgugcugaucagaggcgccacaccucacuucgacuauaucgccagcgagguguccaaaggccuggccgaucugagccuggaacugagaaagcccaucaccuucggcgugaucaccgcugacacacuggaacaggccauugagagagccggcaccaagcacggcaacaaaggaugggaagccgcucuguccgccaucgagauggccaaccuguucaagagccugcggugaggacuagucccuguucccagagcccacuuuuuuuucuuuuuuugaaauaaaauagccugucuuucagaucucaaaggcucuuuucagagccaccaaaaaaaaaaaaaaaaaaaaaaaaaaaaaaaaaaaaaaaaaaaaaaaaaaaaaaaaaaaaaaaaaaaaaaaaaaaaaaaaaaaaaaaaaaaaaaaaaaaaa

SEQ ID NO: 12627 - RNA, 4196 nt, Artificial Sequence
  SARS-CoV-2/Wuhan/WIV05/2019__EPI_ISL_402128 spike protein mRNA gc mod (1-1147)(F970C_G999C) LumSynth construct
aggagagucccgcagucggcguccagcggcucugcuuguucgugugugugucguugcaggccuuauucaagcuuaccauguucguguuucuggugcugcugccccugguguccagccagugugugaaccugaccaccagaacacagcugccuccagccuacaccaacagcuucaccagaggcguguacuaccccgacaagguguucagauccagcgugcugcacucuacccaggaccuguuccugccuuucuucagcaacgugaccugguuccacgccauccacguguccggcaccaauggcaccaagagauucgacaaccccgugcugcccuucaacgacgggguguacuuugccagcaccgagaaguccaacaucaucagaggcuggaucuucggcaccacacuggacagcaagacccagagccugcugaucgugaacaacgccaccaacguggucaucaaagugugcgaguuccaguucugcaacgaccccuuccugggcgucuacuaccacaagaacaacaagagcuggauggaaagcgaguuccggguguacagcagcgccaacaacugcaccuucgaguacgugucccagccuuuccugauggaccuggaaggcaagcagggcaacuucaagaaccugcgcgaguucguguucaagaacaucgacggcuacuucaaaaucuacagcaagcacaccccuaucaaccucgugcgggaucugccucagggcuucucugcucuggaaccccugguggaucugcccaucggcaucaacaucacccgguuucagacacugcuggcccugcacagaagcuaccugacaccuggcgauagcagcagcggauggacagcuggugccgccgcuuacuaugugggcuaccugcagccuagaaccuuccugcugaaguacaacgagaacggcaccaucaccgacgccguggauugugcucuggauccucugagcgagacaaagugcacccugaaguccuucaccguggaaaagggcaucuaccagaccagcaacuuccgggugcagcccaccgaauccaucgugcgguuccccaauaucaccaaucugugccccuucggcgagguguucaaugccaccagauucgccucuguguacgccuggaaccggaagcggaucagcaauugcguggccgacuacuccgugcuguacaacuccgccagcuucagcaccuucaagugcuacggcguguccccuaccaagcugaacgaccugugcuucacaaacguguacgccgacagcuucgugauccggggagaugaagugcggcagauugccccuggacagacaggcaagaucgccgacuacaacuacaagcugcccgacgacuucaccggcugugugauugccuggaacagcaacaaccuggacuccaaagucggcggcaacuacaauuaccuguaccggcuguuccggaaguccaaucugaagcccuucgagcgggacaucagcaccgaaaucuaucaggccggcagcaccccuugcaacggcguggaaggcuucaacugcuacuucccacugcaguccuacggcuuucagcccacaaauggcgugggcuaucagcccuacagagugguggugcugagcuucgaacugcugcaugcuccugccacagugugcggcccuaagaaaagcaccaaucucgugaagaacaaaugcgugaacuucaacuucaacggccugaccggcaccggcgugcugacagagagcaacaagaaguuccugccauuccagcaguuuggccgggauaucgccgauaccacagacgccguuagagauccccagacacuggaaauccuggacaucaccccaugcagcuucggcggagugucugugaucaccccuggcaccaacaccagcaaucagguggcagugcuguaccaggacgugaacuguaccgaagugcccguggccauucacgccgaucagcugacaccuacauggcggguguacuccaccggcagcaauguguuucagaccagagccggcugucugaucggagccgagcacgugaacaauagcuacgagugcgacauccccaucggcgcuggcaucugugccagcuaccagacacagacaaacagccccagacgggcuagaagcguggccagccagagcaucauugccuacacaaugucucugggcgccgagaacagcguggccuacuccaacaacucuaucgcuauccccaccaacuucaccaucagcgugaccaccgagauccugccuguguccaugaccaagaccagcguggacugcaccauguacaucugcggcgauuccaccgagugcuccaaccugcugcugcaguacggcagcuucugcacccagcugaauagagcccugacagggaucgccguggaacaggacaagaacacccaagagguguucgcccaagugaagcaaaucuacaagaccccuccuaucaaggacuucggcggcuucaauuucagccagauucugcccgauccuagcaagcccagcaagcggagcuucaucgaggaccugcuguucaacaaagugacacuggccgacgccggcuucaucaagcaguauggcgauugucugggcgacauugccgccagggaucugauuugcgcccagaaguuuaacggacugacagugcugccuccucugcugaccgaugagaugaucgcccaguacacaucugcccugcuggccggcacaaucacaagcggcuggacauuuggagcuggcgccgcucugcagauccccuuugcuaugcagauggccuaccgguucaacggcaucggagugacccagaaugugcuguacgagaaccagaagcugaucgccaaccaguucaacagcgccaucggcaagauccaggacagccugagcagcacagcaagcgcccugggaaagcugcaggacguggucaaccagaaugcccaggcacugaacacccuggucaagcagcuguccuccaacugcggcgccaucagcucugugcugaacgauauccugagcagacuggacaaggucgaggccgaggugcagaucgacagacugaucacauguagacugcagagccuccagacauacgugacccagcagcugaucagagccgccgagauuagagccucugccaaucuggccgccaccaagaugucugagugugugcugggccagagcaagagaguggacuuuugcggcaagggcuaccaccugaugagcuucccucagucugccccucacggcgugguguuucugcacgugacauaugugcccgcucaagagaagaauuucaccaccgcuccagccaucugccacgacggcaaagcccacuuuccuagagaaggcguguucguguccaacggcacccauugguucgugacacagcggaacuucuacgagccccagaucaucaccaccgacaacaccuucgugucuggcaacugcgacguugugaucggcauugugaacaauaccguguacgacccucugcagcccgagcuggacagcggcggaggaucuggcggaggacagaucuacgagggcaagcugacagccgagggccugagauuuggaaucguggccagccgguucaaucacgcccugguggauagacugguggaaggcgccaucgaugccauugucagacacggcggcagagaagaggacaucacccucguuagagugcccggcucuugggagauuccuguggcugcuggcgagcuggcccggaaagaagauaucgacgccguuaucgccaucggcgugcugaucagaggcgccacaccucacuucgacuauaucgccagcgagguguccaaaggccuggccgaucugagccuggaacugagaaagcccaucaccuucggcgugaucaccgcugacacacuggaacaggccauugagagagccggcaccaagcacggcaacaaaggaugggaagccgcucuguccgccaucgagauggccaaccuguucaagagccugcggugaggacuagucccuguucccagagcccacuuuuuuuucuuuuuuugaaauaaaauagccugucuuucagaucucaaaggcucuuuucagagccaccaaaaaaaaaaaaaaaaaaaaaaaaaaaaaaaaaaaaaaaaaaaaaaaaaaaaaaaaaaaaaaaaaaaaaaaaaaaaaaaaaaaaaaaaaaaaaaaaaaaaa

SEQ ID NO: 12628 - RNA, 4196 nt, Artificial Sequence
  SARS-CoV-2/Wuhan/WIV05/2019__EPI_ISL_402128 spike protein mRNA gc mod (1-1147)(A972C_R995C) LumSynth construct
aggagagucccgcagucggcguccagcggcucugcuuguucgugugugugucguugcaggccuuauucaagcuuaccauguucguguuucuggugcugcugccccugguguccagccagugugugaaccugaccaccagaacacagcugccuccagccuacaccaacagcuucaccagaggcguguacuaccccgacaagguguucagauccagcgugcugcacucuacccaggaccuguuccugccuuucuucagcaacgugaccugguuccacgccauccacguguccggcaccaauggcaccaagagauucgacaaccccgugcugcccuucaacgacgggguguacuuugccagcaccgagaaguccaacaucaucagaggcuggaucuucggcaccacacuggacagcaagacccagagccugcugaucgugaacaacgccaccaacguggucaucaaagugugcgaguuccaguucugcaacgaccccuuccugggcgucuacuaccacaagaacaacaagagcuggauggaaagcgaguuccggguguacagcagcgccaacaacugcaccuucgaguacgugucccagccuuuccugauggaccuggaaggcaagcagggcaacuucaagaaccugcgcgaguucguguucaagaacaucgacggcuacuucaaaaucuacagcaagcacaccccuaucaaccucgugcgggaucugccucagggcuucucugcucuggaaccccugguggaucugcccaucggcaucaacaucacccgguuucagacacugcuggcccugcacagaagcuaccugacaccuggcgauagcagcagcggauggacagcuggugccgccgcuuacuaugugggcuaccugcagccuagaaccuuccugcugaaguacaacgagaacggcaccaucaccgacgccguggauugugcucuggauccucugagcgagacaaagugcacccugaaguccuucaccguggaaaagggcaucuaccagaccagcaacuuccgggugcagcccaccgaauccaucgugcgguuccccaauaucaccaaucugugccccuucggcgagguguucaaugccaccagauucgccucuguguacgccuggaaccggaagcggaucagcaauugcguggccgacuacuccgugcuguacaacuccgccagcuucagcaccuucaagugcuacggcguguccccuaccaagcugaacgaccugugcuucacaaacguguacgccgacagcuucgugauccggggagaugaagugcggcagauugccccuggacagacaggcaagaucgccgacuacaacuacaagcugcccgacgacuucaccggcugugugauugccuggaacagcaacaaccuggacuccaaagucggcggcaacuacaauuaccuguaccggcuguuccggaaguccaaucugaagcccuucgagcgggacaucagcaccgaaaucuaucaggccggcagcaccccuugcaacggcguggaaggcuucaacugcuacuucccacugcaguccuacggcuuucagcccacaaauggcgugggcuaucagcccuacagagugguggugcugagcuucgaacugcugcaugcuccugccacagugugcggcccuaagaaaagcaccaaucucgugaagaacaaaugcgugaacuucaacuucaacggccugaccggcaccggcgugcugacagagagcaacaagaaguuccugccauuccagcaguuuggccgggauaucgccgauaccacagacgccguuagagauccccagacacuggaaauccuggacaucaccccaugcagcuucggcggagugucugugaucaccccuggcaccaacaccagcaaucagguggcagugcuguaccaggacgugaacuguaccgaagugcccguggccauucacgccgaucagcugacaccuacauggcggguguacuccaccggcagcaauguguuucagaccagagccggcugucugaucggagccgagcacgugaacaauagcuacgagugcgacauccccaucggcgcuggcaucugugccagcuaccagacacagacaaacagccccagacgggcuagaagcguggccagccagagcaucauugccuacacaaugucucugggcgccgagaacagcguggccuacuccaacaacucuaucgcuauccccaccaacuucaccaucagcgugaccaccgagauccugccuguguccaugaccaagaccagcguggacugcaccauguacaucugcggcgauuccaccgagugcuccaaccugcugcugcaguacggcagcuucugcacccagcugaauagagcccugacagggaucgccguggaacaggacaagaacacccaagagguguucgcccaagugaagcaaaucuacaagaccccuccuaucaaggacuucggcggcuucaauuucagccagauucugcccgauccuagcaagcccagcaagcggagcuucaucgaggaccugcuguucaacaaagugacacuggccgacgccggcuucaucaagcaguauggcgauugucugggcgacauugccgccagggaucugauuugcgcccagaaguuuaacggacugacagugcugccuccucugcugaccgaugagaugaucgcccaguacacaucugcccugcuggccggcacaaucacaagcggcuggacauuuggagcuggcgccgcucugcagauccccuuugcuaugcagauggccuaccgguucaacggcaucggagugacccagaaugugcuguacgagaaccagaagcugaucgccaaccaguucaacagcgccaucggcaagauccaggacagccugagcagcacagcaagcgcccugggaaagcugcaggacguggucaaccagaaugcccaggcacugaacacccuggucaagcagcuguccuccaacuucggcugcaucagcucugugcugaacgauauccugagcagacuggacaaggucgaggccgaggugcagaucgacugucugaucacaggcagacugcagagccuccagacauacgugacccagcagcugaucagagccgccgagauuagagccucugccaaucuggccgccaccaagaugucugagugugugcugggccagagcaagagaguggacuuuugcggcaagggcuaccaccugaugagcuucccucagucugccccucacggcgugguguuucugcacgugacauaugugcccgcucaagagaagaauuucaccaccgcuccagccaucugccacgacggcaaagcccacuuuccuagagaaggcguguucguguccaacggcacccauugguucgugacacagcggaacuucuacgagccccagaucaucaccaccgacaacaccuucgugucuggcaacugcgacguugugaucggcauugugaacaauaccguguacgacccucugcagcccgagcuggacagcggcggaggaucuggcggaggacagaucuacgagggcaagcugacagccgagggccugagauuuggaaucguggccagccgguucaaucacgcccugguggauagacugguggaaggcgccaucgaugccauugucagacacggcggcagagaagaggacaucacccucguuagagugcccggcucuugggagauuccuguggcugcuggcgagcuggcccggaaagaagauaucgacgccguuaucgccaucggcgugcugaucagaggcgccacaccucacuucgacuauaucgccagcgagguguccaaaggccuggccgaucugagccuggaacugagaaagcccaucaccuucggcgugaucaccgcugacacacuggaacaggccauugagagagccggcaccaagcacggcaacaaaggaugggaagccgcucuguccgccaucgagauggccaaccuguucaagagccugcggugaggacuagucccuguucccagagcccacuuuuuuuucuuuuuuugaaauaaaauagccugucuuucagaucucaaaggcucuuuucagagccaccaaaaaaaaaaaaaaaaaaaaaaaaaaaaaaaaaaaaaaaaaaaaaaaaaaaaaaaaaaaaaaaaaaaaaaaaaaaaaaaaaaaaaaaaaaaaaaaaaaaaa

SEQ ID NO: 12629 - RNA, 4196 nt, Artificial Sequence
  SARS-CoV-2/Wuhan/WIV05/2019__EPI_ISL_402128 spike protein mRNA gc mod (1-1147)(A890C_V1040C) LumSynth construct
aggagagucccgcagucggcguccagcggcucugcuuguucgugugugugucguugcaggccuuauucaagcuuaccauguucguguuucuggugcugcugccccugguguccagccagugugugaaccugaccaccagaacacagcugccuccagccuacaccaacagcuucaccagaggcguguacuaccccgacaagguguucagauccagcgugcugcacucuacccaggaccuguuccugccuuucuucagcaacgugaccugguuccacgccauccacguguccggcaccaauggcaccaagagauucgacaaccccgugcugcccuucaacgacgggguguacuuugccagcaccgagaaguccaacaucaucagaggcuggaucuucggcaccacacuggacagcaagacccagagccugcugaucgugaacaacgccaccaacguggucaucaaagugugcgaguuccaguucugcaacgaccccuuccugggcgucuacuaccacaagaacaacaagagcuggauggaaagcgaguuccggguguacagcagcgccaacaacugcaccuucgaguacgugucccagccuuuccugauggaccuggaaggcaagcagggcaacuucaagaaccugcgcgaguucguguucaagaacaucgacggcuacuucaaaaucuacagcaagcacaccccuaucaaccucgugcgggaucugccucagggcuucucugcucuggaaccccugguggaucugcccaucggcaucaacaucacccgguuucagacacugcuggcccugcacagaagcuaccugacaccuggcgauagcagcagcggauggacagcuggugccgccgcuuacuaugugggcuaccugcagccuagaaccuuccugcugaaguacaacgagaacggcaccaucaccgacgccguggauugugcucuggauccucugagcgagacaaagugcacccugaaguccuucaccguggaaaagggcaucuaccagaccagcaacuuccgggugcagcccaccgaauccaucgugcgguuccccaauaucaccaaucugugccccuucggcgagguguucaaugccaccagauucgccucuguguacgccuggaaccggaagcggaucagcaauugcguggccgacuacuccgugcuguacaacuccgccagcuucagcaccuucaagugcuacggcguguccccuaccaagcugaacgaccugugcuucacaaacguguacgccgacagcuucgugauccggggagaugaagugcggcagauugccccuggacagacaggcaagaucgccgacuacaacuacaagcugcccgacgacuucaccggcugugugauugccuggaacagcaacaaccuggacuccaaagucggcggcaacuacaauuaccuguaccggcuguuccggaaguccaaucugaagcccuucgagcgggacaucagcaccgaaaucuaucaggccggcagcaccccuugcaacggcguggaaggcuucaacugcuacuucccacugcaguccuacggcuuucagcccacaaauggcgugggcuaucagcccuacagagugguggugcugagcuucgaacugcugcaugcuccugccacagugugcggcccuaagaaaagcaccaaucucgugaagaacaaaugcgugaacuucaacuucaacggccugaccggcaccggcgugcugacagagagcaacaagaaguuccugccauuccagcaguuuggccgggauaucgccgauaccacagacgccguuagagauccccagacacuggaaauccuggacaucaccccaugcagcuucggcggagugucugugaucaccccuggcaccaacaccagcaaucagguggcagugcuguaccaggacgugaacuguaccgaagugcccguggccauucacgccgaucagcugacaccuacauggcggguguacuccaccggcagcaauguguuucagaccagagccggcugucugaucggagccgagcacgugaacaauagcuacgagugcgacauccccaucggcgcuggcaucugugccagcuaccagacacagacaaacagccccagacgggcuagaagcguggccagccagagcaucauugccuacacaaugucucugggcgccgagaacagcguggccuacuccaacaacucuaucgcuauccccaccaacuucaccaucagcgugaccaccgagauccugccuguguccaugaccaagaccagcguggacugcaccauguacaucugcggcgauuccaccgagugcuccaaccugcugcugcaguacggcagcuucugcacccagcugaauagagcccugacagggaucgccguggaacaggacaagaacacccaagagguguucgcccaagugaagcaaaucuacaagaccccuccuaucaaggacuucggcggcuucaauuucagccagauucugcccgauccuagcaagcccagcaagcggagcuucaucgaggaccugcuguucaacaaagugacacuggccgacgccggcuucaucaagcaguauggcgauugucugggcgacauugccgccagggaucugauuugcgcccagaaguuuaacggacugacagugcugccuccucugcugaccgaugagaugaucgcccaguacacaucugcccugcuggccggcacaaucacaagcggcuggacauuuggaugcggcgccgcucugcagauccccuuugcuaugcagauggccuaccgguucaacggcaucggagugacccagaaugugcuguacgagaaccagaagcugaucgccaaccaguucaacagcgccaucggcaagauccaggacagccugagcagcacagcaagcgcccugggaaagcugcaggacguggucaaccagaaugcccaggcacugaacacccuggucaagcagcuguccuccaacuucggcgccaucagcucugugcugaacgauauccugagcagacuggacaaggucgaggccgaggugcagaucgacagacugaucacaggcagacugcagagccuccagacauacgugacccagcagcugaucagagccgccgagauuagagccucugccaaucuggccgccaccaagaugucugagugugugcugggccagagcaagagaugugacuuuugcggcaagggcuaccaccugaugagcuucccucagucugccccucacggcgugguguuucugcacgugacauaugugcccgcucaagagaagaauuucaccaccgcuccagccaucugccacgacggcaaagcccacuuuccuagagaaggcguguucguguccaacggcacccauugguucgugacacagcggaacuucuacgagccccagaucaucaccaccgacaacaccuucgugucuggcaacugcgacguugugaucggcauugugaacaauaccguguacgacccucugcagcccgagcuggacagcggcggaggaucuggcggaggacagaucuacgagggcaagcugacagccgagggccugagauuuggaaucguggccagccgguucaaucacgcccugguggauagacugguggaaggcgccaucgaugccauugucagacacggcggcagagaagaggacaucacccucguuagagugcccggcucuugggagauuccuguggcugcuggcgagcuggcccggaaagaagauaucgacgccguuaucgccaucggcgugcugaucagaggcgccacaccucacuucgacuauaucgccagcgagguguccaaaggccuggccgaucugagccuggaacugagaaagcccaucaccuucggcgugaucaccgcugacacacuggaacaggccauugagagagccggcaccaagcacggcaacaaaggaugggaagccgcucuguccgccaucgagauggccaaccuguucaagagccugcggugaggacuagucccuguucccagagcccacuuuuuuuucuuuuuuugaaauaaaauagccugucuuucagaucucaaaggcucuuuucagagccaccaaaaaaaaaaaaaaaaaaaaaaaaaaaaaaaaaaaaaaaaaaaaaaaaaaaaaaaaaaaaaaaaaaaaaaaaaaaaaaaaaaaaaaaaaaaaaaaaaaaaa

SEQ ID NO: 12630 - RNA, 4196 nt, Artificial Sequence
  SARS-CoV-2/Wuhan/WIV05/2019__EPI_ISL_402128 spike protein mRNA gc mod (1-1147)(T874C_S1055C) LumSynth construct
aggagagucccgcagucggcguccagcggcucugcuuguucgugugugugucguugcaggccuuauucaagcuuaccauguucguguuucuggugcugcugccccugguguccagccagugugugaaccugaccaccagaacacagcugccuccagccuacaccaacagcuucaccagaggcguguacuaccccgacaagguguucagauccagcgugcugcacucuacccaggaccuguuccugccuuucuucagcaacgugaccugguuccacgccauccacguguccggcaccaauggcaccaagagauucgacaaccccgugcugcccuucaacgacgggguguacuuugccagcaccgagaaguccaacaucaucagaggcuggaucuucggcaccacacuggacagcaagacccagagccugcugaucgugaacaacgccaccaacguggucaucaaagugugcgaguuccaguucugcaacgaccccuuccugggcgucuacuaccacaagaacaacaagagcuggauggaaagcgaguuccggguguacagcagcgccaacaacugcaccuucgaguacgugucccagccuuuccugauggaccuggaaggcaagcagggcaacuucaagaaccugcgcgaguucguguucaagaacaucgacggcuacuucaaaaucuacagcaagcacaccccuaucaaccucgugcgggaucugccucagggcuucucugcucuggaaccccugguggaucugcccaucggcaucaacaucacccgguuucagacacugcuggcccugcacagaagcuaccugacaccuggcgauagcagcagcggauggacagcuggugccgccgcuuacuaugugggcuaccugcagccuagaaccuuccugcugaaguacaacgagaacggcaccaucaccgacgccguggauugugcucuggauccucugagcgagacaaagugcacccugaaguccuucaccguggaaaagggcaucuaccagaccagcaacuuccgggugcagcccaccgaauccaucgugcgguuccccaauaucaccaaucugugccccuucggcgagguguucaaugccaccagauucgccucuguguacgccuggaaccggaagcggaucagcaauugcguggccgacuacuccgugcuguacaacuccgccagcuucagcaccuucaagugcuacggcguguccccuaccaagcugaacgaccugugcuucacaaacguguacgccgacagcuucgugauccggggagaugaagugcggcagauugccccuggacagacaggcaagaucgccgacuacaacuacaagcugcccgacgacuucaccggcugugugauugccuggaacagcaacaaccuggacuccaaagucggcggcaacuacaauuaccuguaccggcuguuccggaaguccaaucugaagcccuucgagcgggacaucagcaccgaaaucuaucaggccggcagcaccccuugcaacggcguggaaggcuucaacugcuacuucccacugcaguccuacggcuuucagcccacaaauggcgugggcuaucagcccuacagagugguggugcugagcuucgaacugcugcaugcuccugccacagugugcggcccuaagaaaagcaccaaucucgugaagaacaaaugcgugaacuucaacuucaacggccugaccggcaccggcgugcugacagagagcaacaagaaguuccugccauuccagcaguuuggccgggauaucgccgauaccacagacgccguuagagauccccagacacuggaaauccuggacaucaccccaugcagcuucggcggagugucugugaucaccccuggcaccaacaccagcaaucagguggcagugcuguaccaggacgugaacuguaccgaagugcccguggccauucacgccgaucagcugacaccuacauggcggguguacuccaccggcagcaauguguuucagaccagagccggcugucugaucggagccgagcacgugaacaauagcuacgagugcgacauccccaucggcgcuggcaucugugccagcuaccagacacagacaaacagccccagacgggcuagaagcguggccagccagagcaucauugccuacacaaugucucugggcgccgagaacagcguggccuacuccaacaacucuaucgcuauccccaccaacuucaccaucagcgugaccaccgagauccugccuguguccaugaccaagaccagcguggacugcaccauguacaucugcggcgauuccaccgagugcuccaaccugcugcugcaguacggcagcuucugcacccagcugaauagagcccugacagggaucgccguggaacaggacaagaacacccaagagguguucgcccaagugaagcaaaucuacaagaccccuccuaucaaggacuucggcggcuucaauuucagccagauucugcccgauccuagcaagcccagcaagcggagcuucaucgaggaccugcuguucaacaaagugacacuggccgacgccggcuucaucaagcaguauggcgauugucugggcgacauugccgccagggaucugauuugcgcccagaaguuuaacggacugacagugcugccuccucugcugaccgaugagaugaucgcccaguacugcucugcccugcuggccggcacaaucacaagcggcuggacauuuggagcuggcgccgcucugcagauccccuuugcuaugcagauggccuaccgguucaacggcaucggagugacccagaaugugcuguacgagaaccagaagcugaucgccaaccaguucaacagcgccaucggcaagauccaggacagccugagcagcacagcaagcgcccugggaaagcugcaggacguggucaaccagaaugcccaggcacugaacacccuggucaagcagcuguccuccaacuucggcgccaucagcucugugcugaacgauauccugagcagacuggacaaggucgaggccgaggugcagaucgacagacugaucacaggcagacugcagagccuccagacauacgugacccagcagcugaucagagccgccgagauuagagccucugccaaucuggccgccaccaagaugucugagugugugcugggccagagcaagagaguggacuuuugcggcaagggcuaccaccugaugagcuucccucagugcgccccucacggcgugguguuucugcacgugacauaugugcccgcucaagagaagaauuucaccaccgcuccagccaucugccacgacggcaaagcccacuuuccuagagaaggcguguucguguccaacggcacccauugguucgugacacagcggaacuucuacgagccccagaucaucaccaccgacaacaccuucgugucuggcaacugcgacguugugaucggcauugugaacaauaccguguacgacccucugcagcccgagcuggacagcggcggaggaucuggcggaggacagaucuacgagggcaagcugacagccgagggccugagauuuggaaucguggccagccgguucaaucacgcccugguggauagacugguggaaggcgccaucgaugccauugucagacacggcggcagagaagaggacaucacccucguuagagugcccggcucuugggagauuccuguggcugcuggcgagcuggcccggaaagaagauaucgacgccguuaucgccaucggcgugcugaucagaggcgccacaccucacuucgacuauaucgccagcgagguguccaaaggccuggccgaucugagccuggaacugagaaagcccaucaccuucggcgugaucaccgcugacacacuggaacaggccauugagagagccggcaccaagcacggcaacaaaggaugggaagccgcucuguccgccaucgagauggccaaccuguucaagagccugcggugaggacuagucccuguucccagagcccacuuuuuuuucuuuuuuugaaauaaaauagccugucuuucagaucucaaaggcucuuuucagagccaccaaaaaaaaaaaaaaaaaaaaaaaaaaaaaaaaaaaaaaaaaaaaaaaaaaaaaaaaaaaaaaaaaaaaaaaaaaaaaaaaaaaaaaaaaaaaaaaaaaaaa

SEQ ID NO: 12631 - RNA, 4220 nt, Artificial Sequence
  SARS-CoV-2/Wuhan/WIV05/2019__EPI_ISL_402128 spike protein mRNA gc mod (1-1147) Ferritin construct
aggagagucccgcagucggcguccagcggcucugcuuguucgugugugugucguugcaggccuuauucaagcuuaccauguucguguuucuggugcugcugccccugguguccagccagugugugaaccugaccaccagaacacagcugccuccagccuacaccaacagcuucaccagaggcguguacuaccccgacaagguguucagauccagcgugcugcacucuacccaggaccuguuccugccuuucuucagcaacgugaccugguuccacgccauccacguguccggcaccaauggcaccaagagauucgacaaccccgugcugcccuucaacgacgggguguacuuugccagcaccgagaaguccaacaucaucagaggcuggaucuucggcaccacacuggacagcaagacccagagccugcugaucgugaacaacgccaccaacguggucaucaaagugugcgaguuccaguucugcaacgaccccuuccugggcgucuacuaccacaagaacaacaagagcuggauggaaagcgaguuccggguguacagcagcgccaacaacugcaccuucgaguacgugucccagccuuuccugauggaccuggaaggcaagcagggcaacuucaagaaccugcgcgaguucguguucaagaacaucgacggcuacuucaaaaucuacagcaagcacaccccuaucaaccucgugcgggaucugccucagggcuucucugcucuggaaccccugguggaucugcccaucggcaucaacaucacccgguuucagacacugcuggcccugcacagaagcuaccugacaccuggcgauagcagcagcggauggacagcuggugccgccgcuuacuaugugggcuaccugcagccuagaaccuuccugcugaaguacaacgagaacggcaccaucaccgacgccguggauugugcucuggauccucugagcgagacaaagugcacccugaaguccuucaccguggaaaagggcaucuaccagaccagcaacuuccgggugcagcccaccgaauccaucgugcgguuccccaauaucaccaaucugugccccuucggcgagguguucaaugccaccagauucgccucuguguacgccuggaaccggaagcggaucagcaauugcguggccgacuacuccgugcuguacaacuccgccagcuucagcaccuucaagugcuacggcguguccccuaccaagcugaacgaccugugcuucacaaacguguacgccgacagcuucgugauccggggagaugaagugcggcagauugccccuggacagacaggcaagaucgccgacuacaacuacaagcugcccgacgacuucaccggcugugugauugccuggaacagcaacaaccuggacuccaaagucggcggcaacuacaauuaccuguaccggcuguuccggaaguccaaucugaagcccuucgagcgggacaucagcaccgaaaucuaucaggccggcagcaccccuugcaacggcguggaaggcuucaacugcuacuucccacugcaguccuacggcuuucagcccacaaauggcgugggcuaucagcccuacagagugguggugcugagcuucgaacugcugcaugcuccugccacagugugcggcccuaagaaaagcaccaaucucgugaagaacaaaugcgugaacuucaacuucaacggccugaccggcaccggcgugcugacagagagcaacaagaaguuccugccauuccagcaguuuggccgggauaucgccgauaccacagacgccguuagagauccccagacacuggaaauccuggacaucaccccaugcagcuucggcggagugucugugaucaccccuggcaccaacaccagcaaucagguggcagugcuguaccaggacgugaacuguaccgaagugcccguggccauucacgccgaucagcugacaccuacauggcggguguacuccaccggcagcaauguguuucagaccagagccggcugucugaucggagccgagcacgugaacaauagcuacgagugcgacauccccaucggcgcuggcaucugugccagcuaccagacacagacaaacagccccagacgggcuagaagcguggccagccagagcaucauugccuacacaaugucucugggcgccgagaacagcguggccuacuccaacaacucuaucgcuauccccaccaacuucaccaucagcgugaccaccgagauccugccuguguccaugaccaagaccagcguggacugcaccauguacaucugcggcgauuccaccgagugcuccaaccugcugcugcaguacggcagcuucugcacccagcugaauagagcccugacagggaucgccguggaacaggacaagaacacccaagagguguucgcccaagugaagcaaaucuacaagaccccuccuaucaaggacuucggcggcuucaauuucagccagauucugcccgauccuagcaagcccagcaagcggagcuucaucgaggaccugcuguucaacaaagugacacuggccgacgccggcuucaucaagcaguauggcgauugucugggcgacauugccgccagggaucugauuugcgcccagaaguuuaacggacugacagugcugccuccucugcugaccgaugagaugaucgcccaguacacaucugcccugcuggccggcacaaucacaagcggcuggacauuuggagcuggcgccgcucugcagauccccuuugcuaugcagauggccuaccgguucaacggcaucggagugacccagaaugugcuguacgagaaccagaagcugaucgccaaccaguucaacagcgccaucggcaagauccaggacagccugagcagcacagcaagcgcccugggaaagcugcaggacguggucaaccagaaugcccaggcacugaacacccuggucaagcagcuguccuccaacuucggcgccaucagcucugugcugaacgauauccugagcagacuggacaaggucgaggccgaggugcagaucgacagacugaucacaggcagacugcagagccuccagacauacgugacccagcagcugaucagagccgccgagauuagagccucugccaaucuggccgccaccaagaugucugagugugugcugggccagagcaagagaguggacuuuugcggcaagggcuaccaccugaugagcuucccucagucugccccucacggcgugguguuucugcacgugacauaugugcccgcucaagagaagaauuucaccaccgcuccagccaucugccacgacggcaaagcccacuuuccuagagaaggcguguucguguccaacggcacccauugguucgugacacagcggaacuucuacgagccccagaucaucaccaccgacaacaccuucgugucuggcaacugcgacguugugaucggcauugugaacaauaccguguacgacccucugcagcccgagcuggacagcggaggcggaggaucugacaucaucaagcugcugaacgagcaagugaacaaagagaugcagagcagcaaccuguacaugagcaugagcagcuggugcuacacccacagccuugauggcgccggacuguuccuguuugaucacgccgccgaggaauacgagcacgccaagaagcugaucaucuuccugaacgagaacaacgugcccgugcagcugaccagcauuucugccccugagcacaaguucgagggccugacacagaucuuccagaaggccuacgaacacgagcagcacaucagcgagagcaucaacaacaucguggaccacgccauuaagagcaaggaucacgccaccuucaacuuucugcagugguacguggccgaacagcacgaggaagaggugcuguucaaggacauccuggacaagaucgagcugaucggcaacgagaaccacggccuguaucuggccgaccaguacgugaagggaaucgccaagagcagaaagagcugaggacuagucccuguucccagagcccacuuuuuuuucuuuuuuugaaauaaaauagccugucuuucagaucucaaaggcucuuuucagagccaccaaaaaaaaaaaaaaaaaaaaaaaaaaaaaaaaaaaaaaaaaaaaaaaaaaaaaaaaaaaaaaaaaaaaaaaaaaaaaaaaaaaaaaaaaaaaaaaaaaaaa

SEQ ID NO: 12632 - RNA, 4220 nt, Artificial Sequence
  SARS-CoV-2/Wuhan/WIV05/2019__EPI_ISL_402128 spike protein mRNA gc mod (1-1147)(K986P_V987P) Ferritin construct
aggagagucccgcagucggcguccagcggcucugcuuguucgugugugugucguugcaggccuuauucaagcuuaccauguucguguuucuggugcugcugccccugguguccagccagugugugaaccugaccaccagaacacagcugccuccagccuacaccaacagcuucaccagaggcguguacuaccccgacaagguguucagauccagcgugcugcacucuacccaggaccuguuccugccuuucuucagcaacgugaccugguuccacgccauccacguguccggcaccaauggcaccaagagauucgacaaccccgugcugcccuucaacgacgggguguacuuugccagcaccgagaaguccaacaucaucagaggcuggaucuucggcaccacacuggacagcaagacccagagccugcugaucgugaacaacgccaccaacguggucaucaaagugugcgaguuccaguucugcaacgaccccuuccugggcgucuacuaccacaagaacaacaagagcuggauggaaagcgaguuccggguguacagcagcgccaacaacugcaccuucgaguacgugucccagccuuuccugauggaccuggaaggcaagcagggcaacuucaagaaccugcgcgaguucguguucaagaacaucgacggcuacuucaaaaucuacagcaagcacaccccuaucaaccucgugcgggaucugccucagggcuucucugcucuggaaccccugguggaucugcccaucggcaucaacaucacccgguuucagacacugcuggcccugcacagaagcuaccugacaccuggcgauagcagcagcggauggacagcuggugccgccgcuuacuaugugggcuaccugcagccuagaaccuuccugcugaaguacaacgagaacggcaccaucaccgacgccguggauugugcucuggauccucugagcgagacaaagugcacccugaaguccuucaccguggaaaagggcaucuaccagaccagcaacuuccgggugcagcccaccgaauccaucgugcgguuccccaauaucaccaaucugugccccuucggcgagguguucaaugccaccagauucgccucuguguacgccuggaaccggaagcggaucagcaauugcguggccgacuacuccgugcuguacaacuccgccagcuucagcaccuucaagugcuacggcguguccccuaccaagcugaacgaccugugcuucacaaacguguacgccgacagcuucgugauccggggagaugaagugcggcagauugccccuggacagacaggcaagaucgccgacuacaacuacaagcugcccgacgacuucaccggcugugugauugccuggaacagcaacaaccuggacuccaaagucggcggcaacuacaauuaccuguaccggcuguuccggaaguccaaucugaagcccuucgagcgggacaucagcaccgaaaucuaucaggccggcagcaccccuugcaacggcguggaaggcuucaacugcuacuucccacugcaguccuacggcuuucagcccacaaauggcgugggcuaucagcccuacagagugguggugcugagcuucgaacugcugcaugcuccugccacagugugcggcccuaagaaaagcaccaaucucgugaagaacaaaugcgugaacuucaacuucaacggccugaccggcaccggcgugcugacagagagcaacaagaaguuccugccauuccagcaguuuggccgggauaucgccgauaccacagacgccguuagagauccccagacacuggaaauccuggacaucaccccaugcagcuucggcggagugucugugaucaccccuggcaccaacaccagcaaucagguggcagugcuguaccaggacgugaacuguaccgaagugcccguggccauucacgccgaucagcugacaccuacauggcggguguacuccaccggcagcaauguguuucagaccagagccggcugucugaucggagccgagcacgugaacaauagcuacgagugcgacauccccaucggcgcuggcaucugugccagcuaccagacacagacaaacagccccagacgggcuagaagcguggccagccagagcaucauugccuacacaaugucucugggcgccgagaacagcguggccuacuccaacaacucuaucgcuauccccaccaacuucaccaucagcgugaccaccgagauccugccuguguccaugaccaagaccagcguggacugcaccauguacaucugcggcgauuccaccgagugcuccaaccugcugcugcaguacggcagcuucugcacccagcugaauagagcccugacagggaucgccguggaacaggacaagaacacccaagagguguucgcccaagugaagcaaaucuacaagaccccuccuaucaaggacuucggcggcuucaauuucagccagauucugcccgauccuagcaagcccagcaagcggagcuucaucgaggaccugcuguucaacaaagugacacuggccgacgccggcuucaucaagcaguauggcgauugucugggcgacauugccgccagggaucugauuugcgcccagaaguuuaacggacugacagugcugccuccucugcugaccgaugagaugaucgcccaguacacaucugcccugcuggccggcacaaucacaagcggcuggacauuuggagcuggcgccgcucugcagauccccuuugcuaugcagauggccuaccgguucaacggcaucggagugacccagaaugugcuguacgagaaccagaagcugaucgccaaccaguucaacagcgccaucggcaagauccaggacagccugagcagcacagcaagcgcccugggaaagcugcaggacguggucaaccagaaugcccaggcacugaacacccuggucaagcagcuguccuccaacuucggcgccaucagcucugugcugaacgauauccugagcagacuggacccuccugaggccgaggugcagaucgacagacugaucacaggcagacugcagagccuccagacauacgugacccagcagcugaucagagccgccgagauuagagccucugccaaucuggccgccaccaagaugucugagugugugcugggccagagcaagagaguggacuuuugcggcaagggcuaccaccugaugagcuucccucagucugccccucacggcgugguguuucugcacgugacauaugugcccgcucaagagaagaauuucaccaccgcuccagccaucugccacgacggcaaagcccacuuuccuagagaaggcguguucguguccaacggcacccauugguucgugacacagcggaacuucuacgagccccagaucaucaccaccgacaacaccuucgugucuggcaacugcgacguugugaucggcauugugaacaauaccguguacgacccucugcagcccgagcuggacagcggaggcggaggaucugacaucaucaagcugcugaacgagcaagugaacaaagagaugcagagcagcaaccuguacaugagcaugagcagcuggugcuacacccacagccuugauggcgccggacuguuccuguuugaucacgccgccgaggaauacgagcacgccaagaagcugaucaucuuccugaacgagaacaacgugcccgugcagcugaccagcauuucugccccugagcacaaguucgagggccugacacagaucuuccagaaggccuacgaacacgagcagcacaucagcgagagcaucaacaacaucguggaccacgccauuaagagcaaggaucacgccaccuucaacuuucugcagugguacguggccgaacagcacgaggaagaggugcuguucaaggacauccuggacaagaucgagcugaucggcaacgagaaccacggccuguaucuggccgaccaguacgugaagggaaucgccaagagcagaaagagcugaggacuagucccuguucccagagcccacuuuuuuuucuuuuuuugaaauaaaauagccugucuuucagaucucaaaggcucuuuucagagccaccaaaaaaaaaaaaaaaaaaaaaaaaaaaaaaaaaaaaaaaaaaaaaaaaaaaaaaaaaaaaaaaaaaaaaaaaaaaaaaaaaaaaaaaaaaaaaaaaaaaaa

SEQ ID NO: 12633 - RNA, 4220 nt, Artificial Sequence
  SARS-CoV-2/Wuhan/WIV05/2019__EPI_ISL_402128 spike protein mRNA gc mod (1-1147)(K986P_V987P_T887WN_A1020W) Ferritin construct
aggagagucccgcagucggcguccagcggcucugcuuguucgugugugugucguugcaggccuuauucaagcuuaccauguucguguuucuggugcugcugccccugguguccagccagugugugaaccugaccaccagaacacagcugccuccagccuacaccaacagcuucaccagaggcguguacuaccccgacaagguguucagauccagcgugcugcacucuacccaggaccuguuccugccuuucuucagcaacgugaccugguuccacgccauccacguguccggcaccaauggcaccaagagauucgacaaccccgugcugcccuucaacgacgggguguacuuugccagcaccgagaaguccaacaucaucagaggcuggaucuucggcaccacacuggacagcaagacccagagccugcugaucgugaacaacgccaccaacguggucaucaaagugugcgaguuccaguucugcaacgaccccuuccugggcgucuacuaccacaagaacaacaagagcuggauggaaagcgaguuccggguguacagcagcgccaacaacugcaccuucgaguacgugucccagccuuuccugauggaccuggaaggcaagcagggcaacuucaagaaccugcgcgaguucguguucaagaacaucgacggcuacuucaaaaucuacagcaagcacaccccuaucaaccucgugcgggaucugccucagggcuucucugcucuggaaccccugguggaucugcccaucggcaucaacaucacccgguuucagacacugcuggcccugcacagaagcuaccugacaccuggcgauagcagcagcggauggacagcuggugccgccgcuuacuaugugggcuaccugcagccuagaaccuuccugcugaaguacaacgagaacggcaccaucaccgacgccguggauugugcucuggauccucugagcgagacaaagugcacccugaaguccuucaccguggaaaagggcaucuaccagaccagcaacuuccgggugcagcccaccgaauccaucgugcgguuccccaauaucaccaaucugugccccuucggcgagguguucaaugccaccagauucgccucuguguacgccuggaaccggaagcggaucagcaauugcguggccgacuacuccgugcuguacaacuccgccagcuucagcaccuucaagugcuacggcguguccccuaccaagcugaacgaccugugcuucacaaacguguacgccgacagcuucgugauccggggagaugaagugcggcagauugccccuggacagacaggcaagaucgccgacuacaacuacaagcugcccgacgacuucaccggcugugugauugccuggaacagcaacaaccuggacuccaaagucggcggcaacuacaauuaccuguaccggcuguuccggaaguccaaucugaagcccuucgagcgggacaucagcaccgaaaucuaucaggccggcagcaccccuugcaacggcguggaaggcuucaacugcuacuucccacugcaguccuacggcuuucagcccacaaauggcgugggcuaucagcccuacagagugguggugcugagcuucgaacugcugcaugcuccugccacagugugcggcccuaagaaaagcaccaaucucgugaagaacaaaugcgugaacuucaacuucaacggccugaccggcaccggcgugcugacagagagcaacaagaaguuccugccauuccagcaguuuggccgggauaucgccgauaccacagacgccguuagagauccccagacacuggaaauccuggacaucaccccaugcagcuucggcggagugucugugaucaccccuggcaccaacaccagcaaucagguggcagugcuguaccaggacgugaacuguaccgaagugcccguggccauucacgccgaucagcugacaccuacauggcggguguacuccaccggcagcaauguguuucagaccagagccggcugucugaucggagccgagcacgugaacaauagcuacgagugcgacauccccaucggcgcuggcaucugugccagcuaccagacacagacaaacagccccagacgggcuagaagcguggccagccagagcaucauugccuacacaaugucucugggcgccgagaacagcguggccuacuccaacaacucuaucgcuauccccaccaacuucaccaucagcgugaccaccgagauccugccuguguccaugaccaagaccagcguggacugcaccauguacaucugcggcgauuccaccgagugcuccaaccugcugcugcaguacggcagcuucugcacccagcugaauagagcccugacagggaucgccguggaacaggacaagaacacccaagagguguucgcccaagugaagcaaaucuacaagaccccuccuaucaaggacuucggcggcuucaauuucagccagauucugcccgauccuagcaagcccagcaagcggagcuucaucgaggaccugcuguucaacaaagugacacuggccgacgccggcuucaucaagcaguauggcgauugucugggcgacauugccgccagggaucugauuugcgcccagaaguuuaacggacugacagugcugccuccucugcugaccgaugagaugaucgcccaguacacaucugcccugcuggccggcacaaucacaagcggcuggugguuuggagcuggcgccgcucugcagauccccuuugcuaugcagauggccuaccgguucaacggcaucggagugacccagaaugugcuguacgagaaccagaagcugaucgccaaccaguucaacagcgccaucggcaagauccaggacagccugagcagcacagcaagcgcccugggaaagcugcaggacguggucaaccagaaugcccaggcacugaacacccuggucaagcagcuguccuccaacuucggcgccaucagcucugugcugaacgauauccugagcagacuggacccuccugaggccgaggugcagaucgacagacugaucacaggcagacugcagagccuccagacauacgugacccagcagcugaucagagccgccgagauuagauggucugccaaucuggccgccaccaagaugucugagugugugcugggccagagcaagagaguggacuuuugcggcaagggcuaccaccugaugagcuucccucagucugccccucacggcgugguguuucugcacgugacauaugugcccgcucaagagaagaauuucaccaccgcuccagccaucugccacgacggcaaagcccacuuuccuagagaaggcguguucguguccaacggcacccauugguucgugacacagcggaacuucuacgagccccagaucaucaccaccgacaacaccuucgugucuggcaacugcgacguugugaucggcauugugaacaauaccguguacgacccucugcagcccgagcuggacagcggaggcggaggaucugacaucaucaagcugcugaacgagcaagugaacaaagagaugcagagcagcaaccuguacaugagcaugagcagcuggugcuacacccacagccuugauggcgccggacuguuccuguuugaucacgccgccgaggaauacgagcacgccaagaagcugaucaucuuccugaacgagaacaacgugcccgugcagcugaccagcauuucugccccugagcacaaguucgagggccugacacagaucuuccagaaggccuacgaacacgagcagcacaucagcgagagcaucaacaacaucguggaccacgccauuaagagcaaggaucacgccaccuucaacuuucugcagugguacguggccgaacagcacgaggaagaggugcuguucaaggacauccuggacaagaucgagcugaucggcaacgagaaccacggccuguaucuggccgaccaguacgugaagggaaucgccaagagcagaaagagcugaggacuagucccuguucccagagcccacuuuuuuuucuuuuuuugaaauaaaauagccugucuuucagaucucaaaggcucuuuucagagccaccaaaaaaaaaaaaaaaaaaaaaaaaaaaaaaaaaaaaaaaaaaaaaaaaaaaaaaaaaaaaaaaaaaaaaaaaaaaaaaaaaaaaaaaaaaaaaaaaaaaaa

SEQ ID NO: 12634 - RNA, 4220 nt, Artificial Sequence
  SARS-CoV-2/Wuhan/WIV05/2019__EPI_ISL_402128 spike protein mRNA gc mod (1-1147)(K986P_V987P_P1069F) Ferritin construct
aggagagucccgcagucggcguccagcggcucugcuuguucgugugugugucguugcaggccuuauucaagcuuaccauguucguguuucuggugcugcugccccugguguccagccagugugugaaccugaccaccagaacacagcugccuccagccuacaccaacagcuucaccagaggcguguacuaccccgacaagguguucagauccagcgugcugcacucuacccaggaccuguuccugccuuucuucagcaacgugaccugguuccacgccauccacguguccggcaccaauggcaccaagagauucgacaaccccgugcugcccuucaacgacgggguguacuuugccagcaccgagaaguccaacaucaucagaggcuggaucuucggcaccacacuggacagcaagacccagagccugcugaucgugaacaacgccaccaacguggucaucaaagugugcgaguuccaguucugcaacgaccccuuccugggcgucuacuaccacaagaacaacaagagcuggauggaaagcgaguuccggguguacagcagcgccaacaacugcaccuucgaguacgugucccagccuuuccugauggaccuggaaggcaagcagggcaacuucaagaaccugcgcgaguucguguucaagaacaucgacggcuacuucaaaaucuacagcaagcacaccccuaucaaccucgugcgggaucugccucagggcuucucugcucuggaaccccugguggaucugcccaucggcaucaacaucacccgguuucagacacugcuggcccugcacagaagcuaccugacaccuggcgauagcagcagcggauggacagcuggugccgccgcuuacuaugugggcuaccugcagccuagaaccuuccugcugaaguacaacgagaacggcaccaucaccgacgccguggauugugcucuggauccucugagcgagacaaagugcacccugaaguccuucaccguggaaaagggcaucuaccagaccagcaacuuccgggugcagcccaccgaauccaucgugcgguuccccaauaucaccaaucugugccccuucggcgagguguucaaugccaccagauucgccucuguguacgccuggaaccggaagcggaucagcaauugcguggccgacuacuccgugcuguacaacuccgccagcuucagcaccuucaagugcuacggcguguccccuaccaagcugaacgaccugugcuucacaaacguguacgccgacagcuucgugauccggggagaugaagugcggcagauugccccuggacagacaggcaagaucgccgacuacaacuacaagcugcccgacgacuucaccggcugugugauugccuggaacagcaacaaccuggacuccaaagucggcggcaacuacaauuaccuguaccggcuguuccggaaguccaaucugaagcccuucgagcgggacaucagcaccgaaaucuaucaggccggcagcaccccuugcaacggcguggaaggcuucaacugcuacuucccacugcaguccuacggcuuucagcccacaaauggcgugggcuaucagcccuacagagugguggugcugagcuucgaacugcugcaugcuccugccacagugugcggcccuaagaaaagcaccaaucucgugaagaacaaaugcgugaacuucaacuucaacggccugaccggcaccggcgugcugacagagagcaacaagaaguuccugccauuccagcaguuuggccgggauaucgccgauaccacagacgccguuagagauccccagacacuggaaauccuggacaucaccccaugcagcuucggcggagugucugugaucaccccuggcaccaacaccagcaaucagguggcagugcuguaccaggacgugaacuguaccgaagugcccguggccauucacgccgaucagcugacaccuacauggcggguguacuccaccggcagcaauguguuucagaccagagccggcugucugaucggagccgagcacgugaacaauagcuacgagugcgacauccccaucggcgcuggcaucugugccagcuaccagacacagacaaacagccccagacgggcuagaagcguggccagccagagcaucauugccuacacaaugucucugggcgccgagaacagcguggccuacuccaacaacucuaucgcuauccccaccaacuucaccaucagcgugaccaccgagauccugccuguguccaugaccaagaccagcguggacugcaccauguacaucugcggcgauuccaccgagugcuccaaccugcugcugcaguacggcagcuucugcacccagcugaauagagcccugacagggaucgccguggaacaggacaagaacacccaagagguguucgcccaagugaagcaaaucuacaagaccccuccuaucaaggacuucggcggcuucaauuucagccagauucugcccgauccuagcaagcccagcaagcggagcuucaucgaggaccugcuguucaacaaagugacacuggccgacgccggcuucaucaagcaguauggcgauugucugggcgacauugccgccagggaucugauuugcgcccagaaguuuaacggacugacagugcugccuccucugcugaccgaugagaugaucgcccaguacacaucugcccugcuggccggcacaaucacaagcggcuggacauuuggagcuggcgccgcucugcagauccccuuugcuaugcagauggccuaccgguucaacggcaucggagugacccagaaugugcuguacgagaaccagaagcugaucgccaaccaguucaacagcgccaucggcaagauccaggacagccugagcagcacagcaagcgcccugggaaagcugcaggacguggucaaccagaaugcccaggcacugaacacccuggucaagcagcuguccuccaacuucggcgccaucagcucugugcugaacgauauccugagcagacuggacccuccugaggccgaggugcagaucgacagacugaucacaggcagacugcagagccuccagacauacgugacccagcagcugaucagagccgccgagauuagagccucugccaaucuggccgccaccaagaugucugagugugugcugggccagagcaagagaguggacuuuugcggcaagggcuaccaccugaugagcuucccucagucugccccucacggcgugguguuucugcacgugacauauguguucgcucaagagaagaauuucaccaccgcuccagccaucugccacgacggcaaagcccacuuuccuagagaaggcguguucguguccaacggcacccauugguucgugacacagcggaacuucuacgagccccagaucaucaccaccgacaacaccuucgugucuggcaacugcgacguugugaucggcauugugaacaauaccguguacgacccucugcagcccgagcuggacagcggaggcggaggaucugacaucaucaagcugcugaacgagcaagugaacaaagagaugcagagcagcaaccuguacaugagcaugagcagcuggugcuacacccacagccuugauggcgccggacuguuccuguuugaucacgccgccgaggaauacgagcacgccaagaagcugaucaucuuccugaacgagaacaacgugcccgugcagcugaccagcauuucugccccugagcacaaguucgagggccugacacagaucuuccagaaggccuacgaacacgagcagcacaucagcgagagcaucaacaacaucguggaccacgccauuaagagcaaggaucacgccaccuucaacuuucugcagugguacguggccgaacagcacgaggaagaggugcuguucaaggacauccuggacaagaucgagcugaucggcaacgagaaccacggccuguaucuggccgaccaguacgugaagggaaucgccaagagcagaaagagcugaggacuagucccuguucccagagcccacuuuuuuuucuuuuuuugaaauaaaauagccugucuuucagaucucaaaggcucuuuucagagccaccaaaaaaaaaaaaaaaaaaaaaaaaaaaaaaaaaaaaaaaaaaaaaaaaaaaaaaaaaaaaaaaaaaaaaaaaaaaaaaaaaaaaaaaaaaaaaaaaaaaaa

SEQ ID NO: 12635 - RNA, 4220 nt, Artificial Sequence
  SARS-CoV-2/Wuhan/WIV05/2019__EPI_ISL_402128 spike protein mRNA gc mod (1-1147)(K986P_V987P_ H1048Q_H1064N_ H1083N_H1101N) Ferritin construct
aggagagucccgcagucggcguccagcggcucugcuuguucgugugugugucguugcaggccuuauucaagcuuaccauguucguguuucuggugcugcugccccugguguccagccagugugugaaccugaccaccagaacacagcugccuccagccuacaccaacagcuucaccagaggcguguacuaccccgacaagguguucagauccagcgugcugcacucuacccaggaccuguuccugccuuucuucagcaacgugaccugguuccacgccauccacguguccggcaccaauggcaccaagagauucgacaaccccgugcugcccuucaacgacgggguguacuuugccagcaccgagaaguccaacaucaucagaggcuggaucuucggcaccacacuggacagcaagacccagagccugcugaucgugaacaacgccaccaacguggucaucaaagugugcgaguuccaguucugcaacgaccccuuccugggcgucuacuaccacaagaacaacaagagcuggauggaaagcgaguuccggguguacagcagcgccaacaacugcaccuucgaguacgugucccagccuuuccugauggaccuggaaggcaagcagggcaacuucaagaaccugcgcgaguucguguucaagaacaucgacggcuacuucaaaaucuacagcaagcacaccccuaucaaccucgugcgggaucugccucagggcuucucugcucuggaaccccugguggaucugcccaucggcaucaacaucacccgguuucagacacugcuggcccugcacagaagcuaccugacaccuggcgauagcagcagcggauggacagcuggugccgccgcuuacuaugugggcuaccugcagccuagaaccuuccugcugaaguacaacgagaacggcaccaucaccgacgccguggauugugcucuggauccucugagcgagacaaagugcacccugaaguccuucaccguggaaaagggcaucuaccagaccagcaacuuccgggugcagcccaccgaauccaucgugcgguuccccaauaucaccaaucugugccccuucggcgagguguucaaugccaccagauucgccucuguguacgccuggaaccggaagcggaucagcaauugcguggccgacuacuccgugcuguacaacuccgccagcuucagcaccuucaagugcuacggcguguccccuaccaagcugaacgaccugugcuucacaaacguguacgccgacagcuucgugauccggggagaugaagugcggcagauugccccuggacagacaggcaagaucgccgacuacaacuacaagcugcccgacgacuucaccggcugugugauugccuggaacagcaacaaccuggacuccaaagucggcggcaacuacaauuaccuguaccggcuguuccggaaguccaaucugaagcccuucgagcgggacaucagcaccgaaaucuaucaggccggcagcaccccuugcaacggcguggaaggcuucaacugcuacuucccacugcaguccuacggcuuucagcccacaaauggcgugggcuaucagcccuacagagugguggugcugagcuucgaacugcugcaugcuccugccacagugugcggcccuaagaaaagcaccaaucucgugaagaacaaaugcgugaacuucaacuucaacggccugaccggcaccggcgugcugacagagagcaacaagaaguuccugccauuccagcaguuuggccgggauaucgccgauaccacagacgccguuagagauccccagacacuggaaauccuggacaucaccccaugcagcuucggcggagugucugugaucaccccuggcaccaacaccagcaaucagguggcagugcuguaccaggacgugaacuguaccgaagugcccguggccauucacgccgaucagcugacaccuacauggcggguguacuccaccggcagcaauguguuucagaccagagccggcugucugaucggagccgagcacgugaacaauagcuacgagugcgacauccccaucggcgcuggcaucugugccagcuaccagacacagacaaacagccccagacgggcuagaagcguggccagccagagcaucauugccuacacaaugucucugggcgccgagaacagcguggccuacuccaacaacucuaucgcuauccccaccaacuucaccaucagcgugaccaccgagauccugccuguguccaugaccaagaccagcguggacugcaccauguacaucugcggcgauuccaccgagugcuccaaccugcugcugcaguacggcagcuucugcacccagcugaauagagcccugacagggaucgccguggaacaggacaagaacacccaagagguguucgcccaagugaagcaaaucuacaagaccccuccuaucaaggacuucggcggcuucaauuucagccagauucugcccgauccuagcaagcccagcaagcggagcuucaucgaggaccugcuguucaacaaagugacacuggccgacgccggcuucaucaagcaguauggcgauugucugggcgacauugccgccagggaucugauuugcgcccagaaguuuaacggacugacagugcugccuccucugcugaccgaugagaugaucgcccaguacacaucugcccugcuggccggcacaaucacaagcggcuggacauuuggagcuggcgccgcucugcagauccccuuugcuaugcagauggccuaccgguucaacggcaucggagugacccagaaugugcuguacgagaaccagaagcugaucgccaaccaguucaacagcgccaucggcaagauccaggacagccugagcagcacagcaagcgcccugggaaagcugcaggacguggucaaccagaaugcccaggcacugaacacccuggucaagcagcuguccuccaacuucggcgccaucagcucugugcugaacgauauccugagcagacuggacccuccugaggccgaggugcagaucgacagacugaucacaggcagacugcagagccuccagacauacgugacccagcagcugaucagagccgccgagauuagagccucugccaaucuggccgccaccaagaugucugagugugugcugggccagagcaagagaguggacuuuugcggcaagggcuaccagcugaugagcuucccucagucugccccucacggcgugguguuucugaacgugacauaugugcccgcucaagagaagaauuucaccaccgcuccagccaucugcaacgacggcaaagcccacuuuccuagagaaggcguguucguguccaacggcaccaacugguucgugacacagcggaacuucuacgagccccagaucaucaccaccgacaacaccuucgugucuggcaacugcgacguugugaucggcauugugaacaauaccguguacgacccucugcagcccgagcuggacagcggaggcggaggaucugacaucaucaagcugcugaacgagcaagugaacaaagagaugcagagcagcaaccuguacaugagcaugagcagcuggugcuacacccacagccuugauggcgccggacuguuccuguuugaucacgccgccgaggaauacgagcacgccaagaagcugaucaucuuccugaacgagaacaacgugcccgugcagcugaccagcauuucugccccugagcacaaguucgagggccugacacagaucuuccagaaggccuacgaacacgagcagcacaucagcgagagcaucaacaacaucguggaccacgccauuaagagcaaggaucacgccaccuucaacuuucugcagugguacguggccgaacagcacgaggaagaggugcuguucaaggacauccuggacaagaucgagcugaucggcaacgagaaccacggccuguaucuggccgaccaguacgugaagggaaucgccaagagcagaaagagcugaggacuagucccuguucccagagcccacuuuuuuuucuuuuuuugaaauaaaauagccugucuuucagaucucaaaggcucuuuucagagccaccaaaaaaaaaaaaaaaaaaaaaaaaaaaaaaaaaaaaaaaaaaaaaaaaaaaaaaaaaaaaaaaaaaaaaaaaaaaaaaaaaaaaaaaaaaaaaaaaaaaaa

SEQ ID NO: 12636 - RNA, 4220 nt, Artificial Sequence
  SARS-CoV-2/Wuhan/WIV05/2019__EPI_ISL_402128 spike protein mRNA gc mod (1-1147)(I712C_T1077C) Ferritin construct
aggagagucccgcagucggcguccagcggcucugcuuguucgugugugugucguugcaggccuuauucaagcuuaccauguucguguuucuggugcugcugccccugguguccagccagugugugaaccugaccaccagaacacagcugccuccagccuacaccaacagcuucaccagaggcguguacuaccccgacaagguguucagauccagcgugcugcacucuacccaggaccuguuccugccuuucuucagcaacgugaccugguuccacgccauccacguguccggcaccaauggcaccaagagauucgacaaccccgugcugcccuucaacgacgggguguacuuugccagcaccgagaaguccaacaucaucagaggcuggaucuucggcaccacacuggacagcaagacccagagccugcugaucgugaacaacgccaccaacguggucaucaaagugugcgaguuccaguucugcaacgaccccuuccugggcgucuacuaccacaagaacaacaagagcuggauggaaagcgaguuccggguguacagcagcgccaacaacugcaccuucgaguacgugucccagccuuuccugauggaccuggaaggcaagcagggcaacuucaagaaccugcgcgaguucguguucaagaacaucgacggcuacuucaaaaucuacagcaagcacaccccuaucaaccucgugcgggaucugccucagggcuucucugcucuggaaccccugguggaucugcccaucggcaucaacaucacccgguuucagacacugcuggcccugcacagaagcuaccugacaccuggcgauagcagcagcggauggacagcuggugccgccgcuuacuaugugggcuaccugcagccuagaaccuuccugcugaaguacaacgagaacggcaccaucaccgacgccguggauugugcucuggauccucugagcgagacaaagugcacccugaaguccuucaccguggaaaagggcaucuaccagaccagcaacuuccgggugcagcccaccgaauccaucgugcgguuccccaauaucaccaaucugugccccuucggcgagguguucaaugccaccagauucgccucuguguacgccuggaaccggaagcggaucagcaauugcguggccgacuacuccgugcuguacaacuccgccagcuucagcaccuucaagugcuacggcguguccccuaccaagcugaacgaccugugcuucacaaacguguacgccgacagcuucgugauccggggagaugaagugcggcagauugccccuggacagacaggcaagaucgccgacuacaacuacaagcugcccgacgacuucaccggcugugugauugccuggaacagcaacaaccuggacuccaaagucggcggcaacuacaauuaccuguaccggcuguuccggaaguccaaucugaagcccuucgagcgggacaucagcaccgaaaucuaucaggccggcagcaccccuugcaacggcguggaaggcuucaacugcuacuucccacugcaguccuacggcuuucagcccacaaauggcgugggcuaucagcccuacagagugguggugcugagcuucgaacugcugcaugcuccugccacagugugcggcccuaagaaaagcaccaaucucgugaagaacaaaugcgugaacuucaacuucaacggccugaccggcaccggcgugcugacagagagcaacaagaaguuccugccauuccagcaguuuggccgggauaucgccgauaccacagacgccguuagagauccccagacacuggaaauccuggacaucaccccaugcagcuucggcggagugucugugaucaccccuggcaccaacaccagcaaucagguggcagugcuguaccaggacgugaacuguaccgaagugcccguggccauucacgccgaucagcugacaccuacauggcggguguacuccaccggcagcaauguguuucagaccagagccggcugucugaucggagccgagcacgugaacaauagcuacgagugcgacauccccaucggcgcuggcaucugugccagcuaccagacacagacaaacagccccagacgggcuagaagcguggccagccagagcaucauugccuacacaaugucucugggcgccgagaacagcguggccuacuccaacaacucuugcgcuauccccaccaacuucaccaucagcgugaccaccgagauccugccuguguccaugaccaagaccagcguggacugcaccauguacaucugcggcgauuccaccgagugcuccaaccugcugcugcaguacggcagcuucugcacccagcugaauagagcccugacagggaucgccguggaacaggacaagaacacccaagagguguucgcccaagugaagcaaaucuacaagaccccuccuaucaaggacuucggcggcuucaauuucagccagauucugcccgauccuagcaagcccagcaagcggagcuucaucgaggaccugcuguucaacaaagugacacuggccgacgccggcuucaucaagcaguauggcgauugucugggcgacauugccgccagggaucugauuugcgcccagaaguuuaacggacugacagugcugccuccucugcugaccgaugagaugaucgcccaguacacaucugcccugcuggccggcacaaucacaagcggcuggacauuuggagcuggcgccgcucugcagauccccuuugcuaugcagauggccuaccgguucaacggcaucggagugacccagaaugugcuguacgagaaccagaagcugaucgccaaccaguucaacagcgccaucggcaagauccaggacagccugagcagcacagcaagcgcccugggaaagcugcaggacguggucaaccagaaugcccaggcacugaacacccuggucaagcagcuguccuccaacuucggcgccaucagcucugugcugaacgauauccugagcagacuggacaaggucgaggccgaggugcagaucgacagacugaucacaggcagacugcagagccuccagacauacgugacccagcagcugaucagagccgccgagauuagagccucugccaaucuggccgccaccaagaugucugagugugugcugggccagagcaagagaguggacuuuugcggcaagggcuaccaccugaugagcuucccucagucugccccucacggcgugguguuucugcacgugacauaugugcccgcucaagagaagaauuucaccugugcuccagccaucugccacgacggcaaagcccacuuuccuagagaaggcguguucguguccaacggcacccauugguucgugacacagcggaacuucuacgagccccagaucaucaccaccgacaacaccuucgugucuggcaacugcgacguugugaucggcauugugaacaauaccguguacgacccucugcagcccgagcuggacagcggaggcggaggaucugacaucaucaagcugcugaacgagcaagugaacaaagagaugcagagcagcaaccuguacaugagcaugagcagcuggugcuacacccacagccuugauggcgccggacuguuccuguuugaucacgccgccgaggaauacgagcacgccaagaagcugaucaucuuccugaacgagaacaacgugcccgugcagcugaccagcauuucugccccugagcacaaguucgagggccugacacagaucuuccagaaggccuacgaacacgagcagcacaucagcgagagcaucaacaacaucguggaccacgccauuaagagcaaggaucacgccaccuucaacuuucugcagugguacguggccgaacagcacgaggaagaggugcuguucaaggacauccuggacaagaucgagcugaucggcaacgagaaccacggccuguaucuggccgaccaguacgugaagggaaucgccaagagcagaaagagcugaggacuagucccuguucccagagcccacuuuuuuuucuuuuuuugaaauaaaauagccugucuuucagaucucaaaggcucuuuucagagccaccaaaaaaaaaaaaaaaaaaaaaaaaaaaaaaaaaaaaaaaaaaaaaaaaaaaaaaaaaaaaaaaaaaaaaaaaaaaaaaaaaaaaaaaaaaaaaaaaaaaaa

SEQ ID NO: 12637 - RNA, 4220 nt, Artificial Sequence
  SARS-CoV-2/Wuhan/WIV05/2019__EPI_ISL_402128 spike protein mRNA gc mod (1-1147)(I714C_Y1110C) Ferritin construct
aggagagucccgcagucggcguccagcggcucugcuuguucgugugugugucguugcaggccuuauucaagcuuaccauguucguguuucuggugcugcugccccugguguccagccagugugugaaccugaccaccagaacacagcugccuccagccuacaccaacagcuucaccagaggcguguacuaccccgacaagguguucagauccagcgugcugcacucuacccaggaccuguuccugccuuucuucagcaacgugaccugguuccacgccauccacguguccggcaccaauggcaccaagagauucgacaaccccgugcugcccuucaacgacgggguguacuuugccagcaccgagaaguccaacaucaucagaggcuggaucuucggcaccacacuggacagcaagacccagagccugcugaucgugaacaacgccaccaacguggucaucaaagugugcgaguuccaguucugcaacgaccccuuccugggcgucuacuaccacaagaacaacaagagcuggauggaaagcgaguuccggguguacagcagcgccaacaacugcaccuucgaguacgugucccagccuuuccugauggaccuggaaggcaagcagggcaacuucaagaaccugcgcgaguucguguucaagaacaucgacggcuacuucaaaaucuacagcaagcacaccccuaucaaccucgugcgggaucugccucagggcuucucugcucuggaaccccugguggaucugcccaucggcaucaacaucacccgguuucagacacugcuggcccugcacagaagcuaccugacaccuggcgauagcagcagcggauggacagcuggugccgccgcuuacuaugugggcuaccugcagccuagaaccuuccugcugaaguacaacgagaacggcaccaucaccgacgccguggauugugcucuggauccucugagcgagacaaagugcacccugaaguccuucaccguggaaaagggcaucuaccagaccagcaacuuccgggugcagcccaccgaauccaucgugcgguuccccaauaucaccaaucugugccccuucggcgagguguucaaugccaccagauucgccucuguguacgccuggaaccggaagcggaucagcaauugcguggccgacuacuccgugcuguacaacuccgccagcuucagcaccuucaagugcuacggcguguccccuaccaagcugaacgaccugugcuucacaaacguguacgccgacagcuucgugauccggggagaugaagugcggcagauugccccuggacagacaggcaagaucgccgacuacaacuacaagcugcccgacgacuucaccggcugugugauugccuggaacagcaacaaccuggacuccaaagucggcggcaacuacaauuaccuguaccggcuguuccggaaguccaaucugaagcccuucgagcgggacaucagcaccgaaaucuaucaggccggcagcaccccuugcaacggcguggaaggcuucaacugcuacuucccacugcaguccuacggcuuucagcccacaaauggcgugggcuaucagcccuacagagugguggugcugagcuucgaacugcugcaugcuccugccacagugugcggcccuaagaaaagcaccaaucucgugaagaacaaaugcgugaacuucaacuucaacggccugaccggcaccggcgugcugacagagagcaacaagaaguuccugccauuccagcaguuuggccgggauaucgccgauaccacagacgccguuagagauccccagacacuggaaauccuggacaucaccccaugcagcuucggcggagugucugugaucaccccuggcaccaacaccagcaaucagguggcagugcuguaccaggacgugaacuguaccgaagugcccguggccauucacgccgaucagcugacaccuacauggcggguguacuccaccggcagcaauguguuucagaccagagccggcugucugaucggagccgagcacgugaacaauagcuacgagugcgacauccccaucggcgcuggcaucugugccagcuaccagacacagacaaacagccccagacgggcuagaagcguggccagccagagcaucauugccuacacaaugucucugggcgccgagaacagcguggccuacuccaacaacucuaucgcuugccccaccaacuucaccaucagcgugaccaccgagauccugccuguguccaugaccaagaccagcguggacugcaccauguacaucugcggcgauuccaccgagugcuccaaccugcugcugcaguacggcagcuucugcacccagcugaauagagcccugacagggaucgccguggaacaggacaagaacacccaagagguguucgcccaagugaagcaaaucuacaagaccccuccuaucaaggacuucggcggcuucaauuucagccagauucugcccgauccuagcaagcccagcaagcggagcuucaucgaggaccugcuguucaacaaagugacacuggccgacgccggcuucaucaagcaguauggcgauugucugggcgacauugccgccagggaucugauuugcgcccagaaguuuaacggacugacagugcugccuccucugcugaccgaugagaugaucgcccaguacacaucugcccugcuggccggcacaaucacaagcggcuggacauuuggagcuggcgccgcucugcagauccccuuugcuaugcagauggccuaccgguucaacggcaucggagugacccagaaugugcuguacgagaaccagaagcugaucgccaaccaguucaacagcgccaucggcaagauccaggacagccugagcagcacagcaagcgcccugggaaagcugcaggacguggucaaccagaaugcccaggcacugaacacccuggucaagcagcuguccuccaacuucggcgccaucagcucugugcugaacgauauccugagcagacuggacaaggucgaggccgaggugcagaucgacagacugaucacaggcagacugcagagccuccagacauacgugacccagcagcugaucagagccgccgagauuagagccucugccaaucuggccgccaccaagaugucugagugugugcugggccagagcaagagaguggacuuuugcggcaagggcuaccaccugaugagcuucccucagucugccccucacggcgugguguuucugcacgugacauaugugcccgcucaagagaagaauuucaccaccgcuccagccaucugccacgacggcaaagcccacuuuccuagagaaggcguguucguguccaacggcacccauugguucgugacacagcggaacuucugugagccccagaucaucaccaccgacaacaccuucgugucuggcaacugcgacguugugaucggcauugugaacaauaccguguacgacccucugcagcccgagcuggacagcggaggcggaggaucugacaucaucaagcugcugaacgagcaagugaacaaagagaugcagagcagcaaccuguacaugagcaugagcagcuggugcuacacccacagccuugauggcgccggacuguuccuguuugaucacgccgccgaggaauacgagcacgccaagaagcugaucaucuuccugaacgagaacaacgugcccgugcagcugaccagcauuucugccccugagcacaaguucgagggccugacacagaucuuccagaaggccuacgaacacgagcagcacaucagcgagagcaucaacaacaucguggaccacgccauuaagagcaaggaucacgccaccuucaacuuucugcagugguacguggccgaacagcacgaggaagaggugcuguucaaggacauccuggacaagaucgagcugaucggcaacgagaaccacggccuguaucuggccgaccaguacgugaagggaaucgccaagagcagaaagagcugaggacuagucccuguucccagagcccacuuuuuuuucuuuuuuugaaauaaaauagccugucuuucagaucucaaaggcucuuuucagagccaccaaaaaaaaaaaaaaaaaaaaaaaaaaaaaaaaaaaaaaaaaaaaaaaaaaaaaaaaaaaaaaaaaaaaaaaaaaaaaaaaaaaaaaaaaaaaaaaaaaaaa

SEQ ID NO: 12638 - RNA, 4220 nt, Artificial Sequence
  SARS-CoV-2/Wuhan/WIV05/2019__EPI_ISL_402128 spike protein mRNA gc mod (1-1147)(P715C_P1069C) Ferritin construct
aggagagucccgcagucggcguccagcggcucugcuuguucgugugugugucguugcaggccuuauucaagcuuaccauguucguguuucuggugcugcugccccugguguccagccagugugugaaccugaccaccagaacacagcugccuccagccuacaccaacagcuucaccagaggcguguacuaccccgacaagguguucagauccagcgugcugcacucuacccaggaccuguuccugccuuucuucagcaacgugaccugguuccacgccauccacguguccggcaccaauggcaccaagagauucgacaaccccgugcugcccuucaacgacgggguguacuuugccagcaccgagaaguccaacaucaucagaggcuggaucuucggcaccacacuggacagcaagacccagagccugcugaucgugaacaacgccaccaacguggucaucaaagugugcgaguuccaguucugcaacgaccccuuccugggcgucuacuaccacaagaacaacaagagcuggauggaaagcgaguuccggguguacagcagcgccaacaacugcaccuucgaguacgugucccagccuuuccugauggaccuggaaggcaagcagggcaacuucaagaaccugcgcgaguucguguucaagaacaucgacggcuacuucaaaaucuacagcaagcacaccccuaucaaccucgugcgggaucugccucagggcuucucugcucuggaaccccugguggaucugcccaucggcaucaacaucacccgguuucagacacugcuggcccugcacagaagcuaccugacaccuggcgauagcagcagcggauggacagcuggugccgccgcuuacuaugugggcuaccugcagccuagaaccuuccugcugaaguacaacgagaacggcaccaucaccgacgccguggauugugcucuggauccucugagcgagacaaagugcacccugaaguccuucaccguggaaaagggcaucuaccagaccagcaacuuccgggugcagcccaccgaauccaucgugcgguuccccaauaucaccaaucugugccccuucggcgagguguucaaugccaccagauucgccucuguguacgccuggaaccggaagcggaucagcaauugcguggccgacuacuccgugcuguacaacuccgccagcuucagcaccuucaagugcuacggcguguccccuaccaagcugaacgaccugugcuucacaaacguguacgccgacagcuucgugauccggggagaugaagugcggcagauugccccuggacagacaggcaagaucgccgacuacaacuacaagcugcccgacgacuucaccggcugugugauugccuggaacagcaacaaccuggacuccaaagucggcggcaacuacaauuaccuguaccggcuguuccggaaguccaaucugaagcccuucgagcgggacaucagcaccgaaaucuaucaggccggcagcaccccuugcaacggcguggaaggcuucaacugcuacuucccacugcaguccuacggcuuucagcccacaaauggcgugggcuaucagcccuacagagugguggugcugagcuucgaacugcugcaugcuccugccacagugugcggcccuaagaaaagcaccaaucucgugaagaacaaaugcgugaacuucaacuucaacggccugaccggcaccggcgugcugacagagagcaacaagaaguuccugccauuccagcaguuuggccgggauaucgccgauaccacagacgccguuagagauccccagacacuggaaauccuggacaucaccccaugcagcuucggcggagugucugugaucaccccuggcaccaacaccagcaaucagguggcagugcuguaccaggacgugaacuguaccgaagugcccguggccauucacgccgaucagcugacaccuacauggcggguguacuccaccggcagcaauguguuucagaccagagccggcugucugaucggagccgagcacgugaacaauagcuacgagugcgacauccccaucggcgcuggcaucugugccagcuaccagacacagacaaacagccccagacgggcuagaagcguggccagccagagcaucauugccuacacaaugucucugggcgccgagaacagcguggccuacuccaacaacucuaucgcuaucugcaccaacuucaccaucagcgugaccaccgagauccugccuguguccaugaccaagaccagcguggacugcaccauguacaucugcggcgauuccaccgagugcuccaaccugcugcugcaguacggcagcuucugcacccagcugaauagagcccugacagggaucgccguggaacaggacaagaacacccaagagguguucgcccaagugaagcaaaucuacaagaccccuccuaucaaggacuucggcggcuucaauuucagccagauucugcccgauccuagcaagcccagcaagcggagcuucaucgaggaccugcuguucaacaaagugacacuggccgacgccggcuucaucaagcaguauggcgauugucugggcgacauugccgccagggaucugauuugcgcccagaaguuuaacggacugacagugcugccuccucugcugaccgaugagaugaucgcccaguacacaucugcccugcuggccggcacaaucacaagcggcuggacauuuggagcuggcgccgcucugcagauccccuuugcuaugcagauggccuaccgguucaacggcaucggagugacccagaaugugcuguacgagaaccagaagcugaucgccaaccaguucaacagcgccaucggcaagauccaggacagccugagcagcacagcaagcgcccugggaaagcugcaggacguggucaaccagaaugcccaggcacugaacacccuggucaagcagcuguccuccaacuucggcgccaucagcucugugcugaacgauauccugagcagacuggacaaggucgaggccgaggugcagaucgacagacugaucacaggcagacugcagagccuccagacauacgugacccagcagcugaucagagccgccgagauuagagccucugccaaucuggccgccaccaagaugucugagugugugcugggccagagcaagagaguggacuuuugcggcaagggcuaccaccugaugagcuucccucagucugccccucacggcgugguguuucugcacgugacauaugugugugcucaagagaagaauuucaccaccgcuccagccaucugccacgacggcaaagcccacuuuccuagagaaggcguguucguguccaacggcacccauugguucgugacacagcggaacuucuacgagccccagaucaucaccaccgacaacaccuucgugucuggcaacugcgacguugugaucggcauugugaacaauaccguguacgacccucugcagcccgagcuggacagcggaggcggaggaucugacaucaucaagcugcugaacgagcaagugaacaaagagaugcagagcagcaaccuguacaugagcaugagcagcuggugcuacacccacagccuugauggcgccggacuguuccuguuugaucacgccgccgaggaauacgagcacgccaagaagcugaucaucuuccugaacgagaacaacgugcccgugcagcugaccagcauuucugccccugagcacaaguucgagggccugacacagaucuuccagaaggccuacgaacacgagcagcacaucagcgagagcaucaacaacaucguggaccacgccauuaagagcaaggaucacgccaccuucaacuuucugcagugguacguggccgaacagcacgaggaagaggugcuguucaaggacauccuggacaagaucgagcugaucggcaacgagaaccacggccuguaucuggccgaccaguacgugaagggaaucgccaagagcagaaagagcugaggacuagucccuguucccagagcccacuuuuuuuucuuuuuuugaaauaaaauagccugucuuucagaucucaaaggcucuuuucagagccaccaaaaaaaaaaaaaaaaaaaaaaaaaaaaaaaaaaaaaaaaaaaaaaaaaaaaaaaaaaaaaaaaaaaaaaaaaaaaaaaaaaaaaaaaaaaaaaaaaaaaa

SEQ ID NO: 12639 - RNA, 4220 nt, Artificial Sequence
  SARS-CoV-2/Wuhan/WIV05/2019__EPI_ISL_402128 spike protein mRNA gc mod (1-1147)(G889C_L1034C) Ferritin construct
aggagagucccgcagucggcguccagcggcucugcuuguucgugugugugucguugcaggccuuauucaagcuuaccauguucguguuucuggugcugcugccccugguguccagccagugugugaaccugaccaccagaacacagcugccuccagccuacaccaacagcuucaccagaggcguguacuaccccgacaagguguucagauccagcgugcugcacucuacccaggaccuguuccugccuuucuucagcaacgugaccugguuccacgccauccacguguccggcaccaauggcaccaagagauucgacaaccccgugcugcccuucaacgacgggguguacuuugccagcaccgagaaguccaacaucaucagaggcuggaucuucggcaccacacuggacagcaagacccagagccugcugaucgugaacaacgccaccaacguggucaucaaagugugcgaguuccaguucugcaacgaccccuuccugggcgucuacuaccacaagaacaacaagagcuggauggaaagcgaguuccggguguacagcagcgccaacaacugcaccuucgaguacgugucccagccuuuccugauggaccuggaaggcaagcagggcaacuucaagaaccugcgcgaguucguguucaagaacaucgacggcuacuucaaaaucuacagcaagcacaccccuaucaaccucgugcgggaucugccucagggcuucucugcucuggaaccccugguggaucugcccaucggcaucaacaucacccgguuucagacacugcuggcccugcacagaagcuaccugacaccuggcgauagcagcagcggauggacagcuggugccgccgcuuacuaugugggcuaccugcagccuagaaccuuccugcugaaguacaacgagaacggcaccaucaccgacgccguggauugugcucuggauccucugagcgagacaaagugcacccugaaguccuucaccguggaaaagggcaucuaccagaccagcaacuuccgggugcagcccaccgaauccaucgugcgguuccccaauaucaccaaucugugccccuucggcgagguguucaaugccaccagauucgccucuguguacgccuggaaccggaagcggaucagcaauugcguggccgacuacuccgugcuguacaacuccgccagcuucagcaccuucaagugcuacggcguguccccuaccaagcugaacgaccugugcuucacaaacguguacgccgacagcuucgugauccggggagaugaagugcggcagauugccccuggacagacaggcaagaucgccgacuacaacuacaagcugcccgacgacuucaccggcugugugauugccuggaacagcaacaaccuggacuccaaagucggcggcaacuacaauuaccuguaccggcuguuccggaaguccaaucugaagcccuucgagcgggacaucagcaccgaaaucuaucaggccggcagcaccccuugcaacggcguggaaggcuucaacugcuacuucccacugcaguccuacggcuuucagcccacaaauggcgugggcuaucagcccuacagagugguggugcugagcuucgaacugcugcaugcuccugccacagugugcggcccuaagaaaagcaccaaucucgugaagaacaaaugcgugaacuucaacuucaacggccugaccggcaccggcgugcugacagagagcaacaagaaguuccugccauuccagcaguuuggccgggauaucgccgauaccacagacgccguuagagauccccagacacuggaaauccuggacaucaccccaugcagcuucggcggagugucugugaucaccccuggcaccaacaccagcaaucagguggcagugcuguaccaggacgugaacuguaccgaagugcccguggccauucacgccgaucagcugacaccuacauggcggguguacuccaccggcagcaauguguuucagaccagagccggcugucugaucggagccgagcacgugaacaauagcuacgagugcgacauccccaucggcgcuggcaucugugccagcuaccagacacagacaaacagccccagacgggcuagaagcguggccagccagagcaucauugccuacacaaugucucugggcgccgagaacagcguggccuacuccaacaacucuaucgcuauccccaccaacuucaccaucagcgugaccaccgagauccugccuguguccaugaccaagaccagcguggacugcaccauguacaucugcggcgauuccaccgagugcuccaaccugcugcugcaguacggcagcuucugcacccagcugaauagagcccugacagggaucgccguggaacaggacaagaacacccaagagguguucgcccaagugaagcaaaucuacaagaccccuccuaucaaggacuucggcggcuucaauuucagccagauucugcccgauccuagcaagcccagcaagcggagcuucaucgaggaccugcuguucaacaaagugacacuggccgacgccggcuucaucaagcaguauggcgauugucugggcgacauugccgccagggaucugauuugcgcccagaaguuuaacggacugacagugcugccuccucugcugaccgaugagaugaucgcccaguacacaucugcccugcuggccggcacaaucacaagcggcuggacauuuugcgcuggcgccgcucugcagauccccuuugcuaugcagauggccuaccgguucaacggcaucggagugacccagaaugugcuguacgagaaccagaagcugaucgccaaccaguucaacagcgccaucggcaagauccaggacagccugagcagcacagcaagcgcccugggaaagcugcaggacguggucaaccagaaugcccaggcacugaacacccuggucaagcagcuguccuccaacuucggcgccaucagcucugugcugaacgauauccugagcagacuggacaaggucgaggccgaggugcagaucgacagacugaucacaggcagacugcagagccuccagacauacgugacccagcagcugaucagagccgccgagauuagagccucugccaaucuggccgccaccaagaugucugaguguguguguggccagagcaagagaguggacuuuugcggcaagggcuaccaccugaugagcuucccucagucugccccucacggcgugguguuucugcacgugacauaugugcccgcucaagagaagaauuucaccaccgcuccagccaucugccacgacggcaaagcccacuuuccuagagaaggcguguucguguccaacggcacccauugguucgugacacagcggaacuucuacgagccccagaucaucaccaccgacaacaccuucgugucuggcaacugcgacguugugaucggcauugugaacaauaccguguacgacccucugcagcccgagcuggacagcggaggcggaggaucugacaucaucaagcugcugaacgagcaagugaacaaagagaugcagagcagcaaccuguacaugagcaugagcagcuggugcuacacccacagccuugauggcgccggacuguuccuguuugaucacgccgccgaggaauacgagcacgccaagaagcugaucaucuuccugaacgagaacaacgugcccgugcagcugaccagcauuucugccccugagcacaaguucgagggccugacacagaucuuccagaaggccuacgaacacgagcagcacaucagcgagagcaucaacaacaucguggaccacgccauuaagagcaaggaucacgccaccuucaacuuucugcagugguacguggccgaacagcacgaggaagaggugcuguucaaggacauccuggacaagaucgagcugaucggcaacgagaaccacggccuguaucuggccgaccaguacgugaagggaaucgccaagagcagaaagagcugaggacuagucccuguucccagagcccacuuuuuuuucuuuuuuugaaauaaaauagccugucuuucagaucucaaaggcucuuuucagagccaccaaaaaaaaaaaaaaaaaaaaaaaaaaaaaaaaaaaaaaaaaaaaaaaaaaaaaaaaaaaaaaaaaaaaaaaaaaaaaaaaaaaaaaaaaaaaaaaaaaaaa

SEQ ID NO: 12640 - RNA, 4220 nt, Artificial Sequence
  SARS-CoV-2/Wuhan/WIV05/2019__EPI_ISL_402128 spike protein mRNA gc mod (1-1147)(I909C_Y1047C) Ferritin construct
aggagagucccgcagucggcguccagcggcucugcuuguucgugugugugucguugcaggccuuauucaagcuuaccauguucguguuucuggugcugcugccccugguguccagccagugugugaaccugaccaccagaacacagcugccuccagccuacaccaacagcuucaccagaggcguguacuaccccgacaagguguucagauccagcgugcugcacucuacccaggaccuguuccugccuuucuucagcaacgugaccugguuccacgccauccacguguccggcaccaauggcaccaagagauucgacaaccccgugcugcccuucaacgacgggguguacuuugccagcaccgagaaguccaacaucaucagaggcuggaucuucggcaccacacuggacagcaagacccagagccugcugaucgugaacaacgccaccaacguggucaucaaagugugcgaguuccaguucugcaacgaccccuuccugggcgucuacuaccacaagaacaacaagagcuggauggaaagcgaguuccggguguacagcagcgccaacaacugcaccuucgaguacgugucccagccuuuccugauggaccuggaaggcaagcagggcaacuucaagaaccugcgcgaguucguguucaagaacaucgacggcuacuucaaaaucuacagcaagcacaccccuaucaaccucgugcgggaucugccucagggcuucucugcucuggaaccccugguggaucugcccaucggcaucaacaucacccgguuucagacacugcuggcccugcacagaagcuaccugacaccuggcgauagcagcagcggauggacagcuggugccgccgcuuacuaugugggcuaccugcagccuagaaccuuccugcugaaguacaacgagaacggcaccaucaccgacgccguggauugugcucuggauccucugagcgagacaaagugcacccugaaguccuucaccguggaaaagggcaucuaccagaccagcaacuuccgggugcagcccaccgaauccaucgugcgguuccccaauaucaccaaucugugccccuucggcgagguguucaaugccaccagauucgccucuguguacgccuggaaccggaagcggaucagcaauugcguggccgacuacuccgugcuguacaacuccgccagcuucagcaccuucaagugcuacggcguguccccuaccaagcugaacgaccugugcuucacaaacguguacgccgacagcuucgugauccggggagaugaagugcggcagauugccccuggacagacaggcaagaucgccgacuacaacuacaagcugcccgacgacuucaccggcugugugauugccuggaacagcaacaaccuggacuccaaagucggcggcaacuacaauuaccuguaccggcuguuccggaaguccaaucugaagcccuucgagcgggacaucagcaccgaaaucuaucaggccggcagcaccccuugcaacggcguggaaggcuucaacugcuacuucccacugcaguccuacggcuuucagcccacaaauggcgugggcuaucagcccuacagagugguggugcugagcuucgaacugcugcaugcuccugccacagugugcggcccuaagaaaagcaccaaucucgugaagaacaaaugcgugaacuucaacuucaacggccugaccggcaccggcgugcugacagagagcaacaagaaguuccugccauuccagcaguuuggccgggauaucgccgauaccacagacgccguuagagauccccagacacuggaaauccuggacaucaccccaugcagcuucggcggagugucugugaucaccccuggcaccaacaccagcaaucagguggcagugcuguaccaggacgugaacuguaccgaagugcccguggccauucacgccgaucagcugacaccuacauggcggguguacuccaccggcagcaauguguuucagaccagagccggcugucugaucggagccgagcacgugaacaauagcuacgagugcgacauccccaucggcgcuggcaucugugccagcuaccagacacagacaaacagccccagacgggcuagaagcguggccagccagagcaucauugccuacacaaugucucugggcgccgagaacagcguggccuacuccaacaacucuaucgcuauccccaccaacuucaccaucagcgugaccaccgagauccugccuguguccaugaccaagaccagcguggacugcaccauguacaucugcggcgauuccaccgagugcuccaaccugcugcugcaguacggcagcuucugcacccagcugaauagagcccugacagggaucgccguggaacaggacaagaacacccaagagguguucgcccaagugaagcaaaucuacaagaccccuccuaucaaggacuucggcggcuucaauuucagccagauucugcccgauccuagcaagcccagcaagcggagcuucaucgaggaccugcuguucaacaaagugacacuggccgacgccggcuucaucaagcaguauggcgauugucugggcgacauugccgccagggaucugauuugcgcccagaaguuuaacggacugacagugcugccuccucugcugaccgaugagaugaucgcccaguacacaucugcccugcuggccggcacaaucacaagcggcuggacauuuggagcuggcgccgcucugcagauccccuuugcuaugcagauggccuaccgguucaacggcugcggagugacccagaaugugcuguacgagaaccagaagcugaucgccaaccaguucaacagcgccaucggcaagauccaggacagccugagcagcacagcaagcgcccugggaaagcugcaggacguggucaaccagaaugcccaggcacugaacacccuggucaagcagcuguccuccaacuucggcgccaucagcucugugcugaacgauauccugagcagacuggacaaggucgaggccgaggugcagaucgacagacugaucacaggcagacugcagagccuccagacauacgugacccagcagcugaucagagccgccgagauuagagccucugccaaucuggccgccaccaagaugucugagugugugcugggccagagcaagagaguggacuuuugcggcaagggcugucaccugaugagcuucccucagucugccccucacggcgugguguuucugcacgugacauaugugcccgcucaagagaagaauuucaccaccgcuccagccaucugccacgacggcaaagcccacuuuccuagagaaggcguguucguguccaacggcacccauugguucgugacacagcggaacuucuacgagccccagaucaucaccaccgacaacaccuucgugucuggcaacugcgacguugugaucggcauugugaacaauaccguguacgacccucugcagcccgagcuggacagcggaggcggaggaucugacaucaucaagcugcugaacgagcaagugaacaaagagaugcagagcagcaaccuguacaugagcaugagcagcuggugcuacacccacagccuugauggcgccggacuguuccuguuugaucacgccgccgaggaauacgagcacgccaagaagcugaucaucuuccugaacgagaacaacgugcccgugcagcugaccagcauuucugccccugagcacaaguucgagggccugacacagaucuuccagaaggccuacgaacacgagcagcacaucagcgagagcaucaacaacaucguggaccacgccauuaagagcaaggaucacgccaccuucaacuuucugcagugguacguggccgaacagcacgaggaagaggugcuguucaaggacauccuggacaagaucgagcugaucggcaacgagaaccacggccuguaucuggccgaccaguacgugaagggaaucgccaagagcagaaagagcugaggacuagucccuguucccagagcccacuuuuuuuucuuuuuuugaaauaaaauagccugucuuucagaucucaaaggcucuuuucagagccaccaaaaaaaaaaaaaaaaaaaaaaaaaaaaaaaaaaaaaaaaaaaaaaaaaaaaaaaaaaaaaaaaaaaaaaaaaaaaaaaaaaaaaaaaaaaaaaaaaaaaa

SEQ ID NO: 12641 - RNA, 4220 nt, Artificial Sequence
  SARS-CoV-2/Wuhan/WIV05/2019__EPI_ISL_402128 spike protein mRNA gc mod (1-1147)(Q965C_S1003C) Ferritin construct
aggagagucccgcagucggcguccagcggcucugcuuguucgugugugugucguugcaggccuuauucaagcuuaccauguucguguuucuggugcugcugccccugguguccagccagugugugaaccugaccaccagaacacagcugccuccagccuacaccaacagcuucaccagaggcguguacuaccccgacaagguguucagauccagcgugcugcacucuacccaggaccuguuccugccuuucuucagcaacgugaccugguuccacgccauccacguguccggcaccaauggcaccaagagauucgacaaccccgugcugcccuucaacgacgggguguacuuugccagcaccgagaaguccaacaucaucagaggcuggaucuucggcaccacacuggacagcaagacccagagccugcugaucgugaacaacgccaccaacguggucaucaaagugugcgaguuccaguucugcaacgaccccuuccugggcgucuacuaccacaagaacaacaagagcuggauggaaagcgaguuccggguguacagcagcgccaacaacugcaccuucgaguacgugucccagccuuuccugauggaccuggaaggcaagcagggcaacuucaagaaccugcgcgaguucguguucaagaacaucgacggcuacuucaaaaucuacagcaagcacaccccuaucaaccucgugcgggaucugccucagggcuucucugcucuggaaccccugguggaucugcccaucggcaucaacaucacccgguuucagacacugcuggcccugcacagaagcuaccugacaccuggcgauagcagcagcggauggacagcuggugccgccgcuuacuaugugggcuaccugcagccuagaaccuuccugcugaaguacaacgagaacggcaccaucaccgacgccguggauugugcucuggauccucugagcgagacaaagugcacccugaaguccuucaccguggaaaagggcaucuaccagaccagcaacuuccgggugcagcccaccgaauccaucgugcgguuccccaauaucaccaaucugugccccuucggcgagguguucaaugccaccagauucgccucuguguacgccuggaaccggaagcggaucagcaauugcguggccgacuacuccgugcuguacaacuccgccagcuucagcaccuucaagugcuacggcguguccccuaccaagcugaacgaccugugcuucacaaacguguacgccgacagcuucgugauccggggagaugaagugcggcagauugccccuggacagacaggcaagaucgccgacuacaacuacaagcugcccgacgacuucaccggcugugugauugccuggaacagcaacaaccuggacuccaaagucggcggcaacuacaauuaccuguaccggcuguuccggaaguccaaucugaagcccuucgagcgggacaucagcaccgaaaucuaucaggccggcagcaccccuugcaacggcguggaaggcuucaacugcuacuucccacugcaguccuacggcuuucagcccacaaauggcgugggcuaucagcccuacagagugguggugcugagcuucgaacugcugcaugcuccugccacagugugcggcccuaagaaaagcaccaaucucgugaagaacaaaugcgugaacuucaacuucaacggccugaccggcaccggcgugcugacagagagcaacaagaaguuccugccauuccagcaguuuggccgggauaucgccgauaccacagacgccguuagagauccccagacacuggaaauccuggacaucaccccaugcagcuucggcggagugucugugaucaccccuggcaccaacaccagcaaucagguggcagugcuguaccaggacgugaacuguaccgaagugcccguggccauucacgccgaucagcugacaccuacauggcggguguacuccaccggcagcaauguguuucagaccagagccggcugucugaucggagccgagcacgugaacaauagcuacgagugcgacauccccaucggcgcuggcaucugugccagcuaccagacacagacaaacagccccagacgggcuagaagcguggccagccagagcaucauugccuacacaaugucucugggcgccgagaacagcguggccuacuccaacaacucuaucgcuauccccaccaacuucaccaucagcgugaccaccgagauccugccuguguccaugaccaagaccagcguggacugcaccauguacaucugcggcgauuccaccgagugcuccaaccugcugcugcaguacggcagcuucugcacccagcugaauagagcccugacagggaucgccguggaacaggacaagaacacccaagagguguucgcccaagugaagcaaaucuacaagaccccuccuaucaaggacuucggcggcuucaauuucagccagauucugcccgauccuagcaagcccagcaagcggagcuucaucgaggaccugcuguucaacaaagugacacuggccgacgccggcuucaucaagcaguauggcgauugucugggcgacauugccgccagggaucugauuugcgcccagaaguuuaacggacugacagugcugccuccucugcugaccgaugagaugaucgcccaguacacaucugcccugcuggccggcacaaucacaagcggcuggacauuuggagcuggcgccgcucugcagauccccuuugcuaugcagauggccuaccgguucaacggcaucggagugacccagaaugugcuguacgagaaccagaagcugaucgccaaccaguucaacagcgccaucggcaagauccaggacagccugagcagcacagcaagcgcccugggaaagcugcaggacguggucaaccagaaugcccaggcacugaacacccuggucaagugccuguccuccaacuucggcgccaucagcucugugcugaacgauauccugagcagacuggacaaggucgaggccgaggugcagaucgacagacugaucacaggcagacugcagugucuccagacauacgugacccagcagcugaucagagccgccgagauuagagccucugccaaucuggccgccaccaagaugucugagugugugcugggccagagcaagagaguggacuuuugcggcaagggcuaccaccugaugagcuucccucagucugccccucacggcgugguguuucugcacgugacauaugugcccgcucaagagaagaauuucaccaccgcuccagccaucugccacgacggcaaagcccacuuuccuagagaaggcguguucguguccaacggcacccauugguucgugacacagcggaacuucuacgagccccagaucaucaccaccgacaacaccuucgugucuggcaacugcgacguugugaucggcauugugaacaauaccguguacgacccucugcagcccgagcuggacagcggaggcggaggaucugacaucaucaagcugcugaacgagcaagugaacaaagagaugcagagcagcaaccuguacaugagcaugagcagcuggugcuacacccacagccuugauggcgccggacuguuccuguuugaucacgccgccgaggaauacgagcacgccaagaagcugaucaucuuccugaacgagaacaacgugcccgugcagcugaccagcauuucugccccugagcacaaguucgagggccugacacagaucuuccagaaggccuacgaacacgagcagcacaucagcgagagcaucaacaacaucguggaccacgccauuaagagcaaggaucacgccaccuucaacuuucugcagugguacguggccgaacagcacgaggaagaggugcuguucaaggacauccuggacaagaucgagcugaucggcaacgagaaccacggccuguaucuggccgaccaguacgugaagggaaucgccaagagcagaaagagcugaggacuagucccuguucccagagcccacuuuuuuuucuuuuuuugaaauaaaauagccugucuuucagaucucaaaggcucuuuucagagccaccaaaaaaaaaaaaaaaaaaaaaaaaaaaaaaaaaaaaaaaaaaaaaaaaaaaaaaaaaaaaaaaaaaaaaaaaaaaaaaaaaaaaaaaaaaaaaaaaaaaaa

SEQ ID NO: 12642 - RNA, 4220 nt, Artificial Sequence
  SARS-CoV-2/Wuhan/WIV05/2019__EPI_ISL_402128 spike protein mRNA gc mod (1-1147)(F970C_G999C) Ferritin construct
aggagagucccgcagucggcguccagcggcucugcuuguucgugugugugucguugcaggccuuauucaagcuuaccauguucguguuucuggugcugcugccccugguguccagccagugugugaaccugaccaccagaacacagcugccuccagccuacaccaacagcuucaccagaggcguguacuaccccgacaagguguucagauccagcgugcugcacucuacccaggaccuguuccugccuuucuucagcaacgugaccugguuccacgccauccacguguccggcaccaauggcaccaagagauucgacaaccccgugcugcccuucaacgacgggguguacuuugccagcaccgagaaguccaacaucaucagaggcuggaucuucggcaccacacuggacagcaagacccagagccugcugaucgugaacaacgccaccaacguggucaucaaagugugcgaguuccaguucugcaacgaccccuuccugggcgucuacuaccacaagaacaacaagagcuggauggaaagcgaguuccggguguacagcagcgccaacaacugcaccuucgaguacgugucccagccuuuccugauggaccuggaaggcaagcagggcaacuucaagaaccugcgcgaguucguguucaagaacaucgacggcuacuucaaaaucuacagcaagcacaccccuaucaaccucgugcgggaucugccucagggcuucucugcucuggaaccccugguggaucugcccaucggcaucaacaucacccgguuucagacacugcuggcccugcacagaagcuaccugacaccuggcgauagcagcagcggauggacagcuggugccgccgcuuacuaugugggcuaccugcagccuagaaccuuccugcugaaguacaacgagaacggcaccaucaccgacgccguggauugugcucuggauccucugagcgagacaaagugcacccugaaguccuucaccguggaaaagggcaucuaccagaccagcaacuuccgggugcagcccaccgaauccaucgugcgguuccccaauaucaccaaucugugccccuucggcgagguguucaaugccaccagauucgccucuguguacgccuggaaccggaagcggaucagcaauugcguggccgacuacuccgugcuguacaacuccgccagcuucagcaccuucaagugcuacggcguguccccuaccaagcugaacgaccugugcuucacaaacguguacgccgacagcuucgugauccggggagaugaagugcggcagauugccccuggacagacaggcaagaucgccgacuacaacuacaagcugcccgacgacuucaccggcugugugauugccuggaacagcaacaaccuggacuccaaagucggcggcaacuacaauuaccuguaccggcuguuccggaaguccaaucugaagcccuucgagcgggacaucagcaccgaaaucuaucaggccggcagcaccccuugcaacggcguggaaggcuucaacugcuacuucccacugcaguccuacggcuuucagcccacaaauggcgugggcuaucagcccuacagagugguggugcugagcuucgaacugcugcaugcuccugccacagugugcggcccuaagaaaagcaccaaucucgugaagaacaaaugcgugaacuucaacuucaacggccugaccggcaccggcgugcugacagagagcaacaagaaguuccugccauuccagcaguuuggccgggauaucgccgauaccacagacgccguuagagauccccagacacuggaaauccuggacaucaccccaugcagcuucggcggagugucugugaucaccccuggcaccaacaccagcaaucagguggcagugcuguaccaggacgugaacuguaccgaagugcccguggccauucacgccgaucagcugacaccuacauggcggguguacuccaccggcagcaauguguuucagaccagagccggcugucugaucggagccgagcacgugaacaauagcuacgagugcgacauccccaucggcgcuggcaucugugccagcuaccagacacagacaaacagccccagacgggcuagaagcguggccagccagagcaucauugccuacacaaugucucugggcgccgagaacagcguggccuacuccaacaacucuaucgcuauccccaccaacuucaccaucagcgugaccaccgagauccugccuguguccaugaccaagaccagcguggacugcaccauguacaucugcggcgauuccaccgagugcuccaaccugcugcugcaguacggcagcuucugcacccagcugaauagagcccugacagggaucgccguggaacaggacaagaacacccaagagguguucgcccaagugaagcaaaucuacaagaccccuccuaucaaggacuucggcggcuucaauuucagccagauucugcccgauccuagcaagcccagcaagcggagcuucaucgaggaccugcuguucaacaaagugacacuggccgacgccggcuucaucaagcaguauggcgauugucugggcgacauugccgccagggaucugauuugcgcccagaaguuuaacggacugacagugcugccuccucugcugaccgaugagaugaucgcccaguacacaucugcccugcuggccggcacaaucacaagcggcuggacauuuggagcuggcgccgcucugcagauccccuuugcuaugcagauggccuaccgguucaacggcaucggagugacccagaaugugcuguacgagaaccagaagcugaucgccaaccaguucaacagcgccaucggcaagauccaggacagccugagcagcacagcaagcgcccugggaaagcugcaggacguggucaaccagaaugcccaggcacugaacacccuggucaagcagcuguccuccaacugcggcgccaucagcucugugcugaacgauauccugagcagacuggacaaggucgaggccgaggugcagaucgacagacugaucacauguagacugcagagccuccagacauacgugacccagcagcugaucagagccgccgagauuagagccucugccaaucuggccgccaccaagaugucugagugugugcugggccagagcaagagaguggacuuuugcggcaagggcuaccaccugaugagcuucccucagucugccccucacggcgugguguuucugcacgugacauaugugcccgcucaagagaagaauuucaccaccgcuccagccaucugccacgacggcaaagcccacuuuccuagagaaggcguguucguguccaacggcacccauugguucgugacacagcggaacuucuacgagccccagaucaucaccaccgacaacaccuucgugucuggcaacugcgacguugugaucggcauugugaacaauaccguguacgacccucugcagcccgagcuggacagcggaggcggaggaucugacaucaucaagcugcugaacgagcaagugaacaaagagaugcagagcagcaaccuguacaugagcaugagcagcuggugcuacacccacagccuugauggcgccggacuguuccuguuugaucacgccgccgaggaauacgagcacgccaagaagcugaucaucuuccugaacgagaacaacgugcccgugcagcugaccagcauuucugccccugagcacaaguucgagggccugacacagaucuuccagaaggccuacgaacacgagcagcacaucagcgagagcaucaacaacaucguggaccacgccauuaagagcaaggaucacgccaccuucaacuuucugcagugguacguggccgaacagcacgaggaagaggugcuguucaaggacauccuggacaagaucgagcugaucggcaacgagaaccacggccuguaucuggccgaccaguacgugaagggaaucgccaagagcagaaagagcugaggacuagucccuguucccagagcccacuuuuuuuucuuuuuuugaaauaaaauagccugucuuucagaucucaaaggcucuuuucagagccaccaaaaaaaaaaaaaaaaaaaaaaaaaaaaaaaaaaaaaaaaaaaaaaaaaaaaaaaaaaaaaaaaaaaaaaaaaaaaaaaaaaaaaaaaaaaaaaaaaaaaa

SEQ ID NO: 12643 - RNA, 4220 nt, Artificial Sequence
  SARS-CoV-2/Wuhan/WIV05/2019__EPI_ISL_402128 spike protein mRNA gc mod (1-1147)(A972C_R995C) Ferritin construct
aggagagucccgcagucggcguccagcggcucugcuuguucgugugugugucguugcaggccuuauucaagcuuaccauguucguguuucuggugcugcugccccugguguccagccagugugugaaccugaccaccagaacacagcugccuccagccuacaccaacagcuucaccagaggcguguacuaccccgacaagguguucagauccagcgugcugcacucuacccaggaccuguuccugccuuucuucagcaacgugaccugguuccacgccauccacguguccggcaccaauggcaccaagagauucgacaaccccgugcugcccuucaacgacgggguguacuuugccagcaccgagaaguccaacaucaucagaggcuggaucuucggcaccacacuggacagcaagacccagagccugcugaucgugaacaacgccaccaacguggucaucaaagugugcgaguuccaguucugcaacgaccccuuccugggcgucuacuaccacaagaacaacaagagcuggauggaaagcgaguuccggguguacagcagcgccaacaacugcaccuucgaguacgugucccagccuuuccugauggaccuggaaggcaagcagggcaacuucaagaaccugcgcgaguucguguucaagaacaucgacggcuacuucaaaaucuacagcaagcacaccccuaucaaccucgugcgggaucugccucagggcuucucugcucuggaaccccugguggaucugcccaucggcaucaacaucacccgguuucagacacugcuggcccugcacagaagcuaccugacaccuggcgauagcagcagcggauggacagcuggugccgccgcuuacuaugugggcuaccugcagccuagaaccuuccugcugaaguacaacgagaacggcaccaucaccgacgccguggauugugcucuggauccucugagcgagacaaagugcacccugaaguccuucaccguggaaaagggcaucuaccagaccagcaacuuccgggugcagcccaccgaauccaucgugcgguuccccaauaucaccaaucugugccccuucggcgagguguucaaugccaccagauucgccucuguguacgccuggaaccggaagcggaucagcaauugcguggccgacuacuccgugcuguacaacuccgccagcuucagcaccuucaagugcuacggcguguccccuaccaagcugaacgaccugugcuucacaaacguguacgccgacagcuucgugauccggggagaugaagugcggcagauugccccuggacagacaggcaagaucgccgacuacaacuacaagcugcccgacgacuucaccggcugugugauugccuggaacagcaacaaccuggacuccaaagucggcggcaacuacaauuaccuguaccggcuguuccggaaguccaaucugaagcccuucgagcgggacaucagcaccgaaaucuaucaggccggcagcaccccuugcaacggcguggaaggcuucaacugcuacuucccacugcaguccuacggcuuucagcccacaaauggcgugggcuaucagcccuacagagugguggugcugagcuucgaacugcugcaugcuccugccacagugugcggcccuaagaaaagcaccaaucucgugaagaacaaaugcgugaacuucaacuucaacggccugaccggcaccggcgugcugacagagagcaacaagaaguuccugccauuccagcaguuuggccgggauaucgccgauaccacagacgccguuagagauccccagacacuggaaauccuggacaucaccccaugcagcuucggcggagugucugugaucaccccuggcaccaacaccagcaaucagguggcagugcuguaccaggacgugaacuguaccgaagugcccguggccauucacgccgaucagcugacaccuacauggcggguguacuccaccggcagcaauguguuucagaccagagccggcugucugaucggagccgagcacgugaacaauagcuacgagugcgacauccccaucggcgcuggcaucugugccagcuaccagacacagacaaacagccccagacgggcuagaagcguggccagccagagcaucauugccuacacaaugucucugggcgccgagaacagcguggccuacuccaacaacucuaucgcuauccccaccaacuucaccaucagcgugaccaccgagauccugccuguguccaugaccaagaccagcguggacugcaccauguacaucugcggcgauuccaccgagugcuccaaccugcugcugcaguacggcagcuucugcacccagcugaauagagcccugacagggaucgccguggaacaggacaagaacacccaagagguguucgcccaagugaagcaaaucuacaagaccccuccuaucaaggacuucggcggcuucaauuucagccagauucugcccgauccuagcaagcccagcaagcggagcuucaucgaggaccugcuguucaacaaagugacacuggccgacgccggcuucaucaagcaguauggcgauugucugggcgacauugccgccagggaucugauuugcgcccagaaguuuaacggacugacagugcugccuccucugcugaccgaugagaugaucgcccaguacacaucugcccugcuggccggcacaaucacaagcggcuggacauuuggagcuggcgccgcucugcagauccccuuugcuaugcagauggccuaccgguucaacggcaucggagugacccagaaugugcuguacgagaaccagaagcugaucgccaaccaguucaacagcgccaucggcaagauccaggacagccugagcagcacagcaagcgcccugggaaagcugcaggacguggucaaccagaaugcccaggcacugaacacccuggucaagcagcuguccuccaacuucggcugcaucagcucugugcugaacgauauccugagcagacuggacaaggucgaggccgaggugcagaucgacugucugaucacaggcagacugcagagccuccagacauacgugacccagcagcugaucagagccgccgagauuagagccucugccaaucuggccgccaccaagaugucugagugugugcugggccagagcaagagaguggacuuuugcggcaagggcuaccaccugaugagcuucccucagucugccccucacggcgugguguuucugcacgugacauaugugcccgcucaagagaagaauuucaccaccgcuccagccaucugccacgacggcaaagcccacuuuccuagagaaggcguguucguguccaacggcacccauugguucgugacacagcggaacuucuacgagccccagaucaucaccaccgacaacaccuucgugucuggcaacugcgacguugugaucggcauugugaacaauaccguguacgacccucugcagcccgagcuggacagcggaggcggaggaucugacaucaucaagcugcugaacgagcaagugaacaaagagaugcagagcagcaaccuguacaugagcaugagcagcuggugcuacacccacagccuugauggcgccggacuguuccuguuugaucacgccgccgaggaauacgagcacgccaagaagcugaucaucuuccugaacgagaacaacgugcccgugcagcugaccagcauuucugccccugagcacaaguucgagggccugacacagaucuuccagaaggccuacgaacacgagcagcacaucagcgagagcaucaacaacaucguggaccacgccauuaagagcaaggaucacgccaccuucaacuuucugcagugguacguggccgaacagcacgaggaagaggugcuguucaaggacauccuggacaagaucgagcugaucggcaacgagaaccacggccuguaucuggccgaccaguacgugaagggaaucgccaagagcagaaagagcugaggacuagucccuguucccagagcccacuuuuuuuucuuuuuuugaaauaaaauagccugucuuucagaucucaaaggcucuuuucagagccaccaaaaaaaaaaaaaaaaaaaaaaaaaaaaaaaaaaaaaaaaaaaaaaaaaaaaaaaaaaaaaaaaaaaaaaaaaaaaaaaaaaaaaaaaaaaaaaaaaaaaa

SEQ ID NO: 12644 - RNA, 4220 nt, Artificial Sequence
  SARS-CoV-2/Wuhan/WIV05/2019__EPI_ISL_402128 spike protein mRNA gc mod (1-1147)(A890C_V1040C) Ferritin construct
aggagagucccgcagucggcguccagcggcucugcuuguucgugugugugucguugcaggccuuauucaagcuuaccauguucguguuucuggugcugcugccccugguguccagccagugugugaaccugaccaccagaacacagcugccuccagccuacaccaacagcuucaccagaggcguguacuaccccgacaagguguucagauccagcgugcugcacucuacccaggaccuguuccugccuuucuucagcaacgugaccugguuccacgccauccacguguccggcaccaauggcaccaagagauucgacaaccccgugcugcccuucaacgacgggguguacuuugccagcaccgagaaguccaacaucaucagaggcuggaucuucggcaccacacuggacagcaagacccagagccugcugaucgugaacaacgccaccaacguggucaucaaagugugcgaguuccaguucugcaacgaccccuuccugggcgucuacuaccacaagaacaacaagagcuggauggaaagcgaguuccggguguacagcagcgccaacaacugcaccuucgaguacgugucccagccuuuccugauggaccuggaaggcaagcagggcaacuucaagaaccugcgcgaguucguguucaagaacaucgacggcuacuucaaaaucuacagcaagcacaccccuaucaaccucgugcgggaucugccucagggcuucucugcucuggaaccccugguggaucugcccaucggcaucaacaucacccgguuucagacacugcuggcccugcacagaagcuaccugacaccuggcgauagcagcagcggauggacagcuggugccgccgcuuacuaugugggcuaccugcagccuagaaccuuccugcugaaguacaacgagaacggcaccaucaccgacgccguggauugugcucuggauccucugagcgagacaaagugcacccugaaguccuucaccguggaaaagggcaucuaccagaccagcaacuuccgggugcagcccaccgaauccaucgugcgguuccccaauaucaccaaucugugccccuucggcgagguguucaaugccaccagauucgccucuguguacgccuggaaccggaagcggaucagcaauugcguggccgacuacuccgugcuguacaacuccgccagcuucagcaccuucaagugcuacggcguguccccuaccaagcugaacgaccugugcuucacaaacguguacgccgacagcuucgugauccggggagaugaagugcggcagauugccccuggacagacaggcaagaucgccgacuacaacuacaagcugcccgacgacuucaccggcugugugauugccuggaacagcaacaaccuggacuccaaagucggcggcaacuacaauuaccuguaccggcuguuccggaaguccaaucugaagcccuucgagcgggacaucagcaccgaaaucuaucaggccggcagcaccccuugcaacggcguggaaggcuucaacugcuacuucccacugcaguccuacggcuuucagcccacaaauggcgugggcuaucagcccuacagagugguggugcugagcuucgaacugcugcaugcuccugccacagugugcggcccuaagaaaagcaccaaucucgugaagaacaaaugcgugaacuucaacuucaacggccugaccggcaccggcgugcugacagagagcaacaagaaguuccugccauuccagcaguuuggccgggauaucgccgauaccacagacgccguuagagauccccagacacuggaaauccuggacaucaccccaugcagcuucggcggagugucugugaucaccccuggcaccaacaccagcaaucagguggcagugcuguaccaggacgugaacuguaccgaagugcccguggccauucacgccgaucagcugacaccuacauggcggguguacuccaccggcagcaauguguuucagaccagagccggcugucugaucggagccgagcacgugaacaauagcuacgagugcgacauccccaucggcgcuggcaucugugccagcuaccagacacagacaaacagccccagacgggcuagaagcguggccagccagagcaucauugccuacacaaugucucugggcgccgagaacagcguggccuacuccaacaacucuaucgcuauccccaccaacuucaccaucagcgugaccaccgagauccugccuguguccaugaccaagaccagcguggacugcaccauguacaucugcggcgauuccaccgagugcuccaaccugcugcugcaguacggcagcuucugcacccagcugaauagagcccugacagggaucgccguggaacaggacaagaacacccaagagguguucgcccaagugaagcaaaucuacaagaccccuccuaucaaggacuucggcggcuucaauuucagccagauucugcccgauccuagcaagcccagcaagcggagcuucaucgaggaccugcuguucaacaaagugacacuggccgacgccggcuucaucaagcaguauggcgauugucugggcgacauugccgccagggaucugauuugcgcccagaaguuuaacggacugacagugcugccuccucugcugaccgaugagaugaucgcccaguacacaucugcccugcuggccggcacaaucacaagcggcuggacauuuggaugcggcgccgcucugcagauccccuuugcuaugcagauggccuaccgguucaacggcaucggagugacccagaaugugcuguacgagaaccagaagcugaucgccaaccaguucaacagcgccaucggcaagauccaggacagccugagcagcacagcaagcgcccugggaaagcugcaggacguggucaaccagaaugcccaggcacugaacacccuggucaagcagcuguccuccaacuucggcgccaucagcucugugcugaacgauauccugagcagacuggacaaggucgaggccgaggugcagaucgacagacugaucacaggcagacugcagagccuccagacauacgugacccagcagcugaucagagccgccgagauuagagccucugccaaucuggccgccaccaagaugucugagugugugcugggccagagcaagagaugugacuuuugcggcaagggcuaccaccugaugagcuucccucagucugccccucacggcgugguguuucugcacgugacauaugugcccgcucaagagaagaauuucaccaccgcuccagccaucugccacgacggcaaagcccacuuuccuagagaaggcguguucguguccaacggcacccauugguucgugacacagcggaacuucuacgagccccagaucaucaccaccgacaacaccuucgugucuggcaacugcgacguugugaucggcauugugaacaauaccguguacgacccucugcagcccgagcuggacagcggaggcggaggaucugacaucaucaagcugcugaacgagcaagugaacaaagagaugcagagcagcaaccuguacaugagcaugagcagcuggugcuacacccacagccuugauggcgccggacuguuccuguuugaucacgccgccgaggaauacgagcacgccaagaagcugaucaucuuccugaacgagaacaacgugcccgugcagcugaccagcauuucugccccugagcacaaguucgagggccugacacagaucuuccagaaggccuacgaacacgagcagcacaucagcgagagcaucaacaacaucguggaccacgccauuaagagcaaggaucacgccaccuucaacuuucugcagugguacguggccgaacagcacgaggaagaggugcuguucaaggacauccuggacaagaucgagcugaucggcaacgagaaccacggccuguaucuggccgaccaguacgugaagggaaucgccaagagcagaaagagcugaggacuagucccuguucccagagcccacuuuuuuuucuuuuuuugaaauaaaauagccugucuuucagaucucaaaggcucuuuucagagccaccaaaaaaaaaaaaaaaaaaaaaaaaaaaaaaaaaaaaaaaaaaaaaaaaaaaaaaaaaaaaaaaaaaaaaaaaaaaaaaaaaaaaaaaaaaaaaaaaaaaaa

SEQ ID NO: 12645 - RNA, 4220 nt, Artificial Sequence
  SARS-CoV-2/Wuhan/WIV05/2019__EPI_ISL_402128 spike protein mRNA gc mod (1-1147)(T874C_S1055C) Ferritin construct
aggagagucccgcagucggcguccagcggcucugcuuguucgugugugugucguugcaggccuuauucaagcuuaccauguucguguuucuggugcugcugccccugguguccagccagugugugaaccugaccaccagaacacagcugccuccagccuacaccaacagcuucaccagaggcguguacuaccccgacaagguguucagauccagcgugcugcacucuacccaggaccuguuccugccuuucuucagcaacgugaccugguuccacgccauccacguguccggcaccaauggcaccaagagauucgacaaccccgugcugcccuucaacgacgggguguacuuugccagcaccgagaaguccaacaucaucagaggcuggaucuucggcaccacacuggacagcaagacccagagccugcugaucgugaacaacgccaccaacguggucaucaaagugugcgaguuccaguucugcaacgaccccuuccugggcgucuacuaccacaagaacaacaagagcuggauggaaagcgaguuccggguguacagcagcgccaacaacugcaccuucgaguacgugucccagccuuuccugauggaccuggaaggcaagcagggcaacuucaagaaccugcgcgaguucguguucaagaacaucgacggcuacuucaaaaucuacagcaagcacaccccuaucaaccucgugcgggaucugccucagggcuucucugcucuggaaccccugguggaucugcccaucggcaucaacaucacccgguuucagacacugcuggcccugcacagaagcuaccugacaccuggcgauagcagcagcggauggacagcuggugccgccgcuuacuaugugggcuaccugcagccuagaaccuuccugcugaaguacaacgagaacggcaccaucaccgacgccguggauugugcucuggauccucugagcgagacaaagugcacccugaaguccuucaccguggaaaagggcaucuaccagaccagcaacuuccgggugcagcccaccgaauccaucgugcgguuccccaauaucaccaaucugugccccuucggcgagguguucaaugccaccagauucgccucuguguacgccuggaaccggaagcggaucagcaauugcguggccgacuacuccgugcuguacaacuccgccagcuucagcaccuucaagugcuacggcguguccccuaccaagcugaacgaccugugcuucacaaacguguacgccgacagcuucgugauccggggagaugaagugcggcagauugccccuggacagacaggcaagaucgccgacuacaacuacaagcugcccgacgacuucaccggcugugugauugccuggaacagcaacaaccuggacuccaaagucggcggcaacuacaauuaccuguaccggcuguuccggaaguccaaucugaagcccuucgagcgggacaucagcaccgaaaucuaucaggccggcagcaccccuugcaacggcguggaaggcuucaacugcuacuucccacugcaguccuacggcuuucagcccacaaauggcgugggcuaucagcccuacagagugguggugcugagcuucgaacugcugcaugcuccugccacagugugcggcccuaagaaaagcaccaaucucgugaagaacaaaugcgugaacuucaacuucaacggccugaccggcaccggcgugcugacagagagcaacaagaaguuccugccauuccagcaguuuggccgggauaucgccgauaccacagacgccguuagagauccccagacacuggaaauccuggacaucaccccaugcagcuucggcggagugucugugaucaccccuggcaccaacaccagcaaucagguggcagugcuguaccaggacgugaacuguaccgaagugcccguggccauucacgccgaucagcugacaccuacauggcggguguacuccaccggcagcaauguguuucagaccagagccggcugucugaucggagccgagcacgugaacaauagcuacgagugcgacauccccaucggcgcuggcaucugugccagcuaccagacacagacaaacagccccagacgggcuagaagcguggccagccagagcaucauugccuacacaaugucucugggcgccgagaacagcguggccuacuccaacaacucuaucgcuauccccaccaacuucaccaucagcgugaccaccgagauccugccuguguccaugaccaagaccagcguggacugcaccauguacaucugcggcgauuccaccgagugcuccaaccugcugcugcaguacggcagcuucugcacccagcugaauagagcccugacagggaucgccguggaacaggacaagaacacccaagagguguucgcccaagugaagcaaaucuacaagaccccuccuaucaaggacuucggcggcuucaauuucagccagauucugcccgauccuagcaagcccagcaagcggagcuucaucgaggaccugcuguucaacaaagugacacuggccgacgccggcuucaucaagcaguauggcgauugucugggcgacauugccgccagggaucugauuugcgcccagaaguuuaacggacugacagugcugccuccucugcugaccgaugagaugaucgcccaguacugcucugcccugcuggccggcacaaucacaagcggcuggacauuuggagcuggcgccgcucugcagauccccuuugcuaugcagauggccuaccgguucaacggcaucggagugacccagaaugugcuguacgagaaccagaagcugaucgccaaccaguucaacagcgccaucggcaagauccaggacagccugagcagcacagcaagcgcccugggaaagcugcaggacguggucaaccagaaugcccaggcacugaacacccuggucaagcagcuguccuccaacuucggcgccaucagcucugugcugaacgauauccugagcagacuggacaaggucgaggccgaggugcagaucgacagacugaucacaggcagacugcagagccuccagacauacgugacccagcagcugaucagagccgccgagauuagagccucugccaaucuggccgccaccaagaugucugagugugugcugggccagagcaagagaguggacuuuugcggcaagggcuaccaccugaugagcuucccucagugcgccccucacggcgugguguuucugcacgugacauaugugcccgcucaagagaagaauuucaccaccgcuccagccaucugccacgacggcaaagcccacuuuccuagagaaggcguguucguguccaacggcacccauugguucgugacacagcggaacuucuacgagccccagaucaucaccaccgacaacaccuucgugucuggcaacugcgacguugugaucggcauugugaacaauaccguguacgacccucugcagcccgagcuggacagcggaggcggaggaucugacaucaucaagcugcugaacgagcaagugaacaaagagaugcagagcagcaaccuguacaugagcaugagcagcuggugcuacacccacagccuugauggcgccggacuguuccuguuugaucacgccgccgaggaauacgagcacgccaagaagcugaucaucuuccugaacgagaacaacgugcccgugcagcugaccagcauuucugccccugagcacaaguucgagggccugacacagaucuuccagaaggccuacgaacacgagcagcacaucagcgagagcaucaacaacaucguggaccacgccauuaagagcaaggaucacgccaccuucaacuuucugcagugguacguggccgaacagcacgaggaagaggugcuguucaaggacauccuggacaagaucgagcugaucggcaacgagaaccacggccuguaucuggccgaccaguacgugaagggaaucgccaagagcagaaagagcugaggacuagucccuguucccagagcccacuuuuuuuucuuuuuuugaaauaaaauagccugucuuucagaucucaaaggcucuuuucagagccaccaaaaaaaaaaaaaaaaaaaaaaaaaaaaaaaaaaaaaaaaaaaaaaaaaaaaaaaaaaaaaaaaaaaaaaaaaaaaaaaaaaaaaaaaaaaaaaaaaaaaa

SEQ ID NO: 12646 - RNA, 3806 nt, Artificial Sequence
  SARS-CoV-2/Wuhan/WIV05/2019__EPI_ISL_402128 spike protein mRNA gc mod (1-1147) Foldon construct
aggagagucccgcagucggcguccagcggcucugcuuguucgugugugugucguugcaggccuuauucaagcuuaccauguucguguuucuggugcugcugccccugguguccagccagugugugaaccugaccaccagaacacagcugccuccagccuacaccaacagcuucaccagaggcguguacuaccccgacaagguguucagauccagcgugcugcacucuacccaggaccuguuccugccuuucuucagcaacgugaccugguuccacgccauccacguguccggcaccaauggcaccaagagauucgacaaccccgugcugcccuucaacgacgggguguacuuugccagcaccgagaaguccaacaucaucagaggcuggaucuucggcaccacacuggacagcaagacccagagccugcugaucgugaacaacgccaccaacguggucaucaaagugugcgaguuccaguucugcaacgaccccuuccugggcgucuacuaccacaagaacaacaagagcuggauggaaagcgaguuccggguguacagcagcgccaacaacugcaccuucgaguacgugucccagccuuuccugauggaccuggaaggcaagcagggcaacuucaagaaccugcgcgaguucguguucaagaacaucgacggcuacuucaaaaucuacagcaagcacaccccuaucaaccucgugcgggaucugccucagggcuucucugcucuggaaccccugguggaucugcccaucggcaucaacaucacccgguuucagacacugcuggcccugcacagaagcuaccugacaccuggcgauagcagcagcggauggacagcuggugccgccgcuuacuaugugggcuaccugcagccuagaaccuuccugcugaaguacaacgagaacggcaccaucaccgacgccguggauugugcucuggauccucugagcgagacaaagugcacccugaaguccuucaccguggaaaagggcaucuaccagaccagcaacuuccgggugcagcccaccgaauccaucgugcgguuccccaauaucaccaaucugugccccuucggcgagguguucaaugccaccagauucgccucuguguacgccuggaaccggaagcggaucagcaauugcguggccgacuacuccgugcuguacaacuccgccagcuucagcaccuucaagugcuacggcguguccccuaccaagcugaacgaccugugcuucacaaacguguacgccgacagcuucgugauccggggagaugaagugcggcagauugccccuggacagacaggcaagaucgccgacuacaacuacaagcugcccgacgacuucaccggcugugugauugccuggaacagcaacaaccuggacuccaaagucggcggcaacuacaauuaccuguaccggcuguuccggaaguccaaucugaagcccuucgagcgggacaucagcaccgaaaucuaucaggccggcagcaccccuugcaacggcguggaaggcuucaacugcuacuucccacugcaguccuacggcuuucagcccacaaauggcgugggcuaucagcccuacagagugguggugcugagcuucgaacugcugcaugcuccugccacagugugcggcccuaagaaaagcaccaaucucgugaagaacaaaugcgugaacuucaacuucaacggccugaccggcaccggcgugcugacagagagcaacaagaaguuccugccauuccagcaguuuggccgggauaucgccgauaccacagacgccguuagagauccccagacacuggaaauccuggacaucaccccaugcagcuucggcggagugucugugaucaccccuggcaccaacaccagcaaucagguggcagugcuguaccaggacgugaacuguaccgaagugcccguggccauucacgccgaucagcugacaccuacauggcggguguacuccaccggcagcaauguguuucagaccagagccggcugucugaucggagccgagcacgugaacaauagcuacgagugcgacauccccaucggcgcuggcaucugugccagcuaccagacacagacaaacagccccagacgggcuagaagcguggccagccagagcaucauugccuacacaaugucucugggcgccgagaacagcguggccuacuccaacaacucuaucgcuauccccaccaacuucaccaucagcgugaccaccgagauccugccuguguccaugaccaagaccagcguggacugcaccauguacaucugcggcgauuccaccgagugcuccaaccugcugcugcaguacggcagcuucugcacccagcugaauagagcccugacagggaucgccguggaacaggacaagaacacccaagagguguucgcccaagugaagcaaaucuacaagaccccuccuaucaaggacuucggcggcuucaauuucagccagauucugcccgauccuagcaagcccagcaagcggagcuucaucgaggaccugcuguucaacaaagugacacuggccgacgccggcuucaucaagcaguauggcgauugucugggcgacauugccgccagggaucugauuugcgcccagaaguuuaacggacugacagugcugccuccucugcugaccgaugagaugaucgcccaguacacaucugcccugcuggccggcacaaucacaagcggcuggacauuuggagcuggcgccgcucugcagauccccuuugcuaugcagauggccuaccgguucaacggcaucggagugacccagaaugugcuguacgagaaccagaagcugaucgccaaccaguucaacagcgccaucggcaagauccaggacagccugagcagcacagcaagcgcccugggaaagcugcaggacguggucaaccagaaugcccaggcacugaacacccuggucaagcagcuguccuccaacuucggcgccaucagcucugugcugaacgauauccugagcagacuggacaaggucgaggccgaggugcagaucgacagacugaucacaggcagacugcagagccuccagacauacgugacccagcagcugaucagagccgccgagauuagagccucugccaaucuggccgccaccaagaugucugagugugugcugggccagagcaagagaguggacuuuugcggcaagggcuaccaccugaugagcuucccucagucugccccucacggcgugguguuucugcacgugacauaugugcccgcucaagagaagaauuucaccaccgcuccagccaucugccacgacggcaaagcccacuuuccuagagaaggcguguucguguccaacggcacccauugguucgugacacagcggaacuucuacgagccccagaucaucaccaccgacaacaccuucgugucuggcaacugcgacguugugaucggcauugugaacaauaccguguacgacccucugcagcccgagcuggacagcggaggaucuggcuauauccccgaggcuccuagagauggccaggccuauguucggaaggauggcgaaugggugcugcugagcaccuuccuuugaggacuagucccuguucccagagcccacuuuuuuuucuuuuuuugaaauaaaauagccugucuuucagaucucaaaggcucuuuucagagccaccaaaaaaaaaaaaaaaaaaaaaaaaaaaaaaaaaaaaaaaaaaaaaaaaaaaaaaaaaaaaaaaaaaaaaaaaaaaaaaaaaaaaaaaaaaaaaaaaaaaaa

SEQ ID NO: 12647 - RNA, 3806 nt, Artificial Sequence
  SARS-CoV-2/Wuhan/WIV05/2019__EPI_ISL_402128 spike protein mRNA gc mod (1-1147)(K986P_V987P) Foldon construct
aggagagucccgcagucggcguccagcggcucugcuuguucgugugugugucguugcaggccuuauucaagcuuaccauguucguguuucuggugcugcugccccugguguccagccagugugugaaccugaccaccagaacacagcugccuccagccuacaccaacagcuucaccagaggcguguacuaccccgacaagguguucagauccagcgugcugcacucuacccaggaccuguuccugccuuucuucagcaacgugaccugguuccacgccauccacguguccggcaccaauggcaccaagagauucgacaaccccgugcugcccuucaacgacgggguguacuuugccagcaccgagaaguccaacaucaucagaggcuggaucuucggcaccacacuggacagcaagacccagagccugcugaucgugaacaacgccaccaacguggucaucaaagugugcgaguuccaguucugcaacgaccccuuccugggcgucuacuaccacaagaacaacaagagcuggauggaaagcgaguuccggguguacagcagcgccaacaacugcaccuucgaguacgugucccagccuuuccugauggaccuggaaggcaagcagggcaacuucaagaaccugcgcgaguucguguucaagaacaucgacggcuacuucaaaaucuacagcaagcacaccccuaucaaccucgugcgggaucugccucagggcuucucugcucuggaaccccugguggaucugcccaucggcaucaacaucacccgguuucagacacugcuggcccugcacagaagcuaccugacaccuggcgauagcagcagcggauggacagcuggugccgccgcuuacuaugugggcuaccugcagccuagaaccuuccugcugaaguacaacgagaacggcaccaucaccgacgccguggauugugcucuggauccucugagcgagacaaagugcacccugaaguccuucaccguggaaaagggcaucuaccagaccagcaacuuccgggugcagcccaccgaauccaucgugcgguuccccaauaucaccaaucugugccccuucggcgagguguucaaugccaccagauucgccucuguguacgccuggaaccggaagcggaucagcaauugcguggccgacuacuccgugcuguacaacuccgccagcuucagcaccuucaagugcuacggcguguccccuaccaagcugaacgaccugugcuucacaaacguguacgccgacagcuucgugauccggggagaugaagugcggcagauugccccuggacagacaggcaagaucgccgacuacaacuacaagcugcccgacgacuucaccggcugugugauugccuggaacagcaacaaccuggacuccaaagucggcggcaacuacaauuaccuguaccggcuguuccggaaguccaaucugaagcccuucgagcgggacaucagcaccgaaaucuaucaggccggcagcaccccuugcaacggcguggaaggcuucaacugcuacuucccacugcaguccuacggcuuucagcccacaaauggcgugggcuaucagcccuacagagugguggugcugagcuucgaacugcugcaugcuccugccacagugugcggcccuaagaaaagcaccaaucucgugaagaacaaaugcgugaacuucaacuucaacggccugaccggcaccggcgugcugacagagagcaacaagaaguuccugccauuccagcaguuuggccgggauaucgccgauaccacagacgccguuagagauccccagacacuggaaauccuggacaucaccccaugcagcuucggcggagugucugugaucaccccuggcaccaacaccagcaaucagguggcagugcuguaccaggacgugaacuguaccgaagugcccguggccauucacgccgaucagcugacaccuacauggcggguguacuccaccggcagcaauguguuucagaccagagccggcugucugaucggagccgagcacgugaacaauagcuacgagugcgacauccccaucggcgcuggcaucugugccagcuaccagacacagacaaacagccccagacgggcuagaagcguggccagccagagcaucauugccuacacaaugucucugggcgccgagaacagcguggccuacuccaacaacucuaucgcuauccccaccaacuucaccaucagcgugaccaccgagauccugccuguguccaugaccaagaccagcguggacugcaccauguacaucugcggcgauuccaccgagugcuccaaccugcugcugcaguacggcagcuucugcacccagcugaauagagcccugacagggaucgccguggaacaggacaagaacacccaagagguguucgcccaagugaagcaaaucuacaagaccccuccuaucaaggacuucggcggcuucaauuucagccagauucugcccgauccuagcaagcccagcaagcggagcuucaucgaggaccugcuguucaacaaagugacacuggccgacgccggcuucaucaagcaguauggcgauugucugggcgacauugccgccagggaucugauuugcgcccagaaguuuaacggacugacagugcugccuccucugcugaccgaugagaugaucgcccaguacacaucugcccugcuggccggcacaaucacaagcggcuggacauuuggagcuggcgccgcucugcagauccccuuugcuaugcagauggccuaccgguucaacggcaucggagugacccagaaugugcuguacgagaaccagaagcugaucgccaaccaguucaacagcgccaucggcaagauccaggacagccugagcagcacagcaagcgcccugggaaagcugcaggacguggucaaccagaaugcccaggcacugaacacccuggucaagcagcuguccuccaacuucggcgccaucagcucugugcugaacgauauccugagcagacuggacccuccugaggccgaggugcagaucgacagacugaucacaggcagacugcagagccuccagacauacgugacccagcagcugaucagagccgccgagauuagagccucugccaaucuggccgccaccaagaugucugagugugugcugggccagagcaagagaguggacuuuugcggcaagggcuaccaccugaugagcuucccucagucugccccucacggcgugguguuucugcacgugacauaugugcccgcucaagagaagaauuucaccaccgcuccagccaucugccacgacggcaaagcccacuuuccuagagaaggcguguucguguccaacggcacccauugguucgugacacagcggaacuucuacgagccccagaucaucaccaccgacaacaccuucgugucuggcaacugcgacguugugaucggcauugugaacaauaccguguacgacccucugcagcccgagcuggacagcggaggaucuggcuauauccccgaggcuccuagagauggccaggccuauguucggaaggauggcgaaugggugcugcugagcaccuuccuuugaggacuagucccuguucccagagcccacuuuuuuuucuuuuuuugaaauaaaauagccugucuuucagaucucaaaggcucuuuucagagccaccaaaaaaaaaaaaaaaaaaaaaaaaaaaaaaaaaaaaaaaaaaaaaaaaaaaaaaaaaaaaaaaaaaaaaaaaaaaaaaaaaaaaaaaaaaaaaaaaaaaaa

SEQ ID NO: 12648 - RNA, 3806 nt, Artificial Sequence
  SARS-CoV-2/Wuhan/WIV05/2019__EPI_ISL_402128 spike protein mRNA gc mod (1-1147)(K986P_V987P_T887WN_A1020W) Foldon construct
aggagagucccgcagucggcguccagcggcucugcuuguucgugugugugucguugcaggccuuauucaagcuuaccauguucguguuucuggugcugcugccccugguguccagccagugugugaaccugaccaccagaacacagcugccuccagccuacaccaacagcuucaccagaggcguguacuaccccgacaagguguucagauccagcgugcugcacucuacccaggaccuguuccugccuuucuucagcaacgugaccugguuccacgccauccacguguccggcaccaauggcaccaagagauucgacaaccccgugcugcccuucaacgacgggguguacuuugccagcaccgagaaguccaacaucaucagaggcuggaucuucggcaccacacuggacagcaagacccagagccugcugaucgugaacaacgccaccaacguggucaucaaagugugcgaguuccaguucugcaacgaccccuuccugggcgucuacuaccacaagaacaacaagagcuggauggaaagcgaguuccggguguacagcagcgccaacaacugcaccuucgaguacgugucccagccuuuccugauggaccuggaaggcaagcagggcaacuucaagaaccugcgcgaguucguguucaagaacaucgacggcuacuucaaaaucuacagcaagcacaccccuaucaaccucgugcgggaucugccucagggcuucucugcucuggaaccccugguggaucugcccaucggcaucaacaucacccgguuucagacacugcuggcccugcacagaagcuaccugacaccuggcgauagcagcagcggauggacagcuggugccgccgcuuacuaugugggcuaccugcagccuagaaccuuccugcugaaguacaacgagaacggcaccaucaccgacgccguggauugugcucuggauccucugagcgagacaaagugcacccugaaguccuucaccguggaaaagggcaucuaccagaccagcaacuuccgggugcagcccaccgaauccaucgugcgguuccccaauaucaccaaucugugccccuucggcgagguguucaaugccaccagauucgccucuguguacgccuggaaccggaagcggaucagcaauugcguggccgacuacuccgugcuguacaacuccgccagcuucagcaccuucaagugcuacggcguguccccuaccaagcugaacgaccugugcuucacaaacguguacgccgacagcuucgugauccggggagaugaagugcggcagauugccccuggacagacaggcaagaucgccgacuacaacuacaagcugcccgacgacuucaccggcugugugauugccuggaacagcaacaaccuggacuccaaagucggcggcaacuacaauuaccuguaccggcuguuccggaaguccaaucugaagcccuucgagcgggacaucagcaccgaaaucuaucaggccggcagcaccccuugcaacggcguggaaggcuucaacugcuacuucccacugcaguccuacggcuuucagcccacaaauggcgugggcuaucagcccuacagagugguggugcugagcuucgaacugcugcaugcuccugccacagugugcggcccuaagaaaagcaccaaucucgugaagaacaaaugcgugaacuucaacuucaacggccugaccggcaccggcgugcugacagagagcaacaagaaguuccugccauuccagcaguuuggccgggauaucgccgauaccacagacgccguuagagauccccagacacuggaaauccuggacaucaccccaugcagcuucggcggagugucugugaucaccccuggcaccaacaccagcaaucagguggcagugcuguaccaggacgugaacuguaccgaagugcccguggccauucacgccgaucagcugacaccuacauggcggguguacuccaccggcagcaauguguuucagaccagagccggcugucugaucggagccgagcacgugaacaauagcuacgagugcgacauccccaucggcgcuggcaucugugccagcuaccagacacagacaaacagccccagacgggcuagaagcguggccagccagagcaucauugccuacacaaugucucugggcgccgagaacagcguggccuacuccaacaacucuaucgcuauccccaccaacuucaccaucagcgugaccaccgagauccugccuguguccaugaccaagaccagcguggacugcaccauguacaucugcggcgauuccaccgagugcuccaaccugcugcugcaguacggcagcuucugcacccagcugaauagagcccugacagggaucgccguggaacaggacaagaacacccaagagguguucgcccaagugaagcaaaucuacaagaccccuccuaucaaggacuucggcggcuucaauuucagccagauucugcccgauccuagcaagcccagcaagcggagcuucaucgaggaccugcuguucaacaaagugacacuggccgacgccggcuucaucaagcaguauggcgauugucugggcgacauugccgccagggaucugauuugcgcccagaaguuuaacggacugacagugcugccuccucugcugaccgaugagaugaucgcccaguacacaucugcccugcuggccggcacaaucacaagcggcuggugguuuggagcuggcgccgcucugcagauccccuuugcuaugcagauggccuaccgguucaacggcaucggagugacccagaaugugcuguacgagaaccagaagcugaucgccaaccaguucaacagcgccaucggcaagauccaggacagccugagcagcacagcaagcgcccugggaaagcugcaggacguggucaaccagaaugcccaggcacugaacacccuggucaagcagcuguccuccaacuucggcgccaucagcucugugcugaacgauauccugagcagacuggacccuccugaggccgaggugcagaucgacagacugaucacaggcagacugcagagccuccagacauacgugacccagcagcugaucagagccgccgagauuagauggucugccaaucuggccgccaccaagaugucugagugugugcugggccagagcaagagaguggacuuuugcggcaagggcuaccaccugaugagcuucccucagucugccccucacggcgugguguuucugcacgugacauaugugcccgcucaagagaagaauuucaccaccgcuccagccaucugccacgacggcaaagcccacuuuccuagagaaggcguguucguguccaacggcacccauugguucgugacacagcggaacuucuacgagccccagaucaucaccaccgacaacaccuucgugucuggcaacugcgacguugugaucggcauugugaacaauaccguguacgacccucugcagcccgagcuggacagcggaggaucuggcuauauccccgaggcuccuagagauggccaggccuauguucggaaggauggcgaaugggugcugcugagcaccuuccuuugaggacuagucccuguucccagagcccacuuuuuuuucuuuuuuugaaauaaaauagccugucuuucagaucucaaaggcucuuuucagagccaccaaaaaaaaaaaaaaaaaaaaaaaaaaaaaaaaaaaaaaaaaaaaaaaaaaaaaaaaaaaaaaaaaaaaaaaaaaaaaaaaaaaaaaaaaaaaaaaaaaaaa

SEQ ID NO: 12649 - RNA, 3806 nt, Artificial Sequence
  SARS-CoV-2/Wuhan/WIV05/2019__EPI_ISL_402128 spike protein mRNA gc mod (1-1147)(K986P_V987P_P1069F) Foldon construct
aggagagucccgcagucggcguccagcggcucugcuuguucgugugugugucguugcaggccuuauucaagcuuaccauguucguguuucuggugcugcugccccugguguccagccagugugugaaccugaccaccagaacacagcugccuccagccuacaccaacagcuucaccagaggcguguacuaccccgacaagguguucagauccagcgugcugcacucuacccaggaccuguuccugccuuucuucagcaacgugaccugguuccacgccauccacguguccggcaccaauggcaccaagagauucgacaaccccgugcugcccuucaacgacgggguguacuuugccagcaccgagaaguccaacaucaucagaggcuggaucuucggcaccacacuggacagcaagacccagagccugcugaucgugaacaacgccaccaacguggucaucaaagugugcgaguuccaguucugcaacgaccccuuccugggcgucuacuaccacaagaacaacaagagcuggauggaaagcgaguuccggguguacagcagcgccaacaacugcaccuucgaguacgugucccagccuuuccugauggaccuggaaggcaagcagggcaacuucaagaaccugcgcgaguucguguucaagaacaucgacggcuacuucaaaaucuacagcaagcacaccccuaucaaccucgugcgggaucugccucagggcuucucugcucuggaaccccugguggaucugcccaucggcaucaacaucacccgguuucagacacugcuggcccugcacagaagcuaccugacaccuggcgauagcagcagcggauggacagcuggugccgccgcuuacuaugugggcuaccugcagccuagaaccuuccugcugaaguacaacgagaacggcaccaucaccgacgccguggauugugcucuggauccucugagcgagacaaagugcacccugaaguccuucaccguggaaaagggcaucuaccagaccagcaacuuccgggugcagcccaccgaauccaucgugcgguuccccaauaucaccaaucugugccccuucggcgagguguucaaugccaccagauucgccucuguguacgccuggaaccggaagcggaucagcaauugcguggccgacuacuccgugcuguacaacuccgccagcuucagcaccuucaagugcuacggcguguccccuaccaagcugaacgaccugugcuucacaaacguguacgccgacagcuucgugauccggggagaugaagugcggcagauugccccuggacagacaggcaagaucgccgacuacaacuacaagcugcccgacgacuucaccggcugugugauugccuggaacagcaacaaccuggacuccaaagucggcggcaacuacaauuaccuguaccggcuguuccggaaguccaaucugaagcccuucgagcgggacaucagcaccgaaaucuaucaggccggcagcaccccuugcaacggcguggaaggcuucaacugcuacuucccacugcaguccuacggcuuucagcccacaaauggcgugggcuaucagcccuacagagugguggugcugagcuucgaacugcugcaugcuccugccacagugugcggcccuaagaaaagcaccaaucucgugaagaacaaaugcgugaacuucaacuucaacggccugaccggcaccggcgugcugacagagagcaacaagaaguuccugccauuccagcaguuuggccgggauaucgccgauaccacagacgccguuagagauccccagacacuggaaauccuggacaucaccccaugcagcuucggcggagugucugugaucaccccuggcaccaacaccagcaaucagguggcagugcuguaccaggacgugaacuguaccgaagugcccguggccauucacgccgaucagcugacaccuacauggcggguguacuccaccggcagcaauguguuucagaccagagccggcugucugaucggagccgagcacgugaacaauagcuacgagugcgacauccccaucggcgcuggcaucugugccagcuaccagacacagacaaacagccccagacgggcuagaagcguggccagccagagcaucauugccuacacaaugucucugggcgccgagaacagcguggccuacuccaacaacucuaucgcuauccccaccaacuucaccaucagcgugaccaccgagauccugccuguguccaugaccaagaccagcguggacugcaccauguacaucugcggcgauuccaccgagugcuccaaccugcugcugcaguacggcagcuucugcacccagcugaauagagcccugacagggaucgccguggaacaggacaagaacacccaagagguguucgcccaagugaagcaaaucuacaagaccccuccuaucaaggacuucggcggcuucaauuucagccagauucugcccgauccuagcaagcccagcaagcggagcuucaucgaggaccugcuguucaacaaagugacacuggccgacgccggcuucaucaagcaguauggcgauugucugggcgacauugccgccagggaucugauuugcgcccagaaguuuaacggacugacagugcugccuccucugcugaccgaugagaugaucgcccaguacacaucugcccugcuggccggcacaaucacaagcggcuggacauuuggagcuggcgccgcucugcagauccccuuugcuaugcagauggccuaccgguucaacggcaucggagugacccagaaugugcuguacgagaaccagaagcugaucgccaaccaguucaacagcgccaucggcaagauccaggacagccugagcagcacagcaagcgcccugggaaagcugcaggacguggucaaccagaaugcccaggcacugaacacccuggucaagcagcuguccuccaacuucggcgccaucagcucugugcugaacgauauccugagcagacuggacccuccugaggccgaggugcagaucgacagacugaucacaggcagacugcagagccuccagacauacgugacccagcagcugaucagagccgccgagauuagagccucugccaaucuggccgccaccaagaugucugagugugugcugggccagagcaagagaguggacuuuugcggcaagggcuaccaccugaugagcuucccucagucugccccucacggcgugguguuucugcacgugacauauguguucgcucaagagaagaauuucaccaccgcuccagccaucugccacgacggcaaagcccacuuuccuagagaaggcguguucguguccaacggcacccauugguucgugacacagcggaacuucuacgagccccagaucaucaccaccgacaacaccuucgugucuggcaacugcgacguugugaucggcauugugaacaauaccguguacgacccucugcagcccgagcuggacagcggaggaucuggcuauauccccgaggcuccuagagauggccaggccuauguucggaaggauggcgaaugggugcugcugagcaccuuccuuugaggacuagucccuguucccagagcccacuuuuuuuucuuuuuuugaaauaaaauagccugucuuucagaucucaaaggcucuuuucagagccaccaaaaaaaaaaaaaaaaaaaaaaaaaaaaaaaaaaaaaaaaaaaaaaaaaaaaaaaaaaaaaaaaaaaaaaaaaaaaaaaaaaaaaaaaaaaaaaaaaaaaa

SEQ ID NO: 12650 - RNA, 3806 nt, Artificial Sequence
  SARS-CoV-2/Wuhan/WIV05/2019__EPI_ISL_402128 spike protein mRNA gc mod (1-1147)(K986P_V987P_ H1048Q_H1064N_ H1083N_H1101N) Foldon construct
aggagagucccgcagucggcguccagcggcucugcuuguucgugugugugucguugcaggccuuauucaagcuuaccauguucguguuucuggugcugcugccccugguguccagccagugugugaaccugaccaccagaacacagcugccuccagccuacaccaacagcuucaccagaggcguguacuaccccgacaagguguucagauccagcgugcugcacucuacccaggaccuguuccugccuuucuucagcaacgugaccugguuccacgccauccacguguccggcaccaauggcaccaagagauucgacaaccccgugcugcccuucaacgacgggguguacuuugccagcaccgagaaguccaacaucaucagaggcuggaucuucggcaccacacuggacagcaagacccagagccugcugaucgugaacaacgccaccaacguggucaucaaagugugcgaguuccaguucugcaacgaccccuuccugggcgucuacuaccacaagaacaacaagagcuggauggaaagcgaguuccggguguacagcagcgccaacaacugcaccuucgaguacgugucccagccuuuccugauggaccuggaaggcaagcagggcaacuucaagaaccugcgcgaguucguguucaagaacaucgacggcuacuucaaaaucuacagcaagcacaccccuaucaaccucgugcgggaucugccucagggcuucucugcucuggaaccccugguggaucugcccaucggcaucaacaucacccgguuucagacacugcuggcccugcacagaagcuaccugacaccuggcgauagcagcagcggauggacagcuggugccgccgcuuacuaugugggcuaccugcagccuagaaccuuccugcugaaguacaacgagaacggcaccaucaccgacgccguggauugugcucuggauccucugagcgagacaaagugcacccugaaguccuucaccguggaaaagggcaucuaccagaccagcaacuuccgggugcagcccaccgaauccaucgugcgguuccccaauaucaccaaucugugccccuucggcgagguguucaaugccaccagauucgccucuguguacgccuggaaccggaagcggaucagcaauugcguggccgacuacuccgugcuguacaacuccgccagcuucagcaccuucaagugcuacggcguguccccuaccaagcugaacgaccugugcuucacaaacguguacgccgacagcuucgugauccggggagaugaagugcggcagauugccccuggacagacaggcaagaucgccgacuacaacuacaagcugcccgacgacuucaccggcugugugauugccuggaacagcaacaaccuggacuccaaagucggcggcaacuacaauuaccuguaccggcuguuccggaaguccaaucugaagcccuucgagcgggacaucagcaccgaaaucuaucaggccggcagcaccccuugcaacggcguggaaggcuucaacugcuacuucccacugcaguccuacggcuuucagcccacaaauggcgugggcuaucagcccuacagagugguggugcugagcuucgaacugcugcaugcuccugccacagugugcggcccuaagaaaagcaccaaucucgugaagaacaaaugcgugaacuucaacuucaacggccugaccggcaccggcgugcugacagagagcaacaagaaguuccugccauuccagcaguuuggccgggauaucgccgauaccacagacgccguuagagauccccagacacuggaaauccuggacaucaccccaugcagcuucggcggagugucugugaucaccccuggcaccaacaccagcaaucagguggcagugcuguaccaggacgugaacuguaccgaagugcccguggccauucacgccgaucagcugacaccuacauggcggguguacuccaccggcagcaauguguuucagaccagagccggcugucugaucggagccgagcacgugaacaauagcuacgagugcgacauccccaucggcgcuggcaucugugccagcuaccagacacagacaaacagccccagacgggcuagaagcguggccagccagagcaucauugccuacacaaugucucugggcgccgagaacagcguggccuacuccaacaacucuaucgcuauccccaccaacuucaccaucagcgugaccaccgagauccugccuguguccaugaccaagaccagcguggacugcaccauguacaucugcggcgauuccaccgagugcuccaaccugcugcugcaguacggcagcuucugcacccagcugaauagagcccugacagggaucgccguggaacaggacaagaacacccaagagguguucgcccaagugaagcaaaucuacaagaccccuccuaucaaggacuucggcggcuucaauuucagccagauucugcccgauccuagcaagcccagcaagcggagcuucaucgaggaccugcuguucaacaaagugacacuggccgacgccggcuucaucaagcaguauggcgauugucugggcgacauugccgccagggaucugauuugcgcccagaaguuuaacggacugacagugcugccuccucugcugaccgaugagaugaucgcccaguacacaucugcccugcuggccggcacaaucacaagcggcuggacauuuggagcuggcgccgcucugcagauccccuuugcuaugcagauggccuaccgguucaacggcaucggagugacccagaaugugcuguacgagaaccagaagcugaucgccaaccaguucaacagcgccaucggcaagauccaggacagccugagcagcacagcaagcgcccugggaaagcugcaggacguggucaaccagaaugcccaggcacugaacacccuggucaagcagcuguccuccaacuucggcgccaucagcucugugcugaacgauauccugagcagacuggacccuccugaggccgaggugcagaucgacagacugaucacaggcagacugcagagccuccagacauacgugacccagcagcugaucagagccgccgagauuagagccucugccaaucuggccgccaccaagaugucugagugugugcugggccagagcaagagaguggacuuuugcggcaagggcuaccagcugaugagcuucccucagucugccccucacggcgugguguuucugaacgugacauaugugcccgcucaagagaagaauuucaccaccgcuccagccaucugcaacgacggcaaagcccacuuuccuagagaaggcguguucguguccaacggcaccaacugguucgugacacagcggaacuucuacgagccccagaucaucaccaccgacaacaccuucgugucuggcaacugcgacguugugaucggcauugugaacaauaccguguacgacccucugcagcccgagcuggacagcggaggaucuggcuauauccccgaggcuccuagagauggccaggccuauguucggaaggauggcgaaugggugcugcugagcaccuuccuuugaggacuagucccuguucccagagcccacuuuuuuuucuuuuuuugaaauaaaauagccugucuuucagaucucaaaggcucuuuucagagccaccaaaaaaaaaaaaaaaaaaaaaaaaaaaaaaaaaaaaaaaaaaaaaaaaaaaaaaaaaaaaaaaaaaaaaaaaaaaaaaaaaaaaaaaaaaaaaaaaaaaaa

SEQ ID NO: 12651 - RNA, 3806 nt, Artificial Sequence
  SARS-CoV-2/Wuhan/WIV05/2019__EPI_ISL_402128 spike protein mRNA gc mod (1-1147)(I712C_T1077C) Foldon construct
aggagagucccgcagucggcguccagcggcucugcuuguucgugugugugucguugcaggccuuauucaagcuuaccauguucguguuucuggugcugcugccccugguguccagccagugugugaaccugaccaccagaacacagcugccuccagccuacaccaacagcuucaccagaggcguguacuaccccgacaagguguucagauccagcgugcugcacucuacccaggaccuguuccugccuuucuucagcaacgugaccugguuccacgccauccacguguccggcaccaauggcaccaagagauucgacaaccccgugcugcccuucaacgacgggguguacuuugccagcaccgagaaguccaacaucaucagaggcuggaucuucggcaccacacuggacagcaagacccagagccugcugaucgugaacaacgccaccaacguggucaucaaagugugcgaguuccaguucugcaacgaccccuuccugggcgucuacuaccacaagaacaacaagagcuggauggaaagcgaguuccggguguacagcagcgccaacaacugcaccuucgaguacgugucccagccuuuccugauggaccuggaaggcaagcagggcaacuucaagaaccugcgcgaguucguguucaagaacaucgacggcuacuucaaaaucuacagcaagcacaccccuaucaaccucgugcgggaucugccucagggcuucucugcucuggaaccccugguggaucugcccaucggcaucaacaucacccgguuucagacacugcuggcccugcacagaagcuaccugacaccuggcgauagcagcagcggauggacagcuggugccgccgcuuacuaugugggcuaccugcagccuagaaccuuccugcugaaguacaacgagaacggcaccaucaccgacgccguggauugugcucuggauccucugagcgagacaaagugcacccugaaguccuucaccguggaaaagggcaucuaccagaccagcaacuuccgggugcagcccaccgaauccaucgugcgguuccccaauaucaccaaucugugccccuucggcgagguguucaaugccaccagauucgccucuguguacgccuggaaccggaagcggaucagcaauugcguggccgacuacuccgugcuguacaacuccgccagcuucagcaccuucaagugcuacggcguguccccuaccaagcugaacgaccugugcuucacaaacguguacgccgacagcuucgugauccggggagaugaagugcggcagauugccccuggacagacaggcaagaucgccgacuacaacuacaagcugcccgacgacuucaccggcugugugauugccuggaacagcaacaaccuggacuccaaagucggcggcaacuacaauuaccuguaccggcuguuccggaaguccaaucugaagcccuucgagcgggacaucagcaccgaaaucuaucaggccggcagcaccccuugcaacggcguggaaggcuucaacugcuacuucccacugcaguccuacggcuuucagcccacaaauggcgugggcuaucagcccuacagagugguggugcugagcuucgaacugcugcaugcuccugccacagugugcggcccuaagaaaagcaccaaucucgugaagaacaaaugcgugaacuucaacuucaacggccugaccggcaccggcgugcugacagagagcaacaagaaguuccugccauuccagcaguuuggccgggauaucgccgauaccacagacgccguuagagauccccagacacuggaaauccuggacaucaccccaugcagcuucggcggagugucugugaucaccccuggcaccaacaccagcaaucagguggcagugcuguaccaggacgugaacuguaccgaagugcccguggccauucacgccgaucagcugacaccuacauggcggguguacuccaccggcagcaauguguuucagaccagagccggcugucugaucggagccgagcacgugaacaauagcuacgagugcgacauccccaucggcgcuggcaucugugccagcuaccagacacagacaaacagccccagacgggcuagaagcguggccagccagagcaucauugccuacacaaugucucugggcgccgagaacagcguggccuacuccaacaacucuugcgcuauccccaccaacuucaccaucagcgugaccaccgagauccugccuguguccaugaccaagaccagcguggacugcaccauguacaucugcggcgauuccaccgagugcuccaaccugcugcugcaguacggcagcuucugcacccagcugaauagagcccugacagggaucgccguggaacaggacaagaacacccaagagguguucgcccaagugaagcaaaucuacaagaccccuccuaucaaggacuucggcggcuucaauuucagccagauucugcccgauccuagcaagcccagcaagcggagcuucaucgaggaccugcuguucaacaaagugacacuggccgacgccggcuucaucaagcaguauggcgauugucugggcgacauugccgccagggaucugauuugcgcccagaaguuuaacggacugacagugcugccuccucugcugaccgaugagaugaucgcccaguacacaucugcccugcuggccggcacaaucacaagcggcuggacauuuggagcuggcgccgcucugcagauccccuuugcuaugcagauggccuaccgguucaacggcaucggagugacccagaaugugcuguacgagaaccagaagcugaucgccaaccaguucaacagcgccaucggcaagauccaggacagccugagcagcacagcaagcgcccugggaaagcugcaggacguggucaaccagaaugcccaggcacugaacacccuggucaagcagcuguccuccaacuucggcgccaucagcucugugcugaacgauauccugagcagacuggacaaggucgaggccgaggugcagaucgacagacugaucacaggcagacugcagagccuccagacauacgugacccagcagcugaucagagccgccgagauuagagccucugccaaucuggccgccaccaagaugucugagugugugcugggccagagcaagagaguggacuuuugcggcaagggcuaccaccugaugagcuucccucagucugccccucacggcgugguguuucugcacgugacauaugugcccgcucaagagaagaauuucaccugugcuccagccaucugccacgacggcaaagcccacuuuccuagagaaggcguguucguguccaacggcacccauugguucgugacacagcggaacuucuacgagccccagaucaucaccaccgacaacaccuucgugucuggcaacugcgacguugugaucggcauugugaacaauaccguguacgacccucugcagcccgagcuggacagcggaggaucuggcuauauccccgaggcuccuagagauggccaggccuauguucggaaggauggcgaaugggugcugcugagcaccuuccuuugaggacuagucccuguucccagagcccacuuuuuuuucuuuuuuugaaauaaaauagccugucuuucagaucucaaaggcucuuuucagagccaccaaaaaaaaaaaaaaaaaaaaaaaaaaaaaaaaaaaaaaaaaaaaaaaaaaaaaaaaaaaaaaaaaaaaaaaaaaaaaaaaaaaaaaaaaaaaaaaaaaaaa

SEQ ID NO: 12652 - RNA, 3806 nt, Artificial Sequence
  SARS-CoV-2/Wuhan/WIV05/2019__EPI_ISL_402128 spike protein mRNA gc mod (1-1147)(I714C_Y1110C) Foldon construct
aggagagucccgcagucggcguccagcggcucugcuuguucgugugugugucguugcaggccuuauucaagcuuaccauguucguguuucuggugcugcugccccugguguccagccagugugugaaccugaccaccagaacacagcugccuccagccuacaccaacagcuucaccagaggcguguacuaccccgacaagguguucagauccagcgugcugcacucuacccaggaccuguuccugccuuucuucagcaacgugaccugguuccacgccauccacguguccggcaccaauggcaccaagagauucgacaaccccgugcugcccuucaacgacgggguguacuuugccagcaccgagaaguccaacaucaucagaggcuggaucuucggcaccacacuggacagcaagacccagagccugcugaucgugaacaacgccaccaacguggucaucaaagugugcgaguuccaguucugcaacgaccccuuccugggcgucuacuaccacaagaacaacaagagcuggauggaaagcgaguuccggguguacagcagcgccaacaacugcaccuucgaguacgugucccagccuuuccugauggaccuggaaggcaagcagggcaacuucaagaaccugcgcgaguucguguucaagaacaucgacggcuacuucaaaaucuacagcaagcacaccccuaucaaccucgugcgggaucugccucagggcuucucugcucuggaaccccugguggaucugcccaucggcaucaacaucacccgguuucagacacugcuggcccugcacagaagcuaccugacaccuggcgauagcagcagcggauggacagcuggugccgccgcuuacuaugugggcuaccugcagccuagaaccuuccugcugaaguacaacgagaacggcaccaucaccgacgccguggauugugcucuggauccucugagcgagacaaagugcacccugaaguccuucaccguggaaaagggcaucuaccagaccagcaacuuccgggugcagcccaccgaauccaucgugcgguuccccaauaucaccaaucugugccccuucggcgagguguucaaugccaccagauucgccucuguguacgccuggaaccggaagcggaucagcaauugcguggccgacuacuccgugcuguacaacuccgccagcuucagcaccuucaagugcuacggcguguccccuaccaagcugaacgaccugugcuucacaaacguguacgccgacagcuucgugauccggggagaugaagugcggcagauugccccuggacagacaggcaagaucgccgacuacaacuacaagcugcccgacgacuucaccggcugugugauugccuggaacagcaacaaccuggacuccaaagucggcggcaacuacaauuaccuguaccggcuguuccggaaguccaaucugaagcccuucgagcgggacaucagcaccgaaaucuaucaggccggcagcaccccuugcaacggcguggaaggcuucaacugcuacuucccacugcaguccuacggcuuucagcccacaaauggcgugggcuaucagcccuacagagugguggugcugagcuucgaacugcugcaugcuccugccacagugugcggcccuaagaaaagcaccaaucucgugaagaacaaaugcgugaacuucaacuucaacggccugaccggcaccggcgugcugacagagagcaacaagaaguuccugccauuccagcaguuuggccgggauaucgccgauaccacagacgccguuagagauccccagacacuggaaauccuggacaucaccccaugcagcuucggcggagugucugugaucaccccuggcaccaacaccagcaaucagguggcagugcuguaccaggacgugaacuguaccgaagugcccguggccauucacgccgaucagcugacaccuacauggcggguguacuccaccggcagcaauguguuucagaccagagccggcugucugaucggagccgagcacgugaacaauagcuacgagugcgacauccccaucggcgcuggcaucugugccagcuaccagacacagacaaacagccccagacgggcuagaagcguggccagccagagcaucauugccuacacaaugucucugggcgccgagaacagcguggccuacuccaacaacucuaucgcuugccccaccaacuucaccaucagcgugaccaccgagauccugccuguguccaugaccaagaccagcguggacugcaccauguacaucugcggcgauuccaccgagugcuccaaccugcugcugcaguacggcagcuucugcacccagcugaauagagcccugacagggaucgccguggaacaggacaagaacacccaagagguguucgcccaagugaagcaaaucuacaagaccccuccuaucaaggacuucggcggcuucaauuucagccagauucugcccgauccuagcaagcccagcaagcggagcuucaucgaggaccugcuguucaacaaagugacacuggccgacgccggcuucaucaagcaguauggcgauugucugggcgacauugccgccagggaucugauuugcgcccagaaguuuaacggacugacagugcugccuccucugcugaccgaugagaugaucgcccaguacacaucugcccugcuggccggcacaaucacaagcggcuggacauuuggagcuggcgccgcucugcagauccccuuugcuaugcagauggccuaccgguucaacggcaucggagugacccagaaugugcuguacgagaaccagaagcugaucgccaaccaguucaacagcgccaucggcaagauccaggacagccugagcagcacagcaagcgcccugggaaagcugcaggacguggucaaccagaaugcccaggcacugaacacccuggucaagcagcuguccuccaacuucggcgccaucagcucugugcugaacgauauccugagcagacuggacaaggucgaggccgaggugcagaucgacagacugaucacaggcagacugcagagccuccagacauacgugacccagcagcugaucagagccgccgagauuagagccucugccaaucuggccgccaccaagaugucugagugugugcugggccagagcaagagaguggacuuuugcggcaagggcuaccaccugaugagcuucccucagucugccccucacggcgugguguuucugcacgugacauaugugcccgcucaagagaagaauuucaccaccgcuccagccaucugccacgacggcaaagcccacuuuccuagagaaggcguguucguguccaacggcacccauugguucgugacacagcggaacuucugugagccccagaucaucaccaccgacaacaccuucgugucuggcaacugcgacguugugaucggcauugugaacaauaccguguacgacccucugcagcccgagcuggacagcggaggaucuggcuauauccccgaggcuccuagagauggccaggccuauguucggaaggauggcgaaugggugcugcugagcaccuuccuuugaggacuagucccuguucccagagcccacuuuuuuuucuuuuuuugaaauaaaauagccugucuuucagaucucaaaggcucuuuucagagccaccaaaaaaaaaaaaaaaaaaaaaaaaaaaaaaaaaaaaaaaaaaaaaaaaaaaaaaaaaaaaaaaaaaaaaaaaaaaaaaaaaaaaaaaaaaaaaaaaaaaaa

SEQ ID NO: 12653 - RNA, 3806 nt, Artificial Sequence
  SARS-CoV-2/Wuhan/WIV05/2019__EPI_ISL_402128 spike protein mRNA gc mod (1-1147)(P715C_P1069C) Foldon construct
aggagagucccgcagucggcguccagcggcucugcuuguucgugugugugucguugcaggccuuauucaagcuuaccauguucguguuucuggugcugcugccccugguguccagccagugugugaaccugaccaccagaacacagcugccuccagccuacaccaacagcuucaccagaggcguguacuaccccgacaagguguucagauccagcgugcugcacucuacccaggaccuguuccugccuuucuucagcaacgugaccugguuccacgccauccacguguccggcaccaauggcaccaagagauucgacaaccccgugcugcccuucaacgacgggguguacuuugccagcaccgagaaguccaacaucaucagaggcuggaucuucggcaccacacuggacagcaagacccagagccugcugaucgugaacaacgccaccaacguggucaucaaagugugcgaguuccaguucugcaacgaccccuuccugggcgucuacuaccacaagaacaacaagagcuggauggaaagcgaguuccggguguacagcagcgccaacaacugcaccuucgaguacgugucccagccuuuccugauggaccuggaaggcaagcagggcaacuucaagaaccugcgcgaguucguguucaagaacaucgacggcuacuucaaaaucuacagcaagcacaccccuaucaaccucgugcgggaucugccucagggcuucucugcucuggaaccccugguggaucugcccaucggcaucaacaucacccgguuucagacacugcuggcccugcacagaagcuaccugacaccuggcgauagcagcagcggauggacagcuggugccgccgcuuacuaugugggcuaccugcagccuagaaccuuccugcugaaguacaacgagaacggcaccaucaccgacgccguggauugugcucuggauccucugagcgagacaaagugcacccugaaguccuucaccguggaaaagggcaucuaccagaccagcaacuuccgggugcagcccaccgaauccaucgugcgguuccccaauaucaccaaucugugccccuucggcgagguguucaaugccaccagauucgccucuguguacgccuggaaccggaagcggaucagcaauugcguggccgacuacuccgugcuguacaacuccgccagcuucagcaccuucaagugcuacggcguguccccuaccaagcugaacgaccugugcuucacaaacguguacgccgacagcuucgugauccggggagaugaagugcggcagauugccccuggacagacaggcaagaucgccgacuacaacuacaagcugcccgacgacuucaccggcugugugauugccuggaacagcaacaaccuggacuccaaagucggcggcaacuacaauuaccuguaccggcuguuccggaaguccaaucugaagcccuucgagcgggacaucagcaccgaaaucuaucaggccggcagcaccccuugcaacggcguggaaggcuucaacugcuacuucccacugcaguccuacggcuuucagcccacaaauggcgugggcuaucagcccuacagagugguggugcugagcuucgaacugcugcaugcuccugccacagugugcggcccuaagaaaagcaccaaucucgugaagaacaaaugcgugaacuucaacuucaacggccugaccggcaccggcgugcugacagagagcaacaagaaguuccugccauuccagcaguuuggccgggauaucgccgauaccacagacgccguuagagauccccagacacuggaaauccuggacaucaccccaugcagcuucggcggagugucugugaucaccccuggcaccaacaccagcaaucagguggcagugcuguaccaggacgugaacuguaccgaagugcccguggccauucacgccgaucagcugacaccuacauggcggguguacuccaccggcagcaauguguuucagaccagagccggcugucugaucggagccgagcacgugaacaauagcuacgagugcgacauccccaucggcgcuggcaucugugccagcuaccagacacagacaaacagccccagacgggcuagaagcguggccagccagagcaucauugccuacacaaugucucugggcgccgagaacagcguggccuacuccaacaacucuaucgcuaucugcaccaacuucaccaucagcgugaccaccgagauccugccuguguccaugaccaagaccagcguggacugcaccauguacaucugcggcgauuccaccgagugcuccaaccugcugcugcaguacggcagcuucugcacccagcugaauagagcccugacagggaucgccguggaacaggacaagaacacccaagagguguucgcccaagugaagcaaaucuacaagaccccuccuaucaaggacuucggcggcuucaauuucagccagauucugcccgauccuagcaagcccagcaagcggagcuucaucgaggaccugcuguucaacaaagugacacuggccgacgccggcuucaucaagcaguauggcgauugucugggcgacauugccgccagggaucugauuugcgcccagaaguuuaacggacugacagugcugccuccucugcugaccgaugagaugaucgcccaguacacaucugcccugcuggccggcacaaucacaagcggcuggacauuuggagcuggcgccgcucugcagauccccuuugcuaugcagauggccuaccgguucaacggcaucggagugacccagaaugugcuguacgagaaccagaagcugaucgccaaccaguucaacagcgccaucggcaagauccaggacagccugagcagcacagcaagcgcccugggaaagcugcaggacguggucaaccagaaugcccaggcacugaacacccuggucaagcagcuguccuccaacuucggcgccaucagcucugugcugaacgauauccugagcagacuggacaaggucgaggccgaggugcagaucgacagacugaucacaggcagacugcagagccuccagacauacgugacccagcagcugaucagagccgccgagauuagagccucugccaaucuggccgccaccaagaugucugagugugugcugggccagagcaagagaguggacuuuugcggcaagggcuaccaccugaugagcuucccucagucugccccucacggcgugguguuucugcacgugacauaugugugugcucaagagaagaauuucaccaccgcuccagccaucugccacgacggcaaagcccacuuuccuagagaaggcguguucguguccaacggcacccauugguucgugacacagcggaacuucuacgagccccagaucaucaccaccgacaacaccuucgugucuggcaacugcgacguugugaucggcauugugaacaauaccguguacgacccucugcagcccgagcuggacagcggaggaucuggcuauauccccgaggcuccuagagauggccaggccuauguucggaaggauggcgaaugggugcugcugagcaccuuccuuugaggacuagucccuguucccagagcccacuuuuuuuucuuuuuuugaaauaaaauagccugucuuucagaucucaaaggcucuuuucagagccaccaaaaaaaaaaaaaaaaaaaaaaaaaaaaaaaaaaaaaaaaaaaaaaaaaaaaaaaaaaaaaaaaaaaaaaaaaaaaaaaaaaaaaaaaaaaaaaaaaaaaa

SEQ ID NO: 12654 - RNA, 3806 nt, Artificial Sequence
  SARS-CoV-2/Wuhan/WIV05/2019__EPI_ISL_402128 spike protein mRNA gc mod (1-1147)(G889C_L1034C) Foldon construct
aggagagucccgcagucggcguccagcggcucugcuuguucgugugugugucguugcaggccuuauucaagcuuaccauguucguguuucuggugcugcugccccugguguccagccagugugugaaccugaccaccagaacacagcugccuccagccuacaccaacagcuucaccagaggcguguacuaccccgacaagguguucagauccagcgugcugcacucuacccaggaccuguuccugccuuucuucagcaacgugaccugguuccacgccauccacguguccggcaccaauggcaccaagagauucgacaaccccgugcugcccuucaacgacgggguguacuuugccagcaccgagaaguccaacaucaucagaggcuggaucuucggcaccacacuggacagcaagacccagagccugcugaucgugaacaacgccaccaacguggucaucaaagugugcgaguuccaguucugcaacgaccccuuccugggcgucuacuaccacaagaacaacaagagcuggauggaaagcgaguuccggguguacagcagcgccaacaacugcaccuucgaguacgugucccagccuuuccugauggaccuggaaggcaagcagggcaacuucaagaaccugcgcgaguucguguucaagaacaucgacggcuacuucaaaaucuacagcaagcacaccccuaucaaccucgugcgggaucugccucagggcuucucugcucuggaaccccugguggaucugcccaucggcaucaacaucacccgguuucagacacugcuggcccugcacagaagcuaccugacaccuggcgauagcagcagcggauggacagcuggugccgccgcuuacuaugugggcuaccugcagccuagaaccuuccugcugaaguacaacgagaacggcaccaucaccgacgccguggauugugcucuggauccucugagcgagacaaagugcacccugaaguccuucaccguggaaaagggcaucuaccagaccagcaacuuccgggugcagcccaccgaauccaucgugcgguuccccaauaucaccaaucugugccccuucggcgagguguucaaugccaccagauucgccucuguguacgccuggaaccggaagcggaucagcaauugcguggccgacuacuccgugcuguacaacuccgccagcuucagcaccuucaagugcuacggcguguccccuaccaagcugaacgaccugugcuucacaaacguguacgccgacagcuucgugauccggggagaugaagugcggcagauugccccuggacagacaggcaagaucgccgacuacaacuacaagcugcccgacgacuucaccggcugugugauugccuggaacagcaacaaccuggacuccaaagucggcggcaacuacaauuaccuguaccggcuguuccggaaguccaaucugaagcccuucgagcgggacaucagcaccgaaaucuaucaggccggcagcaccccuugcaacggcguggaaggcuucaacugcuacuucccacugcaguccuacggcuuucagcccacaaauggcgugggcuaucagcccuacagagugguggugcugagcuucgaacugcugcaugcuccugccacagugugcggcccuaagaaaagcaccaaucucgugaagaacaaaugcgugaacuucaacuucaacggccugaccggcaccggcgugcugacagagagcaacaagaaguuccugccauuccagcaguuuggccgggauaucgccgauaccacagacgccguuagagauccccagacacuggaaauccuggacaucaccccaugcagcuucggcggagugucugugaucaccccuggcaccaacaccagcaaucagguggcagugcuguaccaggacgugaacuguaccgaagugcccguggccauucacgccgaucagcugacaccuacauggcggguguacuccaccggcagcaauguguuucagaccagagccggcugucugaucggagccgagcacgugaacaauagcuacgagugcgacauccccaucggcgcuggcaucugugccagcuaccagacacagacaaacagccccagacgggcuagaagcguggccagccagagcaucauugccuacacaaugucucugggcgccgagaacagcguggccuacuccaacaacucuaucgcuauccccaccaacuucaccaucagcgugaccaccgagauccugccuguguccaugaccaagaccagcguggacugcaccauguacaucugcggcgauuccaccgagugcuccaaccugcugcugcaguacggcagcuucugcacccagcugaauagagcccugacagggaucgccguggaacaggacaagaacacccaagagguguucgcccaagugaagcaaaucuacaagaccccuccuaucaaggacuucggcggcuucaauuucagccagauucugcccgauccuagcaagcccagcaagcggagcuucaucgaggaccugcuguucaacaaagugacacuggccgacgccggcuucaucaagcaguauggcgauugucugggcgacauugccgccagggaucugauuugcgcccagaaguuuaacggacugacagugcugccuccucugcugaccgaugagaugaucgcccaguacacaucugcccugcuggccggcacaaucacaagcggcuggacauuuugcgcuggcgccgcucugcagauccccuuugcuaugcagauggccuaccgguucaacggcaucggagugacccagaaugugcuguacgagaaccagaagcugaucgccaaccaguucaacagcgccaucggcaagauccaggacagccugagcagcacagcaagcgcccugggaaagcugcaggacguggucaaccagaaugcccaggcacugaacacccuggucaagcagcuguccuccaacuucggcgccaucagcucugugcugaacgauauccugagcagacuggacaaggucgaggccgaggugcagaucgacagacugaucacaggcagacugcagagccuccagacauacgugacccagcagcugaucagagccgccgagauuagagccucugccaaucuggccgccaccaagaugucugaguguguguguggccagagcaagagaguggacuuuugcggcaagggcuaccaccugaugagcuucccucagucugccccucacggcgugguguuucugcacgugacauaugugcccgcucaagagaagaauuucaccaccgcuccagccaucugccacgacggcaaagcccacuuuccuagagaaggcguguucguguccaacggcacccauugguucgugacacagcggaacuucuacgagccccagaucaucaccaccgacaacaccuucgugucuggcaacugcgacguugugaucggcauugugaacaauaccguguacgacccucugcagcccgagcuggacagcggaggaucuggcuauauccccgaggcuccuagagauggccaggccuauguucggaaggauggcgaaugggugcugcugagcaccuuccuuugaggacuagucccuguucccagagcccacuuuuuuuucuuuuuuugaaauaaaauagccugucuuucagaucucaaaggcucuuuucagagccaccaaaaaaaaaaaaaaaaaaaaaaaaaaaaaaaaaaaaaaaaaaaaaaaaaaaaaaaaaaaaaaaaaaaaaaaaaaaaaaaaaaaaaaaaaaaaaaaaaaaaa

SEQ ID NO: 12655 - RNA, 3806 nt, Artificial Sequence
  SARS-CoV-2/Wuhan/WIV05/2019__EPI_ISL_402128 spike protein mRNA gc mod (1-1147)(I909C_Y1047C) Foldon construct
aggagagucccgcagucggcguccagcggcucugcuuguucgugugugugucguugcaggccuuauucaagcuuaccauguucguguuucuggugcugcugccccugguguccagccagugugugaaccugaccaccagaacacagcugccuccagccuacaccaacagcuucaccagaggcguguacuaccccgacaagguguucagauccagcgugcugcacucuacccaggaccuguuccugccuuucuucagcaacgugaccugguuccacgccauccacguguccggcaccaauggcaccaagagauucgacaaccccgugcugcccuucaacgacgggguguacuuugccagcaccgagaaguccaacaucaucagaggcuggaucuucggcaccacacuggacagcaagacccagagccugcugaucgugaacaacgccaccaacguggucaucaaagugugcgaguuccaguucugcaacgaccccuuccugggcgucuacuaccacaagaacaacaagagcuggauggaaagcgaguuccggguguacagcagcgccaacaacugcaccuucgaguacgugucccagccuuuccugauggaccuggaaggcaagcagggcaacuucaagaaccugcgcgaguucguguucaagaacaucgacggcuacuucaaaaucuacagcaagcacaccccuaucaaccucgugcgggaucugccucagggcuucucugcucuggaaccccugguggaucugcccaucggcaucaacaucacccgguuucagacacugcuggcccugcacagaagcuaccugacaccuggcgauagcagcagcggauggacagcuggugccgccgcuuacuaugugggcuaccugcagccuagaaccuuccugcugaaguacaacgagaacggcaccaucaccgacgccguggauugugcucuggauccucugagcgagacaaagugcacccugaaguccuucaccguggaaaagggcaucuaccagaccagcaacuuccgggugcagcccaccgaauccaucgugcgguuccccaauaucaccaaucugugccccuucggcgagguguucaaugccaccagauucgccucuguguacgccuggaaccggaagcggaucagcaauugcguggccgacuacuccgugcuguacaacuccgccagcuucagcaccuucaagugcuacggcguguccccuaccaagcugaacgaccugugcuucacaaacguguacgccgacagcuucgugauccggggagaugaagugcggcagauugccccuggacagacaggcaagaucgccgacuacaacuacaagcugcccgacgacuucaccggcugugugauugccuggaacagcaacaaccuggacuccaaagucggcggcaacuacaauuaccuguaccggcuguuccggaaguccaaucugaagcccuucgagcgggacaucagcaccgaaaucuaucaggccggcagcaccccuugcaacggcguggaaggcuucaacugcuacuucccacugcaguccuacggcuuucagcccacaaauggcgugggcuaucagcccuacagagugguggugcugagcuucgaacugcugcaugcuccugccacagugugcggcccuaagaaaagcaccaaucucgugaagaacaaaugcgugaacuucaacuucaacggccugaccggcaccggcgugcugacagagagcaacaagaaguuccugccauuccagcaguuuggccgggauaucgccgauaccacagacgccguuagagauccccagacacuggaaauccuggacaucaccccaugcagcuucggcggagugucugugaucaccccuggcaccaacaccagcaaucagguggcagugcuguaccaggacgugaacuguaccgaagugcccguggccauucacgccgaucagcugacaccuacauggcggguguacuccaccggcagcaauguguuucagaccagagccggcugucugaucggagccgagcacgugaacaauagcuacgagugcgacauccccaucggcgcuggcaucugugccagcuaccagacacagacaaacagccccagacgggcuagaagcguggccagccagagcaucauugccuacacaaugucucugggcgccgagaacagcguggccuacuccaacaacucuaucgcuauccccaccaacuucaccaucagcgugaccaccgagauccugccuguguccaugaccaagaccagcguggacugcaccauguacaucugcggcgauuccaccgagugcuccaaccugcugcugcaguacggcagcuucugcacccagcugaauagagcccugacagggaucgccguggaacaggacaagaacacccaagagguguucgcccaagugaagcaaaucuacaagaccccuccuaucaaggacuucggcggcuucaauuucagccagauucugcccgauccuagcaagcccagcaagcggagcuucaucgaggaccugcuguucaacaaagugacacuggccgacgccggcuucaucaagcaguauggcgauugucugggcgacauugccgccagggaucugauuugcgcccagaaguuuaacggacugacagugcugccuccucugcugaccgaugagaugaucgcccaguacacaucugcccugcuggccggcacaaucacaagcggcuggacauuuggagcuggcgccgcucugcagauccccuuugcuaugcagauggccuaccgguucaacggcugcggagugacccagaaugugcuguacgagaaccagaagcugaucgccaaccaguucaacagcgccaucggcaagauccaggacagccugagcagcacagcaagcgcccugggaaagcugcaggacguggucaaccagaaugcccaggcacugaacacccuggucaagcagcuguccuccaacuucggcgccaucagcucugugcugaacgauauccugagcagacuggacaaggucgaggccgaggugcagaucgacagacugaucacaggcagacugcagagccuccagacauacgugacccagcagcugaucagagccgccgagauuagagccucugccaaucuggccgccaccaagaugucugagugugugcugggccagagcaagagaguggacuuuugcggcaagggcugucaccugaugagcuucccucagucugccccucacggcgugguguuucugcacgugacauaugugcccgcucaagagaagaauuucaccaccgcuccagccaucugccacgacggcaaagcccacuuuccuagagaaggcguguucguguccaacggcacccauugguucgugacacagcggaacuucuacgagccccagaucaucaccaccgacaacaccuucgugucuggcaacugcgacguugugaucggcauugugaacaauaccguguacgacccucugcagcccgagcuggacagcggaggaucuggcuauauccccgaggcuccuagagauggccaggccuauguucggaaggauggcgaaugggugcugcugagcaccuuccuuugaggacuagucccuguucccagagcccacuuuuuuuucuuuuuuugaaauaaaauagccugucuuucagaucucaaaggcucuuuucagagccaccaaaaaaaaaaaaaaaaaaaaaaaaaaaaaaaaaaaaaaaaaaaaaaaaaaaaaaaaaaaaaaaaaaaaaaaaaaaaaaaaaaaaaaaaaaaaaaaaaaaaa

SEQ ID NO: 12656 - RNA, 3806 nt, Artificial Sequence
  SARS-CoV-2/Wuhan/WIV05/2019__EPI_ISL_402128 spike protein mRNA gc mod (1-1147)(Q965C_S1003C) Foldon construct
aggagagucccgcagucggcguccagcggcucugcuuguucgugugugugucguugcaggccuuauucaagcuuaccauguucguguuucuggugcugcugccccugguguccagccagugugugaaccugaccaccagaacacagcugccuccagccuacaccaacagcuucaccagaggcguguacuaccccgacaagguguucagauccagcgugcugcacucuacccaggaccuguuccugccuuucuucagcaacgugaccugguuccacgccauccacguguccggcaccaauggcaccaagagauucgacaaccccgugcugcccuucaacgacgggguguacuuugccagcaccgagaaguccaacaucaucagaggcuggaucuucggcaccacacuggacagcaagacccagagccugcugaucgugaacaacgccaccaacguggucaucaaagugugcgaguuccaguucugcaacgaccccuuccugggcgucuacuaccacaagaacaacaagagcuggauggaaagcgaguuccggguguacagcagcgccaacaacugcaccuucgaguacgugucccagccuuuccugauggaccuggaaggcaagcagggcaacuucaagaaccugcgcgaguucguguucaagaacaucgacggcuacuucaaaaucuacagcaagcacaccccuaucaaccucgugcgggaucugccucagggcuucucugcucuggaaccccugguggaucugcccaucggcaucaacaucacccgguuucagacacugcuggcccugcacagaagcuaccugacaccuggcgauagcagcagcggauggacagcuggugccgccgcuuacuaugugggcuaccugcagccuagaaccuuccugcugaaguacaacgagaacggcaccaucaccgacgccguggauugugcucuggauccucugagcgagacaaagugcacccugaaguccuucaccguggaaaagggcaucuaccagaccagcaacuuccgggugcagcccaccgaauccaucgugcgguuccccaauaucaccaaucugugccccuucggcgagguguucaaugccaccagauucgccucuguguacgccuggaaccggaagcggaucagcaauugcguggccgacuacuccgugcuguacaacuccgccagcuucagcaccuucaagugcuacggcguguccccuaccaagcugaacgaccugugcuucacaaacguguacgccgacagcuucgugauccggggagaugaagugcggcagauugccccuggacagacaggcaagaucgccgacuacaacuacaagcugcccgacgacuucaccggcugugugauugccuggaacagcaacaaccuggacuccaaagucggcggcaacuacaauuaccuguaccggcuguuccggaaguccaaucugaagcccuucgagcgggacaucagcaccgaaaucuaucaggccggcagcaccccuugcaacggcguggaaggcuucaacugcuacuucccacugcaguccuacggcuuucagcccacaaauggcgugggcuaucagcccuacagagugguggugcugagcuucgaacugcugcaugcuccugccacagugugcggcccuaagaaaagcaccaaucucgugaagaacaaaugcgugaacuucaacuucaacggccugaccggcaccggcgugcugacagagagcaacaagaaguuccugccauuccagcaguuuggccgggauaucgccgauaccacagacgccguuagagauccccagacacuggaaauccuggacaucaccccaugcagcuucggcggagugucugugaucaccccuggcaccaacaccagcaaucagguggcagugcuguaccaggacgugaacuguaccgaagugcccguggccauucacgccgaucagcugacaccuacauggcggguguacuccaccggcagcaauguguuucagaccagagccggcugucugaucggagccgagcacgugaacaauagcuacgagugcgacauccccaucggcgcuggcaucugugccagcuaccagacacagacaaacagccccagacgggcuagaagcguggccagccagagcaucauugccuacacaaugucucugggcgccgagaacagcguggccuacuccaacaacucuaucgcuauccccaccaacuucaccaucagcgugaccaccgagauccugccuguguccaugaccaagaccagcguggacugcaccauguacaucugcggcgauuccaccgagugcuccaaccugcugcugcaguacggcagcuucugcacccagcugaauagagcccugacagggaucgccguggaacaggacaagaacacccaagagguguucgcccaagugaagcaaaucuacaagaccccuccuaucaaggacuucggcggcuucaauuucagccagauucugcccgauccuagcaagcccagcaagcggagcuucaucgaggaccugcuguucaacaaagugacacuggccgacgccggcuucaucaagcaguauggcgauugucugggcgacauugccgccagggaucugauuugcgcccagaaguuuaacggacugacagugcugccuccucugcugaccgaugagaugaucgcccaguacacaucugcccugcuggccggcacaaucacaagcggcuggacauuuggagcuggcgccgcucugcagauccccuuugcuaugcagauggccuaccgguucaacggcaucggagugacccagaaugugcuguacgagaaccagaagcugaucgccaaccaguucaacagcgccaucggcaagauccaggacagccugagcagcacagcaagcgcccugggaaagcugcaggacguggucaaccagaaugcccaggcacugaacacccuggucaagugccuguccuccaacuucggcgccaucagcucugugcugaacgauauccugagcagacuggacaaggucgaggccgaggugcagaucgacagacugaucacaggcagacugcagugucuccagacauacgugacccagcagcugaucagagccgccgagauuagagccucugccaaucuggccgccaccaagaugucugagugugugcugggccagagcaagagaguggacuuuugcggcaagggcuaccaccugaugagcuucccucagucugccccucacggcgugguguuucugcacgugacauaugugcccgcucaagagaagaauuucaccaccgcuccagccaucugccacgacggcaaagcccacuuuccuagagaaggcguguucguguccaacggcacccauugguucgugacacagcggaacuucuacgagccccagaucaucaccaccgacaacaccuucgugucuggcaacugcgacguugugaucggcauugugaacaauaccguguacgacccucugcagcccgagcuggacagcggaggaucuggcuauauccccgaggcuccuagagauggccaggccuauguucggaaggauggcgaaugggugcugcugagcaccuuccuuugaggacuagucccuguucccagagcccacuuuuuuuucuuuuuuugaaauaaaauagccugucuuucagaucucaaaggcucuuuucagagccaccaaaaaaaaaaaaaaaaaaaaaaaaaaaaaaaaaaaaaaaaaaaaaaaaaaaaaaaaaaaaaaaaaaaaaaaaaaaaaaaaaaaaaaaaaaaaaaaaaaaaa

SEQ ID NO: 12657 - RNA, 3806 nt, Artificial Sequence
  SARS-CoV-2/Wuhan/WIV05/2019__EPI_ISL_402128 spike protein mRNA gc mod (1-1147)(F970C_G999C) Foldon construct
aggagagucccgcagucggcguccagcggcucugcuuguucgugugugugucguugcaggccuuauucaagcuuaccauguucguguuucuggugcugcugccccugguguccagccagugugugaaccugaccaccagaacacagcugccuccagccuacaccaacagcuucaccagaggcguguacuaccccgacaagguguucagauccagcgugcugcacucuacccaggaccuguuccugccuuucuucagcaacgugaccugguuccacgccauccacguguccggcaccaauggcaccaagagauucgacaaccccgugcugcccuucaacgacgggguguacuuugccagcaccgagaaguccaacaucaucagaggcuggaucuucggcaccacacuggacagcaagacccagagccugcugaucgugaacaacgccaccaacguggucaucaaagugugcgaguuccaguucugcaacgaccccuuccugggcgucuacuaccacaagaacaacaagagcuggauggaaagcgaguuccggguguacagcagcgccaacaacugcaccuucgaguacgugucccagccuuuccugauggaccuggaaggcaagcagggcaacuucaagaaccugcgcgaguucguguucaagaacaucgacggcuacuucaaaaucuacagcaagcacaccccuaucaaccucgugcgggaucugccucagggcuucucugcucuggaaccccugguggaucugcccaucggcaucaacaucacccgguuucagacacugcuggcccugcacagaagcuaccugacaccuggcgauagcagcagcggauggacagcuggugccgccgcuuacuaugugggcuaccugcagccuagaaccuuccugcugaaguacaacgagaacggcaccaucaccgacgccguggauugugcucuggauccucugagcgagacaaagugcacccugaaguccuucaccguggaaaagggcaucuaccagaccagcaacuuccgggugcagcccaccgaauccaucgugcgguuccccaauaucaccaaucugugccccuucggcgagguguucaaugccaccagauucgccucuguguacgccuggaaccggaagcggaucagcaauugcguggccgacuacuccgugcuguacaacuccgccagcuucagcaccuucaagugcuacggcguguccccuaccaagcugaacgaccugugcuucacaaacguguacgccgacagcuucgugauccggggagaugaagugcggcagauugccccuggacagacaggcaagaucgccgacuacaacuacaagcugcccgacgacuucaccggcugugugauugccuggaacagcaacaaccuggacuccaaagucggcggcaacuacaauuaccuguaccggcuguuccggaaguccaaucugaagcccuucgagcgggacaucagcaccgaaaucuaucaggccggcagcaccccuugcaacggcguggaaggcuucaacugcuacuucccacugcaguccuacggcuuucagcccacaaauggcgugggcuaucagcccuacagagugguggugcugagcuucgaacugcugcaugcuccugccacagugugcggcccuaagaaaagcaccaaucucgugaagaacaaaugcgugaacuucaacuucaacggccugaccggcaccggcgugcugacagagagcaacaagaaguuccugccauuccagcaguuuggccgggauaucgccgauaccacagacgccguuagagauccccagacacuggaaauccuggacaucaccccaugcagcuucggcggagugucugugaucaccccuggcaccaacaccagcaaucagguggcagugcuguaccaggacgugaacuguaccgaagugcccguggccauucacgccgaucagcugacaccuacauggcggguguacuccaccggcagcaauguguuucagaccagagccggcugucugaucggagccgagcacgugaacaauagcuacgagugcgacauccccaucggcgcuggcaucugugccagcuaccagacacagacaaacagccccagacgggcuagaagcguggccagccagagcaucauugccuacacaaugucucugggcgccgagaacagcguggccuacuccaacaacucuaucgcuauccccaccaacuucaccaucagcgugaccaccgagauccugccuguguccaugaccaagaccagcguggacugcaccauguacaucugcggcgauuccaccgagugcuccaaccugcugcugcaguacggcagcuucugcacccagcugaauagagcccugacagggaucgccguggaacaggacaagaacacccaagagguguucgcccaagugaagcaaaucuacaagaccccuccuaucaaggacuucggcggcuucaauuucagccagauucugcccgauccuagcaagcccagcaagcggagcuucaucgaggaccugcuguucaacaaagugacacuggccgacgccggcuucaucaagcaguauggcgauugucugggcgacauugccgccagggaucugauuugcgcccagaaguuuaacggacugacagugcugccuccucugcugaccgaugagaugaucgcccaguacacaucugcccugcuggccggcacaaucacaagcggcuggacauuuggagcuggcgccgcucugcagauccccuuugcuaugcagauggccuaccgguucaacggcaucggagugacccagaaugugcuguacgagaaccagaagcugaucgccaaccaguucaacagcgccaucggcaagauccaggacagccugagcagcacagcaagcgcccugggaaagcugcaggacguggucaaccagaaugcccaggcacugaacacccuggucaagcagcuguccuccaacugcggcgccaucagcucugugcugaacgauauccugagcagacuggacaaggucgaggccgaggugcagaucgacagacugaucacauguagacugcagagccuccagacauacgugacccagcagcugaucagagccgccgagauuagagccucugccaaucuggccgccaccaagaugucugagugugugcugggccagagcaagagaguggacuuuugcggcaagggcuaccaccugaugagcuucccucagucugccccucacggcgugguguuucugcacgugacauaugugcccgcucaagagaagaauuucaccaccgcuccagccaucugccacgacggcaaagcccacuuuccuagagaaggcguguucguguccaacggcacccauugguucgugacacagcggaacuucuacgagccccagaucaucaccaccgacaacaccuucgugucuggcaacugcgacguugugaucggcauugugaacaauaccguguacgacccucugcagcccgagcuggacagcggaggaucuggcuauauccccgaggcuccuagagauggccaggccuauguucggaaggauggcgaaugggugcugcugagcaccuuccuuugaggacuagucccuguucccagagcccacuuuuuuuucuuuuuuugaaauaaaauagccugucuuucagaucucaaaggcucuuuucagagccaccaaaaaaaaaaaaaaaaaaaaaaaaaaaaaaaaaaaaaaaaaaaaaaaaaaaaaaaaaaaaaaaaaaaaaaaaaaaaaaaaaaaaaaaaaaaaaaaaaaaaa

SEQ ID NO: 12658 - RNA, 3806 nt, Artificial Sequence
  SARS-CoV-2/Wuhan/WIV05/2019__EPI_ISL_402128 spike protein mRNA gc mod (1-1147)(A972C_R995C) Foldon construct
aggagagucccgcagucggcguccagcggcucugcuuguucgugugugugucguugcaggccuuauucaagcuuaccauguucguguuucuggugcugcugccccugguguccagccagugugugaaccugaccaccagaacacagcugccuccagccuacaccaacagcuucaccagaggcguguacuaccccgacaagguguucagauccagcgugcugcacucuacccaggaccuguuccugccuuucuucagcaacgugaccugguuccacgccauccacguguccggcaccaauggcaccaagagauucgacaaccccgugcugcccuucaacgacgggguguacuuugccagcaccgagaaguccaacaucaucagaggcuggaucuucggcaccacacuggacagcaagacccagagccugcugaucgugaacaacgccaccaacguggucaucaaagugugcgaguuccaguucugcaacgaccccuuccugggcgucuacuaccacaagaacaacaagagcuggauggaaagcgaguuccggguguacagcagcgccaacaacugcaccuucgaguacgugucccagccuuuccugauggaccuggaaggcaagcagggcaacuucaagaaccugcgcgaguucguguucaagaacaucgacggcuacuucaaaaucuacagcaagcacaccccuaucaaccucgugcgggaucugccucagggcuucucugcucuggaaccccugguggaucugcccaucggcaucaacaucacccgguuucagacacugcuggcccugcacagaagcuaccugacaccuggcgauagcagcagcggauggacagcuggugccgccgcuuacuaugugggcuaccugcagccuagaaccuuccugcugaaguacaacgagaacggcaccaucaccgacgccguggauugugcucuggauccucugagcgagacaaagugcacccugaaguccuucaccguggaaaagggcaucuaccagaccagcaacuuccgggugcagcccaccgaauccaucgugcgguuccccaauaucaccaaucugugccccuucggcgagguguucaaugccaccagauucgccucuguguacgccuggaaccggaagcggaucagcaauugcguggccgacuacuccgugcuguacaacuccgccagcuucagcaccuucaagugcuacggcguguccccuaccaagcugaacgaccugugcuucacaaacguguacgccgacagcuucgugauccggggagaugaagugcggcagauugccccuggacagacaggcaagaucgccgacuacaacuacaagcugcccgacgacuucaccggcugugugauugccuggaacagcaacaaccuggacuccaaagucggcggcaacuacaauuaccuguaccggcuguuccggaaguccaaucugaagcccuucgagcgggacaucagcaccgaaaucuaucaggccggcagcaccccuugcaacggcguggaaggcuucaacugcuacuucccacugcaguccuacggcuuucagcccacaaauggcgugggcuaucagcccuacagagugguggugcugagcuucgaacugcugcaugcuccugccacagugugcggcccuaagaaaagcaccaaucucgugaagaacaaaugcgugaacuucaacuucaacggccugaccggcaccggcgugcugacagagagcaacaagaaguuccugccauuccagcaguuuggccgggauaucgccgauaccacagacgccguuagagauccccagacacuggaaauccuggacaucaccccaugcagcuucggcggagugucugugaucaccccuggcaccaacaccagcaaucagguggcagugcuguaccaggacgugaacuguaccgaagugcccguggccauucacgccgaucagcugacaccuacauggcggguguacuccaccggcagcaauguguuucagaccagagccggcugucugaucggagccgagcacgugaacaauagcuacgagugcgacauccccaucggcgcuggcaucugugccagcuaccagacacagacaaacagccccagacgggcuagaagcguggccagccagagcaucauugccuacacaaugucucugggcgccgagaacagcguggccuacuccaacaacucuaucgcuauccccaccaacuucaccaucagcgugaccaccgagauccugccuguguccaugaccaagaccagcguggacugcaccauguacaucugcggcgauuccaccgagugcuccaaccugcugcugcaguacggcagcuucugcacccagcugaauagagcccugacagggaucgccguggaacaggacaagaacacccaagagguguucgcccaagugaagcaaaucuacaagaccccuccuaucaaggacuucggcggcuucaauuucagccagauucugcccgauccuagcaagcccagcaagcggagcuucaucgaggaccugcuguucaacaaagugacacuggccgacgccggcuucaucaagcaguauggcgauugucugggcgacauugccgccagggaucugauuugcgcccagaaguuuaacggacugacagugcugccuccucugcugaccgaugagaugaucgcccaguacacaucugcccugcuggccggcacaaucacaagcggcuggacauuuggagcuggcgccgcucugcagauccccuuugcuaugcagauggccuaccgguucaacggcaucggagugacccagaaugugcuguacgagaaccagaagcugaucgccaaccaguucaacagcgccaucggcaagauccaggacagccugagcagcacagcaagcgcccugggaaagcugcaggacguggucaaccagaaugcccaggcacugaacacccuggucaagcagcuguccuccaacuucggcugcaucagcucugugcugaacgauauccugagcagacuggacaaggucgaggccgaggugcagaucgacugucugaucacaggcagacugcagagccuccagacauacgugacccagcagcugaucagagccgccgagauuagagccucugccaaucuggccgccaccaagaugucugagugugugcugggccagagcaagagaguggacuuuugcggcaagggcuaccaccugaugagcuucccucagucugccccucacggcgugguguuucugcacgugacauaugugcccgcucaagagaagaauuucaccaccgcuccagccaucugccacgacggcaaagcccacuuuccuagagaaggcguguucguguccaacggcacccauugguucgugacacagcggaacuucuacgagccccagaucaucaccaccgacaacaccuucgugucuggcaacugcgacguugugaucggcauugugaacaauaccguguacgacccucugcagcccgagcuggacagcggaggaucuggcuauauccccgaggcuccuagagauggccaggccuauguucggaaggauggcgaaugggugcugcugagcaccuuccuuugaggacuagucccuguucccagagcccacuuuuuuuucuuuuuuugaaauaaaauagccugucuuucagaucucaaaggcucuuuucagagccaccaaaaaaaaaaaaaaaaaaaaaaaaaaaaaaaaaaaaaaaaaaaaaaaaaaaaaaaaaaaaaaaaaaaaaaaaaaaaaaaaaaaaaaaaaaaaaaaaaaaaa

SEQ ID NO: 12659 - RNA, 3806 nt, Artificial Sequence
  SARS-CoV-2/Wuhan/WIV05/2019__EPI_ISL_402128 spike protein mRNA gc mod (1-1147)(A890C_V1040C) Foldon construct
aggagagucccgcagucggcguccagcggcucugcuuguucgugugugugucguugcaggccuuauucaagcuuaccauguucguguuucuggugcugcugccccugguguccagccagugugugaaccugaccaccagaacacagcugccuccagccuacaccaacagcuucaccagaggcguguacuaccccgacaagguguucagauccagcgugcugcacucuacccaggaccuguuccugccuuucuucagcaacgugaccugguuccacgccauccacguguccggcaccaauggcaccaagagauucgacaaccccgugcugcccuucaacgacgggguguacuuugccagcaccgagaaguccaacaucaucagaggcuggaucuucggcaccacacuggacagcaagacccagagccugcugaucgugaacaacgccaccaacguggucaucaaagugugcgaguuccaguucugcaacgaccccuuccugggcgucuacuaccacaagaacaacaagagcuggauggaaagcgaguuccggguguacagcagcgccaacaacugcaccuucgaguacgugucccagccuuuccugauggaccuggaaggcaagcagggcaacuucaagaaccugcgcgaguucguguucaagaacaucgacggcuacuucaaaaucuacagcaagcacaccccuaucaaccucgugcgggaucugccucagggcuucucugcucuggaaccccugguggaucugcccaucggcaucaacaucacccgguuucagacacugcuggcccugcacagaagcuaccugacaccuggcgauagcagcagcggauggacagcuggugccgccgcuuacuaugugggcuaccugcagccuagaaccuuccugcugaaguacaacgagaacggcaccaucaccgacgccguggauugugcucuggauccucugagcgagacaaagugcacccugaaguccuucaccguggaaaagggcaucuaccagaccagcaacuuccgggugcagcccaccgaauccaucgugcgguuccccaauaucaccaaucugugccccuucggcgagguguucaaugccaccagauucgccucuguguacgccuggaaccggaagcggaucagcaauugcguggccgacuacuccgugcuguacaacuccgccagcuucagcaccuucaagugcuacggcguguccccuaccaagcugaacgaccugugcuucacaaacguguacgccgacagcuucgugauccggggagaugaagugcggcagauugccccuggacagacaggcaagaucgccgacuacaacuacaagcugcccgacgacuucaccggcugugugauugccuggaacagcaacaaccuggacuccaaagucggcggcaacuacaauuaccuguaccggcuguuccggaaguccaaucugaagcccuucgagcgggacaucagcaccgaaaucuaucaggccggcagcaccccuugcaacggcguggaaggcuucaacugcuacuucccacugcaguccuacggcuuucagcccacaaauggcgugggcuaucagcccuacagagugguggugcugagcuucgaacugcugcaugcuccugccacagugugcggcccuaagaaaagcaccaaucucgugaagaacaaaugcgugaacuucaacuucaacggccugaccggcaccggcgugcugacagagagcaacaagaaguuccugccauuccagcaguuuggccgggauaucgccgauaccacagacgccguuagagauccccagacacuggaaauccuggacaucaccccaugcagcuucggcggagugucugugaucaccccuggcaccaacaccagcaaucagguggcagugcuguaccaggacgugaacuguaccgaagugcccguggccauucacgccgaucagcugacaccuacauggcggguguacuccaccggcagcaauguguuucagaccagagccggcugucugaucggagccgagcacgugaacaauagcuacgagugcgacauccccaucggcgcuggcaucugugccagcuaccagacacagacaaacagccccagacgggcuagaagcguggccagccagagcaucauugccuacacaaugucucugggcgccgagaacagcguggccuacuccaacaacucuaucgcuauccccaccaacuucaccaucagcgugaccaccgagauccugccuguguccaugaccaagaccagcguggacugcaccauguacaucugcggcgauuccaccgagugcuccaaccugcugcugcaguacggcagcuucugcacccagcugaauagagcccugacagggaucgccguggaacaggacaagaacacccaagagguguucgcccaagugaagcaaaucuacaagaccccuccuaucaaggacuucggcggcuucaauuucagccagauucugcccgauccuagcaagcccagcaagcggagcuucaucgaggaccugcuguucaacaaagugacacuggccgacgccggcuucaucaagcaguauggcgauugucugggcgacauugccgccagggaucugauuugcgcccagaaguuuaacggacugacagugcugccuccucugcugaccgaugagaugaucgcccaguacacaucugcccugcuggccggcacaaucacaagcggcuggacauuuggaugcggcgccgcucugcagauccccuuugcuaugcagauggccuaccgguucaacggcaucggagugacccagaaugugcuguacgagaaccagaagcugaucgccaaccaguucaacagcgccaucggcaagauccaggacagccugagcagcacagcaagcgcccugggaaagcugcaggacguggucaaccagaaugcccaggcacugaacacccuggucaagcagcuguccuccaacuucggcgccaucagcucugugcugaacgauauccugagcagacuggacaaggucgaggccgaggugcagaucgacagacugaucacaggcagacugcagagccuccagacauacgugacccagcagcugaucagagccgccgagauuagagccucugccaaucuggccgccaccaagaugucugagugugugcugggccagagcaagagaugugacuuuugcggcaagggcuaccaccugaugagcuucccucagucugccccucacggcgugguguuucugcacgugacauaugugcccgcucaagagaagaauuucaccaccgcuccagccaucugccacgacggcaaagcccacuuuccuagagaaggcguguucguguccaacggcacccauugguucgugacacagcggaacuucuacgagccccagaucaucaccaccgacaacaccuucgugucuggcaacugcgacguugugaucggcauugugaacaauaccguguacgacccucugcagcccgagcuggacagcggaggaucuggcuauauccccgaggcuccuagagauggccaggccuauguucggaaggauggcgaaugggugcugcugagcaccuuccuuugaggacuagucccuguucccagagcccacuuuuuuuucuuuuuuugaaauaaaauagccugucuuucagaucucaaaggcucuuuucagagccaccaaaaaaaaaaaaaaaaaaaaaaaaaaaaaaaaaaaaaaaaaaaaaaaaaaaaaaaaaaaaaaaaaaaaaaaaaaaaaaaaaaaaaaaaaaaaaaaaaaaaa

SEQ ID NO: 12660 - RNA, 3806 nt, Artificial Sequence
  SARS-CoV-2/Wuhan/WIV05/2019__EPI_ISL_402128 spike protein mRNA gc mod (1-1147)(T874C_S1055C) Foldon construct
aggagagucccgcagucggcguccagcggcucugcuuguucgugugugugucguugcaggccuuauucaagcuuaccauguucguguuucuggugcugcugccccugguguccagccagugugugaaccugaccaccagaacacagcugccuccagccuacaccaacagcuucaccagaggcguguacuaccccgacaagguguucagauccagcgugcugcacucuacccaggaccuguuccugccuuucuucagcaacgugaccugguuccacgccauccacguguccggcaccaauggcaccaagagauucgacaaccccgugcugcccuucaacgacgggguguacuuugccagcaccgagaaguccaacaucaucagaggcuggaucuucggcaccacacuggacagcaagacccagagccugcugaucgugaacaacgccaccaacguggucaucaaagugugcgaguuccaguucugcaacgaccccuuccugggcgucuacuaccacaagaacaacaagagcuggauggaaagcgaguuccggguguacagcagcgccaacaacugcaccuucgaguacgugucccagccuuuccugauggaccuggaaggcaagcagggcaacuucaagaaccugcgcgaguucguguucaagaacaucgacggcuacuucaaaaucuacagcaagcacaccccuaucaaccucgugcgggaucugccucagggcuucucugcucuggaaccccugguggaucugcccaucggcaucaacaucacccgguuucagacacugcuggcccugcacagaagcuaccugacaccuggcgauagcagcagcggauggacagcuggugccgccgcuuacuaugugggcuaccugcagccuagaaccuuccugcugaaguacaacgagaacggcaccaucaccgacgccguggauugugcucuggauccucugagcgagacaaagugcacccugaaguccuucaccguggaaaagggcaucuaccagaccagcaacuuccgggugcagcccaccgaauccaucgugcgguuccccaauaucaccaaucugugccccuucggcgagguguucaaugccaccagauucgccucuguguacgccuggaaccggaagcggaucagcaauugcguggccgacuacuccgugcuguacaacuccgccagcuucagcaccuucaagugcuacggcguguccccuaccaagcugaacgaccugugcuucacaaacguguacgccgacagcuucgugauccggggagaugaagugcggcagauugccccuggacagacaggcaagaucgccgacuacaacuacaagcugcccgacgacuucaccggcugugugauugccuggaacagcaacaaccuggacuccaaagucggcggcaacuacaauuaccuguaccggcuguuccggaaguccaaucugaagcccuucgagcgggacaucagcaccgaaaucuaucaggccggcagcaccccuugcaacggcguggaaggcuucaacugcuacuucccacugcaguccuacggcuuucagcccacaaauggcgugggcuaucagcccuacagagugguggugcugagcuucgaacugcugcaugcuccugccacagugugcggcccuaagaaaagcaccaaucucgugaagaacaaaugcgugaacuucaacuucaacggccugaccggcaccggcgugcugacagagagcaacaagaaguuccugccauuccagcaguuuggccgggauaucgccgauaccacagacgccguuagagauccccagacacuggaaauccuggacaucaccccaugcagcuucggcggagugucugugaucaccccuggcaccaacaccagcaaucagguggcagugcuguaccaggacgugaacuguaccgaagugcccguggccauucacgccgaucagcugacaccuacauggcggguguacuccaccggcagcaauguguuucagaccagagccggcugucugaucggagccgagcacgugaacaauagcuacgagugcgacauccccaucggcgcuggcaucugugccagcuaccagacacagacaaacagccccagacgggcuagaagcguggccagccagagcaucauugccuacacaaugucucugggcgccgagaacagcguggccuacuccaacaacucuaucgcuauccccaccaacuucaccaucagcgugaccaccgagauccugccuguguccaugaccaagaccagcguggacugcaccauguacaucugcggcgauuccaccgagugcuccaaccugcugcugcaguacggcagcuucugcacccagcugaauagagcccugacagggaucgccguggaacaggacaagaacacccaagagguguucgcccaagugaagcaaaucuacaagaccccuccuaucaaggacuucggcggcuucaauuucagccagauucugcccgauccuagcaagcccagcaagcggagcuucaucgaggaccugcuguucaacaaagugacacuggccgacgccggcuucaucaagcaguauggcgauugucugggcgacauugccgccagggaucugauuugcgcccagaaguuuaacggacugacagugcugccuccucugcugaccgaugagaugaucgcccaguacugcucugcccugcuggccggcacaaucacaagcggcuggacauuuggagcuggcgccgcucugcagauccccuuugcuaugcagauggccuaccgguucaacggcaucggagugacccagaaugugcuguacgagaaccagaagcugaucgccaaccaguucaacagcgccaucggcaagauccaggacagccugagcagcacagcaagcgcccugggaaagcugcaggacguggucaaccagaaugcccaggcacugaacacccuggucaagcagcuguccuccaacuucggcgccaucagcucugugcugaacgauauccugagcagacuggacaaggucgaggccgaggugcagaucgacagacugaucacaggcagacugcagagccuccagacauacgugacccagcagcugaucagagccgccgagauuagagccucugccaaucuggccgccaccaagaugucugagugugugcugggccagagcaagagaguggacuuuugcggcaagggcuaccaccugaugagcuucccucagugcgccccucacggcgugguguuucugcacgugacauaugugcccgcucaagagaagaauuucaccaccgcuccagccaucugccacgacggcaaagcccacuuuccuagagaaggcguguucguguccaacggcacccauugguucgugacacagcggaacuucuacgagccccagaucaucaccaccgacaacaccuucgugucuggcaacugcgacguugugaucggcauugugaacaauaccguguacgacccucugcagcccgagcuggacagcggaggaucuggcuauauccccgaggcuccuagagauggccaggccuauguucggaaggauggcgaaugggugcugcugagcaccuuccuuugaggacuagucccuguucccagagcccacuuuuuuuucuuuuuuugaaauaaaauagccugucuuucagaucucaaaggcucuuuucagagccaccaaaaaaaaaaaaaaaaaaaaaaaaaaaaaaaaaaaaaaaaaaaaaaaaaaaaaaaaaaaaaaaaaaaaaaaaaaaaaaaaaaaaaaaaaaaaaaaaaaaaa

SEQ ID NO: 12661 - RNA, 4178 nt, Artificial Sequence
  SARS-CoV-2/Wuhan/WIV05/2019__EPI_ISL_402128 spike protein mRNA gc mod (1-1147) WhcAg construct
aggagagucccgcagucggcguccagcggcucugcuuguucgugugugugucguugcaggccuuauucaagcuuaccauguucguguuucuggugcugcugccccugguguccagccagugugugaaccugaccaccagaacacagcugccuccagccuacaccaacagcuucaccagaggcguguacuaccccgacaagguguucagauccagcgugcugcacucuacccaggaccuguuccugccuuucuucagcaacgugaccugguuccacgccauccacguguccggcaccaauggcaccaagagauucgacaaccccgugcugcccuucaacgacgggguguacuuugccagcaccgagaaguccaacaucaucagaggcuggaucuucggcaccacacuggacagcaagacccagagccugcugaucgugaacaacgccaccaacguggucaucaaagugugcgaguuccaguucugcaacgaccccuuccugggcgucuacuaccacaagaacaacaagagcuggauggaaagcgaguuccggguguacagcagcgccaacaacugcaccuucgaguacgugucccagccuuuccugauggaccuggaaggcaagcagggcaacuucaagaaccugcgcgaguucguguucaagaacaucgacggcuacuucaaaaucuacagcaagcacaccccuaucaaccucgugcgggaucugccucagggcuucucugcucuggaaccccugguggaucugcccaucggcaucaacaucacccgguuucagacacugcuggcccugcacagaagcuaccugacaccuggcgauagcagcagcggauggacagcuggugccgccgcuuacuaugugggcuaccugcagccuagaaccuuccugcugaaguacaacgagaacggcaccaucaccgacgccguggauugugcucuggauccucugagcgagacaaagugcacccugaaguccuucaccguggaaaagggcaucuaccagaccagcaacuuccgggugcagcccaccgaauccaucgugcgguuccccaauaucaccaaucugugccccuucggcgagguguucaaugccaccagauucgccucuguguacgccuggaaccggaagcggaucagcaauugcguggccgacuacuccgugcuguacaacuccgccagcuucagcaccuucaagugcuacggcguguccccuaccaagcugaacgaccugugcuucacaaacguguacgccgacagcuucgugauccggggagaugaagugcggcagauugccccuggacagacaggcaagaucgccgacuacaacuacaagcugcccgacgacuucaccggcugugugauugccuggaacagcaacaaccuggacuccaaagucggcggcaacuacaauuaccuguaccggcuguuccggaaguccaaucugaagcccuucgagcgggacaucagcaccgaaaucuaucaggccggcagcaccccuugcaacggcguggaaggcuucaacugcuacuucccacugcaguccuacggcuuucagcccacaaauggcgugggcuaucagcccuacagagugguggugcugagcuucgaacugcugcaugcuccugccacagugugcggcccuaagaaaagcaccaaucucgugaagaacaaaugcgugaacuucaacuucaacggccugaccggcaccggcgugcugacagagagcaacaagaaguuccugccauuccagcaguuuggccgggauaucgccgauaccacagacgccguuagagauccccagacacuggaaauccuggacaucaccccaugcagcuucggcggagugucugugaucaccccuggcaccaacaccagcaaucagguggcagugcuguaccaggacgugaacuguaccgaagugcccguggccauucacgccgaucagcugacaccuacauggcggguguacuccaccggcagcaauguguuucagaccagagccggcugucugaucggagccgagcacgugaacaauagcuacgagugcgacauccccaucggcgcuggcaucugugccagcuaccagacacagacaaacagccccagacgggcuagaagcguggccagccagagcaucauugccuacacaaugucucugggcgccgagaacagcguggccuacuccaacaacucuaucgcuauccccaccaacuucaccaucagcgugaccaccgagauccugccuguguccaugaccaagaccagcguggacugcaccauguacaucugcggcgauuccaccgagugcuccaaccugcugcugcaguacggcagcuucugcacccagcugaauagagcccugacagggaucgccguggaacaggacaagaacacccaagagguguucgcccaagugaagcaaaucuacaagaccccuccuaucaaggacuucggcggcuucaauuucagccagauucugcccgauccuagcaagcccagcaagcggagcuucaucgaggaccugcuguucaacaaagugacacuggccgacgccggcuucaucaagcaguauggcgauugucugggcgacauugccgccagggaucugauuugcgcccagaaguuuaacggacugacagugcugccuccucugcugaccgaugagaugaucgcccaguacacaucugcccugcuggccggcacaaucacaagcggcuggacauuuggagcuggcgccgcucugcagauccccuuugcuaugcagauggccuaccgguucaacggcaucggagugacccagaaugugcuguacgagaaccagaagcugaucgccaaccaguucaacagcgccaucggcaagauccaggacagccugagcagcacagcaagcgcccugggaaagcugcaggacguggucaaccagaaugcccaggcacugaacacccuggucaagcagcuguccuccaacuucggcgccaucagcucugugcugaacgauauccugagcagacuggacaaggucgaggccgaggugcagaucgacagacugaucacaggcagacugcagagccuccagacauacgugacccagcagcugaucagagccgccgagauuagagccucugccaaucuggccgccaccaagaugucugagugugugcugggccagagcaagagaguggacuuuugcggcaagggcuaccaccugaugagcuucccucagucugccccucacggcgugguguuucugcacgugacauaugugcccgcucaagagaagaauuucaccaccgcuccagccaucugccacgacggcaaagcccacuuuccuagagaaggcguguucguguccaacggcacccauugguucgugacacagcggaacuucuacgagccccagaucaucaccaccgacaacaccuucgugucuggcaacugcgacguugugaucggcauugugaacaauaccguguacgacccucugcagcccgagcuggacagcggaggcggaggaucugacaucgaccccuacaaagaguucggcagcagcuaccagcugcugaacuuccugccucuggacuucuuccccgaccugaacgcccugguggauacagccacagcucuguacgaggaagaacugaccggcagagagcacugcagcccucaccacacagccauuagacaggcccucgugugcugggacgagcugacaaaacugaucgccuggaugagcagcaacaucaccagcgagcaagugcggaccaucaucgugaaccacgugaacgauaccuggggccugaaagugcggcagagccugugguuucaccugagcugucugaccuucggccagcacaccgugcaagaguuucugguguccuucggcguguggaucagaaccccugcuccauacagaccuccaaacgcucccauccugagcacccugccugagcacacagugaucuguugaggacuagucccuguucccagagcccacuuuuuuuucuuuuuuugaaauaaaauagccugucuuucagaucucaaaggcucuuuucagagccaccaaaaaaaaaaaaaaaaaaaaaaaaaaaaaaaaaaaaaaaaaaaaaaaaaaaaaaaaaaaaaaaaaaaaaaaaaaaaaaaaaaaaaaaaaaaaaaaaaaaaa

SEQ ID NO: 12662 - RNA, 4178 nt, Artificial Sequence
  SARS-CoV-2/Wuhan/WIV05/2019__EPI_ISL_402128 spike protein mRNA gc mod (1-1147)(K986P_V987P) WhcAg construct
aggagagucccgcagucggcguccagcggcucugcuuguucgugugugugucguugcaggccuuauucaagcuuaccauguucguguuucuggugcugcugccccugguguccagccagugugugaaccugaccaccagaacacagcugccuccagccuacaccaacagcuucaccagaggcguguacuaccccgacaagguguucagauccagcgugcugcacucuacccaggaccuguuccugccuuucuucagcaacgugaccugguuccacgccauccacguguccggcaccaauggcaccaagagauucgacaaccccgugcugcccuucaacgacgggguguacuuugccagcaccgagaaguccaacaucaucagaggcuggaucuucggcaccacacuggacagcaagacccagagccugcugaucgugaacaacgccaccaacguggucaucaaagugugcgaguuccaguucugcaacgaccccuuccugggcgucuacuaccacaagaacaacaagagcuggauggaaagcgaguuccggguguacagcagcgccaacaacugcaccuucgaguacgugucccagccuuuccugauggaccuggaaggcaagcagggcaacuucaagaaccugcgcgaguucguguucaagaacaucgacggcuacuucaaaaucuacagcaagcacaccccuaucaaccucgugcgggaucugccucagggcuucucugcucuggaaccccugguggaucugcccaucggcaucaacaucacccgguuucagacacugcuggcccugcacagaagcuaccugacaccuggcgauagcagcagcggauggacagcuggugccgccgcuuacuaugugggcuaccugcagccuagaaccuuccugcugaaguacaacgagaacggcaccaucaccgacgccguggauugugcucuggauccucugagcgagacaaagugcacccugaaguccuucaccguggaaaagggcaucuaccagaccagcaacuuccgggugcagcccaccgaauccaucgugcgguuccccaauaucaccaaucugugccccuucggcgagguguucaaugccaccagauucgccucuguguacgccuggaaccggaagcggaucagcaauugcguggccgacuacuccgugcuguacaacuccgccagcuucagcaccuucaagugcuacggcguguccccuaccaagcugaacgaccugugcuucacaaacguguacgccgacagcuucgugauccggggagaugaagugcggcagauugccccuggacagacaggcaagaucgccgacuacaacuacaagcugcccgacgacuucaccggcugugugauugccuggaacagcaacaaccuggacuccaaagucggcggcaacuacaauuaccuguaccggcuguuccggaaguccaaucugaagcccuucgagcgggacaucagcaccgaaaucuaucaggccggcagcaccccuugcaacggcguggaaggcuucaacugcuacuucccacugcaguccuacggcuuucagcccacaaauggcgugggcuaucagcccuacagagugguggugcugagcuucgaacugcugcaugcuccugccacagugugcggcccuaagaaaagcaccaaucucgugaagaacaaaugcgugaacuucaacuucaacggccugaccggcaccggcgugcugacagagagcaacaagaaguuccugccauuccagcaguuuggccgggauaucgccgauaccacagacgccguuagagauccccagacacuggaaauccuggacaucaccccaugcagcuucggcggagugucugugaucaccccuggcaccaacaccagcaaucagguggcagugcuguaccaggacgugaacuguaccgaagugcccguggccauucacgccgaucagcugacaccuacauggcggguguacuccaccggcagcaauguguuucagaccagagccggcugucugaucggagccgagcacgugaacaauagcuacgagugcgacauccccaucggcgcuggcaucugugccagcuaccagacacagacaaacagccccagacgggcuagaagcguggccagccagagcaucauugccuacacaaugucucugggcgccgagaacagcguggccuacuccaacaacucuaucgcuauccccaccaacuucaccaucagcgugaccaccgagauccugccuguguccaugaccaagaccagcguggacugcaccauguacaucugcggcgauuccaccgagugcuccaaccugcugcugcaguacggcagcuucugcacccagcugaauagagcccugacagggaucgccguggaacaggacaagaacacccaagagguguucgcccaagugaagcaaaucuacaagaccccuccuaucaaggacuucggcggcuucaauuucagccagauucugcccgauccuagcaagcccagcaagcggagcuucaucgaggaccugcuguucaacaaagugacacuggccgacgccggcuucaucaagcaguauggcgauugucugggcgacauugccgccagggaucugauuugcgcccagaaguuuaacggacugacagugcugccuccucugcugaccgaugagaugaucgcccaguacacaucugcccugcuggccggcacaaucacaagcggcuggacauuuggagcuggcgccgcucugcagauccccuuugcuaugcagauggccuaccgguucaacggcaucggagugacccagaaugugcuguacgagaaccagaagcugaucgccaaccaguucaacagcgccaucggcaagauccaggacagccugagcagcacagcaagcgcccugggaaagcugcaggacguggucaaccagaaugcccaggcacugaacacccuggucaagcagcuguccuccaacuucggcgccaucagcucugugcugaacgauauccugagcagacuggacccuccugaggccgaggugcagaucgacagacugaucacaggcagacugcagagccuccagacauacgugacccagcagcugaucagagccgccgagauuagagccucugccaaucuggccgccaccaagaugucugagugugugcugggccagagcaagagaguggacuuuugcggcaagggcuaccaccugaugagcuucccucagucugccccucacggcgugguguuucugcacgugacauaugugcccgcucaagagaagaauuucaccaccgcuccagccaucugccacgacggcaaagcccacuuuccuagagaaggcguguucguguccaacggcacccauugguucgugacacagcggaacuucuacgagccccagaucaucaccaccgacaacaccuucgugucuggcaacugcgacguugugaucggcauugugaacaauaccguguacgacccucugcagcccgagcuggacagcggaggcggaggaucugacaucgaccccuacaaagaguucggcagcagcuaccagcugcugaacuuccugccucuggacuucuuccccgaccugaacgcccugguggauacagccacagcucuguacgaggaagaacugaccggcagagagcacugcagcccucaccacacagccauuagacaggcccucgugugcugggacgagcugacaaaacugaucgccuggaugagcagcaacaucaccagcgagcaagugcggaccaucaucgugaaccacgugaacgauaccuggggccugaaagugcggcagagccugugguuucaccugagcugucugaccuucggccagcacaccgugcaagaguuucugguguccuucggcguguggaucagaaccccugcuccauacagaccuccaaacgcucccauccugagcacccugccugagcacacagugaucuguugaggacuagucccuguucccagagcccacuuuuuuuucuuuuuuugaaauaaaauagccugucuuucagaucucaaaggcucuuuucagagccaccaaaaaaaaaaaaaaaaaaaaaaaaaaaaaaaaaaaaaaaaaaaaaaaaaaaaaaaaaaaaaaaaaaaaaaaaaaaaaaaaaaaaaaaaaaaaaaaaaaaaa

SEQ ID NO: 12663 - RNA, 4178 nt, Artificial Sequence
  SARS-CoV-2/Wuhan/WIV05/2019__EPI_ISL_402128 spike protein mRNA gc mod (1-1147)(K986P_V987P_T887WN_A1020W) WhcAg construct
aggagagucccgcagucggcguccagcggcucugcuuguucgugugugugucguugcaggccuuauucaagcuuaccauguucguguuucuggugcugcugccccugguguccagccagugugugaaccugaccaccagaacacagcugccuccagccuacaccaacagcuucaccagaggcguguacuaccccgacaagguguucagauccagcgugcugcacucuacccaggaccuguuccugccuuucuucagcaacgugaccugguuccacgccauccacguguccggcaccaauggcaccaagagauucgacaaccccgugcugcccuucaacgacgggguguacuuugccagcaccgagaaguccaacaucaucagaggcuggaucuucggcaccacacuggacagcaagacccagagccugcugaucgugaacaacgccaccaacguggucaucaaagugugcgaguuccaguucugcaacgaccccuuccugggcgucuacuaccacaagaacaacaagagcuggauggaaagcgaguuccggguguacagcagcgccaacaacugcaccuucgaguacgugucccagccuuuccugauggaccuggaaggcaagcagggcaacuucaagaaccugcgcgaguucguguucaagaacaucgacggcuacuucaaaaucuacagcaagcacaccccuaucaaccucgugcgggaucugccucagggcuucucugcucuggaaccccugguggaucugcccaucggcaucaacaucacccgguuucagacacugcuggcccugcacagaagcuaccugacaccuggcgauagcagcagcggauggacagcuggugccgccgcuuacuaugugggcuaccugcagccuagaaccuuccugcugaaguacaacgagaacggcaccaucaccgacgccguggauugugcucuggauccucugagcgagacaaagugcacccugaaguccuucaccguggaaaagggcaucuaccagaccagcaacuuccgggugcagcccaccgaauccaucgugcgguuccccaauaucaccaaucugugccccuucggcgagguguucaaugccaccagauucgccucuguguacgccuggaaccggaagcggaucagcaauugcguggccgacuacuccgugcuguacaacuccgccagcuucagcaccuucaagugcuacggcguguccccuaccaagcugaacgaccugugcuucacaaacguguacgccgacagcuucgugauccggggagaugaagugcggcagauugccccuggacagacaggcaagaucgccgacuacaacuacaagcugcccgacgacuucaccggcugugugauugccuggaacagcaacaaccuggacuccaaagucggcggcaacuacaauuaccuguaccggcuguuccggaaguccaaucugaagcccuucgagcgggacaucagcaccgaaaucuaucaggccggcagcaccccuugcaacggcguggaaggcuucaacugcuacuucccacugcaguccuacggcuuucagcccacaaauggcgugggcuaucagcccuacagagugguggugcugagcuucgaacugcugcaugcuccugccacagugugcggcccuaagaaaagcaccaaucucgugaagaacaaaugcgugaacuucaacuucaacggccugaccggcaccggcgugcugacagagagcaacaagaaguuccugccauuccagcaguuuggccgggauaucgccgauaccacagacgccguuagagauccccagacacuggaaauccuggacaucaccccaugcagcuucggcggagugucugugaucaccccuggcaccaacaccagcaaucagguggcagugcuguaccaggacgugaacuguaccgaagugcccguggccauucacgccgaucagcugacaccuacauggcggguguacuccaccggcagcaauguguuucagaccagagccggcugucugaucggagccgagcacgugaacaauagcuacgagugcgacauccccaucggcgcuggcaucugugccagcuaccagacacagacaaacagccccagacgggcuagaagcguggccagccagagcaucauugccuacacaaugucucugggcgccgagaacagcguggccuacuccaacaacucuaucgcuauccccaccaacuucaccaucagcgugaccaccgagauccugccuguguccaugaccaagaccagcguggacugcaccauguacaucugcggcgauuccaccgagugcuccaaccugcugcugcaguacggcagcuucugcacccagcugaauagagcccugacagggaucgccguggaacaggacaagaacacccaagagguguucgcccaagugaagcaaaucuacaagaccccuccuaucaaggacuucggcggcuucaauuucagccagauucugcccgauccuagcaagcccagcaagcggagcuucaucgaggaccugcuguucaacaaagugacacuggccgacgccggcuucaucaagcaguauggcgauugucugggcgacauugccgccagggaucugauuugcgcccagaaguuuaacggacugacagugcugccuccucugcugaccgaugagaugaucgcccaguacacaucugcccugcuggccggcacaaucacaagcggcuggugguuuggagcuggcgccgcucugcagauccccuuugcuaugcagauggccuaccgguucaacggcaucggagugacccagaaugugcuguacgagaaccagaagcugaucgccaaccaguucaacagcgccaucggcaagauccaggacagccugagcagcacagcaagcgcccugggaaagcugcaggacguggucaaccagaaugcccaggcacugaacacccuggucaagcagcuguccuccaacuucggcgccaucagcucugugcugaacgauauccugagcagacuggacccuccugaggccgaggugcagaucgacagacugaucacaggcagacugcagagccuccagacauacgugacccagcagcugaucagagccgccgagauuagauggucugccaaucuggccgccaccaagaugucugagugugugcugggccagagcaagagaguggacuuuugcggcaagggcuaccaccugaugagcuucccucagucugccccucacggcgugguguuucugcacgugacauaugugcccgcucaagagaagaauuucaccaccgcuccagccaucugccacgacggcaaagcccacuuuccuagagaaggcguguucguguccaacggcacccauugguucgugacacagcggaacuucuacgagccccagaucaucaccaccgacaacaccuucgugucuggcaacugcgacguugugaucggcauugugaacaauaccguguacgacccucugcagcccgagcuggacagcggaggcggaggaucugacaucgaccccuacaaagaguucggcagcagcuaccagcugcugaacuuccugccucuggacuucuuccccgaccugaacgcccugguggauacagccacagcucuguacgaggaagaacugaccggcagagagcacugcagcccucaccacacagccauuagacaggcccucgugugcugggacgagcugacaaaacugaucgccuggaugagcagcaacaucaccagcgagcaagugcggaccaucaucgugaaccacgugaacgauaccuggggccugaaagugcggcagagccugugguuucaccugagcugucugaccuucggccagcacaccgugcaagaguuucugguguccuucggcguguggaucagaaccccugcuccauacagaccuccaaacgcucccauccugagcacccugccugagcacacagugaucuguugaggacuagucccuguucccagagcccacuuuuuuuucuuuuuuugaaauaaaauagccugucuuucagaucucaaaggcucuuuucagagccaccaaaaaaaaaaaaaaaaaaaaaaaaaaaaaaaaaaaaaaaaaaaaaaaaaaaaaaaaaaaaaaaaaaaaaaaaaaaaaaaaaaaaaaaaaaaaaaaaaaaaa

SEQ ID NO: 12664 - RNA, 4178 nt, Artificial Sequence
  SARS-CoV-2/Wuhan/WIV05/2019__EPI_ISL_402128 spike protein mRNA gc mod (1-1147)(K986P_V987P_P1069F) WhcAg construct
aggagagucccgcagucggcguccagcggcucugcuuguucgugugugugucguugcaggccuuauucaagcuuaccauguucguguuucuggugcugcugccccugguguccagccagugugugaaccugaccaccagaacacagcugccuccagccuacaccaacagcuucaccagaggcguguacuaccccgacaagguguucagauccagcgugcugcacucuacccaggaccuguuccugccuuucuucagcaacgugaccugguuccacgccauccacguguccggcaccaauggcaccaagagauucgacaaccccgugcugcccuucaacgacgggguguacuuugccagcaccgagaaguccaacaucaucagaggcuggaucuucggcaccacacuggacagcaagacccagagccugcugaucgugaacaacgccaccaacguggucaucaaagugugcgaguuccaguucugcaacgaccccuuccugggcgucuacuaccacaagaacaacaagagcuggauggaaagcgaguuccggguguacagcagcgccaacaacugcaccuucgaguacgugucccagccuuuccugauggaccuggaaggcaagcagggcaacuucaagaaccugcgcgaguucguguucaagaacaucgacggcuacuucaaaaucuacagcaagcacaccccuaucaaccucgugcgggaucugccucagggcuucucugcucuggaaccccugguggaucugcccaucggcaucaacaucacccgguuucagacacugcuggcccugcacagaagcuaccugacaccuggcgauagcagcagcggauggacagcuggugccgccgcuuacuaugugggcuaccugcagccuagaaccuuccugcugaaguacaacgagaacggcaccaucaccgacgccguggauugugcucuggauccucugagcgagacaaagugcacccugaaguccuucaccguggaaaagggcaucuaccagaccagcaacuuccgggugcagcccaccgaauccaucgugcgguuccccaauaucaccaaucugugccccuucggcgagguguucaaugccaccagauucgccucuguguacgccuggaaccggaagcggaucagcaauugcguggccgacuacuccgugcuguacaacuccgccagcuucagcaccuucaagugcuacggcguguccccuaccaagcugaacgaccugugcuucacaaacguguacgccgacagcuucgugauccggggagaugaagugcggcagauugccccuggacagacaggcaagaucgccgacuacaacuacaagcugcccgacgacuucaccggcugugugauugccuggaacagcaacaaccuggacuccaaagucggcggcaacuacaauuaccuguaccggcuguuccggaaguccaaucugaagcccuucgagcgggacaucagcaccgaaaucuaucaggccggcagcaccccuugcaacggcguggaaggcuucaacugcuacuucccacugcaguccuacggcuuucagcccacaaauggcgugggcuaucagcccuacagagugguggugcugagcuucgaacugcugcaugcuccugccacagugugcggcccuaagaaaagcaccaaucucgugaagaacaaaugcgugaacuucaacuucaacggccugaccggcaccggcgugcugacagagagcaacaagaaguuccugccauuccagcaguuuggccgggauaucgccgauaccacagacgccguuagagauccccagacacuggaaauccuggacaucaccccaugcagcuucggcggagugucugugaucaccccuggcaccaacaccagcaaucagguggcagugcuguaccaggacgugaacuguaccgaagugcccguggccauucacgccgaucagcugacaccuacauggcggguguacuccaccggcagcaauguguuucagaccagagccggcugucugaucggagccgagcacgugaacaauagcuacgagugcgacauccccaucggcgcuggcaucugugccagcuaccagacacagacaaacagccccagacgggcuagaagcguggccagccagagcaucauugccuacacaaugucucugggcgccgagaacagcguggccuacuccaacaacucuaucgcuauccccaccaacuucaccaucagcgugaccaccgagauccugccuguguccaugaccaagaccagcguggacugcaccauguacaucugcggcgauuccaccgagugcuccaaccugcugcugcaguacggcagcuucugcacccagcugaauagagcccugacagggaucgccguggaacaggacaagaacacccaagagguguucgcccaagugaagcaaaucuacaagaccccuccuaucaaggacuucggcggcuucaauuucagccagauucugcccgauccuagcaagcccagcaagcggagcuucaucgaggaccugcuguucaacaaagugacacuggccgacgccggcuucaucaagcaguauggcgauugucugggcgacauugccgccagggaucugauuugcgcccagaaguuuaacggacugacagugcugccuccucugcugaccgaugagaugaucgcccaguacacaucugcccugcuggccggcacaaucacaagcggcuggacauuuggagcuggcgccgcucugcagauccccuuugcuaugcagauggccuaccgguucaacggcaucggagugacccagaaugugcuguacgagaaccagaagcugaucgccaaccaguucaacagcgccaucggcaagauccaggacagccugagcagcacagcaagcgcccugggaaagcugcaggacguggucaaccagaaugcccaggcacugaacacccuggucaagcagcuguccuccaacuucggcgccaucagcucugugcugaacgauauccugagcagacuggacccuccugaggccgaggugcagaucgacagacugaucacaggcagacugcagagccuccagacauacgugacccagcagcugaucagagccgccgagauuagagccucugccaaucuggccgccaccaagaugucugagugugugcugggccagagcaagagaguggacuuuugcggcaagggcuaccaccugaugagcuucccucagucugccccucacggcgugguguuucugcacgugacauauguguucgcucaagagaagaauuucaccaccgcuccagccaucugccacgacggcaaagcccacuuuccuagagaaggcguguucguguccaacggcacccauugguucgugacacagcggaacuucuacgagccccagaucaucaccaccgacaacaccuucgugucuggcaacugcgacguugugaucggcauugugaacaauaccguguacgacccucugcagcccgagcuggacagcggaggcggaggaucugacaucgaccccuacaaagaguucggcagcagcuaccagcugcugaacuuccugccucuggacuucuuccccgaccugaacgcccugguggauacagccacagcucuguacgaggaagaacugaccggcagagagcacugcagcccucaccacacagccauuagacaggcccucgugugcugggacgagcugacaaaacugaucgccuggaugagcagcaacaucaccagcgagcaagugcggaccaucaucgugaaccacgugaacgauaccuggggccugaaagugcggcagagccugugguuucaccugagcugucugaccuucggccagcacaccgugcaagaguuucugguguccuucggcguguggaucagaaccccugcuccauacagaccuccaaacgcucccauccugagcacccugccugagcacacagugaucuguugaggacuagucccuguucccagagcccacuuuuuuuucuuuuuuugaaauaaaauagccugucuuucagaucucaaaggcucuuuucagagccaccaaaaaaaaaaaaaaaaaaaaaaaaaaaaaaaaaaaaaaaaaaaaaaaaaaaaaaaaaaaaaaaaaaaaaaaaaaaaaaaaaaaaaaaaaaaaaaaaaaaaa

SEQ ID NO: 12665 - RNA, 4178 nt, Artificial Sequence
  SARS-CoV-2/Wuhan/WIV05/2019__EPI_ISL_402128 spike protein mRNA gc mod (1-1147)(K986P_V987P_ H1048Q_H1064N_ H1083N_H1101N) WhcAg construct
aggagagucccgcagucggcguccagcggcucugcuuguucgugugugugucguugcaggccuuauucaagcuuaccauguucguguuucuggugcugcugccccugguguccagccagugugugaaccugaccaccagaacacagcugccuccagccuacaccaacagcuucaccagaggcguguacuaccccgacaagguguucagauccagcgugcugcacucuacccaggaccuguuccugccuuucuucagcaacgugaccugguuccacgccauccacguguccggcaccaauggcaccaagagauucgacaaccccgugcugcccuucaacgacgggguguacuuugccagcaccgagaaguccaacaucaucagaggcuggaucuucggcaccacacuggacagcaagacccagagccugcugaucgugaacaacgccaccaacguggucaucaaagugugcgaguuccaguucugcaacgaccccuuccugggcgucuacuaccacaagaacaacaagagcuggauggaaagcgaguuccggguguacagcagcgccaacaacugcaccuucgaguacgugucccagccuuuccugauggaccuggaaggcaagcagggcaacuucaagaaccugcgcgaguucguguucaagaacaucgacggcuacuucaaaaucuacagcaagcacaccccuaucaaccucgugcgggaucugccucagggcuucucugcucuggaaccccugguggaucugcccaucggcaucaacaucacccgguuucagacacugcuggcccugcacagaagcuaccugacaccuggcgauagcagcagcggauggacagcuggugccgccgcuuacuaugugggcuaccugcagccuagaaccuuccugcugaaguacaacgagaacggcaccaucaccgacgccguggauugugcucuggauccucugagcgagacaaagugcacccugaaguccuucaccguggaaaagggcaucuaccagaccagcaacuuccgggugcagcccaccgaauccaucgugcgguuccccaauaucaccaaucugugccccuucggcgagguguucaaugccaccagauucgccucuguguacgccuggaaccggaagcggaucagcaauugcguggccgacuacuccgugcuguacaacuccgccagcuucagcaccuucaagugcuacggcguguccccuaccaagcugaacgaccugugcuucacaaacguguacgccgacagcuucgugauccggggagaugaagugcggcagauugccccuggacagacaggcaagaucgccgacuacaacuacaagcugcccgacgacuucaccggcugugugauugccuggaacagcaacaaccuggacuccaaagucggcggcaacuacaauuaccuguaccggcuguuccggaaguccaaucugaagcccuucgagcgggacaucagcaccgaaaucuaucaggccggcagcaccccuugcaacggcguggaaggcuucaacugcuacuucccacugcaguccuacggcuuucagcccacaaauggcgugggcuaucagcccuacagagugguggugcugagcuucgaacugcugcaugcuccugccacagugugcggcccuaagaaaagcaccaaucucgugaagaacaaaugcgugaacuucaacuucaacggccugaccggcaccggcgugcugacagagagcaacaagaaguuccugccauuccagcaguuuggccgggauaucgccgauaccacagacgccguuagagauccccagacacuggaaauccuggacaucaccccaugcagcuucggcggagugucugugaucaccccuggcaccaacaccagcaaucagguggcagugcuguaccaggacgugaacuguaccgaagugcccguggccauucacgccgaucagcugacaccuacauggcggguguacuccaccggcagcaauguguuucagaccagagccggcugucugaucggagccgagcacgugaacaauagcuacgagugcgacauccccaucggcgcuggcaucugugccagcuaccagacacagacaaacagccccagacgggcuagaagcguggccagccagagcaucauugccuacacaaugucucugggcgccgagaacagcguggccuacuccaacaacucuaucgcuauccccaccaacuucaccaucagcgugaccaccgagauccugccuguguccaugaccaagaccagcguggacugcaccauguacaucugcggcgauuccaccgagugcuccaaccugcugcugcaguacggcagcuucugcacccagcugaauagagcccugacagggaucgccguggaacaggacaagaacacccaagagguguucgcccaagugaagcaaaucuacaagaccccuccuaucaaggacuucggcggcuucaauuucagccagauucugcccgauccuagcaagcccagcaagcggagcuucaucgaggaccugcuguucaacaaagugacacuggccgacgccggcuucaucaagcaguauggcgauugucugggcgacauugccgccagggaucugauuugcgcccagaaguuuaacggacugacagugcugccuccucugcugaccgaugagaugaucgcccaguacacaucugcccugcuggccggcacaaucacaagcggcuggacauuuggagcuggcgccgcucugcagauccccuuugcuaugcagauggccuaccgguucaacggcaucggagugacccagaaugugcuguacgagaaccagaagcugaucgccaaccaguucaacagcgccaucggcaagauccaggacagccugagcagcacagcaagcgcccugggaaagcugcaggacguggucaaccagaaugcccaggcacugaacacccuggucaagcagcuguccuccaacuucggcgccaucagcucugugcugaacgauauccugagcagacuggacccuccugaggccgaggugcagaucgacagacugaucacaggcagacugcagagccuccagacauacgugacccagcagcugaucagagccgccgagauuagagccucugccaaucuggccgccaccaagaugucugagugugugcugggccagagcaagagaguggacuuuugcggcaagggcuaccagcugaugagcuucccucagucugccccucacggcgugguguuucugaacgugacauaugugcccgcucaagagaagaauuucaccaccgcuccagccaucugcaacgacggcaaagcccacuuuccuagagaaggcguguucguguccaacggcaccaacugguucgugacacagcggaacuucuacgagccccagaucaucaccaccgacaacaccuucgugucuggcaacugcgacguugugaucggcauugugaacaauaccguguacgacccucugcagcccgagcuggacagcggaggcggaggaucugacaucgaccccuacaaagaguucggcagcagcuaccagcugcugaacuuccugccucuggacuucuuccccgaccugaacgcccugguggauacagccacagcucuguacgaggaagaacugaccggcagagagcacugcagcccucaccacacagccauuagacaggcccucgugugcugggacgagcugacaaaacugaucgccuggaugagcagcaacaucaccagcgagcaagugcggaccaucaucgugaaccacgugaacgauaccuggggccugaaagugcggcagagccugugguuucaccugagcugucugaccuucggccagcacaccgugcaagaguuucugguguccuucggcguguggaucagaaccccugcuccauacagaccuccaaacgcucccauccugagcacccugccugagcacacagugaucuguugaggacuagucccuguucccagagcccacuuuuuuuucuuuuuuugaaauaaaauagccugucuuucagaucucaaaggcucuuuucagagccaccaaaaaaaaaaaaaaaaaaaaaaaaaaaaaaaaaaaaaaaaaaaaaaaaaaaaaaaaaaaaaaaaaaaaaaaaaaaaaaaaaaaaaaaaaaaaaaaaaaaaa

SEQ ID NO: 12666 - RNA, 4178 nt, Artificial Sequence
  SARS-CoV-2/Wuhan/WIV05/2019__EPI_ISL_402128 spike protein mRNA gc mod (1-1147)(I712C_T1077C) WhcAg construct
aggagagucccgcagucggcguccagcggcucugcuuguucgugugugugucguugcaggccuuauucaagcuuaccauguucguguuucuggugcugcugccccugguguccagccagugugugaaccugaccaccagaacacagcugccuccagccuacaccaacagcuucaccagaggcguguacuaccccgacaagguguucagauccagcgugcugcacucuacccaggaccuguuccugccuuucuucagcaacgugaccugguuccacgccauccacguguccggcaccaauggcaccaagagauucgacaaccccgugcugcccuucaacgacgggguguacuuugccagcaccgagaaguccaacaucaucagaggcuggaucuucggcaccacacuggacagcaagacccagagccugcugaucgugaacaacgccaccaacguggucaucaaagugugcgaguuccaguucugcaacgaccccuuccugggcgucuacuaccacaagaacaacaagagcuggauggaaagcgaguuccggguguacagcagcgccaacaacugcaccuucgaguacgugucccagccuuuccugauggaccuggaaggcaagcagggcaacuucaagaaccugcgcgaguucguguucaagaacaucgacggcuacuucaaaaucuacagcaagcacaccccuaucaaccucgugcgggaucugccucagggcuucucugcucuggaaccccugguggaucugcccaucggcaucaacaucacccgguuucagacacugcuggcccugcacagaagcuaccugacaccuggcgauagcagcagcggauggacagcuggugccgccgcuuacuaugugggcuaccugcagccuagaaccuuccugcugaaguacaacgagaacggcaccaucaccgacgccguggauugugcucuggauccucugagcgagacaaagugcacccugaaguccuucaccguggaaaagggcaucuaccagaccagcaacuuccgggugcagcccaccgaauccaucgugcgguuccccaauaucaccaaucugugccccuucggcgagguguucaaugccaccagauucgccucuguguacgccuggaaccggaagcggaucagcaauugcguggccgacuacuccgugcuguacaacuccgccagcuucagcaccuucaagugcuacggcguguccccuaccaagcugaacgaccugugcuucacaaacguguacgccgacagcuucgugauccggggagaugaagugcggcagauugccccuggacagacaggcaagaucgccgacuacaacuacaagcugcccgacgacuucaccggcugugugauugccuggaacagcaacaaccuggacuccaaagucggcggcaacuacaauuaccuguaccggcuguuccggaaguccaaucugaagcccuucgagcgggacaucagcaccgaaaucuaucaggccggcagcaccccuugcaacggcguggaaggcuucaacugcuacuucccacugcaguccuacggcuuucagcccacaaauggcgugggcuaucagcccuacagagugguggugcugagcuucgaacugcugcaugcuccugccacagugugcggcccuaagaaaagcaccaaucucgugaagaacaaaugcgugaacuucaacuucaacggccugaccggcaccggcgugcugacagagagcaacaagaaguuccugccauuccagcaguuuggccgggauaucgccgauaccacagacgccguuagagauccccagacacuggaaauccuggacaucaccccaugcagcuucggcggagugucugugaucaccccuggcaccaacaccagcaaucagguggcagugcuguaccaggacgugaacuguaccgaagugcccguggccauucacgccgaucagcugacaccuacauggcggguguacuccaccggcagcaauguguuucagaccagagccggcugucugaucggagccgagcacgugaacaauagcuacgagugcgacauccccaucggcgcuggcaucugugccagcuaccagacacagacaaacagccccagacgggcuagaagcguggccagccagagcaucauugccuacacaaugucucugggcgccgagaacagcguggccuacuccaacaacucuugcgcuauccccaccaacuucaccaucagcgugaccaccgagauccugccuguguccaugaccaagaccagcguggacugcaccauguacaucugcggcgauuccaccgagugcuccaaccugcugcugcaguacggcagcuucugcacccagcugaauagagcccugacagggaucgccguggaacaggacaagaacacccaagagguguucgcccaagugaagcaaaucuacaagaccccuccuaucaaggacuucggcggcuucaauuucagccagauucugcccgauccuagcaagcccagcaagcggagcuucaucgaggaccugcuguucaacaaagugacacuggccgacgccggcuucaucaagcaguauggcgauugucugggcgacauugccgccagggaucugauuugcgcccagaaguuuaacggacugacagugcugccuccucugcugaccgaugagaugaucgcccaguacacaucugcccugcuggccggcacaaucacaagcggcuggacauuuggagcuggcgccgcucugcagauccccuuugcuaugcagauggccuaccgguucaacggcaucggagugacccagaaugugcuguacgagaaccagaagcugaucgccaaccaguucaacagcgccaucggcaagauccaggacagccugagcagcacagcaagcgcccugggaaagcugcaggacguggucaaccagaaugcccaggcacugaacacccuggucaagcagcuguccuccaacuucggcgccaucagcucugugcugaacgauauccugagcagacuggacaaggucgaggccgaggugcagaucgacagacugaucacaggcagacugcagagccuccagacauacgugacccagcagcugaucagagccgccgagauuagagccucugccaaucuggccgccaccaagaugucugagugugugcugggccagagcaagagaguggacuuuugcggcaagggcuaccaccugaugagcuucccucagucugccccucacggcgugguguuucugcacgugacauaugugcccgcucaagagaagaauuucaccugugcuccagccaucugccacgacggcaaagcccacuuuccuagagaaggcguguucguguccaacggcacccauugguucgugacacagcggaacuucuacgagccccagaucaucaccaccgacaacaccuucgugucuggcaacugcgacguugugaucggcauugugaacaauaccguguacgacccucugcagcccgagcuggacagcggaggcggaggaucugacaucgaccccuacaaagaguucggcagcagcuaccagcugcugaacuuccugccucuggacuucuuccccgaccugaacgcccugguggauacagccacagcucuguacgaggaagaacugaccggcagagagcacugcagcccucaccacacagccauuagacaggcccucgugugcugggacgagcugacaaaacugaucgccuggaugagcagcaacaucaccagcgagcaagugcggaccaucaucgugaaccacgugaacgauaccuggggccugaaagugcggcagagccugugguuucaccugagcugucugaccuucggccagcacaccgugcaagaguuucugguguccuucggcguguggaucagaaccccugcuccauacagaccuccaaacgcucccauccugagcacccugccugagcacacagugaucuguugaggacuagucccuguucccagagcccacuuuuuuuucuuuuuuugaaauaaaauagccugucuuucagaucucaaaggcucuuuucagagccaccaaaaaaaaaaaaaaaaaaaaaaaaaaaaaaaaaaaaaaaaaaaaaaaaaaaaaaaaaaaaaaaaaaaaaaaaaaaaaaaaaaaaaaaaaaaaaaaaaaaaa

SEQ ID NO: 12667 - RNA, 4178 nt, Artificial Sequence
  SARS-CoV-2/Wuhan/WIV05/2019__EPI_ISL_402128 spike protein mRNA gc mod (1-1147)(I714C_Y1110C) WhcAg construct
aggagagucccgcagucggcguccagcggcucugcuuguucgugugugugucguugcaggccuuauucaagcuuaccauguucguguuucuggugcugcugccccugguguccagccagugugugaaccugaccaccagaacacagcugccuccagccuacaccaacagcuucaccagaggcguguacuaccccgacaagguguucagauccagcgugcugcacucuacccaggaccuguuccugccuuucuucagcaacgugaccugguuccacgccauccacguguccggcaccaauggcaccaagagauucgacaaccccgugcugcccuucaacgacgggguguacuuugccagcaccgagaaguccaacaucaucagaggcuggaucuucggcaccacacuggacagcaagacccagagccugcugaucgugaacaacgccaccaacguggucaucaaagugugcgaguuccaguucugcaacgaccccuuccugggcgucuacuaccacaagaacaacaagagcuggauggaaagcgaguuccggguguacagcagcgccaacaacugcaccuucgaguacgugucccagccuuuccugauggaccuggaaggcaagcagggcaacuucaagaaccugcgcgaguucguguucaagaacaucgacggcuacuucaaaaucuacagcaagcacaccccuaucaaccucgugcgggaucugccucagggcuucucugcucuggaaccccugguggaucugcccaucggcaucaacaucacccgguuucagacacugcuggcccugcacagaagcuaccugacaccuggcgauagcagcagcggauggacagcuggugccgccgcuuacuaugugggcuaccugcagccuagaaccuuccugcugaaguacaacgagaacggcaccaucaccgacgccguggauugugcucuggauccucugagcgagacaaagugcacccugaaguccuucaccguggaaaagggcaucuaccagaccagcaacuuccgggugcagcccaccgaauccaucgugcgguuccccaauaucaccaaucugugccccuucggcgagguguucaaugccaccagauucgccucuguguacgccuggaaccggaagcggaucagcaauugcguggccgacuacuccgugcuguacaacuccgccagcuucagcaccuucaagugcuacggcguguccccuaccaagcugaacgaccugugcuucacaaacguguacgccgacagcuucgugauccggggagaugaagugcggcagauugccccuggacagacaggcaagaucgccgacuacaacuacaagcugcccgacgacuucaccggcugugugauugccuggaacagcaacaaccuggacuccaaagucggcggcaacuacaauuaccuguaccggcuguuccggaaguccaaucugaagcccuucgagcgggacaucagcaccgaaaucuaucaggccggcagcaccccuugcaacggcguggaaggcuucaacugcuacuucccacugcaguccuacggcuuucagcccacaaauggcgugggcuaucagcccuacagagugguggugcugagcuucgaacugcugcaugcuccugccacagugugcggcccuaagaaaagcaccaaucucgugaagaacaaaugcgugaacuucaacuucaacggccugaccggcaccggcgugcugacagagagcaacaagaaguuccugccauuccagcaguuuggccgggauaucgccgauaccacagacgccguuagagauccccagacacuggaaauccuggacaucaccccaugcagcuucggcggagugucugugaucaccccuggcaccaacaccagcaaucagguggcagugcuguaccaggacgugaacuguaccgaagugcccguggccauucacgccgaucagcugacaccuacauggcggguguacuccaccggcagcaauguguuucagaccagagccggcugucugaucggagccgagcacgugaacaauagcuacgagugcgacauccccaucggcgcuggcaucugugccagcuaccagacacagacaaacagccccagacgggcuagaagcguggccagccagagcaucauugccuacacaaugucucugggcgccgagaacagcguggccuacuccaacaacucuaucgcuugccccaccaacuucaccaucagcgugaccaccgagauccugccuguguccaugaccaagaccagcguggacugcaccauguacaucugcggcgauuccaccgagugcuccaaccugcugcugcaguacggcagcuucugcacccagcugaauagagcccugacagggaucgccguggaacaggacaagaacacccaagagguguucgcccaagugaagcaaaucuacaagaccccuccuaucaaggacuucggcggcuucaauuucagccagauucugcccgauccuagcaagcccagcaagcggagcuucaucgaggaccugcuguucaacaaagugacacuggccgacgccggcuucaucaagcaguauggcgauugucugggcgacauugccgccagggaucugauuugcgcccagaaguuuaacggacugacagugcugccuccucugcugaccgaugagaugaucgcccaguacacaucugcccugcuggccggcacaaucacaagcggcuggacauuuggagcuggcgccgcucugcagauccccuuugcuaugcagauggccuaccgguucaacggcaucggagugacccagaaugugcuguacgagaaccagaagcugaucgccaaccaguucaacagcgccaucggcaagauccaggacagccugagcagcacagcaagcgcccugggaaagcugcaggacguggucaaccagaaugcccaggcacugaacacccuggucaagcagcuguccuccaacuucggcgccaucagcucugugcugaacgauauccugagcagacuggacaaggucgaggccgaggugcagaucgacagacugaucacaggcagacugcagagccuccagacauacgugacccagcagcugaucagagccgccgagauuagagccucugccaaucuggccgccaccaagaugucugagugugugcugggccagagcaagagaguggacuuuugcggcaagggcuaccaccugaugagcuucccucagucugccccucacggcgugguguuucugcacgugacauaugugcccgcucaagagaagaauuucaccaccgcuccagccaucugccacgacggcaaagcccacuuuccuagagaaggcguguucguguccaacggcacccauugguucgugacacagcggaacuucugugagccccagaucaucaccaccgacaacaccuucgugucuggcaacugcgacguugugaucggcauugugaacaauaccguguacgacccucugcagcccgagcuggacagcggaggcggaggaucugacaucgaccccuacaaagaguucggcagcagcuaccagcugcugaacuuccugccucuggacuucuuccccgaccugaacgcccugguggauacagccacagcucuguacgaggaagaacugaccggcagagagcacugcagcccucaccacacagccauuagacaggcccucgugugcugggacgagcugacaaaacugaucgccuggaugagcagcaacaucaccagcgagcaagugcggaccaucaucgugaaccacgugaacgauaccuggggccugaaagugcggcagagccugugguuucaccugagcugucugaccuucggccagcacaccgugcaagaguuucugguguccuucggcguguggaucagaaccccugcuccauacagaccuccaaacgcucccauccugagcacccugccugagcacacagugaucuguugaggacuagucccuguucccagagcccacuuuuuuuucuuuuuuugaaauaaaauagccugucuuucagaucucaaaggcucuuuucagagccaccaaaaaaaaaaaaaaaaaaaaaaaaaaaaaaaaaaaaaaaaaaaaaaaaaaaaaaaaaaaaaaaaaaaaaaaaaaaaaaaaaaaaaaaaaaaaaaaaaaaaa

SEQ ID NO: 12668 - RNA, 4178 nt, Artificial Sequence
  SARS-CoV-2/Wuhan/WIV05/2019__EPI_ISL_402128 spike protein mRNA gc mod (1-1147)(P715C_P1069C) WhcAg construct
aggagagucccgcagucggcguccagcggcucugcuuguucgugugugugucguugcaggccuuauucaagcuuaccauguucguguuucuggugcugcugccccugguguccagccagugugugaaccugaccaccagaacacagcugccuccagccuacaccaacagcuucaccagaggcguguacuaccccgacaagguguucagauccagcgugcugcacucuacccaggaccuguuccugccuuucuucagcaacgugaccugguuccacgccauccacguguccggcaccaauggcaccaagagauucgacaaccccgugcugcccuucaacgacgggguguacuuugccagcaccgagaaguccaacaucaucagaggcuggaucuucggcaccacacuggacagcaagacccagagccugcugaucgugaacaacgccaccaacguggucaucaaagugugcgaguuccaguucugcaacgaccccuuccugggcgucuacuaccacaagaacaacaagagcuggauggaaagcgaguuccggguguacagcagcgccaacaacugcaccuucgaguacgugucccagccuuuccugauggaccuggaaggcaagcagggcaacuucaagaaccugcgcgaguucguguucaagaacaucgacggcuacuucaaaaucuacagcaagcacaccccuaucaaccucgugcgggaucugccucagggcuucucugcucuggaaccccugguggaucugcccaucggcaucaacaucacccgguuucagacacugcuggcccugcacagaagcuaccugacaccuggcgauagcagcagcggauggacagcuggugccgccgcuuacuaugugggcuaccugcagccuagaaccuuccugcugaaguacaacgagaacggcaccaucaccgacgccguggauugugcucuggauccucugagcgagacaaagugcacccugaaguccuucaccguggaaaagggcaucuaccagaccagcaacuuccgggugcagcccaccgaauccaucgugcgguuccccaauaucaccaaucugugccccuucggcgagguguucaaugccaccagauucgccucuguguacgccuggaaccggaagcggaucagcaauugcguggccgacuacuccgugcuguacaacuccgccagcuucagcaccuucaagugcuacggcguguccccuaccaagcugaacgaccugugcuucacaaacguguacgccgacagcuucgugauccggggagaugaagugcggcagauugccccuggacagacaggcaagaucgccgacuacaacuacaagcugcccgacgacuucaccggcugugugauugccuggaacagcaacaaccuggacuccaaagucggcggcaacuacaauuaccuguaccggcuguuccggaaguccaaucugaagcccuucgagcgggacaucagcaccgaaaucuaucaggccggcagcaccccuugcaacggcguggaaggcuucaacugcuacuucccacugcaguccuacggcuuucagcccacaaauggcgugggcuaucagcccuacagagugguggugcugagcuucgaacugcugcaugcuccugccacagugugcggcccuaagaaaagcaccaaucucgugaagaacaaaugcgugaacuucaacuucaacggccugaccggcaccggcgugcugacagagagcaacaagaaguuccugccauuccagcaguuuggccgggauaucgccgauaccacagacgccguuagagauccccagacacuggaaauccuggacaucaccccaugcagcuucggcggagugucugugaucaccccuggcaccaacaccagcaaucagguggcagugcuguaccaggacgugaacuguaccgaagugcccguggccauucacgccgaucagcugacaccuacauggcggguguacuccaccggcagcaauguguuucagaccagagccggcugucugaucggagccgagcacgugaacaauagcuacgagugcgacauccccaucggcgcuggcaucugugccagcuaccagacacagacaaacagccccagacgggcuagaagcguggccagccagagcaucauugccuacacaaugucucugggcgccgagaacagcguggccuacuccaacaacucuaucgcuaucugcaccaacuucaccaucagcgugaccaccgagauccugccuguguccaugaccaagaccagcguggacugcaccauguacaucugcggcgauuccaccgagugcuccaaccugcugcugcaguacggcagcuucugcacccagcugaauagagcccugacagggaucgccguggaacaggacaagaacacccaagagguguucgcccaagugaagcaaaucuacaagaccccuccuaucaaggacuucggcggcuucaauuucagccagauucugcccgauccuagcaagcccagcaagcggagcuucaucgaggaccugcuguucaacaaagugacacuggccgacgccggcuucaucaagcaguauggcgauugucugggcgacauugccgccagggaucugauuugcgcccagaaguuuaacggacugacagugcugccuccucugcugaccgaugagaugaucgcccaguacacaucugcccugcuggccggcacaaucacaagcggcuggacauuuggagcuggcgccgcucugcagauccccuuugcuaugcagauggccuaccgguucaacggcaucggagugacccagaaugugcuguacgagaaccagaagcugaucgccaaccaguucaacagcgccaucggcaagauccaggacagccugagcagcacagcaagcgcccugggaaagcugcaggacguggucaaccagaaugcccaggcacugaacacccuggucaagcagcuguccuccaacuucggcgccaucagcucugugcugaacgauauccugagcagacuggacaaggucgaggccgaggugcagaucgacagacugaucacaggcagacugcagagccuccagacauacgugacccagcagcugaucagagccgccgagauuagagccucugccaaucuggccgccaccaagaugucugagugugugcugggccagagcaagagaguggacuuuugcggcaagggcuaccaccugaugagcuucccucagucugccccucacggcgugguguuucugcacgugacauaugugugugcucaagagaagaauuucaccaccgcuccagccaucugccacgacggcaaagcccacuuuccuagagaaggcguguucguguccaacggcacccauugguucgugacacagcggaacuucuacgagccccagaucaucaccaccgacaacaccuucgugucuggcaacugcgacguugugaucggcauugugaacaauaccguguacgacccucugcagcccgagcuggacagcggaggcggaggaucugacaucgaccccuacaaagaguucggcagcagcuaccagcugcugaacuuccugccucuggacuucuuccccgaccugaacgcccugguggauacagccacagcucuguacgaggaagaacugaccggcagagagcacugcagcccucaccacacagccauuagacaggcccucgugugcugggacgagcugacaaaacugaucgccuggaugagcagcaacaucaccagcgagcaagugcggaccaucaucgugaaccacgugaacgauaccuggggccugaaagugcggcagagccugugguuucaccugagcugucugaccuucggccagcacaccgugcaagaguuucugguguccuucggcguguggaucagaaccccugcuccauacagaccuccaaacgcucccauccugagcacccugccugagcacacagugaucuguugaggacuagucccuguucccagagcccacuuuuuuuucuuuuuuugaaauaaaauagccugucuuucagaucucaaaggcucuuuucagagccaccaaaaaaaaaaaaaaaaaaaaaaaaaaaaaaaaaaaaaaaaaaaaaaaaaaaaaaaaaaaaaaaaaaaaaaaaaaaaaaaaaaaaaaaaaaaaaaaaaaaaa

SEQ ID NO: 12669 - RNA, 4178 nt, Artificial Sequence
  SARS-CoV-2/Wuhan/WIV05/2019__EPI_ISL_402128 spike protein mRNA gc mod (1-1147)(G889C_L1034C) WhcAg construct
aggagagucccgcagucggcguccagcggcucugcuuguucgugugugugucguugcaggccuuauucaagcuuaccauguucguguuucuggugcugcugccccugguguccagccagugugugaaccugaccaccagaacacagcugccuccagccuacaccaacagcuucaccagaggcguguacuaccccgacaagguguucagauccagcgugcugcacucuacccaggaccuguuccugccuuucuucagcaacgugaccugguuccacgccauccacguguccggcaccaauggcaccaagagauucgacaaccccgugcugcccuucaacgacgggguguacuuugccagcaccgagaaguccaacaucaucagaggcuggaucuucggcaccacacuggacagcaagacccagagccugcugaucgugaacaacgccaccaacguggucaucaaagugugcgaguuccaguucugcaacgaccccuuccugggcgucuacuaccacaagaacaacaagagcuggauggaaagcgaguuccggguguacagcagcgccaacaacugcaccuucgaguacgugucccagccuuuccugauggaccuggaaggcaagcagggcaacuucaagaaccugcgcgaguucguguucaagaacaucgacggcuacuucaaaaucuacagcaagcacaccccuaucaaccucgugcgggaucugccucagggcuucucugcucuggaaccccugguggaucugcccaucggcaucaacaucacccgguuucagacacugcuggcccugcacagaagcuaccugacaccuggcgauagcagcagcggauggacagcuggugccgccgcuuacuaugugggcuaccugcagccuagaaccuuccugcugaaguacaacgagaacggcaccaucaccgacgccguggauugugcucuggauccucugagcgagacaaagugcacccugaaguccuucaccguggaaaagggcaucuaccagaccagcaacuuccgggugcagcccaccgaauccaucgugcgguuccccaauaucaccaaucugugccccuucggcgagguguucaaugccaccagauucgccucuguguacgccuggaaccggaagcggaucagcaauugcguggccgacuacuccgugcuguacaacuccgccagcuucagcaccuucaagugcuacggcguguccccuaccaagcugaacgaccugugcuucacaaacguguacgccgacagcuucgugauccggggagaugaagugcggcagauugccccuggacagacaggcaagaucgccgacuacaacuacaagcugcccgacgacuucaccggcugugugauugccuggaacagcaacaaccuggacuccaaagucggcggcaacuacaauuaccuguaccggcuguuccggaaguccaaucugaagcccuucgagcgggacaucagcaccgaaaucuaucaggccggcagcaccccuugcaacggcguggaaggcuucaacugcuacuucccacugcaguccuacggcuuucagcccacaaauggcgugggcuaucagcccuacagagugguggugcugagcuucgaacugcugcaugcuccugccacagugugcggcccuaagaaaagcaccaaucucgugaagaacaaaugcgugaacuucaacuucaacggccugaccggcaccggcgugcugacagagagcaacaagaaguuccugccauuccagcaguuuggccgggauaucgccgauaccacagacgccguuagagauccccagacacuggaaauccuggacaucaccccaugcagcuucggcggagugucugugaucaccccuggcaccaacaccagcaaucagguggcagugcuguaccaggacgugaacuguaccgaagugcccguggccauucacgccgaucagcugacaccuacauggcggguguacuccaccggcagcaauguguuucagaccagagccggcugucugaucggagccgagcacgugaacaauagcuacgagugcgacauccccaucggcgcuggcaucugugccagcuaccagacacagacaaacagccccagacgggcuagaagcguggccagccagagcaucauugccuacacaaugucucugggcgccgagaacagcguggccuacuccaacaacucuaucgcuauccccaccaacuucaccaucagcgugaccaccgagauccugccuguguccaugaccaagaccagcguggacugcaccauguacaucugcggcgauuccaccgagugcuccaaccugcugcugcaguacggcagcuucugcacccagcugaauagagcccugacagggaucgccguggaacaggacaagaacacccaagagguguucgcccaagugaagcaaaucuacaagaccccuccuaucaaggacuucggcggcuucaauuucagccagauucugcccgauccuagcaagcccagcaagcggagcuucaucgaggaccugcuguucaacaaagugacacuggccgacgccggcuucaucaagcaguauggcgauugucugggcgacauugccgccagggaucugauuugcgcccagaaguuuaacggacugacagugcugccuccucugcugaccgaugagaugaucgcccaguacacaucugcccugcuggccggcacaaucacaagcggcuggacauuuugcgcuggcgccgcucugcagauccccuuugcuaugcagauggccuaccgguucaacggcaucggagugacccagaaugugcuguacgagaaccagaagcugaucgccaaccaguucaacagcgccaucggcaagauccaggacagccugagcagcacagcaagcgcccugggaaagcugcaggacguggucaaccagaaugcccaggcacugaacacccuggucaagcagcuguccuccaacuucggcgccaucagcucugugcugaacgauauccugagcagacuggacaaggucgaggccgaggugcagaucgacagacugaucacaggcagacugcagagccuccagacauacgugacccagcagcugaucagagccgccgagauuagagccucugccaaucuggccgccaccaagaugucugaguguguguguggccagagcaagagaguggacuuuugcggcaagggcuaccaccugaugagcuucccucagucugccccucacggcgugguguuucugcacgugacauaugugcccgcucaagagaagaauuucaccaccgcuccagccaucugccacgacggcaaagcccacuuuccuagagaaggcguguucguguccaacggcacccauugguucgugacacagcggaacuucuacgagccccagaucaucaccaccgacaacaccuucgugucuggcaacugcgacguugugaucggcauugugaacaauaccguguacgacccucugcagcccgagcuggacagcggaggcggaggaucugacaucgaccccuacaaagaguucggcagcagcuaccagcugcugaacuuccugccucuggacuucuuccccgaccugaacgcccugguggauacagccacagcucuguacgaggaagaacugaccggcagagagcacugcagcccucaccacacagccauuagacaggcccucgugugcugggacgagcugacaaaacugaucgccuggaugagcagcaacaucaccagcgagcaagugcggaccaucaucgugaaccacgugaacgauaccuggggccugaaagugcggcagagccugugguuucaccugagcugucugaccuucggccagcacaccgugcaagaguuucugguguccuucggcguguggaucagaaccccugcuccauacagaccuccaaacgcucccauccugagcacccugccugagcacacagugaucuguugaggacuagucccuguucccagagcccacuuuuuuuucuuuuuuugaaauaaaauagccugucuuucagaucucaaaggcucuuuucagagccaccaaaaaaaaaaaaaaaaaaaaaaaaaaaaaaaaaaaaaaaaaaaaaaaaaaaaaaaaaaaaaaaaaaaaaaaaaaaaaaaaaaaaaaaaaaaaaaaaaaaaa

SEQ ID NO: 12670 - RNA, 4178 nt, Artificial Sequence
  SARS-CoV-2/Wuhan/WIV05/2019__EPI_ISL_402128 spike protein mRNA gc mod (1-1147)(I909C_Y1047C) WhcAg construct
aggagagucccgcagucggcguccagcggcucugcuuguucgugugugugucguugcaggccuuauucaagcuuaccauguucguguuucuggugcugcugccccugguguccagccagugugugaaccugaccaccagaacacagcugccuccagccuacaccaacagcuucaccagaggcguguacuaccccgacaagguguucagauccagcgugcugcacucuacccaggaccuguuccugccuuucuucagcaacgugaccugguuccacgccauccacguguccggcaccaauggcaccaagagauucgacaaccccgugcugcccuucaacgacgggguguacuuugccagcaccgagaaguccaacaucaucagaggcuggaucuucggcaccacacuggacagcaagacccagagccugcugaucgugaacaacgccaccaacguggucaucaaagugugcgaguuccaguucugcaacgaccccuuccugggcgucuacuaccacaagaacaacaagagcuggauggaaagcgaguuccggguguacagcagcgccaacaacugcaccuucgaguacgugucccagccuuuccugauggaccuggaaggcaagcagggcaacuucaagaaccugcgcgaguucguguucaagaacaucgacggcuacuucaaaaucuacagcaagcacaccccuaucaaccucgugcgggaucugccucagggcuucucugcucuggaaccccugguggaucugcccaucggcaucaacaucacccgguuucagacacugcuggcccugcacagaagcuaccugacaccuggcgauagcagcagcggauggacagcuggugccgccgcuuacuaugugggcuaccugcagccuagaaccuuccugcugaaguacaacgagaacggcaccaucaccgacgccguggauugugcucuggauccucugagcgagacaaagugcacccugaaguccuucaccguggaaaagggcaucuaccagaccagcaacuuccgggugcagcccaccgaauccaucgugcgguuccccaauaucaccaaucugugccccuucggcgagguguucaaugccaccagauucgccucuguguacgccuggaaccggaagcggaucagcaauugcguggccgacuacuccgugcuguacaacuccgccagcuucagcaccuucaagugcuacggcguguccccuaccaagcugaacgaccugugcuucacaaacguguacgccgacagcuucgugauccggggagaugaagugcggcagauugccccuggacagacaggcaagaucgccgacuacaacuacaagcugcccgacgacuucaccggcugugugauugccuggaacagcaacaaccuggacuccaaagucggcggcaacuacaauuaccuguaccggcuguuccggaaguccaaucugaagcccuucgagcgggacaucagcaccgaaaucuaucaggccggcagcaccccuugcaacggcguggaaggcuucaacugcuacuucccacugcaguccuacggcuuucagcccacaaauggcgugggcuaucagcccuacagagugguggugcugagcuucgaacugcugcaugcuccugccacagugugcggcccuaagaaaagcaccaaucucgugaagaacaaaugcgugaacuucaacuucaacggccugaccggcaccggcgugcugacagagagcaacaagaaguuccugccauuccagcaguuuggccgggauaucgccgauaccacagacgccguuagagauccccagacacuggaaauccuggacaucaccccaugcagcuucggcggagugucugugaucaccccuggcaccaacaccagcaaucagguggcagugcuguaccaggacgugaacuguaccgaagugcccguggccauucacgccgaucagcugacaccuacauggcggguguacuccaccggcagcaauguguuucagaccagagccggcugucugaucggagccgagcacgugaacaauagcuacgagugcgacauccccaucggcgcuggcaucugugccagcuaccagacacagacaaacagccccagacgggcuagaagcguggccagccagagcaucauugccuacacaaugucucugggcgccgagaacagcguggccuacuccaacaacucuaucgcuauccccaccaacuucaccaucagcgugaccaccgagauccugccuguguccaugaccaagaccagcguggacugcaccauguacaucugcggcgauuccaccgagugcuccaaccugcugcugcaguacggcagcuucugcacccagcugaauagagcccugacagggaucgccguggaacaggacaagaacacccaagagguguucgcccaagugaagcaaaucuacaagaccccuccuaucaaggacuucggcggcuucaauuucagccagauucugcccgauccuagcaagcccagcaagcggagcuucaucgaggaccugcuguucaacaaagugacacuggccgacgccggcuucaucaagcaguauggcgauugucugggcgacauugccgccagggaucugauuugcgcccagaaguuuaacggacugacagugcugccuccucugcugaccgaugagaugaucgcccaguacacaucugcccugcuggccggcacaaucacaagcggcuggacauuuggagcuggcgccgcucugcagauccccuuugcuaugcagauggccuaccgguucaacggcugcggagugacccagaaugugcuguacgagaaccagaagcugaucgccaaccaguucaacagcgccaucggcaagauccaggacagccugagcagcacagcaagcgcccugggaaagcugcaggacguggucaaccagaaugcccaggcacugaacacccuggucaagcagcuguccuccaacuucggcgccaucagcucugugcugaacgauauccugagcagacuggacaaggucgaggccgaggugcagaucgacagacugaucacaggcagacugcagagccuccagacauacgugacccagcagcugaucagagccgccgagauuagagccucugccaaucuggccgccaccaagaugucugagugugugcugggccagagcaagagaguggacuuuugcggcaagggcugucaccugaugagcuucccucagucugccccucacggcgugguguuucugcacgugacauaugugcccgcucaagagaagaauuucaccaccgcuccagccaucugccacgacggcaaagcccacuuuccuagagaaggcguguucguguccaacggcacccauugguucgugacacagcggaacuucuacgagccccagaucaucaccaccgacaacaccuucgugucuggcaacugcgacguugugaucggcauugugaacaauaccguguacgacccucugcagcccgagcuggacagcggaggcggaggaucugacaucgaccccuacaaagaguucggcagcagcuaccagcugcugaacuuccugccucuggacuucuuccccgaccugaacgcccugguggauacagccacagcucuguacgaggaagaacugaccggcagagagcacugcagcccucaccacacagccauuagacaggcccucgugugcugggacgagcugacaaaacugaucgccuggaugagcagcaacaucaccagcgagcaagugcggaccaucaucgugaaccacgugaacgauaccuggggccugaaagugcggcagagccugugguuucaccugagcugucugaccuucggccagcacaccgugcaagaguuucugguguccuucggcguguggaucagaaccccugcuccauacagaccuccaaacgcucccauccugagcacccugccugagcacacagugaucuguugaggacuagucccuguucccagagcccacuuuuuuuucuuuuuuugaaauaaaauagccugucuuucagaucucaaaggcucuuuucagagccaccaaaaaaaaaaaaaaaaaaaaaaaaaaaaaaaaaaaaaaaaaaaaaaaaaaaaaaaaaaaaaaaaaaaaaaaaaaaaaaaaaaaaaaaaaaaaaaaaaaaaa

SEQ ID NO: 12671 - RNA, 4178 nt, Artificial Sequence
  SARS-CoV-2/Wuhan/WIV05/2019__EPI_ISL_402128 spike protein mRNA gc mod (1-1147)(Q965C_S1003C) WhcAg construct
aggagagucccgcagucggcguccagcggcucugcuuguucgugugugugucguugcaggccuuauucaagcuuaccauguucguguuucuggugcugcugccccugguguccagccagugugugaaccugaccaccagaacacagcugccuccagccuacaccaacagcuucaccagaggcguguacuaccccgacaagguguucagauccagcgugcugcacucuacccaggaccuguuccugccuuucuucagcaacgugaccugguuccacgccauccacguguccggcaccaauggcaccaagagauucgacaaccccgugcugcccuucaacgacgggguguacuuugccagcaccgagaaguccaacaucaucagaggcuggaucuucggcaccacacuggacagcaagacccagagccugcugaucgugaacaacgccaccaacguggucaucaaagugugcgaguuccaguucugcaacgaccccuuccugggcgucuacuaccacaagaacaacaagagcuggauggaaagcgaguuccggguguacagcagcgccaacaacugcaccuucgaguacgugucccagccuuuccugauggaccuggaaggcaagcagggcaacuucaagaaccugcgcgaguucguguucaagaacaucgacggcuacuucaaaaucuacagcaagcacaccccuaucaaccucgugcgggaucugccucagggcuucucugcucuggaaccccugguggaucugcccaucggcaucaacaucacccgguuucagacacugcuggcccugcacagaagcuaccugacaccuggcgauagcagcagcggauggacagcuggugccgccgcuuacuaugugggcuaccugcagccuagaaccuuccugcugaaguacaacgagaacggcaccaucaccgacgccguggauugugcucuggauccucugagcgagacaaagugcacccugaaguccuucaccguggaaaagggcaucuaccagaccagcaacuuccgggugcagcccaccgaauccaucgugcgguuccccaauaucaccaaucugugccccuucggcgagguguucaaugccaccagauucgccucuguguacgccuggaaccggaagcggaucagcaauugcguggccgacuacuccgugcuguacaacuccgccagcuucagcaccuucaagugcuacggcguguccccuaccaagcugaacgaccugugcuucacaaacguguacgccgacagcuucgugauccggggagaugaagugcggcagauugccccuggacagacaggcaagaucgccgacuacaacuacaagcugcccgacgacuucaccggcugugugauugccuggaacagcaacaaccuggacuccaaagucggcggcaacuacaauuaccuguaccggcuguuccggaaguccaaucugaagcccuucgagcgggacaucagcaccgaaaucuaucaggccggcagcaccccuugcaacggcguggaaggcuucaacugcuacuucccacugcaguccuacggcuuucagcccacaaauggcgugggcuaucagcccuacagagugguggugcugagcuucgaacugcugcaugcuccugccacagugugcggcccuaagaaaagcaccaaucucgugaagaacaaaugcgugaacuucaacuucaacggccugaccggcaccggcgugcugacagagagcaacaagaaguuccugccauuccagcaguuuggccgggauaucgccgauaccacagacgccguuagagauccccagacacuggaaauccuggacaucaccccaugcagcuucggcggagugucugugaucaccccuggcaccaacaccagcaaucagguggcagugcuguaccaggacgugaacuguaccgaagugcccguggccauucacgccgaucagcugacaccuacauggcggguguacuccaccggcagcaauguguuucagaccagagccggcugucugaucggagccgagcacgugaacaauagcuacgagugcgacauccccaucggcgcuggcaucugugccagcuaccagacacagacaaacagccccagacgggcuagaagcguggccagccagagcaucauugccuacacaaugucucugggcgccgagaacagcguggccuacuccaacaacucuaucgcuauccccaccaacuucaccaucagcgugaccaccgagauccugccuguguccaugaccaagaccagcguggacugcaccauguacaucugcggcgauuccaccgagugcuccaaccugcugcugcaguacggcagcuucugcacccagcugaauagagcccugacagggaucgccguggaacaggacaagaacacccaagagguguucgcccaagugaagcaaaucuacaagaccccuccuaucaaggacuucggcggcuucaauuucagccagauucugcccgauccuagcaagcccagcaagcggagcuucaucgaggaccugcuguucaacaaagugacacuggccgacgccggcuucaucaagcaguauggcgauugucugggcgacauugccgccagggaucugauuugcgcccagaaguuuaacggacugacagugcugccuccucugcugaccgaugagaugaucgcccaguacacaucugcccugcuggccggcacaaucacaagcggcuggacauuuggagcuggcgccgcucugcagauccccuuugcuaugcagauggccuaccgguucaacggcaucggagugacccagaaugugcuguacgagaaccagaagcugaucgccaaccaguucaacagcgccaucggcaagauccaggacagccugagcagcacagcaagcgcccugggaaagcugcaggacguggucaaccagaaugcccaggcacugaacacccuggucaagugccuguccuccaacuucggcgccaucagcucugugcugaacgauauccugagcagacuggacaaggucgaggccgaggugcagaucgacagacugaucacaggcagacugcagugucuccagacauacgugacccagcagcugaucagagccgccgagauuagagccucugccaaucuggccgccaccaagaugucugagugugugcugggccagagcaagagaguggacuuuugcggcaagggcuaccaccugaugagcuucccucagucugccccucacggcgugguguuucugcacgugacauaugugcccgcucaagagaagaauuucaccaccgcuccagccaucugccacgacggcaaagcccacuuuccuagagaaggcguguucguguccaacggcacccauugguucgugacacagcggaacuucuacgagccccagaucaucaccaccgacaacaccuucgugucuggcaacugcgacguugugaucggcauugugaacaauaccguguacgacccucugcagcccgagcuggacagcggaggcggaggaucugacaucgaccccuacaaagaguucggcagcagcuaccagcugcugaacuuccugccucuggacuucuuccccgaccugaacgcccugguggauacagccacagcucuguacgaggaagaacugaccggcagagagcacugcagcccucaccacacagccauuagacaggcccucgugugcugggacgagcugacaaaacugaucgccuggaugagcagcaacaucaccagcgagcaagugcggaccaucaucgugaaccacgugaacgauaccuggggccugaaagugcggcagagccugugguuucaccugagcugucugaccuucggccagcacaccgugcaagaguuucugguguccuucggcguguggaucagaaccccugcuccauacagaccuccaaacgcucccauccugagcacccugccugagcacacagugaucuguugaggacuagucccuguucccagagcccacuuuuuuuucuuuuuuugaaauaaaauagccugucuuucagaucucaaaggcucuuuucagagccaccaaaaaaaaaaaaaaaaaaaaaaaaaaaaaaaaaaaaaaaaaaaaaaaaaaaaaaaaaaaaaaaaaaaaaaaaaaaaaaaaaaaaaaaaaaaaaaaaaaaaa

SEQ ID NO: 12672 - RNA, 4178 nt, Artificial Sequence
  SARS-CoV-2/Wuhan/WIV05/2019__EPI_ISL_402128 spike protein mRNA gc mod (1-1147)(F970C_G999C) WhcAg construct
aggagagucccgcagucggcguccagcggcucugcuuguucgugugugugucguugcaggccuuauucaagcuuaccauguucguguuucuggugcugcugccccugguguccagccagugugugaaccugaccaccagaacacagcugccuccagccuacaccaacagcuucaccagaggcguguacuaccccgacaagguguucagauccagcgugcugcacucuacccaggaccuguuccugccuuucuucagcaacgugaccugguuccacgccauccacguguccggcaccaauggcaccaagagauucgacaaccccgugcugcccuucaacgacgggguguacuuugccagcaccgagaaguccaacaucaucagaggcuggaucuucggcaccacacuggacagcaagacccagagccugcugaucgugaacaacgccaccaacguggucaucaaagugugcgaguuccaguucugcaacgaccccuuccugggcgucuacuaccacaagaacaacaagagcuggauggaaagcgaguuccggguguacagcagcgccaacaacugcaccuucgaguacgugucccagccuuuccugauggaccuggaaggcaagcagggcaacuucaagaaccugcgcgaguucguguucaagaacaucgacggcuacuucaaaaucuacagcaagcacaccccuaucaaccucgugcgggaucugccucagggcuucucugcucuggaaccccugguggaucugcccaucggcaucaacaucacccgguuucagacacugcuggcccugcacagaagcuaccugacaccuggcgauagcagcagcggauggacagcuggugccgccgcuuacuaugugggcuaccugcagccuagaaccuuccugcugaaguacaacgagaacggcaccaucaccgacgccguggauugugcucuggauccucugagcgagacaaagugcacccugaaguccuucaccguggaaaagggcaucuaccagaccagcaacuuccgggugcagcccaccgaauccaucgugcgguuccccaauaucaccaaucugugccccuucggcgagguguucaaugccaccagauucgccucuguguacgccuggaaccggaagcggaucagcaauugcguggccgacuacuccgugcuguacaacuccgccagcuucagcaccuucaagugcuacggcguguccccuaccaagcugaacgaccugugcuucacaaacguguacgccgacagcuucgugauccggggagaugaagugcggcagauugccccuggacagacaggcaagaucgccgacuacaacuacaagcugcccgacgacuucaccggcugugugauugccuggaacagcaacaaccuggacuccaaagucggcggcaacuacaauuaccuguaccggcuguuccggaaguccaaucugaagcccuucgagcgggacaucagcaccgaaaucuaucaggccggcagcaccccuugcaacggcguggaaggcuucaacugcuacuucccacugcaguccuacggcuuucagcccacaaauggcgugggcuaucagcccuacagagugguggugcugagcuucgaacugcugcaugcuccugccacagugugcggcccuaagaaaagcaccaaucucgugaagaacaaaugcgugaacuucaacuucaacggccugaccggcaccggcgugcugacagagagcaacaagaaguuccugccauuccagcaguuuggccgggauaucgccgauaccacagacgccguuagagauccccagacacuggaaauccuggacaucaccccaugcagcuucggcggagugucugugaucaccccuggcaccaacaccagcaaucagguggcagugcuguaccaggacgugaacuguaccgaagugcccguggccauucacgccgaucagcugacaccuacauggcggguguacuccaccggcagcaauguguuucagaccagagccggcugucugaucggagccgagcacgugaacaauagcuacgagugcgacauccccaucggcgcuggcaucugugccagcuaccagacacagacaaacagccccagacgggcuagaagcguggccagccagagcaucauugccuacacaaugucucugggcgccgagaacagcguggccuacuccaacaacucuaucgcuauccccaccaacuucaccaucagcgugaccaccgagauccugccuguguccaugaccaagaccagcguggacugcaccauguacaucugcggcgauuccaccgagugcuccaaccugcugcugcaguacggcagcuucugcacccagcugaauagagcccugacagggaucgccguggaacaggacaagaacacccaagagguguucgcccaagugaagcaaaucuacaagaccccuccuaucaaggacuucggcggcuucaauuucagccagauucugcccgauccuagcaagcccagcaagcggagcuucaucgaggaccugcuguucaacaaagugacacuggccgacgccggcuucaucaagcaguauggcgauugucugggcgacauugccgccagggaucugauuugcgcccagaaguuuaacggacugacagugcugccuccucugcugaccgaugagaugaucgcccaguacacaucugcccugcuggccggcacaaucacaagcggcuggacauuuggagcuggcgccgcucugcagauccccuuugcuaugcagauggccuaccgguucaacggcaucggagugacccagaaugugcuguacgagaaccagaagcugaucgccaaccaguucaacagcgccaucggcaagauccaggacagccugagcagcacagcaagcgcccugggaaagcugcaggacguggucaaccagaaugcccaggcacugaacacccuggucaagcagcuguccuccaacugcggcgccaucagcucugugcugaacgauauccugagcagacuggacaaggucgaggccgaggugcagaucgacagacugaucacauguagacugcagagccuccagacauacgugacccagcagcugaucagagccgccgagauuagagccucugccaaucuggccgccaccaagaugucugagugugugcugggccagagcaagagaguggacuuuugcggcaagggcuaccaccugaugagcuucccucagucugccccucacggcgugguguuucugcacgugacauaugugcccgcucaagagaagaauuucaccaccgcuccagccaucugccacgacggcaaagcccacuuuccuagagaaggcguguucguguccaacggcacccauugguucgugacacagcggaacuucuacgagccccagaucaucaccaccgacaacaccuucgugucuggcaacugcgacguugugaucggcauugugaacaauaccguguacgacccucugcagcccgagcuggacagcggaggcggaggaucugacaucgaccccuacaaagaguucggcagcagcuaccagcugcugaacuuccugccucuggacuucuuccccgaccugaacgcccugguggauacagccacagcucuguacgaggaagaacugaccggcagagagcacugcagcccucaccacacagccauuagacaggcccucgugugcugggacgagcugacaaaacugaucgccuggaugagcagcaacaucaccagcgagcaagugcggaccaucaucgugaaccacgugaacgauaccuggggccugaaagugcggcagagccugugguuucaccugagcugucugaccuucggccagcacaccgugcaagaguuucugguguccuucggcguguggaucagaaccccugcuccauacagaccuccaaacgcucccauccugagcacccugccugagcacacagugaucuguugaggacuagucccuguucccagagcccacuuuuuuuucuuuuuuugaaauaaaauagccugucuuucagaucucaaaggcucuuuucagagccaccaaaaaaaaaaaaaaaaaaaaaaaaaaaaaaaaaaaaaaaaaaaaaaaaaaaaaaaaaaaaaaaaaaaaaaaaaaaaaaaaaaaaaaaaaaaaaaaaaaaaa

SEQ ID NO: 12673 - RNA, 4178 nt, Artificial Sequence
  SARS-CoV-2/Wuhan/WIV05/2019__EPI_ISL_402128 spike protein mRNA gc mod (1-1147)(A972C_R995C) WhcAg construct
aggagagucccgcagucggcguccagcggcucugcuuguucgugugugugucguugcaggccuuauucaagcuuaccauguucguguuucuggugcugcugccccugguguccagccagugugugaaccugaccaccagaacacagcugccuccagccuacaccaacagcuucaccagaggcguguacuaccccgacaagguguucagauccagcgugcugcacucuacccaggaccuguuccugccuuucuucagcaacgugaccugguuccacgccauccacguguccggcaccaauggcaccaagagauucgacaaccccgugcugcccuucaacgacgggguguacuuugccagcaccgagaaguccaacaucaucagaggcuggaucuucggcaccacacuggacagcaagacccagagccugcugaucgugaacaacgccaccaacguggucaucaaagugugcgaguuccaguucugcaacgaccccuuccugggcgucuacuaccacaagaacaacaagagcuggauggaaagcgaguuccggguguacagcagcgccaacaacugcaccuucgaguacgugucccagccuuuccugauggaccuggaaggcaagcagggcaacuucaagaaccugcgcgaguucguguucaagaacaucgacggcuacuucaaaaucuacagcaagcacaccccuaucaaccucgugcgggaucugccucagggcuucucugcucuggaaccccugguggaucugcccaucggcaucaacaucacccgguuucagacacugcuggcccugcacagaagcuaccugacaccuggcgauagcagcagcggauggacagcuggugccgccgcuuacuaugugggcuaccugcagccuagaaccuuccugcugaaguacaacgagaacggcaccaucaccgacgccguggauugugcucuggauccucugagcgagacaaagugcacccugaaguccuucaccguggaaaagggcaucuaccagaccagcaacuuccgggugcagcccaccgaauccaucgugcgguuccccaauaucaccaaucugugccccuucggcgagguguucaaugccaccagauucgccucuguguacgccuggaaccggaagcggaucagcaauugcguggccgacuacuccgugcuguacaacuccgccagcuucagcaccuucaagugcuacggcguguccccuaccaagcugaacgaccugugcuucacaaacguguacgccgacagcuucgugauccggggagaugaagugcggcagauugccccuggacagacaggcaagaucgccgacuacaacuacaagcugcccgacgacuucaccggcugugugauugccuggaacagcaacaaccuggacuccaaagucggcggcaacuacaauuaccuguaccggcuguuccggaaguccaaucugaagcccuucgagcgggacaucagcaccgaaaucuaucaggccggcagcaccccuugcaacggcguggaaggcuucaacugcuacuucccacugcaguccuacggcuuucagcccacaaauggcgugggcuaucagcccuacagagugguggugcugagcuucgaacugcugcaugcuccugccacagugugcggcccuaagaaaagcaccaaucucgugaagaacaaaugcgugaacuucaacuucaacggccugaccggcaccggcgugcugacagagagcaacaagaaguuccugccauuccagcaguuuggccgggauaucgccgauaccacagacgccguuagagauccccagacacuggaaauccuggacaucaccccaugcagcuucggcggagugucugugaucaccccuggcaccaacaccagcaaucagguggcagugcuguaccaggacgugaacuguaccgaagugcccguggccauucacgccgaucagcugacaccuacauggcggguguacuccaccggcagcaauguguuucagaccagagccggcugucugaucggagccgagcacgugaacaauagcuacgagugcgacauccccaucggcgcuggcaucugugccagcuaccagacacagacaaacagccccagacgggcuagaagcguggccagccagagcaucauugccuacacaaugucucugggcgccgagaacagcguggccuacuccaacaacucuaucgcuauccccaccaacuucaccaucagcgugaccaccgagauccugccuguguccaugaccaagaccagcguggacugcaccauguacaucugcggcgauuccaccgagugcuccaaccugcugcugcaguacggcagcuucugcacccagcugaauagagcccugacagggaucgccguggaacaggacaagaacacccaagagguguucgcccaagugaagcaaaucuacaagaccccuccuaucaaggacuucggcggcuucaauuucagccagauucugcccgauccuagcaagcccagcaagcggagcuucaucgaggaccugcuguucaacaaagugacacuggccgacgccggcuucaucaagcaguauggcgauugucugggcgacauugccgccagggaucugauuugcgcccagaaguuuaacggacugacagugcugccuccucugcugaccgaugagaugaucgcccaguacacaucugcccugcuggccggcacaaucacaagcggcuggacauuuggagcuggcgccgcucugcagauccccuuugcuaugcagauggccuaccgguucaacggcaucggagugacccagaaugugcuguacgagaaccagaagcugaucgccaaccaguucaacagcgccaucggcaagauccaggacagccugagcagcacagcaagcgcccugggaaagcugcaggacguggucaaccagaaugcccaggcacugaacacccuggucaagcagcuguccuccaacuucggcugcaucagcucugugcugaacgauauccugagcagacuggacaaggucgaggccgaggugcagaucgacugucugaucacaggcagacugcagagccuccagacauacgugacccagcagcugaucagagccgccgagauuagagccucugccaaucuggccgccaccaagaugucugagugugugcugggccagagcaagagaguggacuuuugcggcaagggcuaccaccugaugagcuucccucagucugccccucacggcgugguguuucugcacgugacauaugugcccgcucaagagaagaauuucaccaccgcuccagccaucugccacgacggcaaagcccacuuuccuagagaaggcguguucguguccaacggcacccauugguucgugacacagcggaacuucuacgagccccagaucaucaccaccgacaacaccuucgugucuggcaacugcgacguugugaucggcauugugaacaauaccguguacgacccucugcagcccgagcuggacagcggaggcggaggaucugacaucgaccccuacaaagaguucggcagcagcuaccagcugcugaacuuccugccucuggacuucuuccccgaccugaacgcccugguggauacagccacagcucuguacgaggaagaacugaccggcagagagcacugcagcccucaccacacagccauuagacaggcccucgugugcugggacgagcugacaaaacugaucgccuggaugagcagcaacaucaccagcgagcaagugcggaccaucaucgugaaccacgugaacgauaccuggggccugaaagugcggcagagccugugguuucaccugagcugucugaccuucggccagcacaccgugcaagaguuucugguguccuucggcguguggaucagaaccccugcuccauacagaccuccaaacgcucccauccugagcacccugccugagcacacagugaucuguugaggacuagucccuguucccagagcccacuuuuuuuucuuuuuuugaaauaaaauagccugucuuucagaucucaaaggcucuuuucagagccaccaaaaaaaaaaaaaaaaaaaaaaaaaaaaaaaaaaaaaaaaaaaaaaaaaaaaaaaaaaaaaaaaaaaaaaaaaaaaaaaaaaaaaaaaaaaaaaaaaaaaa

SEQ ID NO: 12674 - RNA, 4178 nt, Artificial Sequence
  SARS-CoV-2/Wuhan/WIV05/2019__EPI_ISL_402128 spike protein mRNA gc mod (1-1147)(A890C_V1040C) WhcAg construct
aggagagucccgcagucggcguccagcggcucugcuuguucgugugugugucguugcaggccuuauucaagcuuaccauguucguguuucuggugcugcugccccugguguccagccagugugugaaccugaccaccagaacacagcugccuccagccuacaccaacagcuucaccagaggcguguacuaccccgacaagguguucagauccagcgugcugcacucuacccaggaccuguuccugccuuucuucagcaacgugaccugguuccacgccauccacguguccggcaccaauggcaccaagagauucgacaaccccgugcugcccuucaacgacgggguguacuuugccagcaccgagaaguccaacaucaucagaggcuggaucuucggcaccacacuggacagcaagacccagagccugcugaucgugaacaacgccaccaacguggucaucaaagugugcgaguuccaguucugcaacgaccccuuccugggcgucuacuaccacaagaacaacaagagcuggauggaaagcgaguuccggguguacagcagcgccaacaacugcaccuucgaguacgugucccagccuuuccugauggaccuggaaggcaagcagggcaacuucaagaaccugcgcgaguucguguucaagaacaucgacggcuacuucaaaaucuacagcaagcacaccccuaucaaccucgugcgggaucugccucagggcuucucugcucuggaaccccugguggaucugcccaucggcaucaacaucacccgguuucagacacugcuggcccugcacagaagcuaccugacaccuggcgauagcagcagcggauggacagcuggugccgccgcuuacuaugugggcuaccugcagccuagaaccuuccugcugaaguacaacgagaacggcaccaucaccgacgccguggauugugcucuggauccucugagcgagacaaagugcacccugaaguccuucaccguggaaaagggcaucuaccagaccagcaacuuccgggugcagcccaccgaauccaucgugcgguuccccaauaucaccaaucugugccccuucggcgagguguucaaugccaccagauucgccucuguguacgccuggaaccggaagcggaucagcaauugcguggccgacuacuccgugcuguacaacuccgccagcuucagcaccuucaagugcuacggcguguccccuaccaagcugaacgaccugugcuucacaaacguguacgccgacagcuucgugauccggggagaugaagugcggcagauugccccuggacagacaggcaagaucgccgacuacaacuacaagcugcccgacgacuucaccggcugugugauugccuggaacagcaacaaccuggacuccaaagucggcggcaacuacaauuaccuguaccggcuguuccggaaguccaaucugaagcccuucgagcgggacaucagcaccgaaaucuaucaggccggcagcaccccuugcaacggcguggaaggcuucaacugcuacuucccacugcaguccuacggcuuucagcccacaaauggcgugggcuaucagcccuacagagugguggugcugagcuucgaacugcugcaugcuccugccacagugugcggcccuaagaaaagcaccaaucucgugaagaacaaaugcgugaacuucaacuucaacggccugaccggcaccggcgugcugacagagagcaacaagaaguuccugccauuccagcaguuuggccgggauaucgccgauaccacagacgccguuagagauccccagacacuggaaauccuggacaucaccccaugcagcuucggcggagugucugugaucaccccuggcaccaacaccagcaaucagguggcagugcuguaccaggacgugaacuguaccgaagugcccguggccauucacgccgaucagcugacaccuacauggcggguguacuccaccggcagcaauguguuucagaccagagccggcugucugaucggagccgagcacgugaacaauagcuacgagugcgacauccccaucggcgcuggcaucugugccagcuaccagacacagacaaacagccccagacgggcuagaagcguggccagccagagcaucauugccuacacaaugucucugggcgccgagaacagcguggccuacuccaacaacucuaucgcuauccccaccaacuucaccaucagcgugaccaccgagauccugccuguguccaugaccaagaccagcguggacugcaccauguacaucugcggcgauuccaccgagugcuccaaccugcugcugcaguacggcagcuucugcacccagcugaauagagcccugacagggaucgccguggaacaggacaagaacacccaagagguguucgcccaagugaagcaaaucuacaagaccccuccuaucaaggacuucggcggcuucaauuucagccagauucugcccgauccuagcaagcccagcaagcggagcuucaucgaggaccugcuguucaacaaagugacacuggccgacgccggcuucaucaagcaguauggcgauugucugggcgacauugccgccagggaucugauuugcgcccagaaguuuaacggacugacagugcugccuccucugcugaccgaugagaugaucgcccaguacacaucugcccugcuggccggcacaaucacaagcggcuggacauuuggaugcggcgccgcucugcagauccccuuugcuaugcagauggccuaccgguucaacggcaucggagugacccagaaugugcuguacgagaaccagaagcugaucgccaaccaguucaacagcgccaucggcaagauccaggacagccugagcagcacagcaagcgcccugggaaagcugcaggacguggucaaccagaaugcccaggcacugaacacccuggucaagcagcuguccuccaacuucggcgccaucagcucugugcugaacgauauccugagcagacuggacaaggucgaggccgaggugcagaucgacagacugaucacaggcagacugcagagccuccagacauacgugacccagcagcugaucagagccgccgagauuagagccucugccaaucuggccgccaccaagaugucugagugugugcugggccagagcaagagaugugacuuuugcggcaagggcuaccaccugaugagcuucccucagucugccccucacggcgugguguuucugcacgugacauaugugcccgcucaagagaagaauuucaccaccgcuccagccaucugccacgacggcaaagcccacuuuccuagagaaggcguguucguguccaacggcacccauugguucgugacacagcggaacuucuacgagccccagaucaucaccaccgacaacaccuucgugucuggcaacugcgacguugugaucggcauugugaacaauaccguguacgacccucugcagcccgagcuggacagcggaggcggaggaucugacaucgaccccuacaaagaguucggcagcagcuaccagcugcugaacuuccugccucuggacuucuuccccgaccugaacgcccugguggauacagccacagcucuguacgaggaagaacugaccggcagagagcacugcagcccucaccacacagccauuagacaggcccucgugugcugggacgagcugacaaaacugaucgccuggaugagcagcaacaucaccagcgagcaagugcggaccaucaucgugaaccacgugaacgauaccuggggccugaaagugcggcagagccugugguuucaccugagcugucugaccuucggccagcacaccgugcaagaguuucugguguccuucggcguguggaucagaaccccugcuccauacagaccuccaaacgcucccauccugagcacccugccugagcacacagugaucuguugaggacuagucccuguucccagagcccacuuuuuuuucuuuuuuugaaauaaaauagccugucuuucagaucucaaaggcucuuuucagagccaccaaaaaaaaaaaaaaaaaaaaaaaaaaaaaaaaaaaaaaaaaaaaaaaaaaaaaaaaaaaaaaaaaaaaaaaaaaaaaaaaaaaaaaaaaaaaaaaaaaaaa

SEQ ID NO: 12675 - RNA, 4178 nt, Artificial Sequence
  SARS-CoV-2/Wuhan/WIV05/2019__EPI_ISL_402128 spike protein mRNA gc mod (1-1147)(T874C_S1055C) WhcAg construct
aggagagucccgcagucggcguccagcggcucugcuuguucgugugugugucguugcaggccuuauucaagcuuaccauguucguguuucuggugcugcugccccugguguccagccagugugugaaccugaccaccagaacacagcugccuccagccuacaccaacagcuucaccagaggcguguacuaccccgacaagguguucagauccagcgugcugcacucuacccaggaccuguuccugccuuucuucagcaacgugaccugguuccacgccauccacguguccggcaccaauggcaccaagagauucgacaaccccgugcugcccuucaacgacgggguguacuuugccagcaccgagaaguccaacaucaucagaggcuggaucuucggcaccacacuggacagcaagacccagagccugcugaucgugaacaacgccaccaacguggucaucaaagugugcgaguuccaguucugcaacgaccccuuccugggcgucuacuaccacaagaacaacaagagcuggauggaaagcgaguuccggguguacagcagcgccaacaacugcaccuucgaguacgugucccagccuuuccugauggaccuggaaggcaagcagggcaacuucaagaaccugcgcgaguucguguucaagaacaucgacggcuacuucaaaaucuacagcaagcacaccccuaucaaccucgugcgggaucugccucagggcuucucugcucuggaaccccugguggaucugcccaucggcaucaacaucacccgguuucagacacugcuggcccugcacagaagcuaccugacaccuggcgauagcagcagcggauggacagcuggugccgccgcuuacuaugugggcuaccugcagccuagaaccuuccugcugaaguacaacgagaacggcaccaucaccgacgccguggauugugcucuggauccucugagcgagacaaagugcacccugaaguccuucaccguggaaaagggcaucuaccagaccagcaacuuccgggugcagcccaccgaauccaucgugcgguuccccaauaucaccaaucugugccccuucggcgagguguucaaugccaccagauucgccucuguguacgccuggaaccggaagcggaucagcaauugcguggccgacuacuccgugcuguacaacuccgccagcuucagcaccuucaagugcuacggcguguccccuaccaagcugaacgaccugugcuucacaaacguguacgccgacagcuucgugauccggggagaugaagugcggcagauugccccuggacagacaggcaagaucgccgacuacaacuacaagcugcccgacgacuucaccggcugugugauugccuggaacagcaacaaccuggacuccaaagucggcggcaacuacaauuaccuguaccggcuguuccggaaguccaaucugaagcccuucgagcgggacaucagcaccgaaaucuaucaggccggcagcaccccuugcaacggcguggaaggcuucaacugcuacuucccacugcaguccuacggcuuucagcccacaaauggcgugggcuaucagcccuacagagugguggugcugagcuucgaacugcugcaugcuccugccacagugugcggcccuaagaaaagcaccaaucucgugaagaacaaaugcgugaacuucaacuucaacggccugaccggcaccggcgugcugacagagagcaacaagaaguuccugccauuccagcaguuuggccgggauaucgccgauaccacagacgccguuagagauccccagacacuggaaauccuggacaucaccccaugcagcuucggcggagugucugugaucaccccuggcaccaacaccagcaaucagguggcagugcuguaccaggacgugaacuguaccgaagugcccguggccauucacgccgaucagcugacaccuacauggcggguguacuccaccggcagcaauguguuucagaccagagccggcugucugaucggagccgagcacgugaacaauagcuacgagugcgacauccccaucggcgcuggcaucugugccagcuaccagacacagacaaacagccccagacgggcuagaagcguggccagccagagcaucauugccuacacaaugucucugggcgccgagaacagcguggccuacuccaacaacucuaucgcuauccccaccaacuucaccaucagcgugaccaccgagauccugccuguguccaugaccaagaccagcguggacugcaccauguacaucugcggcgauuccaccgagugcuccaaccugcugcugcaguacggcagcuucugcacccagcugaauagagcccugacagggaucgccguggaacaggacaagaacacccaagagguguucgcccaagugaagcaaaucuacaagaccccuccuaucaaggacuucggcggcuucaauuucagccagauucugcccgauccuagcaagcccagcaagcggagcuucaucgaggaccugcuguucaacaaagugacacuggccgacgccggcuucaucaagcaguauggcgauugucugggcgacauugccgccagggaucugauuugcgcccagaaguuuaacggacugacagugcugccuccucugcugaccgaugagaugaucgcccaguacugcucugcccugcuggccggcacaaucacaagcggcuggacauuuggagcuggcgccgcucugcagauccccuuugcuaugcagauggccuaccgguucaacggcaucggagugacccagaaugugcuguacgagaaccagaagcugaucgccaaccaguucaacagcgccaucggcaagauccaggacagccugagcagcacagcaagcgcccugggaaagcugcaggacguggucaaccagaaugcccaggcacugaacacccuggucaagcagcuguccuccaacuucggcgccaucagcucugugcugaacgauauccugagcagacuggacaaggucgaggccgaggugcagaucgacagacugaucacaggcagacugcagagccuccagacauacgugacccagcagcugaucagagccgccgagauuagagccucugccaaucuggccgccaccaagaugucugagugugugcugggccagagcaagagaguggacuuuugcggcaagggcuaccaccugaugagcuucccucagugcgccccucacggcgugguguuucugcacgugacauaugugcccgcucaagagaagaauuucaccaccgcuccagccaucugccacgacggcaaagcccacuuuccuagagaaggcguguucguguccaacggcacccauugguucgugacacagcggaacuucuacgagccccagaucaucaccaccgacaacaccuucgugucuggcaacugcgacguugugaucggcauugugaacaauaccguguacgacccucugcagcccgagcuggacagcggaggcggaggaucugacaucgaccccuacaaagaguucggcagcagcuaccagcugcugaacuuccugccucuggacuucuuccccgaccugaacgcccugguggauacagccacagcucuguacgaggaagaacugaccggcagagagcacugcagcccucaccacacagccauuagacaggcccucgugugcugggacgagcugacaaaacugaucgccuggaugagcagcaacaucaccagcgagcaagugcggaccaucaucgugaaccacgugaacgauaccuggggccugaaagugcggcagagccugugguuucaccugagcugucugaccuucggccagcacaccgugcaagaguuucugguguccuucggcguguggaucagaaccccugcuccauacagaccuccaaacgcucccauccugagcacccugccugagcacacagugaucuguugaggacuagucccuguucccagagcccacuuuuuuuucuuuuuuugaaauaaaauagccugucuuucagaucucaaaggcucuuuucagagccaccaaaaaaaaaaaaaaaaaaaaaaaaaaaaaaaaaaaaaaaaaaaaaaaaaaaaaaaaaaaaaaaaaaaaaaaaaaaaaaaaaaaaaaaaaaaaaaaaaaaaa

SEQ ID NO: 12676 - RNA, 4039 nt, Artificial Sequence
  SARS-CoV-2/Wuhan/WIV05/2019__EPI_ISL_402128 spike protein mRNA wt (1-1273)
aggagaaagcuuaccauguuuguuuuucuuguuuuauugccacuagucucuagucaguguguuaaucuuacaaccagaacucaauuacccccugcauacacuaauucuuucacacgugguguuuauuacccugacaaaguuuucagauccucaguuuuacauucaacucaggacuuguucuuaccuuucuuuuccaauguuacuugguuccaugcuauacaugucucugggaccaaugguacuaagagguuugauaacccuguccuaccauuuaaugaugguguuuauuuugcuuccacugagaagucuaacauaauaagaggcuggauuuuugguacuacuuuagauucgaagacccagucccuacuuauuguuaauaacgcuacuaauguuguuauuaaagucugugaauuucaauuuuguaaugauccauuuuuggguguuuauuaccacaaaaacaacaaaaguuggauggaaagugaguucagaguuuauucuagugcgaauaauugcacuuuugaauaugucucucagccuuuucuuauggaccuugaaggaaaacaggguaauuucaaaaaucuuagggaauuuguguuuaagaauauugaugguuauuuuaaaauauauucuaagcacacgccuauuaauuuagugcgugaucucccucaggguuuuucggcuuuagaaccauugguagauuugccaauagguauuaacaucacuagguuucaaacuuuacuugcuuuacauagaaguuauuugacuccuggugauucuucuucagguuggacagcuggugcugcagcuuauuauguggguuaucuucaaccuaggacuuuucuauuaaaauauaaugaaaauggaaccauuacagaugcuguagacugugcacuugacccucucucagaaacaaaguguacguugaaauccuucacuguagaaaaaggaaucuaucaaacuucuaacuuuagaguccaaccaacagaaucuauuguuagauuuccuaauauuacaaacuugugcccuuuuggugaaguuuuuaacgccaccagauuugcaucuguuuaugcuuggaacaggaagagaaucagcaacuguguugcugauuauucuguccuauauaauuccgcaucauuuuccacuuuuaaguguuauggagugucuccuacuaaauuaaaugaucucugcuuuacuaaugucuaugcagauucauuuguaauuagaggugaugaagucagacaaaucgcuccagggcaaacuggaaagauugcugauuauaauuauaaauuaccagaugauuuuacaggcugcguuauagcuuggaauucuaacaaucuugauucuaagguuggugguaauuauaauuaccuguauagauuguuuaggaagucuaaucucaaaccuuuugagagagauauuucaacugaaaucuaucaggccgguagcacaccuuguaaugguguugaagguuuuaauuguuacuuuccuuuacaaucauaugguuuccaacccacuaaugguguugguuaccaaccauacagaguaguaguacuuucuuuugaacuucuacaugcaccagcaacuguuuguggaccuaaaaagucuacuaauuugguuaaaaacaaaugugucaauuucaacuucaaugguuuaacaggcacagguguucuuacugagucuaacaaaaaguuucugccuuuccaacaauuuggcagagacauugcugacacuacugaugcuguccgugauccacagacacuugagauucuugacauuacaccauguucuuuugguggugucaguguuauaacaccaggaacaaauacuucuaaccagguugcuguucuuuaucaggauguuaacugcacagaagucccuguugcuauucaugcagaucaacuuacuccuacuuggcguguuuauucuacagguucuaauguuuuucaaacacgugcaggcuguuuaauaggggcugaacaugucaacaacucauaugagugugacauacccauuggugcagguauaugcgcuaguuaucagacucagacuaauucuccucggcgggcacguaguguagcuagucaauccaucauugccuacacuaugucacuuggugcagaaaauucaguugcuuacucuaauaacucuauugccauacccacaaauuuuacuauuaguguuaccacagaaauucuaccagugucuaugaccaagacaucaguagauuguacaauguacauuuguggugauucaacugaaugcagcaaucuuuuguugcaauauggcaguuuuuguacacaauuaaaccgugcuuuaacuggaauagcuguugaacaagacaaaaacacccaagaaguuuuugcacaagucaaacaaauuuacaaaacaccaccaauuaaagauuuuggugguuuuaauuuuucacaaauauuaccagauccaucaaaaccaagcaagaggucauuuauugaagaucuacuuuucaacaaagugacacuugcagaugcuggcuucaucaaacaauauggugauugccuuggugauauugcugcuagagaccucauuugugcacaaaaguuuaacggccuuacuguuuugccaccuuugcucacagaugaaaugauugcucaauacacuucugcacuguuagcggguacaaucacuucugguuggaccuuuggugcaggugcugcauuacaaauaccauuugcuaugcaaauggcuuauagguuuaaugguauuggaguuacacagaauguucucuaugagaaccaaaaauugauugccaaccaauuuaauagugcuauuggcaaaauucaagacucacuuucuuccacagcaagugcacuuggaaaacuucaagauguggucaaccaaaaugcacaagcuuuaaacacgcuuguuaaacaacuuagcuccaauuuuggugcaauuucaaguguuuuaaaugauauccuuucacgucuugacaaaguugaggcugaagugcaaauugauagguugaucacaggcagacuucaaaguuugcagacauaugugacucaacaauuaauuagagcugcagaaaucagagcuucugcuaaucuugcugcuacuaaaaugucagaguguguacuuggacaaucaaaaagaguugauuuuuguggaaagggcuaucaucuuauguccuucccucagucagcaccucaugguguagucuucuugcaugugacuuaugucccugcacaagaaaagaacuucacaacugcuccugccauuugucaugauggaaaagcacacuuuccucgugaaggugucuuuguuucaaauggcacacacugguuuguaacacaaaggaauuuuuaugaaccacaaaucauuacuacagacaacacauuugugucugguaacugugauguuguaauaggaauugucaacaacacaguuuaugauccuuugcaaccugaauuagacucauucaaggaggaguuagauaaauauuuuaagaaucauacaucaccagauguugauuuaggugacaucucuggcauuaaugcuucaguuguaaacauucaaaaagaaauugaccgccucaaugagguugccaagaauuuaaaugaaucucucaucgaucuccaagaacuuggaaaguaugagcaguauauaaaauggccaugguacauuuggcuagguuuuauagcuggcuugauugccauaguaauggugacaauuaugcuuugcuguaugaccaguugcuguaguugucucaagggcuguuguucuuguggauccugcugcaaauuugaugaagacgacucugagccagugcucaaaggagucaaauuacauuacacauaaggacuaguuauaagacugacuagcccgaugggccucccaacgggcccuccuccccuccuugcaccgagauuaauaaaaaaaaaaaaaaaaaaaaaaaaaaaaaaaaaaaaaaaaaaaaaaaaaaaaaaaaaaaaaaaaugcaucccccccccccccccccccccccccccccccaaaggcucuuuucagagccaccagaauu

SEQ ID NO: 12677 - RNA, 4027 nt, Artificial Sequence
  SARS-CoV-2/bat/Yunnan/RaTG13/2013__EPI_ISL_402131 spike protein mRNA wt (1-1269)
aggagaaagcuuaccauguuuguuuuucuuguuuuauugccacuaguuucuagucaguguguuaaucuaacaacuagaacucaguuaccuccugcauacaccaacucauccacccguggugucuauuacccugacaaaguuuucagaucuucaguuuuacauuuaacucaggauuuguuuuuaccuuucuucuccaaugugaccugguuccaugcuauacauguuucagggaccaaugguauuaaaagguuugauaacccaguucugccauucaacgauggcgucuauuuugcuuccacugagaagucuaauauaauaagaggauggauuuuugguacuaccuuagauucgaagacccagucucuacuuauuguuaauaacgcuacuaauguuguuauuaaagucugugaauuucaauuuuguaaugauccauuuuuggguguuuauuaccacaaaaacaacaaaaguuggauggaaagugaguucagaguuuacucuagugcgaauaauugcacuuuugaguaugucucucagccuuuucuuauggaccuugaaggaaaacaggguaauuucaaaaaucuuagggaauucguguuuaagaauauugaugguuauuucaaaauauauucuaaacauacgccuauuaauuuagugcgugaucuucccccugguuuuucagcuuuagaaccauugguagaucugccaauagguauuaacaucacuagguuucaaacuuuacuugcuuuacauagaagcuauuugacuccuggugauucuucuucagguuggacagcuggugcugcagcuuauuauguggguuaucuucaaccaaggacuuuucuacuaaaauauaaugagaauggaaccauuacagaugcuguagacugugcacuugacccucuuucagaaacaaaguguacguuaaaauccuucacuguugaaaaaggaauuuaucaaaccucuaacuuuagaguccaaccaacagauucuauuguuagauucccaaauauuacaaacuuauguccuuuuggugaaguuuuuaacgccaccacauucgcaucaguuuaugcuuggaacagaaagagaauuagcaacuguguugcugauuacucuguccuauauaauuccacuucauuuucuaccuuuaaauguuauggagugucuccuacuaaauuaaaugaucucugcuuuacuaauguuuaugcagacucauuugugauuacaggugaugaagucagacaaauugcgccaggacaaacuggaaagauugcugacuacaauuauaaacuaccagaugauuuuacugguuguguuauagcuuggaauucuaagcauauugaugcaaaagagggcgguaauuuuaacuaucuuuaccgucucuuuagaaaagcuaaucuuaaacccuuugagagggauaucucaacugaaauuuaccaagcaggcagcaaaccuuguaauggucaaacuggucuaaauugcuacuacccacuuuauagauauggauuuuacccuacugaugguguuggucaccaaccuuauaggguaguaguacuuucuuuugaacuucuaaaugcaccagcaacuguuuguggaccuaagaagucuacuaacuugguuaaaaauaaaugugucaauuucaacuuuaaugguuuaacuggcacagguguccucacagagucuaauaaaaaguuucuaccuuuccaacaauuugguagagacauugcagacacuacugaugccguccgugauccacagacacuugagauucuugacauuacaccauguucuuuugguggugucaguguuauaacaccuggaacaaaugccucuaaccagguugcuguucuuuaucaggauguuaacugcacagaagucccuguugcuauccaugcagaccaacuuacucccacuuggcguguuuacuccacagguucuaauguuuuucaaacacgugcagguuguuuaauaggggcugaacaugucaauaacucguaugagugugacauaccuauuggugcaggaauaugcgccaguuaucagacucaaacuaauucacguaguguggccagucaaucuauuauugccuacacuaugucacuuggugcagaaaauucaguugcuuauucuaauaacucuauugccauaccuacaaauuuuacuauuagugugaccacugaaauucuaccugugucuaugacaaagacaucgguagacuguacaauguauauuuguggugauucaacugagugcagcaaccuuuuguugcaauaugguaguuuuugcacacaauuaaaucgugcuuuaacuggaauagcuguugaacaggacaaaaauacucaagaaguuuuugcucaaguuaaacaaauuuauaagacaccaccaauuaaagauuuuggugguuucaauuuuucacaaauauuaccagauccaucaaaaccaagcaagaggucauuuauugaggauuuacuuuucaauaaagugacacuugcugaugcuggcuucaucaaacaauauggugauugccuuggugauauugcugcuagggaucuuauuugugcucaaaaguucaauggccuuacuguucugccaccuuugcucacagaugaaaugaucgcucaauacacuucugcacuauuagcagguacaaucacuucugguuggacuuuuggugcaggugcugcuuuacaaauaccauuugccaugcaaauggcuuauagguuuaaugguauuggaguuacacagaauguucucuaugagaaccaaaaauugauugccaaccaguuuaauagugcuauuggcaaaauucaagacucacuuucuucuacagcaagugcacuuggaaaacuucaagauguugucaaccaaaaugcacaagcuuuaaacacgcuuguuaaacaacuuagcuccaauuuuggagcuauuucuagcguguuaaaugauauccuuucacgucucgacaaaguugaggcugaagugcagauugacagguugaucacaggcagacuucaaagcuugcagacauaugugacucaacaauuaauuagagcugcagaaaucagagcuucugccaaucuugcugcuacuaaaaugucagaguguguacucggacaaucaaaaagaguugauuuuuguggaaaaggcuaucaucuuaugucuuucccucagucagcaccucaugguguagucuucuugcaugugacauaugucccugcacaagaaaagaacuucacaacugcuccugccauuugucaugauggaaaagcacacuuuccacgugaagguguuuucguuucaaauggcacacacugguuuguuacacaaaggaauuuuuaugaaccacaaauuauuacaacagacaacacauuugucucugguagcugugauguuguaauaggaauugucaacaacacaguuuaugauccuuugcaaccagaacuugauucauucaaggaggaguuggauaaauacuuuaaaaaucauacaucaccugauguagauuuaggugacauuucuggcauuaaugcuucaguugucaauauucaaaaggaaauugaccgccucaaugagguugccaaaaaucuaaaugaaucucucaucgaucuccaagaacuuggaaaguaugaacaguauauaaaauggccaugguacauuuggcuagguuuuauagcuggcuugauugccauaauaauggucacgauuaugcuuugcuguaugaccaguugcugcaguugucucaagggcuguuguucuugcggaucuugcugcaaauuugaugaagacgacucugagccagugcucaaaggagucaaauuacauuacacauaaggacuaguuauaagacugacuagcccgaugggccucccaacgggcccuccuccccuccuugcaccgagauuaauaaaaaaaaaaaaaaaaaaaaaaaaaaaaaaaaaaaaaaaaaaaaaaaaaaaaaaaaaaaaaaaaugcaucccccccccccccccccccccccccccccccaaaggcucuuuucagagccaccagaauu

SEQ ID NO: 12678 - RNA, 4039 nt, Artificial Sequence
  SARS-CoV-2/Wuhan/HBCDC-HB-01/2019__EPI_ISL_402132 spike protein mRNA wt (1-1273)
aggagaaagcuuaccauguuuguuuuucuuguuuuauugccacuagucucuagucaguguguuaaucuuacaaccagaacucaauuacccccugcauacacuaauucuaucacacgugguguuuauuacccugacaaaguuuucagauccucaguuuuacauucaacucaggacuuguucuuaccuuucuuuuccaauguuacuugguuccaugcuauacaugucucugggaccaaugguacuaagagguuugauaacccuguccuaccauuuaaugaugguguuuauuuugcuuccacugagaagucuaacauaauaagaggcuggauuuuugguacuacuuuagauucgaagacccagucccuacuuauuguuaauaacgcuacuaauguuguuauuaaagucugugaauuucaauuuuguaaugauccauuuuuggguguuuauuaccacaaaaacaacaaaaguuggauggaaagugaguucagaguuuauucuagugcgaauaauugcacuuuugaauaugucucucagccuuuucuuauggaccuugaaggaaaacaggguaauuucaaaaaucuuagggaauuuguguuuaagaauauugaugguuauuuuaaaauauauucuaagcacacgccuauuaauuuagugcgugaucucccucaggguuuuucggcuuuagaaccauugguagauuugccaauagguauuaacaucacuagguuucaaacuuuacuugcuuuacauagaaguuauuugacuccuggugauucuucuucagguuggacagcuggugcugcagcuuauuauguggguuaucuucaaccuaggacuuuucuauuaaaauauaaugaaaauggaaccauuacagaugcuguagacugugcacuugacccucucucagaaacaaaguguacguugaaauccuucacuguagaaaaaggaaucuaucaaacuucuaacuuuagaguccaaccaacagaaucuauuguuagauuuccuaauauuacaaacuugugcccuuuuggugaaguuuuuaacgccaccagauuugcaucuguuuaugcuuggaacaggaagagaaucagcaacuguguugcugauuauucuguccuauauaauuccgcaucauuuuccacuuuuaaguguuauggagugucuccuacuaaauuaaaugaucucugcuuuacuaaugucuaugcagauucauuuguaauuagaggugaugaagucagacaaaucgcuccagggcaaacuggaaagauugcugauuauaauuauaaauuaccagaugauuuuacaggcugcguuauagcuuggaauucuaacaaucuugauucuaagguuggugguaauuauaauuaccuguauagauuguuuaggaagucuaaucucaaaccuuuugagagagauauuucaacugaaaucuaucaggccgguagcacaccuuguaaugguguugaagguuuuaauuguuacuuuccuuuacaaucauaugguuuccaacccacuaaugguguugguuaccaaccauacagaguaguaguacuuucuuuugaacuucuacaugcaccagcaacuguuuguggaccuaaaaagucuacuaauuugguuaaaaacaaaugugucaauuucaacuucaaugguuuaacaggcacagguguucuuacugagucuaacaaaaaguuucugccuuuccaacaauuuggcagagacauugcugacacuacugaugcuguccgugauccacagacacuugagauucuugacauuacaccauguucuuuugguggugucaguguuauaacaccaggaacaaauacuucuaaccagguugcuguucuuuaucaggauguuaacugcacagaagucccuguugcuauucaugcagaucaacuuacuccuacuuggcguguuuauucuacagguucuaauguuuuucaaacacgugcaggcuguuuaauaggggcugaacaugucaacaacucauaugagugugacauacccauuggugcagguauaugcgcuaguuaucagacucagacuaauucuccucggcgggcacguaguguagcuagucaauccaucauugccuacacuaugucacuuggugcagaaaauucaguugcuuacucuaauaacucuauugccauacccacaaauuuuacuauuaguguuaccacagaaauucuaccagugucuaugaccaagacaucaguagauuguacaauguacauuuguggugauucaacugaaugcagcaaucuuuuguugcaauauggcaguuuuuguacacaauuaaaccgugcuuuaacuggaauagcuguugaacaagacaaaaacacccaagaaguuuuugcacaagucaaacaaauuuacaaaacaccaccaauuaaagauuuuggugguuuuaauuuuucacaaauauuaccagauccaucaaaaccaagcaagaggucauuuauugaagaucuacuuuucaacaaagugacacuugcagaugcuggcuucaucaaacaauauggugauugccuuggugauauugcugcuagagaccucauuugugcacaaaaguuuaacggccuuacuguuuugccaccuuugcucacagaugaaaugauugcucaauacacuucugcacuguuagcggguacaaucacuucugguuggaccuuuggugcaggugcugcauuacaaauaccauuugcuaugcaaauggcuuauagguuuaaugguauuggaguuacacagaauguucucuaugagaaccaaaaauugauugccaaccaauuuaauagugcuauuggcaaaauucaagacucacuuucuuccacagcaagugcacuuggaaaacuucaagauguggucaaccaaaaugcacaagcuuuaaacacgcuuguuaaacaacuuagcuccaauuuuggugcaauuucaaguguuuuaaaugauauccuuucacgucuugacaaaguugaggcugaagugcaaauugauagguugaucacaggcagacuucaaaguuugcagacauaugugacucaacaauuaauuagagcugcagaaaucagagcuucugcuaaucuugcugcuacuaaaaugucagaguguguacuuggacaaucaaaaagaguugauuuuuguggaaagggcuaucaucuuauguccuucccucagucagcaccucaugguguagucuucuugcaugugacuuaugucccugcacaagaaaagaacuucacaacugcuccugccauuugucaugauggaaaagcacacuuuccucgugaaggugucuuuguuucaaauggcacacacugguuuguaacacaaaggaauuuuuaugaaccacaaaucauuacuacagacaacacauuugugucugguaacugugauguuguaauaggaauugucaacaacacaguuuaugauccuuugcaaccugaauuagacucauucaaggaggaguuagauaaauauuuuaagaaucauacaucaccagauguugauuuaggugacaucucuggcauuaaugcuucaguuguaaacauucaaaaagaaauugaccgccucaaugagguugccaagaauuuaaaugaaucucucaucgaucuccaagaacuuggaaaguaugagcaguauauaaaauggccaugguacauuuggcuagguuuuauagcuggcuugauugccauaguaauggugacaauuaugcuuugcuguaugaccaguugcuguaguugucucaagggcuguuguucuuguggauccugcugcaaauuugaugaagacgacucugagccagugcucaaaggagucaaauuacauuacacauaaggacuaguuauaagacugacuagcccgaugggccucccaacgggcccuccuccccuccuugcaccgagauuaauaaaaaaaaaaaaaaaaaaaaaaaaaaaaaaaaaaaaaaaaaaaaaaaaaaaaaaaaaaaaaaaaugcaucccccccccccccccccccccccccccccccaaaggcucuuuucagagccaccagaauu

SEQ ID NO: 12679 - RNA, 4039 nt, Artificial Sequence
  SARS-CoV-2/Guangdong/20SF028/2020__EPI_ISL_403936 spike protein mRNA wt (1-1273)
aggagaaagcuuaccauguuuguuuuucuuguuuuauugccacuagucucuagucaguguguuaaucuuacaaccagaacucaauuacccccugcauacacuaauucuuucacacgugguguuuauuacccugacaaaguuuucagauccucaguuuuauauucaacucaggacuuguucuuaccuuucuuuuccaauguuacuugguuccaugcuauacaugucucugggaccaaugguacuaagagguuugauaacccuguccuaccauuuaaugaugguguuuauuuugcuuccacugagaagucuaacauaauaagaggcuggauuuuugguacuacuuuagauucgaagacccagucccuacuuauuguuaauaacgcuacuaauguuguuauuaaagucugugaauuucaauuuuguaaugauccauuuuuggguguuuauuaccacaaaaacaacaaaaguuggauggaaagugaguucagaguuuauucuagugcgaauaauugcacuuuugaauaugucucucagccuuuucuuauggaccuugaaggaaaacaggguaauuucaaaaaucuuagggaauuuguguuuaagaauauugaugguuauuuuaaaauauauucuaagcacacgccuauuaauuuagugcgugaucucccucaggguuuuucggcuuuagaaccauugguagauuugccaauagguauuaacaucacuagguuucaaacuuuacuugcuuuacauagaaguuauuugacuccuggugauucuucuucagguuggacagcuggugcugcagcuuauuauguggguuaucuucaaccuaggacuuuucuauuaaaauauaaugaaaauggaaccauuacagaugcuguagacugugcacuugacccucucucagaaacaaaguguacguugaaauccuucacuguagaaaaaggaaucuaucaaacuucuaacuuuagaguccaaccaacagaaucuauuguuagauuuccuaauauuacaaacuugugcccuuuuggugaaguuuuuaacgccaccagauuugcaucuguuuaugcuuggaacaggaagagaaucagcaacuguguugcugauuauucuguccuauauaauuccgcaucauuuuccacuuuuaaguguuauggagugucuccuacuaaauuaaaugaucucugcuuuacuaaugucuaugcagauucauuuguaauuagaggugaugaagucagacaaaucgcuccagggcaaacuggaaagauugcugauuauaauuauaaauuaccagaugauuuuacaggcugcguuauagcuuggaauucuaacaaucuugauucuaagguuggugguaauuauaauuaccuguauagauuguuuaggaagucuaaucucaaaccuuuugagagagauauuucaacugaaaucuaucaggccgguagcacaccuuguaaugguguugaagguuuuaauuguuacuuuccuuuacaaucauaugguuuccaacccacuaaugguguugguuaccaaccauacagaguaguaguacuuucuuuugaacuucuacaugcaccagcaacuguuuguggaccuaaaaagucuacuaauuugguuaaaaacaaaugugucaauuucaacuucaaugguuuaacaggcacagguguucuuacugagucuaacaaaaaguuucugccuuuccaacaauuuggcagagacauugcugacacuacugaugcuguccgugauccacagacacuugagauucuugacauuacaccauguucuuuugguggugucaguguuauaacaccaggaacaaauacuucuaaccagguugcuguucuuuaucaggauguuaacugcacagaagucccuguugcuauucaugcagaucaacuuacuccuacuuggcguguuuauucuacagguucuaauguuuuucaaacacgugcaggcuguuuaauaggggcugaacaugucaacaacucauaugagugugacauacccauuggugcagguauaugcgcuaguuaucagacucagacuaauucuccucggcgggcacguaguguagcuagucaauccaucauugccuacacuaugucacuuggugcagaaaauucaguugcuuacucuaauaacucuauugccauacccacaaauuuuacuauuaguguuaccacagaaauucuaccagugucuaugaccaagacaucaguagauuguacaauguacauuuguggugauucaacugaaugcagcaaucuuuuguugcaauauggcaguuuuuguacacaauuaaaccgugcuuuaacuggaauagcuguugaacaagacaaaaacacccaagaaguuuuugcacaagucaaacaaauuuacaaaacaccaccaauuaaagauuuuggugguuuuaauuuuucacaaauauuaccagauccaucaaaaccaagcaagaggucauuuauugaagaucuacuuuucaacaaagugacacuugcagaugcuggcuucaucaaacaauauggugauugccuuggugauauugcugcuagagaccucauuugugcacaaaaguuuaacggccuuacuguuuugccaccuuugcucacagaugaaaugauugcucaauacacuucugcacuguuagcggguacaaucacuucugguuggaccuuuggugcaggugcugcauuacaaauaccauuugcuaugcaaauggcuuauagguuuaaugguauuggaguuacacagaauguucucuaugagaaccaaaaauugauugccaaccaauuuaauagugcuauuggcaaaauucaagacucacuuucuuccacagcaagugcacuuggaaaacuucaagauguggucaaccaaaaugcacaagcuuuaaacacgcuuguuaaacaacuuagcuccaauuuuggugcaauuucaaguguuuuaaaugauauccuuucacgucuugacaaaguugaggcugaagugcaaauugauagguugaucacaggcagacuucaaaguuugcagacauaugugacucaacaauuaauuagagcugcagaaaucagagcuucugcuaaucuugcugcuacuaaaaugucagaguguguacuuggacaaucaaaaagaguugauuuuuguggaaagggcuaucaucuuauguccuucccucagucagcaccucaugguguagucuucuugcaugugacuuaugucccugcacaagaaaagaacuucacaacugcuccugccauuugucaugauggaaaagcacacuuuccucgugaaggugucuuuguuucaaauggcacacacugguuuguaacacaaaggaauuuuuaugaaccacaaaucauuacuacagacaacacauuugugucugguaacugugauguuguaauaggaauugucaacaacacaguuuaugauccuuugcaaccugaauuagacucauucaaggaggaguuagauaaauauuuuaagaaucauacaucaccagauguugauuuaggugacaucucuggcauuaaugcuucaguuguaaacauucaaaaagaaauugaccgccucaaugagguugccaagaauuuaaaugaaucucucaucgaucuccaagaacuuggaaaguaugagcaguauauaaaauggccaugguacauuuggcuagguuuuauagcuggcuugauugccauaguaauggugacaauuaugcuuugcuguaugaccaguugcuguaguugucucaagggcuguuguucuuguggauccugcugcaaauuugaugaagacgacucugagccagugcucaaaggagucaaauuacauuacacauaaggacuaguuauaagacugacuagcccgaugggccucccaacgggcccuccuccccuccuugcaccgagauuaauaaaaaaaaaaaaaaaaaaaaaaaaaaaaaaaaaaaaaaaaaaaaaaaaaaaaaaaaaaaaaaaaugcaucccccccccccccccccccccccccccccccaaaggcucuuuucagagccaccagaauu

SEQ ID NO: 12680 - RNA, 4039 nt, Artificial Sequence
  SARS-CoV-2/Shenzhen/SZTH-001/2020__EPI_ISL_406592 spike protein mRNA wt (1-1273)
aggagaaagcuuaccauguuuguuuuucuuguuuuauugccacuagucucuagucaguguguuaaucuuacaaccagaacucaauuacccccugcauacacuaauucuuucacacgugguguuuauuacccugacaaaguuuucagauccucaguuuuacauucaacucaggacuuguucuuaccuuucuuuuccaauguuacuugguuccaugcuauacaugucucugggaccaaugguacuaagagguuugauaacccuguccuaccauuuaaugaugguguuuauuuugcuuccacugagaagucuaacauaauaagaggcuggauuuuugguacuacuuuagauucgaagacccagucccuacuuauuguuaauaacgcuacuaauguuguuauuaaagucugugaauuucaauuuuguaaugauccauuuuuggguguuuauuaccacaaaaacaacaaaaguuggauggaaagugaguucagaguuuauucuagugcgaauaauugcacuuuugaauaugucucucagccuuuucuuauggaccuugaaggaaaacaggguaauuucaaaaaucuuagggaauuuguguuuaagaauauugaugguuauuuuaaaauauauucuaagcacacgccuauuaauuuagugcgugaucucccucaggguuuuucggcuuuagaaccauugguagauuugccaauagguauuaacaucacuagguuucaaacuuuacuugcuuuacauagaaguuauuugacuccuggugauucuucuucagguuggacagcuggugcugcagcuuauuauguggguuaucuucaaccuaggacuuuucuauuaaaauauaaugaaaauggaaccauuacagaugcuguagacugugcacuugacccucucucagaaacaaaguguacguugaaauccuucacuguagaaaaaggaaucuaucaaacuucuaacuuuagaguccaaccaacagaaucuauuguuagauuuccuaauauuacaaacuugugcccuuuuggugaaguuuuuaacgccaccagauuugcaucuguuuaugcuuggaacaggaagagaaucagcaacuguguugcugauuauucuguccuauauaauuccgcaucauuuuccacuuuuaaguguuauggagugucuccuacuaaauuaaaugaucucugcuuuacuaaugucuaugcagauucauuuguaauuagaggugaugaagucagacaaaucgcuccagggcaaacuggaaagauugcugauuauaauuauaaauuaccagaugauuuuacaggcugcguuauagcuuggaauucuaacaaucuugauucuaagguuggugguaauuauaauuaccuguauagauuguuuaggaagucuaaucucaaaccuuuugagagagauauuucaacugaaaucuaucaggccgguagcacaccuuguaaugguguugaagguuuuaauuguuacuuuccuuuacaaucauaugguuuccaacccacuaaugguguugguuaccaaccauacagaguaguaguacuuucuuuugaacuucuacaugcaccagcaacuguuuguggaccuaaaaagucuacuaauuugguuaaaaacaaaugugucaauuucaacuucaaugguuuaacaggcacagguguucuuacugagucuaacaaaaaguuucugccuuuccaacaauuuggcagagacauugcugacacuacugaugcuguccgugauccacagacacuugagauucuugacauuacaccauguucuuuugguggugucaguguuauaacaccaggaacaaauacuucuaaccagguugcuguucuuuaucaggauguuaacugcacagaagucccuguugcuauucaugcagaucaacuuacuccuacuuggcguguuuauucuacagguucuaauguuuuucaaacacgugcaggcuguuuaauaggggcugaacaugucaacaacucauaugagugugacauacccauuggugcagguauaugcgcuaguuaucagacucagacuaauucuccucggcgggcacguaguguagcuagucaauccaucauugccuacacuaugucacuuggugcagaaaauucaguugcuuacucuaauaacucuauugccauacccacaaauuuuacuauuaguguuaccacagaaauucuaccagugucuaugaccaagacaucaguagauuguacaauguacauuuguggugauucaacugaaugcagcaaucuuuuguugcaauauggcaguuuuuguacacaauuaaaccgugcuuuaacuggaauagcuguugaacaagacaaaaacacccaagaaguuuuugcacaagucaaacaaauuuacaaaacaccaccaauuaaagauuuuggugguuuuaauuuuucacaaauauuaccagauccaucaaaaccaagcaagaggucauuuauugaagaucuacuuuucaacaaagugacacuugcagaugcuggcuucaucaaacaauauggugauugccuuggugauauugcugcuagagaccucauuugugcacaaaaguuuaacggccuuacuguuuugccaccuuugcucacagaugaaaugauugcucaauacacuucugcacuguuagcggguacaaucacuucugguuggaccuuuggugcaggugcugcauuacaaauaccauuugcuaugcaaauggcuuauagguuuaaugguauuggaguuacacagaauguucucuaugagaaccaaaaauugauugccaaccaauuuaauagugcuauuggcaaaauucaagacucacuuucuuccacagcaagugcacuuggaaaacuucaagauguggucaaccaaaaugcacaagcuuuaaacacgcuuguuaaacaacuuagcuccaauuuuggugcaauuucaaguguuuuaaaugauauccuuucacgucuugacaaaguugaggcugaagugcaaauugauagguugaucacaggcagacuucaaaguuugcagacauaugugacucaacaauuaauuagagcugcagaaaucagagcuucugcuaaucuugcugcuacuaaaaugucagaguguguacuuggacaaucaaaaagaguugauuuuuguggaaagggcuaucaucuuauguccuucccucagucagcaccucaugguguagucuucuugcaugugacuuaugucccugcacaagaaaagaacuucacaacugcuccugccauuugucaugauggaaaagcacacuuuccucgugaaggugucuuuguuucaaauggcacacacugguuuguaacacaaaggaauuuuuaugaaccacaaaucauuacuacagacaacacauuugugucugguaacugugauguucuaauaggaauugucaacaacacaguuuaugauccuuugcaaccugaauuagacucauucaaggaggaguuagauaaauauuuuaagaaucauacaucaccagauguugauuuaggugacaucucuggcauuaaugcuucaguuguaaacauucaaaaagaaauugaccgccucaaugagguugccaagaauuuaaaugaaucucucaucgaucuccaagaacuuggaaaguaugagcaguauauaaaauggccaugguacauuuggcuagguuuuauagcuggcuugauugccauaguaauggugacaauuaugcuuugcuguaugaccaguugcuguaguugucucaagggcuguuguucuuguggauccugcugcaaauuugaugaagacgacucugggccagugcucaaaggagucaaauuacauuacacauaaggacuaguuauaagacugacuagcccgaugggccucccaacgggcccuccuccccuccuugcaccgagauuaauaaaaaaaaaaaaaaaaaaaaaaaaaaaaaaaaaaaaaaaaaaaaaaaaaaaaaaaaaaaaaaaaugcaucccccccccccccccccccccccccccccccaaaggcucuuuucagagccaccagaauu

SEQ ID NO: 12681 - RNA, 4039 nt, Artificial Sequence
  SARS-CoV-2/Shenzhen/SZTH-004/2020__EPI_ISL_406595 spike protein mRNA wt (1-1273)
aggagaaagcuuaccauguuuguuuuucuuguuuuauugccacuagucucuagucaguguguuaaucuuacaaccagaacucaauuacccccugcauacacuaauucuuucacacgugguguuuauuacccugacaaaguuuucagauccucaguuuuacauucaacucaggacuuguucuuaccuuucuuuuccaauguuacuugguuccaugcuauacaugucucugggaccaaugguacuaagagguuugauaacccuguccuaccauuuaaugaugguguuuauuuugcuuccacugagaagucuaacauaauaagaggcuggauuuuugguacuacuuuagauucgaagacccagucccuacuuauuguuaauaacgcuacuaauguuguuauuaaagucugugaauuucaauuuuguaaugauccauuuuuggguguuuauuaccacaaaaacaacaaaaguuggauggaaagugaguucagaguuuauucuagugcgaauaauugcacuuuugaauaugucucucagccuuuucuuauggaccuugaaggaaaacaggguaauuucaaaaaucuuagggaauuuguguuuaagaauauugaugguuauuuuaaaauauauucuaagcacacgccuauuaauuuagugcgugaucucccucaggguuuuucggcuuuagaaccauugguagauuugccaauagguauuaacaucacuagguuucaaacuuuacuugcuuuacauagaaguuauuugacuccuggugauucuucuucagguuggacagcuggugcugcagcuuauuauguggguuaucuucaaccuaggacuuuucuauuaaaauauaaugaaaauggaaccauuacagaugcuguagacugugcacuugacccucucucagaaacaaaguguacguugaaauccuucacuguagaaaaaggaaucuaucaaacuucuaacuuuagaguccaaccaacagaaucuauuguuagauuuccuaauauuacaaacuugugcccuuuuggugaaguuuuuaacgccaccagauuugcaucuguuuaugcuugggacaggaagagaaucagcaacuguguugcuuauuauucuguccuauauaauuccgcaucauuuuccacuuuuaaguguuauggagugucuccuacuaaauuaaaugaucucugcuuuacuaaugucuaugcagauucauuuguaauuagaggugaugaagucagacaaaucgcuccagggcaaacuggaaagauugcugauuauaauuauaaauuaccagaugauuuuacaggcugcguuauagcuuggaauucuaacaaucuugauucuaagguuggugguaauuauaauuaccuguauagauuguuuaggaagucuaaucucaaaccuuuugagagagauauuucaacugaaaucuaucaggccgguagcacaccuuguaaugguguugaagguuuuaauuguuacuuuccuuuacaaucauaugguuuccaacccacuaaugguguugguuaccaaccauacagaguaguaguacuuucuuuugaacuucuacaugcaccagcaacuguuuguggaccuaaaaagucuacuaauuugguuaaaaacaaaugugucaauuucaacuucaaugguuuaacaggcacagguguucuuacugagucuaacaaaaaguuucugccuuuccaacaauuuggcagagacauugcugacacuacugaugcuguccgugauccacagacacuugagauucuugacauuacaccauguucuuuugguggugucaguguuauaacaccaggaacaaauacuucuaaccagguugcuguucuuuaucaggauguuaacugcacagaagucccuguugcuauucaugcagaucaacuuacuccuacuuggcguguuuauucuacagguucuaauguuuuucaaacacgugcaggcuguuuaauaggggcugaacaugucaacaacucauaugagugugacauacccauuggugcaggcauaugcgcuaguuaucagacucagacuaauucuccucggcgggcacguaguguagcuagucaauccaucauugccuacacuaugucacuuggugcagaaaauucaguugcuuacucuaauaacucuauugccauacccacaaauuuuacuauuaguguuaccacagaaauucuaccagugucuaugaccaagacaucaguagauuguacaauguacauuuguggugauucaacugaaugcagcaaucuuuuguugcaauauggcaguuuuuguacacaauuaaaccgugcuuuaacuggaauagcuguugaacaagacaaaaacacccaagaaguuuuugcacaagucaaacaaauuuacaaaacaccaccaauuaaagauuuuggugguuuuaauuuuucacaaauauuaccagauccaucaaaaccaagcaagaggucauuuauugaagaucuacuuuucaacaaagugacacuugcagaugcuggcuucaucaaacaauauggugauugccuuggugauauugcugcuagagaccucauuugugcacaaaaguuuaacggccuuacuguuuugccaccuuugcucacagaugaaaugauugcucaauacacuucugcacuguuagcggguacaaucacuucugguuggaccuuuggugcaggugcugcauuacaaauaccauuugcuaugcaaauggcuuauagguuuaaugguauuggaguuacacagaauguucucuaugagaaccaaaaauugauugccaaccaauuuaauagugcuauuggcaaaauucaagacucacuuucuuccacagcaagugcacuuggaaaacuucaagauguggucaaccaaaaugcacaagcuuuaaacacgcuuguuaaacaacuuagcuccaauuuuggugcaauuucaaguguuuuaaaugauauccuuucacgucuugacaaaguugaggcugaagugcaaauugauagguugaucacaggcagacuucaaaguuugcagacauaugugacucaacaauuaauuagagcugcagaaaucagagcuucugcuaaucuugcugcuacuaaaaugucagaguguguacuuggacaaucaaaaagaguugauuuuuguggaaagggcuaucaucuuauguccuucccucagucagcaccucaugguguagucuucuugcaugugacuuaugucccugcacaagaaaagaacuucacaacugcuccugccauuugucaugauggaaaagcacacuuuccucgugaaggugucuuuguuucaaauggcacacacugguuuguaacacaaaggaauuuuuaugaaccacaaaucauuacuacagacaacacauuugugucugguaacugugauguuguaauaggaauugucaacaacacaguuuaugauccuuugcaaccugaauuagacucauucaaggaggaguuagauaaauauuuuaagaaucauacaucaccagauguugauuuaggugacaucucuggcauuaaugcuucaguuguaaacauucaaaaagaaauugaccgccucaaugagguugccaagaauuuaaaugaaucucucaucgaucuccaagaacuuggaaaguaugagcaguauauaaaauggccaugguacauuuggcuagguuuuauagcuggcuugauugccauaguaauggugacaauuaugcuuugcuguaugaccaguugcuguaguugucucaagggcuguuguucuuguggauccugcugcaaauuugaugaagacgacucugagccagugcucaaaggagucaaauuacauuacacauaaggacuaguuauaagacugacuagcccgaugggccucccaacgggcccuccuccccuccuugcaccgagauuaauaaaaaaaaaaaaaaaaaaaaaaaaaaaaaaaaaaaaaaaaaaaaaaaaaaaaaaaaaaaaaaaaugcaucccccccccccccccccccccccccccccccaaaggcucuuuucagagccaccagaauu

SEQ ID NO: 12682 - RNA, 4039 nt, Artificial Sequence
  SARS-CoV-2/France/IDF0372/2020__EPI_ISL_406596 spike protein mRNA wt (1-1273)
aggagaaagcuuaccauguuuguuuuucuuguuuuauugccacuagucucuagucaguguguuaaucuuacaaccagaacucaauuacccccugcauacacuaauucuuucacacgugguguuuauuacccugacaaaguuuucagauccucaguuuuacauucaacucaggacuuguucuuaccuuucuuuuccaauguuacuugguuccaugcuauacaugucucugggaccaaugguacuaagagguuugauaacccuguccuaccauuuaaugaugguguuuauuuugcuuccacugagaagucuaacauaauaagaggcuggauuuuugguacuacuuuagauucgaagacccagucccuacuuauuguuaauaacgcuacuaauguuguuauuaaagucugugaauuucaauuuuguaaugauccauuuuuggguguuuauuaccacaaaaacaacaaaaguuggauggaaagugaguucagaguuuauucuagugcgaauaauugcacuuuugaauaugucucucagccuuuucuuauggaccuugaaggaaaacaggguaauuucaaaaaucuuagggaauuuguguuuaagaauauugaugguuauuuuaaaauauauucuaagcacacgccuauuaauuuagugcgugaucucccucaggguuuuucggcuuuagaaccauugguagauuugccaauagguauuaacaucacuagguuucaaacuuuacuugcuuuacauagaaguuauuugacuccuggugauucuucuucagguuggacagcuggugcugcagcuuauuauguggguuaucuucaaccuaggacuuuucuauuaaaauauaaugaaaauggaaccauuacagaugcuguagacugugcacuugacccucucucagaaacaaaguguacguugaaauccuucacuguagaaaaaggaaucuaucaaacuucuaacuuuagaguccaaccaacagaaucuauuguuagauuuccuaauauuacaaacuugugcccuuuuggugaaguuuuuaacgccaccagauuugcaucuguuuaugcuuggaacaggaagagaaucagcaacuguguugcugauuauucuuuccuauauaauuccgcaucauuuuccacuuuuaaguguuauggagugucuccuacuaaauuaaaugaucucugcuuuacuaaugucuaugcagauucauuuguaauuagaggugaugaagucagacaaaucgcuccagggcaaacuggaaagauugcugauuauaauuauaaauuaccagaugauuuuacaggcugcguuauagcuuggaauucuaacaaucuugauucuaagguuggugguaauuauaauuaccuguauagauuguuuaggaagucuaaucucaaaccuuuugagagagauauuucaacugaaaucuaucaggccgguagcacaccuuguaaugguguugaagguuuuaauuguuacuuuccuuuacaaucauaugguuuccaacccacuaaugguguugguuaccaaccauacagaguaguaguacuuucuuuugaacuucuacaugcaccagcaacuguuuguggaccuaaaaagucuacuaauuugguuaaaaacaaaugugucaauuucaacuucaaugguuuaacaggcacagguguucuuacugagucuaacaaaaaguuucugccuuuccaacaauuuggcagagacauugcugacacuacugaugcuguccgugauccacagacacuugagauucuugacauuacaccauguucuuuugguggugucaguguuauaacaccaggaacaaauacuucuaaccagguugcuguucuuuaucaggauguuaacugcacagaagucccuguugcuauucaugcagaucaacuuacuccuacuuggcguguuuauucuacagguucuaauguuuuucaaacacgugcaggcuguuuaauaggggcugaacaugucaacaacucauaugagugugacauacccauuggugcagguauaugcgcuaguuaucagacucagacuaauucuccucggcgggcacguaguguagcuagucaauccaucauugccuacacuaugucacuuggugcagaaaauucaguugcuuacucuaauaacucuauugccauacccacaaauuuuacuauuaguguuaccacagaaauucuaccagugucuaugaccaagacaucaguagauuguacaauguacauuuguggugauucaacugaaugcagcaaucuuuuguugcaauauggcaguuuuuguacacaauuaaaccgugcuuuaacuggaauagcuguugaacaagacaaaaacacccaagaaguuuuugcacaagucaaacaaauuuacaaaacaccaccaauuaaagauuuuggugguuuuaauuuuucacaaauauuaccagauccaucaaaaccaagcaagaggucauuuauugaagaucuacuuuucaacaaagugacacuugcagaugcuggcuucaucaaacaauauggugauugccuuggugauauugcugcuagagaccucauuugugcacaaaaguuuaacggccuuacuguuuugccaccuuugcucacagaugaaaugauugcucaauacacuucugcacuguuagcggguacaaucacuucugguuggaccuuuggugcaggugcugcauuacaaauaccauuugcuaugcaaauggcuuauagguuuaaugguauuggaguuacacagaauguucucuaugagaaccaaaaauugauugccaaccaauuuaauagugcuauuggcaaaauucaagacucacuuucuuccacagcaagugcacuuggaaaacuucaagauguggucaaccaaaaugcacaagcuuuaaacacgcuuguuaaacaacuuagcuccaauuuuggugcaauuucaaguguuuuaaaugauauccuuucacgucuugacaaaguugaggcugaagugcaaauugauagguugaucacaggcagacuucaaaguuugcagacauaugugacucaacaauuaauuagagcugcagaaaucagagcuucugcuaaucuugcugcuacuaaaaugucagaguguguacuuggacaaucaaaaagaguugauuuuuguggaaagggcuaucaucuuauguccuucccucagucagcaccucaugguguagucuucuugcaugugacuuaugucccugcacaagaaaagaacuucacaacugcuccugccauuugucaugauggaaaagcacacuuuccucgugaaggugucuuuguuucaaauggcacacacugguuuguaacacaaaggaauuuuuaugaaccacaaaucauuacuacagacaacacauuugugucugguaacugugauguuguaauaggaauugucaacaacacaguuuaugauccuuugcaaccugaauuagacucauucaaggaggaguuagauaaauauuuuaagaaucauacaucaccagauguugauuuaggugacaucucuggcauuaaugcuucaguuguaaacauucaaaaagaaauugaccgccucaaugagguugccaagaauuuaaaugaaucucucaucgaucuccaagaacuuggaaaguaugagcaguauauaaaauggccaugguacauuuggcuagguuuuauagcuggcuugauugccauaguaauggugacaauuaugcuuugcuguaugaccaguugcuguaguugucucaagggcuguuguucuuguggauccugcugcaaauuugaugaagacgacucugagccagugcucaaaggagucaaauuacauuacacauaaggacuaguuauaagacugacuagcccgaugggccucccaacgggcccuccuccccuccuugcaccgagauuaauaaaaaaaaaaaaaaaaaaaaaaaaaaaaaaaaaaaaaaaaaaaaaaaaaaaaaaaaaaaaaaaaugcaucccccccccccccccccccccccccccccccaaaggcucuuuucagagccaccagaauu

SEQ ID NO: 12683 - RNA, 4039 nt, Artificial Sequence
  SARS-CoV-2/Australia/VIC01/2020__EPI_ISL_406844 spike protein mRNA wt (1-1273)
aggagaaagcuuaccauguuuguuuuucuuguuuuauugccacuagucucuagucaguguguuaaucuuacaaccagaacucaauuacccccugcauacacuaauucuuucacacgugguguuuauuacccugacaaaguuuucagauccucaguuuuacauucaacucaggacuuguucuuaccuuucuuuuccaauguuacuugguuccaugcuauacaugucucugggaccaaugguacuaagagguuugauaacccuguccuaccauuuaaugaugguguuuauuuugcuuccacugagaagucuaacauaauaagaggcuggauuuuugguacuacuuuagauucgaagacccagucccuacuuauuguuaauaacgcuacuaauguuguuauuaaagucugugaauuucaauuuuguaaugauccauuuuuggguguuuauuaccacaaaaacaacaaaaguuggauggaaagugaguucagaguuuauucuagugcgaauaauugcacuuuugaauaugucucucagccuuuucuuauggaccuugaaggaaaacaggguaauuucaaaaaucuuagggaauuuguguuuaagaauauugaugguuauuuuaaaauauauucuaagcacacgccuauuaauuuagugcgugaucucccucaggguuuuucggcuuuagaaccauugguagauuugccaauagguauuaacaucacuagguuucaaacuuuacuugcuuuacauagaagguauuugacuccuggugauucuucuucagguuggacagcuggugcugcagcuuauuauguggguuaucuucaaccuaggacuuuucuauuaaaauauaaugaaaauggaaccauuacagaugcuguagacugugcacuugacccucucucagaaacaaaguguacguugaaauccuucacuguagaaaaaggaaucuaucaaacuucuaacuuuagaguccaaccaacagaaucuauuguuagauuuccuaauauuacaaacuugugcccuuuuggugaaguuuuuaacgccaccagauuugcaucuguuuaugcuuggaacaggaagagaaucagcaacuguguugcugauuauucuguccuauauaauuccgcaucauuuuccacuuuuaaguguuauggagugucuccuacuaaauuaaaugaucucugcuuuacuaaugucuaugcagauucauuuguaauuagaggugaugaagucagacaaaucgcuccagggcaaacuggaaagauugcugauuauaauuauaaauuaccagaugauuuuacaggcugcguuauagcuuggaauucuaacaaucuugauucuaagguuggugguaauuauaauuaccuguauagauuguuuaggaagucuaaucucaaaccuuuugagagagauauuucaacugaaaucuaucaggccgguagcacaccuuguaaugguguugaagguuuuaauuguuacuuuccuuuacaaucauaugguuuccaacccacuaaugguguugguuaccaaccauacagaguaguaguacuuucuuuugaacuucuacaugcaccagcaacuguuuguggaccuaaaaagucuacuaauuugguuaaaaacaaaugugucaauuucaacuucaaugguuuaacaggcacagguguucuuacugagucuaacaaaaaguuucugccuuuccaacaauuuggcagagacauugcugacacuacugaugcuguccgugauccacagacacuugagauucuugacauuacaccauguucuuuugguggugucaguguuauaacaccaggaacaaauacuucuaaccagguugcuguucuuuaucaggauguuaacugcacagaagucccuguugcuauucaugcagaucaacuuacuccuacuuggcguguuuauucuacagguucuaauguuuuucaaacacgugcaggcuguuuaauaggggcugaacaugucaacaacucauaugagugugacauacccauuggugcagguauaugcgcuaguuaucagacucagacuaauucuccucggcgggcacguaguguagcuagucaauccaucauugccuacacuaugucacuuggugcagaaaauucaguugcuuacucuaauaacucuauugccauacccacaaauuuuacuauuaguguuaccacagaaauucuaccagugucuaugaccaagacaucaguagauuguacaauguacauuuguggugauucaacugaaugcagcaaucuuuuguugcaauauggcaguuuuuguacacaauuaaaccgugcuuuaacuggaauagcuguugaacaagacaaaaacacccaagaaguuuuugcacaagucaaacaaauuuacaaaacaccaccaauuaaagauuuuggugguuuuaauuuuucacaaauauuaccagauccaucaaaaccaagcaagaggucauuuauugaagaucuacuuuucaacaaagugacacuugcagaugcuggcuucaucaaacaauauggugauugccuuggugauauugcugcuagagaccucauuugugcacaaaaguuuaacggccuuacuguuuugccaccuuugcucacagaugaaaugauugcucaauacacuucugcacuguuagcggguacaaucacuucugguuggaccuuuggugcaggugcugcauuacaaauaccauuugcuaugcaaauggcuuauagguuuaaugguauuggaguuacacagaauguucucuaugagaaccaaaaauugauugccaaccaauuuaauagugcuauuggcaaaauucaagacucacuuucuuccacagcaagugcacuuggaaaacuucaagauguggucaaccaaaaugcacaagcuuuaaacacgcuuguuaaacaacuuagcuccaauuuuggugcaauuucaaguguuuuaaaugauauccuuucacgucuugacaaaguugaggcugaagugcaaauugauagguugaucacaggcagacuucaaaguuugcagacauaugugacucaacaauuaauuagagcugcagaaaucagagcuucugcuaaucuugcugcuacuaaaaugucagaguguguacuuggacaaucaaaaagaguugauuuuuguggaaagggcuaucaucuuauguccuucccucagucagcaccucaugguguagucuucuugcaugugacuuaugucccugcacaagaaaagaacuucacaacugcuccugccauuugucaugauggaaaagcacacuuuccucgugaaggugucuuuguuucaaauggcacacacugguuuguaacacaaaggaauuuuuaugaaccacaaaucauuacuacagacaacacauuugugucugguaacugugauguuguaauaggaauugucaacaacacaguuuaugauccuuugcaaccugaauuagacucauucaaggaggaguuagauaaauauuuuaagaaucauacaucaccagauguugauuuaggugacaucucuggcauuaaugcuucaguuguaaacauucaaaaagaaauugaccgccucaaugagguugccaagaauuuaaaugaaucucucaucgaucuccaagaacuuggaaaguaugagcaguauauaaaauggccaugguacauuuggcuagguuuuauagcuggcuugauugccauaguaauggugacaauuaugcuuugcuguaugaccaguugcuguaguugucucaagggcuguuguucuuguggauccugcugcaaauuugaugaagacgacucugagccagugcucaaaggagucaaauuacauuacacauaaggacuaguuauaagacugacuagcccgaugggccucccaacgggcccuccuccccuccuugcaccgagauuaauaaaaaaaaaaaaaaaaaaaaaaaaaaaaaaaaaaaaaaaaaaaaaaaaaaaaaaaaaaaaaaaaugcaucccccccccccccccccccccccccccccccaaaggcucuuuucagagccaccagaauu

SEQ ID NO: 12684 - RNA, 4039 nt, Artificial Sequence
  SARS-CoV-2/Germany/BavPat1/2020__EPI_ISL_406862 spike protein mRNA wt (1-1273)
aggagaaagcuuaccauguuuguuuuucuuguuuuauugccacuagucucuagucaguguguuaaucuuacaaccagaacucaauuacccccugcauacacuaauucuuucacacgugguguuuauuacccugacaaaguuuucagauccucaguuuuacauucaacucaggacuuguucuuaccuuucuuuuccaauguuacuugguuccaugcuauacaugucucugggaccaaugguacuaagagguuugauaacccuguccuaccauuuaaugaugguguuuauuuugcuuccacugagaagucuaacauaauaagaggcuggauuuuugguacuacuuuagauucgaagacccagucccuacuuauuguuaauaacgcuacuaauguuguuauuaaagucugugaauuucaauuuuguaaugauccauuuuuggguguuuauuaccacaaaaacaacaaaaguuggauggaaagugaguucagaguuuauucuagugcgaauaauugcacuuuugaauaugucucucagccuuuucuuauggaccuugaaggaaaacaggguaauuucaaaaaucuuagggaauuuguguuuaagaauauugaugguuauuuuaaaauauauucuaagcacacgccuauuaauuuagugcgugaucucccucaggguuuuucggcuuuagaaccauugguagauuugccaauagguauuaacaucacuagguuucaaacuuuacuugcuuuacauagaaguuauuugacuccuggugauucuucuucagguuggacagcuggugcugcagcuuauuauguggguuaucuucaaccuaggacuuuucuauuaaaauauaaugaaaauggaaccauuacagaugcuguagacugugcacuugacccucucucagaaacaaaguguacguugaaauccuucacuguagaaaaaggaaucuaucaaacuucuaacuuuagaguccaaccaacagaaucuauuguuagauuuccuaauauuacaaacuugugcccuuuuggugaaguuuuuaacgccaccagauuugcaucuguuuaugcuuggaacaggaagagaaucagcaacuguguugcugauuauucuguccuauauaauuccgcaucauuuuccacuuuuaaguguuauggagugucuccuacuaaauuaaaugaucucugcuuuacuaaugucuaugcagauucauuuguaauuagaggugaugaagucagacaaaucgcuccagggcaaacuggaaagauugcugauuauaauuauaaauuaccagaugauuuuacaggcugcguuauagcuuggaauucuaacaaucuugauucuaagguuggugguaauuauaauuaccuguauagauuguuuaggaagucuaaucucaaaccuuuugagagagauauuucaacugaaaucuaucaggccgguagcacaccuuguaaugguguugaagguuuuaauuguuacuuuccuuuacaaucauaugguuuccaacccacuaaugguguugguuaccaaccauacagaguaguaguacuuucuuuugaacuucuacaugcaccagcaacuguuuguggaccuaaaaagucuacuaauuugguuaaaaacaaaugugucaauuucaacuucaaugguuuaacaggcacagguguucuuacugagucuaacaaaaaguuucugccuuuccaacaauuuggcagagacauugcugacacuacugaugcuguccgugauccacagacacuugagauucuugacauuacaccauguucuuuugguggugucaguguuauaacaccaggaacaaauacuucuaaccagguugcuguucuuuaucaggguguuaacugcacagaagucccuguugcuauucaugcagaucaacuuacuccuacuuggcguguuuauucuacagguucuaauguuuuucaaacacgugcaggcuguuuaauaggggcugaacaugucaacaacucauaugagugugacauacccauuggugcagguauaugcgcuaguuaucagacucagacuaauucuccucggcgggcacguaguguagcuagucaauccaucauugccuacacuaugucacuuggugcagaaaauucaguugcuuacucuaauaacucuauugccauacccacaaauuuuacuauuaguguuaccacagaaauucuaccagugucuaugaccaagacaucaguagauuguacaauguacauuuguggugauucaacugaaugcagcaaucuuuuguugcaauauggcaguuuuuguacacaauuaaaccgugcuuuaacuggaauagcuguugaacaagacaaaaacacccaagaaguuuuugcacaagucaaacaaauuuacaaaacaccaccaauuaaagauuuuggugguuuuaauuuuucacaaauauuaccagauccaucaaaaccaagcaagaggucauuuauugaagaucuacuuuucaacaaagugacacuugcagaugcuggcuucaucaaacaauauggugauugccuuggugauauugcugcuagagaccucauuugugcacaaaaguuuaacggccuuacuguuuugccaccuuugcucacagaugaaaugauugcucaauacacuucugcacuguuagcggguacaaucacuucugguuggaccuuuggugcaggugcugcauuacaaauaccauuugcuaugcaaauggcuuauagguuuaaugguauuggaguuacacagaauguucucuaugagaaccaaaaauugauugccaaccaauuuaauagugcuauuggcaaaauucaagacucacuuucuuccacagcaagugcacuuggaaaacuucaagauguggucaaccaaaaugcacaagcuuuaaacacgcuuguuaaacaacuuagcuccaauuuuggugcaauuucaaguguuuuaaaugauauccuuucacgucuugacaaaguugaggcugaagugcaaauugauagguugaucacaggcagacuucaaaguuugcagacauaugugacucaacaauuaauuagagcugcagaaaucagagcuucugcuaaucuugcugcuacuaaaaugucagaguguguacuuggacaaucaaaaagaguugauuuuuguggaaagggcuaucaucuuauguccuucccucagucagcaccucaugguguagucuucuugcaugugacuuaugucccugcacaagaaaagaacuucacaacugcuccugccauuugucaugauggaaaagcacacuuuccucgugaaggugucuuuguuucaaauggcacacacugguuuguaacacaaaggaauuuuuaugaaccacaaaucauuacuacagacaacacauuugugucugguaacugugauguuguaauaggaauugucaacaacacaguuuaugauccuuugcaaccugaauuagacucauucaaggaggaguuagauaaauauuuuaagaaucauacaucaccagauguugauuuaggugacaucucuggcauuaaugcuucaguuguaaacauucaaaaagaaauugaccgccucaaugagguugccaagaauuuaaaugaaucucucaucgaucuccaagaacuuggaaaguaugagcaguauauaaaauggccaugguacauuuggcuagguuuuauagcuggcuugauugccauaguaauggugacaauuaugcuuugcuguaugaccaguugcuguaguugucucaagggcuguuguucuuguggauccugcugcaaauuugaugaagacgacucugagccagugcucaaaggagucaaauuacauuacacauaaggacuaguuauaagacugacuagcccgaugggccucccaacgggcccuccuccccuccuugcaccgagauuaauaaaaaaaaaaaaaaaaaaaaaaaaaaaaaaaaaaaaaaaaaaaaaaaaaaaaaaaaaaaaaaaaugcaucccccccccccccccccccccccccccccccaaaggcucuuuucagagccaccagaauu

SEQ ID NO: 12685 - RNA, 4039 nt, Artificial Sequence
  SARS-CoV-2/Wuhan/HBCDC-HB-02/2020__EPI_ISL_412978 spike protein mRNA wt (1-1273)
aggagaaagcuuaccauguuuguuuuucuuguuuuauugccacuagucucuagucaguguguuaaucuuacaaccagaacucaauuacccccugcauacacuaauucuuucacacgugguguuuauuacccugacaaaguuuucagauccucaguuuuacauucaacucaggacuuguucuuaccuuucuuuuccaauguuacuugguuccaugcuauacaugucucugggaccaaugguacuaagagguuugauaacccuguccuaccauuuaaugaugguguuuauuuugcuuccacugagaagucuaacauaauaagaggcuggauuuuugguacuacuuuagauucgaagacccagucccuacuuauuguuaauaacgcuacuaauguuguuauuaaagucugugaauuucaauuuuguaaugauccauuuuuggguguuuauuaccacaaaaacaacaaaaguuggauggaaagugaguucagaguuuauucuagugcgaauaauugcacuuuugaauaugucucucagccuuuucuuauggaccuugaaggaaaacaggguaauuucaaaaaucuuagggaauuuguguuuaagaauauugaugguuauuuuaaaauauauucuaagcacacgccuauuaauuuagugcgugaucucccucaggguuuuucggcuuuagaaccauugguagauuugccaauagguauuaacaucacuagguuucaaacuuuacuugcuuuacauagaaguuauuugacuccuggugauucuucuucagguuggacagcuggugcugcagcuuauuauguggguuaucuucaaccuaggacuuuucuauuaaaauauaaugaaaauggaaccauuacagaugcuguagacugugcacuugacccucucucagaaacaaaguguacguugaaauccuucacuguagaaaaaggaaucuaucaaacuucuaacuuuagaguccaaccaacagaaucuauuguuagauuuccuaauauuacaaacuugugcccuuuuggugaaguuuuuaacgccaccagauuugcaucuguuuaugcuuggaacaggaagagaaucagcaacuguguugcugauuauucuguccuauauaauuccgcaucauuuuccacuuuuaaguguuauggagugucuccuacuaaauuaaaugaucucugcuuuacuaaugucuaugcagauucauuuguaauuagaggugaugaagucagacaaaucgcuccagggcaaacuggaaagauugcugauuauaauuauaaauuaccagaugauuuuacaggcugcguuauagcuuggaauucuaacaaucuugauucuaagguuggugguaauuauaauuaccuguauagauuguuuaggaagucuaaucucaaaccuuuugagagagauauuucaacugaaaucuaucaggccgguagcacaccuuguaaugguguugaagguuuuaauuguuacuuuccuuuacaaucauaugguuuccaacccacuaaugguguugguuaccaaccauacagaguaguaguacuuucuuuugaacuucuacaugcaccagcaacuguuuguggaccuaaaaagucuacuaauuugguuaaaaacaaaugugucaauuucaacuucaaugguuuaacaggcacagguguucuuacugagucuaacaaaaaguuucugccuuuccaacaauuuggcagagacauugcugacacuacugaugcuguccgugauccacagacacuugagauucuugacauuacaccauguucuuuugguggugucaguguuauaacaccaggaacaaauacuucuaaccagguugcuguucuuuaucaggauguuaacugcacagaagucccuguugcuauucaugcagaucaacuuacuccuacuuggcguguuuauucuacagguucuaauguuuuucaaacacgugcaggcuguuuaauaggggcugaacaugucaacaacucauaugagugugacauacccauuggugcagguauaugcgcuaguuaucagacucagacuaauucuccucggcgggcacguaguguagcuagucaauccaucauugccuacacuaugucacuuggugcagaaaauucaguugcuuacucuaauaacucuauugccauacccacaaauuuuacuauuaguguuaccacagaaauucuaccagugucuaugaccaagacaucaguagauuguacaauguacauuuguggugauucaacugaaugcagcaauuuuuuguugcaauauggcaguuuuuguacacaauuaaaccgugcuuuaacuggaauagcuguugaacaagacaaaaacacccaagaaguuuuugcacaagucaaacaaauuuacaaaacaccaccaauuaaagauuuuggugguuuuaauuuuucacaaauauuaccagauccaucaaaaccaagcaagaggucauuuauugaagaucuacuuuucaacaaagugacacuugcagaugcuggcuucaucaaacaauauggugauugccuuggugauauugcugcuagagaccucauuugugcacaaaaguuuaacggccuuacuguuuugccaccuuugcucacagaugaaaugauugcucaauacacuucugcacuguuagcggguacaaucacuucugguuggaccuuuggugcaggugcugcauuacaaauaccauuugcuaugcaaauggcuuauagguuuaaugguauuggaguuacacagaauguucucuaugagaaccaaaaauugauugccaaccaauuuaauagugcuauuggcaaaauucaagacucacuuucuuccacagcaagugcacuuggaaaacuucaagauguggucaaccaaaaugcacaagcuuuaaacacgcuuguuaaacaacuuagcuccaauuuuggugcaauuucaaguguuuuaaaugauauccuuucacgucuugacaaaguugaggcugaagugcaaauugauagguugaucacaggcagacuucaaaguuugcagacauaugugacucaacaauuaauuagagcugcagaaaucagagcuucugcuaaucuugcugcuacuaaaaugucagaguguguacuuggacaaucaaaaagaguugauuuuuguggaaagggcuaucaucuuauguccuucccucagucagcaccucaugguguagucuucuugcaugugacuuaugucccugcacaagaaaagaacuucacaacugcuccugccauuugucaugauggaaaagcacacuuuccucgugaaggugucuuuguuucaaauggcacacacugguuuguaacacaaaggaauuuuuaugaaccacaaaucauuacuacagacaacacauuugugucugguaacugugauguuguaauaggaauugucaacaacacaguuuaugauccuuugcaaccugaauuagacucauucaaggaggaguuagauaaauauuuuaagaaucauacaucaccagauguugauuuaggugacaucucuggcauuaaugcuucaguuguaaacauucaaaaagaaauugaccgccucaaugagguugccaagaauuuaaaugaaucucucaucgaucuccaagaacuuggaaaguaugagcaguauauaaaauggccaugguacauuuggcuagguuuuauagcuggcuugauugccauaguaauggugacaauuaugcuuugcuguaugaccaguugcuguaguugucucaagggcuguuguucuuguggauccugcugcaaauuugaugaagacgacucugagccagugcucaaaggagucaaauuacauuacacauaaggacuaguuauaagacugacuagcccgaugggccucccaacgggcccuccuccccuccuugcaccgagauuaauaaaaaaaaaaaaaaaaaaaaaaaaaaaaaaaaaaaaaaaaaaaaaaaaaaaaaaaaaaaaaaaaugcaucccccccccccccccccccccccccccccccaaaggcucuuuucagagccaccagaauu

SEQ ID NO: 12686 - RNA, 4039 nt, Artificial Sequence
  SARS-CoV-2/Australia/QLD02/2020__EPI_ISL_407896 spike protein mRNA wt (1-1273)
aggagaaagcuuaccauguuuguuuuucuuguuuuauugccacuagucucuagucaguguguuaaucuuacaaccagaacucaauuacccccugcauacacuaauucuuucacacgugguguuuauuacccugacaaaguuuucagauccucaguuuuacauucaacucaggacuuguucuuaccuuucuuuuccaauguuacuugguuccaugcuauacaugucucugggaccaaugguacuaagagguuugauaacccuguccuaccauuuaaugaugguguuuauuuugcuuccacugagaagucuaacauaauaagaggcuggauuuuugguacuacuuuagauucgaagacccagucccuacuuauuguuaauaacgcuacuaauguuguuauuaaagucugugaauuucaauuuuguaaugauccauuuuuggguguuuauuaccacaaaaacaacaaaaguuggauggaaagugaguucagaguuuauucuagugcgaauaauugcacuuuugaauaugucucucagccuuuucuuauggaccuugaaggaaaacaggguaauuucaaaaaucuuagggaauuuguguuuaagaauauugaugguuauuuuaaaauauauucuaagcacacgccuauuaauuuagugcgugaucucccucaggguuuuucggcuuuagaaccauugguagauuugccaauagguauuaacaucacuagguuucaaacuuuacuugcuuuacauagaaguuauuugacuccuggugauucuucuucagguuggacagcuggugcugcagcuuauuauguggguuaucuucaaccuaggacuuuucuauuaaaauauaaugaaaauggaaccauuacagaugcuguagacugugcacuugacccucucucagaaacaaaguguacguugaaauccuucacuguagaaaaaggaaucuaucaaacuucuaacuuuagaguccaaccaacagaaucuauuguuagauuuccuaauauuacaaacuugugcccuuuuggugaaguuuuuaacgccaccagauuugcaucuguuuaugcuuggaacaggaagagaaucagcaacuguguugcugauuauucuguccuauauaauuccgcaucauuuuccacuuuuaaguguuauggagugucuccuacuaaauuaaaugaucucugcuuuacuaaugucuaugcagauucauuuguaauuagaggugaugaagucagacaaaucgcuccagggcaaacuggaaagauugcugauuauaauuauaaauuaccagaugauuuuacaggcugcguuauagcuuggaauucuaacaaucuugauucuaagguuggugguaauuauaauuaccuguauagauuguuuaggaagucuaaucucaaaccuuuugagagagauauuucaacugaaaucuaucaggccgguagcacaccuuguaaugguguugaagguuuuaauuguuacuuuccuuuacaaucauaugguuuccaacccacuaaugguguugguuaccaaccauacagaguaguaguacuuucuuuugaacuucuacaugcaccagcaacuguuuguggaccuaaaaagucuacuaauuugguuaaaaacaaaugugucaauuucaacuucaaugguuuaacaggcacagguguucuuacugagucuaacaaaaaguuucugccuuuccaacaauuuggcagagacauugcugacacuacugaugcuguccgugauccacagacacuugagauucuugacauuacaccauguucuuuugguggugucaguguuauaacaccaggaacaaauacuucuaaccagguugcuguucuuuaucaggauguuaacugcacagaagucccuguugcuauucaugcagaucaacuuacuccuacuuggcguguuuauucuacagguucuaauguuuuucaaacacgugcaggcuguuuaauaggggcugaacaugucaacaacucauaugagugugacauacccauuggugcagguauaugcgcuaguuaucagacucagacuaauucuccucggcgggcacguaguguagcuagucaauccaucauugccuacacuaugucacuuggugcagaaaauucaguugcuuacucuaauaacucuauugccauacccacaaauuuuacuauuaguguuaccacagaaauucuaccagugucuaugaccaagacaucaguagauuguacaauguacauuuguggugauucaacugaaugcagcaaucuuuuguugcaauauggcaguuuuuguacacaauuaaaccgugcuuuaacuggaauagcuguugaacaagacaaaaacacccaagaaguuuuugcacaagucaaacaaauuuacaaaacaccaccaauuaaagauuuuggugguuuuaauuuuucacaaauauuaccagauccaucaaaaccaagcaagaggucauuuauugaagaucuacuuuucaacaaagugacacuugcagaugcuggcuucaucaaacaauauggugauugccuuggugauauugcugcuagagaccucauuugugcacaaaaguuuaacggccuuacuguuuugccaccuuugcucacagaugaaaugauugcucaauacacuucugcacuguuagcggguacaaucacuucugguuggaccuuuggugcaggugcugcauuacaaauaccauuugcuaugcaaauggcuuauagguuuaaugguauuggaguuacacagaauguucucuaugagaaccaaaaauugauugccaaccaauuuaauagugcuauuggcaaaauucaagacucacuuucuuccacagcaagugcacuuggaaaacuucaagauguggucaaccaaaaugcacaagcuuuaaacacgcuuguuaaacaacuuagcuccaauuuuggugcaauuucaaguguuuuaaaugauauccuuucacgucuugacaaaguugaggcugaagugcaaauugauagguugaucacaggcagacuucaaaguuugcagacauaugugacucaacaauuaauuagagcugcagaaaucagagcuucugcuaaucuugcugcuacuaaaaugucagaguguguacuuggacaaucaaaaagaguugauuuuuguggaaagggcuaucaucuuauguccuucccucagucagcaccucaugguguagucuucuugcaugugacuuaugucccugcacaagaaaagaacuucacaacugcuccugccauuugucaugauggaaaagcacacuuuccucgugaaggugucuuuguuucaaauggcacacacugguuuguaacacaaaggaauuuuuaugaaccacaaaucauuacuacagacaacacauuugugucugguaacugugauguuguaauaggaauugucaacaacacaguuuaugauccuuugcaacuugaauuagacucauucaaggaggaguuagauaaauauuuuaagaaucauacaucaccagauguugauuuaggugacaucucuggcauuaaugcuucaguuguaaacauucaaaaagaaauugaccgccucaaugagguugccaagaauuuaaaugaaucucucaucgaucuccaagaacuuggaaaguaugagcaguauauaaaauggccaugguacauuuggcuagguuuuauagcuggcuugauugccauaguaauggugacaauuaugcuuugcuguaugaccaguugcuguaguugucucaagggcuguuguucuuguggauccugcugcaaauuugaugaagacgacucugagccagugcucaaaggagucaaauuacauuacacauaaggacuaguuauaagacugacuagcccgaugggccucccaacgggcccuccuccccuccuugcaccgagauuaauaaaaaaaaaaaaaaaaaaaaaaaaaaaaaaaaaaaaaaaaaaaaaaaaaaaaaaaaaaaaaaaaugcaucccccccccccccccccccccccccccccccaaaggcucuuuucagagccaccagaauu

SEQ ID NO: 12687 - RNA, 4039 nt, Artificial Sequence
  SARS-CoV-2/India/1-31/2020__EPI_ISL_413523 spike protein mRNA wt (1-1273)
aggagaaagcuuaccauguuuguuuuucuuguuuuauugccacuagucucuagucaguguguuaaucuuacaaccagaacucaauuacccccugcauacacuaauucuuucacacgugguguuuauuacccugacaaaguuuucagauccucaguuuuacauucaacucaggacuuguucuuaccuuucuuuuccaauguuacuugguuccaugcuauacaugucucugggaccaaugguacuaagagguuugauaacccuguccuaccauuuaaugaugguguuuauuuugcuuccacugagaagucuaacauaauaagaggcuggauuuuugguacuacuuuagauucgaagacccagucccuacuuauuguuaauaacgcuacuaauguuguuauuaaagucugugaauuucaauuuuguaaugauccauuuuuggguguuuauuaccacaaaaacaacaaaaguuggauggaaagugaguucagaguuuauucuagugcgaauaauugcacuuuugaauaugucucucagccuuuucuuauggaccuugaaggaaaacaggguaauuucaaaaaucuuagggaauuuguguuuaagaauauugaugguuauuuuaaaauauauucuaagcacacgccuauuaauuuagugcgugaucucccucaggguuuuucggcuuuagaaccauugguagauuugccaauagguauuaacaucacuagguuucaaacuuuacuugcuuuacauagaaguuauuugacuccuggugauucuucuucagguuggacagcuggugcugcagcuuauuauguggguuaucuucaaccuaggacuuuucuauuaaaauauaaugaaaauggaaccauuacagaugcuguagacugugcacuugacccucucucagaaacaaaguguacguugaaauccuucacuguagaaaaaggaaucuaucaaacuucuaacuuuagaguccaaccaacagaaucuauuguuagauuuccuaauauuacaaacuugugcccuuuuggugaaguuuuuaacgccaccagauuugcaucuguuuaugcuuggaacaggaagagaaucagcaacuguguugcugauuauucuguccuauauaauuccgcaucauuuuccacuuuuaaguguuauggagugucuccuacuaaauuaaaugaucucugcuuuacuaaugucuaugcagauucauuuguaauuagaggugaugaagucagacaaaucgcuccagggcaaacuggaaagauugcugauuauaauuauaaauuaccagaugauuuuacaggcugcguuauagcuuggaauucuaacaaucuugauucuaagguuggugguaauuauaauuaccuguauagauuguuuaggaagucuaaucucaaaccuuuugagagagauauuucaacugaaaucuaucaggccgguagcacaccuuguaaugguguugaagguuuuaauuguuacuuuccuuuacaaucauaugguuuccaacccacuaaugguguugguuaccaaccauacagaguaguaguacuuucuuuugaacuucuacaugcaccagcaacuguuuguggaccuaaaaagucuacuaauuugguuaaaaacaaaugugucaauuucaacuucaaugguuuaacaggcacagguguucuuacugagucuaacaaaaaguuucugccuuuccaacaauuuggcagagacauugcugacacuacugaugcuguccgugauccacagacacuugagauucuugacauuacaccauguucuuuugguggugucaguguuauaacaccaggaacaaauacuucuaaccagguugcuguucuuuaucaggauguuaacugcacagaagucccuguugcuauucaugcagaucaacuuacuccuacuuggcguguuuauucuacagguucuaauguuuuucaaacacgugcaggcuguuuaauaggggcugaacaugucaacaacucauaugagugugacauacccauuggugcagguauaugcgcuaguuaucagacucagacuaauucuccucggcgggcacguaguguagcuagucaauccaucauugccuacacuaugucacuuggugcagaaaauucaguugcuuacucuaauaacucuauugccauacccacaaauuuuacuauuaguguuaccacagaaauucuaccagugucuaugaccaagacaucaguagauuguacaauguacauuuguggugauucaacugaaugcagcaaucuuuuguugcaauauggcaguuuuuguacacaauuaaaccgugcuuuaacuggaauagcuguugaacaagacaaaaacacccaagaaguuuuugcacaagucaaacaaauuuacaaaacaccaccaauuaaagauuuuggugguuuuaauuuuucacaaauauuaccagauccaucaaaaccaagcaagaggucauuuauugaagaucuacuuuucaacaaagugacacuugcagaugcuggcuucaucaaacaauauggugauugccuuggugauauugcugcuagagaccucauuugugcacaaaaguuuaacggccuuacuguuuugccaccuuugcucacagaugaaaugauugcucaauacacuucugcacuguuagcggguacaaucacuucugguuggaccuuuggugcaggugcugcauuacaaauaccauuugcuaugcaaauggcuuauagguuuaaugguauuggaguuacacagaauguucucuaugagaaccaaaaauugauugccaaccaauuuaauaguguuauuggcaaaauucaagacucacuuucuuccacagcaagugcacuuggaaaacuucaagauguggucaaccaaaaugcacaagcuuuaaacacgcuuguuaaacaacuuagcuccaauuuuggugcaauuucaaguguuuuaaaugauauccuuucacgucuugacaaaguugaggcugaagugcaaauugauagguugaucacaggcagacuucaaaguuugcagacauaugugacucaacaauuaauuagagcugcagaaaucagagcuucugcuaaucuugcugcuacuaaaaugucagaguguguacuuggacaaucaaaaagaguugauuuuuguggaaagggcuaucaucuuauguccuucccucagucagcaccucaugguguagucuucuugcaugugacuuaugucccugcacaagaaaagaacuucacaacugcuccugccauuugucaugauggaaaagcacacuuuccucgugaaggugucuuuguuucaaauggcacacacugguuuguaacacaaaggaauuuuuaugaaccacaaaucauuacuacagacaacacauuugugucugguaacugugauguuguaauaggaauugucaacaacacaguuuaugauccuuugcaaccugaauuagacucauucaaggaggaguuagauaaauauuuuaagaaucauacaucaccagauguugauuuaggugacaucucuggcauuaaugcuucaguuguaaacauucaaaaagaaauugaccgccucaaugagguugccaagaauuuaaaugaaucucucaucgaucuccaagaacuuggaaaguaugagcaguauauaaaauggccaugguacauuuggcuagguuuuauagcuggcuugauugccauaguaauggugacaauuaugcuuugcuguaugaccaguugcuguaguugucucaagggcuguuguucuuguggauccugcugcaaauuugaugaagacgacucugagccagugcucaaaggagucaaauuacauuacacauaaggacuaguuauaagacugacuagcccgaugggccucccaacgggcccuccuccccuccuugcaccgagauuaauaaaaaaaaaaaaaaaaaaaaaaaaaaaaaaaaaaaaaaaaaaaaaaaaaaaaaaaaaaaaaaaaugcaucccccccccccccccccccccccccccccccaaaggcucuuuucagagccaccagaauu

SEQ ID NO: 12688 - RNA, 4039 nt, Artificial Sequence
  SARS-CoV-2/Guangdong/GD2020087-P0008/2020__EPI_ISL_413863 spike protein mRNA wt (1-1273)
aggagaaagcuuaccauguuuguuuuucuuguuuuauugccacuagucucuagucaguguguuaaucuuacaaccagaacucaauuacccccugcauacacuaauucuuucacacgugguguuuauuacccugacaaaguuuucagauccucaguuuuacauucaacucaggacuuguucuuaccuuucuuuuccaauguuacuugguuccaugcuauacaugucucugggaccaaugguacuaagagguuugauaacccuguccuaccauuuaaugaugguguuuauuuugcuuccacugagaagucuaacauaauaagaggcuggauuuuugguacuacuuuagauucgaagacccagucccuacuuauuguuaauaacgcuacuaauguuguuauuaaagucugugaauuucaauuuuguaaugauccauuuuuggguguuuauuaccacaaaaacaacaaaaguuggauggaaagugaguucagaguuuauucuagugcgaauaauugcacuuuugaauaugucucucagccuuuucuuauggaccuugaaggaaaacaggguaauuucaaaaaucuuagggaauuuguguuuaagaauauugaugguuauuuuaaaauauauucuaagcacacgccuauuaauuuagugcgugaucucccucaggguuuuucggcuuuagaaccauugguagauuugccaauagguauuaacaucacuagguuucaaacuuuacuugcuuuacauagaaguuauuugacuccuggugauucuucuucagguuggacagcuggugcugcagcuuauuauguggguuaucuucaaccuaggacuuuucuauuaaaauauaaugaaaauggaaccauuacagaugcuguagacugugcacuugacccucucucagaaacaaaguguacguugaaauccuucacuguagaaaaaggaaucuaucaaacuucuaacuuuagaguccaaccaacagaaucuauuguuagauuuccuaauauuacaaacuugugcccuuuuggugaaguuuuuaacgccaccagauuugcaucuguuuaugcuuggaacaggaagagaaucagcaacuguguugcugauuauucuguccuauauaauuccgcaucauuuuccacuuuuaaguguuauggagugucuccuacuaaauuaaaugaucucugcuuuacuaaugucuaugcagauucauuuguaauuagaggugaugaagucagagaaaucgcuccagggcaaacuggaaagauugcugauuauaauuauaaauuaccagaugauuuuacaggcugcguuauagcuuggaauucuaacaaucuugauucuaagguuggugguaauuauaauuaccuguauagauuguuuaggaagucuaaucucaaaccuuuugagagagauauuucaacugaaaucuaucaggccgguagcacaccuuguaaugguguugaagguuuuaauuguuacuuuccuuuacaaucauaugguuuccaacccacuaaugguguugguuaccaaccauacagaguaguaguacuuucuuuugaacuucuacaugcaccagcaacuguuuguggaccuaaaaagucuacuaauuugguuaaaaacaaaugugucaauuucaacuucaaugguuuaacaggcacagguguucuuacugagucuaacaaaaaguuucugccuuuccaacaauuuggcagagacauugcugacacuacugaugcuguccgugauccacagacacuugagauucuugacauuacaccauguucuuuugguggugucaguguuauaacaccaggaacaaauacuucuaaccagguugcuguucuuuaucaggauguuaacugcacagaagucccuguugcuauucaugcagaucaacuuacuccuacuuggcguguuuauucuacagguucuaauguuuuucaaacacgugcaggcuguuuaauaggggcugaacaugucaacaacucauaugagugugacauacccauuggugcagguauaugcgcuaguuaucagacucagacuaauucuccucggcgggcacguaguguagcuagucaauccaucauugccuacacuaugucacuuggugcagaaaauucaguugcuuacucuaauaacucuauugccauacccacaaauuuuacuauuaguguuaccacagaaauucuaccagugucuaugaccaagacaucaguagauuguacaauguacauuuguggugauucaacugaaugcagcaaucuuuuguugcaauauggcaguuuuuguacacaauuaaaccgugcuuuaacuggaauagcuguugaacaagacaaaaacacccaagaaguuuuugcacaagucaaacaaauuuacaaaacaccaccaauuaaagauuuuggugguuuuaauuuuucacaaauauuaccagauccaucaaaaccaagcaagaggucauuuauugaagaucuacuuuucaacaaagugacacuugcagaugcuggcuucaucaaacaauauggugauugccuuggugauauugcugcuagagaccucauuugugcacaaaaguuuaacggccuuacuguuuugccaccuuugcucacagaugaaaugauugcucaauacacuucugcacuguuagcggguacaaucacuucugguuggaccuuuggugcaggugcugcauuacaaauaccauuugcuaugcaaauggcuuauagguuuaaugguauuggaguuacacagaauguucucuaugagaaccaaaaauugauugccaaccaauuuaauagugcuauuggcaaaauucaagacucacuuucuuccacagcaagugcacuuggaaaacuucaagauguggucaaccaaaaugcacaagcuuuaaacacgcuuguuaaacaacuuagcuccaauuuuggugcaauuucaaguguuuuaaaugauauccuuucacgucuugacaaaguugaggcugaagugcaaauugauagguugaucacaggcagacuucaaaguuugcagacauaugugacucaacaauuaauuagagcugcagaaaucagagcuucugcuaaucuugcugcuacuaaaaugucagaguguguacuuggacaaucaaaaagaguugauuuuuguggaaagggcuaucaucuuauguccuucccucagucagcaccucaugguguagucuucuugcaugugacuuaugucccugcacaagaaaagaacuucacaacugcuccugccauuugucaugauggaaaagcacacuuuccucgugaaggugucuuuguuucaaauggcacacacugguuuguaacacaaaggaauuuuuaugaaccacaaaucauuacuacagacaacacauuugugucugguaacugugauguuguaauaggaauugucaacaacacaguuuaugauccuuugcaaccugaauuagacucauucaaggaggaguuagauaaauauuuuaagaaucauacaucaccagauguugauuuaggugacaucucuggcauuaaugcuucaguuguaaacauucaaaaagaaauugaccgccucaaugagguugccaagaauuuaaaugaaucucucaucgaucuccaagaacuuggaaaguaugagcaguauauaaaauggccaugguacauuuggcuagguuuuauagcuggcuugauugccauaguaauggugacaauuaugcuuugcuguaugaccaguugcuguaguugucucaagggcuguuguucuuguggauccugcugcaaauuugaugaagacgacucugagccagugcucaaaggagucaaauuacauuacacauaaggacuaguuauaagacugacuagcccgaugggccucccaacgggcccuccuccccuccuugcaccgagauuaauaaaaaaaaaaaaaaaaaaaaaaaaaaaaaaaaaaaaaaaaaaaaaaaaaaaaaaaaaaaaaaaaugcaucccccccccccccccccccccccccccccccaaaggcucuuuucagagccaccagaauu

SEQ ID NO: 12689 - RNA, 4039 nt, Artificial Sequence
  SARS-CoV-2/Sweden/01/2020__EPI_ISL_411951 spike protein mRNA wt (1-1273)
aggagaaagcuuaccauguuuguuuuucuuguuuuauugccacuagucucuagucaguguguuaaucuuacaaccagaacucaauuacccccugcauacacuaauucuuucacacgugguguuuauuacccugacaaaguuuucagauccucaguuuuacauucaacucaggacuuguucuuaccuuucuuuuccaauguuacuugguuccaugcuauacaugucucugggaccaaugguacuaagagguuugauaacccuguccuaccauuuaaugaugguguuuauuuugcuuccacugagaagucuaacauaauaagaggcuggauuuuugguacuacuuuagauucgaagacccagucccuacuuauuguuaauaacgcuacuaauguuguuauuaaagucugugaauuucaauuuuguaaugauccauuuuuggguguuuauuaccacaaaaacaacaaaaguuggauggaaagugaguucagaguuuauucuagugcgaauaauugcacuuuugaauaugucucucagccuuuucuuauggaccuugaaggaaaacaggguaauuucaaaaaucuuagggaauuuguguuuaagaauauugaugguuauuuuaaaauauauucuaagcacacgccuauuaauuuagugcgugaucucccucaggguuuuucggcuuuagaaccauugguagauuugccaauagguauuaacaucacuagguuucaaacuuuacuugcuuuacauagaaguuauuugacuccuggugauucuucuucagguuggacagcuggugcugcagcuuauuauguggguuaucuucaaccuaggacuuuucuauuaaaauauaaugaaaauggaaccauuacagaugcuguagacugugcacuugacccucucucagaaacaaaguguacguugaaauccuucacuguagaaaaaggaaucuaucaaacuucuaacuuuagaguccaaccaacagaaucuauuguuagauuuccuaauauuacaaacuugugcccuuuuggugaaguuuuuaacgccaccagauuugcaucuguuuaugcuuggaacaggaagagaaucagcaacuguguugcugauuauucuguccuauauaauuccgcaucauuuuccacuuuuaaguguuauggagugucuccuacuaaauuaaaugaucucugcuuuacuaaugucuaugcagauucauuuguaauuagaggugaugaagucagacaaaucgcuccagggcaaacuggaaagauugcugauuauaauuauaaauuaccagaugauuuuacaggcugcguuauagcuuggaauucuaacaaucuugauucuaagguuggugguaauuauaauuaccuguauagauuguuuaggaagucuaaucucaaaccuuuugagagagauauuucaacugaaaucuaucaggccgguagcacaccuuguaaugguguugaagguuuuaauuguuacuuuccuuuacaaucauaugguuuccaacccacuaaugguguugguuaccaaccauacagaguaguaguacuuucuuuugaacuucuacaugcaccagcaacuguuuguggaccuaaaaagucuacuaauuugguuaaaaacaaaugugucaauuucaacuucaaugguuuaacaggcacagguguucuuacugagucuaacaaaaaguuucugccuuuccaacaauuuggcagagacauugcugacacuacugaugcuguccgugauccacagacacuugagauucuugacauuacaccauguucuuuugguggugucaguguuauaacaccaggaacaaauacuucuaaccagguugcuguucuuuaucaggauguuaacugcacagaagucccuguugcuauucaugcagaucaacuuacuccuacuuggcguguuuauucuacagguucuaauguuuuucaaacacgugcaggcuguuuaauaggggcugaacaugucaacaacucauaugagugugacauacccauuggugcagguauaugcgcuaguuaucagacucagacuaauucuccucggcgggcacguaguguagcuagucaauccaucauugccuacacuaugucacuuggugcagaaaauucaguugcuuacucuaauaacucuauugccauacccacaaauuuuacuauuaguguuaccacagaaauucuaccagugucuaugaccaagacaucaguagauuguacaauguacauuuguggugauucaacugaaugcagcaaucuuuuguugcaauauggcaguuuuuguacacaauuaaaccgugcuuuaacuggaauagcuguugaacaagacaaaaacacccaagaaguuuuugcacaagucaaacaaauuuacaaaacaccaccaauuaaagauuguggugguuuuaauuuuucacaaauauuaccagauccaucaaaaccaagcaagaggucauuuauugaagaucuacuuuucaacaaagugacacuugcagaugcuggcuucaucaaacaauauggugauugccuuggugauauugcugcuagagaccucauuugugcacaaaaguuuaacggccuuacuguuuugccaccuuugcucacagaugaaaugauugcucaauacacuucugcacuguuagcggguacaaucacuucugguuggaccuuuggugcaggugcugcauuacaaauaccauuugcuaugcaaauggcuuauagguuuaaugguauuggaguuacacagaauguucucuaugagaaccaaaaauugauugccaaccaauuuaauagugcuauuggcaaaauucaagacucacuuucuuccacagcaagugcacuuggaaaacuucaagauguggucaaccaaaaugcacaagcuuuaaacacgcuuguuaaacaacuuagcuccaauuuuggugcaauuucaaguguuuuaaaugauauccuuucacgucuugacaaaguugaggcugaagugcaaauugauagguugaucacaggcagacuucaaaguuugcagacauaugugacucaacaauuaauuagagcugcagaaaucagagcuucugcuaaucuugcugcuacuaaaaugucagaguguguacuuggacaaucaaaaagaguugauuuuuguggaaagggcuaucaucuuauguccuucccucagucagcaccucaugguguagucuucuugcaugugacuuaugucccugcacaagaaaagaacuucacaacugcuccugccauuugucaugauggaaaagcacacuuuccucgugaaggugucuuuguuucaaauggcacacacugguuuguaacacaaaggaauuuuuaugaaccacaaaucauuacuacagacaacacauuugugucugguaacugugauguuguaauaggaauugucaacaacacaguuuaugauccuuugcaaccugaauuagacucauucaaggaggaguuagauaaauauuuuaagaaucauacaucaccagauguugauuuaggugacaucucuggcauuaaugcuucaguuguaaacauucaaaaagaaauugaccgccucaaugagguugccaagaauuuaaaugaaucucucaucgaucuccaagaacuuggaaaguaugagcaguauauaaaauggccaugguacauuuggcuagguuuuauagcuggcuugauugccauaguaauggugacaauuaugcuuugcuguaugaccaguugcuguaguugucucaagggcuguuguucuuguggauccugcugcaaauuugaugaagacgacucugagccagugcucaaaggagucaaauuacauuacacauaaggacuaguuauaagacugacuagcccgaugggccucccaacgggcccuccuccccuccuugcaccgagauuaauaaaaaaaaaaaaaaaaaaaaaaaaaaaaaaaaaaaaaaaaaaaaaaaaaaaaaaaaaaaaaaaaugcaucccccccccccccccccccccccccccccccaaaggcucuuuucagagccaccagaauu

SEQ ID NO: 12690 - RNA, 4039 nt, Artificial Sequence
  SARS-CoV-2/Tianmen/HBCDC-HB-07/2020__EPI_ISL_412983 spike protein mRNA wt (1-1273)
aggagaaagcuuaccauguuuguuuuucuuguuuuauugccacuagucucuagucaguguguuaaucuuacaaccagaacucaauuacccccugcauacacuaauucuuucacacgugguguuuauuacccugacaaaguuuucagauccucaguuuuacauucaacucaggacuuguucuuaccuuucuuuuccaauguuacuugguuccaugcuauacaugucucugggaccaaugguacuaagagguuugauaacccuguccuaccauuuaaugaugguguuuauuuugcuuccacugagaagucuaacauaauaagaggcuggauuuuugguacuacuuuagauucgaagacccagucccuacuuauuguuaauaacgcuacuaauguuguuauuaaagucugugaauuucaauuuuguaaugauccauuuuuggguguuuauuaccacaaaaacaacaaaaguuggauggaaagugaguucagaguuuauucuagugcgaauaauugcacuuuugaauaugucucucagccuuuucuuauggaccuugaaggaaaacaggguaauuucaaaaaucuuagggaauuuguguuuaagaauauugaugguuauuuuaaaauauauucuaagcacacgccuauuaauuuagugcgugaucucccucaggguuuuucggcuuuagaaccauugguagauuugccaauagguauuaacaucacuagguuucaaacuuuacuugcuuuacauagaaguuauuugacuccuggugauucuucuucagguuggacagcuggugcugcagcuuauuauguggguuaucuucaaccuaggacuuuucuauuaaaauauaaugaaaauggaaccauuacagaugcuguagacugugcacuugacccucucucagaaacaaaguguacguugaaauccuucacuguagaaaaaggaaucuaucaaacuucuaacuuuagaguccaaccaacagaaucuauuguuagauuuccuaauauuacaaacuugugcccuuuuggugaaguuuuuaacgccaccagauuugcaucuguuuaugcuuggaacaggaagagaaucagcaacuguguugcugauuauucuguccuauauaauuccgcaucauuuuccacuuuuaaguguuauggagugucuccuacuaaauuaaaugaucucugcuuuacuaaugucuaugcagauucauuuguaauuagaggugaugaagucagacaaaucgcuccagggcaaacuggaaagauugcugauuauaauuauaaauuaccagaugauuuuacaggcugcguuauagcuuggaauucuaacaaucuugauucuaagguuggugguaauuauaauuaccuguauagauuguuuaggaagucuaaucucaaaccuuuugagagagauauuucaacugaaaucuaucaggccgguagcacaccuuguaaugguguugaagguuuuaauuguuacuuuccuuuacaaucauaugguuuccaacccacuaaugguguugguuaccaaccauacagaguaguaguacuuucuuuugaacuucuacaugcaccagcaacuguuuguggaccuaaaaagucuacuaauuugguuaaaaacaaaugugucaauuucaacuucaaugguuuaacaggcacagguguucuuacugagucuaacaaaaaguuucugccuuuccaacaauuuggcagagacauugcugacacuacugaugcuguccgugauccacagacacuugagauucuugacauuacaccauguucuuuugguggugucaguguuauaacaccaggaacaaauacuucuaaccagguugcuguucuuuaucaggaucuuaacugcacagaagucccuguugcuauucaugcagaucaacuuacuccuacuuggcguguuuauucuacagguucuaauguuuuucaaacacgugcaggcuguuuaauaggggcugaacaugucaacaacucauaugagugugacauacccauuggugcagguauaugcgcuaguuaucagacucagacuaauucuccucggcgggcacguaguguagcuagucaauccaucauugccuacacuaugucacuuggugcagaaaauucaguugcuuacucuaauaacucuauugccauacccacaaauuuuacuauuaguguuaccacagaaauucuaccagugucuaugaccaagacaucaguagauuguacaauguacauuuguggugauucaacugaaugcagcaaucuuuuguugcaauauggcaguuuuuguacacaauuaaaccgugcuuuaacuggaauagcuguugaacaagacaaaaacacccaagaaguuuuugcacaagucaaacaaauuuacaaaacaccaccaauuaaagauuuuggugguuuuaauuuuucacaaauauuaccagauccaucaaaaccaagcaagaggucauuuauugaagaucuacuuuucaacaaagugacacuugcagaugcuggcuucaucaaacaauauggugauugccuuggugauauugcugcuagagaccucauuugugcacaaaaguuuaacggccuuacuguuuugccaccuuugcucacagaugaaaugauugcucaauacacuucugcacuguuagcggguacaaucacuucugguuggaccuuuggugcaggugcugcauuacaaauaccauuugcuaugcaaauggcuuauagguuuaaugguauuggaguuacacagaauguucucuaugagaaccaaaaauugauugccaaccaauuuaauagugcuauuggcaaaauucaagacucacuuucuuccacagcaagugcacuuggaaaacuucaagauguggucaaccaaaaugcacaagcuuuaaacacgcuuguuaaacaacuuagcuccaauuuuggugcaauuucaaguguuuuaaaugauauccuuucacgucuugacaaaguugaggcugaagugcaaauugauagguugaucacaggcagacuucaaaguuugcagacauaugugacucaacaauuaauuagagcugcagaaaucagagcuucugcuaaucuugcugcuacuaaaaugucagaguguguacuuggacaaucaaaaagaguugauuuuuguggaaagggcuaucaucuuauguccuucccucagucagcaccucaugguguagucuucuugcaugugacuuaugucccugcacaagaaaagaacuucacaacugcuccugccauuugucaugauggaaaagcacacuuuccucgugaaggugucuuuguuucaaauggcacacacugguuuguaacacaaaggaauuuuuaugaaccacaaaucauuacuacagacaacacauuugugucugguaacugugauguuguaauaggaauugucaacaacacaguuuaugauccuuugcaaccugaauuagacucauucaaggaggaguuagauaaauauuuuaagaaucauacaucaccagauguugauuuaggugacaucucuggcauuaaugcuucaguuguaaacauucaaaaagaaauugaccgccucaaugagguugccaagaauuuaaaugaaucucucaucgaucuccaagaacuuggaaaguaugagcaguauauaaaauggccaugguacauuuggcuagguuuuauagcuggcuugauugccauaguaauggugacaauuaugcuuugcuguaugaccaguugcuguaguugucucaagggcuguuguucuuguggauccugcugcaaauuugaugaagacgacucugagccagugcucaaaggagucaaauuacauuacacauaaggacuaguuauaagacugacuagcccgaugggccucccaacgggcccuccuccccuccuugcaccgagauuaauaaaaaaaaaaaaaaaaaaaaaaaaaaaaaaaaaaaaaaaaaaaaaaaaaaaaaaaaaaaaaaaaugcaucccccccccccccccccccccccccccccccaaaggcucuuuucagagccaccagaauu

SEQ ID NO: 12691 - RNA, 4039 nt, Artificial Sequence
  SARS-CoV-2/Hong Kong/case42_VM20002493/2020__EPI_ISL_414527 spike protein mRNA wt (1-1273)
aggagaaagcuuaccauguuuguuuuucuuguuuuauugccacuagucucuagucaguguguuaaucuuacaaccagaacucaauuacccccugcauacacuaauucuuucacacgugguguuuauuacccugacaaaguuuucagauccucaguuuuacauucaacucaggacuuguucuuaccuuucuuuuccaauguuacuugguuccaugcuauacaugucucugggaccaaugguacuaagagguuugauaacccuguccuaccauuuaaugaugguguuuauuuugcuuccacugagaagucuaacauaauaagaggcuggauuuuugguacuacuuuagauucgaagacccagucccuacuuauuguuaauaacgcuacuaauguuguuauuaaagucugugaauuucaauuuuguaaugauccauuuuuggguguuuauuaccacaaaaacaacaaaaguuggauggaaagugaguucagaguuuauucuagugcgaauaauugcacuuuugaauaugucucucagccuuuucuuauggaccuugaaggaaaacaggguaauuucaaaaaucuuagggaauuuguguuuaagaauauugaugguuauuuuaaaauauauucuaagcacacgccuauuaauuuagugcgugaucucccucaggguuuuucggcuuuagaaccauugguagauuugccaauagguauuaacaucacuagguuucaaacuuuacuugcuuuacauagaaguuauuugacuccuggugauucuucuucagguuggacagcuggugcugcagcuuauuauguggguuaucuucaaccuaggacuuuucuauuaaaauauaaugaaaauggaaccauuacagaugcuguagacugugcacuugacccucucucagaaacaaaguguacguugaaauccuucacuguagaaaaaggaaucuaucaaacuucuaacuuuagaguccaaccaacagaaucuauuguuagauuuccuaauauuacaaacuugugcccuuuuggugaaguuuuuaacgccaccagauuugcaucuguuuaugcuuggaacaggaagagaaucagcaacuguguugcugauuauucuguccuauauaauuccgcaucauuuuccacuuuuaaguguuauggagugucuccuacuaaauuaaaugaucucugcuuuacuaaugucuaugcagauucauuuguaauuagaggugaugaagucagacaaaucgcuccagggcaaacuggaaagauugcugauuauaauuauaaauuaccagaugauuuuacaggcugcguuauagcuuggaauucuaacaaucuugauucuaagguuggugguaauuauaauuaccuguauagauuguuuaggaagucuaaucucaaaccuuuugagagagauauuucaacugaaaucuaucaggccgguagcacaccuuguaaugguguugaagguuuuaauuguuacuuuccuuuacaaucauaugguuuccaacccacuaaugguguugguuaccaaccauacagaguaguaguacuuucuuuugaacuucuacaugcaccagcaacuguuuguggaccuaaaaagucuacuaauuugguuaaaaacaaaugugucaauuucaacuucaaugguuuaacaggcacagguguucuuacugagucuaacaaaaaguuucugccuuuccaacaauuuggcagagacauugcugacacuacugaugcuguccgugauccacagacacuugagauucuugacauuacaccauguucuuuugguggugucaguguuauaacaccaggaacaaauacuucuaaccagguugcuguucuuuaucaggauguuaacugcacagaagucccuguugcuauucaugcagaucaacuuacuccuacuuggcguguuuauucuacagguucuaauguuuuucaaacacgugcaggcuguuuaauaggggcugaacaugucaacaacucauaugagugugacauacccauuggugcagguauaugcgcuaguuaucagacucagacuaauucuccucggcgggcacguaguguagcuagucaauccaucauugccuacacuaugucacuuggugcagaaaauucaguugcuuacucuaauaacucuauugccauacccacaaauuuugcuauuaguguuaccacagaaauucuaccagugucuaugaccaagacaucaguagauuguacaauguacauuuguggugauucaacugaaugcagcaaucuuuuguugcaauauggcaguuuuuguacacaauuaaaccgugcuuuaacuggaauagcuguugaacaagacaaaaacacccaagaaguuuuugcacaagucaaacaaauuuacaaaacaccaccaauuaaagauuuuggugguuuuaauuuuucacaaauauuaccagauccaucaaaaccaagcaagaggucauuuauugaagaucuacuuuucaacaaagugacacuugcagaugcuggcuucaucaaacaauauggugauugccuuggugauauugcugcuagagaccucauuugugcacaaaaguuuaacggccuuacuguuuugccaccuuugcucacagaugaaaugauugcucaauacacuucugcacuguuagcggguacaaucacuucugguuggaccuuuggugcaggugcugcauuacaaauaccauuugcuaugcaaauggcuuauagguuuaaugguauuggaguuacacagaauguucucuaugagaaccaaaaauugauugccaaccaauuuaauagugcuauuggcaaaauucaagacucacuuucuuccacagcaagugcacuuggaaaacuucaagauguggucaaccaaaaugcacaagcuuuaaacacgcuuguuaaacaacuuagcuccaauuuuggugcaauuucaaguguuuuaaaugauauccuuucacgucuugacaaaguugaggcugaagugcaaauugauagguugaucacaggcagacuucaaaguuugcagacauaugugacucaacaauuaauuagagcugcagaaaucagagcuucugcuaaucuugcugcuacuaaaaugucagaguguguacuuggacaaucaaaaagaguugauuuuuguggaaagggcuaucaucuuauguccuucccucagucagcaccucaugguguagucuucuugcaugugacuuaugucccugcacaagaaaagaacuucacaacugcuccugccauuugucaugauggaaaagcacacuuuccucgugaaggugucuuuguuucaaauggcacacacugguuuguaacacaaaggaauuuuuaugaaccacaaaucauuacuacagacaacacauuugugucugguaacugugauguuguaauaggaauugucaacaacacaguuuaugauccuuugcaaccugaauuagacucauucaaggaggaguuagauaaauauuuuaagaaucauacaucaccagauguugauuuaggugacaucucuggcauuaaugcuucaguuguaaacauucaaaaagaaauugaccgccucaaugagguugccaagaauuuaaaugaaucucucaucgaucuccaagaacuuggaaaguaugagcaguauauaaaauggccaugguacauuuggcuagguuuuauagcuggcuugauugccauaguaauggugacaauuaugcuuugcuguaugaccaguugcuguaguugucucaagggcuguuguucuuguggauccugcugcaaauuugaugaagacgacucugagccagugcucaaaggagucaaauuacauuacacauaaggacuaguuauaagacugacuagcccgaugggccucccaacgggcccuccuccccuccuugcaccgagauuaauaaaaaaaaaaaaaaaaaaaaaaaaaaaaaaaaaaaaaaaaaaaaaaaaaaaaaaaaaaaaaaaaugcaucccccccccccccccccccccccccccccccaaaggcucuuuucagagccaccagaauu

SEQ ID NO: 12692 - RNA, 4039 nt, Artificial Sequence
  SARS-CoV-2/USA/CruiseA-23/2020__EPI_ISL_414482 spike protein mRNA wt (1-1273)
aggagaaagcuuaccauguuuguuuuucuuguuuuauugccacuagucucuagucaguguguuaaucuuacaaccagaacucaauuacccccugcauacacuaauucuuucacacgugguguuuauuacccugacaaaguuuucagauccucaguuuuacauucaacucaggacuuguucuuaccuuucuuuuccaauguuacuugguuccaugcuauacaugucucugggaccaaugguacuaagagguuugauaacccuguccuaccauuuaaugaugguguuuauuuugcuuccacugagaagucuaacauaauaagaggcuggauuuuugguacuacuuuagauucgaagacccagucccuacuuauuguuaauaacgcuacuaauguuguuauuaaagucugugaauuucaauuuuguaaugauccauuuuuggguguuuauuaccacaaaaacaacaaaaguuggauggaaagugaguucagaguuuauucuagugcgaauaauugcacuuuugaauaugucucucagccuuuucuuauggaccuugaaguaaaacaggguaauuucaaaaaucuuagggaauuuguguuuaagaauauugaugguuauuuuaaaauauauucuaagcacacgccuauuaauuuagugcgugaucucccucaggguuuuucggcuuuagaaccauugguagauuugccaauagguauuaacaucacuagguuucaaacuuuacuugcuuuacauagaaguuauuugacuccuggugauucuucuucagguuggacagcuggugcugcagcuuauuauguggguuaucuucaaccuaggacuuuucuauuaaaauauaaugaaaauggaaccauuacagaugcuguagacugugcacuugacccucucucagaaacaaaguguacguugaaauccuucacuguagaaaaaggaaucuaucaaacuucuaacuuuagaguccaaccaacagaaucuauuguuagauuuccuaauauuacaaacuugugcccuuuuggugaaguuuuuaacgccaccagauuugcaucuguuuaugcuuggaacaggaagagaaucagcaacuguguugcugauuauucuguccuauauaauuccgcaucauuuuccacuuuuaaguguuauggagugucuccuacuaaauuaaaugaucucugcuuuacuaaugucuaugcagauucauuuguaauuagaggugaugaagucagacaaaucgcuccagggcaaacuggaaagauugcugauuauaauuauaaauuaccagaugauuuuacaggcugcguuauagcuuggaauucuaacaaucuugauucuaagguuggugguaauuauaauuaccuguauagauuguuuaggaagucuaaucucaaaccuuuugagagagauauuucaacugaaaucuaucaggccgguagcacaccuuguaaugguguugaagguuuuaauuguuacuuuccuuuacaaucauaugguuuccaacccacuaaugguguugguuaccaaccauacagaguaguaguacuuucuuuugaacuucuacaugcaccagcaacuguuuguggaccuaaaaagucuacuaauuugguuaaaaacaaaugugucaauuucaacuucaaugguuuaacaggcacagguguucuuacugagucuaacaaaaaguuucugccuuuccaacaauuuggcagagacauugcugacacuacugaugcuguccgugauccacagacacuugagauucuugacauuacaccauguucuuuugguggugucaguguuauaacaccaggaacaaauacuucuaaccagguugcuguucuuuaucaggauguuaacugcacagaagucccuguugcuauucaugcagaucaacuuacuccuacuuggcguguuuauucuacagguucuaauguuuuucaaacacgugcaggcuguuuaauaggggcugaacaugucaacaacucauaugagugugacauacccauuggugcagguauaugcgcuaguuaucagacucagacuaauucuccucggcgggcacguaguguagcuagucaauccaucauugccuacacuaugucacuuggugcagaaaauucaguugcuuacucuaauaacucuauugccauacccacaaauuuuacuauuaguguuaccacagaaauucuaccagugucuaugaccaagacaucaguagauuguacaauguacauuuguggugauucaacugaaugcagcaaucuuuuguugcaauauggcaguuuuuguacacaauuaaaccgugcuuuaacuggaauagcuguugaacaagacaaaaacacccaagaaguuuuugcacaagucaaacaaauuuacaaaacaccaccaauuaaagauuuuggugguuuuaauuuuucacaaauauuaccagauccaucaaaaccaagcaagaggucauuuauugaagaucuacuuuucaacaaagugacacuugcagaugcuggcuucaucaaacaauauggugauugccuuggugauauugcugcuagagaccucauuugugcacaaaaguuuaacggccuuacuguuuugccaccuuugcucacagaugaaaugauugcucaauacacuucugcacuguuagcggguacaaucacuucugguuggaccuuuggugcaggugcugcauuacaaauaccauuugcuaugcaaauggcuuauagguuuaaugguauuggaguuacacagaauguucucuaugagaaccaaaaauugauugccaaccaauuuaauagugcuauuggcaaaauucaagacucacuuucuuccacagcaagugcacuuggaaaacuucaagauguggucaaccaaaaugcacaagcuuuaaacacgcuuguuaaacaacuuagcuccaauuuuggugcaauuucaaguguuuuaaaugauauccuuucacgucuugacaaaguugaggcugaagugcaaauugauagguugaucacaggcagacuucaaaguuugcagacauaugugacucaacaauuaauuagagcugcagaaaucagagcuucugcuaaucuugcugcuacuaaaaugucagaguguguacuuggacaaucaaaaagaguugauuuuuguggaaagggcuaucaucuuauguccuucccucagucagcaccucaugguguagucuucuugcaugugacuuaugucccugcacaagaaaagaacuucacaacugcuccugccauuugucaugauggaaaagcacacuuuccucgugaaggugucuuuguuucaaauggcacacacugguuuguaacacaaaggaauuuuuaugaaccacaaaucauuacuacagacaacacauuugugucugguaacugugauguuguaauaggaauugucaacaacacaguuuaugauccuuugcaaccugaauuagacucauucaaggaggaguuagauaaauauuuuaagaaucauacaucaccagauguugauuuaggugacaucucuggcauuaaugcuucaguuguaaacauucaaaaagaaauugaccgccucaaugagguugccaagaauuuaaaugaaucucucaucgaucuccaagaacuuggaaaguaugagcaguauauaaaauggccaugguacauuuggcuagguuuuauagcuggcuugauugccauaguaauggugacaauuaugcuuugcuguaugaccaguugcuguaguugucucaagggcuguuguucuuguggauccugcugcaaauuugaugaagacgacucugagccagugcucaaaggagucaaauuacauuacacauaaggacuaguuauaagacugacuagcccgaugggccucccaacgggcccuccuccccuccuugcaccgagauuaauaaaaaaaaaaaaaaaaaaaaaaaaaaaaaaaaaaaaaaaaaaaaaaaaaaaaaaaaaaaaaaaaugcaucccccccccccccccccccccccccccccccaaaggcucuuuucagagccaccagaauu

SEQ ID NO: 12693 - RNA, 4039 nt, Artificial Sequence
  SARS-CoV-2/Hong Kong/case85_VM20002868/2020__EPI_ISL_414519 spike protein mRNA wt (1-1273)
aggagaaagcuuaccauguuuguuuuucuuguuuuagugccacuagucucuagucaguguguuaaucuuacaaccagaacucaauuacccccugcauacacuaauucuuucacacgugguguuuauuacccugacaaaguuuucagauccucaguuuuacauucaacucaggacuuguucuuaccuuucuuuuccaauguuacuugguuccaugcuauacaugucucugggaccaaugguacuaagagguuugauaacccuguccuaccauuuaaugaugguguuuauuuugcuuccacugagaagucuaacauaauaagaggcuggauuuuugguacuacuuuagauucgaagacccagucccuacuuauuguuaauaacgcuacuaauguuguuauuaaagucugugaauuucaauuuuguaaugauccauuuuuggguguuuauuaccacaaaaacaacaaaaguuggauggaaagugaguucagaguuuauucuagugcgaauaauugcacuuuugaauaugucucucagccuuuucuuauggaccuugaaggaaaacaggguaauuucaaaaaucuuagggaauuuguguuuaagaauauugaugguuauuuuaaaauauauucuaagcacacgccuauuaauuuagugcgugaucucccucaggguuuuucggcuuuagaaccauugguagauuugccaauagguauuaacaucacuagguuucaaacuuuacuugcuuuacauagaaguuauuugacuccuggugauucuucuucagguuggacagcuggugcugcagcuuauuauguggguuaucuucaaccuaggacuuuucuauuaaaauauaaugaaaauggaaccauuacagaugcuguagacugugcacuugacccucucucagaaacaaaguguacguugaaauccuucacuguagaaaaaggaaucuaucaaacuucuaacuuuagaguccaaccaacagaaucuauuguuagauuuccuaauauuacaaacuugugcccuuuuggugaaguuuuuaacgccaccagauuugcaucuguuuaugcuuggaacaggaagagaaucagcaacuguguugcugauuauucuguccuauauaauuccgcaucauuuuccacuuuuaaguguuauggagugucuccuacuaaauuaaaugaucucugcuuuacuaaugucuaugcagauucauuuguaauuagaggugaugaagucagacaaaucgcuccagggcaaacuggaaagauugcugauuauaauuauaaauuaccagaugauuuuacaggcugcguuauagcuuggaauucuaacaaucuugauucuaagguuggugguaauuauaauuaccuguauagauuguuuaggaagucuaaucucaaaccuuuugagagagauauuucaacugaaaucuaucaggccgguagcacaccuuguaaugguguugaagguuuuaauuguuacuuuccuuuacaaucauaugguuuccaacccacuaaugguguugguuaccaaccauacagaguaguaguacuuucuuuugaacuucuacaugcaccagcaacuguuuguggaccuaaaaagucuacuaauuugguuaaaaacaaaugugucaauuucaacuucaaugguuuaacaggcacagguguucuuacugagucuaacaaaaaguuucugccuuuccaacaauuuggcagagacauugcugacacuacugaugcuguccgugauccacagacacuugagauucuugacauuacaccauguucuuuugguggugucaguguuauaacaccaggaacaaauacuucuaaccagguugcuguucuuuaucaggauguuaacugcacagaagucccuguugcuauucaugcagaucaacuuacuccuacuuggcguguuuauucuacagguucuaauguuuuucaaacacgugcaggcuguuuaauaggggcugaacaugucaacaacucauaugagugugacauacccauuggugcagguauaugcgcuaguuaucagacucagacuaauucuccucggcgggcacguaguguagcuagucaauccaucauugccuacacuaugucacuuggugcagaaaauucaguugcuuacucuaauaacucuauugccauacccacaaauuuuacuauuaguguuaccacagaaauucuaccagugucuaugaccaagacaucaguagauuguacaauguacauuuguggugauucaacugaaugcagcaaucuuuuguugcaauauggcaguuuuuguacacaauuaaaccgugcuuuaacuggaauagcuguugaacaagacaaaaacacccaagaaguuuuugcacaagucaaacaaauuuacaaaacaccaccaauuaaagauuuuggugguuuuaauuuuucacaaauauuaccagauccaucaaaaccaagcaagaggucauuuauugaagaucuacuuuucaacaaagugacacuugcagaugcuggcuucaucaaacaauauggugauugccuuggugauauugcugcuagagaccucauuugugcacaaaaguuuaacggccuuacuguuuugccaccuuugcucacagaugaaaugauugcucaauacacuucugcacuguuagcggguacaaucacuucugguuggaccuuuggugcaggugcugcauuacaaauaccauuugcuaugcaaauggcuuauagguuuaaugguauuggaguuacacagaauguucucuaugagaaccaaaaauugauugccaaccaauuuaauagugcuauuggcaaaauucaagacucacuuucuuccacagcaagugcacuuggaaaacuucaagauguggucaaccaaaaugcacaagcuuuaaacacgcuuguuaaacaacuuagcuccaauuuuggugcaauuucaaguguuuuaaaugauauccuuucacgucuugacaaaguugaggcugaagugcaaauugauagguugaucacaggcagacuucaaaguuugcagacauaugugacucaacaauuaauuagagcugcagaaaucagagcuucugcuaaucuugcugcuacuaaaaugucagaguguguacuuggacaaucaaaaagaguugauuuuuguggaaagggcuaucaucuuauguccuucccucagucagcaccucaugguguagucuucuugcaugugacuuaugucccugcacaagaaaagaacuucacaacugcuccugccauuugucaugauggaaaagcacacuuuccucgugaaggugucuuuguuucaaauggcacacacugguuuguaacacaaaggaauuuuuaugaaccacaaaucauuacuacagacaacacauuugugucugguaacugugauguuguaauaggaauugucaacaacacaguuuaugauccuuugcaaccugaauuagacucauucaaggaggaguuagauaaauauuuuaagaaucauacaucaccagauguugauuuaggugacaucucuggcauuaaugcuucaguuguaaacauucaaaaagaaauugaccgccucaaugagguugccaagaauuuaaaugaaucucucaucgaucuccaagaacuuggaaaguaugagcaguauauaaaauggccaugguacauuuggcuagguuuuauagcuggcuugauugccauaguaauggugacaauuaugcuuugcuguaugaccaguugcuguaguugucucaagggcuguuguucuuguggauccugcugcaaauuugaugaagacgacucugagccagugcucaaaggagucaaauuacauuacacauaaggacuaguuauaagacugacuagcccgaugggccucccaacgggcccuccuccccuccuugcaccgagauuaauaaaaaaaaaaaaaaaaaaaaaaaaaaaaaaaaaaaaaaaaaaaaaaaaaaaaaaaaaaaaaaaaugcaucccccccccccccccccccccccccccccccaaaggcucuuuucagagccaccagaauu

SEQ ID NO: 12694 - RNA, 4039 nt, Artificial Sequence
  SARS-CoV-2/England/200990660/2020__EPI_ISL_414523 spike protein mRNA wt (1-1273)
aggagaaagcuuaccauguuuguuuuucuuguuuuauugccacuagucucuagucaguguguuaaucuuacaaccagaacucaauuacccccugcauacacuaauucuuucacacgugguguuuauuacccugacaaaguuuucagauccucaguuuuacauucaacucaggacuuguucuuaccuuucuuuuccaauguuacuugguuccaugcuauacaugucucugggaccaaugguacuaagagguuugauaacccuguccuaccauuuaaugaugguguuuauuuugcuuccacugagaagucuaacauaauaagaggcuggauuuuugguacuacuuuagauucgaagacccagucccuacuuauuguuaauaacgcuacuaauguuguuauuaaagucugugaauuucaauuuuguaaugauccauuuuuggguguuuauuaccacaaaaacaacaaaaguuggauggaaagugaguucagaguuuauucuagugcgaauaauugcacuuuugaauaugucucucagccuuuucuuauggaccuugaaggaaaacaggguaauuucaaaaaucuuagggaauuuguguuuaagaauauugaugguuauuuuaaaauauauucuaagcacacgccuauuaauuuagugcgugaucucccucaggguuuuucggcuuuagaaccauugguagauuugccaauagguauuaacaucacuagguuucaaacuuuacuugcuuuacauagaaguuauuugacuccuggugauucuucuucagguuggacagcuggugcugcagcuuauuauguggguuaucuucaaccuaggacuuuucuauuaaaauauaaugaaaauggaaccauuacagaugcuguagacugugcacuugacccucucucagaaacaaaguguacguugaaauccuucacuguagaaaaaggaaucuaucaaacuucuaacuuuagaguccaaccaacagaaucuauuguuagauuuccuaauauuacaaacuugugcccuuuuggugaaguuuuuaacgccaccagauuugcaucuguuuaugcuuggaacaggaagagaaucagcaacuguguugcugauuauucuguccuauauaauuccgcaucauuuuccacuuuuaaguguuauggagugucuccuacuaaauuaaaugaucucugcuuuacuaaugucuaugcagauucauuuguaauuagaggugaugaagucagacaaaucgcuccagggcaaacuggaaagauugcugauuauaauuauaaauuaccagaugauuuuacaggcugcguuauagcuuggaauucuaacaaucuugauucuaagguuggugguaauuauaauuaccuguauagauuguuuaggaagucuaaucucaaaccuuuugagagagauauuucaacugaaaucuaucaggccgguagcacaccuuguaaugguguugaagguuuuaauuguuacuuuccuuuacaaucauaugguuuccaacccacuaaugguguugguuaccaaccauacagaguaguaguacuuucuuuugaacuucuacaugcaccagcaacuguuuguggaccuaaaaagucuacuaauuugguuaaaaacaaaugugucaauuucaacuucaaugguuuaacaggcacagguguucuuacugagucuaacaaaaaguuucugccuuuccaacaauuuggcagagacauugcugacacuacugaugcuguccgugauccacagacacuugagauucuugacauuacaccauguucuuuugguggugucaguguuauaacaccaggaacaaauacuucuaaccagguugcuguucuuuaucaggguguuaacugcacagaagucccuguugcuauucaugcagaucaacuuacuccuacuuggcguguuuauucuacagguucuaauguuuuucaaacacgugcaggcuguuuaauaggggcugaacaugucaacaacucauaugagugugacauacccauuggugcagguauaugcgcuaguuaucagacucagacuaauucuccucggcgggcacguaguguagcuagucaauccaucauugccuacacuaugucacuuggugcagaaaauucaguugcuuacucuaauaacucuauugccauacccacaaauuuuacuauuaguguuaccacagaaauucuaccagugucuaugaccaagacaucaguagauuguacaauguacauuuguggugauucaacugaaugcagcaaucuuuuguugcaauauggcaguuuuuguacacaauuaaaccgugcuuuaacuggaauagcuguugaacaagacaaaaacacccaagaaguuuuugcacaagucaaacaaauuuacaaaacaccaccaauuaaagauuuuggugguuuuaauuuuucacaaauauuaccagauccaucaaaaccaagcaagaggucauuuauugaagaucuacuuuucaacaaagugacacuugcagaugcuggcuucaucaaacaauauggugauugccuuggugauauugcugcuagagaccucauuugugcacaaaaguuuaacggccuuacuguuuugccaccuuugcucacagaugaaaugauugcucaauacacuucugcacuguuagcggguacaaucacuucugguuggaccuuuggugcaggugcugcauuacaaauaccauuugcuaugcaaauggcuuauagguuuaaugguauuggaguuacacagaauguucucuaugagaaccaaaaauugauugccaaccaauuuaauagugcuauuggcaaaauucaagacucacuuucuuccacagcaagugcacuuggaaaacuucaagauguggucaaccaaaaugcacaagcuuuaaacacgcuuguuaaacaacuuagcuccaauuuuggugcaauuucaaguguuuuaaaugauauccuuucacgucuugacaaaguugaggcugaagugcaaauugauagguugaucacaggcagacuucaaaguuugcagacauaugugacucaacaauuaauuagagcugcagaaaucagagcuucugcuaaucuugcugcuacuaaaaugucagaguguguacuuggacaaucaaaaagaguugauuuuuguggaaagggcuaucaucuuauguccuucccucagucagcaccucaugguguagucuucuugcaugugacuuaugucccugcacaagaaaagaacuucacaacugcuccugccauuugucaugauggaaaagcacacuuuccucgugaaggugucuuuguuucaaauggcacacacugguuuguaacacaaaggaauuuuuaugaaccacaaaucauuacuacagacaacacauuugugucugguaacugugauguuguaauaggaauugucaacaacacaguuuaugauccuuugcaaccugaauuagacucauucaaggaggaguuagauaaauauuuuaagaaucauacaucaccagauguugauuuaggugacaucucuggcauuaaugcuucaguuguaaacauucaaaaagaaauugaccgccucaaugagguugccaagaauuuaaaugaaucucucaucgaucuccaagaacuuggaaaguaugagcaguauauaaaauggccaugguacauuuggcuagguuuuauagcuggcuugauugccauaguaauggugacaauuaugcuuugcuguaugaccaguugcuguaguugucucaagggcuguuguucuuguggauccugcugcaaauuugaugaagacgacucugagcuagugcucaaaggagucaaauuacauuacacauaaggacuaguuauaagacugacuagcccgaugggccucccaacgggcccuccuccccuccuugcaccgagauuaauaaaaaaaaaaaaaaaaaaaaaaaaaaaaaaaaaaaaaaaaaaaaaaaaaaaaaaaaaaaaaaaaugcaucccccccccccccccccccccccccccccccaaaggcucuuuucagagccaccagaauu

SEQ ID NO: 12695 - RNA, 4039 nt, Artificial Sequence
  SARS-CoV-2/Australia/NSW09/2020__EPI_ISL_413595 spike protein mRNA wt (1-1273)
aggagaaagcuuaccauguuuguuuuucuuguuuuauugccacuagucucuagucaguguguuaaucuuacaaccagaacucaauuacccccugcauacacuaauucuuucacacgugguguuuauuacccugacaaaguuuucagauccucaguuuuacauucaacucaggacuuguucuuaccuuucuuuuccaauguuacuugguuccaugcuauacaugucucugggaccaaugguacuaagagguuugauaacccuguccuaccauuuaaugaugguguuuauuuugcuuccacugagaagucuaacauaauaagaggcuggauuuuugguacuacuuuagauucgaagacccagucccuacuuauuguuaauaacgcuacuaauguuguuauuaaagucugugaauuucaauuuuguaaugauccauuuuuggguguuuauuaccacaaaaacaacaaaaguuggauggaaagugaguucagaguuuauucuagugcgaauaauugcacuuuugaauaugucucucagccuuuucuuauggaccuugaaggaaaacaggguaauuucaaaaaucuuagggaauuuguguuuaagaauauugaugguuauuuuaaaauauauucuaagcacacgccuauuaauuuagugcgugaucucccucaggguuuuucggcuuuagaaccauugguagauuugccaauagguauuaacaucacuagguuucaaacuuuacuugcuuuacauagaaguuauuugacuccuggugauucuucuucagguuggacagcuggugcugcagcuuauuauguggguuaucuucaaccuaggacuuuucuauuaaaauauaaugaaaauggaaccauuacagaugcuguagacugugcacuugacccucucucagaaacaaaguguacguugaaauccuucacuguagaaaaaggaaucuaucaaacuucuaacuuuagaguccaaccaacagaaucuauuguuagauuuccuaauauuacaaacuugugcccuuuuggugaaguuuuuaacgccaccagauuugcaucuguuuaugcuuggaacaggaagagaaucagcaacuguguugcugauuauucuguccuauauaauuccgcaucauuuuccacuuuuaaguguuauggagugucuccuacuaaauuaaaugaucucugcuuuacuaaugucuaugcagauucauuuguaauuagaggugaugaagucagacaaaucgcuccagggcaaacuggaaagauugcugauuauaauuauaaauuaccagaugauuuuacaggcugcguuauagcuuggaauucuaacaaucuugauucuaagguuggugguaauuauaauuaccuguauagauuguuuaggaagucuaaucucaaaccuuuugagagagauauuucaacugaaaucuaucaggccgguagcacaccuuguaaugguguugaagguuuuaauuguuacuuuccuuuacaaucauaugguuuccaacccacuaaugguguugguuaccaaccauacagaguaguaguacuuucuuuugaacuucuacaugcaccagcaacuguuuguggaccuaaaaagucuacuaauuugguuaaaaacaaaugugucaauuucaacuucaaugguuuaacaggcacagguguucuuacugagucuaacaaaaaguuucugccuuuccaacaauuuggcagagacauugcugacacuacugaugcuguccgugauccacagacacuugagauucuugacauuacaccauguucuuuugguggugucaguguuauaacaccaggaacaaauacuucuaaccagguugcuguucuuuaucaggauguuaacugcacagaagucccuguugcuauucaugcagaucaacuuacuccuacuuggcguguuuauucuacagguucuaauguuuuucaaacacgugcaggcuguuuaauaggggcugaacaugucaacaacucauaugagugugacauacccauuggugcagguauaugcgcuaguuaucagacucagacuaauucuccucggcgggcacguaguguagcuagucaauccaucauugccuacacuaugucacuuggugcagaaaauucaguugcuuacucuaauaacucuauugccauacccacaaauuuuacuauuaguguuaccacagaaauucuaccagugucuaugaccaagacaucaguagauuguacaauguacauuuguggugauucaacugaaugcagcaaucuuuuguugcaauauggcaguuuuuguacacaauuaaaccgugcuuuaacuggaauagcuguugaacaagacaaaaacacccaagaaguuuuugcacaagucaaacaaauuuacaaaacaccaccaauuaaagauuuuggugguuuuaauuuuucacaaauauuaccagauccaucaaaaccaagcaagaggucauuuauugaagaucuacuuuucaacaaagugacacuugcagaugcuggcuucaucaaacaauauggugauugccuuggugauauugcugcuagagaccucauuugugcacaaaaguuuaacggccuuacuguuuugccaccuuugcucacagaugaaaugauugcucaauacacuucugcacuguuagcggguacaaucacuucugguuggaccuuuggugcaggugcugcauuacaaauaccauuugcuaugcaaauggcuuauagguuuaaugguauuggaguuacacagaauguucucuaugagaaccaaaaauugauugccaaccaauuuaauagugcuauuggcaaaauucaagacucacuuucuuucacagcaagugcacuuggaaaacuucaagauguggucaaccaaaaugcacaagcuuuaaacacgcuuguuaaacaacuuagcuccaauuuuggugcaauuucaaguguuuuaaaugauauccuuucacgucuugacaaaguugaggcugaagugcaaauugauagguugaucacaggcagacuucaaaguuugcagacauaugugacucaacaauuaauuagagcugcagaaaucagagcuucugcuaaucuugcugcuacuaaaaugucagaguguguacuuggacaaucaaaaagaguugauuuuuguggaaagggcuaucaucuuauguccuucccucagucagcaccucaugguguagucuucuugcaugugacuuaugucccugcacaagaaaagaacuucacaacugcuccugccauuugucaugauggaaaagcacacuuuccucgugaaggugucuuuguuucaaauggcacacacugguuuguaacacaaaggaauuuuuaugaaccacaaaucauuacuacagacaacacauuugugucugguaacugugauguuguaauaggaauugucaacaacacaguuuaugauccuuugcaaccugaauuagacucauucaaggaggaguuagauaaauauuuuaagaaucauacaucaccagauguugauuuaggugacaucucuggcauuaaugcuucaguuguaaacauucaaaaagaaauugaccgccucaaugagguugccaagaauuuaaaugaaucucucaucgaucuccaagaacuuggaaaguaugagcaguauauaaaauggccaugguacauuuggcuagguuuuauagcuggcuugauugccauaguaauggugacaauuaugcuuugcuguaugaccaguugcuguaguugucucaagggcuguuguucuuguggauccugcugcaaauuugaugaagacgacucugagccagugcucaaaggagucaaauuacauuacacauaaggacuaguuauaagacugacuagcccgaugggccucccaacgggcccuccuccccuccuugcaccgagauuaauaaaaaaaaaaaaaaaaaaaaaaaaaaaaaaaaaaaaaaaaaaaaaaaaaaaaaaaaaaaaaaaaugcaucccccccccccccccccccccccccccccccaaaggcucuuuucagagccaccagaauu

SEQ ID NO: 12696 - RNA, 4039 nt, Artificial Sequence
  SARS-CoV-2/Australia/NSW10/2020__EPI_ISL_413596 spike protein mRNA wt (1-1273)
aggagaaagcuuaccauguuuguuuuucuuguuuuauugccacuagucucuagucaguguguuaaucuuacaaccagaacucaauuacccccugcauacacuaauucuuucacacgugguguuuauuacccugacaaaguuuucagauccucaguuuuacauucaacucaggacuuguucuuaccuuucuuuuccaauguuacuugguuccaugcuauacaugucucugggaccaaugguacuaagagguuugauaacccuguccuaccauuuaaugaugguguuuauuuugcuuccacugagaagucuaacauaauaagaggcuggauuuuugguacuacuuuagauucgaagacccagucccuacuuauuguuaauaacgcuacuaauguuguuauuaaagucugugaauuucaauuuuguaaugauccauuuuuggguguuuauuaccacaaaaacaacaaaaguuggauggaaagugaguucagaguuuauucuagugcgaauaauugcacuuuugaauaugucucucagccuuuucuuauggaccuugaaggaaaacaggguaauuucaaaaaucuuagggaauuuguguuuaagaauauugaugguuauuuuaaaauauauucuaagcacacgccuauuaauuuagugcgugaucucccucaggguuuuucggcuuuagaaccauugguagauuugccaauagguauuaacaucacuagguuucaaacuuuacuugcuuuacauagaaguuauuugacuccuggugauucuucuucagguuggacagcuggugcugcagcuuauuauguggguuaucuucaaccuaggacuuuucuauuaaaauauaaugaaaauggaaccauuacagaugcuguagacugugcacuugacccucucucagaaacaaaguguacguugaaauccuucacuguagaaaaaggaaucuaucaaacuucuaacuuuagaguccaaccaacagaaucuauuguuagauuuccuaauauuacaaacuugugcccuuuuggugaaguuuuuaacgccaccagauuugcaucuguuuaugcuuggaacaggaagagaaucagcaacuguguugcugauuauucuguccuauauaauuccgcaucauuuuccacuuuuaaguguuauggagugucuccuacuaaauuaaaugaucucugcuuuacuaaugucuaugcagauucauuuguaauuagaggugaugaagucagacaaaucgcuccagggcaaacuggaaagauugcugauuauaauuauaaauuaccagaugauuuuacaggcugcguuauagcuuggaauucuaacaaucuugauucuaagguuggugguaauuauaauuaccuguauagauuguuuaggaagucuaaucucaaaccuuuugagagagauauuucaacugaaaucuaucaggccgguagcacaccuuguaaugguguugaagguuuuaauuguuacuuuccuuuacaaucauaugguuuccaacccacuaaugguguugguuaccaaccauacagaguaguaguacuuucuuuugaacuucuacaugcaccagcaacuguuuguggaccuaaaaagucuacuaauuugguuaaaaacaaaugugucaauuucaacuucaaugguuuaacaggcacagguguucuuacugagucuaacaaaaaguuucugccuuuccaacaauuuggcagagacauugcugacacuacugaugcuguccgugauccacagacacuugagauucuugacauuacaccauguucuuuugguggugucaguguuauaacaccaggaacaaauacuucuaaccagguugcuguucuuuaucaggauguuaacugcacagaagucccuguugcuauucaugcagaucaacuuacuccuacuuggcguguuuauucuacagguucuaauguuuuucaaacacgugcaggcuguuuaauaggggcugaacaugucaacaacucauaugagugugacauacccauuggugcagguauaugcgcuaguuaucagacucagacuaauucuccucggcgggcacguaguguagcuagucaauccaucauugccuacacuaugucacuuggugcagaaaauucaguugcuuacucuaauaacucuauugccauacccacaaauuuuacuauuaguguuaccacagaaauucuaccagugucuaugaccaagacaucaguagauuguacaauguacauuuguggugauucaacugaaugcagcaaucuuuuguugcaauauggcaguuuuuguacacaauuaaaccgugcuuuaacuggaauagcuguugaacaagacaaaaacacccaagaaguuuuugcacaagucaaacaaauuuacaaaacaccaccaauuaaagauuuuggugguuuuaauuuuucacaaauauuaccagauccaucaaaaccaagcaagaggucauuuauugaagaucuacuuuucaacaaagugacacuugcagaugcuggcuucaucaaacaauauggugauugccuuggugauauugcugcuagagaccucauuugugcacaaaaguuuaacggccuuacuguuuugccaccuuugcucacagaugaaaugauugcucaauacacuucugcacuguuagcggguacaaucacuucugguuggaccuuuggugcaggugcugcauuacaaauaccauuugcuaugcaaauggcuuauagguuuaaugguauuggaguuacacagaauguucucuaugagaaccaaaaauugauugccaaccaauuuaauagugcuauuggcaaaauucaagacucacuuucuuccacagcaagugcacuuggaaaacuucaagauguggucaaccaaaaugcacaagcuuuaaacacgcuuguuaaacaacuuagcuccaauuuuggugcaauuucaaguguuuuaaaugauauccuuucacgucuugacaaaguugaggcugaagugcaaauugauagguugaucacaggcagacuucaaaguuugcagacauaugugacucaacaauuaauuagagcugcagaaaucagagcuucugcuaaucuugcugcuacuaaaaugucagaguguguacuuggacaaucaaaaagaguugauuuuuguggaaagggcuaucaucuuauguccuucccucagucagcaccucaugguguagucuucuugcaugugacuuaugucccugcacaagaaaagaacuucacaacugcuccugccauuugucaugauggaaaagcacacuuuccucgugaaggugucuuuguuucaaauggcacacacugguuuguaacacaaaggaauuuuuaugaaccacaaaucauuacuacagacaacacauuugugucugguaacugugauguuguaauaggaauugucaacaacacaguuuaugauccuuugcaaccugaauuagacucauucaaggaggaguuagauaaauauuuuaagaaucauacaucaccagauguugauuuaggugacaucucuggcauuaaugcuucaguuguaaacauucaaaaagaaauugaccgccucaaugagguugccaagaauuuaaaugaaucucucaucgaucuccaagaacuuggaaaguaugagcaguauauaaaauggccaugguacauuuggcuagguuuuauagcuggcuugauugccauaguaauggugacaauuaugcuuugcuguaugaccaguugcuguaguugucucaagggcuguuguucuuguggauccugcuucaaauuugaugaagacgacucugagccagugcucaaaggagucaaauuacauuacacauaaggacuaguuauaagacugacuagcccgaugggccucccaacgggcccuccuccccuccuugcaccgagauuaauaaaaaaaaaaaaaaaaaaaaaaaaaaaaaaaaaaaaaaaaaaaaaaaaaaaaaaaaaaaaaaaaugcaucccccccccccccccccccccccccccccccaaaggcucuuuucagagccaccagaauu

SEQ ID NO: 12697 - RNA, 4039 nt, Artificial Sequence
  SARS-CoV-2/Switzerland/1000477797/2020__EPI_ISL_413023 spike protein mRNA wt (1-1273)
aggagaaagcuuaccauguuuguuuuucuuguuuuauugccacuagucucuagucaguguguuaaucuuacaaccagaacucaauuacccccugcauacacuaauucuuucacacgugguguuuauuacccugacaaaguuuucagauccucaguuuuacauucaacucaggacuuguucuuaccuuucuuuuccaauguuacuugguuccaugcuauacaugucucugggaccaaugguacuaagagguuugauaacccuguccuaccauuuaaugaugguguuuauuuugcuuccacugagaagucuaacauaauaagaggcuggauuuuugguacuacuuuagauucgaagacccagucccuacuuauuguuaauaacgcuacuaauguuguuauuaaagucugugaauuucaauuuuguaaugauccauuuuuggguguuuauuaccacaaaaacaacaaaaguuggauggaaagugaguucagaguuuauucuagugcgaauaauugcacuuuugaauaugucucucagccuuuucuuauggaccuugaaggaaaacaggguaauuucaaaaaucuuagggaauuuguguuuaagaauauugaugguuauuuuaacauauauucuaagcacacgccuauuaauuuagugcgugaucucccucaggguuuuucggcuuuagaaccauugguagauuugccaauagguauuaacaucacuagguuucaaacuuuacuugcuuuacauagaaguuauuugacuccuggugauucuucuucagguuggacagcuggugcugcagcuuauuauguggguuaucuucaaccuaggacuuuucuauuaaaauauaaugaaaauggaaccauuacagaugcuguagacugugcacuugacccucucucagaaacaaaguguacguugaaauccuucacuguagaaaaaggaaucuaucaaacuucuaacuuuagaguccaaccaacagaaucuauuguuagauuuccuaauauuacaaacuugugcccuuuuggugaaguuuuuaacgccaccagauuugcaucuguuuaugcuuggaacaggaagagaaucagcaacuguguugcugauuauucuguccuauauaauuccgcaucauuuuccacuuuuaaguguuauggagugucuccuacuaaauuaaaugaucucugcuuuacuaaugucuaugcagauucauuuguaauuagaggugaugaagucagacaaaucgcuccagggcaaacuggaaagauugcugauuauaauuauaaauuaccagaugauuuuacaggcugcguuauagcuuggaauucuaacaaucuugauucuaagguuggugguaauuauaauuaccuguauagauuguuuaggaagucuaaucucaaaccuuuugagagagauauuucaacugaaaucuaucaggccgguagcacaccuuguaaugguguugaagguuuuaauuguuacuuuccuuuacaaucauaugguuuccaacccacuaaugguguugguuaccaaccauacagaguaguaguacuuucuuuugaacuucuacaugcaccagcaacuguuuguggaccuaaaaagucuacuaauuugguuaaaaacaaaugugucaauuucaacuucaaugguuuaacaggcacagguguucuuacugagucuaacaaaaaguuucugccuuuccaacaauuuggcagagacauugcugacacuacugaugcuguccgugauccacagacacuugagauucuugacauuacaccauguucuuuugguggugucaguguuauaacaccaggaacaaauacuucuaaccagguugcuguucuuuaucaggguguuaacugcacagaagucccuguugcuauucaugcagaucaacuuacuccuacuuggcguguuuauucuacagguucuaauguuuuucaaacacgugcaggcuguuuaauaggggcugaacaugucaacaacucauaugagugugacauacccauuggugcagguauaugcgcuaguuaucagacucagacuaauucuccucggcgggcacguaguguagcuagucaauccaucauugccuacacuaugucacuuggugcagaaaauucaguugcuuacucuaauaacucuauugccauacccacaaauuuuacuauuaguguuaccacagaaauucuaccagugucuaugaccaagacaucaguagauuguacaauguacauuuguggugauucaacugaaugcagcaaucuuuuguugcaauauggcaguuuuuguacacaauuaaaccgugcuuuaacuggaauagcuguugaacaagacaaaaacacccaagaaguuuuugcacaagucaaacaaauuuacaaaacaccaccaauuaaagauuuuggugguuuuaauuuuucacaaauauuaccagauccaucaaaaccaagcaagaggucauuuauugaagaucuacuuuucaacaaagugacacuugcagaugcuggcuucaucaaacaauauggugauugccuuggugauauugcugcuagagaccucauuugugcacaaaaguuuaacggccuuacuguuuugccaccuuugcucacagaugaaaugauugcucaauacacuucugcacuguuagcggguacaaucacuucugguuggaccuuuggugcaggugcugcauuacaaauaccauuugcuaugcaaauggcuuauagguuuaaugguauuggaguuacacagaauguucucuaugagaaccaaaaauugauugccaaccaauuuaauagugcuauuggcaaaauucaagacucacuuucuuccacagcaagugcacuuggaaaacuucaagauguggucaaccaaaaugcacaagcuuuaaacacgcuuguuaaacaacuuagcuccaauuuuggugcaauuucaaguguuuuaaaugauauccuuucacgucuugacaaaguugaggcugaagugcaaauugauagguugaucacaggcagacuucaaaguuugcagacauaugugacucaacaauuaauuagagcugcagaaaucagagcuucugcuaaucuugcugcuacuaaaaugucagaguguguacuuggacaaucaaaaagaguugauuuuuguggaaagggcuaucaucuuauguccuucccucagucagcaccucaugguguagucuucuugcaugugacuuaugucccugcacaagaaaagaacuucacaacugcuccugccauuugucaugauggaaaagcacacuuuccucgugaaggugucuuuguuucaaauggcacacacugguuuguaacacaaaggaauuuuuaugaaccacaaaucauuacuacagacaacacauuugugucugguaacugugauguuguaauaggaauugucaacaacacaguuuaugauccuuugcaaccugaauuagacucauucaaggaggaguuagauaaauauuuuaagaaucauacaucaccagauguugauuuaggugacaucucuggcauuaaugcuucaguuguaaacauucaaaaagaaauugaccgccucaaugagguugccaagaauuuaaaugaaucucucaucgaucuccaagaacuuggaaaguaugagcaguauauaaaauggccaugguacauuuggcuagguuuuauagcuggcuugauugccauaguaauggugacaauuaugcuuugcuguaugaccaguugcuguaguugucucaagggcuguuguucuuguggauccugcugcaaauuugaugaagacgacucugagccagugcucaaaggagucaaauuacauuacacauaaggacuaguuauaagacugacuagcccgaugggccucccaacgggcccuccuccccuccuugcaccgagauuaauaaaaaaaaaaaaaaaaaaaaaaaaaaaaaaaaaaaaaaaaaaaaaaaaaaaaaaaaaaaaaaaaugcaucccccccccccccccccccccccccccccccaaaggcucuuuucagagccaccagaauu

SEQ ID NO: 12698 - RNA, 4039 nt, Artificial Sequence
  SARS-CoV-2/Belgium/BA-02291/2020__EPI_ISL_415159 spike protein mRNA wt (1-1273)
aggagaaagcuuaccauguuuguuuuucuuguuuuauugccacuagucucuagucaguguguuaaucuuacaaccagaacucaauuacccccugcauacacuaauucuuucacacgugguguuuauuacccugacaaaguuuucagauccucaguuuuacauucaacucaggacuuguucuuaccuuucuuuuccaauguuacuugguuccaugcuauacaugucucugggaccaaugguacuaagagguuugauaacccuguccuaccauuuaaugaugguguuuauuuugcuuccacugagaagucuaacauaauaagaggcuggauuuuugguacuacuuuagauucgaagacccagucccuacuuauuguuaauaacgcuacuaauguuguuauuaaagucugugaauuucaauuuuguaaugauccauuuuuggguguuuauuaccacaaaaacaacaaaaguuggauggaaagugaguucagaguuuauucuagugcgaauaauugcacuuuugaauaugucucucagccuuuucuuauggaccuugaaggaaaacaggguaauuucaaaaaucuuagggaauuuguguuuaagaauauugaugguuauuuuaaaauauauucuaagcacacgccuauuaauuuagugcgugaucucccucaggguuuuucggcuuuagaaccauugguagauuugccaauagguauuaacaucacuagguuucaaacuuuacuugcuuuacauagaaguuauuugacuccuggugauucuucuucagguuggacagcuggugcugcagcuuauuauguggguuaucuucaaccuaggacuuuucuauuaaaauauaaugaaaauggaaccauuacagaugcuguagacugugcacuugacccucucucagaaacaaaguguacguugaaauccuucacuguagaaaaaggaaucuaucaaacuucuaacuuuagaguccaaccaacagaaucuauuguuagauuuccuaauauuacaaacuugugcccuuuuggugaaguuuuuaacgccaccagauuugcaucuguuuaugcuuggaacaggaagagaaucagcaacuguguugcugauuauucuguccuauauaauuccgcaucauuuuccacuuuuaaguguuauggagugucuccuacuaaauuaaaugaucucugcuuuacuaaugucuaugcagauucauuuguaauuagaggugaugaagucagacaaaucgcuccagggcaaacuggaaagauugcugauuauaauuauaaauuaccagaugauuuuacaggcugcguuauagcuuggaauucuaacaaucuugauucuaagguuggugguaauuauaauuaccuguauagauuguuuaggaggucuaaucucaaaccuuuugagagagauauuucaacugaaaucuaucaggccgguagcacaccuuguaaugguguugaagguuuuaauuguuacuuuccuuuacaaucauaugguuuccaacccacuaaugguguugguuaccaaccauacagaguaguaguacuuucuuuugaacuucuaccugcaccagcaacuguuuguggaccuaaaaagucuacuaauuugguuaaaaacaaaugugucaauuucaacuucaaugguuuaacaggcacagguguucuuacugagucuaacaaaaaguuucugccuuuccaacaauuuggcagagacauugcugacacuacugaugcuguccgugauccacagacacuugagauucuugacauuacaccauguucuuuugguggugucaguguuauaacaccaggaacaaauacuucuaaccagguugcuguucuuuaucaggguguuaacugcacagaagucccuguugcuauucaugcagaucaacuuacuccuacuuggcguguuuauucuacagguucuaauguuuuucaaacacgugcaggcuguuuaauaggggcugaacaugucaacaacucauaugagugugacauacccauuggugcagguauaugcgcuaguuaucagacucagacuaauucuccucggcgggcacguaguguagcuagucaauccaucauugccuacacuaugucacuuggugcagaaaauucaguugcuuacucuaauaacucuauugccauacccacaaauuuuacuauuaguguuaccacagaaauucuaccagugucuaugaccaagacaucaguagauuguacaauguacauuuguggugauucaacugaaugcagcaaucuuuuguugcaauauggcaguuuuuguacacaauuaaaccgugcuuuaacuggaauagcuguugaacaagacaaaaacacccaagaaguuuuugcacaagucaaacaaauuuacaaaacaccaccaauuaaagauuuuggugguuuuaauuuuucacaaauauuaccagauccaucaaaaccaagcaagaggucauuuauugaagaucuacuuuucaacaaagugacacuugcagaugcuggcuucaucaaacaauauggugauugccuuggugauauugcugcuagagaccucauuugugcacaaaaguuuaacggccuuacuguuuugccaccuuugcucacagaugaaaugauugcucaauacacuucugcacuguuagcggguacaaucacuucugguuggaccuuuggugcaggugcugcauuacaaauaccauuugcuaugcaaauggcuuauagguuuaaugguauuggaguuacacagaauguucucuaugagaaccaaaaauugauugccaaccaauuuaauagugcuauuggcaaaauucaagacucacuuucuucugcagcaccugcacuuggaaaacuucaagauguggucaaccaaaaugcacaagcuuuaaacacgcuuguuaaacaacuuagcuccaauuuuggugcaauuucaaguguuuuaaaugauauccuuucacgucuugacaaaguugaggcugaagugcaaauugauagguugaucacaggcagacuucaaaguuugcagacauaugugacucaacaauuaauuagagcugcagaaaucagagcuucugcuaaucuugcugcuacuaaaaugucagaguguguacuuggacaaucaaaaagaguugauuuuuguggaaagggcuaucaucuuauguccuucccucagucagcaccucaugguguagucuucuugcaugugacuuaugucccugcacaagaaaagaacuucacaacugcuccugccauuugucaugauggaaaagcacacuuuccucgugaaggugucuuuguuucaaauggcacacacugguuuguaacacaaaggaauuuuuaugaaccacaaaucauuacuacagacaacacauuugugucugguaacugugauguuguaauaggaauugucaacaacacaguuuaugauccuuugcaaccugaauuagacucauucaaggaggaguuagauaaauauuuuaagaaucauacaucaccagauguugauuuaggugacaucucuggcauuaaugcuucaguuguaaacauucaaaaagaaauugaccgccucaaugagguugccaagaauuuaaaugaaucucucaucgaucuccaagaacuuggaaaguaugagcaguauauaaaauggccaugguacauuuggcuagguuuuauagcuggcuugauugccauaguaauggugacaauuaugcuuugcuguaugaccaguugcuguaguugucucaagggcuguuguucuuguggauccugcugcaaauuugaugaagacgacucugagccagugcucaaaggagucaaauuacauuacacauaaggacuaguuauaagacugacuagcccgaugggccucccaacgggcccuccuccccuccuugcaccgagauuaauaaaaaaaaaaaaaaaaaaaaaaaaaaaaaaaaaaaaaaaaaaaaaaaaaaaaaaaaaaaaaaaaugcaucccccccccccccccccccccccccccccccaaaggcucuuuucagagccaccagaauu

SEQ ID NO: 12699 - RNA, 4039 nt, Artificial Sequence
  SARS-CoV-2/USA/WA8-UW5/2020__EPI_ISL_413486 spike protein mRNA wt (1-1273)
aggagaaagcuuaccauguuuguuuuucuuguuuuauugccacuagucucuagucaguguguuaaucuuacaaccagaacucaauuacccccugcauacacuaauucuuucacacgugguguuuauuacccugacaaaguuuucagauccucaguuuuacauucaacucaggacuuguucuuaccuuucuuuuccaauguuacuugguuccaugcuauacaugucucugggaccaaugguacuaagagguuugauaacccuguccuaccauuuaaugaugguguuuauuuugcuuccacugagaagucuaacauaauaagaggcuggauuuuugguacuacuuuagauucgaagacccagucccuacuuauuguuaauaacgcuacuaauguuguuauuaaagucugugaauuucaauuuuguaaugauccauuuuuggguguuuauuaccacaaaaacaacaaaaguuggauggaaagugaguucagaguuuauucuagugcgaauaauugcacuuuugaauaugucucucagccuuuucuuauggaccuugaaggaaaacaggguaauuucaaaaaucuuagggaauuuguguuuaagaauauugaugguuauuuuaaaauauauucuaagcacacgccuauuaauuuagugcgugaucucccucaggguuuuucggcuuuagaaccauugguagauuugccaauagguauuaacaucacuagguuucaaacuuuacuugcuuuacauagaaguuauuugacuccuggugauucuucuucagguuggacagcuggugcugcagcuuauuauguggguuaucuucaaccuaggacuuuucuauuaaaauauaaugaaaauggaaccauuacagaugcuguagacugugcacuugacccucucucagaaacaaaguguacguugaaauccuucacuguagaaaaaggaaucuaucaaacuucuaacuuuagaguccaaccaacagaaucuauuguuagauuuccuaauauuacaaacuugugcccuuuuggugaaguuuuuaacgccaccagauuugcaucuguuuaugcuuggaacaggaagagaaucagcaacuguguugcugauuauucuguccuauauaauuccgcaucauuuuccacuuuuaaguguuauggagugucuccuacuaaauuaaaugaucucugcuuuacuaaugucuaugcagauucauuuguaauuagaggugaugaagucagacaaaucgcuccagggcaaacuggaaagauugcugauuauaauuauaaauuaccagaugauuuuacaggcugcguuauagcuuggaauucuaacaaucuugauucuaagguuggugguaauuauaauuaccuguauagauuguuuaggaagucuaaucucaaaccuuuugagagagauauuucaacugaaaucuaucaggccgguagcacaccuuguaaugguguugaagguuuuaauuguuacuuuccuuuacaaucauaugguuuccaacccacuaaugguguugguuaccaaccauacagaguaguaguacuuucuuuugaacuucuacaugcaccagcaacuguuuguggaccuaaaaagucuacuaauuugguuaaaaacaaaugugucaauuucaacuucaaugguuuaacaggcacagguguucuuacugagucuaacaaaaaguuucugccuuuccaacaauuuggcagagacauugcugacacuacugaugcuguccgugauccacagacacuugagauucuugacauuacaccauguucuuuugguggugucaguguuauaacaccaggaacaaauacuucuaaccagguugcuguucuuuaucaggauguuaacugcacagaagucccuguugcuauucaugcagaucaacuuacuccuacuuggcguguuuauucuacagguucuaauguuuuucaaacacgugcaggcuguuuaauaggggcugaauaugucaacaacucauaugagugugacauacccauuggugcagguauaugcgcuaguuaucagacucagacuaauucuccucggcgggcacguaguguagcuagucaauccaucauugccuacacuaugucacuuggugcagaaaauucaguugcuuacucuaauaacucuauugccauacccacaaauuuuacuauuaguguuaccacagaaauucuaccagugucuaugaccaagacaucaguagauuguacaauguacauuuguggugauucaacugaaugcagcaaucuuuuguugcaauauggcaguuuuuguacacaauuaaaccgugcuuuaacuggaauagcuguugaacaagacaaaaacacccaagaaguuuuugcacaagucaaacaaauuuacaaaacaccaccaauuaaagauuuuggugguuuuaauuuuucacaaauauuaccagauccaucaaaaccaagcaagaggucauuuauugaagaucuacuuuucaacaaagugacacuugcagaugcuggcuucaucaaacaauauggugauugccuuggugauauugcugcuagagaccucauuugugcacaaaaguuuaacggccuuacuguuuugccaccuuugcucacagaugaaaugauugcucaauacacuucugcacuguuagcggguacaaucacuucugguuggaccuuuggugcaggugcugcauuacaaauaccauuugcuaugcaaauggcuuauagguuuaaugguauuggaguuacacagaauguucucuaugagaaccaaaaauugauugccaaccaauuuaauagugcuauuggcaaaauucaagacucacuuucuuccacagcaagugcacuuggaaaacuucaagauguggucaaccaaaaugcacaagcuuuaaacacgcuuguuaaacaacuuagcuccaauuuuggugcaauuucaaguguuuuaaaugauauccuuucacgucuugacaaaguugaggcugaagugcaaauugauagguugaucacaggcagacuucaaaguuugcagacauaugugacucaacaauuaauuagagcugcagaaaucagagcuucugcuaaucuugcugcuacuaaaaugucagaguguguacuuggacaaucaaaaagaguugauuuuuguggaaagggcuaucaucuuauguccuucccucagucagcaccucaugguguagucuucuugcaugugacuuaugucccugcacaagaaaagaacuucacaacugcuccugccauuugucaugauggaaaagcacacuuuccucgugaaggugucuuuguuucaaauggcacacacugguuuguaacacaaaggaauuuuuaugaaccacaaaucauuacuacagacaacacauuugugucugguaacugugauguuguaauaggaauugucaacaacacaguuuaugauccuuugcaaccugaauuagacucauucaaggaggaguuagauaaauauuuuaagaaucauacaucaccagauguugauuuaggugacaucucuggcauuaaugcuucaguuguaaacauucaaaaagaaauugaccgccucaaugagguugccaagaauuuaaaugaaucucucaucgaucuccaagaacuuggaaaguaugagcaguauauaaaauggccaugguacauuuggcuagguuuuauagcuggcuugauugccauaguaauggugacaauuaugcuuugcuguaugaccaguugcuguaguugucucaagggcuguuguucuuguggauccugcugcaaauuugaugaagacgacucugagccagugcucaaaggagucaaauuacauuacacauaaggacuaguuauaagacugacuagcccgaugggccucccaacgggcccuccuccccuccuugcaccgagauuaauaaaaaaaaaaaaaaaaaaaaaaaaaaaaaaaaaaaaaaaaaaaaaaaaaaaaaaaaaaaaaaaaugcaucccccccccccccccccccccccccccccccaaaggcucuuuucagagccaccagaauu

SEQ ID NO: 12700 - RNA, 4039 nt, Artificial Sequence
  SARS-CoV-2/England/20102000506/2020__EPI_ISL_415147 spike protein mRNA wt (1-1273)
aggagaaagcuuaccauguuuguuuuucuuguuuuauugccacuagucucuagucaguguguuaaucuuacaaccagaacucaauuacccccugcauacacuaauucuuucacacgugguguuuauuacccugacaaaguuuucagauccucaguuuuacauucaacucaggacuuguucuuaccuuucuuuuccaauguuacuugguuccaugcuauacaugucucugggaccaaugguacuaagagguuugauaacccuguccuaccauuuaaugaugguguuuauuuugcuuccacugagaagucuaacauaauaagaggcuggauuuuugguacuacuuuagauucgaagacccagucccuacuuauuguuaauaacgcuacuaauguuguuauuaaagucugugaauuucaauuuuguaaugauccauuuuuggguguuuauuaccacaaaaacaacaaaaguuggauggaaagugaguucagaguuuauucuagugcgaauaauugcacuuuugaauaugucucucagccuuuucuuauggaccuugaaggaaaacaggguaauuucaaaaaucuuagggaauuuguguuuaagaauauugaugguuauuuuaaaauauauucuaagcacacgccuauuaauuuagugcgugaucucccucaggguuuuucggcuuuagaaccauugguagauuugccaauagguauuaacaucacuagguuucaaacuuuacuugcuuuacauagaaguuauuugacuccuggugauucuucuucagguuggacagcuggugcugcagcuuauuauguggguuaucuucaaccuaggacuuuucuauuaaaauauaaugaaaauggaaccauuacagaugcuguagacugugcacuugacccucucucagaaacaaaguguacguugaaauccuucacuguagaaaaaggaaucuaucaaacuucuaacuuuagaguccaaccaacagaaucuauuguuagauuuccuaauauuacaaacuugugcccuuuuggugaaguuuuuaacgccaccagauuugcaucuguuuaugcuuggaacaggaagagaaucagcaacuguguugcugauuauucuguccuauauaauuccgcaucauuuuccacuuuuaaguguuauggagugucuccuacuaaauuaaaugaucucugcuuuacuaaugucuaugcagauucauuuguaauuagaggugaugaagucagacaaaucgcuccagggcaaacuggaaagauugcugauuauaauuauaaauuaccagaugauuuuacaggcugcguuauagcuuggaauucuaacaaucuugauucuaagguuggugguaauuauaauuaccuguauagauuguuuaggaagucuaaucucaaaccuuuugagagagauauuucaacugaaaucuaucaggccgguagcacaccuuguaaugguguugaagguuuuaauuguuacuuuccuuuacaaucauaugguuuccaacccacuaaugguguugguuaccaaccauacagaguaguaguacuuucuuuugaacuucuacaugcaccagcaacuguuuguggaccuaaaaagucuacuaauuugguuaaaaacaaaugugucaauuucaacuucaaugguuuaacaggcacagguguucuuacugagucuaacaaaaaguuucugccuuuccaacaauuuggcagagacauugcugacacuacugaugcuguccgugauccacagacacuugagauucuugacauuacaccauguucuuuugguggugucaguguuauaacaccaggaacaaauacuucuaaccagguugcuguucuuuaucaggguguuaacugcacagaagucccuguugcuauucaugcagaucaacuuacuccuacuuggcguguuuauucuacagguucuaauguuuuucaaacacgugcaggcuguuuaauaggggcugaacaugucaacaacucauaugagugugacauacccauuggugcagguauaugcgcuaguuaucagacucagacuaauucuccucggcgggcacguaguguagcuagucaauccaucauugccuacacuaugucacuuggugcagaaaauucaguugcuuacucuaauaacucuauugccauacccacaaauuuuacuauuaguguuaccacagaaauucuaccagugucuaugaccaagacaucaguagauuguacaauguacauuuguggugauucaacugaaugcagcaaucuuuuguugcaauauggcaguuuuuguacacaauuaaaccgugcuuuaacuggaauagcuguugaacaagacaaaaacacccaagaaguuuuugcacaagucaaacaaauuuacaaaacaccaccaauuaaagauuuuggugguuuuaauuuuucacaaauauuaccagauccaucaaaaccaagcaagaggucauuuauugaagaucuacuuuucaacaaagugacacuugcagaugcuggcuucaucaaacaauaugguuauugccuuggugauauugcugcuagagaccucauuugugcacaaaaguuuaacggccuuacuguuuugccaccuuugcucacagaugaaaugauugcucaauacacuucugcacuguuagcggguacaaucacuucugguuggaccuuuggugcaggugcugcauuacaaauaccauuugcuaugcaaauggcuuauagguuuaaugguauuggaguuacacagaauguucucuaugagaaccaaaaauugauugccaaccaauuuaauagugcuauuggcaaaauucaagacucacuuucuuccacagcaagugcacuuggaaaacuucaagauguggucaaccaaaaugcacaagcuuuaaacacgcuuguuaaacaacuuagcuccaauuuuggugcaauuucaaguguuuuaaaugauauccuuucacgucuugacaaaguugaggcugaagugcaaauugauagguugaucacaggcagacuucaaaguuugcagacauaugugacucaacaauuaauuagagcugcagaaaucagagcuucugcuaaucuugcugcuacuaaaaugucagaguguguacuuggacaaucaaaaagaguugauuuuuguggaaagggcuaucaucuuauguccuucccucagucagcaccucaugguguagucuucuugcaugugacuuaugucccugcacaagaaaagaacuucacaacugcuccugccauuugucaugauggaaaagcacacuuuccucgugaaggugucuuuguuucaaauggcacacacugguuuguaacacaaaggaauuuuuaugaaccacaaaucauuacuacagacaacacauuugugucugguaacugugauguuguaauaggaauugucaacaacacaguuuaugauccuuugcaaccugaauuagacucauucaaggaggaguuagauaaauauuuuaagaaucauacaucaccagauguugauuuaggugacaucucuggcauuaaugcuucaguuguaaacauucaaaaagaaauugaccgccucaaugagguugccaagaauuuaaaugaaucucucaucgaucuccaagaacuuggaaaguaugagcaguauauaaaauggccaugguacauuuggcuagguuuuauagcuggcuugauugccauaguaauggugacaauuaugcuuugcuguaugaccaguugcuguaguugucucaagggcuguuguucuuguggauccugcugcaaauuugaugaagacgacucugagccagugcucaaaggagucaaauuacauuacacauaaggacuaguuauaagacugacuagcccgaugggccucccaacgggcccuccuccccuccuugcaccgagauuaauaaaaaaaaaaaaaaaaaaaaaaaaaaaaaaaaaaaaaaaaaaaaaaaaaaaaaaaaaaaaaaaaugcaucccccccccccccccccccccccccccccccaaaggcucuuuucagagccaccagaauu

SEQ ID NO: 12701 - RNA, 4039 nt, Artificial Sequence
  SARS-CoV-2/Belgium/VAG-03013/2020__EPI_ISL_415155 spike protein mRNA wt (1-1273)
aggagaaagcuuaccauguuuguuuuucuuguuuuauugccacuagucucuagucaguguguuaaucuuacaaccagaacucaauuacccccugcauacacuaauucuuucacacgugguguuuauuacccugacaaaguuuucagauccucaguuuuacauucaacucaggacuuguucuuaccuuucuuuuccaauguuacuugguuccaugcuauacaugucucugggaccaaugguacuaagagguuugauaacccuguccuaccauuuaaugaugguguuuauuuugcuuccacugagaagucuaacauaauaagaggcuggauuuuugguacuacuuuagauucgaagacccagucccuacuuauuguuaauaacgcuacuaauguuguuauuaaagucugugaauuucaauuuuguaaugauccauuuuuggguguuuauuaccacaaaaacaacaaaaguuggauggaaagugaguucagaguuuauucuagugcgaauaauugcacuuuugaauaugucucucagccuuuucuuauggaccuugaaggaaaacaggguaauuucaaaaaucuuagggaauuuguguuuaagaauauugaugguuauuuuaaaauauauucuaagcacacgccuauuaauuuagugcgugaucucccucaggguuuuucggcuuuagaaccauugguagauuugccaauagguauuaacaucacuagguuucaaacuuuacuugcuuuacauagaaguuauuugacuccuggugauucuucuucagguuggacagcuggugcugcagcuuauuauguggguuaucuucaaccuaggacuuuucuauuaaaauauaaugaaaauggaaccauuacagaugcuguagacugugcacuugacccucucucagaaacaaaguguacguugaaauccuucacuguagaaaaaggaaucuaucaaacuucuaacuuuagaguccaaccaacagaaucuauuguuagauuuccuaauauuacaaacuugugcccuuuuggugaaguuuuuaacgccaccagauuugcaucuguuuaugcuuggaacaggaagagaaucagcaacuguguugcugauuauucuguccuauauaauuccgcaucauuuuccacuuuuaaguguuauggagugucuccuacuaaauuaaaugaucucugcuuuacuaaugucuaugcagauucauuuguaauuagaggugaugaagucagacaaaucgcuccagggcaaacuggaaagauugcugauuauaauuauaaauuaccagaugauuuuacaggcugcguuauagcuuggaauucuaacaaucuugauucuaagguuggugguaauuauaauuaccuguauagauuguuuaggaagucuaaucucaaaccuuuugagagagauauuucaacugaaaucuaucaggccgguagcacaccuuguaaugguguugaagguuuuaauuguuacuuuccuuuacaaucauaugguuuccaacccacuaaugguguugguuaccaaccauacagaguaguaguacuuucuuuugaacuucuacaugcaccagcaacuguuuguggaccuaaaaagucuacuaauuugguuaaaaacaaaugugucaauuucaacuucaaugguuuaacaggcacagguguucuuacugagucuaacaaaaaguuucugccuuuccaacaauuuggcagagacauugcugacacuacugaugcuguccgugauccacagacacuugagauucuugacauuacaccauguucuuuugguggugucaguguuauaacaccaggaacaaauacuucuaaccagguugcuguucuuuaucaggguguuaacugcacagaagucccuguugcuauucaugcagaucaacuuacuccuacuuggcguguuuauucuacagguucuaauguuuuucaaacacgugcaggcuguuuaauaggggcugaacaugucaacaacucauaugagugugacauacccauuggugcagguauaugcgcuaguuaucagacucagacuaauucuccucggcgggcacguaguguagcuagucaauccaucauugccuacacuaugucacuuggugcagaaaauucaguugcuuacucuaauaacucuauugccauacccacaaauuuuacuauuaguguuaccacagaaauucuaccagugucuaugaccaagacaucaguagauuguacaauguacauuuguggugauucaacugaaugcagcaaucuuuuguugcaauauggcaguuuuuguacacaauuaaaccgugcuuuaacuggaauagcuguugaacaagacaaaaacacccaagaaguuuuugcacaagucaaacaaauuuacaaaacaccaccaauuaaagauuuuggugguuuuaauuuuucacaaauauuaccagauccaucaaaaccaagcaagaggucauuuauugaagaucuacuuuucaacaaagugacacuugcagaugcuggcuucaucaaacaauauggugauugccuuggugauauugcugcuagagaccucauuugugcacaaaaguuuaacggccuuacuguuuugccaccuuugcucacagaugaaaugauugcucaauacacuucugcacuguuagcggguacaaucacuucugguuggaccuuuggugcaggugcugcauuacaaauaccauuugcuaugcaaauggcuuauagguuuaaugguauuggaguuacacagaauguucucuaugagaaccaaaaauugauugccaaccaauuuaauagugcuauuggcaaaauucaagacucacuuucuuccacagcaacugcacuuggaaaacuucaagauguggucaaccaaaaugcacaagcuuuaaacacgcuuguuaaacaacuuagcuccaauuuuggugcaauuucaaguguuuuaaaugauauccuuucacgucuugacaaaguugaggcugaagugcaaauugauagguugaucacaggcagacuucaaaguuugcagacauaugugacucaacaauuaauuagagcugcagaaaucagagcuucugcuaaucuugcugcuacuaaaaugucagaguguguacuuggacaaucaaaaagaguugauuuuuguggaaagggcuaucaucuuauguccuucccucagucagcaccucaugguguagucuucuugcaugugacuuaugucccugcacaagaaaagaacuucacaacugcuccugccauuugucaugauggaaaagcacacuuuccucgugaaggugucuuuguuucaaauggcacacacugguuuguaacacaaaggaauuuuuaugaaccacaaaucauuacuacagacaacacauuugugucugguaacugugauguuguaauaggaauugucaacaacacaguuuaugauccuuugcaaccugaauuagacucauucaaggaggaguuagauaaauauuuuaagaaucauacaucaccagauguugauuuaggugacaucucuggcauuaaugcuucaguuguaaacauucaaaaagaaauugaccgccucaaugagguugccaagaauuuaaaugaaucucucaucgaucuccaagaacuuggaaaguaugagcaguauauaaaauggccaugguacauuuggcuagguuuuauagcuggcuugauugccauaguaauggugacaauuaugcuuugcuguaugaccaguugcuguaguugucucaagggcuguuguucuuguggauccugcugcaaauuugaugaagacgacucugagccagugcucaaaggagucaaauuacauuacacauaaggacuaguuauaagacugacuagcccgaugggccucccaacgggcccuccuccccuccuugcaccgagauuaauaaaaaaaaaaaaaaaaaaaaaaaaaaaaaaaaaaaaaaaaaaaaaaaaaaaaaaaaaaaaaaaaugcaucccccccccccccccccccccccccccccccaaaggcucuuuucagagccaccagaauu

SEQ ID NO: 12702 - RNA, 4039 nt, Artificial Sequence
  SARS-CoV-2/Belgium/BC-03016/2020__EPI_ISL_415157 spike protein mRNA wt (1-1273)
aggagaaagcuuaccauguuuguuuuucuuguuuuauugccacuagucucuagucaguguguuaaucuuacaaccagaacucaauuacccccugcauacacuaauucuuucacacgugguguuuauuacccugacaaaguuuucagauccucaguuuuacauucaacucaggacuuguucuuaccuuucuuuuccaauguuacuugguuccaugcuauacaugucucugggaccaaugguacuaagagguuugauaacccuguccuaccauuuaaugaugguguuuauuuugcuuccacugagaagucuaacauaauaagaggcuggauuuuugguacuacuuuagauucgaagacccagucccuacuuauuguuaauaacgcuacuaauguuguuauuaaagucugugaauuucaauuuuguaaugauccauuuuuggguguuuauuaccacaaaaacaacaaaaguuggauggaaagugaguucagaguuuauucuagugcgaauaauugcacuuuugaauaugucucucagccuuuucuuauggaccuugaaggaaaacaggguaauuucaaaaaucuuagggaauuuguguuuaagaauauugaugguuauuuuaaaauauauucuaagcacacgccuauuaauuuagugcgugaucucccucaggguuuuucggcuuuagaaccauugguagauuugccaauagguauuaacaucacuagguuucaaacuuuacuugcuuuacauagaaguuauuugacuccuggugauucuucuucagguuggacagcuggugcugcagcuuauuauguggguuaucuucaaccuaggacuuuucuauuaaaauauaaugaaaauggaaccauuacagaugcuguagacugugcacuugacccucucucagaaacaaaguguacguugaaauccuucacuguagaaaaaggaaucuaucaaacuucuaacuuuagaguccaaccaacagaaucuauuguuagauuuccuaauauuacaaacuugugcccuuuuggugaaguuuuuaacgccaccagauuugcaucuguuuaugcuuggaacaggaagagaaucagcaacuguguugcugauuauucuguccuauauaauuccgcaucauuuuccacuuuuaaguguuauggagugucuccuacuaaauuaaaugaucucugcuuuacuaaugucuaugcagauucauuuguaauuagaggugaugaagucagacaaaucgcuccagggcaaacuggaaagauugcugauuauaauuauaaauuaccagaugauuuuacaggcugcguuauagcuuggaauucuaacaaucuugauucuaagguuggugguaauuauaauuaccuguauagauuguuuaggaagucuaaucucaaaccuuuugagagagauauuucaacugaaaucuaucaggccgguagcacaccuuguaaugguguugaagguuuuaauuguuacuuuccuuuacaaucauaugguuuccaacccacuaaugguguugguuaccaaccauacagaguaguaguacuuucuuuugaacuucuacaugcaccagcaacuguuuguggaccuaaaaagucuacuaauuugguuaaaaacaaaugugucaauuucaacuucaaugguuuaacaggcacagguguucuuacugagucuaacaaaaaguuucugccuuuccaacaauuuggcagagacauugcugacacuacugaugcuguccgugauccacagacacuugagauucuugacauuacaccauguucuuuugguggugucaguguuauaacaccaggaacaaauacuucuaaccagguugcuguucuuuaucaggguguuaacugcacagaagucccuguugcuauucaugcagaucaacuuacuccuacuuggcguguuuauucuacagguucuaauguuuuucaaacacgugcaggcuguuuaauaggggcugaacaugucaacaacucauaugagugugacauacccauuggugcagguauaugcgcuaguuaucagacucagacuaauucuccucggcgggcacguaguguagcuagucaauccaucauugccuacacuaugucacuuggugcagaaaauucaguugcuuacucuaauaacucuauugccauacccacaaauuuuacuauuaguguuaccacagaaauucuaccagugucuaugaccaagacaucaguagauuguacaauguacauuuguggugauucaacugaaugcagcaaucuuuuguugcaauauggcaguuuuuguacacaauuaaaccgugcuuuaacuggaauagcuguugaacaagacaaaaacacccaagaaguuuuugcacaagucaaacaaauuuacaaaacaccaccaauuaaagauuuuggugguuuuaauuuuucacaaauauuaccagauccaucaaaaccaagcaagaggucauuuauugaagaucuacuuuucaacaaagugacacuugcagaugcuggcuucaucaaacaauauggugauugccuuggugauauugcugcuagagaccucauuugugcacaaaaguuuaacggccuuacuguuuugccaccuuugcucacagaugaaaugauugcucaauacacuucugcacuguuagcggguacaaucacuucugguuggaccuuuggugcaggugcugcauuacaaauaccauuugcuaugcaaauggcuuauagguuuaaugguauuggaguuacacagaauguucucuaugagaaccaaaaauugauugccaaccaauuuaauagugcuauuggcaaaauucaagacucacuuucuuccacagcaccugcacuuggaaaacuucaagauguggucaaccaaaaugcacaagcuuuaaacacgcuuguuaaacaacuuagcuccaauuuuggugcaauuucaaguguuuuaaaugauauccuuucacgucuugacaaaguugaggcugaagugcaaauugauagguugaucacaggcagacuucaaaguuugcagacauaugugacucaacaauuaauuagagcugcagaaaucagagcuucugcuaaucuugcugcuacuaaaaugucagaguguguacuuggacaaucaaaaagaguugauuuuuguggaaagggcuaucaucuuauguccuucccucagucagcaccucaugguguagucuucuugcaugugacuuaugucccugcacaagaaaagaacuucacaacugcuccugccauuugucaugauggaaaagcacacuuuccucgugaaggugucuuuguuucaaauggcacacacugguuuguaacacaaaggaauuuuuaugaaccacaaaucauuacuacagacaacacauuugugucugguaacugugauguuguaauaggaauugucaacaacacaguuuaugauccuuugcaaccugaauuagacucauucaaggaggaguuagauaaauauuuuaagaaucauacaucaccagauguugauuuaggugacaucucuggcauuaaugcuucaguuguaaacauucaaaaagaaauugaccgccucaaugagguugccaagaauuuaaaugaaucucucaucgaucuccaagaacuuggaaaguaugagcaguauauaaaauggccaugguacauuuggcuagguuuuauagcuggcuugauugccauaguaauggugacaauuaugcuuugcuguaugaccaguugcuguaguugucucaagggcuguuguucuuguggauccugcugcaaauuugaugaagacgacucugagccagugcucaaaggagucaaauuacauuacacauaaggacuaguuauaagacugacuagcccgaugggccucccaacgggcccuccuccccuccuugcaccgagauuaauaaaaaaaaaaaaaaaaaaaaaaaaaaaaaaaaaaaaaaaaaaaaaaaaaaaaaaaaaaaaaaaaugcaucccccccccccccccccccccccccccccccaaaggcucuuuucagagccaccagaauu

SEQ ID NO: 12703 - RNA, 4039 nt, Artificial Sequence
  SARS-CoV-2/Germany/BavPat3/2020__EPI_ISL_414521 spike protein mRNA wt (1-1273)
aggagaaagcuuaccauguuuguuuuucuuguuuuauugccacuagucucuagucaguguguuaaucuuacaaccagaacucaauuacccccugcauacacuaauucuuucacacgugguguuuauuacccugacaaaguuuucagauccucaguuuuacauucaacucaggacuuguucuuaccuuucuuuuccaauguuacuugguuccaugcuauacaugucucugggaccaaugguacuaagagguuugauaacccuguccuaccauuuaaugaugguguuuauuuugcuuccacugagaagucuaacauaauaagaggcuggauuuuugguacuacuuuagauucgaagacccagucccuacuuauuguuaauaacgcuacuaauguuguuauuaaagucugugaauuucaauuuuguaaugauccauuuuuggguguuuauuaccacaaaaacaacaaaaguuggauggaaagugaguucagaguuuauucuagugcgaauaauugcacuuuugaauaugucucucagccuuuucuuauggaccuugaaggaaaacaggguaauuucaaaaaucuuagggaauuuguguuuaagaauauugaugguuauuuuaaaauauauucuaagcacacgccuauuaauuuagugcgugaucucccucaggguuuuucggcuuuagaaccauugguagauuugccaauagguauuaacaucacuagguuucaaacuuuacuugcuuuacauagaaguuauuugacuccuggugauucuucuucagguuggacagcuggugcugcagcuuauuauguggguuaucuucaaccuaggacuuuucuauuaaaauauaaugaaaauggaaccauuacagaugcuguagacugugcacuugacccucucucagaaacaaaguguacguugaaauccuucacuguagaaaaaggaaucuaucaaacuucuaacuuuagaguccaaccaacagaaucuauuguuagauuuccuaauauuacaaacuugugcccuuuuggugaaguuuuuaacgccaccagauuugcaucuguuuaugcuuggaacaggaagagaaucagcaacuguguugcugauuauucuguccuauauaauuccgcaucauuuuccacuuuuaaguguuauggagugucuccuacuaaauuaaaugaucucugcuuuacuaaugucuaugcagauucauuuguaauuagaggugaugaagucagacaaaucgcuccagggcaaacuggaaagauugcugauuauaauuauaaauuaccagaugauuuuacaggcugcguuauagcuuggaauucuaacaaucuugauucuaagguuggugguaauuauaauuaccuguauagauuguuuaggaagucuaaucucaaaccuuuugagagagauauuucaacugaaaucuaucaggccgguagcacaccuuguaaugguguugaagguuuuaauuguuacuuuccuuuacaaucauaugguuuccaacccacuaaugguguugguuaccaaccauacagaguaguaguacuuucuuuugaacuucuacaugcaccagcaacuguuuguggaccuaaaaagucuacuaauuugguuaaaaacaaaugugucaauuucaacuucaaugguuuaacaggcacagguguucuuacugagucuaacaaaaaguuucugccuuuccaacaauuuggcagagacauugcugacacuacugaugcuguccgugauccacagacacuugagauucuugacauuacaccauguucuuuugguggugucaguguuauaacaccaggaacaaauacuucuaaccagguugcuguucuuuaucaggauguuaacugcacagaagucccuguugcuauucaugcagaucaacuuacuccuacuuggcguguuuauucuacagguucuaauguuuuucaaacacgugcaggcuguuuaauaggggcugaacaugucaacaacucauaugagugugacauacccauuggugcagguauaugcgcuaguuaucagacucagacuaauucuccucggcgggcacguaguguagcuagucaauccaucauugccuacacuaugucacuuggugcagaaaauucaguugcuuacucuaauaacucuauugccauacccacaaauuuuacuauuaguguuaccacagaaauucuaccagugucuaugaccaagacaucaguagauuguacaauguacauuuguggugauucaacugaaugcagcaaucuuuuguugcaauauggcaguuuuuguacacaauuaaaccgugcuuuaacuggaauagcuguugaacaagacaaaaacacccaacaaguuuuugcacaagucaaacaaauuuacaaaacaccaccaauuaaagauuuuggugguuuuaauuuuucacaaauauuaccagauccaucaaaaccaagcaagaggucauuuauugaagaucuacuuuucaacaaagugacacuugcagaugcuggcuucaucaaacaauauggugauugccuuggugauauugcugcuagagaccucauuugugcacaaaaguuuaacggccuuacuguuuugccaccuuugcucacagaugaaaugauugcucaauacacuucugcacuguuagcggguacaaucacuucugguuggaccuuuggugcaggugcugcauuacaaauaccauuugcuaugcaaauggcuuauagguuuaaugguauuggaguuacacagaauguucucuaugagaaccaaaaauugauugccaaccaauuuaauagugcuauuggcaaaauucaagacucacuuucuuccacagcaagugcacuuggaaaacuucaagauguggucaaccaaaaugcacaagcuuuaaacacgcuuguuaaacaacuuagcuccaauuuuggugcaauuucaaguguuuuaaaugauauccuuucacgucuugacaaaguugaggcugaagugcaaauugauagguugaucacaggcagacuucaaaguuugcagacauaugugacucaacaauuaauuagagcugcagaaaucagagcuucugcuaaucuugcugcuacuaaaaugucagaguguguacuuggacaaucaaaaagaguugauuuuuguggaaagggcuaucaucuuauguccuucccucagucagcaccucaugguguagucuucuugcaugugacuuaugucccugcacaagaaaagaacuucacaacugcuccugccauuugucaugauggaaaagcacacuuuccucgugaaggugucuuuguuucaaauggcacacacugguuuguaacacaaaggaauuuuuaugaaccacaaaucauuacuacagacaacacauuugugucugguaacugugauguuguaauaggaauugucaacaacacaguuuaugauccuuugcaaccugaauuagacucauucaaggaggaguuagauaaauauuuuaagaaucauacaucaccagauguugauuuaggugacaucucuggcauuaaugcuucaguuguaaacauucaaaaagaaauugaccgccucaaugagguugccaagaauuuaaaugaaucucucaucgaucuccaagaacuuggaaaguaugagcaguauauaaaauggccaugguacauuuggcuagguuuuauagcuggcuugauugccauaguaauggugacaauuaugcuuugcuguaugaccaguugcuguaguugucucaagggcuguuguucuuguggauccugcugcaaauuugaugaagacgacucugagccagugcucaaaggagucaaauuacauuacacauaaggacuaguuauaagacugacuagcccgaugggccucccaacgggcccuccuccccuccuugcaccgagauuaauaaaaaaaaaaaaaaaaaaaaaaaaaaaaaaaaaaaaaaaaaaaaaaaaaaaaaaaaaaaaaaaaugcaucccccccccccccccccccccccccccccccaaaggcucuuuucagagccaccagaauu

SEQ ID NO: 12704 - RNA, 4039 nt, Artificial Sequence
  SARS-CoV-2/France/HF1805/2020__EPI_ISL_414628 spike protein mRNA wt (1-1273)
aggagaaagcuuaccauguuuguuuuucuuguuuuauugccacuagucucuagucaguguguuaaucuuacaaccagaacucaauuacccccugcauacacuaauucuuucacacgugguguuuauuacccugacaaaguuuucagauccucaguuuuacauucaacucaggacuuguucuuaccuuucuuuuccaauguuacuugguuccaugcuauacaugucucugggaccaaugguacuaagagguuugauaacccuguccuaccauuuaaugaugguguuuauuuugcuuccacugagaagucuaacauaauaagaggcuggauuuuugguacuacuuuagauucgaagacccagucccuacuuauuguuaauaacgcuacuaauguuguuauuaaagucugugaauuucaauuuuguaaugauccauuuuuggguguuuauuaccacaaaaacaacaaaaguuggauggaaagugaguucagaguuuauucuagugcgaauaauugcacuuuugaauaugucucucagccuuuucuuauggaccuugaaggaaaacaggguaauuucaaaaaucuuagggaauuuguguuuaagaauauugaugguuauuuuaaaauauauucuaagcacacgccuauuaauuuagugcgugaucucccucaggguuuuucggcuuuagaaccauugguagauuugccaauagguauuaacaucacuagguuucaaacuuuacuugcuuuacauagaaguuauuugacuccuggugauucuucuucagguuggacagcuggugcugcagcuuauuauguggguuaucuucaaccuaggacuuuucuauuaaaauauaaugaaaauggaaccauuacagaugcuguagacugugcacuugacccucucucagaaacaaaguguacguugaaauccuucacuguagaaaaaggaaucuaucaaacuucuaacuuuagaguccaaccaacagaaucuauuguuagauuuccuaauauuacaaacuugugcccuuuuggugaaguuuuuaacgccaccagauuugcaucuguuuaugcuuggaacaggaagagaaucagcaacuguguugcugauuauucuguccuauauaauuccgcaucauuuuccacuuuuaaguguuauggagugucuccuacuaaauuaaaugaucucugcuuuacuaaugucuaugcagauucauuuguaauuagaggugaugaagucagacaaaucgcuccagggcaaacuggaaagauugcugauuauaauuauaaauuaccagaugauuuuacaggcugcguuauagcuuggaauucuaacaaucuugauucuaagguuggugguaauuauaauuaccuguauagauuguuuaggaagucuaaucucaaaccuuuugagagagauauuucaacugaaaucuaucaggccgguagcacaccuuguaaugguguugaagguuuuaauuguuacuuuccuuuacaaucauaugguuuccaacccacuaaugguguugguuaccaaccauacagaguaguaguacuuucuuuugaacuucuacaugcaccagcaacuguuuguggaccuaaaaagucuacuaauuugguuaaaaacaaaugugucaauuucaacuucaaugguuuaacaggcacagguguucuuacugagucuaacaaaaaguuucugccuuuccaacaauuuggcagagacauugcugacacuacugaugcuguccgugauccacagacacuugagauucuugacauuacaccauguucuuuugguggugucaguguuauaacaccaggaacaaauacuucuaaccagguugcuguucuuuaucaggguguuaacugcacagaagucccuguugcuauucaugcagaucaacuuacuccuacuuggcguguuuauucuacagguucuaauguuuuucaaacacgugcaggcuguuuaauaggggcugaacaugucaacaacucauaugagugugacauacccauuggugcagguauaugcgcuaguuaucagacucagacuaauucuccucggcgggcacguaguguagcuagucaauccaucauugccuacacuaugucacuuggugcagaaaauucaguugcuuacucuaauaacucuauugccauacccacaaauuuuacuauuaguguuaccacagaaauucuaccagugucuaugaccaagacaucaguagauuguacaauguacauuuguggugauucaacugaaugcagcaaucuuuuguugcaauauggcaguuuuuguacacaauuaaaccgugcuuuaacuggaauagcuguugaacaagacaaaaacacccaagaaguuuuugcacaagucaaacaaauuuacaaaacaccaccaauuaaagauuuuggugguuuuaauuuuucacaaauauuaccagauccaucaaaaccaagcaagaggucauuuauugaagaucuacuuuucaacaaagugacacuugcagaugcuggcuucaucaaacaauauggugauugccuuggugauauugcugcuagagaccucauuugugcacaaaaguuuaacggccuuacuguuuugccaccuuugcucacagaugaaaugauugcucaauacacuucugcacuguuagcggguacaaucacuucugguuggaccuuuggugcaggugcugcauuacaaauaccauuugcuaugcaaauggcuuauagguuuaaugguauuggaguuacacagaauguucucuaugagaaccaaaaauugauugccaaccaauuuaauagugcuauuggcaaaauucaagacucacuuucuuccacagcaagugcacuuggaaaacuucaagauguggucaaccaaaaugcacaagcuuuaaacacgcuuguuaaacaacuuagcuccaauuuuggugcaauuucaaguguuuuaaaugauauccuuucacgucuugacaaaguugaggcugaagugcaaauugauagguugaucacaggcagacuucaaaguuugcagacauaugugacucaacaauuaauuagagcugcagaaaucagagcuucugcuaaucuugcugcuacuaaaaugucagaguguguacuuggacaaucaaaaagaguugauuuuuguggaaagggcuaucaucuuauguccuucccucagucagcaccucaugguguagucuucuugcaugugacuuaugucccugcacaagaaaagaacuucacaacugcuccugccauuugucaugauggaaaagcacacuuuccucgugaaggugucuuuguuucaaauggcacacacugguuuguaacacaaaggaauuuuuaugaaccacaaaucauuacuacagacaacacauuugugucugguaacugugauguuguaauaggaguugucaacaacacaguuuaugauccuuugcaaccugaauuagacucauucaaggaggaguuagauaaauauuuuaagaaucauacaucaccagauguugauuuaggugacaucucuggcauuaaugcuucaguuguaaacauucaaaaagaaauugaccgccucaaugagguugccaagaauuuaaaugaaucucucaucgaucuccaagaacuuggaaaguaugagcaguauauaaaauggccaugguacauuuggcuagguuuuauagcuggcuugauugccauaguaauggugacaauuaugcuuugcuguaugaccaguugcuguaguugucucaagggcuguuguucuuguggauccugcugcaaauuugaugaagacgacucugagccagugcucaaaggagucaaauuacauuacacauaaggacuaguuauaagacugacuagcccgaugggccucccaacgggcccuccuccccuccuugcaccgagauuaauaaaaaaaaaaaaaaaaaaaaaaaaaaaaaaaaaaaaaaaaaaaaaaaaaaaaaaaaaaaaaaaaugcaucccccccccccccccccccccccccccccccaaaggcucuuuucagagccaccagaauu

SEQ ID NO: 12705 - RNA, 4039 nt, Artificial Sequence
  SARS-CoV-2/Netherlands/ZuidHolland_9/2020__EPI_ISL_414445 spike protein mRNA wt (1-1273)
aggagaaagcuuaccauguuuguuuuucuuguuuuauugccacuagucucuagucaguguguuaaucuuacaaccagaacucaauuacccccugcauacacuaauucuuucacacgugguguuuauuacccugacaaaguuuucagauccucaguuuuacauucaacucaggacuuguucuuaccuuucuuuuccaauguuacuugguuccaugcuauacaugucucugggaccaaugguacuaagagguuugauaacccuguccuaccauuuaaugaugguguuuauuuugcuuccacugagaagucuaacauaauaagaggcuggauuuuugguacuacuuuagauucgaagacccagucccuacuuauuguuaauaacgcuacuaauguuguuauuaaagucugugaauuucaauuuuguaaugauccauuuuuggguguuuauuaccacaaaaacaacaaaaguuggauggaaagugaguucagaguuuauucuagugcgaauaauugcacuuuugaauaugucucucagccuuuucuuauggaccuugaaggaaaacaggguaauuucaaaaaucuuagggaauuuguguuuaagaauauugaugguuauuuuaaaauauauucuaagcacacgccuauuaauuuagugcgugaucucccucaggguuuuucggcuuuagaaccauugguagauuugccaauagguauuaacaucacuagguuucaaacuuuacuugcuuuacauagaaguuauuugacuccuggugauucuucuucagguuggacagcuggugcugcagcuuauuauguggguuaucuucaaccuaggacuuuucuauuaaaauauaaugaaaauggaaccauuacagaugcuguagacugugcacuugacccucucucagaaacaaaguguacguugaaauccuucacuguagaaaaaggaaucuaucaaacuucuaacuuuagaguccaaccaacagaaucuauuguuagauuuccuaauauuacaaacuugugcccuuuuggugaaguuuuuaacgccaccagauuugcaucuguuuaugcuuggaacaggaagagaaucagcaacuguguugcugauuauucuguccuauauaauuccgcaucauuuuccacuuuuaaguguuauggagugucuccuacuaaauuaaaugaucucugcuuuacuaaugucuaugcagauucauuuguaauuagaggugaugaagucagacaaaucgcuccagggcaaacuggaaagauugcugauuauaauuauaaauuaccagaugauuuuacaggcugcguuauagcuuggaauucuaacaaucuugauucuaagguuggugguaauuauaauuaccuguauagauuguuuaggaagucuaaucucaaaccuuuugagagagauauuucaacugaaaucuaucaggccgguagcacaccuuguaaugguguugaagguuuuaauuguuacuuuccuuuacaaucauaugguuuccaacccacuaaugguguugguuaccaaccauacagaguaguaguacuuucuuuugaacuucuacaugcaccagcaacuguuuguggaccuaaaaagucuacuaauuugguuaaaaacaaaugugucaauuucaacuucaaugguuuaacaggcacagguguucuuacugagucuaacaaaaaguuucugccuuuccaacaauuuggcagagacauugcugacacuacugaugcuguccgugauccacagacacuugagauucuugacauuacaccauguucuuuugguggugucaguguuauaacaccaggaacaaauacuucuaaccagguugcuguucuuuaucaggguguuaacugcacagaagucccuguugcuauucaugcagaucaacuuacuccuacuuggcguguuuauucuacagguucuaauguuuuucaaacacgugcaggcuguuuaauaggggcugaacaugucaacaacucauaugagugugacauacccauuggugcagguauaugcgcuaguuaucagacucagacuaauucuccucggcgggcacguaguguagcuagucaauccaucauugccuacacuaugucacuuggugcagaaaauucaguugcuuacucuaauaacucuauugccauacccacaaauuuuacuauuaguguuaccacagaaauucuaccagugucuaugaccaagacaucaguagauuguacaauguacauuuguggugauucaacugaaugcagcaaucuuuuguugcaauauggcaguuuuuguacacaauuaaaccgugcuuuaacuggaauagcuguugaacaagacaaaaacacccaagaaguuuuugcacaagucaaacaaauuuacaaaacaccaccaauuaaagauuuuggugguuuuaauuuuucacaaauauuaccagauccaucaaaaccaagcaagaggucauuuauugaagaucuacuuuucaacaaagugacacuugcagaugcuggcuucaucaaacaauauggugauugccuuggugauauugcugcuagagaccucauuuguguacaaaaguuuaacggccuuacuguuuugccaccuuugcucacagaugaaaugauugcucaauacacuucugcacuguuagcggguacaaucacuucugguuggaccuuuggugcaggugcugcauuacaaauaccauuugcuaugcaaauggcuuauagguuuaaugguauuggaguuacacagaauguucucuaugagaaccaaaaauugauugccaaccaauuuaauagugcuauuggcaaaauucaagacucacuuucuuccacagcaagugcacuuggaaaacuucaagauguggucaaccaaaaugcacaagcuuuaaacacgcuuguuaaacaacuuagcuccaauuuuggugcaauuucaaguguuuuaaaugauauccuuucacgucuugacaaaguugaggcugaagugcaaauugauagguugaucacaggcagacuucaaaguuugcagacauaugugacucaacaauuaauuagagcugcagaaaucagagcuucugcuaaucuugcugcuacuaaaaugucagaguguguacuuggacaaucaaaaagaguugauuuuuguggaaagggcuaucaucuuauguccuucccucagucagcaccucaugguguagucuucuugcaugugacuuaugucccugcacaagaaaagaacuucacaacugcuccugccauuugucaugauggaaaagcacacuuuccucgugaaggugucuuuguuucaaauggcacacacugguuuguaacacaaaggaauuuuuaugaaccacaaaucauuacuacagacaacacauuugugucugguaacugugauguuguaauaggaauugucaacaacacaguuuaugauccuuugcaaccugaauuagacucauucaaggaggaguuagauaaauauuuuaagaaucauacaucaccagauguugauuuaggugacaucucuggcauuaaugcuucaguuguaaacauucaaaaagaaauugaccgccucaaugagguugccaagaauuuaaaugaaucucucaucgaucuccaagaacuuggaaaguaugagcaguauauaaaauggccaugguacauuuggcuagguuuuauagcuggcuugauugccauaguaauggugacaauuaugcuuugcuguaugaccaguugcuguaguugucucaagggcuguuguucuuguggauccugcugcaaauuugaugaagacgacucugagccagugcucaaaggagucaaauuacauuacacauaaggacuaguuauaagacugacuagcccgaugggccucccaacgggcccuccuccccuccuugcaccgagauuaauaaaaaaaaaaaaaaaaaaaaaaaaaaaaaaaaaaaaaaaaaaaaaaaaaaaaaaaaaaaaaaaaugcaucccccccccccccccccccccccccccccccaaaggcucuuuucagagccaccagaauu

SEQ ID NO: 12706 - RNA, 4039 nt, Artificial Sequence
  SARS-CoV-2/Finland/FIN03032020A/2020__EPI_ISL_413602 spike protein mRNA wt (1-1273)
aggagaaagcuuaccauguuuguuuuucuuguuuuauugccacuagucucuagucaguguguuaaucuuacaaccagaacucaauuacccccugcauacacuaauucuuucacacgugguguuuauuacccugacaaaguuuucagauccucaguuuuacauucaacucaggacuuguucuuaccuuucuuuuccaauguuacuugguuccaugcuauacaugucucugggaccaaugguacuaagagguuugauaacccuguccuaccauuuaaugaugguguuuauuuugcuuccacugagaagucuaacauaauaagaggcuggauuuuugguacuacuuuagauucgaagacccagucccuacuuauuguuaauaacgcuacuaauguuguuauuaaagucugugaauuucaauuuuguaaugauccauuuuuggguguuuauuaccacaaaaacaacaaaaguuggauggaaagugaguucagaguuuauucuagugcgaauaauugcacuuuugaauaugucucucagccuuuucuuauggaccuugaaggaaaacaggguaauuucaaaaaucuuagggaauuuguguuuaagaauauugaugguuauuuuaaaauauauucuaagcacacgccuauuaauuuagugcgugaucucccucaggguuuuucggcuuuagaaccauugguagauuugccaauagguauuaacaucacuagguuucaaacuuuacuugcuuuacauagaaguuauuugacuccuggugauucuucuucagguuggacagcuggugcugcagcuuauuauguggguuaucuucaaccuaggacuuuucuauuaaaauauaaugaaaauggaaccauuacagaugcuguagacugugcacuugacccucucucagaaacaaaguguacguugaaauccuucacuguagaaaaaggaaucuaucaaacuucuaacuuuagaguccaaccaacagaaucuauuguuagauuuccuaauauuacaaacuugugcccuuuuggugaaguuuuuaacgccaccagauuugcaucuguuuaugcuuggaacaggaagagaaucagcaacuguguugcugauuauucuguccuauauaauuccgcaucauuuuccacuuuuaaguguuauggagugucuccuacuaaauuaaaugaucucugcuuuacuaaugucuaugcagauucauuuguaauuagaggugaugaagucagacaaaucgcuccagggcaaacuggaaagauugcugauuauaauuauaaauuaccagaugauuuuacaggcugcguuauaucuuggaauucuaacaaucuugauucuaagguuggugguaauuauaauuaccuguauagauuguuuaggaagucuaaucucaaaccuuuugagagagauauuucaacugaaaucuaucaggccgguagcacaccuuguaaugguguugaagguuuuaauuguuacuuuccuuuacaaucauaugguuuccaacccacuaaugguguugguuaccaaccauacagaguaguaguacuuucuuuugaacuucuacaugcaccagcaacuguuuguggaccuaaaaagucuacuaauuugguuaaaaacaaaugugucaauuucaacuucaaugguuuaacaggcacagguguucuuacugagucuaacaaaaaguuucugccuuuccaacaauuuggcagagacauugcugacacuacugaugcuguccgugauccacagacacuugagauucuugacauuacaccauguucuuuugguggugucaguguuauaacaccaggaacaaauacuucuaaccagguugcuguucuuuaucaggguguuaacugcacagaagucccuguugcuauucaugcagaucaacuuacuccuacuuggcguguuuauucuacagguucuaauguuuuucaaacacgugcaggcuguuuaauaggggcugaacaugucaacaacucauaugagugugacauacccauuggugcagguauaugcgcuaguuaucagacucagacuaauucuccucggcgggcacguaguguagcuagucaauccaucauugccuacacuaugucacuuggugcagaaaauucaguugcuuacucuaauaacucuauugccauacccacaaauuuuacuauuaguguuaccacagaaauucuaccagugucuaugaccaagacaucaguagauuguacaauguacauuuguggugauucaacugaaugcagcaaucuuuuguugcaauauggcaguuuuuguacacaauuaaaccgugcuuuaacuggaauagcuguugaacaagacaaaaacacccaagaaguuuuugcacaagucaaacaaauuuacaaaacaccaccaauuaaagauuuuggugguuuuaauuuuucacaaauauuaccagauccaucaaaaccaagcaagaggucauuuauugaagaucuacuuuucaacaaagugacacuugcagaugcuggcuucaucaaacaauauggugauugccuuggugauauugcugcuagagaccucauuugugcacaaaaguuuaacggccuuacuguuuugccaccuuugcucacagaugaaaugauugcucaauacacuucugcacuguuagcggguacaaucacuucugguuggaccuuuggugcaggugcugcauuacaaauaccauuugcuaugcaaauggcuuauagguuuaaugguauuggaguuacacagaauguucucuaugagaaccaaaaauugauugccaaccaauuuaauagugcuauuggcaaaauucaagacucacuuucuuccacagcaagugcacuuggaaaacuucaagauguggucaaccaaaaugcacaagcuuuaaacacgcuuguuaaacaacuuagcuccaauuuuggugcaauuucaaguguuuuaaaugauauccuuucacgucuugacaaaguugaggcugaagugcaaauugauagguugaucacaggcagacuucaaaguuugcagacauaugugacucaacaauuaauuagagcugcagaaaucagagcuucugcuaaucuugcugcuacuaaaaugucagaguguguacuuggacaaucaaaaagaguugauuuuuguggaaagggcuaucaucuuauguccuucccucagucagcaccucaugguguagucuucuugcaugugacuuaugucccugcacaagaaaagaacuucacaacugcuccugccauuugucaugauggaaaagcacacuuuccucgugaaggugucuuuguuucaaauggcacacacugguuuguaacacaaaggaauuuuuaugaaccacaaaucauuacuacagacaacacauuugugucugguaacugugauguuguaauaggaauugucaacaacacaguuuaugauccuuugcaaccugaauuagacucauucaaggaggaguuagauaaauauuuuaagaaucauacaucaccagauguugauuuaggugacaucucuggcauuaaugcuucaguuguaaacauucaaaaagaaauugaccgccucaaugagguugccaagaauuuaaaugaaucucucaucgaucuccaagaacuuggaaaguaugagcaguauauaaaauggccaugguacauuuggcuagguuuuauagcuggcuugauugccauaguaauggugacaauuaugcuuugcuguaugaccaguugcuguaguugucucaagggcuguuguucuuguggauccugcugcaaauuugaugaagacgacucugagccagugcucaaaggagucaaauuacauuacacauaaggacuaguuauaagacugacuagcccgaugggccucccaacgggcccuccuccccuccuugcaccgagauuaauaaaaaaaaaaaaaaaaaaaaaaaaaaaaaaaaaaaaaaaaaaaaaaaaaaaaaaaaaaaaaaaaugcaucccccccccccccccccccccccccccccccaaaggcucuuuucagagccaccagaauu

SEQ ID NO: 12707 - RNA, 4039 nt, Artificial Sequence
  SARS-CoV-2/France/GE1977/2020__EPI_ISL_414632 spike protein mRNA wt (1-1273)
aggagaaagcuuaccauguuuguuuuucuuguuuuauugccacuagucucuagucaguguguuaaucuuacaaccagaacucaauuacccccugcauacacuaauucuuucacacgugguguuuauuacccugacaaaguuuucagauccucaguuuuacauucaacucaggacuuguucuuaccuuucuuuuccaauguuacuugguuccaugcuauacaugucucugggaccaaugguacuaagagguuugauaacccuguccuaccauuuaaugaugguguuuauuuugcuuccacugagaagucuaacauaauaagaggcuggauuuuugguacuacuuuagauucgaagacccagucccuacuuauuguuaauaacgcuacuaauguuguuauuaaagucugugaauuucaauuuuguaaugauccauuuuuggguguuuauuaccacaaaaacaacaaaaguuggauggaaagugaguucagaguuuauucuagugcgaauaauugcacuuuugaauaugucucucagccuuuucuuauggaccuugaaggaaaacaggguaauuucaaaaaucuuagggaauuuguguuuaagaauauugaugguuauuuuaaaauauauucuaagcacacgccuauuaauuuagugcgugaucucccucaggguuuuucggcuuuagaaccauugguagauuugccaauagguauuaacaucacuagguuucaaacuuuacuugcuuuacauagaaguuauuugacuccuggugauucuucuucagguuggacagcuggugcugcagcuuauuauguggguuaucuucaaccuaggacuuuucuauuaaaauauaaugaaaauggaaccauuacagaugcuguagacugugcacuugacccucucucagaaacaaaguguacguugaaauccuucacuguagaaaaaggaaucuaucaaacuucuaacuuuagaguccaaccaacagaaucuauuguuagauuuccuaauauuacaaacuugugcccuuuuggugaaguuuuuaacgccaccagauuugcaucuguuuaugcuuggaacaggaagagaaucagcaacuguguugcugauuauucuguccuauauaauuccgcaucauuuuccacuuuuaaguguuauggagugucuccuacuaaauuaaaugaucucugcuuuacuaaugucuaugcagauucauuuguaauuagaggugaugaagucagacaaaucgcuccagggcaaacuggaaagauugcugauuauaauuauaaauuaccagaugauuuuacaggcugcguuauagcuuggaauucuaacaaucuugauucuaagguuggugguaauuauaauuaccuguauagauuguuuaggaagucuaaucucaaaccuuuugagagagauauuucaacugaaaucuaucaggccgguagcacaccuuguaaugguguugaagguuuuaauuguuacuuuccuuuacaaucauaugguuuccaacccacuaaugguguugguuaccaaccauacagaguaguaguacuuucuuuugaacuucuacaugcaccagcaacuguuuguggaccuaaaaagucuacuaauuugguuaaaaacaaaugugucaauuucaacuucaaugguuuaacaggcacagguguucuuacugagucuaacaaaaaguuucugccuuuccaacaauuuggcagagacauugcugacacuacugaugcuguccgugauccacagacacuugagauucuugacauuacaccauguucuuuugguggugucaguguuauaacaccaggaacaaauacuucuaaccagguugcuguucuuuaucaggguguuaacugcacagaagucccuguugcuauucaugcagaucaacuuacuccuacuuggcguguuuauucuacagguucuaauguuuuucaaacacgugcaggcuguuuaauaggggcugaacaugucaacaacucauaugagugugacauacccauuggugcagguauaugcgcuaguuaucagacucagacuaauucuccucggcgggcacguaguguagcuagucaauccaucauugccuacacuaugucacuuggugcagaaaauucaguugcuuacucuaauaacucuauugccauacccacaaauuuuacuauuaguguuaccacagaaauucuaccagugucuaugaccaagacaucaguagauuguacaauguacauuuguggugauucaacugaaugcagcaaucuuuuguugcaauauggcaguuuuuguacacaauuaaaccgugcuuuaacuggaauagcuguugaacaagacaaaaacacccaagaaguuuuugcacaagucaaacaaauuuacaaaacaccaccaauuaaagauuuuggugguuuuaauuuuucacaaauauuaccagauccaucaaaaccaagcaagaggucauuuauugaagaucuacuuuucaacaaagugacacuugcagaugcuggcuucaucaaacaauauggugauugccuuggugauauugcugcuagagaccucauuugugcacaaaaguuuaacggccuuacuguuuugccaccuuugcucacagaugaaaugauugcucaauacacuucugcacuguuagcggguacaaucacuucugguuggaccuuuggugcaggugcugcauuacaaauaccauuugcuaugcaaauggcuuauagguuuaaugguauuggaguuacacagaauguucucuaugagaaccaaaaauugauugccaaccaauuuaauagugcuauuggcaaaauucaagacucacuuuuuuccacagcaagugcacuuggaaaacuucaagauguggucaaccaaaaugcacaagcuuuaaacacgcuuguuaaacaacuuagcuccaauuuuggugcaauuucaaguguuuuaaaugauauccuuucacgucuugacaaaguugaggcugaagugcaaauugauagguugaucacaggcagacuucaaaguuugcagacauaugugacucaacaauuaauuagagcugcagaaaucagagcuucugcuaaucuugcugcuacuaaaaugucagaguguguacuuggacaaucaaaaagaguugauuuuuguggaaagggcuaucaucuuauguccuucccucagucagcaccucaugguguagucuucuugcaugugacuuaugucccugcacaagaaaagaacuucacaacugcuccugccauuugucaugauggaaaagcacacuuuccucgugaaggugucuuuguuucaaauggcacacacugguuuguaacacaaaggaauuuuuaugaaccacaaaucauuacuacagacaacacauuugugucugguaacugugauguuguaauaggaauugucaacaacacaguuuaugauccuuugcaaccugaauuagacucauucaaggaggaguuagauaaauauuuuaagaaucauacaucaccagauguugauuuaggugacaucucuggcauuaaugcuucaguuguaaacauucaaaaagaaauugaccgccucaaugagguugccaagaauuuaaaugaaucucucaucgaucuccaagaacuuggaaaguaugagcaguauauaaaauggccaugguacauuuggcuagguuuuauagcuggcuugauugccauaguaauggugacaauuaugcuuugcuguaugaccaguugcuguaguugucucaagggcuguuguucuuguggauccugcugcaaauuugaugaagacgacucugagccagugcucaaaggagucaaauuacauuacacauaaggacuaguuauaagacugacuagcccgaugggccucccaacgggcccuccuccccuccuugcaccgagauuaauaaaaaaaaaaaaaaaaaaaaaaaaaaaaaaaaaaaaaaaaaaaaaaaaaaaaaaaaaaaaaaaaugcaucccccccccccccccccccccccccccccccaaaggcucuuuucagagccaccagaauu

SEQ ID NO: 12708 - RNA, 4039 nt, Artificial Sequence
  SARS-CoV-2/Finland/FIN-313/2020__EPI_ISL_414641 spike protein mRNA wt (1-1273)
aggagaaagcuuaccauguuuguuuuucuuguuuuauugccacuagucucuagucaguguguuaaucuuacaaccagaacucaauuacccccugcauacacuaauucuuucacacgugguguuuauuacccugacaaaguuuucagauccucaguuuuacauucaacucaggacuuguucuuaccuuucuuuuccaauguuacuugguuccaugcuauacaugucucugggaccaaugguacuaagagguuugauaacccuguccuaccauuuaaugaugguguuuauuuugcuuccacugagaagucuaacauaauaagaggcuggauuuuugguacuacuuuagauucgaagacccagucccuacuuauuguuaauaacgcuacuaauguuguuauuaaagucugugaauuucaauuuuguaaugauccauuuuuggguguuuauuaccacaaaaacaacaaaaguuggauggaaagugaguucagaguuuauucuagugcgaauaauugcacuuuugaauaugucucucagccuuuucuuauggaccuugaaggaaaacaggguaauuucaaaaaucuuagggaauuuguguuuaagaauauugaugguuauuuuaaaauauauucuaagcacacgccuauuaauuuagugcgugaucucccucaggguuuuucggcuuuagaaccauugguagauuugccaauagguauuaacaucacuagguuuaaaacuuuacuugcuuuacauagaaguuauuugacuccuggugauucuucuucagguuggacagcuggugcugcagcuuauuauguggguuaucuucaaccuaggacuuuucuauuaaaauauaaugaaaauggaaccauuacagaugcuguagacugugcacuugacccucucucagaaacaaaguguacguugaaauccuucacuguagaaaaaggaaucuaucaaacuucuaacuuuagaguccaaccaacagaaucuauuguuagauuuccuaauauuacaaacuugugcccuuuuggugaaguuuuuaacgccaccagauuugcaucuguuuaugcuuggaacaggaagagaaucagcaacuguguugcugauuauucuguccuauauaauuccgcaucauuuuccacuuuuaaguguuauggagugucuccuacuaaauuaaaugaucucugcuuuacuaaugucuaugcagauucauuuguaauuagaggugaugaagucagacaaaucgcuccagggcaaacuggaaagauugcugauuauaauuauaaauuaccagaugauuuuacaggcugcguuauagcuuggaauucuaacaaucuugauucuaagguuggugguaauuauaauuaccuguauagauuguuuaggaagucuaaucucaaaccuuuugagagagauauuucaacugaaaucuaucaggccgguagcacaccuuguaaugguguugaagguuuuaauuguuacuuuccuuuacaaucauaugguuuccaacccacuaaugguguugguuaccaaccauacagaguaguaguacuuucuuuugaacuucuacaugcaccagcaacuguuuguggaccuaaaaagucuacuaauuugguuaaaaacaaaugugucaauuucaacuucaaugguuuaacaggcacagguguucuuacugagucuaacaaaaaguuucugccuuuccaacaauuuggcagagacauugcugacacuacugaugcuguccgugauccacagacacuugagauucuugacauuacaccauguucuuuugguggugucaguguuauaacaccaggaacaaauacuucuaaccagguugcuguucuuuaucaggguguuaacugcacagaagucccuguugcuauucaugcagaucaacuuacuccuacuuggcguguuuauucuacagguucuaauguuuuucaaacacgugcaggcuguuuaauaggggcugaacaugucaacaacucauaugagugugacauacccauuggugcagguauaugcgcuaguuaucagacucagacuaauucuccucggcgggcacguaguguagcuagucaaucuaucauugccuacacuaugucacuuggugcagaaaauucaguugcuuacucuaauaacucuauugccauacccacaaauuuuacuauuaguguuaccacagaaauucuaccagugucuaugaccaagacaucaguagauuguacaauguacauuuguggugauucaacugaaugcagcaaucuuuuguugcaauauggcaguuuuuguacacaauuaaaccgugcuuuaacuggaauagcuguugaacaagacaaaaacacccaagaaguuuuugcacaagucaaacaaauuuacaaaacaccaccaauuaaagauuuuggugguuuuaauuuuucacaaauauuaccagauccaucaaaaccaagcaagaggucauuuauugaagaucuacuuuucaacaaagugacacuugcagaugcuggcuucaucaaacaauauggugauugccuuggugauauugcugcuagagaccucauuugugcacaaaaguuuaacggccuuacuguuuugccaccuuugcucacagaugaaaugauugcucaauacacuucugcacuguuagcggguacaaucacuucugguuggaccuuuggugcaggugcugcauuacaaauaccauuugcuaugcaaauggcuuauagguuuaaugguauuggaguuacacagaauguucucuaugagaaccaaaaauugauugccaaccaauuuaauagugcuauuggcaaaauucaagacucacuuucuuccacagcaagugcacuuggaaaacuucaagauguggucaaccaaaaugcacaagcuuuaaacacgcuuguuaaacaacuuagcuccaauuuuggugcaauuucaaguguuuuaaaugauauccuuucacgucuugacaaaguugaggcugaagugcaaauugauagguugaucacaggcagacuucaaaguuugcagacauaugugacucaacaauuaauuagagcugcagaaaucagagcuucugcuaaucuugcugcuacuaaaaugucagaguguguacuuggacaaucaaaaagaguugauuuuuguggaaagggcuaucaucuuauguccuucccucagucagcaccucaugguguagucuucuugcaugugacuuaugucccugcacaagaaaagaacuucacaacugcuccugccauuugucaugauggaaaagcacacuuuccucgugaaggugucuuuguuucaaauggcacacacugguuuguaacacaaaggaauuuuuaugaaccacaaaucauuacuacagacaacacauuugugucugguaacugugauguuguaauaggaauugucaacaacacaguuuaugauccuuugcaaccugaauuagacucauucaaggaggaguuagauaaauauuuuaagaaucauacaucaccagauguugauuuaggugacaucucuggcauuaaugcuucaguuguaaacauucaaaaagaaauugaccgccucaaugagguugccaagaauuuaaaugaaucucucaucgaucuccaagaacuuggaaaguaugagcaguauauaaaauggccaugguacauuuggcuagguuuuauagcuggcuugauugccauaguaauggugacaauuaugcuuugcuguaugaccaguugcuguaguugucucaagggcuguuguucuuguggauccugcugcaaauuugaugaagacgacucugagccagugcucaaaggagucaaauuacauuacacauaaggacuaguuauaagacugacuagcccgaugggccucccaacgggcccuccuccccuccuugcaccgagauuaauaaaaaaaaaaaaaaaaaaaaaaaaaaaaaaaaaaaaaaaaaaaaaaaaaaaaaaaaaaaaaaaaugcaucccccccccccccccccccccccccccccccaaaggcucuuuucagagccaccagaauu

SEQ ID NO: 12709 - RNA, 4039 nt, Artificial Sequence
  SARS-CoV-2/Netherlands/ZuidHolland_2/2020__EPI_ISL_414556 spike protein mRNA wt (1-1273)
aggagaaagcuuaccauguuuguuuuucuuguuuuauugccacuagucucuagucaguguguuaaucuuacaaccagaacucaauuacccccugcauacacuaauucuuucacacgugguguuuauuacccugacaaaguuuucagauccucaguuuuacauucaacucaggacuuguucuuaccuuucuuuuccaauguuacuugguuccaugcuauacaugucucugggaccaaugguacuaagagguuugauaacccuguccuaccauuuaaugaugguguuuauuuugcuuccacugagaagucuaacauaauaagaggcuggauuuuugguacuacuuuagauucgaagacccagucccuacuuauuguuaauaacgcuacuaauguuguuauuaaagucugugaauuucaauuuuguaaugauccauuuuuggguguuuauuaccacaaaaacaacaaaaguuggauggaaagugaguucagaguuuauucuagugcgaauaauugcacuuuugaauaugucucucagccuuuucuuauggaccuugaaggaaaacaggguaauuucaaaaaucuuagggaauuuguguuuaagaauauugaugguuauuuuaaaauauauucuaagcacacgccuauuaauuuagugcgugaucucccucaggguuuuucggcuuuagaaccauugguagauuugccaauagguauuaacaucacuagguuucaaacuuuacuugcuuuacauagaaguuauuugacuccuggugauucuucuucagguuggacagcuggugcugcagcuuauuauguggguuaucuucaaccuaggacuuuucuauuaaaauauaaugaaaauggaaccauuacagaugcuguagacugugcacuugacccucucucagaaacaaaguguacguugaaauccuucacuguagaaaaaggaaucuaucaaacuucuaacuuuagaguccaaccaacagaaucuauuguuagauuuccuaauauuacaaacuugugcccuuuuggugaaguuuuuaacgccaccagauuugcaucuguuuaugcuuggaacaggaagagaaucagcaacuguguugcugauuauucuguccuauauaauuccgcaucauuuuccacuuuuaaguguuauggagugucuccuacuaaauuaaaugaucucugcuuuacuaaugucuaugcagauucauuuguaauuagaggugaugaagucagacaaaucgcuccagggcaaacuggaaagauugcugauuauaauuauaaauuaccagaugauuuuacaggcugcguuauagcuuggaauucuaacaaucuugauucuaagguuggugguaauuauaauuaccuguauagauuguuuaggaagucuaaucucaaaccuuuugagagagauauuucaacugaaaucuaucaggccgguagcacaccuuguaaugguguugaagguuuuaauuguuacuuuccuuuacaaucauaugguuuccaacccacuaaugguguugguuaccaaccauacagaguaguaguacuuucuuuugaacuucuacaugcaccagcaacuguuuguggaccuaaaaagucuacuaauuugguuaaaaacaaaugugucaauuucaacuucaaugguuuaacaggcacagguguucuuacugagucuaacaaaaaguuucugccuuuccaacaauuuggcagagacauugcugacacuacugaugcuguccgugauccacagacacuugagauucuugacauuacaccauguucuuuugguggugucaguguuauaacaccaggaacaaauacuucuaaccagguugcuguucuuuaucaggguguuaacugcacagaagucccuguugcuauucaugcagaucaacuuacuccuacuuggcguguuuauucuacagguucuaauguuuuucaaacacgugcaggcuguuuaauaggggcugaacaugucaacaacucauaugagugugacauacccauuggugcagguauaugcgcuaguuaucagacucagacuaauucuccucggcgggcacguaguguagcuagucaauccaucauugccuacacuaugucacuuggugcagaaaauucaguugcuuacucuaauaacucuauugccauacccacaaauuuuacuauuaguguuaccacagaaauucuaccagugucuaugaccaagacaucaguagauuguacaauguacauuuguggugauucaacugaaugcagcaaucuuuuguugcaauauggcaguuuuuguacacaauuaaaccgugcuuuaacuggaauagcucuugaacaagacaaaaacacccaagaaguuuuugcacaagucaaacaaauuuacaaaacaccaccaauuaaagauuuuggugguuuuaauuuuucacaaauauuaccagauccaucaaaaccaagcaagaggucauuuauugaagaucuacuuuucaacaaagugacacuugcagaugcuggcuucaucaaacaauauggugauugccuuggugauauugcugcuagagaccucauuugugcacaaaaguuuaacggccuuacuguuuugccaccuuugcucacagaugaaaugauugcucaauacacuucugcacuguuagcggguacaaucacuucugguuggaccuuuggugcaggugcugcauuacaaauaccauuugcuaugcaaauggcuuauagguuuaaugguauuggaguuacacagaauguucucuaugagaaccaaaaauugauugccaaccaauuuaauagugcuauuggcaaaauucaagacucacuuucuuccacagcaagugcacuuggaaaacuucaagauguggucaaccaaaaugcacaagcuuuaaacacgcuuguuaaacaacuuagcuccaauuuuggugcaauuucaaguguuuuaaaugauauccuuucacgucuugacaaaguugaggcugaagugcaaauugauagguugaucacaggcagacuucaaaguuugcagacauaugugacucaacaauuaauuagagcugcagaaaucagagcuucugcuaaucuugcugcuacuaaaaugucagaguguguacuuggacaaucaaaaagaguugauuuuuguggaaagggcuaucaucuuauguccuucccucagucagcaccucaugguguagucuucuugcaugugacuuaugucccugcacaagaaaagaacuucacaacugcuccugccauuugucaugauggaaaagcacacuuuccucgugaaggugucuuuguuucaaauggcacacacugguuuguaacacaaaggaauuuuuaugaaccacaaaucauuacuacagacaacacauuugugucugguaacugugauguuguaauaggaauugucaacaacacaguuuaugauccuuugcaaccugaauuagacucauucaaggaggaguuagauaaauauuuuaagaaucauacaucaccagauguugauuuaggugacaucucuggcauuaaugcuucaguuguaaacauucaaaaagaaauugaccgccucaaugagguugccaagaauuuaaaugaaucucucaucgaucuccaagaacuuggaaaguaugagcaguauauaaaauggccaugguacauuuggcuagguuuuauagcuggcuugauugccauaguaauggugacaauuaugcuuugcuguaugaccaguugcuguaguugucucaagggcuguuguucuuguggauccugcugcaaauuugaugaagacgacucugagccagugcucaaaggagucaaauuacauuacacauaaggacuaguuauaagacugacuagcccgaugggccucccaacgggcccuccuccccuccuugcaccgagauuaauaaaaaaaaaaaaaaaaaaaaaaaaaaaaaaaaaaaaaaaaaaaaaaaaaaaaaaaaaaaaaaaaugcaucccccccccccccccccccccccccccccccaaaggcucuuuucagagccaccagaauu

SEQ ID NO: 12710 - RNA, 4039 nt, Artificial Sequence
  SARS-CoV-2/USA/WA-UW31/2020__EPI_ISL_414618 spike protein mRNA wt (1-1273)
aggagaaagcuuaccauguuuguuuuucuuguuuuauugccacuagucucuagucaguguguuaaucuuacaaccagaacucaauuacccccugcauacacuaauucuuucacacgugguguuuauuacccugacaaaguuuucagauccucaguuuuacauucaacucaggacuuguucuuaccuuucuuuuccaauguuacuugguuccaugcuauacaugucucugggaccaaugguacuaagagguuugauaacccuguccuaccauuuaaugaugguguuuauuuugcuuccacugagaagucuaacauaauaagaggcuggauuuuugguacuacuuuagauucgaagacccagucccuacuuauuguuaauaacgcuacuaauguuguuauuaaagucugugaauuucaauuuuguaaugauccauuuuuggguguuuauuaccacaaaaacaacaaaaguuggauggaaagugaguucagaguuuauucuagugcgaauaauugcacuuuugaauaugucucucagccuuuucuuauggaccuugaaggaaaacaggguaauuucaaaaaucuuagggaauuuguguuuaagaauauugaugguuauuuuaaaauauauucuaagcacacgccuauuaauuuagugcgugaucucccucaggguuuuucggcuuuagaaccauugguagauuugccaauagguauuaacaucacuagguuucaaacuuuacuugcuuuacauagaaguuauuugacuccuggugauucuucuucagguuggacagcuggugcugcagcuuauuauguggguuaucuucaaccuaggacuuuucuauuaaaauauaaugaaaauggaaccauuacagaugcuguagacugugcacuugacccucucucagaaacaaaguguacguugaaauccuucacuguagaaaaaggaaucuaucaaacuucuaacuuuagaguccaaccaacagaaucuauuguuagauuuccuaauauuacaaacuugugcccuuuuggugaaguuuuuaacgccaccagauuugcaucuguuuaugcuuggaacaggaagagaaucagcaacuguguugcugauuauucuguccuauauaauuccgcaucauuuuccacuuuuaaguguuauggagugucuccuacuaaauuaaaugaucucugcuuuacuaaugucuaugcagauucauuuguaauuagaggugaugaagucagacaaaucgcuccagggcaaacuggaaagauugcugauuauaauuauaaauuaccagaugauuuuacaggcugcguuauagcuuggaauucuaacaaucuugauucuaagguuggugguaauuauaauuaccuguauagauuguuuaggaagucuaaucucaaaccuuuugagagagauauuucaacugaaaucuaucaggccgguagcacaccuuguaauggugcugaagguuuuaauuguuacuuuccuuuacaaucauaugguuuccaacccacuaaugguguugguuaccaaccauacagaguaguaguacuuucuuuugaacuucuacaugcaccagcaacuguuuguggaccuaaaaagucuacuaauuugguuaaaaacaaaugugucaauuucaacuucaaugguuuaacaggcacagguguucuuacugagucuaacaaaaaguuucugccuuuccaacaauuuggcagagacauugcugacacuacugaugcuguccgugauccacagacacuugagauucuugacauuacaccauguucuuuugguggugucaguguuauaacaccaggaacaaauacuucuaaccagguugcuguucuuuaucaggauguuaacugcacagaagucccuguugcuauucaugcagaucaacuuacuccuacuuggcguguuuauucuacagguucuaauguuuuucaaacacgugcaggcuguuuaauaggggcugaacaugucaacaacucauaugagugugacauacccauuggugcagguauaugcgcuaguuaucagacucagacuaauucuccucggcgggcacguaguguagcuagucaauccaucauugccuacacuaugucacuuggugcagaaaauucaguugcuuacucuaauaacucuauugccauacccacaaauuuuacuauuaguguuaccacagaaauucuaccagugucuaugaccaagacaucaguagauuguacaauguacauuuguggugauucaacugaaugcagcaaucuuuuguugcaauauggcaguuuuuguacacaauuaaaccgugcuuuaacuggaauagcuguugaacaagacaaaaacacccaagaaguuuuugcacaagucaaacaaauuuacaaaacaccaccaauuaaagauuuuggugguuuuaauuuuucacaaauauuaccagauccaucaaaaccaagcaagaggucauuuauugaagaucuacuuuucaacaaagugacacuugcagaugcuggcuucaucaaacaauauggugauugccuuggugauauugcugcuagagaccucauuugugcacaaaaguuuaacggccuuacuguuuugccaccuuugcucacagaugaaaugauugcucaauacacuucugcacuguuagcggguacaaucacuucugguuggaccuuuggugcaggugcugcauuacaaauaccauuugcuaugcaaauggcuuauagguuuaaugguauuggaguuacacagaauguucucuaugagaaccaaaaauugauugccaaccaauuuaauagugcuauuggcaaaauucaagacucacuuucuuccacagcaagugcacuuggaaaacuucaagauguggucaaccaaaaugcacaagcuuuaaacacgcuuguuaaacaacuuagcuccaauuuuggugcaauuucaaguguuuuaaaugauauccuuucacgucuugacaaaguugaggcugaagugcaaauugauagguugaucacaggcagacuucaaaguuugcagacauaugugacucaacaauuaauuagagcugcagaaaucagagcuucugcuaaucuugcugcuacuaaaaugucagaguguguacuuggacaaucaaaaagaguugauuuuuguggaaagggcuaucaucuuauguccuucccucagucagcaccucaugguguagucuucuugcaugugacuuaugucccugcacaagaaaagaacuucacaacugcuccugccauuugucaugauggaaaagcacacuuuccucgugaaggugucuuuguuucaaauggcacacacugguuuguaacacaaaggaauuuuuaugaaccacaaaucauuacuacagacaacacauuugugucugguaacugugauguuguaauaggaauugucaacaacacaguuuaugauccuuugcaaccugaauuagacucauucaaggaggaguuagauaaauauuuuaagaaucauacaucaccagauguugauuuaggugacaucucuggcauuaaugcuucaguuguaaacauucaaaaagaaauugaccgccucaaugagguugccaagaauuuaaaugaaucucucaucgaucuccaagaacuuggaaaguaugagcaguauauaaaauggccaugguacauuuggcuagguuuuauagcuggcuugauugccauaguaauggugacaauuaugcuuugcuguaugaccaguugcuguaguugucucaagggcuguuguucuuguggauccugcugcaaauuugaugaagacgacucugagccagugcucaaaggagucaaauuacauuacacauaaggacuaguuauaagacugacuagcccgaugggccucccaacgggcccuccuccccuccuugcaccgagauuaauaaaaaaaaaaaaaaaaaaaaaaaaaaaaaaaaaaaaaaaaaaaaaaaaaaaaaaaaaaaaaaaaugcaucccccccccccccccccccccccccccccccaaaggcucuuuucagagccaccagaauu

SEQ ID NO: 12711 - RNA, 4039 nt, Artificial Sequence
  SARS-CoV-2/South Korea/SNU01/2020__EPI_ISL_411929 spike protein mRNA wt (1-1273)
aggagaaagcuuaccauguuuguuuuucuuguuuuauugccacuagucucuagucaguguguuaaucuuacaaccagaacucaauuacccccugcauacacuaauucuuucacacgugguguuuauuacccugacaaaguuuucagauccucaguuuuacauucaacucaggacuuguucuuaccuuucuuuuccaauguuacuugguuccaugcuauacaugucucugggaccaaugguacuaagagguuugauaacccuguccuaccauuuaaugaugguguuuauuuugcuuccacugagaagucuaacauaauaagaggcuggauuuuugguacuacuuuagauucgaagacccagucccuacuuauuguuaauaacgcuacuaauguuguuauuaaagucugugaauuucaauuuuguaaugauccauuuuuggguguuuauuaccacaaaaacaacaaaaguuggauggaaagugaguucagaguuuauucuagugcgaauaauugcacuuuugaauaugucucucagccuuuucuuauggaccuugaaggaaaacaggguaauuucaaaaaucuuagggaauuuguguuuaagaauauugaugguuauuuuaaaauauauucuaagcacacgccuauuaauuuagugcgugaucucccucaggguuuuugggcuuuagaaccauugguagauuugccaauagguauuaacaucacuagguuucaaacuuuacuugcuuuacauagaaguuauuugacuccuggugauucuucuucagguuggacagcuggugcugcagcuuauuauguggguuaucuucaaccuaggacuuuucuauuaaaauauaaugaaaauggaaccauuacagaugcuguagacugugcacuugacccucucucagaaacaaaguguacguugaaauccuucacuguagaaaaaggaaucuaucaaacuucuaacuuuagaguccaaccaacagaaucuauuguuagauuuccuaauauuacaaacuugugcccuuuuggugaaguuuuuaacgccaccagauuugcaucuguuuaugcuuggaacaggaagagaaucagcaacuguguugcugauuauucuguccuauauaauuccgcaucauuuuccacuuuuaaguguuauggagugucuccuacuaaauuaaaugaucucugcuuuacuaaugucuaugcagauucauuuguaauuagaggugaugaagucagacaaaucgcuccagggcaaacuggaaagauugcugauuauaauuauaaauuaccagaugauuuuacaggcugcguuauagcuuggaauucuaacaaucuugauucuaagguuggugguaauuauaauuaccuguauagauuguuuaggaagucuaaucucaaaccuuuugagagagauauuucaacugaaaucuaucaggccgguagcacaccuuguaaugguguugaagguuuuaauuguuacuuuccuuuacaaucauaugguuuccaacccacuaaugguguugguuaccaaccauacagaguaguaguacuuucuuuugaacuucuacaugcaccagcaacuguuuguggaccuaaaaagucuacuaauuugguuaaaaacaaaugugucaauuucaacuucaaugguuuaacaggcacagguguucuuacugagucuaacaaaaaguuucugccuuuccaacaauuuggcagagacauugcugacacuacugaugcuguccgugauccacagacacuugagauucuugacauuacaccauguucuuuugguggugucaguguuauaacaccaggaacaaauacuucuaaccagguugcuguucuuuaucaggauguuaacugcacagaagucccuguugcuauucaugcagaucaacuuacuccuacuuggcguguuuauucuacagguucuaauguuuuucaaacacgugcaggcuguuuaauaggggcugaacaugucaacaacucauaugagugugacauacccauuggugcagguauaugcgcuaguuaucagacucagacuaauucuccucggcgggcacguaguguagcuagucaauccaucauugccuacacuaugucacuuggugcagaaaauucaguugcuuacucuaauaacucuauugccauacccacaaauuuuacuauuaguguuaccacagaaauucuaccagugucuaugaccaagacaucaguagauuguacaauguacauuuguggugauucaacugaaugcagcaaucuuuuguugcaauauggcaguuuuuguacacaauuaaaccgugcuuuaacuggaauagcuguugaacaagacaaaaacacccaagaaguuuuugcacaagucaaacaaauuuacaaaacaccaccaauuaaagauuuuggugguuuuaauuuuucacaaauauuaccagauccaucaaaaccaagcaagaggucauuuauugaagaucuacuuuucaacaaagugacacuugcagaugcuggcuucaucaaacaauauggugauugccuuggugauauugcugcuagagaccucauuugugcacaaaaguuuaacggccuuacuguuuugccaccuuugcucacagaugaaaugauugcucaauacacuucugcacuguuagcggguacaaucacuucugguuggaccuuuggugcaggugcugcauuacaaauaccauuugcuaugcaaauggcuuauagguuuaaugguauuggaguuacacagaauguucucuaugagaaccaaaaauugauugccaaccaauuuaauagugcuauuggcaaaauucaagacucacuuucuuccacagcaagugcacuuggaaaacuucaagauguggucaaccaaaaugcacaagcuuuaaacacgcuuguuaaacaacuuagcuccaauuuuggugcaauuucaaguguuuuaaaugauauccuuucacgucuugacaaaguugaggcugaagugcaaauugauagguugaucacaggcagacuucaaaguuugcagacauaugugacucaacaauuaauuagagcugcagaaaucagagcuucugcuaaucuugcugcuacuaaaaugucagaguguguacuuggacaaucaaaaagaguugauuuuuguggaaagggcuaucaucuuauguccuucccucagucagcaccucaugguguagucuucuugcaugugacuuaugucccugcacaagaaaagaacuucacaacugcuccugccauuugucaugauggaaaagcacacuuuccucgugaaggugucuuuguuucaaauggcacacacugguuuguaacacaaaggaauuuuuaugaaccacaaaucauuacuacagacaacacauuugugucugguaacugugauguuguaauaggaauugucaacaacacaguuuaugauccuuugcaaccugaauuagacucauucaaggaggaguuagauaaauauuuuaagaaucauacaucaccagauguugauuuaggugacaucucuggcauuaaugcuucaguuguaaacauucaaaaagaaauugaccgccucaaugagguugccaagaauuuaaaugaaucucucaucgaucuccaagaacuuggaaaguaugagcaguauauaaaauggccaugguacauuuggcuagguuuuauagcuggcuugauugccauaguaauggugacaauuaugcuuugcuguaugaccaguugcuguaguugucucaagggcuguuguucuuguggauccugcugcaaauuugaugaagacgacucugagccagugcucaaaggagucaaauuacauuacacauaaggacuaguuauaagacugacuagcccgaugggccucccaacgggcccuccuccccuccuugcaccgagauuaauaaaaaaaaaaaaaaaaaaaaaaaaaaaaaaaaaaaaaaaaaaaaaaaaaaaaaaaaaaaaaaaaugcaucccccccccccccccccccccccccccccccaaaggcucuuuucagagccaccagaauu

SEQ ID NO: 12712 - RNA, 4039 nt, Artificial Sequence
  SARS-CoV-2/China/WF0004/2020__EPI_ISL_413694 spike protein mRNA wt (1-1273)
aggagaaagcuuaccauguuuguuuuucuuguuuuauugccacuagucucuagucaguguguuaaucuuacaaccagaacucaauuacccccugcauacacuaauucuuucacacgugguguuuauuacccugacaaaguuuucagauccucaguuuuacauucaacucaggacuuguucuuaccuuucuuuuccaauguuacuugguuccaugcuauacaugucucugggaccaaugguacuaagagguuugauaacccuguccuaccauuuaaugaugguguuuauuuugcuuccacugagaagucuaacauaauaagaggcuggauuuuugguacuacuuuagauucgaagacccagucccuacuuauuguuaauaacgcuacuaauguuguuauuaaagucugugaauuucaauuuuguaaugauccauuuuuggguguuuauuaccacaaaaacaacaaaaguuggacggaaagugaguucagaguuuauucuagugcgaauaauugcacuuuugaauaugucucucagccuuuucuuauggaccuugaaggaaaacaggguaauuucaaaaaucuuagggaauuuguguuuaagaauauugaugguuauuuuaaaauauauucuaagcacacgccuauuaauuuagugcgugaucucccucaggguuuuucggcuuuagaaccauugguagauuugccaauagguauuaacaucacuagguuucaaacuuuacuugcuuuacauagaaguuauuugacuccuggugauucuucuucagguuggacagcuggugcugcagcuuauuauguggguuaucuucaaccuaggacuuuucuauuaaaauauaaugaaaauggaaccauuacagaugcuguagacugugcacuugacccucucucagaaacaaaguguacguugaaauccuucacuguagaaaaaggaaucuaucaaacuucuaacuuuagaguccaaccaacagaaucuauuguuagauuuccuaauauuacaaacuugugcccuuuuggugaaguuuuuaacgccaccagauuugcaucuguuuaugcuuggaacaggaagagaaucagcaacuguguugcugauuauucuguccuauauaauuccgcaucauuuuccacuuuuaaguguuauggagugucuccuacuaaauuaaaugaucucugcuuuacuaaugucuaugcagauucauuuguaauuagaggugaugaagucagacaaaucgcuccagggcaaacuggaaagauugcugauuauaauuauaaauuaccagaugauuuuacaggcugcguuauagcuuggaauucuaacaaucuugauucuaagguuggugguaauuauaauuaccuguauagauuguuuaggaagucuaaucucaaaccuuuugagagagauauuucaacugaaaucuaucaggccgguagcacaccuuguaaugguguugaagguuuuaauuguuacuuuccuuuacaaucauaugguuuccaacccacuaaugguguugguuaccaaccauacagaguaguaguacuuucuuuugaacuucuacaugcaccagcaacuguuuguggaccuaaaaagucuacuaauuugguuaaaaacaaaugugucaauuucaacuucaaugguuuaacaggcacagguguucuuacugagucuaacaaaaaguuucugccuuuccaacaauuuggcagagacauugcugacacuacugaugcuguccgugauccacagacacuugagauucuugacauuacaccauguucuuuugguggugucaguguuauaacaccaggaacaaauacuucuaaccagguugcuguucuuuaucaggauguuaacugcacagaagucccuguugcuauucaugcagaucaacuuacuccuacuuggcguguuuauucuacagguucuaauguuuuucaaacacgugcaggcuguuuaauaggggcugaacaugucaacaacucauaugagugugacauacccauuggugcagguauaugcgcuaguuaucagacucagacuaauucuccucggcgggcacguaguguagcuagucaauccaucauugccuacacuaugucacuuggugcagaaaauucaguugcuuacucuaauaacucuauugccauacccacaaauuuuacuauuaguguuaccacagaaauucuaccagugucuaugaccaagacaucaguagauuguacaauguacauuuguggugauucaacugaaugcagcaaucuuuuguugcaauauggcaguuuuuguacacaauuaaaccgugcuuuaacuggaauagcuguugaacaagacaaaaacacccaagaaguuuuugcacaagucaaacaaauuuacaaaacaccaccaauuaaagauuuuggugguuuuaauuuuucacaaauauuaccagauccaucaaaaccaagcaagaggucauuuauugaagaucuacuuuucaacaaagugacacuugcagaugcuggcuucaucaaacaauauggugauugccuuggugauauugcugcuagagaccucauuugugcacaaaaguuuaacggccuuacuguuuugccaccuuugcucacagaugaaaugauugcucaauacacuucugcacuguuagcggguacaaucacuucugguuggaccuuuggugcaggugcugcauuacaaauaccauuugcuaugcaaauggcuuauagguuuaaugguauuggaguuacacagaauguucucuaugagaaccaaaaauugauugccaaccaauuuaauagugcuauuggcaaaauucaagacucacuuucuuccacagcaagugcacuuggaaaacuucaagauguggucaaccaaaaugcacaagcuuuaaacacgcuuguuaaacaacuuagcuccaauuuuggugcaauuucaaguguuuuaaaugauauccuuucacgucuugacaaaguugaggcugaagugcaaauugauagguugaucacaggcagacuucaaaguuugcagacauaugugacucaacaauuaauuagagcugcagaaaucagagcuucugcuaaucuugcugcuacuaaaaugucagaguguguacuuggacaaucaaaaagauuugauuuuuguggaaagggcuaucaucuuauguccuucccucagucagcaccucaugguguagucuucuugcaugugacuuaugucccugcacaagaaaagaacuucacaacugcuccugccauuugucaugauggaaaagcacacuuuccucgugaaggugucuuuguuucaaauggcacacacugguuuguaacacaaaggaauuuuuaugaaccacaaaucauuacuacagacaacacauuugugucugguaacugugauguuguaauaggaauugucaacaacacaguuuaugauccuuugcaaccugaauuagacucauucaaggaggaguuagauaaauauuuuaagaaucauacaucaccagauguugauuuaggugacaucucuggcauuaaugcuucaguuguaaacauucaaaaagaaauugaccgccucaaugagguugccaagaauuuaaaugaaucucucaucgaucuccaagaacuuggaaaguaugagcaguauauaaaauggccaugguacauuuggcuagguuuuauagcuggcuugauugccauaguaauggugacaauuaugcuuugcuguaugaccaguugcuguaguugucucaagggcuguuguucuuguggauccugcugcaaauuugaugaagacgacucugagccagugcucaaaggagucaaauuacauuacacauaaggacuaguuauaagacugacuagcccgaugggccucccaacgggcccuccuccccuccuugcaccgagauuaauaaaaaaaaaaaaaaaaaaaaaaaaaaaaaaaaaaaaaaaaaaaaaaaaaaaaaaaaaaaaaaaaugcaucccccccccccccccccccccccccccccccaaaggcucuuuucagagccaccagaauu

SEQ ID NO: 12713 - RNA, 4039 nt, Artificial Sequence
  SARS-CoV-2/China/WF0028/2020__EPI_ISL_413791 spike protein mRNA wt (1-1273)
aggagaaagcuuaccauguuuguuuuucuuguuuuauugccacuagucucuagucaguguguuaaucuuacaaccagaacucaauuacccccugcauacacuaauucuuucacacgugguguuuauuacccugacaaaguuuucagauccucaguuuuacauucaacucaggacuuguucuuaccuuucuuuuccaauguuacuugguuccaugcuauacaugucucugggaccaaugguacuaagagguuugauaacccuguccuaccauuuaaugaugguguuuauuuugcuuccacugagaagucuaacauaauaagaggcuggauuuuugguacuacuuuagauucgaagacccagucccuacuuauuguuaauaacgcuacuaauguuguuauuaaagucugugaauuucaauuuuguaaugauccauuuuuggguguuuauuaccacaaaaacaacaaaaguuggauggaaagugaguucagaguuuauucuagugcgaauaauugcacuuuugaauaugucucucagccuuuucuuauggaccuugaaggaaaacaggguaauuucaaaaaucuuagggaauuuguguuuaagaauauugaugguuauuuuaaaauauauucuaagcacacgccuauuaauuuagugcgugaucucccucaggguuuuucggcuuuagaaccauugguagauuugccaauagguauuaacaucacuagguuucaaacuuuacuugcuuuacauagaaguuauuugacuccuggugauucuucuucagguuggacagcuggugcugcagcuuauuauguggguuaucuucaaccuaggacuuuucuauuaaaauauaaugaaaauggaaccauuacagaugcuguagacugugcacuugacccucucucagaaacaaaguguacguugaaauccuucacuguagaaaaaggaaucuaucaaacuucuaacuuuagaguccaaccaacagaaucuauuguuagauuuccuaauauuacaaacuugugcccuuuuggugaaguuuuuaacgccaccagauuugcaucuguuuaugcuuggaacaggaagagaaucagcaacuguguugcugauuauucuguccuauauaauuccgcaucauuuuccacuuuuaaguguuauggagugucuccuacuaaauuaaaugaucucugcuuuacuaaugucuaugcagauucauuuguaauuagaggugaugaagucagacaaaucgcuccagggcaaacuggaaagauugcugauuauaauuauaaauuaccagaugauuuuacaggcugcguuauagcuuggaauucuaacaaucuugauucuaagguuggugguaauuauaauuaccuguauagauuguuuaggaagucuaaucucaaaccuuuugagagagauauuucaacugaaaucuaucaggccgguagcacaccuuguaaugguguugaagguuuuaauuguuacuuuccuuuacaaucauaugguuuccaacccacuaaugguguugguuaccaaccauacagaguaguaguacuuucuuuugaacuucuacaugcaccagcaacuguuuguggaccuaaaaagucuacuaauuugguuaaaaacaaaugugucaauuucaacuucaaugguuuaacaggcacagguguucuuacugagucuaacaaaaaguuucugccuuuccaacaauuuggcagagacauugcugacacuacugaugcuguccgugauccacagacacuugagauucuugacauuacaccauguucuuuugguggugucaguguuauaacaccaggaacaaauacuucuaaccagguugcuguucuuuaucaggauguuaacugcacagaagucccuguugcuauucaugcagaucaacuuacuccuacuuggcguguuuauucuacagguucuaauguuuuucaaacacgugcaggcuguuuaauaggggcugaacaugucaacaacucauaugagugugacauacccauuggugcagguauaugcgcuaguuaucagacucagacuaauucuccucggcgggcacguaguguagcuagucaauccaucauugccuacacuaugucacuuggugcagaaaauucaguugcuuacucuaauaacucuauugccauacccacaaauuuuacuauuaguguuaccacagaaauucuaccagugucuaugaccaagacaucaguagauuguacaauguacauuuguggugauucaacugaaugcagcaaucuuuuguugcaauauggcaguuuuuguacacaauuaaaccgugcuuuaacuggaauagcuguugaacaagacaaaaacacccaagaaguuuuugcacaagucaaacaaauuuacaaaacaccaccaauuaaagauuuuggugguuuuaauuuuucacaaauauuaccagauccaucaaaaccaagcaagaggucauuuauugaagaucuacuuuucaacaaagugacacuugcagaugcuggcuucaucaaacaauauggugauugccuuggugauauugcugcuagagaccucauuugugcacaaaaguuuaacggccuuacuguuuugccaccuuugcucacagaugaaaugauugcucaauacacuucugcacuguuagcggguacaaucacuucugguuggaccuuuggugcaggugcugcauuacaaauaccauuugcuaugcaaauggcuuauagguuuaaugguauuggaguuacacagaauguucucuaugagaaccaaaaauugauugccaaccaauuuaauagugcuauuggcaaaauucaagacucacuuucuuccacagcaagugcacuuggaaaacuucaagauguggucaaccaaaaugcacaagcuuuaaacacgcuuguuaaacaacuuagcuccaauuuuggugcaauuucaaguguuuuaaaugauauccuuucacgucuugacaaaguugaggcugaagugcaaauugauagguugaucacaggcagacuucaaaguuugcagacauaugugacucaacaauuaauuagagcugcagaaaucagagcuucugcuaaucuugcugcuacuaaaaugucagaguguguacuuggacaaucaaaaagaguugauuuuuguggaaagggcuaucaucuuauguccuucccucagucagcaccucaugguguagucuucuugcaugugacuuaugucccugcacaagaaaagaacuucacaacugcuccugccauuugucaugauggaaaagcacacuuuccucgugaaggugucuuuguuucaaauggcacacacugguuuguaacacaaaggaauuuuuaugaaccacaaaucauuacuacagacaacacauuugugucugguaacugugauguuguaauaggaauugucaacaacacaguuuaugauccuuugcaaccugaauuagaaucauucaaggaggaguuagauaaauauuuuaagaaucauacaucaccagauguugauuuaggugacaucucuggcauuaaugcuucaguuguaaacauucaaaaagaaauugaccgccucaaugagguugccaagaauuuaaaugaaucucucaucgaucuccaagaacuuggaaaguaugagcaguauauaaaauggccaugguacauuuggcuagguuuuauagcuggcuugauugccauaguaauggugacaauuaugcuuugcuguaugaccaguugcuguaguugucucaagggcuguuguucuuguggauccugcugcaaauuugaugaagacgacucugagccagugcucaaaggagucaaauuacauuacacauaaggacuaguuauaagacugacuagcccgaugggccucccaacgggcccuccuccccuccuugcaccgagauuaauaaaaaaaaaaaaaaaaaaaaaaaaaaaaaaaaaaaaaaaaaaaaaaaaaaaaaaaaaaaaaaaaugcaucccccccccccccccccccccccccccccccaaaggcucuuuucagagccaccagaauu

SEQ ID NO: 12714 - RNA, 4039 nt, Artificial Sequence
  SARS-CoV-2/2019-nCoV/USA-CruiseA-18/2020__MT159716.1 spike protein mRNA wt (1-1273)
aggagaaagcuuaccauguuuguuuuucuuguuuuauugccacuagucucuagucaguguguuaaucuuacaaccagaacucaauuacccccugcauacacuaauucuuucacacgugguguuuauuacccugacaaaguuuucagauccucaguuuuacauucaacucaggacuuguucuuaccuuucuuuuccaauguuacuugguuccaugcuauacaugucucugggaccaaugguacuaagagguuugauaacccuguccuaccauuuaaugaugguguuuauuuugcuuccacugagaagucuaacauaauaagaggcuggauuuuugguacuacuuuagauucgaagacccagucccuacuuauuguuaauaacgcuacuaauguuguuauuaaagucugugaauuucaauuuuguaaugauccauuuuuggguguuuauuaccacaaaaacaacaaaaguuggauggaaagugaguuaagaguuuauucuagugcgaauaauugcacuuuugaauaugucucucagccuuuucuuauggaccuugaaggaaaacaggguaauuucaaaaaucuuagggaauuuguguuuaagaauauugaugguuauuuuaaaauauauucuaagcacacgccuauuaauuuagugcgugaucucccucaggguuuuucggcuuuagaaccauugguagauuugccaauagguauuaacaucacuagguuucaaacuuuacuugcuuuacauagaaguuauuugacuccuggugauucuucuucagguuggacagcuggugcugcagcuuauuauguggguuaucuucaaccuaggacuuuucuauuaaaauauaaugaaaauggaaccauuacagaugcuguagacugugcacuugacccucucucagaaacaaaguguacguugaaauccuucacuguagaaaaaggaaucuaucaaacuucuaacuuuagaguccaaccaacagaaucuauuguuagauuuccuaauauuacaaacuugugcccuuuuggugaaguuuuuaacgccaccagauuugcaucuguuuaugcuuggaacaggaagagaaucagcaacuguguugcugauuauucuguccuauauaauuccgcaucauuuuccacuuuuaaguguuauggagugucuccuacuaaauuaaaugaucucugcuuuacuaaugucuaugcagauucauuuguaauuagaggugaugaagucagacaaaucgcuccagggcaaacuggaaagauugcugauuauaauuauaaauuaccagaugauuuuacaggcugcguuauagcuuggaauucuaacaaucuugauucuaagguuggugguaauuauaauuaccuguauagauuguuuaggaagucuaaucucaaaccuuuugagagagauauuucaacugaaaucuaucaggccgguagcacaccuuguaaugguguugaagguuuuaauuguuacuuuccuuuacaaucauaugguuuccaacccacuaaugguguugguuaccaaccauacagaguaguaguacuuucuuuugaacuucuacaugcaccagcaacuguuuguggaccuaaaaagucuacuaauuugguuaaaaacaaaugugucaauuucaacuucaaugguuuaacaggcacagguguucuuacugagucuaacaaaaaguuucugccuuuccaacaauuuggcagagacauugcugacacuacugaugcuguccgugauccacagacacuugagauucuugacauuacaccauguucuuuugguggugucaguguuauaacaccaggaacaaauacuucuaaccagguugcuguucuuuaucaggauguuaacugcacagaagucccuguugcuauucaugcagaucaacuuacuccuacuuggcguguuuauucuacagguucuaauguuuuucaaacacgugcaggcuguuuaauaggggcugaacaugucaacaacucauaugagugugacauacccauuggugcagguauaugcgcuaguuaucagacucagacuaauucuccucggcgggcacguaguguagcuagucaauccaucauugccuacacuaugucacuuggugcagaaaauucaguugcuuacucuaauaacucuauugccauacccacaaauuuuacuauuaguguuaccacagaaauucuaccagugucuaugaccaagacaucaguagauuguacaauguacauuuguggugauucaacugaaugcagcaaucuuuuguugcaauauggcaguuuuuguacacaauuaaaccgugcuuuaacuggaauagcuguugaacaagacaaaaacacccaagaaguuuuugcacaagucaaacaaauuuacaaaacaccaccaauuaaagauuuuggugguuuuaauuuuucacaaauauuaccagauccaucaaaaccaagcaagaggucauuuauugaagaucuacuuuucaacaaagugacacuugcagaugcuggcuucaucaaacaauauggugauugccuuggugauauugcugcuagagaccucauuugugcacaaaaguuuaacggccuuacuguuuugccaccuuugcucacagaugaaaugauugcucaauacacuucugcacuguuagcggguacaaucacuucugguuggaccuuuggugcaggugcugcauuacaaauaccauuugcuaugcaaauggcuuauagguuuaaugguauuggaguuacacagaauguucucuaugagaaccaaaaauugauugccaaccaauuuaauagugcuauuggcaaaauucaagacucacuuucuuccacagcaagugcacuuggaaaacuucaagauguggucaaccaaaaugcacaagcuuuaaacacgcuuguuaaacaacuuagcuccaauuuuggugcaauuucaaguguuuuaaaugauauccuuucacgucuugacaaaguugaggcugaagugcaaauugauagguugaucacaggcagacuucaaaguuugcagacauaugugacucaacaauuaauuagagcugcagaaaucagagcuucugcuaaucuugcugcuacuaaaaugucagaguguguacuuggacaaucaaaaagaguugauuuuuguggaaagggcuaucaucuuauguccuucccucagucagcaccucaugguguagucuucuugcaugugacuuaugucccugcacaagaaaagaacuucacaacugcuccugccauuugucaugauggaaaagcacacuuuccucgugaaggugucuuuguuucaaauggcacacacugguuuguaacacaaaggaauuuuuaugaaccacaaaucauuacuacagacaacacauuugugucugguaacugugauguuguaauaggaauugucaacaacacaguuuaugauccuuugcaaccugaauuagacucauucaaggaggaguuagauaaauauuuuaagaaucauacaucaccagauguugauuuaggugacaucucuggcauuaaugcuucaguuguaaacauucaaaaagaaauugaccgccucaaugagguugccaagaauuuaaaugaaucucucaucgaucuccaagaacuuggaaaguaugagcaguauauaaaauggccaugguacauuuggcuagguuuuauagcuggcuugauugccauaguaauggugacaauuaugcuuugcuguaugaccaguugcuguaguugucucaagggcuguuguucuuguggauccugcugcaaauuugaugaagacgacucugagccagugcucaaaggagucaaauuacauuacacauaaggacuaguuauaagacugacuagcccgaugggccucccaacgggcccuccuccccuccuugcaccgagauuaauaaaaaaaaaaaaaaaaaaaaaaaaaaaaaaaaaaaaaaaaaaaaaaaaaaaaaaaaaaaaaaaaugcaucccccccccccccccccccccccccccccccaaaggcucuuuucagagccaccagaauu

SEQ ID NO: 12715 - RNA, 4039 nt, Artificial Sequence
  SARS-CoV-2/SARS-CoV-2/Yunnan-01/human/2020/CHN__MT049951.1 spike protein mRNA wt (1-1273)
aggagaaagcuuaccauguuuguuuuucuuguuuuauugccacuagucucuagucaguguguuaaucuuacaaccagaacucaauuacccccugcaaacacuaauucuuucacacgugguguuuauuacccugacaaaguuuucagauccucaguuuuacauucaacucaggacuuguucuuaccuuucuuuuccaauguuacuugguuccaugcuauacaugucucugggaccaaugguacuaagagguuugauaacccuguccuaccauuuaaugaugguguuuauuuugcuuccacugagaagucuaacauaauaagaggcuggauuuuugguacuacuuuagauucgaagacccagucccuacuuauuguuaauaacgcuacuaauguuguuauuaaagucugugaauuucaauuuuguaaugauccauuuuuggguguuuauuaccacaaaaacaacaaaaguuggauggaaagugaguucagaguuuauucuagugcgaauaauugcacuuuugaauaugucucucagccuuuucuuauggaccuugaaggaaaacaggguaauuucaaaaaucuuagggaauuuguguuuaagaauauugaugguuauuuuaaaauauauucuaagcacacgccuauuaauuuagugcgugaucucccucaggguuuuucggcuuuagaaccauugguagauuugccaauagguauuaacaucacuagguuucaaacuuuacuugcuuuacauagaaguuauuugacuccuggugauucuucuucagguuggacagcuggugcugcagcuuauuauguggguuaucuucaaccuaggacuuuucuauuaaaauauaaugaaaauggaaccauuacagaugcuguagacugugcacuugacccucucucagaaacaaaguguacguugaaauccuucacuguagaaaaaggaaucuaucaaacuucuaacuuuagaguccaaccaacagaaucuauuguuagauuuccuaauauuacaaacuugugcccuuuuggugaaguuuuuaacgccaccagauuugcaucuguuuaugcuuggaacaggaagagaaucagcaacuguguugcugauuauucuguccuauauaauuccgcaucauuuuccacuuuuaaguguuauggagugucuccuacuaaauuaaaugaucucugcuuuacuaaugucuaugcagauucauuuguaauuagaggugaugaagucagacaaaucgcuccagggcaaacuggaaagauugcugauuauaauuauaaauuaccagaugauuuuacaggcugcguuauagcuuggaauucuaacaaucuugauucuaagguuggugguaauuauaauuaccuguauagauuguuuaggaagucuaaucucaaaccuuuugagagagauauuucaacugaaaucuaucaggccgguagcacaccuuguaaugguguugaagguuuuaauuguuacuuuccuuuacaaucauaugguuuccaacccacuaaugguguugguuaccaaccauacagaguaguaguacuuucuuuugaacuucuacaugcaccagcaacuguuuguggaccuaaaaagucuacuaauuugguuaaaaacaaaugugucaauuucaacuucaaugguuuaacaggcacagguguucuuacugagucuaacaaaaaguuucugccuuuccaacaauuuggcagagacauugcugacacuacugaugcuguccgugauccacagacacuugagauucuugacauuacaccauguucuuuugguggugucaguguuauaacaccaggaacaaauacuucuaaccagguugcuguucuuuaucaggauguuaacugcacagaagucccuguugcuauucaugcagaucaacuuacuccuacuuggcguguuuauucuacagguucuaauguuuuucaaacacgugcaggcuguuuaauaggggcugaacaugucaacaacucauaugagugugacauacccauuggugcagguauaugcgcuaguuaucagacucagacuaauucuccucggcgggcacguaguguagcuagucaauccaucauugccuacacuaugucacuuggugcagaaaauucaguugcuuacucuaauaacucuauugccauacccacaaauuuuacuauuaguguuaccacagaaauucuaccagugucuaugaccaagacaucaguagauuguacaauguacauuuguggugauucaacugaaugcagcaaucuuuuguugcaauauggcaguuuuuguacacaauuaaaccgugcuuuaacuggaauagcuguugaacaagacaaaaacacccaagaaguuuuugcacaagucaaacaaauuuacaaaacaccaccaauuaaagauuuuggugguuuuaauuuuucacaaauauuaccagauccaucaaaaccaagcaagaggucauuuauugaagaucuacuuuucaacaaagugacacuugcagaugcuggcuucaucaaacaauauggugauugccuuggugauauugcugcuagagaccucauuugugcacaaaaguuuaacggccuuacuguuuugccaccuuugcucacagaugaaaugauugcucaauacacuucugcacuguuagcggguacaaucacuucugguuggaccuuuggugcaggugcugcauuacaaauaccauuugcuaugcaaauggcuuauagguuuaaugguauuggaguuacacagaauguucucuaugagaaccaaaaauugauugccaaccaauuuaauagugcuauuggcaaaauucaagacucacuuucuuccacagcaagugcacuuggaaaacuucaagauguggucaaccaaaaugcacaagcuuuaaacacgcuuguuaaacaacuuagcuccaauuuuggugcaauuucaaguguuuuaaaugauauccuuucacgucuugacaaaguugaggcugaagugcaaauugauagguugaucacaggcagacuucaaaguuugcagacauaugugacucaacaauuaauuagagcugcagaaaucagagcuucugcuaaucuugcugcuacuaaaaugucagaguguguacuuggacaaucaaaaagaguugauuuuuguggaaagggcuaucaucuuauguccuucccucagucagcaccucaugguguagucuucuugcaugugacuuaugucccugcacaagaaaagaacuucacaacugcuccugccauuugucaugauggaaaagcacacuuuccucgugaaggugucuuuguuucaaauggcacacacugguuuguaacacaaaggaauuuuuaugaaccacaaaucauuacuacagacaacacauuugugucugguaacugugauguuguaauaggaauugucaacaacacaguuuaugauccuuugcaaccugaauuagacucauucaaggaggaguuagauaaauauuuuaagaaucauacaucaccagauguugauuuaggugacaucucuggcauuaaugcuucaguuguaaacauucaaaaagaaauugaccgccucaaugagguugccaagaauuuaaaugaaucucucaucgaucuccaagaacuuggaaaguaugagcaguauauaaaauggccaugguacauuuggcuagguuuuauagcuggcuugauugccauaguaauggugacaauuaugcuuugcuguaugaccaguugcuguaguugucucaagggcuguuguucuuguggauccugcugcaaauuugaugaagacgacucugagccagugcucaaaggagucaaauuacauuacacauaaggacuaguuauaagacugacuagcccgaugggccucccaacgggcccuccuccccuccuugcaccgagauuaauaaaaaaaaaaaaaaaaaaaaaaaaaaaaaaaaaaaaaaaaaaaaaaaaaaaaaaaaaaaaaaaaugcaucccccccccccccccccccccccccccccccaaaggcucuuuucagagccaccagaauu

SEQ ID NO: 12716 - RNA, 4039 nt, Artificial Sequence
  SARS-CoV-2/USA/WA-UW292/2020__EPI_ISL_418077 spike protein mRNA wt (1-1273)
aggagaaagcuuaccauguuuguuuuucuuguuuuauugccacuagucucuagucaguguguuaaucuuacaaccagaacucaauuacccccugcauacacuaauucuuucacacgugguguuuauuacccugacaaaguuuucagauccucaguuuuacauucaacucaggacuuguucuuaccuuucuuuuccaauguuacuugguuccaugcuauacaugucucugggaccaaugguacuaagagguuugauaacccuguccuaccauuuaaugaugguguuuauuuugcuuccacugagaagucuaacauaauaagaggcuggauuuuugguacuacuuuagauucgaagacccagucccuacuuauuguuaauaacgcuacuaauguuguuauuaaagucugugaauuucaauuuuguaaugauccauuuuuggguguuuauuaccacaaaaacaacaaaaguuggauggaaagugaguucagaguuuauucuagugcgaauaauugcacuuuugaauaugucucucagccuuuucuuauggaccuugaaggaaaacaggguaauuucaaaaaucuuagggaauuuguguuuaagaauauugaugguuauuuuaaaauauauucuaagcacacgccuauuaauuuagugcgugaucucccucaggguuuuucggcuuuagaaccauugguagauuugccaauagguauuaacaucacuagguuucaaacuuuacuugcuuuacauagaaguuauuugacuccuggugauucuucuucagguuggacagcuggugcugcagcuuauuauguggguuaucuucaaccuaggacuuuucuauuaaaauauaaugaaaauggaaccauuacagaugcuguagacugugcacuugacccucucucagaaacaaaguguacguugaaauccuucacuguagaaaaaggaaucuaucaaacuucuaacuuuagaguccaaccaacagaaucuauuguuagauuuccuaauauuacaaacuugugcccuuuuggugaaguuuuuaacgccaccagauuugcaucuguuuaugcuuggaacaggaagagaaucagcaacuguguugcugauuauucuguccuauauaauuccgcaucauuuuccacuuuuaaguguuauggagugucuccuacuaaauuaaaugaucucugcuuuacuaaugucuaugcagauucauuuguaauuagaggugaugaagucagacaaaucgcuccagggcaaacuggaaagauugcugauuauaauuauaaauuaccagaugauuuuacaggcugcguuauagcuuggaauucuaacaaucuugauucuaagguuggugguaauuauaauuaccuguauagauuguuuaggaagucuaaucucaaaccuuuugagagagauauuucaacugaaaucuaucaggccaguagcacaccuuguaaugguguugaagguuuuaauuguuacuuuccuuuacaaucauaugguuuccaacccacuaaugguguugguuaccaaccauacagaguaguaguacuuucuuuugaacuucuacaugcaccagcaacuguuuguggaccuaaaaagucuacuaauuugguuaaaaacaaaugugucaauuucaacuucaaugguuuaacaggcacagguguucuuacugagucuaacaaaaaguuucugccuuuccaacaauuuggcagagacauugcugacacuacugaugcuguccgugauccacagacacuugagauucuugacauuacaccauguucuuuugguggugucaguguuauaacaccaggaacaaauacuucuaaccagguugcuguucuuuaucaggauguuaacugcacagaagucccuguugcuauucaugcagaucaacuuacuccuacuuggcguguuuauucuacagguucuaauguuuuucaaacacgugcaggcuguuuaauaggggcugaacaugucaacaacucauaugagugugacauacccauuggugcagguauaugcgcuaguuaucagacucagacuaauucuccucggcgggcacguaguguagcuagucaauccaucauugccuacacuaugucacuuggugcagaaaauucaguugcuuacucuaauaacucuauugccauacccacaaauuuuacuauuaguguuaccacagaaauucuaccagugucuaugaccaagacaucaguagauuguacaauguacauuuguggugauucaacugaaugcagcaaucuuuuguugcaauauggcaguuuuuguacacaauuaaaccgugcuuuaacuggaauagcuguugaacaagacaaaaacacccaagaaguuuuugcacaagucaaacaaauuuacaaaacaccaccaauuaaagauuuuggugguuuuaauuuuucacaaauauuaccagauccaucaaaaccaagcaagaggucauuuauugaagaucuacuuuucaacaaagugacacuugcagaugcuggcuucaucaaacaauauggugauugccuuggugauauugcugcuagagaccucauuugugcacaaaaguuuaacggccuuacuguuuugccaccuuugcucacagaugaaaugauugcucaauacacuucugcacuguuagcggguacaaucacuucugguuggaccuuuggugcaggugcugcauuacaaauaccauuugcuaugcaaauggcuuauagguuuaaugguauuggaguuacacagaauguucucuaugagaaccaaaaauugauugccaaccaauuuaauagugcuauuggcaaaauucaagacucacuuucuuccacagcaagugcacuuggaaaacuucaagauguggucaaccaaaaugcacaagcuuuaaacacgcuuguuaaacaacuuagcuccaauuuuggugcaauuucaaguguuuuaaaugauauccuuucacgucuugacaaaguugaggcugaagugcaaauugauagguugaucacaggcagacuucaaaguuugcagacauaugugacucaacaauuaauuagagcugcagaaaucagagcuucugcuaaucuugcugcuacuaaaaugucagaguguguacuuggacaaucaaaaagaguugauuuuuguggaaagggcuaucaucuuauguccuucccucagucagcaccucaugguguagucuucuugcaugugacuuaugucccugcacaagaaaagaacuucacaacugcuccugccauuugucaugauggaaaagcacacuuuccucgugaaggugucuuuguuucaaauggcacacacugguuuguaacacaaaggaauuuuuaugaaccacaaaucauuacuacagacaacacauuugugucugguaacugugauguuguaauaggaauugucaacaacacaguuuaugauccuuugcaaccugaauuagacucauucaaggaggaguuagauaaauauuuuaagaaucauacaucaccagauguugauuuaggugacaucucuggcauuaaugcuucaguuguaaacauucaaaaagaaauugaccgccucaaugagguugccaagaauuuaaaugaaucucucaucgaucuccaagaacuuggaaaguaugagcaguauauaaaauggccaugguacauuuggcuagguuuuauagcuggcuugauugccauaguaauggugacaauuaugcuuugcuguaugaccaguugcuguaguugucucaagggcuguuguucuuguggauccugcugcaaauuugaugaagacgacucugagccagugcucaaaggagucaaauuacauuacacauaaggacuaguuauaagacugacuagcccgaugggccucccaacgggcccuccuccccuccuugcaccgagauuaauaaaaaaaaaaaaaaaaaaaaaaaaaaaaaaaaaaaaaaaaaaaaaaaaaaaaaaaaaaaaaaaaugcaucccccccccccccccccccccccccccccccaaaggcucuuuucagagccaccagaauu

SEQ ID NO: 12717 - RNA, 4039 nt, Artificial Sequence
  SARS-CoV-2/Iceland/192/2020__EPI_ISL_417819 spike protein mRNA wt (1-1273)
aggagaaagcuuaccauguuuguuuuuuuuguuuuauugccacuagucucuagucaguguguuaaucuuacaaccagaacucaauuacccccugcauacacuaauucuuucacacgugguguuuauuacccugacaaaguuuucagauccucaguuuuacauucaacucaggacuuguucuuaccuuucuuuuccaauguuacuugguuccaugcuauacaugucucugggaccaaugguacuaagagguuugauaacccuguccuaccauuuaaugaugguguuuauuuugcuuccacugagaagucuaacauaauaagaggcuggauuuuugguacuacuuuagauucgaagacccagucccuacuuauuguuaauaacgcuacuaauguuguuauuaaagucugugaauuucaauuuuguaaugauccauuuuuggguguuuauuaccacaaaaacaacaaaaguuggauggaaagugaguucagaguuuauucuagugcgaauaauugcacuuuugaauaugucucucagccuuuucuuauggaccuugaaggaaaacaggguaauuucaaaaaucuuagggaauuuguguuuaagaauauugaugguuauuuuaaaauauauucuaagcacacgccuauuaauuuagugcgugaucucccucaggguuuuucggcuuuagaaccauugguagauuugccaauagguauuaacaucacuagguuucaaacuuuacuugcuuuacauagaaguuauuugacuccuggugauucuucuucagguuggacagcuggugcugcagcuuauuauguggguuaucuucaaccuaggacuuuucuauuaaaauauaaugaaaauggaaccauuacagaugcuguagacugugcacuugacccucucucagaaacaaaguguacguugaaauccuucacuguagaaaaaggaaucuaucaaacuucuaacuuuagaguccaaccaacagaaucuauuguuagauuuccuaauauuacaaacuugugcccuuuuggugaaguuuuuaacgccaccagauuugcaucuguuuaugcuuggaacaggaagagaaucagcaacuguguugcugauuauucuguccuauauaauuccgcaucauuuuccacuuuuaaguguuauggagugucuccuacuaaauuaaaugaucucugcuuuacuaaugucuaugcagauucauuuguaauuagaggugaugaagucagacaaaucgcuccagggcaaacuggaaagauugcugauuauaauuauaaauuaccagaugauuuuacaggcugcguuauagcuuggaauucuaacaaucuugauucuaagguuggugguaauuauaauuaccuguauagauuguuuaggaagucuaaucucaaaccuuuugagagagauauuucaacugaaaucuaucaggccgguagcacaccuuguaaugguguugaagguuuuaauuguuacuuuccuuuacaaucauaugguuuccaacccacuaaugguguugguuaccaaccauacagaguaguaguacuuucuuuugaacuucuacaugcaccagcaacuguuuguggaccuaaaaagucuacuaauuugguuaaaaacaaaugugucaauuucaacuucaaugguuuaacaggcacagguguucuuacugagucuaacaaaaaguuucugccuuuccaacaauuuggcagagacauugcugacacuacugaugcuguccgugauccacagacacuugagauucuugacauuacaccauguucuuuugguggugucaguguuauaacaccaggaacaaauacuucuaaccagguugcuguucuuuaucaggguguuaacugcacagaagucccuguugcuauucaugcagaucaacuuacuccuacuuggcguguuuauucuacagguucuaauguuuuucaaacacgugcaggcuguuuaauaggggcugaacaugucaacaacucauaugagugugacauacccauuggugcagguauaugcgcuaguuaucagacucagacuaauucuccucggcgggcacguaguguagcuagucaauccaucauugccuacacuaugucacuuggugcagaaaauucaguugcuuacucuaauaacucuauugccauacccacaaauuuuacuauuaguguuaccacagaaauucuaccagugucuaugaccaagacaucaguagauuguacaauguacauuuguggugauucaacugaaugcagcaaucuuuuguugcaauauggcaguuuuuguacacaauuaaaccgugcuuuaacuggaauagcuguugaacaagacaaaaacacccaagaaguuuuugcacaagucaaacaaauuuacaaaacaccaccaauuaaagauuuuggugguuuuaauuuuucacaaauauuaccagauccaucaaaaccaagcaagaggucauuuauugaagaucuacuuuucaacaaagugacacuugcagaugcuggcuucaucaaacaauauggugauugccuuggugauauugcugcuagagaccucauuugugcacaaaaguuuaacggccuuacuguuuugccaccuuugcucacagaugaaaugauugcucaauacacuucugcacuguuagcggguacaaucacuucugguuggaccuuuggugcaggugcugcauuacaaauaccauuugcuaugcaaauggcuuauagguuuaaugguauuggaguuacacagaauguucucuaugagaaccaaaaauugauugccaaccaauuuaauagugcuauuggcaaaauucaagacucacuuucuuccacagcaagugcacuuggaaaacuucaagauguggucaaccaaaaugcacaagcuuuaaacacgcuuguuaaacaacuuagcuccaauuuuggugcaauuucaaguguuuuaaaugauauccuuucacgucuugacaaaguugaggcugaagugcaaauugauagguugaucacaggcagacuucaaaguuugcagacauaugugacucaacaauuaauuagagcugcagaaaucagagcuucugcuaaucuugcugcuacuaaaaugucagaguguguacuuggacaaucaaaaagaguugauuuuuguggaaagggcuaucaucuuauguccuucccucagucagcaccucaugguguagucuucuugcaugugacuuaugucccugcacaagaaaagaacuucacaacugcuccugccauuugucaugauggaaaagcacacuuuccucgugaaggugucuuuguuucaaauggcacacacugguuuguaacacaaaggaauuuuuaugaaccacaaaucauuacuacagacaacacauuugugucugguaacugugauguuguaauaggaauugucaacaacacaguuuaugauccuuugcaaccugaauuagacucauucaaggaggaguuagauaaauauuuuaagaaucauacaucaccagauguugauuuaggugacaucucuggcauuaaugcuucaguuguaaacauucaaaaagaaauugaccgccucaaugagguugccaagaauuuaaaugaaucucucaucgaucuccaagaacuuggaaaguaugagcaguauauaaaauggccaugguacauuuggcuagguuuuauagcuggcuugauugccauaguaauggugacaauuaugcuuugcuguaugaccaguugcuguaguugucucaagggcuguuguucuuguggauccugcugcaaauuugaugaagacgacucugagccagugcucaaaggagucaaauuacauuacacauaaggacuaguuauaagacugacuagcccgaugggccucccaacgggcccuccuccccuccuugcaccgagauuaauaaaaaaaaaaaaaaaaaaaaaaaaaaaaaaaaaaaaaaaaaaaaaaaaaaaaaaaaaaaaaaaaugcaucccccccccccccccccccccccccccccccaaaggcucuuuucagagccaccagaauu

SEQ ID NO: 12718 - RNA, 4039 nt, Artificial Sequence
  SARS-CoV-2/Belgium/ULG-6939/2020__EPI_ISL_417020 spike protein mRNA wt (1-1273)
aggagaaagcuuaccauguuuguuuuucuuguuuuauugccacuagucucuagucaguguguuaaucuuacaaccagaacucaauuacccccugcauacacuaauucuuucacacgugguguuuauuacccugacaaaguuuucagauccucaguuuuacauucaacucaggacuuguucuuaccuuucuuuuccaauguuacuugguuccaugcuauacaugucucugggaccaaugguacuaagagguuugauaacccuguccuaccauuuaaugaugguguuuauuuugcuuccacugagaagucuaacauaauaagaggcuggauuuuugguacuacuuuagauucgaagacccagucccuacuuauuguuaauaacgcuacuaauguuguuauuaaagucugugaauuucaauuuuguaaugauccauuuuuggguguuuauuaccacaaaaacaacaaaaguuggauggaaagugaguucagaguuuauucuagugcgaauaauugcacuuuugaauaugucucucagccuuuucuuauggaccuugaaggaaaacaggguaauuucaaaaaucuuagggaauuuguguuuaagaauauugaugguuauuuuaaaauauauucuaagcacacgccuauuaauuuagugcgugaucucccucaggguuuuucggcuuuagaaccauugguagauuugccaauagguauuaacaucacuagguuucaaacuuuacuugcuuuacauagaaguuauuugacuccuggugauucuucuucagguuggacagcuggugcugcagcuuauuauguggguuaucuucaaccuaggacuuuucuauuaaaauauaaugaaaauggaaccauuacagaugcuguagacugugcacuugacccucucucagaaacaaaguguacguugaaauccuucacuguagaaaaaggaaucuaucaaacuucuaacuuuagaguccaaccaacagaaucuauuguuagauuuccuaauauuacaaacuugugcccuuuuggugaaguuuuuaacgccaccagauuugcaucuguuuaugcuuggaacaggaagagaaucagcaacuguguugcugauuauucuguccuauauaauuccgcaucauuuuccacuuuuaaguguuauggagugucuccuacuaaauuaaaugaucucugcuuuacuaaugucuaugcagauucauuuguaauuagaggugaugaagucagacaaaucgcuccagggcaaacuggaaagauugcugauuauaauuauaaauuaccagaugauuuuacaggcugcguuauagcuuggaauucuaacaaucuugauucuaagguuggugguaauuauaauuaccuguauagauuguuuaggaagucuaaucucaaaccuuuugagagagauauuucaacugaaaucuaucaggccgguagcacaccuuguaaugguguugaagguuuuaauuguuacuuuccuuuacaaucauaugguuuccaacccacuaaugguguugguuaccaaccauacagaguaguaguacuuucuuuugaacuucuacaugcaccagcaacuguuuguggaccuaaaaagucuacuaauuugguuaaaaacaaaugugucaauuucaacuucaaugguuuaacaggcacagguguucuuacugagucuaacaaaaaguuucugccuuuccaacaauuuggcagagacauugcugacacuacugaugcuguccgugauccacagacacuugagauucuugacauuacaccauguucuuuugguggugucaguguuauaacaccaggaacaaauacuucuaaccagguugcuguucuuuaucaggguguuaacugcacagaagucccuguugcuauucaugcagaucaacuuacuccuacuuggcguguuuauucuacagguucuaauguuuuucaaacacgugcaggcuguuuaauaggggcugaacaugucaacaacucauaugagugugacauacccauuggugcagguauaugcgcuaguuaucagacucagacuaauucuccucggcgggcacguaguguagcuagucaauccaucauugccuacacuaugucacuuggugcagaaaauucaguuguuuacucuaauaacucuauugccauacccacaaauuuuacuauuaguguuaccacagaaauucuaccagugucuaugaccaagacaucaguagauuguacaauguacauuuguggugauucaacugaaugcagcaaucuuuuguugcaauauggcaguuuuuguacacaauuaaaccgugcuuuaacuggaauagcuguugaacaagacaaaaacacccaagaaguuuuugcacaagucaaacaaauuuacaaaacaccaccaauuaaagauuuuggugguuuuaauuuuucacaaauauuaccagauccaucaaaaccaagcaagaggucauuuauugaagaucuacuuuucaacaaagugacacuugcagaugcuggcuucaucaaacaauauggugauugccuuggugauauugcugcuagagaccucauuugugcacaaaaguuuaacggccuuacuguuuugccaccuuugcucacagaugaaaugauugcucaauacacuucugcacuguuagcggguacaaucacuucugguuggaccuuuggugcaggugcugcauuacaaauaccauuugcuaugcaaauggcuuauagguuuaaugguauuggaguuacacagaauguucucuaugagaaccaaaaauugauugccaaccaauuuaauagugcuauuggcaaaauucaagacucacuuucuuccacagcaagugcacuuggaaaacuucaagauguggucaaccaaaaugcacaagcuuuaaacacgcuuguuaaacaacuuagcuccaauuuuggugcaauuucaaguguuuuaaaugauauccuuucacgucuugacaaaguugaggcugaagugcaaauugauagguugaucacaggcagacuucaaaguuugcagacauaugugacucaacaauuaauuagagcugcagaaaucagagcuucugcuaaucuugcugcuacuaaaaugucagaguguguacuuggacaaucaaaaagaguugauuuuuguggaaagggcuaucaucuuauguccuucccucagucagcaccucaugguguagucuucuugcaugugacuuaugucccugcacaagaaaagaacuucacaacugcuccugccauuugucaugauggaaaagcacacuuuccucgugaaggugucuuuguuucaaauggcacacacugguuuguaacacaaaggaauuuuuaugaaccacaaaucauuacuacagacaacacauuugugucugguaacugugauguuguaauaggaauugucaacaacacaguuuaugauccuuugcaaccugaauuagacucauucaaggaggaguuagauaaauauuuuaagaaucauacaucaccagauguugauuuaggugacaucucuggcauuaaugcuucaguuguaaacauucaaaaagaaauugaccgccucaaugagguugccaagaauuuaaaugaaucucucaucgaucuccaagaacuuggaaaguaugagcaguauauaaaauggccaugguacauuuggcuagguuuuauagcuggcuugauugccauaguaauggugacaauuaugcuuugcuguaugaccaguugcuguaguugucucaagggcuguuguucuuguggauccugcugcaaauuugaugaagacgacucugagccagugcucaaaggagucaaauuacauuacacauaaggacuaguuauaagacugacuagcccgaugggccucccaacgggcccuccuccccuccuugcaccgagauuaauaaaaaaaaaaaaaaaaaaaaaaaaaaaaaaaaaaaaaaaaaaaaaaaaaaaaaaaaaaaaaaaaugcaucccccccccccccccccccccccccccccccaaaggcucuuuucagagccaccagaauu

SEQ ID NO: 12719 - RNA, 4039 nt, Artificial Sequence
  SARS-CoV-2/France/HF2496/2020__EPI_ISL_418231 spike protein mRNA wt (1-1273)
aggagaaagcuuaccauguuuguuuuucuuguuuuauugccacuagucucuagucaguguguuaaucuuacaaccagaacucaauuacccccugcauacacuaauucuuucacacgugguguuuauuacccugacaaaguuuucagauccucaguuuuacauucaacucaggacuuguucuuaccuuucuuuuccaauguuacuugguuccaugcuauacaugucucugggaccaaugguacuaagagguuugauaacccuguccuaccauuuaaugaugguguuuauuuugcuuccacugagaagucuaacauaauaagaggcuggauuuuugguacuacuuuagauucgaagacccagucccuacuuauuguuaauaacgcuacuaauguuguuauuaaagucugugaauuucaauuuuguaaugauccauuuuuggguguuuauuaccacaaaaacaacaaaaguuggauggaaagugaguucagaguuuauucuagugcgaauaauugcacuuuugaauaugucucucagccuuuucuuauggaccuugaaggaaaacaggguaauuucaaaaaucuuagggaauuuguguuuaagaauauugaugguuauuuuaaaauauauucuaagcacacgccuauuaauuuagugcgugaucucccucaggguuuuucggcuuuagaaccauugguagauuugccaauagguauuaacaucacuagguuucaaacuuuacuugcuuuacauagaaguuauuugacuccuggugauucuucuucagguuggacagcuggugcugcagcuuauuauguggguuaucuucaaccuaggacuuuucuauuaaaauauaaugaaaauggaaccauuacagaugcuguagacugugcacuugacccucucucagaaacaaaguguacguugaaauccuucacuguagaaaaaggaaucuaucaaacuucuaacuuuagaguccaaccaacagaaucuauuguuagauuuccuaauauuacaaacuugugcccuuuuggugaaguuuuuaacgccaccagauuugcaucuguuuaugcuuggaacaggaagagaaucagcaacuguguugcugauuauucuguccuauauaauuccgcaucauuuuccacuuuuaaguguuauggagugucuccuacuaaauuaaaugaucucugcuuuacuaaugucuaugcagauucauuuguaauuagaggugaugaagucagacaaaucgcuccagggcaaacuggaaagauugcugauuauaauuauaaauuaccagaugauuuuacaggcugcguuauagcuuggaauucuaacaaucuugauucuaagguuggugguaauuauaauuaccuguauagauuguuuaggaagucuaaucucaaaccuuuugagagagauauuucaacugaaaucuaucaggccgguagcacaccuuguaaugguguugaagguuuuaauuguuacuuuccuuuacaaucauaugguuuccaacccacuaaugguguugguuaccaaccauacagaguaguaguacuuucuuuugaacuucuacaugcaccagcaacuguuuguggaccuaaaaagucuacuaauuugguuaaaaacaaaugugucaauuucaacuucaaugguuuaacaggcacagguguucuuacugagucuaacaaaaaguuucugccuuuccaacaauuuggcagagacauugcugacacuacugaugcuguccgugauccacagacacuugagauucuugacauuacaccauguucuuuugguggugucaguguuauaacaccaggaacaaauacuucuaaccagguugcuguucuuuaucaggguguuaacugcacagaagucccuguugcuauucaugcagaucaacuuacuccuacuuggcguguuuauucuacagguucuaauguuuuucaaacacgugcaggcuguuuaauaggggcugaacaugucaacaacucauaugagugugacauacccauuggugcagguauaugcgcuaguuaucagacucagacuaauucuccucggcgggcacguaguguagcuagucaauccaucauugccuacacuaugucacuuggugcagaaaauucaguugcuuacucuaauaacucuauugccauacccacaaauuuuacuauuaguguuaccacagaaauucuaccagugucuaugaccaagacaucaguagauuguacaauguacauuuguggugauucaacugaaugcagcaaucuuuuguugcaauauggcaguuuuuguacacaauuaaaccgugcuuuaacuggaauagcuguugaacaagacaaaaacacccaagaaguuuuugcacaagucaaacaaauuuacaaaacaccaccaauuaaagauuuuggugguuuuaauuuuucacaaauauuaccagauccaucaaaaccaagcaagaggucauuuauugaagaucuacuuuucaacaaagugacacuugcagaugcuggcuucaucaaacaauauggugauugccuuggugauauuguugcuagagaccucauuugugcacaaaaguuuaacggccuuacuguuuugccaccuuugcucacagaugaaaugauugcucaauacacuucugcacuguuagcggguacaaucacuucugguuggaccuuuggugcaggugcugcauuacaaauaccauuugcuaugcaaauggcuuauagguuuaaugguauuggaguuacacagaauguucucuaugagaaccaaaaauugauugccaaccaauuuaauagugcuauuggcaaaauucaagacucacuuucuuccacagcaagugcacuuggaaaacuucaagauguggucaaccaaaaugcacaagcuuuaaacacgcuuguuaaacaacuuagcuccaauuuuggugcaauuucaaguguuuuaaaugauauccuuucacgucuugacaaaguugaggcugaagugcaaauugauagguugaucacaggcagacuucaaaguuugcagacauaugugacucaacaauuaauuagagcugcagaaaucagagcuucugcuaaucuugcugcuacuaaaaugucagaguguguacuuggacaaucaaaaagaguugauuuuuguggaaagggcuaucaucuuauguccuucccucagucagcaccucaugguguagucuucuugcaugugacuuaugucccugcacaagaaaagaacuucacaacugcuccugccauuugucaugauggaaaagcacacuuuccucgugaaggugucuuuguuucaaauggcacacacugguuuguaacacaaaggaauuuuuaugaaccacaaaucauuacuacagacaacacauuugugucugguaacugugauguuguaauaggaauugucaacaacacaguuuaugauccuuugcaaccugaauuagacucauucaaggaggaguuagauaaauauuuuaagaaucauacaucaccagauguugauuuaggugacaucucuggcauuaaugcuucaguuguaaacauucaaaaagaaauugaccgccucaaugagguugccaagaauuuaaaugaaucucucaucgaucuccaagaacuuggaaaguaugagcaguauauaaaauggccaugguacauuuggcuagguuuuauagcuggcuugauugccauaguaauggugacaauuaugcuuugcuguaugaccaguugcuguaguugucucaagggcuguuguucuuguggauccugcugcaaauuugaugaagacgacucugagccagugcucaaaggagucaaauuacauuacacauaaggacuaguuauaagacugacuagcccgaugggccucccaacgggcccuccuccccuccuugcaccgagauuaauaaaaaaaaaaaaaaaaaaaaaaaaaaaaaaaaaaaaaaaaaaaaaaaaaaaaaaaaaaaaaaaaugcaucccccccccccccccccccccccccccccccaaaggcucuuuucagagccaccagaauu

SEQ ID NO: 12720 - RNA, 4039 nt, Artificial Sequence
  SARS-CoV-2/USA/WA-UW291/2020__EPI_ISL_418076 spike protein mRNA wt (1-1273)
aggagaaagcuuaccauguuuguuuuucuuguuuuauugccacuagucucuagucaguguguuaaucuuacaaccagaacucaauuacccccugcauacacuaauucuuucacacgugguguuuauuacccugacaaaguuuucagauccucaguuuuacauucaacucaggacuuguucuuaccuuucuuuuccaauguuacuugguuccaugcuauacaugucucugggaccaaugguacuaagagguuugauaacccuguccuaccauuuaaugaugguguuuauuuugcuuccacugagaagucuaacauaauaagaggcuggauuuuugguacuacuuuagauucgaagacccagucccuacuuauuguuaauaacgcuacuaauguuguuauuaaagucugugaauuucaauuuuguaaugauccauuuuuggguguuuauuaccacaaaaacaacaaaaguuggauggaaagugaguucagaguuuauucuagugcgaauaauugcacuuuugaauaugucucucagccuuuucuuauggaccuugaaggaaaacaggguaauuucaaaaaucuuagggaauuuguguuuaagaauauugaugguuauuuuaaaauauauucuaagcacacgccuauuaauuuagugcgugaucucccucaggguuuuucggcuuuagaaccauugguagauuugccaauagguauuaacaucacuagguuucaaacuuuacuugcuuuacauagaaguuauuugacuccuggugauucuucuucagguuggacagcuggugcugcagcuuauuauguggguuaucuucaaccuaggacuuuucuauuaaaauauaaugaaaauggaaccauuacagaugcuguagacugugcacuugacccucucucagaaacaaaguguacguugaaauccuucacuguagaaaaaggaaucuaucaaacuucuaacuuuagaguccaaccaacagaaucuauuguuagauuuccuaauauuacaaacuugugcccuuuuggugaaguuuuuaacgccaccagauuugcaucuguuuaugcuuggaacaggaagagaaucagcaacuguguugcugauuauucuguccuauauaauuccgcaucauuuuccacuuuuaaguguuauggagugucuccuacuaaauuaaaugaucucugcuuuacuaaugucuaugcagauucauuuguaauuagaggugaugaagucagacaaaucgcuccagggcaaacuggaaagauugcugauuauaauuauaaauuaccagaugauuuuacaggcugcguuauagcuuggaauucuaacaaucuugauucuaagguuggugguaauuauaauuaccuguauagauuguuuaggaagucuaaucucaaaccuuuugagagagauauuucaacugaaaucuaucaggccgguagcacaccuuguaaugguguugaagguuuuaauuguuacuuuccuuuacaaucauaugguuuccaacccacuaaugguguugguuaccaaccauacagaguaguaguacuuucuuuugaacuucuacaugcaccagcaacuguuuguggaccuaaaaagucuacuaauuugguuaaaaacaaaugugucaauuucaacuucaaugguuuaacaggcacagguguucuuacugagucuaacaaaaaguuucugccuuuccaacaauuuggcagagacauugcugacacuacugaugcuguccgugauccacagacacuugagauucuugacauuacaccauguucuuuugguggugucaguguuauaacaccaggaacaaauacuucuaaccagguugcuguucuuuaucaggguguuaacugcacagaagucccuguugcuauucaugcagaucaacuuacuccuacuuggcguguuuauucuacagguucuaauguuuuucaaacacgugcaggcuguuuaauaggggcugaacaugucaacaacucauaugagugugacauacccauuggugcagguauaugcgcuaguuaucagacucagacuaauucuccucggcgggcacguaguguagcuagucaauccaucauugccuacacuaugucacuuggugcagaaaauucaguugcuuacucuaauaacucuauugccauacccacaaauuuuacuauuaguguuaccacagaaauucuaccagugucuaugaccaagacaucaguagauuguacaauguacauuuguggugauucaacugaaugcagcaaucuuuuguugcaauauggcaguuuuuguacacaauuaaaccgugcuuuaacuggaauagcuguugaacaagacaaaaacacccaagaaguuuuugcacaagucaaacaaauuuacaaaacaccaccaauuaaagauuuuggugguuuuaauuuuucacaaauauuaccagauccaucaaaaccaagcaagaggucauuuauugaagaucuacuuuucaacaaagugacacuugcagaugcuggcuucaucaaacaauauggugauugccuuggugauauugcugcuagagaccucauuugugcacaaaaguuuaacggccuuacuguuuugccaccuuugcucacagaugaaaugauugcucaauacacuucugcacuguuagcggguacaaucacuucugguuggaccuuuggugcaggugcugcauuacaaauaccauuugcuaugcaaauggcuuauagguuuaaugguauuggaguuacacagaauguucucuaugagaaccaaaaauugauugccaaccaauuuaauagugcuauuggcaaaauucaauacucacuuucuuccacagcaagugcacuuggaaaacuucaagauguggucaaccaaaaugcacaagcuuuaaacacgcuuguuaaacaacuuagcuccaauuuuggugcaauuucaaguguuuuaaaugauauccuuucacgucuugacaaaguugaggcugaagugcaaauugauagguugaucacaggcagacuucaaaguuugcagacauaugugacucaacaauuaauuagagcugcagaaaucagagcuucugcuaaucuugcugcuacuaaaaugucagaguguguacuuggacaaucaaaaagaguugauuuuuguggaaagggcuaucaucuuauguccuucccucagucagcaccucaugguguagucuucuugcaugugacuuaugucccugcacaagaaaagaacuucacaacugcuccugccauuugucaugauggaaaagcacacuuuccucgugaaggugucuuuguuucaaauggcacacacugguuuguaacacaaaggaauuuuuaugaaccacaaaucauuacuacagacaacacauuugugucugguaacugugauguuguaauaggaauugucaacaacacaguuuaugauccuuugcaaccugaauuagacucauucaaggaggaguuagauaaauauuuuaagaaucauacaucaccagauguugauuuaggugacaucucuggcauuaaugcuucaguuguaaacauucaaaaagaaauugaccgccucaaugagguugccaagaauuuaaaugaaucucucaucgaucuccaagaacuuggaaaguaugagcaguauauaaaauggccaugguacauuuggcuagguuuuauagcuggcuugauugccauaguaauggugacaauuaugcuuugcuguaugaccaguugcuguaguugucucaagggcuguuguucuuguggauccugcugcaaauuugaugaagacgacucugagccagugcucaaaggagucaaauuacauuacacauaaggacuaguuauaagacugacuagcccgaugggccucccaacgggcccuccuccccuccuugcaccgagauuaauaaaaaaaaaaaaaaaaaaaaaaaaaaaaaaaaaaaaaaaaaaaaaaaaaaaaaaaaaaaaaaaaugcaucccccccccccccccccccccccccccccccaaaggcucuuuucagagccaccagaauu

SEQ ID NO: 12721 - RNA, 4039 nt, Artificial Sequence
  SARS-CoV-2/Portugal/PT0034/2020__EPI_ISL_418019 spike protein mRNA wt (1-1273)
aggagaaagcuuaccauguuuguuuuucuuguuuuauugccacuagucucuagucaguguguuaaucuuacaaccagaacucaauuacccccugcauacacuaauucuuucacacgugguguuuauuacccugacaaaguuuucagauccucaguuuuacauucaacucaggacuuguucuuaccuuucuuuuccaauguuacuugguuccaugcuauacaugucucugggaccaaugguacuaagagguuugauaacccuguccuaccauuuaaugaugguguuuauuuugcuuccacugagaagucuaacauaauaagaggcuggauuuuugguacuacuuuagauucgaagacccagucccuacuuauuguuaauaacgcuacuaauguuguuauuaaagucugugaauuucaauuuuguaaugauccauuuuuggguguuuauuaccacaaaaacaacaaaaguuggauggaaagugaguucagaguuuauucuagugcgaauaauugcacuuuugaauaugucucucagccuuuucuuauggaccuugaaggaaaacaggguaauuucaaaaaucuuagggaauuuguguuuaagaauauugaugguuauuuuaaaauauauucuaagcacacgccuauuaauuuagugcgugaucucccucaggguuuuucggcuuuagaaccauugguagauuugccaauagguauuaacaucacuagguuucaaacuuuacuugcuuuacauagaaguuauuugacuccuggugauucuucuucagguuggacagcuggugcugcagcuuauuauguggguuaucuucaaccuaggacuuuucuauuaaaauauaaugaaaauggaaccauuacagaugcuguagacugugcacuugacccucucucagaaacaaaguguacguugaaauccuucacuguagaaaaaggaaucuaucaaacuucuaacuuuagaguccaaccaacagaaucuauuguuagauuuccuaauauuacaaacuugugcccuuuuggugaaguuuuuaacgccaccagauuugcaucuguuuaugcuuggaacaggaagagaaucagcaacuguguugcugauuauucuguccuauauaauuccgcaucauuuuccacuuuuaaguguuauggagugucuccuacuaaauuaaaugaucucugcuuuacuaaugucuaugcagauucauuuguaauuagaggugaugaagucagacaaaucgcuccagggcaaacuggaaagauugcugauuauaauuauaaauuaccagaugauuuuacaggcugcguuauagcuuggaauucuaacaaucuugauucuaagguuggugguaauuauaauuaccuguauagauuguuuaggaagucuaaucucaaaccuuuugagagagauauuucaacugaaaucuaucaggccgguagcacaccuuguaaugguguugaagguuuuaauuguuacuuuccuuuacaaucauaugguuuccaacccacuaaugguguugguuaccaaccauacagaguaguaguacuuucuuuugaacuucuacaugcaccagcaacuguuuguggaccuaaaaagucuacuaauuugguuaaaaacaaaugugucaauuucaacuucaaugguuuaacaggcacagguguucuuacugagucuaacaaaaaguuucugccuuuccaacaauuuggcagagacauugcugacacuacugaugcuguccgugauccacagacacuugagauucuugacauuacaccauguucuuuugguggugucaguguuauaacaccaggaacaaauacuucuaaccagguugcuguucuuuaucaggguguuaacugcacagaagucccuguugcuauucaugcagaucaacuuacuccuacuuggcguguuuauucuacagguucuaauguuuuucaaacacgugcaggcuguuuaauaggggcugaacaugucaacaacucauaugagugugacauacccauuggugcagguauaugcgcuaguuaucagacucagacuaauucuccucggcgggcacguaguguagcuagucaauccaucauugccuacacuaugucacuuggugcagaaaauucaguugcuuacucuaauaacucuauugccauacccacaaauuuuacuauuaguguuaccacagaaauucuaccagugucuaugaccaagacaucaguagauuguacaauguacauuuguggugauucaacugaaugcagcaaucuuuuguugcaauauggcaguuuuuguacacaauuaaaccgugcuuuaacuggaauagcuguugaacaagacaaaaacacccaagaaguuuuugcacaagucaaacaaauuuacaaaacaccaccaauuaaagauuuuggugguuuuaauuuuucacaaauauuaccagauccaucaaaaccaagcaagaggucauuuauugaagaucuacuuuucaacaaagugacacuugcagaugcuggcuucaucaaacaauauggugauugccuuggugauauugcugcuagagaccucauuugugcacaaaaguuuaacggccuuacuguuuugccaccuuugcucacagaugaaaugauugcucaauacacuucugcacuguuagcggguacaaucacuucugguuggaccuuuggugcaggugcugcauuacaaauaccauuugcuaugcaaauggcuuauagguuuaaugguauuggaguuacacagaauguucucuaugagaaccaaaaauugauugccaaccaauuuaauagugcuauuggcaaaauucaagacucacuuucuuccacagcaagugcacuuggaaaacuucaagauguggucaaccaaaaugcacaagcuuuaaacacgcuuguuaaacaacuuagcuccaauuuuggugcaauuucaaguguuuuaaaugauauccuuucacgucuugacaaaguugaggcugaagugcaaauugauagguugaucacaggcagacuucaaaguuugcagacauaugugacucaacaauuaauuagagcugcagaaaucagagcuucugcuaaucuugcugcuacuaaaaugucagaguguguacuuggacaaucaaaaagaguugauuuuuguggaaagggcuaucaucuuauguccuucccucagucagcaccucaugguguagucuucuugcaugugacuuaugucccugcacaagaaaagaacuucacaacugcuccugccauuugucaugauggaaaagcacacuuuccucgugaaggugucuuuguuucaaauggcacacacugguuuguaacacaaaggaauuuuuaugaaccacaaaucauuacuacagacaacacauuugugucugguaacugugauguuguaauaggaauugucaacaacacaguuuaugauccuuugcaaccugaauuagacucauucaaggaggaguuagauaaauauuuuaagaaucauacaucaccagauguugauuuaggugacaucucuggcauuaaugcuucaguuguaaacauucaaaaagaaauugaccgccucaaugagguugccaagaauuuaaaugaaucucucaucgaucuccaagaacuuggaaaguaugagcaguauauaaaauggccaugguacauuuggcuagguuuuauagcuggcuugauugccauaguaauggugacaauuaugcuuugcuguauuaccaguugcuguaguugucucaagggcuguuguucuuguggauccugcugcaaauuugaugaagacgacucugagccagugcucaaaggagucaaauuacauuacacauaaggacuaguuauaagacugacuagcccgaugggccucccaacgggcccuccuccccuccuugcaccgagauuaauaaaaaaaaaaaaaaaaaaaaaaaaaaaaaaaaaaaaaaaaaaaaaaaaaaaaaaaaaaaaaaaaugcaucccccccccccccccccccccccccccccccaaaggcucuuuucagagccaccagaauu

SEQ ID NO: 12722 - RNA, 4039 nt, Artificial Sequence
  SARS-CoV-2/Iceland/202/2020__EPI_ISL_417750 spike protein mRNA wt (1-1273)
aggagaaagcuuaccauguuuguuuuucuuguuuuauugccacuagucucuagucaguguguuaaucuuacaaccagaacucaauuacccccugcauacacuaauucuuucacacgugguguuuauuacccugacaaaguuuucagauccucaguuuuacauucaacucaggacuuguucuuaccuuucuuuuccaauguuacuugguuccaugcuauacaugucucugggaccaaugguacuaagagguuugauaacccuguccuaccauuuaaugaugguguuuauuuugcuuccacugagaagucuaacauaauaagaggcuggauuuuugguacuacuuuagauucgaagacccagucccuacuuauuguuaauaacgcuacuaauguuguuauuaaagucugugaauuucaauuuuguaaugauccauuuuuggguguuuauuaccacaaaaacaacaaaaguuggauggaaagugaguucagaguuuauucuagugcgaauaauugcacuuuugaauaugucucucagccuuuucuuauggaccuugaaggaaaacaggguaauuucaaaaaucuuagggaauuuguguuuaagaauauugaugguuauuuuaaaauauauucuaagcacacgccuauuaauuuagugcgugaucucccucaggguuuuucggcuuuagaaccauugguagauuugccaauagguauuaacaucacuagguuucaaacuuuacuugcuuuacauagaaguuauuugacuccuggugauucuucuucagguuggacagcuggugcugcagcuuauuauguggguuaucuucaaccuaggacuuuucuauuaaaauauaaugaaaauggaaccauuacagaugcuguagacugugcacuugacccucucucagaaacaaaguguacguugaaauccuucacuguagaaaaaggaaucuaucaaacuucuaacuuuagaguccaaccaacagaaucuauuguuagauuuccuaauauuacaaacuugugcccuuuuggugaaguuuuuaacgccaccagauuugcaucuguuuaugcuuggaacaggaagagaaucagcaacuguguugcugauuauucuguccuauauaauuccgcaucauuuuccacuuuuaaguguuauggagugucuccuacuaaauuaaaugaucucugcuuuacuaaugucuaugcagauucauuuguaauuagaggugaugaagucagacaaaucgcuccagggcaaacuggaaagauugcugauuauaauuauaaauuaccagaugauuuuacaggcugcguuauagcuuggaauucuaacaaucuugauucuaagguuggugguaauuauaauuaccuguauagauuguuuaggaagucuaaucucaaaccuuuugagagagauauuucaacugaaaucuaucaggccgguagcacaccuuguaaugguguugaagguuuuaauuguuacuuuccuuuacaaucauaugguuuccaacccacuaaugguguugguuaccaaccauacagaguaguaguacuuucuuuugaacuucuacaugcaccagcaacuguuuguggaccuaaaaagucuacuaauuugguuaaaaacaaaugugucaauuucaacuucaaugguuuaacaggcacagguguucuuacugagucuaacaaaaaguuucugccuuuccaacaauuuggcagagacauugcugacacuacugaugcuguccgugauccacagacacuugagauucuugacauuacaccauguucuuuugguggugucaguguuauaacaccaggaacaaauacuucuaaccagguugcuguucuuuaucaggauguuaacugcacagaagucccuguugcuauucaugcagaucaacuuacuccuacuuggcguguuuauucuacagguucuaauguuuuucaaacacgugcaggcuguuuaauaggggcugaacaugucaacaacucauaugagugugacauacccauuggugcagguauaugcgcuaguuaucagacucagacuaauucuccucggcgggcacguaguguagcuagucaauccaucauugccuacacuaugucacuuggugcagaaaauucaguugcuuacucuaauaacucuauugccauacccacaaauuuuacuauuaguguuaccacagaaauucuaccagugucuaugaccaagacaucaguagauuguacaauguacauuuguggugauucaacugaaugcagcaaucuuuuguugcaauauggcaguuuuuguacacaauuaaaccgugcuuuaacuggaauagcuguugaacaagacaaaaacacccaagaaguuuuugcacaagucaaacaaauuuacaaaacaccaccaauuaaagauuuuggugguuuuaauuuuucacaaauauuaccagauccaucaaaaccaagcaagaggucauuuauugaagaucuacuuuucaacaaagugacacuugcagaugcuggcuucaucaaacaauauggugauugccuuggugauauugcugcuagagaccucauuugugcacaaaaguuuaacggccuuacuguuuugccaccuuugcucacagaugaaaugauugcucaauacacuucugcacuguuagcggguacaaucacuucugguuggaccuuuggugcaggugcugcauuacaaauaccauuugcuaugcaaauggcuuauagguuuaaugguauuggaguuacacagaauguucucuaugagaaccaaaaauugauugccaaccaauuuaauagugcuauuggcaaaauucaagacucacuuucuuccacagcaagugcacuuggaaaacuucaagauguggucaaccaaaaugcacaagcuuuaaacacgcuuguuaaacaacuuagcuccaauuuuggugcaauuucaaguguuuuaaaugauauccuuucacgucuugacaaaguugaggcugaagugcaaauugauagguugaucacaggcagacuucaaaguuugcagacauaugugacucaacaauuaauuagagcugcagaaaucagagcuucugcuaaucuugcugcuacuaaaaugucagaguguguacuuggacaaucaaaaagaguugauuuuuguggaaagggcuaucaucuuauguccuucccucagucagcaccucaugguguagucuucuugcaugugacuuaugucccugcacaagaaaagaacuucacaacugcuccugccauuugucaugauggaaaagcacacuuuccucgugaaggugucuuuguuucaaauggcacacacugguuuguaacacaaaggaauuuuuaugaaccacaaaucauuacuacagacaacacauuugugucugguaacugugauguuguaauaggaauugucaacaacacaguuuaugauccuuugcaaccugaauuagacucauucaaggaggaguuagauaaauauuuuaagaaucauacaucaccagauguugauuuaggugacaucccuggcauuaaugcuucaguuguaaacauucaaaaagaaauugaccgccucaaugagguugccaagaauuuaaaugaaucucucaucgaucuccaagaacuuggaaaguaugagcaguauauaaaauggccaugguacauuuggcuagguuuuauagcuggcuugauugccauaguaauggugacaauuaugcuuugcuguaugaccaguugcuguaguugucucaagggcuguuguucuuguggauccugcugcaaauuugaugaagacgacucugagccagugcucaaaggagucaaauuacauuacacauaaggacuaguuauaagacugacuagcccgaugggccucccaacgggcccuccuccccuccuugcaccgagauuaauaaaaaaaaaaaaaaaaaaaaaaaaaaaaaaaaaaaaaaaaaaaaaaaaaaaaaaaaaaaaaaaaugcaucccccccccccccccccccccccccccccccaaaggcucuuuucagagccaccagaauu

SEQ ID NO: 12723 - RNA, 4039 nt, Artificial Sequence
  SARS-CoV-2/USA/WA-UW261/2020__EPI_ISL_418046 spike protein mRNA wt (1-1273)
aggagaaagcuuaccauguuuguuuuucuuguuuuauugccacuagucucuagucaguguguuaaucuuacaaccagaacucaauuacccccugcauacacuaauucuuucacacgugguguuuauuacccugacaaaguuuucagauccucaguuuuacauucaacucaggacuuguucuuaccuuucuuuuccaauguuacuugguuccaugcuauacaugucucugggaccaaugguacuaagagguuugauaacccuguccuaccauuuaaugaugguguuuauuuugcuuccacugagaagucuaacauaauaagaggcuggauuuuugguacuacuuuagauucgaagacccagucccuacuuauuguuaauaacgcuacuaauguuguuauuaaagucugugaauuucaauuuuguaaugauccauuuuuggguguuuauuaccacaaaaacaacaaaaguuggauggaaagugaguucagaguuuauucuagugcgaauaauugcacuuuugaauaugucucucagccuuuucuuauggaccuugaaggaaaacaggguaauuucaaaaaucuuagggaauuuguguuuaagaauauugaugguuauuuuaaaauauauucuaagcacacgccuauuaauuuagugcgugaucucccucaggguuuuucggcuuuagaaccauugguagauuugccaauagguauuaacaucacuagguuucaaacuuuacuugcuuuacauagaaguuauuugacuccuggugauucuucuucagguuggacagcuggugcugcagcuuauuauguggguuaucuucaaccuaggacuuuucuauuaaaauauaaugaaaauggaaccauuacagaugcuguagacugugcacuugacccucucucagaaacaaaguguacguugaaauccuucacuguagaaaaaggaaucuaucaaacuucuaacuuuagaguccaaccaacagaaucuauuguuagauuuccuaauauuacaaacuugugcccuuuuggugaaguuuuuaacgccaccagauuuacaucuguuuaugcuuggaacaggaagagaaucagcaacuguguugcugauuauucuguccuauauaauuccgcaucauuuuccacuuuuaaguguuauggagugucuccuacuaaauuaaaugaucucugcuuuacuaaugucuaugcagauucauuuguaauuagaggugaugaagucagacaaaucgcuccagggcaaacuggaaagauugcugauuauaauuauaaauuaccagaugauuuuacaggcugcguuauagcuuggaauucuaacaaucuugauucuaagguuggugguaauuauaauuaccuguauagauuguuuaggaagucuaaucucaaaccuuuugagagagauauuucaacugaaaucuaucaggccgguagcacaccuuguaaugguguugaagguuuuaauuguuacuuuccuuuacaaucauaugguuuccaacccacuaaugguguugguuaccaaccauacagaguaguaguacuuucuuuugaacuucuacaugcaccagcaacuguuuguggaccuaaaaagucuacuaauuugguuaaaaacaaaugugucaauuucaacuucaaugguuuaacaggcacagguguucuuacugagucuaacaaaaaguuucugccuuuccaacaauuuggcagagacauugcugacacuacugaugcuguccgugauccacagacacuugagauucuugacauuacaccauguucuuuugguggugucaguguuauaacaccaggaacaaauacuucuaaccagguugcuguucuuuaucaggauguuaacugcacagaagucccuguugcuauucaugcagaucaacuuacuccuacuuggcguguuuauucuacagguucuaauguuuuucaaacacgugcaggcuguuuaauaggggcugaacaugucaacaacucauaugagugugacauacccauuggugcagguauaugcgcuaguuaucagacucagacuaauucuccucggcgggcacguaguguagcuagucaauccaucauugccuacacuaugucacuuggugcagaaaauucaguugcuuacucuaauaacucuauugccauacccacaaauuuuacuauuaguguuaccacagaaauucuaccagugucuaugaccaagacaucaguagauuguacaauguacauuuguggugauucaacugaaugcagcaaucuuuuguugcaauauggcaguuuuuguacacaauuaaaccgugcuuuaacuggaauagcuguugaacaagacaaaaacacccaagaaguuuuugcacaagucaaacaaauuuacaaaacaccaccaauuaaagauuuuggugguuuuaauuuuucacaaauauuaccagauccaucaaaaccaagcaagaggucauuuauugaagaucuacuuuucaacaaagugacacuugcagaugcuggcuucaucaaacaauauggugauugccuuggugauauugcugcuagagaccucauuugugcacaaaaguuuaacggccuuacuguuuugccaccuuugcucacagaugaaaugauugcucaauacacuucugcacuguuagcggguacaaucacuucugguuggaccuuuggugcaggugcugcauuacaaauaccauuugcuaugcaaauggcuuauagguuuaaugguauuggaguuacacagaauguucucuaugagaaccaaaaauugauugccaaccaauuuaauagugcuauuggcaaaauucaagacucacuuucuuccacagcaagugcacuuggaaaacuucaagauguggucaaccaaaaugcacaagcuuuaaacacgcuuguuaaacaacuuagcuccaauuuuggugcaauuucaaguguuuuaaaugauauccuuucacgucuugacaaaguugaggcugaagugcaaauugauagguugaucacaggcagacuucaaaguuugcagacauaugugacucaacaauuaauuagagcugcagaaaucagagcuucugcuaaucuugcugcuacuaaaaugucagaguguguacuuggacaaucaaaaagaguugauuuuuguggaaagggcuaucaucuuauguccuucccucagucagcaccucaugguguagucuucuugcaugugacuuaugucccugcacaagaaaagaacuucacaacugcuccugccauuugucaugauggaaaagcacacuuuccucgugaaggugucuuuguuucaaauggcacacacugguuuguaacacaaaggaauuuuuaugaaccacaaaucauuacuacagacaacacauuugugucugguaacugugauguuguaauaggaauugucaacaacacaguuuaugauccuuugcaaccugaauuagacucauucaaggaggaguuagauaaauauuuuaagaaucauacaucaccagauguugauuuaggugacaucucuggcauuaaugcuucaguuguaaacauucaaaaagaaauugaccgccucaaugagguugccaagaauuuaaaugaaucucucaucgaucuccaagaacuuggaaaguaugagcaguauauaaaauggccaugguacauuuggcuagguuuuauagcuggcuugauugccauaguaauggugacaauuaugcuuugcuguaugaccaguugcuguaguugucucaagggcuguuguucuuguggauccugcugcaaauuugaugaagacgacucugagccagugcucaaaggagucaaauuacauuacacauaaggacuaguuauaagacugacuagcccgaugggccucccaacgggcccuccuccccuccuugcaccgagauuaauaaaaaaaaaaaaaaaaaaaaaaaaaaaaaaaaaaaaaaaaaaaaaaaaaaaaaaaaaaaaaaaaugcaucccccccccccccccccccccccccccccccaaaggcucuuuucagagccaccagaauu

SEQ ID NO: 12724 - RNA, 4039 nt, Artificial Sequence
  SARS-CoV-2/Portugal/PT0035/2020__EPI_ISL_418020 spike protein mRNA wt (1-1273)
aggagaaagcuuaccauguuuguuuuucuuguuuuauugccacuagucucuagucaguguguuaaucuuacaaccagaacucaauuacccccugcauacacuaauucuuucacacgugguguuuauuacccugacaaaguuuucagauccucaguuuuacauucaacucaggacuuguucuuaccuuucuuuuccaauguuacuugguuccaugcuauacaugucucugggaccaaugguacuaagagguuugauaacccuguccuaccauuuaaugaugguguuuauuuugcuuccacugagaagucuaacauaauaagaggcuggauuuuugguacuacuuuagauucgaagacccagucccuacuuauuguuaauaacgcuacuaauguuguuauuaaagucugugaauuucaauuuuguaaugauccauuuuuggguguuuauuaccacaaaaacaacaaaaguuggauggaaagugaguucagaguuuauucuagugcgaauaauugcacuuuugaauaugucucucagccuuuucuuauggaccuugaaggaaaacaggguaauuucaaaaaucuuagggaauuuguguuuaagaauauugaugguuauuuuaaaauauauucuaagcacacgccuauuaauuuagugcgugaucucccucaggguuuuucggcuuuagaaccauugguagauuugccaauagguauuaacaucacuagguuucaaacuuuacuugcuuuacauagaaguuauuugacuccuggugauucuucuucagguuggacagcuggugcugcagcuuauuauguggguuaucuucaaccuaggacuuuucuauuaaaauauaaugaaaauggaaccauuacagaugcuguagacugugcacuugacccucucucagaaacaaaguguacguugaaauccuucacuguagaaaaaggaaucuaucaaacuucuaacuuuagaguccaaccaacagaaucuauuguuagauuuccuaauauuacaaacuugugcccuuuuggugaaguuuuuaacgccaccagauuugcaucuguuuaugcuuggaacaggaagagaaucagcaacuguguugcugauuauucuguccuauauaauuccgcaucauuuuccacuuuuaaguguuauggagugucuccuacuaaauuaaaugaucucugcuuuacuaaugucuaugcagauucauuuguaauuagaggugaugaagucagacaaaucgcuccagggcaaacuggaaagauugcugauuauaauuauaaauuaccagaugauuuuacaggcugcguuauagcuuggaauucuaacaaucuugauucuaagguuggugguaauuauaauuaccuguauagauuguuuaggaagucuaaucucaaaccuuuugagagagauauuucaacugaaaucuaucaggccgguagcacaccuuguaaugguguugaagguuuuaauuguuacuuuccuuuacaaucauaugguuuccaacccacuaaugguguugguuaccaaccauacagaguaguaguacuuucuuuugaacuucuacaugcaccagcaacuguuuguggaccuaaaaagucuacuaauuugguuaaaaacaaaugugucaauuucaacuucaaugguuuaacaggcacagguguucuuacugagucuaacaaaaaguuucugccuuuccaacaauuuggcagagacauugcugacacuacugaugcuguccgugauccacagacacuugagauucuugacauuacaccauguucuuuugguggugucaguguuauaacaccaggaacaaauacuucuaaccagguugcuguucuuuaucaggauguuaacugcacagaagucccuguugcuauucaugcagaucaacuuacuccuacuuggcguguuuauucuacagguucuaauguuuuucaaacacgugcaggcuguuuaauaggggcugaacaugucaacaacucauaugagugugacauacccauuggugcagguauaugcgcuaguuaucagacucagacuaauucuccucggcgggcacguaguguagcuagucaauccaucauugccuacacuaugucacuuggugcagaaaauucaguugcuuacucuaauaacucuauugccauacccacaaauuuuacuauuaguguuaccacagaaauucuaccagugucuaugaccaagacaucaguagauuguacaauguacauuuguggugauucaacugaaugcagcaaucuuuuguugcaauauggcaguuuuuguacacaauuaaaccgugcuuuaacuggaauagcuguugaacaagacaaaaacacccaagaaguuuuugcacaagucaaacaaauuuacaaaacaccaccaauuaaagauuuuggugguuuuaauuuuucacaaauauuaccagauccaucaaaaccaagcaagaggucauuuauugaagaucuacuuuucaacaaagugacacuugcagaugcuggcuucaucaaacaauauggugauugccuuggugauauuucugcuagagaccucauuugugcacaaaaguuuaacggccuuacuguuuugccaccuuugcucacagaugaaaugauugcucaauacacuucugcacuguuagcggguacaaucacuucugguuggaccuuuggugcaggugcugcauuacaaauaccauuugcuaugcaaauggcuuauagguuuaaugguauuggaguuacacagaauguucucuaugagaaccaaaaauugauugccaaccaauuuaauagugcuauuggcaaaauucaagacucacuuucuuccacagcaagugcacuuggaaaacuucaagauguggucaaccaaaaugcacaagcuuuaaacacgcuuguuaaacaacuuagcuccaauuuuggugcaauuucaaguguuuuaaaugauauccuuucacgucuugacaaaguugaggcugaagugcaaauugauagguugaucacaggcagacuucaaaguuugcagacauaugugacucaacaauuaauuagagcugcagaaaucagagcuucugcuaaucuugcugcuacuaaaaugucagaguguguacuuggacaaucaaaaagaguugauuuuuguggaaagggcuaucaucuuauguccuucccucagucagcaccucaugguguagucuucuugcaugugacuuaugucccugcacaagaaaagaacuucacaacugcuccugccauuugucaugauggaaaagcacacuuuccucgugaaggugucuuuguuucaaauggcacacacugguuuguaacacaaaggaauuuuuaugaaccacaaaucauuacuacagacaacacauuugugucugguaacugugauguuguaauaggaauugucaacaacacaguuuaugauccuuugcaaccugaauuagacucauucaaggaggaguuagauaaauauuuuaagaaucauacaucaccagauguugauuuaggugacaucucuggcauuaaugcuucaguuguaaacauucaaaaagaaauugaccgccucaaugagguugccaagaauuuaaaugaaucucucaucgaucuccaagaacuuggaaaguaugagcaguauauaaaauggccaugguacauuuggcuagguuuuauagcuggcuugauugccauaguaauggugacaauuaugcuuugcuguaugaccaguugcuguaguugucucaagggcuguuguucuuguggauccugcugcaaauuugaugaagacgacucugagccagugcucaaaggagucaaauuacauuacacauaaggacuaguuauaagacugacuagcccgaugggccucccaacgggcccuccuccccuccuugcaccgagauuaauaaaaaaaaaaaaaaaaaaaaaaaaaaaaaaaaaaaaaaaaaaaaaaaaaaaaaaaaaaaaaaaaugcaucccccccccccccccccccccccccccccccaaaggcucuuuucagagccaccagaauu

SEQ ID NO: 12725 - RNA, 4039 nt, Artificial Sequence
  SARS-CoV-2/USA/NY-NYUMC7/2020__EPI_ISL_418192 spike protein mRNA wt (1-1273)
aggagaaagcuuaccauguuuguuuuucuuguuuuauugccacuagucucuagucaguguguuaaucuuacaaccagaacucaauuacccccugcauacacuaauucuuucacacgugguguuuauuacccugacaaaguuuucagauccucaguuuuacauucaacucaggacuuguucuuaccuuucuuuuccaauguuacuugguuccaugcuauacaugucucugggaccaaugguacuaagagguuugauaacccuguccuaccauuuaaugaugguguuuauuuugcuuccacugagaagucuaacauaauaagaggcuggauuuuugguacuacuuuagauucgaagacccagucccuacuuauuguuaauaacgcuacuaauguuguuauuaaagucugugaauuucaauuuuguaaugauccauuuuuggguguuuaucaccacaaaaacaacaaaaguuggauggaaagugaguucagaguuuauucuagugcgaauaauugcacuuuugaauaugucucucagccuuuucuuauggaccuugaaggaaaacaggguaauuucaaaaaucuuagggaauuuguguuuaagaauauugaugguuauuuuaaaauauauucuaagcacacgccuauuaauuuagugcgugaucucccucaggguuuuucggcuuuagaaccauugguagauuugccaauagguauuaacaucacuagguuucaaacuuuacuugcuuuacauagaaguuauuugacuccuggugauucuucuucagguuggacagcuggugcugcagcuuauuauguggguuaucuucaaccuaggacuuuucuauuaaaauauaaugaaaauggaaccauuacagaugcuguagacugugcacuugacccucucucagaaacaaaguguacguugaaauccuucacuguagaaaaaggaaucuaucaaacuucuaacuuuagaguccaaccaacagaaucuauuguuagauuuccuaauauuacaaacuugugcccuuuuggugaaguuuuuaacgccaccagauuugcaucuguuuaugcuuggaacaggaagagaaucagcaacuguguugcugauuauucuguccuauauaauuccgcaucauuuuccacuuuuaaguguuauggagugucuccuacuaaauuaaaugaucucugcuuuacuaaugucuaugcagauucauuuguaauuagaggugaugaagucagacaaaucgcuccagggcaaacuggaaagauugcugauuauaauuauaaauuaccagaugauuuuacaggcugcguuauagcuuggaauucuaacaaucuugauucuaagguuggugguaauuauaauuaccuguauagauuguuuaggaagucuaaucucaaaccuuuugagagagauauuucaacugaaaucuaucaggccgguagcacaccuuguaaugguguugaagguuuuaauuguuacuuuccuuuacaaucauaugguuuccaacccacuaaugguguugguuaccaaccauacagaguaguaguacuuucuuuugaacuucuacaugcaccagcaacuguuuguggaccuaaaaagucuacuaauuugguuaaaaacaaaugugucaauuucaacuucaaugguuuaacaggcacagguguucuuacugagucuaacaaaaaguuucugccuuuccaacaauuuggcagagacauugcugacacuacugaugcuguccgugauccacagacacuugagauucuugacauuacaccauguucuuuugguggugucaguguuauaacaccaggaacaaauacuucuaaccagguugcuguucuuuaucaggguguuaacugcacagaagucccuguugcuauucaugcagaucaacuuacuccuacuuggcguguuuauucuacagguucuaauguuuuucaaacacgugcaggcuguuuaauaggggcugaacaugucaacaacucauaugagugugacauacccauuggugcagguauaugcgcuaguuaucagacucagacuaauucuccucggcgggcacguaguguagcuagucaauccaucauugccuacacuaugucacuuggugcagaaaauucaguugcuuacucuaauaacucuauugccauacccacaaauuuuacuauuaguguuaccacagaaauucuaccagugucuaugaccaagacaucaguagauuguacaauguacauuuguggugauucaacugaaugcagcaaucuuuuguugcaauauggcaguuuuuguacacaauuaaaccgugcuuuaacuggaauagcuguugaacaagacaaaaacacccaagaaguuuuugcacaagucaaacaaauuuacaaaacaccaccaauuaaagauuuuggugguuuuaauuuuucacaaauauuaccagauccaucaaaaccaagcaagaggucauuuauugaagaucuacuuuucaacaaagugacacuugcagaugcuggcuucaucaaacaauauggugauugccuuggugauauugcugcuagagaccucauuugugcacaaaaguuuaacggccuuacuguuuugccaccuuugcucacagaugaaaugauugcucaauacacuucugcacuguuagcggguacaaucacuucugguuggaccuuuggugcaggugcugcauuacaaauaccauuugcuaugcaaauggcuuauagguuuaaugguauuggaguuacacagaauguucucuaugagaaccaaaaauugauugccaaccaauuuaauagugcuauuggcaaaauucaagacucacuuucuuccacagcaagugcacuuggaaaacuucaagauguggucaaccaaaaugcacaagcuuuaaacacgcuuguuaaacaacuuagcuccaauuuuggugcaauuucaaguguuuuaaaugauauccuuucacgucuugacaaaguugaggcugaagugcaaauugauagguugaucacaggcagacuucaaaguuugcagacauaugugacucaacaauuaauuagagcugcagaaaucagagcuucugcuaaucuugcugcuacuaaaaugucagaguguguacuuggacaaucaaaaagaguugauuuuuguggaaagggcuaucaucuuauguccuucccucagucagcaccucaugguguagucuucuugcaugugacuuaugucccugcacaagaaaagaacuucacaacugcuccugccauuugucaugauggaaaagcacacuuuccucgugaaggugucuuuguuucaaauggcacacacugguuuguaacacaaaggaauuuuuaugaaccacaaaucauuacuacagacaacacauuugugucugguaacugugauguuguaauaggaauugucaacaacacaguuuaugauccuuugcaaccugaauuagacucauucaaggaggaguuagauaaauauuuuaagaaucauacaucaccagauguugauuuaggugacaucucuggcauuaaugcuucaguuguaaacauucaaaaagaaauugaccgccucaaugagguugccaagaauuuaaaugaaucucucaucgaucuccaagaacuuggaaaguaugagcaguauauaaaauggccaugguacauuuggcuagguuuuauagcuggcuugauugccauaguaauggugacaauuaugcuuugcuguaugaccaguugcuguaguugucucaagggcuguuguucuuguggauccugcugcaaauuugaugaagacgacucugagccagugcucaaaggagucaaauuacauuacacauaaggacuaguuauaagacugacuagcccgaugggccucccaacgggcccuccuccccuccuugcaccgagauuaauaaaaaaaaaaaaaaaaaaaaaaaaaaaaaaaaaaaaaaaaaaaaaaaaaaaaaaaaaaaaaaaaugcaucccccccccccccccccccccccccccccccaaaggcucuuuucagagccaccagaauu

SEQ ID NO: 12726 - RNA, 4039 nt, Artificial Sequence
  SARS-CoV-2/Iceland/189/2020__EPI_ISL_417709 spike protein mRNA wt (1-1273)
aggagaaagcuuaccauguuuguuuuucuuguuuuauugccacuagucucuagucaguguguuaaucuuacaaccagaacucaauuacccccugcauacacuaauucuuucacacgugguguuuauuacccugacaaaguuuucagauccucaguuuuacauucaacucaggacuuguucuuaccuuucuuuuccaauguuacuugguuccaugcuauacaugucucugggaccaaugguacuaagagguuugauaacccuguccuaccauuuaaugaugguguuuauuuugcuuccacugagaagucuaacauaauaagaggcuggauuuuugguacuacuuuagauucgaagacccagucccuacuuauuguuaauaacgcuacuaauguuguuauuaaagucugugaauuucaauuuuguaaugauccauuuuuggguguuuauuaccacaaaaacaacaaaaguuggauggaaagugaguucagaguuuauucuagugcgaauaauugcacuuuugaauaugucucucagccuuuucuuauggaccuugaaggaaaacaggguaauuucaaaaaucuuagggaauuuguguuuaagaauauugaugguuauuuuaaaauauauucuaagcacacgccuauuaauuuagugcgugaucucccucaggguuuuucggcuuuagaaccauugguagauuugccaauagguauuaacaucacuagguuucaaacuuuacuugcuuuacauagaaguuauuugacuccuggugauucuucuucagguuggacagcuggugcugcagcuuauuauguggguuaucuucaaccuaggacuuuucuauuaaaauauaaugaaaauggaaccauuacagaugcuguagacugugcacuugacccucucucagaaacaaaguguacguugaaauccuucacuguagaaaaaggaaucuaucaaacuucuaacuuuagaguccaaccaacagaaucuauuguuagauuuccuaauauuacaaacuugugcccuuuuggugaaguuuuuaacgccaccagauuugcaucuguuuaugcuuggaacaggaagagaaucagcaacuguguugcugauuauucuguccuauauaauuccgcaucauuuuccacuuuuaaguguuauggagugucuccuacuaaauuaaaugaucucugcuuuacuaaugucuaugcagauucauuuguaauuagaggugaugaagucagacaaaucgcuccagggcaaacuggaaagauugcugauuauaauuauaaauuaccagaugauuuuacaggcugcguuauagcuuggaauucuaacaaucuugauucuaagguuggugguaauuauaauuaccuguauagauuguuuaggaagucuaaucucaaaccuuuugagagagauauuucaacugaaaucuaucaggccgguagcacaccuuguaaugguguugaagguuuuaauuguuacuuuccuuuacaaucauaugguuuccaacccacuaaugguguugguuaccaaccauacagaguaguaguacuuucuuuugaacuucuacaugcaccagcaacuguuuguggaccuaaaaagucuacuaauuugguuaaaaacaaaugugucaauuucaacuucaaugguuuaacaggcacagguguucuuacugagucuaacaaaaaguuucugccuuuccaacaauuuggcagagacauugcugacacuacugaugcuguccgugauccacagacacuugagauucuugacauuacaccauguucuuuugguggugucaguguuauaacaccaggaacaaauacuucuaaccagguugcuguucuuuaucaggguguuaacugcacagaagucccuguugcuauucaugcagaucaacuuacuccuacuuggcguguuuauucuacagguucuaauguuuuucaaacacgugcaggcuguuuaauaggggcugaacaugucaacaacucauaugagugugacauacccauuggugcagguauaugcgcuaguuaucagacucagacuaauucuccucggcgggcacguaguguagcuagucaauccaucauugccuacacuaugucacuuggugcagaaaauucaguugcuuacucuaauaacucuauugccauacccacaaauuuuacuauuaguguuaccacagaaauucuaccagugucuaugaccaagacaucaguagauuguacaauguacauuuguggugauucaacugaaugcagcaaucuuuuguugcaauauggcaguuuuuguacacaauuaaaccgugcuuuaacuggaauagcuguugaacaagacaaaaacacccaagaaguuuuugcacaagucaaacaaauuuacaaaacaccaccaauuaaagauuuuggugguuuuaauuuuucacaaauauuaccagauccaucaaaaccaagcaagaggucauuuauugaagaucuacuuuucaacaaagugacacuugcagaugcuggcuucaccaaacaauauggugauugccuuggugauauugcugcuagagaccucauuugugcacaaaaguuuaacggccuuacuguuuugccaccuuugcucacagaugaaaugauugcucaauacacuucugcacuguuagcggguacaaucacuucugguuggaccuuuggugcaggugcugcauuacaaauaccauuugcuaugcaaauggcuuauagguuuaaugguauuggaguuacacagaauguucucuaugagaaccaaaaauugauugccaaccaauuuaauagugcuauuggcaaaauucaagacucacuuucuuccacagcaagugcacuuggaaaacuucaagauguggucaaccaaaaugcacaagcuuuaaacacgcuuguuaaacaacuuagcuccaauuuuggugcaauuucaaguguuuuaaaugauauccuuucacgucuugacaaaguugaggcugaagugcaaauugauagguugaucacaggcagacuucaaaguuugcagacauaugugacucaacaauuaauuagagcugcagaaaucagagcuucugcuaaucuugcugcuacuaaaaugucagaguguguacuuggacaaucaaaaagaguugauuuuuguggaaagggcuaucaucuuauguccuucccucagucagcaccucaugguguagucuucuugcaugugacuuaugucccugcacaagaaaagaacuucacaacugcuccugccauuugucaugauggaaaagcacacuuuccucgugaaggugucuuuguuucaaauggcacacacugguuuguaacacaaaggaauuuuuaugaaccacaaaucauuacuacagacaacacauuugugucugguaacugugauguuguaauaggaauugucaacaacacaguuuaugauccuuugcaaccugaauuagacucauucaaggaggaguuagauaaauauuuuaagaaucauacaucaccagauguugauuuaggugacaucucuggcauuaaugcuucaguuguaaacauucaaaaagaaauugaccgccucaaugagguugccaagaauuuaaaugaaucucucaucgaucuccaagaacuuggaaaguaugagcaguauauaaaauggccaugguacauuuggcuagguuuuauagcuggcuugauugccauaguaauggugacaauuaugcuuugcuguaugaccaguugcuguaguugucucaagggcuguuguucuuguggauccugcugcaaauuugaugaagacgacucugagccagugcucaaaggagucaaauuacauuacacauaaggacuaguuauaagacugacuagcccgaugggccucccaacgggcccuccuccccuccuugcaccgagauuaauaaaaaaaaaaaaaaaaaaaaaaaaaaaaaaaaaaaaaaaaaaaaaaaaaaaaaaaaaaaaaaaaugcaucccccccccccccccccccccccccccccccaaaggcucuuuucagagccaccagaauu

SEQ ID NO: 12727 - RNA, 4039 nt, Artificial Sequence
  SARS-CoV-2/Australia/NSW56/2020__EPI_ISL_417408 spike protein mRNA wt (1-1273)
aggagaaagcuuaccauguuuguuuuucuuguuuuauugccacuagucucuagucaguguguuaaucuuacaaccagaacucaauuacccccugcauacacuaauucuuucacacgugguguuuauuacccugacaaaguuuucagauccucaguuuuacauucaacucaggacuuguucuuaccuuucuuuuccaauguuacuugguuccaugcuauacaugucucugggaccaaugguacuaagagguuugauaacccuguccuaccauuuaaugaugguguuuauuuugcuuccacugagaagucuaacauaauaagaggcuggauuuuugguacuacuuuagauucgaagacccagucccuacuuauuguuaauaacgcuacuaauguuguuauuaaagucugugaauuucaauuuuguaaugauccauuuuuggguguuuauuaccacaaaaacaacaaaaguuggauggaaagugaguucagaguuuauucuagugcgaauaauugcacuuuugaauaugucucucagccuuuucuuauggaccuugaaggaaaacaggguaauuucaaaaaucuuagggaauuuguguuuaagaauauugaugguuauuuuaaaauauauucuaagcacacgccuauuaauuuagugcgugaucucccucaggguuuuucggcuuuagaaccauugguagauuugccaauagguauuaacaucacuagguuucaaacuuuacuugcuuuacauagaaguuauuugacuccuggugauucuucuucagguuggacagcuggugcugcagcuuauuauguggguuaucuucaaccuaggacuuuucuauuaaaauauaaugaaaauggaaccauuacagaugcuguagacugugcacuugacccucucucagaaacaaaguguacguugaaauccuucacuguagaaaaaggaaucuaucaaacuucuaacuuuagaguccaaccaacagaaucuauuguuagauuuccuaauauuacaaacuugugcccuuuuggugaaguuuuuaacgccaccagauuugcaucuguuuaugcuuggaacaggaagagaaucagcaacuguguugcugauuauucuguccuauauaauuccgcaucauuuuccacuuuuaaguguuauggagugucuccuacuaaauuaaaugaucucugcuuuacuaaugucuaugcagauucauuuguaauuagaggugaugaagucagacaaaucgcuccagggcaaacuggaaagauugcugauuauaauuauaaauuaccagaugauuuuacaggcugcguuauagcuuggaauucuaacaaucuugauucuaagguuggugguaauuauaauuaccuguauagauuguuuaggaagucuaaucucaaaccuuuugagagagauauuucaacugaaaucuaucaggccgguagcacaccuuguaaugguguugaagguuuuaauuguuacuuuccuuuacaaucauaugguuuccaacccacuaaugguguugguuaccaaccauacagaguaguaguacuuucuuuugaacuucuacaugcaccagcaacuguuuguggaccuaaaaagucuacuaauuugguuaaaaacaaaugugucaauuucaacuucaaugguuuaacaggcacagguguucuuacugagucuaacaaaaaguuucugccuuuccaacaauuuggcagagacauugcugacacuacugaugcuguccgugauccacagacacuugagauucuugacauuacaccauguucuuuugguggugucaguguuauaacaccaggaacaaauacuucuaaccagguugcuguucuuuaucaggauguuaacugcacagaagucccuguugcuauucaugcagaucaacuuacuccuacuuggcguguuuauucuacagguucuaauguuuuucaaacacgugcaggcuguuuaauaggggcugaacaugucaacaacucauaugagugugacauacccauuggugcagguauaugcgcuaguuaucagacucagacuaauucuccucggcgggcacguaguguagcuagucaauccaucauugccuacacuaugucacuuggugcagaaaauucaguugcuuacucuaauaacucuauugccauacccacaaauuuuacuauuaguguuaccacagaaauucuaccagugucuaugaccaagacaucaguagauuguacaauguacauuuguggugauucaacugaaugcagcaaucuuuuguugcaauauggcaguuuuuguacacaauuaaaccgugcuuuaacuggaauagcuguugaacaagacaaaaacacccaagaaguuuuugcacaagucaaacaaauuuacaaaacaccaccaauuaaagauuuuggugguuuuaauuuuucacaaauauuaccagauucaucaaaaccaagcaagaggucauuuauugaagaucuacuuuucaacaaagugacacuugcagaugcuggcuucaucaaacaauauggugauugccuuggugauauugcugcuagagaccucauuugugcacaaaaguuuaacggccuuacuguuuugccaccuuugcucacagaugaaaugauugcucaauacacuucugcacuguuagcggguacaaucacuucugguuggaccuuuggugcaggugcugcauuacaaauaccauuugcuaugcaaauggcuuauagguuuaaugguauuggaguuacacagaauguucucuaugagaaccaaaaauugauugccaaccaauuuaauagugcuauuggcaaaauucaagacucacuuucuuccacagcaagugcacuuggaaaacuucaagauguggucaaccaaaaugcacaagcuuuaaacacgcuuguuaaacaacuuagcuccaauuuuggugcaauuucaaguguuuuaaaugauauccuuucacgucuugacaaaguugaggcugaagugcaaauugauagguugaucacaggcagacuucaaaguuugcagacauaugugacucaacaauuaauuagagcugcagaaaucagagcuucugcuaaucuugcugcuacuaaaaugucagaguguguacuuggacaaucaaaaagaguugauuuuuguggaaagggcuaucaucuuauguccuucccucagucagcaccucaugguguagucuucuugcaugugacuuaugucccugcacaagaaaagaacuucacaacugcuccugccauuugucaugauggaaaagcacacuuuccucgugaaggugucuuuguuucaaauggcacacacugguuuguaacacaaaggaauuuuuaugaaccacaaaucauuacuacagacaacacauuugugucugguaacugugauguuguaauaggaauugucaacaacacaguuuaugauccuuugcaaccugaauuagacucauucaaggaggaguuagauaaauauuuuaagaaucauacaucaccagauguugauuuaggugacaucucuggcauuaaugcuucaguuguaaacauucaaaaagaaauugaccgccucaaugagguugccaagaauuuaaaugaaucucucaucgaucuccaagaacuuggaaaguaugagcaguauauaaaauggccaugguacauuuggcuagguuuuauagcuggcuugauugccauaguaauggugacaauuaugcuuugcuguaugaccaguugcuguaguugucucaagggcuguuguucuuguggauccugcugcaaauuugaugaagacgacucugagccagugcucaaaggagucaaauuacauuacacauaaggacuaguuauaagacugacuagcccgaugggccucccaacgggcccuccuccccuccuugcaccgagauuaauaaaaaaaaaaaaaaaaaaaaaaaaaaaaaaaaaaaaaaaaaaaaaaaaaaaaaaaaaaaaaaaaugcaucccccccccccccccccccccccccccccccaaaggcucuuuucagagccaccagaauu

SEQ ID NO: 12728 - RNA, 4039 nt, Artificial Sequence
  SARS-CoV-2/Iceland/280/2020__EPI_ISL_417608 spike protein mRNA wt (1-1273)
aggagaaagcuuaccauguuuguuuuucuuguuuuauugccacuagucucuagucaguguguuaaucuuacaaccagaacucaauuacccccugcauacacuaauucuuucacacgugguguuuauuacccugacaaaguuuucagauccucaguuuuacauucaacucaggacuuguucuuaccuuucuuuuccaauguuacuugguuccaugcuauacaugucucugggaccaaugguacuaagagguuugauaacccuguccuaccauuuaaugaugguguuuauuuugcuuccacugagaagucuaacauaauaagaggcuggauuuuugguacuacuuuagauucgaagacccagucccuacuuauuguuaauaacgcuacuaauguuguuauuaaagucugugaauuucaauuuuguaaugauccauuuuuggguguuuauuaccacaaaaacaacaaaaguuggauggaaagugaguucagaguuuauucuagugcgaauaauugcacuuuugaauaugucucucagccuuuucuuauggaccuugaaggaaaacaggguaauuucaaaaaucuuagggaauuuguguuuaagaauauugaugguuauuuuaaaauauauucuaagcacacgccuauuaauuuagugcgugaucucccucaggguuuuucggcuuuagaaccauugguagauuugccaauagguauuaacaucacuagguuucaaacuuuacuugcuuuacauagaaguuauuugacuccuggugauucuucuucagguuggacagcuggugcugcagcuuauuauguggguuaucuucaaccuaggacuuuucuauuaaaauauaaugaaaauggaaccauuacagaugcuguagacugugcacuugacccucucucagaaacaaaguguacguugaaauccuucacuguagaaaaaggaaucuaucaaacuucuaacuuuagaguccaaccaacagaaucuauuguuagauuuccuaauauuacaaacuugugcccuuuuggugaaguuuuuaacgccaccagauuugcaucuguuuaugcuuggaacaggaagagaaucagcaacuguguugcugauuauucuguccuauauaauuccgcaucauuuuccacuuuuaaguguuauggagugucuccuacuaaauuaaaugaucucugcuuuacuaaugucuaugcagauucauuuguaauuagaggugaugaagucagacaaaucgcuccagggcaaacuggaaagauugcugauuauaauuauaaauuaccagaugauuuuacaggcugcguuauagcuuggaauucuaacaaucuugauucuaagguuggugguaauuauaauuaccuguauagauuguuuaggaagucuaaucucaaaccuuuugagagagauauuucaacugaaaucuaucaggccgguagcacaccuuguaaugguguugaagguuuuaauuguuacuuuccuuuacaaucauaugguuuccaacccacuaaugguguugguuaccaaccauacagaguaguaguacuuucuuuugaacuucuacaugcaccagcaacuguuuguggaccuaaaaagucuacuaauuugguuaaaaacaaaugugucaauuucaacuucaaugguuuaacaggcacagguguucuuacugagucuaacaaaaaguuucugccuuuccaacaauuuggcagagacauugcugacacuacugaugcuguccgugauccacagacacuugagauucuugacauuacaccauguucuuuugguggugucaguguuauaacaccaggaacaaauacuucuaaccagguugcuguucuuuaucaggguguuaacugcacagaagucccuguugcuauucaugcagaucaacuuacuccuacuuggcguguuuauucuacagguucuaauguuuuucaaacacgugcaggcuguuuaauaggggcugaacaugucaacaacucauaugagugugacauacccauuggugcagguauaugcgcuaguuaucauacucagacuaauucuccucggcgggcacguaguguagcuagucaauccaucauugccuacacuaugucacuuggugcagaaaauucaguugcuuacucuaauaacucuauugccauacccacaaauuuuacuauuaguguuaccacagaaauucuaccagugucuaugaccaagacaucaguagauuguacaauguacauuuguggugauucaacugaaugcagcaaucuuuuguugcaauauggcaguuuuuguacacaauuaaaccgugcuuuaacuggaauagcuguugaacaagacaaaaacacccaagaaguuuuugcacaagucaaacaaauuuacaaaacaccaccaauuaaagauuuuggugguuuuaauuuuucacaaauauuaccagauccaucaaaaccaagcaagaggucauuuauugaagaucuacuuuucaacaaagugacacuugcagaugcuggcuucaucaaacaauauggugauugccuuggugauauugcugcuagagaccucauuugugcacaaaaguuuaacggccuuacuguuuugccaccuuugcucacagaugaaaugauugcucaauacacuucugcacuguuagcggguacaaucacuucugguuggaccuuuggugcaggugcugcauuacaaauaccauuugcuaugcaaauggcuuauagguuuaaugguauuggaguuacacagaauguucucuaugagaaccaaaaauugauugccaaccaauuuaauagugcuauuggcaaaauucaagacucacuuucuuccacagcaagugcacuuggaaaacuucaagauguggucaaccaaaaugcacaagcuuuaaacacgcuuguuaaacaacuuagcuccaauuuuggugcaauuucaaguguuuuaaaugauauccuuucacgucuugacaaaguugaggcugaagugcaaauugauagguugaucacaggcagacuucaaaguuugcagacauaugugacucaacaauuaauuagagcugcagaaaucagagcuucugcuaaucuugcugcuacuaaaaugucagaguguguacuuggacaaucaaaaagaguugauuuuuguggaaagggcuaucaucuuauguccuucccucagucagcaccucaugguguagucuucuugcaugugacuuaugucccugcacaagaaaagaacuucacaacugcuccugccauuugucaugauggaaaagcacacuuuccucgugaaggugucuuuguuucaaauggcacacacugguuuguaacacaaaggaauuuuuaugaaccacaaaucauuacuacagacaacacauuugugucugguaacugugauguuguaauaggaauugucaacaacacaguuuaugauccuuugcaaccugaauuagacucauucaaggaggaguuagauaaauauuuuaagaaucauacaucaccagauguugauuuaggugacaucucuggcauuaaugcuucaguuguaaacauucaaaaagaaauugaccgccucaaugagguugccaagaauuuaaaugaaucucucaucgaucuccaagaacuuggaaaguaugagcaguauauaaaauggccaugguacauuuggcuagguuuuauagcuggcuugauugccauaguaauggugacaauuaugcuuugcuguaugaccaguugcuguaguugucucaagggcuguuguucuuguggauccugcugcaaauuugaugaagacgacucugagccagugcucaaaggagucaaauuacauuacacauaaggacuaguuauaagacugacuagcccgaugggccucccaacgggcccuccuccccuccuugcaccgagauuaauaaaaaaaaaaaaaaaaaaaaaaaaaaaaaaaaaaaaaaaaaaaaaaaaaaaaaaaaaaaaaaaaugcaucccccccccccccccccccccccccccccccaaaggcucuuuucagagccaccagaauu

SEQ ID NO: 12729 - RNA, 4039 nt, Artificial Sequence
  SARS-CoV-2/Iceland/247/2020__EPI_ISL_417575 spike protein mRNA wt (1-1273)
aggagaaagcuuaccauguuuguuuuucuuguuuuauugccacuagucucuagucaguguguuaaucuuacaaccagaacucaauuacccccugcauacacuaauucuuucacacgugguguuuauuacccugacaaaguuuucagauccucaguuuuacauucaacucaggacuuguucuuaccuuucuuuuccaauguuacuugguuccaugcuauacaugucucugggaccaaugguacuaagagguuugauaacccuguccuaccauuuaaugaugguguuuauuuugcuuccacugagaagucuaacauaauaagaggcuggauuuuugguacuacuuuagauucgaagacccagucccuacuuauuguuaauaacgcuacuaauguuguuauuaaagucugugaauuucaauuuuguaaugauccauuuuuggguguuuauuaccacaaaaacaacaaaaguuggauggaaagugaguucagaguuuauucuagugcgaauaauugcacuuuugaauaugucucucagccuuuucuuauggaccuugaaggaaaacaggguaauuucaaaaaucuuagggaauuuguguuuaagaauauugaugguuauuuuaaaauauauucuaagcacacgccuauuaauuuagugcgugaucucccucaggguuuuucggcuuuagaaccauugguagauuugccaauagguauuaacaucacuagguuucaaacuuuacuugcuuuacauagaaguuauuugacuccuggugauucuucuucagguuggacagcuggugcugcagcuuauuauguggguuaucuucaaccuaggacuuuucuauuaaaauauaaugaaaauggaaccauuacagaugcuguagacugugcacuugacccucucucagaaacaaaguguacguugaaauccuucacuguagaaaaaggaaucuaucaaacuucuaacuuuagaguccaaccaacagaaucuauuguuagauuuccuaauauuacaaacuugugcccuuuuggugaaguuuuuaacgccaccagauuugcaucuguuuaugcuuggaacaggaagagaaucagcaacuguguugcugauuauucuguccuauauaauuccgcaucauuuuccacuuuuaaguguuauggagugucuccuacuaaauuaaaugaucucugcuuuacuaaugucuaugcagauucauuuguaauuagaggugaugaagucagacaaaucgcuccagggcaaacuggaaagauugcugauuauaauuauaaauuaccagaugauuuuacaggcugcguuauagcuuggaauucuaacaaucuugauucuaagguuggugguaauuauaauuaccuguauagauuguuuaggaagucuaaucucaaaccuuuugagagagauauuucaacugaaaucuaucaggccgguagcacaccuuguaaugguguugaagguuuuaauuguuacuuuccuuuacaaucauaugguuuccaacccacuaaugguguugguuaccaaccauacagaguaguaguacuuucuuuugaacuucuacaugcaccagcaacuguuuguggaccuaaaaagucuacuaauuugguuaaaaacaaaugugucaauuucaacuucaaugguuuaacaggcacagguguucuuacugagucuaacaaaaaguuucugccuuuccaacaauuuggcagagacauugcugacacuacugaugcuguccgugauccacagacacuugagauucuugacauuacaccauguucuuuugguggugucaguguuauaacaccaggaacaaauacuucuaaccagguugcuguucuuuaucaggguguuaacugcacagaagucccuguugcuauucaugcagaucaacuuacuccuacuuggcguguuuauucuacagguucuaauguuuuucaaacacgugcaggcuguuuaauaggggcugaacaugucaacaacucauaugagugugacauacccauuggugcagguauaugcgcuaguuaucagacucagacuaauucuccucggcgggcacguaguguagcuagucaauccaucauugccuacacuaugucacuuggugcagaaaauucaguugcuuacucuaauaacucuauugccauacccacaaauuuuacuauuaguguuaccacagaaauucuaccagugucuaugaccaagacaucaguagauuguacaauguacauuuguggugauucaacugaaugcagcaaucuuuuguugcaauauggcaguuuuuguacacaauuaaaccgugcuuuaacuggaauagcuguugaacaagacaaaaacacccaagaaguuuuugcacaagucaaacaaauuuacaaaacaccaccaauuaaagauuuuggugguuuuaauuuuucacaaauauuaccagauccaucaaaaccaagcaagaggucauuuauugaagaucuacuuuucaacaaagugacacuugcagaugcuggcuucaucaaacaauauggugauugccuuggugauauugcugcuagagaccucauuugugcacaaaaguuuaacggccuuacuguuuugccaccuuugcucacagaugaaaugauugcucaauacacuucugcacuguuagcggguacaaucacuucugguuggaccuuuggugcaggugcugcauuacaaauaccauuugcuaugcaaauggcuuauagguuuaaugguauuggaguuacacagaauguucucuaugagaaccaaaaauugauugccaaccaauuuaauagugcuauuggcaaaauucaagacucacuuucuuccacagcaagugcacuuggaaaacuucaagauguggucaaccaaaaugcacaagcuuuaaacacgcuuguuaaacaacuuagcuccaauuuuggugcaauuucaaguguuuuaaaugauauccuuucacgucuugacaaaguugaggcugaagugcaaauugauagguugaucacaggcagacuucaaaguuugcagacauaugugacucaacaauuaauuagagcugcagaaaucagagcuucugcuaaucuugcugcuacuaaaaugucagaguguguacuuggacaaucaaaaagaguugauuuuuguggaaagggcuaucaucuuauguccuucccucagucagcaccucaugguguagucuucuugcaugugacuuaugucccugcacaagaaaagaacuucacaacugcuccugccauuugucaugauggaaaagcacacuuuccucgugaaggugucuuuguuucaaauggcacacacugguuuguaacacaaaggaauuuuuaugaaccacaaaucauuacuacagacaacacauuugugucugguaacugugauguuguaauaggaauugucaacaacacaguuuaugauccuuugcaaccugaauuagacucauucaaggaggaguuagauaaauauuuuaagaaucauacaucaccagauguugauuuaggugacaucucuggcauuaaugcuucaguuguaaacauucaaaaagaaauugaccgccucaaugagguugccaagaauuuaaaugaaucucucaucgaucuccaagaacuuggaaaguaugagcaguauauaaaauggccaugguacauuuggcuagguuuuauagcuggcuugauugccauaguaauugugacaauuaugcuuugcuguaugaccaguugcuguaguugucucaagggcuguuguucuuguggauccugcugcaaauuugaugaagacgacucugagccagugcucaaaggagucaaauuacauuacacauaaggacuaguuauaagacugacuagcccgaugggccucccaacgggcccuccuccccuccuugcaccgagauuaauaaaaaaaaaaaaaaaaaaaaaaaaaaaaaaaaaaaaaaaaaaaaaaaaaaaaaaaaaaaaaaaaugcaucccccccccccccccccccccccccccccccaaaggcucuuuucagagccaccagaauu

SEQ ID NO: 12730 - RNA, 4039 nt, Artificial Sequence
  SARS-CoV-2/Iceland/238/2020__EPI_ISL_417566 spike protein mRNA wt (1-1273)
aggagaaagcuuaccauguuuguuuuucuuguuuuauugccacuagucucuagucaguguguuaaucuuacaaccagaacucaauuacccccugcauacacuaauucuuucacacgugguguuuauuacccugacaaaguuuucagauccucaguuuuacauucaacucaggacuuguucuuaccuuucuuuuccaauguuacuugguuccaugcuauacaugucucugggaccaaugguacuaagagguuugauaacccuguccuaccauuuaaugaugguguuuauuuugcuuccacugagaagucuaacauaauaagaggcuggauuuuugguacuacuuuagauucgaagacccagucccuacuuauuguuaauaacgcuacuaauguuguuauuaaagucugugaauuucaauuuuguaaugauccauuuuuggguguuuauuaccacaaaaacaacaaaaguuggauggaaagugaguucagaguuuauucuagugcgaauaauugcacuuuugaauaugucucucagccuuuucuuauggaccuugaaggaaaacaggguaauuucaaaaaucuuagggaauuuguguuuaagaauauugaugguuauuuuaaaauauauucuaagcacacgccuauuaauuuagugcgugaucucccucaggguuuuucggcuuuagaaccauugguagauuugccaauagguauuaacaucacuagguuucaaacuuuacuugcuuuacauagaaguuauuugacuccuggugauucuucuucagguuggacagcuggugcugcagcuuauuauguggguuaucuucaaccuaggacuuuucuauuaaaauauaaugaaaauggaaccauuacagaugcuguagacugugcacuugacccucucucagaaacaaaguguacguugaaauccuucacuguagaaaaaggaaucuaucaaacuucuaacuuuagaguccaaccaacagaaucuauuguuagauuuccuaauauuacaaacuugugcccuuuuggugaaguuuuuaacgccaccagauuugcaucuguuuaugcuuggaacaggaagagaaucagcaacuguguugcugauuauucuguccuauauaauuccgcaucauuuuccacuuuuaaguguuauggagugucuccuacuaaauuaaaugaucucugcuuuacuaaugucuaugcagauucauuuguaauuagaggugaugaagucagacaaaucgcuccagggcaaacuggaaagauugcugauuauaauuauaaauuaccagaugauuuuacaggcugcguuauagcuuggaauucuaacaaucuugauucuaagguuggugguaauuauaauuaccuguauagauuguuuaggaagucuaaucucaaaccuuuugagagagauauuucaacugaaaucuaucaggccgguagcacaccuuguaaugguguugaagguuuuaauuguuacuuuccuuuacaaucauaugguuuccaacccacuaaugguguugguuaccaaccauacagaguaguaguacuuucuuuugaacuucuacaugcaccagcaacuguuuguggaccuaaaaagucuacuaauuugguuaaaaacaaaugugucaauuucaacuucaaugguuuaacaggcacagguguucuuacugagucuaacaaaaaguuucugccuuuccaacaauuuggcagagacauugcugacacuacugaugcuguccgugauccacagacacuugagauucuugacauuacaccauguucuuuugguggugucaguguuauaacaccaggaacaaauacuucuaaccagguugcuguucuuuaucaggguguuaacugcacagaagucccuguugcuauucaugcagaucaacuuacuccuacuuggcguguuuauucuacagguucuaauguuuuucaaacacgugcaggcuguuuaauaggggcugaacaugucaacaacucauaugagugugacauacccauuggugcagguauaugcgcuaguuaucagacucagacuaauucuccucggcgggcacguaguguagcuagucaauccaucauugccuacacuaugucacuuggugcagaaaauucaguugcuuacucuaauaacucuauugccauacccacaaauuuuacuauuaguguuaccacagaaauucuaccagugucuaugaccaagacaucaguagauuguacaauguacauuuguggugauucaacugaaugcagcaaucuuuuguugcaauauggcaguuuuuguacacaauuaaaccgugcuuuaacuggaauagcuguugaacaagacaaaaacacccaagaaguuuuugcacaagucaaacaaauuuacaaaacaccaccaauuaaagauuuuggugguuuuaauuuuucacaaauauuaccagauccaucaaaaccaagcaagaggucauuuauugaagaucuacuuuucaacaaagugacacuugcagauguuggcuucaucaaacaauauggugauugccuuggugauauugcugcuagagaccucauuugugcacaaaaguuuaacggccuuacuguuuugccaccuuugcucacagaugaaaugauugcucaauacacuucugcacuguuagcggguacaaucacuucugguuggaccuuuggugcaggugcugcauuacaaauaccauuugcuaugcaaauggcuuauagguuuaaugguauuggaguuacacagaauguucucuaugagaaccaaaaauugauugccaaccaauuuaauagugcuauuggcaaaauucaagacucacuuucuuccacagcaagugcacuuggaaaacuucaagauguggucaaccaaaaugcacaagcuuuaaacacgcuuguuaaacaacuuagcuccaauuuuggugcaauuucaaguguuuuaaaugauauccuuucacgucuugacaaaguugaggcugaagugcaaauugauagguugaucacaggcagacuucaaaguuugcagacauaugugacucaacaauuaauuagagcugcagaaaucagagcuucugcuaaucuugcugcuacuaaaaugucagaguguguacuuggacaaucaaaaagaguugauuuuuguggaaagggcuaucaucuuauguccuucccucagucagcaccucaugguguagucuucuugcaugugacuuaugucccugcacaagaaaagaacuucacaacugcuccugccauuugucaugauggaaaagcacacuuuccucgugaaggugucuuuguuucaaauggcacacacugguuuguaacacaaaggaauuuuuaugaaccacaaaucauuacuacagacaacacauuugugucugguaacugugauguuguaauaggaauugucaacaacacaguuuaugauccuuugcaaccugaauuagacucauucaaggaggaguuagauaaauauuuuaagaaucauacaucaccagauguugauuuaggugacaucucuggcauuaaugcuucaguuguaaacauucaaaaagaaauugaccgccucaaugagguugccaagaauuuaaaugaaucucucaucgaucuccaagaacuuggaaaguaugagcaguauauaaaauggccaugguacauuuggcuagguuuuauagcuggcuugauugccauaguaauggugacaauuaugcuuugcuguaugaccaguugcuguaguugucucaagggcuguuguucuuguggauccugcugcaaauuugaugaagacgacucugagccagugcucaaaggagucaaauuacauuacacauaaggacuaguuauaagacugacuagcccgaugggccucccaacgggcccuccuccccuccuugcaccgagauuaauaaaaaaaaaaaaaaaaaaaaaaaaaaaaaaaaaaaaaaaaaaaaaaaaaaaaaaaaaaaaaaaaugcaucccccccccccccccccccccccccccccccaaaggcucuuuucagagccaccagaauu

SEQ ID NO: 12731 - RNA, 4039 nt, Artificial Sequence
  SARS-CoV-2/Greece/16/2020__EPI_ISL_418265 spike protein mRNA wt (1-1273)
aggagaaagcuuaccauguuuguuuuucuuguuuuauugccacuagucucuagucaguguguuaaucuuacaaccagaacucaauuacccccugcauacacuaauucuuucacacgugguguuuauuacccugacaaaguuuucagauccucaguuuuacauucaacucaggacuuguucuuaccuuucuuuuccaauguuacuugguuccaugcuauacaugucucugggaccaaugguacuaagagguuugauaacccuguccuaccauuuaaugaugguguuuauuuugcuuccacugagaagucuaacauaauaagaggcuggauuuuugguacuacuuuagauucgaagacccagucccuacuuauuguuaauaacgcuacuaauguuguuauuaaagucugugaauuucaauuuuguaaugauccauuuuuggguguuuauuaccacaaaaacaacaaaaguuggauggaaagugaguucagaguuuauucuagugcgaauaauugcacuuuugaauaugucucucagccuuuucuuauggaccuugaaggaaaacaggguaauuucaaaaaucuuagggaauuuguguuuaagaauguugaugguuauuuuaaaauauauucuaagcacacgccuauuaauuuagugcgugaucucccucaggguuuuucggcuuuagaaccauugguagauuugccaauagguauuaacaucacuagguuucaaacuuuacuugcuuuacauagaaguuauuugacuccuggugauucuucuucagguuggacagcuggugcugcagcuuauuauguggguuaucuucaaccuaggacuuuucuauuaaaauauaaugaaaauggaaccauuacagaugcuguagacugugcacuugacccucucucagaaacaaaguguacguugaaauccuucacuguagaaaaaggaaucuaucaaacuucuaacuuuagaguccaaccaacagaaucuauuguuagauuuccuaauauuacaaacuugugcccuuuuggugaaguuuuuaacgccaccagauuugcaucuguuuaugcuuggaacaggaagagaaucagcaacuguguugcugauuauucuguccuauauaauuccgcaucauuuuccacuuuuaaguguuauggagugucuccuacuaaauuaaaugaucucugcuuuacuaaugucuaugcagauucauuuguaauuagaggugaugaagucagacaaaucgcuccagggcaaacuggaaagauugcugauuauaauuauaaauuaccagaugauuuuacaggcugcguuauagcuuggaauucuaacaaucuugauucuaagguuggugguaauuauaauuaccuguauagauuguuuaggaagucuaaucucaaaccuuuugagagagauauuucaacugaaaucuaucaggccgguagcacaccuuguaaugguguugaagguuuuaauuguuacuuuccuuuacaaucauaugguuuccaacccacuaaugguguugguuaccaaccauacagaguaguaguacuuucuuuugaacuucuacaugcaccagcaacuguuuguggaccuaaaaagucuacuaauuugguuaaaaacaaaugugucaauuucaacuucaaugguuuaacaggcacagguguucuuacugagucuaacaaaaaguuucugccuuuccaacaauuuggcagagacauugcugacacuacugaugcuguccgugauccacagacacuugagauucuugacauuacaccauguucuuuugguggugucaguguuauaacaccaggaacaaauacuucuaaccagguugcuguucuuuaucaggauguuaacugcacagaagucccuguugcuauucaugcagaucaacuuacuccuacuuggcguguuuauucuacagguucuaauguuuuucaaacacgugcaggcuguuuaauaggggcugaacaugucaacaacucauaugagugugacauacccauuggugcagguauaugcgcuaguuaucagacucagacuaauucuccucggcgggcacguaguguagcuagucaauccaucauugccuacacuaugucacuuggugcagaaaauucaguugcuuacucuaauaacucuauugccauacccacaaauuuuacuauuaguguuaccacagaaauucuaccagugucuaugaccaagacaucaguagauuguacaauguacauuuguggugauucaacugaaugcagcaaucuuuuguugcaauauggcaguuuuuguacacaauuaaaccgugcuuuaacuggaauagcuguugaacaagacaaaaacacccaagaaguuuuugcacaagucaaacaaauuuacaaaacaccaccaauuaaagauuuuggugguuuuaauuuuucacaaauauuaccagauccaucaaaaccaagcaagaggucauuuauugaagaucuacuuuucaacaaagugacacuugcagaugcuggcuucaucaaacaauauggugauugccuuggugauauugcugcuagagaccucauuugugcacaaaaguuuaacggccuuacuguuuugccaccuuugcucacagaugaaaugauugcucaauacacuucugcacuguuagcggguacaaucacuucugguuggaccuuuggugcaggugcugcauuacaaauaccauuugcuaugcaaauggcuuauagguuuaaugguauuggaguuacacagaauguucucuaugagaaccaaaaauugauugccaaccaauuuaauagugcuauuggcaaaauucaagacucacuuucuuccacagcaagugcacuuggaaaacuucaagauguggucaaccaaaaugcacaagcuuuaaacacgcuuguuaaacaacuuagcuccaauuuuggugcaauuucaaguguuuuaaaugauauccuuucacgucuugacaaaguugaggcugaagugcaaauugauagguugaucacaggcagacuucaaaguuugcagacauaugugacucaacaauuaauuagagcugcagaaaucagagcuucugcuaaucuugcugcuacuaaaaugucagaguguguacuuggacaaucaaaaagaguugauuuuuguggaaagggcuaucaucuuauguccuucccucagucagcaccucaugguguagucuucuugcaugugacuuaugucccugcacaagaaaagaacuucacaacugcuccugccauuugucaugauggaaaagcacacuuuccucgugaaggugucuuuguuucaaauggcacacacugguuuguaacacaaaggaauuuuuaugaaccacaaaucauuacuacagacaacacauuugugucugguaacugugauguuguaauaggaauugucaacaacacaguuuaugauccuuugcaaccugaauuagacucauucaaggaggaguuagauaaauauuuuaagaaucauacaucaccagauguugauuuaggugacaucucuggcauuaaugcuucaguuguaaacauucaaaaagaaauugaccgccucaaugagguugccaagaauuuaaaugaaucucucaucgaucuccaagaacuuggaaaguaugagcaguauauaaaauggccaugguacauuuggcuagguuuuauagcuggcuugauugccauaguaauggugacaauuaugcuuugcuguaugaccaguugcuguaguugucucaagggcuguuguucuuguggauccugcugcaaauuugaugaagacgacucugagccagugcucaaaggagucaaauuacauuacacauaaggacuaguuauaagacugacuagcccgaugggccucccaacgggcccuccuccccuccuugcaccgagauuaauaaaaaaaaaaaaaaaaaaaaaaaaaaaaaaaaaaaaaaaaaaaaaaaaaaaaaaaaaaaaaaaaugcaucccccccccccccccccccccccccccccccaaaggcucuuuucagagccaccagaauu

SEQ ID NO: 12732 - RNA, 4039 nt, Artificial Sequence
  SARS-CoV-2/Iceland/319/2020__EPI_ISL_417648 spike protein mRNA wt (1-1273)
aggagaaagcuuaccauguuuguuuuucuuguuuuauugccacuagucucuagucaguguguuaaucuuacaaccagaacucaauuacccccugcauacacuaauucuuucacacgugguguuuauuacccugacaaaguuuucagauccucaguuuuacauucaacucaggacuuguucuuaccuuucuuuuccaauguuacuugguuccaugcuauacaugucucugggaccaaugguacuaagagguuugauaacccuguccuaccauuuaaugaugguguuuauuuugcuuccacugagaagucuaacauaauaagaggcuggauuuuugguacuacuuuagauucgaagacccagucccuacuuauuguuaauaacgcuacuaauguuguuauuaaagucugugaauuucaauuuuguaaugauccauuuuuggguguuuauuaccacaaaaacaacaaaaguuggauggaaagugaguucagaguuuauucuagugcgaauaauugcacuuuugaauaugucucucagccuuuucuuauagaccuugaaggaaaacaggguaauuucaaaaaucuuagggaauuuguguuuaagaauauugaugguuauuuuaaaauauauucuaagcacacgccuauuaauuuagugcgugaucucccucaggguuuuucggcuuuagaaccauugguagauuugccaauagguauuaacaucacuagguuucaaacuuuacuugcuuuacauagaaguuauuugacuccuggugauucuucuucagguuggacagcuggugcugcagcuuauuauguggguuaucuucaaccuaggacuuuucuauuaaaauauaaugaaaauggaaccauuacagaugcuguagacugugcacuugacccucucucagaaacaaaguguacguugaaauccuucacuguagaaaaaggaaucuaucaaacuucuaacuuuagaguccaaccaacagaaucuauuguuagauuuccuaauauuacaaacuugugcccuuuuggugaaguuuuuaacgccaccagauuugcaucuguuuaugcuuggaacaggaagagaaucagcaacuguguugcugauuauucuguccuauauaauuccgcaucauuuuccacuuuuaaguguuauggagugucuccuacuaaauuaaaugaucucugcuuuacuaaugucuaugcagauucauuuguaauuagaggugaugaagucagacaaaucgcuccagggcaaacuggaaagauugcugauuauaauuauaaauuaccagaugauuuuacaggcugcguuauagcuuggaauucuaacaaucuugauucuaagguuggugguaauuauaauuaccuguauagauuguuuaggaagucuaaucucaaaccuuuugagagagauauuucaacugaaaucuaucaggccgguagcacaccuuguaaugguguugaagguuuuaauuguuacuuuccuuuacaaucauaugguuuccaacccacuaaugguguugguuaccaaccauacagaguaguaguacuuucuuuugaacuucuacaugcaccagcaacuguuuguggaccuaaaaagucuacuaauuugguuaaaaacaaaugugucaauuucaacuucaaugguuuaacaggcacagguguucuuacugagucuaacaaaaaguuucugccuuuccaacaauuuggcagagacauugcugacacuacugaugcuguccgugauccacagacacuugagauucuugacauuacaccauguucuuuugguggugucaguguuauaacaccaggaacaaauacuucuaaccagguugcuguucuuuaucaggguguuaacugcacagaagucccuguugcuauucaugcagaucaacuuacuccuacuuggcguguuuauucuacagguucuaauguuuuucaaacacgugcaggcuguuuaauaggggcugaacaugucaacaacucauaugagugugacauacccauuggugcagguauaugcgcuaguuaucagacucagacuaauucuccucggcgggcacguaguguagcuagucaauccaucauugccuacacuaugucacuuggugcagaaaauucaguugcuuacucuaauaacucuauugccauacccacaaauuuuacuauuaguguuaccacagaaauucuaccagugucuaugaccaagacaucaguagauuguacaauguacauuuguggugauucaacugaaugcagcaaucuuuuguugcaauauggcaguuuuuguacacaauuaaaccgugcuuuaacuggaauagcuguugaacaagacaaaaacacccaagaaguuuuugcacaagucaaacaaauuuacaaaacaccaccaauuaaagauuuuggugguuuuaauuuuucacaaauauuaccagauccaucaaaaccaagcaagaggucauuuauugaagaucuacuuuucaacaaagugacacuugcagaugcuggcuucaucaaacaauauggugauugccuuggugauauugcugcuagagaccucauuugugcacaaaaguuuaacggccuuacuguuuugccaccuuugcucacagaugaaaugauugcucaauacacuucugcacuguuagcggguacaaucacuucugguuggaccuuuggugcaggugcugcauuacaaauaccauuugcuaugcaaauggcuuauagguuuaaugguauuggaguuacacagaauguucucuaugagaaccaaaaauugauugccaaccaauuuaauagugcuauuggcaaaauucaagacucacuuucuuccacagcaagugcacuuggaaaacuucaagauguggucaaccaaaaugcacaagcuuuaaacacgcuuguuaaacaacuuagcuccaauuuuggugcaauuucaaguguuuuaaaugauauccuuucacgucuugacaaaguugaggcugaagugcaaauugauagguugaucacaggcagacuucaaaguuugcagacauaugugacucaacaauuaauuagagcugcagaaaucagagcuucugcuaaucuugcugcuacuaaaaugucagaguguguacuuggacaaucaaaaagaguugauuuuuguggaaagggcuaucaucuuauguccuucccucagucagcaccucaugguguagucuucuugcaugugacuuaugucccugcacaagaaaagaacuucacaacugcuccugccauuugucaugauggaaaagcacacuuuccucgugaaggugucuuuguuucaaauggcacacacugguuuguaacacaaaggaauuuuuaugaaccacaaaucauuacuacagacaacacauuugugucugguaacugugauguuguaauaggaauugucaacaacacaguuuaugauccuuugcaaccugaauuagacucauucaaggaggaguuagauaaauauuuuaagaaucauacaucaccagauguugauuuaggugacaucucuggcauuaaugcuucaguuguaaacauucaaaaagaaauugaccgccucaaugagguugccaagaauuuaaaugaaucucucaucgaucuccaagaacuuggaaaguaugagcaguauauaaaauggccaugguacauuuggcuagguuuuauagcuggcuugauugccauaguaauggugacaauuaugcuuugcuguaugaccaguugcuguaguugucucaagggcuguuguucuuguggauccugcugcaaauuugaugaagacgacucugagccagugcucaaaggagucaaauuacauuacacauaaggacuaguuauaagacugacuagcccgaugggccucccaacgggcccuccuccccuccuugcaccgagauuaauaaaaaaaaaaaaaaaaaaaaaaaaaaaaaaaaaaaaaaaaaaaaaaaaaaaaaaaaaaaaaaaaugcaucccccccccccccccccccccccccccccccaaaggcucuuuucagagccaccagaauu

SEQ ID NO: 12733 - RNA, 4039 nt, Artificial Sequence
  SARS-CoV-2/Congo/94/2020__EPI_ISL_417947 spike protein mRNA wt (1-1273)
aggagaaagcuuaccauguuuguuuuucuuguuuuauugccacuagucucuagucaguguguuaaucuuacaaccagaacucaauuacccccugcauacacuaauucuuucacacgugguguuuauuacccugacaaaguuuucagauccucaguuuuacauucaacucaggacuuguucuuaccuuucuuuuccaauguuacuugguuccaugcuauacaugucucugggaccaaugguacuaagagguuugauaacccuguccuaccauuuaaugaugguguuuauuuugcuuccacugagaagucuaacauaauaagaggcuggauuuuugguacuacuuuagauucgaagacccagucccuacuuauuguuaauaacgcuacuaauguuguuauuaaagucugugaauuucaauuuuguaaugauccauuuuuggguguuuauuaccacaaaaacaacaaaaguuggauggaaagugaguucagaguuuauucuagugcgaauaauugcacuuuugaauaugucucucagccuuuucuuauggaccuugaaggaaaacaggguaauuucaaaaaucuuagggaauuuguguuuaagaauauugaugguuauuuuaaaauauauucuaagcacacgccuauuaauuuagugcgugaucucccucaggguuuuucggcuuuagaaccauugguagauuugccaauagguauuaacaucacuagguuucaaacuuuacuugcuuuacauagaaguuauuugacuccuggugauucuucuucagguuggacagcuggugcugcagcuuauuauguggguuaucuucaaccuaggacuuuucuauuaaaauauaaugaaaauggaaccauuacagaugcuguagacugugcacuugacccucucucagaaacaaaguguacguugaaauccuucacuguagaaaaaggaaucuaucaaacuucuaacuuuagaguccaaccaacagaaucuauuguuagauuuccuaauauuacaaacuugugcccuuuuggugaaguuuuuaacgccaccagauuugcaucuguuuaugcuuggaacaggaagagaaucagcaacuguguugcugauuauucuguccuauauaauuccgcaucauuuuccacuuuuaaguguuauggagugucuccuacuaaauuaaaugaucucugcuuuacuaaugucuaugcagauucauuuguaauuagaggugaugaagucagacaaaucgcuccagggcaaacuggaaagauugcugauuauaauuauaaauuaccagaugauuuuacaggcugcguuauagcuuggaauucuaacaaucuugauucuaagguuggugguaauuauaauuaccuguauagauuguuuaggaagucuaaucucaaaccuuuugagagagauauuucaacugaaaucuaucaggccgguagcacaccuuguaaugguguugaagguuuuaauuguuacuuuccuuuacaaucauaugguuuccaacccacuaaugguguugguuaccaaccauacagaguaguaguacuuucuuuugaacuucuacaugcaccagcaacuguuuguggaccuaaaaagucuacuaauuugguuaaaaacaaaugugucaauuucaacuucaaugguuuaacaggcacagguguucuuacugagucuaacaaaaaguuucugccuuuccaacaauuuggcagagacauugcugacacuacugaugcuguccgugauccacagacacuugagauucuugacauuacaccauguucuuuugguggugucaguguuauaacaccaggaacaaauacuucuaaccagguugcuguucuuuaucaggguguuaacugcacagaagucccuguugcuauucaugcagaucaacuuacuccuacuuggcguguuuauucuacagguucuaauguuuuucaaacacgugcaggcuguuuaauaggggcugaacaugucaacaacucauaugagugugacauacccauuggugcagguauaugcgcuaguuaucagacucagacuaauucuccucggcgggcacguaguguagcuagucaauccaucauugccuacacuaugucacuuggugcagaaaauucaguugcuuacucuaauaacucuauugccauacccacaaauuuuacuauuaguguuaccacagaaauucuaccagugucuaugaccaagacaucaguagauuguacaauguacauuuguggugauucaacugaaugcagcaaucuuuuguugcaauauggcaguuuuuguacacaauuaaaccgugcuuuaacuggaauagcuguugaacaagacaaaaacacccaagaaguuuuugcacaagucaaacaaauuuacaaaacaccaccaauuaaagauuuuggugguuuuaauuuuucacaaauauuaccagauccaucaaaaccaagcaagaggucauuuauugaagauauacuuuucaacaaagugacacuugcagaugcuggcuucaucaaacaauauggugauugccuuggugauauugcugcuagagaccucauuugugcacaaaaguuuaacggccuuacuguuuugccaccuuugcucacagaugaaaugauugcucaauacacuucugcacuguuagcggguacaaucacuucugguuggaccuuuggugcaggugcugcauuacaaauaccauuugcuaugcaaauggcuuauagguuuaaugguauuggaguuacacagaauguucucuaugagaaccaaaaauugauugccaaccaauuuaauagugcuauuggcaaaauucaagacucacuuucuuccacagcaagugcacuuggaaaacuucaagauguggucaaccaaaaugcacaagcuuuaaacacgcuuguuaaacaacuuagcuccaauuuuggugcaauuucaaguguuuuaaaugauauccuuucacgucuugacaaaguugaggcugaagugcaaauugauagguugaucacaggcagacuucaaaguuugcagacauaugugacucaacaauuaauuagagcugcagaaaucagagcuucugcuaaucuugcugcuacuaaaaugucagaguguguacuuggacaaucaaaaagaguugauuuuuguggaaagggcuaucaucuuauguccuucccucagucagcaccucaugguguagucuucuugcaugugacuuaugucccugcacaagaaaagaacuucacaacugcuccugccauuugucaugauggaaaagcacacuuuccucgugaaggugucuuuguuucaaauggcacacacugguuuguaacacaaaggaauuuuuaugaaccacaaaucauuacuacagacaacacauuugugucugguaacugugauguuguaauaggaauugucaacaacacaguuuaugauccuuugcaaccugaauuagacucauucaaggaggaguuagauaaauauuuuaagaaucauacaucaccagauguugauuuaggugacaucucuggcauuaaugcuucaguuguaaacauucaaaaagaaauugaccgccucaaugagguugccaagaauuuaaaugaaucucucaucgaucuccaagaacuuggaaaguaugagcaguauauaaaauggccaugguacauuuggcuagguuuuauagcuggcuugauugccauaguaauggugacaauuaugcuuugcuguaugaccaguugcuguaguugucucaagggcuguuguucuuguggauccugcugcaaauuugaugaagacgacucugagccagugcucaaaggagucaaauuacauuacacauaaggacuaguuauaagacugacuagcccgaugggccucccaacgggcccuccuccccuccuugcaccgagauuaauaaaaaaaaaaaaaaaaaaaaaaaaaaaaaaaaaaaaaaaaaaaaaaaaaaaaaaaaaaaaaaaaugcaucccccccccccccccccccccccccccccccaaaggcucuuuucagagccaccagaauu

SEQ ID NO: 12734 - RNA, 4039 nt, Artificial Sequence
  SARS-CoV-2/Congo/158/2020__EPI_ISL_417950 spike protein mRNA wt (1-1273)
aggagaaagcuuaccauguuuguuuuucuuguuuuauugccacuagucucuagucaguguguuaaucuuacaaccagaacucaauuacccccugcauacacuaauucuuucacacgugguguuuauuacccugacaaaguuuucagauccucaguuuuacauucaacucaggacuuguucuuaccuuucuuuuccaauguuacuugguuccaugcuauacaugucucugggaccaaugguacuaagagguuugauaacccuguccuaccauuuaaugaugguguuuauuuugcuuccacugagaagucuaacauaauaagaggcuggauuuuugguacuacuuuagauucgaagacccagucccuacuuauuguuaauaacgcuacuaauguuguuauuaaagucugugaauuucaauuuuguaaugauccauuuuuggguguuuauuaccacaaaaacaacaaaaguuggauggaaagugaguucagaguuuauucuagugcgaauaauugcacuuuugaauaugucucucagccuuuucuuauggaccuugaaggaaaacaggguaauuucaaaaaucuuagggaauuuguguuuaagaauauugaugguuauuuuaaaauauauucuaagcacacgccuauuaauuuagugcgugaucucccucaggguuuuucggcuuuagaaccauugguagauuugccaauagguauuaacaucacuagguuucaaacuuuacuugcuuuacauagaaguuauuugacuccuggugauucuucuucagguuggacagcuggugcugcagcuuauuauguggguuaucuucaaccuaggacuuuucuauuaaaauauaaugaaaauggaaccauuacagaugcuguagacugugcacuugacccucucucagaaacaaaguguacguugaaauccuucacuguagaaaaaggaaucuaucaaacuucuaacuuuagaguccaaccaacagaaucuauuguuagauuuccuaauauuacaaacuugugcccuuuuggugaaguuuuuaacgccaccagauuugcaucuguuuaugcuuggaacaggaagagaaucagcaacuguguugcugauuauucuguccuauauaauuccgcaucauuuuccacuuuuaaguguuauggagugucuccuacuaaauuaaaugaucucugcuuuacuaaugucuaugcagauucauuuguaauuagaggugaugaagucagacaaaucgcuccagggcaaacuggaaagauugcugauuauaauuauaaauuaccagaugauuuuacaggcugcguuauagcuuggaauucuaacaaucuugauucuaagguuggugguaauuauaauuaccuguauagauuguuuaggaagucuaaucucaaaccuuuugagagagauauuucaacugaaaucuaucaggccgguagcacaccuuguaaugguguugaagguuuuaauuguuacuuuccuuuacaaucauaugguuuccaacccacuaaugguguugguuaccaaccauacagaguaguaguacuuucuuuugaacuucuacaugcaccagcaacuguuuguggaccuaaaaagucuacuaauuugguuaaaaacaaaugugucaauuucaacuucaaugguuuaacaggcacagguguucuuacugagucuaacaaaaaguuucugccuuuccaacaauuuggcagagacauugcugacacuacugaugcuguccgugauccacagacacuugagauucuugacauuacaccauguucuuuugguggugucaguguuauaacaccaggaacaaauacuucuaaccagguugcuguucuuuaucaggauguuaacugcacagaagucccuguugcuauucaugcagaucaacuuacuccuacuuggcguguuuauucuacagguucuaauguuuuucaaacacgugcaggcuguuuaauaggggcugaacaugucaacaacucauaugagugugacauacccauuggugcagguauaugcgcuaguuaucagacucagacuaauucuccucggcgggcacguaguguagcuagucaauccaucauugccuacacuaugucacuuggugcagaaaauucaguugcuuacucuaauaacucuauugccauacccacaaauuuuacuauuaguguuaccacagaaauucuaccagugucuaugaccaagacaucaguagauuguacaauguacauuuguggugauucaacugaaugcagcaaucuuuuguugcaauauggcaguuuuuguacacaauuaaaccgugcuuuaacuggaauagcuguugaacaagacaaaaacacccaagaaguuuuugcacaagucaaacaaauuuacaaaacaccaccaauuaaagauuuuggugguuuuaauuuuucacaaauauuaccagauccaucaaaaccaagcaagaggucauuuauugaagaucuacuuuucaacaaagugacacuugcagaugcuggcuucaucaaacaauauggugauugccuuggugauauugcugcuagagaccucauuugugcacaaaaguuuaacggccuuacuguuuugccaccuuugcucacagaugaaaugauugcucaauacacuucugcacuguuagcggguacaaucacuucugguuggaccuuuggugcaggugcugcauuacaaauaccauuugcuaugcaaauggcuuauagguuuaaugguauuggaguuacacagaauguucucuaugagaaccaaaaauugauugccaaccaauuuaauagugcuauuggcaaaauucaagacucacuuucuuccacagcaagugcacuuggaaaacuucaagauguggucaaccaaaaugcacaagcuuuaaacacgcuuguuaaacaacuuagcuccaauuuuggugcaauuucaaguguuuuaaaugauauccuuucacgucuugacaaaguugaggcugaagugcaaauugauagguugaucacaggcagacuucaaaguuugcagacauaugugacucaacaauuaauuagagcugcagaaaucagagcuucugcuaaucuugcugcuacuaaaaugucagaguguguacuuggacaaucaaaaagaguugauuuuuguggaaagggcuaucaucuuauguccuucccucagucagcaccucaugguguagucuucuugcaugugacuuaugucccugcacaagaaaagaacuucacaacugcuccugccauuugucaugauggaaaagcacacuuuccucgugaaggugucuuuguuucaaauggcacacacugguuuguaacacaaaggaauuuuuaugaaccacaaaucauuacuacagacaacacauuuuugucugguaacugugauguuguaauaggaauugucaacaacacaguuuaugauccuuugcaaccugaauuagacucauucaaggaggaguuagauaaauauuuuaagaaucauacaucaccagauguugauuuaggugacaucucuggcauuaaugcuucaguuguaaacauucaaaaagaaauugaccgccucaaugagguugccaagaauuuaaaugaaucucucaucgaucuccaagaacuuggaaaguaugagcaguauauaaaauggccaugguacauuuggcuagguuuuauagcuggcuugauugccauaguaauggugacaauuaugcuuugcuguaugaccaguugcuguaguugucucaagggcuguuguucuuguggauccugcugcaaauuugaugaagacgacucugagccagugcucaaaggagucaaauuacauuacacauaaggacuaguuauaagacugacuagcccgaugggccucccaacgggcccuccuccccuccuugcaccgagauuaauaaaaaaaaaaaaaaaaaaaaaaaaaaaaaaaaaaaaaaaaaaaaaaaaaaaaaaaaaaaaaaaaugcaucccccccccccccccccccccccccccccccaaaggcucuuuucagagccaccagaauu

SEQ ID NO: 12735 - RNA, 4039 nt, Artificial Sequence
  SARS-CoV-2/USA/UT-00034/2020__EPI_ISL_417977 spike protein mRNA wt (1-1273)
aggagaaagcuuaccauguuuguuuuucuuguuuuauugccacuagucucuagucaguguguuaaucuuacaaccagaacucaauuacccccugcauacacuaauucuuucacacgugguguuuauuacccugacaaaguuuucagauccucaguuuuacauucaacucaggacuuguucuuaccuuucuuuuccaauguuacuugguuccaugcuauacaugucucugggaccaaugguacuaagagguuugauaacccuguccuaccauuuaaugaugguguuuauuuugcuuccacugagaagucuaacauaauaagaggcuggauuuuugguacuacuuuagauucgaagacccagucccuacuuauuguuaauaacgcuacuaauguuguuauuaaagucugugaauuucaauuuuguaaugauccauuuuuggguguuuauuacuacaaaaacaacaaaaguuggauggaaagugaguucagaguuuauucuagugcgaauaauugcacuuuugaauaugucucucagccuuuucuuauggaccuugaaggaaaacaggguaauuucaaaaaucuuagggaauuuguguuuaagaauauugaugguuauuuuaaaauauauucuaagcacacgccuauuaauuuagugcgugaucucccucaggguuuuucggcuuuagaaccauugguagauuugccaauagguauuaacaucacuagguuucaaacuuuacuugcuuuacauagaaguuauuugacuccuggugauucuucuucagguuggacagcuggugcugcagcuuauuauguggguuaucuucaaccuaggacuuuucuauuaaaauauaaugaaaauggaaccauuacagaugcuguagacugugcacuugacccucucucagaaacaaaguguacguugaaauccuucacuguagaaaaaggaaucuaucaaacuucuaacuuuagaguccaaccaacagaaucuauuguuagauuuccuaauauuacaaacuugugcccuuuuggugaaguuuuuaacgccaccagauuugcaucuguuuaugcuuggaacaggaagagaaucagcaacuguguugcugauuauucuguccuauauaauuccgcaucauuuuccacuuuuaaguguuauggagugucuccuacuaaauuaaaugaucucugcuuuacuaaugucuaugcagauucauuuguaauuagaggugaugaagucagacaaaucgcuccagggcaaacuggaaagauugcugauuauaauuauaaauuaccagaugauuuuacaggcugcguuauagcuuggaauucuaacaaucuugauucuaagguuggugguaauuauaauuaccuguauagauuguuuaggaagucuaaucucaaaccuuuugagagagauauuucaacugaaaucuaucaggccgguagcacaccuuguaaugguguugaagguuuuaauuguuacuuuccuuuacaaucauaugguuuccaacccacuaaugguguugguuaccaaccauacagaguaguaguacuuucuuuugaacuucuacaugcaccagcaacuguuuguggaccuaaaaagucuacuaauuugguuaaaaacaaaugugucaauuucaacuucaaugguuuaacaggcacagguguucuuacugagucuaacaaaaaguuucugccuuuccaacaauuuggcagagacauugcugacacuacugaugcuguccgugauccacagacacuugagauucuugacauuacaccauguucuuuugguggugucaguguuauaacaccaggaacaaauacuucuaaccagguugcuguucuuuaucaggguguuaacugcacagaagucccuguugcuauucaugcagaucaacuuacuccuacuuggcguguuuauucuacagguucuaauguuuuucaaacacgugcaggcuguuuaauaggggcugaacaugucaacaacucauaugagugugacauacccauuggugcagguauaugcgcuaguuaucagacucagacuaauucuccucggcgggcacguaguguagcuagucaauccaucauugccuacacuaugucacuuggugcagaaaauucaguugcuuacucuaauaacucuauugccauacccacaaauuuuacuauuaguguuaccacagaaauucuaccagugucuaugaccaagacaucaguagauuguacaauguacauuuguggugauucaacugaaugcagcaaucuuuuguugcaauauggcaguuuuuguacacaauuaaaccgugcuuuaacuggaauagcuguugaacaagacaaaaacacccaagaaguuuuugcacaagucaaacaaauuuacaaaacaccaccaauuaaagauuuuggugguuuuaauuuuucacaaauauuaccagauccaucaaaaccaagcaagaggucauuuauugaagaucuacuuuucaacaaagugacacuugcagaugcuggcuucaucaaacaauauggugauugccuuggugauauugcugcuagagaccucauuugugcacaaaaguuuaacggccuuacuguuuugccaccuuugcucacagaugaaaugauugcucaauacacuucugcacuguuagcggguacaaucacuucugguuggaccuuuggugcaggugcugcauuacaaauaccauuugcuaugcaaauggcuuauagguuuaaugguauuggaguuacacagaauguucucuaugagaaccaaaaauugauugccaaccaauuuaauagugcuauuggcaaaauucaagacucacuuucuuccacagcaagugcacuuggaaaacuucaagauguggucaaccaaaaugcacaagcuuuaaacacgcuuguuaaacaacuuagcuccaauuuuggugcaauuucaaguguuuuaaaugauauccuuucacgucuugacaaaguugaggcugaagugcaaauugauagguugaucacaggcagacuucaaaguuugcagacauaugugacucaacaauuaauuagagcugcagaaaucagagcuucugcuaaucuugcugcuacuaaaaugucagaguguguacuuggacaaucaaaaagaguugauuuuuguggaaagggcuaucaucuuauguccuucccucagucagcaccucaugguguagucuucuugcaugugacuuaugucccugcacaagaaaagaacuucacaacugcuccugccauuugucaugauggaaaagcacacuuuccucgugaaggugucuuuguuucaaauggcacacacugguuuguaacacaaaggaauuuuuaugaaccacaaaucauuacuacagacaacacauuugugucugguaacugugauguuguaauaggaauugucaacaacacaguuuaugauccuuugcaaccugaauuagacucauucaaggaggaguuagauaaauauuuuaagaaucauacaucaccagauguugauuuaggugacaucucuggcauuaaugcuucaguuguaaacauucaaaaagaaauugaccgccucaaugagguugccaagaauuuaaaugaaucucucaucgaucuccaagaacuuggaaaguaugagcaguauauaaaauggccaugguacauuuggcuagguuuuauagcuggcuugauugccauaguaauggugacaauuaugcuuugcuguaugaccaguugcuguaguugucucaagggcuguuguucuuguggauccugcugcaaauuugaugaagacgacucugagccagugcucaaaggagucaaauuacauuacacauaaggacuaguuauaagacugacuagcccgaugggccucccaacgggcccuccuccccuccuugcaccgagauuaauaaaaaaaaaaaaaaaaaaaaaaaaaaaaaaaaaaaaaaaaaaaaaaaaaaaaaaaaaaaaaaaaugcaucccccccccccccccccccccccccccccccaaaggcucuuuucagagccaccagaauu

SEQ ID NO: 12736 - RNA, 4039 nt, Artificial Sequence
  SARS-CoV-2/USA/UT-00033/2020__EPI_ISL_417976 spike protein mRNA wt (1-1273)
aggagaaagcuuaccauguuuguuuuucuuguuuuauugccacuagucucuagucaguguguuaaucuuacaaccagaacucaauuacccccugcauacacuaauucuuucacacgugguguuuauuacccugacaaaguuuucagauccucaguuuuacauucaacucaggacuuguucuuaccuuucuuuuccaauguuacuugguuccaugcuauacaugucucugggaccaaugguacuaagagguuugauaacccuguccuaccauuuaaugaugguguuuauuuugcuuccacugagaagucuaacauaauaagaggcuggauuuuugguacuacuuuagauucgaagacccagucccuacuuauuguuaauaacgcuacuaauguuguuauuaaagucugugaauuucaauuuuguaaugauccauuuuuggguguuuauuaccacaaaaacaacaaaaguuggauggaaagugaguucagaguuuauucuagugcgaauaauugcacuuuugaauaugucucucagccuuuucuuauggaccuugaaggaaaacaggguaauuucaaaaaucuuagggaauuuguguuuaagaauauugaugguuauuuuaaaauauauucuaagcacacgccuauuaauuuagugcgugaucucccucaggguuuuucggcuuuagaaccauugguagauuugccaauagguauuaacaucacuagguuucaaacuuuacuugcuuuacauagaaguuauuugacuccuggugauucuucuucagguuugacagcuggugcugcagcuuauuauguggguuaucuucaaccuaggacuuuucuauuaaaauauaaugaaaauggaaccauuacagaugcuguagacugugcacuugacccucucucagaaacaaaguguacguugaaauccuucacuguagaaaaaggaaucuaucaaacuucuaacuuuagaguccaaccaacagaaucuauuguuagauuuccuaauauuacaaacuugugcccuuuuggugaaguuuuuaacgccaccagauuugcaucuguuuaugcuuggaacaggaagagaaucagcaacuguguugcugauuauucuguccuauauaauuccgcaucauuuuccacuuuuaaguguuauggagugucuccuacuaaauuaaaugaucucugcuuuacuaaugucuaugcagauucauuuguaauuagaggugaugaagucagacaaaucgcuccagggcaaacuggaaagauugcugauuauaauuauaaauuaccagaugauuuuacaggcugcguuauagcuuggaauucuaacaaucuugauucuaagguuggugguaauuauaauuaccuguauagauuguuuaggaagucuaaucucaaaccuuuugagagagauauuucaacugaaaucuaucaggccgguagcacaccuuguaaugguguugaagguuuuaauuguuacuuuccuuuacaaucauaugguuuccaacccacuaaugguguugguuaccaaccauacagaguaguaguacuuucuuuugaacuucuacaugcaccagcaacuguuuguggaccuaaaaagucuacuaauuugguuaaaaacaaaugugucaauuucaacuucaaugguuuaacaggcacagguguucuuacugagucuaacaaaaaguuucugccuuuccaacaauuuggcagagacauugcugacacuacugaugcuguccgugauccacagacacuugagauucuugacauuacaccauguucuuuugguggugucaguguuauaacaccaggaacaaauacuucuaaccagguugcuguucuuuaucaggguguuaacugcacagaagucccuguugcuauucaugcagaucaacuuacuccuacuuggcguguuuauucuacagguucuaauguuuuucaaacacgugcaggcuguuuaauaggggcugaacaugucaacaacucauaugagugugacauacccauuggugcagguauaugcgcuaguuaucagacucagacuaauucuccucggcgggcacguaguguagcuagucaauccaucauugccuacacuaugucacuuggugcagaaaauucaguugcuuacucuaauaacucuauugccauacccacaaauuuuacuauuaguguuaccacagaaauucuaccagugucuaugaccaagacaucaguagauuguacaauguacauuuguggugauucaacugaaugcagcaaucuuuuguugcaauauggcaguuuuuguacacaauuaaaccgugcuuuaacuggaauagcuguugaacaagacaaaaacacccaagaaguuuuugcacaagucaaacaaauuuacaaaacaccaccaauuaaagauuuuggugguuuuaauuuuucacaaauauuaccagauccaucaaaaccaagcaagaggucauuuauugaagaucuacuuuucaacaaagugacacuugcagaugcuggcuucaucaaacaauauggugauugccuuggugauauugcugcuagagaccucauuugugcacaaaaguuuaacggccuuacuguuuugccaccuuugcucacagaugaaaugauugcucaauacacuucugcacuguuagcggguacaaucacuucugguuggaccuuuggugcaggugcugcauuacaaauaccauuugcuaugcaaauggcuuauagguuuaaugguauuggaguuacacagaauguucucuaugagaaccaaaaauugauugccaaccaauuuaauagugcuauuggcaaaauucaagacucacuuucuuccacagcaagugcacuuggaaaacuucaagauguggucaaccaaaaugcacaagcuuuaaacacgcuuguuaaacaacuuagcuccaauuuuggugcaauuucaaguguuuuaaaugauauccuuucacgucuugacaaaguugaggcugaagugcaaauugauagguugaucacaggcagacuucaaaguuugcagacauaugugacucaacaauuaauuagagcugcagaaaucagagcuucugcuaaucuugcugcuacuaaaaugucagaguguguacuuggacaaucaaaaagaguugauuuuuguggaaagggcuaucaucuuauguccuucccucagucagcaccucaugguguagucuucuugcaugugacuuaugucccugcacaagaaaagaacuucacaacugcuccugccauuugucaugauggaaaagcacacuuuccucgugaaggugucuuuguuucaaauggcacacacugguuuguaacacaaaggaauuuuuaugaaccacaaaucauuacuacagacaacacauuugugucugguaacugugauguuguaauaggaauugucaacaacacaguuuaugauccuuugcaaccugaauuagacucauucaaggaggaguuagauaaauauuuuaagaaucauacaucaccagauguugauuuaggugacaucucuggcauuaaugcuucaguuguaaacauucaaaaagaaauugaccgccucaaugagguugccaagaauuuaaaugaaucucucaucgaucuccaagaacuuggaaaguaugagcaguauauaaaauggccaugguacauuuggcuagguuuuauagcuggcuugauugccauaguaauggugacaauuaugcuuugcuguaugaccaguugcuguaguugucucaagggcuguuguucuuguggauccugcugcaaauuugaugaagacgacucugagccagugcucaaaggagucaaauuacauuacacauaaggacuaguuauaagacugacuagcccgaugggccucccaacgggcccuccuccccuccuugcaccgagauuaauaaaaaaaaaaaaaaaaaaaaaaaaaaaaaaaaaaaaaaaaaaaaaaaaaaaaaaaaaaaaaaaaugcaucccccccccccccccccccccccccccccccaaaggcucuuuucagagccaccagaauu

SEQ ID NO: 12737 - RNA, 4039 nt, Artificial Sequence
  SARS-CoV-2/USA/WI-13/2020__EPI_ISL_417516 spike protein mRNA wt (1-1273)
aggagaaagcuuaccauguuuguuuuucuuguuuuauugccacuagucucuagucaguguguuaaucuuacaaccagaacucaauuacccccugcauacacuaauucuuucacacgugguguuuauuacccugacaaaguuuucagauccucaguuuuacauucaacucaggacuuguucuuaccuuucuuuuccaauguuacuugguuccaugcuauacaugucucugggaccaaugguacuaagagguuugauaacccuguccuaccauuuaaugaugguguuuauuuugcuuccacugagaagucuaacauaauaagaggcuggauuuuugguacuacuuuagauucgaagacccagucccuacuuauuguuaauaacgcuacuaauguuguuauuaaagucugugaauuucaauuuuguaaugauccauuuuuggguguuuauuaccacaaaaacaacaaaaguuggauggaaagugaguucagaguuuauucuagugcgaauaauugcacuuuugaauaugucucucagccuuuucuuauggaccuugaaggaaaacaggguaauuucaaaaaucuuagggaauuuguguuuaagaauauugaugguuauuuuaaaauauauucuaagcacacgccuauuaauuuagugcgugaucucccucaggguuuuucggcuuuagaaccauugguagauuugccaauagguauuaacaucacuagguuucaaacuuuacuugcuuuacauagaaguuauuugacuccuggugauucuucuucagguuggacagcuggugcugcagcuuauuauguggguuaucuucaaccuaggacuuuucuauuaaaauauaaugaaaauggaaccauuacagaugcuguagacugugcacuugacccucucucagaaacaaaguguacguugaaauccuucacuguagaaaaaggaaucuaucaaacuucuaacuuuagaguccuaccaacagaaucuauuguuagauuuccuaauauuacaaacuugugcccuuuuggugaaguuuuuaacgccaccagauuugcaucuguuuaugcuuggaacaggaagagaaucagcaacuguguugcugauuauucuguccuauauaauuccgcaucauuuuccacuuuuaaguguuauggagugucuccuacuaaauuaaaugaucucugcuuuacuaaugucuaugcagauucauuuguaauuagaggugaugaagucagacaaaucgcuccagggcaaacuggaaagauugcugauuauaauuauaaauuaccagaugauuuuacaggcugcguuauagcuuggaauucuaacaaucuugauucuaagguuggugguaauuauaauuaccuguauagauuguuuaggaagucuaaucucaaaccuuuugagagagauauuucaacugaaaucuaucaggccgguagcacaccuuguaaugguguugaagguuuuaauuguuacuuuccuuuacaaucauaugguuuccaacccacuaaugguguugguuaccaaccauacagaguaguaguacuuucuuuugaacuucuacaugcaccagcaacuguuuguggaccuaaaaagucuacuaauuugguuaaaaacaaaugugucaauuucaacuucaaugguuuaacaggcacagguguucuuacugagucuaacaaaaaguuucugccuuuccaacaauuuggcagagacauugcugacacuacugaugcuguccgugauccacagacacuugagauucuugacauuacaccauguucuuuugguggugucaguguuauaacaccaggaacaaauacuucuaaccagguugcuguucuuuaucaggguguuaacugcacagaagucccuguugcuauucaugcagaucaacuuacuccuacuuggcguguuuauucuacagguucuaauguuuuucaaacacgugcaggcuguuuaauaggggcugaacaugucaacaacucauaugagugugacauacccauuggugcagguauaugcgcuaguuaucagacucagacuaauucuccucggcgggcacguaguguagcuagucaauccaucauugccuacacuaugucacuuggugcagaaaauucaguugcuuacucuaauaacucuauugccauacccacaaauuuuacuauuaguguuaccacagaaauucuaccagugucuaugaccaagacaucaguagauuguacaauguacauuuguggugauucaacugaaugcagcaaucuuuuguugcaauauggcaguuuuuguacacaauuaaaccgugcuuuaacuggaauagcuguugaacaagacaaaaacacccaagaaguuuuugcacaagucaaacaaauuuacaaaacaccaccaauuaaagauuuuggugguuuuaauuuuucacaaauauuaccagauccaucaaaaccaagcaagaggucauuuauugaagaucuacuuuucaacaaagugacacuugcagaugcuggcuucaucaaacaauauggugauugccuuggugauauugcugcuagagaccucauuugugcacaaaaguuuaacggccuuacuguuuugccaccuuugcucacagaugaaaugauugcucaauacacuucugcacuguuagcggguacaaucacuucugguuggaccuuuggugcaggugcugcauuacaaauaccauuugcuaugcaaauggcuuauagguuuaaugguauuggaguuacacagaauguucucuaugagaaccaaaaauugauugccaaccaauuuaauagugcuauuggcaaaauucaagacucacuuucuuccacagcaagugcacuuggaaaacuucaagauguggucaaccaaaaugcacaagcuuuaaacacgcuuguuaaacaacuuagcuccaauuuuggugcaauuucaaguguuuuaaaugauauccuuucacgucuugacaaaguugaggcugaagugcaaauugauagguugaucacaggcagacuucaaaguuugcagacauaugugacucaacaauuaauuagagcugcagaaaucagagcuucugcuaaucuugcugcuacuaaaaugucagaguguguacuuggacaaucaaaaagaguugauuuuuguggaaagggcuaucaucuuauguccuucccucagucagcaccucaugguguagucuucuugcaugugacuuaugucccugcacaagaaaagaacuucacaacugcuccugccauuugucaugauggaaaagcacacuuuccucgugaaggugucuuuguuucaaauggcacacacugguuuguaacacaaaggaauuuuuaugaaccacaaaucauuacuacagacaacacauuugugucugguaacugugauguuguaauaggaauugucaacaacacaguuuaugauccuuugcaaccugaauuagacucauucaaggaggaguuagauaaauauuuuaagaaucauacaucaccagauguugauuuaggugacaucucuggcauuaaugcuucaguuguaaacauucaaaaagaaauugaccgccucaaugagguugccaagaauuuaaaugaaucucucaucgaucuccaagaacuuggaaaguaugagcaguauauaaaauggccaugguacauuuggcuagguuuuauagcuggcuugauugccauaguaauggugacaauuaugcuuugcuguaugaccaguugcuguaguugucucaagggcuguuguucuuguggauccugcugcaaauuugaugaagacgacucugagccagugcucaaaggagucaaauuacauuacacauaaggacuaguuauaagacugacuagcccgaugggccucccaacgggcccuccuccccuccuugcaccgagauuaauaaaaaaaaaaaaaaaaaaaaaaaaaaaaaaaaaaaaaaaaaaaaaaaaaaaaaaaaaaaaaaaaugcaucccccccccccccccccccccccccccccccaaaggcucuuuucagagccaccagaauu

SEQ ID NO: 12738 - RNA, 4036 nt, Artificial Sequence
  SARS-CoV-2/India/1-27/2020__EPI_ISL_413522 spike protein mRNA wt (1-1272)
aggagaaagcuuaccauguuuguuuuucuuguuuuauugccacuagucucuagucaguguguuaaucuuacaaccagaacucaauuacccccugcauacacuaauucuuucacacgugguguuuauuacccugacaaaguuuucagauccucaguuuuacauucaacucaggacuuguucuuaccuuucuuuuccaauguuacuugguuccaugcuauacaugucucugggaccaaugguacuaagagguuugauaacccuguccuaccauuuaaugaugguguuuauuuugcuuccacugagaagucuaacauaauaagaggcuggauuuuugguacuacuuuagauucgaagacccagucccuacuuauuguuaauaacgcuacuaauguuguuauuaaagucugugaauuucaauuuuguaaugauccauuuuuggguguuuaccacaaaaacaacaaaaguuggauggaaagugaguucagaguuuauucuagugcgaauaauugcacuuuugaauaugucucucagccuuuucuuauggaccuugaaggaaaacaggguaauuucaaaaaucuuagggaauuuguguuuaagaauauugaugguuauuuuaaaauauauucuaagcacacgccuauuaauuuagugcgugaucucccucaggguuuuucggcuuuagaaccauugguagauuugccaauagguauuaacaucacuagguuucaaacuuuacuugcuuuacauagaaguuauuugacuccuggugauucuucuucagguuggacagcuggugcugcagcuuauuauguggguuaucuucaaccuaggacuuuucuauuaaaauauaaugaaaauggaaccauuacagaugcuguagacugugcacuugacccucucucagaaacaaaguguacguugaaauccuucacuguagaaaaaggaaucuaucaaacuucuaacuuuagaguccaaccaacagaaucuauuguuagauuuccuaauauuacaaacuugugcccuuuuggugaaguuuuuaacgccaccagauuugcaucuguuuaugcuuggaacaggaagagaaucagcaacuguguugcugauuauucuguccuauauaauuccgcaucauuuuccacuuuuaaguguuauggagugucuccuacuaaauuaaaugaucucugcuuuacuaaugucuaugcagauucauuuguaauuagaggugaugaagucauacaaaucgcuccagggcaaacuggaaagauugcugauuauaauuauaaauuaccagaugauuuuacaggcugcguuauagcuuggaauucuaacaaucuugauucuaagguuggugguaauuauaauuaccuguauagauuguuuaggaagucuaaucucaaaccuuuugagagagauauuucaacugaaaucuaucaggccgguagcacaccuuguaaugguguugaagguuuuaauuguuacuuuccuuuacaaucauaugguuuccaacccacuaaugguguugguuaccaaccauacagaguaguaguacuuucuuuugaacuucuacaugcaccagcaacuguuuguggaccuaaaaagucuacuaauuugguuaaaaacaaaugugucaauuucaacuucaaugguuuaacaggcacagguguucuuacugagucuaacaaaaaguuucugccuuuccaacaauuuggcagagacauugcugacacuacugaugcuguccgugauccacagacacuugagauucuugacauuacaccauguucuuuugguggugucaguguuauaacaccaggaacaaauacuucuaaccagguugcuguucuuuaucaggauguuaacugcacagaagucccuguugcuauucaugcagaucaacuuacuccuacuuggcguguuuauucuacagguucuaauguuuuucaaacacgugcaggcuguuuaauaggggcugaacaugucaacaacucauaugagugugacauacccauuggugcagguauaugcgcuaguuaucagacucagacuaauucuccucggcgggcacguaguguagcuagucaauccaucauugccuacacuaugucacuuggugcagaaaauucaguugcuuacucuaauaacucuauugccauacccacaaauuuuacuauuaguguuaccacagaaauucuaccagugucuaugaccaagacaucaguagauuguacaauguacauuuguggugauucaacugaaugcagcaaucuuuuguugcaauauggcaguuuuuguacacaauuaaaccgugcuuuaacuggaauagcuguugaacaagacaaaaacacccaagaaguuuuugcacaagucaaacaaauuuacaaaacaccaccaauuaaagauuuuggugguuuuaauuuuucacaaauauuaccagauccaucaaaaccaagcaagaggucauuuauugaagaucuacuuuucaacaaagugacacuugcagaugcuggcuucaucaaacaauauggugauugccuuggugauauugcugcuagagaccucauuugugcacaaaaguuuaacggccuuacuguuuugccaccuuugcucacagaugaaaugauugcucaauacacuucugcacuguuagcggguacaaucacuucugguuggaccuuuggugcaggugcugcauuacaaauaccauuugcuaugcaaauggcuuauagguuuaaugguauuggaguuacacagaauguucucuaugagaaccaaaaauugauugccaaccaauuuaauagugcuauuggcaaaauucaagacucacuuucuuccacagcaagugcacuuggaaaacuucaagauguggucaaccaaaaugcacaagcuuuaaacacgcuuguuaaacaacuuagcuccaauuuuggugcaauuucaaguguuuuaaaugauauccuuucacgucuugacaaaguugaggcugaagugcaaauugauagguugaucacaggcagacuucaaaguuugcagacauaugugacucaacaauuaauuagagcugcagaaaucagagcuucugcuaaucuugcugcuacuaaaaugucagaguguguacuuggacaaucaaaaagaguugauuuuuguggaaagggcuaucaucuuauguccuucccucagucagcaccucaugguguagucuucuugcaugugacuuaugucccugcacaagaaaagaacuucacaacugcuccugccauuugucaugauggaaaagcacacuuuccucgugaaggugucuuuguuucaaauggcacacacugguuuguaacacaaaggaauuuuuaugaaccacaaaucauuacuacagacaacacauuugugucugguaacugugauguuguaauaggaauugucaacaacacaguuuaugauccuuugcaaccugaauuagacucauucaaggaggaguuagauaaauauuuuaagaaucauacaucaccagauguugauuuaggugacaucucuggcauuaaugcuucaguuguaaacauucaaaaagaaauugaccgccucaaugagguugccaagaauuuaaaugaaucucucaucgaucuccaagaacuuggaaaguaugagcaguauauaaaauggccaugguacauuuggcuagguuuuauagcuggcuugauugccauaguaauggugacaauuaugcuuugcuguaugaccaguugcuguaguugucucaagggcuguuguucuuguggauccugcugcaaauuugaugaagacgacucugagccagugcucaaaggagucaaauuacauuacacauaaggacuaguuauaagacugacuagcccgaugggccucccaacgggcccuccuccccuccuugcaccgagauuaauaaaaaaaaaaaaaaaaaaaaaaaaaaaaaaaaaaaaaaaaaaaaaaaaaaaaaaaaaaaaaaaaugcaucccccccccccccccccccccccccccccccaaaggcucuuuucagagccaccagaauu

SEQ ID NO: 12739 - RNA, 4021 nt, Artificial Sequence
  SARS-CoV-2/pangolin/Guangxi/P4L/2017__EPI_ISL_410538 spike protein mRNA wt (1-1267)
aggagaaagcuuaccauguuuguuuuucuuuuugucuugccuuugguuuccagucaaugugucaauuugaccacaagaacuggaauaccgccagguuauaccaauucaucuacuagaggugucuauuauccagacaaaguuuuuaggucuucaauuuuacaucuuacacaagaccuuuucuuaccuuucuuuucuaauguuacuugguuuaacaccauaaauuaucaaggaggcuuuaagaaguuugacaauccuguuuuaccauuuaaugaugguguuuacuuugccuccacggaaaaguccaauauuauacgcgguuggauuuuuggaacaacacuugaugccagaacucaaucucuucuaauaguuaacaacgcaaccaauguuguuaucaaaguaugugaguuucaguuuugcacugauccauuuuuagguguuuacuaucauaacaacaauaaaacauggguugaaaaugaguuuagaguuuauucaagugccaacaauugcacuuucgaauacauuucucaaccuuuucuuauggaccuugaaggaaagcaagguaauuuuaagaaccuuagagaguuuguguuuaaaaauguugaugguuauuucaagauuuacucuaaacacacaccuauugauuuagugcgcgaccuccccagagguuuugcugcauuggaaccacugguggaccucccuauagguauuaauauuaccagauuccaaacauugcuugcuuuacauagaaguuaucuuacaccugguaaucuagaaaguggcuggacaacuggagcugcugcuuacuauguagguuaccuacaacagaggacuuuucucuuaaguuacaaucaaaauggaaccauuacagaugcuguugauuguucacuagacccucuuucagagacaaagugcacauuaaaaucccuaacaguugaaaaaggaauuuaccagacuucuaacuucagaguucaaccaacaaucaguauaguuagauuuccuaauauuacaaacuuauguccauuuggagaaguguuuaacgcauccaaauuugcaucaguuuaugcuuggaacaggaagagaauuagcaauuguguugcugauuacucuguacuuuauaacucuacaucauuuuccacuuuuaaauguuauggaguuucaccuacaaaacucaaugaccuuugcuucaccaauguguaugcagacucauuuguuguuaaaggugacgagguuagacaaauagcacccggacaaacugguguuauugcugauuauaacuauaagcugccagaugauuuuacugguuguguuauugcuuggaacucaguuaagcaagaugcuuugacuggugguaauuaugguuauuuguauagauuauuuagaaagucuaagcuuaaaccauuugagagagauauuuccacugaaauauaccaagccggcagcacacccuguaacggucaaguuggucuaaauuguuauuauccucuugaaagguaugguuuucacccaacuacagguguuaacuaccaaccuuuuagagugguuguuuuaucauuugaguuacuuaauggaccagcuacuguuuguggacccaaauugucuacaacacuaguuaaagacaaaugugucaauuucaacuuuaacgguuuaacuggcacagguguucuuacaacaucuaagaaacaguuucugccuuuucaacaauuugguagagacaucucugacacuacugaugcuguccgugacccacagacacuugaaauacuugacauuaccccuugcucuuuuggaggaguuagugugauaacaccagguacaaacacuucuaaucaaguggcuguacuuuaccaagauguuaacuguacugaagugccuauggccauucaugcagaacaacuuacaccugccuggcguguuuacucugcaggagcaaauguguuucaaacaagagcaggcuguuuaguaggugcugagcaugucaacaauucuuaugaaugugacauuccagucggugcuggcauaugugcaaguuaccauuccaugucaucauugcguagugucaaccagcguucaaucauugcuuacacuaugucuuuaggugcagaaaauucaguugcuuauucuaauaauucaauugccauaccuacuaauuuuacaauaaguguuaccacagaaauucuaccagugucaaugacuaagacuucuguagauuguacuauguacaucuguggagauucaauugaguguaguaauuuauugcuacaauauggcaguuuuugcacacaauuaaaccgugcuuugacugggauugcuguugaacaagacaaaaacacacaagaaguuuuugcccagguuaaacaaaucuacaaaacaccaccuauuaaagauuuugguggcuuuaacuuuucacaaauauugccagauccaucaaaaccaagcaagaggucauuuauugaggauuuacucuucaacaaagugacacuugcugaugcuggcuucaucaaacaauauggugauugccuuggugauauugcugcuagagaucucaucugugcacaaaaguucaauggacucacgguucuaccgccuuugcucacagaugaaaugauugcucaauacacuucugcacuacuugcuggaacaaucaccucagguuggaccuuuggugcaggagcugcuuuacaaauacccuuugcaaugcaaauggcuuacagguuuaauggcauuggagucacucagaauguucuauaugagaaucagaaauuaauugccaaucaguucaacagugcuauuggcaaaauacaggauucacuuucaucuacggcuagugcacuugguaaacuucaagacgucguaaaucaaaaugcacaggcuuuaaacacacuugucaaacaacuuaguuccaauuuuggagcuauuucgagugugcuuaaugauauucuuucacgucuugacaaaguugaggcugaagugcaaauugauagguuaaucacaggaagacuacagagucuucaaacuuaugugacacaacaauuaaucagagcagcagaaaucagagcuucugcuaaucuugcugcaacaaaaaugucugagugcguacucggacaaucuaaaagaguugauuuuuguggaaaaggcuaccauuuaaugucuuucccucaaucagcaccgcaugguguuguuuucuugcauguuacuuauguaccugcacaagaaaagaacuuuacuacugcuccugcuauuugucaugaaggaaaagcacacuucccucgugaaggugucuucguuucaaauggcacucauugguuuauuacacaaaggaauuuuuaugaaccucaaauuauuaccacugacaacacauucgucucugguagcugugauguuguaauuggaauagucaacaacacaguuuaugauccuuugcaacccgagcuugacucauuuaaggaggaguuagacaaauacuucaaaaaucacacaucaccagauguugaucuuggcgacauaucuggcauaaaugcuucggucgucaacauacaaaaagaaauugaccgccucaaugagguugccaaaaauuugaaugaaucacccauugaccuacaagagcuuggaaaauaugagcaauacaucaaauggccuugguacauuuggcuugguuuuauagcugggcuaauugcuaucauuauggucacaaucaugcuauguuguaugacuaguugcuguaguugccucaaggguuguugcucuugcgguuccugcugcaaauuugaugaagacgauucagaaccuguucugaaaggagucaaauuacauuacacauaaggacuaguuauaagacugacuagcccgaugggccucccaacgggcccuccuccccuccuugcaccgagauuaauaaaaaaaaaaaaaaaaaaaaaaaaaaaaaaaaaaaaaaaaaaaaaaaaaaaaaaaaaaaaaaaaugcaucccccccccccccccccccccccccccccccaaaggcucuuuucagagccaccagaauu

SEQ ID NO: 12740 - RNA, 4021 nt, Artificial Sequence
  SARS-CoV-2/pangolin/Guangxi/P5L/2017__EPI_ISL_410540 spike protein mRNA wt (1-1267)
aggagaaagcuuaccauguuuguuuuucuuuuugucuugccuuugguuuccagucaaugugucaauuugaccacaagaacuggaauaccgccagguuauaccaauucaucuacuagaggugucuauuauccagacaaaguuuuuaggucuucaauuuuacaucuuacacaagaccuuuucuuaccuuucuuuucuaauguuacuugguuuaacaccauaaauuaucaaggaggcuuuaagaaguuugacaauccuguuuuaccauuuaaugaugguguuuacuuugccuccacggaaaaguccaauauuauacgcgguuggauuuuuggaacaacacuugaugccagaacucaaucucuucuaauaguuaacaacgcaaccaauguuguuaucaaaguaugugaguuucaguuuugcacugauccauuuuuagguguuuacuaucauaacaacaauaaaacauggguugaaaaugaguuuagaguuuauucaagugccaacaauugcacuuucgaauacauuucucaaccuuuucuuauggaccuugaaggaaagcaagguaauuuuaagaaccuuagagaguuuguguuuaaaaauguugaugguuauuucaagauuuacucuaaacacacaccuauugauuuagugcgcgaccuccccagagguuuugcugcauuggaaccacugguggaccucccuauagguauuaauauuaccagauuccaaacauugcuugcuuuacauagaaguuaucuuacaccugguaagcuagaaaguggcuggacaacuggagcugcugcuuacuauguagguuaccuacaacagaggacuuuucucuuaaguuacaaucaaaauggaaccauuacagaugcuguugauuguucacuagacccucuuucagagacaaagugcacauuaaaaucccuaacaguugaaaaaggaauuuaccagacuucuaacuucagaguucaaccaacaaucaguauaguuagauuuccuaauauuacaaacuuauguccauuuggagaaguguuuaacgcauccaaauuugcaucaguuuaugcuuggaacaggaagagaauuagcaauuguguugcugauuacucuguacuuuauaacucuacaucauuuuccacuuuuaaauguuauggaguuucaccuacaaaacucaaugaccuuugcuucaccaauguguaugcagacucauuuguuguuaaaggugacgagguuagacaaauagcacccggacaaacugguguuauugcugauuauaacuauaagcugccagaugauuuuacugguuguguuauugcuuggaacucaguuaagcaagaugcuuugacuggugguaauuaugguuauuuguauagauuauuuagaaagucuaagcuuaaaccauuugagagagauauuuccacugaaauauaccaagccggcagcacacccuguaacggucaaguuggucuaaauuguuauuauccucuugaaagguaugguuuucacccaacuacagguguuaacuaccaaccuuuuagagugguuguuuuaucauuugaguuacuuaauggaccagcuacuguuuguggacccaaauugucuacaacacuaguuaaagacaaaugugucaauuucaacuuuaacgguuuaacuggcacagguguucuuacaacaucuaagaaacaguuucugccuuuucaacaauuugguagagacaucucugacacuacugaugcuguccgugacccacagacacuugaaauacuugacauuaccccuugcucuuuuggaggaguuagugugauaacaccagguacaaacacuucuaaucaaguggcuguacuuuaccaagauguuaacuguacugaagugccuauggccauucaugcagaacaacuuacaccugccuggcguguuuacucugcaggagcaaauguguuucaaacaagagcaggcuguuuaguaggugcugagcaugucaacaauucuuaugaaugugacauuccagucggugcuggcauaugugcaaguuaccauuccaugucaucauuucguagugucaaccagcguucaaucauugcuuacacuaugucuuuaggugcagaaaauucaguugcuuauucuaauaauucaauugccauaccuacuaauuuuacaauaaguguuaccacagaaauucuaccagugucaaugacuaagacuucuguagauuguacuauguacaucuguggagauucaauugaguguaguaauuuauugcuacaauauggcaguuuuugcacacaauuaaaccgugcuuugacugggauugcuguugaacaagacaaaaacacacaagaaguuuuugcccagguuaaacaaaucuacaaaacaccaccuauuaaagauuuugguggcuuuaacuuuucacaaauauugccagauccaucaaaaccaagcaagaggucauuuauugaggauuuacucuucaacaaagugacacuugcugaugcuggcuucaucaaacaauauggugauugccuuggugauauugcugcuagagaucucaucugugcacaaaaguucaauggacucacgguucuaccgccuuugcucacagaugaaaugauugcucaauacacuucugcacuacuugcuggaacaaucaccucagguuggaccuuuggugcaggagcugcuuuacaaauacccuuugcaaugcaaauggcuuacagguuuaauggcauuggagucacucagaauguucuauaugagaaucagaaauuaauugccaaucaguucaacagugcuauuggcaaaauacaggauucacuuucaucuacggcuagugcacuugguaaacuucaagacgucguaaaucaaaaugcacaggcuuuaaacacacuugucaaacaacuuaguuccaauuuuggagcuauuucgagugugcuuaaugauauucuuucacgucuugacaaaguugaggcugaagugcaaauugauagguuaaucacaggaagacuacagagucuucaaacuuaugugacacaacaauuaaucagagcagcagaaaucagagcuucugcuaaucuugcugcaacaaaaaugucugagugcguacucggacaaucuaaaagaguugauuuuuguggaaaaggcuaccauuuaaugucuuucccucaaucagcaccgcaugguguuguuuucuugcauguuacuuauguaccugcacaagaaaagaacuuuacuacugcuccugcuauuugucaugaaggaaaagcacacuucccucgugaaggugucuucguuucaaauggcacucauugguuuauuacacaaaggaauuuuuaugaaccucaaauuauuaccacugacaacacauucgucucugguagcugugauguuguaauuggaauagucaacaacacaguuuaugauccuuugcaacccgagcuugacucauuuaaggaggaguuagacaaauacuucaaaaaucacacaucaccagauguugaucuuggcgacauaucuggcauaaaugcuucggucgucaacauacaaaaagaaauugaccgccucaaugagguugccaaaaauuugaaugaaucacucauugaccuacaagagcuuggaaaauaugagcaauacaucaaauggccuugguacauuuggcuugguuuuauagcugggcuaauugcuaucauuauggucacaaucaugcuauguuguaugacuaguugcuguaguugccucaaggguuguugcucuugcgguuccugcugcaaauuugaugaagacgauucagaaccuguucugaaaggagucaaauuacauuacacauaaggacuaguuauaagacugacuagcccgaugggccucccaacgggcccuccuccccuccuugcaccgagauuaauaaaaaaaaaaaaaaaaaaaaaaaaaaaaaaaaaaaaaaaaaaaaaaaaaaaaaaaaaaaaaaaaugcaucccccccccccccccccccccccccccccccaaaggcucuuuucagagccaccagaauu

SEQ ID NO: 12741 - RNA, 4021 nt, Artificial Sequence
  SARS-CoV-2/pangolin/Guangxi/P5E/2017__EPI_ISL_410541 spike protein mRNA wt (1-1267)
aggagaaagcuuaccauguuuguuuuucuuuuugucuugccuuugguuuccagucaaugugucaauuugaccacaagaacuggaauaccgccagguuauaccaauucaucuacuagaggugucuauuauccagacaaaguuuuuaggucuucaauuuuacaucuuacacaagaccuuuucuuaccuuucuuuucuaauguuacuugguuuaacaccauaacuuaucaaggaggcucuaagaaguuugacaauccuguuuuaccauuuaaugaugguguuuacuuugccuccacggaaaaguccaauauuauacgcgguuggauuuuuggaacaacacuugaugccagaacucaaucucuucuaauaguuaacaacgcaaccaauguuguuaucaaaguaugugaguuucaguuuugcacugauccauuuuuagguguuuacuaucauaacaacaauaaaacauggguugaaaaugaguuuagaguuuauucaagugccaacaauugcacuuucgaauacauuucucaaccuuuucuuauggaccuugaaggaaagcaagguaauuuuaagaaccuuagagaguuuguguuuaaaaauguugaugguuauuucaagauuuacucuaaacacacaccuauugauuuagugcgcgaccuccccagagguuuugcugcauuggaaccacugguggaccucccuauagguauuaauauuaccagauuccaaacauugcuugcuuuacauagaaguuaucuuacaccugguaagcuagaaaguggcuggacaacuggagcugcugcuuacuauguagguuaccuacaacagaggacuuuucucuuaaguuacaaucaaaauggaaccauuacagaugcuguugauuguucacuagacccucuuucagagacaaagugcacauuaaaaucccuaacaguugaaaaaggaauuuaccagacuucuaacuucagaguucaaccaacaaucaguauaguuagauuuccuaauauuacaaacuuauguccauuuggagaaguguuuaacgcauccaaauuugcaucaguuuaugcuuggaacaggaagagaauuagcaauuguguugcugauuacucuguacuuuauaacucuacaucauuuuccacuuuuaaauguuauggaguuucaccuacaaaacucaaugaccuuugcuucaccaauguguaugcagacucauuuguuguuaaaggugacgagguuagacaaauagcacccggacaaacugguguuauugcugauuauaacuauaagcugccagaugauuuuacugguuguguuauugcuuggaacucaguuaagcaagaugcuuugacuggugauaauuaugguuauuuguauagauuauuuagaaagucuaagcuuaaaccauuugagagagauauuuccacugaaauauaccaagccggcagcacacccuguaacggucaaguuggucuaaauuguuauuauccucuugaaagguaugguuuucacccaacuacagguguuaacuaccaaccuuuuagagugguuguuuuaucauuugaguuacuuaauggaccagcuacuguuuguggacccaaauugucuacaacacuaguuaaagacaaaugugucaauuucaacuuuaacgguuuaacuggcacagguguucuuacaacaucuaagaaacaguuucugccuuuucaacaauuugguagagacaucucugacacuacugaugcuguccgugacccacagacacuugaaauacuugacauuaccccuugcucuuuuggaggaguuagugugauaacaccagguacaaacacuucuaaucaaguggcuguacuuuaccaagauguuaacuguacugaagugccuauggccauucaugcagaacaacuuacaccugccuggcguguuuacucugcaggagcaaauguguuucaaacaagagcaggcuguuuaguaggugcugagcaugucaacaauucuuaugaaugugacauuccagucggugcuggcauaugugcaaguuaccauuccaugucaucauuucguagugucaaccagcguucaaucauugcuuacacuaugucuuuaggugcagaaaauucaguugcuuauucuaauaauucaauugccauaccuacuaauuuuacaauaaguguuaccacagaaauucuaccagugucaaugacuaagacuucuguagauuguacuauguacaucuguggagauucaauugaguguaguaauuuauugcuacaauauggcaguuuuugcacacaauuaaaccgugcuuugacugggauugcuguugaacaagacaaaaacacacaagaaguuuuugcccagguuaaacaaaucuacaaaacaccaccuauuaaagauuuugguggcuuuaacuuuucacaaauauugccagauccaucaaaaccaagcaagaggucauuuauugaggauuuacucuucaacaaagugacacuugcugaugcuggcuucaucaaacaauauggugauugccuuggugauauugcugcuagagaucucaucugugcacaaaaguucaauggacucacgguucuaccgccuuugcucacagaugaaaugauugcucaauacacuucugcacuacuugcuggaacaaucaccucagguuggaccuuuggugcaggagcugcuuuacaaauacccuuugcaaugcaaauggcuuacagguuuaauggcauuggagucacucagaauguucuauaugagaaucagaaauuaauugccaaucaguucaacagugcuauuggcaaaauacaggauucacuuucaucuacggcuagugcacuugguaaacuucaagacgucguaaaucaaaaugcacaggcuuuaaacacacuugucaaacaacuuaguuccaauuuuggagcuauuucgagugugcuuaaugauauucuuucacgucuugacaaaguugaggcugaagugcaaauugauagguuaaucacaggaagacuacagagucuucaaacuuaugugacacaacaauuaaucagagcagcagaaaucagagcuucugcuaaucuugcugcaacaaaaaugucugagugcguacucggacaaucuaaaagaguugauuuuuguggaaaaggcuaccauuuaaugucuuucccucaaucagcaccgcaugguguuguuuucuugcauguuacuuauguaccugcacaagaaaagaacuuuacuacugcuccugcuauuugucaugaaggaaaagcacacuucccucgugaaggugucuucguuucaaauggcacucauugguuuauuacacaaaggaauuuuuaugaaccucaaauuauuaccacugacaacacauucgucucugguagcugugauguuguaauuggaauagucaacaacacaguuuaugauccuuugcaacccgagcuugacucauuuaaggaggaguuagacaaauacuucaaaaaucacacaucaccagauguugaucuuggcgacauaucuggcauaaaugcuucggucgucaacauacaaaaagaaauugaccgccucaaugagguugccaaaaauuugaaugaaucacucauugaccuacaagagcuuggaaaauaugagcaauacaucaaauggccuugguacauuuggcuugguuuuauagcugggcuaauugcuaucauuauggucacaaucaugcuauguuguaugacuaguugcuguaguugccucaaggguuguugcucuugcgguuccugcugcaaauuugaugaagacgauucagaaccuguucugaaaggagucaaauuacauuacacauaaggacuaguuauaagacugacuagcccgaugggccucccaacgggcccuccuccccuccuugcaccgagauuaauaaaaaaaaaaaaaaaaaaaaaaaaaaaaaaaaaaaaaaaaaaaaaaaaaaaaaaaaaaaaaaaaugcaucccccccccccccccccccccccccccccccaaaggcucuuuucagagccaccagaauu

SEQ ID NO: 12742 - RNA, 4015 nt, Artificial Sequence
  SARS-CoV-2/pangolin/Guangxi/P1E/2017__EPI_ISL_410539 spike protein mRNA wt (1-1265)
aggagaaagcuuaccauguuuguuuuucuuuuugucuugccuuugguuuccagucaaugugucaauuugaccacaagaacuggaauacagccagguuauaccaauucaucuacuagaggugucuauuauccagacaaaguuuuuaggucuucaauuuuacaucuuacacaagaccuuuucuuaccuuucuuuucuaauguuacuugguuuaacaccauaaauuaucaaggaggcuuuaagaaguuugacaauccuguuuuaccauuuaaugaugguguuuacuuugccuccacggaaaaguccaauauuauacgcgguuggauuuuuggaacaacacuugaugccagaacucaaucucuucuaauaguuaacaacgcaaccaauguuguuaucaaaguaugugaguuucaguuuugcacugauccauuuuuagguguuuacuaucauaacaacaauaaaacauggguugaaaaugaguuuagaguuuauucaagugccaacaauugcacuuucgaauacauuucucaaccuuuucuuauggaccuugaaggaaagcaagguaauuuuaagaaccuuagagaguuuguguuuaaaaauguugaugguuauuucaagauuuacucuaaacacacaccuauugauuuagugcgcgaccuccccagagguuuugcugcauuggaaccacugguggaccucccuauagguauuaauauuaccagauuccaaacauugcuugcuuuacauagaaguuaucuuacaccugguaagcuagaaaguggcuggacaacuggagcugcugcuuacuauguagguuaccuacaacagaggacuuuucucuuaaguuacaaucaaaauggaaccauuacagaugcuguugauuguucacuagacccucuuucagagacaaagugcacauuaaaaucccuaacaguugaaaaaggaauuuaccagacuucuaacuucagaguucaaccaacaaucaguauaguuagauuuccuaauauuacaaacuuauguccauuuggagaaguguuuaacgcauccaaauuugcaucaguuuaugcuuggaacaggaagagaauuagcaauuguguugcugauuacucuguacuuuauaacucuacaucauuuuccacuuuuaaauguuauggaguuucaccuacaaaacucaaugaccuuugcuucaccaauguguaugcagacucauuuguuguuaaaggugacgagguuagacaaauagcacccggacaaacugguguuauugcugauuauaacuauaagcugccagaugauuuuacugguuguguuauugcuuggaacucaguuaagcaagaugcuuugacuggugguaauuauuuguauagauuauuuagaaagucuaagcuuaaaccauuugagagagauauuuccacugaaauauaccaagccggcagcacacccuguaacggucaaguuggucuaaauuguuauuauccucuugaaagguaugguuuucacccaacuacagguguuaacuaccaaccuuuuagagugguuguuuuaucauuugaguuacuuaauggaccagcuacuguuuguggacccaaauugucuacaacacuaguuaaagacaaaugugucaauuucaacuuuaacgguuuaacuggcacagguguucuuacaacaucuaagaaacaguuucugccuuuucaacaauuugguagagacaucucugacacuacugaugcuguccgugacccacagacacuugaaauacuugacauuaccccuugcucuuuuggaggaguuagugugauaacaccagguacaaacacuucuaaucaaguggcuguacuuuaccaagauguuaacuguacugaagugccuauggccauucaugcagaacaacuuacaccugccuggcguguuuacucugcaggagcaaauguguuucaaacaagagcaggcuguuuaguaggugcugagcaugucaacaauucuuaugaaugugacauuccagucggugcuggcauaugugcaaguuaccauuccaugucaucauugcguagugucaaccagcguucaaucauugcuuacacuaugucuuuaggugcagaaaauucaguugcuuauucuaauaauucaauugccauaccuacuaauuuuacaauaaguguuaccacagaaauucuaccagugucaaugacuaagacuucuguagauuguacuauguacaucuguggagauucaauugaguguaguaauuuauugcuacaauauggcaguuuuugcacacaauuaaaccgugcuuugacugggauugcuguugaacaagacaaaaacacacaagaaguuuuugcccagguuaaacaaaucuacaaaacaccaccuauuaaagauuuugguggcuuuaacuuuucacaaauauugccagauccaucaaaaccaagcaagaggucauuuauugaggauuuacucuucaacaaagugacacuugcugaugcuggcuucaucaaacaauauggugauugccuuggugauauugcugcuagagaucucaucugugcacaaaaguucaauggacucacgguucuaccgccuuugcucacagaugaaaugauugcucaauacacuucugcacuacuugcuggaacaaucaccucagguuggaccuuuggugcaggagcugcuuuacaaauacccuuugcaaugcaaauggcuuacagguuuaauggcauuggagucacucagaauguucuauaugagaaucagaaauuaauugccaaucaguucaacagugcuauuggcaaaauacaggauucacuuucaucuacggcuagugcacuugguaaacuucaagacgucguaaaucaaaaugcacaggcuuuaaacacacuugucaaacaacuuaguuccaauuuuggagcuauuucgagugugcuuaaugauauucuuucacgucuugacaaaguugaggcugaagugcaaauugauagguuaaucacaggaagacuacagagucuucaaacuuaugugacacaacaauuaaucagagcagcagaaaucagagcuucugcuaaucuugcugcaacaaaaaugucugagugcguacucggacaaucuaaaagaguugauuuuuguggaaaaggcuaccauuuaaugucuuucccucaaucagcaccgcaugguguuguuuucuugcauguuacuuauguaccugcacaagaaaagaacuuuacuacugcuccugcuauuugucaugaaggaaaagcacacuucccucgugaaggugucuucguuucaaauggcacucauugguuuauuacacaaaggaauuuuuaugaaccucaaauuauuaccacugacaacacauucgucucugguagcugugauguuguaauuggaauagucaacaacacaguuuaugauccuuugcaacccgagcuugacucauuuaaggaggaguuagacaaauacuucaaaaaucacacaucaccagauguugaucuuggcgacauaucuggcauaaaugcuucggucgucaacauacaaaaagaaauugaccgccucaaugagguugccaaaaauuugaaugaaucacucauugaccuacaagagcuuggaaaauaugagcaauacaucaaauggccuugguacauuuggcuugguuuuauagcugggcuaauugcuaucauuauggucacaaucaugcuauguuguaugacuaguugcuguaguugccucaaggguuguugcucuugcgguuccugcugcaaauuugaugaagacgauucagaaccuguucugaaaggagucaaauuacauuacacauaaggacuaguuauaagacugacuagcccgaugggccucccaacgggcccuccuccccuccuugcaccgagauuaauaaaaaaaaaaaaaaaaaaaaaaaaaaaaaaaaaaaaaaaaaaaaaaaaaaaaaaaaaaaaaaaaugcaucccccccccccccccccccccccccccccccaaaggcucuuuucagagccaccagaauu

SEQ ID NO: 12743 - RNA, 4039 nt, Artificial Sequence; identical to SEQ ID NO: 162
  SARS-CoV-2/Wuhan/WIV05/2019__EPI_ISL_402128 spike protein mRNA gc (1-1273) R9514

SEQ ID NO: 12744 - RNA, 4027 nt, Artificial Sequence
  SARS-CoV-2/bat/Yunnan/RaTG13/2013__EPI_ISL_402131 spike protein mRNA gc (1-1269)
aggagaaagcuuaccauguucguguuccugguccuccugccccuggugagcucccagugcgugaaccucaccacccgcacgcagcugccgcccgccuacaccaacagcuccacccggggcgucuacuaccccgacaagguguuccgcagcuccgugcugcaccucacccaggaccuguuccugcccuucuucagcaacgucacgugguuccacgccauccacguguccgggaccaacggcaucaagcgguucgacaacccggugcuccccuucaacgacggggucuacuucgcgagcaccgagaaguccaacaucauccgcggcuggaucuucgggaccacgcuggacagcaagacccagucccugcucaucgugaacaacgccaccaacguggucaucaaggugugcgaguuccaguucugcaacgaccccuuccugggcguguacuaccacaagaacaacaagagcuggauggaguccgaguuccgggucuacagcuccgccaacaacugcaccuucgaguacgugagccagcccuuccugauggaccucgagggcaagcaggggaacuucaagaaccugcgcgaguucguguucaagaacaucgacggcuacuucaagaucuacuccaagcacacgccgaucaaccugguccgggaccucccgcccggguucagcgcccuggagccccugguggaccuccccaucggcaucaacaucacccgcuuccagacccugcuggcccuccaccgguccuaccugacccccggggacagcagcuccggcuggacggcgggcgccgccgccuacuacgugggguaccugcagccccgcaccuuccuccugaaguacaacgagaacggcaccaucaccgacgcggucgacugcgcccuggacccccucagcgagacgaagugcacccugaaguccuucaccguggagaaggggaucuaccagaccagcaacuuccgggugcagccgacggacuccaucguccgcuuccccaacaucaccaaccugugccccuucggcgagguguucaacgccaccaccuucgccagcgucuacgccuggaaccggaagcgcaucuccaacugcguggcggacuacagcgugcucuacaacuccacgagcuucuccaccuucaagugcuacggcgucagccccaccaagcugaacgaccugugcuucaccaacguguacgccgacuccuucgugaucacgggggacgagguccggcagaucgccccgggccagaccgggaagaucgccgacuacaacuacaagcuccccgacgacuucaccggcugcgugaucgccuggaacagcaagcacaucgacgcgaaggagggcgggaacuucaacuaccuguaccgccuguuccggaaggccaaccucaagcccuucgagcgcgacaucuccaccgagaucuaccaggccggcagcaagcccugcaacgggcagacgggccugaacugcuacuacccgcuguaccgguacggguucuaccccaccgacggcguggggcaccagcccuaccgcgucguggugcucuccuucgagcugcugaacgcccccgccaccgucugcggcccgaagaaguccaccaaccucgugaagaacaagugcgugaacuucaacuucaacggccugaccgggacgggcguccugaccgagagcaacaagaaguuccugcccuuccagcaguucgggcgggacaucgcggacaccaccgacgccgugcgcgacccccagacgcucgagauccuggacaucaccccgugcagcuucggcggggugagcgucaucacccccggcaccaacgccuccaaccagguggccgugcuguaccaggacgucaacugcacggaggugcccguggccauccacgcggaccagcucacccccaccuggcgcgucuacagcaccggcuccaacguguuccagacgcgggccgggugccugaucggcgccgagcacgugaacaacagcuacgagugcgacaucccgaucggggccggcaucugcgcguccuaccagacccagaccaacagccgcuccgucgccagccaguccaucaucgccuacaccaugagccugggcgccgagaacuccguggccuacagcaacaacuccaucgcgauccccacgaacuucaccaucagcgugaccaccgagauccuccccgucuccaugacgaagaccagcguggacugcaccauguacaucugcggggacuccaccgagugcagcaaccugcugcuccaguacggcagcuucugcacgcagcugaaccgggcccugaccgggaucgccguggagcaggacaagaacacccaggaggucuucgcccaggugaagcagaucuacaagacgcccccgaucaaggacuucggcggguucaacuucucccagauccuccccgaccccagcaagcccuccaagcgcagcuucaucgaggaccugcuguucaacaaggugacccucgccgacgcgggcuucaucaagcaguacggcgacugccugggggacaucgccgcccgggaccugaucugcgcccagaaguucaacggccucaccguccugccgccccugcucaccgacgagaugaucgcccaguacaccuccgcgcugcuggccgggacgaucaccagcggcuggaccuucggggccggcgccgcgcuccagauccccuucgccaugcagauggccuaccgcuucaacggcaucggggugacccagaacgugcuguacgagaaccagaagcugaucgccaaccaguucaacuccgccaucggcaagauccaggacagccucuccagcacggcguccgcccuggggaagcugcaggacgucgugaaccagaacgcccaggcccucaacacccuggugaagcagcugagcuccaacuucggcgccaucagcuccguccucaacgacauccugagccggcuggacaagguggaggcggaggugcagaucgaccgccucaucaccgggcggcugcagucccugcagaccuacgucacccagcagcucauccgcgccgccgagauccgggccagcgccaaccuggcggccacgaagauguccgagugcgugcugggccagagcaagcgcguggacuucugcggcaagggguaccaccucaugagcuucccccaguccgccccgcacggcgucguguuccugcacgugaccuacguccccgcccaggagaagaacuucaccaccgcgcccgccaucugccacgacgggaaggcccacuucccccgggagggcguguucgucagcaacgggacgcacugguucgugacccagcgcaacuucuacgagccgcagaucaucaccaccgacaacacguucguguccggcagcugcgacgucgugaucggcaucgugaacaacaccgucuacgacccccugcagcccgagcucgacuccuucaaggaggagcuggacaaguacuucaagaaccacaccagccccgacguggaccugggggacaucuccggcaucaacgccagcguggucaacauccagaaggagaucgaccggcucaacgagguggccaagaaccugaacgagucccugaucgaccuccaggagcuggggaaguacgagcaguacaucaaguggccgugguacaucuggcugggcuucaucgcgggccucaucgccaucaucauggugaccaucaugcugugcugcaugacgagcugcugcuccugccugaaggggugcugcagcugcggcuccugcugcaaguucgacgaggacgacagcgagcccguccucaagggggugaagcugcacuacaccugaggacuaguuauaagacugacuagcccgaugggccucccaacgggcccuccuccccuccuugcaccgagauuaauaaaaaaaaaaaaaaaaaaaaaaaaaaaaaaaaaaaaaaaaaaaaaaaaaaaaaaaaaaaaaaaaugcaucccccccccccccccccccccccccccccccaaaggcucuuuucagagccaccagaauu

SEQ ID NO: 12745 - RNA, 4039 nt, Artificial Sequence
  SARS-CoV-2/Wuhan/HBCDC-HB-01/2019__EPI_ISL_402132 spike protein mRNA gc (1-1273)
aggagaaagcuuaccauguucguguuccugguccuccugccccuggugagcucccagugcgugaaccucaccacccgcacgcagcugccgcccgccuacaccaacagcaucacccggggcgucuacuaccccgacaagguguuccgcuccagcgugcugcacuccacccaggaccucuuccugcccuucuucagcaacgucacgugguuccacgccauccacguguccgggaccaacggcaccaagcgguucgacaacccggugcugcccuucaacgacggggucuacuucgcgagcaccgagaaguccaacaucauccgcggcuggaucuucgggacgacccucgacagcaagacccagucccugcugaucgugaacaacgccaccaacguggucaucaaggugugcgaguuccaguucugcaacgaccccuuccucggcguguacuaccacaagaacaacaagagcuggauggaguccgaguuccgggucuacagcuccgccaacaacugcacguucgaguacgugagccagcccuuccugauggaccuggagggcaagcaggggaacuucaagaaccuccgcgaguucguguucaagaacaucgacggcuacuucaagaucuacuccaagcacaccccgaucaaccugguccgggaccugccccagggguucagcgcccucgagccccugguggaccugcccaucggcaucaacaucacccgcuuccagacccuccuggcccugcaccgguccuaccucacgccgggggacagcagcuccggcuggaccgcgggcgccgccgccuacuacgugggguaccugcagccccgcaccuuccugcucaaguacaacgagaacggcaccaucacggacgcggucgacugcgcccuggacccccugagcgagaccaagugcacccucaaguccuucaccguggagaaggggaucuaccagacgagcaacuuccgggugcagcccaccgaguccaucguccgcuucccgaacaucaccaaccugugccccuucggcgagguguucaacgccacccgguucgccagcgucuacgccuggaaccgcaagcggaucuccaacugcguggcggacuacagcgugcuguacaacuccgccagcuucuccacguucaagugcuacggcgucagccccaccaagcucaacgaccugugcuucaccaacguguacgccgacuccuucgugauccgcggggacgagguccggcagaucgcccccggccagaccgggaagaucgccgacuacaacuacaagcugccggacgacuucacgggcugcgugaucgcguggaacagcaacaaccucgacuccaaggucgggggcaacuacaacuaccuguaccgccuguuccgcaagagcaaccucaagcccuucgagcgggacaucuccaccgagaucuaccaggccggcagcacccccugcaacgggguggagggcuucaacugcuacuucccccugcaguccuacggguuccagccgaccaacggcgugggguaccagcccuaccggguggucgugcugagcuucgagcuccugcacgcccccgccacggugugcggccccaagaaguccaccaaccuggucaagaacaagugcgugaacuucaacuucaacggccucaccgggaccggcgugcugaccgagagcaacaagaaguuccugccguuccagcaguucgggcgcgacaucgccgacacgaccgacgcgguccgcgacccccagacccuggagauccucgacaucacccccugcagcuucggcgggguguccgugaucacgccgggcaccaacaccagcaaccaggucgccgugcuguaccaggacgugaacugcaccgagguccccguggccauccacgccgaccagcugacgcccaccuggcggguguacuccaccggcagcaacgucuuccagacccgcgccgggugccucaucggcgcggagcacgugaacaacuccuacgagugcgacauccccaucggggccggcaucugcgccagcuaccagacgcagaccaacuccccgcggcgcgcccggagcguggcgucccagagcaucaucgccuacaccaugucccugggcgccgagaacagcgucgccuacuccaacaacagcaucgccauccccaccaacuucacgaucuccgugaccaccgagauccugcccgugagcaugaccaagacgagcgucgacugcaccauguacaucugcggggacuccaccgagugcagcaaccuccugcugcaguacggcuccuucugcacccagcucaaccgcgcgcugacggggaucgccguggagcaggacaagaacacccaggagguguucgcccaggucaagcagaucuacaagacgcccccgaucaaggacuucggcggguucaacuucagccagauccugcccgaccccuccaagcccagcaagcgguccuucaucgaggaccuccuguucaacaaggugacccuggccgacgccggcuucaucaagcaguacggcgacugccucggggacaucgcggcccgcgaccugaucugcgcccagaaguucaacggccugaccgugcucccgccccugcugaccgacgagaugaucgcccaguacaccagcgcccuccuggcggggaccaucacguccggcuggaccuucggggccggcgccgcccugcagauccccuucgcgaugcagauggccuaccgguucaacggcaucggggucacccagaacgugcucuacgagaaccagaagcugaucgccaaccaguucaacagcgccaucggcaagauccaggacucccugagcuccaccgccagcgcgcucgggaagcugcaggacguggucaaccagaacgcccaggcccugaacacgcucgugaagcagcuguccagcaacuucggcgccaucuccagcgugcugaacgacauccucucccgccuggacaaggucgaggccgaggugcagaucgaccggcugaucaccgggcgccuccagagccugcagaccuacgugacccagcagcugauccgggcggccgagauccgcgccagcgccaaccucgccgcgaccaagauguccgagugcguccugggccagagcaagcggguggacuucugcggcaagggguaccaccugauguccuucccccagagcgccccgcacggcguggucuuccuccacgugacguacguccccgcccaggagaagaacuucaccaccgcccccgcgaucugccacgacgggaaggcccacuucccccgcgagggcguguucguguccaacgggacccacugguucgucacgcagcggaacuucuacgagccgcagaucaucaccaccgacaacaccuucgugagcggcaacugcgacguggucaucggcaucgugaacaacacgguguacgacccccugcagcccgagcuggacuccuucaaggaggagcucgacaaguacuucaagaaccacaccagccccgacgucgaccugggggacaucuccggcaucaacgccagcguggugaacauccagaaggagaucgaccgccugaacgaggucgccaagaaccucaacgagucccugaucgaccugcaggagcucgggaaguacgagcaguacaucaaguggccgugguacaucuggcugggcuucaucgccggccugaucgcgaucgugauggugaccaucaugcucugcugcaugaccagcugcugcuccugccugaaggggugcugcagcugcggcuccugcugcaaguucgacgaggacgacagcgagcccguccugaagggggugaagcuccacuacacgugaggacuaguuauaagacugacuagcccgaugggccucccaacgggcccuccuccccuccuugcaccgagauuaauaaaaaaaaaaaaaaaaaaaaaaaaaaaaaaaaaaaaaaaaaaaaaaaaaaaaaaaaaaaaaaaaugcaucccccccccccccccccccccccccccccccaaaggcucuuuucagagccaccagaauu

SEQ ID NO: 12746 - RNA, 4039 nt, Artificial Sequence
  SARS-CoV-2/Guangdong/20SF028/2020__EPI_ISL_403936 spike protein mRNA gc (1-1273)
aggagaaagcuuaccauguucguguuccugguccuccugccccuggugagcucccagugcgugaaccucaccacccgcacgcagcugccgcccgccuacaccaacagcuucacccggggcgucuacuaccccgacaagguguuccgcuccagcgugcuguacuccacccaggaccucuuccugcccuucuucagcaacgucacgugguuccacgccauccacguguccgggaccaacggcaccaagcgguucgacaacccggugcugcccuucaacgacggggucuacuucgcgagcaccgagaaguccaacaucauccgcggcuggaucuucgggacgacccucgacagcaagacccagucccugcugaucgugaacaacgccaccaacguggucaucaaggugugcgaguuccaguucugcaacgaccccuuccucggcguguacuaccacaagaacaacaagagcuggauggaguccgaguuccgggucuacagcuccgccaacaacugcacguucgaguacgugagccagcccuuccugauggaccuggagggcaagcaggggaacuucaagaaccuccgcgaguucguguucaagaacaucgacggcuacuucaagaucuacuccaagcacaccccgaucaaccugguccgggaccugccccagggguucagcgcccucgagccccugguggaccugcccaucggcaucaacaucacccgcuuccagacccuccuggcccugcaccgguccuaccucacgccgggggacagcagcuccggcuggaccgcgggcgccgccgccuacuacgugggguaccugcagccccgcaccuuccugcucaaguacaacgagaacggcaccaucacggacgcggucgacugcgcccuggacccccugagcgagaccaagugcacccucaaguccuucaccguggagaaggggaucuaccagacgagcaacuuccgggugcagcccaccgaguccaucguccgcuucccgaacaucaccaaccugugccccuucggcgagguguucaacgccacccgguucgccagcgucuacgccuggaaccgcaagcggaucuccaacugcguggcggacuacagcgugcuguacaacuccgccagcuucuccacguucaagugcuacggcgucagccccaccaagcucaacgaccugugcuucaccaacguguacgccgacuccuucgugauccgcggggacgagguccggcagaucgcccccggccagaccgggaagaucgccgacuacaacuacaagcugccggacgacuucacgggcugcgugaucgcguggaacagcaacaaccucgacuccaaggucgggggcaacuacaacuaccuguaccgccuguuccgcaagagcaaccucaagcccuucgagcgggacaucuccaccgagaucuaccaggccggcagcacccccugcaacgggguggagggcuucaacugcuacuucccccugcaguccuacggguuccagccgaccaacggcgugggguaccagcccuaccggguggucgugcugagcuucgagcuccugcacgcccccgccacggugugcggccccaagaaguccaccaaccuggucaagaacaagugcgugaacuucaacuucaacggccucaccgggaccggcgugcugaccgagagcaacaagaaguuccugccguuccagcaguucgggcgcgacaucgccgacacgaccgacgcgguccgcgacccccagacccuggagauccucgacaucacccccugcagcuucggcgggguguccgugaucacgccgggcaccaacaccagcaaccaggucgccgugcuguaccaggacgugaacugcaccgagguccccguggccauccacgccgaccagcugacgcccaccuggcggguguacuccaccggcagcaacgucuuccagacccgcgccgggugccucaucggcgcggagcacgugaacaacuccuacgagugcgacauccccaucggggccggcaucugcgccagcuaccagacgcagaccaacuccccgcggcgcgcccggagcguggcgucccagagcaucaucgccuacaccaugucccugggcgccgagaacagcgucgccuacuccaacaacagcaucgccauccccaccaacuucacgaucuccgugaccaccgagauccugcccgugagcaugaccaagacgagcgucgacugcaccauguacaucugcggggacuccaccgagugcagcaaccuccugcugcaguacggcuccuucugcacccagcucaaccgcgcgcugacggggaucgccguggagcaggacaagaacacccaggagguguucgcccaggucaagcagaucuacaagacgcccccgaucaaggacuucggcggguucaacuucagccagauccugcccgaccccuccaagcccagcaagcgguccuucaucgaggaccuccuguucaacaaggugacccuggccgacgccggcuucaucaagcaguacggcgacugccucggggacaucgcggcccgcgaccugaucugcgcccagaaguucaacggccugaccgugcucccgccccugcugaccgacgagaugaucgcccaguacaccagcgcccuccuggcggggaccaucacguccggcuggaccuucggggccggcgccgcccugcagauccccuucgcgaugcagauggccuaccgguucaacggcaucggggucacccagaacgugcucuacgagaaccagaagcugaucgccaaccaguucaacagcgccaucggcaagauccaggacucccugagcuccaccgccagcgcgcucgggaagcugcaggacguggucaaccagaacgcccaggcccugaacacgcucgugaagcagcuguccagcaacuucggcgccaucuccagcgugcugaacgacauccucucccgccuggacaaggucgaggccgaggugcagaucgaccggcugaucaccgggcgccuccagagccugcagaccuacgugacccagcagcugauccgggcggccgagauccgcgccagcgccaaccucgccgcgaccaagauguccgagugcguccugggccagagcaagcggguggacuucugcggcaagggguaccaccugauguccuucccccagagcgccccgcacggcguggucuuccuccacgugacguacguccccgcccaggagaagaacuucaccaccgcccccgcgaucugccacgacgggaaggcccacuucccccgcgagggcguguucguguccaacgggacccacugguucgucacgcagcggaacuucuacgagccgcagaucaucaccaccgacaacaccuucgugagcggcaacugcgacguggucaucggcaucgugaacaacacgguguacgacccccugcagcccgagcuggacuccuucaaggaggagcucgacaaguacuucaagaaccacaccagccccgacgucgaccugggggacaucuccggcaucaacgccagcguggugaacauccagaaggagaucgaccgccugaacgaggucgccaagaaccucaacgagucccugaucgaccugcaggagcucgggaaguacgagcaguacaucaaguggccgugguacaucuggcugggcuucaucgccggccugaucgcgaucgugauggugaccaucaugcucugcugcaugaccagcugcugcuccugccugaaggggugcugcagcugcggcuccugcugcaaguucgacgaggacgacagcgagcccguccugaagggggugaagcuccacuacacgugaggacuaguuauaagacugacuagcccgaugggccucccaacgggcccuccuccccuccuugcaccgagauuaauaaaaaaaaaaaaaaaaaaaaaaaaaaaaaaaaaaaaaaaaaaaaaaaaaaaaaaaaaaaaaaaaugcaucccccccccccccccccccccccccccccccaaaggcucuuuucagagccaccagaauu

SEQ ID NO: 12747 - RNA, 4039 nt, Artificial Sequence
  SARS-CoV-2/Shenzhen/SZTH-001/2020__EPI_ISL_406592 spike protein mRNA gc (1-1273)
aggagaaagcuuaccauguucguguuccugguccuccugccccuggugagcucccagugcgugaaccucaccacccgcacgcagcugccgcccgccuacaccaacagcuucacccggggcgucuacuaccccgacaagguguuccgcuccagcgugcugcacuccacccaggaccucuuccugcccuucuucagcaacgucacgugguuccacgccauccacguguccgggaccaacggcaccaagcgguucgacaacccggugcugcccuucaacgacggggucuacuucgcgagcaccgagaaguccaacaucauccgcggcuggaucuucgggacgacccucgacagcaagacccagucccugcugaucgugaacaacgccaccaacguggucaucaaggugugcgaguuccaguucugcaacgaccccuuccucggcguguacuaccacaagaacaacaagagcuggauggaguccgaguuccgggucuacagcuccgccaacaacugcacguucgaguacgugagccagcccuuccugauggaccuggagggcaagcaggggaacuucaagaaccuccgcgaguucguguucaagaacaucgacggcuacuucaagaucuacuccaagcacaccccgaucaaccugguccgggaccugccccagggguucagcgcccucgagccccugguggaccugcccaucggcaucaacaucacccgcuuccagacccuccuggcccugcaccgguccuaccucacgccgggggacagcagcuccggcuggaccgcgggcgccgccgccuacuacgugggguaccugcagccccgcaccuuccugcucaaguacaacgagaacggcaccaucacggacgcggucgacugcgcccuggacccccugagcgagaccaagugcacccucaaguccuucaccguggagaaggggaucuaccagacgagcaacuuccgggugcagcccaccgaguccaucguccgcuucccgaacaucaccaaccugugccccuucggcgagguguucaacgccacccgguucgccagcgucuacgccuggaaccgcaagcggaucuccaacugcguggcggacuacagcgugcuguacaacuccgccagcuucuccacguucaagugcuacggcgucagccccaccaagcucaacgaccugugcuucaccaacguguacgccgacuccuucgugauccgcggggacgagguccggcagaucgcccccggccagaccgggaagaucgccgacuacaacuacaagcugccggacgacuucacgggcugcgugaucgcguggaacagcaacaaccucgacuccaaggucgggggcaacuacaacuaccuguaccgccuguuccgcaagagcaaccucaagcccuucgagcgggacaucuccaccgagaucuaccaggccggcagcacccccugcaacgggguggagggcuucaacugcuacuucccccugcaguccuacggguuccagccgaccaacggcgugggguaccagcccuaccggguggucgugcugagcuucgagcuccugcacgcccccgccacggugugcggccccaagaaguccaccaaccuggucaagaacaagugcgugaacuucaacuucaacggccucaccgggaccggcgugcugaccgagagcaacaagaaguuccugccguuccagcaguucgggcgcgacaucgccgacacgaccgacgcgguccgcgacccccagacccuggagauccucgacaucacccccugcagcuucggcgggguguccgugaucacgccgggcaccaacaccagcaaccaggucgccgugcuguaccaggacgugaacugcaccgagguccccguggccauccacgccgaccagcugacgcccaccuggcggguguacuccaccggcagcaacgucuuccagacccgcgccgggugccucaucggcgcggagcacgugaacaacuccuacgagugcgacauccccaucggggccggcaucugcgccagcuaccagacgcagaccaacuccccgcggcgcgcccggagcguggcgucccagagcaucaucgccuacaccaugucccugggcgccgagaacagcgucgccuacuccaacaacagcaucgccauccccaccaacuucacgaucuccgugaccaccgagauccugcccgugagcaugaccaagacgagcgucgacugcaccauguacaucugcggggacuccaccgagugcagcaaccuccugcugcaguacggcuccuucugcacccagcucaaccgcgcgcugacggggaucgccguggagcaggacaagaacacccaggagguguucgcccaggucaagcagaucuacaagacgcccccgaucaaggacuucggcggguucaacuucagccagauccugcccgaccccuccaagcccagcaagcgguccuucaucgaggaccuccuguucaacaaggugacccuggccgacgccggcuucaucaagcaguacggcgacugccucggggacaucgcggcccgcgaccugaucugcgcccagaaguucaacggccugaccgugcucccgccccugcugaccgacgagaugaucgcccaguacaccagcgcccuccuggcggggaccaucacguccggcuggaccuucggggccggcgccgcccugcagauccccuucgcgaugcagauggccuaccgguucaacggcaucggggucacccagaacgugcucuacgagaaccagaagcugaucgccaaccaguucaacagcgccaucggcaagauccaggacucccugagcuccaccgccagcgcgcucgggaagcugcaggacguggucaaccagaacgcccaggcccugaacacgcucgugaagcagcuguccagcaacuucggcgccaucuccagcgugcugaacgacauccucucccgccuggacaaggucgaggccgaggugcagaucgaccggcugaucaccgggcgccuccagagccugcagaccuacgugacccagcagcugauccgggcggccgagauccgcgccagcgccaaccucgccgcgaccaagauguccgagugcguccugggccagagcaagcggguggacuucugcggcaagggguaccaccugauguccuucccccagagcgccccgcacggcguggucuuccuccacgugacguacguccccgcccaggagaagaacuucaccaccgcccccgcgaucugccacgacgggaaggcccacuucccccgcgagggcguguucguguccaacgggacccacugguucgucacgcagcggaacuucuacgagccgcagaucaucaccaccgacaacaccuucgugagcggcaacugcgacgugcugaucggcaucgucaacaacacgguguacgacccccugcagcccgagcucgacuccuucaaggaggagcuggacaaguacuucaagaaccacaccagccccgacguggaccugggggacaucuccggcaucaacgccagcgucgugaacauccagaaggagaucgaccgccucaacgagguggccaagaaccugaacgagucccugaucgaccuccaggagcuggggaaguacgagcaguacaucaaguggccgugguacaucuggcugggcuucaucgccggccucaucgcgaucgucauggugaccaucaugcugugcugcaugaccagcugcugcuccugccugaaggggugcugcagcugcggcuccugcugcaaguucgacgaggacgacagcgggcccgugcucaagggcgucaagcugcacuacacgugaggacuaguuauaagacugacuagcccgaugggccucccaacgggcccuccuccccuccuugcaccgagauuaauaaaaaaaaaaaaaaaaaaaaaaaaaaaaaaaaaaaaaaaaaaaaaaaaaaaaaaaaaaaaaaaaugcaucccccccccccccccccccccccccccccccaaaggcucuuuucagagccaccagaauu

SEQ ID NO: 12748 - RNA, 4039 nt, Artificial Sequence
  SARS-CoV-2/Shenzhen/SZTH-004/2020__EPI_ISL_406595 spike protein mRNA gc (1-1273)
aggagaaagcuuaccauguucguguuccugguccuccugccccuggugagcucccagugcgugaaccucaccacccgcacgcagcugccgcccgccuacaccaacagcuucacccggggcgucuacuaccccgacaagguguuccgcuccagcgugcugcacuccacccaggaccucuuccugcccuucuucagcaacgucacgugguuccacgccauccacguguccgggaccaacggcaccaagcgguucgacaacccggugcugcccuucaacgacggggucuacuucgcgagcaccgagaaguccaacaucauccgcggcuggaucuucgggacgacccucgacagcaagacccagucccugcugaucgugaacaacgccaccaacguggucaucaaggugugcgaguuccaguucugcaacgaccccuuccucggcguguacuaccacaagaacaacaagagcuggauggaguccgaguuccgggucuacagcuccgccaacaacugcacguucgaguacgugagccagcccuuccugauggaccuggagggcaagcaggggaacuucaagaaccuccgcgaguucguguucaagaacaucgacggcuacuucaagaucuacuccaagcacaccccgaucaaccugguccgggaccugccccagggguucagcgcccucgagccccugguggaccugcccaucggcaucaacaucacccgcuuccagacccuccuggcccugcaccgguccuaccucacgccgggggacagcagcuccggcuggaccgcgggcgccgccgccuacuacgugggguaccugcagccccgcaccuuccugcucaaguacaacgagaacggcaccaucacggacgcggucgacugcgcccuggacccccugagcgagaccaagugcacccucaaguccuucaccguggagaaggggaucuaccagacgagcaacuuccgggugcagcccaccgaguccaucguccgcuucccgaacaucaccaaccugugccccuucggcgagguguucaacgccacccgguucgccagcgucuacgccugggaccgcaagcggaucuccaacugcguggcguacuacagcgugcuguacaacuccgccagcuucuccacguucaagugcuacggcgucagccccaccaagcucaacgaccugugcuucaccaacguguacgccgacuccuucgugauccgcggggacgagguccggcagaucgcccccggccagaccgggaagaucgccgacuacaacuacaagcugccggacgacuucacgggcugcgugaucgcguggaacagcaacaaccucgacuccaaggucgggggcaacuacaacuaccuguaccgccuguuccgcaagagcaaccucaagcccuucgagcgggacaucuccaccgagaucuaccaggccggcagcacccccugcaacgggguggagggcuucaacugcuacuucccccugcaguccuacggguuccagccgaccaacggcgugggguaccagcccuaccggguggucgugcugagcuucgagcuccugcacgcccccgccacggugugcggccccaagaaguccaccaaccuggucaagaacaagugcgugaacuucaacuucaacggccucaccgggaccggcgugcugaccgagagcaacaagaaguuccugccguuccagcaguucgggcgcgacaucgccgacacgaccgacgcgguccgcgacccccagacccuggagauccucgacaucacccccugcagcuucggcgggguguccgugaucacgccgggcaccaacaccagcaaccaggucgccgugcuguaccaggacgugaacugcaccgagguccccguggccauccacgccgaccagcugacgcccaccuggcggguguacuccaccggcagcaacgucuuccagacccgcgccgggugccucaucggcgcggagcacgugaacaacuccuacgagugcgacauccccaucggggccggcaucugcgccagcuaccagacgcagaccaacuccccgcggcgcgcccggagcguggcgucccagagcaucaucgccuacaccaugucccugggcgccgagaacagcgucgccuacuccaacaacagcaucgccauccccaccaacuucacgaucuccgugaccaccgagauccugcccgugagcaugaccaagacgagcgucgacugcaccauguacaucugcggggacuccaccgagugcagcaaccuccugcugcaguacggcuccuucugcacccagcucaaccgcgcgcugacggggaucgccguggagcaggacaagaacacccaggagguguucgcccaggucaagcagaucuacaagacgcccccgaucaaggacuucggcggguucaacuucagccagauccugcccgaccccuccaagcccagcaagcgguccuucaucgaggaccuccuguucaacaaggugacccuggccgacgccggcuucaucaagcaguacggcgacugccucggggacaucgcggcccgcgaccugaucugcgcccagaaguucaacggccugaccgugcucccgccccugcugaccgacgagaugaucgcccaguacaccagcgcccuccuggcggggaccaucacguccggcuggaccuucggggccggcgccgcccugcagauccccuucgcgaugcagauggccuaccgguucaacggcaucggggucacccagaacgugcucuacgagaaccagaagcugaucgccaaccaguucaacagcgccaucggcaagauccaggacucccugagcuccaccgccagcgcgcucgggaagcugcaggacguggucaaccagaacgcccaggcccugaacacgcucgugaagcagcuguccagcaacuucggcgccaucuccagcgugcugaacgacauccucucccgccuggacaaggucgaggccgaggugcagaucgaccggcugaucaccgggcgccuccagagccugcagaccuacgugacccagcagcugauccgggcggccgagauccgcgccagcgccaaccucgccgcgaccaagauguccgagugcguccugggccagagcaagcggguggacuucugcggcaagggguaccaccugauguccuucccccagagcgccccgcacggcguggucuuccuccacgugacguacguccccgcccaggagaagaacuucaccaccgcccccgcgaucugccacgacgggaaggcccacuucccccgcgagggcguguucguguccaacgggacccacugguucgucacgcagcggaacuucuacgagccgcagaucaucaccaccgacaacaccuucgugagcggcaacugcgacguggucaucggcaucgugaacaacacgguguacgacccccugcagcccgagcuggacuccuucaaggaggagcucgacaaguacuucaagaaccacaccagccccgacgucgaccugggggacaucuccggcaucaacgccagcguggugaacauccagaaggagaucgaccgccugaacgaggucgccaagaaccucaacgagucccugaucgaccugcaggagcucgggaaguacgagcaguacaucaaguggccgugguacaucuggcugggcuucaucgccggccugaucgcgaucgugauggugaccaucaugcucugcugcaugaccagcugcugcuccugccugaaggggugcugcagcugcggcuccugcugcaaguucgacgaggacgacagcgagcccguccugaagggggugaagcuccacuacacgugaggacuaguuauaagacugacuagcccgaugggccucccaacgggcccuccuccccuccuugcaccgagauuaauaaaaaaaaaaaaaaaaaaaaaaaaaaaaaaaaaaaaaaaaaaaaaaaaaaaaaaaaaaaaaaaaugcaucccccccccccccccccccccccccccccccaaaggcucuuuucagagccaccagaauu

SEQ ID NO: 12749 - RNA, 4039 nt, Artificial Sequence
  SARS-CoV-2/France/IDF0372/2020__EPI_ISL_406596 spike protein mRNA gc (1-1273)
aggagaaagcuuaccauguucguguuccugguccuccugccccuggugagcucccagugcgugaaccucaccacccgcacgcagcugccgcccgccuacaccaacagcuucacccggggcgucuacuaccccgacaagguguuccgcuccagcgugcugcacuccacccaggaccucuuccugcccuucuucagcaacgucacgugguuccacgccauccacguguccgggaccaacggcaccaagcgguucgacaacccggugcugcccuucaacgacggggucuacuucgcgagcaccgagaaguccaacaucauccgcggcuggaucuucgggacgacccucgacagcaagacccagucccugcugaucgugaacaacgccaccaacguggucaucaaggugugcgaguuccaguucugcaacgaccccuuccucggcguguacuaccacaagaacaacaagagcuggauggaguccgaguuccgggucuacagcuccgccaacaacugcacguucgaguacgugagccagcccuuccugauggaccuggagggcaagcaggggaacuucaagaaccuccgcgaguucguguucaagaacaucgacggcuacuucaagaucuacuccaagcacaccccgaucaaccugguccgggaccugccccagggguucagcgcccucgagccccugguggaccugcccaucggcaucaacaucacccgcuuccagacccuccuggcccugcaccgguccuaccucacgccgggggacagcagcuccggcuggaccgcgggcgccgccgccuacuacgugggguaccugcagccccgcaccuuccugcucaaguacaacgagaacggcaccaucacggacgcggucgacugcgcccuggacccccugagcgagaccaagugcacccucaaguccuucaccguggagaaggggaucuaccagacgagcaacuuccgggugcagcccaccgaguccaucguccgcuucccgaacaucaccaaccugugccccuucggcgagguguucaacgccacccgguucgccagcgucuacgccuggaaccgcaagcggaucuccaacugcguggcggacuacagcuuccuguacaacuccgccagcuucuccacguucaagugcuacggcgugagccccaccaagcucaacgaccugugcuucaccaacgucuacgccgacuccuucgugauccgcggggacgaggugcggcagaucgcccccggccagaccgggaagaucgccgacuacaacuacaagcugccggacgacuucacgggcugcgucaucgcguggaacagcaacaaccucgacuccaaggucgggggcaacuacaacuaccuguaccgccuguuccgcaagagcaaccucaagcccuucgagcgggacaucuccaccgagaucuaccaggccggcagcacccccugcaacgggguggagggcuucaacugcuacuucccccugcaguccuacggguuccagccgaccaacggcgugggguaccagcccuaccggguggugguccugagcuucgagcuccugcacgcccccgccacggugugcggccccaagaaguccaccaaccuggugaagaacaagugcgucaacuucaacuucaacggccucaccgggaccggcgugcugaccgagagcaacaagaaguuccugccguuccagcaguucgggcgcgacaucgccgacacgaccgacgcggugcgcgacccccagacccuggagauccucgacaucacccccugcagcuucggcggggucuccgugaucacgccgggcaccaacaccagcaaccagguggccguccuguaccaggacgugaacugcaccgaggugcccgucgccauccacgccgaccagcugacgcccaccuggcggguguacuccaccggcagcaacguguuccagacccgcgccgggugccucaucggcgcggagcacgucaacaacuccuacgagugcgacauccccaucggggccggcaucugcgccagcuaccagacgcagaccaacuccccgcggcgcgcccggagcguggcgucccagagcaucaucgccuacaccaugucccugggcgccgagaacagcguggccuacuccaacaacagcaucgccauccccaccaacuucacgaucuccgucaccaccgagauccugcccgugagcaugaccaagacgagcguggacugcaccauguacaucugcggggacuccaccgagugcagcaaccuccugcugcaguacggcuccuucugcacccagcucaaccgcgcgcugacggggaucgccgucgagcaggacaagaacacccaggagguguucgcccaggugaagcagaucuacaagacgcccccgaucaaggacuucggcggguucaacuucagccagauccugcccgaccccuccaagcccagcaagcgguccuucaucgaggaccuccuguucaacaaggucacccuggccgacgccggcuucaucaagcaguacggcgacugccucggggacaucgcggcccgcgaccugaucugcgcccagaaguucaacggccugaccgugcucccgccccugcugaccgacgagaugaucgcccaguacaccagcgcccuccuggcggggaccaucacguccggcuggaccuucggggccggcgccgcccugcagauccccuucgcgaugcagauggccuaccgguucaacggcaucggggugacccagaacguccucuacgagaaccagaagcugaucgccaaccaguucaacagcgccaucggcaagauccaggacucccugagcuccaccgccagcgcgcucgggaagcugcaggacguggugaaccagaacgcccaggcccugaacacgcucgucaagcagcuguccagcaacuucggcgccaucuccagcgugcugaacgacauccucucccgccuggacaagguggaggccgagguccagaucgaccggcugaucaccgggcgccuccagagccugcagaccuacgugacccagcagcugauccgggcggccgagauccgcgccagcgccaaccucgccgcgaccaagauguccgagugcgugcugggccagagcaagcgggucgacuucugcggcaagggguaccaccugauguccuucccccagagcgccccgcacggcgugguguuccuccacgucacguacgugcccgcccaggagaagaacuucaccaccgcccccgcgaucugccacgacgggaaggcccacuucccccgcgagggcgucuucguguccaacgggacccacugguucgugacgcagcggaacuucuacgagccgcagaucaucaccaccgacaacaccuucgucagcggcaacugcgacguggugaucggcaucgucaacaacacgguguacgacccccugcagcccgagcuggacuccuucaaggaggagcucgacaaguacuucaagaaccacaccagccccgacguggaccugggggacaucuccggcaucaacgccagcgucgugaacauccagaaggagaucgaccgccugaacgagguggccaagaaccucaacgagucccugaucgaccugcaggagcucgggaaguacgagcaguacaucaaguggccgugguacaucuggcugggcuucaucgccggccugaucgcgaucgucauggugaccaucaugcucugcugcaugaccagcugcugcuccugccugaaggggugcugcagcugcggcuccugcugcaaguucgacgaggacgacagcgagcccgugcugaagggggucaagcuccacuacacgugaggacuaguuauaagacugacuagcccgaugggccucccaacgggcccuccuccccuccuugcaccgagauuaauaaaaaaaaaaaaaaaaaaaaaaaaaaaaaaaaaaaaaaaaaaaaaaaaaaaaaaaaaaaaaaaaugcaucccccccccccccccccccccccccccccccaaaggcucuuuucagagccaccagaauu

SEQ ID NO: 12750 - RNA, 4039 nt, Artificial Sequence
  SARS-CoV-2/Australia/VIC01/2020__EPI_ISL_406844 spike protein mRNA gc (1-1273)
aggagaaagcuuaccauguucguguuccugguccuccugccccuggugagcucccagugcgugaaccucaccacccgcacgcagcugccgcccgccuacaccaacagcuucacccggggcgucuacuaccccgacaagguguuccgcuccagcgugcugcacuccacccaggaccucuuccugcccuucuucagcaacgucacgugguuccacgccauccacguguccgggaccaacggcaccaagcgguucgacaacccggugcugcccuucaacgacggggucuacuucgcgagcaccgagaaguccaacaucauccgcggcuggaucuucgggacgacccucgacagcaagacccagucccugcugaucgugaacaacgccaccaacguggucaucaaggugugcgaguuccaguucugcaacgaccccuuccucggcguguacuaccacaagaacaacaagagcuggauggaguccgaguuccgggucuacagcuccgccaacaacugcacguucgaguacgugagccagcccuuccugauggaccuggagggcaagcaggggaacuucaagaaccuccgcgaguucguguucaagaacaucgacggcuacuucaagaucuacuccaagcacaccccgaucaaccugguccgggaccugccccagggguucagcgcccucgagccccugguggaccugcccaucggcaucaacaucacccgcuuccagacccuccuggcccugcaccggcgcuaccucacgccgggggacuccagcagcggcuggaccgcgggcgccgccgccuacuacgugggguaccugcagccccggaccuuccugcucaaguacaacgagaacggcaccaucacggacgcggucgacugcgcccuggacccccuguccgagaccaagugcacccucaagagcuucaccguggagaaggggaucuaccagacguccaacuuccgcgugcagcccaccgagagcaucguccgguucccgaacaucaccaaccugugccccuucggcgagguguucaacgccacccgcuucgccuccgucuacgccuggaaccggaagcgcaucagcaacugcguggcggacuacuccgugcuguacaacagcgccuccuucagcacguucaagugcuacggcgucucccccaccaagcucaacgaccugugcuucaccaacguguacgccgacagcuucgugauccgcggggacgagguccggcagaucgcccccggccagaccgggaagaucgccgacuacaacuacaagcugccggacgacuucacgggcugcgugaucgcguggaacuccaacaaccucgacagcaaggucgggggcaacuacaacuaccuguaccggcuguuccgcaaguccaaccucaagcccuucgagcgggacaucagcaccgagaucuaccaggccggcuccacccccugcaacgggguggagggcuucaacugcuacuucccccugcagagcuacggguuccagccgaccaacggcgugggguaccagcccuaccgcguggucgugcuguccuucgagcuccugcacgcccccgccacggugugcggccccaagaaguccaccaaccuggucaagaacaagugcgugaacuucaacuucaacggccucaccgggaccggcgugcugaccgagagcaacaagaaguuccugccguuccagcaguucgggcgcgacaucgccgacacgaccgacgcgguccgggacccccagacccuggagauccucgacaucacccccugcagcuucggcggggugagcgugaucacgccgggcaccaacaccuccaaccaggucgccgugcuguaccaggacgugaacugcaccgagguccccguggccauccacgccgaccagcugacgcccaccuggcgcguguacagcaccggcuccaacgucuuccagacccgggccgggugccucaucggcgcggagcacgugaacaacagcuacgagugcgacauccccaucggggccggcaucugcgccuccuaccagacgcagaccaacagcccgcgccgggcccgcuccguggcgagccaguccaucaucgccuacaccaugagccugggcgccgagaacuccgucgccuacagcaacaacuccaucgccauccccaccaacuucacgaucagcgugaccaccgagauccugcccguguccaugaccaagacgagcgucgacugcaccauguacaucugcggggacagcaccgagugcuccaaccuccugcugcaguacggcagcuucugcacccagcucaaccgggcgcugacggggaucgccguggagcaggacaagaacacccaggagguguucgcccaggucaagcagaucuacaagacgcccccgaucaaggacuucggcggguucaacuucucccagauccugcccgaccccagcaagcccuccaagcgcagcuucaucgaggaccuccuguucaacaaggugacccuggccgacgccggcuucaucaagcaguacggcgacugccucggggacaucgcggcccgggaccugaucugcgcccagaaguucaacggccugaccgugcucccgccccugcugaccgacgagaugaucgcccaguacaccuccgcccuccuggcggggaccaucacgagcggcuggaccuucggggccggcgccgcccugcagauccccuucgcgaugcagauggccuaccgcuucaacggcaucggggucacccagaacgugcucuacgagaaccagaagcugaucgccaaccaguucaacuccgccaucggcaagauccaggacagccuguccagcaccgccuccgcgcucgggaagcugcaggacguggucaaccagaacgcccaggcccugaacacgcucgugaagcagcugagcuccaacuucggcgccaucagcuccgugcugaacgacauccucagccggcuggacaaggucgaggccgaggugcagaucgaccgccugaucaccgggcggcuccagucccugcagaccuacgugacccagcagcugauccgcgcggccgagauccgggccagcgccaaccucgccgcgaccaagaugagcgagugcguccugggccaguccaagcgcguggacuucugcggcaagggguaccaccugaugagcuucccccaguccgccccgcacggcguggucuuccuccacgugacguacguccccgcccaggagaagaacuucaccaccgcccccgcgaucugccacgacgggaaggcccacuucccccgggagggcguguucgugagcaacgggacccacugguucgucacgcagcgcaacuucuacgagccgcagaucaucaccaccgacaacaccuucguguccggcaacugcgacguggucaucggcaucgugaacaacacgguguacgacccccugcagcccgagcuggacagcuucaaggaggagcucgacaaguacuucaagaaccacaccucccccgacgucgaccugggggacaucagcggcaucaacgccuccguggugaacauccagaaggagaucgaccggcugaacgaggucgccaagaaccucaacgagagccugaucgaccugcaggagcucgggaaguacgagcaguacaucaaguggccgugguacaucuggcugggcuucaucgccggccugaucgcgaucgugauggugaccaucaugcucugcugcaugaccuccugcugcagcugccugaaggggugcugcuccugcggcagcugcugcaaguucgacgaggacgacuccgagcccguccugaagggggugaagcuccacuacacgugaggacuaguuauaagacugacuagcccgaugggccucccaacgggcccuccuccccuccuugcaccgagauuaauaaaaaaaaaaaaaaaaaaaaaaaaaaaaaaaaaaaaaaaaaaaaaaaaaaaaaaaaaaaaaaaaugcaucccccccccccccccccccccccccccccccaaaggcucuuuucagagccaccagaauu

SEQ ID NO: 12751 - RNA, 4039 nt, Artificial Sequence
  SARS-CoV-2/Germany/BavPat1/2020__EPI_ISL_406862 spike protein mRNA gc (1-1273)
aggagaaagcuuaccauguucguguuccugguccuccugccccuggugagcucccagugcgugaaccucaccacccgcacgcagcugccgcccgccuacaccaacagcuucacccggggcgucuacuaccccgacaagguguuccgcuccagcgugcugcacuccacccaggaccucuuccugcccuucuucagcaacgucacgugguuccacgccauccacguguccgggaccaacggcaccaagcgguucgacaacccggugcugcccuucaacgacggggucuacuucgcgagcaccgagaaguccaacaucauccgcggcuggaucuucgggacgacccucgacagcaagacccagucccugcugaucgugaacaacgccaccaacguggucaucaaggugugcgaguuccaguucugcaacgaccccuuccucggcguguacuaccacaagaacaacaagagcuggauggaguccgaguuccgggucuacagcuccgccaacaacugcacguucgaguacgugagccagcccuuccugauggaccuggagggcaagcaggggaacuucaagaaccuccgcgaguucguguucaagaacaucgacggcuacuucaagaucuacuccaagcacaccccgaucaaccugguccgggaccugccccagggguucagcgcccucgagccccugguggaccugcccaucggcaucaacaucacccgcuuccagacccuccuggcccugcaccgguccuaccucacgccgggggacagcagcuccggcuggaccgcgggcgccgccgccuacuacgugggguaccugcagccccgcaccuuccugcucaaguacaacgagaacggcaccaucacggacgcggucgacugcgcccuggacccccugagcgagaccaagugcacccucaaguccuucaccguggagaaggggaucuaccagacgagcaacuuccgggugcagcccaccgaguccaucguccgcuucccgaacaucaccaaccugugccccuucggcgagguguucaacgccacccgguucgccagcgucuacgccuggaaccgcaagcggaucuccaacugcguggcggacuacagcgugcuguacaacuccgccagcuucuccacguucaagugcuacggcgucagccccaccaagcucaacgaccugugcuucaccaacguguacgccgacuccuucgugauccgcggggacgagguccggcagaucgcccccggccagaccgggaagaucgccgacuacaacuacaagcugccggacgacuucacgggcugcgugaucgcguggaacagcaacaaccucgacuccaaggucgggggcaacuacaacuaccuguaccgccuguuccgcaagagcaaccucaagcccuucgagcgggacaucuccaccgagaucuaccaggccggcagcacccccugcaacgggguggagggcuucaacugcuacuucccccugcaguccuacggguuccagccgaccaacggcgugggguaccagcccuaccggguggucgugcugagcuucgagcuccugcacgcccccgccacggugugcggccccaagaaguccaccaaccuggucaagaacaagugcgugaacuucaacuucaacggccucaccgggaccggcgugcugaccgagagcaacaagaaguuccugccguuccagcaguucgggcgcgacaucgccgacacgaccgacgcgguccgcgacccccagacccuggagauccucgacaucacccccugcagcuucggcgggguguccgugaucacgccgggcaccaacaccagcaaccaggucgccgugcuguaccagggcgugaacugcaccgagguccccguggccauccacgccgaccagcugacgcccaccuggcggguguacuccaccgggagcaacgucuuccagacccgcgccggcugccucaucggggcggagcacgugaacaacuccuacgagugcgacauccccaucggcgccggcaucugcgccagcuaccagacgcagaccaacuccccgcggcgcgcccggagcguggcgucccagagcaucaucgccuacaccaugucccugggggccgagaacagcgucgccuacuccaacaacagcaucgccauccccaccaacuucacgaucuccgugaccaccgagauccugcccgugagcaugaccaagacgagcgucgacugcaccauguacaucugcggcgacuccaccgagugcagcaaccuccugcugcaguacggguccuucugcacccagcucaaccgcgcgcugacgggcaucgccguggagcaggacaagaacacccaggagguguucgcccaggucaagcagaucuacaagacgcccccgaucaaggacuucgggggcuucaacuucagccagauccugcccgaccccuccaagcccagcaagcgguccuucaucgaggaccuccuguucaacaaggugacccuggccgacgccggcuucaucaagcaguacggggacugccucggcgacaucgcggcccgcgaccugaucugcgcccagaaguucaacgggcugaccgugcucccgccccugcugaccgacgagaugaucgcccaguacaccagcgcccuccuggcgggcaccaucacguccggguggaccuucggcgccggcgccgcccugcagauccccuucgcgaugcagauggccuaccgguucaacgggaucggcgucacccagaacgugcucuacgagaaccagaagcugaucgccaaccaguucaacagcgccaucgggaagauccaggacucccugagcuccaccgccagcgcgcucggcaagcugcaggacguggucaaccagaacgcccaggcccugaacacgcucgugaagcagcuguccagcaacuucggggccaucuccagcgugcugaacgacauccucucccgccuggacaaggucgaggccgaggugcagaucgaccggcugaucaccggccgccuccagagccugcagaccuacgugacccagcagcugauccgggcggccgagauccgcgccagcgccaaccucgccgcgaccaagauguccgagugcguccugggccagagcaagcggguggacuucugcgggaagggcuaccaccugauguccuucccccagagcgccccgcacgggguggucuuccuccacgugacguacguccccgcccaggagaagaacuucaccaccgcccccgcgaucugccacgacggcaaggcccacuucccccgcgaggggguguucguguccaacggcacccacugguucgucacgcagcggaacuucuacgagccgcagaucaucaccaccgacaacaccuucgugagcggcaacugcgacguggucaucgggaucgugaacaacacgguguacgacccccugcagcccgagcuggacuccuucaaggaggagcucgacaaguacuucaagaaccacaccagccccgacgucgaccugggcgacaucuccgggaucaacgccagcguggugaacauccagaaggagaucgaccgccugaacgaggucgccaagaaccucaacgagucccugaucgaccugcaggagcucggcaaguacgagcaguacaucaaguggccgugguacaucuggcugggcuucaucgccgggcugaucgcgaucgugauggugaccaucaugcucugcugcaugaccagcugcugcuccugccugaagggcugcugcagcugcggguccugcugcaaguucgacgaggacgacagcgagcccguccugaagggcgugaagcuccacuacacgugaggacuaguuauaagacugacuagcccgaugggccucccaacgggcccuccuccccuccuugcaccgagauuaauaaaaaaaaaaaaaaaaaaaaaaaaaaaaaaaaaaaaaaaaaaaaaaaaaaaaaaaaaaaaaaaaugcaucccccccccccccccccccccccccccccccaaaggcucuuuucagagccaccagaauu

SEQ ID NO: 12752 - RNA, 4039 nt, Artificial Sequence
  SARS-CoV-2/Wuhan/HBCDC-HB-02/2020__EPI_ISL_412978 spike protein mRNA gc (1-1273)
aggagaaagcuuaccauguucguguuccugguccuccugccccuggugagcucccagugcgugaaccucaccacccgcacgcagcugccgcccgccuacaccaacagcuucacccggggcgucuacuaccccgacaagguguuccgcuccagcgugcugcacuccacccaggaccucuuccugcccuucuucagcaacgucacgugguuccacgccauccacguguccgggaccaacggcaccaagcgguucgacaacccggugcugcccuucaacgacggggucuacuucgcgagcaccgagaaguccaacaucauccgcggcuggaucuucgggacgacccucgacagcaagacccagucccugcugaucgugaacaacgccaccaacguggucaucaaggugugcgaguuccaguucugcaacgaccccuuccucggcguguacuaccacaagaacaacaagagcuggauggaguccgaguuccgggucuacagcuccgccaacaacugcacguucgaguacgugagccagcccuuccugauggaccuggagggcaagcaggggaacuucaagaaccuccgcgaguucguguucaagaacaucgacggcuacuucaagaucuacuccaagcacaccccgaucaaccugguccgggaccugccccagggguucagcgcccucgagccccugguggaccugcccaucggcaucaacaucacccgcuuccagacccuccuggcccugcaccgguccuaccucacgccgggggacagcagcuccggcuggaccgcgggcgccgccgccuacuacgugggguaccugcagccccgcaccuuccugcucaaguacaacgagaacggcaccaucacggacgcggucgacugcgcccuggacccccugagcgagaccaagugcacccucaaguccuucaccguggagaaggggaucuaccagacgagcaacuuccgggugcagcccaccgaguccaucguccgcuucccgaacaucaccaaccugugccccuucggcgagguguucaacgccacccgguucgccagcgucuacgccuggaaccgcaagcggaucuccaacugcguggcggacuacagcgugcuguacaacuccgccagcuucuccacguucaagugcuacggcgucagccccaccaagcucaacgaccugugcuucaccaacguguacgccgacuccuucgugauccgcggggacgagguccggcagaucgcccccggccagaccgggaagaucgccgacuacaacuacaagcugccggacgacuucacgggcugcgugaucgcguggaacagcaacaaccucgacuccaaggucgggggcaacuacaacuaccuguaccgccuguuccgcaagagcaaccucaagcccuucgagcgggacaucuccaccgagaucuaccaggccggcagcacccccugcaacgggguggagggcuucaacugcuacuucccccugcaguccuacggguuccagccgaccaacggcgugggguaccagcccuaccggguggucgugcugagcuucgagcuccugcacgcccccgccacggugugcggccccaagaaguccaccaaccuggucaagaacaagugcgugaacuucaacuucaacggccucaccgggaccggcgugcugaccgagagcaacaagaaguuccugccguuccagcaguucgggcgcgacaucgccgacacgaccgacgcgguccgcgacccccagacccuggagauccucgacaucacccccugcagcuucggcgggguguccgugaucacgccgggcaccaacaccagcaaccaggucgccgugcuguaccaggacgugaacugcaccgagguccccguggccauccacgccgaccagcugacgcccaccuggcggguguacuccaccggcagcaacgucuuccagacccgcgccgggugccucaucggcgcggagcacgugaacaacuccuacgagugcgacauccccaucggggccggcaucugcgccagcuaccagacgcagaccaacuccccgcggcgcgcccggagcguggcgucccagagcaucaucgccuacaccaugucccugggcgccgagaacagcgucgccuacuccaacaacagcaucgccauccccaccaacuucacgaucuccgugaccaccgagauccugcccgugagcaugaccaagacgagcgucgacugcaccauguacaucugcggggacuccaccgagugcagcaacuuccuccugcaguacggcuccuucugcacccagcugaaccgcgcgcucacggggaucgccguggagcaggacaagaacacccaggagguguucgcccaggucaagcagaucuacaagacgcccccgaucaaggacuucggcggguucaacuucagccagauccugcccgaccccuccaagcccagcaagcgguccuucaucgaggaccuccuguucaacaaggugacccuggccgacgccggcuucaucaagcaguacggcgacugccugggggacaucgcggcccgcgaccucaucugcgcccagaaguucaacggccugaccgugcugccgccccuccugaccgacgagaugaucgcccaguacaccagcgcccugcucgcggggaccaucacguccggcuggaccuucggggccggcgccgcccugcagauccccuucgcgaugcagauggccuaccgguucaacggcaucggggucacccagaacgugcuguacgagaaccagaagcucaucgccaaccaguucaacagcgccaucggcaagauccaggacucccugagcuccaccgccagcgcgcuggggaagcuccaggacguggucaaccagaacgcccaggcccugaacacgcuggugaagcagcucuccagcaacuucggcgccaucuccagcgugcugaacgacauccugucccgccucgacaaggucgaggccgaggugcagaucgaccggcugaucaccgggcgccugcagagccuccagaccuacgugacccagcagcugauccgggcggccgagauccgcgccagcgccaaccuggccgcgaccaagauguccgagugcguccucggccagagcaagcggguggacuucugcggcaagggguaccaccugauguccuucccccagagcgccccgcacggcguggucuuccugcacgugacguacguccccgcccaggagaagaacuucaccaccgcccccgcgaucugccacgacgggaaggcccacuucccccgcgagggcguguucguguccaacgggacccacugguucgucacgcagcggaacuucuacgagccgcagaucaucaccaccgacaacaccuucgugagcggcaacugcgacguggucaucggcaucgugaacaacacgguguacgacccccuccagcccgagcuggacuccuucaaggaggagcuggacaaguacuucaagaaccacaccagccccgacgucgaccucggggacaucuccggcaucaacgccagcguggugaacauccagaaggagaucgaccgccugaacgaggucgccaagaaccugaacgagucccucaucgaccugcaggagcuggggaaguacgagcaguacaucaaguggccgugguacaucuggcucggcuucaucgccggccugaucgcgaucgugauggugaccaucaugcugugcugcaugaccagcugcugcuccugccucaaggggugcugcagcugcggcuccugcugcaaguucgacgaggacgacagcgagcccguccugaagggggugaagcugcacuacacgugaggacuaguuauaagacugacuagcccgaugggccucccaacgggcccuccuccccuccuugcaccgagauuaauaaaaaaaaaaaaaaaaaaaaaaaaaaaaaaaaaaaaaaaaaaaaaaaaaaaaaaaaaaaaaaaaugcaucccccccccccccccccccccccccccccccaaaggcucuuuucagagccaccagaauu

SEQ ID NO: 12753 - RNA, 4039 nt, Artificial Sequence
  SARS-CoV-2/Australia/QLD02/2020__EPI_ISL_407896 spike protein mRNA gc (1-1273)
aggagaaagcuuaccauguucguguuccugguccuccugccccuggugagcucccagugcgugaaccucaccacccgcacgcagcugccgcccgccuacaccaacagcuucacccggggcgucuacuaccccgacaagguguuccgcuccagcgugcugcacuccacccaggaccucuuccugcccuucuucagcaacgucacgugguuccacgccauccacguguccgggaccaacggcaccaagcgguucgacaacccggugcugcccuucaacgacggggucuacuucgcgagcaccgagaaguccaacaucauccgcggcuggaucuucgggacgacccucgacagcaagacccagucccugcugaucgugaacaacgccaccaacguggucaucaaggugugcgaguuccaguucugcaacgaccccuuccucggcguguacuaccacaagaacaacaagagcuggauggaguccgaguuccgggucuacagcuccgccaacaacugcacguucgaguacgugagccagcccuuccugauggaccuggagggcaagcaggggaacuucaagaaccuccgcgaguucguguucaagaacaucgacggcuacuucaagaucuacuccaagcacaccccgaucaaccugguccgggaccugccccagggguucagcgcccucgagccccugguggaccugcccaucggcaucaacaucacccgcuuccagacccuccuggcccugcaccgguccuaccucacgccgggggacagcagcuccggcuggaccgcgggcgccgccgccuacuacgugggguaccugcagccccgcaccuuccugcucaaguacaacgagaacggcaccaucacggacgcggucgacugcgcccuggacccccugagcgagaccaagugcacccucaaguccuucaccguggagaaggggaucuaccagacgagcaacuuccgggugcagcccaccgaguccaucguccgcuucccgaacaucaccaaccugugccccuucggcgagguguucaacgccacccgguucgccagcgucuacgccuggaaccgcaagcggaucuccaacugcguggcggacuacagcgugcuguacaacuccgccagcuucuccacguucaagugcuacggcgucagccccaccaagcucaacgaccugugcuucaccaacguguacgccgacuccuucgugauccgcggggacgagguccggcagaucgcccccggccagaccgggaagaucgccgacuacaacuacaagcugccggacgacuucacgggcugcgugaucgcguggaacagcaacaaccucgacuccaaggucgggggcaacuacaacuaccuguaccgccuguuccgcaagagcaaccucaagcccuucgagcgggacaucuccaccgagaucuaccaggccggcagcacccccugcaacgggguggagggcuucaacugcuacuucccccugcaguccuacggguuccagccgaccaacggcgugggguaccagcccuaccggguggucgugcugagcuucgagcuccugcacgcccccgccacggugugcggccccaagaaguccaccaaccuggucaagaacaagugcgugaacuucaacuucaacggccucaccgggaccggcgugcugaccgagagcaacaagaaguuccugccguuccagcaguucgggcgcgacaucgccgacacgaccgacgcgguccgcgacccccagacccuggagauccucgacaucacccccugcagcuucggcgggguguccgugaucacgccgggcaccaacaccagcaaccaggucgccgugcuguaccaggacgugaacugcaccgagguccccguggccauccacgccgaccagcugacgcccaccuggcggguguacuccaccggcagcaacgucuuccagacccgcgccgggugccucaucggcgcggagcacgugaacaacuccuacgagugcgacauccccaucggggccggcaucugcgccagcuaccagacgcagaccaacuccccgcggcgcgcccggagcguggcgucccagagcaucaucgccuacaccaugucccugggcgccgagaacagcgucgccuacuccaacaacagcaucgccauccccaccaacuucacgaucuccgugaccaccgagauccugcccgugagcaugaccaagacgagcgucgacugcaccauguacaucugcggggacuccaccgagugcagcaaccuccugcugcaguacggcuccuucugcacccagcucaaccgcgcgcugacggggaucgccguggagcaggacaagaacacccaggagguguucgcccaggucaagcagaucuacaagacgcccccgaucaaggacuucggcggguucaacuucagccagauccugcccgaccccuccaagcccagcaagcgguccuucaucgaggaccuccuguucaacaaggugacccuggccgacgccggcuucaucaagcaguacggcgacugccucggggacaucgcggcccgcgaccugaucugcgcccagaaguucaacggccugaccgugcucccgccccugcugaccgacgagaugaucgcccaguacaccagcgcccuccuggcggggaccaucacguccggcuggaccuucggggccggcgccgcccugcagauccccuucgcgaugcagauggccuaccgguucaacggcaucggggucacccagaacgugcucuacgagaaccagaagcugaucgccaaccaguucaacagcgccaucggcaagauccaggacucccugagcuccaccgccagcgcgcucgggaagcugcaggacguggucaaccagaacgcccaggcccugaacacgcucgugaagcagcuguccagcaacuucggcgccaucuccagcgugcugaacgacauccucucccgccuggacaaggucgaggccgaggugcagaucgaccggcugaucaccgggcgccuccagagccugcagaccuacgugacccagcagcugauccgggcggccgagauccgcgccagcgccaaccucgccgcgaccaagauguccgagugcguccugggccagagcaagcggguggacuucugcggcaagggguaccaccugauguccuucccccagagcgccccgcacggcguggucuuccuccacgugacguacguccccgcccaggagaagaacuucaccaccgcccccgcgaucugccacgacgggaaggcccacuucccccgcgagggcguguucguguccaacgggacccacugguucgucacgcagcggaacuucuacgagccgcagaucaucaccaccgacaacaccuucgugagcggcaacugcgacguggucaucggcaucgugaacaacacgguguacgacccccugcagcuggagcucgacuccuucaaggaggagcuggacaaguacuucaagaaccacaccagccccgacgucgaccugggggacaucuccggcaucaacgccagcguggugaacauccagaaggagaucgaccgccucaacgaggucgccaagaaccugaacgagucccugaucgaccuccaggagcuggggaaguacgagcaguacaucaaguggcccugguacaucuggcugggcuucaucgccggccucaucgcgaucgugauggugaccaucaugcugugcugcaugaccagcugcugcuccugccugaaggggugcugcagcugcggcuccugcugcaaguucgacgaggacgacagcgagccgguccucaagggggugaagcugcacuacacgugaggacuaguuauaagacugacuagcccgaugggccucccaacgggcccuccuccccuccuugcaccgagauuaauaaaaaaaaaaaaaaaaaaaaaaaaaaaaaaaaaaaaaaaaaaaaaaaaaaaaaaaaaaaaaaaaugcaucccccccccccccccccccccccccccccccaaaggcucuuuucagagccaccagaauu

SEQ ID NO: 12754 - RNA, 4039 nt, Artificial Sequence
  SARS-CoV-2/India/1-31/2020__EPI_ISL_413523 spike protein mRNA gc (1-1273)
aggagaaagcuuaccauguucguguuccugguccuccugccccuggugagcucccagugcgugaaccucaccacccgcacgcagcugccgcccgccuacaccaacagcuucacccggggcgucuacuaccccgacaagguguuccgcuccagcgugcugcacuccacccaggaccucuuccugcccuucuucagcaacgucacgugguuccacgccauccacguguccgggaccaacggcaccaagcgguucgacaacccggugcugcccuucaacgacggggucuacuucgcgagcaccgagaaguccaacaucauccgcggcuggaucuucgggacgacccucgacagcaagacccagucccugcugaucgugaacaacgccaccaacguggucaucaaggugugcgaguuccaguucugcaacgaccccuuccucggcguguacuaccacaagaacaacaagagcuggauggaguccgaguuccgggucuacagcuccgccaacaacugcacguucgaguacgugagccagcccuuccugauggaccuggagggcaagcaggggaacuucaagaaccuccgcgaguucguguucaagaacaucgacggcuacuucaagaucuacuccaagcacaccccgaucaaccugguccgggaccugccccagggguucagcgcccucgagccccugguggaccugcccaucggcaucaacaucacccgcuuccagacccuccuggcccugcaccgguccuaccucacgccgggggacagcagcuccggcuggaccgcgggcgccgccgccuacuacgugggguaccugcagccccgcaccuuccugcucaaguacaacgagaacggcaccaucacggacgcggucgacugcgcccuggacccccugagcgagaccaagugcacccucaaguccuucaccguggagaaggggaucuaccagacgagcaacuuccgggugcagcccaccgaguccaucguccgcuucccgaacaucaccaaccugugccccuucggcgagguguucaacgccacccgguucgccagcgucuacgccuggaaccgcaagcggaucuccaacugcguggcggacuacagcgugcuguacaacuccgccagcuucuccacguucaagugcuacggcgucagccccaccaagcucaacgaccugugcuucaccaacguguacgccgacuccuucgugauccgcggggacgagguccggcagaucgcccccggccagaccgggaagaucgccgacuacaacuacaagcugccggacgacuucacgggcugcgugaucgcguggaacagcaacaaccucgacuccaaggucgggggcaacuacaacuaccuguaccgccuguuccgcaagagcaaccucaagcccuucgagcgggacaucuccaccgagaucuaccaggccggcagcacccccugcaacgggguggagggcuucaacugcuacuucccccugcaguccuacggguuccagccgaccaacggcgugggguaccagcccuaccggguggucgugcugagcuucgagcuccugcacgcccccgccacggugugcggccccaagaaguccaccaaccuggucaagaacaagugcgugaacuucaacuucaacggccucaccgggaccggcgugcugaccgagagcaacaagaaguuccugccguuccagcaguucgggcgcgacaucgccgacacgaccgacgcgguccgcgacccccagacccuggagauccucgacaucacccccugcagcuucggcgggguguccgugaucacgccgggcaccaacaccagcaaccaggucgccgugcuguaccaggacgugaacugcaccgagguccccguggccauccacgccgaccagcugacgcccaccuggcggguguacuccaccggcagcaacgucuuccagacccgcgccgggugccucaucggcgcggagcacgugaacaacuccuacgagugcgacauccccaucggggccggcaucugcgccagcuaccagacgcagaccaacuccccgcggcgcgcccggagcguggcgucccagagcaucaucgccuacaccaugucccugggcgccgagaacagcgucgccuacuccaacaacagcaucgccauccccaccaacuucacgaucuccgugaccaccgagauccugcccgugagcaugaccaagacgagcgucgacugcaccauguacaucugcggggacuccaccgagugcagcaaccuccugcugcaguacggcuccuucugcacccagcucaaccgcgcgcugacggggaucgccguggagcaggacaagaacacccaggagguguucgcccaggucaagcagaucuacaagacgcccccgaucaaggacuucggcggguucaacuucagccagauccugcccgaccccuccaagcccagcaagcgguccuucaucgaggaccuccuguucaacaaggugacccuggccgacgccggcuucaucaagcaguacggcgacugccucggggacaucgcggcccgcgaccugaucugcgcccagaaguucaacggccugaccgugcucccgccccugcugaccgacgagaugaucgcccaguacaccagcgcccuccuggcggggaccaucacguccggcuggaccuucggggccggcgccgcccugcagauccccuucgcgaugcagauggccuaccgguucaacggcaucggggucacccagaacgugcucuacgagaaccagaagcugaucgccaaccaguucaacagcgugaucggcaagauccaggacucccugagcuccaccgccagcgcccucgggaagcugcaggacgucgugaaccagaacgcgcaggcccugaacacgcucgugaagcagcuguccagcaacuucggcgccaucuccagcguccugaacgacauccucucccgccuggacaagguggaggccgaggugcagaucgaccggcugaucaccgggcgccuccagagccugcagaccuacgucacccagcagcugauccgggccgcggagauccgcgccagcgccaaccucgccgccaccaagauguccgagugcgugcugggccagagcaagcggguggacuucugcggcaagggguaccaccugauguccuucccccagagcgcgccgcacggcgucguguuccuccacgucacguacgugcccgcccaggagaagaacuucaccaccgcccccgccaucugccacgacgggaaggcgcacuucccccgcgagggcguguucgucuccaacgggacccacugguucgugacgcagcggaacuucuacgagccgcagaucaucaccaccgacaacaccuucgugagcggcaacugcgacgucgugaucggcaucgugaacaacacggucuacgacccccugcagcccgagcuggacuccuucaaggaggagcucgacaaguacuucaagaaccacaccagccccgacguggaccugggggacaucuccggcaucaacgccagcguggucaacauccagaaggagaucgaccgccugaacgagguggccaagaaccucaacgagucccugaucgaccugcaggagcucgggaaguacgagcaguacaucaaguggccgugguacaucuggcugggcuucaucgccggccugaucgccaucgugauggucaccaucaugcucugcugcaugaccagcugcugcuccugccugaaggggugcugcagcugcggcuccugcugcaaguucgacgaggacgacagcgagcccgugcugaagggggugaagcuccacuacacgugaggacuaguuauaagacugacuagcccgaugggccucccaacgggcccuccuccccuccuugcaccgagauuaauaaaaaaaaaaaaaaaaaaaaaaaaaaaaaaaaaaaaaaaaaaaaaaaaaaaaaaaaaaaaaaaaugcaucccccccccccccccccccccccccccccccaaaggcucuuuucagagccaccagaauu

SEQ ID NO: 12755 - RNA, 4039 nt, Artificial Sequence
  SARS-CoV-2/Guangdong/GD2020087-P0008/2020__EPI_ISL_413863 spike protein mRNA gc (1-1273)
aggagaaagcuuaccauguucguguuccugguccuccugccccuggugagcucccagugcgugaaccucaccacccgcacgcagcugccgcccgccuacaccaacagcuucacccggggcgucuacuaccccgacaagguguuccgcuccagcgugcugcacuccacccaggaccucuuccugcccuucuucagcaacgucacgugguuccacgccauccacguguccgggaccaacggcaccaagcgguucgacaacccggugcugcccuucaacgacggggucuacuucgcgagcaccgagaaguccaacaucauccgcggcuggaucuucgggacgacccucgacagcaagacccagucccugcugaucgugaacaacgccaccaacguggucaucaaggugugcgaguuccaguucugcaacgaccccuuccucggcguguacuaccacaagaacaacaagagcuggauggaguccgaguuccgggucuacagcuccgccaacaacugcacguucgaguacgugagccagcccuuccugauggaccuggagggcaagcaggggaacuucaagaaccuccgcgaguucguguucaagaacaucgacggcuacuucaagaucuacuccaagcacaccccgaucaaccugguccgggaccugccccagggguucagcgcccucgagccccugguggaccugcccaucggcaucaacaucacccgcuuccagacccuccuggcccugcaccgguccuaccucacgccgggggacagcagcuccggcuggaccgcgggcgccgccgccuacuacgugggguaccugcagccccgcaccuuccugcucaaguacaacgagaacggcaccaucacggacgcggucgacugcgcccuggacccccugagcgagaccaagugcacccucaaguccuucaccguggagaaggggaucuaccagacgagcaacuuccgggugcagcccaccgaguccaucguccgcuucccgaacaucaccaaccugugccccuucggcgagguguucaacgccacccgguucgccagcgucuacgccuggaaccgcaagcggaucuccaacugcguggcggacuacagcgugcuguacaacuccgccagcuucuccacguucaagugcuacggcgucagccccaccaagcucaacgaccugugcuucaccaacguguacgccgacuccuucgugauccgcggggacgagguccgggagaucgcccccggccagaccgggaagaucgccgacuacaacuacaagcugccggacgacuucacgggcugcgugaucgcguggaacagcaacaaccucgacuccaaggucgggggcaacuacaacuaccuguaccgccuguuccgcaagagcaaccucaagcccuucgagcgggacaucuccaccgagaucuaccaggccggcagcacccccugcaacgggguggagggcuucaacugcuacuucccccugcaguccuacggguuccagccgaccaacggcgugggguaccagcccuaccggguggucgugcugagcuucgagcuccugcacgcccccgccacggugugcggccccaagaaguccaccaaccuggucaagaacaagugcgugaacuucaacuucaacggccucaccgggaccggcgugcugaccgagagcaacaagaaguuccugccguuccagcaguucgggcgcgacaucgccgacacgaccgacgcgguccgcgacccccagacccuggagauccucgacaucacccccugcagcuucggcgggguguccgugaucacgccgggcaccaacaccagcaaccaggucgccgugcuguaccaggacgugaacugcaccgagguccccguggccauccacgccgaccagcugacgcccaccuggcggguguacuccaccggcagcaacgucuuccagacccgcgccgggugccucaucggcgcggagcacgugaacaacuccuacgagugcgacauccccaucggggccggcaucugcgccagcuaccagacgcagaccaacuccccgcggcgcgcccggagcguggcgucccagagcaucaucgccuacaccaugucccugggcgccgagaacagcgucgccuacuccaacaacagcaucgccauccccaccaacuucacgaucuccgugaccaccgagauccugcccgugagcaugaccaagacgagcgucgacugcaccauguacaucugcggggacuccaccgagugcagcaaccuccugcugcaguacggcuccuucugcacccagcucaaccgcgcgcugacggggaucgccguggagcaggacaagaacacccaggagguguucgcccaggucaagcagaucuacaagacgcccccgaucaaggacuucggcggguucaacuucagccagauccugcccgaccccuccaagcccagcaagcgguccuucaucgaggaccuccuguucaacaaggugacccuggccgacgccggcuucaucaagcaguacggcgacugccucggggacaucgcggcccgcgaccugaucugcgcccagaaguucaacggccugaccgugcucccgccccugcugaccgacgagaugaucgcccaguacaccagcgcccuccuggcggggaccaucacguccggcuggaccuucggggccggcgccgcccugcagauccccuucgcgaugcagauggccuaccgguucaacggcaucggggucacccagaacgugcucuacgagaaccagaagcugaucgccaaccaguucaacagcgccaucggcaagauccaggacucccugagcuccaccgccagcgcgcucgggaagcugcaggacguggucaaccagaacgcccaggcccugaacacgcucgugaagcagcuguccagcaacuucggcgccaucuccagcgugcugaacgacauccucucccgccuggacaaggucgaggccgaggugcagaucgaccggcugaucaccgggcgccuccagagccugcagaccuacgugacccagcagcugauccgggcggccgagauccgcgccagcgccaaccucgccgcgaccaagauguccgagugcguccugggccagagcaagcggguggacuucugcggcaagggguaccaccugauguccuucccccagagcgccccgcacggcguggucuuccuccacgugacguacguccccgcccaggagaagaacuucaccaccgcccccgcgaucugccacgacgggaaggcccacuucccccgcgagggcguguucguguccaacgggacccacugguucgucacgcagcggaacuucuacgagccgcagaucaucaccaccgacaacaccuucgugagcggcaacugcgacguggucaucggcaucgugaacaacacgguguacgacccccugcagcccgagcuggacuccuucaaggaggagcucgacaaguacuucaagaaccacaccagccccgacgucgaccugggggacaucuccggcaucaacgccagcguggugaacauccagaaggagaucgaccgccugaacgaggucgccaagaaccucaacgagucccugaucgaccugcaggagcucgggaaguacgagcaguacaucaaguggccgugguacaucuggcugggcuucaucgccggccugaucgcgaucgugauggugaccaucaugcucugcugcaugaccagcugcugcuccugccugaaggggugcugcagcugcggcuccugcugcaaguucgacgaggacgacagcgagcccguccugaagggggugaagcuccacuacacgugaggacuaguuauaagacugacuagcccgaugggccucccaacgggcccuccuccccuccuugcaccgagauuaauaaaaaaaaaaaaaaaaaaaaaaaaaaaaaaaaaaaaaaaaaaaaaaaaaaaaaaaaaaaaaaaaugcaucccccccccccccccccccccccccccccccaaaggcucuuuucagagccaccagaauu

SEQ ID NO: 12756 - RNA, 4039 nt, Artificial Sequence
  SARS-CoV-2/Sweden/01/2020__EPI_ISL_411951 spike protein mRNA gc (1-1273)
aggagaaagcuuaccauguucguguuccugguccuccugccccuggugagcucccagugcgugaaccucaccacccgcacgcagcugccgcccgccuacaccaacagcuucacccggggcgucuacuaccccgacaagguguuccgcuccagcgugcugcacuccacccaggaccucuuccugcccuucuucagcaacgucacgugguuccacgccauccacguguccgggaccaacggcaccaagcgguucgacaacccggugcugcccuucaacgacggggucuacuucgcgagcaccgagaaguccaacaucauccgcggcuggaucuucgggacgacccucgacagcaagacccagucccugcugaucgugaacaacgccaccaacguggucaucaaggugugcgaguuccaguucugcaacgaccccuuccucggcguguacuaccacaagaacaacaagagcuggauggaguccgaguuccgggucuacagcuccgccaacaacugcacguucgaguacgugagccagcccuuccugauggaccuggagggcaagcaggggaacuucaagaaccuccgcgaguucguguucaagaacaucgacggcuacuucaagaucuacuccaagcacaccccgaucaaccugguccgggaccugccccagggguucagcgcccucgagccccugguggaccugcccaucggcaucaacaucacccgcuuccagacccuccuggcccugcaccgguccuaccucacgccgggggacagcagcuccggcuggaccgcgggcgccgccgccuacuacgugggguaccugcagccccgcaccuuccugcucaaguacaacgagaacggcaccaucacggacgcggucgacugcgcccuggacccccugagcgagaccaagugcacccucaaguccuucaccguggagaaggggaucuaccagacgagcaacuuccgggugcagcccaccgaguccaucguccgcuucccgaacaucaccaaccugugccccuucggcgagguguucaacgccacccgguucgccagcgucuacgccuggaaccgcaagcggaucuccaacugcguggcggacuacagcgugcuguacaacuccgccagcuucuccacguucaagugcuacggcgucagccccaccaagcucaacgaccugugcuucaccaacguguacgccgacuccuucgugauccgcggggacgagguccggcagaucgcccccggccagaccgggaagaucgccgacuacaacuacaagcugccggacgacuucacgggcugcgugaucgcguggaacagcaacaaccucgacuccaaggucgggggcaacuacaacuaccuguaccgccuguuccgcaagagcaaccucaagcccuucgagcgggacaucuccaccgagaucuaccaggccggcagcacccccugcaacgggguggagggcuucaacugcuacuucccccugcaguccuacggguuccagccgaccaacggcgugggguaccagcccuaccggguggucgugcugagcuucgagcuccugcacgcccccgccacggugugcggccccaagaaguccaccaaccuggucaagaacaagugcgugaacuucaacuucaacggccucaccgggaccggcgugcugaccgagagcaacaagaaguuccugccguuccagcaguucgggcgcgacaucgccgacacgaccgacgcgguccgcgacccccagacccuggagauccucgacaucacccccugcagcuucggcgggguguccgugaucacgccgggcaccaacaccagcaaccaggucgccgugcuguaccaggacgugaacugcaccgagguccccguggccauccacgccgaccagcugacgcccaccuggcggguguacuccaccggcagcaacgucuuccagacccgcgccgggugccucaucggcgcggagcacgugaacaacuccuacgagugcgacauccccaucggggccggcaucugcgccagcuaccagacgcagaccaacuccccgcggcgcgcccggagcguggcgucccagagcaucaucgccuacaccaugucccugggcgccgagaacagcgucgccuacuccaacaacagcaucgccauccccaccaacuucacgaucuccgugaccaccgagauccugcccgugagcaugaccaagacgagcgucgacugcaccauguacaucugcggggacuccaccgagugcagcaaccuccugcugcaguacggcuccuucugcacccagcucaaccgcgcgcugacggggaucgccguggagcaggacaagaacacccaggagguguucgcccaggucaagcagaucuacaagacgcccccgaucaaggacugcggcggguucaacuucagccagauccugcccgaccccuccaagcccagcaagcgguccuucaucgaggaccuccuguucaacaaggugacccuggccgacgccggcuucaucaagcaguacggcgacugccucggggacaucgcggcccgcgaccugaucugcgcccagaaguucaacggccugaccgugcucccgccccugcugaccgacgagaugaucgcccaguacaccagcgcccuccuggcggggaccaucacguccggcuggaccuucggggccggcgccgcccugcagauccccuucgcgaugcagauggccuaccgguucaacggcaucggggucacccagaacgugcucuacgagaaccagaagcugaucgccaaccaguucaacagcgccaucggcaagauccaggacucccugagcuccaccgccagcgcgcucgggaagcugcaggacguggucaaccagaacgcccaggcccugaacacgcucgugaagcagcuguccagcaacuucggcgccaucuccagcgugcugaacgacauccucucccgccuggacaaggucgaggccgaggugcagaucgaccggcugaucaccgggcgccuccagagccugcagaccuacgugacccagcagcugauccgggcggccgagauccgcgccagcgccaaccucgccgcgaccaagauguccgagugcguccugggccagagcaagcggguggacuucugcggcaagggguaccaccugauguccuucccccagagcgccccgcacggcguggucuuccuccacgugacguacguccccgcccaggagaagaacuucaccaccgcccccgcgaucugccacgacgggaaggcccacuucccccgcgagggcguguucguguccaacgggacccacugguucgucacgcagcggaacuucuacgagccgcagaucaucaccaccgacaacaccuucgugagcggcaacugcgacguggucaucggcaucgugaacaacacgguguacgacccccugcagcccgagcuggacuccuucaaggaggagcucgacaaguacuucaagaaccacaccagccccgacgucgaccugggggacaucuccggcaucaacgccagcguggugaacauccagaaggagaucgaccgccugaacgaggucgccaagaaccucaacgagucccugaucgaccugcaggagcucgggaaguacgagcaguacaucaaguggccgugguacaucuggcugggcuucaucgccggccugaucgcgaucgugauggugaccaucaugcucugcugcaugaccagcugcugcuccugccugaaggggugcugcagcugcggcuccugcugcaaguucgacgaggacgacagcgagcccguccugaagggggugaagcuccacuacacgugaggacuaguuauaagacugacuagcccgaugggccucccaacgggcccuccuccccuccuugcaccgagauuaauaaaaaaaaaaaaaaaaaaaaaaaaaaaaaaaaaaaaaaaaaaaaaaaaaaaaaaaaaaaaaaaaugcaucccccccccccccccccccccccccccccccaaaggcucuuuucagagccaccagaauu

SEQ ID NO: 12757 - RNA, 4039 nt, Artificial Sequence
  SARS-CoV-2/Tianmen/HBCDC-HB-07/2020__EPI_ISL_412983 spike protein mRNA gc (1-1273)
aggagaaagcuuaccauguucguguuccugguccuccugccccuggugagcucccagugcgugaaccucaccacccgcacgcagcugccgcccgccuacaccaacagcuucacccggggcgucuacuaccccgacaagguguuccgcuccagcgugcugcacuccacccaggaccucuuccugcccuucuucagcaacgucacgugguuccacgccauccacguguccgggaccaacggcaccaagcgguucgacaacccggugcugcccuucaacgacggggucuacuucgcgagcaccgagaaguccaacaucauccgcggcuggaucuucgggacgacccucgacagcaagacccagucccugcugaucgugaacaacgccaccaacguggucaucaaggugugcgaguuccaguucugcaacgaccccuuccucggcguguacuaccacaagaacaacaagagcuggauggaguccgaguuccgggucuacagcuccgccaacaacugcacguucgaguacgugagccagcccuuccugauggaccuggagggcaagcaggggaacuucaagaaccuccgcgaguucguguucaagaacaucgacggcuacuucaagaucuacuccaagcacaccccgaucaaccugguccgggaccugccccagggguucagcgcccucgagccccugguggaccugcccaucggcaucaacaucacccgcuuccagacccuccuggcccugcaccgguccuaccucacgccgggggacagcagcuccggcuggaccgcgggcgccgccgccuacuacgugggguaccugcagccccgcaccuuccugcucaaguacaacgagaacggcaccaucacggacgcggucgacugcgcccuggacccccugagcgagaccaagugcacccucaaguccuucaccguggagaaggggaucuaccagacgagcaacuuccgggugcagcccaccgaguccaucguccgcuucccgaacaucaccaaccugugccccuucggcgagguguucaacgccacccgguucgccagcgucuacgccuggaaccgcaagcggaucuccaacugcguggcggacuacagcgugcuguacaacuccgccagcuucuccacguucaagugcuacggcgucagccccaccaagcucaacgaccugugcuucaccaacguguacgccgacuccuucgugauccgcggggacgagguccggcagaucgcccccggccagaccgggaagaucgccgacuacaacuacaagcugccggacgacuucacgggcugcgugaucgcguggaacagcaacaaccucgacuccaaggucgggggcaacuacaacuaccuguaccgccuguuccgcaagagcaaccucaagcccuucgagcgggacaucuccaccgagaucuaccaggccggcagcacccccugcaacgggguggagggcuucaacugcuacuucccccugcaguccuacggguuccagccgaccaacggcgugggguaccagcccuaccggguggucgugcugagcuucgagcuccugcacgcccccgccacggugugcggccccaagaaguccaccaaccuggucaagaacaagugcgugaacuucaacuucaacggccucaccgggaccggcgugcugaccgagagcaacaagaaguuccugccguuccagcaguucgggcgcgacaucgccgacacgaccgacgcgguccgcgacccccagacccuggagauccucgacaucacccccugcagcuucggcgggguguccgugaucacgccgggcaccaacaccagcaaccaggucgccgugcuguaccaggaccugaacugcaccgaggugcccgucgccauccacgccgaccagcucacgcccaccuggcggguguacuccaccggcagcaacguguuccagacccgcgccgggugccugaucggcgcggagcacgucaacaacuccuacgagugcgacauccccaucggggccggcaucugcgccagcuaccagacgcagaccaacuccccgcggcgcgcccggagcguggcgucccagagcaucaucgccuacaccaugucccugggcgccgagaacagcguggccuacuccaacaacagcaucgccauccccaccaacuucacgaucuccgucaccaccgagauccuccccgugagcaugaccaagacgagcguggacugcaccauguacaucugcggggacuccaccgagugcagcaaccugcugcuccaguacggcuccuucugcacccagcugaaccgcgcgcugacggggaucgccgucgagcaggacaagaacacccaggagguguucgcccaggugaagcagaucuacaagacgcccccgaucaaggacuucggcggguucaacuucagccagauccuccccgaccccuccaagcccagcaagcgguccuucaucgaggaccugcuguucaacaaggucacccucgccgacgccggcuucaucaagcaguacggcgacugccugggggacaucgcggcccgcgaccugaucugcgcccagaaguucaacggccucaccgugcugccgccccugcucaccgacgagaugaucgcccaguacaccagcgcccugcuggcggggaccaucacguccggcuggaccuucggggccggcgccgcccuccagauccccuucgcgaugcagauggccuaccgguucaacggcaucggggugacccagaacguccuguacgagaaccagaagcugaucgccaaccaguucaacagcgccaucggcaagauccaggacucccucagcuccaccgccagcgcgcuggggaagcugcaggacguggugaaccagaacgcccaggcccucaacacgcuggucaagcagcuguccagcaacuucggcgccaucuccagcgugcucaacgacauccugucccgccuggacaagguggaggccgagguccagaucgaccggcucaucaccgggcgccugcagagccugcagaccuacgugacccagcagcucauccgggcggccgagauccgcgccagcgccaaccuggccgcgaccaagauguccgagugcgugcugggccagagcaagcgggucgacuucugcggcaagggguaccaccucauguccuucccccagagcgccccgcacggcgugguguuccugcacgucacguacgugcccgcccaggagaagaacuucaccaccgcccccgcgaucugccacgacgggaaggcccacuucccccgcgagggcgucuucguguccaacgggacccacugguucgugacgcagcggaacuucuacgagccgcagaucaucaccaccgacaacaccuucgucagcggcaacugcgacguggugaucggcaucgucaacaacacgguguacgacccccugcagcccgagcucgacuccuucaaggaggagcuggacaaguacuucaagaaccacaccagccccgacguggaccugggggacaucuccggcaucaacgccagcgucgugaacauccagaaggagaucgaccgccucaacgagguggccaagaaccugaacgagucccugaucgaccuccaggagcuggggaaguacgagcaguacaucaaguggccgugguacaucuggcugggcuucaucgccggccucaucgcgaucgucauggugaccaucaugcugugcugcaugaccagcugcugcuccugccugaaggggugcugcagcugcggcuccugcugcaaguucgacgaggacgacagcgagcccgugcucaagggggucaagcugcacuacacgugaggacuaguuauaagacugacuagcccgaugggccucccaacgggcccuccuccccuccuugcaccgagauuaauaaaaaaaaaaaaaaaaaaaaaaaaaaaaaaaaaaaaaaaaaaaaaaaaaaaaaaaaaaaaaaaaugcaucccccccccccccccccccccccccccccccaaaggcucuuuucagagccaccagaauu

SEQ ID NO: 12758 - RNA, 4039 nt, Artificial Sequence
  SARS-CoV-2/Hong Kong/case42_VM20002493/2020__EPI_ISL_414527 spike protein mRNA gc (1-1273)
aggagaaagcuuaccauguucguguuccugguccuccugccccuggugagcucccagugcgugaaccucaccacccgcacgcagcugccgcccgccuacaccaacagcuucacccggggcgucuacuaccccgacaagguguuccgcuccagcgugcugcacuccacccaggaccucuuccugcccuucuucagcaacgucacgugguuccacgccauccacguguccgggaccaacggcaccaagcgguucgacaacccggugcugcccuucaacgacggggucuacuucgcgagcaccgagaaguccaacaucauccgcggcuggaucuucgggacgacccucgacagcaagacccagucccugcugaucgugaacaacgccaccaacguggucaucaaggugugcgaguuccaguucugcaacgaccccuuccucggcguguacuaccacaagaacaacaagagcuggauggaguccgaguuccgggucuacagcuccgccaacaacugcacguucgaguacgugagccagcccuuccugauggaccuggagggcaagcaggggaacuucaagaaccuccgcgaguucguguucaagaacaucgacggcuacuucaagaucuacuccaagcacaccccgaucaaccugguccgggaccugccccagggguucagcgcccucgagccccugguggaccugcccaucggcaucaacaucacccgcuuccagacccuccuggcccugcaccgguccuaccucacgccgggggacagcagcuccggcuggaccgcgggcgccgccgccuacuacgugggguaccugcagccccgcaccuuccugcucaaguacaacgagaacggcaccaucacggacgcggucgacugcgcccuggacccccugagcgagaccaagugcacccucaaguccuucaccguggagaaggggaucuaccagacgagcaacuuccgggugcagcccaccgaguccaucguccgcuucccgaacaucaccaaccugugccccuucggcgagguguucaacgccacccgguucgccagcgucuacgccuggaaccgcaagcggaucuccaacugcguggcggacuacagcgugcuguacaacuccgccagcuucuccacguucaagugcuacggcgucagccccaccaagcucaacgaccugugcuucaccaacguguacgccgacuccuucgugauccgcggggacgagguccggcagaucgcccccggccagaccgggaagaucgccgacuacaacuacaagcugccggacgacuucacgggcugcgugaucgcguggaacagcaacaaccucgacuccaaggucgggggcaacuacaacuaccuguaccgccuguuccgcaagagcaaccucaagcccuucgagcgggacaucuccaccgagaucuaccaggccggcagcacccccugcaacgggguggagggcuucaacugcuacuucccccugcaguccuacggguuccagccgaccaacggcgugggguaccagcccuaccggguggucgugcugagcuucgagcuccugcacgcccccgccacggugugcggccccaagaaguccaccaaccuggucaagaacaagugcgugaacuucaacuucaacggccucaccgggaccggcgugcugaccgagagcaacaagaaguuccugccguuccagcaguucgggcgcgacaucgccgacacgaccgacgcgguccgcgacccccagacccuggagauccucgacaucacccccugcagcuucggcgggguguccgugaucacgccgggcaccaacaccagcaaccaggucgccgugcuguaccaggacgugaacugcaccgagguccccguggccauccacgccgaccagcugacgcccaccuggcggguguacuccaccggcagcaacgucuuccagacccgcgccgggugccucaucggcgcggagcacgugaacaacuccuacgagugcgacauccccaucggggccggcaucugcgccagcuaccagacgcagaccaacuccccgcggcgcgcccggagcguggcgucccagagcaucaucgccuacaccaugucccugggcgccgagaacagcgucgccuacuccaacaacagcaucgccauccccaccaacuucgcgaucuccgugacgaccgagauccugcccgugagcaugaccaagaccagcgucgacugcacgauguacaucugcggggacuccaccgagugcagcaaccuccugcugcaguacggcuccuucugcacccagcucaaccgcgcccugaccgggaucgccguggagcaggacaagaacacgcaggagguguucgcccaggucaagcagaucuacaagacgcccccgaucaaggacuucggcggguucaacuucagccagauccugcccgaccccuccaagcccagcaagcgguccuucaucgaggaccuccuguucaacaaggugacccuggccgacgcgggcuucaucaagcaguacggcgacugccucggggacaucgccgcccgcgaccugaucugcgcccagaaguucaacggccugaccgugcucccgccccugcugaccgacgagaugaucgcccaguacaccagcgcgcuccuggccgggaccaucaccuccggcuggacguucggggccggcgccgcgcugcagauccccuucgccaugcagauggccuaccgguucaacggcaucggggucacccagaacgugcucuacgagaaccagaagcugaucgccaaccaguucaacagcgccaucggcaagauccaggacucccugagcuccaccgcgagcgcccucgggaagcugcaggacguggucaaccagaacgcccaggcccugaacacccucgugaagcagcuguccagcaacuucggcgccaucuccagcgugcugaacgacauccucucccgccuggacaaggucgaggcggaggugcagaucgaccggcugaucacggggcgccuccagagccugcagaccuacgugacccagcagcugauccgggccgccgagauccgcgccagcgccaaccucgcggccaccaagauguccgagugcguccugggccagagcaagcggguggacuucugcggcaagggguaccaccugauguccuucccccagagcgccccgcacggcguggucuuccuccacgugaccuacguccccgcccaggagaagaacuucacgaccgcgcccgccaucugccacgacgggaaggcccacuucccccgcgagggcguguucguguccaacgggacccacugguucgucacccagcggaacuucuacgagccgcagaucaucacgaccgacaacaccuucgugagcggcaacugcgacguggucaucggcaucgugaacaacaccguguacgacccccugcagcccgagcuggacuccuucaaggaggagcucgacaaguacuucaagaaccacacgagccccgacgucgaccugggggacaucuccggcaucaacgccagcguggugaacauccagaaggagaucgaccgccugaacgaggucgccaagaaccucaacgagucccugaucgaccugcaggagcucgggaaguacgagcaguacaucaaguggccgugguacaucuggcugggcuucaucgcgggccugaucgccaucgugauggugaccaucaugcucugcugcaugaccagcugcugcuccugccugaaggggugcugcagcugcggcuccugcugcaaguucgacgaggacgacagcgagcccguccugaagggggugaagcuccacuacaccugaggacuaguuauaagacugacuagcccgaugggccucccaacgggcccuccuccccuccuugcaccgagauuaauaaaaaaaaaaaaaaaaaaaaaaaaaaaaaaaaaaaaaaaaaaaaaaaaaaaaaaaaaaaaaaaaugcaucccccccccccccccccccccccccccccccaaaggcucuuuucagagccaccagaauu

SEQ ID NO: 12759 - RNA, 4039 nt, Artificial Sequence
  SARS-CoV-2/USA/CruiseA-23/2020__EPI_ISL_414482 spike protein mRNA gc (1-1273)
aggagaaagcuuaccauguucguguuccugguccuccugccccuggugagcucccagugcgugaaccucaccacccgcacgcagcugccgcccgccuacaccaacagcuucacccggggcgucuacuaccccgacaagguguuccgcuccagcgugcugcacuccacccaggaccucuuccugcccuucuucagcaacgucacgugguuccacgccauccacguguccgggaccaacggcaccaagcgguucgacaacccggugcugcccuucaacgacggggucuacuucgcgagcaccgagaaguccaacaucauccgcggcuggaucuucgggacgacccucgacagcaagacccagucccugcugaucgugaacaacgccaccaacguggucaucaaggugugcgaguuccaguucugcaacgaccccuuccucggcguguacuaccacaagaacaacaagagcuggauggaguccgaguuccgggucuacagcuccgccaacaacugcacguucgaguacgugagccagcccuuccugauggaccuggaggugaagcagggcaacuucaagaaccuccgcgaguucgucuucaagaacaucgacggguacuucaagaucuacuccaagcacaccccgaucaaccuggugcgggaccugccccagggcuucagcgcccucgagccccugguggaccugcccaucgggaucaacaucacccgcuuccagacccuccuggcccugcaccgguccuaccucacgccgggcgacagcagcuccggguggaccgcgggcgccgccgccuacuacgucggcuaccugcagccccgcaccuuccugcucaaguacaacgagaacgggaccaucacggacgcgguggacugcgcccuggacccccugagcgagaccaagugcacccucaaguccuucaccguggagaagggcaucuaccagacgagcaacuuccggguccagcccaccgaguccaucgugcgcuucccgaacaucaccaaccugugccccuucggggaggucuucaacgccacccgguucgccagcguguacgccuggaaccgcaagcggaucuccaacugcguggcggacuacagcguccuguacaacuccgccagcuucuccacguucaagugcuacggcgugagccccaccaagcucaacgaccugugcuucaccaacguguacgccgacuccuucgucauccgcggcgacgaggugcggcagaucgcccccgggcagaccggcaagaucgccgacuacaacuacaagcugccggacgacuucacggggugcgugaucgcguggaacagcaacaaccucgacuccaaggucggcgggaacuacaacuaccuguaccgccuguuccgcaagagcaaccucaagcccuucgagcgggacaucuccaccgagaucuaccaggccggcagcacccccugcaacggcguggagggguucaacugcuacuucccccugcaguccuacggcuuccagccgaccaacggggugggcuaccagcccuaccgggucguggugcugagcuucgagcuccugcacgcccccgccacggucugcgggcccaagaaguccaccaaccuggugaagaacaagugcgugaacuucaacuucaacggccucaccggcaccgggguccugaccgagagcaacaagaaguuccugccguuccagcaguucggccgcgacaucgccgacacgaccgacgcggugcgcgacccccagacccuggagauccucgacaucacccccugcagcuucgggggcguguccgucaucacgccggggaccaacaccagcaaccagguggccgugcuguaccaggacgucaacugcaccgaggugcccguggccauccacgccgaccagcugacgcccaccuggcgggucuacuccaccggcagcaacguguuccagacccgcgccggcugccucaucggggcggagcacgugaacaacuccuacgagugcgacauccccaucggcgccgggaucugcgccagcuaccagacgcagaccaacuccccgcggcgcgcccggagcgucgcgucccagagcaucaucgccuacaccaugucccugggcgccgagaacagcguggccuacuccaacaacagcaucgccauccccaccaacuucacgaucuccgugaccaccgagauccugcccgucagcaugaccaagacgagcguggacugcaccauguacaucugcggcgacuccaccgagugcagcaaccuccugcugcaguacggguccuucugcacccagcucaaccgcgcgcugacgggcaucgccguggagcaggacaagaacacccaggaggucuucgcccaggugaagcagaucuacaagacgcccccgaucaaggacuucgggggcuucaacuucagccagauccugcccgaccccuccaagcccagcaagcgguccuucaucgaggaccuccuguucaacaaggugacccuggccgacgccggguucaucaagcaguacggcgacugccucggcgacaucgcggcccgcgaccugaucugcgcccagaaguucaacgggcugaccguccucccgccccugcugaccgacgagaugaucgcccaguacaccagcgcccuccuggcgggcaccaucacguccggguggaccuucggcgccggggccgcccugcagauccccuucgcgaugcagauggccuaccgguucaacggcaucggcgugacccagaacgugcucuacgagaaccagaagcugaucgccaaccaguucaacagcgccaucgggaagauccaggacucccugagcuccaccgccagcgcgcucggcaagcugcaggacgucgugaaccagaacgcccaggcccugaacacgcucgugaagcagcuguccagcaacuucggggccaucuccagcguccugaacgacauccucucccgccuggacaagguggaggccgaggugcagaucgaccggcugaucaccggccgccuccagagccugcagaccuacgucacccagcagcugauccgggcggccgagauccgcgccagcgccaaccucgccgcgaccaagauguccgagugcgugcuggggcagagcaagcggguggacuucugcggcaagggcuaccaccugauguccuucccccagagcgccccgcacggggucguguuccuccacgucacguacgugcccgcccaggagaagaacuucaccaccgcccccgcgaucugccacgacggcaaggcccacuucccccgcgaggggguguucgucuccaacggcacccacugguucgugacgcagcggaacuucuacgagccgcagaucaucaccaccgacaacaccuucgugagcgggaacugcgacgucgugaucggcaucgugaacaacacggucuacgacccccugcagcccgagcuggacuccuucaaggaggagcucgacaaguacuucaagaaccacaccagccccgacguggaccugggcgacaucuccgggaucaacgccagcguggucaacauccagaaggagaucgaccgccugaacgagguggccaagaaccucaacgagucccugaucgaccugcaggagcucggcaaguacgagcaguacaucaaguggccgugguacaucuggcugggguucaucgccggccugaucgcgaucgugauggucaccaucaugcucugcugcaugaccagcugcugcuccugccugaagggcugcugcagcugcggguccugcugcaaguucgacgaggacgacagcgagcccgugcugaagggcgugaagcuccacuacacgugaggacuaguuauaagacugacuagcccgaugggccucccaacgggcccuccuccccuccuugcaccgagauuaauaaaaaaaaaaaaaaaaaaaaaaaaaaaaaaaaaaaaaaaaaaaaaaaaaaaaaaaaaaaaaaaaugcaucccccccccccccccccccccccccccccccaaaggcucuuuucagagccaccagaauu

SEQ ID NO: 12760 - RNA, 4039 nt, Artificial Sequence
  SARS-CoV-2/Hong Kong/case85_VM20002868/2020__EPI_ISL_414519 spike protein mRNA gc (1-1273)
aggagaaagcuuaccauguucguguuccugguccucgugccccuggugagcucccagugcgucaaccugaccacccgcacgcagcucccgcccgccuacaccaacagcuucacccggggcguguacuaccccgacaagguguuccgcuccagcguccugcacuccacccaggaccuguuccuccccuucuucagcaacgugacgugguuccacgccauccacguguccgggaccaacggcaccaagcgguucgacaacccgguccugcccuucaacgacgggguguacuucgcgagcaccgagaaguccaacaucauccgcggcuggaucuucgggacgacccuggacagcaagacccagucccuccugaucgugaacaacgccaccaacgucgugaucaaggugugcgaguuccaguucugcaacgaccccuuccugggcgucuacuaccacaagaacaacaagagcuggauggaguccgaguuccggguguacagcuccgccaacaacugcacguucgaguacgugagccagcccuuccucauggaccuggagggcaagcaggggaacuucaagaaccugcgcgaguucgucuucaagaacaucgacggcuacuucaagaucuacuccaagcacaccccgaucaaccucgugcgggaccugccccagggguucagcgcccuggagccccucguggaccugcccaucggcaucaacaucacccgcuuccagacccugcucgcccugcaccgguccuaccugacgccgggggacagcagcuccggcuggaccgcgggcgccgccgccuacuacgucggguaccuccagccccgcaccuuccugcugaaguacaacgagaacggcaccaucacggacgcgguggacugcgcccucgacccccugagcgagaccaagugcacccugaaguccuucaccguggagaaggggaucuaccagacgagcaacuuccggguccagcccaccgaguccaucgugcgcuucccgaacaucaccaaccucugccccuucggcgaggucuucaacgccacccgguucgccagcguguacgccuggaaccgcaagcggaucuccaacugcguggcggacuacagcguccuguacaacuccgccagcuucuccacguucaagugcuacggcgugagccccaccaagcugaacgaccucugcuucaccaacguguacgccgacuccuucgucauccgcggggacgaggugcggcagaucgcccccggccagaccgggaagaucgccgacuacaacuacaagcugccggacgacuucacgggcugcgugaucgcguggaacagcaacaaccuggacuccaaggucgggggcaacuacaacuaccucuaccgccuguuccgcaagagcaaccugaagcccuucgagcgggacaucuccaccgagaucuaccaggccggcagcacccccugcaacgggguggagggcuucaacugcuacuucccccuccaguccuacggguuccagccgaccaacggcgugggguaccagcccuaccgggucguggugcugagcuucgagcugcuccacgcccccgccacggucugcggccccaagaaguccaccaaccuggugaagaacaagugcgugaacuucaacuucaacggccugaccgggaccggcguccucaccgagagcaacaagaaguuccugccguuccagcaguucgggcgcgacaucgccgacacgaccgacgcggugcgcgacccccagacccuggagauccuggacaucacccccugcagcuucggcgggguguccgucaucacgccgggcaccaacaccagcaaccagguggccgugcucuaccaggacgucaacugcaccgaggugcccguggccauccacgccgaccagcugacgcccaccuggcgggucuacuccaccggcagcaacguguuccagacccgcgccgggugccugaucggcgcggagcacgugaacaacuccuacgagugcgacauccccaucggggccggcaucugcgccagcuaccagacgcagaccaacuccccgcggcgcgcccggagcgucgcgucccagagcaucaucgccuacaccaugucccucggcgccgagaacagcguggccuacuccaacaacagcaucgccauccccaccaacuucacgaucuccgugaccaccgagauccugcccgucagcaugaccaagacgagcguggacugcaccauguacaucugcggggacuccaccgagugcagcaaccugcuccugcaguacggcuccuucugcacccagcugaaccgcgcgcucacggggaucgccguggagcaggacaagaacacccaggaggucuucgcccaggugaagcagaucuacaagacgcccccgaucaaggacuucggcggguucaacuucagccagauccugcccgaccccuccaagcccagcaagcgguccuucaucgaggaccuccuguucaacaaggugacccuggccgacgccggcuucaucaagcaguacggcgacugccugggggacaucgcggcccgcgaccucaucugcgcccagaaguucaacggccugaccguccugccgccccuccugaccgacgagaugaucgcccaguacaccagcgcccugcucgcggggaccaucacguccggcuggaccuucggggccggcgccgcccugcagauccccuucgcgaugcagauggccuaccgguucaacggcaucggggugacccagaacgugcuguacgagaaccagaagcucaucgccaaccaguucaacagcgccaucggcaagauccaggacucccugagcuccaccgccagcgcgcuggggaagcuccaggacgucgugaaccagaacgcccaggcccugaacacgcuggugaagcagcucuccagcaacuucggcgccaucuccagcguccugaacgacauccugucccgccucgacaagguggaggccgaggugcagaucgaccggcugaucaccgggcgccugcagagccuccagaccuacgucacccagcagcugauccgggcggccgagauccgcgccagcgccaaccuggccgcgaccaagauguccgagugcgugcucggccagagcaagcggguggacuucugcggcaagggguaccaccugauguccuucccccagagcgccccgcacggcgucguguuccugcacgucacguacgugcccgcccaggagaagaacuucaccaccgcccccgcgaucugccacgacgggaaggcccacuucccccgcgagggcguguucgucuccaacgggacccacugguucgugacgcagcggaacuucuacgagccgcagaucaucaccaccgacaacaccuucgugagcggcaacugcgacgucgugaucggcaucgugaacaacacggucuacgacccccuccagcccgagcuggacuccuucaaggaggagcuggacaaguacuucaagaaccacaccagccccgacguggaccucggggacaucuccggcaucaacgccagcguggucaacauccagaaggagaucgaccgccugaacgagguggccaagaaccugaacgagucccucaucgaccugcaggagcuggggaaguacgagcaguacaucaaguggccgugguacaucuggcucggcuucaucgccggccugaucgcgaucgugauggucaccaucaugcugugcugcaugaccagcugcugcuccugccucaaggggugcugcagcugcggcuccugcugcaaguucgacgaggacgacagcgagcccgugcugaagggggugaagcugcacuacacgugaggacuaguuauaagacugacuagcccgaugggccucccaacgggcccuccuccccuccuugcaccgagauuaauaaaaaaaaaaaaaaaaaaaaaaaaaaaaaaaaaaaaaaaaaaaaaaaaaaaaaaaaaaaaaaaaugcaucccccccccccccccccccccccccccccccaaaggcucuuuucagagccaccagaauu

SEQ ID NO: 12761 - RNA, 4039 nt, Artificial Sequence
  SARS-CoV-2/England/200990660/2020__EPI_ISL_414523 spike protein mRNA gc (1-1273)
aggagaaagcuuaccauguucguguuccugguccuccugccccuggugagcucccagugcgugaaccucaccacccgcacgcagcugccgcccgccuacaccaacagcuucacccggggcgucuacuaccccgacaagguguuccgcuccagcgugcugcacuccacccaggaccucuuccugcccuucuucagcaacgucacgugguuccacgccauccacguguccgggaccaacggcaccaagcgguucgacaacccggugcugcccuucaacgacggggucuacuucgcgagcaccgagaaguccaacaucauccgcggcuggaucuucgggacgacccucgacagcaagacccagucccugcugaucgugaacaacgccaccaacguggucaucaaggugugcgaguuccaguucugcaacgaccccuuccucggcguguacuaccacaagaacaacaagagcuggauggaguccgaguuccgggucuacagcuccgccaacaacugcacguucgaguacgugagccagcccuuccugauggaccuggagggcaagcaggggaacuucaagaaccuccgcgaguucguguucaagaacaucgacggcuacuucaagaucuacuccaagcacaccccgaucaaccugguccgggaccugccccagggguucagcgcccucgagccccugguggaccugcccaucggcaucaacaucacccgcuuccagacccuccuggcccugcaccgguccuaccucacgccgggggacagcagcuccggcuggaccgcgggcgccgccgccuacuacgugggguaccugcagccccgcaccuuccugcucaaguacaacgagaacggcaccaucacggacgcggucgacugcgcccuggacccccugagcgagaccaagugcacccucaaguccuucaccguggagaaggggaucuaccagacgagcaacuuccgggugcagcccaccgaguccaucguccgcuucccgaacaucaccaaccugugccccuucggcgagguguucaacgccacccgguucgccagcgucuacgccuggaaccgcaagcggaucuccaacugcguggcggacuacagcgugcuguacaacuccgccagcuucuccacguucaagugcuacggcgucagccccaccaagcucaacgaccugugcuucaccaacguguacgccgacuccuucgugauccgcggggacgagguccggcagaucgcccccggccagaccgggaagaucgccgacuacaacuacaagcugccggacgacuucacgggcugcgugaucgcguggaacagcaacaaccucgacuccaaggucgggggcaacuacaacuaccuguaccgccuguuccgcaagagcaaccucaagcccuucgagcgggacaucuccaccgagaucuaccaggccggcagcacccccugcaacgggguggagggcuucaacugcuacuucccccugcaguccuacggguuccagccgaccaacggcgugggguaccagcccuaccggguggucgugcugagcuucgagcuccugcacgcccccgccacggugugcggccccaagaaguccaccaaccuggucaagaacaagugcgugaacuucaacuucaacggccucaccgggaccggcgugcugaccgagagcaacaagaaguuccugccguuccagcaguucgggcgcgacaucgccgacacgaccgacgcgguccgcgacccccagacccuggagauccucgacaucacccccugcagcuucggcgggguguccgugaucacgccgggcaccaacaccagcaaccaggucgccgugcuguaccagggcgugaacugcaccgagguccccguggccauccacgccgaccagcugacgcccaccuggcggguguacuccaccgggagcaacgucuuccagacccgcgccggcugccucaucggggcggagcacgugaacaacuccuacgagugcgacauccccaucggcgccggcaucugcgccagcuaccagacgcagaccaacuccccgcggcgcgcccggagcguggcgucccagagcaucaucgccuacaccaugucccugggggccgagaacagcgucgccuacuccaacaacagcaucgccauccccaccaacuucacgaucuccgugaccaccgagauccugcccgugagcaugaccaagacgagcgucgacugcaccauguacaucugcggcgacuccaccgagugcagcaaccuccugcugcaguacggguccuucugcacccagcucaaccgcgcgcugacgggcaucgccguggagcaggacaagaacacccaggagguguucgcccaggucaagcagaucuacaagacgcccccgaucaaggacuucgggggcuucaacuucagccagauccugcccgaccccuccaagcccagcaagcgguccuucaucgaggaccuccuguucaacaaggugacccuggccgacgccggcuucaucaagcaguacggggacugccucggcgacaucgcggcccgcgaccugaucugcgcccagaaguucaacgggcugaccgugcucccgccccugcugaccgacgagaugaucgcccaguacaccagcgcccuccuggcgggcaccaucacguccggguggaccuucggcgccggcgccgcccugcagauccccuucgcgaugcagauggccuaccgguucaacgggaucggcgucacccagaacgugcucuacgagaaccagaagcugaucgccaaccaguucaacagcgccaucgggaagauccaggacucccugagcuccaccgccagcgcgcucggcaagcugcaggacguggucaaccagaacgcccaggcccugaacacgcucgugaagcagcuguccagcaacuucggggccaucuccagcgugcugaacgacauccucucccgccuggacaaggucgaggccgaggugcagaucgaccggcugaucaccggccgccuccagagccugcagaccuacgugacccagcagcugauccgggcggccgagauccgcgccagcgccaaccucgccgcgaccaagauguccgagugcguccugggccagagcaagcggguggacuucugcgggaagggcuaccaccugauguccuucccccagagcgccccgcacgggguggucuuccuccacgugacguacguccccgcccaggagaagaacuucaccaccgcccccgcgaucugccacgacggcaaggcccacuucccccgcgaggggguguucguguccaacggcacccacugguucgucacgcagcggaacuucuacgagccgcagaucaucaccaccgacaacaccuucgugagcggcaacugcgacguggucaucgggaucgugaacaacacgguguacgacccccugcagcccgagcuggacuccuucaaggaggagcucgacaaguacuucaagaaccacaccagccccgacgucgaccugggcgacaucuccgggaucaacgccagcguggugaacauccagaaggagaucgaccgccugaacgaggucgccaagaaccucaacgagucccugaucgaccugcaggagcucggcaaguacgagcaguacaucaaguggccgugguacaucuggcugggcuucaucgccgggcugaucgcgaucgugauggugaccaucaugcucugcugcaugaccagcugcugcuccugccugaagggcugcugcagcugcggguccugcugcaaguucgacgaggacgacagcgagcugguccucaagggcgugaagcugcacuacacgugaggacuaguuauaagacugacuagcccgaugggccucccaacgggcccuccuccccuccuugcaccgagauuaauaaaaaaaaaaaaaaaaaaaaaaaaaaaaaaaaaaaaaaaaaaaaaaaaaaaaaaaaaaaaaaaaugcaucccccccccccccccccccccccccccccccaaaggcucuuuucagagccaccagaauu

SEQ ID NO: 12762 - RNA, 4039 nt, Artificial Sequence
  SARS-CoV-2/Australia/NSW09/2020__EPI_ISL_413595 spike protein mRNA gc (1-1273)
aggagaaagcuuaccauguucguguuccugguccuccugccccuggugagcucccagugcgugaaccucaccacccgcacgcagcugccgcccgccuacaccaacagcuucacccggggcgucuacuaccccgacaagguguuccgcuccagcgugcugcacuccacccaggaccucuuccugcccuucuucagcaacgucacgugguuccacgccauccacguguccgggaccaacggcaccaagcgguucgacaacccggugcugcccuucaacgacggggucuacuucgcgagcaccgagaaguccaacaucauccgcggcuggaucuucgggacgacccucgacagcaagacccagucccugcugaucgugaacaacgccaccaacguggucaucaaggugugcgaguuccaguucugcaacgaccccuuccucggcguguacuaccacaagaacaacaagagcuggauggaguccgaguuccgggucuacagcuccgccaacaacugcacguucgaguacgugagccagcccuuccugauggaccuggagggcaagcaggggaacuucaagaaccuccgcgaguucguguucaagaacaucgacggcuacuucaagaucuacuccaagcacaccccgaucaaccugguccgggaccugccccagggguucagcgcccucgagccccugguggaccugcccaucggcaucaacaucacccgcuuccagacccuccuggcccugcaccgguccuaccucacgccgggggacagcagcuccggcuggaccgcgggcgccgccgccuacuacgugggguaccugcagccccgcaccuuccugcucaaguacaacgagaacggcaccaucacggacgcggucgacugcgcccuggacccccugagcgagaccaagugcacccucaaguccuucaccguggagaaggggaucuaccagacgagcaacuuccgggugcagcccaccgaguccaucguccgcuucccgaacaucaccaaccugugccccuucggcgagguguucaacgccacccgguucgccagcgucuacgccuggaaccgcaagcggaucuccaacugcguggcggacuacagcgugcuguacaacuccgccagcuucuccacguucaagugcuacggcgucagccccaccaagcucaacgaccugugcuucaccaacguguacgccgacuccuucgugauccgcggggacgagguccggcagaucgcccccggccagaccgggaagaucgccgacuacaacuacaagcugccggacgacuucacgggcugcgugaucgcguggaacagcaacaaccucgacuccaaggucgggggcaacuacaacuaccuguaccgccuguuccgcaagagcaaccucaagcccuucgagcgggacaucuccaccgagaucuaccaggccggcagcacccccugcaacgggguggagggcuucaacugcuacuucccccugcaguccuacggguuccagccgaccaacggcgugggguaccagcccuaccggguggucgugcugagcuucgagcuccugcacgcccccgccacggugugcggccccaagaaguccaccaaccuggucaagaacaagugcgugaacuucaacuucaacggccucaccgggaccggcgugcugaccgagagcaacaagaaguuccugccguuccagcaguucgggcgcgacaucgccgacacgaccgacgcgguccgcgacccccagacccuggagauccucgacaucacccccugcagcuucggcgggguguccgugaucacgccgggcaccaacaccagcaaccaggucgccgugcuguaccaggacgugaacugcaccgagguccccguggccauccacgccgaccagcugacgcccaccuggcggguguacuccaccggcagcaacgucuuccagacccgcgccgggugccucaucggcgcggagcacgugaacaacuccuacgagugcgacauccccaucggggccggcaucugcgccagcuaccagacgcagaccaacuccccgcggcgcgcccggagcguggcgucccagagcaucaucgccuacaccaugucccugggcgccgagaacagcgucgccuacuccaacaacagcaucgccauccccaccaacuucacgaucuccgugaccaccgagauccugcccgugagcaugaccaagacgagcgucgacugcaccauguacaucugcggggacuccaccgagugcagcaaccuccugcugcaguacggcuccuucugcacccagcucaaccgcgcgcugacggggaucgccguggagcaggacaagaacacccaggagguguucgcccaggucaagcagaucuacaagacgcccccgaucaaggacuucggcggguucaacuucagccagauccugcccgaccccuccaagcccagcaagcgguccuucaucgaggaccuccuguucaacaaggugacccuggccgacgccggcuucaucaagcaguacggcgacugccucggggacaucgcggcccgcgaccugaucugcgcccagaaguucaacggccugaccgugcucccgccccugcugaccgacgagaugaucgcccaguacaccagcgcccuccuggcggggaccaucacguccggcuggaccuucggggccggcgccgcccugcagauccccuucgcgaugcagauggccuaccgguucaacggcaucggggucacccagaacgugcucuacgagaaccagaagcugaucgccaaccaguucaacagcgccaucggcaagauccaggacucccugagcuucaccgccuccgcgcucgggaagcugcaggacguggucaaccagaacgcccaggcccugaacacgcucgugaagcagcugagcuccaacuucggcgccaucagcuccgugcugaacgacauccucagccgccuggacaaggucgaggccgaggugcagaucgaccggcugaucaccgggcgccuccagucccugcagaccuacgugacccagcagcugauccgggcggccgagauccgcgccagcgccaaccucgccgcgaccaagaugagcgagugcguccugggccaguccaagcggguggacuucugcggcaagggguaccaccugaugagcuucccccaguccgccccgcacggcguggucuuccuccacgugacguacguccccgcccaggagaagaacuucaccaccgcccccgcgaucugccacgacgggaaggcccacuucccccgcgagggcguguucgugagcaacgggacccacugguucgucacgcagcggaacuucuacgagccgcagaucaucaccaccgacaacaccuucguguccggcaacugcgacguggucaucggcaucgugaacaacacgguguacgacccccugcagcccgagcuggacagcuucaaggaggagcucgacaaguacuucaagaaccacaccucccccgacgucgaccugggggacaucagcggcaucaacgccuccguggugaacauccagaaggagaucgaccgccugaacgaggucgccaagaaccucaacgagagccugaucgaccugcaggagcucgggaaguacgagcaguacaucaaguggccgugguacaucuggcugggcuucaucgccggccugaucgcgaucgugauggugaccaucaugcucugcugcaugaccuccugcugcagcugccugaaggggugcugcuccugcggcagcugcugcaaguucgacgaggacgacuccgagcccguccugaagggggugaagcuccacuacacgugaggacuaguuauaagacugacuagcccgaugggccucccaacgggcccuccuccccuccuugcaccgagauuaauaaaaaaaaaaaaaaaaaaaaaaaaaaaaaaaaaaaaaaaaaaaaaaaaaaaaaaaaaaaaaaaaugcaucccccccccccccccccccccccccccccccaaaggcucuuuucagagccaccagaauu

SEQ ID NO: 12763 - RNA, 4039 nt, Artificial Sequence
  SARS-CoV-2/Australia/NSW10/2020__EPI_ISL_413596 spike protein mRNA gc (1-1273)
aggagaaagcuuaccauguucguguuccugguccuccugccccuggugagcucccagugcgugaaccucaccacccgcacgcagcugccgcccgccuacaccaacagcuucacccggggcgucuacuaccccgacaagguguuccgcuccagcgugcugcacuccacccaggaccucuuccugcccuucuucagcaacgucacgugguuccacgccauccacguguccgggaccaacggcaccaagcgguucgacaacccggugcugcccuucaacgacggggucuacuucgcgagcaccgagaaguccaacaucauccgcggcuggaucuucgggacgacccucgacagcaagacccagucccugcugaucgugaacaacgccaccaacguggucaucaaggugugcgaguuccaguucugcaacgaccccuuccucggcguguacuaccacaagaacaacaagagcuggauggaguccgaguuccgggucuacagcuccgccaacaacugcacguucgaguacgugagccagcccuuccugauggaccuggagggcaagcaggggaacuucaagaaccuccgcgaguucguguucaagaacaucgacggcuacuucaagaucuacuccaagcacaccccgaucaaccugguccgggaccugccccagggguucagcgcccucgagccccugguggaccugcccaucggcaucaacaucacccgcuuccagacccuccuggcccugcaccgguccuaccucacgccgggggacagcagcuccggcuggaccgcgggcgccgccgccuacuacgugggguaccugcagccccgcaccuuccugcucaaguacaacgagaacggcaccaucacggacgcggucgacugcgcccuggacccccugagcgagaccaagugcacccucaaguccuucaccguggagaaggggaucuaccagacgagcaacuuccgggugcagcccaccgaguccaucguccgcuucccgaacaucaccaaccugugccccuucggcgagguguucaacgccacccgguucgccagcgucuacgccuggaaccgcaagcggaucuccaacugcguggcggacuacagcgugcuguacaacuccgccagcuucuccacguucaagugcuacggcgucagccccaccaagcucaacgaccugugcuucaccaacguguacgccgacuccuucgugauccgcggggacgagguccggcagaucgcccccggccagaccgggaagaucgccgacuacaacuacaagcugccggacgacuucacgggcugcgugaucgcguggaacagcaacaaccucgacuccaaggucgggggcaacuacaacuaccuguaccgccuguuccgcaagagcaaccucaagcccuucgagcgggacaucuccaccgagaucuaccaggccggcagcacccccugcaacgggguggagggcuucaacugcuacuucccccugcaguccuacggguuccagccgaccaacggcgugggguaccagcccuaccggguggucgugcugagcuucgagcuccugcacgcccccgccacggugugcggccccaagaaguccaccaaccuggucaagaacaagugcgugaacuucaacuucaacggccucaccgggaccggcgugcugaccgagagcaacaagaaguuccugccguuccagcaguucgggcgcgacaucgccgacacgaccgacgcgguccgcgacccccagacccuggagauccucgacaucacccccugcagcuucggcgggguguccgugaucacgccgggcaccaacaccagcaaccaggucgccgugcuguaccaggacgugaacugcaccgagguccccguggccauccacgccgaccagcugacgcccaccuggcggguguacuccaccggcagcaacgucuuccagacccgcgccgggugccucaucggcgcggagcacgugaacaacuccuacgagugcgacauccccaucggggccggcaucugcgccagcuaccagacgcagaccaacuccccgcggcgcgcccggagcguggcgucccagagcaucaucgccuacaccaugucccugggcgccgagaacagcgucgccuacuccaacaacagcaucgccauccccaccaacuucacgaucuccgugaccaccgagauccugcccgugagcaugaccaagacgagcgucgacugcaccauguacaucugcggggacuccaccgagugcagcaaccuccugcugcaguacggcuccuucugcacccagcucaaccgcgcgcugacggggaucgccguggagcaggacaagaacacccaggagguguucgcccaggucaagcagaucuacaagacgcccccgaucaaggacuucggcggguucaacuucagccagauccugcccgaccccuccaagcccagcaagcgguccuucaucgaggaccuccuguucaacaaggugacccuggccgacgccggcuucaucaagcaguacggcgacugccucggggacaucgcggcccgcgaccugaucugcgcccagaaguucaacggccugaccgugcucccgccccugcugaccgacgagaugaucgcccaguacaccagcgcccuccuggcggggaccaucacguccggcuggaccuucggggccggcgccgcccugcagauccccuucgcgaugcagauggccuaccgguucaacggcaucggggucacccagaacgugcucuacgagaaccagaagcugaucgccaaccaguucaacagcgccaucggcaagauccaggacucccugagcuccaccgccagcgcgcucgggaagcugcaggacguggucaaccagaacgcccaggcccugaacacgcucgugaagcagcuguccagcaacuucggcgccaucuccagcgugcugaacgacauccucucccgccuggacaaggucgaggccgaggugcagaucgaccggcugaucaccgggcgccuccagagccugcagaccuacgugacccagcagcugauccgggcggccgagauccgcgccagcgccaaccucgccgcgaccaagauguccgagugcguccugggccagagcaagcggguggacuucugcggcaagggguaccaccugauguccuucccccagagcgccccgcacggcguggucuuccuccacgugacguacguccccgcccaggagaagaacuucaccaccgcccccgcgaucugccacgacgggaaggcccacuucccccgcgagggcguguucguguccaacgggacccacugguucgucacgcagcggaacuucuacgagccgcagaucaucaccaccgacaacaccuucgugagcggcaacugcgacguggucaucggcaucgugaacaacacgguguacgacccccugcagcccgagcuggacuccuucaaggaggagcucgacaaguacuucaagaaccacaccagccccgacgucgaccugggggacaucuccggcaucaacgccagcguggugaacauccagaaggagaucgaccgccugaacgaggucgccaagaaccucaacgagucccugaucgaccugcaggagcucgggaaguacgagcaguacaucaaguggccgugguacaucuggcugggcuucaucgccggccugaucgcgaucgugauggugaccaucaugcucugcugcaugaccagcugcugcuccugccugaaggggugcugcagcugcggcuccugcuucaaguucgacgaggacgacagcgagcccguccugaagggggugaagcuccacuacacgugaggacuaguuauaagacugacuagcccgaugggccucccaacgggcccuccuccccuccuugcaccgagauuaauaaaaaaaaaaaaaaaaaaaaaaaaaaaaaaaaaaaaaaaaaaaaaaaaaaaaaaaaaaaaaaaaugcaucccccccccccccccccccccccccccccccaaaggcucuuuucagagccaccagaauu

SEQ ID NO: 12764 - RNA, 4039 nt, Artificial Sequence
  SARS-CoV-2/Switzerland/1000477797/2020__EPI_ISL_413023 spike protein mRNA gc (1-1273)
aggagaaagcuuaccauguucguguuccugguccuccugccccuggugagcucccagugcgugaaccucaccacccgcacgcagcugccgcccgccuacaccaacagcuucacccggggcgucuacuaccccgacaagguguuccgcuccagcgugcugcacuccacccaggaccucuuccugcccuucuucagcaacgucacgugguuccacgccauccacguguccgggaccaacggcaccaagcgguucgacaacccggugcugcccuucaacgacggggucuacuucgcgagcaccgagaaguccaacaucauccgcggcuggaucuucgggacgacccucgacagcaagacccagucccugcugaucgugaacaacgccaccaacguggucaucaaggugugcgaguuccaguucugcaacgaccccuuccucggcguguacuaccacaagaacaacaagagcuggauggaguccgaguuccgggucuacagcuccgccaacaacugcacguucgaguacgugagccagcccuuccugauggaccuggagggcaagcaggggaacuucaagaaccuccgcgaguucguguucaagaacaucgacggcuacuucaacaucuacuccaagcacaccccgaucaaccugguccgggaccugccccagggguucagcgcccucgagccccugguggaccugcccaucggcaucaacaucacccgcuuccagacccuccuggcccugcaccgguccuaccucacgccgggggacagcagcuccggcuggaccgcgggcgccgccgccuacuacgugggguaccugcagccccgcaccuuccugcucaaguacaacgagaacggcaccaucacggacgcggucgacugcgcccuggacccccugagcgagaccaagugcacccucaaguccuucaccguggagaaggggaucuaccagacgagcaacuuccgggugcagcccaccgaguccaucguccgcuucccgaacaucaccaaccugugccccuucggcgagguguucaacgccacccgguucgccagcgucuacgccuggaaccgcaagcggaucuccaacugcguggcggacuacagcgugcuguacaacuccgccagcuucuccacguucaagugcuacggcgucagccccaccaagcucaacgaccugugcuucaccaacguguacgccgacuccuucgugauccgcggggacgagguccggcagaucgcccccggccagaccgggaagaucgccgacuacaacuacaagcugccggacgacuucacgggcugcgugaucgcguggaacagcaacaaccucgacuccaaggucgggggcaacuacaacuaccuguaccgccuguuccgcaagagcaaccucaagcccuucgagcgggacaucuccaccgagaucuaccaggccggcagcacccccugcaacgggguggagggcuucaacugcuacuucccccugcaguccuacggguuccagccgaccaacggcgugggguaccagcccuaccggguggucgugcugagcuucgagcuccugcacgcccccgccacggugugcggccccaagaaguccaccaaccuggucaagaacaagugcgugaacuucaacuucaacggccucaccgggaccggcgugcugaccgagagcaacaagaaguuccugccguuccagcaguucgggcgcgacaucgccgacacgaccgacgcgguccgcgacccccagacccuggagauccucgacaucacccccugcagcuucggcgggguguccgugaucacgccgggcaccaacaccagcaaccaggucgccgugcuguaccagggcgugaacugcaccgagguccccguggccauccacgccgaccagcugacgcccaccuggcggguguacuccaccgggagcaacgucuuccagacccgcgccggcugccucaucggggcggagcacgugaacaacuccuacgagugcgacauccccaucggcgccggcaucugcgccagcuaccagacgcagaccaacuccccgcggcgcgcccggagcguggcgucccagagcaucaucgccuacaccaugucccugggggccgagaacagcgucgccuacuccaacaacagcaucgccauccccaccaacuucacgaucuccgugaccaccgagauccugcccgugagcaugaccaagacgagcgucgacugcaccauguacaucugcggcgacuccaccgagugcagcaaccuccugcugcaguacggguccuucugcacccagcucaaccgcgcgcugacgggcaucgccguggagcaggacaagaacacccaggagguguucgcccaggucaagcagaucuacaagacgcccccgaucaaggacuucgggggcuucaacuucagccagauccugcccgaccccuccaagcccagcaagcgguccuucaucgaggaccuccuguucaacaaggugacccuggccgacgccggcuucaucaagcaguacggggacugccucggcgacaucgcggcccgcgaccugaucugcgcccagaaguucaacgggcugaccgugcucccgccccugcugaccgacgagaugaucgcccaguacaccagcgcccuccuggcgggcaccaucacguccggguggaccuucggcgccggcgccgcccugcagauccccuucgcgaugcagauggccuaccgguucaacgggaucggcgucacccagaacgugcucuacgagaaccagaagcugaucgccaaccaguucaacagcgccaucgggaagauccaggacucccugagcuccaccgccagcgcgcucggcaagcugcaggacguggucaaccagaacgcccaggcccugaacacgcucgugaagcagcuguccagcaacuucggggccaucuccagcgugcugaacgacauccucucccgccuggacaaggucgaggccgaggugcagaucgaccggcugaucaccggccgccuccagagccugcagaccuacgugacccagcagcugauccgggcggccgagauccgcgccagcgccaaccucgccgcgaccaagauguccgagugcguccugggccagagcaagcggguggacuucugcgggaagggcuaccaccugauguccuucccccagagcgccccgcacgggguggucuuccuccacgugacguacguccccgcccaggagaagaacuucaccaccgcccccgcgaucugccacgacggcaaggcccacuucccccgcgaggggguguucguguccaacggcacccacugguucgucacgcagcggaacuucuacgagccgcagaucaucaccaccgacaacaccuucgugagcggcaacugcgacguggucaucgggaucgugaacaacacgguguacgacccccugcagcccgagcuggacuccuucaaggaggagcucgacaaguacuucaagaaccacaccagccccgacgucgaccugggcgacaucuccgggaucaacgccagcguggugaacauccagaaggagaucgaccgccugaacgaggucgccaagaaccucaacgagucccugaucgaccugcaggagcucggcaaguacgagcaguacaucaaguggccgugguacaucuggcugggcuucaucgccgggcugaucgcgaucgugauggugaccaucaugcucugcugcaugaccagcugcugcuccugccugaagggcugcugcagcugcggguccugcugcaaguucgacgaggacgacagcgagcccguccugaagggcgugaagcuccacuacacgugaggacuaguuauaagacugacuagcccgaugggccucccaacgggcccuccuccccuccuugcaccgagauuaauaaaaaaaaaaaaaaaaaaaaaaaaaaaaaaaaaaaaaaaaaaaaaaaaaaaaaaaaaaaaaaaaugcaucccccccccccccccccccccccccccccccaaaggcucuuuucagagccaccagaauu

SEQ ID NO: 12765 - RNA, 4039 nt, Artificial Sequence
  SARS-CoV-2/Belgium/BA-02291/2020__EPI_ISL_415159 spike protein mRNA gc (1-1273)
aggagaaagcuuaccauguucguguuccugguccuccugccccuggugagcucccagugcgugaaccucaccacccgcacgcagcugccgcccgccuacaccaacagcuucacccggggcgucuacuaccccgacaagguguuccgcuccagcgugcugcacuccacccaggaccucuuccugcccuucuucagcaacgucacgugguuccacgccauccacguguccgggaccaacggcaccaagcgguucgacaacccggugcugcccuucaacgacggggucuacuucgcgagcaccgagaaguccaacaucauccgcggcuggaucuucgggacgacccucgacagcaagacccagucccugcugaucgugaacaacgccaccaacguggucaucaaggugugcgaguuccaguucugcaacgaccccuuccucggcguguacuaccacaagaacaacaagagcuggauggaguccgaguuccgggucuacagcuccgccaacaacugcacguucgaguacgugagccagcccuuccugauggaccuggagggcaagcaggggaacuucaagaaccuccgcgaguucguguucaagaacaucgacggcuacuucaagaucuacuccaagcacaccccgaucaaccugguccgggaccugccccagggguucagcgcccucgagccccugguggaccugcccaucggcaucaacaucacccgcuuccagacccuccuggcccugcaccgguccuaccucacgccgggggacagcagcuccggcuggaccgcgggcgccgccgccuacuacgugggguaccugcagccccgcaccuuccugcucaaguacaacgagaacggcaccaucacggacgcggucgacugcgcccuggacccccugagcgagaccaagugcacccucaaguccuucaccguggagaaggggaucuaccagacgagcaacuuccgggugcagcccaccgaguccaucguccgcuucccgaacaucaccaaccugugccccuucggcgagguguucaacgccacccgguucgccagcgucuacgccuggaaccgcaagcggaucuccaacugcguggcggacuacagcgugcuguacaacuccgccagcuucuccacguucaagugcuacggcgucagccccaccaagcucaacgaccugugcuucaccaacguguacgccgacuccuucgugauccgcggggacgagguccggcagaucgcccccggccagaccgggaagaucgccgacuacaacuacaagcugccggacgacuucacgggcugcgugaucgcguggaacagcaacaaccucgacuccaaggucgggggcaacuacaacuaccuguaccgccuguuccggcgcagcaaccucaagcccuucgagcgggacaucuccaccgagaucuaccaggccggcagcacccccugcaacgggguggagggcuucaacugcuacuucccccugcaguccuacggguuccagccgaccaacggcgugggguaccagcccuaccgcguggucgugcugagcuucgagcuccugcccgcccccgccacggugugcggcccgaagaaguccaccaaccuggucaagaacaagugcgugaacuucaacuucaacggccucaccgggaccggcgugcugaccgaguccaacaagaaguuccugcccuuccagcaguucgggcgcgacaucgccgacacgaccgacgcgguccgggacccccagacccuggagauccucgacaucaccccgugcagcuucggcgggguguccgugaucacgcccggcaccaacaccagcaaccaggucgccgugcuguaccagggcgugaacugcaccgagguccccguggccauccacgccgaccagcugacgcccaccuggcgcguguacuccaccgggagcaacgucuuccagacccgggccggcugccucaucggggcggagcacgugaacaacuccuacgagugcgacaucccgaucggcgccggcaucugcgccagcuaccagacgcagaccaacagcccccgccgggcccgcagcguggcgucccagagcaucaucgccuacaccaugucccugggggccgagaacagcgucgccuacuccaacaacagcaucgccauccccaccaacuucacgaucuccgugaccaccgagauccugcccgugagcaugaccaagacgagcgucgacugcaccauguacaucugcggcgacuccaccgagugcagcaaccuccugcugcaguacggguccuucugcacccagcucaaccgggcgcugacgggcaucgccguggagcaggacaagaacacccaggagguguucgcccaggucaagcagaucuacaagaccccgcccaucaaggacuucgggggcuucaacuucagccagauccugcccgaccccuccaagccgagcaagcgcuccuucaucgaggaccuccuguucaacaaggugacccuggccgacgccggcuucaucaagcaguacggggacugccucggcgacaucgcggcccgggaccugaucugcgcccagaaguucaacgggcugacggugcucccgccccugcugaccgacgagaugaucgcccaguacaccagcgcccuccuggcgggcaccaucacguccggguggaccuucggcgccggcgccgcccugcagauccccuucgcgaugcagauggccuaccgcuucaacgggaucggcgucacccagaacgugcucuacgagaaccagaagcugaucgccaaccaguucaacagcgccaucgggaagauccaggacucccugagcuccgccgcgcccgcccucggcaagcugcaggacguggucaaccagaacgcccaggcccugaacacccucgugaagcagcugagcuccaacuucggggccaucagcuccgugcugaacgacauccucagccggcuggacaaggucgaggcggaggugcagaucgaccgccugaucacgggccggcuccagucccugcagaccuacgugacccagcagcugauccgcgccgccgagauccgggccagcgccaaccucgcggccaccaagaugagcgagugcguccugggccaguccaagcgcguggacuucugcgggaagggcuaccaccugaugagcuucccccaguccgcgccccacgggguggucuuccuccacgugaccuacguccccgcccaggagaagaacuucacgaccgccccggccaucugccacgacggcaaggcccacuucccccgggaggggguguucgugagcaacggcacccacugguucgucacccagcgcaacuucuacgagccccagaucaucacgaccgacaacaccuucguguccggcaacugcgacguggucaucgggaucgugaacaacaccguguacgacccccugcagccggagcuggacagcuucaaggaggagcucgacaaguacuucaagaaccacacgucccccgacgucgaccugggcgacaucagcgggaucaacgccuccguggugaacauccagaaggagaucgaccggcugaacgaggucgccaagaaccucaacgagagccugaucgaccugcaggagcucggcaaguacgagcaguacaucaaguggcccugguacaucuggcugggcuucaucgcggggcugaucgccaucgugauggugaccaucaugcucugcugcaugaccuccugcugcagcugccugaagggcugcugcuccugcgggagcugcugcaaguucgacgaggacgacuccgagccgguccugaagggcgugaagcuccacuacaccugaggacuaguuauaagacugacuagcccgaugggccucccaacgggcccuccuccccuccuugcaccgagauuaauaaaaaaaaaaaaaaaaaaaaaaaaaaaaaaaaaaaaaaaaaaaaaaaaaaaaaaaaaaaaaaaaugcaucccccccccccccccccccccccccccccccaaaggcucuuuucagagccaccagaauu

SEQ ID NO: 12766 - RNA, 4039 nt, Artificial Sequence
  SARS-CoV-2/USA/WA8-UW5/2020__EPI_ISL_413486 spike protein mRNA gc (1-1273)
aggagaaagcuuaccauguucguguuccugguccuccugccccuggugagcucccagugcgugaaccucaccacccgcacgcagcugccgcccgccuacaccaacagcuucacccggggcgucuacuaccccgacaagguguuccgcuccagcgugcugcacuccacccaggaccucuuccugcccuucuucagcaacgucacgugguuccacgccauccacguguccgggaccaacggcaccaagcgguucgacaacccggugcugcccuucaacgacggggucuacuucgcgagcaccgagaaguccaacaucauccgcggcuggaucuucgggacgacccucgacagcaagacccagucccugcugaucgugaacaacgccaccaacguggucaucaaggugugcgaguuccaguucugcaacgaccccuuccucggcguguacuaccacaagaacaacaagagcuggauggaguccgaguuccgggucuacagcuccgccaacaacugcacguucgaguacgugagccagcccuuccugauggaccuggagggcaagcaggggaacuucaagaaccuccgcgaguucguguucaagaacaucgacggcuacuucaagaucuacuccaagcacaccccgaucaaccugguccgggaccugccccagggguucagcgcccucgagccccugguggaccugcccaucggcaucaacaucacccgcuuccagacccuccuggcccugcaccgguccuaccucacgccgggggacagcagcuccggcuggaccgcgggcgccgccgccuacuacgugggguaccugcagccccgcaccuuccugcucaaguacaacgagaacggcaccaucacggacgcggucgacugcgcccuggacccccugagcgagaccaagugcacccucaaguccuucaccguggagaaggggaucuaccagacgagcaacuuccgggugcagcccaccgaguccaucguccgcuucccgaacaucaccaaccugugccccuucggcgagguguucaacgccacccgguucgccagcgucuacgccuggaaccgcaagcggaucuccaacugcguggcggacuacagcgugcuguacaacuccgccagcuucuccacguucaagugcuacggcgucagccccaccaagcucaacgaccugugcuucaccaacguguacgccgacuccuucgugauccgcggggacgagguccggcagaucgcccccggccagaccgggaagaucgccgacuacaacuacaagcugccggacgacuucacgggcugcgugaucgcguggaacagcaacaaccucgacuccaaggucgggggcaacuacaacuaccuguaccgccuguuccgcaagagcaaccucaagcccuucgagcgggacaucuccaccgagaucuaccaggccggcagcacccccugcaacgggguggagggcuucaacugcuacuucccccugcaguccuacggguuccagccgaccaacggcgugggguaccagcccuaccggguggucgugcugagcuucgagcuccugcacgcccccgccacggugugcggccccaagaaguccaccaaccuggucaagaacaagugcgugaacuucaacuucaacggccucaccgggaccggcgugcugaccgagagcaacaagaaguuccugccguuccagcaguucgggcgcgacaucgccgacacgaccgacgcgguccgcgacccccagacccuggagauccucgacaucacccccugcagcuucggcgggguguccgugaucacgccgggcaccaacaccagcaaccaggucgccgugcuguaccaggacgugaacugcaccgagguccccguggccauccacgccgaccagcugacgcccaccuggcggguguacuccaccggcagcaacgucuuccagacccgcgccgggugccucaucggcgcggaguacgugaacaacuccuacgagugcgacauccccaucggggccggcaucugcgccagcuaccagacgcagaccaacuccccgcggcgcgcccggagcguggcgucccagagcaucaucgccuacaccaugucccugggcgccgagaacagcgucgccuacuccaacaacagcaucgccauccccaccaacuucacgaucuccgugaccaccgagauccugcccgugagcaugaccaagacgagcgucgacugcaccauguacaucugcggggacuccaccgagugcagcaaccuccugcugcaguacggcuccuucugcacccagcucaaccgcgcgcugacggggaucgccguggagcaggacaagaacacccaggagguguucgcccaggucaagcagaucuacaagacgcccccgaucaaggacuucggcggguucaacuucagccagauccugcccgaccccuccaagcccagcaagcgguccuucaucgaggaccuccuguucaacaaggugacccuggccgacgccggcuucaucaagcaguacggcgacugccucggggacaucgcggcccgcgaccugaucugcgcccagaaguucaacggccugaccgugcucccgccccugcugaccgacgagaugaucgcccaguacaccagcgcccuccuggcggggaccaucacguccggcuggaccuucggggccggcgccgcccugcagauccccuucgcgaugcagauggccuaccgguucaacggcaucggggucacccagaacgugcucuacgagaaccagaagcugaucgccaaccaguucaacagcgccaucggcaagauccaggacucccugagcuccaccgccagcgcgcucgggaagcugcaggacguggucaaccagaacgcccaggcccugaacacgcucgugaagcagcuguccagcaacuucggcgccaucuccagcgugcugaacgacauccucucccgccuggacaaggucgaggccgaggugcagaucgaccggcugaucaccgggcgccuccagagccugcagaccuacgugacccagcagcugauccgggcggccgagauccgcgccagcgccaaccucgccgcgaccaagauguccgagugcguccugggccagagcaagcggguggacuucugcggcaagggguaccaccugauguccuucccccagagcgccccgcacggcguggucuuccuccacgugacguacguccccgcccaggagaagaacuucaccaccgcccccgcgaucugccacgacgggaaggcccacuucccccgcgagggcguguucguguccaacgggacccacugguucgucacgcagcggaacuucuacgagccgcagaucaucaccaccgacaacaccuucgugagcggcaacugcgacguggucaucggcaucgugaacaacacgguguacgacccccugcagcccgagcuggacuccuucaaggaggagcucgacaaguacuucaagaaccacaccagccccgacgucgaccugggggacaucuccggcaucaacgccagcguggugaacauccagaaggagaucgaccgccugaacgaggucgccaagaaccucaacgagucccugaucgaccugcaggagcucgggaaguacgagcaguacaucaaguggccgugguacaucuggcugggcuucaucgccggccugaucgcgaucgugauggugaccaucaugcucugcugcaugaccagcugcugcuccugccugaaggggugcugcagcugcggcuccugcugcaaguucgacgaggacgacagcgagcccguccugaagggggugaagcuccacuacacgugaggacuaguuauaagacugacuagcccgaugggccucccaacgggcccuccuccccuccuugcaccgagauuaauaaaaaaaaaaaaaaaaaaaaaaaaaaaaaaaaaaaaaaaaaaaaaaaaaaaaaaaaaaaaaaaaugcaucccccccccccccccccccccccccccccccaaaggcucuuuucagagccaccagaauu

SEQ ID NO: 12767 - RNA, 4039 nt, Artificial Sequence
  SARS-CoV-2/England/20102000506/2020__EPI_ISL_415147 spike protein mRNA gc (1-1273)
aggagaaagcuuaccauguucguguuccugguccuccugccccuggugagcucccagugcgugaaccucaccacccgcacgcagcugccgcccgccuacaccaacagcuucacccggggcgucuacuaccccgacaagguguuccgcuccagcgugcugcacuccacccaggaccucuuccugcccuucuucagcaacgucacgugguuccacgccauccacguguccgggaccaacggcaccaagcgguucgacaacccggugcugcccuucaacgacggggucuacuucgcgagcaccgagaaguccaacaucauccgcggcuggaucuucgggacgacccucgacagcaagacccagucccugcugaucgugaacaacgccaccaacguggucaucaaggugugcgaguuccaguucugcaacgaccccuuccucggcguguacuaccacaagaacaacaagagcuggauggaguccgaguuccgggucuacagcuccgccaacaacugcacguucgaguacgugagccagcccuuccugauggaccuggagggcaagcaggggaacuucaagaaccuccgcgaguucguguucaagaacaucgacggcuacuucaagaucuacuccaagcacaccccgaucaaccugguccgggaccugccccagggguucagcgcccucgagccccugguggaccugcccaucggcaucaacaucacccgcuuccagacccuccuggcccugcaccgguccuaccucacgccgggggacagcagcuccggcuggaccgcgggcgccgccgccuacuacgugggguaccugcagccccgcaccuuccugcucaaguacaacgagaacggcaccaucacggacgcggucgacugcgcccuggacccccugagcgagaccaagugcacccucaaguccuucaccguggagaaggggaucuaccagacgagcaacuuccgggugcagcccaccgaguccaucguccgcuucccgaacaucaccaaccugugccccuucggcgagguguucaacgccacccgguucgccagcgucuacgccuggaaccgcaagcggaucuccaacugcguggcggacuacagcgugcuguacaacuccgccagcuucuccacguucaagugcuacggcgucagccccaccaagcucaacgaccugugcuucaccaacguguacgccgacuccuucgugauccgcggggacgagguccggcagaucgcccccggccagaccgggaagaucgccgacuacaacuacaagcugccggacgacuucacgggcugcgugaucgcguggaacagcaacaaccucgacuccaaggucgggggcaacuacaacuaccuguaccgccuguuccgcaagagcaaccucaagcccuucgagcgggacaucuccaccgagaucuaccaggccggcagcacccccugcaacgggguggagggcuucaacugcuacuucccccugcaguccuacggguuccagccgaccaacggcgugggguaccagcccuaccggguggucgugcugagcuucgagcuccugcacgcccccgccacggugugcggccccaagaaguccaccaaccuggucaagaacaagugcgugaacuucaacuucaacggccucaccgggaccggcgugcugaccgagagcaacaagaaguuccugccguuccagcaguucgggcgcgacaucgccgacacgaccgacgcgguccgcgacccccagacccuggagauccucgacaucacccccugcagcuucggcgggguguccgugaucacgccgggcaccaacaccagcaaccaggucgccgugcuguaccagggcgugaacugcaccgagguccccguggccauccacgccgaccagcugacgcccaccuggcggguguacuccaccgggagcaacgucuuccagacccgcgccggcugccucaucggggcggagcacgugaacaacuccuacgagugcgacauccccaucggcgccggcaucugcgccagcuaccagacgcagaccaacuccccgcggcgcgcccggagcguggcgucccagagcaucaucgccuacaccaugucccugggggccgagaacagcgucgccuacuccaacaacagcaucgccauccccaccaacuucacgaucuccgugaccaccgagauccugcccgugagcaugaccaagacgagcgucgacugcaccauguacaucugcggcgacuccaccgagugcagcaaccuccugcugcaguacggguccuucugcacccagcucaaccgcgcgcugacgggcaucgccguggagcaggacaagaacacccaggagguguucgcccaggucaagcagaucuacaagacgcccccgaucaaggacuucgggggcuucaacuucagccagauccugcccgaccccuccaagcccagcaagcgguccuucaucgaggaccuccuguucaacaaggugacccuggccgacgccggcuucaucaagcaguacggguacugccucggcgacaucgcggcccgcgaccugaucugcgcccagaaguucaacgggcugaccgugcucccgccccugcugaccgacgagaugaucgcccaguacaccagcgcccuccuggcgggcaccaucacguccggguggaccuucggcgccggcgccgcccugcagauccccuucgcgaugcagauggccuaccgguucaacgggaucggcgucacccagaacgugcucuacgagaaccagaagcugaucgccaaccaguucaacagcgccaucgggaagauccaggacucccugagcuccaccgccagcgcgcucggcaagcugcaggacguggucaaccagaacgcccaggcccugaacacgcucgugaagcagcuguccagcaacuucggggccaucuccagcgugcugaacgacauccucucccgccuggacaaggucgaggccgaggugcagaucgaccggcugaucaccggccgccuccagagccugcagaccuacgugacccagcagcugauccgggcggccgagauccgcgccagcgccaaccucgccgcgaccaagauguccgagugcguccugggccagagcaagcggguggacuucugcgggaagggcuaccaccugauguccuucccccagagcgccccgcacgggguggucuuccuccacgugacguacguccccgcccaggagaagaacuucaccaccgcccccgcgaucugccacgacggcaaggcccacuucccccgcgaggggguguucguguccaacggcacccacugguucgucacgcagcggaacuucuacgagccgcagaucaucaccaccgacaacaccuucgugagcggcaacugcgacguggucaucgggaucgugaacaacacgguguacgacccccugcagcccgagcuggacuccuucaaggaggagcucgacaaguacuucaagaaccacaccagccccgacgucgaccugggcgacaucuccgggaucaacgccagcguggugaacauccagaaggagaucgaccgccugaacgaggucgccaagaaccucaacgagucccugaucgaccugcaggagcucggcaaguacgagcaguacaucaaguggccgugguacaucuggcugggcuucaucgccgggcugaucgcgaucgugauggugaccaucaugcucugcugcaugaccagcugcugcuccugccugaagggcugcugcagcugcggguccugcugcaaguucgacgaggacgacagcgagcccguccugaagggcgugaagcuccacuacacgugaggacuaguuauaagacugacuagcccgaugggccucccaacgggcccuccuccccuccuugcaccgagauuaauaaaaaaaaaaaaaaaaaaaaaaaaaaaaaaaaaaaaaaaaaaaaaaaaaaaaaaaaaaaaaaaaugcaucccccccccccccccccccccccccccccccaaaggcucuuuucagagccaccagaauu

SEQ ID NO: 12768 - RNA, 4039 nt, Artificial Sequence
  SARS-CoV-2/Belgium/VAG-03013/2020__EPI_ISL_415155 spike protein mRNA gc (1-1273)
aggagaaagcuuaccauguucguguuccugguccuccugccccuggugagcucccagugcgugaaccucaccacccgcacgcagcugccgcccgccuacaccaacagcuucacccggggcgucuacuaccccgacaagguguuccgcuccagcgugcugcacuccacccaggaccucuuccugcccuucuucagcaacgucacgugguuccacgccauccacguguccgggaccaacggcaccaagcgguucgacaacccggugcugcccuucaacgacggggucuacuucgcgagcaccgagaaguccaacaucauccgcggcuggaucuucgggacgacccucgacagcaagacccagucccugcugaucgugaacaacgccaccaacguggucaucaaggugugcgaguuccaguucugcaacgaccccuuccucggcguguacuaccacaagaacaacaagagcuggauggaguccgaguuccgggucuacagcuccgccaacaacugcacguucgaguacgugagccagcccuuccugauggaccuggagggcaagcaggggaacuucaagaaccuccgcgaguucguguucaagaacaucgacggcuacuucaagaucuacuccaagcacaccccgaucaaccugguccgggaccugccccagggguucagcgcccucgagccccugguggaccugcccaucggcaucaacaucacccgcuuccagacccuccuggcccugcaccgguccuaccucacgccgggggacagcagcuccggcuggaccgcgggcgccgccgccuacuacgugggguaccugcagccccgcaccuuccugcucaaguacaacgagaacggcaccaucacggacgcggucgacugcgcccuggacccccugagcgagaccaagugcacccucaaguccuucaccguggagaaggggaucuaccagacgagcaacuuccgggugcagcccaccgaguccaucguccgcuucccgaacaucaccaaccugugccccuucggcgagguguucaacgccacccgguucgccagcgucuacgccuggaaccgcaagcggaucuccaacugcguggcggacuacagcgugcuguacaacuccgccagcuucuccacguucaagugcuacggcgucagccccaccaagcucaacgaccugugcuucaccaacguguacgccgacuccuucgugauccgcggggacgagguccggcagaucgcccccggccagaccgggaagaucgccgacuacaacuacaagcugccggacgacuucacgggcugcgugaucgcguggaacagcaacaaccucgacuccaaggucgggggcaacuacaacuaccuguaccgccuguuccgcaagagcaaccucaagcccuucgagcgggacaucuccaccgagaucuaccaggccggcagcacccccugcaacgggguggagggcuucaacugcuacuucccccugcaguccuacggguuccagccgaccaacggcgugggguaccagcccuaccggguggucgugcugagcuucgagcuccugcacgcccccgccacggugugcggccccaagaaguccaccaaccuggucaagaacaagugcgugaacuucaacuucaacggccucaccgggaccggcgugcugaccgagagcaacaagaaguuccugccguuccagcaguucgggcgcgacaucgccgacacgaccgacgcgguccgcgacccccagacccuggagauccucgacaucacccccugcagcuucggcgggguguccgugaucacgccgggcaccaacaccagcaaccaggucgccgugcuguaccagggcgugaacugcaccgagguccccguggccauccacgccgaccagcugacgcccaccuggcggguguacuccaccgggagcaacgucuuccagacccgcgccggcugccucaucggggcggagcacgugaacaacuccuacgagugcgacauccccaucggcgccggcaucugcgccagcuaccagacgcagaccaacuccccgcggcgcgcccggagcguggcgucccagagcaucaucgccuacaccaugucccugggggccgagaacagcgucgccuacuccaacaacagcaucgccauccccaccaacuucacgaucuccgugaccaccgagauccugcccgugagcaugaccaagacgagcgucgacugcaccauguacaucugcggcgacuccaccgagugcagcaaccuccugcugcaguacggguccuucugcacccagcucaaccgcgcgcugacgggcaucgccguggagcaggacaagaacacccaggagguguucgcccaggucaagcagaucuacaagacgcccccgaucaaggacuucgggggcuucaacuucagccagauccugcccgaccccuccaagcccagcaagcgguccuucaucgaggaccuccuguucaacaaggugacccuggccgacgccggcuucaucaagcaguacggggacugccucggcgacaucgcggcccgcgaccugaucugcgcccagaaguucaacgggcugaccgugcucccgccccugcugaccgacgagaugaucgcccaguacaccagcgcccuccuggcgggcaccaucacguccggguggaccuucggcgccggcgccgcccugcagauccccuucgcgaugcagauggccuaccgguucaacgggaucggcgucacccagaacgugcucuacgagaaccagaagcugaucgccaaccaguucaacagcgccaucgggaagauccaggacucccugagcuccaccgccacggcgcucggcaagcugcaggacguggucaaccagaacgcccaggcccugaacacccucgugaagcagcugagcuccaacuucggggccaucagcuccgugcugaacgacauccucagccgccuggacaaggucgaggccgaggugcagaucgaccggcugaucaccggccgccuccagucccugcagaccuacgugacccagcagcugauccgggcggccgagauccgcgccagcgccaaccucgccgcgacgaagaugagcgagugcguccugggccaguccaagcggguggacuucugcgggaagggcuaccaccugaugagcuucccccaguccgccccgcacgggguggucuuccuccacgugaccuacguccccgcccaggagaagaacuucaccaccgcccccgcgaucugccacgacggcaaggcccacuucccccgcgaggggguguucgugagcaacggcacgcacugguucgucacccagcggaacuucuacgagccgcagaucaucaccaccgacaacacguucguguccggcaacugcgacguggucaucgggaucgugaacaacaccguguacgacccccugcagcccgagcuggacagcuucaaggaggagcucgacaaguacuucaagaaccacaccucccccgacgucgaccugggcgacaucagcgggaucaacgccuccguggugaacauccagaaggagaucgaccgccugaacgaggucgccaagaaccucaacgagagccugaucgaccugcaggagcucggcaaguacgagcaguacaucaaguggccgugguacaucuggcugggcuucaucgccgggcugaucgcgaucgugauggugaccaucaugcucugcugcaugacguccugcugcagcugccugaagggcugcugcuccugcgggagcugcugcaaguucgacgaggacgacuccgagcccguccugaagggcgugaagcuccacuacaccugaggacuaguuauaagacugacuagcccgaugggccucccaacgggcccuccuccccuccuugcaccgagauuaauaaaaaaaaaaaaaaaaaaaaaaaaaaaaaaaaaaaaaaaaaaaaaaaaaaaaaaaaaaaaaaaaugcaucccccccccccccccccccccccccccccccaaaggcucuuuucagagccaccagaauu

SEQ ID NO: 12769 - RNA, 4039 nt, Artificial Sequence
  SARS-CoV-2/Belgium/BC-03016/2020__EPI_ISL_415157 spike protein mRNA gc (1-1273)
aggagaaagcuuaccauguucguguuccugguccuccugccccuggugagcucccagugcgugaaccucaccacccgcacgcagcugccgcccgccuacaccaacagcuucacccggggcgucuacuaccccgacaagguguuccgcuccagcgugcugcacuccacccaggaccucuuccugcccuucuucagcaacgucacgugguuccacgccauccacguguccgggaccaacggcaccaagcgguucgacaacccggugcugcccuucaacgacggggucuacuucgcgagcaccgagaaguccaacaucauccgcggcuggaucuucgggacgacccucgacagcaagacccagucccugcugaucgugaacaacgccaccaacguggucaucaaggugugcgaguuccaguucugcaacgaccccuuccucggcguguacuaccacaagaacaacaagagcuggauggaguccgaguuccgggucuacagcuccgccaacaacugcacguucgaguacgugagccagcccuuccugauggaccuggagggcaagcaggggaacuucaagaaccuccgcgaguucguguucaagaacaucgacggcuacuucaagaucuacuccaagcacaccccgaucaaccugguccgggaccugccccagggguucagcgcccucgagccccugguggaccugcccaucggcaucaacaucacccgcuuccagacccuccuggcccugcaccgguccuaccucacgccgggggacagcagcuccggcuggaccgcgggcgccgccgccuacuacgugggguaccugcagccccgcaccuuccugcucaaguacaacgagaacggcaccaucacggacgcggucgacugcgcccuggacccccugagcgagaccaagugcacccucaaguccuucaccguggagaaggggaucuaccagacgagcaacuuccgggugcagcccaccgaguccaucguccgcuucccgaacaucaccaaccugugccccuucggcgagguguucaacgccacccgguucgccagcgucuacgccuggaaccgcaagcggaucuccaacugcguggcggacuacagcgugcuguacaacuccgccagcuucuccacguucaagugcuacggcgucagccccaccaagcucaacgaccugugcuucaccaacguguacgccgacuccuucgugauccgcggggacgagguccggcagaucgcccccggccagaccgggaagaucgccgacuacaacuacaagcugccggacgacuucacgggcugcgugaucgcguggaacagcaacaaccucgacuccaaggucgggggcaacuacaacuaccuguaccgccuguuccgcaagagcaaccucaagcccuucgagcgggacaucuccaccgagaucuaccaggccggcagcacccccugcaacgggguggagggcuucaacugcuacuucccccugcaguccuacggguuccagccgaccaacggcgugggguaccagcccuaccggguggucgugcugagcuucgagcuccugcacgcccccgccacggugugcggccccaagaaguccaccaaccuggucaagaacaagugcgugaacuucaacuucaacggccucaccgggaccggcgugcugaccgagagcaacaagaaguuccugccguuccagcaguucgggcgcgacaucgccgacacgaccgacgcgguccgcgacccccagacccuggagauccucgacaucacccccugcagcuucggcgggguguccgugaucacgccgggcaccaacaccagcaaccaggucgccgugcuguaccagggcgugaacugcaccgagguccccguggccauccacgccgaccagcugacgcccaccuggcggguguacuccaccgggagcaacgucuuccagacccgcgccggcugccucaucggggcggagcacgugaacaacuccuacgagugcgacauccccaucggcgccggcaucugcgccagcuaccagacgcagaccaacuccccgcggcgcgcccggagcguggcgucccagagcaucaucgccuacaccaugucccugggggccgagaacagcgucgccuacuccaacaacagcaucgccauccccaccaacuucacgaucuccgugaccaccgagauccugcccgugagcaugaccaagacgagcgucgacugcaccauguacaucugcggcgacuccaccgagugcagcaaccuccugcugcaguacggguccuucugcacccagcucaaccgcgcgcugacgggcaucgccguggagcaggacaagaacacccaggagguguucgcccaggucaagcagaucuacaagacgcccccgaucaaggacuucgggggcuucaacuucagccagauccugcccgaccccuccaagcccagcaagcgguccuucaucgaggaccuccuguucaacaaggugacccuggccgacgccggcuucaucaagcaguacggggacugccucggcgacaucgcggcccgcgaccugaucugcgcccagaaguucaacgggcugaccgugcucccgccccugcugaccgacgagaugaucgcccaguacaccagcgcccuccuggcgggcaccaucacguccggguggaccuucggcgccggcgccgcccugcagauccccuucgcgaugcagauggccuaccgguucaacgggaucggcgucacccagaacgugcucuacgagaaccagaagcugaucgccaaccaguucaacagcgccaucgggaagauccaggacucccugagcuccaccgcccccgcgcucggcaagcugcaggacguggucaaccagaacgcccaggcccugaacacgcucgugaagcagcugagcuccaacuucggggccaucagcuccgugcugaacgacauccucagccgccuggacaaggucgaggccgaggugcagaucgaccggcugaucaccggccgccuccagucccugcagaccuacgugacccagcagcugauccgggcggccgagauccgcgccagcgccaaccucgccgcgaccaagaugagcgagugcguccugggccaguccaagcggguggacuucugcgggaagggcuaccaccugaugagcuucccgcaguccgcgccccacgggguggucuuccuccacgugacguacguccccgcccaggagaagaacuucaccaccgcccccgccaucugccacgacggcaaggcccacuucccgcgcgaggggguguucgugagcaacggcacccacugguucgucacgcagcggaacuucuacgagccccagaucaucaccaccgacaacaccuucguguccggcaacugcgacguggucaucgggaucgugaacaacacgguguacgacccccugcagcccgagcuggacagcuucaaggaggagcucgacaaguacuucaagaaccacaccuccccggacgucgaccugggcgacaucagcgggaucaacgccuccguggugaacauccagaaggagaucgaccgccugaacgaggucgccaagaaccucaacgagagccugaucgaccugcaggagcucggcaaguacgagcaguacaucaaguggcccugguacaucuggcugggcuucaucgccgggcugaucgcgaucgugauggugaccaucaugcucugcugcaugaccuccugcugcagcugccugaagggcugcugcuccugcgggagcugcugcaaguucgacgaggacgacuccgagcccguccugaagggcgugaagcuccacuacacgugaggacuaguuauaagacugacuagcccgaugggccucccaacgggcccuccuccccuccuugcaccgagauuaauaaaaaaaaaaaaaaaaaaaaaaaaaaaaaaaaaaaaaaaaaaaaaaaaaaaaaaaaaaaaaaaaugcaucccccccccccccccccccccccccccccccaaaggcucuuuucagagccaccagaauu

SEQ ID NO: 12770 - RNA, 4039 nt, Artificial Sequence
  SARS-CoV-2/Germany/BavPat3/2020__EPI_ISL_414521 spike protein mRNA gc (1-1273)
aggagaaagcuuaccauguucguguuccugguccuccugccccuggugagcucccagugcgugaaccucaccacccgcacgcagcugccgcccgccuacaccaacagcuucacccggggcgucuacuaccccgacaagguguuccgcuccagcgugcugcacuccacccaggaccucuuccugcccuucuucagcaacgucacgugguuccacgccauccacguguccgggaccaacggcaccaagcgguucgacaacccggugcugcccuucaacgacggggucuacuucgcgagcaccgagaaguccaacaucauccgcggcuggaucuucgggacgacccucgacagcaagacccagucccugcugaucgugaacaacgccaccaacguggucaucaaggugugcgaguuccaguucugcaacgaccccuuccucggcguguacuaccacaagaacaacaagagcuggauggaguccgaguuccgggucuacagcuccgccaacaacugcacguucgaguacgugagccagcccuuccugauggaccuggagggcaagcaggggaacuucaagaaccuccgcgaguucguguucaagaacaucgacggcuacuucaagaucuacuccaagcacaccccgaucaaccugguccgggaccugccccagggguucagcgcccucgagccccugguggaccugcccaucggcaucaacaucacccgcuuccagacccuccuggcccugcaccgguccuaccucacgccgggggacagcagcuccggcuggaccgcgggcgccgccgccuacuacgugggguaccugcagccccgcaccuuccugcucaaguacaacgagaacggcaccaucacggacgcggucgacugcgcccuggacccccugagcgagaccaagugcacccucaaguccuucaccguggagaaggggaucuaccagacgagcaacuuccgggugcagcccaccgaguccaucguccgcuucccgaacaucaccaaccugugccccuucggcgagguguucaacgccacccgguucgccagcgucuacgccuggaaccgcaagcggaucuccaacugcguggcggacuacagcgugcuguacaacuccgccagcuucuccacguucaagugcuacggcgucagccccaccaagcucaacgaccugugcuucaccaacguguacgccgacuccuucgugauccgcggggacgagguccggcagaucgcccccggccagaccgggaagaucgccgacuacaacuacaagcugccggacgacuucacgggcugcgugaucgcguggaacagcaacaaccucgacuccaaggucgggggcaacuacaacuaccuguaccgccuguuccgcaagagcaaccucaagcccuucgagcgggacaucuccaccgagaucuaccaggccggcagcacccccugcaacgggguggagggcuucaacugcuacuucccccugcaguccuacggguuccagccgaccaacggcgugggguaccagcccuaccggguggucgugcugagcuucgagcuccugcacgcccccgccacggugugcggccccaagaaguccaccaaccuggucaagaacaagugcgugaacuucaacuucaacggccucaccgggaccggcgugcugaccgagagcaacaagaaguuccugccguuccagcaguucgggcgcgacaucgccgacacgaccgacgcgguccgcgacccccagacccuggagauccucgacaucacccccugcagcuucggcgggguguccgugaucacgccgggcaccaacaccagcaaccaggucgccgugcuguaccaggacgugaacugcaccgagguccccguggccauccacgccgaccagcugacgcccaccuggcggguguacuccaccggcagcaacgucuuccagacccgcgccgggugccucaucggcgcggagcacgugaacaacuccuacgagugcgacauccccaucggggccggcaucugcgccagcuaccagacgcagaccaacuccccgcggcgcgcccggagcguggcgucccagagcaucaucgccuacaccaugucccugggcgccgagaacagcgucgccuacuccaacaacagcaucgccauccccaccaacuucacgaucuccgugaccaccgagauccugcccgugagcaugaccaagacgagcgucgacugcaccauguacaucugcggggacuccaccgagugcagcaaccuccugcugcaguacggcuccuucugcacccagcucaaccgcgcgcugacggggaucgccguggagcaggacaagaacacccagcaggucuucgcccaggugaagcagaucuacaagacgcccccgaucaaggacuucggcggguucaacuucagccagauccugcccgaccccuccaagcccagcaagcgguccuucaucgaggaccuccuguucaacaaggugacccuggccgacgccggcuucaucaagcaguacggcgacugccucggggacaucgcggcccgcgaccugaucugcgcccagaaguucaacggccugaccgugcucccgccccugcugaccgacgagaugaucgcccaguacaccagcgcccuccuggcggggaccaucacguccggcuggaccuucggggccggcgccgcccugcagauccccuucgcgaugcagauggccuaccgguucaacggcaucggggucacccagaacgugcucuacgagaaccagaagcugaucgccaaccaguucaacagcgccaucggcaagauccaggacucccugagcuccaccgccagcgcgcucgggaagcugcaggacguggucaaccagaacgcccaggcccugaacacgcucgugaagcagcuguccagcaacuucggcgccaucuccagcgugcugaacgacauccucucccgccuggacaaggucgaggccgaggugcagaucgaccggcugaucaccgggcgccuccagagccugcagaccuacgugacccagcagcugauccgggcggccgagauccgcgccagcgccaaccucgccgcgaccaagauguccgagugcguccugggccagagcaagcggguggacuucugcggcaagggguaccaccugauguccuucccccagagcgccccgcacggcguggucuuccuccacgugacguacguccccgcccaggagaagaacuucaccaccgcccccgcgaucugccacgacgggaaggcccacuucccccgcgagggcguguucguguccaacgggacccacugguucgucacgcagcggaacuucuacgagccgcagaucaucaccaccgacaacaccuucgugagcggcaacugcgacguggucaucggcaucgugaacaacacgguguacgacccccugcagcccgagcuggacuccuucaaggaggagcucgacaaguacuucaagaaccacaccagccccgacgucgaccugggggacaucuccggcaucaacgccagcguggugaacauccagaaggagaucgaccgccugaacgaggucgccaagaaccucaacgagucccugaucgaccugcaggagcucgggaaguacgagcaguacaucaaguggccgugguacaucuggcugggcuucaucgccggccugaucgcgaucgugauggugaccaucaugcucugcugcaugaccagcugcugcuccugccugaaggggugcugcagcugcggcuccugcugcaaguucgacgaggacgacagcgagcccguccugaagggggugaagcuccacuacacgugaggacuaguuauaagacugacuagcccgaugggccucccaacgggcccuccuccccuccuugcaccgagauuaauaaaaaaaaaaaaaaaaaaaaaaaaaaaaaaaaaaaaaaaaaaaaaaaaaaaaaaaaaaaaaaaaugcaucccccccccccccccccccccccccccccccaaaggcucuuuucagagccaccagaauu

SEQ ID NO: 12771 - RNA, 4039 nt, Artificial Sequence
  SARS-CoV-2/France/HF1805/2020__EPI_ISL_414628 spike protein mRNA gc (1-1273)
aggagaaagcuuaccauguucguguuccugguccuccugccccuggugagcucccagugcgugaaccucaccacccgcacgcagcugccgcccgccuacaccaacagcuucacccggggcgucuacuaccccgacaagguguuccgcuccagcgugcugcacuccacccaggaccucuuccugcccuucuucagcaacgucacgugguuccacgccauccacguguccgggaccaacggcaccaagcgguucgacaacccggugcugcccuucaacgacggggucuacuucgcgagcaccgagaaguccaacaucauccgcggcuggaucuucgggacgacccucgacagcaagacccagucccugcugaucgugaacaacgccaccaacguggucaucaaggugugcgaguuccaguucugcaacgaccccuuccucggcguguacuaccacaagaacaacaagagcuggauggaguccgaguuccgggucuacagcuccgccaacaacugcacguucgaguacgugagccagcccuuccugauggaccuggagggcaagcaggggaacuucaagaaccuccgcgaguucguguucaagaacaucgacggcuacuucaagaucuacuccaagcacaccccgaucaaccugguccgggaccugccccagggguucagcgcccucgagccccugguggaccugcccaucggcaucaacaucacccgcuuccagacccuccuggcccugcaccgguccuaccucacgccgggggacagcagcuccggcuggaccgcgggcgccgccgccuacuacgugggguaccugcagccccgcaccuuccugcucaaguacaacgagaacggcaccaucacggacgcggucgacugcgcccuggacccccugagcgagaccaagugcacccucaaguccuucaccguggagaaggggaucuaccagacgagcaacuuccgggugcagcccaccgaguccaucguccgcuucccgaacaucaccaaccugugccccuucggcgagguguucaacgccacccgguucgccagcgucuacgccuggaaccgcaagcggaucuccaacugcguggcggacuacagcgugcuguacaacuccgccagcuucuccacguucaagugcuacggcgucagccccaccaagcucaacgaccugugcuucaccaacguguacgccgacuccuucgugauccgcggggacgagguccggcagaucgcccccggccagaccgggaagaucgccgacuacaacuacaagcugccggacgacuucacgggcugcgugaucgcguggaacagcaacaaccucgacuccaaggucgggggcaacuacaacuaccuguaccgccuguuccgcaagagcaaccucaagcccuucgagcgggacaucuccaccgagaucuaccaggccggcagcacccccugcaacgggguggagggcuucaacugcuacuucccccugcaguccuacggguuccagccgaccaacggcgugggguaccagcccuaccggguggucgugcugagcuucgagcuccugcacgcccccgccacggugugcggccccaagaaguccaccaaccuggucaagaacaagugcgugaacuucaacuucaacggccucaccgggaccggcgugcugaccgagagcaacaagaaguuccugccguuccagcaguucgggcgcgacaucgccgacacgaccgacgcgguccgcgacccccagacccuggagauccucgacaucacccccugcagcuucggcgggguguccgugaucacgccgggcaccaacaccagcaaccaggucgccgugcuguaccagggcgugaacugcaccgagguccccguggccauccacgccgaccagcugacgcccaccuggcggguguacuccaccgggagcaacgucuuccagacccgcgccggcugccucaucggggcggagcacgugaacaacuccuacgagugcgacauccccaucggcgccggcaucugcgccagcuaccagacgcagaccaacuccccgcggcgcgcccggagcguggcgucccagagcaucaucgccuacaccaugucccugggggccgagaacagcgucgccuacuccaacaacagcaucgccauccccaccaacuucacgaucuccgugaccaccgagauccugcccgugagcaugaccaagacgagcgucgacugcaccauguacaucugcggcgacuccaccgagugcagcaaccuccugcugcaguacggguccuucugcacccagcucaaccgcgcgcugacgggcaucgccguggagcaggacaagaacacccaggagguguucgcccaggucaagcagaucuacaagacgcccccgaucaaggacuucgggggcuucaacuucagccagauccugcccgaccccuccaagcccagcaagcgguccuucaucgaggaccuccuguucaacaaggugacccuggccgacgccggcuucaucaagcaguacggggacugccucggcgacaucgcggcccgcgaccugaucugcgcccagaaguucaacgggcugaccgugcucccgccccugcugaccgacgagaugaucgcccaguacaccagcgcccuccuggcgggcaccaucacguccggguggaccuucggcgccggcgccgcccugcagauccccuucgcgaugcagauggccuaccgguucaacgggaucggcgucacccagaacgugcucuacgagaaccagaagcugaucgccaaccaguucaacagcgccaucgggaagauccaggacucccugagcuccaccgccagcgcgcucggcaagcugcaggacguggucaaccagaacgcccaggcccugaacacgcucgugaagcagcuguccagcaacuucggggccaucuccagcgugcugaacgacauccucucccgccuggacaaggucgaggccgaggugcagaucgaccggcugaucaccggccgccuccagagccugcagaccuacgugacccagcagcugauccgggcggccgagauccgcgccagcgccaaccucgccgcgaccaagauguccgagugcguccugggccagagcaagcggguggacuucugcgggaagggcuaccaccugauguccuucccccagagcgccccgcacgggguggucuuccuccacgugacguacguccccgcccaggagaagaacuucaccaccgcccccgcgaucugccacgacggcaaggcccacuucccccgcgaggggguguucguguccaacggcacccacugguucgucacgcagcggaacuucuacgagccgcagaucaucaccaccgacaacaccuucgugagcggcaacugcgacguggucaucgggguggugaacaacacggucuacgacccccugcagcccgagcuggacuccuucaaggaggagcucgacaaguacuucaagaaccacaccagccccgacguggaccugggcgacaucuccgggaucaacgccagcguggucaacauccagaaggagaucgaccgccugaacgagguggccaagaaccucaacgagucccugaucgaccugcaggagcucggcaaguacgagcaguacaucaaguggccgugguacaucuggcugggcuucaucgccgggcugaucgcgaucgugauggucaccaucaugcucugcugcaugaccagcugcugcuccugccugaagggcugcugcagcugcggguccugcugcaaguucgacgaggacgacagcgagcccgugcugaagggcgugaagcuccacuacacgugaggacuaguuauaagacugacuagcccgaugggccucccaacgggcccuccuccccuccuugcaccgagauuaauaaaaaaaaaaaaaaaaaaaaaaaaaaaaaaaaaaaaaaaaaaaaaaaaaaaaaaaaaaaaaaaaugcaucccccccccccccccccccccccccccccccaaaggcucuuuucagagccaccagaauu

SEQ ID NO: 12772 - RNA, 4039 nt, Artificial Sequence
  SARS-CoV-2/Netherlands/ZuidHolland_9/2020__EPI_ISL_414445 spike protein mRNA gc (1-1273)
aggagaaagcuuaccauguucguguuccugguccuccugccccuggugagcucccagugcgugaaccucaccacccgcacgcagcugccgcccgccuacaccaacagcuucacccggggcgucuacuaccccgacaagguguuccgcuccagcgugcugcacuccacccaggaccucuuccugcccuucuucagcaacgucacgugguuccacgccauccacguguccgggaccaacggcaccaagcgguucgacaacccggugcugcccuucaacgacggggucuacuucgcgagcaccgagaaguccaacaucauccgcggcuggaucuucgggacgacccucgacagcaagacccagucccugcugaucgugaacaacgccaccaacguggucaucaaggugugcgaguuccaguucugcaacgaccccuuccucggcguguacuaccacaagaacaacaagagcuggauggaguccgaguuccgggucuacagcuccgccaacaacugcacguucgaguacgugagccagcccuuccugauggaccuggagggcaagcaggggaacuucaagaaccuccgcgaguucguguucaagaacaucgacggcuacuucaagaucuacuccaagcacaccccgaucaaccugguccgggaccugccccagggguucagcgcccucgagccccugguggaccugcccaucggcaucaacaucacccgcuuccagacccuccuggcccugcaccgguccuaccucacgccgggggacagcagcuccggcuggaccgcgggcgccgccgccuacuacgugggguaccugcagccccgcaccuuccugcucaaguacaacgagaacggcaccaucacggacgcggucgacugcgcccuggacccccugagcgagaccaagugcacccucaaguccuucaccguggagaaggggaucuaccagacgagcaacuuccgggugcagcccaccgaguccaucguccgcuucccgaacaucaccaaccugugccccuucggcgagguguucaacgccacccgguucgccagcgucuacgccuggaaccgcaagcggaucuccaacugcguggcggacuacagcgugcuguacaacuccgccagcuucuccacguucaagugcuacggcgucagccccaccaagcucaacgaccugugcuucaccaacguguacgccgacuccuucgugauccgcggggacgagguccggcagaucgcccccggccagaccgggaagaucgccgacuacaacuacaagcugccggacgacuucacgggcugcgugaucgcguggaacagcaacaaccucgacuccaaggucgggggcaacuacaacuaccuguaccgccuguuccgcaagagcaaccucaagcccuucgagcgggacaucuccaccgagaucuaccaggccggcagcacccccugcaacgggguggagggcuucaacugcuacuucccccugcaguccuacggguuccagccgaccaacggcgugggguaccagcccuaccggguggucgugcugagcuucgagcuccugcacgcccccgccacggugugcggccccaagaaguccaccaaccuggucaagaacaagugcgugaacuucaacuucaacggccucaccgggaccggcgugcugaccgagagcaacaagaaguuccugccguuccagcaguucgggcgcgacaucgccgacacgaccgacgcgguccgcgacccccagacccuggagauccucgacaucacccccugcagcuucggcgggguguccgugaucacgccgggcaccaacaccagcaaccaggucgccgugcuguaccagggcgugaacugcaccgagguccccguggccauccacgccgaccagcugacgcccaccuggcggguguacuccaccgggagcaacgucuuccagacccgcgccggcugccucaucggggcggagcacgugaacaacuccuacgagugcgacauccccaucggcgccggcaucugcgccagcuaccagacgcagaccaacuccccgcggcgcgcccggagcguggcgucccagagcaucaucgccuacaccaugucccugggggccgagaacagcgucgccuacuccaacaacagcaucgccauccccaccaacuucacgaucuccgugaccaccgagauccugcccgugagcaugaccaagacgagcgucgacugcaccauguacaucugcggcgacuccaccgagugcagcaaccuccugcugcaguacggguccuucugcacccagcucaaccgcgcgcugacgggcaucgccguggagcaggacaagaacacccaggagguguucgcccaggucaagcagaucuacaagacgcccccgaucaaggacuucgggggcuucaacuucagccagauccugcccgaccccuccaagcccagcaagcgguccuucaucgaggaccuccuguucaacaaggugacccuggccgacgccggcuucaucaagcaguacggggacugccucggcgacaucgcggcccgcgaccugaucugcgugcagaaguucaacgggcugaccguccucccgccccugcugaccgacgagaugaucgcccaguacaccagcgcccuccuggccggcaccaucacguccggguggaccuucggcgcgggcgccgcccugcagauccccuucgccaugcagauggcguaccgguucaacgggaucggcgugacccagaacgugcucuacgagaaccagaagcugaucgccaaccaguucaacagcgccaucgggaagauccaggacucccugagcuccaccgccagcgcccucggcaagcugcaggacgucgugaaccagaacgcgcaggcccugaacacgcucgugaagcagcuguccagcaacuucggggccaucuccagcguccugaacgacauccucucccgccuggacaagguggaggccgaggugcagaucgaccggcugaucaccggccgccuccagagccugcagaccuacgucacccagcagcugauccgggccgcggagauccgcgccagcgccaaccucgccgccaccaagauguccgagugcgugcugggccagagcaagcggguggacuucugcgggaagggcuaccaccugauguccuucccccagagcgcgccgcacggggucguguuccuccacgucacguacgugcccgcccaggagaagaacuucaccaccgcccccgccaucugccacgacggcaaggcgcacuucccccgcgaggggguguucgucuccaacggcacccacugguucgugacgcagcggaacuucuacgagccgcagaucaucaccaccgacaacaccuucgugagcggcaacugcgacgucgugaucgggaucgugaacaacacggucuacgacccccugcagcccgagcuggacuccuucaaggaggagcucgacaaguacuucaagaaccacaccagccccgacguggaccugggcgacaucuccgggaucaacgccagcguggucaacauccagaaggagaucgaccgccugaacgagguggccaagaaccucaacgagucccugaucgaccugcaggagcucggcaaguacgagcaguacaucaaguggccgugguacaucuggcugggcuucaucgccgggcugaucgccaucgugauggucaccaucaugcucugcugcaugaccagcugcugcuccugccugaagggcugcugcagcugcggguccugcugcaaguucgacgaggacgacagcgagcccgugcugaagggcgugaagcuccacuacacgugaggacuaguuauaagacugacuagcccgaugggccucccaacgggcccuccuccccuccuugcaccgagauuaauaaaaaaaaaaaaaaaaaaaaaaaaaaaaaaaaaaaaaaaaaaaaaaaaaaaaaaaaaaaaaaaaugcaucccccccccccccccccccccccccccccccaaaggcucuuuucagagccaccagaauu

SEQ ID NO: 12773 - RNA, 4039 nt, Artificial Sequence
  SARS-CoV-2/Finland/FIN03032020A/2020__EPI_ISL_413602 spike protein mRNA gc (1-1273)
aggagaaagcuuaccauguucguguuccugguccuccugccccuggugagcucccagugcgugaaccucaccacccgcacgcagcugccgcccgccuacaccaacagcuucacccggggcgucuacuaccccgacaagguguuccgcuccagcgugcugcacuccacccaggaccucuuccugcccuucuucagcaacgucacgugguuccacgccauccacguguccgggaccaacggcaccaagcgguucgacaacccggugcugcccuucaacgacggggucuacuucgcgagcaccgagaaguccaacaucauccgcggcuggaucuucgggacgacccucgacagcaagacccagucccugcugaucgugaacaacgccaccaacguggucaucaaggugugcgaguuccaguucugcaacgaccccuuccucggcguguacuaccacaagaacaacaagagcuggauggaguccgaguuccgggucuacagcuccgccaacaacugcacguucgaguacgugagccagcccuuccugauggaccuggagggcaagcaggggaacuucaagaaccuccgcgaguucguguucaagaacaucgacggcuacuucaagaucuacuccaagcacaccccgaucaaccugguccgggaccugccccagggguucagcgcccucgagccccugguggaccugcccaucggcaucaacaucacccgcuuccagacccuccuggcccugcaccgguccuaccucacgccgggggacagcagcuccggcuggaccgcgggcgccgccgccuacuacgugggguaccugcagccccgcaccuuccugcucaaguacaacgagaacggcaccaucacggacgcggucgacugcgcccuggacccccugagcgagaccaagugcacccucaaguccuucaccguggagaaggggaucuaccagacgagcaacuuccgggugcagcccaccgaguccaucguccgcuucccgaacaucaccaaccugugccccuucggcgagguguucaacgccacccgguucgccagcgucuacgccuggaaccgcaagcggaucuccaacugcguggcggacuacagcgugcuguacaacuccgccagcuucuccacguucaagugcuacggcgucagccccaccaagcucaacgaccugugcuucaccaacguguacgccgacuccuucgugauccgcggggacgagguccggcagaucgcccccggccagaccgggaagaucgccgacuacaacuacaagcugccggacgacuucacgggcugcgugaucagcuggaacuccaacaaccucgacagcaaggucgggggcaacuacaacuaccuguaccgccuguuccggaaguccaaccucaagcccuucgagcgcgacaucagcaccgagaucuaccaggcgggcuccacccccugcaacgggguggagggcuucaacugcuacuucccccugcagagcuacggguuccagccgaccaacggcgugggguaccagcccuaccggguggucgugcugagcuucgagcuccugcacgcccccgccacggugugcggccccaagaaguccaccaaccuggucaagaacaagugcgugaacuucaacuucaacggccucaccgggaccggcgugcugaccgagagcaacaagaaguuccugccguuccagcaguucgggcgcgacaucgccgacacgaccgacgccguccgcgacccccagacccuggagauccucgacaucacccccugcuccuucggcggggugagcgugaucacgccgggcaccaacaccuccaaccaggucgcggugcuguaccagggcgugaacugcaccgagguccccguggccauccacgccgaccagcugacgcccaccuggcggguguacagcaccggguccaacgucuuccagacccgcgccggcugccucaucggggccgagcacgugaacaacagcuacgagugcgacauccccaucggcgcgggcaucugcgccuccuaccagacgcagaccaacagcccgcggcgcgcccgguccguggccagccaguccaucaucgcguacaccaugagccugggggccgagaacuccgucgccuacagcaacaacuccaucgccauccccaccaacuucacgaucagcgugaccaccgagauccugcccgugagcaugaccaagacguccgucgacugcaccauguacaucugcggcgacagcaccgagugcuccaaccuccugcugcaguacgggagcuucugcacccagcucaaccgcgcccugacgggcaucgcgguggagcaggacaagaacacccaggagguguucgcccaggucaagcagaucuacaagacgcccccgaucaaggacuucgggggcuucaacuucucccagauccugcccgaccccagcaagcccuccaagcggagcuucaucgaggaccuccuguucaacaaggugacccuggccgacgccggcuucaucaagcaguacggggacugccucggcgacaucgccgcgcgcgaccugaucugcgcccagaaguucaacgggcugaccgugcucccgccccugcugaccgacgagaugaucgcccaguacaccuccgcccuccuggccggcaccaucacgagcggguggaccuucggcgcgggcgccgcccugcagauccccuucgccaugcagauggcguaccgguucaacgggaucggcgucacccagaacgugcucuacgagaaccagaagcugaucgccaaccaguucaacuccgccaucgggaagauccaggacagccuguccagcaccgccuccgcccucggcaagcugcaggacguggucaaccagaacgcgcaggcccugaacacgcucgugaagcagcugagcuccaacuucggggccaucagcuccgugcugaacgacauccucagccgccuggacaaggucgaggccgaggugcagaucgaccggcugaucaccggccgccuccagagccugcagaccuacgugacccagcagcugauccgggccgcggagauccgcgccuccgccaaccucgccgccaccaagaugagcgagugcguccugggccaguccaagcggguggacuucugcgggaagggcuaccaccugaugagcuucccccaguccgcgccgcacgggguggucuuccuccacgugacguacguccccgcccaggagaagaacuucaccaccgcccccgccaucugccacgacggcaaggcgcacuucccccgcgaggggguguucgugagcaacggcacccacugguucgucacgcagcggaacuucuacgagccgcagaucaucaccaccgacaacaccuucguguccggcaacugcgacguggucaucgggaucgugaacaacacgguguacgacccccugcagcccgagcuggacagcuucaaggaggagcucgacaaguacuucaagaaccacaccucccccgacgucgaccugggcgacaucagcgggaucaacgccuccguggugaacauccagaaggagaucgaccgccugaacgaggucgccaagaaccucaacgagagccugaucgaccugcaggagcucggcaaguacgagcaguacaucaaguggccgugguacaucuggcugggcuucaucgccgggcugaucgccaucgugauggugaccaucaugcucugcugcaugaccuccugcugcagcugccugaagggcugcugcuccugcgggagcugcugcaaguucgacgaggacgacuccgagcccguccugaagggcgugaagcuccacuacacgugaggacuaguuauaagacugacuagcccgaugggccucccaacgggcccuccuccccuccuugcaccgagauuaauaaaaaaaaaaaaaaaaaaaaaaaaaaaaaaaaaaaaaaaaaaaaaaaaaaaaaaaaaaaaaaaaugcaucccccccccccccccccccccccccccccccaaaggcucuuuucagagccaccagaauu

SEQ ID NO: 12774 - RNA, 4039 nt, Artificial Sequence
  SARS-CoV-2/France/GE1977/2020__EPI_ISL_414632 spike protein mRNA gc (1-1273)
aggagaaagcuuaccauguucguguuccugguccuccugccccuggugagcucccagugcgugaaccucaccacccgcacgcagcugccgcccgccuacaccaacagcuucacccggggcgucuacuaccccgacaagguguuccgcuccagcgugcugcacuccacccaggaccucuuccugcccuucuucagcaacgucacgugguuccacgccauccacguguccgggaccaacggcaccaagcgguucgacaacccggugcugcccuucaacgacggggucuacuucgcgagcaccgagaaguccaacaucauccgcggcuggaucuucgggacgacccucgacagcaagacccagucccugcugaucgugaacaacgccaccaacguggucaucaaggugugcgaguuccaguucugcaacgaccccuuccucggcguguacuaccacaagaacaacaagagcuggauggaguccgaguuccgggucuacagcuccgccaacaacugcacguucgaguacgugagccagcccuuccugauggaccuggagggcaagcaggggaacuucaagaaccuccgcgaguucguguucaagaacaucgacggcuacuucaagaucuacuccaagcacaccccgaucaaccugguccgggaccugccccagggguucagcgcccucgagccccugguggaccugcccaucggcaucaacaucacccgcuuccagacccuccuggcccugcaccgguccuaccucacgccgggggacagcagcuccggcuggaccgcgggcgccgccgccuacuacgugggguaccugcagccccgcaccuuccugcucaaguacaacgagaacggcaccaucacggacgcggucgacugcgcccuggacccccugagcgagaccaagugcacccucaaguccuucaccguggagaaggggaucuaccagacgagcaacuuccgggugcagcccaccgaguccaucguccgcuucccgaacaucaccaaccugugccccuucggcgagguguucaacgccacccgguucgccagcgucuacgccuggaaccgcaagcggaucuccaacugcguggcggacuacagcgugcuguacaacuccgccagcuucuccacguucaagugcuacggcgucagccccaccaagcucaacgaccugugcuucaccaacguguacgccgacuccuucgugauccgcggggacgagguccggcagaucgcccccggccagaccgggaagaucgccgacuacaacuacaagcugccggacgacuucacgggcugcgugaucgcguggaacagcaacaaccucgacuccaaggucgggggcaacuacaacuaccuguaccgccuguuccgcaagagcaaccucaagcccuucgagcgggacaucuccaccgagaucuaccaggccggcagcacccccugcaacgggguggagggcuucaacugcuacuucccccugcaguccuacggguuccagccgaccaacggcgugggguaccagcccuaccggguggucgugcugagcuucgagcuccugcacgcccccgccacggugugcggccccaagaaguccaccaaccuggucaagaacaagugcgugaacuucaacuucaacggccucaccgggaccggcgugcugaccgagagcaacaagaaguuccugccguuccagcaguucgggcgcgacaucgccgacacgaccgacgcgguccgcgacccccagacccuggagauccucgacaucacccccugcagcuucggcgggguguccgugaucacgccgggcaccaacaccagcaaccaggucgccgugcuguaccagggcgugaacugcaccgagguccccguggccauccacgccgaccagcugacgcccaccuggcggguguacuccaccgggagcaacgucuuccagacccgcgccggcugccucaucggggcggagcacgugaacaacuccuacgagugcgacauccccaucggcgccggcaucugcgccagcuaccagacgcagaccaacuccccgcggcgcgcccggagcguggcgucccagagcaucaucgccuacaccaugucccugggggccgagaacagcgucgccuacuccaacaacagcaucgccauccccaccaacuucacgaucuccgugaccaccgagauccugcccgugagcaugaccaagacgagcgucgacugcaccauguacaucugcggcgacuccaccgagugcagcaaccuccugcugcaguacggguccuucugcacccagcucaaccgcgcgcugacgggcaucgccguggagcaggacaagaacacccaggagguguucgcccaggucaagcagaucuacaagacgcccccgaucaaggacuucgggggcuucaacuucagccagauccugcccgaccccuccaagcccagcaagcgguccuucaucgaggaccuccuguucaacaaggugacccuggccgacgccggcuucaucaagcaguacggggacugccucggcgacaucgcggcccgcgaccugaucugcgcccagaaguucaacgggcugaccgugcucccgccccugcugaccgacgagaugaucgcccaguacaccagcgcccuccuggcgggcaccaucacguccggguggaccuucggcgccggcgccgcccugcagauccccuucgcgaugcagauggccuaccgguucaacgggaucggcgucacccagaacgugcucuacgagaaccagaagcugaucgccaaccaguucaacagcgccaucgggaagauccaggacucccuguucagcaccgccuccgcgcucggcaagcugcaggacguggucaaccagaacgcccaggcccugaacacgcucgugaagcagcugagcuccaacuucggggccaucagcuccgugcugaacgacauccucagccgccuggacaaggucgaggccgaggugcagaucgaccggcugaucaccggccgccuccagucccugcagaccuacgugacccagcagcugauccgggcggccgagauccgcgccagcgccaaccucgccgcgaccaagaugagcgagugcguccugggccaguccaagcggguggacuucugcgggaagggcuaccaccugaugagcuucccccaguccgccccgcacgggguggucuuccuccacgugacguacguccccgcccaggagaagaacuucaccaccgcccccgcgaucugccacgacggcaaggcccacuucccccgcgaggggguguucgugagcaacggcacccacugguucgucacgcagcggaacuucuacgagccgcagaucaucaccaccgacaacaccuucguguccggcaacugcgacguggucaucgggaucgugaacaacacgguguacgacccccugcagcccgagcuggacagcuucaaggaggagcucgacaaguacuucaagaaccacaccucccccgacgucgaccugggcgacaucagcgggaucaacgccuccguggugaacauccagaaggagaucgaccgccugaacgaggucgccaagaaccucaacgagagccugaucgaccugcaggagcucggcaaguacgagcaguacaucaaguggccgugguacaucuggcugggcuucaucgccgggcugaucgcgaucgugauggugaccaucaugcucugcugcaugaccuccugcugcagcugccugaagggcugcugcuccugcgggagcugcugcaaguucgacgaggacgacuccgagcccguccugaagggcgugaagcuccacuacacgugaggacuaguuauaagacugacuagcccgaugggccucccaacgggcccuccuccccuccuugcaccgagauuaauaaaaaaaaaaaaaaaaaaaaaaaaaaaaaaaaaaaaaaaaaaaaaaaaaaaaaaaaaaaaaaaaugcaucccccccccccccccccccccccccccccccaaaggcucuuuucagagccaccagaauu

SEQ ID NO: 12775 - RNA, 4039 nt, Artificial Sequence
  SARS-CoV-2/Finland/FIN-313/2020__EPI_ISL_414641 spike protein mRNA gc (1-1273)
aggagaaagcuuaccauguucguguuccugguccuccugccccuggugagcucccagugcgugaaccucaccacccgcacgcagcugccgcccgccuacaccaacagcuucacccggggcgucuacuaccccgacaagguguuccgcuccagcgugcugcacuccacccaggaccucuuccugcccuucuucagcaacgucacgugguuccacgccauccacguguccgggaccaacggcaccaagcgguucgacaacccggugcugcccuucaacgacggggucuacuucgcgagcaccgagaaguccaacaucauccgcggcuggaucuucgggacgacccucgacagcaagacccagucccugcugaucgugaacaacgccaccaacguggucaucaaggugugcgaguuccaguucugcaacgaccccuuccucggcguguacuaccacaagaacaacaagagcuggauggaguccgaguuccgggucuacagcuccgccaacaacugcacguucgaguacgugagccagcccuuccugauggaccuggagggcaagcaggggaacuucaagaaccuccgcgaguucguguucaagaacaucgacggcuacuucaagaucuacuccaagcacaccccgaucaaccugguccgggaccugccccagggguucagcgcccucgagccccugguggaccugcccaucggcaucaacaucacccgcuucaagacccuccuggcccugcaccgguccuaccucacgccgggggacagcagcuccggcuggaccgcgggcgccgccgccuacuacgugggguaccugcagccccgcaccuuccugcucaaguacaacgagaacggcaccaucacggacgcggucgacugcgcccuggacccccugagcgagaccaagugcacccucaaguccuucaccguggagaaggggaucuaccagacgagcaacuuccgggugcagcccaccgaguccaucguccgcuucccgaacaucaccaaccugugccccuucggcgagguguucaacgccacccgguucgccagcgucuacgccuggaaccgcaagcggaucuccaacugcguggcggacuacagcgugcuguacaacuccgccagcuucuccacguucaagugcuacggcgucagccccaccaagcucaacgaccugugcuucaccaacguguacgccgacuccuucgugauccgcggggacgagguccggcagaucgcccccggccagaccgggaagaucgccgacuacaacuacaagcugccggacgacuucacgggcugcgugaucgcguggaacagcaacaaccucgacuccaaggucgggggcaacuacaacuaccuguaccgccuguuccgcaagagcaaccucaagcccuucgagcgggacaucuccaccgagaucuaccaggccggcagcacccccugcaacgggguggagggcuucaacugcuacuucccccugcaguccuacggguuccagccgaccaacggcgugggguaccagcccuaccggguggucgugcugagcuucgagcuccugcacgcccccgccacggugugcggccccaagaaguccaccaaccuggucaagaacaagugcgugaacuucaacuucaacggccucaccgggaccggcgugcugaccgagagcaacaagaaguuccugccguuccagcaguucgggcgcgacaucgccgacacgaccgacgcgguccgcgacccccagacccuggagauccucgacaucacccccugcagcuucggcgggguguccgugaucacgccgggcaccaacaccagcaaccaggucgccgugcuguaccagggcgugaacugcaccgagguccccguggccauccacgccgaccagcugacgcccaccuggcggguguacuccaccgggagcaacgucuuccagacccgcgccggcugccucaucggggcggagcacgugaacaacuccuacgagugcgacauccccaucggcgccggcaucugcgccagcuaccagacgcagaccaacuccccgcggcgcgcccggagcguggcgucccagagcaucaucgccuacaccaugucccugggggccgagaacagcgucgccuacuccaacaacagcaucgccauccccaccaacuucacgaucuccgugaccaccgagauccugcccgugagcaugaccaagacgagcgucgacugcaccauguacaucugcggcgacuccaccgagugcagcaaccuccugcugcaguacggguccuucugcacccagcucaaccgcgcgcugacgggcaucgccguggagcaggacaagaacacccaggagguguucgcccaggucaagcagaucuacaagacgcccccgaucaaggacuucgggggcuucaacuucagccagauccugcccgaccccuccaagcccagcaagcgguccuucaucgaggaccuccuguucaacaaggugacccuggccgacgccggcuucaucaagcaguacggggacugccucggcgacaucgcggcccgcgaccugaucugcgcccagaaguucaacgggcugaccgugcucccgccccugcugaccgacgagaugaucgcccaguacaccagcgcccuccuggcgggcaccaucacguccggguggaccuucggcgccggcgccgcccugcagauccccuucgcgaugcagauggccuaccgguucaacgggaucggcgucacccagaacgugcucuacgagaaccagaagcugaucgccaaccaguucaacagcgccaucgggaagauccaggacucccugagcuccaccgccagcgcgcucggcaagcugcaggacguggucaaccagaacgcccaggcccugaacacgcucgugaagcagcuguccagcaacuucggggccaucuccagcgugcugaacgacauccucucccgccuggacaaggucgaggccgaggugcagaucgaccggcugaucaccggccgccuccagagccugcagaccuacgugacccagcagcugauccgggcggccgagauccgcgccagcgccaaccucgccgcgaccaagauguccgagugcguccugggccagagcaagcggguggacuucugcgggaagggcuaccaccugauguccuucccccagagcgccccgcacgggguggucuuccuccacgugacguacguccccgcccaggagaagaacuucaccaccgcccccgcgaucugccacgacggcaaggcccacuucccccgcgaggggguguucguguccaacggcacccacugguucgucacgcagcggaacuucuacgagccgcagaucaucaccaccgacaacaccuucgugagcggcaacugcgacguggucaucgggaucgugaacaacacgguguacgacccccugcagcccgagcuggacuccuucaaggaggagcucgacaaguacuucaagaaccacaccagccccgacgucgaccugggcgacaucuccgggaucaacgccagcguggugaacauccagaaggagaucgaccgccugaacgaggucgccaagaaccucaacgagucccugaucgaccugcaggagcucggcaaguacgagcaguacaucaaguggccgugguacaucuggcugggcuucaucgccgggcugaucgcgaucgugauggugaccaucaugcucugcugcaugaccagcugcugcuccugccugaagggcugcugcagcugcggguccugcugcaaguucgacgaggacgacagcgagcccguccugaagggcgugaagcuccacuacacgugaggacuaguuauaagacugacuagcccgaugggccucccaacgggcccuccuccccuccuugcaccgagauuaauaaaaaaaaaaaaaaaaaaaaaaaaaaaaaaaaaaaaaaaaaaaaaaaaaaaaaaaaaaaaaaaaugcaucccccccccccccccccccccccccccccccaaaggcucuuuucagagccaccagaauu

SEQ ID NO: 12776 - RNA, 4039 nt, Artificial Sequence
  SARS-CoV-2/Netherlands/ZuidHolland_2/2020__EPI_ISL_414556 spike protein mRNA gc (1-1273)
aggagaaagcuuaccauguucguguuccugguccuccugccccuggugagcucccagugcgugaaccucaccacccgcacgcagcugccgcccgccuacaccaacagcuucacccggggcgucuacuaccccgacaagguguuccgcuccagcgugcugcacuccacccaggaccucuuccugcccuucuucagcaacgucacgugguuccacgccauccacguguccgggaccaacggcaccaagcgguucgacaacccggugcugcccuucaacgacggggucuacuucgcgagcaccgagaaguccaacaucauccgcggcuggaucuucgggacgacccucgacagcaagacccagucccugcugaucgugaacaacgccaccaacguggucaucaaggugugcgaguuccaguucugcaacgaccccuuccucggcguguacuaccacaagaacaacaagagcuggauggaguccgaguuccgggucuacagcuccgccaacaacugcacguucgaguacgugagccagcccuuccugauggaccuggagggcaagcaggggaacuucaagaaccuccgcgaguucguguucaagaacaucgacggcuacuucaagaucuacuccaagcacaccccgaucaaccugguccgggaccugccccagggguucagcgcccucgagccccugguggaccugcccaucggcaucaacaucacccgcuuccagacccuccuggcccugcaccgguccuaccucacgccgggggacagcagcuccggcuggaccgcgggcgccgccgccuacuacgugggguaccugcagccccgcaccuuccugcucaaguacaacgagaacggcaccaucacggacgcggucgacugcgcccuggacccccugagcgagaccaagugcacccucaaguccuucaccguggagaaggggaucuaccagacgagcaacuuccgggugcagcccaccgaguccaucguccgcuucccgaacaucaccaaccugugccccuucggcgagguguucaacgccacccgguucgccagcgucuacgccuggaaccgcaagcggaucuccaacugcguggcggacuacagcgugcuguacaacuccgccagcuucuccacguucaagugcuacggcgucagccccaccaagcucaacgaccugugcuucaccaacguguacgccgacuccuucgugauccgcggggacgagguccggcagaucgcccccggccagaccgggaagaucgccgacuacaacuacaagcugccggacgacuucacgggcugcgugaucgcguggaacagcaacaaccucgacuccaaggucgggggcaacuacaacuaccuguaccgccuguuccgcaagagcaaccucaagcccuucgagcgggacaucuccaccgagaucuaccaggccggcagcacccccugcaacgggguggagggcuucaacugcuacuucccccugcaguccuacggguuccagccgaccaacggcgugggguaccagcccuaccggguggucgugcugagcuucgagcuccugcacgcccccgccacggugugcggccccaagaaguccaccaaccuggucaagaacaagugcgugaacuucaacuucaacggccucaccgggaccggcgugcugaccgagagcaacaagaaguuccugccguuccagcaguucgggcgcgacaucgccgacacgaccgacgcgguccgcgacccccagacccuggagauccucgacaucacccccugcagcuucggcgggguguccgugaucacgccgggcaccaacaccagcaaccaggucgccgugcuguaccagggcgugaacugcaccgagguccccguggccauccacgccgaccagcugacgcccaccuggcggguguacuccaccgggagcaacgucuuccagacccgcgccggcugccucaucggggcggagcacgugaacaacuccuacgagugcgacauccccaucggcgccggcaucugcgccagcuaccagacgcagaccaacuccccgcggcgcgcccggagcguggcgucccagagcaucaucgccuacaccaugucccugggggccgagaacagcgucgccuacuccaacaacagcaucgccauccccaccaacuucacgaucuccgugaccaccgagauccugcccgugagcaugaccaagacgagcgucgacugcaccauguacaucugcggcgacuccaccgagugcagcaaccuccugcugcaguacggguccuucugcacccagcucaaccgcgcgcugacgggcaucgcccuggagcaggacaagaacacccaggagguguucgcccaggugaagcagaucuacaagacgcccccgaucaaggacuucgggggcuucaacuucagccagauccuccccgaccccuccaagcccagcaagcgguccuucaucgaggaccugcuguucaacaaggucacccucgccgacgccggcuucaucaagcaguacggggacugccugggcgacaucgcggcccgcgaccugaucugcgcccagaaguucaacgggcucaccgugcugccgccccugcucaccgacgagaugaucgcccaguacaccagcgcccugcuggcgggcaccaucacguccggguggaccuucggcgccggcgccgcccuccagauccccuucgcgaugcagauggccuaccgguucaacgggaucggcgugacccagaacguccuguacgagaaccagaagcugaucgccaaccaguucaacagcgccaucgggaagauccaggacucccucagcuccaccgccagcgcgcugggcaagcugcaggacguggugaaccagaacgcccaggcccucaacacgcuggucaagcagcuguccagcaacuucggggccaucuccagcgugcucaacgacauccugucccgccuggacaagguggaggccgagguccagaucgaccggcucaucaccggccgccugcagagccugcagaccuacgugacccagcagcucauccgggcggccgagauccgcgccagcgccaaccuggccgcgaccaagauguccgagugcgugcugggccagagcaagcgggucgacuucugcgggaagggcuaccaccucauguccuucccccagagcgccccgcacggggugguguuccugcacgucacguacgugcccgcccaggagaagaacuucaccaccgcccccgcgaucugccacgacggcaaggcccacuucccccgcgagggggucuucguguccaacggcacccacugguucgugacgcagcggaacuucuacgagccgcagaucaucaccaccgacaacaccuucgucagcggcaacugcgacguggugaucgggaucgucaacaacacgguguacgacccccugcagcccgagcucgacuccuucaaggaggagcuggacaaguacuucaagaaccacaccagccccgacguggaccugggcgacaucuccgggaucaacgccagcgucgugaacauccagaaggagaucgaccgccucaacgagguggccaagaaccugaacgagucccugaucgaccuccaggagcugggcaaguacgagcaguacaucaaguggccgugguacaucuggcugggcuucaucgccgggcucaucgcgaucgucauggugaccaucaugcugugcugcaugaccagcugcugcuccugccugaagggcugcugcagcugcggguccugcugcaaguucgacgaggacgacagcgagcccgugcucaagggcgucaagcugcacuacacgugaggacuaguuauaagacugacuagcccgaugggccucccaacgggcccuccuccccuccuugcaccgagauuaauaaaaaaaaaaaaaaaaaaaaaaaaaaaaaaaaaaaaaaaaaaaaaaaaaaaaaaaaaaaaaaaaugcaucccccccccccccccccccccccccccccccaaaggcucuuuucagagccaccagaauu

SEQ ID NO: 12777 - RNA, 4039 nt, Artificial Sequence
  SARS-CoV-2/USA/WA-UW31/2020__EPI_ISL_414618 spike protein mRNA gc (1-1273)
aggagaaagcuuaccauguucguguuccugguccuccugccccuggugagcucccagugcgugaaccucaccacccgcacgcagcugccgcccgccuacaccaacagcuucacccggggcgucuacuaccccgacaagguguuccgcuccagcgugcugcacuccacccaggaccucuuccugcccuucuucagcaacgucacgugguuccacgccauccacguguccgggaccaacggcaccaagcgguucgacaacccggugcugcccuucaacgacggggucuacuucgcgagcaccgagaaguccaacaucauccgcggcuggaucuucgggacgacccucgacagcaagacccagucccugcugaucgugaacaacgccaccaacguggucaucaaggugugcgaguuccaguucugcaacgaccccuuccucggcguguacuaccacaagaacaacaagagcuggauggaguccgaguuccgggucuacagcuccgccaacaacugcacguucgaguacgugagccagcccuuccugauggaccuggagggcaagcaggggaacuucaagaaccuccgcgaguucguguucaagaacaucgacggcuacuucaagaucuacuccaagcacaccccgaucaaccugguccgggaccugccccagggguucagcgcccucgagccccugguggaccugcccaucggcaucaacaucacccgcuuccagacccuccuggcccugcaccgguccuaccucacgccgggggacagcagcuccggcuggaccgcgggcgccgccgccuacuacgugggguaccugcagccccgcaccuuccugcucaaguacaacgagaacggcaccaucacggacgcggucgacugcgcccuggacccccugagcgagaccaagugcacccucaaguccuucaccguggagaaggggaucuaccagacgagcaacuuccgggugcagcccaccgaguccaucguccgcuucccgaacaucaccaaccugugccccuucggcgagguguucaacgccacccgguucgccagcgucuacgccuggaaccgcaagcggaucuccaacugcguggcggacuacagcgugcuguacaacuccgccagcuucuccacguucaagugcuacggcgucagccccaccaagcucaacgaccugugcuucaccaacguguacgccgacuccuucgugauccgcggggacgagguccggcagaucgcccccggccagaccgggaagaucgccgacuacaacuacaagcugccggacgacuucacgggcugcgugaucgcguggaacagcaacaaccucgacuccaaggucgggggcaacuacaacuaccuguaccgccuguuccgcaagagcaaccucaagcccuucgagcgggacaucuccaccgagaucuaccaggccggcagcacccccugcaacggggccgagggcuucaacugcuacuucccccugcaguccuacggguuccagccgaccaacggcgugggguaccagcccuaccggguggugguccugagcuucgagcuccugcacgcccccgccacggugugcggccccaagaaguccaccaaccuggugaagaacaagugcgucaacuucaacuucaacggccucaccgggaccggcgugcugaccgagagcaacaagaaguuccugccguuccagcaguucgggcgcgacaucgcggacacgaccgacgccgugcgcgacccccagacccuggagauccucgacaucacccccugcagcuucggcggggucuccgugaucacgccgggcaccaacaccagcaaccagguggccguccuguaccaggacgugaacugcaccgaggugcccgucgccauccacgccgaccagcugacgcccaccuggcggguguacuccaccggcagcaacguguuccagacccgcgcggggugccucaucggcgccgagcacgucaacaacuccuacgagugcgacauccccaucggggccggcaucugcgccagcuaccagacgcagaccaacuccccgcggcgcgcgcggagcguggccucccagagcaucaucgccuacaccaugucccugggcgccgagaacagcguggccuacuccaacaacagcaucgcgauccccaccaacuucacgaucuccgucaccaccgagauccugcccgugagcaugaccaagacgagcguggacugcaccauguacaucugcggggacuccaccgagugcagcaaccuccugcugcaguacggcuccuucugcacccagcucaaccgcgcccugacggggaucgccgucgagcaggacaagaacacccaggagguguucgcccaggugaagcagaucuacaagacgcccccgaucaaggacuucggcggguucaacuucagccagauccugcccgaccccuccaagcccagcaagcgguccuucaucgaggaccuccuguucaacaaggucacccuggccgacgcgggcuucaucaagcaguacggcgacugccucggggacaucgccgcccgcgaccugaucugcgcccagaaguucaacggccugaccgugcucccgccccugcugaccgacgagaugaucgcccaguacaccagcgcgcuccuggccgggaccaucacguccggcuggaccuucggggccggcgccgcgcugcagauccccuucgccaugcagauggccuaccgguucaacggcaucggggugacccagaacguccucuacgagaaccagaagcugaucgccaaccaguucaacagcgccaucggcaagauccaggacucccugagcuccaccgcgagcgcccucgggaagcugcaggacguggugaaccagaacgcccaggcccugaacacgcucgucaagcagcuguccagcaacuucggcgccaucuccagcgugcugaacgacauccucucccgccuggacaagguggaggcggagguccagaucgaccggcugaucaccgggcgccuccagagccugcagaccuacgugacccagcagcugauccgggccgccgagauccgcgccagcgccaaccucgcggccaccaagauguccgagugcgugcugggccagagcaagcgggucgacuucugcggcaagggguaccaccugauguccuucccccagagcgccccgcacggcgugguguuccuccacgucacguacgugcccgcccaggagaagaacuucaccaccgcgcccgccaucugccacgacgggaaggcccacuucccccgcgagggcgucuucguguccaacgggacccacugguucgugacgcagcggaacuucuacgagccgcagaucaucaccaccgacaacaccuucgucagcggcaacugcgacguggugaucggcaucgucaacaacacgguguacgacccccugcagcccgagcuggacuccuucaaggaggagcucgacaaguacuucaagaaccacaccagccccgacguggaccugggggacaucuccggcaucaacgccagcgucgugaacauccagaaggagaucgaccgccugaacgagguggccaagaaccucaacgagucccugaucgaccugcaggagcucgggaaguacgagcaguacaucaaguggccgugguacaucuggcugggcuucaucgcgggccugaucgccaucgucauggugaccaucaugcucugcugcaugaccagcugcugcuccugccugaaggggugcugcagcugcggcuccugcugcaaguucgacgaggacgacagcgagcccgugcugaagggggucaagcuccacuacacgugaggacuaguuauaagacugacuagcccgaugggccucccaacgggcccuccuccccuccuugcaccgagauuaauaaaaaaaaaaaaaaaaaaaaaaaaaaaaaaaaaaaaaaaaaaaaaaaaaaaaaaaaaaaaaaaaugcaucccccccccccccccccccccccccccccccaaaggcucuuuucagagccaccagaauu

SEQ ID NO: 12778 - RNA, 4039 nt, Artificial Sequence
  SARS-CoV-2/South Korea/SNU01/2020__EPI_ISL_411929 spike protein mRNA gc (1-1273)
aggagaaagcuuaccauguucguguuccugguccuccugccccuggugagcucccagugcgugaaccucaccacccgcacgcagcugccgcccgccuacaccaacagcuucacccggggcgucuacuaccccgacaagguguuccgcuccagcgugcugcacuccacccaggaccucuuccugcccuucuucagcaacgucacgugguuccacgccauccacguguccgggaccaacggcaccaagcgguucgacaacccggugcugcccuucaacgacggggucuacuucgcgagcaccgagaaguccaacaucauccgcggcuggaucuucgggacgacccucgacagcaagacccagucccugcugaucgugaacaacgccaccaacguggucaucaaggugugcgaguuccaguucugcaacgaccccuuccucggcguguacuaccacaagaacaacaagagcuggauggaguccgaguuccgggucuacagcuccgccaacaacugcacguucgaguacgugagccagcccuuccugauggaccuggagggcaagcaggggaacuucaagaaccuccgcgaguucguguucaagaacaucgacggcuacuucaagaucuacuccaagcacaccccgaucaaccugguccgggaccugccccagggguucugggcccucgagccccugguggaccugcccaucggcaucaacaucacccgcuuccagacccuccuggcccugcaccggagcuaccucacgccgggggacuccagcagcggcuggaccgcgggcgccgccgccuacuacgugggguaccugcagccccgcaccuuccugcucaaguacaacgagaacggcaccaucacggacgcggucgacugcgcccuggacccccuguccgagaccaagugcacccucaagagcuucaccguggagaaggggaucuaccagacguccaacuuccgggugcagcccaccgagagcaucguccgcuucccgaacaucaccaaccugugccccuucggcgagguguucaacgccacccgguucgccuccgucuacgccuggaaccgcaagcggaucagcaacugcguggcggacuacuccgugcuguacaacagcgccuccuucagcacguucaagugcuacggcgucucccccaccaagcucaacgaccugugcuucaccaacguguacgccgacagcuucgugauccgcggggacgagguccggcagaucgcccccggccagaccgggaagaucgccgacuacaacuacaagcugccggacgacuucacgggcugcgugaucgcguggaacuccaacaaccucgacagcaaggucgggggcaacuacaacuaccuguaccgccuguuccggaaguccaaccucaagcccuucgagcgcgacaucagcaccgagaucuaccaggccggcuccacccccugcaacgggguggagggcuucaacugcuacuucccccugcagagcuacggguuccagccgaccaacggcgugggguaccagcccuaccggguggucgugcuguccuucgagcuccugcacgcccccgccacggugugcggccccaagaaguccaccaaccuggucaagaacaagugcgugaacuucaacuucaacggccucaccgggaccggcgugcugaccgagagcaacaagaaguuccugccguuccagcaguucgggcgcgacaucgccgacacgaccgacgcgguccgcgacccccagacccuggagauccucgacaucacccccugcagcuucggcggggugagcgugaucacgccgggcaccaacaccuccaaccaggucgccgugcuguaccaggacgugaacugcaccgagguccccguggccauccacgccgaccagcugacgcccaccuggcggguguacagcaccggcuccaacgucuuccagacccgcgccgggugccucaucggcgcggagcacgugaacaacagcuacgagugcgacauccccaucggggccggcaucugcgccuccuaccagacgcagaccaacagcccgcggcgcgcccgguccguggcgagccaguccaucaucgccuacaccaugagccugggcgccgagaacuccgucgccuacagcaacaacuccaucgccauccccaccaacuucacgaucagcgugaccaccgagauccugcccguguccaugaccaagacgagcgucgacugcaccauguacaucugcggggacagcaccgagugcuccaaccuccugcugcaguacggcagcuucugcacccagcucaaccgcgcgcugacggggaucgccguggagcaggacaagaacacccaggagguguucgcccaggucaagcagaucuacaagacgcccccgaucaaggacuucggcggguucaacuucucccagauccugcccgaccccagcaagcccuccaagcggagcuucaucgaggaccuccuguucaacaaggugacccuggccgacgccggcuucaucaagcaguacggcgacugccucggggacaucgcggcccgcgaccugaucugcgcccagaaguucaacggccugaccgugcucccgccccugcugaccgacgagaugaucgcccaguacaccuccgcccuccuggcggggaccaucacgagcggcuggaccuucggggccggcgccgcccugcagauccccuucgcgaugcagauggccuaccgguucaacggcaucggggucacccagaacgugcucuacgagaaccagaagcugaucgccaaccaguucaacuccgccaucggcaagauccaggacagccuguccagcaccgccuccgcgcucgggaagcugcaggacguggucaaccagaacgcccaggcccugaacacgcucgugaagcagcugagcuccaacuucggcgccaucagcuccgugcugaacgacauccucagccgccuggacaaggucgaggccgaggugcagaucgaccggcugaucaccgggcgccuccagucccugcagaccuacgugacccagcagcugauccgggcggccgagauccgcgccagcgccaaccucgccgcgaccaagaugagcgagugcguccugggccaguccaagcggguggacuucugcggcaagggguaccaccugaugagcuucccccaguccgccccgcacggcguggucuuccuccacgugacguacguccccgcccaggagaagaacuucaccaccgcccccgcgaucugccacgacgggaaggcccacuucccccgcgagggcguguucgugagcaacgggacccacugguucgucacgcagcggaacuucuacgagccgcagaucaucaccaccgacaacaccuucguguccggcaacugcgacguggucaucggcaucgugaacaacacgguguacgacccccugcagcccgagcuggacagcuucaaggaggagcucgacaaguacuucaagaaccacaccucccccgacgucgaccugggggacaucagcggcaucaacgccuccguggugaacauccagaaggagaucgaccgccugaacgaggucgccaagaaccucaacgagagccugaucgaccugcaggagcucgggaaguacgagcaguacaucaaguggccgugguacaucuggcugggcuucaucgccggccugaucgcgaucgugauggugaccaucaugcucugcugcaugaccuccugcugcagcugccugaaggggugcugcuccugcggcagcugcugcaaguucgacgaggacgacuccgagcccguccugaagggggugaagcuccacuacacgugaggacuaguuauaagacugacuagcccgaugggccucccaacgggcccuccuccccuccuugcaccgagauuaauaaaaaaaaaaaaaaaaaaaaaaaaaaaaaaaaaaaaaaaaaaaaaaaaaaaaaaaaaaaaaaaaugcaucccccccccccccccccccccccccccccccaaaggcucuuuucagagccaccagaauu

SEQ ID NO: 12779 - RNA, 4039 nt, Artificial Sequence
  SARS-CoV-2/China/WF0004/2020__EPI_ISL_413694 spike protein mRNA gc (1-1273)
aggagaaagcuuaccauguucguguuccugguccuccugccccuggugagcucccagugcgugaaccucaccacccgcacgcagcugccgcccgccuacaccaacagcuucacccggggcgucuacuaccccgacaagguguuccgcuccagcgugcugcacuccacccaggaccucuuccugcccuucuucagcaacgucacgugguuccacgccauccacguguccgggaccaacggcaccaagcgguucgacaacccggugcugcccuucaacgacggggucuacuucgcgagcaccgagaaguccaacaucauccgcggcuggaucuucgggacgacccucgacagcaagacccagucccugcugaucgugaacaacgccaccaacguggucaucaaggugugcgaguuccaguucugcaacgaccccuuccucggcguguacuaccacaagaacaacaagagcuggacggaguccgaguuccgggucuacagcuccgccaacaacugcaccuucgaguacgugagccagcccuuccugauggaccuggagggcaagcaggggaacuucaagaaccuccgcgaguucguguucaagaacaucgacggcuacuucaagaucuacuccaagcacaccccgaucaaccugguccgggaccugccccagggguucagcgcccucgagccccugguggaccugcccaucggcaucaacaucacccgcuuccagacgcuccuggcccugcaccgguccuaccucaccccgggggacagcagcuccggcuggaccgcgggcgccgccgccuacuacgugggguaccugcagccccgcaccuuccugcucaaguacaacgagaacggcacgaucaccgacgcggucgacugcgcccuggacccccugagcgagaccaagugcacccucaaguccuucacgguggagaaggggaucuaccagaccagcaacuuccgggugcagcccaccgaguccaucguccgcuucccgaacaucaccaaccugugccccuucggcgagguguucaacgccacgcgguucgccagcgucuacgccuggaaccgcaagcggaucuccaacugcguggcggacuacagcgugcuguacaacuccgccagcuucuccaccuucaagugcuacggcgucagccccaccaagcucaacgaccugugcuucaccaacguguacgccgacuccuucgugauccgcggggacgagguccggcagaucgcccccggccagacggggaagaucgccgacuacaacuacaagcugccggacgacuucaccggcugcgugaucgcguggaacagcaacaaccucgacuccaaggucgggggcaacuacaacuaccuguaccgccuguuccgcaagagcaaccucaagcccuucgagcgggacaucuccaccgagaucuaccaggccggcagcacccccugcaacgggguggagggcuucaacugcuacuucccccugcaguccuacggguuccagccgacgaacggcgugggguaccagcccuaccggguggucgugcugagcuucgagcuccugcacgcccccgccaccgugugcggccccaagaaguccaccaaccuggucaagaacaagugcgugaacuucaacuucaacggccucaccgggaccggcgugcugacggagagcaacaagaaguuccugccguuccagcaguucgggcgcgacaucgccgacaccaccgacgcgguccgcgacccccagacccuggagauccucgacaucacgcccugcagcuucggcgggguguccgugaucaccccgggcaccaacaccagcaaccaggucgccgugcuguaccaggacgugaacugcacggagguccccguggccauccacgccgaccagcugacccccaccuggcggguguacuccaccggcagcaacgucuuccagacgcgcgccgggugccucaucggcgcggagcacgugaacaacuccuacgagugcgacauccccaucggggccggcaucugcgccagcuaccagacccagaccaacuccccgcggcgcgcccggagcguggcgucccagagcaucaucgccuacaccaugucccugggcgccgagaacagcgucgccuacuccaacaacagcaucgccauccccacgaacuucaccaucuccgugaccaccgagauccugcccgugagcaugacgaagaccagcgucgacugcaccauguacaucugcggggacuccaccgagugcagcaaccuccugcugcaguacggcuccuucugcacgcagcucaaccgcgcgcugaccgggaucgccguggagcaggacaagaacacccaggagguguucgcccaggucaagcagaucuacaagacgcccccgaucaaggacuucggcggguucaacuucagccagauccugcccgaccccuccaagcccagcaagcgguccuucaucgaggaccuccuguucaacaaggugacccuggccgacgccggcuucaucaagcaguacggcgacugccucggggacaucgcggcccgcgaccugaucugcgcccagaaguucaacggccugaccgugcucccgccccugcugaccgacgagaugaucgcccaguacaccagcgcccuccuggcggggacgaucaccuccggcuggaccuucggggccggcgccgcccugcagauccccuucgcgaugcagauggccuaccgguucaacggcaucggggucacccagaacgugcucuacgagaaccagaagcugaucgccaaccaguucaacagcgccaucggcaagauccaggacucccugagcuccacggccagcgcgcucgggaagcugcaggacguggucaaccagaacgcccaggcccugaacacccucgugaagcagcuguccagcaacuucggcgccaucuccagcgugcugaacgacauccucucccgccuggacaaggucgaggccgaggugcagaucgaccggcugaucaccgggcgccuccagagccugcagaccuacgugacccagcagcugauccgggcggccgagauccgcgccagcgccaaccucgccgcgacgaagauguccgagugcguccugggccagagcaagcgguucgacuucugcggcaagggguaccaccugauguccuucccccagagcgccccgcacggcgugguguuccuccacgucaccuacgugcccgcccaggagaagaacuucaccaccgcccccgcgaucugccacgacgggaaggcccacuucccccgcgagggcgucuucguguccaacgggacgcacugguucgugacccagcggaacuucuacgagccgcagaucaucaccaccgacaacacguucgucagcggcaacugcgacguggugaucggcaucgucaacaacaccguguacgacccccugcagcccgagcuggacuccuucaaggaggagcucgacaaguacuucaagaaccacaccagccccgacguggaccugggggacaucuccggcaucaacgccagcgucgugaacauccagaaggagaucgaccgccugaacgagguggccaagaaccucaacgagucccugaucgaccugcaggagcucgggaaguacgagcaguacaucaaguggccgugguacaucuggcugggcuucaucgccggccugaucgcgaucgucauggugaccaucaugcucugcugcaugacgagcugcugcuccugccugaaggggugcugcagcugcggcuccugcugcaaguucgacgaggacgacagcgagcccgugcugaagggggucaagcuccacuacaccugaggacuaguuauaagacugacuagcccgaugggccucccaacgggcccuccuccccuccuugcaccgagauuaauaaaaaaaaaaaaaaaaaaaaaaaaaaaaaaaaaaaaaaaaaaaaaaaaaaaaaaaaaaaaaaaaugcaucccccccccccccccccccccccccccccccaaaggcucuuuucagagccaccagaauu

SEQ ID NO: 12780 - RNA, 4039 nt, Artificial Sequence
  SARS-CoV-2/China/WF0028/2020__EPI_ISL_413791 spike protein mRNA gc (1-1273)
aggagaaagcuuaccauguucguguuccugguccuccugccccuggugagcucccagugcgugaaccucaccacccgcacgcagcugccgcccgccuacaccaacagcuucacccggggcgucuacuaccccgacaagguguuccgcuccagcgugcugcacuccacccaggaccucuuccugcccuucuucagcaacgucacgugguuccacgccauccacguguccgggaccaacggcaccaagcgguucgacaacccggugcugcccuucaacgacggggucuacuucgcgagcaccgagaaguccaacaucauccgcggcuggaucuucgggacgacccucgacagcaagacccagucccugcugaucgugaacaacgccaccaacguggucaucaaggugugcgaguuccaguucugcaacgaccccuuccucggcguguacuaccacaagaacaacaagagcuggauggaguccgaguuccgggucuacagcuccgccaacaacugcacguucgaguacgugagccagcccuuccugauggaccuggagggcaagcaggggaacuucaagaaccuccgcgaguucguguucaagaacaucgacggcuacuucaagaucuacuccaagcacaccccgaucaaccugguccgggaccugccccagggguucagcgcccucgagccccugguggaccugcccaucggcaucaacaucacccgcuuccagacccuccuggcccugcaccgguccuaccucacgccgggggacagcagcuccggcuggaccgcgggcgccgccgccuacuacgugggguaccugcagccccgcaccuuccugcucaaguacaacgagaacggcaccaucacggacgcggucgacugcgcccuggacccccugagcgagaccaagugcacccucaaguccuucaccguggagaaggggaucuaccagacgagcaacuuccgggugcagcccaccgaguccaucguccgcuucccgaacaucaccaaccugugccccuucggcgagguguucaacgccacccgguucgccagcgucuacgccuggaaccgcaagcggaucuccaacugcguggcggacuacagcgugcuguacaacuccgccagcuucuccacguucaagugcuacggcgucagccccaccaagcucaacgaccugugcuucaccaacguguacgccgacuccuucgugauccgcggggacgagguccggcagaucgcccccggccagaccgggaagaucgccgacuacaacuacaagcugccggacgacuucacgggcugcgugaucgcguggaacagcaacaaccucgacuccaaggucgggggcaacuacaacuaccuguaccgccuguuccgcaagagcaaccucaagcccuucgagcgggacaucuccaccgagaucuaccaggccggcagcacccccugcaacgggguggagggcuucaacugcuacuucccccugcaguccuacggguuccagccgaccaacggcgugggguaccagcccuaccggguggucgugcugagcuucgagcuccugcacgcccccgccacggugugcggccccaagaaguccaccaaccuggucaagaacaagugcgugaacuucaacuucaacggccucaccgggaccggcgugcugaccgagagcaacaagaaguuccugccguuccagcaguucgggcgcgacaucgccgacacgaccgacgcgguccgcgacccccagacccuggagauccucgacaucacccccugcagcuucggcgggguguccgugaucacgccgggcaccaacaccagcaaccaggucgccgugcuguaccaggacgugaacugcaccgagguccccguggccauccacgccgaccagcugacgcccaccuggcggguguacuccaccggcagcaacgucuuccagacccgcgccgggugccucaucggcgcggagcacgugaacaacuccuacgagugcgacauccccaucggggccggcaucugcgccagcuaccagacgcagaccaacuccccgcggcgcgcccggagcguggcgucccagagcaucaucgccuacaccaugucccugggcgccgagaacagcgucgccuacuccaacaacagcaucgccauccccaccaacuucacgaucuccgugaccaccgagauccugcccgugagcaugaccaagacgagcgucgacugcaccauguacaucugcggggacuccaccgagugcagcaaccuccugcugcaguacggcuccuucugcacccagcucaaccgcgcgcugacggggaucgccguggagcaggacaagaacacccaggagguguucgcccaggucaagcagaucuacaagacgcccccgaucaaggacuucggcggguucaacuucagccagauccugcccgaccccuccaagcccagcaagcgguccuucaucgaggaccuccuguucaacaaggugacccuggccgacgccggcuucaucaagcaguacggcgacugccucggggacaucgcggcccgcgaccugaucugcgcccagaaguucaacggccugaccgugcucccgccccugcugaccgacgagaugaucgcccaguacaccagcgcccuccuggcggggaccaucacguccggcuggaccuucggggccggcgccgcccugcagauccccuucgcgaugcagauggccuaccgguucaacggcaucggggucacccagaacgugcucuacgagaaccagaagcugaucgccaaccaguucaacagcgccaucggcaagauccaggacucccugagcuccaccgccagcgcgcucgggaagcugcaggacguggucaaccagaacgcccaggcccugaacacgcucgugaagcagcuguccagcaacuucggcgccaucuccagcgugcugaacgacauccucucccgccuggacaaggucgaggccgaggugcagaucgaccggcugaucaccgggcgccuccagagccugcagaccuacgugacccagcagcugauccgggcggccgagauccgcgccagcgccaaccucgccgcgaccaagauguccgagugcguccugggccagagcaagcggguggacuucugcggcaagggguaccaccugauguccuucccccagagcgccccgcacggcguggucuuccuccacgugacguacguccccgcccaggagaagaacuucaccaccgcccccgcgaucugccacgacgggaaggcccacuucccccgcgagggcguguucguguccaacgggacccacugguucgucacgcagcggaacuucuacgagccgcagaucaucaccaccgacaacaccuucgugagcggcaacugcgacguggucaucggcaucgugaacaacacgguguacgacccccugcagcccgagcuggaguccuucaaggaggagcucgacaaguacuucaagaaccacaccagccccgacgucgaccugggggacaucuccggcaucaacgccagcguggugaacauccagaaggagaucgaccgccugaacgaggucgccaagaaccucaacgagucccugaucgaccugcaggagcucgggaaguacgagcaguacaucaaguggccgugguacaucuggcugggcuucaucgccggccugaucgcgaucgugauggugaccaucaugcucugcugcaugaccagcugcugcuccugccugaaggggugcugcagcugcggcuccugcugcaaguucgacgaggacgacagcgagcccguccugaagggggugaagcuccacuacacgugaggacuaguuauaagacugacuagcccgaugggccucccaacgggcccuccuccccuccuugcaccgagauuaauaaaaaaaaaaaaaaaaaaaaaaaaaaaaaaaaaaaaaaaaaaaaaaaaaaaaaaaaaaaaaaaaugcaucccccccccccccccccccccccccccccccaaaggcucuuuucagagccaccagaauu

SEQ ID NO: 12781 - RNA, 4039 nt, Artificial Sequence
  SARS-CoV-2/2019-nCoV/USA-CruiseA-18/2020__MT159716.1 spike protein mRNA gc (1-1273)
aggagaaagcuuaccauguucguguuccugguccuccugccccuggugagcucccagugcgugaaccucaccacccgcacgcagcugccgcccgccuacaccaacagcuucacccggggcgucuacuaccccgacaagguguuccgcuccagcgugcugcacuccacccaggaccucuuccugcccuucuucagcaacgucacgugguuccacgccauccacguguccgggaccaacggcaccaagcgguucgacaacccggugcugcccuucaacgacggggucuacuucgcgagcaccgagaaguccaacaucauccgcggcuggaucuucgggacgacccucgacagcaagacccagucccugcugaucgugaacaacgccaccaacguggucaucaaggugugcgaguuccaguucugcaacgaccccuuccucggcguguacuaccacaagaacaacaagagcuggauggaguccgagcugcgggucuacagcuccgccaacaacugcacguucgaguacgugagccagcccuuccugauggaccucgagggcaagcaggggaacuucaagaaccugcgcgaguucguguucaagaacaucgacggcuacuucaagaucuacuccaagcacaccccgaucaaccugguccgggaccucccccagggguucagcgcccuggagccccugguggaccuccccaucggcaucaacaucacccgcuuccagacccugcuggcccuccaccgguccuaccugacgccgggggacagcagcuccggcuggaccgcgggcgccgccgccuacuacgugggguaccugcagccccgcaccuuccuccugaaguacaacgagaacggcaccaucacggacgcggucgacugcgcccuggacccccucagcgagaccaagugcacccugaaguccuucaccguggagaaggggaucuaccagacgagcaacuuccgggugcagcccaccgaguccaucguccgcuucccgaacaucaccaaccugugccccuucggcgagguguucaacgccacccgguucgccagcgucuacgccuggaaccgcaagcggaucuccaacugcguggcggacuacagcgugcucuacaacuccgccagcuucuccacguucaagugcuacggcgucagccccaccaagcugaacgaccugugcuucaccaacguguacgccgacuccuucgugauccgcggggacgagguccggcagaucgcccccggccagaccgggaagaucgccgacuacaacuacaagcucccggacgacuucacgggcugcgugaucgcguggaacagcaacaaccuggacuccaaggucgggggcaacuacaacuaccuguaccgccucuuccgcaagagcaaccugaagcccuucgagcgggacaucuccaccgagaucuaccaggccggcagcacccccugcaacgggguggagggcuucaacugcuacuucccccugcaguccuacggguuccagccgaccaacggcgugggguaccagcccuaccggguggucgugcucagcuucgagcugcugcacgcccccgccacggugugcggccccaagaaguccaccaaccucgucaagaacaagugcgugaacuucaacuucaacggccugaccgggaccggcgugcugaccgagagcaacaagaaguuccugccguuccagcaguucgggcgcgacaucgccgacacgaccgacgcgguccgcgacccccagacccucgagauccuggacaucacccccugcagcuucggcgggguguccgugaucacgccgggcaccaacaccagcaaccaggucgccgugcuguaccaggacgugaacugcaccgagguccccguggccauccacgccgaccagcucacgcccaccuggcggguguacuccaccggcagcaacgucuuccagacccgcgccgggugccugaucggcgcggagcacgugaacaacuccuacgagugcgacauccccaucggggccggcaucugcgccagcuaccagacgcagaccaacuccccgcggcgcgcccggagcguggcgucccagagcaucaucgccuacaccaugucccugggcgccgagaacagcgucgccuacuccaacaacagcaucgccauccccaccaacuucacgaucuccgugaccaccgagauccuccccgugagcaugaccaagacgagcgucgacugcaccauguacaucugcggggacuccaccgagugcagcaaccugcugcuccaguacggcuccuucugcacccagcugaaccgcgcgcugacggggaucgccguggagcaggacaagaacacccaggagguguucgcccaggucaagcagaucuacaagacgcccccgaucaaggacuucggcggguucaacuucagccagauccuccccgaccccuccaagcccagcaagcgguccuucaucgaggaccugcuguucaacaaggugacccucgccgacgccggcuucaucaagcaguacggcgacugccugggggacaucgcggcccgcgaccugaucugcgcccagaaguucaacggccucaccgugcugccgccccugcucaccgacgagaugaucgcccaguacaccagcgcccugcuggcggggaccaucacguccggcuggaccuucggggccggcgccgcccuccagauccccuucgcgaugcagauggccuaccgguucaacggcaucggggucacccagaacgugcuguacgagaaccagaagcugaucgccaaccaguucaacagcgccaucggcaagauccaggacucccucagcuccaccgccagcgcgcuggggaagcugcaggacguggucaaccagaacgcccaggcccucaacacgcuggugaagcagcuguccagcaacuucggcgccaucuccagcgugcucaacgacauccugucccgccuggacaaggucgaggccgaggugcagaucgaccggcucaucaccgggcgccugcagagccugcagaccuacgugacccagcagcucauccgggcggccgagauccgcgccagcgccaaccuggccgcgaccaagauguccgagugcguccugggccagagcaagcggguggacuucugcggcaagggguaccaccucauguccuucccccagagcgccccgcacggcguggucuuccugcacgugacguacguccccgcccaggagaagaacuucaccaccgcccccgcgaucugccacgacgggaaggcccacuucccccgcgagggcguguucguguccaacgggacccacugguucgucacgcagcggaacuucuacgagccgcagaucaucaccaccgacaacaccuucgugagcggcaacugcgacguggucaucggcaucgugaacaacacgguguacgacccccugcagcccgagcucgacuccuucaaggaggagcuggacaaguacuucaagaaccacaccagccccgacgucgaccugggggacaucuccggcaucaacgccagcguggugaacauccagaaggagaucgaccgccucaacgaggucgccaagaaccugaacgagucccugaucgaccuccaggagcuggggaaguacgagcaguacaucaaguggccgugguacaucuggcugggcuucaucgccggccucaucgcgaucgugauggugaccaucaugcugugcugcaugaccagcugcugcuccugccugaaggggugcugcagcugcggcuccugcugcaaguucgacgaggacgacagcgagcccguccucaagggggugaagcugcacuacacgugaggacuaguuauaagacugacuagcccgaugggccucccaacgggcccuccuccccuccuugcaccgagauuaauaaaaaaaaaaaaaaaaaaaaaaaaaaaaaaaaaaaaaaaaaaaaaaaaaaaaaaaaaaaaaaaaugcaucccccccccccccccccccccccccccccccaaaggcucuuuucagagccaccagaauu

SEQ ID NO: 12782 - RNA, 4039 nt, Artificial Sequence
  SARS-CoV-2/SARS-CoV-2/Yunnan-01/human/2020/CHN__MT049951.1 spike protein mRNA gc (1-1273)
aggagaaagcuuaccauguucguguuccugguccuccugccccuggugagcucccagugcgugaaccucaccacccgcacgcagcugccgcccgccaacaccaacagcuucacccggggcgucuacuaccccgacaagguguuccgcuccagcgugcugcacuccacccaggaccucuuccugcccuucuucagcaacgucacgugguuccacgccauccacguguccgggaccaacggcaccaagcgguucgacaacccggugcugcccuucaacgacggggucuacuucgcgagcaccgagaaguccaacaucauccgcggcuggaucuucgggacgacccucgacagcaagacccagucccugcugaucgugaacaacgccaccaacguggucaucaaggugugcgaguuccaguucugcaacgaccccuuccucggcguguacuaccacaagaacaacaagagcuggauggaguccgaguuccgggucuacagcuccgccaacaacugcacguucgaguacgugagccagcccuuccugauggaccuggagggcaagcaggggaacuucaagaaccuccgcgaguucguguucaagaacaucgacggcuacuucaagaucuacuccaagcacaccccgaucaaccugguccgggaccugccccagggguucagcgcccucgagccccugguggaccugcccaucggcaucaacaucacccgcuuccagacccuccuggcccugcaccgguccuaccucacgccgggggacagcagcuccggcuggaccgcgggcgccgccgccuacuacgugggguaccugcagccccgcaccuuccugcucaaguacaacgagaacggcaccaucacggacgcggucgacugcgcccuggacccccugagcgagaccaagugcacccucaaguccuucaccguggagaaggggaucuaccagacgagcaacuuccgggugcagcccaccgaguccaucguccgcuucccgaacaucaccaaccugugccccuucggcgagguguucaacgccacccgguucgccagcgucuacgccuggaaccgcaagcggaucuccaacugcguggcggacuacagcgugcuguacaacuccgccagcuucuccacguucaagugcuacggcgucagccccaccaagcucaacgaccugugcuucaccaacguguacgccgacuccuucgugauccgcggggacgagguccggcagaucgcccccggccagaccgggaagaucgccgacuacaacuacaagcugccggacgacuucacgggcugcgugaucgcguggaacagcaacaaccucgacuccaaggucgggggcaacuacaacuaccuguaccgccuguuccgcaagagcaaccucaagcccuucgagcgggacaucuccaccgagaucuaccaggccggcagcacccccugcaacgggguggagggcuucaacugcuacuucccccugcaguccuacggguuccagccgaccaacggcgugggguaccagcccuaccggguggucgugcugagcuucgagcuccugcacgcccccgccacggugugcggccccaagaaguccaccaaccuggucaagaacaagugcgugaacuucaacuucaacggccucaccgggaccggcgugcugaccgagagcaacaagaaguuccugccguuccagcaguucgggcgcgacaucgccgacacgaccgacgcgguccgcgacccccagacccuggagauccucgacaucacccccugcagcuucggcgggguguccgugaucacgccgggcaccaacaccagcaaccaggucgccgugcuguaccaggacgugaacugcaccgagguccccguggccauccacgccgaccagcugacgcccaccuggcggguguacuccaccggcagcaacgucuuccagacccgcgccgggugccucaucggcgcggagcacgugaacaacuccuacgagugcgacauccccaucggggccggcaucugcgccagcuaccagacgcagaccaacuccccgcggcgcgcccggagcguggcgucccagagcaucaucgccuacaccaugucccugggcgccgagaacagcgucgccuacuccaacaacagcaucgccauccccaccaacuucacgaucuccgugaccaccgagauccugcccgugagcaugaccaagacgagcgucgacugcaccauguacaucugcggggacuccaccgagugcagcaaccuccugcugcaguacggcuccuucugcacccagcucaaccgcgcgcugacggggaucgccguggagcaggacaagaacacccaggagguguucgcccaggucaagcagaucuacaagacgcccccgaucaaggacuucggcggguucaacuucagccagauccugcccgaccccuccaagcccagcaagcgguccuucaucgaggaccuccuguucaacaaggugacccuggccgacgccggcuucaucaagcaguacggcgacugccucggggacaucgcggcccgcgaccugaucugcgcccagaaguucaacggccugaccgugcucccgccccugcugaccgacgagaugaucgcccaguacaccagcgcccuccuggcggggaccaucacguccggcuggaccuucggggccggcgccgcccugcagauccccuucgcgaugcagauggccuaccgguucaacggcaucggggucacccagaacgugcucuacgagaaccagaagcugaucgccaaccaguucaacagcgccaucggcaagauccaggacucccugagcuccaccgccagcgcgcucgggaagcugcaggacguggucaaccagaacgcccaggcccugaacacgcucgugaagcagcuguccagcaacuucggcgccaucuccagcgugcugaacgacauccucucccgccuggacaaggucgaggccgaggugcagaucgaccggcugaucaccgggcgccuccagagccugcagaccuacgugacccagcagcugauccgggcggccgagauccgcgccagcgccaaccucgccgcgaccaagauguccgagugcguccugggccagagcaagcggguggacuucugcggcaagggguaccaccugauguccuucccccagagcgccccgcacggcguggucuuccuccacgugacguacguccccgcccaggagaagaacuucaccaccgcccccgcgaucugccacgacgggaaggcccacuucccccgcgagggcguguucguguccaacgggacccacugguucgucacgcagcggaacuucuacgagccgcagaucaucaccaccgacaacaccuucgugagcggcaacugcgacguggucaucggcaucgugaacaacacgguguacgacccccugcagcccgagcuggacuccuucaaggaggagcucgacaaguacuucaagaaccacaccagccccgacgucgaccugggggacaucuccggcaucaacgccagcguggugaacauccagaaggagaucgaccgccugaacgaggucgccaagaaccucaacgagucccugaucgaccugcaggagcucgggaaguacgagcaguacaucaaguggccgugguacaucuggcugggcuucaucgccggccugaucgcgaucgugauggugaccaucaugcucugcugcaugaccagcugcugcuccugccugaaggggugcugcagcugcggcuccugcugcaaguucgacgaggacgacagcgagcccguccugaagggggugaagcuccacuacacgugaggacuaguuauaagacugacuagcccgaugggccucccaacgggcccuccuccccuccuugcaccgagauuaauaaaaaaaaaaaaaaaaaaaaaaaaaaaaaaaaaaaaaaaaaaaaaaaaaaaaaaaaaaaaaaaaugcaucccccccccccccccccccccccccccccccaaaggcucuuuucagagccaccagaauu

SEQ ID NO: 12783 - RNA, 4039 nt, Artificial Sequence
  SARS-CoV-2/USA/WA-UW292/2020__EPI_ISL_418077 spike protein mRNA gc (1-1273)
aggagaaagcuuaccauguucguguuccugguccuccugccccuggugagcucccagugcgugaaccucaccacccgcacgcagcugccgcccgccuacaccaacagcuucacccggggcgucuacuaccccgacaagguguuccgcuccagcgugcugcacuccacccaggaccucuuccugcccuucuucagcaacgucacgugguuccacgccauccacguguccgggaccaacggcaccaagcgguucgacaacccggugcugcccuucaacgacggggucuacuucgcgagcaccgagaaguccaacaucauccgcggcuggaucuucgggacgacccucgacagcaagacccagucccugcugaucgugaacaacgccaccaacguggucaucaaggugugcgaguuccaguucugcaacgaccccuuccucggcguguacuaccacaagaacaacaagagcuggauggaguccgaguuccgggucuacagcuccgccaacaacugcacguucgaguacgugagccagcccuuccugauggaccuggagggcaagcaggggaacuucaagaaccuccgcgaguucguguucaagaacaucgacggcuacuucaagaucuacuccaagcacaccccgaucaaccugguccgggaccugccccagggguucagcgcccucgagccccugguggaccugcccaucggcaucaacaucacccgcuuccagacccuccuggcccugcaccgguccuaccucacgccgggggacagcagcuccggcuggaccgcgggcgccgccgccuacuacgugggguaccugcagccccgcaccuuccugcucaaguacaacgagaacggcaccaucacggacgcggucgacugcgcccuggacccccugagcgagaccaagugcacccucaaguccuucaccguggagaaggggaucuaccagacgagcaacuuccgggugcagcccaccgaguccaucguccgcuucccgaacaucaccaaccugugccccuucggcgagguguucaacgccacccgguucgccagcgucuacgccuggaaccgcaagcggaucuccaacugcguggcggacuacagcgugcuguacaacuccgccagcuucuccacguucaagugcuacggcgucagccccaccaagcucaacgaccugugcuucaccaacguguacgccgacuccuucgugauccgcggggacgagguccggcagaucgcccccggccagaccgggaagaucgccgacuacaacuacaagcugccggacgacuucacgggcugcgugaucgcguggaacagcaacaaccucgacuccaaggucgggggcaacuacaacuaccuguaccgccuguuccgcaagagcaaccucaagcccuucgagcgggacaucuccaccgagaucuaccaggccagcuccacccccugcaacggcguggagggguucaacugcuacuucccccugcagagcuacggcuuccagccgaccaacggggugggcuaccagcccuaccggguggucgugcugagcuucgagcuccugcacgcccccgccacggugugcgggcccaagaaguccaccaaccuggucaagaacaagugcgugaacuucaacuucaacggccucaccggcaccggggugcugaccgagagcaacaagaaguuccugccguuccagcaguucggccgcgacaucgccgacacgaccgacgcgguccgcgacccccagacccuggagauccucgacaucacccccugcuccuucgggggcgugagcgugaucacgccggggaccaacaccuccaaccaggucgccgugcuguaccaggacgugaacugcaccgagguccccguggccauccacgccgaccagcugacgcccaccuggcggguguacagcaccggcuccaacgucuuccagacccgcgccggcugccucaucggggcggagcacgugaacaacagcuacgagugcgacauccccaucggcgccgggaucugcgccuccuaccagacgcagaccaacagcccgcggcgcgcccgguccguggcgagccaguccaucaucgccuacaccaugagccugggcgccgagaacuccgucgccuacagcaacaacuccaucgccauccccaccaacuucacgaucagcgugaccaccgagauccugcccgugagcaugaccaagacguccgucgacugcaccauguacaucugcggcgacagcaccgagugcuccaaccuccugcugcaguacgggagcuucugcacccagcucaaccgcgcgcugacgggcaucgccguggagcaggacaagaacacccaggagguguucgcccaggucaagcagaucuacaagacgcccccgaucaaggacuucgggggcuucaacuucucccagauccugcccgaccccagcaagcccuccaagcggagcuucaucgaggaccuccuguucaacaaggugacccuggccgacgccggguucaucaagcaguacggcgacugccucggcgacaucgcggcccgcgaccugaucugcgcccagaaguucaacgggcugaccgugcucccgccccugcugaccgacgagaugaucgcccaguacaccuccgcccuccuggcgggcaccaucacgagcggguggaccuucggcgccggggccgcccugcagauccccuucgcgaugcagauggccuaccgguucaacggcaucggcgucacccagaacgugcucuacgagaaccagaagcugaucgccaaccaguucaacuccgccaucgggaagauccaggacagccuguccagcaccgccuccgcgcucggcaagcugcaggacguggucaaccagaacgcccaggcccugaacacgcucgugaagcagcugagcuccaacuucggggccaucagcuccgugcugaacgacauccucagccgccuggacaaggucgaggccgaggugcagaucgaccggcugaucaccggccgccuccagagccugcagaccuacgugacccagcagcugauccgggcggccgagauccgcgccuccgccaaccucgccgcgaccaagaugagcgagugcguccuggggcaguccaagcggguggacuucugcggcaagggcuaccaccugaugagcuucccccaguccgccccgcacgggguggucuuccuccacgugacguacguccccgcccaggagaagaacuucaccaccgcccccgcgaucugccacgacggcaaggcccacuucccccgcgaggggguguucgugagcaacggcacccacugguucgucacgcagcggaacuucuacgagccgcagaucaucaccaccgacaacaccuucguguccgggaacugcgacguggucaucggcaucgugaacaacacgguguacgacccccugcagcccgagcuggacagcuucaaggaggagcucgacaaguacuucaagaaccacaccucccccgacgucgaccugggcgacaucagcgggaucaacgccuccguggugaacauccagaaggagaucgaccgccugaacgaggucgccaagaaccucaacgagagccugaucgaccugcaggagcucggcaaguacgagcaguacaucaaguggccgugguacaucuggcugggguucaucgccggccugaucgcgaucgugauggugaccaucaugcucugcugcaugaccuccugcugcagcugccugaagggcugcugcuccugcgggagcugcugcaaguucgacgaggacgacuccgagcccguccugaagggcgugaagcuccacuacacgugaggacuaguuauaagacugacuagcccgaugggccucccaacgggcccuccuccccuccuugcaccgagauuaauaaaaaaaaaaaaaaaaaaaaaaaaaaaaaaaaaaaaaaaaaaaaaaaaaaaaaaaaaaaaaaaaugcaucccccccccccccccccccccccccccccccaaaggcucuuuucagagccaccagaauu

SEQ ID NO: 12784 - RNA, 4039 nt, Artificial Sequence
  SARS-CoV-2/Iceland/192/2020__EPI_ISL_417819 spike protein mRNA gc (1-1273)
aggagaaagcuuaccauguucguguucuucguccugcucccccuggugagcucccagugcgugaaccugaccacccgcacgcagcucccgcccgccuacaccaacagcuucacccggggcgucuacuaccccgacaagguguuccgcuccagcgugcugcacuccacccaggaccuguuccuccccuucuucagcaacgucacgugguuccacgccauccacguguccgggaccaacggcaccaagcgguucgacaacccggugcugcccuucaacgacggggucuacuucgcgagcaccgagaaguccaacaucauccgcggcuggaucuucgggacgacccuggacagcaagacccagucccuccugaucgugaacaacgccaccaacguggucaucaaggugugcgaguuccaguucugcaacgaccccuuccugggcguguacuaccacaagaacaacaagagcuggauggaguccgaguuccgggucuacagcuccgccaacaacugcacguucgaguacgugagccagcccuuccucauggaccuggagggcaagcaggggaacuucaagaaccugcgcgaguucguguucaagaacaucgacggcuacuucaagaucuacuccaagcacaccccgaucaaccucguccgggaccugccccagggguucagcgcccuggagccccucguggaccugcccaucggcaucaacaucacccgcuuccagacccugcucgcccugcaccgguccuaccugacgccgggggacagcagcuccggcuggaccgcgggcgccgccgccuacuacgugggguaccuccagccccgcaccuuccugcugaaguacaacgagaacggcaccaucacggacgcggucgacugcgcccucgacccccugagcgagaccaagugcacccugaaguccuucaccguggagaaggggaucuaccagacgagcaacuuccgggugcagcccaccgaguccaucguccgcuucccgaacaucaccaaccucugccccuucggcgagguguucaacgccacccgguucgccagcgucuacgccuggaaccgcaagcggaucuccaacugcguggcggacuacagcgugcuguacaacuccgccagcuucuccacguucaagugcuacggcgucagccccaccaagcugaacgaccucugcuucaccaacguguacgccgacuccuucgugauccgcggggacgagguccggcagaucgcccccggccagaccgggaagaucgccgacuacaacuacaagcugccggacgacuucacgggcugcgugaucgcguggaacagcaacaaccuggacuccaaggucgggggcaacuacaacuaccucuaccgccuguuccgcaagagcaaccugaagcccuucgagcgggacaucuccaccgagaucuaccaggccggcagcacccccugcaacgggguggagggcuucaacugcuacuucccccuccaguccuacggguuccagccgaccaacggcgugggguaccagcccuaccggguggucgugcugagcuucgagcugcuccacgcccccgccacggugugcggccccaagaaguccaccaaccuggucaagaacaagugcgugaacuucaacuucaacggccugaccgggaccggcgugcucaccgagagcaacaagaaguuccugccguuccagcaguucgggcgcgacaucgccgacacgaccgacgcgguccgcgacccccagacccuggagauccuggacaucacccccugcagcuucggcgggguguccgugaucacgccgggcaccaacaccagcaaccaggucgccgugcucuaccagggcgugaacugcaccgagguccccguggccauccacgccgaccagcugacgcccaccuggcggguguacuccaccgggagcaacgucuuccagacccgcgccggcugccugaucggggcggagcacgugaacaacuccuacgagugcgacauccccaucggcgccggcaucugcgccagcuaccagacgcagaccaacuccccgcggcgcgcccggagcguggcgucccagagcaucaucgccuacaccaugucccucggggccgagaacagcgucgccuacuccaacaacagcaucgccauccccaccaacuucacgaucuccgugaccaccgagauccugcccgugagcaugaccaagacgagcgucgacugcaccauguacaucugcggcgacuccaccgagugcagcaaccugcuccugcaguacggguccuucugcacccagcugaaccgcgcgcucacgggcaucgccguggagcaggacaagaacacccaggagguguucgcccaggucaagcagaucuacaagacgcccccgaucaaggacuucgggggcuucaacuucagccagauccugcccgaccccuccaagcccagcaagcgguccuucaucgaggaccuccuguucaacaaggugacccuggccgacgccggcuucaucaagcaguacggggacugccugggcgacaucgcggcccgcgaccucaucugcgcccagaaguucaacgggcugaccgugcugccgccccuccugaccgacgagaugaucgcccaguacaccagcgcccugcucgcgggcaccaucacguccggguggaccuucggcgccggcgccgcccugcagauccccuucgcgaugcagauggccuaccgguucaacgggaucggcgucacccagaacgugcuguacgagaaccagaagcucaucgccaaccaguucaacagcgccaucgggaagauccaggacucccugagcuccaccgccagcgcgcugggcaagcuccaggacguggucaaccagaacgcccaggcccugaacacgcuggugaagcagcucuccagcaacuucggggccaucuccagcgugcugaacgacauccugucccgccucgacaaggucgaggccgaggugcagaucgaccggcugaucaccggccgccugcagagccuccagaccuacgugacccagcagcugauccgggcggccgagauccgcgccagcgccaaccuggccgcgaccaagauguccgagugcguccucggccagagcaagcggguggacuucugcgggaagggcuaccaccugauguccuucccccagagcgccccgcacgggguggucuuccugcacgugacguacguccccgcccaggagaagaacuucaccaccgcccccgcgaucugccacgacggcaaggcccacuucccccgcgaggggguguucguguccaacggcacccacugguucgucacgcagcggaacuucuacgagccgcagaucaucaccaccgacaacaccuucgugagcggcaacugcgacguggucaucgggaucgugaacaacacgguguacgacccccuccagcccgagcuggacuccuucaaggaggagcuggacaaguacuucaagaaccacaccagccccgacgucgaccucggcgacaucuccgggaucaacgccagcguggugaacauccagaaggagaucgaccgccugaacgaggucgccaagaaccugaacgagucccucaucgaccugcaggagcugggcaaguacgagcaguacaucaaguggccgugguacaucuggcucggcuucaucgccgggcugaucgcgaucgugauggugaccaucaugcugugcugcaugaccagcugcugcuccugccucaagggcugcugcagcugcggguccugcugcaaguucgacgaggacgacagcgagcccguccugaagggcgugaagcugcacuacacgugaggacuaguuauaagacugacuagcccgaugggccucccaacgggcccuccuccccuccuugcaccgagauuaauaaaaaaaaaaaaaaaaaaaaaaaaaaaaaaaaaaaaaaaaaaaaaaaaaaaaaaaaaaaaaaaaugcaucccccccccccccccccccccccccccccccaaaggcucuuuucagagccaccagaauu

SEQ ID NO: 12785 - RNA, 4039 nt, Artificial Sequence
  SARS-CoV-2/Belgium/ULG-6939/2020__EPI_ISL_417020 spike protein mRNA gc (1-1273)
aggagaaagcuuaccauguucguguuccugguccuccugccccuggugagcucccagugcgugaaccucaccacccgcacgcagcugccgcccgccuacaccaacagcuucacccggggcgucuacuaccccgacaagguguuccgcuccagcgugcugcacuccacccaggaccucuuccugcccuucuucagcaacgucacgugguuccacgccauccacguguccgggaccaacggcaccaagcgguucgacaacccggugcugcccuucaacgacggggucuacuucgcgagcaccgagaaguccaacaucauccgcggcuggaucuucgggacgacccucgacagcaagacccagucccugcugaucgugaacaacgccaccaacguggucaucaaggugugcgaguuccaguucugcaacgaccccuuccucggcguguacuaccacaagaacaacaagagcuggauggaguccgaguuccgggucuacagcuccgccaacaacugcacguucgaguacgugagccagcccuuccugauggaccuggagggcaagcaggggaacuucaagaaccuccgcgaguucguguucaagaacaucgacggcuacuucaagaucuacuccaagcacaccccgaucaaccugguccgggaccugccccagggguucagcgcccucgagccccugguggaccugcccaucggcaucaacaucacccgcuuccagacccuccuggcccugcaccgguccuaccucacgccgggggacagcagcuccggcuggaccgcgggcgccgccgccuacuacgugggguaccugcagccccgcaccuuccugcucaaguacaacgagaacggcaccaucacggacgcggucgacugcgcccuggacccccugagcgagaccaagugcacccucaaguccuucaccguggagaaggggaucuaccagacgagcaacuuccgggugcagcccaccgaguccaucguccgcuucccgaacaucaccaaccugugccccuucggcgagguguucaacgccacccgguucgccagcgucuacgccuggaaccgcaagcggaucuccaacugcguggcggacuacagcgugcuguacaacuccgccagcuucuccacguucaagugcuacggcgucagccccaccaagcucaacgaccugugcuucaccaacguguacgccgacuccuucgugauccgcggggacgagguccggcagaucgcccccggccagaccgggaagaucgccgacuacaacuacaagcugccggacgacuucacgggcugcgugaucgcguggaacagcaacaaccucgacuccaaggucgggggcaacuacaacuaccuguaccgccuguuccgcaagagcaaccucaagcccuucgagcgggacaucuccaccgagaucuaccaggccggcagcacccccugcaacgggguggagggcuucaacugcuacuucccccugcaguccuacggguuccagccgaccaacggcgugggguaccagcccuaccggguggucgugcugagcuucgagcuccugcacgcccccgccacggugugcggccccaagaaguccaccaaccuggucaagaacaagugcgugaacuucaacuucaacggccucaccgggaccggcgugcugaccgagagcaacaagaaguuccugccguuccagcaguucgggcgcgacaucgccgacacgaccgacgcgguccgcgacccccagacccuggagauccucgacaucacccccugcagcuucggcgggguguccgugaucacgccgggcaccaacaccagcaaccaggucgccgugcuguaccagggcgugaacugcaccgagguccccguggccauccacgccgaccagcugacgcccaccuggcggguguacuccaccgggagcaacgucuuccagacccgcgccggcugccucaucggggcggagcacgugaacaacuccuacgagugcgacauccccaucggcgccggcaucugcgccagcuaccagacgcagaccaacuccccgcggcgcgcccggagcguggcgucccagagcaucaucgccuacaccaugucccugggggccgagaacagcgucguguacuccaacaacagcaucgccauccccaccaacuucacgaucuccgugaccaccgagauccugcccgucagcaugaccaagacgagcguggacugcaccauguacaucugcggcgacuccaccgagugcagcaaccuccugcugcaguacggguccuucugcacccagcucaaccgcgcccugacgggcaucgcgguggagcaggacaagaacacccaggaggucuucgcccaggugaagcagaucuacaagacgcccccgaucaaggacuucgggggcuucaacuucagccagauccugcccgaccccuccaagcccagcaagcgguccuucaucgaggaccuccuguucaacaaggugacccuggccgacgccggcuucaucaagcaguacggggacugccucggcgacaucgccgcgcgcgaccugaucugcgcccagaaguucaacgggcugaccguccucccgccccugcugaccgacgagaugaucgcccaguacaccagcgcccuccuggccggcaccaucacguccggguggaccuucggcgcgggcgccgcccugcagauccccuucgccaugcagauggcguaccgguucaacgggaucggcgugacccagaacgugcucuacgagaaccagaagcugaucgccaaccaguucaacagcgccaucgggaagauccaggacucccugagcuccaccgccagcgcccucggcaagcugcaggacgucgugaaccagaacgcgcaggcccugaacacgcucgugaagcagcuguccagcaacuucggggccaucuccagcguccugaacgacauccucucccgccuggacaagguggaggccgaggugcagaucgaccggcugaucaccggccgccuccagagccugcagaccuacgucacccagcagcugauccgggccgcggagauccgcgccagcgccaaccucgccgccaccaagauguccgagugcgugcugggccagagcaagcggguggacuucugcgggaagggcuaccaccugauguccuucccccagagcgcgccgcacggggucguguuccuccacgucacguacgugcccgcccaggagaagaacuucaccaccgcccccgccaucugccacgacggcaaggcgcacuucccccgcgaggggguguucgucuccaacggcacccacugguucgugacgcagcggaacuucuacgagccgcagaucaucaccaccgacaacaccuucgugagcggcaacugcgacgucgugaucgggaucgugaacaacacggucuacgacccccugcagcccgagcuggacuccuucaaggaggagcucgacaaguacuucaagaaccacaccagccccgacguggaccugggcgacaucuccgggaucaacgccagcguggucaacauccagaaggagaucgaccgccugaacgagguggccaagaaccucaacgagucccugaucgaccugcaggagcucggcaaguacgagcaguacaucaaguggccgugguacaucuggcugggcuucaucgccgggcugaucgccaucgugauggucaccaucaugcucugcugcaugaccagcugcugcuccugccugaagggcugcugcagcugcggguccugcugcaaguucgacgaggacgacagcgagcccgugcugaagggcgugaagcuccacuacacgugaggacuaguuauaagacugacuagcccgaugggccucccaacgggcccuccuccccuccuugcaccgagauuaauaaaaaaaaaaaaaaaaaaaaaaaaaaaaaaaaaaaaaaaaaaaaaaaaaaaaaaaaaaaaaaaaugcaucccccccccccccccccccccccccccccccaaaggcucuuuucagagccaccagaauu

SEQ ID NO: 12786 - RNA, 4039 nt, Artificial Sequence
  SARS-CoV-2/France/HF2496/2020__EPI_ISL_418231 spike protein mRNA gc (1-1273)
aggagaaagcuuaccauguucguguuccugguccuccugccccuggugagcucccagugcgugaaccucaccacccgcacgcagcugccgcccgccuacaccaacagcuucacccggggcgucuacuaccccgacaagguguuccgcuccagcgugcugcacuccacccaggaccucuuccugcccuucuucagcaacgucacgugguuccacgccauccacguguccgggaccaacggcaccaagcgguucgacaacccggugcugcccuucaacgacggggucuacuucgcgagcaccgagaaguccaacaucauccgcggcuggaucuucgggacgacccucgacagcaagacccagucccugcugaucgugaacaacgccaccaacguggucaucaaggugugcgaguuccaguucugcaacgaccccuuccucggcguguacuaccacaagaacaacaagagcuggauggaguccgaguuccgggucuacagcuccgccaacaacugcacguucgaguacgugagccagcccuuccugauggaccuggagggcaagcaggggaacuucaagaaccuccgcgaguucguguucaagaacaucgacggcuacuucaagaucuacuccaagcacaccccgaucaaccugguccgggaccugccccagggguucagcgcccucgagccccugguggaccugcccaucggcaucaacaucacccgcuuccagacccuccuggcccugcaccgguccuaccucacgccgggggacagcagcuccggcuggaccgcgggcgccgccgccuacuacgugggguaccugcagccccgcaccuuccugcucaaguacaacgagaacggcaccaucacggacgcggucgacugcgcccuggacccccugagcgagaccaagugcacccucaaguccuucaccguggagaaggggaucuaccagacgagcaacuuccgggugcagcccaccgaguccaucguccgcuucccgaacaucaccaaccugugccccuucggcgagguguucaacgccacccgguucgccagcgucuacgccuggaaccgcaagcggaucuccaacugcguggcggacuacagcgugcuguacaacuccgccagcuucuccacguucaagugcuacggcgucagccccaccaagcucaacgaccugugcuucaccaacguguacgccgacuccuucgugauccgcggggacgagguccggcagaucgcccccggccagaccgggaagaucgccgacuacaacuacaagcugccggacgacuucacgggcugcgugaucgcguggaacagcaacaaccucgacuccaaggucgggggcaacuacaacuaccuguaccgccuguuccgcaagagcaaccucaagcccuucgagcgggacaucuccaccgagaucuaccaggccggcagcacccccugcaacgggguggagggcuucaacugcuacuucccccugcaguccuacggguuccagccgaccaacggcgugggguaccagcccuaccggguggucgugcugagcuucgagcuccugcacgcccccgccacggugugcggccccaagaaguccaccaaccuggucaagaacaagugcgugaacuucaacuucaacggccucaccgggaccggcgugcugaccgagagcaacaagaaguuccugccguuccagcaguucgggcgcgacaucgccgacacgaccgacgcgguccgcgacccccagacccuggagauccucgacaucacccccugcagcuucggcgggguguccgugaucacgccgggcaccaacaccagcaaccaggucgccgugcuguaccagggcgugaacugcaccgagguccccguggccauccacgccgaccagcugacgcccaccuggcggguguacuccaccgggagcaacgucuuccagacccgcgccggcugccucaucggggcggagcacgugaacaacuccuacgagugcgacauccccaucggcgccggcaucugcgccagcuaccagacgcagaccaacuccccgcggcgcgcccggagcguggcgucccagagcaucaucgccuacaccaugucccugggggccgagaacagcgucgccuacuccaacaacagcaucgccauccccaccaacuucacgaucuccgugaccaccgagauccugcccgugagcaugaccaagacgagcgucgacugcaccauguacaucugcggcgacuccaccgagugcagcaaccuccugcugcaguacggguccuucugcacccagcucaaccgcgcgcugacgggcaucgccguggagcaggacaagaacacccaggagguguucgcccaggucaagcagaucuacaagacgcccccgaucaaggacuucgggggcuucaacuucagccagauccugcccgaccccuccaagcccagcaagcgguccuucaucgaggaccuccuguucaacaaggugacccuggccgacgccggcuucaucaagcaguacggggacugccucggcgacaucguggcgcgcgaccugaucugcgcccagaaguucaacgggcugaccguccucccgccccugcugaccgacgagaugaucgcccaguacaccagcgcccuccuggccggcaccaucacguccggguggaccuucggcgcgggcgccgcccugcagauccccuucgccaugcagauggcguaccgguucaacgggaucggcgugacccagaacgugcucuacgagaaccagaagcugaucgccaaccaguucaacagcgccaucgggaagauccaggacucccugagcuccaccgccagcgcccucggcaagcugcaggacgucgugaaccagaacgcgcaggcccugaacacgcucgugaagcagcuguccagcaacuucggggccaucuccagcguccugaacgacauccucucccgccuggacaagguggaggccgaggugcagaucgaccggcugaucaccggccgccuccagagccugcagaccuacgucacccagcagcugauccgggccgcggagauccgcgccagcgccaaccucgccgccaccaagauguccgagugcgugcugggccagagcaagcggguggacuucugcgggaagggcuaccaccugauguccuucccccagagcgcgccgcacggggucguguuccuccacgucacguacgugcccgcccaggagaagaacuucaccaccgcccccgccaucugccacgacggcaaggcgcacuucccccgcgaggggguguucgucuccaacggcacccacugguucgugacgcagcggaacuucuacgagccgcagaucaucaccaccgacaacaccuucgugagcggcaacugcgacgucgugaucgggaucgugaacaacacggucuacgacccccugcagcccgagcuggacuccuucaaggaggagcucgacaaguacuucaagaaccacaccagccccgacguggaccugggcgacaucuccgggaucaacgccagcguggucaacauccagaaggagaucgaccgccugaacgagguggccaagaaccucaacgagucccugaucgaccugcaggagcucggcaaguacgagcaguacaucaaguggccgugguacaucuggcugggcuucaucgccgggcugaucgccaucgugauggucaccaucaugcucugcugcaugaccagcugcugcuccugccugaagggcugcugcagcugcggguccugcugcaaguucgacgaggacgacagcgagcccgugcugaagggcgugaagcuccacuacacgugaggacuaguuauaagacugacuagcccgaugggccucccaacgggcccuccuccccuccuugcaccgagauuaauaaaaaaaaaaaaaaaaaaaaaaaaaaaaaaaaaaaaaaaaaaaaaaaaaaaaaaaaaaaaaaaaugcaucccccccccccccccccccccccccccccccaaaggcucuuuucagagccaccagaauu

SEQ ID NO: 12787 - RNA, 4039 nt, Artificial Sequence
  SARS-CoV-2/USA/WA-UW291/2020__EPI_ISL_418076 spike protein mRNA gc (1-1273)
aggagaaagcuuaccauguucguguuccugguccuccugccccuggugagcucccagugcgugaaccucaccacccgcacgcagcugccgcccgccuacaccaacagcuucacccggggcgucuacuaccccgacaagguguuccgcuccagcgugcugcacuccacccaggaccucuuccugcccuucuucagcaacgucacgugguuccacgccauccacguguccgggaccaacggcaccaagcgguucgacaacccggugcugcccuucaacgacggggucuacuucgcgagcaccgagaaguccaacaucauccgcggcuggaucuucgggacgacccucgacagcaagacccagucccugcugaucgugaacaacgccaccaacguggucaucaaggugugcgaguuccaguucugcaacgaccccuuccucggcguguacuaccacaagaacaacaagagcuggauggaguccgaguuccgggucuacagcuccgccaacaacugcacguucgaguacgugagccagcccuuccugauggaccuggagggcaagcaggggaacuucaagaaccuccgcgaguucguguucaagaacaucgacggcuacuucaagaucuacuccaagcacaccccgaucaaccugguccgggaccugccccagggguucagcgcccucgagccccugguggaccugcccaucggcaucaacaucacccgcuuccagacccuccuggcccugcaccgguccuaccucacgccgggggacagcagcuccggcuggaccgcgggcgccgccgccuacuacgugggguaccugcagccccgcaccuuccugcucaaguacaacgagaacggcaccaucacggacgcggucgacugcgcccuggacccccugagcgagaccaagugcacccucaaguccuucaccguggagaaggggaucuaccagacgagcaacuuccgggugcagcccaccgaguccaucguccgcuucccgaacaucaccaaccugugccccuucggcgagguguucaacgccacccgguucgccagcgucuacgccuggaaccgcaagcggaucuccaacugcguggcggacuacagcgugcuguacaacuccgccagcuucuccacguucaagugcuacggcgucagccccaccaagcucaacgaccugugcuucaccaacguguacgccgacuccuucgugauccgcggggacgagguccggcagaucgcccccggccagaccgggaagaucgccgacuacaacuacaagcugccggacgacuucacgggcugcgugaucgcguggaacagcaacaaccucgacuccaaggucgggggcaacuacaacuaccuguaccgccuguuccgcaagagcaaccucaagcccuucgagcgggacaucuccaccgagaucuaccaggccggcagcacccccugcaacgggguggagggcuucaacugcuacuucccccugcaguccuacggguuccagccgaccaacggcgugggguaccagcccuaccggguggucgugcugagcuucgagcuccugcacgcccccgccacggugugcggccccaagaaguccaccaaccuggucaagaacaagugcgugaacuucaacuucaacggccucaccgggaccggcgugcugaccgagagcaacaagaaguuccugccguuccagcaguucgggcgcgacaucgccgacacgaccgacgcgguccgcgacccccagacccuggagauccucgacaucacccccugcagcuucggcgggguguccgugaucacgccgggcaccaacaccagcaaccaggucgccgugcuguaccagggcgugaacugcaccgagguccccguggccauccacgccgaccagcugacgcccaccuggcggguguacuccaccgggagcaacgucuuccagacccgcgccggcugccucaucggggcggagcacgugaacaacuccuacgagugcgacauccccaucggcgccggcaucugcgccagcuaccagacgcagaccaacuccccgcggcgcgcccggagcguggcgucccagagcaucaucgccuacaccaugucccugggggccgagaacagcgucgccuacuccaacaacagcaucgccauccccaccaacuucacgaucuccgugaccaccgagauccugcccgugagcaugaccaagacgagcgucgacugcaccauguacaucugcggcgacuccaccgagugcagcaaccuccugcugcaguacggguccuucugcacccagcucaaccgcgcgcugacgggcaucgccguggagcaggacaagaacacccaggagguguucgcccaggucaagcagaucuacaagacgcccccgaucaaggacuucgggggcuucaacuucagccagauccugcccgaccccuccaagcccagcaagcgguccuucaucgaggaccuccuguucaacaaggugacccuggccgacgccggcuucaucaagcaguacggggacugccucggcgacaucgcggcccgcgaccugaucugcgcccagaaguucaacgggcugaccgugcucccgccccugcugaccgacgagaugaucgcccaguacaccagcgcccuccuggcgggcaccaucacguccggguggaccuucggcgccggcgccgcccugcagauccccuucgcgaugcagauggccuaccgguucaacgggaucggcgucacccagaacgugcucuacgagaaccagaagcugaucgccaaccaguucaacagcgccaucgggaagauccaguacucccugagcuccaccgccagcgcgcucggcaagcugcaggacguggucaaccagaacgcccaggcccugaacacgcucgugaagcagcuguccagcaacuucggggccaucuccagcgugcugaacgacauccucucccgccuggacaaggucgaggccgaggugcagaucgaccggcugaucaccggccgccuccagagccugcagaccuacgugacccagcagcugauccgggcggccgagauccgcgccagcgccaaccucgccgcgaccaagauguccgagugcguccugggccagagcaagcggguggacuucugcgggaagggcuaccaccugauguccuucccccagagcgccccgcacgggguggucuuccuccacgugacguacguccccgcccaggagaagaacuucaccaccgcccccgcgaucugccacgacggcaaggcccacuucccccgcgaggggguguucguguccaacggcacccacugguucgucacgcagcggaacuucuacgagccgcagaucaucaccaccgacaacaccuucgugagcggcaacugcgacguggucaucgggaucgugaacaacacgguguacgacccccugcagcccgagcuggacuccuucaaggaggagcucgacaaguacuucaagaaccacaccagccccgacgucgaccugggcgacaucuccgggaucaacgccagcguggugaacauccagaaggagaucgaccgccugaacgaggucgccaagaaccucaacgagucccugaucgaccugcaggagcucggcaaguacgagcaguacaucaaguggccgugguacaucuggcugggcuucaucgccgggcugaucgcgaucgugauggugaccaucaugcucugcugcaugaccagcugcugcuccugccugaagggcugcugcagcugcggguccugcugcaaguucgacgaggacgacagcgagcccguccugaagggcgugaagcuccacuacacgugaggacuaguuauaagacugacuagcccgaugggccucccaacgggcccuccuccccuccuugcaccgagauuaauaaaaaaaaaaaaaaaaaaaaaaaaaaaaaaaaaaaaaaaaaaaaaaaaaaaaaaaaaaaaaaaaugcaucccccccccccccccccccccccccccccccaaaggcucuuuucagagccaccagaauu

SEQ ID NO: 12788 - RNA, 4039 nt, Artificial Sequence
  SARS-CoV-2/Portugal/PT0034/2020__EPI_ISL_418019 spike protein mRNA gc (1-1273)
aggagaaagcuuaccauguucguguuccugguccuccugccccuggugagcucccagugcgugaaccucaccacccgcacgcagcugccgcccgccuacaccaacagcuucacccggggcgucuacuaccccgacaagguguuccgcuccagcgugcugcacuccacccaggaccucuuccugcccuucuucagcaacgucacgugguuccacgccauccacguguccgggaccaacggcaccaagcgguucgacaacccggugcugcccuucaacgacggggucuacuucgcgagcaccgagaaguccaacaucauccgcggcuggaucuucgggacgacccucgacagcaagacccagucccugcugaucgugaacaacgccaccaacguggucaucaaggugugcgaguuccaguucugcaacgaccccuuccucggcguguacuaccacaagaacaacaagagcuggauggaguccgaguuccgggucuacagcuccgccaacaacugcacguucgaguacgugagccagcccuuccugauggaccuggagggcaagcaggggaacuucaagaaccuccgcgaguucguguucaagaacaucgacggcuacuucaagaucuacuccaagcacaccccgaucaaccugguccgggaccugccccagggguucagcgcccucgagccccugguggaccugcccaucggcaucaacaucacccgcuuccagacccuccuggcccugcaccgguccuaccucacgccgggggacagcagcuccggcuggaccgcgggcgccgccgccuacuacgugggguaccugcagccccgcaccuuccugcucaaguacaacgagaacggcaccaucacggacgcggucgacugcgcccuggacccccugagcgagaccaagugcacccucaaguccuucaccguggagaaggggaucuaccagacgagcaacuuccgggugcagcccaccgaguccaucguccgcuucccgaacaucaccaaccugugccccuucggcgagguguucaacgccacccgguucgccagcgucuacgccuggaaccgcaagcggaucuccaacugcguggcggacuacagcgugcuguacaacuccgccagcuucuccacguucaagugcuacggcgucagccccaccaagcucaacgaccugugcuucaccaacguguacgccgacuccuucgugauccgcggggacgagguccggcagaucgcccccggccagaccgggaagaucgccgacuacaacuacaagcugccggacgacuucacgggcugcgugaucgcguggaacagcaacaaccucgacuccaaggucgggggcaacuacaacuaccuguaccgccuguuccgcaagagcaaccucaagcccuucgagcgggacaucuccaccgagaucuaccaggccggcagcacccccugcaacgggguggagggcuucaacugcuacuucccccugcaguccuacggguuccagccgaccaacggcgugggguaccagcccuaccggguggucgugcugagcuucgagcuccugcacgcccccgccacggugugcggccccaagaaguccaccaaccuggucaagaacaagugcgugaacuucaacuucaacggccucaccgggaccggcgugcugaccgagagcaacaagaaguuccugccguuccagcaguucgggcgcgacaucgccgacacgaccgacgcgguccgcgacccccagacccuggagauccucgacaucacccccugcagcuucggcgggguguccgugaucacgccgggcaccaacaccagcaaccaggucgccgugcuguaccagggcgugaacugcaccgagguccccguggccauccacgccgaccagcugacgcccaccuggcggguguacuccaccgggagcaacgucuuccagacccgcgccggcugccucaucggggcggagcacgugaacaacuccuacgagugcgacauccccaucggcgccggcaucugcgccagcuaccagacgcagaccaacuccccgcggcgcgcccggagcguggcgucccagagcaucaucgccuacaccaugucccugggggccgagaacagcgucgccuacuccaacaacagcaucgccauccccaccaacuucacgaucuccgugaccaccgagauccugcccgugagcaugaccaagacgagcgucgacugcaccauguacaucugcggcgacuccaccgagugcagcaaccuccugcugcaguacggguccuucugcacccagcucaaccgcgcgcugacgggcaucgccguggagcaggacaagaacacccaggagguguucgcccaggucaagcagaucuacaagacgcccccgaucaaggacuucgggggcuucaacuucagccagauccugcccgaccccuccaagcccagcaagcgguccuucaucgaggaccuccuguucaacaaggugacccuggccgacgccggcuucaucaagcaguacggggacugccucggcgacaucgcggcccgcgaccugaucugcgcccagaaguucaacgggcugaccgugcucccgccccugcugaccgacgagaugaucgcccaguacaccagcgcccuccuggcgggcaccaucacguccggguggaccuucggcgccggcgccgcccugcagauccccuucgcgaugcagauggccuaccgguucaacgggaucggcgucacccagaacgugcucuacgagaaccagaagcugaucgccaaccaguucaacagcgccaucgggaagauccaggacucccugagcuccaccgccagcgcgcucggcaagcugcaggacguggucaaccagaacgcccaggcccugaacacgcucgugaagcagcuguccagcaacuucggggccaucuccagcgugcugaacgacauccucucccgccuggacaaggucgaggccgaggugcagaucgaccggcugaucaccggccgccuccagagccugcagaccuacgugacccagcagcugauccgggcggccgagauccgcgccagcgccaaccucgccgcgaccaagauguccgagugcguccugggccagagcaagcggguggacuucugcgggaagggcuaccaccugauguccuucccccagagcgccccgcacgggguggucuuccuccacgugacguacguccccgcccaggagaagaacuucaccaccgcccccgcgaucugccacgacggcaaggcccacuucccccgcgaggggguguucguguccaacggcacccacugguucgucacgcagcggaacuucuacgagccgcagaucaucaccaccgacaacaccuucgugagcggcaacugcgacguggucaucgggaucgugaacaacacgguguacgacccccugcagcccgagcuggacuccuucaaggaggagcucgacaaguacuucaagaaccacaccagccccgacgucgaccugggcgacaucuccgggaucaacgccagcguggugaacauccagaaggagaucgaccgccugaacgaggucgccaagaaccucaacgagucccugaucgaccugcaggagcucggcaaguacgagcaguacaucaaguggccgugguacaucuggcugggcuucaucgccgggcugaucgcgaucgugauggugaccaucaugcucugcugcaucaccagcugcugcuccugccugaagggcugcugcagcugcggguccugcugcaaguucgacgaggacgacagcgagcccguccugaagggcgugaagcuccacuacacgugaggacuaguuauaagacugacuagcccgaugggccucccaacgggcccuccuccccuccuugcaccgagauuaauaaaaaaaaaaaaaaaaaaaaaaaaaaaaaaaaaaaaaaaaaaaaaaaaaaaaaaaaaaaaaaaaugcaucccccccccccccccccccccccccccccccaaaggcucuuuucagagccaccagaauu

SEQ ID NO: 12789 - RNA, 4039 nt, Artificial Sequence
  SARS-CoV-2/Iceland/202/2020__EPI_ISL_417750 spike protein mRNA gc (1-1273)
aggagaaagcuuaccauguucguguuccugguccuccugccccuggugagcucccagugcgugaaccucaccacccgcacgcagcugccgcccgccuacaccaacagcuucacccggggcgucuacuaccccgacaagguguuccgcuccagcgugcugcacuccacccaggaccucuuccugcccuucuucagcaacgucacgugguuccacgccauccacguguccgggaccaacggcaccaagcgguucgacaacccggugcugcccuucaacgacggggucuacuucgcgagcaccgagaaguccaacaucauccgcggcuggaucuucgggacgacccucgacagcaagacccagucccugcugaucgugaacaacgccaccaacguggucaucaaggugugcgaguuccaguucugcaacgaccccuuccucggcguguacuaccacaagaacaacaagagcuggauggaguccgaguuccgggucuacagcuccgccaacaacugcacguucgaguacgugagccagcccuuccugauggaccuggagggcaagcaggggaacuucaagaaccuccgcgaguucguguucaagaacaucgacggcuacuucaagaucuacuccaagcacaccccgaucaaccugguccgggaccugccccagggguucagcgcccucgagccccugguggaccugcccaucggcaucaacaucacccgcuuccagacccuccuggcccugcaccgguccuaccucacgccgggggacagcagcuccggcuggaccgcgggcgccgccgccuacuacgugggguaccugcagccccgcaccuuccugcucaaguacaacgagaacggcaccaucacggacgcggucgacugcgcccuggacccccugagcgagaccaagugcacccucaaguccuucaccguggagaaggggaucuaccagacgagcaacuuccgggugcagcccaccgaguccaucguccgcuucccgaacaucaccaaccugugccccuucggcgagguguucaacgccacccgguucgccagcgucuacgccuggaaccgcaagcggaucuccaacugcguggcggacuacagcgugcuguacaacuccgccagcuucuccacguucaagugcuacggcgucagccccaccaagcucaacgaccugugcuucaccaacguguacgccgacuccuucgugauccgcggggacgagguccggcagaucgcccccggccagaccgggaagaucgccgacuacaacuacaagcugccggacgacuucacgggcugcgugaucgcguggaacagcaacaaccucgacuccaaggucgggggcaacuacaacuaccuguaccgccuguuccgcaagagcaaccucaagcccuucgagcgggacaucuccaccgagaucuaccaggccggcagcacccccugcaacgggguggagggcuucaacugcuacuucccccugcaguccuacggguuccagccgaccaacggcgugggguaccagcccuaccggguggucgugcugagcuucgagcuccugcacgcccccgccacggugugcggccccaagaaguccaccaaccuggucaagaacaagugcgugaacuucaacuucaacggccucaccgggaccggcgugcugaccgagagcaacaagaaguuccugccguuccagcaguucgggcgcgacaucgccgacacgaccgacgcgguccgcgacccccagacccuggagauccucgacaucacccccugcagcuucggcgggguguccgugaucacgccgggcaccaacaccagcaaccaggucgccgugcuguaccaggacgugaacugcaccgagguccccguggccauccacgccgaccagcugacgcccaccuggcggguguacuccaccggcagcaacgucuuccagacccgcgccgggugccucaucggcgcggagcacgugaacaacuccuacgagugcgacauccccaucggggccggcaucugcgccagcuaccagacgcagaccaacuccccgcggcgcgcccggagcguggcgucccagagcaucaucgccuacaccaugucccugggcgccgagaacagcgucgccuacuccaacaacagcaucgccauccccaccaacuucacgaucuccgugaccaccgagauccugcccgugagcaugaccaagacgagcgucgacugcaccauguacaucugcggggacuccaccgagugcagcaaccuccugcugcaguacggcuccuucugcacccagcucaaccgcgcgcugacggggaucgccguggagcaggacaagaacacccaggagguguucgcccaggucaagcagaucuacaagacgcccccgaucaaggacuucggcggguucaacuucagccagauccugcccgaccccuccaagcccagcaagcgguccuucaucgaggaccuccuguucaacaaggugacccuggccgacgccggcuucaucaagcaguacggcgacugccucggggacaucgcggcccgcgaccugaucugcgcccagaaguucaacggccugaccgugcucccgccccugcugaccgacgagaugaucgcccaguacaccagcgcccuccuggcggggaccaucacguccggcuggaccuucggggccggcgccgcccugcagauccccuucgcgaugcagauggccuaccgguucaacggcaucggggucacccagaacgugcucuacgagaaccagaagcugaucgccaaccaguucaacagcgccaucggcaagauccaggacucccugagcuccaccgccagcgcgcucgggaagcugcaggacguggucaaccagaacgcccaggcccugaacacgcucgugaagcagcuguccagcaacuucggcgccaucuccagcgugcugaacgacauccucucccgccuggacaaggucgaggccgaggugcagaucgaccggcugaucaccgggcgccuccagagccugcagaccuacgugacccagcagcugauccgggcggccgagauccgcgccagcgccaaccucgccgcgaccaagauguccgagugcguccugggccagagcaagcggguggacuucugcggcaagggguaccaccugauguccuucccccagagcgccccgcacggcguggucuuccuccacgugacguacguccccgcccaggagaagaacuucaccaccgcccccgcgaucugccacgacgggaaggcccacuucccccgcgagggcguguucguguccaacgggacccacugguucgucacgcagcggaacuucuacgagccgcagaucaucaccaccgacaacaccuucgugagcggcaacugcgacguggucaucggcaucgugaacaacacgguguacgacccccugcagcccgagcuggacuccuucaaggaggagcucgacaaguacuucaagaaccacaccagccccgacgucgaccugggggacaucccgggcaucaacgccuccguggugaacauccagaaggagaucgaccgccugaacgaggucgccaagaaccucaacgagagccugaucgaccugcaggagcucgggaaguacgagcaguacaucaaguggcccugguacaucuggcugggcuucaucgccggccugaucgcgaucgugauggugaccaucaugcucugcugcaugaccuccugcugcagcugccugaaggggugcugcuccugcggcagcugcugcaaguucgacgaggacgacuccgagcccguccugaagggggugaagcuccacuacacgugaggacuaguuauaagacugacuagcccgaugggccucccaacgggcccuccuccccuccuugcaccgagauuaauaaaaaaaaaaaaaaaaaaaaaaaaaaaaaaaaaaaaaaaaaaaaaaaaaaaaaaaaaaaaaaaaugcaucccccccccccccccccccccccccccccccaaaggcucuuuucagagccaccagaauu

SEQ ID NO: 12790 - RNA, 4039 nt, Artificial Sequence
  SARS-CoV-2/USA/WA-UW261/2020__EPI_ISL_418046 spike protein mRNA gc (1-1273)
aggagaaagcuuaccauguucguguuccugguccuccugccccuggugagcucccagugcgugaaccucaccacccgcacgcagcugccgcccgccuacaccaacagcuucacccggggcgucuacuaccccgacaagguguuccgcuccagcgugcugcacuccacccaggaccucuuccugcccuucuucagcaacgucacgugguuccacgccauccacguguccgggaccaacggcaccaagcgguucgacaacccggugcugcccuucaacgacggggucuacuucgcgagcaccgagaaguccaacaucauccgcggcuggaucuucgggacgacccucgacagcaagacccagucccugcugaucgugaacaacgccaccaacguggucaucaaggugugcgaguuccaguucugcaacgaccccuuccucggcguguacuaccacaagaacaacaagagcuggauggaguccgaguuccgggucuacagcuccgccaacaacugcacguucgaguacgugagccagcccuuccugauggaccuggagggcaagcaggggaacuucaagaaccuccgcgaguucguguucaagaacaucgacggcuacuucaagaucuacuccaagcacaccccgaucaaccugguccgggaccugccccagggguucagcgcccucgagccccugguggaccugcccaucggcaucaacaucacccgcuuccagacccuccuggcccugcaccgguccuaccucacgccgggggacagcagcuccggcuggaccgcgggcgccgccgccuacuacgugggguaccugcagccccgcaccuuccugcucaaguacaacgagaacggcaccaucacggacgcggucgacugcgcccuggacccccugagcgagaccaagugcacccucaaguccuucaccguggagaaggggaucuaccagacgagcaacuuccgggugcagcccaccgaguccaucguccgcuucccgaacaucaccaaccugugccccuucggcgagguguucaacgccacccgguucacgagcgucuacgccuggaaccgcaagcggaucuccaacugcguggccgacuacagcgugcuguacaacuccgcgagcuucuccaccuucaagugcuacggcgucagccccaccaagcucaacgaccugugcuucaccaacguguacgccgacuccuucgugauccgcggggacgagguccggcagaucgcccccggccagacggggaagaucgccgacuacaacuacaagcugccggacgacuucaccggcugcgugaucgccuggaacagcaacaaccucgacuccaaggucgggggcaacuacaacuaccuguaccgccuguuccgcaagagcaaccucaagcccuucgagcgggacaucuccaccgagaucuaccaggcgggcagcacccccugcaacgggguggagggcuucaacugcuacuucccccugcaguccuacggguuccagccgacgaacggcgugggguaccagcccuaccggguggucgugcugagcuucgagcuccugcacgcccccgccaccgugugcggccccaagaaguccaccaaccuggucaagaacaagugcgugaacuucaacuucaacggccucaccgggaccggcgugcugacggagagcaacaagaaguuccugccguuccagcaguucgggcgcgacaucgccgacaccaccgacgccguccgcgacccccagacccuggagauccucgacaucacgcccugcagcuucggcgggguguccgugaucaccccgggcaccaacaccagcaaccaggucgcggugcuguaccaggacgugaacugcacggagguccccguggccauccacgccgaccagcugacccccaccuggcggguguacuccaccggcagcaacgucuuccagacgcgcgccgggugccucaucggcgccgagcacgugaacaacuccuacgagugcgacauccccaucggggcgggcaucugcgccagcuaccagacccagaccaacuccccgcggcgcgcccggagcguggccucccagagcaucaucgcguacaccaugucccugggcgccgagaacagcgucgccuacuccaacaacagcaucgccauccccacgaacuucaccaucuccgugaccaccgagauccugcccgugagcaugacgaagaccagcgucgacugcaccauguacaucugcggggacuccaccgagugcagcaaccuccugcugcaguacggcuccuucugcacgcagcucaaccgcgcccugaccgggaucgcgguggagcaggacaagaacacccaggagguguucgcccaggucaagcagaucuacaagacgcccccgaucaaggacuucggcggguucaacuucagccagauccugcccgaccccuccaagcccagcaagcgguccuucaucgaggaccuccuguucaacaaggugacccuggccgacgccggcuucaucaagcaguacggcgacugccucggggacaucgccgcgcgcgaccugaucugcgcccagaaguucaacggccugaccgugcucccgccccugcugaccgacgagaugaucgcccaguacaccagcgcccuccuggccgggacgaucaccuccggcuggaccuucggggcgggcgccgcccugcagauccccuucgccaugcagauggcguaccgguucaacggcaucggggucacccagaacgugcucuacgagaaccagaagcugaucgccaaccaguucaacagcgccaucggcaagauccaggacucccugagcuccacggccagcgcccucgggaagcugcaggacguggucaaccagaacgcgcaggcccugaacacccucgugaagcagcuguccagcaacuucggcgccaucuccagcgugcugaacgacauccucucccgccuggacaaggucgaggccgaggugcagaucgaccggcugaucaccgggcgccuccagagccugcagaccuacgugacccagcagcugauccgggccgcggagauccgcgccagcgccaaccucgccgccacgaagauguccgagugcguccugggccagagcaagcggguggacuucugcggcaagggguaccaccugauguccuucccccagagcgcgccgcacggcguggucuuccuccacgugaccuacguccccgcccaggagaagaacuucaccaccgcccccgccaucugccacgacgggaaggcgcacuucccccgcgagggcguguucguguccaacgggacgcacugguucgucacccagcggaacuucuacgagccgcagaucaucaccaccgacaacacguucgugagcggcaacugcgacguggucaucggcaucgugaacaacaccguguacgacccccugcagcccgagcuggacuccuucaaggaggagcucgacaaguacuucaagaaccacaccagccccgacgucgaccugggggacaucuccggcaucaacgccagcguggugaacauccagaaggagaucgaccgccugaacgaggucgccaagaaccucaacgagucccugaucgaccugcaggagcucgggaaguacgagcaguacaucaaguggccgugguacaucuggcugggcuucaucgccggccugaucgccaucgugauggugaccaucaugcucugcugcaugacgagcugcugcuccugccugaaggggugcugcagcugcggcuccugcugcaaguucgacgaggacgacagcgagcccguccugaagggggugaagcuccacuacaccugaggacuaguuauaagacugacuagcccgaugggccucccaacgggcccuccuccccuccuugcaccgagauuaauaaaaaaaaaaaaaaaaaaaaaaaaaaaaaaaaaaaaaaaaaaaaaaaaaaaaaaaaaaaaaaaaugcaucccccccccccccccccccccccccccccccaaaggcucuuuucagagccaccagaauu

SEQ ID NO: 12791 - RNA, 4039 nt, Artificial Sequence
  SARS-CoV-2/Portugal/PT0035/2020__EPI_ISL_418020 spike protein mRNA gc (1-1273)
aggagaaagcuuaccauguucguguuccugguccuccugccccuggugagcucccagugcgugaaccucaccacccgcacgcagcugccgcccgccuacaccaacagcuucacccggggcgucuacuaccccgacaagguguuccgcuccagcgugcugcacuccacccaggaccucuuccugcccuucuucagcaacgucacgugguuccacgccauccacguguccgggaccaacggcaccaagcgguucgacaacccggugcugcccuucaacgacggggucuacuucgcgagcaccgagaaguccaacaucauccgcggcuggaucuucgggacgacccucgacagcaagacccagucccugcugaucgugaacaacgccaccaacguggucaucaaggugugcgaguuccaguucugcaacgaccccuuccucggcguguacuaccacaagaacaacaagagcuggauggaguccgaguuccgggucuacagcuccgccaacaacugcacguucgaguacgugagccagcccuuccugauggaccuggagggcaagcaggggaacuucaagaaccuccgcgaguucguguucaagaacaucgacggcuacuucaagaucuacuccaagcacaccccgaucaaccugguccgggaccugccccagggguucagcgcccucgagccccugguggaccugcccaucggcaucaacaucacccgcuuccagacccuccuggcccugcaccgguccuaccucacgccgggggacagcagcuccggcuggaccgcgggcgccgccgccuacuacgugggguaccugcagccccgcaccuuccugcucaaguacaacgagaacggcaccaucacggacgcggucgacugcgcccuggacccccugagcgagaccaagugcacccucaaguccuucaccguggagaaggggaucuaccagacgagcaacuuccgggugcagcccaccgaguccaucguccgcuucccgaacaucaccaaccugugccccuucggcgagguguucaacgccacccgguucgccagcgucuacgccuggaaccgcaagcggaucuccaacugcguggcggacuacagcgugcuguacaacuccgccagcuucuccacguucaagugcuacggcgucagccccaccaagcucaacgaccugugcuucaccaacguguacgccgacuccuucgugauccgcggggacgagguccggcagaucgcccccggccagaccgggaagaucgccgacuacaacuacaagcugccggacgacuucacgggcugcgugaucgcguggaacagcaacaaccucgacuccaaggucgggggcaacuacaacuaccuguaccgccuguuccgcaagagcaaccucaagcccuucgagcgggacaucuccaccgagaucuaccaggccggcagcacccccugcaacgggguggagggcuucaacugcuacuucccccugcaguccuacggguuccagccgaccaacggcgugggguaccagcccuaccggguggucgugcugagcuucgagcuccugcacgcccccgccacggugugcggccccaagaaguccaccaaccuggucaagaacaagugcgugaacuucaacuucaacggccucaccgggaccggcgugcugaccgagagcaacaagaaguuccugccguuccagcaguucgggcgcgacaucgccgacacgaccgacgcgguccgcgacccccagacccuggagauccucgacaucacccccugcagcuucggcgggguguccgugaucacgccgggcaccaacaccagcaaccaggucgccgugcuguaccaggacgugaacugcaccgagguccccguggccauccacgccgaccagcugacgcccaccuggcggguguacuccaccggcagcaacgucuuccagacccgcgccgggugccucaucggcgcggagcacgugaacaacuccuacgagugcgacauccccaucggggccggcaucugcgccagcuaccagacgcagaccaacuccccgcggcgcgcccggagcguggcgucccagagcaucaucgccuacaccaugucccugggcgccgagaacagcgucgccuacuccaacaacagcaucgccauccccaccaacuucacgaucuccgugaccaccgagauccugcccgugagcaugaccaagacgagcgucgacugcaccauguacaucugcggggacuccaccgagugcagcaaccuccugcugcaguacggcuccuucugcacccagcucaaccgcgcgcugacggggaucgccguggagcaggacaagaacacccaggagguguucgcccaggucaagcagaucuacaagacgcccccgaucaaggacuucggcggguucaacuucagccagauccugcccgaccccuccaagcccagcaagcgguccuucaucgaggaccuccuguucaacaaggugacccuggccgacgccggcuucaucaagcaguacggcgacugccucggggacaucagcgcgcgcgaccugaucugcgcccagaaguucaacggccugaccgugcucccgccccugcugaccgacgagaugaucgcccaguacaccuccgcccuccuggccgggaccaucacgagcggcuggaccuucggggcgggcgccgcccugcagauccccuucgccaugcagauggcguaccgguucaacggcaucggggucacccagaacgugcucuacgagaaccagaagcugaucgccaaccaguucaacuccgccaucggcaagauccaggacagccuguccagcaccgccuccgcccucgggaagcugcaggacguggucaaccagaacgcgcaggcccugaacacgcucgugaagcagcugagcuccaacuucggcgccaucagcuccgugcugaacgacauccucagccgccuggacaaggucgaggccgaggugcagaucgaccggcugaucaccgggcgccuccagagccugcagaccuacgugacccagcagcugauccgggccgcggagauccgcgccuccgccaaccucgccgccaccaagaugagcgagugcguccugggccaguccaagcggguggacuucugcggcaagggguaccaccugaugagcuucccccaguccgcgccgcacggcguggucuuccuccacgugacguacguccccgcccaggagaagaacuucaccaccgcccccgccaucugccacgacgggaaggcgcacuucccccgcgagggcguguucgugagcaacgggacccacugguucgucacgcagcggaacuucuacgagccgcagaucaucaccaccgacaacaccuucguguccggcaacugcgacguggucaucggcaucgugaacaacacgguguacgacccccugcagcccgagcuggacagcuucaaggaggagcucgacaaguacuucaagaaccacaccucccccgacgucgaccugggggacaucagcggcaucaacgccuccguggugaacauccagaaggagaucgaccgccugaacgaggucgccaagaaccucaacgagagccugaucgaccugcaggagcucgggaaguacgagcaguacaucaaguggccgugguacaucuggcugggcuucaucgccggccugaucgccaucgugauggugaccaucaugcucugcugcaugaccuccugcugcagcugccugaaggggugcugcuccugcggcagcugcugcaaguucgacgaggacgacuccgagcccguccugaagggggugaagcuccacuacacgugaggacuaguuauaagacugacuagcccgaugggccucccaacgggcccuccuccccuccuugcaccgagauuaauaaaaaaaaaaaaaaaaaaaaaaaaaaaaaaaaaaaaaaaaaaaaaaaaaaaaaaaaaaaaaaaaugcaucccccccccccccccccccccccccccccccaaaggcucuuuucagagccaccagaauu

SEQ ID NO: 12792 - RNA, 4039 nt, Artificial Sequence
  SARS-CoV-2/USA/NY-NYUMC7/2020__EPI_ISL_418192 spike protein mRNA gc (1-1273)
aggagaaagcuuaccauguucguguuccugguccuccugccccuggugagcucccagugcgugaaccucaccacccgcacgcagcugccgcccgccuacaccaacagcuucacccggggcgucuacuaccccgacaagguguuccgcuccagcgugcugcacuccacccaggaccucuuccugcccuucuucagcaacgucacgugguuccacgccauccacguguccgggaccaacggcaccaagcgguucgacaacccggugcugcccuucaacgacggggucuacuucgcgagcaccgagaaguccaacaucauccgcggcuggaucuucgggacgacccucgacagcaagacccagucccugcugaucgugaacaacgccaccaacguggucaucaaggugugcgaguuccaguucugcaacgaccccuuccucggcguguaccaccacaagaacaacaagagcuggauggaguccgaguuccgggucuacagcuccgccaacaacugcacguucgaguacgugagccagcccuuccugauggaccuggagggcaagcaggggaacuucaagaaccuccgcgaguucguguucaagaacaucgacggcuacuucaagaucuacuccaagcacaccccgaucaaccugguccgggaccugccccagggguucagcgcccucgagccccugguggaccugcccaucggcaucaacaucacccgcuuccagacccuccuggcccugcaccgguccuaccucacgccgggggacagcagcuccggcuggaccgcgggcgccgccgccuacuacgugggguaccugcagccccgcaccuuccugcucaaguacaacgagaacggcaccaucacggacgcggucgacugcgcccuggacccccugagcgagaccaagugcacccucaaguccuucaccguggagaaggggaucuaccagacgagcaacuuccgggugcagcccaccgaguccaucguccgcuucccgaacaucaccaaccugugccccuucggcgagguguucaacgccacccgguucgccagcgucuacgccuggaaccgcaagcggaucuccaacugcguggcggacuacagcgugcuguacaacuccgccagcuucuccacguucaagugcuacggcgucagccccaccaagcucaacgaccugugcuucaccaacguguacgccgacuccuucgugauccgcggggacgagguccggcagaucgcccccggccagaccgggaagaucgccgacuacaacuacaagcugccggacgacuucacgggcugcgugaucgcguggaacagcaacaaccucgacuccaaggucgggggcaacuacaacuaccuguaccgccuguuccgcaagagcaaccucaagcccuucgagcgggacaucuccaccgagaucuaccaggccggcagcacccccugcaacgggguggagggcuucaacugcuacuucccccugcaguccuacggguuccagccgaccaacggcgugggguaccagcccuaccggguggucgugcugagcuucgagcuccugcacgcccccgccacggugugcggccccaagaaguccaccaaccuggucaagaacaagugcgugaacuucaacuucaacggccucaccgggaccggcgugcugaccgagagcaacaagaaguuccugccguuccagcaguucgggcgcgacaucgccgacacgaccgacgcgguccgcgacccccagacccuggagauccucgacaucacccccugcagcuucggcgggguguccgugaucacgccgggcaccaacaccagcaaccaggucgccgugcuguaccagggcgugaacugcaccgagguccccguggccauccacgccgaccagcugacgcccaccuggcggguguacuccaccgggagcaacgucuuccagacccgcgccggcugccucaucggggcggagcacgugaacaacuccuacgagugcgacauccccaucggcgccggcaucugcgccagcuaccagacgcagaccaacuccccgcggcgcgcccggagcguggcgucccagagcaucaucgccuacaccaugucccugggggccgagaacagcgucgccuacuccaacaacagcaucgccauccccaccaacuucacgaucuccgugaccaccgagauccugcccgugagcaugaccaagacgagcgucgacugcaccauguacaucugcggcgacuccaccgagugcagcaaccuccugcugcaguacggguccuucugcacccagcucaaccgcgcgcugacgggcaucgccguggagcaggacaagaacacccaggagguguucgcccaggucaagcagaucuacaagacgcccccgaucaaggacuucgggggcuucaacuucagccagauccugcccgaccccuccaagcccagcaagcgguccuucaucgaggaccuccuguucaacaaggugacccuggccgacgccggcuucaucaagcaguacggggacugccucggcgacaucgcggcccgcgaccugaucugcgcccagaaguucaacgggcugaccgugcucccgccccugcugaccgacgagaugaucgcccaguacaccagcgcccuccuggcgggcaccaucacguccggguggaccuucggcgccggcgccgcccugcagauccccuucgcgaugcagauggccuaccgguucaacgggaucggcgucacccagaacgugcucuacgagaaccagaagcugaucgccaaccaguucaacagcgccaucgggaagauccaggacucccugagcuccaccgccagcgcgcucggcaagcugcaggacguggucaaccagaacgcccaggcccugaacacgcucgugaagcagcuguccagcaacuucggggccaucuccagcgugcugaacgacauccucucccgccuggacaaggucgaggccgaggugcagaucgaccggcugaucaccggccgccuccagagccugcagaccuacgugacccagcagcugauccgggcggccgagauccgcgccagcgccaaccucgccgcgaccaagauguccgagugcguccugggccagagcaagcggguggacuucugcgggaagggcuaccaccugauguccuucccccagagcgccccgcacgggguggucuuccuccacgugacguacguccccgcccaggagaagaacuucaccaccgcccccgcgaucugccacgacggcaaggcccacuucccccgcgaggggguguucguguccaacggcacccacugguucgucacgcagcggaacuucuacgagccgcagaucaucaccaccgacaacaccuucgugagcggcaacugcgacguggucaucgggaucgugaacaacacgguguacgacccccugcagcccgagcuggacuccuucaaggaggagcucgacaaguacuucaagaaccacaccagccccgacgucgaccugggcgacaucuccgggaucaacgccagcguggugaacauccagaaggagaucgaccgccugaacgaggucgccaagaaccucaacgagucccugaucgaccugcaggagcucggcaaguacgagcaguacaucaaguggccgugguacaucuggcugggcuucaucgccgggcugaucgcgaucgugauggugaccaucaugcucugcugcaugaccagcugcugcuccugccugaagggcugcugcagcugcggguccugcugcaaguucgacgaggacgacagcgagcccguccugaagggcgugaagcuccacuacacgugaggacuaguuauaagacugacuagcccgaugggccucccaacgggcccuccuccccuccuugcaccgagauuaauaaaaaaaaaaaaaaaaaaaaaaaaaaaaaaaaaaaaaaaaaaaaaaaaaaaaaaaaaaaaaaaaugcaucccccccccccccccccccccccccccccccaaaggcucuuuucagagccaccagaauu

SEQ ID NO: 12793 - RNA, 4039 nt, Artificial Sequence
  SARS-CoV-2/Iceland/189/2020__EPI_ISL_417709 spike protein mRNA gc (1-1273)
aggagaaagcuuaccauguucguguuccugguccuccugccccuggugagcucccagugcgugaaccucaccacccgcacgcagcugccgcccgccuacaccaacagcuucacccggggcgucuacuaccccgacaagguguuccgcuccagcgugcugcacuccacccaggaccucuuccugcccuucuucagcaacgucacgugguuccacgccauccacguguccgggaccaacggcaccaagcgguucgacaacccggugcugcccuucaacgacggggucuacuucgcgagcaccgagaaguccaacaucauccgcggcuggaucuucgggacgacccucgacagcaagacccagucccugcugaucgugaacaacgccaccaacguggucaucaaggugugcgaguuccaguucugcaacgaccccuuccucggcguguacuaccacaagaacaacaagagcuggauggaguccgaguuccgggucuacagcuccgccaacaacugcacguucgaguacgugagccagcccuuccugauggaccuggagggcaagcaggggaacuucaagaaccuccgcgaguucguguucaagaacaucgacggcuacuucaagaucuacuccaagcacaccccgaucaaccugguccgggaccugccccagggguucagcgcccucgagccccugguggaccugcccaucggcaucaacaucacccgcuuccagacccuccuggcccugcaccgguccuaccucacgccgggggacagcagcuccggcuggaccgcgggcgccgccgccuacuacgugggguaccugcagccccgcaccuuccugcucaaguacaacgagaacggcaccaucacggacgcggucgacugcgcccuggacccccugagcgagaccaagugcacccucaaguccuucaccguggagaaggggaucuaccagacgagcaacuuccgggugcagcccaccgaguccaucguccgcuucccgaacaucaccaaccugugccccuucggcgagguguucaacgccacccgguucgccagcgucuacgccuggaaccgcaagcggaucuccaacugcguggcggacuacagcgugcuguacaacuccgccagcuucuccacguucaagugcuacggcgucagccccaccaagcucaacgaccugugcuucaccaacguguacgccgacuccuucgugauccgcggggacgagguccggcagaucgcccccggccagaccgggaagaucgccgacuacaacuacaagcugccggacgacuucacgggcugcgugaucgcguggaacagcaacaaccucgacuccaaggucgggggcaacuacaacuaccuguaccgccuguuccgcaagagcaaccucaagcccuucgagcgggacaucuccaccgagaucuaccaggccggcagcacccccugcaacgggguggagggcuucaacugcuacuucccccugcaguccuacggguuccagccgaccaacggcgugggguaccagcccuaccggguggucgugcugagcuucgagcuccugcacgcccccgccacggugugcggccccaagaaguccaccaaccuggucaagaacaagugcgugaacuucaacuucaacggccucaccgggaccggcgugcugaccgagagcaacaagaaguuccugccguuccagcaguucgggcgcgacaucgccgacacgaccgacgcgguccgcgacccccagacccuggagauccucgacaucacccccugcagcuucggcgggguguccgugaucacgccgggcaccaacaccagcaaccaggucgccgugcuguaccagggcgugaacugcaccgagguccccguggccauccacgccgaccagcugacgcccaccuggcggguguacuccaccgggagcaacgucuuccagacccgcgccggcugccucaucggggcggagcacgugaacaacuccuacgagugcgacauccccaucggcgccggcaucugcgccagcuaccagacgcagaccaacuccccgcggcgcgcccggagcguggcgucccagagcaucaucgccuacaccaugucccugggggccgagaacagcgucgccuacuccaacaacagcaucgccauccccaccaacuucacgaucuccgugaccaccgagauccugcccgugagcaugaccaagacgagcgucgacugcaccauguacaucugcggcgacuccaccgagugcagcaaccuccugcugcaguacggguccuucugcacccagcucaaccgcgcgcugacgggcaucgccguggagcaggacaagaacacccaggagguguucgcccaggucaagcagaucuacaagacgcccccgaucaaggacuucgggggcuucaacuucagccagauccugcccgaccccuccaagcccagcaagcgguccuucaucgaggaccuccuguucaacaaggugacccuggccgacgccggcuucaccaagcaguacggggacugccucggcgacaucgcggcccgcgaccugaucugcgcccagaaguucaacgggcugaccgugcucccgccccugcugaccgacgagaugaucgcccaguacaccagcgcccuccuggcgggcacgaucaccuccggguggaccuucggcgccggcgccgcccugcagauccccuucgcgaugcagauggccuaccgguucaacgggaucggcgucacccagaacgugcucuacgagaaccagaagcugaucgccaaccaguucaacagcgccaucgggaagauccaggacucccugagcuccacggccagcgcgcucggcaagcugcaggacguggucaaccagaacgcccaggcccugaacacccucgugaagcagcuguccagcaacuucggggccaucuccagcgugcugaacgacauccucucccgccuggacaaggucgaggccgaggugcagaucgaccggcugaucaccggccgccuccagagccugcagaccuacgugacccagcagcugauccgggcggccgagauccgcgccagcgccaaccucgccgcgacgaagauguccgagugcguccugggccagagcaagcggguggacuucugcgggaagggcuaccaccugauguccuucccccagagcgccccgcacgggguggucuuccuccacgugaccuacguccccgcccaggagaagaacuucaccaccgcccccgcgaucugccacgacggcaaggcccacuucccccgcgaggggguguucguguccaacggcacgcacugguucgucacccagcggaacuucuacgagccgcagaucaucaccaccgacaacacguucgugagcggcaacugcgacguggucaucgggaucgugaacaacaccguguacgacccccugcagcccgagcuggacuccuucaaggaggagcucgacaaguacuucaagaaccacaccagccccgacgucgaccugggcgacaucuccgggaucaacgccagcguggugaacauccagaaggagaucgaccgccugaacgaggucgccaagaaccucaacgagucccugaucgaccugcaggagcucggcaaguacgagcaguacaucaaguggccgugguacaucuggcugggcuucaucgccgggcugaucgcgaucgugauggugaccaucaugcucugcugcaugacgagcugcugcuccugccugaagggcugcugcagcugcggguccugcugcaaguucgacgaggacgacagcgagcccguccugaagggcgugaagcuccacuacaccugaggacuaguuauaagacugacuagcccgaugggccucccaacgggcccuccuccccuccuugcaccgagauuaauaaaaaaaaaaaaaaaaaaaaaaaaaaaaaaaaaaaaaaaaaaaaaaaaaaaaaaaaaaaaaaaaugcaucccccccccccccccccccccccccccccccaaaggcucuuuucagagccaccagaauu

SEQ ID NO: 12794 - RNA, 4039 nt, Artificial Sequence
  SARS-CoV-2/Australia/NSW56/2020__EPI_ISL_417408 spike protein mRNA gc (1-1273)
aggagaaagcuuaccauguucguguuccugguccuccugccccuggugagcucccagugcgugaaccucaccacccgcacgcagcugccgcccgccuacaccaacagcuucacccggggcgucuacuaccccgacaagguguuccgcuccagcgugcugcacuccacccaggaccucuuccugcccuucuucagcaacgucacgugguuccacgccauccacguguccgggaccaacggcaccaagcgguucgacaacccggugcugcccuucaacgacggggucuacuucgcgagcaccgagaaguccaacaucauccgcggcuggaucuucgggacgacccucgacagcaagacccagucccugcugaucgugaacaacgccaccaacguggucaucaaggugugcgaguuccaguucugcaacgaccccuuccucggcguguacuaccacaagaacaacaagagcuggauggaguccgaguuccgggucuacagcuccgccaacaacugcacguucgaguacgugagccagcccuuccugauggaccuggagggcaagcaggggaacuucaagaaccuccgcgaguucguguucaagaacaucgacggcuacuucaagaucuacuccaagcacaccccgaucaaccugguccgggaccugccccagggguucagcgcccucgagccccugguggaccugcccaucggcaucaacaucacccgcuuccagacccuccuggcccugcaccgguccuaccucacgccgggggacagcagcuccggcuggaccgcgggcgccgccgccuacuacgugggguaccugcagccccgcaccuuccugcucaaguacaacgagaacggcaccaucacggacgcggucgacugcgcccuggacccccugagcgagaccaagugcacccucaaguccuucaccguggagaaggggaucuaccagacgagcaacuuccgggugcagcccaccgaguccaucguccgcuucccgaacaucaccaaccugugccccuucggcgagguguucaacgccacccgguucgccagcgucuacgccuggaaccgcaagcggaucuccaacugcguggcggacuacagcgugcuguacaacuccgccagcuucuccacguucaagugcuacggcgucagccccaccaagcucaacgaccugugcuucaccaacguguacgccgacuccuucgugauccgcggggacgagguccggcagaucgcccccggccagaccgggaagaucgccgacuacaacuacaagcugccggacgacuucacgggcugcgugaucgcguggaacagcaacaaccucgacuccaaggucgggggcaacuacaacuaccuguaccgccuguuccgcaagagcaaccucaagcccuucgagcgggacaucuccaccgagaucuaccaggccggcagcacccccugcaacgggguggagggcuucaacugcuacuucccccugcaguccuacggguuccagccgaccaacggcgugggguaccagcccuaccggguggucgugcugagcuucgagcuccugcacgcccccgccacggugugcggccccaagaaguccaccaaccuggucaagaacaagugcgugaacuucaacuucaacggccucaccgggaccggcgugcugaccgagagcaacaagaaguuccugccguuccagcaguucgggcgcgacaucgccgacacgaccgacgcgguccgcgacccccagacccuggagauccucgacaucacccccugcagcuucggcgggguguccgugaucacgccgggcaccaacaccagcaaccaggucgccgugcuguaccaggacgugaacugcaccgagguccccguggccauccacgccgaccagcugacgcccaccuggcggguguacuccaccggcagcaacgucuuccagacccgcgccgggugccucaucggcgcggagcacgugaacaacuccuacgagugcgacauccccaucggggccggcaucugcgccagcuaccagacgcagaccaacuccccgcggcgcgcccggagcguggcgucccagagcaucaucgccuacaccaugucccugggcgccgagaacagcgucgccuacuccaacaacagcaucgccauccccaccaacuucacgaucuccgugaccaccgagauccugcccgugagcaugaccaagacgagcgucgacugcaccauguacaucugcggggacuccaccgagugcagcaaccuccugcugcaguacggcuccuucugcacccagcucaaccgcgcgcugacggggaucgccguggagcaggacaagaacacccaggagguguucgcccaggucaagcagaucuacaagacgcccccgaucaaggacuucggcggguucaacuucagccagauccugcccgacuccagcaagcccuccaagcggagcuucaucgaggaccuccuguucaacaaggugacccuggccgacgccggcuucaucaagcaguacggcgacugccucggggacaucgcggcccgcgaccugaucugcgcccagaaguucaacggccugaccgugcugcccccgcuccugaccgacgagaugaucgcccaguacaccuccgcccuccuggcggggaccaucacgagcggcuggaccuucggggccggcgccgcccugcagauccccuucgcgaugcagauggccuaccgguucaacggcaucggggucacccagaacgugcucuacgagaaccagaagcugaucgccaaccaguucaacuccgccaucggcaagauccaggacagccuguccagcaccgccuccgcgcucgggaagcugcaggacguggucaaccagaacgcccaggcccugaacacgcucgugaagcagcugagcuccaacuucggcgccaucagcuccgugcugaacgacauccucagccgccuggacaaggucgaggccgaggugcagaucgaccggcugaucaccgggcgccuccagagccugcagaccuacgugacccagcagcugauccgggcggccgagauccgcgccuccgccaaccucgccgcgaccaagaugagcgagugcguccugggccaguccaagcggguggacuucugcggcaagggguaccaccugaugagcuucccccaguccgcgccccacggcguggucuuccuccacgugacguacgucccggcccaggagaagaacuucaccaccgcccccgccaucugccacgacgggaaggcccacuucccccgcgagggcguguucgugagcaacgggacccacugguucgucacgcagcggaacuucuacgagccccagaucaucaccaccgacaacaccuucguguccggcaacugcgacguggucaucggcaucgugaacaacacgguguacgacccgcugcagcccgagcuggacagcuucaaggaggagcucgacaaguacuucaagaaccacaccucccccgacgucgaccugggggacaucagcggcaucaacgccuccguggugaacauccagaaggagaucgaccgccugaacgaggucgccaagaaccucaacgagagccugaucgaccugcaggagcucgggaaguacgagcaguacaucaaguggcccugguacaucuggcugggcuucaucgccggccugaucgcgaucgugauggugaccaucaugcucugcugcaugaccuccugcugcagcugccugaaggggugcugcuccugcggcagcugcugcaaguucgacgaggacgacuccgagccgguccugaagggggugaagcuccacuacacgugaggacuaguuauaagacugacuagcccgaugggccucccaacgggcccuccuccccuccuugcaccgagauuaauaaaaaaaaaaaaaaaaaaaaaaaaaaaaaaaaaaaaaaaaaaaaaaaaaaaaaaaaaaaaaaaaugcaucccccccccccccccccccccccccccccccaaaggcucuuuucagagccaccagaauu

SEQ ID NO: 12795 - RNA, 4039 nt, Artificial Sequence
  SARS-CoV-2/Iceland/280/2020__EPI_ISL_417608 spike protein mRNA gc (1-1273)
aggagaaagcuuaccauguucguguuccugguccuccugccccuggugagcucccagugcgugaaccucaccacccgcacgcagcugccgcccgccuacaccaacagcuucacccggggcgucuacuaccccgacaagguguuccgcuccagcgugcugcacuccacccaggaccucuuccugcccuucuucagcaacgucacgugguuccacgccauccacguguccgggaccaacggcaccaagcgguucgacaacccggugcugcccuucaacgacggggucuacuucgcgagcaccgagaaguccaacaucauccgcggcuggaucuucgggacgacccucgacagcaagacccagucccugcugaucgugaacaacgccaccaacguggucaucaaggugugcgaguuccaguucugcaacgaccccuuccucggcguguacuaccacaagaacaacaagagcuggauggaguccgaguuccgggucuacagcuccgccaacaacugcacguucgaguacgugagccagcccuuccugauggaccuggagggcaagcaggggaacuucaagaaccuccgcgaguucguguucaagaacaucgacggcuacuucaagaucuacuccaagcacaccccgaucaaccugguccgggaccugccccagggguucagcgcccucgagccccugguggaccugcccaucggcaucaacaucacccgcuuccagacccuccuggcccugcaccgguccuaccucacgccgggggacagcagcuccggcuggaccgcgggcgccgccgccuacuacgugggguaccugcagccccgcaccuuccugcucaaguacaacgagaacggcaccaucacggacgcggucgacugcgcccuggacccccugagcgagaccaagugcacccucaaguccuucaccguggagaaggggaucuaccagacgagcaacuuccgggugcagcccaccgaguccaucguccgcuucccgaacaucaccaaccugugccccuucggcgagguguucaacgccacccgguucgccagcgucuacgccuggaaccgcaagcggaucuccaacugcguggcggacuacagcgugcuguacaacuccgccagcuucuccacguucaagugcuacggcgucagccccaccaagcucaacgaccugugcuucaccaacguguacgccgacuccuucgugauccgcggggacgagguccggcagaucgcccccggccagaccgggaagaucgccgacuacaacuacaagcugccggacgacuucacgggcugcgugaucgcguggaacagcaacaaccucgacuccaaggucgggggcaacuacaacuaccuguaccgccuguuccgcaagagcaaccucaagcccuucgagcgggacaucuccaccgagaucuaccaggccggcagcacccccugcaacgggguggagggcuucaacugcuacuucccccugcaguccuacggguuccagccgaccaacggcgugggguaccagcccuaccggguggucgugcugagcuucgagcuccugcacgcccccgccacggugugcggccccaagaaguccaccaaccuggucaagaacaagugcgugaacuucaacuucaacggccucaccgggaccggcgugcugaccgagagcaacaagaaguuccugccguuccagcaguucgggcgcgacaucgccgacacgaccgacgcgguccgcgacccccagacccuggagauccucgacaucacccccugcagcuucggcgggguguccgugaucacgccgggcaccaacaccagcaaccaggucgccgugcuguaccagggcgugaacugcaccgagguccccguggccauccacgccgaccagcugacgcccaccuggcggguguacuccaccgggagcaacgucuuccagacccgcgccggcugccucaucggggcggagcacgugaacaacuccuacgagugcgacauccccaucggcgccggcaucugcgccagcuaccacacgcagaccaacuccccgcggcgcgcccggagcguggcgucccagagcaucaucgccuacaccaugucccugggggccgagaacagcgucgccuacuccaacaacagcaucgccauccccaccaacuucacgaucuccgugaccaccgagauccugcccgugagcaugaccaagacgagcgucgacugcaccauguacaucugcggcgacuccaccgagugcagcaaccuccugcugcaguacggguccuucugcacccagcucaaccgcgcgcugacgggcaucgccguggagcaggacaagaacacccaggagguguucgcccaggucaagcagaucuacaagacgcccccgaucaaggacuucgggggcuucaacuucagccagauccugcccgaccccuccaagcccagcaagcgguccuucaucgaggaccuccuguucaacaaggugacccuggccgacgccggcuucaucaagcaguacggggacugccucggcgacaucgcggcccgcgaccugaucugcgcccagaaguucaacgggcugaccgugcucccgccccugcugaccgacgagaugaucgcccaguacaccagcgcccuccuggcgggcaccaucacguccggguggaccuucggcgccggcgccgcccugcagauccccuucgcgaugcagauggccuaccgguucaacgggaucggcgucacccagaacgugcucuacgagaaccagaagcugaucgccaaccaguucaacagcgccaucgggaagauccaggacucccugagcuccaccgccagcgcgcucggcaagcugcaggacguggucaaccagaacgcccaggcccugaacacgcucgugaagcagcuguccagcaacuucggggccaucuccagcgugcugaacgacauccucucccgccuggacaaggucgaggccgaggugcagaucgaccggcugaucaccggccgccuccagagccugcagaccuacgugacccagcagcugauccgggcggccgagauccgcgccagcgccaaccucgccgcgaccaagauguccgagugcguccugggccagagcaagcggguggacuucugcgggaagggcuaccaccugauguccuucccccagagcgccccgcacgggguggucuuccuccacgugacguacguccccgcccaggagaagaacuucaccaccgcccccgcgaucugccacgacggcaaggcccacuucccccgcgaggggguguucguguccaacggcacccacugguucgucacgcagcggaacuucuacgagccgcagaucaucaccaccgacaacaccuucgugagcggcaacugcgacguggucaucgggaucgugaacaacacgguguacgacccccugcagcccgagcuggacuccuucaaggaggagcucgacaaguacuucaagaaccacaccagccccgacgucgaccugggcgacaucuccgggaucaacgccagcguggugaacauccagaaggagaucgaccgccugaacgaggucgccaagaaccucaacgagucccugaucgaccugcaggagcucggcaaguacgagcaguacaucaaguggccgugguacaucuggcugggcuucaucgccgggcugaucgcgaucgugauggugaccaucaugcucugcugcaugaccagcugcugcuccugccugaagggcugcugcagcugcggguccugcugcaaguucgacgaggacgacagcgagcccguccugaagggcgugaagcuccacuacacgugaggacuaguuauaagacugacuagcccgaugggccucccaacgggcccuccuccccuccuugcaccgagauuaauaaaaaaaaaaaaaaaaaaaaaaaaaaaaaaaaaaaaaaaaaaaaaaaaaaaaaaaaaaaaaaaaugcaucccccccccccccccccccccccccccccccaaaggcucuuuucagagccaccagaauu

SEQ ID NO: 12796 - RNA, 4039 nt, Artificial Sequence
  SARS-CoV-2/Iceland/247/2020__EPI_ISL_417575 spike protein mRNA gc (1-1273)
aggagaaagcuuaccauguucguguuccugguccuccugccccuggugagcucccagugcgugaaccucaccacccgcacgcagcugccgcccgccuacaccaacagcuucacccggggcgucuacuaccccgacaagguguuccgcuccagcgugcugcacuccacccaggaccucuuccugcccuucuucagcaacgucacgugguuccacgccauccacguguccgggaccaacggcaccaagcgguucgacaacccggugcugcccuucaacgacggggucuacuucgcgagcaccgagaaguccaacaucauccgcggcuggaucuucgggacgacccucgacagcaagacccagucccugcugaucgugaacaacgccaccaacguggucaucaaggugugcgaguuccaguucugcaacgaccccuuccucggcguguacuaccacaagaacaacaagagcuggauggaguccgaguuccgggucuacagcuccgccaacaacugcacguucgaguacgugagccagcccuuccugauggaccuggagggcaagcaggggaacuucaagaaccuccgcgaguucguguucaagaacaucgacggcuacuucaagaucuacuccaagcacaccccgaucaaccugguccgggaccugccccagggguucagcgcccucgagccccugguggaccugcccaucggcaucaacaucacccgcuuccagacccuccuggcccugcaccgguccuaccucacgccgggggacagcagcuccggcuggaccgcgggcgccgccgccuacuacgugggguaccugcagccccgcaccuuccugcucaaguacaacgagaacggcaccaucacggacgcggucgacugcgcccuggacccccugagcgagaccaagugcacccucaaguccuucaccguggagaaggggaucuaccagacgagcaacuuccgggugcagcccaccgaguccaucguccgcuucccgaacaucaccaaccugugccccuucggcgagguguucaacgccacccgguucgccagcgucuacgccuggaaccgcaagcggaucuccaacugcguggcggacuacagcgugcuguacaacuccgccagcuucuccacguucaagugcuacggcgucagccccaccaagcucaacgaccugugcuucaccaacguguacgccgacuccuucgugauccgcggggacgagguccggcagaucgcccccggccagaccgggaagaucgccgacuacaacuacaagcugccggacgacuucacgggcugcgugaucgcguggaacagcaacaaccucgacuccaaggucgggggcaacuacaacuaccuguaccgccuguuccgcaagagcaaccucaagcccuucgagcgggacaucuccaccgagaucuaccaggccggcagcacccccugcaacgggguggagggcuucaacugcuacuucccccugcaguccuacggguuccagccgaccaacggcgugggguaccagcccuaccggguggucgugcugagcuucgagcuccugcacgcccccgccacggugugcggccccaagaaguccaccaaccuggucaagaacaagugcgugaacuucaacuucaacggccucaccgggaccggcgugcugaccgagagcaacaagaaguuccugccguuccagcaguucgggcgcgacaucgccgacacgaccgacgcgguccgcgacccccagacccuggagauccucgacaucacccccugcagcuucggcgggguguccgugaucacgccgggcaccaacaccagcaaccaggucgccgugcuguaccagggcgugaacugcaccgagguccccguggccauccacgccgaccagcugacgcccaccuggcggguguacuccaccgggagcaacgucuuccagacccgcgccggcugccucaucggggcggagcacgugaacaacuccuacgagugcgacauccccaucggcgccggcaucugcgccagcuaccagacgcagaccaacuccccgcggcgcgcccggagcguggcgucccagagcaucaucgccuacaccaugucccugggggccgagaacagcgucgccuacuccaacaacagcaucgccauccccaccaacuucacgaucuccgugaccaccgagauccugcccgugagcaugaccaagacgagcgucgacugcaccauguacaucugcggcgacuccaccgagugcagcaaccuccugcugcaguacggguccuucugcacccagcucaaccgcgcgcugacgggcaucgccguggagcaggacaagaacacccaggagguguucgcccaggucaagcagaucuacaagacgcccccgaucaaggacuucgggggcuucaacuucagccagauccugcccgaccccuccaagcccagcaagcgguccuucaucgaggaccuccuguucaacaaggugacccuggccgacgccggcuucaucaagcaguacggggacugccucggcgacaucgcggcccgcgaccugaucugcgcccagaaguucaacgggcugaccgugcucccgccccugcugaccgacgagaugaucgcccaguacaccagcgcccuccuggcgggcaccaucacguccggguggaccuucggcgccggcgccgcccugcagauccccuucgcgaugcagauggccuaccgguucaacgggaucggcgucacccagaacgugcucuacgagaaccagaagcugaucgccaaccaguucaacagcgccaucgggaagauccaggacucccugagcuccaccgccagcgcgcucggcaagcugcaggacguggucaaccagaacgcccaggcccugaacacgcucgugaagcagcuguccagcaacuucggggccaucuccagcgugcugaacgacauccucucccgccuggacaaggucgaggccgaggugcagaucgaccggcugaucaccggccgccuccagagccugcagaccuacgugacccagcagcugauccgggcggccgagauccgcgccagcgccaaccucgccgcgaccaagauguccgagugcguccugggccagagcaagcggguggacuucugcgggaagggcuaccaccugauguccuucccccagagcgccccgcacgggguggucuuccuccacgugacguacguccccgcccaggagaagaacuucaccaccgcccccgcgaucugccacgacggcaaggcccacuucccccgcgaggggguguucguguccaacggcacccacugguucgucacgcagcggaacuucuacgagccgcagaucaucaccaccgacaacaccuucgugagcggcaacugcgacguggucaucgggaucgugaacaacacgguguacgacccccugcagcccgagcuggacuccuucaaggaggagcucgacaaguacuucaagaaccacaccagccccgacgucgaccugggcgacaucuccgggaucaacgccagcguggugaacauccagaaggagaucgaccgccugaacgaggucgccaagaaccucaacgagucccugaucgaccugcaggagcucggcaaguacgagcaguacaucaaguggccgugguacaucuggcugggcuucaucgccgggcugaucgcgaucgugaucgugaccaucaugcucugcugcaugaccagcugcugcuccugccugaagggcugcugcagcugcggguccugcugcaaguucgacgaggacgacagcgagcccguccugaagggcgugaagcuccacuacacgugaggacuaguuauaagacugacuagcccgaugggccucccaacgggcccuccuccccuccuugcaccgagauuaauaaaaaaaaaaaaaaaaaaaaaaaaaaaaaaaaaaaaaaaaaaaaaaaaaaaaaaaaaaaaaaaaugcaucccccccccccccccccccccccccccccccaaaggcucuuuucagagccaccagaauu

SEQ ID NO: 12797 - RNA, 4039 nt, Artificial Sequence
  SARS-CoV-2/Iceland/238/2020__EPI_ISL_417566 spike protein mRNA gc (1-1273)
aggagaaagcuuaccauguucguguuccugguccuccugccccuggugagcucccagugcgugaaccucaccacccgcacgcagcugccgcccgccuacaccaacagcuucacccggggcgucuacuaccccgacaagguguuccgcuccagcgugcugcacuccacccaggaccucuuccugcccuucuucagcaacgucacgugguuccacgccauccacguguccgggaccaacggcaccaagcgguucgacaacccggugcugcccuucaacgacggggucuacuucgcgagcaccgagaaguccaacaucauccgcggcuggaucuucgggacgacccucgacagcaagacccagucccugcugaucgugaacaacgccaccaacguggucaucaaggugugcgaguuccaguucugcaacgaccccuuccucggcguguacuaccacaagaacaacaagagcuggauggaguccgaguuccgggucuacagcuccgccaacaacugcacguucgaguacgugagccagcccuuccugauggaccuggagggcaagcaggggaacuucaagaaccuccgcgaguucguguucaagaacaucgacggcuacuucaagaucuacuccaagcacaccccgaucaaccugguccgggaccugccccagggguucagcgcccucgagccccugguggaccugcccaucggcaucaacaucacccgcuuccagacccuccuggcccugcaccgguccuaccucacgccgggggacagcagcuccggcuggaccgcgggcgccgccgccuacuacgugggguaccugcagccccgcaccuuccugcucaaguacaacgagaacggcaccaucacggacgcggucgacugcgcccuggacccccugagcgagaccaagugcacccucaaguccuucaccguggagaaggggaucuaccagacgagcaacuuccgggugcagcccaccgaguccaucguccgcuucccgaacaucaccaaccugugccccuucggcgagguguucaacgccacccgguucgccagcgucuacgccuggaaccgcaagcggaucuccaacugcguggcggacuacagcgugcuguacaacuccgccagcuucuccacguucaagugcuacggcgucagccccaccaagcucaacgaccugugcuucaccaacguguacgccgacuccuucgugauccgcggggacgagguccggcagaucgcccccggccagaccgggaagaucgccgacuacaacuacaagcugccggacgacuucacgggcugcgugaucgcguggaacagcaacaaccucgacuccaaggucgggggcaacuacaacuaccuguaccgccuguuccgcaagagcaaccucaagcccuucgagcgggacaucuccaccgagaucuaccaggccggcagcacccccugcaacgggguggagggcuucaacugcuacuucccccugcaguccuacggguuccagccgaccaacggcgugggguaccagcccuaccggguggucgugcugagcuucgagcuccugcacgcccccgccacggugugcggccccaagaaguccaccaaccuggucaagaacaagugcgugaacuucaacuucaacggccucaccgggaccggcgugcugaccgagagcaacaagaaguuccugccguuccagcaguucgggcgcgacaucgccgacacgaccgacgcgguccgcgacccccagacccuggagauccucgacaucacccccugcagcuucggcgggguguccgugaucacgccgggcaccaacaccagcaaccaggucgccgugcuguaccagggcgugaacugcaccgagguccccguggccauccacgccgaccagcugacgcccaccuggcggguguacuccaccgggagcaacgucuuccagacccgcgccggcugccucaucggggcggagcacgugaacaacuccuacgagugcgacauccccaucggcgccggcaucugcgccagcuaccagacgcagaccaacuccccgcggcgcgcccggagcguggcgucccagagcaucaucgccuacaccaugucccugggggccgagaacagcgucgccuacuccaacaacagcaucgccauccccaccaacuucacgaucuccgugaccaccgagauccugcccgugagcaugaccaagacgagcgucgacugcaccauguacaucugcggcgacuccaccgagugcagcaaccuccugcugcaguacggguccuucugcacccagcucaaccgcgcgcugacgggcaucgccguggagcaggacaagaacacccaggagguguucgcccaggucaagcagaucuacaagacgcccccgaucaaggacuucgggggcuucaacuucagccagauccugcccgaccccuccaagcccagcaagcgguccuucaucgaggaccuccuguucaacaaggugacccuggccgacgugggcuucaucaagcaguacggggacugccucggcgacaucgccgcgcgcgaccugaucugcgcccagaaguucaacgggcugaccguccucccgccccugcugaccgacgagaugaucgcccaguacaccagcgcccuccuggccggcaccaucacguccggguggaccuucggcgcgggcgccgcccugcagauccccuucgccaugcagauggcguaccgguucaacgggaucggcgugacccagaacgugcucuacgagaaccagaagcugaucgccaaccaguucaacagcgccaucgggaagauccaggacucccugagcuccaccgccagcgcccucggcaagcugcaggacgucgugaaccagaacgcgcaggcccugaacacgcucgugaagcagcuguccagcaacuucggggccaucuccagcguccugaacgacauccucucccgccuggacaagguggaggccgaggugcagaucgaccggcugaucaccggccgccuccagagccugcagaccuacgucacccagcagcugauccgggccgcggagauccgcgccagcgccaaccucgccgccaccaagauguccgagugcgugcugggccagagcaagcggguggacuucugcgggaagggcuaccaccugauguccuucccccagagcgcgccgcacggggucguguuccuccacgucacguacgugcccgcccaggagaagaacuucaccaccgcccccgccaucugccacgacggcaaggcgcacuucccccgcgaggggguguucgucuccaacggcacccacugguucgugacgcagcggaacuucuacgagccgcagaucaucaccaccgacaacaccuucgugagcggcaacugcgacgucgugaucgggaucgugaacaacacggucuacgacccccugcagcccgagcuggacuccuucaaggaggagcucgacaaguacuucaagaaccacaccagccccgacguggaccugggcgacaucuccgggaucaacgccagcguggucaacauccagaaggagaucgaccgccugaacgagguggccaagaaccucaacgagucccugaucgaccugcaggagcucggcaaguacgagcaguacaucaaguggccgugguacaucuggcugggcuucaucgccgggcugaucgccaucgugauggucaccaucaugcucugcugcaugaccagcugcugcuccugccugaagggcugcugcagcugcggguccugcugcaaguucgacgaggacgacagcgagcccgugcugaagggcgugaagcuccacuacacgugaggacuaguuauaagacugacuagcccgaugggccucccaacgggcccuccuccccuccuugcaccgagauuaauaaaaaaaaaaaaaaaaaaaaaaaaaaaaaaaaaaaaaaaaaaaaaaaaaaaaaaaaaaaaaaaaugcaucccccccccccccccccccccccccccccccaaaggcucuuuucagagccaccagaauu

SEQ ID NO: 12798 - RNA, 4039 nt, Artificial Sequence
  SARS-CoV-2/Greece/16/2020__EPI_ISL_418265 spike protein mRNA gc (1-1273)
aggagaaagcuuaccauguucguguuccugguccuccugccccuggugagcucccagugcgugaaccucaccacccgcacgcagcugccgcccgccuacaccaacagcuucacccggggcgucuacuaccccgacaagguguuccgcuccagcgugcugcacuccacccaggaccucuuccugcccuucuucagcaacgucacgugguuccacgccauccacguguccgggaccaacggcaccaagcgguucgacaacccggugcugcccuucaacgacggggucuacuucgcgagcaccgagaaguccaacaucauccgcggcuggaucuucgggacgacccucgacagcaagacccagucccugcugaucgugaacaacgccaccaacguggucaucaaggugugcgaguuccaguucugcaacgaccccuuccucggcguguacuaccacaagaacaacaagagcuggauggaguccgaguuccgggucuacagcuccgccaacaacugcacguucgaguacgugagccagcccuuccugauggaccuggagggcaagcaggggaacuucaagaaccuccgcgaguucguguucaagaacgucgacggcuacuucaagaucuacuccaagcacaccccgaucaaccuggugcgggaccugccccagggguucagcgcccucgagccccugguggaccugcccaucggcaucaacaucacccgcuuccagacccuccuggcccugcaccgguccuaccucacgccgggggacagcagcuccggcuggaccgcgggcgccgccgccuacuacgucggguaccugcagccccgcaccuuccugcucaaguacaacgagaacggcaccaucacggacgcgguggacugcgcccuggacccccugagcgagaccaagugcacccucaaguccuucaccguggagaaggggaucuaccagacgagcaacuuccggguccagcccaccgaguccaucgugcgcuucccgaacaucaccaaccugugccccuucggcgaggucuucaacgccacccgguucgccagcguguacgccuggaaccgcaagcggaucuccaacugcguggcggacuacagcguccuguacaacuccgccagcuucuccacguucaagugcuacggcgugagccccaccaagcucaacgaccugugcuucaccaacguguacgccgacuccuucgucauccgcggggacgaggugcggcagaucgcccccggccagaccgggaagaucgccgacuacaacuacaagcugccggacgacuucacgggcugcgugaucgcguggaacagcaacaaccucgacuccaaggucgggggcaacuacaacuaccuguaccgccuguuccgcaagagcaaccucaagcccuucgagcgggacaucuccaccgagaucuaccaggccggcagcacccccugcaacgggguggagggcuucaacugcuacuucccccugcaguccuacggguuccagccgaccaacggcgugggguaccagcccuaccgggucguggugcugagcuucgagcuccugcacgcccccgccacggucugcggccccaagaaguccaccaaccuggugaagaacaagugcgugaacuucaacuucaacggccucaccgggaccggcguccugaccgagagcaacaagaaguuccugccguuccagcaguucgggcgcgacaucgccgacacgaccgacgcggugcgcgacccccagacccuggagauccucgacaucacccccugcagcuucggcgggguguccgucaucacgccgggcaccaacaccagcaaccagguggccgugcuguaccaggacgucaacugcaccgaggugcccguggccauccacgccgaccagcugacgcccaccuggcgggucuacuccaccggcagcaacguguuccagacccgcgccgggugccucaucggcgcggagcacgugaacaacuccuacgagugcgacauccccaucggggccggcaucugcgccagcuaccagacgcagaccaacuccccgcggcgcgcccggagcgucgcgucccagagcaucaucgccuacaccaugucccugggcgccgagaacagcguggccuacuccaacaacagcaucgccauccccaccaacuucacgaucuccgugaccaccgagauccugcccgucagcaugaccaagacgagcguggacugcaccauguacaucugcggggacuccaccgagugcagcaaccuccugcugcaguacggcuccuucugcacccagcucaaccgcgcgcugacggggaucgccguggagcaggacaagaacacccaggaggucuucgcccaggugaagcagaucuacaagacgcccccgaucaaggacuucggcggguucaacuucagccagauccugcccgaccccuccaagcccagcaagcgguccuucaucgaggaccuccuguucaacaaggugacccuggccgacgccggcuucaucaagcaguacggcgacugccucggggacaucgcggcccgcgaccugaucugcgcccagaaguucaacggccugaccguccucccgccccugcugaccgacgagaugaucgcccaguacaccagcgcccuccuggcggggaccaucacguccggcuggaccuucggggccggcgccgcccugcagauccccuucgcgaugcagauggccuaccgguucaacggcaucggggugacccagaacgugcucuacgagaaccagaagcugaucgccaaccaguucaacagcgccaucggcaagauccaggacucccugagcuccaccgccagcgcgcucgggaagcugcaggacgucgugaaccagaacgcccaggcccugaacacgcucgugaagcagcuguccagcaacuucggcgccaucuccagcguccugaacgacauccucucccgccuggacaagguggaggccgaggugcagaucgaccggcugaucaccgggcgccuccagagccugcagaccuacgucacccagcagcugauccgggcggccgagauccgcgccagcgccaaccucgccgcgaccaagauguccgagugcgugcugggccagagcaagcggguggacuucugcggcaagggguaccaccugauguccuucccccagagcgccccgcacggcgucguguuccuccacgucacguacgugcccgcccaggagaagaacuucaccaccgcccccgcgaucugccacgacgggaaggcccacuucccccgcgagggcguguucgucuccaacgggacccacugguucgugacgcagcggaacuucuacgagccgcagaucaucaccaccgacaacaccuucgugagcggcaacugcgacgucgugaucggcaucgugaacaacacggucuacgacccccugcagcccgagcuggacuccuucaaggaggagcucgacaaguacuucaagaaccacaccagccccgacguggaccugggggacaucuccggcaucaacgccagcguggucaacauccagaaggagaucgaccgccugaacgagguggccaagaaccucaacgagucccugaucgaccugcaggagcucgggaaguacgagcaguacaucaaguggccgugguacaucuggcugggcuucaucgccggccugaucgcgaucgugauggucaccaucaugcucugcugcaugaccagcugcugcuccugccugaaggggugcugcagcugcggcuccugcugcaaguucgacgaggacgacagcgagcccgugcugaagggggugaagcuccacuacacgugaggacuaguuauaagacugacuagcccgaugggccucccaacgggcccuccuccccuccuugcaccgagauuaauaaaaaaaaaaaaaaaaaaaaaaaaaaaaaaaaaaaaaaaaaaaaaaaaaaaaaaaaaaaaaaaaugcaucccccccccccccccccccccccccccccccaaaggcucuuuucagagccaccagaauu

SEQ ID NO: 12799 - RNA, 4039 nt, Artificial Sequence
  SARS-CoV-2/Iceland/319/2020__EPI_ISL_417648 spike protein mRNA gc (1-1273)
aggagaaagcuuaccauguucguguuccugguccuccugccccuggugagcucccagugcgugaaccucaccacccgcacgcagcugccgcccgccuacaccaacagcuucacccggggcgucuacuaccccgacaagguguuccgcuccagcgugcugcacuccacccaggaccucuuccugcccuucuucagcaacgucacgugguuccacgccauccacguguccgggaccaacggcaccaagcgguucgacaacccggugcugcccuucaacgacggggucuacuucgcgagcaccgagaaguccaacaucauccgcggcuggaucuucgggacgacccucgacagcaagacccagucccugcugaucgugaacaacgccaccaacguggucaucaaggugugcgaguuccaguucugcaacgaccccuuccucggcguguacuaccacaagaacaacaagagcuggauggaguccgaguuccgggucuacagcuccgccaacaacugcacguucgaguacgugagccagcccuuccugaucgaccuggagggcaagcaggggaacuucaagaaccuccgcgaguucguguucaagaacaucgacggcuacuucaagaucuacuccaagcacaccccgaucaaccugguccgggaccugccccagggguucagcgcccucgagccccugguggaccugcccaucggcaucaacaucacccgcuuccagacccuccuggcccugcaccgguccuaccucacgccgggggacagcagcuccggcuggaccgcgggcgccgccgccuacuacgugggguaccugcagccccgcaccuuccugcucaaguacaacgagaacggcaccaucacggacgcggucgacugcgcccuggacccccugagcgagaccaagugcacccucaaguccuucaccguggagaaggggaucuaccagacgagcaacuuccgggugcagcccaccgaguccaucguccgcuucccgaacaucaccaaccugugccccuucggcgagguguucaacgccacccgguucgccagcgucuacgccuggaaccgcaagcggaucuccaacugcguggcggacuacagcgugcuguacaacuccgccagcuucuccacguucaagugcuacggcgucagccccaccaagcucaacgaccugugcuucaccaacguguacgccgacuccuucgugauccgcggggacgagguccggcagaucgcccccggccagaccgggaagaucgccgacuacaacuacaagcugccggacgacuucacgggcugcgugaucgcguggaacagcaacaaccucgacuccaaggucgggggcaacuacaacuaccuguaccgccuguuccgcaagagcaaccucaagcccuucgagcgggacaucuccaccgagaucuaccaggccggcagcacccccugcaacgggguggagggcuucaacugcuacuucccccugcaguccuacggguuccagccgaccaacggcgugggguaccagcccuaccggguggucgugcugagcuucgagcuccugcacgcccccgccacggugugcggccccaagaaguccaccaaccuggucaagaacaagugcgugaacuucaacuucaacggccucaccgggaccggcgugcugaccgagagcaacaagaaguuccugccguuccagcaguucgggcgcgacaucgccgacacgaccgacgcgguccgcgacccccagacccuggagauccucgacaucacccccugcagcuucggcgggguguccgugaucacgccgggcaccaacaccagcaaccaggucgccgugcuguaccagggcgugaacugcaccgagguccccguggccauccacgccgaccagcugacgcccaccuggcggguguacuccaccgggagcaacgucuuccagacccgcgccggcugccucaucggggcggagcacgugaacaacuccuacgagugcgacauccccaucggcgccggcaucugcgccagcuaccagacgcagaccaacuccccgcggcgcgcccggagcguggcgucccagagcaucaucgccuacaccaugucccugggggccgagaacagcgucgccuacuccaacaacagcaucgccauccccaccaacuucacgaucuccgugaccaccgagauccugcccgugagcaugaccaagacgagcgucgacugcaccauguacaucugcggcgacuccaccgagugcagcaaccuccugcugcaguacggguccuucugcacccagcucaaccgcgcgcugacgggcaucgccguggagcaggacaagaacacccaggagguguucgcccaggucaagcagaucuacaagacgcccccgaucaaggacuucgggggcuucaacuucagccagauccugcccgaccccuccaagcccagcaagcgguccuucaucgaggaccuccuguucaacaaggugacccuggccgacgccggcuucaucaagcaguacggggacugccucggcgacaucgcggcccgcgaccugaucugcgcccagaaguucaacgggcugaccgugcucccgccccugcugaccgacgagaugaucgcccaguacaccagcgcccuccuggcgggcaccaucacguccggguggaccuucggcgccggcgccgcccugcagauccccuucgcgaugcagauggccuaccgguucaacgggaucggcgucacccagaacgugcucuacgagaaccagaagcugaucgccaaccaguucaacagcgccaucgggaagauccaggacucccugagcuccaccgccagcgcgcucggcaagcugcaggacguggucaaccagaacgcccaggcccugaacacgcucgugaagcagcuguccagcaacuucggggccaucuccagcgugcugaacgacauccucucccgccuggacaaggucgaggccgaggugcagaucgaccggcugaucaccggccgccuccagagccugcagaccuacgugacccagcagcugauccgggcggccgagauccgcgccagcgccaaccucgccgcgaccaagauguccgagugcguccugggccagagcaagcggguggacuucugcgggaagggcuaccaccugauguccuucccccagagcgccccgcacgggguggucuuccuccacgugacguacguccccgcccaggagaagaacuucaccaccgcccccgcgaucugccacgacggcaaggcccacuucccccgcgaggggguguucguguccaacggcacccacugguucgucacgcagcggaacuucuacgagccgcagaucaucaccaccgacaacaccuucgugagcggcaacugcgacguggucaucgggaucgugaacaacacgguguacgacccccugcagcccgagcuggacuccuucaaggaggagcucgacaaguacuucaagaaccacaccagccccgacgucgaccugggcgacaucuccgggaucaacgccagcguggugaacauccagaaggagaucgaccgccugaacgaggucgccaagaaccucaacgagucccugaucgaccugcaggagcucggcaaguacgagcaguacaucaaguggccgugguacaucuggcugggcuucaucgccgggcugaucgcgaucgugauggugaccaucaugcucugcugcaugaccagcugcugcuccugccugaagggcugcugcagcugcggguccugcugcaaguucgacgaggacgacagcgagcccguccugaagggcgugaagcuccacuacacgugaggacuaguuauaagacugacuagcccgaugggccucccaacgggcccuccuccccuccuugcaccgagauuaauaaaaaaaaaaaaaaaaaaaaaaaaaaaaaaaaaaaaaaaaaaaaaaaaaaaaaaaaaaaaaaaaugcaucccccccccccccccccccccccccccccccaaaggcucuuuucagagccaccagaauu

SEQ ID NO: 12800 - RNA, 4039 nt, Artificial Sequence
  SARS-CoV-2/Congo/94/2020__EPI_ISL_417947 spike protein mRNA gc (1-1273)
aggagaaagcuuaccauguucguguuccugguccuccugccccuggugagcucccagugcgugaaccucaccacccgcacgcagcugccgcccgccuacaccaacagcuucacccggggcgucuacuaccccgacaagguguuccgcuccagcgugcugcacuccacccaggaccucuuccugcccuucuucagcaacgucacgugguuccacgccauccacguguccgggaccaacggcaccaagcgguucgacaacccggugcugcccuucaacgacggggucuacuucgcgagcaccgagaaguccaacaucauccgcggcuggaucuucgggacgacccucgacagcaagacccagucccugcugaucgugaacaacgccaccaacguggucaucaaggugugcgaguuccaguucugcaacgaccccuuccucggcguguacuaccacaagaacaacaagagcuggauggaguccgaguuccgggucuacagcuccgccaacaacugcacguucgaguacgugagccagcccuuccugauggaccuggagggcaagcaggggaacuucaagaaccuccgcgaguucguguucaagaacaucgacggcuacuucaagaucuacuccaagcacaccccgaucaaccugguccgggaccugccccagggguucagcgcccucgagccccugguggaccugcccaucggcaucaacaucacccgcuuccagacccuccuggcccugcaccgguccuaccucacgccgggggacagcagcuccggcuggaccgcgggcgccgccgccuacuacgugggguaccugcagccccgcaccuuccugcucaaguacaacgagaacggcaccaucacggacgcggucgacugcgcccuggacccccugagcgagaccaagugcacccucaaguccuucaccguggagaaggggaucuaccagacgagcaacuuccgggugcagcccaccgaguccaucguccgcuucccgaacaucaccaaccugugccccuucggcgagguguucaacgccacccgguucgccagcgucuacgccuggaaccgcaagcggaucuccaacugcguggcggacuacagcgugcuguacaacuccgccagcuucuccacguucaagugcuacggcgucagccccaccaagcucaacgaccugugcuucaccaacguguacgccgacuccuucgugauccgcggggacgagguccggcagaucgcccccggccagaccgggaagaucgccgacuacaacuacaagcugccggacgacuucacgggcugcgugaucgcguggaacagcaacaaccucgacuccaaggucgggggcaacuacaacuaccuguaccgccuguuccgcaagagcaaccucaagcccuucgagcgggacaucuccaccgagaucuaccaggccggcagcacccccugcaacgggguggagggcuucaacugcuacuucccccugcaguccuacggguuccagccgaccaacggcgugggguaccagcccuaccggguggucgugcugagcuucgagcuccugcacgcccccgccacggugugcggccccaagaaguccaccaaccuggucaagaacaagugcgugaacuucaacuucaacggccucaccgggaccggcgugcugaccgagagcaacaagaaguuccugccguuccagcaguucgggcgcgacaucgccgacacgaccgacgcgguccgcgacccccagacccuggagauccucgacaucacccccugcagcuucggcgggguguccgugaucacgccgggcaccaacaccagcaaccaggucgccgugcuguaccagggcgugaacugcaccgagguccccguggccauccacgccgaccagcugacgcccaccuggcggguguacuccaccgggagcaacgucuuccagacccgcgccggcugccucaucggggcggagcacgugaacaacuccuacgagugcgacauccccaucggcgccggcaucugcgccagcuaccagacgcagaccaacuccccgcggcgcgcccggagcguggcgucccagagcaucaucgccuacaccaugucccugggggccgagaacagcgucgccuacuccaacaacagcaucgccauccccaccaacuucacgaucuccgugaccaccgagauccugcccgugagcaugaccaagacgagcgucgacugcaccauguacaucugcggcgacuccaccgagugcagcaaccuccugcugcaguacggguccuucugcacccagcucaaccgcgcgcugacgggcaucgccguggagcaggacaagaacacccaggagguguucgcccaggucaagcagaucuacaagacgcccccgaucaaggacuucgggggcuucaacuucagccagauccugcccgaccccuccaagcccagcaagcgguccuucaucgaggacauccucuucaacaaggugacccuggccgacgccggcuucaucaagcaguacggggacugccugggcgacaucgcggcccgcgaccucaucugcgcccagaaguucaacgggcugaccgugcugccgccccuccugaccgacgagaugaucgcccaguacaccagcgcccugcucgcgggcaccaucacguccggguggaccuucggcgccggcgccgcccugcagauccccuucgcgaugcagauggccuaccgguucaacgggaucggcgucacccagaacgugcuguacgagaaccagaagcucaucgccaaccaguucaacagcgccaucgggaagauccaggacucccugagcuccaccgccagcgcgcugggcaagcuccaggacguggucaaccagaacgcccaggcccugaacacgcuggugaagcagcucuccagcaacuucggggccaucuccagcgugcugaacgacauccugucccgccucgacaaggucgaggccgaggugcagaucgaccggcugaucaccggccgccugcagagccuccagaccuacgugacccagcagcugauccgggcggccgagauccgcgccagcgccaaccuggccgcgaccaagauguccgagugcguccucggccagagcaagcggguggacuucugcgggaagggcuaccaccugauguccuucccccagagcgccccgcacgggguggucuuccugcacgugacguacguccccgcccaggagaagaacuucaccaccgcccccgcgaucugccacgacggcaaggcccacuucccccgcgaggggguguucguguccaacggcacccacugguucgucacgcagcggaacuucuacgagccgcagaucaucaccaccgacaacaccuucgugagcggcaacugcgacguggucaucgggaucgugaacaacacgguguacgacccccuccagcccgagcuggacuccuucaaggaggagcuggacaaguacuucaagaaccacaccagccccgacgucgaccucggcgacaucuccgggaucaacgccagcguggugaacauccagaaggagaucgaccgccugaacgaggucgccaagaaccugaacgagucccucaucgaccugcaggagcugggcaaguacgagcaguacaucaaguggccgugguacaucuggcucggcuucaucgccgggcugaucgcgaucgugauggugaccaucaugcugugcugcaugaccagcugcugcuccugccucaagggcugcugcagcugcggguccugcugcaaguucgacgaggacgacagcgagcccguccugaagggcgugaagcugcacuacacgugaggacuaguuauaagacugacuagcccgaugggccucccaacgggcccuccuccccuccuugcaccgagauuaauaaaaaaaaaaaaaaaaaaaaaaaaaaaaaaaaaaaaaaaaaaaaaaaaaaaaaaaaaaaaaaaaugcaucccccccccccccccccccccccccccccccaaaggcucuuuucagagccaccagaauu

SEQ ID NO: 12801 - RNA, 4039 nt, Artificial Sequence
  SARS-CoV-2/Congo/158/2020__EPI_ISL_417950 spike protein mRNA gc (1-1273)
aggagaaagcuuaccauguucguguuccugguccuccugccccuggugagcucccagugcgugaaccucaccacccgcacgcagcugccgcccgccuacaccaacagcuucacccggggcgucuacuaccccgacaagguguuccgcuccagcgugcugcacuccacccaggaccucuuccugcccuucuucagcaacgucacgugguuccacgccauccacguguccgggaccaacggcaccaagcgguucgacaacccggugcugcccuucaacgacggggucuacuucgcgagcaccgagaaguccaacaucauccgcggcuggaucuucgggacgacccucgacagcaagacccagucccugcugaucgugaacaacgccaccaacguggucaucaaggugugcgaguuccaguucugcaacgaccccuuccucggcguguacuaccacaagaacaacaagagcuggauggaguccgaguuccgggucuacagcuccgccaacaacugcacguucgaguacgugagccagcccuuccugauggaccuggagggcaagcaggggaacuucaagaaccuccgcgaguucguguucaagaacaucgacggcuacuucaagaucuacuccaagcacaccccgaucaaccugguccgggaccugccccagggguucagcgcccucgagccccugguggaccugcccaucggcaucaacaucacccgcuuccagacccuccuggcccugcaccgguccuaccucacgccgggggacagcagcuccggcuggaccgcgggcgccgccgccuacuacgugggguaccugcagccccgcaccuuccugcucaaguacaacgagaacggcaccaucacggacgcggucgacugcgcccuggacccccugagcgagaccaagugcacccucaaguccuucaccguggagaaggggaucuaccagacgagcaacuuccgggugcagcccaccgaguccaucguccgcuucccgaacaucaccaaccugugccccuucggcgagguguucaacgccacccgguucgccagcgucuacgccuggaaccgcaagcggaucuccaacugcguggcggacuacagcgugcuguacaacuccgccagcuucuccacguucaagugcuacggcgucagccccaccaagcucaacgaccugugcuucaccaacguguacgccgacuccuucgugauccgcggggacgagguccggcagaucgcccccggccagaccgggaagaucgccgacuacaacuacaagcugccggacgacuucacgggcugcgugaucgcguggaacagcaacaaccucgacuccaaggucgggggcaacuacaacuaccuguaccgccuguuccgcaagagcaaccucaagcccuucgagcgggacaucuccaccgagaucuaccaggccggcagcacccccugcaacgggguggagggcuucaacugcuacuucccccugcaguccuacggguuccagccgaccaacggcgugggguaccagcccuaccggguggucgugcugagcuucgagcuccugcacgcccccgccacggugugcggccccaagaaguccaccaaccuggucaagaacaagugcgugaacuucaacuucaacggccucaccgggaccggcgugcugaccgagagcaacaagaaguuccugccguuccagcaguucgggcgcgacaucgccgacacgaccgacgcgguccgcgacccccagacccuggagauccucgacaucacccccugcagcuucggcgggguguccgugaucacgccgggcaccaacaccagcaaccaggucgccgugcuguaccaggacgugaacugcaccgagguccccguggccauccacgccgaccagcugacgcccaccuggcggguguacuccaccggcagcaacgucuuccagacccgcgccgggugccucaucggcgcggagcacgugaacaacuccuacgagugcgacauccccaucggggccggcaucugcgccagcuaccagacgcagaccaacuccccgcggcgcgcccggagcguggcgucccagagcaucaucgccuacaccaugucccugggcgccgagaacagcgucgccuacuccaacaacagcaucgccauccccaccaacuucacgaucuccgugaccaccgagauccugcccgugagcaugaccaagacgagcgucgacugcaccauguacaucugcggggacuccaccgagugcagcaaccuccugcugcaguacggcuccuucugcacccagcucaaccgcgcgcugacggggaucgccguggagcaggacaagaacacccaggagguguucgcccaggucaagcagaucuacaagacgcccccgaucaaggacuucggcggguucaacuucagccagauccugcccgaccccuccaagcccagcaagcgguccuucaucgaggaccuccuguucaacaaggugacccuggccgacgccggcuucaucaagcaguacggcgacugccucggggacaucgcggcccgcgaccugaucugcgcccagaaguucaacggccugaccgugcucccgccccugcugaccgacgagaugaucgcccaguacaccagcgcccuccuggcggggaccaucacguccggcuggaccuucggggccggcgccgcccugcagauccccuucgcgaugcagauggccuaccgguucaacggcaucggggucacccagaacgugcucuacgagaaccagaagcugaucgccaaccaguucaacagcgccaucggcaagauccaggacucccugagcuccaccgccagcgcgcucgggaagcugcaggacguggucaaccagaacgcccaggcccugaacacgcucgugaagcagcuguccagcaacuucggcgccaucuccagcgugcugaacgacauccucucccgccuggacaaggucgaggccgaggugcagaucgaccggcugaucaccgggcgccuccagagccugcagaccuacgugacccagcagcugauccgggcggccgagauccgcgccagcgccaaccucgccgcgaccaagauguccgagugcguccugggccagagcaagcggguggacuucugcggcaagggguaccaccugauguccuucccccagagcgccccgcacggcguggucuuccuccacgugacguacguccccgcccaggagaagaacuucaccaccgcccccgcgaucugccacgacgggaaggcccacuucccccgcgagggcguguucguguccaacgggacccacugguucgucacgcagcggaacuucuacgagccgcagaucaucaccaccgacaacaccuuccugagcggcaacugcgacguggugaucggcaucgucaacaacacgguguacgacccccugcagcccgagcucgacuccuucaaggaggagcuggacaaguacuucaagaaccacaccagccccgacguggaccugggggacaucuccggcaucaacgccagcgucgugaacauccagaaggagaucgaccgccucaacgagguggccaagaaccugaacgagucccugaucgaccuccaggagcuggggaaguacgagcaguacaucaaguggccgugguacaucuggcugggcuucaucgccggccucaucgcgaucgucauggugaccaucaugcugugcugcaugaccagcugcugcuccugccugaaggggugcugcagcugcggcuccugcugcaaguucgacgaggacgacagcgagcccgugcucaagggggucaagcugcacuacacgugaggacuaguuauaagacugacuagcccgaugggccucccaacgggcccuccuccccuccuugcaccgagauuaauaaaaaaaaaaaaaaaaaaaaaaaaaaaaaaaaaaaaaaaaaaaaaaaaaaaaaaaaaaaaaaaaugcaucccccccccccccccccccccccccccccccaaaggcucuuuucagagccaccagaauu

SEQ ID NO: 12802 - RNA, 4039 nt, Artificial Sequence
  SARS-CoV-2/USA/UT-00034/2020__EPI_ISL_417977 spike protein mRNA gc (1-1273)
aggagaaagcuuaccauguucguguuccugguccuccugccccuggugagcucccagugcgugaaccucaccacccgcacgcagcugccgcccgccuacaccaacagcuucacccggggcgucuacuaccccgacaagguguuccgcuccagcgugcugcacuccacccaggaccucuuccugcccuucuucagcaacgucacgugguuccacgccauccacguguccgggaccaacggcaccaagcgguucgacaacccggugcugcccuucaacgacggggucuacuucgcgagcaccgagaaguccaacaucauccgcggcuggaucuucgggacgacccucgacagcaagacccagucccugcugaucgugaacaacgccaccaacguggucaucaaggugugcgaguuccaguucugcaacgaccccuuccucggcguguacuacuacaagaacaacaagagcuggauggaguccgaguuccgggucuacagcuccgccaacaacugcacguucgaguacgugagccagcccuuccugauggaccuggagggcaagcaggggaacuucaagaaccuccgcgaguucguguucaagaacaucgacggcuacuucaagaucuacuccaagcacaccccgaucaaccugguccgggaccugccccagggguucagcgcccucgagccccugguggaccugcccaucggcaucaacaucacccgcuuccagacccuccuggcccugcaccgguccuaccucacgccgggggacagcagcuccggcuggaccgcgggcgccgccgccuacuacgugggguaccugcagccccgcaccuuccugcucaaguacaacgagaacggcaccaucacggacgcggucgacugcgcccuggacccccugagcgagaccaagugcacccucaaguccuucaccguggagaaggggaucuaccagacgagcaacuuccgggugcagcccaccgaguccaucguccgcuucccgaacaucaccaaccugugccccuucggcgagguguucaacgccacccgguucgccagcgucuacgccuggaaccgcaagcggaucuccaacugcguggcggacuacagcgugcuguacaacuccgccagcuucuccacguucaagugcuacggcgucagccccaccaagcucaacgaccugugcuucaccaacguguacgccgacuccuucgugauccgcggggacgagguccggcagaucgcccccggccagaccgggaagaucgccgacuacaacuacaagcugccggacgacuucacgggcugcgugaucgcguggaacagcaacaaccucgacuccaaggucgggggcaacuacaacuaccuguaccgccuguuccgcaagagcaaccucaagcccuucgagcgggacaucuccaccgagaucuaccaggccggcagcacccccugcaacgggguggagggcuucaacugcuacuucccccugcaguccuacggguuccagccgaccaacggcgugggguaccagcccuaccggguggucgugcugagcuucgagcuccugcacgcccccgccacggugugcggccccaagaaguccaccaaccuggucaagaacaagugcgugaacuucaacuucaacggccucaccgggaccggcgugcugaccgagagcaacaagaaguuccugccguuccagcaguucgggcgcgacaucgccgacacgaccgacgcgguccgcgacccccagacccuggagauccucgacaucacccccugcagcuucggcgggguguccgugaucacgccgggcaccaacaccagcaaccaggucgccgugcuguaccagggcgugaacugcaccgagguccccguggccauccacgccgaccagcugacgcccaccuggcggguguacuccaccgggagcaacgucuuccagacccgcgccggcugccucaucggggcggagcacgugaacaacuccuacgagugcgacauccccaucggcgccggcaucugcgccagcuaccagacgcagaccaacuccccgcggcgcgcccggagcguggcgucccagagcaucaucgccuacaccaugucccugggggccgagaacagcgucgccuacuccaacaacagcaucgccauccccaccaacuucacgaucuccgugaccaccgagauccugcccgugagcaugaccaagacgagcgucgacugcaccauguacaucugcggcgacuccaccgagugcagcaaccuccugcugcaguacggguccuucugcacccagcucaaccgcgcgcugacgggcaucgccguggagcaggacaagaacacccaggagguguucgcccaggucaagcagaucuacaagacgcccccgaucaaggacuucgggggcuucaacuucagccagauccugcccgaccccuccaagcccagcaagcgguccuucaucgaggaccuccuguucaacaaggugacccuggccgacgccggcuucaucaagcaguacggggacugccucggcgacaucgcggcccgcgaccugaucugcgcccagaaguucaacgggcugaccgugcucccgccccugcugaccgacgagaugaucgcccaguacaccagcgcccuccuggcgggcaccaucacguccggguggaccuucggcgccggcgccgcccugcagauccccuucgcgaugcagauggccuaccgguucaacgggaucggcgucacccagaacgugcucuacgagaaccagaagcugaucgccaaccaguucaacagcgccaucgggaagauccaggacucccugagcuccaccgccagcgcgcucggcaagcugcaggacguggucaaccagaacgcccaggcccugaacacgcucgugaagcagcuguccagcaacuucggggccaucuccagcgugcugaacgacauccucucccgccuggacaaggucgaggccgaggugcagaucgaccggcugaucaccggccgccuccagagccugcagaccuacgugacccagcagcugauccgggcggccgagauccgcgccagcgccaaccucgccgcgaccaagauguccgagugcguccugggccagagcaagcggguggacuucugcgggaagggcuaccaccugauguccuucccccagagcgccccgcacgggguggucuuccuccacgugacguacguccccgcccaggagaagaacuucaccaccgcccccgcgaucugccacgacggcaaggcccacuucccccgcgaggggguguucguguccaacggcacccacugguucgucacgcagcggaacuucuacgagccgcagaucaucaccaccgacaacaccuucgugagcggcaacugcgacguggucaucgggaucgugaacaacacgguguacgacccccugcagcccgagcuggacuccuucaaggaggagcucgacaaguacuucaagaaccacaccagccccgacgucgaccugggcgacaucuccgggaucaacgccagcguggugaacauccagaaggagaucgaccgccugaacgaggucgccaagaaccucaacgagucccugaucgaccugcaggagcucggcaaguacgagcaguacaucaaguggccgugguacaucuggcugggcuucaucgccgggcugaucgcgaucgugauggugaccaucaugcucugcugcaugaccagcugcugcuccugccugaagggcugcugcagcugcggguccugcugcaaguucgacgaggacgacagcgagcccguccugaagggcgugaagcuccacuacacgugaggacuaguuauaagacugacuagcccgaugggccucccaacgggcccuccuccccuccuugcaccgagauuaauaaaaaaaaaaaaaaaaaaaaaaaaaaaaaaaaaaaaaaaaaaaaaaaaaaaaaaaaaaaaaaaaugcaucccccccccccccccccccccccccccccccaaaggcucuuuucagagccaccagaauu

SEQ ID NO: 12803 - RNA, 4039 nt, Artificial Sequence
  SARS-CoV-2/USA/UT-00033/2020__EPI_ISL_417976 spike protein mRNA gc (1-1273)
aggagaaagcuuaccauguucguguuccugguccuccugccccuggugagcucccagugcgugaaccucaccacccgcacgcagcugccgcccgccuacaccaacagcuucacccggggcgucuacuaccccgacaagguguuccgcuccagcgugcugcacuccacccaggaccucuuccugcccuucuucagcaacgucacgugguuccacgccauccacguguccgggaccaacggcaccaagcgguucgacaacccggugcugcccuucaacgacggggucuacuucgcgagcaccgagaaguccaacaucauccgcggcuggaucuucgggacgacccucgacagcaagacccagucccugcugaucgugaacaacgccaccaacguggucaucaaggugugcgaguuccaguucugcaacgaccccuuccucggcguguacuaccacaagaacaacaagagcuggauggaguccgaguuccgggucuacagcuccgccaacaacugcacguucgaguacgugagccagcccuuccugauggaccuggagggcaagcaggggaacuucaagaaccuccgcgaguucguguucaagaacaucgacggcuacuucaagaucuacuccaagcacaccccgaucaaccugguccgggaccugccccagggguucagcgcccucgagccccugguggaccugcccaucggcaucaacaucacccgcuuccagacccuccuggcccugcaccgguccuaccucacgccgggggacagcagcuccggccugaccgcgggcgccgccgccuacuacgugggguaccugcagccccgcaccuuccuccugaaguacaacgagaacggcaccaucacggacgcggucgacugcgcccuggacccccucagcgagaccaagugcacccugaaguccuucaccguggagaaggggaucuaccagacgagcaacuuccgggugcagcccaccgaguccaucguccgcuucccgaacaucaccaaccugugccccuucggcgagguguucaacgccacccgguucgccagcgucuacgccuggaaccgcaagcggaucuccaacugcguggcggacuacagcgugcucuacaacuccgccagcuucuccacguucaagugcuacggcgucagccccaccaagcugaacgaccugugcuucaccaacguguacgccgacuccuucgugauccgcggggacgagguccggcagaucgcccccggccagaccgggaagaucgccgacuacaacuacaagcucccggacgacuucacgggcugcgugaucgcguggaacagcaacaaccuggacuccaaggucgggggcaacuacaacuaccuguaccgccucuuccgcaagagcaaccugaagcccuucgagcgggacaucuccaccgagaucuaccaggccggcagcacccccugcaacgggguggagggcuucaacugcuacuucccccugcaguccuacggguuccagccgaccaacggcgugggguaccagcccuaccggguggucgugcucagcuucgagcugcugcacgcccccgccacggugugcggccccaagaaguccaccaaccucgucaagaacaagugcgugaacuucaacuucaacggccugaccgggaccggcgugcugaccgagagcaacaagaaguuccugccguuccagcaguucgggcgcgacaucgccgacacgaccgacgcgguccgcgacccccagacccucgagauccuggacaucacccccugcagcuucggcgggguguccgugaucacgccgggcaccaacaccagcaaccaggucgccgugcuguaccagggcgugaacugcaccgagguccccguggccauccacgccgaccagcucacgcccaccuggcggguguacuccaccgggagcaacgucuuccagacccgcgccggcugccugaucggggcggagcacgugaacaacuccuacgagugcgacauccccaucggcgccggcaucugcgccagcuaccagacgcagaccaacuccccgcggcgcgcccggagcguggcgucccagagcaucaucgccuacaccaugucccugggggccgagaacagcgucgccuacuccaacaacagcaucgccauccccaccaacuucacgaucuccgugaccaccgagauccuccccgugagcaugaccaagacgagcgucgacugcaccauguacaucugcggcgacuccaccgagugcagcaaccugcugcuccaguacggguccuucugcacccagcugaaccgcgcgcugacgggcaucgccguggagcaggacaagaacacccaggagguguucgcccaggucaagcagaucuacaagacgcccccgaucaaggacuucgggggcuucaacuucagccagauccuccccgaccccuccaagcccagcaagcgguccuucaucgaggaccugcuguucaacaaggugacccucgccgacgccggcuucaucaagcaguacggggacugccugggcgacaucgcggcccgcgaccugaucugcgcccagaaguucaacgggcucaccgugcugccgccccugcucaccgacgagaugaucgcccaguacaccagcgcccugcuggcgggcaccaucacguccggguggaccuucggcgccggcgccgcccuccagauccccuucgcgaugcagauggccuaccgguucaacgggaucggcgucacccagaacgugcuguacgagaaccagaagcugaucgccaaccaguucaacagcgccaucgggaagauccaggacucccucagcuccaccgccagcgcgcugggcaagcugcaggacguggucaaccagaacgcccaggcccucaacacgcuggugaagcagcuguccagcaacuucggggccaucuccagcgugcucaacgacauccugucccgccuggacaaggucgaggccgaggugcagaucgaccggcucaucaccggccgccugcagagccugcagaccuacgugacccagcagcucauccgggcggccgagauccgcgccagcgccaaccuggccgcgaccaagauguccgagugcguccugggccagagcaagcggguggacuucugcgggaagggcuaccaccucauguccuucccccagagcgccccgcacgggguggucuuccugcacgugacguacguccccgcccaggagaagaacuucaccaccgcccccgcgaucugccacgacggcaaggcccacuucccccgcgaggggguguucguguccaacggcacccacugguucgucacgcagcggaacuucuacgagccgcagaucaucaccaccgacaacaccuucgugagcggcaacugcgacguggucaucgggaucgugaacaacacgguguacgacccccugcagcccgagcucgacuccuucaaggaggagcuggacaaguacuucaagaaccacaccagccccgacgucgaccugggcgacaucuccgggaucaacgccagcguggugaacauccagaaggagaucgaccgccucaacgaggucgccaagaaccugaacgagucccugaucgaccuccaggagcugggcaaguacgagcaguacaucaaguggccgugguacaucuggcugggcuucaucgccgggcucaucgcgaucgugauggugaccaucaugcugugcugcaugaccagcugcugcuccugccugaagggcugcugcagcugcggguccugcugcaaguucgacgaggacgacagcgagcccguccucaagggcgugaagcugcacuacacgugaggacuaguuauaagacugacuagcccgaugggccucccaacgggcccuccuccccuccuugcaccgagauuaauaaaaaaaaaaaaaaaaaaaaaaaaaaaaaaaaaaaaaaaaaaaaaaaaaaaaaaaaaaaaaaaaugcaucccccccccccccccccccccccccccccccaaaggcucuuuucagagccaccagaauu

SEQ ID NO: 12804 - RNA, 4039 nt, Artificial Sequence
  SARS-CoV-2/USA/WI-13/2020__EPI_ISL_417516 spike protein mRNA gc (1-1273)
aggagaaagcuuaccauguucguguuccugguccuccugccccuggugagcucccagugcgugaaccucaccacccgcacgcagcugccgcccgccuacaccaacagcuucacccggggcgucuacuaccccgacaagguguuccgcuccagcgugcugcacuccacccaggaccucuuccugcccuucuucagcaacgucacgugguuccacgccauccacguguccgggaccaacggcaccaagcgguucgacaacccggugcugcccuucaacgacggggucuacuucgcgagcaccgagaaguccaacaucauccgcggcuggaucuucgggacgacccucgacagcaagacccagucccugcugaucgugaacaacgccaccaacguggucaucaaggugugcgaguuccaguucugcaacgaccccuuccucggcguguacuaccacaagaacaacaagagcuggauggaguccgaguuccgggucuacagcuccgccaacaacugcacguucgaguacgugagccagcccuuccugauggaccuggagggcaagcaggggaacuucaagaaccuccgcgaguucguguucaagaacaucgacggcuacuucaagaucuacuccaagcacaccccgaucaaccugguccgggaccugccccagggguucagcgcccucgagccccugguggaccugcccaucggcaucaacaucacccgcuuccagacccuccuggcccugcaccgguccuaccucacgccgggggacagcagcuccggcuggaccgcgggcgccgccgccuacuacgugggguaccugcagccccgcaccuuccugcucaaguacaacgagaacggcaccaucacggacgcggucgacugcgcccuggacccccugagcgagaccaagugcacccucaaguccuucaccguggagaaggggaucuaccagacgagcaacuuccgggugcugcccaccgaguccaucguccgcuucccgaacaucaccaaccugugccccuucggcgagguguucaacgccacccgguucgccagcgucuacgccuggaaccgcaagcggaucuccaacugcguggcggacuacagcgugcucuacaacuccgccagcuucuccacguucaagugcuacggcgucagccccaccaagcugaacgaccugugcuucaccaacguguacgccgacuccuucgugauccgcggggacgagguccggcagaucgcccccggccagaccgggaagaucgccgacuacaacuacaagcucccggacgacuucacgggcugcgugaucgcguggaacagcaacaaccuggacuccaaggucgggggcaacuacaacuaccuguaccgccucuuccgcaagagcaaccugaagcccuucgagcgggacaucuccaccgagaucuaccaggccggcagcacccccugcaacgggguggagggcuucaacugcuacuucccccugcaguccuacggguuccagccgaccaacggcgugggguaccagcccuaccggguggucgugcucagcuucgagcugcugcacgcccccgccacggugugcggccccaagaaguccaccaaccucgucaagaacaagugcgugaacuucaacuucaacggccugaccgggaccggcgugcugaccgagagcaacaagaaguuccugccguuccagcaguucgggcgcgacaucgccgacacgaccgacgcgguccgcgacccccagacccucgagauccuggacaucacccccugcagcuucggcgggguguccgugaucacgccgggcaccaacaccagcaaccaggucgccgugcuguaccagggcgugaacugcaccgagguccccguggccauccacgccgaccagcucacgcccaccuggcggguguacuccaccgggagcaacgucuuccagacccgcgccggcugccugaucggggcggagcacgugaacaacuccuacgagugcgacauccccaucggcgccggcaucugcgccagcuaccagacgcagaccaacuccccgcggcgcgcccggagcguggcgucccagagcaucaucgccuacaccaugucccugggggccgagaacagcgucgccuacuccaacaacagcaucgccauccccaccaacuucacgaucuccgugaccaccgagauccuccccgugagcaugaccaagacgagcgucgacugcaccauguacaucugcggcgacuccaccgagugcagcaaccugcugcuccaguacggguccuucugcacccagcugaaccgcgcgcugacgggcaucgccguggagcaggacaagaacacccaggagguguucgcccaggucaagcagaucuacaagacgcccccgaucaaggacuucgggggcuucaacuucagccagauccuccccgaccccuccaagcccagcaagcgguccuucaucgaggaccugcuguucaacaaggugacccucgccgacgccggcuucaucaagcaguacggggacugccugggcgacaucgcggcccgcgaccugaucugcgcccagaaguucaacgggcucaccgugcugccgccccugcucaccgacgagaugaucgcccaguacaccagcgcccugcuggcgggcaccaucacguccggguggaccuucggcgccggcgccgcccuccagauccccuucgcgaugcagauggccuaccgguucaacgggaucggcgucacccagaacgugcuguacgagaaccagaagcugaucgccaaccaguucaacagcgccaucgggaagauccaggacucccucagcuccaccgccagcgcgcugggcaagcugcaggacguggucaaccagaacgcccaggcccucaacacgcuggugaagcagcuguccagcaacuucggggccaucuccagcgugcucaacgacauccugucccgccuggacaaggucgaggccgaggugcagaucgaccggcucaucaccggccgccugcagagccugcagaccuacgugacccagcagcucauccgggcggccgagauccgcgccagcgccaaccuggccgcgaccaagauguccgagugcguccugggccagagcaagcggguggacuucugcgggaagggcuaccaccucauguccuucccccagagcgccccgcacgggguggucuuccugcacgugacguacguccccgcccaggagaagaacuucaccaccgcccccgcgaucugccacgacggcaaggcccacuucccccgcgaggggguguucguguccaacggcacccacugguucgucacgcagcggaacuucuacgagccgcagaucaucaccaccgacaacaccuucgugagcggcaacugcgacguggucaucgggaucgugaacaacacgguguacgacccccugcagcccgagcucgacuccuucaaggaggagcuggacaaguacuucaagaaccacaccagccccgacgucgaccugggcgacaucuccgggaucaacgccagcguggugaacauccagaaggagaucgaccgccucaacgaggucgccaagaaccugaacgagucccugaucgaccuccaggagcugggcaaguacgagcaguacaucaaguggccgugguacaucuggcugggcuucaucgccgggcucaucgcgaucgugauggugaccaucaugcugugcugcaugaccagcugcugcuccugccugaagggcugcugcagcugcggguccugcugcaaguucgacgaggacgacagcgagcccguccucaagggcgugaagcugcacuacacgugaggacuaguuauaagacugacuagcccgaugggccucccaacgggcccuccuccccuccuugcaccgagauuaauaaaaaaaaaaaaaaaaaaaaaaaaaaaaaaaaaaaaaaaaaaaaaaaaaaaaaaaaaaaaaaaaugcaucccccccccccccccccccccccccccccccaaaggcucuuuucagagccaccagaauu

SEQ ID NO: 12805 - RNA, 4036 nt, Artificial Sequence
  SARS-CoV-2/India/1-27/2020__EPI_ISL_413522 spike protein mRNA gc (1-1272)
aggagaaagcuuaccauguucguguuccugguccuccugccccuggugagcucccagugcgugaaccucaccacccgcacgcagcugccgcccgccuacaccaacagcuucacccggggcgucuacuaccccgacaagguguuccgcuccagcgugcugcacuccacccaggaccucuuccugcccuucuucagcaacgucacgugguuccacgccauccacguguccgggaccaacggcaccaagcgguucgacaacccggugcugcccuucaacgacggggucuacuucgcgagcaccgagaaguccaacaucauccgcggcuggaucuucgggacgacccucgacagcaagacccagucccugcugaucgugaacaacgccaccaacguggucaucaaggugugcgaguuccaguucugcaacgaccccuuccucggcguguaccacaagaacaacaagagcuggauggaguccgaguuccgggucuacagcuccgccaacaacugcacguucgaguacgugagccagcccuuccugauggaccuggagggcaagcaggggaacuucaagaaccuccgcgaguucguguucaagaacaucgacggcuacuucaagaucuacuccaagcacaccccgaucaaccugguccgggaccugccccagggguucagcgcccucgagccccugguggaccugcccaucggcaucaacaucacccgcuuccagacccuccuggcccugcaccgguccuaccucacgccgggggacagcagcuccggcuggaccgcgggcgccgccgccuacuacgugggguaccugcagccccgcaccuuccugcucaaguacaacgagaacggcaccaucacggacgcggucgacugcgcccuggacccccugagcgagaccaagugcacccucaaguccuucaccguggagaaggggaucuaccagacgagcaacuuccgggugcagcccaccgaguccaucguccgcuucccgaacaucaccaaccugugccccuucggcgagguguucaacgccacccgguucgccagcgucuacgccuggaaccgcaagcggaucuccaacugcguggcggacuacagcgugcuguacaacuccgccagcuucuccacguucaagugcuacggcgucagccccaccaagcucaacgaccugugcuucaccaacguguacgccgacuccuucgugauccgcggggacgaggucauccagaucgcccccggccagaccgggaagaucgccgacuacaacuacaagcugccggacgacuucacgggcugcgugaucgcguggaacagcaacaaccucgacuccaaggucgggggcaacuacaacuaccuguaccggcuguuccgcaagagcaaccucaagcccuucgagcgggacaucuccaccgagaucuaccaggccggcagcacccccugcaacgggguggagggcuucaacugcuacuucccccugcaguccuacggguuccagccgaccaacggcgugggguaccagcccuaccgcguggucgugcugagcuucgagcuccugcacgcccccgccacggugugcggccccaagaaguccaccaaccuggucaagaacaagugcgugaacuucaacuucaacggccucaccgggaccggcgugcugaccgagagcaacaagaaguuccugccguuccagcaguucgggcgggacaucgccgacacgaccgacgcgguccgcgacccccagacccuggagauccucgacaucacccccugcagcuucggcgggguguccgugaucacgccgggcaccaacaccagcaaccaggucgccgugcuguaccaggacgugaacugcaccgagguccccguggccauccacgccgaccagcugacgcccaccuggcgcguguacuccaccggcagcaacgucuuccagacccgggccgggugccucaucggcgcggagcacgugaacaacuccuacgagugcgacauccccaucggggccggcaucugcgccagcuaccagacgcagaccaacuccccgcgccgggcccgcagcguggcgucccagagcaucaucgccuacaccaugucccugggcgccgagaacagcgucgccuacuccaacaacagcaucgccauccccaccaacuucacgaucuccgugaccaccgagauccugcccgugagcaugaccaagacgagcgucgacugcaccauguacaucugcggggacuccaccgagugcagcaaccuccugcugcaguacggcuccuucugcacccagcucaaccgggcgcugacggggaucgccguggagcaggacaagaacacccaggagguguucgcccaggucaagcagaucuacaagacgcccccgaucaaggacuucggcggguucaacuucagccagauccugcccgaccccuccaagcccagcaagcgcuccuucaucgaggaccuccuguucaacaaggugacccuggccgacgccggcuucaucaagcaguacggcgacugccucggggacaucgcggcccgggaccugaucugcgcccagaaguucaacggccugaccgugcucccgccccugcugaccgacgagaugaucgcccaguacaccagcgcccuccuggcggggaccaucacguccggcuggaccuucggggccggcgccgcccugcagauccccuucgcgaugcagauggccuaccgcuucaacggcaucggggucacccagaacgugcucuacgagaaccagaagcugaucgccaaccaguucaacagcgccaucggcaagauccaggacucccugagcuccaccgccagcgcgcucgggaagcugcaggacguggucaaccagaacgcccaggcccugaacacgcucgugaagcagcuguccagcaacuucggcgccaucuccagcgugcugaacgacauccucucccggcuggacaaggucgaggccgaggugcagaucgaccgccugaucaccgggcggcuccagagccugcagaccuacgugacccagcagcugauccgcgcggccgagauccgggccagcgccaaccucgccgcgaccaagauguccgagugcguccugggccagagcaagcgcguggacuucugcggcaagggguaccaccugauguccuucccccagagcgccccgcacggcguggucuuccuccacgugacguacguccccgcccaggagaagaacuucaccaccgcccccgcgaucugccacgacgggaaggcccacuucccccgggagggcguguucguguccaacgggacccacugguucgucacgcagcgcaacuucuacgagccgcagaucaucaccaccgacaacaccuucgugagcggcaacugcgacguggucaucggcaucgugaacaacacgguguacgacccccugcagcccgagcuggacuccuucaaggaggagcucgacaaguacuucaagaaccacaccagccccgacgucgaccugggggacaucuccggcaucaacgccagcguggugaacauccagaaggagaucgaccggcugaacgaggucgccaagaaccucaacgagucccugaucgaccugcaggagcucgggaaguacgagcaguacaucaaguggccgugguacaucuggcugggcuucaucgccggccugaucgcgaucgugauggugaccaucaugcucugcugcaugaccagcugcugcuccugccugaaggggugcugcagcugcggcuccugcugcaaguucgacgaggacgacagcgagcccguccugaagggggugaagcuccacuacacgugaggacuaguuauaagacugacuagcccgaugggccucccaacgggcccuccuccccuccuugcaccgagauuaauaaaaaaaaaaaaaaaaaaaaaaaaaaaaaaaaaaaaaaaaaaaaaaaaaaaaaaaaaaaaaaaaugcaucccccccccccccccccccccccccccccccaaaggcucuuuucagagccaccagaauu

SEQ ID NO: 12806 - RNA, 4021 nt, Artificial Sequence
  SARS-CoV-2/pangolin/Guangxi/P4L/2017__EPI_ISL_410538 spike protein mRNA gc (1-1267)
aggagaaagcuuaccauguucguguuccuguucguccucccccuggugagcucccagugcgugaaccugaccacccgcacgggcaucccgcccggguacaccaacagcuccacccggggcgucuacuaccccgacaagguguuccgcagcuccauccuccaccugacccaggaccuguuccuccccuucuucagcaacgugacgugguucaacaccaucaacuaccagggcggguucaagaaguucgacaacccgguccugcccuucaacgacgggguguacuucgccuccaccgagaaguccaacaucauccggggcuggaucuucggcaccacgcuggacgcccgcacccagagccuccugaucgugaacaacgcgaccaacgucgugaucaaggugugcgaguuccaguucugcaccgaccccuuccugggggucuacuaccacaacaacaacaagacguggguggagaacgaguuccggguguacagcuccgccaacaacugcaccuucgaguacaucagccagcccuuccucauggaccuggagggcaagcaggggaacuucaagaaccugcgcgaguucgucuucaagaacguggacggcuacuucaagaucuacuccaagcacaccccgaucgaccucgugcgggaccugccccgcggguucgccgcccuggagccccucgucgaccugcccaucggcaucaacaucacccgguuccagacgcugcucgcccugcaccgcagcuaccugaccccgggcaaccucgaguccggguggaccaccggcgcggccgccuacuacgugggguaccugcagcagcggacguuccugcucagcuacaaccagaacggcaccaucaccgacgccguggacugcucccuggacccccugagcgagaccaagugcacgcucaagucccugaccgucgagaagggcaucuaccagaccagcaacuuccgcgugcagcccaccaucagcaucgugcgguuccccaacaucacgaaccugugcccguucggggaggucuucaacgcguccaaguucgccagcguguacgccuggaaccgcaagcggaucuccaacugcgucgccgacuacagcgugcucuacaacuccaccagcuucuccaccuucaagugcuacggcgugagccccaccaagcugaacgaccugugcuucacgaacgucuacgccgacuccuucguggugaagggggacgagguccgccagaucgcgcccggccagaccggggugaucgccgacuacaacuacaagcuccccgacgacuucaccggcugcgugaucgccuggaacagcgucaagcaggacgcccugaccggcgggaacuacggcuaccuguaccgccucuuccggaaguccaagcugaagccguucgagcgggacaucagcacggagaucuaccaggccggguccacccccugcaacggccagguggggcugaacugcuacuacccccucgagcgcuacggcuuccaccccaccaccggcgugaacuaccagccguuccgggucguggugcugagcuucgagcugcucaacgggcccgcgaccgucugcggccccaagcuguccacgacccuggugaaggacaagugcgugaacuucaacuucaacgggcugaccggcaccgggguccucacgaccagcaagaagcaguuccugcccuuccagcaguucggccgcgacaucuccgacaccaccgacgccgugcgcgacccgcagacgcuggagauccucgacaucacccccugcagcuucggcgggguguccgucaucacccccggcaccaacacgagcaaccagguggccgugcuguaccaggacgucaacugcaccgaggugccgauggccauccacgccgagcagcugacccccgcguggcggguguacagcgccggggccaacgucuuccagacccgcgccggcugccucgugggcgccgagcacgugaacaacuccuacgagugcgacauccccgucggggcgggcaucugcgccagcuaccacuccaugagcucccugcggagcgugaaccagcgcuccaucaucgccuacacgaugagccugggggccgagaacuccguggcguacagcaacaacuccaucgccauccccaccaacuucaccaucagcgucaccacggagauccucccgguguccaugaccaagaccagcguggacugcaccauguacaucugcggcgacuccaucgagugcagcaaccugcugcuccaguacggguccuucugcacgcagcugaaccgggcccugaccggcaucgccgucgagcaggacaagaacacccaggagguguucgcccaggugaagcagaucuacaagaccccgcccaucaaggacuucggcggguucaacuucagccagauccuccccgaccccagcaagcccuccaagcgcagcuucaucgaggaccugcuguucaacaaggucacgcucgcggacgccggcuucaucaagcaguacggggacugccugggcgacaucgccgcccgggaccugaucugcgcccagaaguucaacgggcucaccgugcugccgccccugcucaccgacgagaugaucgcgcaguacaccuccgcccugcuggccggcacgaucaccagcggcuggaccuucggggccggcgccgcgcuccagauccccuucgccaugcagauggccuaccgcuucaacgggaucggcgugacccagaacguccuguacgagaaccagaagcugaucgccaaccaguucaacuccgcgaucgggaagauccaggacagccucuccagcacggccuccgcccugggcaagcugcaggacguggugaaccagaacgcccaggcccucaacacccuggucaagcagcugagcuccaacuucggcgcgaucagcuccgugcucaacgacauccugagccggcuggacaagguggaggccgagguccagaucgaccgccucaucaccgggcggcugcagucccugcagaccuacgugacccagcagcucauccgcgccgccgagauccgggccagcgcgaaccuggccgccacgaagauguccgagugcgugcugggccagagcaagcgcgucgacuucugcgggaagggcuaccaccucauguccuucccccagagcgcgccccacgggguggucuuccugcacgugaccuacgugcccgcccaggagaagaacuucaccaccgccccggccaucugccacgagggcaaggcccacuucccccgggagggcgucuucgugagcaacgggacgcacugguucaucacccagcgcaacuucuacgagccccagaucaucaccaccgacaacacguucguguccggcagcugcgacgucgugaucgggaucgugaacaacaccgucuacgacccccugcagccggagcucgacuccuucaaggaggagcuggacaaguacuucaagaaccacaccagccccgacguggaccugggcgacaucuccggcaucaacgccagcguggucaacauccagaaggagaucgaccggcucaacgagguggcgaagaaccugaacgagucccccaucgaccugcaggagcucgggaaguacgagcaguacaucaaguggcccugguacaucuggcugggcuucaucgccgggcugaucgccaucaucauggugaccaucaugcucugcugcaugacgagcugcugcuccugccugaagggcugcugcagcugcggguccugcugcaaguucgacgaggacgacagcgagccgguccugaagggcgugaagcuccacuacaccugaggacuaguuauaagacugacuagcccgaugggccucccaacgggcccuccuccccuccuugcaccgagauuaauaaaaaaaaaaaaaaaaaaaaaaaaaaaaaaaaaaaaaaaaaaaaaaaaaaaaaaaaaaaaaaaaugcaucccccccccccccccccccccccccccccccaaaggcucuuuucagagccaccagaauu

SEQ ID NO: 12807 - RNA, 4021 nt, Artificial Sequence
  SARS-CoV-2/pangolin/Guangxi/P5L/2017__EPI_ISL_410540 spike protein mRNA gc (1-1267)
aggagaaagcuuaccauguucguguuccuguucguccucccccuggugagcucccagugcgugaaccugaccacccgcacgggcaucccgcccggguacaccaacagcuccacccggggcgucuacuaccccgacaagguguuccgcagcuccauccuccaccugacccaggaccuguuccuccccuucuucagcaacgugacgugguucaacaccaucaacuaccagggcggguucaagaaguucgacaacccgguccugcccuucaacgacgggguguacuucgccuccaccgagaaguccaacaucauccggggcuggaucuucggcaccacgcuggacgcccgcacccagagccuccugaucgugaacaacgcgaccaacgucgugaucaaggugugcgaguuccaguucugcaccgaccccuuccugggggucuacuaccacaacaacaacaagacguggguggagaacgaguuccggguguacagcuccgccaacaacugcaccuucgaguacaucagccagcccuuccucauggaccuggagggcaagcaggggaacuucaagaaccugcgcgaguucgucuucaagaacguggacggcuacuucaagaucuacuccaagcacaccccgaucgaccucgugcgggaccugccccgcggguucgccgcccuggagccccucgucgaccugcccaucggcaucaacaucacccgguuccagacgcugcucgcccugcaccgcagcuaccugaccccgggcaagcucgaguccggguggaccaccggcgcggccgccuacuacgugggguaccugcagcagcggacguuccugcucagcuacaaccagaacggcaccaucaccgacgccguggacugcucccuggacccccugagcgagaccaagugcacgcucaagucccugaccgucgagaagggcaucuaccagaccagcaacuuccgcgugcagcccaccaucagcaucgugcgguuccccaacaucacgaaccugugcccguucggggaggucuucaacgcguccaaguucgccagcguguacgccuggaaccgcaagcggaucuccaacugcgucgccgacuacagcgugcucuacaacuccaccagcuucuccaccuucaagugcuacggcgugagccccaccaagcugaacgaccugugcuucacgaacgucuacgccgacuccuucguggugaagggggacgagguccgccagaucgcgcccggccagaccggggugaucgccgacuacaacuacaagcuccccgacgacuucaccggcugcgugaucgccuggaacagcgucaagcaggacgcccugaccggcgggaacuacggcuaccuguaccgccucuuccggaaguccaagcugaagccguucgagcgggacaucagcacggagaucuaccaggccggguccacccccugcaacggccagguggggcugaacugcuacuacccccucgagcgcuacggcuuccaccccaccaccggcgugaacuaccagccguuccgggucguggugcugagcuucgagcugcucaacgggcccgcgaccgucugcggccccaagcuguccacgacccuggugaaggacaagugcgugaacuucaacuucaacgggcugaccggcaccgggguccucacgaccagcaagaagcaguuccugcccuuccagcaguucggccgcgacaucuccgacaccaccgacgccgugcgcgacccgcagacgcuggagauccucgacaucacccccugcagcuucggcgggguguccgucaucacccccggcaccaacacgagcaaccagguggccgugcuguaccaggacgucaacugcaccgaggugccgauggccauccacgccgagcagcugacccccgcguggcggguguacagcgccggggccaacgucuuccagacccgcgccggcugccucgugggcgccgagcacgugaacaacuccuacgagugcgacauccccgucggggcgggcaucugcgccagcuaccacuccaugagcuccuuccggagcgugaaccagcgcuccaucaucgccuacacgaugagccugggggccgagaacuccguggcguacagcaacaacuccaucgccauccccaccaacuucaccaucagcgucaccacggagauccugccgguguccaugaccaagaccagcguggacugcaccauguacaucugcggcgacuccaucgagugcagcaaccuccugcugcaguacggguccuucugcacgcagcucaaccgggcccugaccggcaucgccgucgagcaggacaagaacacccaggagguguucgcccaggugaagcagaucuacaagaccccgcccaucaaggacuucggcggguucaacuucagccagauccugcccgaccccagcaagcccuccaagcgcagcuucaucgaggaccuccuguucaacaaggucacgcuggcggacgccggcuucaucaagcaguacggggacugccucggcgacaucgccgcccgggaccugaucugcgcccagaaguucaacgggcugaccgugcucccgccccugcugaccgacgagaugaucgcgcaguacaccuccgcccuccuggccggcacgaucaccagcggcuggaccuucggggccggcgccgcgcugcagauccccuucgccaugcagauggccuaccgcuucaacgggaucggcgugacccagaacguccucuacgagaaccagaagcugaucgccaaccaguucaacuccgcgaucgggaagauccaggacagccuguccagcacggccuccgcccucggcaagcugcaggacguggugaaccagaacgcccaggcccugaacacccucgucaagcagcugagcuccaacuucggcgcgaucagcuccgugcugaacgacauccucagccggcuggacaagguggaggccgagguccagaucgaccgccugaucaccgggcggcuccagucccugcagaccuacgugacccagcagcugauccgcgccgccgagauccgggccagcgcgaaccucgccgccacgaagauguccgagugcgugcugggccagagcaagcgcgucgacuucugcgggaagggcuaccaccugauguccuucccccagagcgcgccccacgggguggucuuccuccacgugaccuacgugcccgcccaggagaagaacuucaccaccgccccggccaucugccacgagggcaaggcccacuucccccgggagggcgucuucgugagcaacgggacgcacugguucaucacccagcgcaacuucuacgagccccagaucaucaccaccgacaacacguucguguccggcagcugcgacgucgugaucgggaucgugaacaacaccgucuacgacccccugcagccggagcuggacuccuucaaggaggagcucgacaaguacuucaagaaccacaccagccccgacguggaccugggcgacaucuccggcaucaacgccagcguggucaacauccagaaggagaucgaccggcugaacgagguggcgaagaaccucaacgagucccugaucgaccugcaggagcucgggaaguacgagcaguacaucaaguggcccugguacaucuggcugggcuucaucgccgggcugaucgccaucaucauggugaccaucaugcucugcugcaugacgagcugcugcuccugccugaagggcugcugcagcugcggguccugcugcaaguucgacgaggacgacagcgagcccguccugaagggcgugaagcuccacuacaccugaggacuaguuauaagacugacuagcccgaugggccucccaacgggcccuccuccccuccuugcaccgagauuaauaaaaaaaaaaaaaaaaaaaaaaaaaaaaaaaaaaaaaaaaaaaaaaaaaaaaaaaaaaaaaaaaugcaucccccccccccccccccccccccccccccccaaaggcucuuuucagagccaccagaauu

SEQ ID NO: 12808 - RNA, 4021 nt, Artificial Sequence
  SARS-CoV-2/pangolin/Guangxi/P5E/2017__EPI_ISL_410541 spike protein mRNA gc (1-1267)
aggagaaagcuuaccauguucguguuccuguucguccucccccuggugagcucccagugcgugaaccugaccacccgcacgggcaucccgcccggguacaccaacagcuccacccggggcgucuacuaccccgacaagguguuccgcagcuccauccuccaccugacccaggaccuguuccuccccuucuucagcaacgugacgugguucaacaccaucaccuaccagggcggguccaagaaguucgacaacccgguccugcccuucaacgacgggguguacuucgccagcaccgagaaguccaacaucauccggggcuggaucuucggcacgacccuggacgcccgcacccagagccuccugaucgugaacaacgcgaccaacgucgugaucaaggugugcgaguuccaguucugcacggaccccuuccugggggucuacuaccacaacaacaacaagaccuggguggagaacgaguuccggguguacuccagcgccaacaacugcaccuucgaguacaucucccagcccuuccucauggaccuggagggcaagcaggggaacuucaagaaccugcgcgaguucgucuucaagaacguggacggcuacuucaagaucuacagcaagcacaccccgaucgaccucgugcgggaccugccccgcggguucgccgcccuggagccccucgucgaccugcccaucggcaucaacaucacgcgguuccagacccugcucgcccugcaccgcuccuaccugaccccgggcaagcucgagagcggguggaccacgggcgcggccgccuacuacgugggguaccugcagcagcggaccuuccugcucuccuacaaccagaacggcaccaucaccgacgccguggacugcagccuggacccccuguccgagacgaagugcacccucaagagccugaccgucgagaagggcaucuaccagaccagcaacuuccgcgugcagcccacgaucuccaucgugcgguuccccaacaucaccaaccugugcccguucggggaggucuucaacgcgagcaaguucgccuccguguacgccuggaaccgcaagcggaucagcaacugcgucgccgacuacuccgugcucuacaacagcaccuccuucagcaccuucaagugcuacggcgugucccccacgaagcugaacgaccugugcuucaccaacgucuacgccgacagcuucguggugaagggggacgagguccgccagaucgcgcccggccagaccggggugaucgccgacuacaacuacaagcuccccgacgacuucaccggcugcgugaucgccuggaacuccgucaagcaggacgcccugacgggcgacaacuacggguaccuguaccggcuguuccgcaagagcaagcucaagccguucgagcgggacaucuccaccgagaucuaccaggccggcagcacccccugcaacggccagguggggcugaacugcuacuacccccucgagcgcuacggguuccaccccaccaccggcgugaacuaccagccguuccgggucguggugcuguccuucgagcugcucaacggccccgcgacggucugcgggcccaagcugagcaccacccuggugaaggacaagugcgugaacuucaacuucaacggccugaccgggacgggcguccucaccaccuccaagaagcaguuccugcccuuccagcaguucgggcgcgacaucagcgacaccacggacgccgugcgcgacccgcagacccuggagauccucgacaucacccccugcuccuucggcggcgugagcgucaucacccccgggacgaacaccagcaaccagguggccgugcuguaccaggacgucaacugcaccgaggugccgauggccauccacgccgagcagcugacccccgcguggcggguguacuccgccggcgccaacgucuuccagacgcgcgccgggugccucgugggcgccgagcacgugaacaacagcuacgagugcgacauccccgucggcgcggggaucugcgccuccuaccacagcauguccagcuuccgguccgugaaccagcgcagcaucaucgccuacaccaugucccugggcgccgagaacagcguggcguacuccaacaacagcaucgccauccccaccaacuucaccaucuccgucacgaccgagauccugccggugagcaugaccaagaccuccguggacugcacgauguacaucugcggggacagcaucgagugcuccaaccuccugcugcaguacggcagcuucugcacccagcucaaccgggcccugaccgggaucgccgucgagcaggacaagaacacccaggagguguucgcccaggugaagcagaucuacaagacgccgcccaucaaggacuucggcggcuucaacuucagccagauccugcccgaccccuccaagcccagcaagcgcuccuucaucgaggaccuccuguucaacaaggucacccuggcggacgccggguucaucaagcaguacggcgacugccucggggacaucgccgcccgggaccugaucugcgcccagaaguucaacggccugaccgugcucccgccccugcugaccgacgagaugaucgcgcaguacacgagcgcccuccuggccgggaccaucaccuccggcuggaccuucggcgccggggccgcgcugcagauccccuucgccaugcagauggccuaccgcuucaacggcaucggggugacgcagaacguccucuacgagaaccagaagcugaucgccaaccaguucaacagcgcgaucggcaagauccaggacucccugagcuccaccgccagcgcccucgggaagcugcaggacguggugaaccagaacgcccaggcccugaacacccucgucaagcagcuguccagcaacuucggcgcgaucuccagcgugcugaacgacauccucucccggcuggacaagguggaggccgagguccagaucgaccgccugaucaccggccggcuccagagccugcagaccuacgugacgcagcagcugauccgcgccgccgagauccgggccuccgcgaaccucgccgccaccaagaugagcgagugcgugcuggggcaguccaagcgcgucgacuucugcggcaagggguaccaccugaugagcuucccccagagcgcgccccacggcguggucuuccuccacgugaccuacgugcccgcccaggagaagaacuucaccacggccccggccaucugccacgaggggaaggcccacuucccccgggagggcgucuucguguccaacggcacccacugguucaucacccagcgcaacuucuacgagccccagaucaucaccacggacaacaccuucgugagcggguccugcgacgucgugaucggcaucgugaacaacaccgucuacgacccccugcagccggagcuggacagcuucaaggaggagcucgacaaguacuucaagaaccacaccucccccgacguggaccugggggacaucagcggcaucaacgccuccguggucaacauccagaaggagaucgaccggcugaacgagguggcgaagaaccucaacgagagccugaucgaccugcaggagcucggcaaguacgagcaguacaucaaguggcccugguacaucuggcugggguucaucgccggccugaucgccaucaucauggugacgaucaugcucugcugcaugaccuccugcugcagcugccugaaggggugcugcuccugcggcagcugcugcaaguucgacgaggacgacuccgagcccguccugaagggggugaagcuccacuacaccugaggacuaguuauaagacugacuagcccgaugggccucccaacgggcccuccuccccuccuugcaccgagauuaauaaaaaaaaaaaaaaaaaaaaaaaaaaaaaaaaaaaaaaaaaaaaaaaaaaaaaaaaaaaaaaaaugcaucccccccccccccccccccccccccccccccaaaggcucuuuucagagccaccagaauu

SEQ ID NO: 12809 - RNA, 4015 nt, Artificial Sequence
  SARS-CoV-2/pangolin/Guangxi/P1E/2017__EPI_ISL_410539 spike protein mRNA gc (1-1265)
aggagaaagcuuaccauguucguguuccuguucguccucccccuggugagcucccagugcgugaaccugaccacccgcacgggcauccagccgggguacaccaacagcuccacccggggcgucuacuaccccgacaagguguuccgcagcuccauccuccaccugacccaggaccuguuccuccccuucuucagcaacgugacgugguucaacaccaucaacuaccagggcggguucaagaaguucgacaaccccguccugccguucaacgacgggguguacuucgccuccaccgagaaguccaacaucauccggggcuggaucuucggcaccacgcuggacgcccgcacccagagccuccugaucgugaacaacgcgaccaacgucgugaucaaggugugcgaguuccaguucugcaccgaccccuuccugggggucuacuaccacaacaacaacaagacguggguggagaacgaguuccggguguacagcuccgccaacaacugcaccuucgaguacaucagccagcccuuccucauggaccuggagggcaagcaggggaacuucaagaaccugcgcgaguucgucuucaagaacguggacggcuacuucaagaucuacuccaagcacacccccaucgaccucgugcgggaccugccgcgcggguucgccgcccuggagccccucgucgaccugcccaucggcaucaacaucacccgguuccagacgcugcucgcccugcaccgcagcuaccugacccccggcaagcucgaguccggguggaccaccggcgcggccgccuacuacgugggguaccugcagcagcggacguuccugcucagcuacaaccagaacggcaccaucaccgacgccguggacugcucccuggacccgcugagcgagaccaagugcacgcucaagucccugaccgucgagaagggcaucuaccagaccagcaacuuccgcgugcagcccaccaucagcaucgugcgguuccccaacaucacgaaccugugccccuucggggaggucuucaacgcguccaaguucgccagcguguacgccuggaaccgcaagcggaucuccaacugcgucgccgacuacagcgugcucuacaacuccaccagcuucuccaccuucaagugcuacggcgugagcccgaccaagcugaacgaccugugcuucacgaacgucuacgccgacuccuucguggugaagggggacgagguccgccagaucgcgcccggccagaccggggugaucgccgacuacaacuacaagcuccccgacgacuucaccggcugcgugaucgccuggaacagcgucaagcaggacgcccugaccggcgggaacuaccuguaccgccucuuccggaaguccaagcugaagcccuucgagcgggacaucagcacggagaucuaccaggccggcuccaccccgugcaacggccagguggggcugaacugcuacuacccccucgagcgcuacggguuccaccccaccaccggcgugaacuaccagcccuuccgggucguggugcugagcuucgagcugcucaacggcccggcgaccgucugcgggcccaagcuguccacgacccuggugaaggacaagugcgugaacuucaacuucaacggccugaccgggaccggcguccucacgaccagcaagaagcaguuccugcccuuccagcaguucgggcgcgacaucuccgacaccaccgacgccgugcgcgacccccagacgcuggagauccucgacaucaccccgugcagcuucggcggcguguccgucaucacccccgggaccaacacgagcaaccagguggccgugcuguaccaggacgucaacugcaccgaggugcccauggccauccacgccgagcagcugaccccggcguggcggguguacagcgccggcgccaacgucuuccagacccgcgccgggugccucgugggcgccgagcacgugaacaacuccuacgagugcgacauccccgucggcgcggggaucugcgccagcuaccacuccaugagcucccugcggagcgugaaccagcgcuccaucaucgccuacacgaugagccugggcgccgagaacuccguggcguacagcaacaacuccaucgccauccccaccaacuucaccaucagcgucaccacggagauccuccccguguccaugaccaagaccagcguggacugcaccauguacaucugcggggacuccaucgagugcagcaaccugcugcuccaguacggcuccuucugcacgcagcugaaccgggcccugaccgggaucgccgucgagcaggacaagaacacccaggagguguucgcccaggugaagcagaucuacaagaccccgcccaucaaggacuucggcggcuucaacuucagccagauccuccccgaccccagcaagccguccaagcgcagcuucaucgaggaccugcuguucaacaaggucacgcucgcggacgccggguucaucaagcaguacggcgacugccugggggacaucgccgcccgggaccugaucugcgcccagaaguucaacggccucaccgugcugccgccccugcucaccgacgagaugaucgcgcaguacaccuccgcccugcuggccgggacgaucaccagcggcuggaccuucggcgccggggccgcgcuccagauccccuucgccaugcagauggccuaccgcuucaacggcaucggggugacccagaacguccuguacgagaaccagaagcugaucgccaaccaguucaacuccgcgaucggcaagauccaggacagccucuccagcacggccuccgcccuggggaagcugcaggacguggugaaccagaacgcccaggcccucaacacccuggucaagcagcugagcuccaacuucggcgcgaucagcuccgugcucaacgacauccugagccggcuggacaagguggaggccgagguccagaucgaccgccucaucaccggccggcugcagucccugcagaccuacgugacccagcagcucauccgcgccgccgagauccgggccagcgcgaaccuggccgccacgaagauguccgagugcgugcuggggcagagcaagcgcgucgacuucugcggcaagggguaccaccucauguccuucccccagagcgcgccccacggcguggucuuccugcacgugaccuacgugcccgcccaggagaagaacuucaccaccgcccccgccaucugccacgaggggaaggcccacuucccgcgggagggcgucuucgugagcaacggcacgcacugguucaucacccagcgcaacuucuacgagccccagaucaucaccaccgacaacacguucguguccgggagcugcgacgucgugaucggcaucgugaacaacaccgucuacgacccccugcagcccgagcucgacuccuucaaggaggagcuggacaaguacuucaagaaccacaccagcccggacguggaccugggggacaucuccggcaucaacgccagcguggucaacauccagaaggagaucgaccggcucaacgagguggcgaagaaccugaacgagucccugaucgaccuccaggagcugggcaaguacgagcaguacaucaaguggcccugguacaucuggcugggguucaucgccggccucaucgccaucaucauggugaccaucaugcugugcugcaugacgagcugcugcuccugccugaaggggugcugcagcugcggcuccugcugcaaguucgacgaggacgacagcgagcccguccucaagggggugaagcugcacuacaccugaggacuaguuauaagacugacuagcccgaugggccucccaacgggcccuccuccccuccuugcaccgagauuaauaaaaaaaaaaaaaaaaaaaaaaaaaaaaaaaaaaaaaaaaaaaaaaaaaaaaaaaaaaaaaaaaugcaucccccccccccccccccccccccccccccccaaaggcucuuuucagagccaccagaauu

SEQ ID NO: 12810 - RNA, 4039 nt, Artificial Sequence; identical to SEQ ID NO: 163
  SARS-CoV-2/Wuhan/WIV05/2019__EPI_ISL_402128 spike protein mRNA gc (1-1273)(K986P_V987P) R9515, R10157

SEQ ID NO: 12811 - RNA, 4039 nt, Artificial Sequence
  SARS-CoV-2/Wuhan/WIV05/2019__EPI_ISL_402128 spike protein mRNA gc (1-1273)(K986P_V987P_T887WN_A1020W) R9641
aggagaaagcuuaccauguucguguuccugguccuccugccccuggugagcucccagugcgugaaccucaccacccgcacgcagcugccgcccgccuacaccaacagcuucacccggggcgucuacuaccccgacaagguguuccgcuccagcgugcugcacuccacccaggaccucuuccugcccuucuucagcaacgucacgugguuccacgccauccacguguccgggaccaacggcaccaagcgguucgacaacccggugcugcccuucaacgacggggucuacuucgcgagcaccgagaaguccaacaucauccgcggcuggaucuucgggacgacccucgacagcaagacccagucccugcugaucgugaacaacgccaccaacguggucaucaaggugugcgaguuccaguucugcaacgaccccuuccucggcguguacuaccacaagaacaacaagagcuggauggaguccgaguuccgggucuacagcuccgccaacaacugcacguucgaguacgugagccagcccuuccugauggaccuggagggcaagcaggggaacuucaagaaccuccgcgaguucguguucaagaacaucgacggcuacuucaagaucuacuccaagcacaccccgaucaaccugguccgggaccugccccagggguucagcgcccucgagccccugguggaccugcccaucggcaucaacaucacccgcuuccagacccuccuggcccugcaccgguccuaccucacgccgggggacagcagcuccggcuggaccgcgggcgccgccgccuacuacgugggguaccugcagccccgcaccuuccugcucaaguacaacgagaacggcaccaucacggacgcggucgacugcgcccuggacccccugagcgagaccaagugcacccucaaguccuucaccguggagaaggggaucuaccagacgagcaacuuccgggugcagcccaccgaguccaucguccgcuucccgaacaucaccaaccugugccccuucggcgagguguucaacgccacccgguucgccagcgucuacgccuggaaccgcaagcggaucuccaacugcguggcggacuacagcgugcuguacaacuccgccagcuucuccacguucaagugcuacggcgucagccccaccaagcucaacgaccugugcuucaccaacguguacgccgacuccuucgugauccgcggggacgagguccggcagaucgcccccggccagaccgggaagaucgccgacuacaacuacaagcugccggacgacuucacgggcugcgugaucgcguggaacagcaacaaccucgacuccaaggucgggggcaacuacaacuaccuguaccgccuguuccgcaagagcaaccucaagcccuucgagcgggacaucuccaccgagaucuaccaggccggcagcacccccugcaacgggguggagggcuucaacugcuacuucccccugcaguccuacggguuccagccgaccaacggcgugggguaccagcccuaccggguggucgugcugagcuucgagcuccugcacgcccccgccacggugugcggccccaagaaguccaccaaccuggucaagaacaagugcgugaacuucaacuucaacggccucaccgggaccggcgugcugaccgagagcaacaagaaguuccugccguuccagcaguucgggcgcgacaucgccgacacgaccgacgcgguccgcgacccccagacccuggagauccucgacaucacccccugcagcuucggcgggguguccgugaucacgccgggcaccaacaccagcaaccaggucgccgugcuguaccaggacgugaacugcaccgagguccccguggccauccacgccgaccagcugacgcccaccuggcggguguacuccaccggcagcaacgucuuccagacccgcgccgggugccucaucggcgcggagcacgugaacaacuccuacgagugcgacauccccaucggggccggcaucugcgccagcuaccagacgcagaccaacuccccgcggcgcgcccggagcguggcgucccagagcaucaucgccuacaccaugucccugggcgccgagaacagcgucgccuacuccaacaacagcaucgccauccccaccaacuucacgaucuccgugaccaccgagauccugcccgugagcaugaccaagacgagcgucgacugcaccauguacaucugcggggacuccaccgagugcagcaaccuccugcugcaguacggcuccuucugcacccagcucaaccgcgcgcugacggggaucgccguggagcaggacaagaacacccaggagguguucgcccaggucaagcagaucuacaagacgcccccgaucaaggacuucggcggguucaacuucagccagauccugcccgaccccuccaagcccagcaagcgguccuucaucgaggaccuccuguucaacaaggugacccuggccgacgccggcuucaucaagcaguacggcgacugccucggggacaucgcggcccgcgaccugaucugcgcccagaaguucaacggccugaccgugcucccgccccugcugaccgacgagaugaucgcccaguacaccagcgcccuccuggcggggaccaucacguccggcuggugguucggggccggcgccgcccugcagauccccuucgcgaugcagauggccuaccgguucaacggcaucggggucacccagaacgugcucuacgagaaccagaagcugaucgccaaccaguucaacagcgccaucggcaagauccaggacucccugagcuccaccgccagcgcgcucgggaagcugcaggacguggucaaccagaacgcccaggcccugaacacgcucgugaagcagcuguccagcaacuucggcgccaucuccagcgugcugaacgacauccucucccgccuggacccgcccgaggccgaggugcagaucgaccggcugaucaccgggcgccuccagagccugcagaccuacgugacccagcagcugauccgggcggccgagauccgcuggagcgccaaccucgccgcgaccaagauguccgagugcguccugggccagagcaagcggguggacuucugcggcaagggguaccaccugauguccuucccccagagcgccccgcacggcguggucuuccuccacgugacguacguccccgcccaggagaagaacuucaccaccgcccccgcgaucugccacgacgggaaggcccacuucccccgcgagggcguguucguguccaacgggacccacugguucgucacgcagcggaacuucuacgagccgcagaucaucaccaccgacaacaccuucgugagcggcaacugcgacguggucaucggcaucgugaacaacacgguguacgacccccugcagcccgagcuggacuccuucaaggaggagcucgacaaguacuucaagaaccacaccagccccgacgucgaccugggggacaucuccggcaucaacgccagcguggugaacauccagaaggagaucgaccgccugaacgaggucgccaagaaccucaacgagucccugaucgaccugcaggagcucgggaaguacgagcaguacaucaaguggccgugguacaucuggcugggcuucaucgccggccugaucgcgaucgugauggugaccaucaugcucugcugcaugaccagcugcugcuccugccugaaggggugcugcagcugcggcuccugcugcaaguucgacgaggacgacagcgagcccguccugaagggggugaagcuccacuacacgugaggacuaguuauaagacugacuagcccgaugggccucccaacgggcccuccuccccuccuugcaccgagauuaauaaaaaaaaaaaaaaaaaaaaaaaaaaaaaaaaaaaaaaaaaaaaaaaaaaaaaaaaaaaaaaaaugcaucccccccccccccccccccccccccccccccaaaggcucuuuucagagccaccagaauu

SEQ ID NO: 12812 - RNA, 4039 nt, Artificial Sequence
  SARS-CoV-2/Wuhan/WIV05/2019__EPI_ISL_402128 spike protein mRNA gc (1-1273)(K986P_V987P_P1069F) R9660
aggagaaagcuuaccauguucguguuccugguccuccugccccuggugagcucccagugcgugaaccucaccacccgcacgcagcugccgcccgccuacaccaacagcuucacccggggcgucuacuaccccgacaagguguuccgcuccagcgugcugcacuccacccaggaccucuuccugcccuucuucagcaacgucacgugguuccacgccauccacguguccgggaccaacggcaccaagcgguucgacaacccggugcugcccuucaacgacggggucuacuucgcgagcaccgagaaguccaacaucauccgcggcuggaucuucgggacgacccucgacagcaagacccagucccugcugaucgugaacaacgccaccaacguggucaucaaggugugcgaguuccaguucugcaacgaccccuuccucggcguguacuaccacaagaacaacaagagcuggauggaguccgaguuccgggucuacagcuccgccaacaacugcacguucgaguacgugagccagcccuuccugauggaccuggagggcaagcaggggaacuucaagaaccuccgcgaguucguguucaagaacaucgacggcuacuucaagaucuacuccaagcacaccccgaucaaccugguccgggaccugccccagggguucagcgcccucgagccccugguggaccugcccaucggcaucaacaucacccgcuuccagacccuccuggcccugcaccgguccuaccucacgccgggggacagcagcuccggcuggaccgcgggcgccgccgccuacuacgugggguaccugcagccccgcaccuuccugcucaaguacaacgagaacggcaccaucacggacgcggucgacugcgcccuggacccccugagcgagaccaagugcacccucaaguccuucaccguggagaaggggaucuaccagacgagcaacuuccgggugcagcccaccgaguccaucguccgcuucccgaacaucaccaaccugugccccuucggcgagguguucaacgccacccgguucgccagcgucuacgccuggaaccgcaagcggaucuccaacugcguggcggacuacagcgugcuguacaacuccgccagcuucuccacguucaagugcuacggcgucagccccaccaagcucaacgaccugugcuucaccaacguguacgccgacuccuucgugauccgcggggacgagguccggcagaucgcccccggccagaccgggaagaucgccgacuacaacuacaagcugccggacgacuucacgggcugcgugaucgcguggaacagcaacaaccucgacuccaaggucgggggcaacuacaacuaccuguaccgccuguuccgcaagagcaaccucaagcccuucgagcgggacaucuccaccgagaucuaccaggccggcagcacccccugcaacgggguggagggcuucaacugcuacuucccccugcaguccuacggguuccagccgaccaacggcgugggguaccagcccuaccggguggucgugcugagcuucgagcuccugcacgcccccgccacggugugcggccccaagaaguccaccaaccuggucaagaacaagugcgugaacuucaacuucaacggccucaccgggaccggcgugcugaccgagagcaacaagaaguuccugccguuccagcaguucgggcgcgacaucgccgacacgaccgacgcgguccgcgacccccagacccuggagauccucgacaucacccccugcagcuucggcgggguguccgugaucacgccgggcaccaacaccagcaaccaggucgccgugcuguaccaggacgugaacugcaccgagguccccguggccauccacgccgaccagcugacgcccaccuggcggguguacuccaccggcagcaacgucuuccagacccgcgccgggugccucaucggcgcggagcacgugaacaacuccuacgagugcgacauccccaucggggccggcaucugcgccagcuaccagacgcagaccaacuccccgcggcgcgcccggagcguggcgucccagagcaucaucgccuacaccaugucccugggcgccgagaacagcgucgccuacuccaacaacagcaucgccauccccaccaacuucacgaucuccgugaccaccgagauccugcccgugagcaugaccaagacgagcgucgacugcaccauguacaucugcggggacuccaccgagugcagcaaccuccugcugcaguacggcuccuucugcacccagcucaaccgcgcgcugacggggaucgccguggagcaggacaagaacacccaggagguguucgcccaggucaagcagaucuacaagacgcccccgaucaaggacuucggcggguucaacuucagccagauccugcccgaccccuccaagcccagcaagcgguccuucaucgaggaccuccuguucaacaaggugacccuggccgacgccggcuucaucaagcaguacggcgacugccucggggacaucgcggcccgcgaccugaucugcgcccagaaguucaacggccugaccgugcucccgccccugcugaccgacgagaugaucgcccaguacaccagcgcccuccuggcggggaccaucacguccggcuggaccuucggggccggcgccgcccugcagauccccuucgcgaugcagauggccuaccgguucaacggcaucggggucacccagaacgugcucuacgagaaccagaagcugaucgccaaccaguucaacagcgccaucggcaagauccaggacucccugagcuccaccgccagcgcgcucgggaagcugcaggacguggucaaccagaacgcccaggcccugaacacgcucgugaagcagcuguccagcaacuucggcgccaucuccagcgugcugaacgacauccucucccgccuggacccgcccgaggccgaggugcagaucgaccggcugaucaccgggcgccuccagagccugcagaccuacgugacccagcagcugauccgggcggccgagauccgcgccagcgccaaccucgccgcgaccaagauguccgagugcguccugggccagagcaagcggguggacuucugcggcaagggguaccaccugauguccuucccccagagcgccccgcacggcguggucuuccuccacgugacguacgucuucgcccaggagaagaacuucaccaccgcccccgcgaucugccacgacgggaaggcccacuucccccgcgagggcguguucguguccaacgggacccacugguucgucacgcagcggaacuucuacgagccgcagaucaucaccaccgacaacaccuucgugagcggcaacugcgacguggucaucggcaucgugaacaacacgguguacgacccccugcagcccgagcuggacuccuucaaggaggagcucgacaaguacuucaagaaccacaccagccccgacgucgaccugggggacaucuccggcaucaacgccagcguggugaacauccagaaggagaucgaccgccugaacgaggucgccaagaaccucaacgagucccugaucgaccugcaggagcucgggaaguacgagcaguacaucaaguggccgugguacaucuggcugggcuucaucgccggccugaucgcgaucgugauggugaccaucaugcucugcugcaugaccagcugcugcuccugccugaaggggugcugcagcugcggcuccugcugcaaguucgacgaggacgacagcgagcccguccugaagggggugaagcuccacuacacgugaggacuaguuauaagacugacuagcccgaugggccucccaacgggcccuccuccccuccuugcaccgagauuaauaaaaaaaaaaaaaaaaaaaaaaaaaaaaaaaaaaaaaaaaaaaaaaaaaaaaaaaaaaaaaaaaugcaucccccccccccccccccccccccccccccccaaaggcucuuuucagagccaccagaauu

SEQ ID NO: 12813 - RNA, 4039 nt, Artificial Sequence
  SARS-CoV-2/Wuhan/WIV05/2019__EPI_ISL_402128 spike protein mRNA gc (1-1273)(K986P_V987P_ H1048Q_H1064N_ H1083N_H1101N) R9661
aggagaaagcuuaccauguucguguuccugguccuccugccccuggugagcucccagugcgugaaccucaccacccgcacgcagcugccgcccgccuacaccaacagcuucacccggggcgucuacuaccccgacaagguguuccgcuccagcgugcugcacuccacccaggaccucuuccugcccuucuucagcaacgucacgugguuccacgccauccacguguccgggaccaacggcaccaagcgguucgacaacccggugcugcccuucaacgacggggucuacuucgcgagcaccgagaaguccaacaucauccgcggcuggaucuucgggacgacccucgacagcaagacccagucccugcugaucgugaacaacgccaccaacguggucaucaaggugugcgaguuccaguucugcaacgaccccuuccucggcguguacuaccacaagaacaacaagagcuggauggaguccgaguuccgggucuacagcuccgccaacaacugcacguucgaguacgugagccagcccuuccugauggaccuggagggcaagcaggggaacuucaagaaccuccgcgaguucguguucaagaacaucgacggcuacuucaagaucuacuccaagcacaccccgaucaaccugguccgggaccugccccagggguucagcgcccucgagccccugguggaccugcccaucggcaucaacaucacccgcuuccagacccuccuggcccugcaccgguccuaccucacgccgggggacagcagcuccggcuggaccgcgggcgccgccgccuacuacgugggguaccugcagccccgcaccuuccugcucaaguacaacgagaacggcaccaucacggacgcggucgacugcgcccuggacccccugagcgagaccaagugcacccucaaguccuucaccguggagaaggggaucuaccagacgagcaacuuccgggugcagcccaccgaguccaucguccgcuucccgaacaucaccaaccugugccccuucggcgagguguucaacgccacccgguucgccagcgucuacgccuggaaccgcaagcggaucuccaacugcguggcggacuacagcgugcuguacaacuccgccagcuucuccacguucaagugcuacggcgucagccccaccaagcucaacgaccugugcuucaccaacguguacgccgacuccuucgugauccgcggggacgagguccggcagaucgcccccggccagaccgggaagaucgccgacuacaacuacaagcugccggacgacuucacgggcugcgugaucgcguggaacagcaacaaccucgacuccaaggucgggggcaacuacaacuaccuguaccgccuguuccgcaagagcaaccucaagcccuucgagcgggacaucuccaccgagaucuaccaggccggcagcacccccugcaacgggguggagggcuucaacugcuacuucccccugcaguccuacggguuccagccgaccaacggcgugggguaccagcccuaccggguggucgugcugagcuucgagcuccugcacgcccccgccacggugugcggccccaagaaguccaccaaccuggucaagaacaagugcgugaacuucaacuucaacggccucaccgggaccggcgugcugaccgagagcaacaagaaguuccugccguuccagcaguucgggcgcgacaucgccgacacgaccgacgcgguccgcgacccccagacccuggagauccucgacaucacccccugcagcuucggcgggguguccgugaucacgccgggcaccaacaccagcaaccaggucgccgugcuguaccaggacgugaacugcaccgagguccccguggccauccacgccgaccagcugacgcccaccuggcggguguacuccaccggcagcaacgucuuccagacccgcgccgggugccucaucggcgcggagcacgugaacaacuccuacgagugcgacauccccaucggggccggcaucugcgccagcuaccagacgcagaccaacuccccgcggcgcgcccggagcguggcgucccagagcaucaucgccuacaccaugucccugggcgccgagaacagcgucgccuacuccaacaacagcaucgccauccccaccaacuucacgaucuccgugaccaccgagauccugcccgugagcaugaccaagacgagcgucgacugcaccauguacaucugcggggacuccaccgagugcagcaaccuccugcugcaguacggcuccuucugcacccagcucaaccgcgcgcugacggggaucgccguggagcaggacaagaacacccaggagguguucgcccaggucaagcagaucuacaagacgcccccgaucaaggacuucggcggguucaacuucagccagauccugcccgaccccuccaagcccagcaagcgguccuucaucgaggaccuccuguucaacaaggugacccuggccgacgccggcuucaucaagcaguacggcgacugccucggggacaucgcggcccgcgaccugaucugcgcccagaaguucaacggccugaccgugcucccgccccugcugaccgacgagaugaucgcccaguacaccagcgcccuccuggcggggaccaucacguccggcuggaccuucggggccggcgccgcccugcagauccccuucgcgaugcagauggccuaccgguucaacggcaucggggucacccagaacgugcucuacgagaaccagaagcugaucgccaaccaguucaacagcgccaucggcaagauccaggacucccugagcuccaccgccagcgcgcucgggaagcugcaggacguggucaaccagaacgcccaggcccugaacacgcucgugaagcagcuguccagcaacuucggcgccaucuccagcgugcugaacgacauccucucccgccuggacccgcccgaggccgaggugcagaucgaccggcugaucaccgggcgccuccagagccugcagaccuacgugacccagcagcugauccgggcggccgagauccgcgccagcgccaaccucgccgcgaccaagauguccgagugcguccugggccagagcaagcggguggacuucugcggcaagggguaccagcugauguccuucccccagagcgccccgcacggcguggucuuccucaacgugacguacguccccgcccaggagaagaacuucaccaccgcccccgcgaucugcaacgacgggaaggcccacuucccccgcgagggcguguucguguccaacgggaccaacugguucgucacgcagcggaacuucuacgagccgcagaucaucaccaccgacaacaccuucgugagcggcaacugcgacguggucaucggcaucgugaacaacacgguguacgacccccugcagcccgagcuggacuccuucaaggaggagcucgacaaguacuucaagaaccacaccagccccgacgucgaccugggggacaucuccggcaucaacgccagcguggugaacauccagaaggagaucgaccgccugaacgaggucgccaagaaccucaacgagucccugaucgaccugcaggagcucgggaaguacgagcaguacaucaaguggccgugguacaucuggcugggcuucaucgccggccugaucgcgaucgugauggugaccaucaugcucugcugcaugaccagcugcugcuccugccugaaggggugcugcagcugcggcuccugcugcaaguucgacgaggacgacagcgagcccguccugaagggggugaagcuccacuacacgugaggacuaguuauaagacugacuagcccgaugggccucccaacgggcccuccuccccuccuugcaccgagauuaauaaaaaaaaaaaaaaaaaaaaaaaaaaaaaaaaaaaaaaaaaaaaaaaaaaaaaaaaaaaaaaaaugcaucccccccccccccccccccccccccccccccaaaggcucuuuucagagccaccagaauu

SEQ ID NO: 12814 - RNA, 4039 nt, Artificial Sequence
  SARS-CoV-2/Wuhan/WIV05/2019__EPI_ISL_402128 spike protein mRNA gc (1-1273)(I712C_T1077C)
aggagaaagcuuaccauguucguguuccugguccuccugccccuggugagcucccagugcgugaaccucaccacccgcacgcagcugccgcccgccuacaccaacagcuucacccggggcgucuacuaccccgacaagguguuccgcuccagcgugcugcacuccacccaggaccucuuccugcccuucuucagcaacgucacgugguuccacgccauccacguguccgggaccaacggcaccaagcgguucgacaacccggugcugcccuucaacgacggggucuacuucgcgagcaccgagaaguccaacaucauccgcggcuggaucuucgggacgacccucgacagcaagacccagucccugcugaucgugaacaacgccaccaacguggucaucaaggugugcgaguuccaguucugcaacgaccccuuccucggcguguacuaccacaagaacaacaagagcuggauggaguccgaguuccgggucuacagcuccgccaacaacugcacguucgaguacgugagccagcccuuccugauggaccuggagggcaagcaggggaacuucaagaaccuccgcgaguucguguucaagaacaucgacggcuacuucaagaucuacuccaagcacaccccgaucaaccugguccgggaccugccccagggguucagcgcccucgagccccugguggaccugcccaucggcaucaacaucacccgcuuccagacccuccuggcccugcaccgguccuaccucacgccgggggacagcagcuccggcuggaccgcgggcgccgccgccuacuacgugggguaccugcagccccgcaccuuccugcucaaguacaacgagaacggcaccaucacggacgcggucgacugcgcccuggacccccugagcgagaccaagugcacccucaaguccuucaccguggagaaggggaucuaccagacgagcaacuuccgggugcagcccaccgaguccaucguccgcuucccgaacaucaccaaccugugccccuucggcgagguguucaacgccacccgguucgccagcgucuacgccuggaaccgcaagcggaucuccaacugcguggcggacuacagcgugcuguacaacuccgccagcuucuccacguucaagugcuacggcgucagccccaccaagcucaacgaccugugcuucaccaacguguacgccgacuccuucgugauccgcggggacgagguccggcagaucgcccccggccagaccgggaagaucgccgacuacaacuacaagcugccggacgacuucacgggcugcgugaucgcguggaacagcaacaaccucgacuccaaggucgggggcaacuacaacuaccuguaccgccuguuccgcaagagcaaccucaagcccuucgagcgggacaucuccaccgagaucuaccaggccggcagcacccccugcaacgggguggagggcuucaacugcuacuucccccugcaguccuacggguuccagccgaccaacggcgugggguaccagcccuaccggguggucgugcugagcuucgagcuccugcacgcccccgccacggugugcggccccaagaaguccaccaaccuggucaagaacaagugcgugaacuucaacuucaacggccucaccgggaccggcgugcugaccgagagcaacaagaaguuccugccguuccagcaguucgggcgcgacaucgccgacacgaccgacgcgguccgcgacccccagacccuggagauccucgacaucacccccugcagcuucggcgggguguccgugaucacgccgggcaccaacaccagcaaccaggucgccgugcuguaccaggacgugaacugcaccgagguccccguggccauccacgccgaccagcugacgcccaccuggcggguguacuccaccggcagcaacgucuuccagacccgcgccgggugccucaucggcgcggagcacgugaacaacuccuacgagugcgacauccccaucggggccggcaucugcgccagcuaccagacgcagaccaacuccccgcggcgcgcccggagcguggcgucccagagcaucaucgccuacaccaugucccugggcgccgagaacagcgucgccuacuccaacaacagcugcgccauccccaccaacuucacgaucuccgugaccaccgagauccugcccgugagcaugaccaagacgagcgucgacugcaccauguacaucugcggggacuccaccgagugcagcaaccuccugcugcaguacggcuccuucugcacccagcucaaccgcgcgcugacggggaucgccguggagcaggacaagaacacccaggagguguucgcccaggucaagcagaucuacaagacgcccccgaucaaggacuucggcggguucaacuucagccagauccugcccgaccccuccaagcccagcaagcgguccuucaucgaggaccuccuguucaacaaggugacccuggccgacgccggcuucaucaagcaguacggcgacugccucggggacaucgcggcccgcgaccugaucugcgcccagaaguucaacggccugaccgugcucccgccccugcugaccgacgagaugaucgcccaguacaccagcgcccuccuggcggggaccaucacguccggcuggaccuucggggccggcgccgcccugcagauccccuucgcgaugcagauggccuaccgguucaacggcaucggggucacccagaacgugcucuacgagaaccagaagcugaucgccaaccaguucaacagcgccaucggcaagauccaggacucccugagcuccaccgccagcgcgcucgggaagcugcaggacguggucaaccagaacgcccaggcccugaacacgcucgugaagcagcuguccagcaacuucggcgccaucuccagcgugcugaacgacauccucucccgccuggacaaggucgaggccgaggugcagaucgaccggcugaucaccgggcgccuccagagccugcagaccuacgugacccagcagcugauccgggcggccgagauccgcgccagcgccaaccucgccgcgaccaagauguccgagugcguccugggccagagcaagcggguggacuucugcggcaagggguaccaccugauguccuucccccagagcgccccgcacggcguggucuuccuccacgugacguacguccccgcccaggagaagaacuucaccugcgcccccgcgaucugccacgacgggaaggcccacuucccccgcgagggcguguucguguccaacgggacccacugguucgucacgcagcggaacuucuacgagccgcagaucaucaccaccgacaacaccuucgugagcggcaacugcgacguggucaucggcaucgugaacaacacgguguacgacccccugcagcccgagcuggacuccuucaaggaggagcucgacaaguacuucaagaaccacaccagccccgacgucgaccugggggacaucuccggcaucaacgccagcguggugaacauccagaaggagaucgaccgccugaacgaggucgccaagaaccucaacgagucccugaucgaccugcaggagcucgggaaguacgagcaguacaucaaguggccgugguacaucuggcugggcuucaucgccggccugaucgcgaucgugauggugaccaucaugcucugcugcaugaccagcugcugcuccugccugaaggggugcugcagcugcggcuccugcugcaaguucgacgaggacgacagcgagcccguccugaagggggugaagcuccacuacacgugaggacuaguuauaagacugacuagcccgaugggccucccaacgggcccuccuccccuccuugcaccgagauuaauaaaaaaaaaaaaaaaaaaaaaaaaaaaaaaaaaaaaaaaaaaaaaaaaaaaaaaaaaaaaaaaaugcaucccccccccccccccccccccccccccccccaaaggcucuuuucagagccaccagaauu

SEQ ID NO: 12815 - RNA, 4039 nt, Artificial Sequence
  SARS-CoV-2/Wuhan/WIV05/2019__EPI_ISL_402128 spike protein mRNA gc (1-1273)(I714C_Y1110C)
aggagaaagcuuaccauguucguguuccugguccuccugccccuggugagcucccagugcgugaaccucaccacccgcacgcagcugccgcccgccuacaccaacagcuucacccggggcgucuacuaccccgacaagguguuccgcuccagcgugcugcacuccacccaggaccucuuccugcccuucuucagcaacgucacgugguuccacgccauccacguguccgggaccaacggcaccaagcgguucgacaacccggugcugcccuucaacgacggggucuacuucgcgagcaccgagaaguccaacaucauccgcggcuggaucuucgggacgacccucgacagcaagacccagucccugcugaucgugaacaacgccaccaacguggucaucaaggugugcgaguuccaguucugcaacgaccccuuccucggcguguacuaccacaagaacaacaagagcuggauggaguccgaguuccgggucuacagcuccgccaacaacugcacguucgaguacgugagccagcccuuccugauggaccuggagggcaagcaggggaacuucaagaaccuccgcgaguucguguucaagaacaucgacggcuacuucaagaucuacuccaagcacaccccgaucaaccugguccgggaccugccccagggguucagcgcccucgagccccugguggaccugcccaucggcaucaacaucacccgcuuccagacccuccuggcccugcaccgguccuaccucacgccgggggacagcagcuccggcuggaccgcgggcgccgccgccuacuacgugggguaccugcagccccgcaccuuccugcucaaguacaacgagaacggcaccaucacggacgcggucgacugcgcccuggacccccugagcgagaccaagugcacccucaaguccuucaccguggagaaggggaucuaccagacgagcaacuuccgggugcagcccaccgaguccaucguccgcuucccgaacaucaccaaccugugccccuucggcgagguguucaacgccacccgguucgccagcgucuacgccuggaaccgcaagcggaucuccaacugcguggcggacuacagcgugcuguacaacuccgccagcuucuccacguucaagugcuacggcgucagccccaccaagcucaacgaccugugcuucaccaacguguacgccgacuccuucgugauccgcggggacgagguccggcagaucgcccccggccagaccgggaagaucgccgacuacaacuacaagcugccggacgacuucacgggcugcgugaucgcguggaacagcaacaaccucgacuccaaggucgggggcaacuacaacuaccuguaccgccuguuccgcaagagcaaccucaagcccuucgagcgggacaucuccaccgagaucuaccaggccggcagcacccccugcaacgggguggagggcuucaacugcuacuucccccugcaguccuacggguuccagccgaccaacggcgugggguaccagcccuaccggguggucgugcugagcuucgagcuccugcacgcccccgccacggugugcggccccaagaaguccaccaaccuggucaagaacaagugcgugaacuucaacuucaacggccucaccgggaccggcgugcugaccgagagcaacaagaaguuccugccguuccagcaguucgggcgcgacaucgccgacacgaccgacgcgguccgcgacccccagacccuggagauccucgacaucacccccugcagcuucggcgggguguccgugaucacgccgggcaccaacaccagcaaccaggucgccgugcuguaccaggacgugaacugcaccgagguccccguggccauccacgccgaccagcugacgcccaccuggcggguguacuccaccggcagcaacgucuuccagacccgcgccgggugccucaucggcgcggagcacgugaacaacuccuacgagugcgacauccccaucggggccggcaucugcgccagcuaccagacgcagaccaacuccccgcggcgcgcccggagcguggcgucccagagcaucaucgccuacaccaugucccugggcgccgagaacagcgucgccuacuccaacaacagcaucgccugccccaccaacuucacgaucuccgugaccaccgagauccugcccgugagcaugaccaagacgagcgucgacugcaccauguacaucugcggggacuccaccgagugcagcaaccuccugcugcaguacggcuccuucugcacccagcucaaccgcgcgcugacggggaucgccguggagcaggacaagaacacccaggagguguucgcccaggucaagcagaucuacaagacgcccccgaucaaggacuucggcggguucaacuucagccagauccugcccgaccccuccaagcccagcaagcgguccuucaucgaggaccuccuguucaacaaggugacccuggccgacgccggcuucaucaagcaguacggcgacugccucggggacaucgcggcccgcgaccugaucugcgcccagaaguucaacggccugaccgugcucccgccccugcugaccgacgagaugaucgcccaguacaccagcgcccuccuggcggggaccaucacguccggcuggaccuucggggccggcgccgcccugcagauccccuucgcgaugcagauggccuaccgguucaacggcaucggggucacccagaacgugcucuacgagaaccagaagcugaucgccaaccaguucaacagcgccaucggcaagauccaggacucccugagcuccaccgccagcgcgcucgggaagcugcaggacguggucaaccagaacgcccaggcccugaacacgcucgugaagcagcuguccagcaacuucggcgccaucuccagcgugcugaacgacauccucucccgccuggacaaggucgaggccgaggugcagaucgaccggcugaucaccgggcgccuccagagccugcagaccuacgugacccagcagcugauccgggcggccgagauccgcgccagcgccaaccucgccgcgaccaagauguccgagugcguccugggccagagcaagcggguggacuucugcggcaagggguaccaccugauguccuucccccagagcgccccgcacggcguggucuuccuccacgugacguacguccccgcccaggagaagaacuucaccaccgcccccgcgaucugccacgacgggaaggcccacuucccccgcgagggcguguucguguccaacgggacccacugguucgucacgcagcggaacuucugcgagccgcagaucaucaccaccgacaacaccuucgugagcggcaacugcgacguggucaucggcaucgugaacaacacgguguacgacccccugcagcccgagcuggacuccuucaaggaggagcucgacaaguacuucaagaaccacaccagccccgacgucgaccugggggacaucuccggcaucaacgccagcguggugaacauccagaaggagaucgaccgccugaacgaggucgccaagaaccucaacgagucccugaucgaccugcaggagcucgggaaguacgagcaguacaucaaguggccgugguacaucuggcugggcuucaucgccggccugaucgcgaucgugauggugaccaucaugcucugcugcaugaccagcugcugcuccugccugaaggggugcugcagcugcggcuccugcugcaaguucgacgaggacgacagcgagcccguccugaagggggugaagcuccacuacacgugaggacuaguuauaagacugacuagcccgaugggccucccaacgggcccuccuccccuccuugcaccgagauuaauaaaaaaaaaaaaaaaaaaaaaaaaaaaaaaaaaaaaaaaaaaaaaaaaaaaaaaaaaaaaaaaaugcaucccccccccccccccccccccccccccccccaaaggcucuuuucagagccaccagaauu

SEQ ID NO: 12816 - RNA, 4039 nt, Artificial Sequence
  SARS-CoV-2/Wuhan/WIV05/2019__EPI_ISL_402128 spike protein mRNA gc (1-1273)(P715C_P1069C) R9561
aggagaaagcuuaccauguucguguuccugguccuccugccccuggugagcucccagugcgugaaccucaccacccgcacgcagcugccgcccgccuacaccaacagcuucacccggggcgucuacuaccccgacaagguguuccgcuccagcgugcugcacuccacccaggaccucuuccugcccuucuucagcaacgucacgugguuccacgccauccacguguccgggaccaacggcaccaagcgguucgacaacccggugcugcccuucaacgacggggucuacuucgcgagcaccgagaaguccaacaucauccgcggcuggaucuucgggacgacccucgacagcaagacccagucccugcugaucgugaacaacgccaccaacguggucaucaaggugugcgaguuccaguucugcaacgaccccuuccucggcguguacuaccacaagaacaacaagagcuggauggaguccgaguuccgggucuacagcuccgccaacaacugcacguucgaguacgugagccagcccuuccugauggaccuggagggcaagcaggggaacuucaagaaccuccgcgaguucguguucaagaacaucgacggcuacuucaagaucuacuccaagcacaccccgaucaaccugguccgggaccugccccagggguucagcgcccucgagccccugguggaccugcccaucggcaucaacaucacccgcuuccagacccuccuggcccugcaccgguccuaccucacgccgggggacagcagcuccggcuggaccgcgggcgccgccgccuacuacgugggguaccugcagccccgcaccuuccugcucaaguacaacgagaacggcaccaucacggacgcggucgacugcgcccuggacccccugagcgagaccaagugcacccucaaguccuucaccguggagaaggggaucuaccagacgagcaacuuccgggugcagcccaccgaguccaucguccgcuucccgaacaucaccaaccugugccccuucggcgagguguucaacgccacccgguucgccagcgucuacgccuggaaccgcaagcggaucuccaacugcguggcggacuacagcgugcuguacaacuccgccagcuucuccacguucaagugcuacggcgucagccccaccaagcucaacgaccugugcuucaccaacguguacgccgacuccuucgugauccgcggggacgagguccggcagaucgcccccggccagaccgggaagaucgccgacuacaacuacaagcugccggacgacuucacgggcugcgugaucgcguggaacagcaacaaccucgacuccaaggucgggggcaacuacaacuaccuguaccgccuguuccgcaagagcaaccucaagcccuucgagcgggacaucuccaccgagaucuaccaggccggcagcacccccugcaacgggguggagggcuucaacugcuacuucccccugcaguccuacggguuccagccgaccaacggcgugggguaccagcccuaccggguggucgugcugagcuucgagcuccugcacgcccccgccacggugugcggccccaagaaguccaccaaccuggucaagaacaagugcgugaacuucaacuucaacggccucaccgggaccggcgugcugaccgagagcaacaagaaguuccugccguuccagcaguucgggcgcgacaucgccgacacgaccgacgcgguccgcgacccccagacccuggagauccucgacaucacccccugcagcuucggcgggguguccgugaucacgccgggcaccaacaccagcaaccaggucgccgugcuguaccaggacgugaacugcaccgagguccccguggccauccacgccgaccagcugacgcccaccuggcggguguacuccaccggcagcaacgucuuccagacccgcgccgggugccucaucggcgcggagcacgugaacaacuccuacgagugcgacauccccaucggggccggcaucugcgccagcuaccagacgcagaccaacuccccgcggcgcgcccggagcguggcgucccagagcaucaucgccuacaccaugucccugggcgccgagaacagcgucgccuacuccaacaacagcaucgccaucugcaccaacuucacgaucuccgugaccaccgagauccugcccgugagcaugaccaagacgagcgucgacugcaccauguacaucugcggggacuccaccgagugcagcaaccuccugcugcaguacggcuccuucugcacccagcucaaccgcgcgcugacggggaucgccguggagcaggacaagaacacccaggagguguucgcccaggucaagcagaucuacaagacgcccccgaucaaggacuucggcggguucaacuucagccagauccugcccgaccccuccaagcccagcaagcgguccuucaucgaggaccuccuguucaacaaggugacccuggccgacgccggcuucaucaagcaguacggcgacugccucggggacaucgcggcccgcgaccugaucugcgcccagaaguucaacggccugaccgugcucccgccccugcugaccgacgagaugaucgcccaguacaccagcgcccuccuggcggggaccaucacguccggcuggaccuucggggccggcgccgcccugcagauccccuucgcgaugcagauggccuaccgguucaacggcaucggggucacccagaacgugcucuacgagaaccagaagcugaucgccaaccaguucaacagcgccaucggcaagauccaggacucccugagcuccaccgccagcgcgcucgggaagcugcaggacguggucaaccagaacgcccaggcccugaacacgcucgugaagcagcuguccagcaacuucggcgccaucuccagcgugcugaacgacauccucucccgccuggacaaggucgaggccgaggugcagaucgaccggcugaucaccgggcgccuccagagccugcagaccuacgugacccagcagcugauccgggcggccgagauccgcgccagcgccaaccucgccgcgaccaagauguccgagugcguccugggccagagcaagcggguggacuucugcggcaagggguaccaccugauguccuucccccagagcgccccgcacggcguggucuuccuccacgugacguacgucugcgcccaggagaagaacuucaccaccgcccccgcgaucugccacgacgggaaggcccacuucccccgcgagggcguguucguguccaacgggacccacugguucgucacgcagcggaacuucuacgagccgcagaucaucaccaccgacaacaccuucgugagcggcaacugcgacguggucaucggcaucgugaacaacacgguguacgacccccugcagcccgagcuggacuccuucaaggaggagcucgacaaguacuucaagaaccacaccagccccgacgucgaccugggggacaucuccggcaucaacgccagcguggugaacauccagaaggagaucgaccgccugaacgaggucgccaagaaccucaacgagucccugaucgaccugcaggagcucgggaaguacgagcaguacaucaaguggccgugguacaucuggcugggcuucaucgccggccugaucgcgaucgugauggugaccaucaugcucugcugcaugaccagcugcugcuccugccugaaggggugcugcagcugcggcuccugcugcaaguucgacgaggacgacagcgagcccguccugaagggggugaagcuccacuacacgugaggacuaguuauaagacugacuagcccgaugggccucccaacgggcccuccuccccuccuugcaccgagauuaauaaaaaaaaaaaaaaaaaaaaaaaaaaaaaaaaaaaaaaaaaaaaaaaaaaaaaaaaaaaaaaaaugcaucccccccccccccccccccccccccccccccaaaggcucuuuucagagccaccagaauu

SEQ ID NO: 12817 - RNA, 4039 nt, Artificial Sequence
  SARS-CoV-2/Wuhan/WIV05/2019__EPI_ISL_402128 spike protein mRNA gc (1-1273)(G889C_L1034C) R9564
aggagaaagcuuaccauguucguguuccugguccuccugccccuggugagcucccagugcgugaaccucaccacccgcacgcagcugccgcccgccuacaccaacagcuucacccggggcgucuacuaccccgacaagguguuccgcuccagcgugcugcacuccacccaggaccucuuccugcccuucuucagcaacgucacgugguuccacgccauccacguguccgggaccaacggcaccaagcgguucgacaacccggugcugcccuucaacgacggggucuacuucgcgagcaccgagaaguccaacaucauccgcggcuggaucuucgggacgacccucgacagcaagacccagucccugcugaucgugaacaacgccaccaacguggucaucaaggugugcgaguuccaguucugcaacgaccccuuccucggcguguacuaccacaagaacaacaagagcuggauggaguccgaguuccgggucuacagcuccgccaacaacugcacguucgaguacgugagccagcccuuccugauggaccuggagggcaagcaggggaacuucaagaaccuccgcgaguucguguucaagaacaucgacggcuacuucaagaucuacuccaagcacaccccgaucaaccugguccgggaccugccccagggguucagcgcccucgagccccugguggaccugcccaucggcaucaacaucacccgcuuccagacccuccuggcccugcaccgguccuaccucacgccgggggacagcagcuccggcuggaccgcgggcgccgccgccuacuacgugggguaccugcagccccgcaccuuccugcucaaguacaacgagaacggcaccaucacggacgcggucgacugcgcccuggacccccugagcgagaccaagugcacccucaaguccuucaccguggagaaggggaucuaccagacgagcaacuuccgggugcagcccaccgaguccaucguccgcuucccgaacaucaccaaccugugccccuucggcgagguguucaacgccacccgguucgccagcgucuacgccuggaaccgcaagcggaucuccaacugcguggcggacuacagcgugcuguacaacuccgccagcuucuccacguucaagugcuacggcgucagccccaccaagcucaacgaccugugcuucaccaacguguacgccgacuccuucgugauccgcggggacgagguccggcagaucgcccccggccagaccgggaagaucgccgacuacaacuacaagcugccggacgacuucacgggcugcgugaucgcguggaacagcaacaaccucgacuccaaggucgggggcaacuacaacuaccuguaccgccuguuccgcaagagcaaccucaagcccuucgagcgggacaucuccaccgagaucuaccaggccggcagcacccccugcaacgggguggagggcuucaacugcuacuucccccugcaguccuacggguuccagccgaccaacggcgugggguaccagcccuaccggguggucgugcugagcuucgagcuccugcacgcccccgccacggugugcggccccaagaaguccaccaaccuggucaagaacaagugcgugaacuucaacuucaacggccucaccgggaccggcgugcugaccgagagcaacaagaaguuccugccguuccagcaguucgggcgcgacaucgccgacacgaccgacgcgguccgcgacccccagacccuggagauccucgacaucacccccugcagcuucggcgggguguccgugaucacgccgggcaccaacaccagcaaccaggucgccgugcuguaccaggacgugaacugcaccgagguccccguggccauccacgccgaccagcugacgcccaccuggcggguguacuccaccggcagcaacgucuuccagacccgcgccgggugccucaucggcgcggagcacgugaacaacuccuacgagugcgacauccccaucggggccggcaucugcgccagcuaccagacgcagaccaacuccccgcggcgcgcccggagcguggcgucccagagcaucaucgccuacaccaugucccugggcgccgagaacagcgucgccuacuccaacaacagcaucgccauccccaccaacuucacgaucuccgugaccaccgagauccugcccgugagcaugaccaagacgagcgucgacugcaccauguacaucugcggggacuccaccgagugcagcaaccuccugcugcaguacggcuccuucugcacccagcucaaccgcgcgcugacggggaucgccguggagcaggacaagaacacccaggagguguucgcccaggucaagcagaucuacaagacgcccccgaucaaggacuucggcggguucaacuucagccagauccugcccgaccccuccaagcccagcaagcgguccuucaucgaggaccuccuguucaacaaggugacccuggccgacgccggcuucaucaagcaguacggcgacugccucggggacaucgcggcccgcgaccugaucugcgcccagaaguucaacggccugaccgugcucccgccccugcugaccgacgagaugaucgcccaguacaccagcgcccuccuggcggggaccaucacguccggcuggaccuucugcgccggcgccgcccugcagauccccuucgcgaugcagauggccuaccgguucaacggcaucggggucacccagaacgugcucuacgagaaccagaagcugaucgccaaccaguucaacagcgccaucggcaagauccaggacucccugagcuccaccgccagcgcgcucgggaagcugcaggacguggucaaccagaacgcccaggcccugaacacgcucgugaagcagcuguccagcaacuucggcgccaucuccagcgugcugaacgacauccucucccgccuggacaaggucgaggccgaggugcagaucgaccggcugaucaccgggcgccuccagagccugcagaccuacgugacccagcagcugauccgggcggccgagauccgcgccagcgccaaccucgccgcgaccaagauguccgagugcgucugcggccagagcaagcggguggacuucugcggcaagggguaccaccugauguccuucccccagagcgccccgcacggcguggucuuccuccacgugacguacguccccgcccaggagaagaacuucaccaccgcccccgcgaucugccacgacgggaaggcccacuucccccgcgagggcguguucguguccaacgggacccacugguucgucacgcagcggaacuucuacgagccgcagaucaucaccaccgacaacaccuucgugagcggcaacugcgacguggucaucggcaucgugaacaacacgguguacgacccccugcagcccgagcuggacuccuucaaggaggagcucgacaaguacuucaagaaccacaccagccccgacgucgaccugggggacaucuccggcaucaacgccagcguggugaacauccagaaggagaucgaccgccugaacgaggucgccaagaaccucaacgagucccugaucgaccugcaggagcucgggaaguacgagcaguacaucaaguggccgugguacaucuggcugggcuucaucgccggccugaucgcgaucgugauggugaccaucaugcucugcugcaugaccagcugcugcuccugccugaaggggugcugcagcugcggcuccugcugcaaguucgacgaggacgacagcgagcccguccugaagggggugaagcuccacuacacgugaggacuaguuauaagacugacuagcccgaugggccucccaacgggcccuccuccccuccuugcaccgagauuaauaaaaaaaaaaaaaaaaaaaaaaaaaaaaaaaaaaaaaaaaaaaaaaaaaaaaaaaaaaaaaaaaugcaucccccccccccccccccccccccccccccccaaaggcucuuuucagagccaccagaauu

SEQ ID NO: 12818 - RNA, 4039 nt, Artificial Sequence
  SARS-CoV-2/Wuhan/WIV05/2019__EPI_ISL_402128 spike protein mRNA gc (1-1273)(I909C_Y1047C)
aggagaaagcuuaccauguucguguuccugguccuccugccccuggugagcucccagugcgugaaccucaccacccgcacgcagcugccgcccgccuacaccaacagcuucacccggggcgucuacuaccccgacaagguguuccgcuccagcgugcugcacuccacccaggaccucuuccugcccuucuucagcaacgucacgugguuccacgccauccacguguccgggaccaacggcaccaagcgguucgacaacccggugcugcccuucaacgacggggucuacuucgcgagcaccgagaaguccaacaucauccgcggcuggaucuucgggacgacccucgacagcaagacccagucccugcugaucgugaacaacgccaccaacguggucaucaaggugugcgaguuccaguucugcaacgaccccuuccucggcguguacuaccacaagaacaacaagagcuggauggaguccgaguuccgggucuacagcuccgccaacaacugcacguucgaguacgugagccagcccuuccugauggaccuggagggcaagcaggggaacuucaagaaccuccgcgaguucguguucaagaacaucgacggcuacuucaagaucuacuccaagcacaccccgaucaaccugguccgggaccugccccagggguucagcgcccucgagccccugguggaccugcccaucggcaucaacaucacccgcuuccagacccuccuggcccugcaccgguccuaccucacgccgggggacagcagcuccggcuggaccgcgggcgccgccgccuacuacgugggguaccugcagccccgcaccuuccugcucaaguacaacgagaacggcaccaucacggacgcggucgacugcgcccuggacccccugagcgagaccaagugcacccucaaguccuucaccguggagaaggggaucuaccagacgagcaacuuccgggugcagcccaccgaguccaucguccgcuucccgaacaucaccaaccugugccccuucggcgagguguucaacgccacccgguucgccagcgucuacgccuggaaccgcaagcggaucuccaacugcguggcggacuacagcgugcuguacaacuccgccagcuucuccacguucaagugcuacggcgucagccccaccaagcucaacgaccugugcuucaccaacguguacgccgacuccuucgugauccgcggggacgagguccggcagaucgcccccggccagaccgggaagaucgccgacuacaacuacaagcugccggacgacuucacgggcugcgugaucgcguggaacagcaacaaccucgacuccaaggucgggggcaacuacaacuaccuguaccgccuguuccgcaagagcaaccucaagcccuucgagcgggacaucuccaccgagaucuaccaggccggcagcacccccugcaacgggguggagggcuucaacugcuacuucccccugcaguccuacggguuccagccgaccaacggcgugggguaccagcccuaccggguggucgugcugagcuucgagcuccugcacgcccccgccacggugugcggccccaagaaguccaccaaccuggucaagaacaagugcgugaacuucaacuucaacggccucaccgggaccggcgugcugaccgagagcaacaagaaguuccugccguuccagcaguucgggcgcgacaucgccgacacgaccgacgcgguccgcgacccccagacccuggagauccucgacaucacccccugcagcuucggcgggguguccgugaucacgccgggcaccaacaccagcaaccaggucgccgugcuguaccaggacgugaacugcaccgagguccccguggccauccacgccgaccagcugacgcccaccuggcggguguacuccaccggcagcaacgucuuccagacccgcgccgggugccucaucggcgcggagcacgugaacaacuccuacgagugcgacauccccaucggggccggcaucugcgccagcuaccagacgcagaccaacuccccgcggcgcgcccggagcguggcgucccagagcaucaucgccuacaccaugucccugggcgccgagaacagcgucgccuacuccaacaacagcaucgccauccccaccaacuucacgaucuccgugaccaccgagauccugcccgugagcaugaccaagacgagcgucgacugcaccauguacaucugcggggacuccaccgagugcagcaaccuccugcugcaguacggcuccuucugcacccagcucaaccgcgcgcugacggggaucgccguggagcaggacaagaacacccaggagguguucgcccaggucaagcagaucuacaagacgcccccgaucaaggacuucggcggguucaacuucagccagauccugcccgaccccuccaagcccagcaagcgguccuucaucgaggaccuccuguucaacaaggugacccuggccgacgccggcuucaucaagcaguacggcgacugccucggggacaucgcggcccgcgaccugaucugcgcccagaaguucaacggccugaccgugcucccgccccugcugaccgacgagaugaucgcccaguacaccagcgcccuccuggcggggaccaucacguccggcuggaccuucggggccggcgccgcccugcagauccccuucgcgaugcagauggccuaccgguucaacggcugcggggucacccagaacgugcucuacgagaaccagaagcugaucgccaaccaguucaacagcgccaucggcaagauccaggacucccugagcuccaccgccagcgcgcucgggaagcugcaggacguggucaaccagaacgcccaggcccugaacacgcucgugaagcagcuguccagcaacuucggcgccaucuccagcgugcugaacgacauccucucccgccuggacaaggucgaggccgaggugcagaucgaccggcugaucaccgggcgccuccagagccugcagaccuacgugacccagcagcugauccgggcggccgagauccgcgccagcgccaaccucgccgcgaccaagauguccgagugcguccugggccagagcaagcggguggacuucugcggcaaggggugccaccugauguccuucccccagagcgccccgcacggcguggucuuccuccacgugacguacguccccgcccaggagaagaacuucaccaccgcccccgcgaucugccacgacgggaaggcccacuucccccgcgagggcguguucguguccaacgggacccacugguucgucacgcagcggaacuucuacgagccgcagaucaucaccaccgacaacaccuucgugagcggcaacugcgacguggucaucggcaucgugaacaacacgguguacgacccccugcagcccgagcuggacuccuucaaggaggagcucgacaaguacuucaagaaccacaccagccccgacgucgaccugggggacaucuccggcaucaacgccagcguggugaacauccagaaggagaucgaccgccugaacgaggucgccaagaaccucaacgagucccugaucgaccugcaggagcucgggaaguacgagcaguacaucaaguggccgugguacaucuggcugggcuucaucgccggccugaucgcgaucgugauggugaccaucaugcucugcugcaugaccagcugcugcuccugccugaaggggugcugcagcugcggcuccugcugcaaguucgacgaggacgacagcgagcccguccugaagggggugaagcuccacuacacgugaggacuaguuauaagacugacuagcccgaugggccucccaacgggcccuccuccccuccuugcaccgagauuaauaaaaaaaaaaaaaaaaaaaaaaaaaaaaaaaaaaaaaaaaaaaaaaaaaaaaaaaaaaaaaaaaugcaucccccccccccccccccccccccccccccccaaaggcucuuuucagagccaccagaauu

SEQ ID NO: 12819 - RNA, 4039 nt, Artificial Sequence
  SARS-CoV-2/Wuhan/WIV05/2019__EPI_ISL_402128 spike protein mRNA gc (1-1273)(Q965C_S1003C)
aggagaaagcuuaccauguucguguuccugguccuccugccccuggugagcucccagugcgugaaccucaccacccgcacgcagcugccgcccgccuacaccaacagcuucacccggggcgucuacuaccccgacaagguguuccgcuccagcgugcugcacuccacccaggaccucuuccugcccuucuucagcaacgucacgugguuccacgccauccacguguccgggaccaacggcaccaagcgguucgacaacccggugcugcccuucaacgacggggucuacuucgcgagcaccgagaaguccaacaucauccgcggcuggaucuucgggacgacccucgacagcaagacccagucccugcugaucgugaacaacgccaccaacguggucaucaaggugugcgaguuccaguucugcaacgaccccuuccucggcguguacuaccacaagaacaacaagagcuggauggaguccgaguuccgggucuacagcuccgccaacaacugcacguucgaguacgugagccagcccuuccugauggaccuggagggcaagcaggggaacuucaagaaccuccgcgaguucguguucaagaacaucgacggcuacuucaagaucuacuccaagcacaccccgaucaaccugguccgggaccugccccagggguucagcgcccucgagccccugguggaccugcccaucggcaucaacaucacccgcuuccagacccuccuggcccugcaccgguccuaccucacgccgggggacagcagcuccggcuggaccgcgggcgccgccgccuacuacgugggguaccugcagccccgcaccuuccugcucaaguacaacgagaacggcaccaucacggacgcggucgacugcgcccuggacccccugagcgagaccaagugcacccucaaguccuucaccguggagaaggggaucuaccagacgagcaacuuccgggugcagcccaccgaguccaucguccgcuucccgaacaucaccaaccugugccccuucggcgagguguucaacgccacccgguucgccagcgucuacgccuggaaccgcaagcggaucuccaacugcguggcggacuacagcgugcuguacaacuccgccagcuucuccacguucaagugcuacggcgucagccccaccaagcucaacgaccugugcuucaccaacguguacgccgacuccuucgugauccgcggggacgagguccggcagaucgcccccggccagaccgggaagaucgccgacuacaacuacaagcugccggacgacuucacgggcugcgugaucgcguggaacagcaacaaccucgacuccaaggucgggggcaacuacaacuaccuguaccgccuguuccgcaagagcaaccucaagcccuucgagcgggacaucuccaccgagaucuaccaggccggcagcacccccugcaacgggguggagggcuucaacugcuacuucccccugcaguccuacggguuccagccgaccaacggcgugggguaccagcccuaccggguggucgugcugagcuucgagcuccugcacgcccccgccacggugugcggccccaagaaguccaccaaccuggucaagaacaagugcgugaacuucaacuucaacggccucaccgggaccggcgugcugaccgagagcaacaagaaguuccugccguuccagcaguucgggcgcgacaucgccgacacgaccgacgcgguccgcgacccccagacccuggagauccucgacaucacccccugcagcuucggcgggguguccgugaucacgccgggcaccaacaccagcaaccaggucgccgugcuguaccaggacgugaacugcaccgagguccccguggccauccacgccgaccagcugacgcccaccuggcggguguacuccaccggcagcaacgucuuccagacccgcgccgggugccucaucggcgcggagcacgugaacaacuccuacgagugcgacauccccaucggggccggcaucugcgccagcuaccagacgcagaccaacuccccgcggcgcgcccggagcguggcgucccagagcaucaucgccuacaccaugucccugggcgccgagaacagcgucgccuacuccaacaacagcaucgccauccccaccaacuucacgaucuccgugaccaccgagauccugcccgugagcaugaccaagacgagcgucgacugcaccauguacaucugcggggacuccaccgagugcagcaaccuccugcugcaguacggcuccuucugcacccagcucaaccgcgcgcugacggggaucgccguggagcaggacaagaacacccaggagguguucgcccaggucaagcagaucuacaagacgcccccgaucaaggacuucggcggguucaacuucagccagauccugcccgaccccuccaagcccagcaagcgguccuucaucgaggaccuccuguucaacaaggugacccuggccgacgccggcuucaucaagcaguacggcgacugccucggggacaucgcggcccgcgaccugaucugcgcccagaaguucaacggccugaccgugcucccgccccugcugaccgacgagaugaucgcccaguacaccagcgcccuccuggcggggaccaucacguccggcuggaccuucggggccggcgccgcccugcagauccccuucgcgaugcagauggccuaccgguucaacggcaucggggucacccagaacgugcucuacgagaaccagaagcugaucgccaaccaguucaacagcgccaucggcaagauccaggacucccugagcuccaccgccagcgcgcucgggaagcugcaggacguggucaaccagaacgcccaggcccugaacacgcucgugaagugccuguccagcaacuucggcgccaucuccagcgugcugaacgacauccucucccgccuggacaaggucgaggccgaggugcagaucgaccggcugaucaccgggcgccuccagugccugcagaccuacgugacccagcagcugauccgggcggccgagauccgcgccagcgccaaccucgccgcgaccaagauguccgagugcguccugggccagagcaagcggguggacuucugcggcaagggguaccaccugauguccuucccccagagcgccccgcacggcguggucuuccuccacgugacguacguccccgcccaggagaagaacuucaccaccgcccccgcgaucugccacgacgggaaggcccacuucccccgcgagggcguguucguguccaacgggacccacugguucgucacgcagcggaacuucuacgagccgcagaucaucaccaccgacaacaccuucgugagcggcaacugcgacguggucaucggcaucgugaacaacacgguguacgacccccugcagcccgagcuggacuccuucaaggaggagcucgacaaguacuucaagaaccacaccagccccgacgucgaccugggggacaucuccggcaucaacgccagcguggugaacauccagaaggagaucgaccgccugaacgaggucgccaagaaccucaacgagucccugaucgaccugcaggagcucgggaaguacgagcaguacaucaaguggccgugguacaucuggcugggcuucaucgccggccugaucgcgaucgugauggugaccaucaugcucugcugcaugaccagcugcugcuccugccugaaggggugcugcagcugcggcuccugcugcaaguucgacgaggacgacagcgagcccguccugaagggggugaagcuccacuacacgugaggacuaguuauaagacugacuagcccgaugggccucccaacgggcccuccuccccuccuugcaccgagauuaauaaaaaaaaaaaaaaaaaaaaaaaaaaaaaaaaaaaaaaaaaaaaaaaaaaaaaaaaaaaaaaaaugcaucccccccccccccccccccccccccccccccaaaggcucuuuucagagccaccagaauu

SEQ ID NO: 12820 - RNA, 4039 nt, Artificial Sequence
  SARS-CoV-2/Wuhan/WIV05/2019__EPI_ISL_402128 spike protein mRNA gc (1-1273)(F970C_G999C) R9562
aggagaaagcuuaccauguucguguuccugguccuccugccccuggugagcucccagugcgugaaccucaccacccgcacgcagcugccgcccgccuacaccaacagcuucacccggggcgucuacuaccccgacaagguguuccgcuccagcgugcugcacuccacccaggaccucuuccugcccuucuucagcaacgucacgugguuccacgccauccacguguccgggaccaacggcaccaagcgguucgacaacccggugcugcccuucaacgacggggucuacuucgcgagcaccgagaaguccaacaucauccgcggcuggaucuucgggacgacccucgacagcaagacccagucccugcugaucgugaacaacgccaccaacguggucaucaaggugugcgaguuccaguucugcaacgaccccuuccucggcguguacuaccacaagaacaacaagagcuggauggaguccgaguuccgggucuacagcuccgccaacaacugcacguucgaguacgugagccagcccuuccugauggaccuggagggcaagcaggggaacuucaagaaccuccgcgaguucguguucaagaacaucgacggcuacuucaagaucuacuccaagcacaccccgaucaaccugguccgggaccugccccagggguucagcgcccucgagccccugguggaccugcccaucggcaucaacaucacccgcuuccagacccuccuggcccugcaccgguccuaccucacgccgggggacagcagcuccggcuggaccgcgggcgccgccgccuacuacgugggguaccugcagccccgcaccuuccugcucaaguacaacgagaacggcaccaucacggacgcggucgacugcgcccuggacccccugagcgagaccaagugcacccucaaguccuucaccguggagaaggggaucuaccagacgagcaacuuccgggugcagcccaccgaguccaucguccgcuucccgaacaucaccaaccugugccccuucggcgagguguucaacgccacccgguucgccagcgucuacgccuggaaccgcaagcggaucuccaacugcguggcggacuacagcgugcuguacaacuccgccagcuucuccacguucaagugcuacggcgucagccccaccaagcucaacgaccugugcuucaccaacguguacgccgacuccuucgugauccgcggggacgagguccggcagaucgcccccggccagaccgggaagaucgccgacuacaacuacaagcugccggacgacuucacgggcugcgugaucgcguggaacagcaacaaccucgacuccaaggucgggggcaacuacaacuaccuguaccgccuguuccgcaagagcaaccucaagcccuucgagcgggacaucuccaccgagaucuaccaggccggcagcacccccugcaacgggguggagggcuucaacugcuacuucccccugcaguccuacggguuccagccgaccaacggcgugggguaccagcccuaccggguggucgugcugagcuucgagcuccugcacgcccccgccacggugugcggccccaagaaguccaccaaccuggucaagaacaagugcgugaacuucaacuucaacggccucaccgggaccggcgugcugaccgagagcaacaagaaguuccugccguuccagcaguucgggcgcgacaucgccgacacgaccgacgcgguccgcgacccccagacccuggagauccucgacaucacccccugcagcuucggcgggguguccgugaucacgccgggcaccaacaccagcaaccaggucgccgugcuguaccaggacgugaacugcaccgagguccccguggccauccacgccgaccagcugacgcccaccuggcggguguacuccaccggcagcaacgucuuccagacccgcgccgggugccucaucggcgcggagcacgugaacaacuccuacgagugcgacauccccaucggggccggcaucugcgccagcuaccagacgcagaccaacuccccgcggcgcgcccggagcguggcgucccagagcaucaucgccuacaccaugucccugggcgccgagaacagcgucgccuacuccaacaacagcaucgccauccccaccaacuucacgaucuccgugaccaccgagauccugcccgugagcaugaccaagacgagcgucgacugcaccauguacaucugcggggacuccaccgagugcagcaaccuccugcugcaguacggcuccuucugcacccagcucaaccgcgcgcugacggggaucgccguggagcaggacaagaacacccaggagguguucgcccaggucaagcagaucuacaagacgcccccgaucaaggacuucggcggguucaacuucagccagauccugcccgaccccuccaagcccagcaagcgguccuucaucgaggaccuccuguucaacaaggugacccuggccgacgccggcuucaucaagcaguacggcgacugccucggggacaucgcggcccgcgaccugaucugcgcccagaaguucaacggccugaccgugcucccgccccugcugaccgacgagaugaucgcccaguacaccagcgcccuccuggcggggaccaucacguccggcuggaccuucggggccggcgccgcccugcagauccccuucgcgaugcagauggccuaccgguucaacggcaucggggucacccagaacgugcucuacgagaaccagaagcugaucgccaaccaguucaacagcgccaucggcaagauccaggacucccugagcuccaccgccagcgcgcucgggaagcugcaggacguggucaaccagaacgcccaggcccugaacacgcucgugaagcagcuguccagcaacugcggcgccaucuccagcgugcugaacgacauccucucccgccuggacaaggucgaggccgaggugcagaucgaccggcugaucaccugucgccuccagagccugcagaccuacgugacccagcagcugauccgggcggccgagauccgcgccagcgccaaccucgccgcgaccaagauguccgagugcguccugggccagagcaagcggguggacuucugcggcaagggguaccaccugauguccuucccccagagcgccccgcacggcguggucuuccuccacgugacguacguccccgcccaggagaagaacuucaccaccgcccccgcgaucugccacgacgggaaggcccacuucccccgcgagggcguguucguguccaacgggacccacugguucgucacgcagcggaacuucuacgagccgcagaucaucaccaccgacaacaccuucgugagcggcaacugcgacguggucaucggcaucgugaacaacacgguguacgacccccugcagcccgagcuggacuccuucaaggaggagcucgacaaguacuucaagaaccacaccagccccgacgucgaccugggggacaucuccggcaucaacgccagcguggugaacauccagaaggagaucgaccgccugaacgaggucgccaagaaccucaacgagucccugaucgaccugcaggagcucgggaaguacgagcaguacaucaaguggccgugguacaucuggcugggcuucaucgccggccugaucgcgaucgugauggugaccaucaugcucugcugcaugaccagcugcugcuccugccugaaggggugcugcagcugcggcuccugcugcaaguucgacgaggacgacagcgagcccguccugaagggggugaagcuccacuacacgugaggacuaguuauaagacugacuagcccgaugggccucccaacgggcccuccuccccuccuugcaccgagauuaauaaaaaaaaaaaaaaaaaaaaaaaaaaaaaaaaaaaaaaaaaaaaaaaaaaaaaaaaaaaaaaaaugcaucccccccccccccccccccccccccccccccaaaggcucuuuucagagccaccagaauu

SEQ ID NO: 12821 - RNA, 4039 nt, Artificial Sequence
  SARS-CoV-2/Wuhan/WIV05/2019__EPI_ISL_402128 spike protein mRNA gc (1-1273)(A972C_R995C)
aggagaaagcuuaccauguucguguuccugguccuccugccccuggugagcucccagugcgugaaccucaccacccgcacgcagcugccgcccgccuacaccaacagcuucacccggggcgucuacuaccccgacaagguguuccgcuccagcgugcugcacuccacccaggaccucuuccugcccuucuucagcaacgucacgugguuccacgccauccacguguccgggaccaacggcaccaagcgguucgacaacccggugcugcccuucaacgacggggucuacuucgcgagcaccgagaaguccaacaucauccgcggcuggaucuucgggacgacccucgacagcaagacccagucccugcugaucgugaacaacgccaccaacguggucaucaaggugugcgaguuccaguucugcaacgaccccuuccucggcguguacuaccacaagaacaacaagagcuggauggaguccgaguuccgggucuacagcuccgccaacaacugcacguucgaguacgugagccagcccuuccugauggaccuggagggcaagcaggggaacuucaagaaccuccgcgaguucguguucaagaacaucgacggcuacuucaagaucuacuccaagcacaccccgaucaaccugguccgggaccugccccagggguucagcgcccucgagccccugguggaccugcccaucggcaucaacaucacccgcuuccagacccuccuggcccugcaccgguccuaccucacgccgggggacagcagcuccggcuggaccgcgggcgccgccgccuacuacgugggguaccugcagccccgcaccuuccugcucaaguacaacgagaacggcaccaucacggacgcggucgacugcgcccuggacccccugagcgagaccaagugcacccucaaguccuucaccguggagaaggggaucuaccagacgagcaacuuccgggugcagcccaccgaguccaucguccgcuucccgaacaucaccaaccugugccccuucggcgagguguucaacgccacccgguucgccagcgucuacgccuggaaccgcaagcggaucuccaacugcguggcggacuacagcgugcuguacaacuccgccagcuucuccacguucaagugcuacggcgucagccccaccaagcucaacgaccugugcuucaccaacguguacgccgacuccuucgugauccgcggggacgagguccggcagaucgcccccggccagaccgggaagaucgccgacuacaacuacaagcugccggacgacuucacgggcugcgugaucgcguggaacagcaacaaccucgacuccaaggucgggggcaacuacaacuaccuguaccgccuguuccgcaagagcaaccucaagcccuucgagcgggacaucuccaccgagaucuaccaggccggcagcacccccugcaacgggguggagggcuucaacugcuacuucccccugcaguccuacggguuccagccgaccaacggcgugggguaccagcccuaccggguggucgugcugagcuucgagcuccugcacgcccccgccacggugugcggccccaagaaguccaccaaccuggucaagaacaagugcgugaacuucaacuucaacggccucaccgggaccggcgugcugaccgagagcaacaagaaguuccugccguuccagcaguucgggcgcgacaucgccgacacgaccgacgcgguccgcgacccccagacccuggagauccucgacaucacccccugcagcuucggcgggguguccgugaucacgccgggcaccaacaccagcaaccaggucgccgugcuguaccaggacgugaacugcaccgagguccccguggccauccacgccgaccagcugacgcccaccuggcggguguacuccaccggcagcaacgucuuccagacccgcgccgggugccucaucggcgcggagcacgugaacaacuccuacgagugcgacauccccaucggggccggcaucugcgccagcuaccagacgcagaccaacuccccgcggcgcgcccggagcguggcgucccagagcaucaucgccuacaccaugucccugggcgccgagaacagcgucgccuacuccaacaacagcaucgccauccccaccaacuucacgaucuccgugaccaccgagauccugcccgugagcaugaccaagacgagcgucgacugcaccauguacaucugcggggacuccaccgagugcagcaaccuccugcugcaguacggcuccuucugcacccagcucaaccgcgcgcugacggggaucgccguggagcaggacaagaacacccaggagguguucgcccaggucaagcagaucuacaagacgcccccgaucaaggacuucggcggguucaacuucagccagauccugcccgaccccuccaagcccagcaagcgguccuucaucgaggaccuccuguucaacaaggugacccuggccgacgccggcuucaucaagcaguacggcgacugccucggggacaucgcggcccgcgaccugaucugcgcccagaaguucaacggccugaccgugcucccgccccugcugaccgacgagaugaucgcccaguacaccagcgcccuccuggcggggaccaucacguccggcuggaccuucggggccggcgccgcccugcagauccccuucgcgaugcagauggccuaccgguucaacggcaucggggucacccagaacgugcucuacgagaaccagaagcugaucgccaaccaguucaacagcgccaucggcaagauccaggacucccugagcuccaccgccagcgcgcucgggaagcugcaggacguggucaaccagaacgcccaggcccugaacacgcucgugaagcagcuguccagcaacuucggcugcaucuccagcgugcugaacgacauccucucccgccuggacaaggucgaggccgaggugcagaucgacugccugaucaccgggcgccuccagagccugcagaccuacgugacccagcagcugauccgggcggccgagauccgcgccagcgccaaccucgccgcgaccaagauguccgagugcguccugggccagagcaagcggguggacuucugcggcaagggguaccaccugauguccuucccccagagcgccccgcacggcguggucuuccuccacgugacguacguccccgcccaggagaagaacuucaccaccgcccccgcgaucugccacgacgggaaggcccacuucccccgcgagggcguguucguguccaacgggacccacugguucgucacgcagcggaacuucuacgagccgcagaucaucaccaccgacaacaccuucgugagcggcaacugcgacguggucaucggcaucgugaacaacacgguguacgacccccugcagcccgagcuggacuccuucaaggaggagcucgacaaguacuucaagaaccacaccagccccgacgucgaccugggggacaucuccggcaucaacgccagcguggugaacauccagaaggagaucgaccgccugaacgaggucgccaagaaccucaacgagucccugaucgaccugcaggagcucgggaaguacgagcaguacaucaaguggccgugguacaucuggcugggcuucaucgccggccugaucgcgaucgugauggugaccaucaugcucugcugcaugaccagcugcugcuccugccugaaggggugcugcagcugcggcuccugcugcaaguucgacgaggacgacagcgagcccguccugaagggggugaagcuccacuacacgugaggacuaguuauaagacugacuagcccgaugggccucccaacgggcccuccuccccuccuugcaccgagauuaauaaaaaaaaaaaaaaaaaaaaaaaaaaaaaaaaaaaaaaaaaaaaaaaaaaaaaaaaaaaaaaaaugcaucccccccccccccccccccccccccccccccaaaggcucuuuucagagccaccagaauu

SEQ ID NO: 12822 - RNA, 4039 nt, Artificial Sequence
  SARS-CoV-2/Wuhan/WIV05/2019__EPI_ISL_402128 spike protein mRNA gc (1-1273)(A890C_V1040C) R9560
aggagaaagcuuaccauguucguguuccugguccuccugccccuggugagcucccagugcgugaaccucaccacccgcacgcagcugccgcccgccuacaccaacagcuucacccggggcgucuacuaccccgacaagguguuccgcuccagcgugcugcacuccacccaggaccucuuccugcccuucuucagcaacgucacgugguuccacgccauccacguguccgggaccaacggcaccaagcgguucgacaacccggugcugcccuucaacgacggggucuacuucgcgagcaccgagaaguccaacaucauccgcggcuggaucuucgggacgacccucgacagcaagacccagucccugcugaucgugaacaacgccaccaacguggucaucaaggugugcgaguuccaguucugcaacgaccccuuccucggcguguacuaccacaagaacaacaagagcuggauggaguccgaguuccgggucuacagcuccgccaacaacugcacguucgaguacgugagccagcccuuccugauggaccuggagggcaagcaggggaacuucaagaaccuccgcgaguucguguucaagaacaucgacggcuacuucaagaucuacuccaagcacaccccgaucaaccugguccgggaccugccccagggguucagcgcccucgagccccugguggaccugcccaucggcaucaacaucacccgcuuccagacccuccuggcccugcaccgguccuaccucacgccgggggacagcagcuccggcuggaccgcgggcgccgccgccuacuacgugggguaccugcagccccgcaccuuccugcucaaguacaacgagaacggcaccaucacggacgcggucgacugcgcccuggacccccugagcgagaccaagugcacccucaaguccuucaccguggagaaggggaucuaccagacgagcaacuuccgggugcagcccaccgaguccaucguccgcuucccgaacaucaccaaccugugccccuucggcgagguguucaacgccacccgguucgccagcgucuacgccuggaaccgcaagcggaucuccaacugcguggcggacuacagcgugcuguacaacuccgccagcuucuccacguucaagugcuacggcgucagccccaccaagcucaacgaccugugcuucaccaacguguacgccgacuccuucgugauccgcggggacgagguccggcagaucgcccccggccagaccgggaagaucgccgacuacaacuacaagcugccggacgacuucacgggcugcgugaucgcguggaacagcaacaaccucgacuccaaggucgggggcaacuacaacuaccuguaccgccuguuccgcaagagcaaccucaagcccuucgagcgggacaucuccaccgagaucuaccaggccggcagcacccccugcaacgggguggagggcuucaacugcuacuucccccugcaguccuacggguuccagccgaccaacggcgugggguaccagcccuaccggguggucgugcugagcuucgagcuccugcacgcccccgccacggugugcggccccaagaaguccaccaaccuggucaagaacaagugcgugaacuucaacuucaacggccucaccgggaccggcgugcugaccgagagcaacaagaaguuccugccguuccagcaguucgggcgcgacaucgccgacacgaccgacgcgguccgcgacccccagacccuggagauccucgacaucacccccugcagcuucggcgggguguccgugaucacgccgggcaccaacaccagcaaccaggucgccgugcuguaccaggacgugaacugcaccgagguccccguggccauccacgccgaccagcugacgcccaccuggcggguguacuccaccggcagcaacgucuuccagacccgcgccgggugccucaucggcgcggagcacgugaacaacuccuacgagugcgacauccccaucggggccggcaucugcgccagcuaccagacgcagaccaacuccccgcggcgcgcccggagcguggcgucccagagcaucaucgccuacaccaugucccugggcgccgagaacagcgucgccuacuccaacaacagcaucgccauccccaccaacuucacgaucuccgugaccaccgagauccugcccgugagcaugaccaagacgagcgucgacugcaccauguacaucugcggggacuccaccgagugcagcaaccuccugcugcaguacggcuccuucugcacccagcucaaccgcgcgcugacggggaucgccguggagcaggacaagaacacccaggagguguucgcccaggucaagcagaucuacaagacgcccccgaucaaggacuucggcggguucaacuucagccagauccugcccgaccccuccaagcccagcaagcgguccuucaucgaggaccuccuguucaacaaggugacccuggccgacgccggcuucaucaagcaguacggcgacugccucggggacaucgcggcccgcgaccugaucugcgcccagaaguucaacggccugaccgugcucccgccccugcugaccgacgagaugaucgcccaguacaccagcgcccuccuggcggggaccaucacguccggcuggaccuucgggugcggcgccgcccugcagauccccuucgcgaugcagauggccuaccgguucaacggcaucggggucacccagaacgugcucuacgagaaccagaagcugaucgccaaccaguucaacagcgccaucggcaagauccaggacucccugagcuccaccgccagcgcgcucgggaagcugcaggacguggucaaccagaacgcccaggcccugaacacgcucgugaagcagcuguccagcaacuucggcgccaucuccagcgugcugaacgacauccucucccgccuggacaaggucgaggccgaggugcagaucgaccggcugaucaccgggcgccuccagagccugcagaccuacgugacccagcagcugauccgggcggccgagauccgcgccagcgccaaccucgccgcgaccaagauguccgagugcguccugggccagagcaagcggugcgacuucugcggcaagggguaccaccugauguccuucccccagagcgccccgcacggcguggucuuccuccacgugacguacguccccgcccaggagaagaacuucaccaccgcccccgcgaucugccacgacgggaaggcccacuucccccgcgagggcguguucguguccaacgggacccacugguucgucacgcagcggaacuucuacgagccgcagaucaucaccaccgacaacaccuucgugagcggcaacugcgacguggucaucggcaucgugaacaacacgguguacgacccccugcagcccgagcuggacuccuucaaggaggagcucgacaaguacuucaagaaccacaccagccccgacgucgaccugggggacaucuccggcaucaacgccagcguggugaacauccagaaggagaucgaccgccugaacgaggucgccaagaaccucaacgagucccugaucgaccugcaggagcucgggaaguacgagcaguacaucaaguggccgugguacaucuggcugggcuucaucgccggccugaucgcgaucgugauggugaccaucaugcucugcugcaugaccagcugcugcuccugccugaaggggugcugcagcugcggcuccugcugcaaguucgacgaggacgacagcgagcccguccugaagggggugaagcuccacuacacgugaggacuaguuauaagacugacuagcccgaugggccucccaacgggcccuccuccccuccuugcaccgagauuaauaaaaaaaaaaaaaaaaaaaaaaaaaaaaaaaaaaaaaaaaaaaaaaaaaaaaaaaaaaaaaaaaugcaucccccccccccccccccccccccccccccccaaaggcucuuuucagagccaccagaauu

SEQ ID NO: 12823 - RNA, 4039 nt, Artificial Sequence
  SARS-CoV-2/Wuhan/WIV05/2019__EPI_ISL_402128 spike protein mRNA gc (1-1273)(T874C_S1055C) R9563
aggagaaagcuuaccauguucguguuccugguccuccugccccuggugagcucccagugcgugaaccucaccacccgcacgcagcugccgcccgccuacaccaacagcuucacccggggcgucuacuaccccgacaagguguuccgcuccagcgugcugcacuccacccaggaccucuuccugcccuucuucagcaacgucacgugguuccacgccauccacguguccgggaccaacggcaccaagcgguucgacaacccggugcugcccuucaacgacggggucuacuucgcgagcaccgagaaguccaacaucauccgcggcuggaucuucgggacgacccucgacagcaagacccagucccugcugaucgugaacaacgccaccaacguggucaucaaggugugcgaguuccaguucugcaacgaccccuuccucggcguguacuaccacaagaacaacaagagcuggauggaguccgaguuccgggucuacagcuccgccaacaacugcacguucgaguacgugagccagcccuuccugauggaccuggagggcaagcaggggaacuucaagaaccuccgcgaguucguguucaagaacaucgacggcuacuucaagaucuacuccaagcacaccccgaucaaccugguccgggaccugccccagggguucagcgcccucgagccccugguggaccugcccaucggcaucaacaucacccgcuuccagacccuccuggcccugcaccgguccuaccucacgccgggggacagcagcuccggcuggaccgcgggcgccgccgccuacuacgugggguaccugcagccccgcaccuuccugcucaaguacaacgagaacggcaccaucacggacgcggucgacugcgcccuggacccccugagcgagaccaagugcacccucaaguccuucaccguggagaaggggaucuaccagacgagcaacuuccgggugcagcccaccgaguccaucguccgcuucccgaacaucaccaaccugugccccuucggcgagguguucaacgccacccgguucgccagcgucuacgccuggaaccgcaagcggaucuccaacugcguggcggacuacagcgugcuguacaacuccgccagcuucuccacguucaagugcuacggcgucagccccaccaagcucaacgaccugugcuucaccaacguguacgccgacuccuucgugauccgcggggacgagguccggcagaucgcccccggccagaccgggaagaucgccgacuacaacuacaagcugccggacgacuucacgggcugcgugaucgcguggaacagcaacaaccucgacuccaaggucgggggcaacuacaacuaccuguaccgccuguuccgcaagagcaaccucaagcccuucgagcgggacaucuccaccgagaucuaccaggccggcagcacccccugcaacgggguggagggcuucaacugcuacuucccccugcaguccuacggguuccagccgaccaacggcgugggguaccagcccuaccggguggucgugcugagcuucgagcuccugcacgcccccgccacggugugcggccccaagaaguccaccaaccuggucaagaacaagugcgugaacuucaacuucaacggccucaccgggaccggcgugcugaccgagagcaacaagaaguuccugccguuccagcaguucgggcgcgacaucgccgacacgaccgacgcgguccgcgacccccagacccuggagauccucgacaucacccccugcagcuucggcgggguguccgugaucacgccgggcaccaacaccagcaaccaggucgccgugcuguaccaggacgugaacugcaccgagguccccguggccauccacgccgaccagcugacgcccaccuggcggguguacuccaccggcagcaacgucuuccagacccgcgccgggugccucaucggcgcggagcacgugaacaacuccuacgagugcgacauccccaucggggccggcaucugcgccagcuaccagacgcagaccaacuccccgcggcgcgcccggagcguggcgucccagagcaucaucgccuacaccaugucccugggcgccgagaacagcgucgccuacuccaacaacagcaucgccauccccaccaacuucacgaucuccgugaccaccgagauccugcccgugagcaugaccaagacgagcgucgacugcaccauguacaucugcggggacuccaccgagugcagcaaccuccugcugcaguacggcuccuucugcacccagcucaaccgcgcgcugacggggaucgccguggagcaggacaagaacacccaggagguguucgcccaggucaagcagaucuacaagacgcccccgaucaaggacuucggcggguucaacuucagccagauccugcccgaccccuccaagcccagcaagcgguccuucaucgaggaccuccuguucaacaaggugacccuggccgacgccggcuucaucaagcaguacggcgacugccucggggacaucgcggcccgcgaccugaucugcgcccagaaguucaacggccugaccgugcucccgccccugcugaccgacgagaugaucgcccaguacugcagcgcccuccuggcggggaccaucacguccggcuggaccuucggggccggcgccgcccugcagauccccuucgcgaugcagauggccuaccgguucaacggcaucggggucacccagaacgugcucuacgagaaccagaagcugaucgccaaccaguucaacagcgccaucggcaagauccaggacucccugagcuccaccgccagcgcgcucgggaagcugcaggacguggucaaccagaacgcccaggcccugaacacgcucgugaagcagcuguccagcaacuucggcgccaucuccagcgugcugaacgacauccucucccgccuggacaaggucgaggccgaggugcagaucgaccggcugaucaccgggcgccuccagagccugcagaccuacgugacccagcagcugauccgggcggccgagauccgcgccagcgccaaccucgccgcgaccaagauguccgagugcguccugggccagagcaagcggguggacuucugcggcaagggguaccaccugauguccuucccccagugcgccccgcacggcguggucuuccuccacgugacguacguccccgcccaggagaagaacuucaccaccgcccccgcgaucugccacgacgggaaggcccacuucccccgcgagggcguguucguguccaacgggacccacugguucgucacgcagcggaacuucuacgagccgcagaucaucaccaccgacaacaccuucgugagcggcaacugcgacguggucaucggcaucgugaacaacacgguguacgacccccugcagcccgagcuggacuccuucaaggaggagcucgacaaguacuucaagaaccacaccagccccgacgucgaccugggggacaucuccggcaucaacgccagcguggugaacauccagaaggagaucgaccgccugaacgaggucgccaagaaccucaacgagucccugaucgaccugcaggagcucgggaaguacgagcaguacaucaaguggccgugguacaucuggcugggcuucaucgccggccugaucgcgaucgugauggugaccaucaugcucugcugcaugaccagcugcugcuccugccugaaggggugcugcagcugcggcuccugcugcaaguucgacgaggacgacagcgagcccguccugaagggggugaagcuccacuacacgugaggacuaguuauaagacugacuagcccgaugggccucccaacgggcccuccuccccuccuugcaccgagauuaauaaaaaaaaaaaaaaaaaaaaaaaaaaaaaaaaaaaaaaaaaaaaaaaaaaaaaaaaaaaaaaaaugcaucccccccccccccccccccccccccccccccaaaggcucuuuucagagccaccagaauu

SEQ ID NO: 12824 - RNA, 2263 nt, Artificial Sequence; identical to SEQ ID NO: 166
  SARS-CoV-2/Wuhan/WIV05/2019__EPI_ISL_402128 spike protein mRNA gc (1-681) R9506, R9513

SEQ ID NO: 12825 - RNA, 4333 nt, Artificial Sequence
  SARS-CoV-2/Wuhan/WIV05/2019__EPI_ISL_402128 spike protein mRNA gc (1-1211) LumSynth construct
aggagaaagcuuaccauguucguguuccugguccuccugccccuggugagcucccagugcgugaaccucaccacccgcacgcagcugccgcccgccuacaccaacagcuucacccggggcgucuacuaccccgacaagguguuccgcuccagcgugcugcacuccacccaggaccucuuccugcccuucuucagcaacgucacgugguuccacgccauccacguguccgggaccaacggcaccaagcgguucgacaacccggugcugcccuucaacgacggggucuacuucgcgagcaccgagaaguccaacaucauccgcggcuggaucuucgggacgacccucgacagcaagacccagucccugcugaucgugaacaacgccaccaacguggucaucaaggugugcgaguuccaguucugcaacgaccccuuccucggcguguacuaccacaagaacaacaagagcuggauggaguccgaguuccgggucuacagcuccgccaacaacugcacguucgaguacgugagccagcccuuccugauggaccuggagggcaagcaggggaacuucaagaaccuccgcgaguucguguucaagaacaucgacggcuacuucaagaucuacuccaagcacaccccgaucaaccugguccgggaccugccccagggguucagcgcccucgagccccugguggaccugcccaucggcaucaacaucacccgcuuccagacccuccuggcccugcaccgguccuaccucacgccgggggacagcagcuccggcuggaccgcgggcgccgccgccuacuacgugggguaccugcagccccgcaccuuccugcucaaguacaacgagaacggcaccaucacggacgcggucgacugcgcccuggacccccugagcgagaccaagugcacccucaaguccuucaccguggagaaggggaucuaccagacgagcaacuuccgggugcagcccaccgaguccaucguccgcuucccgaacaucaccaaccugugccccuucggcgagguguucaacgccacccgguucgccagcgucuacgccuggaaccgcaagcggaucuccaacugcguggcggacuacagcgugcuguacaacuccgccagcuucuccacguucaagugcuacggcgucagccccaccaagcucaacgaccugugcuucaccaacguguacgccgacuccuucgugauccgcggggacgagguccggcagaucgcccccggccagaccgggaagaucgccgacuacaacuacaagcugccggacgacuucacgggcugcgugaucgcguggaacagcaacaaccucgacuccaaggucgggggcaacuacaacuaccuguaccgccuguuccgcaagagcaaccucaagcccuucgagcgggacaucuccaccgagaucuaccaggccggcagcacccccugcaacgggguggagggcuucaacugcuacuucccccugcaguccuacggguuccagccgaccaacggcgugggguaccagcccuaccggguggucgugcugagcuucgagcuccugcacgcccccgccacggugugcggccccaagaaguccaccaaccuggucaagaacaagugcgugaacuucaacuucaacggccucaccgggaccggcgugcugaccgagagcaacaagaaguuccugccguuccagcaguucgggcgcgacaucgccgacacgaccgacgcgguccgcgacccccagacccuggagauccucgacaucacccccugcagcuucggcgggguguccgugaucacgccgggcaccaacaccagcaaccaggucgccgugcuguaccaggacgugaacugcaccgagguccccguggccauccacgccgaccagcugacgcccaccuggcggguguacuccaccggcagcaacgucuuccagacccgcgccgggugccucaucggcgcggagcacgugaacaacuccuacgagugcgacauccccaucggggccggcaucugcgccagcuaccagacgcagaccaacuccccgcggcgcgcccggagcguggcgucccagagcaucaucgccuacaccaugucccugggcgccgagaacagcgucgccuacuccaacaacagcaucgccauccccaccaacuucacgaucuccgugaccaccgagauccugcccgugagcaugaccaagacgagcgucgacugcaccauguacaucugcggggacuccaccgagugcagcaaccuccugcugcaguacggcuccuucugcacccagcucaaccgcgcgcugacggggaucgccguggagcaggacaagaacacccaggagguguucgcccaggucaagcagaucuacaagacgcccccgaucaaggacuucggcggguucaacuucagccagauccugcccgaccccuccaagcccagcaagcgguccuucaucgaggaccuccuguucaacaaggugacccuggccgacgccggcuucaucaagcaguacggcgacugccucggggacaucgcggcccgcgaccugaucugcgcccagaaguucaacggccugaccgugcucccgccccugcugaccgacgagaugaucgcccaguacaccagcgcccuccuggcggggaccaucacguccggcuggaccuucggggccggcgccgcccugcagauccccuucgcgaugcagauggccuaccgguucaacggcaucggggucacccagaacgugcucuacgagaaccagaagcugaucgccaaccaguucaacagcgccaucggcaagauccaggacucccugagcuccaccgccagcgcgcucgggaagcugcaggacguggucaaccagaacgcccaggcccugaacacgcucgugaagcagcuguccagcaacuucggcgccaucuccagcgugcugaacgacauccucucccgccuggacaaggucgaggccgaggugcagaucgaccggcugaucaccgggcgccuccagagccugcagaccuacgugacccagcagcugauccgggcggccgagauccgcgccagcgccaaccucgccgcgaccaagauguccgagugcguccugggccagagcaagcggguggacuucugcggcaagggguaccaccugauguccuucccccagagcgccccgcacggcguggucuuccuccacgugacguacguccccgcccaggagaagaacuucaccaccgcccccgcgaucugccacgacgggaaggcccacuucccccgcgagggcguguucguguccaacgggacccacugguucgucacgcagcggaacuucuacgagccgcagaucaucaccaccgacaacaccuucgugagcggcaacugcgacguggucaucggcaucgugaacaacacgguguacgacccccugcagcccgagcuggacuccuucaaggaggagcucgacaaguacuucaagaaccacaccagccccgacgucgaccugggggacaucuccggcaucaacgccagcguggugaacauccagaaggagaucgaccgccugaacgaggucgccaagaaccucaacgagucccugaucgaccugcaggagcucgggaaguacgagcaguacaucaagggcggcgggagcgggggcgggcagaucuacgagggcaagcugaccgccgaggggcuccgcuucggcaucguggccagccgguucaaccacgcgcuggucgaccgccugguggagggggccaucgacgccaucgugcggcacggcgggcgcgaggaggacaucacccucguccgggugcccggcuccugggagaucccgguggccgccggcgagcuggcccgcaaggaggacaucgacgcggucaucgccaucggggugcugauccggggcgccacgccccacuucgacuacaucgccagcgagguguccaaggggcucgcggaccugagccuggagcuccgcaagcccaucaccuucggcgucaucaccgccgacacccuggagcaggccaucgagcgggccgggacgaagcacggcaacaagggcugggaggccgcgcuguccgccaucgagauggccaaccucuucaagagccugcgcugaggacuaguuauaagacugacuagcccgaugggccucccaacgggcccuccuccccuccuugcaccgagauuaauaaaaaaaaaaaaaaaaaaaaaaaaaaaaaaaaaaaaaaaaaaaaaaaaaaaaaaaaaaaaaaaaugcaucccccccccccccccccccccccccccccccaaaggcucuuuucagagccaccagaauu

SEQ ID NO: 12826 - RNA, 4333 nt, Artificial Sequence
  SARS-CoV-2/Wuhan/WIV05/2019__EPI_ISL_402128 spike protein mRNA gc (1-1211)(K986P_V987P) LumSynth construct
aggagaaagcuuaccauguucguguuccugguccuccugccccuggugagcucccagugcgugaaccucaccacccgcacgcagcugccgcccgccuacaccaacagcuucacccggggcgucuacuaccccgacaagguguuccgcuccagcgugcugcacuccacccaggaccucuuccugcccuucuucagcaacgucacgugguuccacgccauccacguguccgggaccaacggcaccaagcgguucgacaacccggugcugcccuucaacgacggggucuacuucgcgagcaccgagaaguccaacaucauccgcggcuggaucuucgggacgacccucgacagcaagacccagucccugcugaucgugaacaacgccaccaacguggucaucaaggugugcgaguuccaguucugcaacgaccccuuccucggcguguacuaccacaagaacaacaagagcuggauggaguccgaguuccgggucuacagcuccgccaacaacugcacguucgaguacgugagccagcccuuccugauggaccuggagggcaagcaggggaacuucaagaaccuccgcgaguucguguucaagaacaucgacggcuacuucaagaucuacuccaagcacaccccgaucaaccugguccgggaccugccccagggguucagcgcccucgagccccugguggaccugcccaucggcaucaacaucacccgcuuccagacccuccuggcccugcaccgguccuaccucacgccgggggacagcagcuccggcuggaccgcgggcgccgccgccuacuacgugggguaccugcagccccgcaccuuccugcucaaguacaacgagaacggcaccaucacggacgcggucgacugcgcccuggacccccugagcgagaccaagugcacccucaaguccuucaccguggagaaggggaucuaccagacgagcaacuuccgggugcagcccaccgaguccaucguccgcuucccgaacaucaccaaccugugccccuucggcgagguguucaacgccacccgguucgccagcgucuacgccuggaaccgcaagcggaucuccaacugcguggcggacuacagcgugcuguacaacuccgccagcuucuccacguucaagugcuacggcgucagccccaccaagcucaacgaccugugcuucaccaacguguacgccgacuccuucgugauccgcggggacgagguccggcagaucgcccccggccagaccgggaagaucgccgacuacaacuacaagcugccggacgacuucacgggcugcgugaucgcguggaacagcaacaaccucgacuccaaggucgggggcaacuacaacuaccuguaccgccuguuccgcaagagcaaccucaagcccuucgagcgggacaucuccaccgagaucuaccaggccggcagcacccccugcaacgggguggagggcuucaacugcuacuucccccugcaguccuacggguuccagccgaccaacggcgugggguaccagcccuaccggguggucgugcugagcuucgagcuccugcacgcccccgccacggugugcggccccaagaaguccaccaaccuggucaagaacaagugcgugaacuucaacuucaacggccucaccgggaccggcgugcugaccgagagcaacaagaaguuccugccguuccagcaguucgggcgcgacaucgccgacacgaccgacgcgguccgcgacccccagacccuggagauccucgacaucacccccugcagcuucggcgggguguccgugaucacgccgggcaccaacaccagcaaccaggucgccgugcuguaccaggacgugaacugcaccgagguccccguggccauccacgccgaccagcugacgcccaccuggcggguguacuccaccggcagcaacgucuuccagacccgcgccgggugccucaucggcgcggagcacgugaacaacuccuacgagugcgacauccccaucggggccggcaucugcgccagcuaccagacgcagaccaacuccccgcggcgcgcccggagcguggcgucccagagcaucaucgccuacaccaugucccugggcgccgagaacagcgucgccuacuccaacaacagcaucgccauccccaccaacuucacgaucuccgugaccaccgagauccugcccgugagcaugaccaagacgagcgucgacugcaccauguacaucugcggggacuccaccgagugcagcaaccuccugcugcaguacggcuccuucugcacccagcucaaccgcgcgcugacggggaucgccguggagcaggacaagaacacccaggagguguucgcccaggucaagcagaucuacaagacgcccccgaucaaggacuucggcggguucaacuucagccagauccugcccgaccccuccaagcccagcaagcgguccuucaucgaggaccuccuguucaacaaggugacccuggccgacgccggcuucaucaagcaguacggcgacugccucggggacaucgcggcccgcgaccugaucugcgcccagaaguucaacggccugaccgugcucccgccccugcugaccgacgagaugaucgcccaguacaccagcgcccuccuggcggggaccaucacguccggcuggaccuucggggccggcgccgcccugcagauccccuucgcgaugcagauggccuaccgguucaacggcaucggggucacccagaacgugcucuacgagaaccagaagcugaucgccaaccaguucaacagcgccaucggcaagauccaggacucccugagcuccaccgccagcgcgcucgggaagcugcaggacguggucaaccagaacgcccaggcccugaacacgcucgugaagcagcuguccagcaacuucggcgccaucuccagcgugcugaacgacauccucucccgccuggacccgcccgaggccgaggugcagaucgaccggcugaucaccgggcgccuccagagccugcagaccuacgugacccagcagcugauccgggcggccgagauccgcgccagcgccaaccucgccgcgaccaagauguccgagugcguccugggccagagcaagcggguggacuucugcggcaagggguaccaccugauguccuucccccagagcgccccgcacggcguggucuuccuccacgugacguacguccccgcccaggagaagaacuucaccaccgcccccgcgaucugccacgacgggaaggcccacuucccccgcgagggcguguucguguccaacgggacccacugguucgucacgcagcggaacuucuacgagccgcagaucaucaccaccgacaacaccuucgugagcggcaacugcgacguggucaucggcaucgugaacaacacgguguacgacccccugcagcccgagcuggacuccuucaaggaggagcucgacaaguacuucaagaaccacaccagccccgacgucgaccugggggacaucuccggcaucaacgccagcguggugaacauccagaaggagaucgaccgccugaacgaggucgccaagaaccucaacgagucccugaucgaccugcaggagcucgggaaguacgagcaguacaucaagggcggcgggagcgggggcgggcagaucuacgagggcaagcugaccgccgaggggcuccgcuucggcaucguggccagccgguucaaccacgcgcuggucgaccgccugguggagggggccaucgacgccaucgugcggcacggcgggcgcgaggaggacaucacccucguccgggugcccggcuccugggagaucccgguggccgccggcgagcuggcccgcaaggaggacaucgacgcggucaucgccaucggggugcugauccggggcgccacgccccacuucgacuacaucgccagcgagguguccaaggggcucgcggaccugagccuggagcuccgcaagcccaucaccuucggcgucaucaccgccgacacccuggagcaggccaucgagcgggccgggacgaagcacggcaacaagggcugggaggccgcgcuguccgccaucgagauggccaaccucuucaagagccugcgcugaggacuaguuauaagacugacuagcccgaugggccucccaacgggcccuccuccccuccuugcaccgagauuaauaaaaaaaaaaaaaaaaaaaaaaaaaaaaaaaaaaaaaaaaaaaaaaaaaaaaaaaaaaaaaaaaugcaucccccccccccccccccccccccccccccccaaaggcucuuuucagagccaccagaauu

SEQ ID NO: 12827 - RNA, 4333 nt, Artificial Sequence
  SARS-CoV-2/Wuhan/WIV05/2019__EPI_ISL_402128 spike protein mRNA gc (1-1211)(K986P_V987P_T887WN_A1020W) LumSynth construct
aggagaaagcuuaccauguucguguuccugguccuccugccccuggugagcucccagugcgugaaccucaccacccgcacgcagcugccgcccgccuacaccaacagcuucacccggggcgucuacuaccccgacaagguguuccgcuccagcgugcugcacuccacccaggaccucuuccugcccuucuucagcaacgucacgugguuccacgccauccacguguccgggaccaacggcaccaagcgguucgacaacccggugcugcccuucaacgacggggucuacuucgcgagcaccgagaaguccaacaucauccgcggcuggaucuucgggacgacccucgacagcaagacccagucccugcugaucgugaacaacgccaccaacguggucaucaaggugugcgaguuccaguucugcaacgaccccuuccucggcguguacuaccacaagaacaacaagagcuggauggaguccgaguuccgggucuacagcuccgccaacaacugcacguucgaguacgugagccagcccuuccugauggaccuggagggcaagcaggggaacuucaagaaccuccgcgaguucguguucaagaacaucgacggcuacuucaagaucuacuccaagcacaccccgaucaaccugguccgggaccugccccagggguucagcgcccucgagccccugguggaccugcccaucggcaucaacaucacccgcuuccagacccuccuggcccugcaccgguccuaccucacgccgggggacagcagcuccggcuggaccgcgggcgccgccgccuacuacgugggguaccugcagccccgcaccuuccugcucaaguacaacgagaacggcaccaucacggacgcggucgacugcgcccuggacccccugagcgagaccaagugcacccucaaguccuucaccguggagaaggggaucuaccagacgagcaacuuccgggugcagcccaccgaguccaucguccgcuucccgaacaucaccaaccugugccccuucggcgagguguucaacgccacccgguucgccagcgucuacgccuggaaccgcaagcggaucuccaacugcguggcggacuacagcgugcuguacaacuccgccagcuucuccacguucaagugcuacggcgucagccccaccaagcucaacgaccugugcuucaccaacguguacgccgacuccuucgugauccgcggggacgagguccggcagaucgcccccggccagaccgggaagaucgccgacuacaacuacaagcugccggacgacuucacgggcugcgugaucgcguggaacagcaacaaccucgacuccaaggucgggggcaacuacaacuaccuguaccgccuguuccgcaagagcaaccucaagcccuucgagcgggacaucuccaccgagaucuaccaggccggcagcacccccugcaacgggguggagggcuucaacugcuacuucccccugcaguccuacggguuccagccgaccaacggcgugggguaccagcccuaccggguggucgugcugagcuucgagcuccugcacgcccccgccacggugugcggccccaagaaguccaccaaccuggucaagaacaagugcgugaacuucaacuucaacggccucaccgggaccggcgugcugaccgagagcaacaagaaguuccugccguuccagcaguucgggcgcgacaucgccgacacgaccgacgcgguccgcgacccccagacccuggagauccucgacaucacccccugcagcuucggcgggguguccgugaucacgccgggcaccaacaccagcaaccaggucgccgugcuguaccaggacgugaacugcaccgagguccccguggccauccacgccgaccagcugacgcccaccuggcggguguacuccaccggcagcaacgucuuccagacccgcgccgggugccucaucggcgcggagcacgugaacaacuccuacgagugcgacauccccaucggggccggcaucugcgccagcuaccagacgcagaccaacuccccgcggcgcgcccggagcguggcgucccagagcaucaucgccuacaccaugucccugggcgccgagaacagcgucgccuacuccaacaacagcaucgccauccccaccaacuucacgaucuccgugaccaccgagauccugcccgugagcaugaccaagacgagcgucgacugcaccauguacaucugcggggacuccaccgagugcagcaaccuccugcugcaguacggcuccuucugcacccagcucaaccgcgcgcugacggggaucgccguggagcaggacaagaacacccaggagguguucgcccaggucaagcagaucuacaagacgcccccgaucaaggacuucggcggguucaacuucagccagauccugcccgaccccuccaagcccagcaagcgguccuucaucgaggaccuccuguucaacaaggugacccuggccgacgccggcuucaucaagcaguacggcgacugccucggggacaucgcggcccgcgaccugaucugcgcccagaaguucaacggccugaccgugcucccgccccugcugaccgacgagaugaucgcccaguacaccagcgcccuccuggcggggaccaucacguccggcuggugguucggggccggcgccgcccugcagauccccuucgcgaugcagauggccuaccgguucaacggcaucggggucacccagaacgugcucuacgagaaccagaagcugaucgccaaccaguucaacagcgccaucggcaagauccaggacucccugagcuccaccgccagcgcgcucgggaagcugcaggacguggucaaccagaacgcccaggcccugaacacgcucgugaagcagcuguccagcaacuucggcgccaucuccagcgugcugaacgacauccucucccgccuggacccgcccgaggccgaggugcagaucgaccggcugaucaccgggcgccuccagagccugcagaccuacgugacccagcagcugauccgggcggccgagauccgcuggagcgccaaccucgccgcgaccaagauguccgagugcguccugggccagagcaagcggguggacuucugcggcaagggguaccaccugauguccuucccccagagcgccccgcacggcguggucuuccuccacgugacguacguccccgcccaggagaagaacuucaccaccgcccccgcgaucugccacgacgggaaggcccacuucccccgcgagggcguguucguguccaacgggacccacugguucgucacgcagcggaacuucuacgagccgcagaucaucaccaccgacaacaccuucgugagcggcaacugcgacguggucaucggcaucgugaacaacacgguguacgacccccugcagcccgagcuggacuccuucaaggaggagcucgacaaguacuucaagaaccacaccagccccgacgucgaccugggggacaucuccggcaucaacgccagcguggugaacauccagaaggagaucgaccgccugaacgaggucgccaagaaccucaacgagucccugaucgaccugcaggagcucgggaaguacgagcaguacaucaagggcggcgggagcgggggcgggcagaucuacgagggcaagcugaccgccgaggggcuccgcuucggcaucguggccagccgguucaaccacgcgcuggucgaccgccugguggagggggccaucgacgccaucgugcggcacggcgggcgcgaggaggacaucacccucguccgggugcccggcuccugggagaucccgguggccgccggcgagcuggcccgcaaggaggacaucgacgcggucaucgccaucggggugcugauccggggcgccacgccccacuucgacuacaucgccagcgagguguccaaggggcucgcggaccugagccuggagcuccgcaagcccaucaccuucggcgucaucaccgccgacacccuggagcaggccaucgagcgggccgggacgaagcacggcaacaagggcugggaggccgcgcuguccgccaucgagauggccaaccucuucaagagccugcgcugaggacuaguuauaagacugacuagcccgaugggccucccaacgggcccuccuccccuccuugcaccgagauuaauaaaaaaaaaaaaaaaaaaaaaaaaaaaaaaaaaaaaaaaaaaaaaaaaaaaaaaaaaaaaaaaaugcaucccccccccccccccccccccccccccccccaaaggcucuuuucagagccaccagaauu

SEQ ID NO: 12828 - RNA, 4333 nt, Artificial Sequence
  SARS-CoV-2/Wuhan/WIV05/2019__EPI_ISL_402128 spike protein mRNA gc (1-1211)(K986P_V987P_P1069F) LumSynth construct
aggagaaagcuuaccauguucguguuccugguccuccugccccuggugagcucccagugcgugaaccucaccacccgcacgcagcugccgcccgccuacaccaacagcuucacccggggcgucuacuaccccgacaagguguuccgcuccagcgugcugcacuccacccaggaccucuuccugcccuucuucagcaacgucacgugguuccacgccauccacguguccgggaccaacggcaccaagcgguucgacaacccggugcugcccuucaacgacggggucuacuucgcgagcaccgagaaguccaacaucauccgcggcuggaucuucgggacgacccucgacagcaagacccagucccugcugaucgugaacaacgccaccaacguggucaucaaggugugcgaguuccaguucugcaacgaccccuuccucggcguguacuaccacaagaacaacaagagcuggauggaguccgaguuccgggucuacagcuccgccaacaacugcacguucgaguacgugagccagcccuuccugauggaccuggagggcaagcaggggaacuucaagaaccuccgcgaguucguguucaagaacaucgacggcuacuucaagaucuacuccaagcacaccccgaucaaccugguccgggaccugccccagggguucagcgcccucgagccccugguggaccugcccaucggcaucaacaucacccgcuuccagacccuccuggcccugcaccgguccuaccucacgccgggggacagcagcuccggcuggaccgcgggcgccgccgccuacuacgugggguaccugcagccccgcaccuuccugcucaaguacaacgagaacggcaccaucacggacgcggucgacugcgcccuggacccccugagcgagaccaagugcacccucaaguccuucaccguggagaaggggaucuaccagacgagcaacuuccgggugcagcccaccgaguccaucguccgcuucccgaacaucaccaaccugugccccuucggcgagguguucaacgccacccgguucgccagcgucuacgccuggaaccgcaagcggaucuccaacugcguggcggacuacagcgugcuguacaacuccgccagcuucuccacguucaagugcuacggcgucagccccaccaagcucaacgaccugugcuucaccaacguguacgccgacuccuucgugauccgcggggacgagguccggcagaucgcccccggccagaccgggaagaucgccgacuacaacuacaagcugccggacgacuucacgggcugcgugaucgcguggaacagcaacaaccucgacuccaaggucgggggcaacuacaacuaccuguaccgccuguuccgcaagagcaaccucaagcccuucgagcgggacaucuccaccgagaucuaccaggccggcagcacccccugcaacgggguggagggcuucaacugcuacuucccccugcaguccuacggguuccagccgaccaacggcgugggguaccagcccuaccggguggucgugcugagcuucgagcuccugcacgcccccgccacggugugcggccccaagaaguccaccaaccuggucaagaacaagugcgugaacuucaacuucaacggccucaccgggaccggcgugcugaccgagagcaacaagaaguuccugccguuccagcaguucgggcgcgacaucgccgacacgaccgacgcgguccgcgacccccagacccuggagauccucgacaucacccccugcagcuucggcgggguguccgugaucacgccgggcaccaacaccagcaaccaggucgccgugcuguaccaggacgugaacugcaccgagguccccguggccauccacgccgaccagcugacgcccaccuggcggguguacuccaccggcagcaacgucuuccagacccgcgccgggugccucaucggcgcggagcacgugaacaacuccuacgagugcgacauccccaucggggccggcaucugcgccagcuaccagacgcagaccaacuccccgcggcgcgcccggagcguggcgucccagagcaucaucgccuacaccaugucccugggcgccgagaacagcgucgccuacuccaacaacagcaucgccauccccaccaacuucacgaucuccgugaccaccgagauccugcccgugagcaugaccaagacgagcgucgacugcaccauguacaucugcggggacuccaccgagugcagcaaccuccugcugcaguacggcuccuucugcacccagcucaaccgcgcgcugacggggaucgccguggagcaggacaagaacacccaggagguguucgcccaggucaagcagaucuacaagacgcccccgaucaaggacuucggcggguucaacuucagccagauccugcccgaccccuccaagcccagcaagcgguccuucaucgaggaccuccuguucaacaaggugacccuggccgacgccggcuucaucaagcaguacggcgacugccucggggacaucgcggcccgcgaccugaucugcgcccagaaguucaacggccugaccgugcucccgccccugcugaccgacgagaugaucgcccaguacaccagcgcccuccuggcggggaccaucacguccggcuggaccuucggggccggcgccgcccugcagauccccuucgcgaugcagauggccuaccgguucaacggcaucggggucacccagaacgugcucuacgagaaccagaagcugaucgccaaccaguucaacagcgccaucggcaagauccaggacucccugagcuccaccgccagcgcgcucgggaagcugcaggacguggucaaccagaacgcccaggcccugaacacgcucgugaagcagcuguccagcaacuucggcgccaucuccagcgugcugaacgacauccucucccgccuggacccgcccgaggccgaggugcagaucgaccggcugaucaccgggcgccuccagagccugcagaccuacgugacccagcagcugauccgggcggccgagauccgcgccagcgccaaccucgccgcgaccaagauguccgagugcguccugggccagagcaagcggguggacuucugcggcaagggguaccaccugauguccuucccccagagcgccccgcacggcguggucuuccuccacgugacguacgucuucgcccaggagaagaacuucaccaccgcccccgcgaucugccacgacgggaaggcccacuucccccgcgagggcguguucguguccaacgggacccacugguucgucacgcagcggaacuucuacgagccgcagaucaucaccaccgacaacaccuucgugagcggcaacugcgacguggucaucggcaucgugaacaacacgguguacgacccccugcagcccgagcuggacuccuucaaggaggagcucgacaaguacuucaagaaccacaccagccccgacgucgaccugggggacaucuccggcaucaacgccagcguggugaacauccagaaggagaucgaccgccugaacgaggucgccaagaaccucaacgagucccugaucgaccugcaggagcucgggaaguacgagcaguacaucaagggcggcgggagcgggggcgggcagaucuacgagggcaagcugaccgccgaggggcuccgcuucggcaucguggccagccgguucaaccacgcgcuggucgaccgccugguggagggggccaucgacgccaucgugcggcacggcgggcgcgaggaggacaucacccucguccgggugcccggcuccugggagaucccgguggccgccggcgagcuggcccgcaaggaggacaucgacgcggucaucgccaucggggugcugauccggggcgccacgccccacuucgacuacaucgccagcgagguguccaaggggcucgcggaccugagccuggagcuccgcaagcccaucaccuucggcgucaucaccgccgacacccuggagcaggccaucgagcgggccgggacgaagcacggcaacaagggcugggaggccgcgcuguccgccaucgagauggccaaccucuucaagagccugcgcugaggacuaguuauaagacugacuagcccgaugggccucccaacgggcccuccuccccuccuugcaccgagauuaauaaaaaaaaaaaaaaaaaaaaaaaaaaaaaaaaaaaaaaaaaaaaaaaaaaaaaaaaaaaaaaaaugcaucccccccccccccccccccccccccccccccaaaggcucuuuucagagccaccagaauu

SEQ ID NO: 12829 - RNA, 4333 nt, Artificial Sequence
  SARS-CoV-2/Wuhan/WIV05/2019__EPI_ISL_402128 spike protein mRNA gc (1-1211)(K986P_V987P_ H1048Q_H1064N_ H1083N_H1101N) LumSynth construct
aggagaaagcuuaccauguucguguuccugguccuccugccccuggugagcucccagugcgugaaccucaccacccgcacgcagcugccgcccgccuacaccaacagcuucacccggggcgucuacuaccccgacaagguguuccgcuccagcgugcugcacuccacccaggaccucuuccugcccuucuucagcaacgucacgugguuccacgccauccacguguccgggaccaacggcaccaagcgguucgacaacccggugcugcccuucaacgacggggucuacuucgcgagcaccgagaaguccaacaucauccgcggcuggaucuucgggacgacccucgacagcaagacccagucccugcugaucgugaacaacgccaccaacguggucaucaaggugugcgaguuccaguucugcaacgaccccuuccucggcguguacuaccacaagaacaacaagagcuggauggaguccgaguuccgggucuacagcuccgccaacaacugcacguucgaguacgugagccagcccuuccugauggaccuggagggcaagcaggggaacuucaagaaccuccgcgaguucguguucaagaacaucgacggcuacuucaagaucuacuccaagcacaccccgaucaaccugguccgggaccugccccagggguucagcgcccucgagccccugguggaccugcccaucggcaucaacaucacccgcuuccagacccuccuggcccugcaccgguccuaccucacgccgggggacagcagcuccggcuggaccgcgggcgccgccgccuacuacgugggguaccugcagccccgcaccuuccugcucaaguacaacgagaacggcaccaucacggacgcggucgacugcgcccuggacccccugagcgagaccaagugcacccucaaguccuucaccguggagaaggggaucuaccagacgagcaacuuccgggugcagcccaccgaguccaucguccgcuucccgaacaucaccaaccugugccccuucggcgagguguucaacgccacccgguucgccagcgucuacgccuggaaccgcaagcggaucuccaacugcguggcggacuacagcgugcuguacaacuccgccagcuucuccacguucaagugcuacggcgucagccccaccaagcucaacgaccugugcuucaccaacguguacgccgacuccuucgugauccgcggggacgagguccggcagaucgcccccggccagaccgggaagaucgccgacuacaacuacaagcugccggacgacuucacgggcugcgugaucgcguggaacagcaacaaccucgacuccaaggucgggggcaacuacaacuaccuguaccgccuguuccgcaagagcaaccucaagcccuucgagcgggacaucuccaccgagaucuaccaggccggcagcacccccugcaacgggguggagggcuucaacugcuacuucccccugcaguccuacggguuccagccgaccaacggcgugggguaccagcccuaccggguggucgugcugagcuucgagcuccugcacgcccccgccacggugugcggccccaagaaguccaccaaccuggucaagaacaagugcgugaacuucaacuucaacggccucaccgggaccggcgugcugaccgagagcaacaagaaguuccugccguuccagcaguucgggcgcgacaucgccgacacgaccgacgcgguccgcgacccccagacccuggagauccucgacaucacccccugcagcuucggcgggguguccgugaucacgccgggcaccaacaccagcaaccaggucgccgugcuguaccaggacgugaacugcaccgagguccccguggccauccacgccgaccagcugacgcccaccuggcggguguacuccaccggcagcaacgucuuccagacccgcgccgggugccucaucggcgcggagcacgugaacaacuccuacgagugcgacauccccaucggggccggcaucugcgccagcuaccagacgcagaccaacuccccgcggcgcgcccggagcguggcgucccagagcaucaucgccuacaccaugucccugggcgccgagaacagcgucgccuacuccaacaacagcaucgccauccccaccaacuucacgaucuccgugaccaccgagauccugcccgugagcaugaccaagacgagcgucgacugcaccauguacaucugcggggacuccaccgagugcagcaaccuccugcugcaguacggcuccuucugcacccagcucaaccgcgcgcugacggggaucgccguggagcaggacaagaacacccaggagguguucgcccaggucaagcagaucuacaagacgcccccgaucaaggacuucggcggguucaacuucagccagauccugcccgaccccuccaagcccagcaagcgguccuucaucgaggaccuccuguucaacaaggugacccuggccgacgccggcuucaucaagcaguacggcgacugccucggggacaucgcggcccgcgaccugaucugcgcccagaaguucaacggccugaccgugcucccgccccugcugaccgacgagaugaucgcccaguacaccagcgcccuccuggcggggaccaucacguccggcuggaccuucggggccggcgccgcccugcagauccccuucgcgaugcagauggccuaccgguucaacggcaucggggucacccagaacgugcucuacgagaaccagaagcugaucgccaaccaguucaacagcgccaucggcaagauccaggacucccugagcuccaccgccagcgcgcucgggaagcugcaggacguggucaaccagaacgcccaggcccugaacacgcucgugaagcagcuguccagcaacuucggcgccaucuccagcgugcugaacgacauccucucccgccuggacccgcccgaggccgaggugcagaucgaccggcugaucaccgggcgccuccagagccugcagaccuacgugacccagcagcugauccgggcggccgagauccgcgccagcgccaaccucgccgcgaccaagauguccgagugcguccugggccagagcaagcggguggacuucugcggcaagggguaccagcugauguccuucccccagagcgccccgcacggcguggucuuccucaacgugacguacguccccgcccaggagaagaacuucaccaccgcccccgcgaucugcaacgacgggaaggcccacuucccccgcgagggcguguucguguccaacgggaccaacugguucgucacgcagcggaacuucuacgagccgcagaucaucaccaccgacaacaccuucgugagcggcaacugcgacguggucaucggcaucgugaacaacacgguguacgacccccugcagcccgagcuggacuccuucaaggaggagcucgacaaguacuucaagaaccacaccagccccgacgucgaccugggggacaucuccggcaucaacgccagcguggugaacauccagaaggagaucgaccgccugaacgaggucgccaagaaccucaacgagucccugaucgaccugcaggagcucgggaaguacgagcaguacaucaagggcggcgggagcgggggcgggcagaucuacgagggcaagcugaccgccgaggggcuccgcuucggcaucguggccagccgguucaaccacgcgcuggucgaccgccugguggagggggccaucgacgccaucgugcggcacggcgggcgcgaggaggacaucacccucguccgggugcccggcuccugggagaucccgguggccgccggcgagcuggcccgcaaggaggacaucgacgcggucaucgccaucggggugcugauccggggcgccacgccccacuucgacuacaucgccagcgagguguccaaggggcucgcggaccugagccuggagcuccgcaagcccaucaccuucggcgucaucaccgccgacacccuggagcaggccaucgagcgggccgggacgaagcacggcaacaagggcugggaggccgcgcuguccgccaucgagauggccaaccucuucaagagccugcgcugaggacuaguuauaagacugacuagcccgaugggccucccaacgggcccuccuccccuccuugcaccgagauuaauaaaaaaaaaaaaaaaaaaaaaaaaaaaaaaaaaaaaaaaaaaaaaaaaaaaaaaaaaaaaaaaaugcaucccccccccccccccccccccccccccccccaaaggcucuuuucagagccaccagaauu

SEQ ID NO: 12830 - RNA, 4333 nt, Artificial Sequence
  SARS-CoV-2/Wuhan/WIV05/2019__EPI_ISL_402128 spike protein mRNA gc (1-1211)(I712C_T1077C) LumSynth construct
aggagaaagcuuaccauguucguguuccugguccuccugccccuggugagcucccagugcgugaaccucaccacccgcacgcagcugccgcccgccuacaccaacagcuucacccggggcgucuacuaccccgacaagguguuccgcuccagcgugcugcacuccacccaggaccucuuccugcccuucuucagcaacgucacgugguuccacgccauccacguguccgggaccaacggcaccaagcgguucgacaacccggugcugcccuucaacgacggggucuacuucgcgagcaccgagaaguccaacaucauccgcggcuggaucuucgggacgacccucgacagcaagacccagucccugcugaucgugaacaacgccaccaacguggucaucaaggugugcgaguuccaguucugcaacgaccccuuccucggcguguacuaccacaagaacaacaagagcuggauggaguccgaguuccgggucuacagcuccgccaacaacugcacguucgaguacgugagccagcccuuccugauggaccuggagggcaagcaggggaacuucaagaaccuccgcgaguucguguucaagaacaucgacggcuacuucaagaucuacuccaagcacaccccgaucaaccugguccgggaccugccccagggguucagcgcccucgagccccugguggaccugcccaucggcaucaacaucacccgcuuccagacccuccuggcccugcaccgguccuaccucacgccgggggacagcagcuccggcuggaccgcgggcgccgccgccuacuacgugggguaccugcagccccgcaccuuccugcucaaguacaacgagaacggcaccaucacggacgcggucgacugcgcccuggacccccugagcgagaccaagugcacccucaaguccuucaccguggagaaggggaucuaccagacgagcaacuuccgggugcagcccaccgaguccaucguccgcuucccgaacaucaccaaccugugccccuucggcgagguguucaacgccacccgguucgccagcgucuacgccuggaaccgcaagcggaucuccaacugcguggcggacuacagcgugcuguacaacuccgccagcuucuccacguucaagugcuacggcgucagccccaccaagcucaacgaccugugcuucaccaacguguacgccgacuccuucgugauccgcggggacgagguccggcagaucgcccccggccagaccgggaagaucgccgacuacaacuacaagcugccggacgacuucacgggcugcgugaucgcguggaacagcaacaaccucgacuccaaggucgggggcaacuacaacuaccuguaccgccuguuccgcaagagcaaccucaagcccuucgagcgggacaucuccaccgagaucuaccaggccggcagcacccccugcaacgggguggagggcuucaacugcuacuucccccugcaguccuacggguuccagccgaccaacggcgugggguaccagcccuaccggguggucgugcugagcuucgagcuccugcacgcccccgccacggugugcggccccaagaaguccaccaaccuggucaagaacaagugcgugaacuucaacuucaacggccucaccgggaccggcgugcugaccgagagcaacaagaaguuccugccguuccagcaguucgggcgcgacaucgccgacacgaccgacgcgguccgcgacccccagacccuggagauccucgacaucacccccugcagcuucggcgggguguccgugaucacgccgggcaccaacaccagcaaccaggucgccgugcuguaccaggacgugaacugcaccgagguccccguggccauccacgccgaccagcugacgcccaccuggcggguguacuccaccggcagcaacgucuuccagacccgcgccgggugccucaucggcgcggagcacgugaacaacuccuacgagugcgacauccccaucggggccggcaucugcgccagcuaccagacgcagaccaacuccccgcggcgcgcccggagcguggcgucccagagcaucaucgccuacaccaugucccugggcgccgagaacagcgucgccuacuccaacaacagcugcgccauccccaccaacuucacgaucuccgugaccaccgagauccugcccgugagcaugaccaagacgagcgucgacugcaccauguacaucugcggggacuccaccgagugcagcaaccuccugcugcaguacggcuccuucugcacccagcucaaccgcgcgcugacggggaucgccguggagcaggacaagaacacccaggagguguucgcccaggucaagcagaucuacaagacgcccccgaucaaggacuucggcggguucaacuucagccagauccugcccgaccccuccaagcccagcaagcgguccuucaucgaggaccuccuguucaacaaggugacccuggccgacgccggcuucaucaagcaguacggcgacugccucggggacaucgcggcccgcgaccugaucugcgcccagaaguucaacggccugaccgugcucccgccccugcugaccgacgagaugaucgcccaguacaccagcgcccuccuggcggggaccaucacguccggcuggaccuucggggccggcgccgcccugcagauccccuucgcgaugcagauggccuaccgguucaacggcaucggggucacccagaacgugcucuacgagaaccagaagcugaucgccaaccaguucaacagcgccaucggcaagauccaggacucccugagcuccaccgccagcgcgcucgggaagcugcaggacguggucaaccagaacgcccaggcccugaacacgcucgugaagcagcuguccagcaacuucggcgccaucuccagcgugcugaacgacauccucucccgccuggacaaggucgaggccgaggugcagaucgaccggcugaucaccgggcgccuccagagccugcagaccuacgugacccagcagcugauccgggcggccgagauccgcgccagcgccaaccucgccgcgaccaagauguccgagugcguccugggccagagcaagcggguggacuucugcggcaagggguaccaccugauguccuucccccagagcgccccgcacggcguggucuuccuccacgugacguacguccccgcccaggagaagaacuucaccugcgcccccgcgaucugccacgacgggaaggcccacuucccccgcgagggcguguucguguccaacgggacccacugguucgucacgcagcggaacuucuacgagccgcagaucaucaccaccgacaacaccuucgugagcggcaacugcgacguggucaucggcaucgugaacaacacgguguacgacccccugcagcccgagcuggacuccuucaaggaggagcucgacaaguacuucaagaaccacaccagccccgacgucgaccugggggacaucuccggcaucaacgccagcguggugaacauccagaaggagaucgaccgccugaacgaggucgccaagaaccucaacgagucccugaucgaccugcaggagcucgggaaguacgagcaguacaucaagggcggcgggagcgggggcgggcagaucuacgagggcaagcugaccgccgaggggcuccgcuucggcaucguggccagccgguucaaccacgcgcuggucgaccgccugguggagggggccaucgacgccaucgugcggcacggcgggcgcgaggaggacaucacccucguccgggugcccggcuccugggagaucccgguggccgccggcgagcuggcccgcaaggaggacaucgacgcggucaucgccaucggggugcugauccggggcgccacgccccacuucgacuacaucgccagcgagguguccaaggggcucgcggaccugagccuggagcuccgcaagcccaucaccuucggcgucaucaccgccgacacccuggagcaggccaucgagcgggccgggacgaagcacggcaacaagggcugggaggccgcgcuguccgccaucgagauggccaaccucuucaagagccugcgcugaggacuaguuauaagacugacuagcccgaugggccucccaacgggcccuccuccccuccuugcaccgagauuaauaaaaaaaaaaaaaaaaaaaaaaaaaaaaaaaaaaaaaaaaaaaaaaaaaaaaaaaaaaaaaaaaugcaucccccccccccccccccccccccccccccccaaaggcucuuuucagagccaccagaauu

SEQ ID NO: 12831 - RNA, 4333 nt, Artificial Sequence
  SARS-CoV-2/Wuhan/WIV05/2019__EPI_ISL_402128 spike protein mRNA gc (1-1211)(I714C_Y1110C) LumSynth construct
aggagaaagcuuaccauguucguguuccugguccuccugccccuggugagcucccagugcgugaaccucaccacccgcacgcagcugccgcccgccuacaccaacagcuucacccggggcgucuacuaccccgacaagguguuccgcuccagcgugcugcacuccacccaggaccucuuccugcccuucuucagcaacgucacgugguuccacgccauccacguguccgggaccaacggcaccaagcgguucgacaacccggugcugcccuucaacgacggggucuacuucgcgagcaccgagaaguccaacaucauccgcggcuggaucuucgggacgacccucgacagcaagacccagucccugcugaucgugaacaacgccaccaacguggucaucaaggugugcgaguuccaguucugcaacgaccccuuccucggcguguacuaccacaagaacaacaagagcuggauggaguccgaguuccgggucuacagcuccgccaacaacugcacguucgaguacgugagccagcccuuccugauggaccuggagggcaagcaggggaacuucaagaaccuccgcgaguucguguucaagaacaucgacggcuacuucaagaucuacuccaagcacaccccgaucaaccugguccgggaccugccccagggguucagcgcccucgagccccugguggaccugcccaucggcaucaacaucacccgcuuccagacccuccuggcccugcaccgguccuaccucacgccgggggacagcagcuccggcuggaccgcgggcgccgccgccuacuacgugggguaccugcagccccgcaccuuccugcucaaguacaacgagaacggcaccaucacggacgcggucgacugcgcccuggacccccugagcgagaccaagugcacccucaaguccuucaccguggagaaggggaucuaccagacgagcaacuuccgggugcagcccaccgaguccaucguccgcuucccgaacaucaccaaccugugccccuucggcgagguguucaacgccacccgguucgccagcgucuacgccuggaaccgcaagcggaucuccaacugcguggcggacuacagcgugcuguacaacuccgccagcuucuccacguucaagugcuacggcgucagccccaccaagcucaacgaccugugcuucaccaacguguacgccgacuccuucgugauccgcggggacgagguccggcagaucgcccccggccagaccgggaagaucgccgacuacaacuacaagcugccggacgacuucacgggcugcgugaucgcguggaacagcaacaaccucgacuccaaggucgggggcaacuacaacuaccuguaccgccuguuccgcaagagcaaccucaagcccuucgagcgggacaucuccaccgagaucuaccaggccggcagcacccccugcaacgggguggagggcuucaacugcuacuucccccugcaguccuacggguuccagccgaccaacggcgugggguaccagcccuaccggguggucgugcugagcuucgagcuccugcacgcccccgccacggugugcggccccaagaaguccaccaaccuggucaagaacaagugcgugaacuucaacuucaacggccucaccgggaccggcgugcugaccgagagcaacaagaaguuccugccguuccagcaguucgggcgcgacaucgccgacacgaccgacgcgguccgcgacccccagacccuggagauccucgacaucacccccugcagcuucggcgggguguccgugaucacgccgggcaccaacaccagcaaccaggucgccgugcuguaccaggacgugaacugcaccgagguccccguggccauccacgccgaccagcugacgcccaccuggcggguguacuccaccggcagcaacgucuuccagacccgcgccgggugccucaucggcgcggagcacgugaacaacuccuacgagugcgacauccccaucggggccggcaucugcgccagcuaccagacgcagaccaacuccccgcggcgcgcccggagcguggcgucccagagcaucaucgccuacaccaugucccugggcgccgagaacagcgucgccuacuccaacaacagcaucgccugccccaccaacuucacgaucuccgugaccaccgagauccugcccgugagcaugaccaagacgagcgucgacugcaccauguacaucugcggggacuccaccgagugcagcaaccuccugcugcaguacggcuccuucugcacccagcucaaccgcgcgcugacggggaucgccguggagcaggacaagaacacccaggagguguucgcccaggucaagcagaucuacaagacgcccccgaucaaggacuucggcggguucaacuucagccagauccugcccgaccccuccaagcccagcaagcgguccuucaucgaggaccuccuguucaacaaggugacccuggccgacgccggcuucaucaagcaguacggcgacugccucggggacaucgcggcccgcgaccugaucugcgcccagaaguucaacggccugaccgugcucccgccccugcugaccgacgagaugaucgcccaguacaccagcgcccuccuggcggggaccaucacguccggcuggaccuucggggccggcgccgcccugcagauccccuucgcgaugcagauggccuaccgguucaacggcaucggggucacccagaacgugcucuacgagaaccagaagcugaucgccaaccaguucaacagcgccaucggcaagauccaggacucccugagcuccaccgccagcgcgcucgggaagcugcaggacguggucaaccagaacgcccaggcccugaacacgcucgugaagcagcuguccagcaacuucggcgccaucuccagcgugcugaacgacauccucucccgccuggacaaggucgaggccgaggugcagaucgaccggcugaucaccgggcgccuccagagccugcagaccuacgugacccagcagcugauccgggcggccgagauccgcgccagcgccaaccucgccgcgaccaagauguccgagugcguccugggccagagcaagcggguggacuucugcggcaagggguaccaccugauguccuucccccagagcgccccgcacggcguggucuuccuccacgugacguacguccccgcccaggagaagaacuucaccaccgcccccgcgaucugccacgacgggaaggcccacuucccccgcgagggcguguucguguccaacgggacccacugguucgucacgcagcggaacuucugcgagccgcagaucaucaccaccgacaacaccuucgugagcggcaacugcgacguggucaucggcaucgugaacaacacgguguacgacccccugcagcccgagcuggacuccuucaaggaggagcucgacaaguacuucaagaaccacaccagccccgacgucgaccugggggacaucuccggcaucaacgccagcguggugaacauccagaaggagaucgaccgccugaacgaggucgccaagaaccucaacgagucccugaucgaccugcaggagcucgggaaguacgagcaguacaucaagggcggcgggagcgggggcgggcagaucuacgagggcaagcugaccgccgaggggcuccgcuucggcaucguggccagccgguucaaccacgcgcuggucgaccgccugguggagggggccaucgacgccaucgugcggcacggcgggcgcgaggaggacaucacccucguccgggugcccggcuccugggagaucccgguggccgccggcgagcuggcccgcaaggaggacaucgacgcggucaucgccaucggggugcugauccggggcgccacgccccacuucgacuacaucgccagcgagguguccaaggggcucgcggaccugagccuggagcuccgcaagcccaucaccuucggcgucaucaccgccgacacccuggagcaggccaucgagcgggccgggacgaagcacggcaacaagggcugggaggccgcgcuguccgccaucgagauggccaaccucuucaagagccugcgcugaggacuaguuauaagacugacuagcccgaugggccucccaacgggcccuccuccccuccuugcaccgagauuaauaaaaaaaaaaaaaaaaaaaaaaaaaaaaaaaaaaaaaaaaaaaaaaaaaaaaaaaaaaaaaaaaugcaucccccccccccccccccccccccccccccccaaaggcucuuuucagagccaccagaauu

SEQ ID NO: 12832 - RNA, 4333 nt, Artificial Sequence
  SARS-CoV-2/Wuhan/WIV05/2019__EPI_ISL_402128 spike protein mRNA gc (1-1211)(P715C_P1069C) LumSynth construct
aggagaaagcuuaccauguucguguuccugguccuccugccccuggugagcucccagugcgugaaccucaccacccgcacgcagcugccgcccgccuacaccaacagcuucacccggggcgucuacuaccccgacaagguguuccgcuccagcgugcugcacuccacccaggaccucuuccugcccuucuucagcaacgucacgugguuccacgccauccacguguccgggaccaacggcaccaagcgguucgacaacccggugcugcccuucaacgacggggucuacuucgcgagcaccgagaaguccaacaucauccgcggcuggaucuucgggacgacccucgacagcaagacccagucccugcugaucgugaacaacgccaccaacguggucaucaaggugugcgaguuccaguucugcaacgaccccuuccucggcguguacuaccacaagaacaacaagagcuggauggaguccgaguuccgggucuacagcuccgccaacaacugcacguucgaguacgugagccagcccuuccugauggaccuggagggcaagcaggggaacuucaagaaccuccgcgaguucguguucaagaacaucgacggcuacuucaagaucuacuccaagcacaccccgaucaaccugguccgggaccugccccagggguucagcgcccucgagccccugguggaccugcccaucggcaucaacaucacccgcuuccagacccuccuggcccugcaccgguccuaccucacgccgggggacagcagcuccggcuggaccgcgggcgccgccgccuacuacgugggguaccugcagccccgcaccuuccugcucaaguacaacgagaacggcaccaucacggacgcggucgacugcgcccuggacccccugagcgagaccaagugcacccucaaguccuucaccguggagaaggggaucuaccagacgagcaacuuccgggugcagcccaccgaguccaucguccgcuucccgaacaucaccaaccugugccccuucggcgagguguucaacgccacccgguucgccagcgucuacgccuggaaccgcaagcggaucuccaacugcguggcggacuacagcgugcuguacaacuccgccagcuucuccacguucaagugcuacggcgucagccccaccaagcucaacgaccugugcuucaccaacguguacgccgacuccuucgugauccgcggggacgagguccggcagaucgcccccggccagaccgggaagaucgccgacuacaacuacaagcugccggacgacuucacgggcugcgugaucgcguggaacagcaacaaccucgacuccaaggucgggggcaacuacaacuaccuguaccgccuguuccgcaagagcaaccucaagcccuucgagcgggacaucuccaccgagaucuaccaggccggcagcacccccugcaacgggguggagggcuucaacugcuacuucccccugcaguccuacggguuccagccgaccaacggcgugggguaccagcccuaccggguggucgugcugagcuucgagcuccugcacgcccccgccacggugugcggccccaagaaguccaccaaccuggucaagaacaagugcgugaacuucaacuucaacggccucaccgggaccggcgugcugaccgagagcaacaagaaguuccugccguuccagcaguucgggcgcgacaucgccgacacgaccgacgcgguccgcgacccccagacccuggagauccucgacaucacccccugcagcuucggcgggguguccgugaucacgccgggcaccaacaccagcaaccaggucgccgugcuguaccaggacgugaacugcaccgagguccccguggccauccacgccgaccagcugacgcccaccuggcggguguacuccaccggcagcaacgucuuccagacccgcgccgggugccucaucggcgcggagcacgugaacaacuccuacgagugcgacauccccaucggggccggcaucugcgccagcuaccagacgcagaccaacuccccgcggcgcgcccggagcguggcgucccagagcaucaucgccuacaccaugucccugggcgccgagaacagcgucgccuacuccaacaacagcaucgccaucugcaccaacuucacgaucuccgugaccaccgagauccugcccgugagcaugaccaagacgagcgucgacugcaccauguacaucugcggggacuccaccgagugcagcaaccuccugcugcaguacggcuccuucugcacccagcucaaccgcgcgcugacggggaucgccguggagcaggacaagaacacccaggagguguucgcccaggucaagcagaucuacaagacgcccccgaucaaggacuucggcggguucaacuucagccagauccugcccgaccccuccaagcccagcaagcgguccuucaucgaggaccuccuguucaacaaggugacccuggccgacgccggcuucaucaagcaguacggcgacugccucggggacaucgcggcccgcgaccugaucugcgcccagaaguucaacggccugaccgugcucccgccccugcugaccgacgagaugaucgcccaguacaccagcgcccuccuggcggggaccaucacguccggcuggaccuucggggccggcgccgcccugcagauccccuucgcgaugcagauggccuaccgguucaacggcaucggggucacccagaacgugcucuacgagaaccagaagcugaucgccaaccaguucaacagcgccaucggcaagauccaggacucccugagcuccaccgccagcgcgcucgggaagcugcaggacguggucaaccagaacgcccaggcccugaacacgcucgugaagcagcuguccagcaacuucggcgccaucuccagcgugcugaacgacauccucucccgccuggacaaggucgaggccgaggugcagaucgaccggcugaucaccgggcgccuccagagccugcagaccuacgugacccagcagcugauccgggcggccgagauccgcgccagcgccaaccucgccgcgaccaagauguccgagugcguccugggccagagcaagcggguggacuucugcggcaagggguaccaccugauguccuucccccagagcgccccgcacggcguggucuuccuccacgugacguacgucugcgcccaggagaagaacuucaccaccgcccccgcgaucugccacgacgggaaggcccacuucccccgcgagggcguguucguguccaacgggacccacugguucgucacgcagcggaacuucuacgagccgcagaucaucaccaccgacaacaccuucgugagcggcaacugcgacguggucaucggcaucgugaacaacacgguguacgacccccugcagcccgagcuggacuccuucaaggaggagcucgacaaguacuucaagaaccacaccagccccgacgucgaccugggggacaucuccggcaucaacgccagcguggugaacauccagaaggagaucgaccgccugaacgaggucgccaagaaccucaacgagucccugaucgaccugcaggagcucgggaaguacgagcaguacaucaagggcggcgggagcgggggcgggcagaucuacgagggcaagcugaccgccgaggggcuccgcuucggcaucguggccagccgguucaaccacgcgcuggucgaccgccugguggagggggccaucgacgccaucgugcggcacggcgggcgcgaggaggacaucacccucguccgggugcccggcuccugggagaucccgguggccgccggcgagcuggcccgcaaggaggacaucgacgcggucaucgccaucggggugcugauccggggcgccacgccccacuucgacuacaucgccagcgagguguccaaggggcucgcggaccugagccuggagcuccgcaagcccaucaccuucggcgucaucaccgccgacacccuggagcaggccaucgagcgggccgggacgaagcacggcaacaagggcugggaggccgcgcuguccgccaucgagauggccaaccucuucaagagccugcgcugaggacuaguuauaagacugacuagcccgaugggccucccaacgggcccuccuccccuccuugcaccgagauuaauaaaaaaaaaaaaaaaaaaaaaaaaaaaaaaaaaaaaaaaaaaaaaaaaaaaaaaaaaaaaaaaaugcaucccccccccccccccccccccccccccccccaaaggcucuuuucagagccaccagaauu

SEQ ID NO: 12833 - RNA, 4333 nt, Artificial Sequence
  SARS-CoV-2/Wuhan/WIV05/2019__EPI_ISL_402128 spike protein mRNA gc (1-1211)(G889C_L1034C) LumSynth construct
aggagaaagcuuaccauguucguguuccugguccuccugccccuggugagcucccagugcgugaaccucaccacccgcacgcagcugccgcccgccuacaccaacagcuucacccggggcgucuacuaccccgacaagguguuccgcuccagcgugcugcacuccacccaggaccucuuccugcccuucuucagcaacgucacgugguuccacgccauccacguguccgggaccaacggcaccaagcgguucgacaacccggugcugcccuucaacgacggggucuacuucgcgagcaccgagaaguccaacaucauccgcggcuggaucuucgggacgacccucgacagcaagacccagucccugcugaucgugaacaacgccaccaacguggucaucaaggugugcgaguuccaguucugcaacgaccccuuccucggcguguacuaccacaagaacaacaagagcuggauggaguccgaguuccgggucuacagcuccgccaacaacugcacguucgaguacgugagccagcccuuccugauggaccuggagggcaagcaggggaacuucaagaaccuccgcgaguucguguucaagaacaucgacggcuacuucaagaucuacuccaagcacaccccgaucaaccugguccgggaccugccccagggguucagcgcccucgagccccugguggaccugcccaucggcaucaacaucacccgcuuccagacccuccuggcccugcaccgguccuaccucacgccgggggacagcagcuccggcuggaccgcgggcgccgccgccuacuacgugggguaccugcagccccgcaccuuccugcucaaguacaacgagaacggcaccaucacggacgcggucgacugcgcccuggacccccugagcgagaccaagugcacccucaaguccuucaccguggagaaggggaucuaccagacgagcaacuuccgggugcagcccaccgaguccaucguccgcuucccgaacaucaccaaccugugccccuucggcgagguguucaacgccacccgguucgccagcgucuacgccuggaaccgcaagcggaucuccaacugcguggcggacuacagcgugcuguacaacuccgccagcuucuccacguucaagugcuacggcgucagccccaccaagcucaacgaccugugcuucaccaacguguacgccgacuccuucgugauccgcggggacgagguccggcagaucgcccccggccagaccgggaagaucgccgacuacaacuacaagcugccggacgacuucacgggcugcgugaucgcguggaacagcaacaaccucgacuccaaggucgggggcaacuacaacuaccuguaccgccuguuccgcaagagcaaccucaagcccuucgagcgggacaucuccaccgagaucuaccaggccggcagcacccccugcaacgggguggagggcuucaacugcuacuucccccugcaguccuacggguuccagccgaccaacggcgugggguaccagcccuaccggguggucgugcugagcuucgagcuccugcacgcccccgccacggugugcggccccaagaaguccaccaaccuggucaagaacaagugcgugaacuucaacuucaacggccucaccgggaccggcgugcugaccgagagcaacaagaaguuccugccguuccagcaguucgggcgcgacaucgccgacacgaccgacgcgguccgcgacccccagacccuggagauccucgacaucacccccugcagcuucggcgggguguccgugaucacgccgggcaccaacaccagcaaccaggucgccgugcuguaccaggacgugaacugcaccgagguccccguggccauccacgccgaccagcugacgcccaccuggcggguguacuccaccggcagcaacgucuuccagacccgcgccgggugccucaucggcgcggagcacgugaacaacuccuacgagugcgacauccccaucggggccggcaucugcgccagcuaccagacgcagaccaacuccccgcggcgcgcccggagcguggcgucccagagcaucaucgccuacaccaugucccugggcgccgagaacagcgucgccuacuccaacaacagcaucgccauccccaccaacuucacgaucuccgugaccaccgagauccugcccgugagcaugaccaagacgagcgucgacugcaccauguacaucugcggggacuccaccgagugcagcaaccuccugcugcaguacggcuccuucugcacccagcucaaccgcgcgcugacggggaucgccguggagcaggacaagaacacccaggagguguucgcccaggucaagcagaucuacaagacgcccccgaucaaggacuucggcggguucaacuucagccagauccugcccgaccccuccaagcccagcaagcgguccuucaucgaggaccuccuguucaacaaggugacccuggccgacgccggcuucaucaagcaguacggcgacugccucggggacaucgcggcccgcgaccugaucugcgcccagaaguucaacggccugaccgugcucccgccccugcugaccgacgagaugaucgcccaguacaccagcgcccuccuggcggggaccaucacguccggcuggaccuucugcgccggcgccgcccugcagauccccuucgcgaugcagauggccuaccgguucaacggcaucggggucacccagaacgugcucuacgagaaccagaagcugaucgccaaccaguucaacagcgccaucggcaagauccaggacucccugagcuccaccgccagcgcgcucgggaagcugcaggacguggucaaccagaacgcccaggcccugaacacgcucgugaagcagcuguccagcaacuucggcgccaucuccagcgugcugaacgacauccucucccgccuggacaaggucgaggccgaggugcagaucgaccggcugaucaccgggcgccuccagagccugcagaccuacgugacccagcagcugauccgggcggccgagauccgcgccagcgccaaccucgccgcgaccaagauguccgagugcgucugcggccagagcaagcggguggacuucugcggcaagggguaccaccugauguccuucccccagagcgccccgcacggcguggucuuccuccacgugacguacguccccgcccaggagaagaacuucaccaccgcccccgcgaucugccacgacgggaaggcccacuucccccgcgagggcguguucguguccaacgggacccacugguucgucacgcagcggaacuucuacgagccgcagaucaucaccaccgacaacaccuucgugagcggcaacugcgacguggucaucggcaucgugaacaacacgguguacgacccccugcagcccgagcuggacuccuucaaggaggagcucgacaaguacuucaagaaccacaccagccccgacgucgaccugggggacaucuccggcaucaacgccagcguggugaacauccagaaggagaucgaccgccugaacgaggucgccaagaaccucaacgagucccugaucgaccugcaggagcucgggaaguacgagcaguacaucaagggcggcgggagcgggggcgggcagaucuacgagggcaagcugaccgccgaggggcuccgcuucggcaucguggccagccgguucaaccacgcgcuggucgaccgccugguggagggggccaucgacgccaucgugcggcacggcgggcgcgaggaggacaucacccucguccgggugcccggcuccugggagaucccgguggccgccggcgagcuggcccgcaaggaggacaucgacgcggucaucgccaucggggugcugauccggggcgccacgccccacuucgacuacaucgccagcgagguguccaaggggcucgcggaccugagccuggagcuccgcaagcccaucaccuucggcgucaucaccgccgacacccuggagcaggccaucgagcgggccgggacgaagcacggcaacaagggcugggaggccgcgcuguccgccaucgagauggccaaccucuucaagagccugcgcugaggacuaguuauaagacugacuagcccgaugggccucccaacgggcccuccuccccuccuugcaccgagauuaauaaaaaaaaaaaaaaaaaaaaaaaaaaaaaaaaaaaaaaaaaaaaaaaaaaaaaaaaaaaaaaaaugcaucccccccccccccccccccccccccccccccaaaggcucuuuucagagccaccagaauu

SEQ ID NO: 12834 - RNA, 4333 nt, Artificial Sequence
  SARS-CoV-2/Wuhan/WIV05/2019__EPI_ISL_402128 spike protein mRNA gc (1-1211)(I909C_Y1047C) LumSynth construct
aggagaaagcuuaccauguucguguuccugguccuccugccccuggugagcucccagugcgugaaccucaccacccgcacgcagcugccgcccgccuacaccaacagcuucacccggggcgucuacuaccccgacaagguguuccgcuccagcgugcugcacuccacccaggaccucuuccugcccuucuucagcaacgucacgugguuccacgccauccacguguccgggaccaacggcaccaagcgguucgacaacccggugcugcccuucaacgacggggucuacuucgcgagcaccgagaaguccaacaucauccgcggcuggaucuucgggacgacccucgacagcaagacccagucccugcugaucgugaacaacgccaccaacguggucaucaaggugugcgaguuccaguucugcaacgaccccuuccucggcguguacuaccacaagaacaacaagagcuggauggaguccgaguuccgggucuacagcuccgccaacaacugcacguucgaguacgugagccagcccuuccugauggaccuggagggcaagcaggggaacuucaagaaccuccgcgaguucguguucaagaacaucgacggcuacuucaagaucuacuccaagcacaccccgaucaaccugguccgggaccugccccagggguucagcgcccucgagccccugguggaccugcccaucggcaucaacaucacccgcuuccagacccuccuggcccugcaccgguccuaccucacgccgggggacagcagcuccggcuggaccgcgggcgccgccgccuacuacgugggguaccugcagccccgcaccuuccugcucaaguacaacgagaacggcaccaucacggacgcggucgacugcgcccuggacccccugagcgagaccaagugcacccucaaguccuucaccguggagaaggggaucuaccagacgagcaacuuccgggugcagcccaccgaguccaucguccgcuucccgaacaucaccaaccugugccccuucggcgagguguucaacgccacccgguucgccagcgucuacgccuggaaccgcaagcggaucuccaacugcguggcggacuacagcgugcuguacaacuccgccagcuucuccacguucaagugcuacggcgucagccccaccaagcucaacgaccugugcuucaccaacguguacgccgacuccuucgugauccgcggggacgagguccggcagaucgcccccggccagaccgggaagaucgccgacuacaacuacaagcugccggacgacuucacgggcugcgugaucgcguggaacagcaacaaccucgacuccaaggucgggggcaacuacaacuaccuguaccgccuguuccgcaagagcaaccucaagcccuucgagcgggacaucuccaccgagaucuaccaggccggcagcacccccugcaacgggguggagggcuucaacugcuacuucccccugcaguccuacggguuccagccgaccaacggcgugggguaccagcccuaccggguggucgugcugagcuucgagcuccugcacgcccccgccacggugugcggccccaagaaguccaccaaccuggucaagaacaagugcgugaacuucaacuucaacggccucaccgggaccggcgugcugaccgagagcaacaagaaguuccugccguuccagcaguucgggcgcgacaucgccgacacgaccgacgcgguccgcgacccccagacccuggagauccucgacaucacccccugcagcuucggcgggguguccgugaucacgccgggcaccaacaccagcaaccaggucgccgugcuguaccaggacgugaacugcaccgagguccccguggccauccacgccgaccagcugacgcccaccuggcggguguacuccaccggcagcaacgucuuccagacccgcgccgggugccucaucggcgcggagcacgugaacaacuccuacgagugcgacauccccaucggggccggcaucugcgccagcuaccagacgcagaccaacuccccgcggcgcgcccggagcguggcgucccagagcaucaucgccuacaccaugucccugggcgccgagaacagcgucgccuacuccaacaacagcaucgccauccccaccaacuucacgaucuccgugaccaccgagauccugcccgugagcaugaccaagacgagcgucgacugcaccauguacaucugcggggacuccaccgagugcagcaaccuccugcugcaguacggcuccuucugcacccagcucaaccgcgcgcugacggggaucgccguggagcaggacaagaacacccaggagguguucgcccaggucaagcagaucuacaagacgcccccgaucaaggacuucggcggguucaacuucagccagauccugcccgaccccuccaagcccagcaagcgguccuucaucgaggaccuccuguucaacaaggugacccuggccgacgccggcuucaucaagcaguacggcgacugccucggggacaucgcggcccgcgaccugaucugcgcccagaaguucaacggccugaccgugcucccgccccugcugaccgacgagaugaucgcccaguacaccagcgcccuccuggcggggaccaucacguccggcuggaccuucggggccggcgccgcccugcagauccccuucgcgaugcagauggccuaccgguucaacggcugcggggucacccagaacgugcucuacgagaaccagaagcugaucgccaaccaguucaacagcgccaucggcaagauccaggacucccugagcuccaccgccagcgcgcucgggaagcugcaggacguggucaaccagaacgcccaggcccugaacacgcucgugaagcagcuguccagcaacuucggcgccaucuccagcgugcugaacgacauccucucccgccuggacaaggucgaggccgaggugcagaucgaccggcugaucaccgggcgccuccagagccugcagaccuacgugacccagcagcugauccgggcggccgagauccgcgccagcgccaaccucgccgcgaccaagauguccgagugcguccugggccagagcaagcggguggacuucugcggcaaggggugccaccugauguccuucccccagagcgccccgcacggcguggucuuccuccacgugacguacguccccgcccaggagaagaacuucaccaccgcccccgcgaucugccacgacgggaaggcccacuucccccgcgagggcguguucguguccaacgggacccacugguucgucacgcagcggaacuucuacgagccgcagaucaucaccaccgacaacaccuucgugagcggcaacugcgacguggucaucggcaucgugaacaacacgguguacgacccccugcagcccgagcuggacuccuucaaggaggagcucgacaaguacuucaagaaccacaccagccccgacgucgaccugggggacaucuccggcaucaacgccagcguggugaacauccagaaggagaucgaccgccugaacgaggucgccaagaaccucaacgagucccugaucgaccugcaggagcucgggaaguacgagcaguacaucaagggcggcgggagcgggggcgggcagaucuacgagggcaagcugaccgccgaggggcuccgcuucggcaucguggccagccgguucaaccacgcgcuggucgaccgccugguggagggggccaucgacgccaucgugcggcacggcgggcgcgaggaggacaucacccucguccgggugcccggcuccugggagaucccgguggccgccggcgagcuggcccgcaaggaggacaucgacgcggucaucgccaucggggugcugauccggggcgccacgccccacuucgacuacaucgccagcgagguguccaaggggcucgcggaccugagccuggagcuccgcaagcccaucaccuucggcgucaucaccgccgacacccuggagcaggccaucgagcgggccgggacgaagcacggcaacaagggcugggaggccgcgcuguccgccaucgagauggccaaccucuucaagagccugcgcugaggacuaguuauaagacugacuagcccgaugggccucccaacgggcccuccuccccuccuugcaccgagauuaauaaaaaaaaaaaaaaaaaaaaaaaaaaaaaaaaaaaaaaaaaaaaaaaaaaaaaaaaaaaaaaaaugcaucccccccccccccccccccccccccccccccaaaggcucuuuucagagccaccagaauu

SEQ ID NO: 12835 - RNA, 4333 nt, Artificial Sequence
  SARS-CoV-2/Wuhan/WIV05/2019__EPI_ISL_402128 spike protein mRNA gc (1-1211)(Q965C_S1003C) LumSynth construct
aggagaaagcuuaccauguucguguuccugguccuccugccccuggugagcucccagugcgugaaccucaccacccgcacgcagcugccgcccgccuacaccaacagcuucacccggggcgucuacuaccccgacaagguguuccgcuccagcgugcugcacuccacccaggaccucuuccugcccuucuucagcaacgucacgugguuccacgccauccacguguccgggaccaacggcaccaagcgguucgacaacccggugcugcccuucaacgacggggucuacuucgcgagcaccgagaaguccaacaucauccgcggcuggaucuucgggacgacccucgacagcaagacccagucccugcugaucgugaacaacgccaccaacguggucaucaaggugugcgaguuccaguucugcaacgaccccuuccucggcguguacuaccacaagaacaacaagagcuggauggaguccgaguuccgggucuacagcuccgccaacaacugcacguucgaguacgugagccagcccuuccugauggaccuggagggcaagcaggggaacuucaagaaccuccgcgaguucguguucaagaacaucgacggcuacuucaagaucuacuccaagcacaccccgaucaaccugguccgggaccugccccagggguucagcgcccucgagccccugguggaccugcccaucggcaucaacaucacccgcuuccagacccuccuggcccugcaccgguccuaccucacgccgggggacagcagcuccggcuggaccgcgggcgccgccgccuacuacgugggguaccugcagccccgcaccuuccugcucaaguacaacgagaacggcaccaucacggacgcggucgacugcgcccuggacccccugagcgagaccaagugcacccucaaguccuucaccguggagaaggggaucuaccagacgagcaacuuccgggugcagcccaccgaguccaucguccgcuucccgaacaucaccaaccugugccccuucggcgagguguucaacgccacccgguucgccagcgucuacgccuggaaccgcaagcggaucuccaacugcguggcggacuacagcgugcuguacaacuccgccagcuucuccacguucaagugcuacggcgucagccccaccaagcucaacgaccugugcuucaccaacguguacgccgacuccuucgugauccgcggggacgagguccggcagaucgcccccggccagaccgggaagaucgccgacuacaacuacaagcugccggacgacuucacgggcugcgugaucgcguggaacagcaacaaccucgacuccaaggucgggggcaacuacaacuaccuguaccgccuguuccgcaagagcaaccucaagcccuucgagcgggacaucuccaccgagaucuaccaggccggcagcacccccugcaacgggguggagggcuucaacugcuacuucccccugcaguccuacggguuccagccgaccaacggcgugggguaccagcccuaccggguggucgugcugagcuucgagcuccugcacgcccccgccacggugugcggccccaagaaguccaccaaccuggucaagaacaagugcgugaacuucaacuucaacggccucaccgggaccggcgugcugaccgagagcaacaagaaguuccugccguuccagcaguucgggcgcgacaucgccgacacgaccgacgcgguccgcgacccccagacccuggagauccucgacaucacccccugcagcuucggcgggguguccgugaucacgccgggcaccaacaccagcaaccaggucgccgugcuguaccaggacgugaacugcaccgagguccccguggccauccacgccgaccagcugacgcccaccuggcggguguacuccaccggcagcaacgucuuccagacccgcgccgggugccucaucggcgcggagcacgugaacaacuccuacgagugcgacauccccaucggggccggcaucugcgccagcuaccagacgcagaccaacuccccgcggcgcgcccggagcguggcgucccagagcaucaucgccuacaccaugucccugggcgccgagaacagcgucgccuacuccaacaacagcaucgccauccccaccaacuucacgaucuccgugaccaccgagauccugcccgugagcaugaccaagacgagcgucgacugcaccauguacaucugcggggacuccaccgagugcagcaaccuccugcugcaguacggcuccuucugcacccagcucaaccgcgcgcugacggggaucgccguggagcaggacaagaacacccaggagguguucgcccaggucaagcagaucuacaagacgcccccgaucaaggacuucggcggguucaacuucagccagauccugcccgaccccuccaagcccagcaagcgguccuucaucgaggaccuccuguucaacaaggugacccuggccgacgccggcuucaucaagcaguacggcgacugccucggggacaucgcggcccgcgaccugaucugcgcccagaaguucaacggccugaccgugcucccgccccugcugaccgacgagaugaucgcccaguacaccagcgcccuccuggcggggaccaucacguccggcuggaccuucggggccggcgccgcccugcagauccccuucgcgaugcagauggccuaccgguucaacggcaucggggucacccagaacgugcucuacgagaaccagaagcugaucgccaaccaguucaacagcgccaucggcaagauccaggacucccugagcuccaccgccagcgcgcucgggaagcugcaggacguggucaaccagaacgcccaggcccugaacacgcucgugaagugccuguccagcaacuucggcgccaucuccagcgugcugaacgacauccucucccgccuggacaaggucgaggccgaggugcagaucgaccggcugaucaccgggcgccuccagugccugcagaccuacgugacccagcagcugauccgggcggccgagauccgcgccagcgccaaccucgccgcgaccaagauguccgagugcguccugggccagagcaagcggguggacuucugcggcaagggguaccaccugauguccuucccccagagcgccccgcacggcguggucuuccuccacgugacguacguccccgcccaggagaagaacuucaccaccgcccccgcgaucugccacgacgggaaggcccacuucccccgcgagggcguguucguguccaacgggacccacugguucgucacgcagcggaacuucuacgagccgcagaucaucaccaccgacaacaccuucgugagcggcaacugcgacguggucaucggcaucgugaacaacacgguguacgacccccugcagcccgagcuggacuccuucaaggaggagcucgacaaguacuucaagaaccacaccagccccgacgucgaccugggggacaucuccggcaucaacgccagcguggugaacauccagaaggagaucgaccgccugaacgaggucgccaagaaccucaacgagucccugaucgaccugcaggagcucgggaaguacgagcaguacaucaagggcggcgggagcgggggcgggcagaucuacgagggcaagcugaccgccgaggggcuccgcuucggcaucguggccagccgguucaaccacgcgcuggucgaccgccugguggagggggccaucgacgccaucgugcggcacggcgggcgcgaggaggacaucacccucguccgggugcccggcuccugggagaucccgguggccgccggcgagcuggcccgcaaggaggacaucgacgcggucaucgccaucggggugcugauccggggcgccacgccccacuucgacuacaucgccagcgagguguccaaggggcucgcggaccugagccuggagcuccgcaagcccaucaccuucggcgucaucaccgccgacacccuggagcaggccaucgagcgggccgggacgaagcacggcaacaagggcugggaggccgcgcuguccgccaucgagauggccaaccucuucaagagccugcgcugaggacuaguuauaagacugacuagcccgaugggccucccaacgggcccuccuccccuccuugcaccgagauuaauaaaaaaaaaaaaaaaaaaaaaaaaaaaaaaaaaaaaaaaaaaaaaaaaaaaaaaaaaaaaaaaaugcaucccccccccccccccccccccccccccccccaaaggcucuuuucagagccaccagaauu

SEQ ID NO: 12836 - RNA, 4333 nt, Artificial Sequence
  SARS-CoV-2/Wuhan/WIV05/2019__EPI_ISL_402128 spike protein mRNA gc (1-1211)(F970C_G999C) LumSynth construct
aggagaaagcuuaccauguucguguuccugguccuccugccccuggugagcucccagugcgugaaccucaccacccgcacgcagcugccgcccgccuacaccaacagcuucacccggggcgucuacuaccccgacaagguguuccgcuccagcgugcugcacuccacccaggaccucuuccugcccuucuucagcaacgucacgugguuccacgccauccacguguccgggaccaacggcaccaagcgguucgacaacccggugcugcccuucaacgacggggucuacuucgcgagcaccgagaaguccaacaucauccgcggcuggaucuucgggacgacccucgacagcaagacccagucccugcugaucgugaacaacgccaccaacguggucaucaaggugugcgaguuccaguucugcaacgaccccuuccucggcguguacuaccacaagaacaacaagagcuggauggaguccgaguuccgggucuacagcuccgccaacaacugcacguucgaguacgugagccagcccuuccugauggaccuggagggcaagcaggggaacuucaagaaccuccgcgaguucguguucaagaacaucgacggcuacuucaagaucuacuccaagcacaccccgaucaaccugguccgggaccugccccagggguucagcgcccucgagccccugguggaccugcccaucggcaucaacaucacccgcuuccagacccuccuggcccugcaccgguccuaccucacgccgggggacagcagcuccggcuggaccgcgggcgccgccgccuacuacgugggguaccugcagccccgcaccuuccugcucaaguacaacgagaacggcaccaucacggacgcggucgacugcgcccuggacccccugagcgagaccaagugcacccucaaguccuucaccguggagaaggggaucuaccagacgagcaacuuccgggugcagcccaccgaguccaucguccgcuucccgaacaucaccaaccugugccccuucggcgagguguucaacgccacccgguucgccagcgucuacgccuggaaccgcaagcggaucuccaacugcguggcggacuacagcgugcuguacaacuccgccagcuucuccacguucaagugcuacggcgucagccccaccaagcucaacgaccugugcuucaccaacguguacgccgacuccuucgugauccgcggggacgagguccggcagaucgcccccggccagaccgggaagaucgccgacuacaacuacaagcugccggacgacuucacgggcugcgugaucgcguggaacagcaacaaccucgacuccaaggucgggggcaacuacaacuaccuguaccgccuguuccgcaagagcaaccucaagcccuucgagcgggacaucuccaccgagaucuaccaggccggcagcacccccugcaacgggguggagggcuucaacugcuacuucccccugcaguccuacggguuccagccgaccaacggcgugggguaccagcccuaccggguggucgugcugagcuucgagcuccugcacgcccccgccacggugugcggccccaagaaguccaccaaccuggucaagaacaagugcgugaacuucaacuucaacggccucaccgggaccggcgugcugaccgagagcaacaagaaguuccugccguuccagcaguucgggcgcgacaucgccgacacgaccgacgcgguccgcgacccccagacccuggagauccucgacaucacccccugcagcuucggcgggguguccgugaucacgccgggcaccaacaccagcaaccaggucgccgugcuguaccaggacgugaacugcaccgagguccccguggccauccacgccgaccagcugacgcccaccuggcggguguacuccaccggcagcaacgucuuccagacccgcgccgggugccucaucggcgcggagcacgugaacaacuccuacgagugcgacauccccaucggggccggcaucugcgccagcuaccagacgcagaccaacuccccgcggcgcgcccggagcguggcgucccagagcaucaucgccuacaccaugucccugggcgccgagaacagcgucgccuacuccaacaacagcaucgccauccccaccaacuucacgaucuccgugaccaccgagauccugcccgugagcaugaccaagacgagcgucgacugcaccauguacaucugcggggacuccaccgagugcagcaaccuccugcugcaguacggcuccuucugcacccagcucaaccgcgcgcugacggggaucgccguggagcaggacaagaacacccaggagguguucgcccaggucaagcagaucuacaagacgcccccgaucaaggacuucggcggguucaacuucagccagauccugcccgaccccuccaagcccagcaagcgguccuucaucgaggaccuccuguucaacaaggugacccuggccgacgccggcuucaucaagcaguacggcgacugccucggggacaucgcggcccgcgaccugaucugcgcccagaaguucaacggccugaccgugcucccgccccugcugaccgacgagaugaucgcccaguacaccagcgcccuccuggcggggaccaucacguccggcuggaccuucggggccggcgccgcccugcagauccccuucgcgaugcagauggccuaccgguucaacggcaucggggucacccagaacgugcucuacgagaaccagaagcugaucgccaaccaguucaacagcgccaucggcaagauccaggacucccugagcuccaccgccagcgcgcucgggaagcugcaggacguggucaaccagaacgcccaggcccugaacacgcucgugaagcagcuguccagcaacugcggcgccaucuccagcgugcugaacgacauccucucccgccuggacaaggucgaggccgaggugcagaucgaccggcugaucaccugucgccuccagagccugcagaccuacgugacccagcagcugauccgggcggccgagauccgcgccagcgccaaccucgccgcgaccaagauguccgagugcguccugggccagagcaagcggguggacuucugcggcaagggguaccaccugauguccuucccccagagcgccccgcacggcguggucuuccuccacgugacguacguccccgcccaggagaagaacuucaccaccgcccccgcgaucugccacgacgggaaggcccacuucccccgcgagggcguguucguguccaacgggacccacugguucgucacgcagcggaacuucuacgagccgcagaucaucaccaccgacaacaccuucgugagcggcaacugcgacguggucaucggcaucgugaacaacacgguguacgacccccugcagcccgagcuggacuccuucaaggaggagcucgacaaguacuucaagaaccacaccagccccgacgucgaccugggggacaucuccggcaucaacgccagcguggugaacauccagaaggagaucgaccgccugaacgaggucgccaagaaccucaacgagucccugaucgaccugcaggagcucgggaaguacgagcaguacaucaagggcggcgggagcgggggcgggcagaucuacgagggcaagcugaccgccgaggggcuccgcuucggcaucguggccagccgguucaaccacgcgcuggucgaccgccugguggagggggccaucgacgccaucgugcggcacggcgggcgcgaggaggacaucacccucguccgggugcccggcuccugggagaucccgguggccgccggcgagcuggcccgcaaggaggacaucgacgcggucaucgccaucggggugcugauccggggcgccacgccccacuucgacuacaucgccagcgagguguccaaggggcucgcggaccugagccuggagcuccgcaagcccaucaccuucggcgucaucaccgccgacacccuggagcaggccaucgagcgggccgggacgaagcacggcaacaagggcugggaggccgcgcuguccgccaucgagauggccaaccucuucaagagccugcgcugaggacuaguuauaagacugacuagcccgaugggccucccaacgggcccuccuccccuccuugcaccgagauuaauaaaaaaaaaaaaaaaaaaaaaaaaaaaaaaaaaaaaaaaaaaaaaaaaaaaaaaaaaaaaaaaaugcaucccccccccccccccccccccccccccccccaaaggcucuuuucagagccaccagaauu

SEQ ID NO: 12837 - RNA, 4333 nt, Artificial Sequence
  SARS-CoV-2/Wuhan/WIV05/2019__EPI_ISL_402128 spike protein mRNA gc (1-1211)(A972C_R995C) LumSynth construct
aggagaaagcuuaccauguucguguuccugguccuccugccccuggugagcucccagugcgugaaccucaccacccgcacgcagcugccgcccgccuacaccaacagcuucacccggggcgucuacuaccccgacaagguguuccgcuccagcgugcugcacuccacccaggaccucuuccugcccuucuucagcaacgucacgugguuccacgccauccacguguccgggaccaacggcaccaagcgguucgacaacccggugcugcccuucaacgacggggucuacuucgcgagcaccgagaaguccaacaucauccgcggcuggaucuucgggacgacccucgacagcaagacccagucccugcugaucgugaacaacgccaccaacguggucaucaaggugugcgaguuccaguucugcaacgaccccuuccucggcguguacuaccacaagaacaacaagagcuggauggaguccgaguuccgggucuacagcuccgccaacaacugcacguucgaguacgugagccagcccuuccugauggaccuggagggcaagcaggggaacuucaagaaccuccgcgaguucguguucaagaacaucgacggcuacuucaagaucuacuccaagcacaccccgaucaaccugguccgggaccugccccagggguucagcgcccucgagccccugguggaccugcccaucggcaucaacaucacccgcuuccagacccuccuggcccugcaccgguccuaccucacgccgggggacagcagcuccggcuggaccgcgggcgccgccgccuacuacgugggguaccugcagccccgcaccuuccugcucaaguacaacgagaacggcaccaucacggacgcggucgacugcgcccuggacccccugagcgagaccaagugcacccucaaguccuucaccguggagaaggggaucuaccagacgagcaacuuccgggugcagcccaccgaguccaucguccgcuucccgaacaucaccaaccugugccccuucggcgagguguucaacgccacccgguucgccagcgucuacgccuggaaccgcaagcggaucuccaacugcguggcggacuacagcgugcuguacaacuccgccagcuucuccacguucaagugcuacggcgucagccccaccaagcucaacgaccugugcuucaccaacguguacgccgacuccuucgugauccgcggggacgagguccggcagaucgcccccggccagaccgggaagaucgccgacuacaacuacaagcugccggacgacuucacgggcugcgugaucgcguggaacagcaacaaccucgacuccaaggucgggggcaacuacaacuaccuguaccgccuguuccgcaagagcaaccucaagcccuucgagcgggacaucuccaccgagaucuaccaggccggcagcacccccugcaacgggguggagggcuucaacugcuacuucccccugcaguccuacggguuccagccgaccaacggcgugggguaccagcccuaccggguggucgugcugagcuucgagcuccugcacgcccccgccacggugugcggccccaagaaguccaccaaccuggucaagaacaagugcgugaacuucaacuucaacggccucaccgggaccggcgugcugaccgagagcaacaagaaguuccugccguuccagcaguucgggcgcgacaucgccgacacgaccgacgcgguccgcgacccccagacccuggagauccucgacaucacccccugcagcuucggcgggguguccgugaucacgccgggcaccaacaccagcaaccaggucgccgugcuguaccaggacgugaacugcaccgagguccccguggccauccacgccgaccagcugacgcccaccuggcggguguacuccaccggcagcaacgucuuccagacccgcgccgggugccucaucggcgcggagcacgugaacaacuccuacgagugcgacauccccaucggggccggcaucugcgccagcuaccagacgcagaccaacuccccgcggcgcgcccggagcguggcgucccagagcaucaucgccuacaccaugucccugggcgccgagaacagcgucgccuacuccaacaacagcaucgccauccccaccaacuucacgaucuccgugaccaccgagauccugcccgugagcaugaccaagacgagcgucgacugcaccauguacaucugcggggacuccaccgagugcagcaaccuccugcugcaguacggcuccuucugcacccagcucaaccgcgcgcugacggggaucgccguggagcaggacaagaacacccaggagguguucgcccaggucaagcagaucuacaagacgcccccgaucaaggacuucggcggguucaacuucagccagauccugcccgaccccuccaagcccagcaagcgguccuucaucgaggaccuccuguucaacaaggugacccuggccgacgccggcuucaucaagcaguacggcgacugccucggggacaucgcggcccgcgaccugaucugcgcccagaaguucaacggccugaccgugcucccgccccugcugaccgacgagaugaucgcccaguacaccagcgcccuccuggcggggaccaucacguccggcuggaccuucggggccggcgccgcccugcagauccccuucgcgaugcagauggccuaccgguucaacggcaucggggucacccagaacgugcucuacgagaaccagaagcugaucgccaaccaguucaacagcgccaucggcaagauccaggacucccugagcuccaccgccagcgcgcucgggaagcugcaggacguggucaaccagaacgcccaggcccugaacacgcucgugaagcagcuguccagcaacuucggcugcaucuccagcgugcugaacgacauccucucccgccuggacaaggucgaggccgaggugcagaucgacugccugaucaccgggcgccuccagagccugcagaccuacgugacccagcagcugauccgggcggccgagauccgcgccagcgccaaccucgccgcgaccaagauguccgagugcguccugggccagagcaagcggguggacuucugcggcaagggguaccaccugauguccuucccccagagcgccccgcacggcguggucuuccuccacgugacguacguccccgcccaggagaagaacuucaccaccgcccccgcgaucugccacgacgggaaggcccacuucccccgcgagggcguguucguguccaacgggacccacugguucgucacgcagcggaacuucuacgagccgcagaucaucaccaccgacaacaccuucgugagcggcaacugcgacguggucaucggcaucgugaacaacacgguguacgacccccugcagcccgagcuggacuccuucaaggaggagcucgacaaguacuucaagaaccacaccagccccgacgucgaccugggggacaucuccggcaucaacgccagcguggugaacauccagaaggagaucgaccgccugaacgaggucgccaagaaccucaacgagucccugaucgaccugcaggagcucgggaaguacgagcaguacaucaagggcggcgggagcgggggcgggcagaucuacgagggcaagcugaccgccgaggggcuccgcuucggcaucguggccagccgguucaaccacgcgcuggucgaccgccugguggagggggccaucgacgccaucgugcggcacggcgggcgcgaggaggacaucacccucguccgggugcccggcuccugggagaucccgguggccgccggcgagcuggcccgcaaggaggacaucgacgcggucaucgccaucggggugcugauccggggcgccacgccccacuucgacuacaucgccagcgagguguccaaggggcucgcggaccugagccuggagcuccgcaagcccaucaccuucggcgucaucaccgccgacacccuggagcaggccaucgagcgggccgggacgaagcacggcaacaagggcugggaggccgcgcuguccgccaucgagauggccaaccucuucaagagccugcgcugaggacuaguuauaagacugacuagcccgaugggccucccaacgggcccuccuccccuccuugcaccgagauuaauaaaaaaaaaaaaaaaaaaaaaaaaaaaaaaaaaaaaaaaaaaaaaaaaaaaaaaaaaaaaaaaaugcaucccccccccccccccccccccccccccccccaaaggcucuuuucagagccaccagaauu

SEQ ID NO: 12838 - RNA, 4333 nt, Artificial Sequence
  SARS-CoV-2/Wuhan/WIV05/2019__EPI_ISL_402128 spike protein mRNA gc (1-1211)(A890C_V1040C) LumSynth construct
aggagaaagcuuaccauguucguguuccugguccuccugccccuggugagcucccagugcgugaaccucaccacccgcacgcagcugccgcccgccuacaccaacagcuucacccggggcgucuacuaccccgacaagguguuccgcuccagcgugcugcacuccacccaggaccucuuccugcccuucuucagcaacgucacgugguuccacgccauccacguguccgggaccaacggcaccaagcgguucgacaacccggugcugcccuucaacgacggggucuacuucgcgagcaccgagaaguccaacaucauccgcggcuggaucuucgggacgacccucgacagcaagacccagucccugcugaucgugaacaacgccaccaacguggucaucaaggugugcgaguuccaguucugcaacgaccccuuccucggcguguacuaccacaagaacaacaagagcuggauggaguccgaguuccgggucuacagcuccgccaacaacugcacguucgaguacgugagccagcccuuccugauggaccuggagggcaagcaggggaacuucaagaaccuccgcgaguucguguucaagaacaucgacggcuacuucaagaucuacuccaagcacaccccgaucaaccugguccgggaccugccccagggguucagcgcccucgagccccugguggaccugcccaucggcaucaacaucacccgcuuccagacccuccuggcccugcaccgguccuaccucacgccgggggacagcagcuccggcuggaccgcgggcgccgccgccuacuacgugggguaccugcagccccgcaccuuccugcucaaguacaacgagaacggcaccaucacggacgcggucgacugcgcccuggacccccugagcgagaccaagugcacccucaaguccuucaccguggagaaggggaucuaccagacgagcaacuuccgggugcagcccaccgaguccaucguccgcuucccgaacaucaccaaccugugccccuucggcgagguguucaacgccacccgguucgccagcgucuacgccuggaaccgcaagcggaucuccaacugcguggcggacuacagcgugcuguacaacuccgccagcuucuccacguucaagugcuacggcgucagccccaccaagcucaacgaccugugcuucaccaacguguacgccgacuccuucgugauccgcggggacgagguccggcagaucgcccccggccagaccgggaagaucgccgacuacaacuacaagcugccggacgacuucacgggcugcgugaucgcguggaacagcaacaaccucgacuccaaggucgggggcaacuacaacuaccuguaccgccuguuccgcaagagcaaccucaagcccuucgagcgggacaucuccaccgagaucuaccaggccggcagcacccccugcaacgggguggagggcuucaacugcuacuucccccugcaguccuacggguuccagccgaccaacggcgugggguaccagcccuaccggguggucgugcugagcuucgagcuccugcacgcccccgccacggugugcggccccaagaaguccaccaaccuggucaagaacaagugcgugaacuucaacuucaacggccucaccgggaccggcgugcugaccgagagcaacaagaaguuccugccguuccagcaguucgggcgcgacaucgccgacacgaccgacgcgguccgcgacccccagacccuggagauccucgacaucacccccugcagcuucggcgggguguccgugaucacgccgggcaccaacaccagcaaccaggucgccgugcuguaccaggacgugaacugcaccgagguccccguggccauccacgccgaccagcugacgcccaccuggcggguguacuccaccggcagcaacgucuuccagacccgcgccgggugccucaucggcgcggagcacgugaacaacuccuacgagugcgacauccccaucggggccggcaucugcgccagcuaccagacgcagaccaacuccccgcggcgcgcccggagcguggcgucccagagcaucaucgccuacaccaugucccugggcgccgagaacagcgucgccuacuccaacaacagcaucgccauccccaccaacuucacgaucuccgugaccaccgagauccugcccgugagcaugaccaagacgagcgucgacugcaccauguacaucugcggggacuccaccgagugcagcaaccuccugcugcaguacggcuccuucugcacccagcucaaccgcgcgcugacggggaucgccguggagcaggacaagaacacccaggagguguucgcccaggucaagcagaucuacaagacgcccccgaucaaggacuucggcggguucaacuucagccagauccugcccgaccccuccaagcccagcaagcgguccuucaucgaggaccuccuguucaacaaggugacccuggccgacgccggcuucaucaagcaguacggcgacugccucggggacaucgcggcccgcgaccugaucugcgcccagaaguucaacggccugaccgugcucccgccccugcugaccgacgagaugaucgcccaguacaccagcgcccuccuggcggggaccaucacguccggcuggaccuucgggugcggcgccgcccugcagauccccuucgcgaugcagauggccuaccgguucaacggcaucggggucacccagaacgugcucuacgagaaccagaagcugaucgccaaccaguucaacagcgccaucggcaagauccaggacucccugagcuccaccgccagcgcgcucgggaagcugcaggacguggucaaccagaacgcccaggcccugaacacgcucgugaagcagcuguccagcaacuucggcgccaucuccagcgugcugaacgacauccucucccgccuggacaaggucgaggccgaggugcagaucgaccggcugaucaccgggcgccuccagagccugcagaccuacgugacccagcagcugauccgggcggccgagauccgcgccagcgccaaccucgccgcgaccaagauguccgagugcguccugggccagagcaagcggugcgacuucugcggcaagggguaccaccugauguccuucccccagagcgccccgcacggcguggucuuccuccacgugacguacguccccgcccaggagaagaacuucaccaccgcccccgcgaucugccacgacgggaaggcccacuucccccgcgagggcguguucguguccaacgggacccacugguucgucacgcagcggaacuucuacgagccgcagaucaucaccaccgacaacaccuucgugagcggcaacugcgacguggucaucggcaucgugaacaacacgguguacgacccccugcagcccgagcuggacuccuucaaggaggagcucgacaaguacuucaagaaccacaccagccccgacgucgaccugggggacaucuccggcaucaacgccagcguggugaacauccagaaggagaucgaccgccugaacgaggucgccaagaaccucaacgagucccugaucgaccugcaggagcucgggaaguacgagcaguacaucaagggcggcgggagcgggggcgggcagaucuacgagggcaagcugaccgccgaggggcuccgcuucggcaucguggccagccgguucaaccacgcgcuggucgaccgccugguggagggggccaucgacgccaucgugcggcacggcgggcgcgaggaggacaucacccucguccgggugcccggcuccugggagaucccgguggccgccggcgagcuggcccgcaaggaggacaucgacgcggucaucgccaucggggugcugauccggggcgccacgccccacuucgacuacaucgccagcgagguguccaaggggcucgcggaccugagccuggagcuccgcaagcccaucaccuucggcgucaucaccgccgacacccuggagcaggccaucgagcgggccgggacgaagcacggcaacaagggcugggaggccgcgcuguccgccaucgagauggccaaccucuucaagagccugcgcugaggacuaguuauaagacugacuagcccgaugggccucccaacgggcccuccuccccuccuugcaccgagauuaauaaaaaaaaaaaaaaaaaaaaaaaaaaaaaaaaaaaaaaaaaaaaaaaaaaaaaaaaaaaaaaaaugcaucccccccccccccccccccccccccccccccaaaggcucuuuucagagccaccagaauu

SEQ ID NO: 12839 - RNA, 4333 nt, Artificial Sequence
  SARS-CoV-2/Wuhan/WIV05/2019__EPI_ISL_402128 spike protein mRNA gc (1-1211)(T874C_S1055C) LumSynth construct
aggagaaagcuuaccauguucguguuccugguccuccugccccuggugagcucccagugcgugaaccucaccacccgcacgcagcugccgcccgccuacaccaacagcuucacccggggcgucuacuaccccgacaagguguuccgcuccagcgugcugcacuccacccaggaccucuuccugcccuucuucagcaacgucacgugguuccacgccauccacguguccgggaccaacggcaccaagcgguucgacaacccggugcugcccuucaacgacggggucuacuucgcgagcaccgagaaguccaacaucauccgcggcuggaucuucgggacgacccucgacagcaagacccagucccugcugaucgugaacaacgccaccaacguggucaucaaggugugcgaguuccaguucugcaacgaccccuuccucggcguguacuaccacaagaacaacaagagcuggauggaguccgaguuccgggucuacagcuccgccaacaacugcacguucgaguacgugagccagcccuuccugauggaccuggagggcaagcaggggaacuucaagaaccuccgcgaguucguguucaagaacaucgacggcuacuucaagaucuacuccaagcacaccccgaucaaccugguccgggaccugccccagggguucagcgcccucgagccccugguggaccugcccaucggcaucaacaucacccgcuuccagacccuccuggcccugcaccgguccuaccucacgccgggggacagcagcuccggcuggaccgcgggcgccgccgccuacuacgugggguaccugcagccccgcaccuuccugcucaaguacaacgagaacggcaccaucacggacgcggucgacugcgcccuggacccccugagcgagaccaagugcacccucaaguccuucaccguggagaaggggaucuaccagacgagcaacuuccgggugcagcccaccgaguccaucguccgcuucccgaacaucaccaaccugugccccuucggcgagguguucaacgccacccgguucgccagcgucuacgccuggaaccgcaagcggaucuccaacugcguggcggacuacagcgugcuguacaacuccgccagcuucuccacguucaagugcuacggcgucagccccaccaagcucaacgaccugugcuucaccaacguguacgccgacuccuucgugauccgcggggacgagguccggcagaucgcccccggccagaccgggaagaucgccgacuacaacuacaagcugccggacgacuucacgggcugcgugaucgcguggaacagcaacaaccucgacuccaaggucgggggcaacuacaacuaccuguaccgccuguuccgcaagagcaaccucaagcccuucgagcgggacaucuccaccgagaucuaccaggccggcagcacccccugcaacgggguggagggcuucaacugcuacuucccccugcaguccuacggguuccagccgaccaacggcgugggguaccagcccuaccggguggucgugcugagcuucgagcuccugcacgcccccgccacggugugcggccccaagaaguccaccaaccuggucaagaacaagugcgugaacuucaacuucaacggccucaccgggaccggcgugcugaccgagagcaacaagaaguuccugccguuccagcaguucgggcgcgacaucgccgacacgaccgacgcgguccgcgacccccagacccuggagauccucgacaucacccccugcagcuucggcgggguguccgugaucacgccgggcaccaacaccagcaaccaggucgccgugcuguaccaggacgugaacugcaccgagguccccguggccauccacgccgaccagcugacgcccaccuggcggguguacuccaccggcagcaacgucuuccagacccgcgccgggugccucaucggcgcggagcacgugaacaacuccuacgagugcgacauccccaucggggccggcaucugcgccagcuaccagacgcagaccaacuccccgcggcgcgcccggagcguggcgucccagagcaucaucgccuacaccaugucccugggcgccgagaacagcgucgccuacuccaacaacagcaucgccauccccaccaacuucacgaucuccgugaccaccgagauccugcccgugagcaugaccaagacgagcgucgacugcaccauguacaucugcggggacuccaccgagugcagcaaccuccugcugcaguacggcuccuucugcacccagcucaaccgcgcgcugacggggaucgccguggagcaggacaagaacacccaggagguguucgcccaggucaagcagaucuacaagacgcccccgaucaaggacuucggcggguucaacuucagccagauccugcccgaccccuccaagcccagcaagcgguccuucaucgaggaccuccuguucaacaaggugacccuggccgacgccggcuucaucaagcaguacggcgacugccucggggacaucgcggcccgcgaccugaucugcgcccagaaguucaacggccugaccgugcucccgccccugcugaccgacgagaugaucgcccaguacugcagcgcccuccuggcggggaccaucacguccggcuggaccuucggggccggcgccgcccugcagauccccuucgcgaugcagauggccuaccgguucaacggcaucggggucacccagaacgugcucuacgagaaccagaagcugaucgccaaccaguucaacagcgccaucggcaagauccaggacucccugagcuccaccgccagcgcgcucgggaagcugcaggacguggucaaccagaacgcccaggcccugaacacgcucgugaagcagcuguccagcaacuucggcgccaucuccagcgugcugaacgacauccucucccgccuggacaaggucgaggccgaggugcagaucgaccggcugaucaccgggcgccuccagagccugcagaccuacgugacccagcagcugauccgggcggccgagauccgcgccagcgccaaccucgccgcgaccaagauguccgagugcguccugggccagagcaagcggguggacuucugcggcaagggguaccaccugauguccuucccccagugcgccccgcacggcguggucuuccuccacgugacguacguccccgcccaggagaagaacuucaccaccgcccccgcgaucugccacgacgggaaggcccacuucccccgcgagggcguguucguguccaacgggacccacugguucgucacgcagcggaacuucuacgagccgcagaucaucaccaccgacaacaccuucgugagcggcaacugcgacguggucaucggcaucgugaacaacacgguguacgacccccugcagcccgagcuggacuccuucaaggaggagcucgacaaguacuucaagaaccacaccagccccgacgucgaccugggggacaucuccggcaucaacgccagcguggugaacauccagaaggagaucgaccgccugaacgaggucgccaagaaccucaacgagucccugaucgaccugcaggagcucgggaaguacgagcaguacaucaagggcggcgggagcgggggcgggcagaucuacgagggcaagcugaccgccgaggggcuccgcuucggcaucguggccagccgguucaaccacgcgcuggucgaccgccugguggagggggccaucgacgccaucgugcggcacggcgggcgcgaggaggacaucacccucguccgggugcccggcuccugggagaucccgguggccgccggcgagcuggcccgcaaggaggacaucgacgcggucaucgccaucggggugcugauccggggcgccacgccccacuucgacuacaucgccagcgagguguccaaggggcucgcggaccugagccuggagcuccgcaagcccaucaccuucggcgucaucaccgccgacacccuggagcaggccaucgagcgggccgggacgaagcacggcaacaagggcugggaggccgcgcuguccgccaucgagauggccaaccucuucaagagccugcgcugaggacuaguuauaagacugacuagcccgaugggccucccaacgggcccuccuccccuccuugcaccgagauuaauaaaaaaaaaaaaaaaaaaaaaaaaaaaaaaaaaaaaaaaaaaaaaaaaaaaaaaaaaaaaaaaaugcaucccccccccccccccccccccccccccccccaaaggcucuuuucagagccaccagaauu

SEQ ID NO: 12840 - RNA, 4357 nt, Artificial Sequence
  SARS-CoV-2/Wuhan/WIV05/2019__EPI_ISL_402128 spike protein mRNA gc (1-1211) Ferritin construct
aggagaaagcuuaccauguucguguuccugguccuccugccccuggugagcucccagugcgugaaccucaccacccgcacgcagcugccgcccgccuacaccaacagcuucacccggggcgucuacuaccccgacaagguguuccgcuccagcgugcugcacuccacccaggaccucuuccugcccuucuucagcaacgucacgugguuccacgccauccacguguccgggaccaacggcaccaagcgguucgacaacccggugcugcccuucaacgacggggucuacuucgcgagcaccgagaaguccaacaucauccgcggcuggaucuucgggacgacccucgacagcaagacccagucccugcugaucgugaacaacgccaccaacguggucaucaaggugugcgaguuccaguucugcaacgaccccuuccucggcguguacuaccacaagaacaacaagagcuggauggaguccgaguuccgggucuacagcuccgccaacaacugcacguucgaguacgugagccagcccuuccugauggaccuggagggcaagcaggggaacuucaagaaccuccgcgaguucguguucaagaacaucgacggcuacuucaagaucuacuccaagcacaccccgaucaaccugguccgggaccugccccagggguucagcgcccucgagccccugguggaccugcccaucggcaucaacaucacccgcuuccagacccuccuggcccugcaccgguccuaccucacgccgggggacagcagcuccggcuggaccgcgggcgccgccgccuacuacgugggguaccugcagccccgcaccuuccugcucaaguacaacgagaacggcaccaucacggacgcggucgacugcgcccuggacccccugagcgagaccaagugcacccucaaguccuucaccguggagaaggggaucuaccagacgagcaacuuccgggugcagcccaccgaguccaucguccgcuucccgaacaucaccaaccugugccccuucggcgagguguucaacgccacccgguucgccagcgucuacgccuggaaccgcaagcggaucuccaacugcguggcggacuacagcgugcuguacaacuccgccagcuucuccacguucaagugcuacggcgucagccccaccaagcucaacgaccugugcuucaccaacguguacgccgacuccuucgugauccgcggggacgagguccggcagaucgcccccggccagaccgggaagaucgccgacuacaacuacaagcugccggacgacuucacgggcugcgugaucgcguggaacagcaacaaccucgacuccaaggucgggggcaacuacaacuaccuguaccgccuguuccgcaagagcaaccucaagcccuucgagcgggacaucuccaccgagaucuaccaggccggcagcacccccugcaacgggguggagggcuucaacugcuacuucccccugcaguccuacggguuccagccgaccaacggcgugggguaccagcccuaccggguggucgugcugagcuucgagcuccugcacgcccccgccacggugugcggccccaagaaguccaccaaccuggucaagaacaagugcgugaacuucaacuucaacggccucaccgggaccggcgugcugaccgagagcaacaagaaguuccugccguuccagcaguucgggcgcgacaucgccgacacgaccgacgcgguccgcgacccccagacccuggagauccucgacaucacccccugcagcuucggcgggguguccgugaucacgccgggcaccaacaccagcaaccaggucgccgugcuguaccaggacgugaacugcaccgagguccccguggccauccacgccgaccagcugacgcccaccuggcggguguacuccaccggcagcaacgucuuccagacccgcgccgggugccucaucggcgcggagcacgugaacaacuccuacgagugcgacauccccaucggggccggcaucugcgccagcuaccagacgcagaccaacuccccgcggcgcgcccggagcguggcgucccagagcaucaucgccuacaccaugucccugggcgccgagaacagcgucgccuacuccaacaacagcaucgccauccccaccaacuucacgaucuccgugaccaccgagauccugcccgugagcaugaccaagacgagcgucgacugcaccauguacaucugcggggacuccaccgagugcagcaaccuccugcugcaguacggcuccuucugcacccagcucaaccgcgcgcugacggggaucgccguggagcaggacaagaacacccaggagguguucgcccaggucaagcagaucuacaagacgcccccgaucaaggacuucggcggguucaacuucagccagauccugcccgaccccuccaagcccagcaagcgguccuucaucgaggaccuccuguucaacaaggugacccuggccgacgccggcuucaucaagcaguacggcgacugccucggggacaucgcggcccgcgaccugaucugcgcccagaaguucaacggccugaccgugcucccgccccugcugaccgacgagaugaucgcccaguacaccagcgcccuccuggcggggaccaucacguccggcuggaccuucggggccggcgccgcccugcagauccccuucgcgaugcagauggccuaccgguucaacggcaucggggucacccagaacgugcucuacgagaaccagaagcugaucgccaaccaguucaacagcgccaucggcaagauccaggacucccugagcuccaccgccagcgcgcucgggaagcugcaggacguggucaaccagaacgcccaggcccugaacacgcucgugaagcagcuguccagcaacuucggcgccaucuccagcgugcugaacgacauccucucccgccuggacaaggucgaggccgaggugcagaucgaccggcugaucaccgggcgccuccagagccugcagaccuacgugacccagcagcugauccgggcggccgagauccgcgccagcgccaaccucgccgcgaccaagauguccgagugcguccugggccagagcaagcggguggacuucugcggcaagggguaccaccugauguccuucccccagagcgccccgcacggcguggucuuccuccacgugacguacguccccgcccaggagaagaacuucaccaccgcccccgcgaucugccacgacgggaaggcccacuucccccgcgagggcguguucguguccaacgggacccacugguucgucacgcagcggaacuucuacgagccgcagaucaucaccaccgacaacaccuucgugagcggcaacugcgacguggucaucggcaucgugaacaacacgguguacgacccccugcagcccgagcuggacuccuucaaggaggagcucgacaaguacuucaagaaccacaccagccccgacgucgaccugggggacaucuccggcaucaacgccagcguggugaacauccagaaggagaucgaccgccugaacgaggucgccaagaaccucaacgagucccugaucgaccugcaggagcucgggaaguacgagcaguacaucaagggcgggggcgggagcgacaucaucaagcuccugaacgagcaggucaacaaggagaugcaguccagcaaccuguacauguccaugagcuccuggugcuacacccacagccucgacggcgccgggcuguuccuguucgaccacgccgcggaggaguacgagcacgccaagaagcucaucaucuuccugaacgagaacaacgugcccgugcagcugaccuccaucagcgccccggagcacaaguucgagggccucacgcagaucuuccagaaggccuacgagcacgagcagcacaucuccgagagcaucaacaacaucguggaccacgccaucaaguccaaggaccacgcgaccuucaacuuccugcagugguacgucgccgagcagcacgaggaggaggugcuguucaaggacauccucgacaagaucgagcugaucgggaacgagaaccacggccuguaccucgccgaccaguacgugaaggggaucgccaagagccgcaaguccugaggacuaguuauaagacugacuagcccgaugggccucccaacgggcccuccuccccuccuugcaccgagauuaauaaaaaaaaaaaaaaaaaaaaaaaaaaaaaaaaaaaaaaaaaaaaaaaaaaaaaaaaaaaaaaaaugcaucccccccccccccccccccccccccccccccaaaggcucuuuucagagccaccagaauu

SEQ ID NO: 12841 - RNA, 4357 nt, Artificial Sequence
  SARS-CoV-2/Wuhan/WIV05/2019__EPI_ISL_402128 spike protein mRNA gc (1-1211)(K986P_V987P) Ferritin construct
aggagaaagcuuaccauguucguguuccugguccuccugccccuggugagcucccagugcgugaaccucaccacccgcacgcagcugccgcccgccuacaccaacagcuucacccggggcgucuacuaccccgacaagguguuccgcuccagcgugcugcacuccacccaggaccucuuccugcccuucuucagcaacgucacgugguuccacgccauccacguguccgggaccaacggcaccaagcgguucgacaacccggugcugcccuucaacgacggggucuacuucgcgagcaccgagaaguccaacaucauccgcggcuggaucuucgggacgacccucgacagcaagacccagucccugcugaucgugaacaacgccaccaacguggucaucaaggugugcgaguuccaguucugcaacgaccccuuccucggcguguacuaccacaagaacaacaagagcuggauggaguccgaguuccgggucuacagcuccgccaacaacugcacguucgaguacgugagccagcccuuccugauggaccuggagggcaagcaggggaacuucaagaaccuccgcgaguucguguucaagaacaucgacggcuacuucaagaucuacuccaagcacaccccgaucaaccugguccgggaccugccccagggguucagcgcccucgagccccugguggaccugcccaucggcaucaacaucacccgcuuccagacccuccuggcccugcaccgguccuaccucacgccgggggacagcagcuccggcuggaccgcgggcgccgccgccuacuacgugggguaccugcagccccgcaccuuccugcucaaguacaacgagaacggcaccaucacggacgcggucgacugcgcccuggacccccugagcgagaccaagugcacccucaaguccuucaccguggagaaggggaucuaccagacgagcaacuuccgggugcagcccaccgaguccaucguccgcuucccgaacaucaccaaccugugccccuucggcgagguguucaacgccacccgguucgccagcgucuacgccuggaaccgcaagcggaucuccaacugcguggcggacuacagcgugcuguacaacuccgccagcuucuccacguucaagugcuacggcgucagccccaccaagcucaacgaccugugcuucaccaacguguacgccgacuccuucgugauccgcggggacgagguccggcagaucgcccccggccagaccgggaagaucgccgacuacaacuacaagcugccggacgacuucacgggcugcgugaucgcguggaacagcaacaaccucgacuccaaggucgggggcaacuacaacuaccuguaccgccuguuccgcaagagcaaccucaagcccuucgagcgggacaucuccaccgagaucuaccaggccggcagcacccccugcaacgggguggagggcuucaacugcuacuucccccugcaguccuacggguuccagccgaccaacggcgugggguaccagcccuaccggguggucgugcugagcuucgagcuccugcacgcccccgccacggugugcggccccaagaaguccaccaaccuggucaagaacaagugcgugaacuucaacuucaacggccucaccgggaccggcgugcugaccgagagcaacaagaaguuccugccguuccagcaguucgggcgcgacaucgccgacacgaccgacgcgguccgcgacccccagacccuggagauccucgacaucacccccugcagcuucggcgggguguccgugaucacgccgggcaccaacaccagcaaccaggucgccgugcuguaccaggacgugaacugcaccgagguccccguggccauccacgccgaccagcugacgcccaccuggcggguguacuccaccggcagcaacgucuuccagacccgcgccgggugccucaucggcgcggagcacgugaacaacuccuacgagugcgacauccccaucggggccggcaucugcgccagcuaccagacgcagaccaacuccccgcggcgcgcccggagcguggcgucccagagcaucaucgccuacaccaugucccugggcgccgagaacagcgucgccuacuccaacaacagcaucgccauccccaccaacuucacgaucuccgugaccaccgagauccugcccgugagcaugaccaagacgagcgucgacugcaccauguacaucugcggggacuccaccgagugcagcaaccuccugcugcaguacggcuccuucugcacccagcucaaccgcgcgcugacggggaucgccguggagcaggacaagaacacccaggagguguucgcccaggucaagcagaucuacaagacgcccccgaucaaggacuucggcggguucaacuucagccagauccugcccgaccccuccaagcccagcaagcgguccuucaucgaggaccuccuguucaacaaggugacccuggccgacgccggcuucaucaagcaguacggcgacugccucggggacaucgcggcccgcgaccugaucugcgcccagaaguucaacggccugaccgugcucccgccccugcugaccgacgagaugaucgcccaguacaccagcgcccuccuggcggggaccaucacguccggcuggaccuucggggccggcgccgcccugcagauccccuucgcgaugcagauggccuaccgguucaacggcaucggggucacccagaacgugcucuacgagaaccagaagcugaucgccaaccaguucaacagcgccaucggcaagauccaggacucccugagcuccaccgccagcgcgcucgggaagcugcaggacguggucaaccagaacgcccaggcccugaacacgcucgugaagcagcuguccagcaacuucggcgccaucuccagcgugcugaacgacauccucucccgccuggacccgcccgaggccgaggugcagaucgaccggcugaucaccgggcgccuccagagccugcagaccuacgugacccagcagcugauccgggcggccgagauccgcgccagcgccaaccucgccgcgaccaagauguccgagugcguccugggccagagcaagcggguggacuucugcggcaagggguaccaccugauguccuucccccagagcgccccgcacggcguggucuuccuccacgugacguacguccccgcccaggagaagaacuucaccaccgcccccgcgaucugccacgacgggaaggcccacuucccccgcgagggcguguucguguccaacgggacccacugguucgucacgcagcggaacuucuacgagccgcagaucaucaccaccgacaacaccuucgugagcggcaacugcgacguggucaucggcaucgugaacaacacgguguacgacccccugcagcccgagcuggacuccuucaaggaggagcucgacaaguacuucaagaaccacaccagccccgacgucgaccugggggacaucuccggcaucaacgccagcguggugaacauccagaaggagaucgaccgccugaacgaggucgccaagaaccucaacgagucccugaucgaccugcaggagcucgggaaguacgagcaguacaucaagggcgggggcgggagcgacaucaucaagcuccugaacgagcaggucaacaaggagaugcaguccagcaaccuguacauguccaugagcuccuggugcuacacccacagccucgacggcgccgggcuguuccuguucgaccacgccgcggaggaguacgagcacgccaagaagcucaucaucuuccugaacgagaacaacgugcccgugcagcugaccuccaucagcgccccggagcacaaguucgagggccucacgcagaucuuccagaaggccuacgagcacgagcagcacaucuccgagagcaucaacaacaucguggaccacgccaucaaguccaaggaccacgcgaccuucaacuuccugcagugguacgucgccgagcagcacgaggaggaggugcuguucaaggacauccucgacaagaucgagcugaucgggaacgagaaccacggccuguaccucgccgaccaguacgugaaggggaucgccaagagccgcaaguccugaggacuaguuauaagacugacuagcccgaugggccucccaacgggcccuccuccccuccuugcaccgagauuaauaaaaaaaaaaaaaaaaaaaaaaaaaaaaaaaaaaaaaaaaaaaaaaaaaaaaaaaaaaaaaaaaugcaucccccccccccccccccccccccccccccccaaaggcucuuuucagagccaccagaauu

SEQ ID NO: 12842 - RNA, 4357 nt, Artificial Sequence
  SARS-CoV-2/Wuhan/WIV05/2019__EPI_ISL_402128 spike protein mRNA gc (1-1211)(K986P_V987P_T887WN_A1020W) Ferritin construct
aggagaaagcuuaccauguucguguuccugguccuccugccccuggugagcucccagugcgugaaccucaccacccgcacgcagcugccgcccgccuacaccaacagcuucacccggggcgucuacuaccccgacaagguguuccgcuccagcgugcugcacuccacccaggaccucuuccugcccuucuucagcaacgucacgugguuccacgccauccacguguccgggaccaacggcaccaagcgguucgacaacccggugcugcccuucaacgacggggucuacuucgcgagcaccgagaaguccaacaucauccgcggcuggaucuucgggacgacccucgacagcaagacccagucccugcugaucgugaacaacgccaccaacguggucaucaaggugugcgaguuccaguucugcaacgaccccuuccucggcguguacuaccacaagaacaacaagagcuggauggaguccgaguuccgggucuacagcuccgccaacaacugcacguucgaguacgugagccagcccuuccugauggaccuggagggcaagcaggggaacuucaagaaccuccgcgaguucguguucaagaacaucgacggcuacuucaagaucuacuccaagcacaccccgaucaaccugguccgggaccugccccagggguucagcgcccucgagccccugguggaccugcccaucggcaucaacaucacccgcuuccagacccuccuggcccugcaccgguccuaccucacgccgggggacagcagcuccggcuggaccgcgggcgccgccgccuacuacgugggguaccugcagccccgcaccuuccugcucaaguacaacgagaacggcaccaucacggacgcggucgacugcgcccuggacccccugagcgagaccaagugcacccucaaguccuucaccguggagaaggggaucuaccagacgagcaacuuccgggugcagcccaccgaguccaucguccgcuucccgaacaucaccaaccugugccccuucggcgagguguucaacgccacccgguucgccagcgucuacgccuggaaccgcaagcggaucuccaacugcguggcggacuacagcgugcuguacaacuccgccagcuucuccacguucaagugcuacggcgucagccccaccaagcucaacgaccugugcuucaccaacguguacgccgacuccuucgugauccgcggggacgagguccggcagaucgcccccggccagaccgggaagaucgccgacuacaacuacaagcugccggacgacuucacgggcugcgugaucgcguggaacagcaacaaccucgacuccaaggucgggggcaacuacaacuaccuguaccgccuguuccgcaagagcaaccucaagcccuucgagcgggacaucuccaccgagaucuaccaggccggcagcacccccugcaacgggguggagggcuucaacugcuacuucccccugcaguccuacggguuccagccgaccaacggcgugggguaccagcccuaccggguggucgugcugagcuucgagcuccugcacgcccccgccacggugugcggccccaagaaguccaccaaccuggucaagaacaagugcgugaacuucaacuucaacggccucaccgggaccggcgugcugaccgagagcaacaagaaguuccugccguuccagcaguucgggcgcgacaucgccgacacgaccgacgcgguccgcgacccccagacccuggagauccucgacaucacccccugcagcuucggcgggguguccgugaucacgccgggcaccaacaccagcaaccaggucgccgugcuguaccaggacgugaacugcaccgagguccccguggccauccacgccgaccagcugacgcccaccuggcggguguacuccaccggcagcaacgucuuccagacccgcgccgggugccucaucggcgcggagcacgugaacaacuccuacgagugcgacauccccaucggggccggcaucugcgccagcuaccagacgcagaccaacuccccgcggcgcgcccggagcguggcgucccagagcaucaucgccuacaccaugucccugggcgccgagaacagcgucgccuacuccaacaacagcaucgccauccccaccaacuucacgaucuccgugaccaccgagauccugcccgugagcaugaccaagacgagcgucgacugcaccauguacaucugcggggacuccaccgagugcagcaaccuccugcugcaguacggcuccuucugcacccagcucaaccgcgcgcugacggggaucgccguggagcaggacaagaacacccaggagguguucgcccaggucaagcagaucuacaagacgcccccgaucaaggacuucggcggguucaacuucagccagauccugcccgaccccuccaagcccagcaagcgguccuucaucgaggaccuccuguucaacaaggugacccuggccgacgccggcuucaucaagcaguacggcgacugccucggggacaucgcggcccgcgaccugaucugcgcccagaaguucaacggccugaccgugcucccgccccugcugaccgacgagaugaucgcccaguacaccagcgcccuccuggcggggaccaucacguccggcuggugguucggggccggcgccgcccugcagauccccuucgcgaugcagauggccuaccgguucaacggcaucggggucacccagaacgugcucuacgagaaccagaagcugaucgccaaccaguucaacagcgccaucggcaagauccaggacucccugagcuccaccgccagcgcgcucgggaagcugcaggacguggucaaccagaacgcccaggcccugaacacgcucgugaagcagcuguccagcaacuucggcgccaucuccagcgugcugaacgacauccucucccgccuggacccgcccgaggccgaggugcagaucgaccggcugaucaccgggcgccuccagagccugcagaccuacgugacccagcagcugauccgggcggccgagauccgcuggagcgccaaccucgccgcgaccaagauguccgagugcguccugggccagagcaagcggguggacuucugcggcaagggguaccaccugauguccuucccccagagcgccccgcacggcguggucuuccuccacgugacguacguccccgcccaggagaagaacuucaccaccgcccccgcgaucugccacgacgggaaggcccacuucccccgcgagggcguguucguguccaacgggacccacugguucgucacgcagcggaacuucuacgagccgcagaucaucaccaccgacaacaccuucgugagcggcaacugcgacguggucaucggcaucgugaacaacacgguguacgacccccugcagcccgagcuggacuccuucaaggaggagcucgacaaguacuucaagaaccacaccagccccgacgucgaccugggggacaucuccggcaucaacgccagcguggugaacauccagaaggagaucgaccgccugaacgaggucgccaagaaccucaacgagucccugaucgaccugcaggagcucgggaaguacgagcaguacaucaagggcgggggcgggagcgacaucaucaagcuccugaacgagcaggucaacaaggagaugcaguccagcaaccuguacauguccaugagcuccuggugcuacacccacagccucgacggcgccgggcuguuccuguucgaccacgccgcggaggaguacgagcacgccaagaagcucaucaucuuccugaacgagaacaacgugcccgugcagcugaccuccaucagcgccccggagcacaaguucgagggccucacgcagaucuuccagaaggccuacgagcacgagcagcacaucuccgagagcaucaacaacaucguggaccacgccaucaaguccaaggaccacgcgaccuucaacuuccugcagugguacgucgccgagcagcacgaggaggaggugcuguucaaggacauccucgacaagaucgagcugaucgggaacgagaaccacggccuguaccucgccgaccaguacgugaaggggaucgccaagagccgcaaguccugaggacuaguuauaagacugacuagcccgaugggccucccaacgggcccuccuccccuccuugcaccgagauuaauaaaaaaaaaaaaaaaaaaaaaaaaaaaaaaaaaaaaaaaaaaaaaaaaaaaaaaaaaaaaaaaaugcaucccccccccccccccccccccccccccccccaaaggcucuuuucagagccaccagaauu

SEQ ID NO: 12843 - RNA, 4357 nt, Artificial Sequence
  SARS-CoV-2/Wuhan/WIV05/2019__EPI_ISL_402128 spike protein mRNA gc (1-1211)(K986P_V987P_P1069F) Ferritin construct
aggagaaagcuuaccauguucguguuccugguccuccugccccuggugagcucccagugcgugaaccucaccacccgcacgcagcugccgcccgccuacaccaacagcuucacccggggcgucuacuaccccgacaagguguuccgcuccagcgugcugcacuccacccaggaccucuuccugcccuucuucagcaacgucacgugguuccacgccauccacguguccgggaccaacggcaccaagcgguucgacaacccggugcugcccuucaacgacggggucuacuucgcgagcaccgagaaguccaacaucauccgcggcuggaucuucgggacgacccucgacagcaagacccagucccugcugaucgugaacaacgccaccaacguggucaucaaggugugcgaguuccaguucugcaacgaccccuuccucggcguguacuaccacaagaacaacaagagcuggauggaguccgaguuccgggucuacagcuccgccaacaacugcacguucgaguacgugagccagcccuuccugauggaccuggagggcaagcaggggaacuucaagaaccuccgcgaguucguguucaagaacaucgacggcuacuucaagaucuacuccaagcacaccccgaucaaccugguccgggaccugccccagggguucagcgcccucgagccccugguggaccugcccaucggcaucaacaucacccgcuuccagacccuccuggcccugcaccgguccuaccucacgccgggggacagcagcuccggcuggaccgcgggcgccgccgccuacuacgugggguaccugcagccccgcaccuuccugcucaaguacaacgagaacggcaccaucacggacgcggucgacugcgcccuggacccccugagcgagaccaagugcacccucaaguccuucaccguggagaaggggaucuaccagacgagcaacuuccgggugcagcccaccgaguccaucguccgcuucccgaacaucaccaaccugugccccuucggcgagguguucaacgccacccgguucgccagcgucuacgccuggaaccgcaagcggaucuccaacugcguggcggacuacagcgugcuguacaacuccgccagcuucuccacguucaagugcuacggcgucagccccaccaagcucaacgaccugugcuucaccaacguguacgccgacuccuucgugauccgcggggacgagguccggcagaucgcccccggccagaccgggaagaucgccgacuacaacuacaagcugccggacgacuucacgggcugcgugaucgcguggaacagcaacaaccucgacuccaaggucgggggcaacuacaacuaccuguaccgccuguuccgcaagagcaaccucaagcccuucgagcgggacaucuccaccgagaucuaccaggccggcagcacccccugcaacgggguggagggcuucaacugcuacuucccccugcaguccuacggguuccagccgaccaacggcgugggguaccagcccuaccggguggucgugcugagcuucgagcuccugcacgcccccgccacggugugcggccccaagaaguccaccaaccuggucaagaacaagugcgugaacuucaacuucaacggccucaccgggaccggcgugcugaccgagagcaacaagaaguuccugccguuccagcaguucgggcgcgacaucgccgacacgaccgacgcgguccgcgacccccagacccuggagauccucgacaucacccccugcagcuucggcgggguguccgugaucacgccgggcaccaacaccagcaaccaggucgccgugcuguaccaggacgugaacugcaccgagguccccguggccauccacgccgaccagcugacgcccaccuggcggguguacuccaccggcagcaacgucuuccagacccgcgccgggugccucaucggcgcggagcacgugaacaacuccuacgagugcgacauccccaucggggccggcaucugcgccagcuaccagacgcagaccaacuccccgcggcgcgcccggagcguggcgucccagagcaucaucgccuacaccaugucccugggcgccgagaacagcgucgccuacuccaacaacagcaucgccauccccaccaacuucacgaucuccgugaccaccgagauccugcccgugagcaugaccaagacgagcgucgacugcaccauguacaucugcggggacuccaccgagugcagcaaccuccugcugcaguacggcuccuucugcacccagcucaaccgcgcgcugacggggaucgccguggagcaggacaagaacacccaggagguguucgcccaggucaagcagaucuacaagacgcccccgaucaaggacuucggcggguucaacuucagccagauccugcccgaccccuccaagcccagcaagcgguccuucaucgaggaccuccuguucaacaaggugacccuggccgacgccggcuucaucaagcaguacggcgacugccucggggacaucgcggcccgcgaccugaucugcgcccagaaguucaacggccugaccgugcucccgccccugcugaccgacgagaugaucgcccaguacaccagcgcccuccuggcggggaccaucacguccggcuggaccuucggggccggcgccgcccugcagauccccuucgcgaugcagauggccuaccgguucaacggcaucggggucacccagaacgugcucuacgagaaccagaagcugaucgccaaccaguucaacagcgccaucggcaagauccaggacucccugagcuccaccgccagcgcgcucgggaagcugcaggacguggucaaccagaacgcccaggcccugaacacgcucgugaagcagcuguccagcaacuucggcgccaucuccagcgugcugaacgacauccucucccgccuggacccgcccgaggccgaggugcagaucgaccggcugaucaccgggcgccuccagagccugcagaccuacgugacccagcagcugauccgggcggccgagauccgcgccagcgccaaccucgccgcgaccaagauguccgagugcguccugggccagagcaagcggguggacuucugcggcaagggguaccaccugauguccuucccccagagcgccccgcacggcguggucuuccuccacgugacguacgucuucgcccaggagaagaacuucaccaccgcccccgcgaucugccacgacgggaaggcccacuucccccgcgagggcguguucguguccaacgggacccacugguucgucacgcagcggaacuucuacgagccgcagaucaucaccaccgacaacaccuucgugagcggcaacugcgacguggucaucggcaucgugaacaacacgguguacgacccccugcagcccgagcuggacuccuucaaggaggagcucgacaaguacuucaagaaccacaccagccccgacgucgaccugggggacaucuccggcaucaacgccagcguggugaacauccagaaggagaucgaccgccugaacgaggucgccaagaaccucaacgagucccugaucgaccugcaggagcucgggaaguacgagcaguacaucaagggcgggggcgggagcgacaucaucaagcuccugaacgagcaggucaacaaggagaugcaguccagcaaccuguacauguccaugagcuccuggugcuacacccacagccucgacggcgccgggcuguuccuguucgaccacgccgcggaggaguacgagcacgccaagaagcucaucaucuuccugaacgagaacaacgugcccgugcagcugaccuccaucagcgccccggagcacaaguucgagggccucacgcagaucuuccagaaggccuacgagcacgagcagcacaucuccgagagcaucaacaacaucguggaccacgccaucaaguccaaggaccacgcgaccuucaacuuccugcagugguacgucgccgagcagcacgaggaggaggugcuguucaaggacauccucgacaagaucgagcugaucgggaacgagaaccacggccuguaccucgccgaccaguacgugaaggggaucgccaagagccgcaaguccugaggacuaguuauaagacugacuagcccgaugggccucccaacgggcccuccuccccuccuugcaccgagauuaauaaaaaaaaaaaaaaaaaaaaaaaaaaaaaaaaaaaaaaaaaaaaaaaaaaaaaaaaaaaaaaaaugcaucccccccccccccccccccccccccccccccaaaggcucuuuucagagccaccagaauu

SEQ ID NO: 12844 - RNA, 4357 nt, Artificial Sequence
  SARS-CoV-2/Wuhan/WIV05/2019__EPI_ISL_402128 spike protein mRNA gc (1-1211)(K986P_V987P_ H1048Q_H1064N_ H1083N_H1101N) Ferritin construct
aggagaaagcuuaccauguucguguuccugguccuccugccccuggugagcucccagugcgugaaccucaccacccgcacgcagcugccgcccgccuacaccaacagcuucacccggggcgucuacuaccccgacaagguguuccgcuccagcgugcugcacuccacccaggaccucuuccugcccuucuucagcaacgucacgugguuccacgccauccacguguccgggaccaacggcaccaagcgguucgacaacccggugcugcccuucaacgacggggucuacuucgcgagcaccgagaaguccaacaucauccgcggcuggaucuucgggacgacccucgacagcaagacccagucccugcugaucgugaacaacgccaccaacguggucaucaaggugugcgaguuccaguucugcaacgaccccuuccucggcguguacuaccacaagaacaacaagagcuggauggaguccgaguuccgggucuacagcuccgccaacaacugcacguucgaguacgugagccagcccuuccugauggaccuggagggcaagcaggggaacuucaagaaccuccgcgaguucguguucaagaacaucgacggcuacuucaagaucuacuccaagcacaccccgaucaaccugguccgggaccugccccagggguucagcgcccucgagccccugguggaccugcccaucggcaucaacaucacccgcuuccagacccuccuggcccugcaccgguccuaccucacgccgggggacagcagcuccggcuggaccgcgggcgccgccgccuacuacgugggguaccugcagccccgcaccuuccugcucaaguacaacgagaacggcaccaucacggacgcggucgacugcgcccuggacccccugagcgagaccaagugcacccucaaguccuucaccguggagaaggggaucuaccagacgagcaacuuccgggugcagcccaccgaguccaucguccgcuucccgaacaucaccaaccugugccccuucggcgagguguucaacgccacccgguucgccagcgucuacgccuggaaccgcaagcggaucuccaacugcguggcggacuacagcgugcuguacaacuccgccagcuucuccacguucaagugcuacggcgucagccccaccaagcucaacgaccugugcuucaccaacguguacgccgacuccuucgugauccgcggggacgagguccggcagaucgcccccggccagaccgggaagaucgccgacuacaacuacaagcugccggacgacuucacgggcugcgugaucgcguggaacagcaacaaccucgacuccaaggucgggggcaacuacaacuaccuguaccgccuguuccgcaagagcaaccucaagcccuucgagcgggacaucuccaccgagaucuaccaggccggcagcacccccugcaacgggguggagggcuucaacugcuacuucccccugcaguccuacggguuccagccgaccaacggcgugggguaccagcccuaccggguggucgugcugagcuucgagcuccugcacgcccccgccacggugugcggccccaagaaguccaccaaccuggucaagaacaagugcgugaacuucaacuucaacggccucaccgggaccggcgugcugaccgagagcaacaagaaguuccugccguuccagcaguucgggcgcgacaucgccgacacgaccgacgcgguccgcgacccccagacccuggagauccucgacaucacccccugcagcuucggcgggguguccgugaucacgccgggcaccaacaccagcaaccaggucgccgugcuguaccaggacgugaacugcaccgagguccccguggccauccacgccgaccagcugacgcccaccuggcggguguacuccaccggcagcaacgucuuccagacccgcgccgggugccucaucggcgcggagcacgugaacaacuccuacgagugcgacauccccaucggggccggcaucugcgccagcuaccagacgcagaccaacuccccgcggcgcgcccggagcguggcgucccagagcaucaucgccuacaccaugucccugggcgccgagaacagcgucgccuacuccaacaacagcaucgccauccccaccaacuucacgaucuccgugaccaccgagauccugcccgugagcaugaccaagacgagcgucgacugcaccauguacaucugcggggacuccaccgagugcagcaaccuccugcugcaguacggcuccuucugcacccagcucaaccgcgcgcugacggggaucgccguggagcaggacaagaacacccaggagguguucgcccaggucaagcagaucuacaagacgcccccgaucaaggacuucggcggguucaacuucagccagauccugcccgaccccuccaagcccagcaagcgguccuucaucgaggaccuccuguucaacaaggugacccuggccgacgccggcuucaucaagcaguacggcgacugccucggggacaucgcggcccgcgaccugaucugcgcccagaaguucaacggccugaccgugcucccgccccugcugaccgacgagaugaucgcccaguacaccagcgcccuccuggcggggaccaucacguccggcuggaccuucggggccggcgccgcccugcagauccccuucgcgaugcagauggccuaccgguucaacggcaucggggucacccagaacgugcucuacgagaaccagaagcugaucgccaaccaguucaacagcgccaucggcaagauccaggacucccugagcuccaccgccagcgcgcucgggaagcugcaggacguggucaaccagaacgcccaggcccugaacacgcucgugaagcagcuguccagcaacuucggcgccaucuccagcgugcugaacgacauccucucccgccuggacccgcccgaggccgaggugcagaucgaccggcugaucaccgggcgccuccagagccugcagaccuacgugacccagcagcugauccgggcggccgagauccgcgccagcgccaaccucgccgcgaccaagauguccgagugcguccugggccagagcaagcggguggacuucugcggcaagggguaccagcugauguccuucccccagagcgccccgcacggcguggucuuccucaacgugacguacguccccgcccaggagaagaacuucaccaccgcccccgcgaucugcaacgacgggaaggcccacuucccccgcgagggcguguucguguccaacgggaccaacugguucgucacgcagcggaacuucuacgagccgcagaucaucaccaccgacaacaccuucgugagcggcaacugcgacguggucaucggcaucgugaacaacacgguguacgacccccugcagcccgagcuggacuccuucaaggaggagcucgacaaguacuucaagaaccacaccagccccgacgucgaccugggggacaucuccggcaucaacgccagcguggugaacauccagaaggagaucgaccgccugaacgaggucgccaagaaccucaacgagucccugaucgaccugcaggagcucgggaaguacgagcaguacaucaagggcgggggcgggagcgacaucaucaagcuccugaacgagcaggucaacaaggagaugcaguccagcaaccuguacauguccaugagcuccuggugcuacacccacagccucgacggcgccgggcuguuccuguucgaccacgccgcggaggaguacgagcacgccaagaagcucaucaucuuccugaacgagaacaacgugcccgugcagcugaccuccaucagcgccccggagcacaaguucgagggccucacgcagaucuuccagaaggccuacgagcacgagcagcacaucuccgagagcaucaacaacaucguggaccacgccaucaaguccaaggaccacgcgaccuucaacuuccugcagugguacgucgccgagcagcacgaggaggaggugcuguucaaggacauccucgacaagaucgagcugaucgggaacgagaaccacggccuguaccucgccgaccaguacgugaaggggaucgccaagagccgcaaguccugaggacuaguuauaagacugacuagcccgaugggccucccaacgggcccuccuccccuccuugcaccgagauuaauaaaaaaaaaaaaaaaaaaaaaaaaaaaaaaaaaaaaaaaaaaaaaaaaaaaaaaaaaaaaaaaaugcaucccccccccccccccccccccccccccccccaaaggcucuuuucagagccaccagaauu

SEQ ID NO: 12845 - RNA, 4357 nt, Artificial Sequence
  SARS-CoV-2/Wuhan/WIV05/2019__EPI_ISL_402128 spike protein mRNA gc (1-1211)(I712C_T1077C) Ferritin construct
aggagaaagcuuaccauguucguguuccugguccuccugccccuggugagcucccagugcgugaaccucaccacccgcacgcagcugccgcccgccuacaccaacagcuucacccggggcgucuacuaccccgacaagguguuccgcuccagcgugcugcacuccacccaggaccucuuccugcccuucuucagcaacgucacgugguuccacgccauccacguguccgggaccaacggcaccaagcgguucgacaacccggugcugcccuucaacgacggggucuacuucgcgagcaccgagaaguccaacaucauccgcggcuggaucuucgggacgacccucgacagcaagacccagucccugcugaucgugaacaacgccaccaacguggucaucaaggugugcgaguuccaguucugcaacgaccccuuccucggcguguacuaccacaagaacaacaagagcuggauggaguccgaguuccgggucuacagcuccgccaacaacugcacguucgaguacgugagccagcccuuccugauggaccuggagggcaagcaggggaacuucaagaaccuccgcgaguucguguucaagaacaucgacggcuacuucaagaucuacuccaagcacaccccgaucaaccugguccgggaccugccccagggguucagcgcccucgagccccugguggaccugcccaucggcaucaacaucacccgcuuccagacccuccuggcccugcaccgguccuaccucacgccgggggacagcagcuccggcuggaccgcgggcgccgccgccuacuacgugggguaccugcagccccgcaccuuccugcucaaguacaacgagaacggcaccaucacggacgcggucgacugcgcccuggacccccugagcgagaccaagugcacccucaaguccuucaccguggagaaggggaucuaccagacgagcaacuuccgggugcagcccaccgaguccaucguccgcuucccgaacaucaccaaccugugccccuucggcgagguguucaacgccacccgguucgccagcgucuacgccuggaaccgcaagcggaucuccaacugcguggcggacuacagcgugcuguacaacuccgccagcuucuccacguucaagugcuacggcgucagccccaccaagcucaacgaccugugcuucaccaacguguacgccgacuccuucgugauccgcggggacgagguccggcagaucgcccccggccagaccgggaagaucgccgacuacaacuacaagcugccggacgacuucacgggcugcgugaucgcguggaacagcaacaaccucgacuccaaggucgggggcaacuacaacuaccuguaccgccuguuccgcaagagcaaccucaagcccuucgagcgggacaucuccaccgagaucuaccaggccggcagcacccccugcaacgggguggagggcuucaacugcuacuucccccugcaguccuacggguuccagccgaccaacggcgugggguaccagcccuaccggguggucgugcugagcuucgagcuccugcacgcccccgccacggugugcggccccaagaaguccaccaaccuggucaagaacaagugcgugaacuucaacuucaacggccucaccgggaccggcgugcugaccgagagcaacaagaaguuccugccguuccagcaguucgggcgcgacaucgccgacacgaccgacgcgguccgcgacccccagacccuggagauccucgacaucacccccugcagcuucggcgggguguccgugaucacgccgggcaccaacaccagcaaccaggucgccgugcuguaccaggacgugaacugcaccgagguccccguggccauccacgccgaccagcugacgcccaccuggcggguguacuccaccggcagcaacgucuuccagacccgcgccgggugccucaucggcgcggagcacgugaacaacuccuacgagugcgacauccccaucggggccggcaucugcgccagcuaccagacgcagaccaacuccccgcggcgcgcccggagcguggcgucccagagcaucaucgccuacaccaugucccugggcgccgagaacagcgucgccuacuccaacaacagcugcgccauccccaccaacuucacgaucuccgugaccaccgagauccugcccgugagcaugaccaagacgagcgucgacugcaccauguacaucugcggggacuccaccgagugcagcaaccuccugcugcaguacggcuccuucugcacccagcucaaccgcgcgcugacggggaucgccguggagcaggacaagaacacccaggagguguucgcccaggucaagcagaucuacaagacgcccccgaucaaggacuucggcggguucaacuucagccagauccugcccgaccccuccaagcccagcaagcgguccuucaucgaggaccuccuguucaacaaggugacccuggccgacgccggcuucaucaagcaguacggcgacugccucggggacaucgcggcccgcgaccugaucugcgcccagaaguucaacggccugaccgugcucccgccccugcugaccgacgagaugaucgcccaguacaccagcgcccuccuggcggggaccaucacguccggcuggaccuucggggccggcgccgcccugcagauccccuucgcgaugcagauggccuaccgguucaacggcaucggggucacccagaacgugcucuacgagaaccagaagcugaucgccaaccaguucaacagcgccaucggcaagauccaggacucccugagcuccaccgccagcgcgcucgggaagcugcaggacguggucaaccagaacgcccaggcccugaacacgcucgugaagcagcuguccagcaacuucggcgccaucuccagcgugcugaacgacauccucucccgccuggacaaggucgaggccgaggugcagaucgaccggcugaucaccgggcgccuccagagccugcagaccuacgugacccagcagcugauccgggcggccgagauccgcgccagcgccaaccucgccgcgaccaagauguccgagugcguccugggccagagcaagcggguggacuucugcggcaagggguaccaccugauguccuucccccagagcgccccgcacggcguggucuuccuccacgugacguacguccccgcccaggagaagaacuucaccugcgcccccgcgaucugccacgacgggaaggcccacuucccccgcgagggcguguucguguccaacgggacccacugguucgucacgcagcggaacuucuacgagccgcagaucaucaccaccgacaacaccuucgugagcggcaacugcgacguggucaucggcaucgugaacaacacgguguacgacccccugcagcccgagcuggacuccuucaaggaggagcucgacaaguacuucaagaaccacaccagccccgacgucgaccugggggacaucuccggcaucaacgccagcguggugaacauccagaaggagaucgaccgccugaacgaggucgccaagaaccucaacgagucccugaucgaccugcaggagcucgggaaguacgagcaguacaucaagggcgggggcgggagcgacaucaucaagcuccugaacgagcaggucaacaaggagaugcaguccagcaaccuguacauguccaugagcuccuggugcuacacccacagccucgacggcgccgggcuguuccuguucgaccacgccgcggaggaguacgagcacgccaagaagcucaucaucuuccugaacgagaacaacgugcccgugcagcugaccuccaucagcgccccggagcacaaguucgagggccucacgcagaucuuccagaaggccuacgagcacgagcagcacaucuccgagagcaucaacaacaucguggaccacgccaucaaguccaaggaccacgcgaccuucaacuuccugcagugguacgucgccgagcagcacgaggaggaggugcuguucaaggacauccucgacaagaucgagcugaucgggaacgagaaccacggccuguaccucgccgaccaguacgugaaggggaucgccaagagccgcaaguccugaggacuaguuauaagacugacuagcccgaugggccucccaacgggcccuccuccccuccuugcaccgagauuaauaaaaaaaaaaaaaaaaaaaaaaaaaaaaaaaaaaaaaaaaaaaaaaaaaaaaaaaaaaaaaaaaugcaucccccccccccccccccccccccccccccccaaaggcucuuuucagagccaccagaauu

SEQ ID NO: 12846 - RNA, 4357 nt, Artificial Sequence
  SARS-CoV-2/Wuhan/WIV05/2019__EPI_ISL_402128 spike protein mRNA gc (1-1211)(I714C_Y1110C) Ferritin construct
aggagaaagcuuaccauguucguguuccugguccuccugccccuggugagcucccagugcgugaaccucaccacccgcacgcagcugccgcccgccuacaccaacagcuucacccggggcgucuacuaccccgacaagguguuccgcuccagcgugcugcacuccacccaggaccucuuccugcccuucuucagcaacgucacgugguuccacgccauccacguguccgggaccaacggcaccaagcgguucgacaacccggugcugcccuucaacgacggggucuacuucgcgagcaccgagaaguccaacaucauccgcggcuggaucuucgggacgacccucgacagcaagacccagucccugcugaucgugaacaacgccaccaacguggucaucaaggugugcgaguuccaguucugcaacgaccccuuccucggcguguacuaccacaagaacaacaagagcuggauggaguccgaguuccgggucuacagcuccgccaacaacugcacguucgaguacgugagccagcccuuccugauggaccuggagggcaagcaggggaacuucaagaaccuccgcgaguucguguucaagaacaucgacggcuacuucaagaucuacuccaagcacaccccgaucaaccugguccgggaccugccccagggguucagcgcccucgagccccugguggaccugcccaucggcaucaacaucacccgcuuccagacccuccuggcccugcaccgguccuaccucacgccgggggacagcagcuccggcuggaccgcgggcgccgccgccuacuacgugggguaccugcagccccgcaccuuccugcucaaguacaacgagaacggcaccaucacggacgcggucgacugcgcccuggacccccugagcgagaccaagugcacccucaaguccuucaccguggagaaggggaucuaccagacgagcaacuuccgggugcagcccaccgaguccaucguccgcuucccgaacaucaccaaccugugccccuucggcgagguguucaacgccacccgguucgccagcgucuacgccuggaaccgcaagcggaucuccaacugcguggcggacuacagcgugcuguacaacuccgccagcuucuccacguucaagugcuacggcgucagccccaccaagcucaacgaccugugcuucaccaacguguacgccgacuccuucgugauccgcggggacgagguccggcagaucgcccccggccagaccgggaagaucgccgacuacaacuacaagcugccggacgacuucacgggcugcgugaucgcguggaacagcaacaaccucgacuccaaggucgggggcaacuacaacuaccuguaccgccuguuccgcaagagcaaccucaagcccuucgagcgggacaucuccaccgagaucuaccaggccggcagcacccccugcaacgggguggagggcuucaacugcuacuucccccugcaguccuacggguuccagccgaccaacggcgugggguaccagcccuaccggguggucgugcugagcuucgagcuccugcacgcccccgccacggugugcggccccaagaaguccaccaaccuggucaagaacaagugcgugaacuucaacuucaacggccucaccgggaccggcgugcugaccgagagcaacaagaaguuccugccguuccagcaguucgggcgcgacaucgccgacacgaccgacgcgguccgcgacccccagacccuggagauccucgacaucacccccugcagcuucggcgggguguccgugaucacgccgggcaccaacaccagcaaccaggucgccgugcuguaccaggacgugaacugcaccgagguccccguggccauccacgccgaccagcugacgcccaccuggcggguguacuccaccggcagcaacgucuuccagacccgcgccgggugccucaucggcgcggagcacgugaacaacuccuacgagugcgacauccccaucggggccggcaucugcgccagcuaccagacgcagaccaacuccccgcggcgcgcccggagcguggcgucccagagcaucaucgccuacaccaugucccugggcgccgagaacagcgucgccuacuccaacaacagcaucgccugccccaccaacuucacgaucuccgugaccaccgagauccugcccgugagcaugaccaagacgagcgucgacugcaccauguacaucugcggggacuccaccgagugcagcaaccuccugcugcaguacggcuccuucugcacccagcucaaccgcgcgcugacggggaucgccguggagcaggacaagaacacccaggagguguucgcccaggucaagcagaucuacaagacgcccccgaucaaggacuucggcggguucaacuucagccagauccugcccgaccccuccaagcccagcaagcgguccuucaucgaggaccuccuguucaacaaggugacccuggccgacgccggcuucaucaagcaguacggcgacugccucggggacaucgcggcccgcgaccugaucugcgcccagaaguucaacggccugaccgugcucccgccccugcugaccgacgagaugaucgcccaguacaccagcgcccuccuggcggggaccaucacguccggcuggaccuucggggccggcgccgcccugcagauccccuucgcgaugcagauggccuaccgguucaacggcaucggggucacccagaacgugcucuacgagaaccagaagcugaucgccaaccaguucaacagcgccaucggcaagauccaggacucccugagcuccaccgccagcgcgcucgggaagcugcaggacguggucaaccagaacgcccaggcccugaacacgcucgugaagcagcuguccagcaacuucggcgccaucuccagcgugcugaacgacauccucucccgccuggacaaggucgaggccgaggugcagaucgaccggcugaucaccgggcgccuccagagccugcagaccuacgugacccagcagcugauccgggcggccgagauccgcgccagcgccaaccucgccgcgaccaagauguccgagugcguccugggccagagcaagcggguggacuucugcggcaagggguaccaccugauguccuucccccagagcgccccgcacggcguggucuuccuccacgugacguacguccccgcccaggagaagaacuucaccaccgcccccgcgaucugccacgacgggaaggcccacuucccccgcgagggcguguucguguccaacgggacccacugguucgucacgcagcggaacuucugcgagccgcagaucaucaccaccgacaacaccuucgugagcggcaacugcgacguggucaucggcaucgugaacaacacgguguacgacccccugcagcccgagcuggacuccuucaaggaggagcucgacaaguacuucaagaaccacaccagccccgacgucgaccugggggacaucuccggcaucaacgccagcguggugaacauccagaaggagaucgaccgccugaacgaggucgccaagaaccucaacgagucccugaucgaccugcaggagcucgggaaguacgagcaguacaucaagggcgggggcgggagcgacaucaucaagcuccugaacgagcaggucaacaaggagaugcaguccagcaaccuguacauguccaugagcuccuggugcuacacccacagccucgacggcgccgggcuguuccuguucgaccacgccgcggaggaguacgagcacgccaagaagcucaucaucuuccugaacgagaacaacgugcccgugcagcugaccuccaucagcgccccggagcacaaguucgagggccucacgcagaucuuccagaaggccuacgagcacgagcagcacaucuccgagagcaucaacaacaucguggaccacgccaucaaguccaaggaccacgcgaccuucaacuuccugcagugguacgucgccgagcagcacgaggaggaggugcuguucaaggacauccucgacaagaucgagcugaucgggaacgagaaccacggccuguaccucgccgaccaguacgugaaggggaucgccaagagccgcaaguccugaggacuaguuauaagacugacuagcccgaugggccucccaacgggcccuccuccccuccuugcaccgagauuaauaaaaaaaaaaaaaaaaaaaaaaaaaaaaaaaaaaaaaaaaaaaaaaaaaaaaaaaaaaaaaaaaugcaucccccccccccccccccccccccccccccccaaaggcucuuuucagagccaccagaauu

SEQ ID NO: 12847 - RNA, 4357 nt, Artificial Sequence
  SARS-CoV-2/Wuhan/WIV05/2019__EPI_ISL_402128 spike protein mRNA gc (1-1211)(P715C_P1069C) Ferritin construct
aggagaaagcuuaccauguucguguuccugguccuccugccccuggugagcucccagugcgugaaccucaccacccgcacgcagcugccgcccgccuacaccaacagcuucacccggggcgucuacuaccccgacaagguguuccgcuccagcgugcugcacuccacccaggaccucuuccugcccuucuucagcaacgucacgugguuccacgccauccacguguccgggaccaacggcaccaagcgguucgacaacccggugcugcccuucaacgacggggucuacuucgcgagcaccgagaaguccaacaucauccgcggcuggaucuucgggacgacccucgacagcaagacccagucccugcugaucgugaacaacgccaccaacguggucaucaaggugugcgaguuccaguucugcaacgaccccuuccucggcguguacuaccacaagaacaacaagagcuggauggaguccgaguuccgggucuacagcuccgccaacaacugcacguucgaguacgugagccagcccuuccugauggaccuggagggcaagcaggggaacuucaagaaccuccgcgaguucguguucaagaacaucgacggcuacuucaagaucuacuccaagcacaccccgaucaaccugguccgggaccugccccagggguucagcgcccucgagccccugguggaccugcccaucggcaucaacaucacccgcuuccagacccuccuggcccugcaccgguccuaccucacgccgggggacagcagcuccggcuggaccgcgggcgccgccgccuacuacgugggguaccugcagccccgcaccuuccugcucaaguacaacgagaacggcaccaucacggacgcggucgacugcgcccuggacccccugagcgagaccaagugcacccucaaguccuucaccguggagaaggggaucuaccagacgagcaacuuccgggugcagcccaccgaguccaucguccgcuucccgaacaucaccaaccugugccccuucggcgagguguucaacgccacccgguucgccagcgucuacgccuggaaccgcaagcggaucuccaacugcguggcggacuacagcgugcuguacaacuccgccagcuucuccacguucaagugcuacggcgucagccccaccaagcucaacgaccugugcuucaccaacguguacgccgacuccuucgugauccgcggggacgagguccggcagaucgcccccggccagaccgggaagaucgccgacuacaacuacaagcugccggacgacuucacgggcugcgugaucgcguggaacagcaacaaccucgacuccaaggucgggggcaacuacaacuaccuguaccgccuguuccgcaagagcaaccucaagcccuucgagcgggacaucuccaccgagaucuaccaggccggcagcacccccugcaacgggguggagggcuucaacugcuacuucccccugcaguccuacggguuccagccgaccaacggcgugggguaccagcccuaccggguggucgugcugagcuucgagcuccugcacgcccccgccacggugugcggccccaagaaguccaccaaccuggucaagaacaagugcgugaacuucaacuucaacggccucaccgggaccggcgugcugaccgagagcaacaagaaguuccugccguuccagcaguucgggcgcgacaucgccgacacgaccgacgcgguccgcgacccccagacccuggagauccucgacaucacccccugcagcuucggcgggguguccgugaucacgccgggcaccaacaccagcaaccaggucgccgugcuguaccaggacgugaacugcaccgagguccccguggccauccacgccgaccagcugacgcccaccuggcggguguacuccaccggcagcaacgucuuccagacccgcgccgggugccucaucggcgcggagcacgugaacaacuccuacgagugcgacauccccaucggggccggcaucugcgccagcuaccagacgcagaccaacuccccgcggcgcgcccggagcguggcgucccagagcaucaucgccuacaccaugucccugggcgccgagaacagcgucgccuacuccaacaacagcaucgccaucugcaccaacuucacgaucuccgugaccaccgagauccugcccgugagcaugaccaagacgagcgucgacugcaccauguacaucugcggggacuccaccgagugcagcaaccuccugcugcaguacggcuccuucugcacccagcucaaccgcgcgcugacggggaucgccguggagcaggacaagaacacccaggagguguucgcccaggucaagcagaucuacaagacgcccccgaucaaggacuucggcggguucaacuucagccagauccugcccgaccccuccaagcccagcaagcgguccuucaucgaggaccuccuguucaacaaggugacccuggccgacgccggcuucaucaagcaguacggcgacugccucggggacaucgcggcccgcgaccugaucugcgcccagaaguucaacggccugaccgugcucccgccccugcugaccgacgagaugaucgcccaguacaccagcgcccuccuggcggggaccaucacguccggcuggaccuucggggccggcgccgcccugcagauccccuucgcgaugcagauggccuaccgguucaacggcaucggggucacccagaacgugcucuacgagaaccagaagcugaucgccaaccaguucaacagcgccaucggcaagauccaggacucccugagcuccaccgccagcgcgcucgggaagcugcaggacguggucaaccagaacgcccaggcccugaacacgcucgugaagcagcuguccagcaacuucggcgccaucuccagcgugcugaacgacauccucucccgccuggacaaggucgaggccgaggugcagaucgaccggcugaucaccgggcgccuccagagccugcagaccuacgugacccagcagcugauccgggcggccgagauccgcgccagcgccaaccucgccgcgaccaagauguccgagugcguccugggccagagcaagcggguggacuucugcggcaagggguaccaccugauguccuucccccagagcgccccgcacggcguggucuuccuccacgugacguacgucugcgcccaggagaagaacuucaccaccgcccccgcgaucugccacgacgggaaggcccacuucccccgcgagggcguguucguguccaacgggacccacugguucgucacgcagcggaacuucuacgagccgcagaucaucaccaccgacaacaccuucgugagcggcaacugcgacguggucaucggcaucgugaacaacacgguguacgacccccugcagcccgagcuggacuccuucaaggaggagcucgacaaguacuucaagaaccacaccagccccgacgucgaccugggggacaucuccggcaucaacgccagcguggugaacauccagaaggagaucgaccgccugaacgaggucgccaagaaccucaacgagucccugaucgaccugcaggagcucgggaaguacgagcaguacaucaagggcgggggcgggagcgacaucaucaagcuccugaacgagcaggucaacaaggagaugcaguccagcaaccuguacauguccaugagcuccuggugcuacacccacagccucgacggcgccgggcuguuccuguucgaccacgccgcggaggaguacgagcacgccaagaagcucaucaucuuccugaacgagaacaacgugcccgugcagcugaccuccaucagcgccccggagcacaaguucgagggccucacgcagaucuuccagaaggccuacgagcacgagcagcacaucuccgagagcaucaacaacaucguggaccacgccaucaaguccaaggaccacgcgaccuucaacuuccugcagugguacgucgccgagcagcacgaggaggaggugcuguucaaggacauccucgacaagaucgagcugaucgggaacgagaaccacggccuguaccucgccgaccaguacgugaaggggaucgccaagagccgcaaguccugaggacuaguuauaagacugacuagcccgaugggccucccaacgggcccuccuccccuccuugcaccgagauuaauaaaaaaaaaaaaaaaaaaaaaaaaaaaaaaaaaaaaaaaaaaaaaaaaaaaaaaaaaaaaaaaaugcaucccccccccccccccccccccccccccccccaaaggcucuuuucagagccaccagaauu

SEQ ID NO: 12848 - RNA, 4357 nt, Artificial Sequence
  SARS-CoV-2/Wuhan/WIV05/2019__EPI_ISL_402128 spike protein mRNA gc (1-1211)(G889C_L1034C) Ferritin construct
aggagaaagcuuaccauguucguguuccugguccuccugccccuggugagcucccagugcgugaaccucaccacccgcacgcagcugccgcccgccuacaccaacagcuucacccggggcgucuacuaccccgacaagguguuccgcuccagcgugcugcacuccacccaggaccucuuccugcccuucuucagcaacgucacgugguuccacgccauccacguguccgggaccaacggcaccaagcgguucgacaacccggugcugcccuucaacgacggggucuacuucgcgagcaccgagaaguccaacaucauccgcggcuggaucuucgggacgacccucgacagcaagacccagucccugcugaucgugaacaacgccaccaacguggucaucaaggugugcgaguuccaguucugcaacgaccccuuccucggcguguacuaccacaagaacaacaagagcuggauggaguccgaguuccgggucuacagcuccgccaacaacugcacguucgaguacgugagccagcccuuccugauggaccuggagggcaagcaggggaacuucaagaaccuccgcgaguucguguucaagaacaucgacggcuacuucaagaucuacuccaagcacaccccgaucaaccugguccgggaccugccccagggguucagcgcccucgagccccugguggaccugcccaucggcaucaacaucacccgcuuccagacccuccuggcccugcaccgguccuaccucacgccgggggacagcagcuccggcuggaccgcgggcgccgccgccuacuacgugggguaccugcagccccgcaccuuccugcucaaguacaacgagaacggcaccaucacggacgcggucgacugcgcccuggacccccugagcgagaccaagugcacccucaaguccuucaccguggagaaggggaucuaccagacgagcaacuuccgggugcagcccaccgaguccaucguccgcuucccgaacaucaccaaccugugccccuucggcgagguguucaacgccacccgguucgccagcgucuacgccuggaaccgcaagcggaucuccaacugcguggcggacuacagcgugcuguacaacuccgccagcuucuccacguucaagugcuacggcgucagccccaccaagcucaacgaccugugcuucaccaacguguacgccgacuccuucgugauccgcggggacgagguccggcagaucgcccccggccagaccgggaagaucgccgacuacaacuacaagcugccggacgacuucacgggcugcgugaucgcguggaacagcaacaaccucgacuccaaggucgggggcaacuacaacuaccuguaccgccuguuccgcaagagcaaccucaagcccuucgagcgggacaucuccaccgagaucuaccaggccggcagcacccccugcaacgggguggagggcuucaacugcuacuucccccugcaguccuacggguuccagccgaccaacggcgugggguaccagcccuaccggguggucgugcugagcuucgagcuccugcacgcccccgccacggugugcggccccaagaaguccaccaaccuggucaagaacaagugcgugaacuucaacuucaacggccucaccgggaccggcgugcugaccgagagcaacaagaaguuccugccguuccagcaguucgggcgcgacaucgccgacacgaccgacgcgguccgcgacccccagacccuggagauccucgacaucacccccugcagcuucggcgggguguccgugaucacgccgggcaccaacaccagcaaccaggucgccgugcuguaccaggacgugaacugcaccgagguccccguggccauccacgccgaccagcugacgcccaccuggcggguguacuccaccggcagcaacgucuuccagacccgcgccgggugccucaucggcgcggagcacgugaacaacuccuacgagugcgacauccccaucggggccggcaucugcgccagcuaccagacgcagaccaacuccccgcggcgcgcccggagcguggcgucccagagcaucaucgccuacaccaugucccugggcgccgagaacagcgucgccuacuccaacaacagcaucgccauccccaccaacuucacgaucuccgugaccaccgagauccugcccgugagcaugaccaagacgagcgucgacugcaccauguacaucugcggggacuccaccgagugcagcaaccuccugcugcaguacggcuccuucugcacccagcucaaccgcgcgcugacggggaucgccguggagcaggacaagaacacccaggagguguucgcccaggucaagcagaucuacaagacgcccccgaucaaggacuucggcggguucaacuucagccagauccugcccgaccccuccaagcccagcaagcgguccuucaucgaggaccuccuguucaacaaggugacccuggccgacgccggcuucaucaagcaguacggcgacugccucggggacaucgcggcccgcgaccugaucugcgcccagaaguucaacggccugaccgugcucccgccccugcugaccgacgagaugaucgcccaguacaccagcgcccuccuggcggggaccaucacguccggcuggaccuucugcgccggcgccgcccugcagauccccuucgcgaugcagauggccuaccgguucaacggcaucggggucacccagaacgugcucuacgagaaccagaagcugaucgccaaccaguucaacagcgccaucggcaagauccaggacucccugagcuccaccgccagcgcgcucgggaagcugcaggacguggucaaccagaacgcccaggcccugaacacgcucgugaagcagcuguccagcaacuucggcgccaucuccagcgugcugaacgacauccucucccgccuggacaaggucgaggccgaggugcagaucgaccggcugaucaccgggcgccuccagagccugcagaccuacgugacccagcagcugauccgggcggccgagauccgcgccagcgccaaccucgccgcgaccaagauguccgagugcgucugcggccagagcaagcggguggacuucugcggcaagggguaccaccugauguccuucccccagagcgccccgcacggcguggucuuccuccacgugacguacguccccgcccaggagaagaacuucaccaccgcccccgcgaucugccacgacgggaaggcccacuucccccgcgagggcguguucguguccaacgggacccacugguucgucacgcagcggaacuucuacgagccgcagaucaucaccaccgacaacaccuucgugagcggcaacugcgacguggucaucggcaucgugaacaacacgguguacgacccccugcagcccgagcuggacuccuucaaggaggagcucgacaaguacuucaagaaccacaccagccccgacgucgaccugggggacaucuccggcaucaacgccagcguggugaacauccagaaggagaucgaccgccugaacgaggucgccaagaaccucaacgagucccugaucgaccugcaggagcucgggaaguacgagcaguacaucaagggcgggggcgggagcgacaucaucaagcuccugaacgagcaggucaacaaggagaugcaguccagcaaccuguacauguccaugagcuccuggugcuacacccacagccucgacggcgccgggcuguuccuguucgaccacgccgcggaggaguacgagcacgccaagaagcucaucaucuuccugaacgagaacaacgugcccgugcagcugaccuccaucagcgccccggagcacaaguucgagggccucacgcagaucuuccagaaggccuacgagcacgagcagcacaucuccgagagcaucaacaacaucguggaccacgccaucaaguccaaggaccacgcgaccuucaacuuccugcagugguacgucgccgagcagcacgaggaggaggugcuguucaaggacauccucgacaagaucgagcugaucgggaacgagaaccacggccuguaccucgccgaccaguacgugaaggggaucgccaagagccgcaaguccugaggacuaguuauaagacugacuagcccgaugggccucccaacgggcccuccuccccuccuugcaccgagauuaauaaaaaaaaaaaaaaaaaaaaaaaaaaaaaaaaaaaaaaaaaaaaaaaaaaaaaaaaaaaaaaaaugcaucccccccccccccccccccccccccccccccaaaggcucuuuucagagccaccagaauu

SEQ ID NO: 12849 - RNA, 4357 nt, Artificial Sequence
  SARS-CoV-2/Wuhan/WIV05/2019__EPI_ISL_402128 spike protein mRNA gc (1-1211)(I909C_Y1047C) Ferritin construct
aggagaaagcuuaccauguucguguuccugguccuccugccccuggugagcucccagugcgugaaccucaccacccgcacgcagcugccgcccgccuacaccaacagcuucacccggggcgucuacuaccccgacaagguguuccgcuccagcgugcugcacuccacccaggaccucuuccugcccuucuucagcaacgucacgugguuccacgccauccacguguccgggaccaacggcaccaagcgguucgacaacccggugcugcccuucaacgacggggucuacuucgcgagcaccgagaaguccaacaucauccgcggcuggaucuucgggacgacccucgacagcaagacccagucccugcugaucgugaacaacgccaccaacguggucaucaaggugugcgaguuccaguucugcaacgaccccuuccucggcguguacuaccacaagaacaacaagagcuggauggaguccgaguuccgggucuacagcuccgccaacaacugcacguucgaguacgugagccagcccuuccugauggaccuggagggcaagcaggggaacuucaagaaccuccgcgaguucguguucaagaacaucgacggcuacuucaagaucuacuccaagcacaccccgaucaaccugguccgggaccugccccagggguucagcgcccucgagccccugguggaccugcccaucggcaucaacaucacccgcuuccagacccuccuggcccugcaccgguccuaccucacgccgggggacagcagcuccggcuggaccgcgggcgccgccgccuacuacgugggguaccugcagccccgcaccuuccugcucaaguacaacgagaacggcaccaucacggacgcggucgacugcgcccuggacccccugagcgagaccaagugcacccucaaguccuucaccguggagaaggggaucuaccagacgagcaacuuccgggugcagcccaccgaguccaucguccgcuucccgaacaucaccaaccugugccccuucggcgagguguucaacgccacccgguucgccagcgucuacgccuggaaccgcaagcggaucuccaacugcguggcggacuacagcgugcuguacaacuccgccagcuucuccacguucaagugcuacggcgucagccccaccaagcucaacgaccugugcuucaccaacguguacgccgacuccuucgugauccgcggggacgagguccggcagaucgcccccggccagaccgggaagaucgccgacuacaacuacaagcugccggacgacuucacgggcugcgugaucgcguggaacagcaacaaccucgacuccaaggucgggggcaacuacaacuaccuguaccgccuguuccgcaagagcaaccucaagcccuucgagcgggacaucuccaccgagaucuaccaggccggcagcacccccugcaacgggguggagggcuucaacugcuacuucccccugcaguccuacggguuccagccgaccaacggcgugggguaccagcccuaccggguggucgugcugagcuucgagcuccugcacgcccccgccacggugugcggccccaagaaguccaccaaccuggucaagaacaagugcgugaacuucaacuucaacggccucaccgggaccggcgugcugaccgagagcaacaagaaguuccugccguuccagcaguucgggcgcgacaucgccgacacgaccgacgcgguccgcgacccccagacccuggagauccucgacaucacccccugcagcuucggcgggguguccgugaucacgccgggcaccaacaccagcaaccaggucgccgugcuguaccaggacgugaacugcaccgagguccccguggccauccacgccgaccagcugacgcccaccuggcggguguacuccaccggcagcaacgucuuccagacccgcgccgggugccucaucggcgcggagcacgugaacaacuccuacgagugcgacauccccaucggggccggcaucugcgccagcuaccagacgcagaccaacuccccgcggcgcgcccggagcguggcgucccagagcaucaucgccuacaccaugucccugggcgccgagaacagcgucgccuacuccaacaacagcaucgccauccccaccaacuucacgaucuccgugaccaccgagauccugcccgugagcaugaccaagacgagcgucgacugcaccauguacaucugcggggacuccaccgagugcagcaaccuccugcugcaguacggcuccuucugcacccagcucaaccgcgcgcugacggggaucgccguggagcaggacaagaacacccaggagguguucgcccaggucaagcagaucuacaagacgcccccgaucaaggacuucggcggguucaacuucagccagauccugcccgaccccuccaagcccagcaagcgguccuucaucgaggaccuccuguucaacaaggugacccuggccgacgccggcuucaucaagcaguacggcgacugccucggggacaucgcggcccgcgaccugaucugcgcccagaaguucaacggccugaccgugcucccgccccugcugaccgacgagaugaucgcccaguacaccagcgcccuccuggcggggaccaucacguccggcuggaccuucggggccggcgccgcccugcagauccccuucgcgaugcagauggccuaccgguucaacggcugcggggucacccagaacgugcucuacgagaaccagaagcugaucgccaaccaguucaacagcgccaucggcaagauccaggacucccugagcuccaccgccagcgcgcucgggaagcugcaggacguggucaaccagaacgcccaggcccugaacacgcucgugaagcagcuguccagcaacuucggcgccaucuccagcgugcugaacgacauccucucccgccuggacaaggucgaggccgaggugcagaucgaccggcugaucaccgggcgccuccagagccugcagaccuacgugacccagcagcugauccgggcggccgagauccgcgccagcgccaaccucgccgcgaccaagauguccgagugcguccugggccagagcaagcggguggacuucugcggcaaggggugccaccugauguccuucccccagagcgccccgcacggcguggucuuccuccacgugacguacguccccgcccaggagaagaacuucaccaccgcccccgcgaucugccacgacgggaaggcccacuucccccgcgagggcguguucguguccaacgggacccacugguucgucacgcagcggaacuucuacgagccgcagaucaucaccaccgacaacaccuucgugagcggcaacugcgacguggucaucggcaucgugaacaacacgguguacgacccccugcagcccgagcuggacuccuucaaggaggagcucgacaaguacuucaagaaccacaccagccccgacgucgaccugggggacaucuccggcaucaacgccagcguggugaacauccagaaggagaucgaccgccugaacgaggucgccaagaaccucaacgagucccugaucgaccugcaggagcucgggaaguacgagcaguacaucaagggcgggggcgggagcgacaucaucaagcuccugaacgagcaggucaacaaggagaugcaguccagcaaccuguacauguccaugagcuccuggugcuacacccacagccucgacggcgccgggcuguuccuguucgaccacgccgcggaggaguacgagcacgccaagaagcucaucaucuuccugaacgagaacaacgugcccgugcagcugaccuccaucagcgccccggagcacaaguucgagggccucacgcagaucuuccagaaggccuacgagcacgagcagcacaucuccgagagcaucaacaacaucguggaccacgccaucaaguccaaggaccacgcgaccuucaacuuccugcagugguacgucgccgagcagcacgaggaggaggugcuguucaaggacauccucgacaagaucgagcugaucgggaacgagaaccacggccuguaccucgccgaccaguacgugaaggggaucgccaagagccgcaaguccugaggacuaguuauaagacugacuagcccgaugggccucccaacgggcccuccuccccuccuugcaccgagauuaauaaaaaaaaaaaaaaaaaaaaaaaaaaaaaaaaaaaaaaaaaaaaaaaaaaaaaaaaaaaaaaaaugcaucccccccccccccccccccccccccccccccaaaggcucuuuucagagccaccagaauu

SEQ ID NO: 12850 - RNA, 4357 nt, Artificial Sequence
  SARS-CoV-2/Wuhan/WIV05/2019__EPI_ISL_402128 spike protein mRNA gc (1-1211)(Q965C_S1003C) Ferritin construct
aggagaaagcuuaccauguucguguuccugguccuccugccccuggugagcucccagugcgugaaccucaccacccgcacgcagcugccgcccgccuacaccaacagcuucacccggggcgucuacuaccccgacaagguguuccgcuccagcgugcugcacuccacccaggaccucuuccugcccuucuucagcaacgucacgugguuccacgccauccacguguccgggaccaacggcaccaagcgguucgacaacccggugcugcccuucaacgacggggucuacuucgcgagcaccgagaaguccaacaucauccgcggcuggaucuucgggacgacccucgacagcaagacccagucccugcugaucgugaacaacgccaccaacguggucaucaaggugugcgaguuccaguucugcaacgaccccuuccucggcguguacuaccacaagaacaacaagagcuggauggaguccgaguuccgggucuacagcuccgccaacaacugcacguucgaguacgugagccagcccuuccugauggaccuggagggcaagcaggggaacuucaagaaccuccgcgaguucguguucaagaacaucgacggcuacuucaagaucuacuccaagcacaccccgaucaaccugguccgggaccugccccagggguucagcgcccucgagccccugguggaccugcccaucggcaucaacaucacccgcuuccagacccuccuggcccugcaccgguccuaccucacgccgggggacagcagcuccggcuggaccgcgggcgccgccgccuacuacgugggguaccugcagccccgcaccuuccugcucaaguacaacgagaacggcaccaucacggacgcggucgacugcgcccuggacccccugagcgagaccaagugcacccucaaguccuucaccguggagaaggggaucuaccagacgagcaacuuccgggugcagcccaccgaguccaucguccgcuucccgaacaucaccaaccugugccccuucggcgagguguucaacgccacccgguucgccagcgucuacgccuggaaccgcaagcggaucuccaacugcguggcggacuacagcgugcuguacaacuccgccagcuucuccacguucaagugcuacggcgucagccccaccaagcucaacgaccugugcuucaccaacguguacgccgacuccuucgugauccgcggggacgagguccggcagaucgcccccggccagaccgggaagaucgccgacuacaacuacaagcugccggacgacuucacgggcugcgugaucgcguggaacagcaacaaccucgacuccaaggucgggggcaacuacaacuaccuguaccgccuguuccgcaagagcaaccucaagcccuucgagcgggacaucuccaccgagaucuaccaggccggcagcacccccugcaacgggguggagggcuucaacugcuacuucccccugcaguccuacggguuccagccgaccaacggcgugggguaccagcccuaccggguggucgugcugagcuucgagcuccugcacgcccccgccacggugugcggccccaagaaguccaccaaccuggucaagaacaagugcgugaacuucaacuucaacggccucaccgggaccggcgugcugaccgagagcaacaagaaguuccugccguuccagcaguucgggcgcgacaucgccgacacgaccgacgcgguccgcgacccccagacccuggagauccucgacaucacccccugcagcuucggcgggguguccgugaucacgccgggcaccaacaccagcaaccaggucgccgugcuguaccaggacgugaacugcaccgagguccccguggccauccacgccgaccagcugacgcccaccuggcggguguacuccaccggcagcaacgucuuccagacccgcgccgggugccucaucggcgcggagcacgugaacaacuccuacgagugcgacauccccaucggggccggcaucugcgccagcuaccagacgcagaccaacuccccgcggcgcgcccggagcguggcgucccagagcaucaucgccuacaccaugucccugggcgccgagaacagcgucgccuacuccaacaacagcaucgccauccccaccaacuucacgaucuccgugaccaccgagauccugcccgugagcaugaccaagacgagcgucgacugcaccauguacaucugcggggacuccaccgagugcagcaaccuccugcugcaguacggcuccuucugcacccagcucaaccgcgcgcugacggggaucgccguggagcaggacaagaacacccaggagguguucgcccaggucaagcagaucuacaagacgcccccgaucaaggacuucggcggguucaacuucagccagauccugcccgaccccuccaagcccagcaagcgguccuucaucgaggaccuccuguucaacaaggugacccuggccgacgccggcuucaucaagcaguacggcgacugccucggggacaucgcggcccgcgaccugaucugcgcccagaaguucaacggccugaccgugcucccgccccugcugaccgacgagaugaucgcccaguacaccagcgcccuccuggcggggaccaucacguccggcuggaccuucggggccggcgccgcccugcagauccccuucgcgaugcagauggccuaccgguucaacggcaucggggucacccagaacgugcucuacgagaaccagaagcugaucgccaaccaguucaacagcgccaucggcaagauccaggacucccugagcuccaccgccagcgcgcucgggaagcugcaggacguggucaaccagaacgcccaggcccugaacacgcucgugaagugccuguccagcaacuucggcgccaucuccagcgugcugaacgacauccucucccgccuggacaaggucgaggccgaggugcagaucgaccggcugaucaccgggcgccuccagugccugcagaccuacgugacccagcagcugauccgggcggccgagauccgcgccagcgccaaccucgccgcgaccaagauguccgagugcguccugggccagagcaagcggguggacuucugcggcaagggguaccaccugauguccuucccccagagcgccccgcacggcguggucuuccuccacgugacguacguccccgcccaggagaagaacuucaccaccgcccccgcgaucugccacgacgggaaggcccacuucccccgcgagggcguguucguguccaacgggacccacugguucgucacgcagcggaacuucuacgagccgcagaucaucaccaccgacaacaccuucgugagcggcaacugcgacguggucaucggcaucgugaacaacacgguguacgacccccugcagcccgagcuggacuccuucaaggaggagcucgacaaguacuucaagaaccacaccagccccgacgucgaccugggggacaucuccggcaucaacgccagcguggugaacauccagaaggagaucgaccgccugaacgaggucgccaagaaccucaacgagucccugaucgaccugcaggagcucgggaaguacgagcaguacaucaagggcgggggcgggagcgacaucaucaagcuccugaacgagcaggucaacaaggagaugcaguccagcaaccuguacauguccaugagcuccuggugcuacacccacagccucgacggcgccgggcuguuccuguucgaccacgccgcggaggaguacgagcacgccaagaagcucaucaucuuccugaacgagaacaacgugcccgugcagcugaccuccaucagcgccccggagcacaaguucgagggccucacgcagaucuuccagaaggccuacgagcacgagcagcacaucuccgagagcaucaacaacaucguggaccacgccaucaaguccaaggaccacgcgaccuucaacuuccugcagugguacgucgccgagcagcacgaggaggaggugcuguucaaggacauccucgacaagaucgagcugaucgggaacgagaaccacggccuguaccucgccgaccaguacgugaaggggaucgccaagagccgcaaguccugaggacuaguuauaagacugacuagcccgaugggccucccaacgggcccuccuccccuccuugcaccgagauuaauaaaaaaaaaaaaaaaaaaaaaaaaaaaaaaaaaaaaaaaaaaaaaaaaaaaaaaaaaaaaaaaaugcaucccccccccccccccccccccccccccccccaaaggcucuuuucagagccaccagaauu

SEQ ID NO: 12851 - RNA, 4357 nt, Artificial Sequence
  SARS-CoV-2/Wuhan/WIV05/2019__EPI_ISL_402128 spike protein mRNA gc (1-1211)(F970C_G999C) Ferritin construct
aggagaaagcuuaccauguucguguuccugguccuccugccccuggugagcucccagugcgugaaccucaccacccgcacgcagcugccgcccgccuacaccaacagcuucacccggggcgucuacuaccccgacaagguguuccgcuccagcgugcugcacuccacccaggaccucuuccugcccuucuucagcaacgucacgugguuccacgccauccacguguccgggaccaacggcaccaagcgguucgacaacccggugcugcccuucaacgacggggucuacuucgcgagcaccgagaaguccaacaucauccgcggcuggaucuucgggacgacccucgacagcaagacccagucccugcugaucgugaacaacgccaccaacguggucaucaaggugugcgaguuccaguucugcaacgaccccuuccucggcguguacuaccacaagaacaacaagagcuggauggaguccgaguuccgggucuacagcuccgccaacaacugcacguucgaguacgugagccagcccuuccugauggaccuggagggcaagcaggggaacuucaagaaccuccgcgaguucguguucaagaacaucgacggcuacuucaagaucuacuccaagcacaccccgaucaaccugguccgggaccugccccagggguucagcgcccucgagccccugguggaccugcccaucggcaucaacaucacccgcuuccagacccuccuggcccugcaccgguccuaccucacgccgggggacagcagcuccggcuggaccgcgggcgccgccgccuacuacgugggguaccugcagccccgcaccuuccugcucaaguacaacgagaacggcaccaucacggacgcggucgacugcgcccuggacccccugagcgagaccaagugcacccucaaguccuucaccguggagaaggggaucuaccagacgagcaacuuccgggugcagcccaccgaguccaucguccgcuucccgaacaucaccaaccugugccccuucggcgagguguucaacgccacccgguucgccagcgucuacgccuggaaccgcaagcggaucuccaacugcguggcggacuacagcgugcuguacaacuccgccagcuucuccacguucaagugcuacggcgucagccccaccaagcucaacgaccugugcuucaccaacguguacgccgacuccuucgugauccgcggggacgagguccggcagaucgcccccggccagaccgggaagaucgccgacuacaacuacaagcugccggacgacuucacgggcugcgugaucgcguggaacagcaacaaccucgacuccaaggucgggggcaacuacaacuaccuguaccgccuguuccgcaagagcaaccucaagcccuucgagcgggacaucuccaccgagaucuaccaggccggcagcacccccugcaacgggguggagggcuucaacugcuacuucccccugcaguccuacggguuccagccgaccaacggcgugggguaccagcccuaccggguggucgugcugagcuucgagcuccugcacgcccccgccacggugugcggccccaagaaguccaccaaccuggucaagaacaagugcgugaacuucaacuucaacggccucaccgggaccggcgugcugaccgagagcaacaagaaguuccugccguuccagcaguucgggcgcgacaucgccgacacgaccgacgcgguccgcgacccccagacccuggagauccucgacaucacccccugcagcuucggcgggguguccgugaucacgccgggcaccaacaccagcaaccaggucgccgugcuguaccaggacgugaacugcaccgagguccccguggccauccacgccgaccagcugacgcccaccuggcggguguacuccaccggcagcaacgucuuccagacccgcgccgggugccucaucggcgcggagcacgugaacaacuccuacgagugcgacauccccaucggggccggcaucugcgccagcuaccagacgcagaccaacuccccgcggcgcgcccggagcguggcgucccagagcaucaucgccuacaccaugucccugggcgccgagaacagcgucgccuacuccaacaacagcaucgccauccccaccaacuucacgaucuccgugaccaccgagauccugcccgugagcaugaccaagacgagcgucgacugcaccauguacaucugcggggacuccaccgagugcagcaaccuccugcugcaguacggcuccuucugcacccagcucaaccgcgcgcugacggggaucgccguggagcaggacaagaacacccaggagguguucgcccaggucaagcagaucuacaagacgcccccgaucaaggacuucggcggguucaacuucagccagauccugcccgaccccuccaagcccagcaagcgguccuucaucgaggaccuccuguucaacaaggugacccuggccgacgccggcuucaucaagcaguacggcgacugccucggggacaucgcggcccgcgaccugaucugcgcccagaaguucaacggccugaccgugcucccgccccugcugaccgacgagaugaucgcccaguacaccagcgcccuccuggcggggaccaucacguccggcuggaccuucggggccggcgccgcccugcagauccccuucgcgaugcagauggccuaccgguucaacggcaucggggucacccagaacgugcucuacgagaaccagaagcugaucgccaaccaguucaacagcgccaucggcaagauccaggacucccugagcuccaccgccagcgcgcucgggaagcugcaggacguggucaaccagaacgcccaggcccugaacacgcucgugaagcagcuguccagcaacugcggcgccaucuccagcgugcugaacgacauccucucccgccuggacaaggucgaggccgaggugcagaucgaccggcugaucaccugucgccuccagagccugcagaccuacgugacccagcagcugauccgggcggccgagauccgcgccagcgccaaccucgccgcgaccaagauguccgagugcguccugggccagagcaagcggguggacuucugcggcaagggguaccaccugauguccuucccccagagcgccccgcacggcguggucuuccuccacgugacguacguccccgcccaggagaagaacuucaccaccgcccccgcgaucugccacgacgggaaggcccacuucccccgcgagggcguguucguguccaacgggacccacugguucgucacgcagcggaacuucuacgagccgcagaucaucaccaccgacaacaccuucgugagcggcaacugcgacguggucaucggcaucgugaacaacacgguguacgacccccugcagcccgagcuggacuccuucaaggaggagcucgacaaguacuucaagaaccacaccagccccgacgucgaccugggggacaucuccggcaucaacgccagcguggugaacauccagaaggagaucgaccgccugaacgaggucgccaagaaccucaacgagucccugaucgaccugcaggagcucgggaaguacgagcaguacaucaagggcgggggcgggagcgacaucaucaagcuccugaacgagcaggucaacaaggagaugcaguccagcaaccuguacauguccaugagcuccuggugcuacacccacagccucgacggcgccgggcuguuccuguucgaccacgccgcggaggaguacgagcacgccaagaagcucaucaucuuccugaacgagaacaacgugcccgugcagcugaccuccaucagcgccccggagcacaaguucgagggccucacgcagaucuuccagaaggccuacgagcacgagcagcacaucuccgagagcaucaacaacaucguggaccacgccaucaaguccaaggaccacgcgaccuucaacuuccugcagugguacgucgccgagcagcacgaggaggaggugcuguucaaggacauccucgacaagaucgagcugaucgggaacgagaaccacggccuguaccucgccgaccaguacgugaaggggaucgccaagagccgcaaguccugaggacuaguuauaagacugacuagcccgaugggccucccaacgggcccuccuccccuccuugcaccgagauuaauaaaaaaaaaaaaaaaaaaaaaaaaaaaaaaaaaaaaaaaaaaaaaaaaaaaaaaaaaaaaaaaaugcaucccccccccccccccccccccccccccccccaaaggcucuuuucagagccaccagaauu

SEQ ID NO: 12852 - RNA, 4357 nt, Artificial Sequence
  SARS-CoV-2/Wuhan/WIV05/2019__EPI_ISL_402128 spike protein mRNA gc (1-1211)(A972C_R995C) Ferritin construct
aggagaaagcuuaccauguucguguuccugguccuccugccccuggugagcucccagugcgugaaccucaccacccgcacgcagcugccgcccgccuacaccaacagcuucacccggggcgucuacuaccccgacaagguguuccgcuccagcgugcugcacuccacccaggaccucuuccugcccuucuucagcaacgucacgugguuccacgccauccacguguccgggaccaacggcaccaagcgguucgacaacccggugcugcccuucaacgacggggucuacuucgcgagcaccgagaaguccaacaucauccgcggcuggaucuucgggacgacccucgacagcaagacccagucccugcugaucgugaacaacgccaccaacguggucaucaaggugugcgaguuccaguucugcaacgaccccuuccucggcguguacuaccacaagaacaacaagagcuggauggaguccgaguuccgggucuacagcuccgccaacaacugcacguucgaguacgugagccagcccuuccugauggaccuggagggcaagcaggggaacuucaagaaccuccgcgaguucguguucaagaacaucgacggcuacuucaagaucuacuccaagcacaccccgaucaaccugguccgggaccugccccagggguucagcgcccucgagccccugguggaccugcccaucggcaucaacaucacccgcuuccagacccuccuggcccugcaccgguccuaccucacgccgggggacagcagcuccggcuggaccgcgggcgccgccgccuacuacgugggguaccugcagccccgcaccuuccugcucaaguacaacgagaacggcaccaucacggacgcggucgacugcgcccuggacccccugagcgagaccaagugcacccucaaguccuucaccguggagaaggggaucuaccagacgagcaacuuccgggugcagcccaccgaguccaucguccgcuucccgaacaucaccaaccugugccccuucggcgagguguucaacgccacccgguucgccagcgucuacgccuggaaccgcaagcggaucuccaacugcguggcggacuacagcgugcuguacaacuccgccagcuucuccacguucaagugcuacggcgucagccccaccaagcucaacgaccugugcuucaccaacguguacgccgacuccuucgugauccgcggggacgagguccggcagaucgcccccggccagaccgggaagaucgccgacuacaacuacaagcugccggacgacuucacgggcugcgugaucgcguggaacagcaacaaccucgacuccaaggucgggggcaacuacaacuaccuguaccgccuguuccgcaagagcaaccucaagcccuucgagcgggacaucuccaccgagaucuaccaggccggcagcacccccugcaacgggguggagggcuucaacugcuacuucccccugcaguccuacggguuccagccgaccaacggcgugggguaccagcccuaccggguggucgugcugagcuucgagcuccugcacgcccccgccacggugugcggccccaagaaguccaccaaccuggucaagaacaagugcgugaacuucaacuucaacggccucaccgggaccggcgugcugaccgagagcaacaagaaguuccugccguuccagcaguucgggcgcgacaucgccgacacgaccgacgcgguccgcgacccccagacccuggagauccucgacaucacccccugcagcuucggcgggguguccgugaucacgccgggcaccaacaccagcaaccaggucgccgugcuguaccaggacgugaacugcaccgagguccccguggccauccacgccgaccagcugacgcccaccuggcggguguacuccaccggcagcaacgucuuccagacccgcgccgggugccucaucggcgcggagcacgugaacaacuccuacgagugcgacauccccaucggggccggcaucugcgccagcuaccagacgcagaccaacuccccgcggcgcgcccggagcguggcgucccagagcaucaucgccuacaccaugucccugggcgccgagaacagcgucgccuacuccaacaacagcaucgccauccccaccaacuucacgaucuccgugaccaccgagauccugcccgugagcaugaccaagacgagcgucgacugcaccauguacaucugcggggacuccaccgagugcagcaaccuccugcugcaguacggcuccuucugcacccagcucaaccgcgcgcugacggggaucgccguggagcaggacaagaacacccaggagguguucgcccaggucaagcagaucuacaagacgcccccgaucaaggacuucggcggguucaacuucagccagauccugcccgaccccuccaagcccagcaagcgguccuucaucgaggaccuccuguucaacaaggugacccuggccgacgccggcuucaucaagcaguacggcgacugccucggggacaucgcggcccgcgaccugaucugcgcccagaaguucaacggccugaccgugcucccgccccugcugaccgacgagaugaucgcccaguacaccagcgcccuccuggcggggaccaucacguccggcuggaccuucggggccggcgccgcccugcagauccccuucgcgaugcagauggccuaccgguucaacggcaucggggucacccagaacgugcucuacgagaaccagaagcugaucgccaaccaguucaacagcgccaucggcaagauccaggacucccugagcuccaccgccagcgcgcucgggaagcugcaggacguggucaaccagaacgcccaggcccugaacacgcucgugaagcagcuguccagcaacuucggcugcaucuccagcgugcugaacgacauccucucccgccuggacaaggucgaggccgaggugcagaucgacugccugaucaccgggcgccuccagagccugcagaccuacgugacccagcagcugauccgggcggccgagauccgcgccagcgccaaccucgccgcgaccaagauguccgagugcguccugggccagagcaagcggguggacuucugcggcaagggguaccaccugauguccuucccccagagcgccccgcacggcguggucuuccuccacgugacguacguccccgcccaggagaagaacuucaccaccgcccccgcgaucugccacgacgggaaggcccacuucccccgcgagggcguguucguguccaacgggacccacugguucgucacgcagcggaacuucuacgagccgcagaucaucaccaccgacaacaccuucgugagcggcaacugcgacguggucaucggcaucgugaacaacacgguguacgacccccugcagcccgagcuggacuccuucaaggaggagcucgacaaguacuucaagaaccacaccagccccgacgucgaccugggggacaucuccggcaucaacgccagcguggugaacauccagaaggagaucgaccgccugaacgaggucgccaagaaccucaacgagucccugaucgaccugcaggagcucgggaaguacgagcaguacaucaagggcgggggcgggagcgacaucaucaagcuccugaacgagcaggucaacaaggagaugcaguccagcaaccuguacauguccaugagcuccuggugcuacacccacagccucgacggcgccgggcuguuccuguucgaccacgccgcggaggaguacgagcacgccaagaagcucaucaucuuccugaacgagaacaacgugcccgugcagcugaccuccaucagcgccccggagcacaaguucgagggccucacgcagaucuuccagaaggccuacgagcacgagcagcacaucuccgagagcaucaacaacaucguggaccacgccaucaaguccaaggaccacgcgaccuucaacuuccugcagugguacgucgccgagcagcacgaggaggaggugcuguucaaggacauccucgacaagaucgagcugaucgggaacgagaaccacggccuguaccucgccgaccaguacgugaaggggaucgccaagagccgcaaguccugaggacuaguuauaagacugacuagcccgaugggccucccaacgggcccuccuccccuccuugcaccgagauuaauaaaaaaaaaaaaaaaaaaaaaaaaaaaaaaaaaaaaaaaaaaaaaaaaaaaaaaaaaaaaaaaaugcaucccccccccccccccccccccccccccccccaaaggcucuuuucagagccaccagaauu

SEQ ID NO: 12853 - RNA, 4357 nt, Artificial Sequence
  SARS-CoV-2/Wuhan/WIV05/2019__EPI_ISL_402128 spike protein mRNA gc (1-1211)(A890C_V1040C) Ferritin construct
aggagaaagcuuaccauguucguguuccugguccuccugccccuggugagcucccagugcgugaaccucaccacccgcacgcagcugccgcccgccuacaccaacagcuucacccggggcgucuacuaccccgacaagguguuccgcuccagcgugcugcacuccacccaggaccucuuccugcccuucuucagcaacgucacgugguuccacgccauccacguguccgggaccaacggcaccaagcgguucgacaacccggugcugcccuucaacgacggggucuacuucgcgagcaccgagaaguccaacaucauccgcggcuggaucuucgggacgacccucgacagcaagacccagucccugcugaucgugaacaacgccaccaacguggucaucaaggugugcgaguuccaguucugcaacgaccccuuccucggcguguacuaccacaagaacaacaagagcuggauggaguccgaguuccgggucuacagcuccgccaacaacugcacguucgaguacgugagccagcccuuccugauggaccuggagggcaagcaggggaacuucaagaaccuccgcgaguucguguucaagaacaucgacggcuacuucaagaucuacuccaagcacaccccgaucaaccugguccgggaccugccccagggguucagcgcccucgagccccugguggaccugcccaucggcaucaacaucacccgcuuccagacccuccuggcccugcaccgguccuaccucacgccgggggacagcagcuccggcuggaccgcgggcgccgccgccuacuacgugggguaccugcagccccgcaccuuccugcucaaguacaacgagaacggcaccaucacggacgcggucgacugcgcccuggacccccugagcgagaccaagugcacccucaaguccuucaccguggagaaggggaucuaccagacgagcaacuuccgggugcagcccaccgaguccaucguccgcuucccgaacaucaccaaccugugccccuucggcgagguguucaacgccacccgguucgccagcgucuacgccuggaaccgcaagcggaucuccaacugcguggcggacuacagcgugcuguacaacuccgccagcuucuccacguucaagugcuacggcgucagccccaccaagcucaacgaccugugcuucaccaacguguacgccgacuccuucgugauccgcggggacgagguccggcagaucgcccccggccagaccgggaagaucgccgacuacaacuacaagcugccggacgacuucacgggcugcgugaucgcguggaacagcaacaaccucgacuccaaggucgggggcaacuacaacuaccuguaccgccuguuccgcaagagcaaccucaagcccuucgagcgggacaucuccaccgagaucuaccaggccggcagcacccccugcaacgggguggagggcuucaacugcuacuucccccugcaguccuacggguuccagccgaccaacggcgugggguaccagcccuaccggguggucgugcugagcuucgagcuccugcacgcccccgccacggugugcggccccaagaaguccaccaaccuggucaagaacaagugcgugaacuucaacuucaacggccucaccgggaccggcgugcugaccgagagcaacaagaaguuccugccguuccagcaguucgggcgcgacaucgccgacacgaccgacgcgguccgcgacccccagacccuggagauccucgacaucacccccugcagcuucggcgggguguccgugaucacgccgggcaccaacaccagcaaccaggucgccgugcuguaccaggacgugaacugcaccgagguccccguggccauccacgccgaccagcugacgcccaccuggcggguguacuccaccggcagcaacgucuuccagacccgcgccgggugccucaucggcgcggagcacgugaacaacuccuacgagugcgacauccccaucggggccggcaucugcgccagcuaccagacgcagaccaacuccccgcggcgcgcccggagcguggcgucccagagcaucaucgccuacaccaugucccugggcgccgagaacagcgucgccuacuccaacaacagcaucgccauccccaccaacuucacgaucuccgugaccaccgagauccugcccgugagcaugaccaagacgagcgucgacugcaccauguacaucugcggggacuccaccgagugcagcaaccuccugcugcaguacggcuccuucugcacccagcucaaccgcgcgcugacggggaucgccguggagcaggacaagaacacccaggagguguucgcccaggucaagcagaucuacaagacgcccccgaucaaggacuucggcggguucaacuucagccagauccugcccgaccccuccaagcccagcaagcgguccuucaucgaggaccuccuguucaacaaggugacccuggccgacgccggcuucaucaagcaguacggcgacugccucggggacaucgcggcccgcgaccugaucugcgcccagaaguucaacggccugaccgugcucccgccccugcugaccgacgagaugaucgcccaguacaccagcgcccuccuggcggggaccaucacguccggcuggaccuucgggugcggcgccgcccugcagauccccuucgcgaugcagauggccuaccgguucaacggcaucggggucacccagaacgugcucuacgagaaccagaagcugaucgccaaccaguucaacagcgccaucggcaagauccaggacucccugagcuccaccgccagcgcgcucgggaagcugcaggacguggucaaccagaacgcccaggcccugaacacgcucgugaagcagcuguccagcaacuucggcgccaucuccagcgugcugaacgacauccucucccgccuggacaaggucgaggccgaggugcagaucgaccggcugaucaccgggcgccuccagagccugcagaccuacgugacccagcagcugauccgggcggccgagauccgcgccagcgccaaccucgccgcgaccaagauguccgagugcguccugggccagagcaagcggugcgacuucugcggcaagggguaccaccugauguccuucccccagagcgccccgcacggcguggucuuccuccacgugacguacguccccgcccaggagaagaacuucaccaccgcccccgcgaucugccacgacgggaaggcccacuucccccgcgagggcguguucguguccaacgggacccacugguucgucacgcagcggaacuucuacgagccgcagaucaucaccaccgacaacaccuucgugagcggcaacugcgacguggucaucggcaucgugaacaacacgguguacgacccccugcagcccgagcuggacuccuucaaggaggagcucgacaaguacuucaagaaccacaccagccccgacgucgaccugggggacaucuccggcaucaacgccagcguggugaacauccagaaggagaucgaccgccugaacgaggucgccaagaaccucaacgagucccugaucgaccugcaggagcucgggaaguacgagcaguacaucaagggcgggggcgggagcgacaucaucaagcuccugaacgagcaggucaacaaggagaugcaguccagcaaccuguacauguccaugagcuccuggugcuacacccacagccucgacggcgccgggcuguuccuguucgaccacgccgcggaggaguacgagcacgccaagaagcucaucaucuuccugaacgagaacaacgugcccgugcagcugaccuccaucagcgccccggagcacaaguucgagggccucacgcagaucuuccagaaggccuacgagcacgagcagcacaucuccgagagcaucaacaacaucguggaccacgccaucaaguccaaggaccacgcgaccuucaacuuccugcagugguacgucgccgagcagcacgaggaggaggugcuguucaaggacauccucgacaagaucgagcugaucgggaacgagaaccacggccuguaccucgccgaccaguacgugaaggggaucgccaagagccgcaaguccugaggacuaguuauaagacugacuagcccgaugggccucccaacgggcccuccuccccuccuugcaccgagauuaauaaaaaaaaaaaaaaaaaaaaaaaaaaaaaaaaaaaaaaaaaaaaaaaaaaaaaaaaaaaaaaaaugcaucccccccccccccccccccccccccccccccaaaggcucuuuucagagccaccagaauu

SEQ ID NO: 12854 - RNA, 4357 nt, Artificial Sequence
  SARS-CoV-2/Wuhan/WIV05/2019__EPI_ISL_402128 spike protein mRNA gc (1-1211)(T874C_S1055C) Ferritin construct
aggagaaagcuuaccauguucguguuccugguccuccugccccuggugagcucccagugcgugaaccucaccacccgcacgcagcugccgcccgccuacaccaacagcuucacccggggcgucuacuaccccgacaagguguuccgcuccagcgugcugcacuccacccaggaccucuuccugcccuucuucagcaacgucacgugguuccacgccauccacguguccgggaccaacggcaccaagcgguucgacaacccggugcugcccuucaacgacggggucuacuucgcgagcaccgagaaguccaacaucauccgcggcuggaucuucgggacgacccucgacagcaagacccagucccugcugaucgugaacaacgccaccaacguggucaucaaggugugcgaguuccaguucugcaacgaccccuuccucggcguguacuaccacaagaacaacaagagcuggauggaguccgaguuccgggucuacagcuccgccaacaacugcacguucgaguacgugagccagcccuuccugauggaccuggagggcaagcaggggaacuucaagaaccuccgcgaguucguguucaagaacaucgacggcuacuucaagaucuacuccaagcacaccccgaucaaccugguccgggaccugccccagggguucagcgcccucgagccccugguggaccugcccaucggcaucaacaucacccgcuuccagacccuccuggcccugcaccgguccuaccucacgccgggggacagcagcuccggcuggaccgcgggcgccgccgccuacuacgugggguaccugcagccccgcaccuuccugcucaaguacaacgagaacggcaccaucacggacgcggucgacugcgcccuggacccccugagcgagaccaagugcacccucaaguccuucaccguggagaaggggaucuaccagacgagcaacuuccgggugcagcccaccgaguccaucguccgcuucccgaacaucaccaaccugugccccuucggcgagguguucaacgccacccgguucgccagcgucuacgccuggaaccgcaagcggaucuccaacugcguggcggacuacagcgugcuguacaacuccgccagcuucuccacguucaagugcuacggcgucagccccaccaagcucaacgaccugugcuucaccaacguguacgccgacuccuucgugauccgcggggacgagguccggcagaucgcccccggccagaccgggaagaucgccgacuacaacuacaagcugccggacgacuucacgggcugcgugaucgcguggaacagcaacaaccucgacuccaaggucgggggcaacuacaacuaccuguaccgccuguuccgcaagagcaaccucaagcccuucgagcgggacaucuccaccgagaucuaccaggccggcagcacccccugcaacgggguggagggcuucaacugcuacuucccccugcaguccuacggguuccagccgaccaacggcgugggguaccagcccuaccggguggucgugcugagcuucgagcuccugcacgcccccgccacggugugcggccccaagaaguccaccaaccuggucaagaacaagugcgugaacuucaacuucaacggccucaccgggaccggcgugcugaccgagagcaacaagaaguuccugccguuccagcaguucgggcgcgacaucgccgacacgaccgacgcgguccgcgacccccagacccuggagauccucgacaucacccccugcagcuucggcgggguguccgugaucacgccgggcaccaacaccagcaaccaggucgccgugcuguaccaggacgugaacugcaccgagguccccguggccauccacgccgaccagcugacgcccaccuggcggguguacuccaccggcagcaacgucuuccagacccgcgccgggugccucaucggcgcggagcacgugaacaacuccuacgagugcgacauccccaucggggccggcaucugcgccagcuaccagacgcagaccaacuccccgcggcgcgcccggagcguggcgucccagagcaucaucgccuacaccaugucccugggcgccgagaacagcgucgccuacuccaacaacagcaucgccauccccaccaacuucacgaucuccgugaccaccgagauccugcccgugagcaugaccaagacgagcgucgacugcaccauguacaucugcggggacuccaccgagugcagcaaccuccugcugcaguacggcuccuucugcacccagcucaaccgcgcgcugacggggaucgccguggagcaggacaagaacacccaggagguguucgcccaggucaagcagaucuacaagacgcccccgaucaaggacuucggcggguucaacuucagccagauccugcccgaccccuccaagcccagcaagcgguccuucaucgaggaccuccuguucaacaaggugacccuggccgacgccggcuucaucaagcaguacggcgacugccucggggacaucgcggcccgcgaccugaucugcgcccagaaguucaacggccugaccgugcucccgccccugcugaccgacgagaugaucgcccaguacugcagcgcccuccuggcggggaccaucacguccggcuggaccuucggggccggcgccgcccugcagauccccuucgcgaugcagauggccuaccgguucaacggcaucggggucacccagaacgugcucuacgagaaccagaagcugaucgccaaccaguucaacagcgccaucggcaagauccaggacucccugagcuccaccgccagcgcgcucgggaagcugcaggacguggucaaccagaacgcccaggcccugaacacgcucgugaagcagcuguccagcaacuucggcgccaucuccagcgugcugaacgacauccucucccgccuggacaaggucgaggccgaggugcagaucgaccggcugaucaccgggcgccuccagagccugcagaccuacgugacccagcagcugauccgggcggccgagauccgcgccagcgccaaccucgccgcgaccaagauguccgagugcguccugggccagagcaagcggguggacuucugcggcaagggguaccaccugauguccuucccccagugcgccccgcacggcguggucuuccuccacgugacguacguccccgcccaggagaagaacuucaccaccgcccccgcgaucugccacgacgggaaggcccacuucccccgcgagggcguguucguguccaacgggacccacugguucgucacgcagcggaacuucuacgagccgcagaucaucaccaccgacaacaccuucgugagcggcaacugcgacguggucaucggcaucgugaacaacacgguguacgacccccugcagcccgagcuggacuccuucaaggaggagcucgacaaguacuucaagaaccacaccagccccgacgucgaccugggggacaucuccggcaucaacgccagcguggugaacauccagaaggagaucgaccgccugaacgaggucgccaagaaccucaacgagucccugaucgaccugcaggagcucgggaaguacgagcaguacaucaagggcgggggcgggagcgacaucaucaagcuccugaacgagcaggucaacaaggagaugcaguccagcaaccuguacauguccaugagcuccuggugcuacacccacagccucgacggcgccgggcuguuccuguucgaccacgccgcggaggaguacgagcacgccaagaagcucaucaucuuccugaacgagaacaacgugcccgugcagcugaccuccaucagcgccccggagcacaaguucgagggccucacgcagaucuuccagaaggccuacgagcacgagcagcacaucuccgagagcaucaacaacaucguggaccacgccaucaaguccaaggaccacgcgaccuucaacuuccugcagugguacgucgccgagcagcacgaggaggaggugcuguucaaggacauccucgacaagaucgagcugaucgggaacgagaaccacggccuguaccucgccgaccaguacgugaaggggaucgccaagagccgcaaguccugaggacuaguuauaagacugacuagcccgaugggccucccaacgggcccuccuccccuccuugcaccgagauuaauaaaaaaaaaaaaaaaaaaaaaaaaaaaaaaaaaaaaaaaaaaaaaaaaaaaaaaaaaaaaaaaaugcaucccccccccccccccccccccccccccccccaaaggcucuuuucagagccaccagaauu

SEQ ID NO: 12855 - RNA, 3943 nt, Artificial Sequence
  SARS-CoV-2/Wuhan/WIV05/2019__EPI_ISL_402128 spike protein mRNA gc (1-1211) Foldon construct
aggagaaagcuuaccauguucguguuccugguccuccugccccuggugagcucccagugcgugaaccucaccacccgcacgcagcugccgcccgccuacaccaacagcuucacccggggcgucuacuaccccgacaagguguuccgcuccagcgugcugcacuccacccaggaccucuuccugcccuucuucagcaacgucacgugguuccacgccauccacguguccgggaccaacggcaccaagcgguucgacaacccggugcugcccuucaacgacggggucuacuucgcgagcaccgagaaguccaacaucauccgcggcuggaucuucgggacgacccucgacagcaagacccagucccugcugaucgugaacaacgccaccaacguggucaucaaggugugcgaguuccaguucugcaacgaccccuuccucggcguguacuaccacaagaacaacaagagcuggauggaguccgaguuccgggucuacagcuccgccaacaacugcacguucgaguacgugagccagcccuuccugauggaccuggagggcaagcaggggaacuucaagaaccuccgcgaguucguguucaagaacaucgacggcuacuucaagaucuacuccaagcacaccccgaucaaccugguccgggaccugccccagggguucagcgcccucgagccccugguggaccugcccaucggcaucaacaucacccgcuuccagacccuccuggcccugcaccgguccuaccucacgccgggggacagcagcuccggcuggaccgcgggcgccgccgccuacuacgugggguaccugcagccccgcaccuuccugcucaaguacaacgagaacggcaccaucacggacgcggucgacugcgcccuggacccccugagcgagaccaagugcacccucaaguccuucaccguggagaaggggaucuaccagacgagcaacuuccgggugcagcccaccgaguccaucguccgcuucccgaacaucaccaaccugugccccuucggcgagguguucaacgccacccgguucgccagcgucuacgccuggaaccgcaagcggaucuccaacugcguggcggacuacagcgugcuguacaacuccgccagcuucuccacguucaagugcuacggcgucagccccaccaagcucaacgaccugugcuucaccaacguguacgccgacuccuucgugauccgcggggacgagguccggcagaucgcccccggccagaccgggaagaucgccgacuacaacuacaagcugccggacgacuucacgggcugcgugaucgcguggaacagcaacaaccucgacuccaaggucgggggcaacuacaacuaccuguaccgccuguuccgcaagagcaaccucaagcccuucgagcgggacaucuccaccgagaucuaccaggccggcagcacccccugcaacgggguggagggcuucaacugcuacuucccccugcaguccuacggguuccagccgaccaacggcgugggguaccagcccuaccggguggucgugcugagcuucgagcuccugcacgcccccgccacggugugcggccccaagaaguccaccaaccuggucaagaacaagugcgugaacuucaacuucaacggccucaccgggaccggcgugcugaccgagagcaacaagaaguuccugccguuccagcaguucgggcgcgacaucgccgacacgaccgacgcgguccgcgacccccagacccuggagauccucgacaucacccccugcagcuucggcgggguguccgugaucacgccgggcaccaacaccagcaaccaggucgccgugcuguaccaggacgugaacugcaccgagguccccguggccauccacgccgaccagcugacgcccaccuggcggguguacuccaccggcagcaacgucuuccagacccgcgccgggugccucaucggcgcggagcacgugaacaacuccuacgagugcgacauccccaucggggccggcaucugcgccagcuaccagacgcagaccaacuccccgcggcgcgcccggagcguggcgucccagagcaucaucgccuacaccaugucccugggcgccgagaacagcgucgccuacuccaacaacagcaucgccauccccaccaacuucacgaucuccgugaccaccgagauccugcccgugagcaugaccaagacgagcgucgacugcaccauguacaucugcggggacuccaccgagugcagcaaccuccugcugcaguacggcuccuucugcacccagcucaaccgcgcgcugacggggaucgccguggagcaggacaagaacacccaggagguguucgcccaggucaagcagaucuacaagacgcccccgaucaaggacuucggcggguucaacuucagccagauccugcccgaccccuccaagcccagcaagcgguccuucaucgaggaccuccuguucaacaaggugacccuggccgacgccggcuucaucaagcaguacggcgacugccucggggacaucgcggcccgcgaccugaucugcgcccagaaguucaacggccugaccgugcucccgccccugcugaccgacgagaugaucgcccaguacaccagcgcccuccuggcggggaccaucacguccggcuggaccuucggggccggcgccgcccugcagauccccuucgcgaugcagauggccuaccgguucaacggcaucggggucacccagaacgugcucuacgagaaccagaagcugaucgccaaccaguucaacagcgccaucggcaagauccaggacucccugagcuccaccgccagcgcgcucgggaagcugcaggacguggucaaccagaacgcccaggcccugaacacgcucgugaagcagcuguccagcaacuucggcgccaucuccagcgugcugaacgacauccucucccgccuggacaaggucgaggccgaggugcagaucgaccggcugaucaccgggcgccuccagagccugcagaccuacgugacccagcagcugauccgggcggccgagauccgcgccagcgccaaccucgccgcgaccaagauguccgagugcguccugggccagagcaagcggguggacuucugcggcaagggguaccaccugauguccuucccccagagcgccccgcacggcguggucuuccuccacgugacguacguccccgcccaggagaagaacuucaccaccgcccccgcgaucugccacgacgggaaggcccacuucccccgcgagggcguguucguguccaacgggacccacugguucgucacgcagcggaacuucuacgagccgcagaucaucaccaccgacaacaccuucgugagcggcaacugcgacguggucaucggcaucgugaacaacacgguguacgacccccugcagcccgagcuggacuccuucaaggaggagcucgacaaguacuucaagaaccacaccagccccgacgucgaccugggggacaucuccggcaucaacgccagcguggugaacauccagaaggagaucgaccgccugaacgaggucgccaagaaccucaacgagucccugaucgaccugcaggagcucgggaaguacgagcaguacaucaagggcgggagcggcuacauccccgaggccccgcgcgacgggcaggccuacgugcggaaggacggcgaguggguccugcucagcaccuuccugugaggacuaguuauaagacugacuagcccgaugggccucccaacgggcccuccuccccuccuugcaccgagauuaauaaaaaaaaaaaaaaaaaaaaaaaaaaaaaaaaaaaaaaaaaaaaaaaaaaaaaaaaaaaaaaaaugcaucccccccccccccccccccccccccccccccaaaggcucuuuucagagccaccagaauu

SEQ ID NO: 12856 - RNA, 3943 nt, Artificial Sequence
  SARS-CoV-2/Wuhan/WIV05/2019__EPI_ISL_402128 spike protein mRNA gc (1-1211)(K986P_V987P) Foldon construct
aggagaaagcuuaccauguucguguuccugguccuccugccccuggugagcucccagugcgugaaccucaccacccgcacgcagcugccgcccgccuacaccaacagcuucacccggggcgucuacuaccccgacaagguguuccgcuccagcgugcugcacuccacccaggaccucuuccugcccuucuucagcaacgucacgugguuccacgccauccacguguccgggaccaacggcaccaagcgguucgacaacccggugcugcccuucaacgacggggucuacuucgcgagcaccgagaaguccaacaucauccgcggcuggaucuucgggacgacccucgacagcaagacccagucccugcugaucgugaacaacgccaccaacguggucaucaaggugugcgaguuccaguucugcaacgaccccuuccucggcguguacuaccacaagaacaacaagagcuggauggaguccgaguuccgggucuacagcuccgccaacaacugcacguucgaguacgugagccagcccuuccugauggaccuggagggcaagcaggggaacuucaagaaccuccgcgaguucguguucaagaacaucgacggcuacuucaagaucuacuccaagcacaccccgaucaaccugguccgggaccugccccagggguucagcgcccucgagccccugguggaccugcccaucggcaucaacaucacccgcuuccagacccuccuggcccugcaccgguccuaccucacgccgggggacagcagcuccggcuggaccgcgggcgccgccgccuacuacgugggguaccugcagccccgcaccuuccugcucaaguacaacgagaacggcaccaucacggacgcggucgacugcgcccuggacccccugagcgagaccaagugcacccucaaguccuucaccguggagaaggggaucuaccagacgagcaacuuccgggugcagcccaccgaguccaucguccgcuucccgaacaucaccaaccugugccccuucggcgagguguucaacgccacccgguucgccagcgucuacgccuggaaccgcaagcggaucuccaacugcguggcggacuacagcgugcuguacaacuccgccagcuucuccacguucaagugcuacggcgucagccccaccaagcucaacgaccugugcuucaccaacguguacgccgacuccuucgugauccgcggggacgagguccggcagaucgcccccggccagaccgggaagaucgccgacuacaacuacaagcugccggacgacuucacgggcugcgugaucgcguggaacagcaacaaccucgacuccaaggucgggggcaacuacaacuaccuguaccgccuguuccgcaagagcaaccucaagcccuucgagcgggacaucuccaccgagaucuaccaggccggcagcacccccugcaacgggguggagggcuucaacugcuacuucccccugcaguccuacggguuccagccgaccaacggcgugggguaccagcccuaccggguggucgugcugagcuucgagcuccugcacgcccccgccacggugugcggccccaagaaguccaccaaccuggucaagaacaagugcgugaacuucaacuucaacggccucaccgggaccggcgugcugaccgagagcaacaagaaguuccugccguuccagcaguucgggcgcgacaucgccgacacgaccgacgcgguccgcgacccccagacccuggagauccucgacaucacccccugcagcuucggcgggguguccgugaucacgccgggcaccaacaccagcaaccaggucgccgugcuguaccaggacgugaacugcaccgagguccccguggccauccacgccgaccagcugacgcccaccuggcggguguacuccaccggcagcaacgucuuccagacccgcgccgggugccucaucggcgcggagcacgugaacaacuccuacgagugcgacauccccaucggggccggcaucugcgccagcuaccagacgcagaccaacuccccgcggcgcgcccggagcguggcgucccagagcaucaucgccuacaccaugucccugggcgccgagaacagcgucgccuacuccaacaacagcaucgccauccccaccaacuucacgaucuccgugaccaccgagauccugcccgugagcaugaccaagacgagcgucgacugcaccauguacaucugcggggacuccaccgagugcagcaaccuccugcugcaguacggcuccuucugcacccagcucaaccgcgcgcugacggggaucgccguggagcaggacaagaacacccaggagguguucgcccaggucaagcagaucuacaagacgcccccgaucaaggacuucggcggguucaacuucagccagauccugcccgaccccuccaagcccagcaagcgguccuucaucgaggaccuccuguucaacaaggugacccuggccgacgccggcuucaucaagcaguacggcgacugccucggggacaucgcggcccgcgaccugaucugcgcccagaaguucaacggccugaccgugcucccgccccugcugaccgacgagaugaucgcccaguacaccagcgcccuccuggcggggaccaucacguccggcuggaccuucggggccggcgccgcccugcagauccccuucgcgaugcagauggccuaccgguucaacggcaucggggucacccagaacgugcucuacgagaaccagaagcugaucgccaaccaguucaacagcgccaucggcaagauccaggacucccugagcuccaccgccagcgcgcucgggaagcugcaggacguggucaaccagaacgcccaggcccugaacacgcucgugaagcagcuguccagcaacuucggcgccaucuccagcgugcugaacgacauccucucccgccuggacccgcccgaggccgaggugcagaucgaccggcugaucaccgggcgccuccagagccugcagaccuacgugacccagcagcugauccgggcggccgagauccgcgccagcgccaaccucgccgcgaccaagauguccgagugcguccugggccagagcaagcggguggacuucugcggcaagggguaccaccugauguccuucccccagagcgccccgcacggcguggucuuccuccacgugacguacguccccgcccaggagaagaacuucaccaccgcccccgcgaucugccacgacgggaaggcccacuucccccgcgagggcguguucguguccaacgggacccacugguucgucacgcagcggaacuucuacgagccgcagaucaucaccaccgacaacaccuucgugagcggcaacugcgacguggucaucggcaucgugaacaacacgguguacgacccccugcagcccgagcuggacuccuucaaggaggagcucgacaaguacuucaagaaccacaccagccccgacgucgaccugggggacaucuccggcaucaacgccagcguggugaacauccagaaggagaucgaccgccugaacgaggucgccaagaaccucaacgagucccugaucgaccugcaggagcucgggaaguacgagcaguacaucaagggcgggagcggcuacauccccgaggccccgcgcgacgggcaggccuacgugcggaaggacggcgaguggguccugcucagcaccuuccugugaggacuaguuauaagacugacuagcccgaugggccucccaacgggcccuccuccccuccuugcaccgagauuaauaaaaaaaaaaaaaaaaaaaaaaaaaaaaaaaaaaaaaaaaaaaaaaaaaaaaaaaaaaaaaaaaugcaucccccccccccccccccccccccccccccccaaaggcucuuuucagagccaccagaauu

SEQ ID NO: 12857 - RNA, 3943 nt, Artificial Sequence
  SARS-CoV-2/Wuhan/WIV05/2019__EPI_ISL_402128 spike protein mRNA gc (1-1211)(K986P_V987P_T887WN_A1020W) Foldon construct
aggagaaagcuuaccauguucguguuccugguccuccugccccuggugagcucccagugcgugaaccucaccacccgcacgcagcugccgcccgccuacaccaacagcuucacccggggcgucuacuaccccgacaagguguuccgcuccagcgugcugcacuccacccaggaccucuuccugcccuucuucagcaacgucacgugguuccacgccauccacguguccgggaccaacggcaccaagcgguucgacaacccggugcugcccuucaacgacggggucuacuucgcgagcaccgagaaguccaacaucauccgcggcuggaucuucgggacgacccucgacagcaagacccagucccugcugaucgugaacaacgccaccaacguggucaucaaggugugcgaguuccaguucugcaacgaccccuuccucggcguguacuaccacaagaacaacaagagcuggauggaguccgaguuccgggucuacagcuccgccaacaacugcacguucgaguacgugagccagcccuuccugauggaccuggagggcaagcaggggaacuucaagaaccuccgcgaguucguguucaagaacaucgacggcuacuucaagaucuacuccaagcacaccccgaucaaccugguccgggaccugccccagggguucagcgcccucgagccccugguggaccugcccaucggcaucaacaucacccgcuuccagacccuccuggcccugcaccgguccuaccucacgccgggggacagcagcuccggcuggaccgcgggcgccgccgccuacuacgugggguaccugcagccccgcaccuuccugcucaaguacaacgagaacggcaccaucacggacgcggucgacugcgcccuggacccccugagcgagaccaagugcacccucaaguccuucaccguggagaaggggaucuaccagacgagcaacuuccgggugcagcccaccgaguccaucguccgcuucccgaacaucaccaaccugugccccuucggcgagguguucaacgccacccgguucgccagcgucuacgccuggaaccgcaagcggaucuccaacugcguggcggacuacagcgugcuguacaacuccgccagcuucuccacguucaagugcuacggcgucagccccaccaagcucaacgaccugugcuucaccaacguguacgccgacuccuucgugauccgcggggacgagguccggcagaucgcccccggccagaccgggaagaucgccgacuacaacuacaagcugccggacgacuucacgggcugcgugaucgcguggaacagcaacaaccucgacuccaaggucgggggcaacuacaacuaccuguaccgccuguuccgcaagagcaaccucaagcccuucgagcgggacaucuccaccgagaucuaccaggccggcagcacccccugcaacgggguggagggcuucaacugcuacuucccccugcaguccuacggguuccagccgaccaacggcgugggguaccagcccuaccggguggucgugcugagcuucgagcuccugcacgcccccgccacggugugcggccccaagaaguccaccaaccuggucaagaacaagugcgugaacuucaacuucaacggccucaccgggaccggcgugcugaccgagagcaacaagaaguuccugccguuccagcaguucgggcgcgacaucgccgacacgaccgacgcgguccgcgacccccagacccuggagauccucgacaucacccccugcagcuucggcgggguguccgugaucacgccgggcaccaacaccagcaaccaggucgccgugcuguaccaggacgugaacugcaccgagguccccguggccauccacgccgaccagcugacgcccaccuggcggguguacuccaccggcagcaacgucuuccagacccgcgccgggugccucaucggcgcggagcacgugaacaacuccuacgagugcgacauccccaucggggccggcaucugcgccagcuaccagacgcagaccaacuccccgcggcgcgcccggagcguggcgucccagagcaucaucgccuacaccaugucccugggcgccgagaacagcgucgccuacuccaacaacagcaucgccauccccaccaacuucacgaucuccgugaccaccgagauccugcccgugagcaugaccaagacgagcgucgacugcaccauguacaucugcggggacuccaccgagugcagcaaccuccugcugcaguacggcuccuucugcacccagcucaaccgcgcgcugacggggaucgccguggagcaggacaagaacacccaggagguguucgcccaggucaagcagaucuacaagacgcccccgaucaaggacuucggcggguucaacuucagccagauccugcccgaccccuccaagcccagcaagcgguccuucaucgaggaccuccuguucaacaaggugacccuggccgacgccggcuucaucaagcaguacggcgacugccucggggacaucgcggcccgcgaccugaucugcgcccagaaguucaacggccugaccgugcucccgccccugcugaccgacgagaugaucgcccaguacaccagcgcccuccuggcggggaccaucacguccggcuggugguucggggccggcgccgcccugcagauccccuucgcgaugcagauggccuaccgguucaacggcaucggggucacccagaacgugcucuacgagaaccagaagcugaucgccaaccaguucaacagcgccaucggcaagauccaggacucccugagcuccaccgccagcgcgcucgggaagcugcaggacguggucaaccagaacgcccaggcccugaacacgcucgugaagcagcuguccagcaacuucggcgccaucuccagcgugcugaacgacauccucucccgccuggacccgcccgaggccgaggugcagaucgaccggcugaucaccgggcgccuccagagccugcagaccuacgugacccagcagcugauccgggcggccgagauccgcuggagcgccaaccucgccgcgaccaagauguccgagugcguccugggccagagcaagcggguggacuucugcggcaagggguaccaccugauguccuucccccagagcgccccgcacggcguggucuuccuccacgugacguacguccccgcccaggagaagaacuucaccaccgcccccgcgaucugccacgacgggaaggcccacuucccccgcgagggcguguucguguccaacgggacccacugguucgucacgcagcggaacuucuacgagccgcagaucaucaccaccgacaacaccuucgugagcggcaacugcgacguggucaucggcaucgugaacaacacgguguacgacccccugcagcccgagcuggacuccuucaaggaggagcucgacaaguacuucaagaaccacaccagccccgacgucgaccugggggacaucuccggcaucaacgccagcguggugaacauccagaaggagaucgaccgccugaacgaggucgccaagaaccucaacgagucccugaucgaccugcaggagcucgggaaguacgagcaguacaucaagggcgggagcggcuacauccccgaggccccgcgcgacgggcaggccuacgugcggaaggacggcgaguggguccugcucagcaccuuccugugaggacuaguuauaagacugacuagcccgaugggccucccaacgggcccuccuccccuccuugcaccgagauuaauaaaaaaaaaaaaaaaaaaaaaaaaaaaaaaaaaaaaaaaaaaaaaaaaaaaaaaaaaaaaaaaaugcaucccccccccccccccccccccccccccccccaaaggcucuuuucagagccaccagaauu

SEQ ID NO: 12858 - RNA, 3943 nt, Artificial Sequence
  SARS-CoV-2/Wuhan/WIV05/2019__EPI_ISL_402128 spike protein mRNA gc (1-1211)(K986P_V987P_P1069F) Foldon construct
aggagaaagcuuaccauguucguguuccugguccuccugccccuggugagcucccagugcgugaaccucaccacccgcacgcagcugccgcccgccuacaccaacagcuucacccggggcgucuacuaccccgacaagguguuccgcuccagcgugcugcacuccacccaggaccucuuccugcccuucuucagcaacgucacgugguuccacgccauccacguguccgggaccaacggcaccaagcgguucgacaacccggugcugcccuucaacgacggggucuacuucgcgagcaccgagaaguccaacaucauccgcggcuggaucuucgggacgacccucgacagcaagacccagucccugcugaucgugaacaacgccaccaacguggucaucaaggugugcgaguuccaguucugcaacgaccccuuccucggcguguacuaccacaagaacaacaagagcuggauggaguccgaguuccgggucuacagcuccgccaacaacugcacguucgaguacgugagccagcccuuccugauggaccuggagggcaagcaggggaacuucaagaaccuccgcgaguucguguucaagaacaucgacggcuacuucaagaucuacuccaagcacaccccgaucaaccugguccgggaccugccccagggguucagcgcccucgagccccugguggaccugcccaucggcaucaacaucacccgcuuccagacccuccuggcccugcaccgguccuaccucacgccgggggacagcagcuccggcuggaccgcgggcgccgccgccuacuacgugggguaccugcagccccgcaccuuccugcucaaguacaacgagaacggcaccaucacggacgcggucgacugcgcccuggacccccugagcgagaccaagugcacccucaaguccuucaccguggagaaggggaucuaccagacgagcaacuuccgggugcagcccaccgaguccaucguccgcuucccgaacaucaccaaccugugccccuucggcgagguguucaacgccacccgguucgccagcgucuacgccuggaaccgcaagcggaucuccaacugcguggcggacuacagcgugcuguacaacuccgccagcuucuccacguucaagugcuacggcgucagccccaccaagcucaacgaccugugcuucaccaacguguacgccgacuccuucgugauccgcggggacgagguccggcagaucgcccccggccagaccgggaagaucgccgacuacaacuacaagcugccggacgacuucacgggcugcgugaucgcguggaacagcaacaaccucgacuccaaggucgggggcaacuacaacuaccuguaccgccuguuccgcaagagcaaccucaagcccuucgagcgggacaucuccaccgagaucuaccaggccggcagcacccccugcaacgggguggagggcuucaacugcuacuucccccugcaguccuacggguuccagccgaccaacggcgugggguaccagcccuaccggguggucgugcugagcuucgagcuccugcacgcccccgccacggugugcggccccaagaaguccaccaaccuggucaagaacaagugcgugaacuucaacuucaacggccucaccgggaccggcgugcugaccgagagcaacaagaaguuccugccguuccagcaguucgggcgcgacaucgccgacacgaccgacgcgguccgcgacccccagacccuggagauccucgacaucacccccugcagcuucggcgggguguccgugaucacgccgggcaccaacaccagcaaccaggucgccgugcuguaccaggacgugaacugcaccgagguccccguggccauccacgccgaccagcugacgcccaccuggcggguguacuccaccggcagcaacgucuuccagacccgcgccgggugccucaucggcgcggagcacgugaacaacuccuacgagugcgacauccccaucggggccggcaucugcgccagcuaccagacgcagaccaacuccccgcggcgcgcccggagcguggcgucccagagcaucaucgccuacaccaugucccugggcgccgagaacagcgucgccuacuccaacaacagcaucgccauccccaccaacuucacgaucuccgugaccaccgagauccugcccgugagcaugaccaagacgagcgucgacugcaccauguacaucugcggggacuccaccgagugcagcaaccuccugcugcaguacggcuccuucugcacccagcucaaccgcgcgcugacggggaucgccguggagcaggacaagaacacccaggagguguucgcccaggucaagcagaucuacaagacgcccccgaucaaggacuucggcggguucaacuucagccagauccugcccgaccccuccaagcccagcaagcgguccuucaucgaggaccuccuguucaacaaggugacccuggccgacgccggcuucaucaagcaguacggcgacugccucggggacaucgcggcccgcgaccugaucugcgcccagaaguucaacggccugaccgugcucccgccccugcugaccgacgagaugaucgcccaguacaccagcgcccuccuggcggggaccaucacguccggcuggaccuucggggccggcgccgcccugcagauccccuucgcgaugcagauggccuaccgguucaacggcaucggggucacccagaacgugcucuacgagaaccagaagcugaucgccaaccaguucaacagcgccaucggcaagauccaggacucccugagcuccaccgccagcgcgcucgggaagcugcaggacguggucaaccagaacgcccaggcccugaacacgcucgugaagcagcuguccagcaacuucggcgccaucuccagcgugcugaacgacauccucucccgccuggacccgcccgaggccgaggugcagaucgaccggcugaucaccgggcgccuccagagccugcagaccuacgugacccagcagcugauccgggcggccgagauccgcgccagcgccaaccucgccgcgaccaagauguccgagugcguccugggccagagcaagcggguggacuucugcggcaagggguaccaccugauguccuucccccagagcgccccgcacggcguggucuuccuccacgugacguacgucuucgcccaggagaagaacuucaccaccgcccccgcgaucugccacgacgggaaggcccacuucccccgcgagggcguguucguguccaacgggacccacugguucgucacgcagcggaacuucuacgagccgcagaucaucaccaccgacaacaccuucgugagcggcaacugcgacguggucaucggcaucgugaacaacacgguguacgacccccugcagcccgagcuggacuccuucaaggaggagcucgacaaguacuucaagaaccacaccagccccgacgucgaccugggggacaucuccggcaucaacgccagcguggugaacauccagaaggagaucgaccgccugaacgaggucgccaagaaccucaacgagucccugaucgaccugcaggagcucgggaaguacgagcaguacaucaagggcgggagcggcuacauccccgaggccccgcgcgacgggcaggccuacgugcggaaggacggcgaguggguccugcucagcaccuuccugugaggacuaguuauaagacugacuagcccgaugggccucccaacgggcccuccuccccuccuugcaccgagauuaauaaaaaaaaaaaaaaaaaaaaaaaaaaaaaaaaaaaaaaaaaaaaaaaaaaaaaaaaaaaaaaaaugcaucccccccccccccccccccccccccccccccaaaggcucuuuucagagccaccagaauu

SEQ ID NO: 12859 - RNA, 3943 nt, Artificial Sequence
  SARS-CoV-2/Wuhan/WIV05/2019__EPI_ISL_402128 spike protein mRNA gc (1-1211)(K986P_V987P_ H1048Q_H1064N_ H1083N_H1101N) Foldon construct
aggagaaagcuuaccauguucguguuccugguccuccugccccuggugagcucccagugcgugaaccucaccacccgcacgcagcugccgcccgccuacaccaacagcuucacccggggcgucuacuaccccgacaagguguuccgcuccagcgugcugcacuccacccaggaccucuuccugcccuucuucagcaacgucacgugguuccacgccauccacguguccgggaccaacggcaccaagcgguucgacaacccggugcugcccuucaacgacggggucuacuucgcgagcaccgagaaguccaacaucauccgcggcuggaucuucgggacgacccucgacagcaagacccagucccugcugaucgugaacaacgccaccaacguggucaucaaggugugcgaguuccaguucugcaacgaccccuuccucggcguguacuaccacaagaacaacaagagcuggauggaguccgaguuccgggucuacagcuccgccaacaacugcacguucgaguacgugagccagcccuuccugauggaccuggagggcaagcaggggaacuucaagaaccuccgcgaguucguguucaagaacaucgacggcuacuucaagaucuacuccaagcacaccccgaucaaccugguccgggaccugccccagggguucagcgcccucgagccccugguggaccugcccaucggcaucaacaucacccgcuuccagacccuccuggcccugcaccgguccuaccucacgccgggggacagcagcuccggcuggaccgcgggcgccgccgccuacuacgugggguaccugcagccccgcaccuuccugcucaaguacaacgagaacggcaccaucacggacgcggucgacugcgcccuggacccccugagcgagaccaagugcacccucaaguccuucaccguggagaaggggaucuaccagacgagcaacuuccgggugcagcccaccgaguccaucguccgcuucccgaacaucaccaaccugugccccuucggcgagguguucaacgccacccgguucgccagcgucuacgccuggaaccgcaagcggaucuccaacugcguggcggacuacagcgugcuguacaacuccgccagcuucuccacguucaagugcuacggcgucagccccaccaagcucaacgaccugugcuucaccaacguguacgccgacuccuucgugauccgcggggacgagguccggcagaucgcccccggccagaccgggaagaucgccgacuacaacuacaagcugccggacgacuucacgggcugcgugaucgcguggaacagcaacaaccucgacuccaaggucgggggcaacuacaacuaccuguaccgccuguuccgcaagagcaaccucaagcccuucgagcgggacaucuccaccgagaucuaccaggccggcagcacccccugcaacgggguggagggcuucaacugcuacuucccccugcaguccuacggguuccagccgaccaacggcgugggguaccagcccuaccggguggucgugcugagcuucgagcuccugcacgcccccgccacggugugcggccccaagaaguccaccaaccuggucaagaacaagugcgugaacuucaacuucaacggccucaccgggaccggcgugcugaccgagagcaacaagaaguuccugccguuccagcaguucgggcgcgacaucgccgacacgaccgacgcgguccgcgacccccagacccuggagauccucgacaucacccccugcagcuucggcgggguguccgugaucacgccgggcaccaacaccagcaaccaggucgccgugcuguaccaggacgugaacugcaccgagguccccguggccauccacgccgaccagcugacgcccaccuggcggguguacuccaccggcagcaacgucuuccagacccgcgccgggugccucaucggcgcggagcacgugaacaacuccuacgagugcgacauccccaucggggccggcaucugcgccagcuaccagacgcagaccaacuccccgcggcgcgcccggagcguggcgucccagagcaucaucgccuacaccaugucccugggcgccgagaacagcgucgccuacuccaacaacagcaucgccauccccaccaacuucacgaucuccgugaccaccgagauccugcccgugagcaugaccaagacgagcgucgacugcaccauguacaucugcggggacuccaccgagugcagcaaccuccugcugcaguacggcuccuucugcacccagcucaaccgcgcgcugacggggaucgccguggagcaggacaagaacacccaggagguguucgcccaggucaagcagaucuacaagacgcccccgaucaaggacuucggcggguucaacuucagccagauccugcccgaccccuccaagcccagcaagcgguccuucaucgaggaccuccuguucaacaaggugacccuggccgacgccggcuucaucaagcaguacggcgacugccucggggacaucgcggcccgcgaccugaucugcgcccagaaguucaacggccugaccgugcucccgccccugcugaccgacgagaugaucgcccaguacaccagcgcccuccuggcggggaccaucacguccggcuggaccuucggggccggcgccgcccugcagauccccuucgcgaugcagauggccuaccgguucaacggcaucggggucacccagaacgugcucuacgagaaccagaagcugaucgccaaccaguucaacagcgccaucggcaagauccaggacucccugagcuccaccgccagcgcgcucgggaagcugcaggacguggucaaccagaacgcccaggcccugaacacgcucgugaagcagcuguccagcaacuucggcgccaucuccagcgugcugaacgacauccucucccgccuggacccgcccgaggccgaggugcagaucgaccggcugaucaccgggcgccuccagagccugcagaccuacgugacccagcagcugauccgggcggccgagauccgcgccagcgccaaccucgccgcgaccaagauguccgagugcguccugggccagagcaagcggguggacuucugcggcaagggguaccagcugauguccuucccccagagcgccccgcacggcguggucuuccucaacgugacguacguccccgcccaggagaagaacuucaccaccgcccccgcgaucugcaacgacgggaaggcccacuucccccgcgagggcguguucguguccaacgggaccaacugguucgucacgcagcggaacuucuacgagccgcagaucaucaccaccgacaacaccuucgugagcggcaacugcgacguggucaucggcaucgugaacaacacgguguacgacccccugcagcccgagcuggacuccuucaaggaggagcucgacaaguacuucaagaaccacaccagccccgacgucgaccugggggacaucuccggcaucaacgccagcguggugaacauccagaaggagaucgaccgccugaacgaggucgccaagaaccucaacgagucccugaucgaccugcaggagcucgggaaguacgagcaguacaucaagggcgggagcggcuacauccccgaggccccgcgcgacgggcaggccuacgugcggaaggacggcgaguggguccugcucagcaccuuccugugaggacuaguuauaagacugacuagcccgaugggccucccaacgggcccuccuccccuccuugcaccgagauuaauaaaaaaaaaaaaaaaaaaaaaaaaaaaaaaaaaaaaaaaaaaaaaaaaaaaaaaaaaaaaaaaaugcaucccccccccccccccccccccccccccccccaaaggcucuuuucagagccaccagaauu

SEQ ID NO: 12860 - RNA, 3943 nt, Artificial Sequence
  SARS-CoV-2/Wuhan/WIV05/2019__EPI_ISL_402128 spike protein mRNA gc (1-1211)(I712C_T1077C) Foldon construct
aggagaaagcuuaccauguucguguuccugguccuccugccccuggugagcucccagugcgugaaccucaccacccgcacgcagcugccgcccgccuacaccaacagcuucacccggggcgucuacuaccccgacaagguguuccgcuccagcgugcugcacuccacccaggaccucuuccugcccuucuucagcaacgucacgugguuccacgccauccacguguccgggaccaacggcaccaagcgguucgacaacccggugcugcccuucaacgacggggucuacuucgcgagcaccgagaaguccaacaucauccgcggcuggaucuucgggacgacccucgacagcaagacccagucccugcugaucgugaacaacgccaccaacguggucaucaaggugugcgaguuccaguucugcaacgaccccuuccucggcguguacuaccacaagaacaacaagagcuggauggaguccgaguuccgggucuacagcuccgccaacaacugcacguucgaguacgugagccagcccuuccugauggaccuggagggcaagcaggggaacuucaagaaccuccgcgaguucguguucaagaacaucgacggcuacuucaagaucuacuccaagcacaccccgaucaaccugguccgggaccugccccagggguucagcgcccucgagccccugguggaccugcccaucggcaucaacaucacccgcuuccagacccuccuggcccugcaccgguccuaccucacgccgggggacagcagcuccggcuggaccgcgggcgccgccgccuacuacgugggguaccugcagccccgcaccuuccugcucaaguacaacgagaacggcaccaucacggacgcggucgacugcgcccuggacccccugagcgagaccaagugcacccucaaguccuucaccguggagaaggggaucuaccagacgagcaacuuccgggugcagcccaccgaguccaucguccgcuucccgaacaucaccaaccugugccccuucggcgagguguucaacgccacccgguucgccagcgucuacgccuggaaccgcaagcggaucuccaacugcguggcggacuacagcgugcuguacaacuccgccagcuucuccacguucaagugcuacggcgucagccccaccaagcucaacgaccugugcuucaccaacguguacgccgacuccuucgugauccgcggggacgagguccggcagaucgcccccggccagaccgggaagaucgccgacuacaacuacaagcugccggacgacuucacgggcugcgugaucgcguggaacagcaacaaccucgacuccaaggucgggggcaacuacaacuaccuguaccgccuguuccgcaagagcaaccucaagcccuucgagcgggacaucuccaccgagaucuaccaggccggcagcacccccugcaacgggguggagggcuucaacugcuacuucccccugcaguccuacggguuccagccgaccaacggcgugggguaccagcccuaccggguggucgugcugagcuucgagcuccugcacgcccccgccacggugugcggccccaagaaguccaccaaccuggucaagaacaagugcgugaacuucaacuucaacggccucaccgggaccggcgugcugaccgagagcaacaagaaguuccugccguuccagcaguucgggcgcgacaucgccgacacgaccgacgcgguccgcgacccccagacccuggagauccucgacaucacccccugcagcuucggcgggguguccgugaucacgccgggcaccaacaccagcaaccaggucgccgugcuguaccaggacgugaacugcaccgagguccccguggccauccacgccgaccagcugacgcccaccuggcggguguacuccaccggcagcaacgucuuccagacccgcgccgggugccucaucggcgcggagcacgugaacaacuccuacgagugcgacauccccaucggggccggcaucugcgccagcuaccagacgcagaccaacuccccgcggcgcgcccggagcguggcgucccagagcaucaucgccuacaccaugucccugggcgccgagaacagcgucgccuacuccaacaacagcugcgccauccccaccaacuucacgaucuccgugaccaccgagauccugcccgugagcaugaccaagacgagcgucgacugcaccauguacaucugcggggacuccaccgagugcagcaaccuccugcugcaguacggcuccuucugcacccagcucaaccgcgcgcugacggggaucgccguggagcaggacaagaacacccaggagguguucgcccaggucaagcagaucuacaagacgcccccgaucaaggacuucggcggguucaacuucagccagauccugcccgaccccuccaagcccagcaagcgguccuucaucgaggaccuccuguucaacaaggugacccuggccgacgccggcuucaucaagcaguacggcgacugccucggggacaucgcggcccgcgaccugaucugcgcccagaaguucaacggccugaccgugcucccgccccugcugaccgacgagaugaucgcccaguacaccagcgcccuccuggcggggaccaucacguccggcuggaccuucggggccggcgccgcccugcagauccccuucgcgaugcagauggccuaccgguucaacggcaucggggucacccagaacgugcucuacgagaaccagaagcugaucgccaaccaguucaacagcgccaucggcaagauccaggacucccugagcuccaccgccagcgcgcucgggaagcugcaggacguggucaaccagaacgcccaggcccugaacacgcucgugaagcagcuguccagcaacuucggcgccaucuccagcgugcugaacgacauccucucccgccuggacaaggucgaggccgaggugcagaucgaccggcugaucaccgggcgccuccagagccugcagaccuacgugacccagcagcugauccgggcggccgagauccgcgccagcgccaaccucgccgcgaccaagauguccgagugcguccugggccagagcaagcggguggacuucugcggcaagggguaccaccugauguccuucccccagagcgccccgcacggcguggucuuccuccacgugacguacguccccgcccaggagaagaacuucaccugcgcccccgcgaucugccacgacgggaaggcccacuucccccgcgagggcguguucguguccaacgggacccacugguucgucacgcagcggaacuucuacgagccgcagaucaucaccaccgacaacaccuucgugagcggcaacugcgacguggucaucggcaucgugaacaacacgguguacgacccccugcagcccgagcuggacuccuucaaggaggagcucgacaaguacuucaagaaccacaccagccccgacgucgaccugggggacaucuccggcaucaacgccagcguggugaacauccagaaggagaucgaccgccugaacgaggucgccaagaaccucaacgagucccugaucgaccugcaggagcucgggaaguacgagcaguacaucaagggcgggagcggcuacauccccgaggccccgcgcgacgggcaggccuacgugcggaaggacggcgaguggguccugcucagcaccuuccugugaggacuaguuauaagacugacuagcccgaugggccucccaacgggcccuccuccccuccuugcaccgagauuaauaaaaaaaaaaaaaaaaaaaaaaaaaaaaaaaaaaaaaaaaaaaaaaaaaaaaaaaaaaaaaaaaugcaucccccccccccccccccccccccccccccccaaaggcucuuuucagagccaccagaauu

SEQ ID NO: 12861 - RNA, 3943 nt, Artificial Sequence
  SARS-CoV-2/Wuhan/WIV05/2019__EPI_ISL_402128 spike protein mRNA gc (1-1211)(I714C_Y1110C) Foldon construct
aggagaaagcuuaccauguucguguuccugguccuccugccccuggugagcucccagugcgugaaccucaccacccgcacgcagcugccgcccgccuacaccaacagcuucacccggggcgucuacuaccccgacaagguguuccgcuccagcgugcugcacuccacccaggaccucuuccugcccuucuucagcaacgucacgugguuccacgccauccacguguccgggaccaacggcaccaagcgguucgacaacccggugcugcccuucaacgacggggucuacuucgcgagcaccgagaaguccaacaucauccgcggcuggaucuucgggacgacccucgacagcaagacccagucccugcugaucgugaacaacgccaccaacguggucaucaaggugugcgaguuccaguucugcaacgaccccuuccucggcguguacuaccacaagaacaacaagagcuggauggaguccgaguuccgggucuacagcuccgccaacaacugcacguucgaguacgugagccagcccuuccugauggaccuggagggcaagcaggggaacuucaagaaccuccgcgaguucguguucaagaacaucgacggcuacuucaagaucuacuccaagcacaccccgaucaaccugguccgggaccugccccagggguucagcgcccucgagccccugguggaccugcccaucggcaucaacaucacccgcuuccagacccuccuggcccugcaccgguccuaccucacgccgggggacagcagcuccggcuggaccgcgggcgccgccgccuacuacgugggguaccugcagccccgcaccuuccugcucaaguacaacgagaacggcaccaucacggacgcggucgacugcgcccuggacccccugagcgagaccaagugcacccucaaguccuucaccguggagaaggggaucuaccagacgagcaacuuccgggugcagcccaccgaguccaucguccgcuucccgaacaucaccaaccugugccccuucggcgagguguucaacgccacccgguucgccagcgucuacgccuggaaccgcaagcggaucuccaacugcguggcggacuacagcgugcuguacaacuccgccagcuucuccacguucaagugcuacggcgucagccccaccaagcucaacgaccugugcuucaccaacguguacgccgacuccuucgugauccgcggggacgagguccggcagaucgcccccggccagaccgggaagaucgccgacuacaacuacaagcugccggacgacuucacgggcugcgugaucgcguggaacagcaacaaccucgacuccaaggucgggggcaacuacaacuaccuguaccgccuguuccgcaagagcaaccucaagcccuucgagcgggacaucuccaccgagaucuaccaggccggcagcacccccugcaacgggguggagggcuucaacugcuacuucccccugcaguccuacggguuccagccgaccaacggcgugggguaccagcccuaccggguggucgugcugagcuucgagcuccugcacgcccccgccacggugugcggccccaagaaguccaccaaccuggucaagaacaagugcgugaacuucaacuucaacggccucaccgggaccggcgugcugaccgagagcaacaagaaguuccugccguuccagcaguucgggcgcgacaucgccgacacgaccgacgcgguccgcgacccccagacccuggagauccucgacaucacccccugcagcuucggcgggguguccgugaucacgccgggcaccaacaccagcaaccaggucgccgugcuguaccaggacgugaacugcaccgagguccccguggccauccacgccgaccagcugacgcccaccuggcggguguacuccaccggcagcaacgucuuccagacccgcgccgggugccucaucggcgcggagcacgugaacaacuccuacgagugcgacauccccaucggggccggcaucugcgccagcuaccagacgcagaccaacuccccgcggcgcgcccggagcguggcgucccagagcaucaucgccuacaccaugucccugggcgccgagaacagcgucgccuacuccaacaacagcaucgccugccccaccaacuucacgaucuccgugaccaccgagauccugcccgugagcaugaccaagacgagcgucgacugcaccauguacaucugcggggacuccaccgagugcagcaaccuccugcugcaguacggcuccuucugcacccagcucaaccgcgcgcugacggggaucgccguggagcaggacaagaacacccaggagguguucgcccaggucaagcagaucuacaagacgcccccgaucaaggacuucggcggguucaacuucagccagauccugcccgaccccuccaagcccagcaagcgguccuucaucgaggaccuccuguucaacaaggugacccuggccgacgccggcuucaucaagcaguacggcgacugccucggggacaucgcggcccgcgaccugaucugcgcccagaaguucaacggccugaccgugcucccgccccugcugaccgacgagaugaucgcccaguacaccagcgcccuccuggcggggaccaucacguccggcuggaccuucggggccggcgccgcccugcagauccccuucgcgaugcagauggccuaccgguucaacggcaucggggucacccagaacgugcucuacgagaaccagaagcugaucgccaaccaguucaacagcgccaucggcaagauccaggacucccugagcuccaccgccagcgcgcucgggaagcugcaggacguggucaaccagaacgcccaggcccugaacacgcucgugaagcagcuguccagcaacuucggcgccaucuccagcgugcugaacgacauccucucccgccuggacaaggucgaggccgaggugcagaucgaccggcugaucaccgggcgccuccagagccugcagaccuacgugacccagcagcugauccgggcggccgagauccgcgccagcgccaaccucgccgcgaccaagauguccgagugcguccugggccagagcaagcggguggacuucugcggcaagggguaccaccugauguccuucccccagagcgccccgcacggcguggucuuccuccacgugacguacguccccgcccaggagaagaacuucaccaccgcccccgcgaucugccacgacgggaaggcccacuucccccgcgagggcguguucguguccaacgggacccacugguucgucacgcagcggaacuucugcgagccgcagaucaucaccaccgacaacaccuucgugagcggcaacugcgacguggucaucggcaucgugaacaacacgguguacgacccccugcagcccgagcuggacuccuucaaggaggagcucgacaaguacuucaagaaccacaccagccccgacgucgaccugggggacaucuccggcaucaacgccagcguggugaacauccagaaggagaucgaccgccugaacgaggucgccaagaaccucaacgagucccugaucgaccugcaggagcucgggaaguacgagcaguacaucaagggcgggagcggcuacauccccgaggccccgcgcgacgggcaggccuacgugcggaaggacggcgaguggguccugcucagcaccuuccugugaggacuaguuauaagacugacuagcccgaugggccucccaacgggcccuccuccccuccuugcaccgagauuaauaaaaaaaaaaaaaaaaaaaaaaaaaaaaaaaaaaaaaaaaaaaaaaaaaaaaaaaaaaaaaaaaugcaucccccccccccccccccccccccccccccccaaaggcucuuuucagagccaccagaauu

SEQ ID NO: 12862 - RNA, 3943 nt, Artificial Sequence
  SARS-CoV-2/Wuhan/WIV05/2019__EPI_ISL_402128 spike protein mRNA gc (1-1211)(P715C_P1069C) Foldon construct
aggagaaagcuuaccauguucguguuccugguccuccugccccuggugagcucccagugcgugaaccucaccacccgcacgcagcugccgcccgccuacaccaacagcuucacccggggcgucuacuaccccgacaagguguuccgcuccagcgugcugcacuccacccaggaccucuuccugcccuucuucagcaacgucacgugguuccacgccauccacguguccgggaccaacggcaccaagcgguucgacaacccggugcugcccuucaacgacggggucuacuucgcgagcaccgagaaguccaacaucauccgcggcuggaucuucgggacgacccucgacagcaagacccagucccugcugaucgugaacaacgccaccaacguggucaucaaggugugcgaguuccaguucugcaacgaccccuuccucggcguguacuaccacaagaacaacaagagcuggauggaguccgaguuccgggucuacagcuccgccaacaacugcacguucgaguacgugagccagcccuuccugauggaccuggagggcaagcaggggaacuucaagaaccuccgcgaguucguguucaagaacaucgacggcuacuucaagaucuacuccaagcacaccccgaucaaccugguccgggaccugccccagggguucagcgcccucgagccccugguggaccugcccaucggcaucaacaucacccgcuuccagacccuccuggcccugcaccgguccuaccucacgccgggggacagcagcuccggcuggaccgcgggcgccgccgccuacuacgugggguaccugcagccccgcaccuuccugcucaaguacaacgagaacggcaccaucacggacgcggucgacugcgcccuggacccccugagcgagaccaagugcacccucaaguccuucaccguggagaaggggaucuaccagacgagcaacuuccgggugcagcccaccgaguccaucguccgcuucccgaacaucaccaaccugugccccuucggcgagguguucaacgccacccgguucgccagcgucuacgccuggaaccgcaagcggaucuccaacugcguggcggacuacagcgugcuguacaacuccgccagcuucuccacguucaagugcuacggcgucagccccaccaagcucaacgaccugugcuucaccaacguguacgccgacuccuucgugauccgcggggacgagguccggcagaucgcccccggccagaccgggaagaucgccgacuacaacuacaagcugccggacgacuucacgggcugcgugaucgcguggaacagcaacaaccucgacuccaaggucgggggcaacuacaacuaccuguaccgccuguuccgcaagagcaaccucaagcccuucgagcgggacaucuccaccgagaucuaccaggccggcagcacccccugcaacgggguggagggcuucaacugcuacuucccccugcaguccuacggguuccagccgaccaacggcgugggguaccagcccuaccggguggucgugcugagcuucgagcuccugcacgcccccgccacggugugcggccccaagaaguccaccaaccuggucaagaacaagugcgugaacuucaacuucaacggccucaccgggaccggcgugcugaccgagagcaacaagaaguuccugccguuccagcaguucgggcgcgacaucgccgacacgaccgacgcgguccgcgacccccagacccuggagauccucgacaucacccccugcagcuucggcgggguguccgugaucacgccgggcaccaacaccagcaaccaggucgccgugcuguaccaggacgugaacugcaccgagguccccguggccauccacgccgaccagcugacgcccaccuggcggguguacuccaccggcagcaacgucuuccagacccgcgccgggugccucaucggcgcggagcacgugaacaacuccuacgagugcgacauccccaucggggccggcaucugcgccagcuaccagacgcagaccaacuccccgcggcgcgcccggagcguggcgucccagagcaucaucgccuacaccaugucccugggcgccgagaacagcgucgccuacuccaacaacagcaucgccaucugcaccaacuucacgaucuccgugaccaccgagauccugcccgugagcaugaccaagacgagcgucgacugcaccauguacaucugcggggacuccaccgagugcagcaaccuccugcugcaguacggcuccuucugcacccagcucaaccgcgcgcugacggggaucgccguggagcaggacaagaacacccaggagguguucgcccaggucaagcagaucuacaagacgcccccgaucaaggacuucggcggguucaacuucagccagauccugcccgaccccuccaagcccagcaagcgguccuucaucgaggaccuccuguucaacaaggugacccuggccgacgccggcuucaucaagcaguacggcgacugccucggggacaucgcggcccgcgaccugaucugcgcccagaaguucaacggccugaccgugcucccgccccugcugaccgacgagaugaucgcccaguacaccagcgcccuccuggcggggaccaucacguccggcuggaccuucggggccggcgccgcccugcagauccccuucgcgaugcagauggccuaccgguucaacggcaucggggucacccagaacgugcucuacgagaaccagaagcugaucgccaaccaguucaacagcgccaucggcaagauccaggacucccugagcuccaccgccagcgcgcucgggaagcugcaggacguggucaaccagaacgcccaggcccugaacacgcucgugaagcagcuguccagcaacuucggcgccaucuccagcgugcugaacgacauccucucccgccuggacaaggucgaggccgaggugcagaucgaccggcugaucaccgggcgccuccagagccugcagaccuacgugacccagcagcugauccgggcggccgagauccgcgccagcgccaaccucgccgcgaccaagauguccgagugcguccugggccagagcaagcggguggacuucugcggcaagggguaccaccugauguccuucccccagagcgccccgcacggcguggucuuccuccacgugacguacgucugcgcccaggagaagaacuucaccaccgcccccgcgaucugccacgacgggaaggcccacuucccccgcgagggcguguucguguccaacgggacccacugguucgucacgcagcggaacuucuacgagccgcagaucaucaccaccgacaacaccuucgugagcggcaacugcgacguggucaucggcaucgugaacaacacgguguacgacccccugcagcccgagcuggacuccuucaaggaggagcucgacaaguacuucaagaaccacaccagccccgacgucgaccugggggacaucuccggcaucaacgccagcguggugaacauccagaaggagaucgaccgccugaacgaggucgccaagaaccucaacgagucccugaucgaccugcaggagcucgggaaguacgagcaguacaucaagggcgggagcggcuacauccccgaggccccgcgcgacgggcaggccuacgugcggaaggacggcgaguggguccugcucagcaccuuccugugaggacuaguuauaagacugacuagcccgaugggccucccaacgggcccuccuccccuccuugcaccgagauuaauaaaaaaaaaaaaaaaaaaaaaaaaaaaaaaaaaaaaaaaaaaaaaaaaaaaaaaaaaaaaaaaaugcaucccccccccccccccccccccccccccccccaaaggcucuuuucagagccaccagaauu

SEQ ID NO: 12863 - RNA, 3943 nt, Artificial Sequence
  SARS-CoV-2/Wuhan/WIV05/2019__EPI_ISL_402128 spike protein mRNA gc (1-1211)(G889C_L1034C) Foldon construct
aggagaaagcuuaccauguucguguuccugguccuccugccccuggugagcucccagugcgugaaccucaccacccgcacgcagcugccgcccgccuacaccaacagcuucacccggggcgucuacuaccccgacaagguguuccgcuccagcgugcugcacuccacccaggaccucuuccugcccuucuucagcaacgucacgugguuccacgccauccacguguccgggaccaacggcaccaagcgguucgacaacccggugcugcccuucaacgacggggucuacuucgcgagcaccgagaaguccaacaucauccgcggcuggaucuucgggacgacccucgacagcaagacccagucccugcugaucgugaacaacgccaccaacguggucaucaaggugugcgaguuccaguucugcaacgaccccuuccucggcguguacuaccacaagaacaacaagagcuggauggaguccgaguuccgggucuacagcuccgccaacaacugcacguucgaguacgugagccagcccuuccugauggaccuggagggcaagcaggggaacuucaagaaccuccgcgaguucguguucaagaacaucgacggcuacuucaagaucuacuccaagcacaccccgaucaaccugguccgggaccugccccagggguucagcgcccucgagccccugguggaccugcccaucggcaucaacaucacccgcuuccagacccuccuggcccugcaccgguccuaccucacgccgggggacagcagcuccggcuggaccgcgggcgccgccgccuacuacgugggguaccugcagccccgcaccuuccugcucaaguacaacgagaacggcaccaucacggacgcggucgacugcgcccuggacccccugagcgagaccaagugcacccucaaguccuucaccguggagaaggggaucuaccagacgagcaacuuccgggugcagcccaccgaguccaucguccgcuucccgaacaucaccaaccugugccccuucggcgagguguucaacgccacccgguucgccagcgucuacgccuggaaccgcaagcggaucuccaacugcguggcggacuacagcgugcuguacaacuccgccagcuucuccacguucaagugcuacggcgucagccccaccaagcucaacgaccugugcuucaccaacguguacgccgacuccuucgugauccgcggggacgagguccggcagaucgcccccggccagaccgggaagaucgccgacuacaacuacaagcugccggacgacuucacgggcugcgugaucgcguggaacagcaacaaccucgacuccaaggucgggggcaacuacaacuaccuguaccgccuguuccgcaagagcaaccucaagcccuucgagcgggacaucuccaccgagaucuaccaggccggcagcacccccugcaacgggguggagggcuucaacugcuacuucccccugcaguccuacggguuccagccgaccaacggcgugggguaccagcccuaccggguggucgugcugagcuucgagcuccugcacgcccccgccacggugugcggccccaagaaguccaccaaccuggucaagaacaagugcgugaacuucaacuucaacggccucaccgggaccggcgugcugaccgagagcaacaagaaguuccugccguuccagcaguucgggcgcgacaucgccgacacgaccgacgcgguccgcgacccccagacccuggagauccucgacaucacccccugcagcuucggcgggguguccgugaucacgccgggcaccaacaccagcaaccaggucgccgugcuguaccaggacgugaacugcaccgagguccccguggccauccacgccgaccagcugacgcccaccuggcggguguacuccaccggcagcaacgucuuccagacccgcgccgggugccucaucggcgcggagcacgugaacaacuccuacgagugcgacauccccaucggggccggcaucugcgccagcuaccagacgcagaccaacuccccgcggcgcgcccggagcguggcgucccagagcaucaucgccuacaccaugucccugggcgccgagaacagcgucgccuacuccaacaacagcaucgccauccccaccaacuucacgaucuccgugaccaccgagauccugcccgugagcaugaccaagacgagcgucgacugcaccauguacaucugcggggacuccaccgagugcagcaaccuccugcugcaguacggcuccuucugcacccagcucaaccgcgcgcugacggggaucgccguggagcaggacaagaacacccaggagguguucgcccaggucaagcagaucuacaagacgcccccgaucaaggacuucggcggguucaacuucagccagauccugcccgaccccuccaagcccagcaagcgguccuucaucgaggaccuccuguucaacaaggugacccuggccgacgccggcuucaucaagcaguacggcgacugccucggggacaucgcggcccgcgaccugaucugcgcccagaaguucaacggccugaccgugcucccgccccugcugaccgacgagaugaucgcccaguacaccagcgcccuccuggcggggaccaucacguccggcuggaccuucugcgccggcgccgcccugcagauccccuucgcgaugcagauggccuaccgguucaacggcaucggggucacccagaacgugcucuacgagaaccagaagcugaucgccaaccaguucaacagcgccaucggcaagauccaggacucccugagcuccaccgccagcgcgcucgggaagcugcaggacguggucaaccagaacgcccaggcccugaacacgcucgugaagcagcuguccagcaacuucggcgccaucuccagcgugcugaacgacauccucucccgccuggacaaggucgaggccgaggugcagaucgaccggcugaucaccgggcgccuccagagccugcagaccuacgugacccagcagcugauccgggcggccgagauccgcgccagcgccaaccucgccgcgaccaagauguccgagugcgucugcggccagagcaagcggguggacuucugcggcaagggguaccaccugauguccuucccccagagcgccccgcacggcguggucuuccuccacgugacguacguccccgcccaggagaagaacuucaccaccgcccccgcgaucugccacgacgggaaggcccacuucccccgcgagggcguguucguguccaacgggacccacugguucgucacgcagcggaacuucuacgagccgcagaucaucaccaccgacaacaccuucgugagcggcaacugcgacguggucaucggcaucgugaacaacacgguguacgacccccugcagcccgagcuggacuccuucaaggaggagcucgacaaguacuucaagaaccacaccagccccgacgucgaccugggggacaucuccggcaucaacgccagcguggugaacauccagaaggagaucgaccgccugaacgaggucgccaagaaccucaacgagucccugaucgaccugcaggagcucgggaaguacgagcaguacaucaagggcgggagcggcuacauccccgaggccccgcgcgacgggcaggccuacgugcggaaggacggcgaguggguccugcucagcaccuuccugugaggacuaguuauaagacugacuagcccgaugggccucccaacgggcccuccuccccuccuugcaccgagauuaauaaaaaaaaaaaaaaaaaaaaaaaaaaaaaaaaaaaaaaaaaaaaaaaaaaaaaaaaaaaaaaaaugcaucccccccccccccccccccccccccccccccaaaggcucuuuucagagccaccagaauu

SEQ ID NO: 12864 - RNA, 3943 nt, Artificial Sequence
  SARS-CoV-2/Wuhan/WIV05/2019__EPI_ISL_402128 spike protein mRNA gc (1-1211)(I909C_Y1047C) Foldon construct
aggagaaagcuuaccauguucguguuccugguccuccugccccuggugagcucccagugcgugaaccucaccacccgcacgcagcugccgcccgccuacaccaacagcuucacccggggcgucuacuaccccgacaagguguuccgcuccagcgugcugcacuccacccaggaccucuuccugcccuucuucagcaacgucacgugguuccacgccauccacguguccgggaccaacggcaccaagcgguucgacaacccggugcugcccuucaacgacggggucuacuucgcgagcaccgagaaguccaacaucauccgcggcuggaucuucgggacgacccucgacagcaagacccagucccugcugaucgugaacaacgccaccaacguggucaucaaggugugcgaguuccaguucugcaacgaccccuuccucggcguguacuaccacaagaacaacaagagcuggauggaguccgaguuccgggucuacagcuccgccaacaacugcacguucgaguacgugagccagcccuuccugauggaccuggagggcaagcaggggaacuucaagaaccuccgcgaguucguguucaagaacaucgacggcuacuucaagaucuacuccaagcacaccccgaucaaccugguccgggaccugccccagggguucagcgcccucgagccccugguggaccugcccaucggcaucaacaucacccgcuuccagacccuccuggcccugcaccgguccuaccucacgccgggggacagcagcuccggcuggaccgcgggcgccgccgccuacuacgugggguaccugcagccccgcaccuuccugcucaaguacaacgagaacggcaccaucacggacgcggucgacugcgcccuggacccccugagcgagaccaagugcacccucaaguccuucaccguggagaaggggaucuaccagacgagcaacuuccgggugcagcccaccgaguccaucguccgcuucccgaacaucaccaaccugugccccuucggcgagguguucaacgccacccgguucgccagcgucuacgccuggaaccgcaagcggaucuccaacugcguggcggacuacagcgugcuguacaacuccgccagcuucuccacguucaagugcuacggcgucagccccaccaagcucaacgaccugugcuucaccaacguguacgccgacuccuucgugauccgcggggacgagguccggcagaucgcccccggccagaccgggaagaucgccgacuacaacuacaagcugccggacgacuucacgggcugcgugaucgcguggaacagcaacaaccucgacuccaaggucgggggcaacuacaacuaccuguaccgccuguuccgcaagagcaaccucaagcccuucgagcgggacaucuccaccgagaucuaccaggccggcagcacccccugcaacgggguggagggcuucaacugcuacuucccccugcaguccuacggguuccagccgaccaacggcgugggguaccagcccuaccggguggucgugcugagcuucgagcuccugcacgcccccgccacggugugcggccccaagaaguccaccaaccuggucaagaacaagugcgugaacuucaacuucaacggccucaccgggaccggcgugcugaccgagagcaacaagaaguuccugccguuccagcaguucgggcgcgacaucgccgacacgaccgacgcgguccgcgacccccagacccuggagauccucgacaucacccccugcagcuucggcgggguguccgugaucacgccgggcaccaacaccagcaaccaggucgccgugcuguaccaggacgugaacugcaccgagguccccguggccauccacgccgaccagcugacgcccaccuggcggguguacuccaccggcagcaacgucuuccagacccgcgccgggugccucaucggcgcggagcacgugaacaacuccuacgagugcgacauccccaucggggccggcaucugcgccagcuaccagacgcagaccaacuccccgcggcgcgcccggagcguggcgucccagagcaucaucgccuacaccaugucccugggcgccgagaacagcgucgccuacuccaacaacagcaucgccauccccaccaacuucacgaucuccgugaccaccgagauccugcccgugagcaugaccaagacgagcgucgacugcaccauguacaucugcggggacuccaccgagugcagcaaccuccugcugcaguacggcuccuucugcacccagcucaaccgcgcgcugacggggaucgccguggagcaggacaagaacacccaggagguguucgcccaggucaagcagaucuacaagacgcccccgaucaaggacuucggcggguucaacuucagccagauccugcccgaccccuccaagcccagcaagcgguccuucaucgaggaccuccuguucaacaaggugacccuggccgacgccggcuucaucaagcaguacggcgacugccucggggacaucgcggcccgcgaccugaucugcgcccagaaguucaacggccugaccgugcucccgccccugcugaccgacgagaugaucgcccaguacaccagcgcccuccuggcggggaccaucacguccggcuggaccuucggggccggcgccgcccugcagauccccuucgcgaugcagauggccuaccgguucaacggcugcggggucacccagaacgugcucuacgagaaccagaagcugaucgccaaccaguucaacagcgccaucggcaagauccaggacucccugagcuccaccgccagcgcgcucgggaagcugcaggacguggucaaccagaacgcccaggcccugaacacgcucgugaagcagcuguccagcaacuucggcgccaucuccagcgugcugaacgacauccucucccgccuggacaaggucgaggccgaggugcagaucgaccggcugaucaccgggcgccuccagagccugcagaccuacgugacccagcagcugauccgggcggccgagauccgcgccagcgccaaccucgccgcgaccaagauguccgagugcguccugggccagagcaagcggguggacuucugcggcaaggggugccaccugauguccuucccccagagcgccccgcacggcguggucuuccuccacgugacguacguccccgcccaggagaagaacuucaccaccgcccccgcgaucugccacgacgggaaggcccacuucccccgcgagggcguguucguguccaacgggacccacugguucgucacgcagcggaacuucuacgagccgcagaucaucaccaccgacaacaccuucgugagcggcaacugcgacguggucaucggcaucgugaacaacacgguguacgacccccugcagcccgagcuggacuccuucaaggaggagcucgacaaguacuucaagaaccacaccagccccgacgucgaccugggggacaucuccggcaucaacgccagcguggugaacauccagaaggagaucgaccgccugaacgaggucgccaagaaccucaacgagucccugaucgaccugcaggagcucgggaaguacgagcaguacaucaagggcgggagcggcuacauccccgaggccccgcgcgacgggcaggccuacgugcggaaggacggcgaguggguccugcucagcaccuuccugugaggacuaguuauaagacugacuagcccgaugggccucccaacgggcccuccuccccuccuugcaccgagauuaauaaaaaaaaaaaaaaaaaaaaaaaaaaaaaaaaaaaaaaaaaaaaaaaaaaaaaaaaaaaaaaaaugcaucccccccccccccccccccccccccccccccaaaggcucuuuucagagccaccagaauu

SEQ ID NO: 12865 - RNA, 3943 nt, Artificial Sequence
  SARS-CoV-2/Wuhan/WIV05/2019__EPI_ISL_402128 spike protein mRNA gc (1-1211)(Q965C_S1003C) Foldon construct
aggagaaagcuuaccauguucguguuccugguccuccugccccuggugagcucccagugcgugaaccucaccacccgcacgcagcugccgcccgccuacaccaacagcuucacccggggcgucuacuaccccgacaagguguuccgcuccagcgugcugcacuccacccaggaccucuuccugcccuucuucagcaacgucacgugguuccacgccauccacguguccgggaccaacggcaccaagcgguucgacaacccggugcugcccuucaacgacggggucuacuucgcgagcaccgagaaguccaacaucauccgcggcuggaucuucgggacgacccucgacagcaagacccagucccugcugaucgugaacaacgccaccaacguggucaucaaggugugcgaguuccaguucugcaacgaccccuuccucggcguguacuaccacaagaacaacaagagcuggauggaguccgaguuccgggucuacagcuccgccaacaacugcacguucgaguacgugagccagcccuuccugauggaccuggagggcaagcaggggaacuucaagaaccuccgcgaguucguguucaagaacaucgacggcuacuucaagaucuacuccaagcacaccccgaucaaccugguccgggaccugccccagggguucagcgcccucgagccccugguggaccugcccaucggcaucaacaucacccgcuuccagacccuccuggcccugcaccgguccuaccucacgccgggggacagcagcuccggcuggaccgcgggcgccgccgccuacuacgugggguaccugcagccccgcaccuuccugcucaaguacaacgagaacggcaccaucacggacgcggucgacugcgcccuggacccccugagcgagaccaagugcacccucaaguccuucaccguggagaaggggaucuaccagacgagcaacuuccgggugcagcccaccgaguccaucguccgcuucccgaacaucaccaaccugugccccuucggcgagguguucaacgccacccgguucgccagcgucuacgccuggaaccgcaagcggaucuccaacugcguggcggacuacagcgugcuguacaacuccgccagcuucuccacguucaagugcuacggcgucagccccaccaagcucaacgaccugugcuucaccaacguguacgccgacuccuucgugauccgcggggacgagguccggcagaucgcccccggccagaccgggaagaucgccgacuacaacuacaagcugccggacgacuucacgggcugcgugaucgcguggaacagcaacaaccucgacuccaaggucgggggcaacuacaacuaccuguaccgccuguuccgcaagagcaaccucaagcccuucgagcgggacaucuccaccgagaucuaccaggccggcagcacccccugcaacgggguggagggcuucaacugcuacuucccccugcaguccuacggguuccagccgaccaacggcgugggguaccagcccuaccggguggucgugcugagcuucgagcuccugcacgcccccgccacggugugcggccccaagaaguccaccaaccuggucaagaacaagugcgugaacuucaacuucaacggccucaccgggaccggcgugcugaccgagagcaacaagaaguuccugccguuccagcaguucgggcgcgacaucgccgacacgaccgacgcgguccgcgacccccagacccuggagauccucgacaucacccccugcagcuucggcgggguguccgugaucacgccgggcaccaacaccagcaaccaggucgccgugcuguaccaggacgugaacugcaccgagguccccguggccauccacgccgaccagcugacgcccaccuggcggguguacuccaccggcagcaacgucuuccagacccgcgccgggugccucaucggcgcggagcacgugaacaacuccuacgagugcgacauccccaucggggccggcaucugcgccagcuaccagacgcagaccaacuccccgcggcgcgcccggagcguggcgucccagagcaucaucgccuacaccaugucccugggcgccgagaacagcgucgccuacuccaacaacagcaucgccauccccaccaacuucacgaucuccgugaccaccgagauccugcccgugagcaugaccaagacgagcgucgacugcaccauguacaucugcggggacuccaccgagugcagcaaccuccugcugcaguacggcuccuucugcacccagcucaaccgcgcgcugacggggaucgccguggagcaggacaagaacacccaggagguguucgcccaggucaagcagaucuacaagacgcccccgaucaaggacuucggcggguucaacuucagccagauccugcccgaccccuccaagcccagcaagcgguccuucaucgaggaccuccuguucaacaaggugacccuggccgacgccggcuucaucaagcaguacggcgacugccucggggacaucgcggcccgcgaccugaucugcgcccagaaguucaacggccugaccgugcucccgccccugcugaccgacgagaugaucgcccaguacaccagcgcccuccuggcggggaccaucacguccggcuggaccuucggggccggcgccgcccugcagauccccuucgcgaugcagauggccuaccgguucaacggcaucggggucacccagaacgugcucuacgagaaccagaagcugaucgccaaccaguucaacagcgccaucggcaagauccaggacucccugagcuccaccgccagcgcgcucgggaagcugcaggacguggucaaccagaacgcccaggcccugaacacgcucgugaagugccuguccagcaacuucggcgccaucuccagcgugcugaacgacauccucucccgccuggacaaggucgaggccgaggugcagaucgaccggcugaucaccgggcgccuccagugccugcagaccuacgugacccagcagcugauccgggcggccgagauccgcgccagcgccaaccucgccgcgaccaagauguccgagugcguccugggccagagcaagcggguggacuucugcggcaagggguaccaccugauguccuucccccagagcgccccgcacggcguggucuuccuccacgugacguacguccccgcccaggagaagaacuucaccaccgcccccgcgaucugccacgacgggaaggcccacuucccccgcgagggcguguucguguccaacgggacccacugguucgucacgcagcggaacuucuacgagccgcagaucaucaccaccgacaacaccuucgugagcggcaacugcgacguggucaucggcaucgugaacaacacgguguacgacccccugcagcccgagcuggacuccuucaaggaggagcucgacaaguacuucaagaaccacaccagccccgacgucgaccugggggacaucuccggcaucaacgccagcguggugaacauccagaaggagaucgaccgccugaacgaggucgccaagaaccucaacgagucccugaucgaccugcaggagcucgggaaguacgagcaguacaucaagggcgggagcggcuacauccccgaggccccgcgcgacgggcaggccuacgugcggaaggacggcgaguggguccugcucagcaccuuccugugaggacuaguuauaagacugacuagcccgaugggccucccaacgggcccuccuccccuccuugcaccgagauuaauaaaaaaaaaaaaaaaaaaaaaaaaaaaaaaaaaaaaaaaaaaaaaaaaaaaaaaaaaaaaaaaaugcaucccccccccccccccccccccccccccccccaaaggcucuuuucagagccaccagaauu

SEQ ID NO: 12866 - RNA, 3943 nt, Artificial Sequence
  SARS-CoV-2/Wuhan/WIV05/2019__EPI_ISL_402128 spike protein mRNA gc (1-1211)(F970C_G999C) Foldon construct
aggagaaagcuuaccauguucguguuccugguccuccugccccuggugagcucccagugcgugaaccucaccacccgcacgcagcugccgcccgccuacaccaacagcuucacccggggcgucuacuaccccgacaagguguuccgcuccagcgugcugcacuccacccaggaccucuuccugcccuucuucagcaacgucacgugguuccacgccauccacguguccgggaccaacggcaccaagcgguucgacaacccggugcugcccuucaacgacggggucuacuucgcgagcaccgagaaguccaacaucauccgcggcuggaucuucgggacgacccucgacagcaagacccagucccugcugaucgugaacaacgccaccaacguggucaucaaggugugcgaguuccaguucugcaacgaccccuuccucggcguguacuaccacaagaacaacaagagcuggauggaguccgaguuccgggucuacagcuccgccaacaacugcacguucgaguacgugagccagcccuuccugauggaccuggagggcaagcaggggaacuucaagaaccuccgcgaguucguguucaagaacaucgacggcuacuucaagaucuacuccaagcacaccccgaucaaccugguccgggaccugccccagggguucagcgcccucgagccccugguggaccugcccaucggcaucaacaucacccgcuuccagacccuccuggcccugcaccgguccuaccucacgccgggggacagcagcuccggcuggaccgcgggcgccgccgccuacuacgugggguaccugcagccccgcaccuuccugcucaaguacaacgagaacggcaccaucacggacgcggucgacugcgcccuggacccccugagcgagaccaagugcacccucaaguccuucaccguggagaaggggaucuaccagacgagcaacuuccgggugcagcccaccgaguccaucguccgcuucccgaacaucaccaaccugugccccuucggcgagguguucaacgccacccgguucgccagcgucuacgccuggaaccgcaagcggaucuccaacugcguggcggacuacagcgugcuguacaacuccgccagcuucuccacguucaagugcuacggcgucagccccaccaagcucaacgaccugugcuucaccaacguguacgccgacuccuucgugauccgcggggacgagguccggcagaucgcccccggccagaccgggaagaucgccgacuacaacuacaagcugccggacgacuucacgggcugcgugaucgcguggaacagcaacaaccucgacuccaaggucgggggcaacuacaacuaccuguaccgccuguuccgcaagagcaaccucaagcccuucgagcgggacaucuccaccgagaucuaccaggccggcagcacccccugcaacgggguggagggcuucaacugcuacuucccccugcaguccuacggguuccagccgaccaacggcgugggguaccagcccuaccggguggucgugcugagcuucgagcuccugcacgcccccgccacggugugcggccccaagaaguccaccaaccuggucaagaacaagugcgugaacuucaacuucaacggccucaccgggaccggcgugcugaccgagagcaacaagaaguuccugccguuccagcaguucgggcgcgacaucgccgacacgaccgacgcgguccgcgacccccagacccuggagauccucgacaucacccccugcagcuucggcgggguguccgugaucacgccgggcaccaacaccagcaaccaggucgccgugcuguaccaggacgugaacugcaccgagguccccguggccauccacgccgaccagcugacgcccaccuggcggguguacuccaccggcagcaacgucuuccagacccgcgccgggugccucaucggcgcggagcacgugaacaacuccuacgagugcgacauccccaucggggccggcaucugcgccagcuaccagacgcagaccaacuccccgcggcgcgcccggagcguggcgucccagagcaucaucgccuacaccaugucccugggcgccgagaacagcgucgccuacuccaacaacagcaucgccauccccaccaacuucacgaucuccgugaccaccgagauccugcccgugagcaugaccaagacgagcgucgacugcaccauguacaucugcggggacuccaccgagugcagcaaccuccugcugcaguacggcuccuucugcacccagcucaaccgcgcgcugacggggaucgccguggagcaggacaagaacacccaggagguguucgcccaggucaagcagaucuacaagacgcccccgaucaaggacuucggcggguucaacuucagccagauccugcccgaccccuccaagcccagcaagcgguccuucaucgaggaccuccuguucaacaaggugacccuggccgacgccggcuucaucaagcaguacggcgacugccucggggacaucgcggcccgcgaccugaucugcgcccagaaguucaacggccugaccgugcucccgccccugcugaccgacgagaugaucgcccaguacaccagcgcccuccuggcggggaccaucacguccggcuggaccuucggggccggcgccgcccugcagauccccuucgcgaugcagauggccuaccgguucaacggcaucggggucacccagaacgugcucuacgagaaccagaagcugaucgccaaccaguucaacagcgccaucggcaagauccaggacucccugagcuccaccgccagcgcgcucgggaagcugcaggacguggucaaccagaacgcccaggcccugaacacgcucgugaagcagcuguccagcaacugcggcgccaucuccagcgugcugaacgacauccucucccgccuggacaaggucgaggccgaggugcagaucgaccggcugaucaccugucgccuccagagccugcagaccuacgugacccagcagcugauccgggcggccgagauccgcgccagcgccaaccucgccgcgaccaagauguccgagugcguccugggccagagcaagcggguggacuucugcggcaagggguaccaccugauguccuucccccagagcgccccgcacggcguggucuuccuccacgugacguacguccccgcccaggagaagaacuucaccaccgcccccgcgaucugccacgacgggaaggcccacuucccccgcgagggcguguucguguccaacgggacccacugguucgucacgcagcggaacuucuacgagccgcagaucaucaccaccgacaacaccuucgugagcggcaacugcgacguggucaucggcaucgugaacaacacgguguacgacccccugcagcccgagcuggacuccuucaaggaggagcucgacaaguacuucaagaaccacaccagccccgacgucgaccugggggacaucuccggcaucaacgccagcguggugaacauccagaaggagaucgaccgccugaacgaggucgccaagaaccucaacgagucccugaucgaccugcaggagcucgggaaguacgagcaguacaucaagggcgggagcggcuacauccccgaggccccgcgcgacgggcaggccuacgugcggaaggacggcgaguggguccugcucagcaccuuccugugaggacuaguuauaagacugacuagcccgaugggccucccaacgggcccuccuccccuccuugcaccgagauuaauaaaaaaaaaaaaaaaaaaaaaaaaaaaaaaaaaaaaaaaaaaaaaaaaaaaaaaaaaaaaaaaaugcaucccccccccccccccccccccccccccccccaaaggcucuuuucagagccaccagaauu

SEQ ID NO: 12867 - RNA, 3943 nt, Artificial Sequence
  SARS-CoV-2/Wuhan/WIV05/2019__EPI_ISL_402128 spike protein mRNA gc (1-1211)(A972C_R995C) Foldon construct
aggagaaagcuuaccauguucguguuccugguccuccugccccuggugagcucccagugcgugaaccucaccacccgcacgcagcugccgcccgccuacaccaacagcuucacccggggcgucuacuaccccgacaagguguuccgcuccagcgugcugcacuccacccaggaccucuuccugcccuucuucagcaacgucacgugguuccacgccauccacguguccgggaccaacggcaccaagcgguucgacaacccggugcugcccuucaacgacggggucuacuucgcgagcaccgagaaguccaacaucauccgcggcuggaucuucgggacgacccucgacagcaagacccagucccugcugaucgugaacaacgccaccaacguggucaucaaggugugcgaguuccaguucugcaacgaccccuuccucggcguguacuaccacaagaacaacaagagcuggauggaguccgaguuccgggucuacagcuccgccaacaacugcacguucgaguacgugagccagcccuuccugauggaccuggagggcaagcaggggaacuucaagaaccuccgcgaguucguguucaagaacaucgacggcuacuucaagaucuacuccaagcacaccccgaucaaccugguccgggaccugccccagggguucagcgcccucgagccccugguggaccugcccaucggcaucaacaucacccgcuuccagacccuccuggcccugcaccgguccuaccucacgccgggggacagcagcuccggcuggaccgcgggcgccgccgccuacuacgugggguaccugcagccccgcaccuuccugcucaaguacaacgagaacggcaccaucacggacgcggucgacugcgcccuggacccccugagcgagaccaagugcacccucaaguccuucaccguggagaaggggaucuaccagacgagcaacuuccgggugcagcccaccgaguccaucguccgcuucccgaacaucaccaaccugugccccuucggcgagguguucaacgccacccgguucgccagcgucuacgccuggaaccgcaagcggaucuccaacugcguggcggacuacagcgugcuguacaacuccgccagcuucuccacguucaagugcuacggcgucagccccaccaagcucaacgaccugugcuucaccaacguguacgccgacuccuucgugauccgcggggacgagguccggcagaucgcccccggccagaccgggaagaucgccgacuacaacuacaagcugccggacgacuucacgggcugcgugaucgcguggaacagcaacaaccucgacuccaaggucgggggcaacuacaacuaccuguaccgccuguuccgcaagagcaaccucaagcccuucgagcgggacaucuccaccgagaucuaccaggccggcagcacccccugcaacgggguggagggcuucaacugcuacuucccccugcaguccuacggguuccagccgaccaacggcgugggguaccagcccuaccggguggucgugcugagcuucgagcuccugcacgcccccgccacggugugcggccccaagaaguccaccaaccuggucaagaacaagugcgugaacuucaacuucaacggccucaccgggaccggcgugcugaccgagagcaacaagaaguuccugccguuccagcaguucgggcgcgacaucgccgacacgaccgacgcgguccgcgacccccagacccuggagauccucgacaucacccccugcagcuucggcgggguguccgugaucacgccgggcaccaacaccagcaaccaggucgccgugcuguaccaggacgugaacugcaccgagguccccguggccauccacgccgaccagcugacgcccaccuggcggguguacuccaccggcagcaacgucuuccagacccgcgccgggugccucaucggcgcggagcacgugaacaacuccuacgagugcgacauccccaucggggccggcaucugcgccagcuaccagacgcagaccaacuccccgcggcgcgcccggagcguggcgucccagagcaucaucgccuacaccaugucccugggcgccgagaacagcgucgccuacuccaacaacagcaucgccauccccaccaacuucacgaucuccgugaccaccgagauccugcccgugagcaugaccaagacgagcgucgacugcaccauguacaucugcggggacuccaccgagugcagcaaccuccugcugcaguacggcuccuucugcacccagcucaaccgcgcgcugacggggaucgccguggagcaggacaagaacacccaggagguguucgcccaggucaagcagaucuacaagacgcccccgaucaaggacuucggcggguucaacuucagccagauccugcccgaccccuccaagcccagcaagcgguccuucaucgaggaccuccuguucaacaaggugacccuggccgacgccggcuucaucaagcaguacggcgacugccucggggacaucgcggcccgcgaccugaucugcgcccagaaguucaacggccugaccgugcucccgccccugcugaccgacgagaugaucgcccaguacaccagcgcccuccuggcggggaccaucacguccggcuggaccuucggggccggcgccgcccugcagauccccuucgcgaugcagauggccuaccgguucaacggcaucggggucacccagaacgugcucuacgagaaccagaagcugaucgccaaccaguucaacagcgccaucggcaagauccaggacucccugagcuccaccgccagcgcgcucgggaagcugcaggacguggucaaccagaacgcccaggcccugaacacgcucgugaagcagcuguccagcaacuucggcugcaucuccagcgugcugaacgacauccucucccgccuggacaaggucgaggccgaggugcagaucgacugccugaucaccgggcgccuccagagccugcagaccuacgugacccagcagcugauccgggcggccgagauccgcgccagcgccaaccucgccgcgaccaagauguccgagugcguccugggccagagcaagcggguggacuucugcggcaagggguaccaccugauguccuucccccagagcgccccgcacggcguggucuuccuccacgugacguacguccccgcccaggagaagaacuucaccaccgcccccgcgaucugccacgacgggaaggcccacuucccccgcgagggcguguucguguccaacgggacccacugguucgucacgcagcggaacuucuacgagccgcagaucaucaccaccgacaacaccuucgugagcggcaacugcgacguggucaucggcaucgugaacaacacgguguacgacccccugcagcccgagcuggacuccuucaaggaggagcucgacaaguacuucaagaaccacaccagccccgacgucgaccugggggacaucuccggcaucaacgccagcguggugaacauccagaaggagaucgaccgccugaacgaggucgccaagaaccucaacgagucccugaucgaccugcaggagcucgggaaguacgagcaguacaucaagggcgggagcggcuacauccccgaggccccgcgcgacgggcaggccuacgugcggaaggacggcgaguggguccugcucagcaccuuccugugaggacuaguuauaagacugacuagcccgaugggccucccaacgggcccuccuccccuccuugcaccgagauuaauaaaaaaaaaaaaaaaaaaaaaaaaaaaaaaaaaaaaaaaaaaaaaaaaaaaaaaaaaaaaaaaaugcaucccccccccccccccccccccccccccccccaaaggcucuuuucagagccaccagaauu

SEQ ID NO: 12868 - RNA, 3943 nt, Artificial Sequence
  SARS-CoV-2/Wuhan/WIV05/2019__EPI_ISL_402128 spike protein mRNA gc (1-1211)(A890C_V1040C) Foldon construct
aggagaaagcuuaccauguucguguuccugguccuccugccccuggugagcucccagugcgugaaccucaccacccgcacgcagcugccgcccgccuacaccaacagcuucacccggggcgucuacuaccccgacaagguguuccgcuccagcgugcugcacuccacccaggaccucuuccugcccuucuucagcaacgucacgugguuccacgccauccacguguccgggaccaacggcaccaagcgguucgacaacccggugcugcccuucaacgacggggucuacuucgcgagcaccgagaaguccaacaucauccgcggcuggaucuucgggacgacccucgacagcaagacccagucccugcugaucgugaacaacgccaccaacguggucaucaaggugugcgaguuccaguucugcaacgaccccuuccucggcguguacuaccacaagaacaacaagagcuggauggaguccgaguuccgggucuacagcuccgccaacaacugcacguucgaguacgugagccagcccuuccugauggaccuggagggcaagcaggggaacuucaagaaccuccgcgaguucguguucaagaacaucgacggcuacuucaagaucuacuccaagcacaccccgaucaaccugguccgggaccugccccagggguucagcgcccucgagccccugguggaccugcccaucggcaucaacaucacccgcuuccagacccuccuggcccugcaccgguccuaccucacgccgggggacagcagcuccggcuggaccgcgggcgccgccgccuacuacgugggguaccugcagccccgcaccuuccugcucaaguacaacgagaacggcaccaucacggacgcggucgacugcgcccuggacccccugagcgagaccaagugcacccucaaguccuucaccguggagaaggggaucuaccagacgagcaacuuccgggugcagcccaccgaguccaucguccgcuucccgaacaucaccaaccugugccccuucggcgagguguucaacgccacccgguucgccagcgucuacgccuggaaccgcaagcggaucuccaacugcguggcggacuacagcgugcuguacaacuccgccagcuucuccacguucaagugcuacggcgucagccccaccaagcucaacgaccugugcuucaccaacguguacgccgacuccuucgugauccgcggggacgagguccggcagaucgcccccggccagaccgggaagaucgccgacuacaacuacaagcugccggacgacuucacgggcugcgugaucgcguggaacagcaacaaccucgacuccaaggucgggggcaacuacaacuaccuguaccgccuguuccgcaagagcaaccucaagcccuucgagcgggacaucuccaccgagaucuaccaggccggcagcacccccugcaacgggguggagggcuucaacugcuacuucccccugcaguccuacggguuccagccgaccaacggcgugggguaccagcccuaccggguggucgugcugagcuucgagcuccugcacgcccccgccacggugugcggccccaagaaguccaccaaccuggucaagaacaagugcgugaacuucaacuucaacggccucaccgggaccggcgugcugaccgagagcaacaagaaguuccugccguuccagcaguucgggcgcgacaucgccgacacgaccgacgcgguccgcgacccccagacccuggagauccucgacaucacccccugcagcuucggcgggguguccgugaucacgccgggcaccaacaccagcaaccaggucgccgugcuguaccaggacgugaacugcaccgagguccccguggccauccacgccgaccagcugacgcccaccuggcggguguacuccaccggcagcaacgucuuccagacccgcgccgggugccucaucggcgcggagcacgugaacaacuccuacgagugcgacauccccaucggggccggcaucugcgccagcuaccagacgcagaccaacuccccgcggcgcgcccggagcguggcgucccagagcaucaucgccuacaccaugucccugggcgccgagaacagcgucgccuacuccaacaacagcaucgccauccccaccaacuucacgaucuccgugaccaccgagauccugcccgugagcaugaccaagacgagcgucgacugcaccauguacaucugcggggacuccaccgagugcagcaaccuccugcugcaguacggcuccuucugcacccagcucaaccgcgcgcugacggggaucgccguggagcaggacaagaacacccaggagguguucgcccaggucaagcagaucuacaagacgcccccgaucaaggacuucggcggguucaacuucagccagauccugcccgaccccuccaagcccagcaagcgguccuucaucgaggaccuccuguucaacaaggugacccuggccgacgccggcuucaucaagcaguacggcgacugccucggggacaucgcggcccgcgaccugaucugcgcccagaaguucaacggccugaccgugcucccgccccugcugaccgacgagaugaucgcccaguacaccagcgcccuccuggcggggaccaucacguccggcuggaccuucgggugcggcgccgcccugcagauccccuucgcgaugcagauggccuaccgguucaacggcaucggggucacccagaacgugcucuacgagaaccagaagcugaucgccaaccaguucaacagcgccaucggcaagauccaggacucccugagcuccaccgccagcgcgcucgggaagcugcaggacguggucaaccagaacgcccaggcccugaacacgcucgugaagcagcuguccagcaacuucggcgccaucuccagcgugcugaacgacauccucucccgccuggacaaggucgaggccgaggugcagaucgaccggcugaucaccgggcgccuccagagccugcagaccuacgugacccagcagcugauccgggcggccgagauccgcgccagcgccaaccucgccgcgaccaagauguccgagugcguccugggccagagcaagcggugcgacuucugcggcaagggguaccaccugauguccuucccccagagcgccccgcacggcguggucuuccuccacgugacguacguccccgcccaggagaagaacuucaccaccgcccccgcgaucugccacgacgggaaggcccacuucccccgcgagggcguguucguguccaacgggacccacugguucgucacgcagcggaacuucuacgagccgcagaucaucaccaccgacaacaccuucgugagcggcaacugcgacguggucaucggcaucgugaacaacacgguguacgacccccugcagcccgagcuggacuccuucaaggaggagcucgacaaguacuucaagaaccacaccagccccgacgucgaccugggggacaucuccggcaucaacgccagcguggugaacauccagaaggagaucgaccgccugaacgaggucgccaagaaccucaacgagucccugaucgaccugcaggagcucgggaaguacgagcaguacaucaagggcgggagcggcuacauccccgaggccccgcgcgacgggcaggccuacgugcggaaggacggcgaguggguccugcucagcaccuuccugugaggacuaguuauaagacugacuagcccgaugggccucccaacgggcccuccuccccuccuugcaccgagauuaauaaaaaaaaaaaaaaaaaaaaaaaaaaaaaaaaaaaaaaaaaaaaaaaaaaaaaaaaaaaaaaaaugcaucccccccccccccccccccccccccccccccaaaggcucuuuucagagccaccagaauu

SEQ ID NO: 12869 - RNA, 3943 nt, Artificial Sequence
  SARS-CoV-2/Wuhan/WIV05/2019__EPI_ISL_402128 spike protein mRNA gc (1-1211)(T874C_S1055C) Foldon construct
aggagaaagcuuaccauguucguguuccugguccuccugccccuggugagcucccagugcgugaaccucaccacccgcacgcagcugccgcccgccuacaccaacagcuucacccggggcgucuacuaccccgacaagguguuccgcuccagcgugcugcacuccacccaggaccucuuccugcccuucuucagcaacgucacgugguuccacgccauccacguguccgggaccaacggcaccaagcgguucgacaacccggugcugcccuucaacgacggggucuacuucgcgagcaccgagaaguccaacaucauccgcggcuggaucuucgggacgacccucgacagcaagacccagucccugcugaucgugaacaacgccaccaacguggucaucaaggugugcgaguuccaguucugcaacgaccccuuccucggcguguacuaccacaagaacaacaagagcuggauggaguccgaguuccgggucuacagcuccgccaacaacugcacguucgaguacgugagccagcccuuccugauggaccuggagggcaagcaggggaacuucaagaaccuccgcgaguucguguucaagaacaucgacggcuacuucaagaucuacuccaagcacaccccgaucaaccugguccgggaccugccccagggguucagcgcccucgagccccugguggaccugcccaucggcaucaacaucacccgcuuccagacccuccuggcccugcaccgguccuaccucacgccgggggacagcagcuccggcuggaccgcgggcgccgccgccuacuacgugggguaccugcagccccgcaccuuccugcucaaguacaacgagaacggcaccaucacggacgcggucgacugcgcccuggacccccugagcgagaccaagugcacccucaaguccuucaccguggagaaggggaucuaccagacgagcaacuuccgggugcagcccaccgaguccaucguccgcuucccgaacaucaccaaccugugccccuucggcgagguguucaacgccacccgguucgccagcgucuacgccuggaaccgcaagcggaucuccaacugcguggcggacuacagcgugcuguacaacuccgccagcuucuccacguucaagugcuacggcgucagccccaccaagcucaacgaccugugcuucaccaacguguacgccgacuccuucgugauccgcggggacgagguccggcagaucgcccccggccagaccgggaagaucgccgacuacaacuacaagcugccggacgacuucacgggcugcgugaucgcguggaacagcaacaaccucgacuccaaggucgggggcaacuacaacuaccuguaccgccuguuccgcaagagcaaccucaagcccuucgagcgggacaucuccaccgagaucuaccaggccggcagcacccccugcaacgggguggagggcuucaacugcuacuucccccugcaguccuacggguuccagccgaccaacggcgugggguaccagcccuaccggguggucgugcugagcuucgagcuccugcacgcccccgccacggugugcggccccaagaaguccaccaaccuggucaagaacaagugcgugaacuucaacuucaacggccucaccgggaccggcgugcugaccgagagcaacaagaaguuccugccguuccagcaguucgggcgcgacaucgccgacacgaccgacgcgguccgcgacccccagacccuggagauccucgacaucacccccugcagcuucggcgggguguccgugaucacgccgggcaccaacaccagcaaccaggucgccgugcuguaccaggacgugaacugcaccgagguccccguggccauccacgccgaccagcugacgcccaccuggcggguguacuccaccggcagcaacgucuuccagacccgcgccgggugccucaucggcgcggagcacgugaacaacuccuacgagugcgacauccccaucggggccggcaucugcgccagcuaccagacgcagaccaacuccccgcggcgcgcccggagcguggcgucccagagcaucaucgccuacaccaugucccugggcgccgagaacagcgucgccuacuccaacaacagcaucgccauccccaccaacuucacgaucuccgugaccaccgagauccugcccgugagcaugaccaagacgagcgucgacugcaccauguacaucugcggggacuccaccgagugcagcaaccuccugcugcaguacggcuccuucugcacccagcucaaccgcgcgcugacggggaucgccguggagcaggacaagaacacccaggagguguucgcccaggucaagcagaucuacaagacgcccccgaucaaggacuucggcggguucaacuucagccagauccugcccgaccccuccaagcccagcaagcgguccuucaucgaggaccuccuguucaacaaggugacccuggccgacgccggcuucaucaagcaguacggcgacugccucggggacaucgcggcccgcgaccugaucugcgcccagaaguucaacggccugaccgugcucccgccccugcugaccgacgagaugaucgcccaguacugcagcgcccuccuggcggggaccaucacguccggcuggaccuucggggccggcgccgcccugcagauccccuucgcgaugcagauggccuaccgguucaacggcaucggggucacccagaacgugcucuacgagaaccagaagcugaucgccaaccaguucaacagcgccaucggcaagauccaggacucccugagcuccaccgccagcgcgcucgggaagcugcaggacguggucaaccagaacgcccaggcccugaacacgcucgugaagcagcuguccagcaacuucggcgccaucuccagcgugcugaacgacauccucucccgccuggacaaggucgaggccgaggugcagaucgaccggcugaucaccgggcgccuccagagccugcagaccuacgugacccagcagcugauccgggcggccgagauccgcgccagcgccaaccucgccgcgaccaagauguccgagugcguccugggccagagcaagcggguggacuucugcggcaagggguaccaccugauguccuucccccagugcgccccgcacggcguggucuuccuccacgugacguacguccccgcccaggagaagaacuucaccaccgcccccgcgaucugccacgacgggaaggcccacuucccccgcgagggcguguucguguccaacgggacccacugguucgucacgcagcggaacuucuacgagccgcagaucaucaccaccgacaacaccuucgugagcggcaacugcgacguggucaucggcaucgugaacaacacgguguacgacccccugcagcccgagcuggacuccuucaaggaggagcucgacaaguacuucaagaaccacaccagccccgacgucgaccugggggacaucuccggcaucaacgccagcguggugaacauccagaaggagaucgaccgccugaacgaggucgccaagaaccucaacgagucccugaucgaccugcaggagcucgggaaguacgagcaguacaucaagggcgggagcggcuacauccccgaggccccgcgcgacgggcaggccuacgugcggaaggacggcgaguggguccugcucagcaccuuccugugaggacuaguuauaagacugacuagcccgaugggccucccaacgggcccuccuccccuccuugcaccgagauuaauaaaaaaaaaaaaaaaaaaaaaaaaaaaaaaaaaaaaaaaaaaaaaaaaaaaaaaaaaaaaaaaaugcaucccccccccccccccccccccccccccccccaaaggcucuuuucagagccaccagaauu

SEQ ID NO: 12870 - RNA, 4315 nt, Artificial Sequence
  SARS-CoV-2/Wuhan/WIV05/2019__EPI_ISL_402128 spike protein mRNA gc (1-1211) WhcAg construct
aggagaaagcuuaccauguucguguuccugguccuccugccccuggugagcucccagugcgugaaccucaccacccgcacgcagcugccgcccgccuacaccaacagcuucacccggggcgucuacuaccccgacaagguguuccgcuccagcgugcugcacuccacccaggaccucuuccugcccuucuucagcaacgucacgugguuccacgccauccacguguccgggaccaacggcaccaagcgguucgacaacccggugcugcccuucaacgacggggucuacuucgcgagcaccgagaaguccaacaucauccgcggcuggaucuucgggacgacccucgacagcaagacccagucccugcugaucgugaacaacgccaccaacguggucaucaaggugugcgaguuccaguucugcaacgaccccuuccucggcguguacuaccacaagaacaacaagagcuggauggaguccgaguuccgggucuacagcuccgccaacaacugcacguucgaguacgugagccagcccuuccugauggaccuggagggcaagcaggggaacuucaagaaccuccgcgaguucguguucaagaacaucgacggcuacuucaagaucuacuccaagcacaccccgaucaaccugguccgggaccugccccagggguucagcgcccucgagccccugguggaccugcccaucggcaucaacaucacccgcuuccagacccuccuggcccugcaccgguccuaccucacgccgggggacagcagcuccggcuggaccgcgggcgccgccgccuacuacgugggguaccugcagccccgcaccuuccugcucaaguacaacgagaacggcaccaucacggacgcggucgacugcgcccuggacccccugagcgagaccaagugcacccucaaguccuucaccguggagaaggggaucuaccagacgagcaacuuccgggugcagcccaccgaguccaucguccgcuucccgaacaucaccaaccugugccccuucggcgagguguucaacgccacccgguucgccagcgucuacgccuggaaccgcaagcggaucuccaacugcguggcggacuacagcgugcuguacaacuccgccagcuucuccacguucaagugcuacggcgucagccccaccaagcucaacgaccugugcuucaccaacguguacgccgacuccuucgugauccgcggggacgagguccggcagaucgcccccggccagaccgggaagaucgccgacuacaacuacaagcugccggacgacuucacgggcugcgugaucgcguggaacagcaacaaccucgacuccaaggucgggggcaacuacaacuaccuguaccgccuguuccgcaagagcaaccucaagcccuucgagcgggacaucuccaccgagaucuaccaggccggcagcacccccugcaacgggguggagggcuucaacugcuacuucccccugcaguccuacggguuccagccgaccaacggcgugggguaccagcccuaccggguggucgugcugagcuucgagcuccugcacgcccccgccacggugugcggccccaagaaguccaccaaccuggucaagaacaagugcgugaacuucaacuucaacggccucaccgggaccggcgugcugaccgagagcaacaagaaguuccugccguuccagcaguucgggcgcgacaucgccgacacgaccgacgcgguccgcgacccccagacccuggagauccucgacaucacccccugcagcuucggcgggguguccgugaucacgccgggcaccaacaccagcaaccaggucgccgugcuguaccaggacgugaacugcaccgagguccccguggccauccacgccgaccagcugacgcccaccuggcggguguacuccaccggcagcaacgucuuccagacccgcgccgggugccucaucggcgcggagcacgugaacaacuccuacgagugcgacauccccaucggggccggcaucugcgccagcuaccagacgcagaccaacuccccgcggcgcgcccggagcguggcgucccagagcaucaucgccuacaccaugucccugggcgccgagaacagcgucgccuacuccaacaacagcaucgccauccccaccaacuucacgaucuccgugaccaccgagauccugcccgugagcaugaccaagacgagcgucgacugcaccauguacaucugcggggacuccaccgagugcagcaaccuccugcugcaguacggcuccuucugcacccagcucaaccgcgcgcugacggggaucgccguggagcaggacaagaacacccaggagguguucgcccaggucaagcagaucuacaagacgcccccgaucaaggacuucggcggguucaacuucagccagauccugcccgaccccuccaagcccagcaagcgguccuucaucgaggaccuccuguucaacaaggugacccuggccgacgccggcuucaucaagcaguacggcgacugccucggggacaucgcggcccgcgaccugaucugcgcccagaaguucaacggccugaccgugcucccgccccugcugaccgacgagaugaucgcccaguacaccagcgcccuccuggcggggaccaucacguccggcuggaccuucggggccggcgccgcccugcagauccccuucgcgaugcagauggccuaccgguucaacggcaucggggucacccagaacgugcucuacgagaaccagaagcugaucgccaaccaguucaacagcgccaucggcaagauccaggacucccugagcuccaccgccagcgcgcucgggaagcugcaggacguggucaaccagaacgcccaggcccugaacacgcucgugaagcagcuguccagcaacuucggcgccaucuccagcgugcugaacgacauccucucccgccuggacaaggucgaggccgaggugcagaucgaccggcugaucaccgggcgccuccagagccugcagaccuacgugacccagcagcugauccgggcggccgagauccgcgccagcgccaaccucgccgcgaccaagauguccgagugcguccugggccagagcaagcggguggacuucugcggcaagggguaccaccugauguccuucccccagagcgccccgcacggcguggucuuccuccacgugacguacguccccgcccaggagaagaacuucaccaccgcccccgcgaucugccacgacgggaaggcccacuucccccgcgagggcguguucguguccaacgggacccacugguucgucacgcagcggaacuucuacgagccgcagaucaucaccaccgacaacaccuucgugagcggcaacugcgacguggucaucggcaucgugaacaacacgguguacgacccccugcagcccgagcuggacuccuucaaggaggagcucgacaaguacuucaagaaccacaccagccccgacgucgaccugggggacaucuccggcaucaacgccagcguggugaacauccagaaggagaucgaccgccugaacgaggucgccaagaaccucaacgagucccugaucgaccugcaggagcucgggaaguacgagcaguacaucaagggcgggggcgggagcgacaucgaccccuacaaggaguucggcagcuccuaccagcugcucaacuuccugccccuggacuucuuccccgaccucaacgcccugguggacaccgccaccgcgcuguacgaggaggagcucacggggcgcgagcacugcagcccccaccacaccgccauccggcaggcccuggucugcugggacgagcugaccaagcucaucgccuggauguccagcaacaucaccuccgagcagguccgcacgaucaucgugaaccacgucaacgacaccuggggccugaaggugcggcagagccugugguuccaccucuccugccugaccuucgggcagcacaccgugcaggaguuccuggucagcuucggcguguggauccgcacgcccgccccguaccggccgcccaacgcgccgauccucuccacccugccggagcacaccgugaucugcugaggacuaguuauaagacugacuagcccgaugggccucccaacgggcccuccuccccuccuugcaccgagauuaauaaaaaaaaaaaaaaaaaaaaaaaaaaaaaaaaaaaaaaaaaaaaaaaaaaaaaaaaaaaaaaaaugcaucccccccccccccccccccccccccccccccaaaggcucuuuucagagccaccagaauu

SEQ ID NO: 12871 - RNA, 4315 nt, Artificial Sequence
  SARS-CoV-2/Wuhan/WIV05/2019__EPI_ISL_402128 spike protein mRNA gc (1-1211)(K986P_V987P) WhcAg construct
aggagaaagcuuaccauguucguguuccugguccuccugccccuggugagcucccagugcgugaaccucaccacccgcacgcagcugccgcccgccuacaccaacagcuucacccggggcgucuacuaccccgacaagguguuccgcuccagcgugcugcacuccacccaggaccucuuccugcccuucuucagcaacgucacgugguuccacgccauccacguguccgggaccaacggcaccaagcgguucgacaacccggugcugcccuucaacgacggggucuacuucgcgagcaccgagaaguccaacaucauccgcggcuggaucuucgggacgacccucgacagcaagacccagucccugcugaucgugaacaacgccaccaacguggucaucaaggugugcgaguuccaguucugcaacgaccccuuccucggcguguacuaccacaagaacaacaagagcuggauggaguccgaguuccgggucuacagcuccgccaacaacugcacguucgaguacgugagccagcccuuccugauggaccuggagggcaagcaggggaacuucaagaaccuccgcgaguucguguucaagaacaucgacggcuacuucaagaucuacuccaagcacaccccgaucaaccugguccgggaccugccccagggguucagcgcccucgagccccugguggaccugcccaucggcaucaacaucacccgcuuccagacccuccuggcccugcaccgguccuaccucacgccgggggacagcagcuccggcuggaccgcgggcgccgccgccuacuacgugggguaccugcagccccgcaccuuccugcucaaguacaacgagaacggcaccaucacggacgcggucgacugcgcccuggacccccugagcgagaccaagugcacccucaaguccuucaccguggagaaggggaucuaccagacgagcaacuuccgggugcagcccaccgaguccaucguccgcuucccgaacaucaccaaccugugccccuucggcgagguguucaacgccacccgguucgccagcgucuacgccuggaaccgcaagcggaucuccaacugcguggcggacuacagcgugcuguacaacuccgccagcuucuccacguucaagugcuacggcgucagccccaccaagcucaacgaccugugcuucaccaacguguacgccgacuccuucgugauccgcggggacgagguccggcagaucgcccccggccagaccgggaagaucgccgacuacaacuacaagcugccggacgacuucacgggcugcgugaucgcguggaacagcaacaaccucgacuccaaggucgggggcaacuacaacuaccuguaccgccuguuccgcaagagcaaccucaagcccuucgagcgggacaucuccaccgagaucuaccaggccggcagcacccccugcaacgggguggagggcuucaacugcuacuucccccugcaguccuacggguuccagccgaccaacggcgugggguaccagcccuaccggguggucgugcugagcuucgagcuccugcacgcccccgccacggugugcggccccaagaaguccaccaaccuggucaagaacaagugcgugaacuucaacuucaacggccucaccgggaccggcgugcugaccgagagcaacaagaaguuccugccguuccagcaguucgggcgcgacaucgccgacacgaccgacgcgguccgcgacccccagacccuggagauccucgacaucacccccugcagcuucggcgggguguccgugaucacgccgggcaccaacaccagcaaccaggucgccgugcuguaccaggacgugaacugcaccgagguccccguggccauccacgccgaccagcugacgcccaccuggcggguguacuccaccggcagcaacgucuuccagacccgcgccgggugccucaucggcgcggagcacgugaacaacuccuacgagugcgacauccccaucggggccggcaucugcgccagcuaccagacgcagaccaacuccccgcggcgcgcccggagcguggcgucccagagcaucaucgccuacaccaugucccugggcgccgagaacagcgucgccuacuccaacaacagcaucgccauccccaccaacuucacgaucuccgugaccaccgagauccugcccgugagcaugaccaagacgagcgucgacugcaccauguacaucugcggggacuccaccgagugcagcaaccuccugcugcaguacggcuccuucugcacccagcucaaccgcgcgcugacggggaucgccguggagcaggacaagaacacccaggagguguucgcccaggucaagcagaucuacaagacgcccccgaucaaggacuucggcggguucaacuucagccagauccugcccgaccccuccaagcccagcaagcgguccuucaucgaggaccuccuguucaacaaggugacccuggccgacgccggcuucaucaagcaguacggcgacugccucggggacaucgcggcccgcgaccugaucugcgcccagaaguucaacggccugaccgugcucccgccccugcugaccgacgagaugaucgcccaguacaccagcgcccuccuggcggggaccaucacguccggcuggaccuucggggccggcgccgcccugcagauccccuucgcgaugcagauggccuaccgguucaacggcaucggggucacccagaacgugcucuacgagaaccagaagcugaucgccaaccaguucaacagcgccaucggcaagauccaggacucccugagcuccaccgccagcgcgcucgggaagcugcaggacguggucaaccagaacgcccaggcccugaacacgcucgugaagcagcuguccagcaacuucggcgccaucuccagcgugcugaacgacauccucucccgccuggacccgcccgaggccgaggugcagaucgaccggcugaucaccgggcgccuccagagccugcagaccuacgugacccagcagcugauccgggcggccgagauccgcgccagcgccaaccucgccgcgaccaagauguccgagugcguccugggccagagcaagcggguggacuucugcggcaagggguaccaccugauguccuucccccagagcgccccgcacggcguggucuuccuccacgugacguacguccccgcccaggagaagaacuucaccaccgcccccgcgaucugccacgacgggaaggcccacuucccccgcgagggcguguucguguccaacgggacccacugguucgucacgcagcggaacuucuacgagccgcagaucaucaccaccgacaacaccuucgugagcggcaacugcgacguggucaucggcaucgugaacaacacgguguacgacccccugcagcccgagcuggacuccuucaaggaggagcucgacaaguacuucaagaaccacaccagccccgacgucgaccugggggacaucuccggcaucaacgccagcguggugaacauccagaaggagaucgaccgccugaacgaggucgccaagaaccucaacgagucccugaucgaccugcaggagcucgggaaguacgagcaguacaucaagggcgggggcgggagcgacaucgaccccuacaaggaguucggcagcuccuaccagcugcucaacuuccugccccuggacuucuuccccgaccucaacgcccugguggacaccgccaccgcgcuguacgaggaggagcucacggggcgcgagcacugcagcccccaccacaccgccauccggcaggcccuggucugcugggacgagcugaccaagcucaucgccuggauguccagcaacaucaccuccgagcagguccgcacgaucaucgugaaccacgucaacgacaccuggggccugaaggugcggcagagccugugguuccaccucuccugccugaccuucgggcagcacaccgugcaggaguuccuggucagcuucggcguguggauccgcacgcccgccccguaccggccgcccaacgcgccgauccucuccacccugccggagcacaccgugaucugcugaggacuaguuauaagacugacuagcccgaugggccucccaacgggcccuccuccccuccuugcaccgagauuaauaaaaaaaaaaaaaaaaaaaaaaaaaaaaaaaaaaaaaaaaaaaaaaaaaaaaaaaaaaaaaaaaugcaucccccccccccccccccccccccccccccccaaaggcucuuuucagagccaccagaauu

SEQ ID NO: 12872 - RNA, 4315 nt, Artificial Sequence
  SARS-CoV-2/Wuhan/WIV05/2019__EPI_ISL_402128 spike protein mRNA gc (1-1211)(K986P_V987P_T887WN_A1020W) WhcAg construct
aggagaaagcuuaccauguucguguuccugguccuccugccccuggugagcucccagugcgugaaccucaccacccgcacgcagcugccgcccgccuacaccaacagcuucacccggggcgucuacuaccccgacaagguguuccgcuccagcgugcugcacuccacccaggaccucuuccugcccuucuucagcaacgucacgugguuccacgccauccacguguccgggaccaacggcaccaagcgguucgacaacccggugcugcccuucaacgacggggucuacuucgcgagcaccgagaaguccaacaucauccgcggcuggaucuucgggacgacccucgacagcaagacccagucccugcugaucgugaacaacgccaccaacguggucaucaaggugugcgaguuccaguucugcaacgaccccuuccucggcguguacuaccacaagaacaacaagagcuggauggaguccgaguuccgggucuacagcuccgccaacaacugcacguucgaguacgugagccagcccuuccugauggaccuggagggcaagcaggggaacuucaagaaccuccgcgaguucguguucaagaacaucgacggcuacuucaagaucuacuccaagcacaccccgaucaaccugguccgggaccugccccagggguucagcgcccucgagccccugguggaccugcccaucggcaucaacaucacccgcuuccagacccuccuggcccugcaccgguccuaccucacgccgggggacagcagcuccggcuggaccgcgggcgccgccgccuacuacgugggguaccugcagccccgcaccuuccugcucaaguacaacgagaacggcaccaucacggacgcggucgacugcgcccuggacccccugagcgagaccaagugcacccucaaguccuucaccguggagaaggggaucuaccagacgagcaacuuccgggugcagcccaccgaguccaucguccgcuucccgaacaucaccaaccugugccccuucggcgagguguucaacgccacccgguucgccagcgucuacgccuggaaccgcaagcggaucuccaacugcguggcggacuacagcgugcuguacaacuccgccagcuucuccacguucaagugcuacggcgucagccccaccaagcucaacgaccugugcuucaccaacguguacgccgacuccuucgugauccgcggggacgagguccggcagaucgcccccggccagaccgggaagaucgccgacuacaacuacaagcugccggacgacuucacgggcugcgugaucgcguggaacagcaacaaccucgacuccaaggucgggggcaacuacaacuaccuguaccgccuguuccgcaagagcaaccucaagcccuucgagcgggacaucuccaccgagaucuaccaggccggcagcacccccugcaacgggguggagggcuucaacugcuacuucccccugcaguccuacggguuccagccgaccaacggcgugggguaccagcccuaccggguggucgugcugagcuucgagcuccugcacgcccccgccacggugugcggccccaagaaguccaccaaccuggucaagaacaagugcgugaacuucaacuucaacggccucaccgggaccggcgugcugaccgagagcaacaagaaguuccugccguuccagcaguucgggcgcgacaucgccgacacgaccgacgcgguccgcgacccccagacccuggagauccucgacaucacccccugcagcuucggcgggguguccgugaucacgccgggcaccaacaccagcaaccaggucgccgugcuguaccaggacgugaacugcaccgagguccccguggccauccacgccgaccagcugacgcccaccuggcggguguacuccaccggcagcaacgucuuccagacccgcgccgggugccucaucggcgcggagcacgugaacaacuccuacgagugcgacauccccaucggggccggcaucugcgccagcuaccagacgcagaccaacuccccgcggcgcgcccggagcguggcgucccagagcaucaucgccuacaccaugucccugggcgccgagaacagcgucgccuacuccaacaacagcaucgccauccccaccaacuucacgaucuccgugaccaccgagauccugcccgugagcaugaccaagacgagcgucgacugcaccauguacaucugcggggacuccaccgagugcagcaaccuccugcugcaguacggcuccuucugcacccagcucaaccgcgcgcugacggggaucgccguggagcaggacaagaacacccaggagguguucgcccaggucaagcagaucuacaagacgcccccgaucaaggacuucggcggguucaacuucagccagauccugcccgaccccuccaagcccagcaagcgguccuucaucgaggaccuccuguucaacaaggugacccuggccgacgccggcuucaucaagcaguacggcgacugccucggggacaucgcggcccgcgaccugaucugcgcccagaaguucaacggccugaccgugcucccgccccugcugaccgacgagaugaucgcccaguacaccagcgcccuccuggcggggaccaucacguccggcuggugguucggggccggcgccgcccugcagauccccuucgcgaugcagauggccuaccgguucaacggcaucggggucacccagaacgugcucuacgagaaccagaagcugaucgccaaccaguucaacagcgccaucggcaagauccaggacucccugagcuccaccgccagcgcgcucgggaagcugcaggacguggucaaccagaacgcccaggcccugaacacgcucgugaagcagcuguccagcaacuucggcgccaucuccagcgugcugaacgacauccucucccgccuggacccgcccgaggccgaggugcagaucgaccggcugaucaccgggcgccuccagagccugcagaccuacgugacccagcagcugauccgggcggccgagauccgcuggagcgccaaccucgccgcgaccaagauguccgagugcguccugggccagagcaagcggguggacuucugcggcaagggguaccaccugauguccuucccccagagcgccccgcacggcguggucuuccuccacgugacguacguccccgcccaggagaagaacuucaccaccgcccccgcgaucugccacgacgggaaggcccacuucccccgcgagggcguguucguguccaacgggacccacugguucgucacgcagcggaacuucuacgagccgcagaucaucaccaccgacaacaccuucgugagcggcaacugcgacguggucaucggcaucgugaacaacacgguguacgacccccugcagcccgagcuggacuccuucaaggaggagcucgacaaguacuucaagaaccacaccagccccgacgucgaccugggggacaucuccggcaucaacgccagcguggugaacauccagaaggagaucgaccgccugaacgaggucgccaagaaccucaacgagucccugaucgaccugcaggagcucgggaaguacgagcaguacaucaagggcgggggcgggagcgacaucgaccccuacaaggaguucggcagcuccuaccagcugcucaacuuccugccccuggacuucuuccccgaccucaacgcccugguggacaccgccaccgcgcuguacgaggaggagcucacggggcgcgagcacugcagcccccaccacaccgccauccggcaggcccuggucugcugggacgagcugaccaagcucaucgccuggauguccagcaacaucaccuccgagcagguccgcacgaucaucgugaaccacgucaacgacaccuggggccugaaggugcggcagagccugugguuccaccucuccugccugaccuucgggcagcacaccgugcaggaguuccuggucagcuucggcguguggauccgcacgcccgccccguaccggccgcccaacgcgccgauccucuccacccugccggagcacaccgugaucugcugaggacuaguuauaagacugacuagcccgaugggccucccaacgggcccuccuccccuccuugcaccgagauuaauaaaaaaaaaaaaaaaaaaaaaaaaaaaaaaaaaaaaaaaaaaaaaaaaaaaaaaaaaaaaaaaaugcaucccccccccccccccccccccccccccccccaaaggcucuuuucagagccaccagaauu

SEQ ID NO: 12873 - RNA, 4315 nt, Artificial Sequence
  SARS-CoV-2/Wuhan/WIV05/2019__EPI_ISL_402128 spike protein mRNA gc (1-1211)(K986P_V987P_P1069F) WhcAg construct
aggagaaagcuuaccauguucguguuccugguccuccugccccuggugagcucccagugcgugaaccucaccacccgcacgcagcugccgcccgccuacaccaacagcuucacccggggcgucuacuaccccgacaagguguuccgcuccagcgugcugcacuccacccaggaccucuuccugcccuucuucagcaacgucacgugguuccacgccauccacguguccgggaccaacggcaccaagcgguucgacaacccggugcugcccuucaacgacggggucuacuucgcgagcaccgagaaguccaacaucauccgcggcuggaucuucgggacgacccucgacagcaagacccagucccugcugaucgugaacaacgccaccaacguggucaucaaggugugcgaguuccaguucugcaacgaccccuuccucggcguguacuaccacaagaacaacaagagcuggauggaguccgaguuccgggucuacagcuccgccaacaacugcacguucgaguacgugagccagcccuuccugauggaccuggagggcaagcaggggaacuucaagaaccuccgcgaguucguguucaagaacaucgacggcuacuucaagaucuacuccaagcacaccccgaucaaccugguccgggaccugccccagggguucagcgcccucgagccccugguggaccugcccaucggcaucaacaucacccgcuuccagacccuccuggcccugcaccgguccuaccucacgccgggggacagcagcuccggcuggaccgcgggcgccgccgccuacuacgugggguaccugcagccccgcaccuuccugcucaaguacaacgagaacggcaccaucacggacgcggucgacugcgcccuggacccccugagcgagaccaagugcacccucaaguccuucaccguggagaaggggaucuaccagacgagcaacuuccgggugcagcccaccgaguccaucguccgcuucccgaacaucaccaaccugugccccuucggcgagguguucaacgccacccgguucgccagcgucuacgccuggaaccgcaagcggaucuccaacugcguggcggacuacagcgugcuguacaacuccgccagcuucuccacguucaagugcuacggcgucagccccaccaagcucaacgaccugugcuucaccaacguguacgccgacuccuucgugauccgcggggacgagguccggcagaucgcccccggccagaccgggaagaucgccgacuacaacuacaagcugccggacgacuucacgggcugcgugaucgcguggaacagcaacaaccucgacuccaaggucgggggcaacuacaacuaccuguaccgccuguuccgcaagagcaaccucaagcccuucgagcgggacaucuccaccgagaucuaccaggccggcagcacccccugcaacgggguggagggcuucaacugcuacuucccccugcaguccuacggguuccagccgaccaacggcgugggguaccagcccuaccggguggucgugcugagcuucgagcuccugcacgcccccgccacggugugcggccccaagaaguccaccaaccuggucaagaacaagugcgugaacuucaacuucaacggccucaccgggaccggcgugcugaccgagagcaacaagaaguuccugccguuccagcaguucgggcgcgacaucgccgacacgaccgacgcgguccgcgacccccagacccuggagauccucgacaucacccccugcagcuucggcgggguguccgugaucacgccgggcaccaacaccagcaaccaggucgccgugcuguaccaggacgugaacugcaccgagguccccguggccauccacgccgaccagcugacgcccaccuggcggguguacuccaccggcagcaacgucuuccagacccgcgccgggugccucaucggcgcggagcacgugaacaacuccuacgagugcgacauccccaucggggccggcaucugcgccagcuaccagacgcagaccaacuccccgcggcgcgcccggagcguggcgucccagagcaucaucgccuacaccaugucccugggcgccgagaacagcgucgccuacuccaacaacagcaucgccauccccaccaacuucacgaucuccgugaccaccgagauccugcccgugagcaugaccaagacgagcgucgacugcaccauguacaucugcggggacuccaccgagugcagcaaccuccugcugcaguacggcuccuucugcacccagcucaaccgcgcgcugacggggaucgccguggagcaggacaagaacacccaggagguguucgcccaggucaagcagaucuacaagacgcccccgaucaaggacuucggcggguucaacuucagccagauccugcccgaccccuccaagcccagcaagcgguccuucaucgaggaccuccuguucaacaaggugacccuggccgacgccggcuucaucaagcaguacggcgacugccucggggacaucgcggcccgcgaccugaucugcgcccagaaguucaacggccugaccgugcucccgccccugcugaccgacgagaugaucgcccaguacaccagcgcccuccuggcggggaccaucacguccggcuggaccuucggggccggcgccgcccugcagauccccuucgcgaugcagauggccuaccgguucaacggcaucggggucacccagaacgugcucuacgagaaccagaagcugaucgccaaccaguucaacagcgccaucggcaagauccaggacucccugagcuccaccgccagcgcgcucgggaagcugcaggacguggucaaccagaacgcccaggcccugaacacgcucgugaagcagcuguccagcaacuucggcgccaucuccagcgugcugaacgacauccucucccgccuggacccgcccgaggccgaggugcagaucgaccggcugaucaccgggcgccuccagagccugcagaccuacgugacccagcagcugauccgggcggccgagauccgcgccagcgccaaccucgccgcgaccaagauguccgagugcguccugggccagagcaagcggguggacuucugcggcaagggguaccaccugauguccuucccccagagcgccccgcacggcguggucuuccuccacgugacguacgucuucgcccaggagaagaacuucaccaccgcccccgcgaucugccacgacgggaaggcccacuucccccgcgagggcguguucguguccaacgggacccacugguucgucacgcagcggaacuucuacgagccgcagaucaucaccaccgacaacaccuucgugagcggcaacugcgacguggucaucggcaucgugaacaacacgguguacgacccccugcagcccgagcuggacuccuucaaggaggagcucgacaaguacuucaagaaccacaccagccccgacgucgaccugggggacaucuccggcaucaacgccagcguggugaacauccagaaggagaucgaccgccugaacgaggucgccaagaaccucaacgagucccugaucgaccugcaggagcucgggaaguacgagcaguacaucaagggcgggggcgggagcgacaucgaccccuacaaggaguucggcagcuccuaccagcugcucaacuuccugccccuggacuucuuccccgaccucaacgcccugguggacaccgccaccgcgcuguacgaggaggagcucacggggcgcgagcacugcagcccccaccacaccgccauccggcaggcccuggucugcugggacgagcugaccaagcucaucgccuggauguccagcaacaucaccuccgagcagguccgcacgaucaucgugaaccacgucaacgacaccuggggccugaaggugcggcagagccugugguuccaccucuccugccugaccuucgggcagcacaccgugcaggaguuccuggucagcuucggcguguggauccgcacgcccgccccguaccggccgcccaacgcgccgauccucuccacccugccggagcacaccgugaucugcugaggacuaguuauaagacugacuagcccgaugggccucccaacgggcccuccuccccuccuugcaccgagauuaauaaaaaaaaaaaaaaaaaaaaaaaaaaaaaaaaaaaaaaaaaaaaaaaaaaaaaaaaaaaaaaaaugcaucccccccccccccccccccccccccccccccaaaggcucuuuucagagccaccagaauu

SEQ ID NO: 12874 - RNA, 4315 nt, Artificial Sequence
  SARS-CoV-2/Wuhan/WIV05/2019__EPI_ISL_402128 spike protein mRNA gc (1-1211)(K986P_V987P_ H1048Q_H1064N_ H1083N_H1101N) WhcAg construct
aggagaaagcuuaccauguucguguuccugguccuccugccccuggugagcucccagugcgugaaccucaccacccgcacgcagcugccgcccgccuacaccaacagcuucacccggggcgucuacuaccccgacaagguguuccgcuccagcgugcugcacuccacccaggaccucuuccugcccuucuucagcaacgucacgugguuccacgccauccacguguccgggaccaacggcaccaagcgguucgacaacccggugcugcccuucaacgacggggucuacuucgcgagcaccgagaaguccaacaucauccgcggcuggaucuucgggacgacccucgacagcaagacccagucccugcugaucgugaacaacgccaccaacguggucaucaaggugugcgaguuccaguucugcaacgaccccuuccucggcguguacuaccacaagaacaacaagagcuggauggaguccgaguuccgggucuacagcuccgccaacaacugcacguucgaguacgugagccagcccuuccugauggaccuggagggcaagcaggggaacuucaagaaccuccgcgaguucguguucaagaacaucgacggcuacuucaagaucuacuccaagcacaccccgaucaaccugguccgggaccugccccagggguucagcgcccucgagccccugguggaccugcccaucggcaucaacaucacccgcuuccagacccuccuggcccugcaccgguccuaccucacgccgggggacagcagcuccggcuggaccgcgggcgccgccgccuacuacgugggguaccugcagccccgcaccuuccugcucaaguacaacgagaacggcaccaucacggacgcggucgacugcgcccuggacccccugagcgagaccaagugcacccucaaguccuucaccguggagaaggggaucuaccagacgagcaacuuccgggugcagcccaccgaguccaucguccgcuucccgaacaucaccaaccugugccccuucggcgagguguucaacgccacccgguucgccagcgucuacgccuggaaccgcaagcggaucuccaacugcguggcggacuacagcgugcuguacaacuccgccagcuucuccacguucaagugcuacggcgucagccccaccaagcucaacgaccugugcuucaccaacguguacgccgacuccuucgugauccgcggggacgagguccggcagaucgcccccggccagaccgggaagaucgccgacuacaacuacaagcugccggacgacuucacgggcugcgugaucgcguggaacagcaacaaccucgacuccaaggucgggggcaacuacaacuaccuguaccgccuguuccgcaagagcaaccucaagcccuucgagcgggacaucuccaccgagaucuaccaggccggcagcacccccugcaacgggguggagggcuucaacugcuacuucccccugcaguccuacggguuccagccgaccaacggcgugggguaccagcccuaccggguggucgugcugagcuucgagcuccugcacgcccccgccacggugugcggccccaagaaguccaccaaccuggucaagaacaagugcgugaacuucaacuucaacggccucaccgggaccggcgugcugaccgagagcaacaagaaguuccugccguuccagcaguucgggcgcgacaucgccgacacgaccgacgcgguccgcgacccccagacccuggagauccucgacaucacccccugcagcuucggcgggguguccgugaucacgccgggcaccaacaccagcaaccaggucgccgugcuguaccaggacgugaacugcaccgagguccccguggccauccacgccgaccagcugacgcccaccuggcggguguacuccaccggcagcaacgucuuccagacccgcgccgggugccucaucggcgcggagcacgugaacaacuccuacgagugcgacauccccaucggggccggcaucugcgccagcuaccagacgcagaccaacuccccgcggcgcgcccggagcguggcgucccagagcaucaucgccuacaccaugucccugggcgccgagaacagcgucgccuacuccaacaacagcaucgccauccccaccaacuucacgaucuccgugaccaccgagauccugcccgugagcaugaccaagacgagcgucgacugcaccauguacaucugcggggacuccaccgagugcagcaaccuccugcugcaguacggcuccuucugcacccagcucaaccgcgcgcugacggggaucgccguggagcaggacaagaacacccaggagguguucgcccaggucaagcagaucuacaagacgcccccgaucaaggacuucggcggguucaacuucagccagauccugcccgaccccuccaagcccagcaagcgguccuucaucgaggaccuccuguucaacaaggugacccuggccgacgccggcuucaucaagcaguacggcgacugccucggggacaucgcggcccgcgaccugaucugcgcccagaaguucaacggccugaccgugcucccgccccugcugaccgacgagaugaucgcccaguacaccagcgcccuccuggcggggaccaucacguccggcuggaccuucggggccggcgccgcccugcagauccccuucgcgaugcagauggccuaccgguucaacggcaucggggucacccagaacgugcucuacgagaaccagaagcugaucgccaaccaguucaacagcgccaucggcaagauccaggacucccugagcuccaccgccagcgcgcucgggaagcugcaggacguggucaaccagaacgcccaggcccugaacacgcucgugaagcagcuguccagcaacuucggcgccaucuccagcgugcugaacgacauccucucccgccuggacccgcccgaggccgaggugcagaucgaccggcugaucaccgggcgccuccagagccugcagaccuacgugacccagcagcugauccgggcggccgagauccgcgccagcgccaaccucgccgcgaccaagauguccgagugcguccugggccagagcaagcggguggacuucugcggcaagggguaccagcugauguccuucccccagagcgccccgcacggcguggucuuccucaacgugacguacguccccgcccaggagaagaacuucaccaccgcccccgcgaucugcaacgacgggaaggcccacuucccccgcgagggcguguucguguccaacgggaccaacugguucgucacgcagcggaacuucuacgagccgcagaucaucaccaccgacaacaccuucgugagcggcaacugcgacguggucaucggcaucgugaacaacacgguguacgacccccugcagcccgagcuggacuccuucaaggaggagcucgacaaguacuucaagaaccacaccagccccgacgucgaccugggggacaucuccggcaucaacgccagcguggugaacauccagaaggagaucgaccgccugaacgaggucgccaagaaccucaacgagucccugaucgaccugcaggagcucgggaaguacgagcaguacaucaagggcgggggcgggagcgacaucgaccccuacaaggaguucggcagcuccuaccagcugcucaacuuccugccccuggacuucuuccccgaccucaacgcccugguggacaccgccaccgcgcuguacgaggaggagcucacggggcgcgagcacugcagcccccaccacaccgccauccggcaggcccuggucugcugggacgagcugaccaagcucaucgccuggauguccagcaacaucaccuccgagcagguccgcacgaucaucgugaaccacgucaacgacaccuggggccugaaggugcggcagagccugugguuccaccucuccugccugaccuucgggcagcacaccgugcaggaguuccuggucagcuucggcguguggauccgcacgcccgccccguaccggccgcccaacgcgccgauccucuccacccugccggagcacaccgugaucugcugaggacuaguuauaagacugacuagcccgaugggccucccaacgggcccuccuccccuccuugcaccgagauuaauaaaaaaaaaaaaaaaaaaaaaaaaaaaaaaaaaaaaaaaaaaaaaaaaaaaaaaaaaaaaaaaaugcaucccccccccccccccccccccccccccccccaaaggcucuuuucagagccaccagaauu

SEQ ID NO: 12875 - RNA, 4315 nt, Artificial Sequence
  SARS-CoV-2/Wuhan/WIV05/2019__EPI_ISL_402128 spike protein mRNA gc (1-1211)(I712C_T1077C) WhcAg construct
aggagaaagcuuaccauguucguguuccugguccuccugccccuggugagcucccagugcgugaaccucaccacccgcacgcagcugccgcccgccuacaccaacagcuucacccggggcgucuacuaccccgacaagguguuccgcuccagcgugcugcacuccacccaggaccucuuccugcccuucuucagcaacgucacgugguuccacgccauccacguguccgggaccaacggcaccaagcgguucgacaacccggugcugcccuucaacgacggggucuacuucgcgagcaccgagaaguccaacaucauccgcggcuggaucuucgggacgacccucgacagcaagacccagucccugcugaucgugaacaacgccaccaacguggucaucaaggugugcgaguuccaguucugcaacgaccccuuccucggcguguacuaccacaagaacaacaagagcuggauggaguccgaguuccgggucuacagcuccgccaacaacugcacguucgaguacgugagccagcccuuccugauggaccuggagggcaagcaggggaacuucaagaaccuccgcgaguucguguucaagaacaucgacggcuacuucaagaucuacuccaagcacaccccgaucaaccugguccgggaccugccccagggguucagcgcccucgagccccugguggaccugcccaucggcaucaacaucacccgcuuccagacccuccuggcccugcaccgguccuaccucacgccgggggacagcagcuccggcuggaccgcgggcgccgccgccuacuacgugggguaccugcagccccgcaccuuccugcucaaguacaacgagaacggcaccaucacggacgcggucgacugcgcccuggacccccugagcgagaccaagugcacccucaaguccuucaccguggagaaggggaucuaccagacgagcaacuuccgggugcagcccaccgaguccaucguccgcuucccgaacaucaccaaccugugccccuucggcgagguguucaacgccacccgguucgccagcgucuacgccuggaaccgcaagcggaucuccaacugcguggcggacuacagcgugcuguacaacuccgccagcuucuccacguucaagugcuacggcgucagccccaccaagcucaacgaccugugcuucaccaacguguacgccgacuccuucgugauccgcggggacgagguccggcagaucgcccccggccagaccgggaagaucgccgacuacaacuacaagcugccggacgacuucacgggcugcgugaucgcguggaacagcaacaaccucgacuccaaggucgggggcaacuacaacuaccuguaccgccuguuccgcaagagcaaccucaagcccuucgagcgggacaucuccaccgagaucuaccaggccggcagcacccccugcaacgggguggagggcuucaacugcuacuucccccugcaguccuacggguuccagccgaccaacggcgugggguaccagcccuaccggguggucgugcugagcuucgagcuccugcacgcccccgccacggugugcggccccaagaaguccaccaaccuggucaagaacaagugcgugaacuucaacuucaacggccucaccgggaccggcgugcugaccgagagcaacaagaaguuccugccguuccagcaguucgggcgcgacaucgccgacacgaccgacgcgguccgcgacccccagacccuggagauccucgacaucacccccugcagcuucggcgggguguccgugaucacgccgggcaccaacaccagcaaccaggucgccgugcuguaccaggacgugaacugcaccgagguccccguggccauccacgccgaccagcugacgcccaccuggcggguguacuccaccggcagcaacgucuuccagacccgcgccgggugccucaucggcgcggagcacgugaacaacuccuacgagugcgacauccccaucggggccggcaucugcgccagcuaccagacgcagaccaacuccccgcggcgcgcccggagcguggcgucccagagcaucaucgccuacaccaugucccugggcgccgagaacagcgucgccuacuccaacaacagcugcgccauccccaccaacuucacgaucuccgugaccaccgagauccugcccgugagcaugaccaagacgagcgucgacugcaccauguacaucugcggggacuccaccgagugcagcaaccuccugcugcaguacggcuccuucugcacccagcucaaccgcgcgcugacggggaucgccguggagcaggacaagaacacccaggagguguucgcccaggucaagcagaucuacaagacgcccccgaucaaggacuucggcggguucaacuucagccagauccugcccgaccccuccaagcccagcaagcgguccuucaucgaggaccuccuguucaacaaggugacccuggccgacgccggcuucaucaagcaguacggcgacugccucggggacaucgcggcccgcgaccugaucugcgcccagaaguucaacggccugaccgugcucccgccccugcugaccgacgagaugaucgcccaguacaccagcgcccuccuggcggggaccaucacguccggcuggaccuucggggccggcgccgcccugcagauccccuucgcgaugcagauggccuaccgguucaacggcaucggggucacccagaacgugcucuacgagaaccagaagcugaucgccaaccaguucaacagcgccaucggcaagauccaggacucccugagcuccaccgccagcgcgcucgggaagcugcaggacguggucaaccagaacgcccaggcccugaacacgcucgugaagcagcuguccagcaacuucggcgccaucuccagcgugcugaacgacauccucucccgccuggacaaggucgaggccgaggugcagaucgaccggcugaucaccgggcgccuccagagccugcagaccuacgugacccagcagcugauccgggcggccgagauccgcgccagcgccaaccucgccgcgaccaagauguccgagugcguccugggccagagcaagcggguggacuucugcggcaagggguaccaccugauguccuucccccagagcgccccgcacggcguggucuuccuccacgugacguacguccccgcccaggagaagaacuucaccugcgcccccgcgaucugccacgacgggaaggcccacuucccccgcgagggcguguucguguccaacgggacccacugguucgucacgcagcggaacuucuacgagccgcagaucaucaccaccgacaacaccuucgugagcggcaacugcgacguggucaucggcaucgugaacaacacgguguacgacccccugcagcccgagcuggacuccuucaaggaggagcucgacaaguacuucaagaaccacaccagccccgacgucgaccugggggacaucuccggcaucaacgccagcguggugaacauccagaaggagaucgaccgccugaacgaggucgccaagaaccucaacgagucccugaucgaccugcaggagcucgggaaguacgagcaguacaucaagggcgggggcgggagcgacaucgaccccuacaaggaguucggcagcuccuaccagcugcucaacuuccugccccuggacuucuuccccgaccucaacgcccugguggacaccgccaccgcgcuguacgaggaggagcucacggggcgcgagcacugcagcccccaccacaccgccauccggcaggcccuggucugcugggacgagcugaccaagcucaucgccuggauguccagcaacaucaccuccgagcagguccgcacgaucaucgugaaccacgucaacgacaccuggggccugaaggugcggcagagccugugguuccaccucuccugccugaccuucgggcagcacaccgugcaggaguuccuggucagcuucggcguguggauccgcacgcccgccccguaccggccgcccaacgcgccgauccucuccacccugccggagcacaccgugaucugcugaggacuaguuauaagacugacuagcccgaugggccucccaacgggcccuccuccccuccuugcaccgagauuaauaaaaaaaaaaaaaaaaaaaaaaaaaaaaaaaaaaaaaaaaaaaaaaaaaaaaaaaaaaaaaaaaugcaucccccccccccccccccccccccccccccccaaaggcucuuuucagagccaccagaauu

SEQ ID NO: 12876 - RNA, 4315 nt, Artificial Sequence
  SARS-CoV-2/Wuhan/WIV05/2019__EPI_ISL_402128 spike protein mRNA gc (1-1211)(I714C_Y1110C) WhcAg construct
aggagaaagcuuaccauguucguguuccugguccuccugccccuggugagcucccagugcgugaaccucaccacccgcacgcagcugccgcccgccuacaccaacagcuucacccggggcgucuacuaccccgacaagguguuccgcuccagcgugcugcacuccacccaggaccucuuccugcccuucuucagcaacgucacgugguuccacgccauccacguguccgggaccaacggcaccaagcgguucgacaacccggugcugcccuucaacgacggggucuacuucgcgagcaccgagaaguccaacaucauccgcggcuggaucuucgggacgacccucgacagcaagacccagucccugcugaucgugaacaacgccaccaacguggucaucaaggugugcgaguuccaguucugcaacgaccccuuccucggcguguacuaccacaagaacaacaagagcuggauggaguccgaguuccgggucuacagcuccgccaacaacugcacguucgaguacgugagccagcccuuccugauggaccuggagggcaagcaggggaacuucaagaaccuccgcgaguucguguucaagaacaucgacggcuacuucaagaucuacuccaagcacaccccgaucaaccugguccgggaccugccccagggguucagcgcccucgagccccugguggaccugcccaucggcaucaacaucacccgcuuccagacccuccuggcccugcaccgguccuaccucacgccgggggacagcagcuccggcuggaccgcgggcgccgccgccuacuacgugggguaccugcagccccgcaccuuccugcucaaguacaacgagaacggcaccaucacggacgcggucgacugcgcccuggacccccugagcgagaccaagugcacccucaaguccuucaccguggagaaggggaucuaccagacgagcaacuuccgggugcagcccaccgaguccaucguccgcuucccgaacaucaccaaccugugccccuucggcgagguguucaacgccacccgguucgccagcgucuacgccuggaaccgcaagcggaucuccaacugcguggcggacuacagcgugcuguacaacuccgccagcuucuccacguucaagugcuacggcgucagccccaccaagcucaacgaccugugcuucaccaacguguacgccgacuccuucgugauccgcggggacgagguccggcagaucgcccccggccagaccgggaagaucgccgacuacaacuacaagcugccggacgacuucacgggcugcgugaucgcguggaacagcaacaaccucgacuccaaggucgggggcaacuacaacuaccuguaccgccuguuccgcaagagcaaccucaagcccuucgagcgggacaucuccaccgagaucuaccaggccggcagcacccccugcaacgggguggagggcuucaacugcuacuucccccugcaguccuacggguuccagccgaccaacggcgugggguaccagcccuaccggguggucgugcugagcuucgagcuccugcacgcccccgccacggugugcggccccaagaaguccaccaaccuggucaagaacaagugcgugaacuucaacuucaacggccucaccgggaccggcgugcugaccgagagcaacaagaaguuccugccguuccagcaguucgggcgcgacaucgccgacacgaccgacgcgguccgcgacccccagacccuggagauccucgacaucacccccugcagcuucggcgggguguccgugaucacgccgggcaccaacaccagcaaccaggucgccgugcuguaccaggacgugaacugcaccgagguccccguggccauccacgccgaccagcugacgcccaccuggcggguguacuccaccggcagcaacgucuuccagacccgcgccgggugccucaucggcgcggagcacgugaacaacuccuacgagugcgacauccccaucggggccggcaucugcgccagcuaccagacgcagaccaacuccccgcggcgcgcccggagcguggcgucccagagcaucaucgccuacaccaugucccugggcgccgagaacagcgucgccuacuccaacaacagcaucgccugccccaccaacuucacgaucuccgugaccaccgagauccugcccgugagcaugaccaagacgagcgucgacugcaccauguacaucugcggggacuccaccgagugcagcaaccuccugcugcaguacggcuccuucugcacccagcucaaccgcgcgcugacggggaucgccguggagcaggacaagaacacccaggagguguucgcccaggucaagcagaucuacaagacgcccccgaucaaggacuucggcggguucaacuucagccagauccugcccgaccccuccaagcccagcaagcgguccuucaucgaggaccuccuguucaacaaggugacccuggccgacgccggcuucaucaagcaguacggcgacugccucggggacaucgcggcccgcgaccugaucugcgcccagaaguucaacggccugaccgugcucccgccccugcugaccgacgagaugaucgcccaguacaccagcgcccuccuggcggggaccaucacguccggcuggaccuucggggccggcgccgcccugcagauccccuucgcgaugcagauggccuaccgguucaacggcaucggggucacccagaacgugcucuacgagaaccagaagcugaucgccaaccaguucaacagcgccaucggcaagauccaggacucccugagcuccaccgccagcgcgcucgggaagcugcaggacguggucaaccagaacgcccaggcccugaacacgcucgugaagcagcuguccagcaacuucggcgccaucuccagcgugcugaacgacauccucucccgccuggacaaggucgaggccgaggugcagaucgaccggcugaucaccgggcgccuccagagccugcagaccuacgugacccagcagcugauccgggcggccgagauccgcgccagcgccaaccucgccgcgaccaagauguccgagugcguccugggccagagcaagcggguggacuucugcggcaagggguaccaccugauguccuucccccagagcgccccgcacggcguggucuuccuccacgugacguacguccccgcccaggagaagaacuucaccaccgcccccgcgaucugccacgacgggaaggcccacuucccccgcgagggcguguucguguccaacgggacccacugguucgucacgcagcggaacuucugcgagccgcagaucaucaccaccgacaacaccuucgugagcggcaacugcgacguggucaucggcaucgugaacaacacgguguacgacccccugcagcccgagcuggacuccuucaaggaggagcucgacaaguacuucaagaaccacaccagccccgacgucgaccugggggacaucuccggcaucaacgccagcguggugaacauccagaaggagaucgaccgccugaacgaggucgccaagaaccucaacgagucccugaucgaccugcaggagcucgggaaguacgagcaguacaucaagggcgggggcgggagcgacaucgaccccuacaaggaguucggcagcuccuaccagcugcucaacuuccugccccuggacuucuuccccgaccucaacgcccugguggacaccgccaccgcgcuguacgaggaggagcucacggggcgcgagcacugcagcccccaccacaccgccauccggcaggcccuggucugcugggacgagcugaccaagcucaucgccuggauguccagcaacaucaccuccgagcagguccgcacgaucaucgugaaccacgucaacgacaccuggggccugaaggugcggcagagccugugguuccaccucuccugccugaccuucgggcagcacaccgugcaggaguuccuggucagcuucggcguguggauccgcacgcccgccccguaccggccgcccaacgcgccgauccucuccacccugccggagcacaccgugaucugcugaggacuaguuauaagacugacuagcccgaugggccucccaacgggcccuccuccccuccuugcaccgagauuaauaaaaaaaaaaaaaaaaaaaaaaaaaaaaaaaaaaaaaaaaaaaaaaaaaaaaaaaaaaaaaaaaugcaucccccccccccccccccccccccccccccccaaaggcucuuuucagagccaccagaauu

SEQ ID NO: 12877 - RNA, 4315 nt, Artificial Sequence
  SARS-CoV-2/Wuhan/WIV05/2019__EPI_ISL_402128 spike protein mRNA gc (1-1211)(P715C_P1069C) WhcAg construct
aggagaaagcuuaccauguucguguuccugguccuccugccccuggugagcucccagugcgugaaccucaccacccgcacgcagcugccgcccgccuacaccaacagcuucacccggggcgucuacuaccccgacaagguguuccgcuccagcgugcugcacuccacccaggaccucuuccugcccuucuucagcaacgucacgugguuccacgccauccacguguccgggaccaacggcaccaagcgguucgacaacccggugcugcccuucaacgacggggucuacuucgcgagcaccgagaaguccaacaucauccgcggcuggaucuucgggacgacccucgacagcaagacccagucccugcugaucgugaacaacgccaccaacguggucaucaaggugugcgaguuccaguucugcaacgaccccuuccucggcguguacuaccacaagaacaacaagagcuggauggaguccgaguuccgggucuacagcuccgccaacaacugcacguucgaguacgugagccagcccuuccugauggaccuggagggcaagcaggggaacuucaagaaccuccgcgaguucguguucaagaacaucgacggcuacuucaagaucuacuccaagcacaccccgaucaaccugguccgggaccugccccagggguucagcgcccucgagccccugguggaccugcccaucggcaucaacaucacccgcuuccagacccuccuggcccugcaccgguccuaccucacgccgggggacagcagcuccggcuggaccgcgggcgccgccgccuacuacgugggguaccugcagccccgcaccuuccugcucaaguacaacgagaacggcaccaucacggacgcggucgacugcgcccuggacccccugagcgagaccaagugcacccucaaguccuucaccguggagaaggggaucuaccagacgagcaacuuccgggugcagcccaccgaguccaucguccgcuucccgaacaucaccaaccugugccccuucggcgagguguucaacgccacccgguucgccagcgucuacgccuggaaccgcaagcggaucuccaacugcguggcggacuacagcgugcuguacaacuccgccagcuucuccacguucaagugcuacggcgucagccccaccaagcucaacgaccugugcuucaccaacguguacgccgacuccuucgugauccgcggggacgagguccggcagaucgcccccggccagaccgggaagaucgccgacuacaacuacaagcugccggacgacuucacgggcugcgugaucgcguggaacagcaacaaccucgacuccaaggucgggggcaacuacaacuaccuguaccgccuguuccgcaagagcaaccucaagcccuucgagcgggacaucuccaccgagaucuaccaggccggcagcacccccugcaacgggguggagggcuucaacugcuacuucccccugcaguccuacggguuccagccgaccaacggcgugggguaccagcccuaccggguggucgugcugagcuucgagcuccugcacgcccccgccacggugugcggccccaagaaguccaccaaccuggucaagaacaagugcgugaacuucaacuucaacggccucaccgggaccggcgugcugaccgagagcaacaagaaguuccugccguuccagcaguucgggcgcgacaucgccgacacgaccgacgcgguccgcgacccccagacccuggagauccucgacaucacccccugcagcuucggcgggguguccgugaucacgccgggcaccaacaccagcaaccaggucgccgugcuguaccaggacgugaacugcaccgagguccccguggccauccacgccgaccagcugacgcccaccuggcggguguacuccaccggcagcaacgucuuccagacccgcgccgggugccucaucggcgcggagcacgugaacaacuccuacgagugcgacauccccaucggggccggcaucugcgccagcuaccagacgcagaccaacuccccgcggcgcgcccggagcguggcgucccagagcaucaucgccuacaccaugucccugggcgccgagaacagcgucgccuacuccaacaacagcaucgccaucugcaccaacuucacgaucuccgugaccaccgagauccugcccgugagcaugaccaagacgagcgucgacugcaccauguacaucugcggggacuccaccgagugcagcaaccuccugcugcaguacggcuccuucugcacccagcucaaccgcgcgcugacggggaucgccguggagcaggacaagaacacccaggagguguucgcccaggucaagcagaucuacaagacgcccccgaucaaggacuucggcggguucaacuucagccagauccugcccgaccccuccaagcccagcaagcgguccuucaucgaggaccuccuguucaacaaggugacccuggccgacgccggcuucaucaagcaguacggcgacugccucggggacaucgcggcccgcgaccugaucugcgcccagaaguucaacggccugaccgugcucccgccccugcugaccgacgagaugaucgcccaguacaccagcgcccuccuggcggggaccaucacguccggcuggaccuucggggccggcgccgcccugcagauccccuucgcgaugcagauggccuaccgguucaacggcaucggggucacccagaacgugcucuacgagaaccagaagcugaucgccaaccaguucaacagcgccaucggcaagauccaggacucccugagcuccaccgccagcgcgcucgggaagcugcaggacguggucaaccagaacgcccaggcccugaacacgcucgugaagcagcuguccagcaacuucggcgccaucuccagcgugcugaacgacauccucucccgccuggacaaggucgaggccgaggugcagaucgaccggcugaucaccgggcgccuccagagccugcagaccuacgugacccagcagcugauccgggcggccgagauccgcgccagcgccaaccucgccgcgaccaagauguccgagugcguccugggccagagcaagcggguggacuucugcggcaagggguaccaccugauguccuucccccagagcgccccgcacggcguggucuuccuccacgugacguacgucugcgcccaggagaagaacuucaccaccgcccccgcgaucugccacgacgggaaggcccacuucccccgcgagggcguguucguguccaacgggacccacugguucgucacgcagcggaacuucuacgagccgcagaucaucaccaccgacaacaccuucgugagcggcaacugcgacguggucaucggcaucgugaacaacacgguguacgacccccugcagcccgagcuggacuccuucaaggaggagcucgacaaguacuucaagaaccacaccagccccgacgucgaccugggggacaucuccggcaucaacgccagcguggugaacauccagaaggagaucgaccgccugaacgaggucgccaagaaccucaacgagucccugaucgaccugcaggagcucgggaaguacgagcaguacaucaagggcgggggcgggagcgacaucgaccccuacaaggaguucggcagcuccuaccagcugcucaacuuccugccccuggacuucuuccccgaccucaacgcccugguggacaccgccaccgcgcuguacgaggaggagcucacggggcgcgagcacugcagcccccaccacaccgccauccggcaggcccuggucugcugggacgagcugaccaagcucaucgccuggauguccagcaacaucaccuccgagcagguccgcacgaucaucgugaaccacgucaacgacaccuggggccugaaggugcggcagagccugugguuccaccucuccugccugaccuucgggcagcacaccgugcaggaguuccuggucagcuucggcguguggauccgcacgcccgccccguaccggccgcccaacgcgccgauccucuccacccugccggagcacaccgugaucugcugaggacuaguuauaagacugacuagcccgaugggccucccaacgggcccuccuccccuccuugcaccgagauuaauaaaaaaaaaaaaaaaaaaaaaaaaaaaaaaaaaaaaaaaaaaaaaaaaaaaaaaaaaaaaaaaaugcaucccccccccccccccccccccccccccccccaaaggcucuuuucagagccaccagaauu

SEQ ID NO: 12878 - RNA, 4315 nt, Artificial Sequence
  SARS-CoV-2/Wuhan/WIV05/2019__EPI_ISL_402128 spike protein mRNA gc (1-1211)(G889C_L1034C) WhcAg construct
aggagaaagcuuaccauguucguguuccugguccuccugccccuggugagcucccagugcgugaaccucaccacccgcacgcagcugccgcccgccuacaccaacagcuucacccggggcgucuacuaccccgacaagguguuccgcuccagcgugcugcacuccacccaggaccucuuccugcccuucuucagcaacgucacgugguuccacgccauccacguguccgggaccaacggcaccaagcgguucgacaacccggugcugcccuucaacgacggggucuacuucgcgagcaccgagaaguccaacaucauccgcggcuggaucuucgggacgacccucgacagcaagacccagucccugcugaucgugaacaacgccaccaacguggucaucaaggugugcgaguuccaguucugcaacgaccccuuccucggcguguacuaccacaagaacaacaagagcuggauggaguccgaguuccgggucuacagcuccgccaacaacugcacguucgaguacgugagccagcccuuccugauggaccuggagggcaagcaggggaacuucaagaaccuccgcgaguucguguucaagaacaucgacggcuacuucaagaucuacuccaagcacaccccgaucaaccugguccgggaccugccccagggguucagcgcccucgagccccugguggaccugcccaucggcaucaacaucacccgcuuccagacccuccuggcccugcaccgguccuaccucacgccgggggacagcagcuccggcuggaccgcgggcgccgccgccuacuacgugggguaccugcagccccgcaccuuccugcucaaguacaacgagaacggcaccaucacggacgcggucgacugcgcccuggacccccugagcgagaccaagugcacccucaaguccuucaccguggagaaggggaucuaccagacgagcaacuuccgggugcagcccaccgaguccaucguccgcuucccgaacaucaccaaccugugccccuucggcgagguguucaacgccacccgguucgccagcgucuacgccuggaaccgcaagcggaucuccaacugcguggcggacuacagcgugcuguacaacuccgccagcuucuccacguucaagugcuacggcgucagccccaccaagcucaacgaccugugcuucaccaacguguacgccgacuccuucgugauccgcggggacgagguccggcagaucgcccccggccagaccgggaagaucgccgacuacaacuacaagcugccggacgacuucacgggcugcgugaucgcguggaacagcaacaaccucgacuccaaggucgggggcaacuacaacuaccuguaccgccuguuccgcaagagcaaccucaagcccuucgagcgggacaucuccaccgagaucuaccaggccggcagcacccccugcaacgggguggagggcuucaacugcuacuucccccugcaguccuacggguuccagccgaccaacggcgugggguaccagcccuaccggguggucgugcugagcuucgagcuccugcacgcccccgccacggugugcggccccaagaaguccaccaaccuggucaagaacaagugcgugaacuucaacuucaacggccucaccgggaccggcgugcugaccgagagcaacaagaaguuccugccguuccagcaguucgggcgcgacaucgccgacacgaccgacgcgguccgcgacccccagacccuggagauccucgacaucacccccugcagcuucggcgggguguccgugaucacgccgggcaccaacaccagcaaccaggucgccgugcuguaccaggacgugaacugcaccgagguccccguggccauccacgccgaccagcugacgcccaccuggcggguguacuccaccggcagcaacgucuuccagacccgcgccgggugccucaucggcgcggagcacgugaacaacuccuacgagugcgacauccccaucggggccggcaucugcgccagcuaccagacgcagaccaacuccccgcggcgcgcccggagcguggcgucccagagcaucaucgccuacaccaugucccugggcgccgagaacagcgucgccuacuccaacaacagcaucgccauccccaccaacuucacgaucuccgugaccaccgagauccugcccgugagcaugaccaagacgagcgucgacugcaccauguacaucugcggggacuccaccgagugcagcaaccuccugcugcaguacggcuccuucugcacccagcucaaccgcgcgcugacggggaucgccguggagcaggacaagaacacccaggagguguucgcccaggucaagcagaucuacaagacgcccccgaucaaggacuucggcggguucaacuucagccagauccugcccgaccccuccaagcccagcaagcgguccuucaucgaggaccuccuguucaacaaggugacccuggccgacgccggcuucaucaagcaguacggcgacugccucggggacaucgcggcccgcgaccugaucugcgcccagaaguucaacggccugaccgugcucccgccccugcugaccgacgagaugaucgcccaguacaccagcgcccuccuggcggggaccaucacguccggcuggaccuucugcgccggcgccgcccugcagauccccuucgcgaugcagauggccuaccgguucaacggcaucggggucacccagaacgugcucuacgagaaccagaagcugaucgccaaccaguucaacagcgccaucggcaagauccaggacucccugagcuccaccgccagcgcgcucgggaagcugcaggacguggucaaccagaacgcccaggcccugaacacgcucgugaagcagcuguccagcaacuucggcgccaucuccagcgugcugaacgacauccucucccgccuggacaaggucgaggccgaggugcagaucgaccggcugaucaccgggcgccuccagagccugcagaccuacgugacccagcagcugauccgggcggccgagauccgcgccagcgccaaccucgccgcgaccaagauguccgagugcgucugcggccagagcaagcggguggacuucugcggcaagggguaccaccugauguccuucccccagagcgccccgcacggcguggucuuccuccacgugacguacguccccgcccaggagaagaacuucaccaccgcccccgcgaucugccacgacgggaaggcccacuucccccgcgagggcguguucguguccaacgggacccacugguucgucacgcagcggaacuucuacgagccgcagaucaucaccaccgacaacaccuucgugagcggcaacugcgacguggucaucggcaucgugaacaacacgguguacgacccccugcagcccgagcuggacuccuucaaggaggagcucgacaaguacuucaagaaccacaccagccccgacgucgaccugggggacaucuccggcaucaacgccagcguggugaacauccagaaggagaucgaccgccugaacgaggucgccaagaaccucaacgagucccugaucgaccugcaggagcucgggaaguacgagcaguacaucaagggcgggggcgggagcgacaucgaccccuacaaggaguucggcagcuccuaccagcugcucaacuuccugccccuggacuucuuccccgaccucaacgcccugguggacaccgccaccgcgcuguacgaggaggagcucacggggcgcgagcacugcagcccccaccacaccgccauccggcaggcccuggucugcugggacgagcugaccaagcucaucgccuggauguccagcaacaucaccuccgagcagguccgcacgaucaucgugaaccacgucaacgacaccuggggccugaaggugcggcagagccugugguuccaccucuccugccugaccuucgggcagcacaccgugcaggaguuccuggucagcuucggcguguggauccgcacgcccgccccguaccggccgcccaacgcgccgauccucuccacccugccggagcacaccgugaucugcugaggacuaguuauaagacugacuagcccgaugggccucccaacgggcccuccuccccuccuugcaccgagauuaauaaaaaaaaaaaaaaaaaaaaaaaaaaaaaaaaaaaaaaaaaaaaaaaaaaaaaaaaaaaaaaaaugcaucccccccccccccccccccccccccccccccaaaggcucuuuucagagccaccagaauu

SEQ ID NO: 12879 - RNA, 4315 nt, Artificial Sequence
  SARS-CoV-2/Wuhan/WIV05/2019__EPI_ISL_402128 spike protein mRNA gc (1-1211)(I909C_Y1047C) WhcAg construct
aggagaaagcuuaccauguucguguuccugguccuccugccccuggugagcucccagugcgugaaccucaccacccgcacgcagcugccgcccgccuacaccaacagcuucacccggggcgucuacuaccccgacaagguguuccgcuccagcgugcugcacuccacccaggaccucuuccugcccuucuucagcaacgucacgugguuccacgccauccacguguccgggaccaacggcaccaagcgguucgacaacccggugcugcccuucaacgacggggucuacuucgcgagcaccgagaaguccaacaucauccgcggcuggaucuucgggacgacccucgacagcaagacccagucccugcugaucgugaacaacgccaccaacguggucaucaaggugugcgaguuccaguucugcaacgaccccuuccucggcguguacuaccacaagaacaacaagagcuggauggaguccgaguuccgggucuacagcuccgccaacaacugcacguucgaguacgugagccagcccuuccugauggaccuggagggcaagcaggggaacuucaagaaccuccgcgaguucguguucaagaacaucgacggcuacuucaagaucuacuccaagcacaccccgaucaaccugguccgggaccugccccagggguucagcgcccucgagccccugguggaccugcccaucggcaucaacaucacccgcuuccagacccuccuggcccugcaccgguccuaccucacgccgggggacagcagcuccggcuggaccgcgggcgccgccgccuacuacgugggguaccugcagccccgcaccuuccugcucaaguacaacgagaacggcaccaucacggacgcggucgacugcgcccuggacccccugagcgagaccaagugcacccucaaguccuucaccguggagaaggggaucuaccagacgagcaacuuccgggugcagcccaccgaguccaucguccgcuucccgaacaucaccaaccugugccccuucggcgagguguucaacgccacccgguucgccagcgucuacgccuggaaccgcaagcggaucuccaacugcguggcggacuacagcgugcuguacaacuccgccagcuucuccacguucaagugcuacggcgucagccccaccaagcucaacgaccugugcuucaccaacguguacgccgacuccuucgugauccgcggggacgagguccggcagaucgcccccggccagaccgggaagaucgccgacuacaacuacaagcugccggacgacuucacgggcugcgugaucgcguggaacagcaacaaccucgacuccaaggucgggggcaacuacaacuaccuguaccgccuguuccgcaagagcaaccucaagcccuucgagcgggacaucuccaccgagaucuaccaggccggcagcacccccugcaacgggguggagggcuucaacugcuacuucccccugcaguccuacggguuccagccgaccaacggcgugggguaccagcccuaccggguggucgugcugagcuucgagcuccugcacgcccccgccacggugugcggccccaagaaguccaccaaccuggucaagaacaagugcgugaacuucaacuucaacggccucaccgggaccggcgugcugaccgagagcaacaagaaguuccugccguuccagcaguucgggcgcgacaucgccgacacgaccgacgcgguccgcgacccccagacccuggagauccucgacaucacccccugcagcuucggcgggguguccgugaucacgccgggcaccaacaccagcaaccaggucgccgugcuguaccaggacgugaacugcaccgagguccccguggccauccacgccgaccagcugacgcccaccuggcggguguacuccaccggcagcaacgucuuccagacccgcgccgggugccucaucggcgcggagcacgugaacaacuccuacgagugcgacauccccaucggggccggcaucugcgccagcuaccagacgcagaccaacuccccgcggcgcgcccggagcguggcgucccagagcaucaucgccuacaccaugucccugggcgccgagaacagcgucgccuacuccaacaacagcaucgccauccccaccaacuucacgaucuccgugaccaccgagauccugcccgugagcaugaccaagacgagcgucgacugcaccauguacaucugcggggacuccaccgagugcagcaaccuccugcugcaguacggcuccuucugcacccagcucaaccgcgcgcugacggggaucgccguggagcaggacaagaacacccaggagguguucgcccaggucaagcagaucuacaagacgcccccgaucaaggacuucggcggguucaacuucagccagauccugcccgaccccuccaagcccagcaagcgguccuucaucgaggaccuccuguucaacaaggugacccuggccgacgccggcuucaucaagcaguacggcgacugccucggggacaucgcggcccgcgaccugaucugcgcccagaaguucaacggccugaccgugcucccgccccugcugaccgacgagaugaucgcccaguacaccagcgcccuccuggcggggaccaucacguccggcuggaccuucggggccggcgccgcccugcagauccccuucgcgaugcagauggccuaccgguucaacggcugcggggucacccagaacgugcucuacgagaaccagaagcugaucgccaaccaguucaacagcgccaucggcaagauccaggacucccugagcuccaccgccagcgcgcucgggaagcugcaggacguggucaaccagaacgcccaggcccugaacacgcucgugaagcagcuguccagcaacuucggcgccaucuccagcgugcugaacgacauccucucccgccuggacaaggucgaggccgaggugcagaucgaccggcugaucaccgggcgccuccagagccugcagaccuacgugacccagcagcugauccgggcggccgagauccgcgccagcgccaaccucgccgcgaccaagauguccgagugcguccugggccagagcaagcggguggacuucugcggcaaggggugccaccugauguccuucccccagagcgccccgcacggcguggucuuccuccacgugacguacguccccgcccaggagaagaacuucaccaccgcccccgcgaucugccacgacgggaaggcccacuucccccgcgagggcguguucguguccaacgggacccacugguucgucacgcagcggaacuucuacgagccgcagaucaucaccaccgacaacaccuucgugagcggcaacugcgacguggucaucggcaucgugaacaacacgguguacgacccccugcagcccgagcuggacuccuucaaggaggagcucgacaaguacuucaagaaccacaccagccccgacgucgaccugggggacaucuccggcaucaacgccagcguggugaacauccagaaggagaucgaccgccugaacgaggucgccaagaaccucaacgagucccugaucgaccugcaggagcucgggaaguacgagcaguacaucaagggcgggggcgggagcgacaucgaccccuacaaggaguucggcagcuccuaccagcugcucaacuuccugccccuggacuucuuccccgaccucaacgcccugguggacaccgccaccgcgcuguacgaggaggagcucacggggcgcgagcacugcagcccccaccacaccgccauccggcaggcccuggucugcugggacgagcugaccaagcucaucgccuggauguccagcaacaucaccuccgagcagguccgcacgaucaucgugaaccacgucaacgacaccuggggccugaaggugcggcagagccugugguuccaccucuccugccugaccuucgggcagcacaccgugcaggaguuccuggucagcuucggcguguggauccgcacgcccgccccguaccggccgcccaacgcgccgauccucuccacccugccggagcacaccgugaucugcugaggacuaguuauaagacugacuagcccgaugggccucccaacgggcccuccuccccuccuugcaccgagauuaauaaaaaaaaaaaaaaaaaaaaaaaaaaaaaaaaaaaaaaaaaaaaaaaaaaaaaaaaaaaaaaaaugcaucccccccccccccccccccccccccccccccaaaggcucuuuucagagccaccagaauu

SEQ ID NO: 12880 - RNA, 4315 nt, Artificial Sequence
  SARS-CoV-2/Wuhan/WIV05/2019__EPI_ISL_402128 spike protein mRNA gc (1-1211)(Q965C_S1003C) WhcAg construct
aggagaaagcuuaccauguucguguuccugguccuccugccccuggugagcucccagugcgugaaccucaccacccgcacgcagcugccgcccgccuacaccaacagcuucacccggggcgucuacuaccccgacaagguguuccgcuccagcgugcugcacuccacccaggaccucuuccugcccuucuucagcaacgucacgugguuccacgccauccacguguccgggaccaacggcaccaagcgguucgacaacccggugcugcccuucaacgacggggucuacuucgcgagcaccgagaaguccaacaucauccgcggcuggaucuucgggacgacccucgacagcaagacccagucccugcugaucgugaacaacgccaccaacguggucaucaaggugugcgaguuccaguucugcaacgaccccuuccucggcguguacuaccacaagaacaacaagagcuggauggaguccgaguuccgggucuacagcuccgccaacaacugcacguucgaguacgugagccagcccuuccugauggaccuggagggcaagcaggggaacuucaagaaccuccgcgaguucguguucaagaacaucgacggcuacuucaagaucuacuccaagcacaccccgaucaaccugguccgggaccugccccagggguucagcgcccucgagccccugguggaccugcccaucggcaucaacaucacccgcuuccagacccuccuggcccugcaccgguccuaccucacgccgggggacagcagcuccggcuggaccgcgggcgccgccgccuacuacgugggguaccugcagccccgcaccuuccugcucaaguacaacgagaacggcaccaucacggacgcggucgacugcgcccuggacccccugagcgagaccaagugcacccucaaguccuucaccguggagaaggggaucuaccagacgagcaacuuccgggugcagcccaccgaguccaucguccgcuucccgaacaucaccaaccugugccccuucggcgagguguucaacgccacccgguucgccagcgucuacgccuggaaccgcaagcggaucuccaacugcguggcggacuacagcgugcuguacaacuccgccagcuucuccacguucaagugcuacggcgucagccccaccaagcucaacgaccugugcuucaccaacguguacgccgacuccuucgugauccgcggggacgagguccggcagaucgcccccggccagaccgggaagaucgccgacuacaacuacaagcugccggacgacuucacgggcugcgugaucgcguggaacagcaacaaccucgacuccaaggucgggggcaacuacaacuaccuguaccgccuguuccgcaagagcaaccucaagcccuucgagcgggacaucuccaccgagaucuaccaggccggcagcacccccugcaacgggguggagggcuucaacugcuacuucccccugcaguccuacggguuccagccgaccaacggcgugggguaccagcccuaccggguggucgugcugagcuucgagcuccugcacgcccccgccacggugugcggccccaagaaguccaccaaccuggucaagaacaagugcgugaacuucaacuucaacggccucaccgggaccggcgugcugaccgagagcaacaagaaguuccugccguuccagcaguucgggcgcgacaucgccgacacgaccgacgcgguccgcgacccccagacccuggagauccucgacaucacccccugcagcuucggcgggguguccgugaucacgccgggcaccaacaccagcaaccaggucgccgugcuguaccaggacgugaacugcaccgagguccccguggccauccacgccgaccagcugacgcccaccuggcggguguacuccaccggcagcaacgucuuccagacccgcgccgggugccucaucggcgcggagcacgugaacaacuccuacgagugcgacauccccaucggggccggcaucugcgccagcuaccagacgcagaccaacuccccgcggcgcgcccggagcguggcgucccagagcaucaucgccuacaccaugucccugggcgccgagaacagcgucgccuacuccaacaacagcaucgccauccccaccaacuucacgaucuccgugaccaccgagauccugcccgugagcaugaccaagacgagcgucgacugcaccauguacaucugcggggacuccaccgagugcagcaaccuccugcugcaguacggcuccuucugcacccagcucaaccgcgcgcugacggggaucgccguggagcaggacaagaacacccaggagguguucgcccaggucaagcagaucuacaagacgcccccgaucaaggacuucggcggguucaacuucagccagauccugcccgaccccuccaagcccagcaagcgguccuucaucgaggaccuccuguucaacaaggugacccuggccgacgccggcuucaucaagcaguacggcgacugccucggggacaucgcggcccgcgaccugaucugcgcccagaaguucaacggccugaccgugcucccgccccugcugaccgacgagaugaucgcccaguacaccagcgcccuccuggcggggaccaucacguccggcuggaccuucggggccggcgccgcccugcagauccccuucgcgaugcagauggccuaccgguucaacggcaucggggucacccagaacgugcucuacgagaaccagaagcugaucgccaaccaguucaacagcgccaucggcaagauccaggacucccugagcuccaccgccagcgcgcucgggaagcugcaggacguggucaaccagaacgcccaggcccugaacacgcucgugaagugccuguccagcaacuucggcgccaucuccagcgugcugaacgacauccucucccgccuggacaaggucgaggccgaggugcagaucgaccggcugaucaccgggcgccuccagugccugcagaccuacgugacccagcagcugauccgggcggccgagauccgcgccagcgccaaccucgccgcgaccaagauguccgagugcguccugggccagagcaagcggguggacuucugcggcaagggguaccaccugauguccuucccccagagcgccccgcacggcguggucuuccuccacgugacguacguccccgcccaggagaagaacuucaccaccgcccccgcgaucugccacgacgggaaggcccacuucccccgcgagggcguguucguguccaacgggacccacugguucgucacgcagcggaacuucuacgagccgcagaucaucaccaccgacaacaccuucgugagcggcaacugcgacguggucaucggcaucgugaacaacacgguguacgacccccugcagcccgagcuggacuccuucaaggaggagcucgacaaguacuucaagaaccacaccagccccgacgucgaccugggggacaucuccggcaucaacgccagcguggugaacauccagaaggagaucgaccgccugaacgaggucgccaagaaccucaacgagucccugaucgaccugcaggagcucgggaaguacgagcaguacaucaagggcgggggcgggagcgacaucgaccccuacaaggaguucggcagcuccuaccagcugcucaacuuccugccccuggacuucuuccccgaccucaacgcccugguggacaccgccaccgcgcuguacgaggaggagcucacggggcgcgagcacugcagcccccaccacaccgccauccggcaggcccuggucugcugggacgagcugaccaagcucaucgccuggauguccagcaacaucaccuccgagcagguccgcacgaucaucgugaaccacgucaacgacaccuggggccugaaggugcggcagagccugugguuccaccucuccugccugaccuucgggcagcacaccgugcaggaguuccuggucagcuucggcguguggauccgcacgcccgccccguaccggccgcccaacgcgccgauccucuccacccugccggagcacaccgugaucugcugaggacuaguuauaagacugacuagcccgaugggccucccaacgggcccuccuccccuccuugcaccgagauuaauaaaaaaaaaaaaaaaaaaaaaaaaaaaaaaaaaaaaaaaaaaaaaaaaaaaaaaaaaaaaaaaaugcaucccccccccccccccccccccccccccccccaaaggcucuuuucagagccaccagaauu

SEQ ID NO: 12881 - RNA, 4315 nt, Artificial Sequence
  SARS-CoV-2/Wuhan/WIV05/2019__EPI_ISL_402128 spike protein mRNA gc (1-1211)(F970C_G999C) WhcAg construct
aggagaaagcuuaccauguucguguuccugguccuccugccccuggugagcucccagugcgugaaccucaccacccgcacgcagcugccgcccgccuacaccaacagcuucacccggggcgucuacuaccccgacaagguguuccgcuccagcgugcugcacuccacccaggaccucuuccugcccuucuucagcaacgucacgugguuccacgccauccacguguccgggaccaacggcaccaagcgguucgacaacccggugcugcccuucaacgacggggucuacuucgcgagcaccgagaaguccaacaucauccgcggcuggaucuucgggacgacccucgacagcaagacccagucccugcugaucgugaacaacgccaccaacguggucaucaaggugugcgaguuccaguucugcaacgaccccuuccucggcguguacuaccacaagaacaacaagagcuggauggaguccgaguuccgggucuacagcuccgccaacaacugcacguucgaguacgugagccagcccuuccugauggaccuggagggcaagcaggggaacuucaagaaccuccgcgaguucguguucaagaacaucgacggcuacuucaagaucuacuccaagcacaccccgaucaaccugguccgggaccugccccagggguucagcgcccucgagccccugguggaccugcccaucggcaucaacaucacccgcuuccagacccuccuggcccugcaccgguccuaccucacgccgggggacagcagcuccggcuggaccgcgggcgccgccgccuacuacgugggguaccugcagccccgcaccuuccugcucaaguacaacgagaacggcaccaucacggacgcggucgacugcgcccuggacccccugagcgagaccaagugcacccucaaguccuucaccguggagaaggggaucuaccagacgagcaacuuccgggugcagcccaccgaguccaucguccgcuucccgaacaucaccaaccugugccccuucggcgagguguucaacgccacccgguucgccagcgucuacgccuggaaccgcaagcggaucuccaacugcguggcggacuacagcgugcuguacaacuccgccagcuucuccacguucaagugcuacggcgucagccccaccaagcucaacgaccugugcuucaccaacguguacgccgacuccuucgugauccgcggggacgagguccggcagaucgcccccggccagaccgggaagaucgccgacuacaacuacaagcugccggacgacuucacgggcugcgugaucgcguggaacagcaacaaccucgacuccaaggucgggggcaacuacaacuaccuguaccgccuguuccgcaagagcaaccucaagcccuucgagcgggacaucuccaccgagaucuaccaggccggcagcacccccugcaacgggguggagggcuucaacugcuacuucccccugcaguccuacggguuccagccgaccaacggcgugggguaccagcccuaccggguggucgugcugagcuucgagcuccugcacgcccccgccacggugugcggccccaagaaguccaccaaccuggucaagaacaagugcgugaacuucaacuucaacggccucaccgggaccggcgugcugaccgagagcaacaagaaguuccugccguuccagcaguucgggcgcgacaucgccgacacgaccgacgcgguccgcgacccccagacccuggagauccucgacaucacccccugcagcuucggcgggguguccgugaucacgccgggcaccaacaccagcaaccaggucgccgugcuguaccaggacgugaacugcaccgagguccccguggccauccacgccgaccagcugacgcccaccuggcggguguacuccaccggcagcaacgucuuccagacccgcgccgggugccucaucggcgcggagcacgugaacaacuccuacgagugcgacauccccaucggggccggcaucugcgccagcuaccagacgcagaccaacuccccgcggcgcgcccggagcguggcgucccagagcaucaucgccuacaccaugucccugggcgccgagaacagcgucgccuacuccaacaacagcaucgccauccccaccaacuucacgaucuccgugaccaccgagauccugcccgugagcaugaccaagacgagcgucgacugcaccauguacaucugcggggacuccaccgagugcagcaaccuccugcugcaguacggcuccuucugcacccagcucaaccgcgcgcugacggggaucgccguggagcaggacaagaacacccaggagguguucgcccaggucaagcagaucuacaagacgcccccgaucaaggacuucggcggguucaacuucagccagauccugcccgaccccuccaagcccagcaagcgguccuucaucgaggaccuccuguucaacaaggugacccuggccgacgccggcuucaucaagcaguacggcgacugccucggggacaucgcggcccgcgaccugaucugcgcccagaaguucaacggccugaccgugcucccgccccugcugaccgacgagaugaucgcccaguacaccagcgcccuccuggcggggaccaucacguccggcuggaccuucggggccggcgccgcccugcagauccccuucgcgaugcagauggccuaccgguucaacggcaucggggucacccagaacgugcucuacgagaaccagaagcugaucgccaaccaguucaacagcgccaucggcaagauccaggacucccugagcuccaccgccagcgcgcucgggaagcugcaggacguggucaaccagaacgcccaggcccugaacacgcucgugaagcagcuguccagcaacugcggcgccaucuccagcgugcugaacgacauccucucccgccuggacaaggucgaggccgaggugcagaucgaccggcugaucaccugucgccuccagagccugcagaccuacgugacccagcagcugauccgggcggccgagauccgcgccagcgccaaccucgccgcgaccaagauguccgagugcguccugggccagagcaagcggguggacuucugcggcaagggguaccaccugauguccuucccccagagcgccccgcacggcguggucuuccuccacgugacguacguccccgcccaggagaagaacuucaccaccgcccccgcgaucugccacgacgggaaggcccacuucccccgcgagggcguguucguguccaacgggacccacugguucgucacgcagcggaacuucuacgagccgcagaucaucaccaccgacaacaccuucgugagcggcaacugcgacguggucaucggcaucgugaacaacacgguguacgacccccugcagcccgagcuggacuccuucaaggaggagcucgacaaguacuucaagaaccacaccagccccgacgucgaccugggggacaucuccggcaucaacgccagcguggugaacauccagaaggagaucgaccgccugaacgaggucgccaagaaccucaacgagucccugaucgaccugcaggagcucgggaaguacgagcaguacaucaagggcgggggcgggagcgacaucgaccccuacaaggaguucggcagcuccuaccagcugcucaacuuccugccccuggacuucuuccccgaccucaacgcccugguggacaccgccaccgcgcuguacgaggaggagcucacggggcgcgagcacugcagcccccaccacaccgccauccggcaggcccuggucugcugggacgagcugaccaagcucaucgccuggauguccagcaacaucaccuccgagcagguccgcacgaucaucgugaaccacgucaacgacaccuggggccugaaggugcggcagagccugugguuccaccucuccugccugaccuucgggcagcacaccgugcaggaguuccuggucagcuucggcguguggauccgcacgcccgccccguaccggccgcccaacgcgccgauccucuccacccugccggagcacaccgugaucugcugaggacuaguuauaagacugacuagcccgaugggccucccaacgggcccuccuccccuccuugcaccgagauuaauaaaaaaaaaaaaaaaaaaaaaaaaaaaaaaaaaaaaaaaaaaaaaaaaaaaaaaaaaaaaaaaaugcaucccccccccccccccccccccccccccccccaaaggcucuuuucagagccaccagaauu

SEQ ID NO: 12882 - RNA, 4315 nt, Artificial Sequence
  SARS-CoV-2/Wuhan/WIV05/2019__EPI_ISL_402128 spike protein mRNA gc (1-1211)(A972C_R995C) WhcAg construct
aggagaaagcuuaccauguucguguuccugguccuccugccccuggugagcucccagugcgugaaccucaccacccgcacgcagcugccgcccgccuacaccaacagcuucacccggggcgucuacuaccccgacaagguguuccgcuccagcgugcugcacuccacccaggaccucuuccugcccuucuucagcaacgucacgugguuccacgccauccacguguccgggaccaacggcaccaagcgguucgacaacccggugcugcccuucaacgacggggucuacuucgcgagcaccgagaaguccaacaucauccgcggcuggaucuucgggacgacccucgacagcaagacccagucccugcugaucgugaacaacgccaccaacguggucaucaaggugugcgaguuccaguucugcaacgaccccuuccucggcguguacuaccacaagaacaacaagagcuggauggaguccgaguuccgggucuacagcuccgccaacaacugcacguucgaguacgugagccagcccuuccugauggaccuggagggcaagcaggggaacuucaagaaccuccgcgaguucguguucaagaacaucgacggcuacuucaagaucuacuccaagcacaccccgaucaaccugguccgggaccugccccagggguucagcgcccucgagccccugguggaccugcccaucggcaucaacaucacccgcuuccagacccuccuggcccugcaccgguccuaccucacgccgggggacagcagcuccggcuggaccgcgggcgccgccgccuacuacgugggguaccugcagccccgcaccuuccugcucaaguacaacgagaacggcaccaucacggacgcggucgacugcgcccuggacccccugagcgagaccaagugcacccucaaguccuucaccguggagaaggggaucuaccagacgagcaacuuccgggugcagcccaccgaguccaucguccgcuucccgaacaucaccaaccugugccccuucggcgagguguucaacgccacccgguucgccagcgucuacgccuggaaccgcaagcggaucuccaacugcguggcggacuacagcgugcuguacaacuccgccagcuucuccacguucaagugcuacggcgucagccccaccaagcucaacgaccugugcuucaccaacguguacgccgacuccuucgugauccgcggggacgagguccggcagaucgcccccggccagaccgggaagaucgccgacuacaacuacaagcugccggacgacuucacgggcugcgugaucgcguggaacagcaacaaccucgacuccaaggucgggggcaacuacaacuaccuguaccgccuguuccgcaagagcaaccucaagcccuucgagcgggacaucuccaccgagaucuaccaggccggcagcacccccugcaacgggguggagggcuucaacugcuacuucccccugcaguccuacggguuccagccgaccaacggcgugggguaccagcccuaccggguggucgugcugagcuucgagcuccugcacgcccccgccacggugugcggccccaagaaguccaccaaccuggucaagaacaagugcgugaacuucaacuucaacggccucaccgggaccggcgugcugaccgagagcaacaagaaguuccugccguuccagcaguucgggcgcgacaucgccgacacgaccgacgcgguccgcgacccccagacccuggagauccucgacaucacccccugcagcuucggcgggguguccgugaucacgccgggcaccaacaccagcaaccaggucgccgugcuguaccaggacgugaacugcaccgagguccccguggccauccacgccgaccagcugacgcccaccuggcggguguacuccaccggcagcaacgucuuccagacccgcgccgggugccucaucggcgcggagcacgugaacaacuccuacgagugcgacauccccaucggggccggcaucugcgccagcuaccagacgcagaccaacuccccgcggcgcgcccggagcguggcgucccagagcaucaucgccuacaccaugucccugggcgccgagaacagcgucgccuacuccaacaacagcaucgccauccccaccaacuucacgaucuccgugaccaccgagauccugcccgugagcaugaccaagacgagcgucgacugcaccauguacaucugcggggacuccaccgagugcagcaaccuccugcugcaguacggcuccuucugcacccagcucaaccgcgcgcugacggggaucgccguggagcaggacaagaacacccaggagguguucgcccaggucaagcagaucuacaagacgcccccgaucaaggacuucggcggguucaacuucagccagauccugcccgaccccuccaagcccagcaagcgguccuucaucgaggaccuccuguucaacaaggugacccuggccgacgccggcuucaucaagcaguacggcgacugccucggggacaucgcggcccgcgaccugaucugcgcccagaaguucaacggccugaccgugcucccgccccugcugaccgacgagaugaucgcccaguacaccagcgcccuccuggcggggaccaucacguccggcuggaccuucggggccggcgccgcccugcagauccccuucgcgaugcagauggccuaccgguucaacggcaucggggucacccagaacgugcucuacgagaaccagaagcugaucgccaaccaguucaacagcgccaucggcaagauccaggacucccugagcuccaccgccagcgcgcucgggaagcugcaggacguggucaaccagaacgcccaggcccugaacacgcucgugaagcagcuguccagcaacuucggcugcaucuccagcgugcugaacgacauccucucccgccuggacaaggucgaggccgaggugcagaucgacugccugaucaccgggcgccuccagagccugcagaccuacgugacccagcagcugauccgggcggccgagauccgcgccagcgccaaccucgccgcgaccaagauguccgagugcguccugggccagagcaagcggguggacuucugcggcaagggguaccaccugauguccuucccccagagcgccccgcacggcguggucuuccuccacgugacguacguccccgcccaggagaagaacuucaccaccgcccccgcgaucugccacgacgggaaggcccacuucccccgcgagggcguguucguguccaacgggacccacugguucgucacgcagcggaacuucuacgagccgcagaucaucaccaccgacaacaccuucgugagcggcaacugcgacguggucaucggcaucgugaacaacacgguguacgacccccugcagcccgagcuggacuccuucaaggaggagcucgacaaguacuucaagaaccacaccagccccgacgucgaccugggggacaucuccggcaucaacgccagcguggugaacauccagaaggagaucgaccgccugaacgaggucgccaagaaccucaacgagucccugaucgaccugcaggagcucgggaaguacgagcaguacaucaagggcgggggcgggagcgacaucgaccccuacaaggaguucggcagcuccuaccagcugcucaacuuccugccccuggacuucuuccccgaccucaacgcccugguggacaccgccaccgcgcuguacgaggaggagcucacggggcgcgagcacugcagcccccaccacaccgccauccggcaggcccuggucugcugggacgagcugaccaagcucaucgccuggauguccagcaacaucaccuccgagcagguccgcacgaucaucgugaaccacgucaacgacaccuggggccugaaggugcggcagagccugugguuccaccucuccugccugaccuucgggcagcacaccgugcaggaguuccuggucagcuucggcguguggauccgcacgcccgccccguaccggccgcccaacgcgccgauccucuccacccugccggagcacaccgugaucugcugaggacuaguuauaagacugacuagcccgaugggccucccaacgggcccuccuccccuccuugcaccgagauuaauaaaaaaaaaaaaaaaaaaaaaaaaaaaaaaaaaaaaaaaaaaaaaaaaaaaaaaaaaaaaaaaaugcaucccccccccccccccccccccccccccccccaaaggcucuuuucagagccaccagaauu

SEQ ID NO: 12883 - RNA, 4315 nt, Artificial Sequence
  SARS-CoV-2/Wuhan/WIV05/2019__EPI_ISL_402128 spike protein mRNA gc (1-1211)(A890C_V1040C) WhcAg construct
aggagaaagcuuaccauguucguguuccugguccuccugccccuggugagcucccagugcgugaaccucaccacccgcacgcagcugccgcccgccuacaccaacagcuucacccggggcgucuacuaccccgacaagguguuccgcuccagcgugcugcacuccacccaggaccucuuccugcccuucuucagcaacgucacgugguuccacgccauccacguguccgggaccaacggcaccaagcgguucgacaacccggugcugcccuucaacgacggggucuacuucgcgagcaccgagaaguccaacaucauccgcggcuggaucuucgggacgacccucgacagcaagacccagucccugcugaucgugaacaacgccaccaacguggucaucaaggugugcgaguuccaguucugcaacgaccccuuccucggcguguacuaccacaagaacaacaagagcuggauggaguccgaguuccgggucuacagcuccgccaacaacugcacguucgaguacgugagccagcccuuccugauggaccuggagggcaagcaggggaacuucaagaaccuccgcgaguucguguucaagaacaucgacggcuacuucaagaucuacuccaagcacaccccgaucaaccugguccgggaccugccccagggguucagcgcccucgagccccugguggaccugcccaucggcaucaacaucacccgcuuccagacccuccuggcccugcaccgguccuaccucacgccgggggacagcagcuccggcuggaccgcgggcgccgccgccuacuacgugggguaccugcagccccgcaccuuccugcucaaguacaacgagaacggcaccaucacggacgcggucgacugcgcccuggacccccugagcgagaccaagugcacccucaaguccuucaccguggagaaggggaucuaccagacgagcaacuuccgggugcagcccaccgaguccaucguccgcuucccgaacaucaccaaccugugccccuucggcgagguguucaacgccacccgguucgccagcgucuacgccuggaaccgcaagcggaucuccaacugcguggcggacuacagcgugcuguacaacuccgccagcuucuccacguucaagugcuacggcgucagccccaccaagcucaacgaccugugcuucaccaacguguacgccgacuccuucgugauccgcggggacgagguccggcagaucgcccccggccagaccgggaagaucgccgacuacaacuacaagcugccggacgacuucacgggcugcgugaucgcguggaacagcaacaaccucgacuccaaggucgggggcaacuacaacuaccuguaccgccuguuccgcaagagcaaccucaagcccuucgagcgggacaucuccaccgagaucuaccaggccggcagcacccccugcaacgggguggagggcuucaacugcuacuucccccugcaguccuacggguuccagccgaccaacggcgugggguaccagcccuaccggguggucgugcugagcuucgagcuccugcacgcccccgccacggugugcggccccaagaaguccaccaaccuggucaagaacaagugcgugaacuucaacuucaacggccucaccgggaccggcgugcugaccgagagcaacaagaaguuccugccguuccagcaguucgggcgcgacaucgccgacacgaccgacgcgguccgcgacccccagacccuggagauccucgacaucacccccugcagcuucggcgggguguccgugaucacgccgggcaccaacaccagcaaccaggucgccgugcuguaccaggacgugaacugcaccgagguccccguggccauccacgccgaccagcugacgcccaccuggcggguguacuccaccggcagcaacgucuuccagacccgcgccgggugccucaucggcgcggagcacgugaacaacuccuacgagugcgacauccccaucggggccggcaucugcgccagcuaccagacgcagaccaacuccccgcggcgcgcccggagcguggcgucccagagcaucaucgccuacaccaugucccugggcgccgagaacagcgucgccuacuccaacaacagcaucgccauccccaccaacuucacgaucuccgugaccaccgagauccugcccgugagcaugaccaagacgagcgucgacugcaccauguacaucugcggggacuccaccgagugcagcaaccuccugcugcaguacggcuccuucugcacccagcucaaccgcgcgcugacggggaucgccguggagcaggacaagaacacccaggagguguucgcccaggucaagcagaucuacaagacgcccccgaucaaggacuucggcggguucaacuucagccagauccugcccgaccccuccaagcccagcaagcgguccuucaucgaggaccuccuguucaacaaggugacccuggccgacgccggcuucaucaagcaguacggcgacugccucggggacaucgcggcccgcgaccugaucugcgcccagaaguucaacggccugaccgugcucccgccccugcugaccgacgagaugaucgcccaguacaccagcgcccuccuggcggggaccaucacguccggcuggaccuucgggugcggcgccgcccugcagauccccuucgcgaugcagauggccuaccgguucaacggcaucggggucacccagaacgugcucuacgagaaccagaagcugaucgccaaccaguucaacagcgccaucggcaagauccaggacucccugagcuccaccgccagcgcgcucgggaagcugcaggacguggucaaccagaacgcccaggcccugaacacgcucgugaagcagcuguccagcaacuucggcgccaucuccagcgugcugaacgacauccucucccgccuggacaaggucgaggccgaggugcagaucgaccggcugaucaccgggcgccuccagagccugcagaccuacgugacccagcagcugauccgggcggccgagauccgcgccagcgccaaccucgccgcgaccaagauguccgagugcguccugggccagagcaagcggugcgacuucugcggcaagggguaccaccugauguccuucccccagagcgccccgcacggcguggucuuccuccacgugacguacguccccgcccaggagaagaacuucaccaccgcccccgcgaucugccacgacgggaaggcccacuucccccgcgagggcguguucguguccaacgggacccacugguucgucacgcagcggaacuucuacgagccgcagaucaucaccaccgacaacaccuucgugagcggcaacugcgacguggucaucggcaucgugaacaacacgguguacgacccccugcagcccgagcuggacuccuucaaggaggagcucgacaaguacuucaagaaccacaccagccccgacgucgaccugggggacaucuccggcaucaacgccagcguggugaacauccagaaggagaucgaccgccugaacgaggucgccaagaaccucaacgagucccugaucgaccugcaggagcucgggaaguacgagcaguacaucaagggcgggggcgggagcgacaucgaccccuacaaggaguucggcagcuccuaccagcugcucaacuuccugccccuggacuucuuccccgaccucaacgcccugguggacaccgccaccgcgcuguacgaggaggagcucacggggcgcgagcacugcagcccccaccacaccgccauccggcaggcccuggucugcugggacgagcugaccaagcucaucgccuggauguccagcaacaucaccuccgagcagguccgcacgaucaucgugaaccacgucaacgacaccuggggccugaaggugcggcagagccugugguuccaccucuccugccugaccuucgggcagcacaccgugcaggaguuccuggucagcuucggcguguggauccgcacgcccgccccguaccggccgcccaacgcgccgauccucuccacccugccggagcacaccgugaucugcugaggacuaguuauaagacugacuagcccgaugggccucccaacgggcccuccuccccuccuugcaccgagauuaauaaaaaaaaaaaaaaaaaaaaaaaaaaaaaaaaaaaaaaaaaaaaaaaaaaaaaaaaaaaaaaaaugcaucccccccccccccccccccccccccccccccaaaggcucuuuucagagccaccagaauu

SEQ ID NO: 12884 - RNA, 4315 nt, Artificial Sequence
  SARS-CoV-2/Wuhan/WIV05/2019__EPI_ISL_402128 spike protein mRNA gc (1-1211)(T874C_S1055C) WhcAg construct
aggagaaagcuuaccauguucguguuccugguccuccugccccuggugagcucccagugcgugaaccucaccacccgcacgcagcugccgcccgccuacaccaacagcuucacccggggcgucuacuaccccgacaagguguuccgcuccagcgugcugcacuccacccaggaccucuuccugcccuucuucagcaacgucacgugguuccacgccauccacguguccgggaccaacggcaccaagcgguucgacaacccggugcugcccuucaacgacggggucuacuucgcgagcaccgagaaguccaacaucauccgcggcuggaucuucgggacgacccucgacagcaagacccagucccugcugaucgugaacaacgccaccaacguggucaucaaggugugcgaguuccaguucugcaacgaccccuuccucggcguguacuaccacaagaacaacaagagcuggauggaguccgaguuccgggucuacagcuccgccaacaacugcacguucgaguacgugagccagcccuuccugauggaccuggagggcaagcaggggaacuucaagaaccuccgcgaguucguguucaagaacaucgacggcuacuucaagaucuacuccaagcacaccccgaucaaccugguccgggaccugccccagggguucagcgcccucgagccccugguggaccugcccaucggcaucaacaucacccgcuuccagacccuccuggcccugcaccgguccuaccucacgccgggggacagcagcuccggcuggaccgcgggcgccgccgccuacuacgugggguaccugcagccccgcaccuuccugcucaaguacaacgagaacggcaccaucacggacgcggucgacugcgcccuggacccccugagcgagaccaagugcacccucaaguccuucaccguggagaaggggaucuaccagacgagcaacuuccgggugcagcccaccgaguccaucguccgcuucccgaacaucaccaaccugugccccuucggcgagguguucaacgccacccgguucgccagcgucuacgccuggaaccgcaagcggaucuccaacugcguggcggacuacagcgugcuguacaacuccgccagcuucuccacguucaagugcuacggcgucagccccaccaagcucaacgaccugugcuucaccaacguguacgccgacuccuucgugauccgcggggacgagguccggcagaucgcccccggccagaccgggaagaucgccgacuacaacuacaagcugccggacgacuucacgggcugcgugaucgcguggaacagcaacaaccucgacuccaaggucgggggcaacuacaacuaccuguaccgccuguuccgcaagagcaaccucaagcccuucgagcgggacaucuccaccgagaucuaccaggccggcagcacccccugcaacgggguggagggcuucaacugcuacuucccccugcaguccuacggguuccagccgaccaacggcgugggguaccagcccuaccggguggucgugcugagcuucgagcuccugcacgcccccgccacggugugcggccccaagaaguccaccaaccuggucaagaacaagugcgugaacuucaacuucaacggccucaccgggaccggcgugcugaccgagagcaacaagaaguuccugccguuccagcaguucgggcgcgacaucgccgacacgaccgacgcgguccgcgacccccagacccuggagauccucgacaucacccccugcagcuucggcgggguguccgugaucacgccgggcaccaacaccagcaaccaggucgccgugcuguaccaggacgugaacugcaccgagguccccguggccauccacgccgaccagcugacgcccaccuggcggguguacuccaccggcagcaacgucuuccagacccgcgccgggugccucaucggcgcggagcacgugaacaacuccuacgagugcgacauccccaucggggccggcaucugcgccagcuaccagacgcagaccaacuccccgcggcgcgcccggagcguggcgucccagagcaucaucgccuacaccaugucccugggcgccgagaacagcgucgccuacuccaacaacagcaucgccauccccaccaacuucacgaucuccgugaccaccgagauccugcccgugagcaugaccaagacgagcgucgacugcaccauguacaucugcggggacuccaccgagugcagcaaccuccugcugcaguacggcuccuucugcacccagcucaaccgcgcgcugacggggaucgccguggagcaggacaagaacacccaggagguguucgcccaggucaagcagaucuacaagacgcccccgaucaaggacuucggcggguucaacuucagccagauccugcccgaccccuccaagcccagcaagcgguccuucaucgaggaccuccuguucaacaaggugacccuggccgacgccggcuucaucaagcaguacggcgacugccucggggacaucgcggcccgcgaccugaucugcgcccagaaguucaacggccugaccgugcucccgccccugcugaccgacgagaugaucgcccaguacugcagcgcccuccuggcggggaccaucacguccggcuggaccuucggggccggcgccgcccugcagauccccuucgcgaugcagauggccuaccgguucaacggcaucggggucacccagaacgugcucuacgagaaccagaagcugaucgccaaccaguucaacagcgccaucggcaagauccaggacucccugagcuccaccgccagcgcgcucgggaagcugcaggacguggucaaccagaacgcccaggcccugaacacgcucgugaagcagcuguccagcaacuucggcgccaucuccagcgugcugaacgacauccucucccgccuggacaaggucgaggccgaggugcagaucgaccggcugaucaccgggcgccuccagagccugcagaccuacgugacccagcagcugauccgggcggccgagauccgcgccagcgccaaccucgccgcgaccaagauguccgagugcguccugggccagagcaagcggguggacuucugcggcaagggguaccaccugauguccuucccccagugcgccccgcacggcguggucuuccuccacgugacguacguccccgcccaggagaagaacuucaccaccgcccccgcgaucugccacgacgggaaggcccacuucccccgcgagggcguguucguguccaacgggacccacugguucgucacgcagcggaacuucuacgagccgcagaucaucaccaccgacaacaccuucgugagcggcaacugcgacguggucaucggcaucgugaacaacacgguguacgacccccugcagcccgagcuggacuccuucaaggaggagcucgacaaguacuucaagaaccacaccagccccgacgucgaccugggggacaucuccggcaucaacgccagcguggugaacauccagaaggagaucgaccgccugaacgaggucgccaagaaccucaacgagucccugaucgaccugcaggagcucgggaaguacgagcaguacaucaagggcgggggcgggagcgacaucgaccccuacaaggaguucggcagcuccuaccagcugcucaacuuccugccccuggacuucuuccccgaccucaacgcccugguggacaccgccaccgcgcuguacgaggaggagcucacggggcgcgagcacugcagcccccaccacaccgccauccggcaggcccuggucugcugggacgagcugaccaagcucaucgccuggauguccagcaacaucaccuccgagcagguccgcacgaucaucgugaaccacgucaacgacaccuggggccugaaggugcggcagagccugugguuccaccucuccugccugaccuucgggcagcacaccgugcaggaguuccuggucagcuucggcguguggauccgcacgcccgccccguaccggccgcccaacgcgccgauccucuccacccugccggagcacaccgugaucugcugaggacuaguuauaagacugacuagcccgaugggccucccaacgggcccuccuccccuccuugcaccgagauuaauaaaaaaaaaaaaaaaaaaaaaaaaaaaaaaaaaaaaaaaaaaaaaaaaaaaaaaaaaaaaaaaaugcaucccccccccccccccccccccccccccccccaaaggcucuuuucagagccaccagaauu

SEQ ID NO: 12885 - RNA, 4141 nt, Artificial Sequence
  SARS-CoV-2/Wuhan/WIV05/2019__EPI_ISL_402128 spike protein mRNA gc (1-1147) LumSynth construct
aggagaaagcuuaccauguucguguuccugguccuccugccccuggugagcucccagugcgugaaccucaccacccgcacgcagcugccgcccgccuacaccaacagcuucacccggggcgucuacuaccccgacaagguguuccgcuccagcgugcugcacuccacccaggaccucuuccugcccuucuucagcaacgucacgugguuccacgccauccacguguccgggaccaacggcaccaagcgguucgacaacccggugcugcccuucaacgacggggucuacuucgcgagcaccgagaaguccaacaucauccgcggcuggaucuucgggacgacccucgacagcaagacccagucccugcugaucgugaacaacgccaccaacguggucaucaaggugugcgaguuccaguucugcaacgaccccuuccucggcguguacuaccacaagaacaacaagagcuggauggaguccgaguuccgggucuacagcuccgccaacaacugcacguucgaguacgugagccagcccuuccugauggaccuggagggcaagcaggggaacuucaagaaccuccgcgaguucguguucaagaacaucgacggcuacuucaagaucuacuccaagcacaccccgaucaaccugguccgggaccugccccagggguucagcgcccucgagccccugguggaccugcccaucggcaucaacaucacccgcuuccagacccuccuggcccugcaccgguccuaccucacgccgggggacagcagcuccggcuggaccgcgggcgccgccgccuacuacgugggguaccugcagccccgcaccuuccugcucaaguacaacgagaacggcaccaucacggacgcggucgacugcgcccuggacccccugagcgagaccaagugcacccucaaguccuucaccguggagaaggggaucuaccagacgagcaacuuccgggugcagcccaccgaguccaucguccgcuucccgaacaucaccaaccugugccccuucggcgagguguucaacgccacccgguucgccagcgucuacgccuggaaccgcaagcggaucuccaacugcguggcggacuacagcgugcuguacaacuccgccagcuucuccacguucaagugcuacggcgucagccccaccaagcucaacgaccugugcuucaccaacguguacgccgacuccuucgugauccgcggggacgagguccggcagaucgcccccggccagaccgggaagaucgccgacuacaacuacaagcugccggacgacuucacgggcugcgugaucgcguggaacagcaacaaccucgacuccaaggucgggggcaacuacaacuaccuguaccgccuguuccgcaagagcaaccucaagcccuucgagcgggacaucuccaccgagaucuaccaggccggcagcacccccugcaacgggguggagggcuucaacugcuacuucccccugcaguccuacggguuccagccgaccaacggcgugggguaccagcccuaccggguggucgugcugagcuucgagcuccugcacgcccccgccacggugugcggccccaagaaguccaccaaccuggucaagaacaagugcgugaacuucaacuucaacggccucaccgggaccggcgugcugaccgagagcaacaagaaguuccugccguuccagcaguucgggcgcgacaucgccgacacgaccgacgcgguccgcgacccccagacccuggagauccucgacaucacccccugcagcuucggcgggguguccgugaucacgccgggcaccaacaccagcaaccaggucgccgugcuguaccaggacgugaacugcaccgagguccccguggccauccacgccgaccagcugacgcccaccuggcggguguacuccaccggcagcaacgucuuccagacccgcgccgggugccucaucggcgcggagcacgugaacaacuccuacgagugcgacauccccaucggggccggcaucugcgccagcuaccagacgcagaccaacuccccgcggcgcgcccggagcguggcgucccagagcaucaucgccuacaccaugucccugggcgccgagaacagcgucgccuacuccaacaacagcaucgccauccccaccaacuucacgaucuccgugaccaccgagauccugcccgugagcaugaccaagacgagcgucgacugcaccauguacaucugcggggacuccaccgagugcagcaaccuccugcugcaguacggcuccuucugcacccagcucaaccgcgcgcugacggggaucgccguggagcaggacaagaacacccaggagguguucgcccaggucaagcagaucuacaagacgcccccgaucaaggacuucggcggguucaacuucagccagauccugcccgaccccuccaagcccagcaagcgguccuucaucgaggaccuccuguucaacaaggugacccuggccgacgccggcuucaucaagcaguacggcgacugccucggggacaucgcggcccgcgaccugaucugcgcccagaaguucaacggccugaccgugcucccgccccugcugaccgacgagaugaucgcccaguacaccagcgcccuccuggcggggaccaucacguccggcuggaccuucggggccggcgccgcccugcagauccccuucgcgaugcagauggccuaccgguucaacggcaucggggucacccagaacgugcucuacgagaaccagaagcugaucgccaaccaguucaacagcgccaucggcaagauccaggacucccugagcuccaccgccagcgcgcucgggaagcugcaggacguggucaaccagaacgcccaggcccugaacacgcucgugaagcagcuguccagcaacuucggcgccaucuccagcgugcugaacgacauccucucccgccuggacaaggucgaggccgaggugcagaucgaccggcugaucaccgggcgccuccagagccugcagaccuacgugacccagcagcugauccgggcggccgagauccgcgccagcgccaaccucgccgcgaccaagauguccgagugcguccugggccagagcaagcggguggacuucugcggcaagggguaccaccugauguccuucccccagagcgccccgcacggcguggucuuccuccacgugacguacguccccgcccaggagaagaacuucaccaccgcccccgcgaucugccacgacgggaaggcccacuucccccgcgagggcguguucguguccaacgggacccacugguucgucacgcagcggaacuucuacgagccgcagaucaucaccaccgacaacaccuucgugagcggcaacugcgacguggucaucggcaucgugaacaacacgguguacgacccccugcagcccgagcuggacuccggcggcgggagcgggggcgggcagaucuacgagggcaagcugaccgccgaggggcuccgcuucggcaucguggccagccgguucaaccacgcgcuggucgaccgccugguggagggggccaucgacgccaucgugcggcacggcgggcgcgaggaggacaucacccucguccgggugcccggcuccugggagaucccgguggccgccggcgagcuggcccgcaaggaggacaucgacgcggucaucgccaucggggugcugauccggggcgccacgccccacuucgacuacaucgccagcgagguguccaaggggcucgcggaccugagccuggagcuccgcaagcccaucaccuucggcgucaucaccgccgacacccuggagcaggccaucgagcgggccgggacgaagcacggcaacaagggcugggaggccgcgcuguccgccaucgagauggccaaccucuucaagagccugcgcugaggacuaguuauaagacugacuagcccgaugggccucccaacgggcccuccuccccuccuugcaccgagauuaauaaaaaaaaaaaaaaaaaaaaaaaaaaaaaaaaaaaaaaaaaaaaaaaaaaaaaaaaaaaaaaaaugcaucccccccccccccccccccccccccccccccaaaggcucuuuucagagccaccagaauu

SEQ ID NO: 12886 - RNA, 4141 nt, Artificial Sequence
  SARS-CoV-2/Wuhan/WIV05/2019__EPI_ISL_402128 spike protein mRNA gc (1-1147)(K986P_V987P) LumSynth construct
aggagaaagcuuaccauguucguguuccugguccuccugccccuggugagcucccagugcgugaaccucaccacccgcacgcagcugccgcccgccuacaccaacagcuucacccggggcgucuacuaccccgacaagguguuccgcuccagcgugcugcacuccacccaggaccucuuccugcccuucuucagcaacgucacgugguuccacgccauccacguguccgggaccaacggcaccaagcgguucgacaacccggugcugcccuucaacgacggggucuacuucgcgagcaccgagaaguccaacaucauccgcggcuggaucuucgggacgacccucgacagcaagacccagucccugcugaucgugaacaacgccaccaacguggucaucaaggugugcgaguuccaguucugcaacgaccccuuccucggcguguacuaccacaagaacaacaagagcuggauggaguccgaguuccgggucuacagcuccgccaacaacugcacguucgaguacgugagccagcccuuccugauggaccuggagggcaagcaggggaacuucaagaaccuccgcgaguucguguucaagaacaucgacggcuacuucaagaucuacuccaagcacaccccgaucaaccugguccgggaccugccccagggguucagcgcccucgagccccugguggaccugcccaucggcaucaacaucacccgcuuccagacccuccuggcccugcaccgguccuaccucacgccgggggacagcagcuccggcuggaccgcgggcgccgccgccuacuacgugggguaccugcagccccgcaccuuccugcucaaguacaacgagaacggcaccaucacggacgcggucgacugcgcccuggacccccugagcgagaccaagugcacccucaaguccuucaccguggagaaggggaucuaccagacgagcaacuuccgggugcagcccaccgaguccaucguccgcuucccgaacaucaccaaccugugccccuucggcgagguguucaacgccacccgguucgccagcgucuacgccuggaaccgcaagcggaucuccaacugcguggcggacuacagcgugcuguacaacuccgccagcuucuccacguucaagugcuacggcgucagccccaccaagcucaacgaccugugcuucaccaacguguacgccgacuccuucgugauccgcggggacgagguccggcagaucgcccccggccagaccgggaagaucgccgacuacaacuacaagcugccggacgacuucacgggcugcgugaucgcguggaacagcaacaaccucgacuccaaggucgggggcaacuacaacuaccuguaccgccuguuccgcaagagcaaccucaagcccuucgagcgggacaucuccaccgagaucuaccaggccggcagcacccccugcaacgggguggagggcuucaacugcuacuucccccugcaguccuacggguuccagccgaccaacggcgugggguaccagcccuaccggguggucgugcugagcuucgagcuccugcacgcccccgccacggugugcggccccaagaaguccaccaaccuggucaagaacaagugcgugaacuucaacuucaacggccucaccgggaccggcgugcugaccgagagcaacaagaaguuccugccguuccagcaguucgggcgcgacaucgccgacacgaccgacgcgguccgcgacccccagacccuggagauccucgacaucacccccugcagcuucggcgggguguccgugaucacgccgggcaccaacaccagcaaccaggucgccgugcuguaccaggacgugaacugcaccgagguccccguggccauccacgccgaccagcugacgcccaccuggcggguguacuccaccggcagcaacgucuuccagacccgcgccgggugccucaucggcgcggagcacgugaacaacuccuacgagugcgacauccccaucggggccggcaucugcgccagcuaccagacgcagaccaacuccccgcggcgcgcccggagcguggcgucccagagcaucaucgccuacaccaugucccugggcgccgagaacagcgucgccuacuccaacaacagcaucgccauccccaccaacuucacgaucuccgugaccaccgagauccugcccgugagcaugaccaagacgagcgucgacugcaccauguacaucugcggggacuccaccgagugcagcaaccuccugcugcaguacggcuccuucugcacccagcucaaccgcgcgcugacggggaucgccguggagcaggacaagaacacccaggagguguucgcccaggucaagcagaucuacaagacgcccccgaucaaggacuucggcggguucaacuucagccagauccugcccgaccccuccaagcccagcaagcgguccuucaucgaggaccuccuguucaacaaggugacccuggccgacgccggcuucaucaagcaguacggcgacugccucggggacaucgcggcccgcgaccugaucugcgcccagaaguucaacggccugaccgugcucccgccccugcugaccgacgagaugaucgcccaguacaccagcgcccuccuggcggggaccaucacguccggcuggaccuucggggccggcgccgcccugcagauccccuucgcgaugcagauggccuaccgguucaacggcaucggggucacccagaacgugcucuacgagaaccagaagcugaucgccaaccaguucaacagcgccaucggcaagauccaggacucccugagcuccaccgccagcgcgcucgggaagcugcaggacguggucaaccagaacgcccaggcccugaacacgcucgugaagcagcuguccagcaacuucggcgccaucuccagcgugcugaacgacauccucucccgccuggacccgcccgaggccgaggugcagaucgaccggcugaucaccgggcgccuccagagccugcagaccuacgugacccagcagcugauccgggcggccgagauccgcgccagcgccaaccucgccgcgaccaagauguccgagugcguccugggccagagcaagcggguggacuucugcggcaagggguaccaccugauguccuucccccagagcgccccgcacggcguggucuuccuccacgugacguacguccccgcccaggagaagaacuucaccaccgcccccgcgaucugccacgacgggaaggcccacuucccccgcgagggcguguucguguccaacgggacccacugguucgucacgcagcggaacuucuacgagccgcagaucaucaccaccgacaacaccuucgugagcggcaacugcgacguggucaucggcaucgugaacaacacgguguacgacccccugcagcccgagcuggacuccggcggcgggagcgggggcgggcagaucuacgagggcaagcugaccgccgaggggcuccgcuucggcaucguggccagccgguucaaccacgcgcuggucgaccgccugguggagggggccaucgacgccaucgugcggcacggcgggcgcgaggaggacaucacccucguccgggugcccggcuccugggagaucccgguggccgccggcgagcuggcccgcaaggaggacaucgacgcggucaucgccaucggggugcugauccggggcgccacgccccacuucgacuacaucgccagcgagguguccaaggggcucgcggaccugagccuggagcuccgcaagcccaucaccuucggcgucaucaccgccgacacccuggagcaggccaucgagcgggccgggacgaagcacggcaacaagggcugggaggccgcgcuguccgccaucgagauggccaaccucuucaagagccugcgcugaggacuaguuauaagacugacuagcccgaugggccucccaacgggcccuccuccccuccuugcaccgagauuaauaaaaaaaaaaaaaaaaaaaaaaaaaaaaaaaaaaaaaaaaaaaaaaaaaaaaaaaaaaaaaaaaugcaucccccccccccccccccccccccccccccccaaaggcucuuuucagagccaccagaauu

SEQ ID NO: 12887 - RNA, 4141 nt, Artificial Sequence
  SARS-CoV-2/Wuhan/WIV05/2019__EPI_ISL_402128 spike protein mRNA gc (1-1147)(K986P_V987P_T887WN_A1020W) LumSynth construct
aggagaaagcuuaccauguucguguuccugguccuccugccccuggugagcucccagugcgugaaccucaccacccgcacgcagcugccgcccgccuacaccaacagcuucacccggggcgucuacuaccccgacaagguguuccgcuccagcgugcugcacuccacccaggaccucuuccugcccuucuucagcaacgucacgugguuccacgccauccacguguccgggaccaacggcaccaagcgguucgacaacccggugcugcccuucaacgacggggucuacuucgcgagcaccgagaaguccaacaucauccgcggcuggaucuucgggacgacccucgacagcaagacccagucccugcugaucgugaacaacgccaccaacguggucaucaaggugugcgaguuccaguucugcaacgaccccuuccucggcguguacuaccacaagaacaacaagagcuggauggaguccgaguuccgggucuacagcuccgccaacaacugcacguucgaguacgugagccagcccuuccugauggaccuggagggcaagcaggggaacuucaagaaccuccgcgaguucguguucaagaacaucgacggcuacuucaagaucuacuccaagcacaccccgaucaaccugguccgggaccugccccagggguucagcgcccucgagccccugguggaccugcccaucggcaucaacaucacccgcuuccagacccuccuggcccugcaccgguccuaccucacgccgggggacagcagcuccggcuggaccgcgggcgccgccgccuacuacgugggguaccugcagccccgcaccuuccugcucaaguacaacgagaacggcaccaucacggacgcggucgacugcgcccuggacccccugagcgagaccaagugcacccucaaguccuucaccguggagaaggggaucuaccagacgagcaacuuccgggugcagcccaccgaguccaucguccgcuucccgaacaucaccaaccugugccccuucggcgagguguucaacgccacccgguucgccagcgucuacgccuggaaccgcaagcggaucuccaacugcguggcggacuacagcgugcuguacaacuccgccagcuucuccacguucaagugcuacggcgucagccccaccaagcucaacgaccugugcuucaccaacguguacgccgacuccuucgugauccgcggggacgagguccggcagaucgcccccggccagaccgggaagaucgccgacuacaacuacaagcugccggacgacuucacgggcugcgugaucgcguggaacagcaacaaccucgacuccaaggucgggggcaacuacaacuaccuguaccgccuguuccgcaagagcaaccucaagcccuucgagcgggacaucuccaccgagaucuaccaggccggcagcacccccugcaacgggguggagggcuucaacugcuacuucccccugcaguccuacggguuccagccgaccaacggcgugggguaccagcccuaccggguggucgugcugagcuucgagcuccugcacgcccccgccacggugugcggccccaagaaguccaccaaccuggucaagaacaagugcgugaacuucaacuucaacggccucaccgggaccggcgugcugaccgagagcaacaagaaguuccugccguuccagcaguucgggcgcgacaucgccgacacgaccgacgcgguccgcgacccccagacccuggagauccucgacaucacccccugcagcuucggcgggguguccgugaucacgccgggcaccaacaccagcaaccaggucgccgugcuguaccaggacgugaacugcaccgagguccccguggccauccacgccgaccagcugacgcccaccuggcggguguacuccaccggcagcaacgucuuccagacccgcgccgggugccucaucggcgcggagcacgugaacaacuccuacgagugcgacauccccaucggggccggcaucugcgccagcuaccagacgcagaccaacuccccgcggcgcgcccggagcguggcgucccagagcaucaucgccuacaccaugucccugggcgccgagaacagcgucgccuacuccaacaacagcaucgccauccccaccaacuucacgaucuccgugaccaccgagauccugcccgugagcaugaccaagacgagcgucgacugcaccauguacaucugcggggacuccaccgagugcagcaaccuccugcugcaguacggcuccuucugcacccagcucaaccgcgcgcugacggggaucgccguggagcaggacaagaacacccaggagguguucgcccaggucaagcagaucuacaagacgcccccgaucaaggacuucggcggguucaacuucagccagauccugcccgaccccuccaagcccagcaagcgguccuucaucgaggaccuccuguucaacaaggugacccuggccgacgccggcuucaucaagcaguacggcgacugccucggggacaucgcggcccgcgaccugaucugcgcccagaaguucaacggccugaccgugcucccgccccugcugaccgacgagaugaucgcccaguacaccagcgcccuccuggcggggaccaucacguccggcuggugguucggggccggcgccgcccugcagauccccuucgcgaugcagauggccuaccgguucaacggcaucggggucacccagaacgugcucuacgagaaccagaagcugaucgccaaccaguucaacagcgccaucggcaagauccaggacucccugagcuccaccgccagcgcgcucgggaagcugcaggacguggucaaccagaacgcccaggcccugaacacgcucgugaagcagcuguccagcaacuucggcgccaucuccagcgugcugaacgacauccucucccgccuggacccgcccgaggccgaggugcagaucgaccggcugaucaccgggcgccuccagagccugcagaccuacgugacccagcagcugauccgggcggccgagauccgcuggagcgccaaccucgccgcgaccaagauguccgagugcguccugggccagagcaagcggguggacuucugcggcaagggguaccaccugauguccuucccccagagcgccccgcacggcguggucuuccuccacgugacguacguccccgcccaggagaagaacuucaccaccgcccccgcgaucugccacgacgggaaggcccacuucccccgcgagggcguguucguguccaacgggacccacugguucgucacgcagcggaacuucuacgagccgcagaucaucaccaccgacaacaccuucgugagcggcaacugcgacguggucaucggcaucgugaacaacacgguguacgacccccugcagcccgagcuggacuccggcggcgggagcgggggcgggcagaucuacgagggcaagcugaccgccgaggggcuccgcuucggcaucguggccagccgguucaaccacgcgcuggucgaccgccugguggagggggccaucgacgccaucgugcggcacggcgggcgcgaggaggacaucacccucguccgggugcccggcuccugggagaucccgguggccgccggcgagcuggcccgcaaggaggacaucgacgcggucaucgccaucggggugcugauccggggcgccacgccccacuucgacuacaucgccagcgagguguccaaggggcucgcggaccugagccuggagcuccgcaagcccaucaccuucggcgucaucaccgccgacacccuggagcaggccaucgagcgggccgggacgaagcacggcaacaagggcugggaggccgcgcuguccgccaucgagauggccaaccucuucaagagccugcgcugaggacuaguuauaagacugacuagcccgaugggccucccaacgggcccuccuccccuccuugcaccgagauuaauaaaaaaaaaaaaaaaaaaaaaaaaaaaaaaaaaaaaaaaaaaaaaaaaaaaaaaaaaaaaaaaaugcaucccccccccccccccccccccccccccccccaaaggcucuuuucagagccaccagaauu

SEQ ID NO: 12888 - RNA, 4141 nt, Artificial Sequence
  SARS-CoV-2/Wuhan/WIV05/2019__EPI_ISL_402128 spike protein mRNA gc (1-1147)(K986P_V987P_P1069F) LumSynth construct
aggagaaagcuuaccauguucguguuccugguccuccugccccuggugagcucccagugcgugaaccucaccacccgcacgcagcugccgcccgccuacaccaacagcuucacccggggcgucuacuaccccgacaagguguuccgcuccagcgugcugcacuccacccaggaccucuuccugcccuucuucagcaacgucacgugguuccacgccauccacguguccgggaccaacggcaccaagcgguucgacaacccggugcugcccuucaacgacggggucuacuucgcgagcaccgagaaguccaacaucauccgcggcuggaucuucgggacgacccucgacagcaagacccagucccugcugaucgugaacaacgccaccaacguggucaucaaggugugcgaguuccaguucugcaacgaccccuuccucggcguguacuaccacaagaacaacaagagcuggauggaguccgaguuccgggucuacagcuccgccaacaacugcacguucgaguacgugagccagcccuuccugauggaccuggagggcaagcaggggaacuucaagaaccuccgcgaguucguguucaagaacaucgacggcuacuucaagaucuacuccaagcacaccccgaucaaccugguccgggaccugccccagggguucagcgcccucgagccccugguggaccugcccaucggcaucaacaucacccgcuuccagacccuccuggcccugcaccgguccuaccucacgccgggggacagcagcuccggcuggaccgcgggcgccgccgccuacuacgugggguaccugcagccccgcaccuuccugcucaaguacaacgagaacggcaccaucacggacgcggucgacugcgcccuggacccccugagcgagaccaagugcacccucaaguccuucaccguggagaaggggaucuaccagacgagcaacuuccgggugcagcccaccgaguccaucguccgcuucccgaacaucaccaaccugugccccuucggcgagguguucaacgccacccgguucgccagcgucuacgccuggaaccgcaagcggaucuccaacugcguggcggacuacagcgugcuguacaacuccgccagcuucuccacguucaagugcuacggcgucagccccaccaagcucaacgaccugugcuucaccaacguguacgccgacuccuucgugauccgcggggacgagguccggcagaucgcccccggccagaccgggaagaucgccgacuacaacuacaagcugccggacgacuucacgggcugcgugaucgcguggaacagcaacaaccucgacuccaaggucgggggcaacuacaacuaccuguaccgccuguuccgcaagagcaaccucaagcccuucgagcgggacaucuccaccgagaucuaccaggccggcagcacccccugcaacgggguggagggcuucaacugcuacuucccccugcaguccuacggguuccagccgaccaacggcgugggguaccagcccuaccggguggucgugcugagcuucgagcuccugcacgcccccgccacggugugcggccccaagaaguccaccaaccuggucaagaacaagugcgugaacuucaacuucaacggccucaccgggaccggcgugcugaccgagagcaacaagaaguuccugccguuccagcaguucgggcgcgacaucgccgacacgaccgacgcgguccgcgacccccagacccuggagauccucgacaucacccccugcagcuucggcgggguguccgugaucacgccgggcaccaacaccagcaaccaggucgccgugcuguaccaggacgugaacugcaccgagguccccguggccauccacgccgaccagcugacgcccaccuggcggguguacuccaccggcagcaacgucuuccagacccgcgccgggugccucaucggcgcggagcacgugaacaacuccuacgagugcgacauccccaucggggccggcaucugcgccagcuaccagacgcagaccaacuccccgcggcgcgcccggagcguggcgucccagagcaucaucgccuacaccaugucccugggcgccgagaacagcgucgccuacuccaacaacagcaucgccauccccaccaacuucacgaucuccgugaccaccgagauccugcccgugagcaugaccaagacgagcgucgacugcaccauguacaucugcggggacuccaccgagugcagcaaccuccugcugcaguacggcuccuucugcacccagcucaaccgcgcgcugacggggaucgccguggagcaggacaagaacacccaggagguguucgcccaggucaagcagaucuacaagacgcccccgaucaaggacuucggcggguucaacuucagccagauccugcccgaccccuccaagcccagcaagcgguccuucaucgaggaccuccuguucaacaaggugacccuggccgacgccggcuucaucaagcaguacggcgacugccucggggacaucgcggcccgcgaccugaucugcgcccagaaguucaacggccugaccgugcucccgccccugcugaccgacgagaugaucgcccaguacaccagcgcccuccuggcggggaccaucacguccggcuggaccuucggggccggcgccgcccugcagauccccuucgcgaugcagauggccuaccgguucaacggcaucggggucacccagaacgugcucuacgagaaccagaagcugaucgccaaccaguucaacagcgccaucggcaagauccaggacucccugagcuccaccgccagcgcgcucgggaagcugcaggacguggucaaccagaacgcccaggcccugaacacgcucgugaagcagcuguccagcaacuucggcgccaucuccagcgugcugaacgacauccucucccgccuggacccgcccgaggccgaggugcagaucgaccggcugaucaccgggcgccuccagagccugcagaccuacgugacccagcagcugauccgggcggccgagauccgcgccagcgccaaccucgccgcgaccaagauguccgagugcguccugggccagagcaagcggguggacuucugcggcaagggguaccaccugauguccuucccccagagcgccccgcacggcguggucuuccuccacgugacguacgucuucgcccaggagaagaacuucaccaccgcccccgcgaucugccacgacgggaaggcccacuucccccgcgagggcguguucguguccaacgggacccacugguucgucacgcagcggaacuucuacgagccgcagaucaucaccaccgacaacaccuucgugagcggcaacugcgacguggucaucggcaucgugaacaacacgguguacgacccccugcagcccgagcuggacuccggcggcgggagcgggggcgggcagaucuacgagggcaagcugaccgccgaggggcuccgcuucggcaucguggccagccgguucaaccacgcgcuggucgaccgccugguggagggggccaucgacgccaucgugcggcacggcgggcgcgaggaggacaucacccucguccgggugcccggcuccugggagaucccgguggccgccggcgagcuggcccgcaaggaggacaucgacgcggucaucgccaucggggugcugauccggggcgccacgccccacuucgacuacaucgccagcgagguguccaaggggcucgcggaccugagccuggagcuccgcaagcccaucaccuucggcgucaucaccgccgacacccuggagcaggccaucgagcgggccgggacgaagcacggcaacaagggcugggaggccgcgcuguccgccaucgagauggccaaccucuucaagagccugcgcugaggacuaguuauaagacugacuagcccgaugggccucccaacgggcccuccuccccuccuugcaccgagauuaauaaaaaaaaaaaaaaaaaaaaaaaaaaaaaaaaaaaaaaaaaaaaaaaaaaaaaaaaaaaaaaaaugcaucccccccccccccccccccccccccccccccaaaggcucuuuucagagccaccagaauu

SEQ ID NO: 12889 - RNA, 4141 nt, Artificial Sequence
  SARS-CoV-2/Wuhan/WIV05/2019__EPI_ISL_402128 spike protein mRNA gc (1-1147)(K986P_V987P_ H1048Q_H1064N_ H1083N_H1101N) LumSynth construct
aggagaaagcuuaccauguucguguuccugguccuccugccccuggugagcucccagugcgugaaccucaccacccgcacgcagcugccgcccgccuacaccaacagcuucacccggggcgucuacuaccccgacaagguguuccgcuccagcgugcugcacuccacccaggaccucuuccugcccuucuucagcaacgucacgugguuccacgccauccacguguccgggaccaacggcaccaagcgguucgacaacccggugcugcccuucaacgacggggucuacuucgcgagcaccgagaaguccaacaucauccgcggcuggaucuucgggacgacccucgacagcaagacccagucccugcugaucgugaacaacgccaccaacguggucaucaaggugugcgaguuccaguucugcaacgaccccuuccucggcguguacuaccacaagaacaacaagagcuggauggaguccgaguuccgggucuacagcuccgccaacaacugcacguucgaguacgugagccagcccuuccugauggaccuggagggcaagcaggggaacuucaagaaccuccgcgaguucguguucaagaacaucgacggcuacuucaagaucuacuccaagcacaccccgaucaaccugguccgggaccugccccagggguucagcgcccucgagccccugguggaccugcccaucggcaucaacaucacccgcuuccagacccuccuggcccugcaccgguccuaccucacgccgggggacagcagcuccggcuggaccgcgggcgccgccgccuacuacgugggguaccugcagccccgcaccuuccugcucaaguacaacgagaacggcaccaucacggacgcggucgacugcgcccuggacccccugagcgagaccaagugcacccucaaguccuucaccguggagaaggggaucuaccagacgagcaacuuccgggugcagcccaccgaguccaucguccgcuucccgaacaucaccaaccugugccccuucggcgagguguucaacgccacccgguucgccagcgucuacgccuggaaccgcaagcggaucuccaacugcguggcggacuacagcgugcuguacaacuccgccagcuucuccacguucaagugcuacggcgucagccccaccaagcucaacgaccugugcuucaccaacguguacgccgacuccuucgugauccgcggggacgagguccggcagaucgcccccggccagaccgggaagaucgccgacuacaacuacaagcugccggacgacuucacgggcugcgugaucgcguggaacagcaacaaccucgacuccaaggucgggggcaacuacaacuaccuguaccgccuguuccgcaagagcaaccucaagcccuucgagcgggacaucuccaccgagaucuaccaggccggcagcacccccugcaacgggguggagggcuucaacugcuacuucccccugcaguccuacggguuccagccgaccaacggcgugggguaccagcccuaccggguggucgugcugagcuucgagcuccugcacgcccccgccacggugugcggccccaagaaguccaccaaccuggucaagaacaagugcgugaacuucaacuucaacggccucaccgggaccggcgugcugaccgagagcaacaagaaguuccugccguuccagcaguucgggcgcgacaucgccgacacgaccgacgcgguccgcgacccccagacccuggagauccucgacaucacccccugcagcuucggcgggguguccgugaucacgccgggcaccaacaccagcaaccaggucgccgugcuguaccaggacgugaacugcaccgagguccccguggccauccacgccgaccagcugacgcccaccuggcggguguacuccaccggcagcaacgucuuccagacccgcgccgggugccucaucggcgcggagcacgugaacaacuccuacgagugcgacauccccaucggggccggcaucugcgccagcuaccagacgcagaccaacuccccgcggcgcgcccggagcguggcgucccagagcaucaucgccuacaccaugucccugggcgccgagaacagcgucgccuacuccaacaacagcaucgccauccccaccaacuucacgaucuccgugaccaccgagauccugcccgugagcaugaccaagacgagcgucgacugcaccauguacaucugcggggacuccaccgagugcagcaaccuccugcugcaguacggcuccuucugcacccagcucaaccgcgcgcugacggggaucgccguggagcaggacaagaacacccaggagguguucgcccaggucaagcagaucuacaagacgcccccgaucaaggacuucggcggguucaacuucagccagauccugcccgaccccuccaagcccagcaagcgguccuucaucgaggaccuccuguucaacaaggugacccuggccgacgccggcuucaucaagcaguacggcgacugccucggggacaucgcggcccgcgaccugaucugcgcccagaaguucaacggccugaccgugcucccgccccugcugaccgacgagaugaucgcccaguacaccagcgcccuccuggcggggaccaucacguccggcuggaccuucggggccggcgccgcccugcagauccccuucgcgaugcagauggccuaccgguucaacggcaucggggucacccagaacgugcucuacgagaaccagaagcugaucgccaaccaguucaacagcgccaucggcaagauccaggacucccugagcuccaccgccagcgcgcucgggaagcugcaggacguggucaaccagaacgcccaggcccugaacacgcucgugaagcagcuguccagcaacuucggcgccaucuccagcgugcugaacgacauccucucccgccuggacccgcccgaggccgaggugcagaucgaccggcugaucaccgggcgccuccagagccugcagaccuacgugacccagcagcugauccgggcggccgagauccgcgccagcgccaaccucgccgcgaccaagauguccgagugcguccugggccagagcaagcggguggacuucugcggcaagggguaccagcugauguccuucccccagagcgccccgcacggcguggucuuccucaacgugacguacguccccgcccaggagaagaacuucaccaccgcccccgcgaucugcaacgacgggaaggcccacuucccccgcgagggcguguucguguccaacgggaccaacugguucgucacgcagcggaacuucuacgagccgcagaucaucaccaccgacaacaccuucgugagcggcaacugcgacguggucaucggcaucgugaacaacacgguguacgacccccugcagcccgagcuggacuccggcggcgggagcgggggcgggcagaucuacgagggcaagcugaccgccgaggggcuccgcuucggcaucguggccagccgguucaaccacgcgcuggucgaccgccugguggagggggccaucgacgccaucgugcggcacggcgggcgcgaggaggacaucacccucguccgggugcccggcuccugggagaucccgguggccgccggcgagcuggcccgcaaggaggacaucgacgcggucaucgccaucggggugcugauccggggcgccacgccccacuucgacuacaucgccagcgagguguccaaggggcucgcggaccugagccuggagcuccgcaagcccaucaccuucggcgucaucaccgccgacacccuggagcaggccaucgagcgggccgggacgaagcacggcaacaagggcugggaggccgcgcuguccgccaucgagauggccaaccucuucaagagccugcgcugaggacuaguuauaagacugacuagcccgaugggccucccaacgggcccuccuccccuccuugcaccgagauuaauaaaaaaaaaaaaaaaaaaaaaaaaaaaaaaaaaaaaaaaaaaaaaaaaaaaaaaaaaaaaaaaaugcaucccccccccccccccccccccccccccccccaaaggcucuuuucagagccaccagaauu

SEQ ID NO: 12890 - RNA, 4141 nt, Artificial Sequence
  SARS-CoV-2/Wuhan/WIV05/2019__EPI_ISL_402128 spike protein mRNA gc (1-1147)(I712C_T1077C) LumSynth construct
aggagaaagcuuaccauguucguguuccugguccuccugccccuggugagcucccagugcgugaaccucaccacccgcacgcagcugccgcccgccuacaccaacagcuucacccggggcgucuacuaccccgacaagguguuccgcuccagcgugcugcacuccacccaggaccucuuccugcccuucuucagcaacgucacgugguuccacgccauccacguguccgggaccaacggcaccaagcgguucgacaacccggugcugcccuucaacgacggggucuacuucgcgagcaccgagaaguccaacaucauccgcggcuggaucuucgggacgacccucgacagcaagacccagucccugcugaucgugaacaacgccaccaacguggucaucaaggugugcgaguuccaguucugcaacgaccccuuccucggcguguacuaccacaagaacaacaagagcuggauggaguccgaguuccgggucuacagcuccgccaacaacugcacguucgaguacgugagccagcccuuccugauggaccuggagggcaagcaggggaacuucaagaaccuccgcgaguucguguucaagaacaucgacggcuacuucaagaucuacuccaagcacaccccgaucaaccugguccgggaccugccccagggguucagcgcccucgagccccugguggaccugcccaucggcaucaacaucacccgcuuccagacccuccuggcccugcaccgguccuaccucacgccgggggacagcagcuccggcuggaccgcgggcgccgccgccuacuacgugggguaccugcagccccgcaccuuccugcucaaguacaacgagaacggcaccaucacggacgcggucgacugcgcccuggacccccugagcgagaccaagugcacccucaaguccuucaccguggagaaggggaucuaccagacgagcaacuuccgggugcagcccaccgaguccaucguccgcuucccgaacaucaccaaccugugccccuucggcgagguguucaacgccacccgguucgccagcgucuacgccuggaaccgcaagcggaucuccaacugcguggcggacuacagcgugcuguacaacuccgccagcuucuccacguucaagugcuacggcgucagccccaccaagcucaacgaccugugcuucaccaacguguacgccgacuccuucgugauccgcggggacgagguccggcagaucgcccccggccagaccgggaagaucgccgacuacaacuacaagcugccggacgacuucacgggcugcgugaucgcguggaacagcaacaaccucgacuccaaggucgggggcaacuacaacuaccuguaccgccuguuccgcaagagcaaccucaagcccuucgagcgggacaucuccaccgagaucuaccaggccggcagcacccccugcaacgggguggagggcuucaacugcuacuucccccugcaguccuacggguuccagccgaccaacggcgugggguaccagcccuaccggguggucgugcugagcuucgagcuccugcacgcccccgccacggugugcggccccaagaaguccaccaaccuggucaagaacaagugcgugaacuucaacuucaacggccucaccgggaccggcgugcugaccgagagcaacaagaaguuccugccguuccagcaguucgggcgcgacaucgccgacacgaccgacgcgguccgcgacccccagacccuggagauccucgacaucacccccugcagcuucggcgggguguccgugaucacgccgggcaccaacaccagcaaccaggucgccgugcuguaccaggacgugaacugcaccgagguccccguggccauccacgccgaccagcugacgcccaccuggcggguguacuccaccggcagcaacgucuuccagacccgcgccgggugccucaucggcgcggagcacgugaacaacuccuacgagugcgacauccccaucggggccggcaucugcgccagcuaccagacgcagaccaacuccccgcggcgcgcccggagcguggcgucccagagcaucaucgccuacaccaugucccugggcgccgagaacagcgucgccuacuccaacaacagcugcgccauccccaccaacuucacgaucuccgugaccaccgagauccugcccgugagcaugaccaagacgagcgucgacugcaccauguacaucugcggggacuccaccgagugcagcaaccuccugcugcaguacggcuccuucugcacccagcucaaccgcgcgcugacggggaucgccguggagcaggacaagaacacccaggagguguucgcccaggucaagcagaucuacaagacgcccccgaucaaggacuucggcggguucaacuucagccagauccugcccgaccccuccaagcccagcaagcgguccuucaucgaggaccuccuguucaacaaggugacccuggccgacgccggcuucaucaagcaguacggcgacugccucggggacaucgcggcccgcgaccugaucugcgcccagaaguucaacggccugaccgugcucccgccccugcugaccgacgagaugaucgcccaguacaccagcgcccuccuggcggggaccaucacguccggcuggaccuucggggccggcgccgcccugcagauccccuucgcgaugcagauggccuaccgguucaacggcaucggggucacccagaacgugcucuacgagaaccagaagcugaucgccaaccaguucaacagcgccaucggcaagauccaggacucccugagcuccaccgccagcgcgcucgggaagcugcaggacguggucaaccagaacgcccaggcccugaacacgcucgugaagcagcuguccagcaacuucggcgccaucuccagcgugcugaacgacauccucucccgccuggacaaggucgaggccgaggugcagaucgaccggcugaucaccgggcgccuccagagccugcagaccuacgugacccagcagcugauccgggcggccgagauccgcgccagcgccaaccucgccgcgaccaagauguccgagugcguccugggccagagcaagcggguggacuucugcggcaagggguaccaccugauguccuucccccagagcgccccgcacggcguggucuuccuccacgugacguacguccccgcccaggagaagaacuucaccugcgcccccgcgaucugccacgacgggaaggcccacuucccccgcgagggcguguucguguccaacgggacccacugguucgucacgcagcggaacuucuacgagccgcagaucaucaccaccgacaacaccuucgugagcggcaacugcgacguggucaucggcaucgugaacaacacgguguacgacccccugcagcccgagcuggacuccggcggcgggagcgggggcgggcagaucuacgagggcaagcugaccgccgaggggcuccgcuucggcaucguggccagccgguucaaccacgcgcuggucgaccgccugguggagggggccaucgacgccaucgugcggcacggcgggcgcgaggaggacaucacccucguccgggugcccggcuccugggagaucccgguggccgccggcgagcuggcccgcaaggaggacaucgacgcggucaucgccaucggggugcugauccggggcgccacgccccacuucgacuacaucgccagcgagguguccaaggggcucgcggaccugagccuggagcuccgcaagcccaucaccuucggcgucaucaccgccgacacccuggagcaggccaucgagcgggccgggacgaagcacggcaacaagggcugggaggccgcgcuguccgccaucgagauggccaaccucuucaagagccugcgcugaggacuaguuauaagacugacuagcccgaugggccucccaacgggcccuccuccccuccuugcaccgagauuaauaaaaaaaaaaaaaaaaaaaaaaaaaaaaaaaaaaaaaaaaaaaaaaaaaaaaaaaaaaaaaaaaugcaucccccccccccccccccccccccccccccccaaaggcucuuuucagagccaccagaauu

SEQ ID NO: 12891 - RNA, 4141 nt, Artificial Sequence
  SARS-CoV-2/Wuhan/WIV05/2019__EPI_ISL_402128 spike protein mRNA gc (1-1147)(I714C_Y1110C) LumSynth construct
aggagaaagcuuaccauguucguguuccugguccuccugccccuggugagcucccagugcgugaaccucaccacccgcacgcagcugccgcccgccuacaccaacagcuucacccggggcgucuacuaccccgacaagguguuccgcuccagcgugcugcacuccacccaggaccucuuccugcccuucuucagcaacgucacgugguuccacgccauccacguguccgggaccaacggcaccaagcgguucgacaacccggugcugcccuucaacgacggggucuacuucgcgagcaccgagaaguccaacaucauccgcggcuggaucuucgggacgacccucgacagcaagacccagucccugcugaucgugaacaacgccaccaacguggucaucaaggugugcgaguuccaguucugcaacgaccccuuccucggcguguacuaccacaagaacaacaagagcuggauggaguccgaguuccgggucuacagcuccgccaacaacugcacguucgaguacgugagccagcccuuccugauggaccuggagggcaagcaggggaacuucaagaaccuccgcgaguucguguucaagaacaucgacggcuacuucaagaucuacuccaagcacaccccgaucaaccugguccgggaccugccccagggguucagcgcccucgagccccugguggaccugcccaucggcaucaacaucacccgcuuccagacccuccuggcccugcaccgguccuaccucacgccgggggacagcagcuccggcuggaccgcgggcgccgccgccuacuacgugggguaccugcagccccgcaccuuccugcucaaguacaacgagaacggcaccaucacggacgcggucgacugcgcccuggacccccugagcgagaccaagugcacccucaaguccuucaccguggagaaggggaucuaccagacgagcaacuuccgggugcagcccaccgaguccaucguccgcuucccgaacaucaccaaccugugccccuucggcgagguguucaacgccacccgguucgccagcgucuacgccuggaaccgcaagcggaucuccaacugcguggcggacuacagcgugcuguacaacuccgccagcuucuccacguucaagugcuacggcgucagccccaccaagcucaacgaccugugcuucaccaacguguacgccgacuccuucgugauccgcggggacgagguccggcagaucgcccccggccagaccgggaagaucgccgacuacaacuacaagcugccggacgacuucacgggcugcgugaucgcguggaacagcaacaaccucgacuccaaggucgggggcaacuacaacuaccuguaccgccuguuccgcaagagcaaccucaagcccuucgagcgggacaucuccaccgagaucuaccaggccggcagcacccccugcaacgggguggagggcuucaacugcuacuucccccugcaguccuacggguuccagccgaccaacggcgugggguaccagcccuaccggguggucgugcugagcuucgagcuccugcacgcccccgccacggugugcggccccaagaaguccaccaaccuggucaagaacaagugcgugaacuucaacuucaacggccucaccgggaccggcgugcugaccgagagcaacaagaaguuccugccguuccagcaguucgggcgcgacaucgccgacacgaccgacgcgguccgcgacccccagacccuggagauccucgacaucacccccugcagcuucggcgggguguccgugaucacgccgggcaccaacaccagcaaccaggucgccgugcuguaccaggacgugaacugcaccgagguccccguggccauccacgccgaccagcugacgcccaccuggcggguguacuccaccggcagcaacgucuuccagacccgcgccgggugccucaucggcgcggagcacgugaacaacuccuacgagugcgacauccccaucggggccggcaucugcgccagcuaccagacgcagaccaacuccccgcggcgcgcccggagcguggcgucccagagcaucaucgccuacaccaugucccugggcgccgagaacagcgucgccuacuccaacaacagcaucgccugccccaccaacuucacgaucuccgugaccaccgagauccugcccgugagcaugaccaagacgagcgucgacugcaccauguacaucugcggggacuccaccgagugcagcaaccuccugcugcaguacggcuccuucugcacccagcucaaccgcgcgcugacggggaucgccguggagcaggacaagaacacccaggagguguucgcccaggucaagcagaucuacaagacgcccccgaucaaggacuucggcggguucaacuucagccagauccugcccgaccccuccaagcccagcaagcgguccuucaucgaggaccuccuguucaacaaggugacccuggccgacgccggcuucaucaagcaguacggcgacugccucggggacaucgcggcccgcgaccugaucugcgcccagaaguucaacggccugaccgugcucccgccccugcugaccgacgagaugaucgcccaguacaccagcgcccuccuggcggggaccaucacguccggcuggaccuucggggccggcgccgcccugcagauccccuucgcgaugcagauggccuaccgguucaacggcaucggggucacccagaacgugcucuacgagaaccagaagcugaucgccaaccaguucaacagcgccaucggcaagauccaggacucccugagcuccaccgccagcgcgcucgggaagcugcaggacguggucaaccagaacgcccaggcccugaacacgcucgugaagcagcuguccagcaacuucggcgccaucuccagcgugcugaacgacauccucucccgccuggacaaggucgaggccgaggugcagaucgaccggcugaucaccgggcgccuccagagccugcagaccuacgugacccagcagcugauccgggcggccgagauccgcgccagcgccaaccucgccgcgaccaagauguccgagugcguccugggccagagcaagcggguggacuucugcggcaagggguaccaccugauguccuucccccagagcgccccgcacggcguggucuuccuccacgugacguacguccccgcccaggagaagaacuucaccaccgcccccgcgaucugccacgacgggaaggcccacuucccccgcgagggcguguucguguccaacgggacccacugguucgucacgcagcggaacuucugcgagccgcagaucaucaccaccgacaacaccuucgugagcggcaacugcgacguggucaucggcaucgugaacaacacgguguacgacccccugcagcccgagcuggacuccggcggcgggagcgggggcgggcagaucuacgagggcaagcugaccgccgaggggcuccgcuucggcaucguggccagccgguucaaccacgcgcuggucgaccgccugguggagggggccaucgacgccaucgugcggcacggcgggcgcgaggaggacaucacccucguccgggugcccggcuccugggagaucccgguggccgccggcgagcuggcccgcaaggaggacaucgacgcggucaucgccaucggggugcugauccggggcgccacgccccacuucgacuacaucgccagcgagguguccaaggggcucgcggaccugagccuggagcuccgcaagcccaucaccuucggcgucaucaccgccgacacccuggagcaggccaucgagcgggccgggacgaagcacggcaacaagggcugggaggccgcgcuguccgccaucgagauggccaaccucuucaagagccugcgcugaggacuaguuauaagacugacuagcccgaugggccucccaacgggcccuccuccccuccuugcaccgagauuaauaaaaaaaaaaaaaaaaaaaaaaaaaaaaaaaaaaaaaaaaaaaaaaaaaaaaaaaaaaaaaaaaugcaucccccccccccccccccccccccccccccccaaaggcucuuuucagagccaccagaauu

SEQ ID NO: 12892 - RNA, 4141 nt, Artificial Sequence
  SARS-CoV-2/Wuhan/WIV05/2019__EPI_ISL_402128 spike protein mRNA gc (1-1147)(P715C_P1069C) LumSynth construct
aggagaaagcuuaccauguucguguuccugguccuccugccccuggugagcucccagugcgugaaccucaccacccgcacgcagcugccgcccgccuacaccaacagcuucacccggggcgucuacuaccccgacaagguguuccgcuccagcgugcugcacuccacccaggaccucuuccugcccuucuucagcaacgucacgugguuccacgccauccacguguccgggaccaacggcaccaagcgguucgacaacccggugcugcccuucaacgacggggucuacuucgcgagcaccgagaaguccaacaucauccgcggcuggaucuucgggacgacccucgacagcaagacccagucccugcugaucgugaacaacgccaccaacguggucaucaaggugugcgaguuccaguucugcaacgaccccuuccucggcguguacuaccacaagaacaacaagagcuggauggaguccgaguuccgggucuacagcuccgccaacaacugcacguucgaguacgugagccagcccuuccugauggaccuggagggcaagcaggggaacuucaagaaccuccgcgaguucguguucaagaacaucgacggcuacuucaagaucuacuccaagcacaccccgaucaaccugguccgggaccugccccagggguucagcgcccucgagccccugguggaccugcccaucggcaucaacaucacccgcuuccagacccuccuggcccugcaccgguccuaccucacgccgggggacagcagcuccggcuggaccgcgggcgccgccgccuacuacgugggguaccugcagccccgcaccuuccugcucaaguacaacgagaacggcaccaucacggacgcggucgacugcgcccuggacccccugagcgagaccaagugcacccucaaguccuucaccguggagaaggggaucuaccagacgagcaacuuccgggugcagcccaccgaguccaucguccgcuucccgaacaucaccaaccugugccccuucggcgagguguucaacgccacccgguucgccagcgucuacgccuggaaccgcaagcggaucuccaacugcguggcggacuacagcgugcuguacaacuccgccagcuucuccacguucaagugcuacggcgucagccccaccaagcucaacgaccugugcuucaccaacguguacgccgacuccuucgugauccgcggggacgagguccggcagaucgcccccggccagaccgggaagaucgccgacuacaacuacaagcugccggacgacuucacgggcugcgugaucgcguggaacagcaacaaccucgacuccaaggucgggggcaacuacaacuaccuguaccgccuguuccgcaagagcaaccucaagcccuucgagcgggacaucuccaccgagaucuaccaggccggcagcacccccugcaacgggguggagggcuucaacugcuacuucccccugcaguccuacggguuccagccgaccaacggcgugggguaccagcccuaccggguggucgugcugagcuucgagcuccugcacgcccccgccacggugugcggccccaagaaguccaccaaccuggucaagaacaagugcgugaacuucaacuucaacggccucaccgggaccggcgugcugaccgagagcaacaagaaguuccugccguuccagcaguucgggcgcgacaucgccgacacgaccgacgcgguccgcgacccccagacccuggagauccucgacaucacccccugcagcuucggcgggguguccgugaucacgccgggcaccaacaccagcaaccaggucgccgugcuguaccaggacgugaacugcaccgagguccccguggccauccacgccgaccagcugacgcccaccuggcggguguacuccaccggcagcaacgucuuccagacccgcgccgggugccucaucggcgcggagcacgugaacaacuccuacgagugcgacauccccaucggggccggcaucugcgccagcuaccagacgcagaccaacuccccgcggcgcgcccggagcguggcgucccagagcaucaucgccuacaccaugucccugggcgccgagaacagcgucgccuacuccaacaacagcaucgccaucugcaccaacuucacgaucuccgugaccaccgagauccugcccgugagcaugaccaagacgagcgucgacugcaccauguacaucugcggggacuccaccgagugcagcaaccuccugcugcaguacggcuccuucugcacccagcucaaccgcgcgcugacggggaucgccguggagcaggacaagaacacccaggagguguucgcccaggucaagcagaucuacaagacgcccccgaucaaggacuucggcggguucaacuucagccagauccugcccgaccccuccaagcccagcaagcgguccuucaucgaggaccuccuguucaacaaggugacccuggccgacgccggcuucaucaagcaguacggcgacugccucggggacaucgcggcccgcgaccugaucugcgcccagaaguucaacggccugaccgugcucccgccccugcugaccgacgagaugaucgcccaguacaccagcgcccuccuggcggggaccaucacguccggcuggaccuucggggccggcgccgcccugcagauccccuucgcgaugcagauggccuaccgguucaacggcaucggggucacccagaacgugcucuacgagaaccagaagcugaucgccaaccaguucaacagcgccaucggcaagauccaggacucccugagcuccaccgccagcgcgcucgggaagcugcaggacguggucaaccagaacgcccaggcccugaacacgcucgugaagcagcuguccagcaacuucggcgccaucuccagcgugcugaacgacauccucucccgccuggacaaggucgaggccgaggugcagaucgaccggcugaucaccgggcgccuccagagccugcagaccuacgugacccagcagcugauccgggcggccgagauccgcgccagcgccaaccucgccgcgaccaagauguccgagugcguccugggccagagcaagcggguggacuucugcggcaagggguaccaccugauguccuucccccagagcgccccgcacggcguggucuuccuccacgugacguacgucugcgcccaggagaagaacuucaccaccgcccccgcgaucugccacgacgggaaggcccacuucccccgcgagggcguguucguguccaacgggacccacugguucgucacgcagcggaacuucuacgagccgcagaucaucaccaccgacaacaccuucgugagcggcaacugcgacguggucaucggcaucgugaacaacacgguguacgacccccugcagcccgagcuggacuccggcggcgggagcgggggcgggcagaucuacgagggcaagcugaccgccgaggggcuccgcuucggcaucguggccagccgguucaaccacgcgcuggucgaccgccugguggagggggccaucgacgccaucgugcggcacggcgggcgcgaggaggacaucacccucguccgggugcccggcuccugggagaucccgguggccgccggcgagcuggcccgcaaggaggacaucgacgcggucaucgccaucggggugcugauccggggcgccacgccccacuucgacuacaucgccagcgagguguccaaggggcucgcggaccugagccuggagcuccgcaagcccaucaccuucggcgucaucaccgccgacacccuggagcaggccaucgagcgggccgggacgaagcacggcaacaagggcugggaggccgcgcuguccgccaucgagauggccaaccucuucaagagccugcgcugaggacuaguuauaagacugacuagcccgaugggccucccaacgggcccuccuccccuccuugcaccgagauuaauaaaaaaaaaaaaaaaaaaaaaaaaaaaaaaaaaaaaaaaaaaaaaaaaaaaaaaaaaaaaaaaaugcaucccccccccccccccccccccccccccccccaaaggcucuuuucagagccaccagaauu

SEQ ID NO: 12893 - RNA, 4141 nt, Artificial Sequence
  SARS-CoV-2/Wuhan/WIV05/2019__EPI_ISL_402128 spike protein mRNA gc (1-1147)(G889C_L1034C) LumSynth construct
aggagaaagcuuaccauguucguguuccugguccuccugccccuggugagcucccagugcgugaaccucaccacccgcacgcagcugccgcccgccuacaccaacagcuucacccggggcgucuacuaccccgacaagguguuccgcuccagcgugcugcacuccacccaggaccucuuccugcccuucuucagcaacgucacgugguuccacgccauccacguguccgggaccaacggcaccaagcgguucgacaacccggugcugcccuucaacgacggggucuacuucgcgagcaccgagaaguccaacaucauccgcggcuggaucuucgggacgacccucgacagcaagacccagucccugcugaucgugaacaacgccaccaacguggucaucaaggugugcgaguuccaguucugcaacgaccccuuccucggcguguacuaccacaagaacaacaagagcuggauggaguccgaguuccgggucuacagcuccgccaacaacugcacguucgaguacgugagccagcccuuccugauggaccuggagggcaagcaggggaacuucaagaaccuccgcgaguucguguucaagaacaucgacggcuacuucaagaucuacuccaagcacaccccgaucaaccugguccgggaccugccccagggguucagcgcccucgagccccugguggaccugcccaucggcaucaacaucacccgcuuccagacccuccuggcccugcaccgguccuaccucacgccgggggacagcagcuccggcuggaccgcgggcgccgccgccuacuacgugggguaccugcagccccgcaccuuccugcucaaguacaacgagaacggcaccaucacggacgcggucgacugcgcccuggacccccugagcgagaccaagugcacccucaaguccuucaccguggagaaggggaucuaccagacgagcaacuuccgggugcagcccaccgaguccaucguccgcuucccgaacaucaccaaccugugccccuucggcgagguguucaacgccacccgguucgccagcgucuacgccuggaaccgcaagcggaucuccaacugcguggcggacuacagcgugcuguacaacuccgccagcuucuccacguucaagugcuacggcgucagccccaccaagcucaacgaccugugcuucaccaacguguacgccgacuccuucgugauccgcggggacgagguccggcagaucgcccccggccagaccgggaagaucgccgacuacaacuacaagcugccggacgacuucacgggcugcgugaucgcguggaacagcaacaaccucgacuccaaggucgggggcaacuacaacuaccuguaccgccuguuccgcaagagcaaccucaagcccuucgagcgggacaucuccaccgagaucuaccaggccggcagcacccccugcaacgggguggagggcuucaacugcuacuucccccugcaguccuacggguuccagccgaccaacggcgugggguaccagcccuaccggguggucgugcugagcuucgagcuccugcacgcccccgccacggugugcggccccaagaaguccaccaaccuggucaagaacaagugcgugaacuucaacuucaacggccucaccgggaccggcgugcugaccgagagcaacaagaaguuccugccguuccagcaguucgggcgcgacaucgccgacacgaccgacgcgguccgcgacccccagacccuggagauccucgacaucacccccugcagcuucggcgggguguccgugaucacgccgggcaccaacaccagcaaccaggucgccgugcuguaccaggacgugaacugcaccgagguccccguggccauccacgccgaccagcugacgcccaccuggcggguguacuccaccggcagcaacgucuuccagacccgcgccgggugccucaucggcgcggagcacgugaacaacuccuacgagugcgacauccccaucggggccggcaucugcgccagcuaccagacgcagaccaacuccccgcggcgcgcccggagcguggcgucccagagcaucaucgccuacaccaugucccugggcgccgagaacagcgucgccuacuccaacaacagcaucgccauccccaccaacuucacgaucuccgugaccaccgagauccugcccgugagcaugaccaagacgagcgucgacugcaccauguacaucugcggggacuccaccgagugcagcaaccuccugcugcaguacggcuccuucugcacccagcucaaccgcgcgcugacggggaucgccguggagcaggacaagaacacccaggagguguucgcccaggucaagcagaucuacaagacgcccccgaucaaggacuucggcggguucaacuucagccagauccugcccgaccccuccaagcccagcaagcgguccuucaucgaggaccuccuguucaacaaggugacccuggccgacgccggcuucaucaagcaguacggcgacugccucggggacaucgcggcccgcgaccugaucugcgcccagaaguucaacggccugaccgugcucccgccccugcugaccgacgagaugaucgcccaguacaccagcgcccuccuggcggggaccaucacguccggcuggaccuucugcgccggcgccgcccugcagauccccuucgcgaugcagauggccuaccgguucaacggcaucggggucacccagaacgugcucuacgagaaccagaagcugaucgccaaccaguucaacagcgccaucggcaagauccaggacucccugagcuccaccgccagcgcgcucgggaagcugcaggacguggucaaccagaacgcccaggcccugaacacgcucgugaagcagcuguccagcaacuucggcgccaucuccagcgugcugaacgacauccucucccgccuggacaaggucgaggccgaggugcagaucgaccggcugaucaccgggcgccuccagagccugcagaccuacgugacccagcagcugauccgggcggccgagauccgcgccagcgccaaccucgccgcgaccaagauguccgagugcgucugcggccagagcaagcggguggacuucugcggcaagggguaccaccugauguccuucccccagagcgccccgcacggcguggucuuccuccacgugacguacguccccgcccaggagaagaacuucaccaccgcccccgcgaucugccacgacgggaaggcccacuucccccgcgagggcguguucguguccaacgggacccacugguucgucacgcagcggaacuucuacgagccgcagaucaucaccaccgacaacaccuucgugagcggcaacugcgacguggucaucggcaucgugaacaacacgguguacgacccccugcagcccgagcuggacuccggcggcgggagcgggggcgggcagaucuacgagggcaagcugaccgccgaggggcuccgcuucggcaucguggccagccgguucaaccacgcgcuggucgaccgccugguggagggggccaucgacgccaucgugcggcacggcgggcgcgaggaggacaucacccucguccgggugcccggcuccugggagaucccgguggccgccggcgagcuggcccgcaaggaggacaucgacgcggucaucgccaucggggugcugauccggggcgccacgccccacuucgacuacaucgccagcgagguguccaaggggcucgcggaccugagccuggagcuccgcaagcccaucaccuucggcgucaucaccgccgacacccuggagcaggccaucgagcgggccgggacgaagcacggcaacaagggcugggaggccgcgcuguccgccaucgagauggccaaccucuucaagagccugcgcugaggacuaguuauaagacugacuagcccgaugggccucccaacgggcccuccuccccuccuugcaccgagauuaauaaaaaaaaaaaaaaaaaaaaaaaaaaaaaaaaaaaaaaaaaaaaaaaaaaaaaaaaaaaaaaaaugcaucccccccccccccccccccccccccccccccaaaggcucuuuucagagccaccagaauu

SEQ ID NO: 12894 - RNA, 4141 nt, Artificial Sequence
  SARS-CoV-2/Wuhan/WIV05/2019__EPI_ISL_402128 spike protein mRNA gc (1-1147)(I909C_Y1047C) LumSynth construct
aggagaaagcuuaccauguucguguuccugguccuccugccccuggugagcucccagugcgugaaccucaccacccgcacgcagcugccgcccgccuacaccaacagcuucacccggggcgucuacuaccccgacaagguguuccgcuccagcgugcugcacuccacccaggaccucuuccugcccuucuucagcaacgucacgugguuccacgccauccacguguccgggaccaacggcaccaagcgguucgacaacccggugcugcccuucaacgacggggucuacuucgcgagcaccgagaaguccaacaucauccgcggcuggaucuucgggacgacccucgacagcaagacccagucccugcugaucgugaacaacgccaccaacguggucaucaaggugugcgaguuccaguucugcaacgaccccuuccucggcguguacuaccacaagaacaacaagagcuggauggaguccgaguuccgggucuacagcuccgccaacaacugcacguucgaguacgugagccagcccuuccugauggaccuggagggcaagcaggggaacuucaagaaccuccgcgaguucguguucaagaacaucgacggcuacuucaagaucuacuccaagcacaccccgaucaaccugguccgggaccugccccagggguucagcgcccucgagccccugguggaccugcccaucggcaucaacaucacccgcuuccagacccuccuggcccugcaccgguccuaccucacgccgggggacagcagcuccggcuggaccgcgggcgccgccgccuacuacgugggguaccugcagccccgcaccuuccugcucaaguacaacgagaacggcaccaucacggacgcggucgacugcgcccuggacccccugagcgagaccaagugcacccucaaguccuucaccguggagaaggggaucuaccagacgagcaacuuccgggugcagcccaccgaguccaucguccgcuucccgaacaucaccaaccugugccccuucggcgagguguucaacgccacccgguucgccagcgucuacgccuggaaccgcaagcggaucuccaacugcguggcggacuacagcgugcuguacaacuccgccagcuucuccacguucaagugcuacggcgucagccccaccaagcucaacgaccugugcuucaccaacguguacgccgacuccuucgugauccgcggggacgagguccggcagaucgcccccggccagaccgggaagaucgccgacuacaacuacaagcugccggacgacuucacgggcugcgugaucgcguggaacagcaacaaccucgacuccaaggucgggggcaacuacaacuaccuguaccgccuguuccgcaagagcaaccucaagcccuucgagcgggacaucuccaccgagaucuaccaggccggcagcacccccugcaacgggguggagggcuucaacugcuacuucccccugcaguccuacggguuccagccgaccaacggcgugggguaccagcccuaccggguggucgugcugagcuucgagcuccugcacgcccccgccacggugugcggccccaagaaguccaccaaccuggucaagaacaagugcgugaacuucaacuucaacggccucaccgggaccggcgugcugaccgagagcaacaagaaguuccugccguuccagcaguucgggcgcgacaucgccgacacgaccgacgcgguccgcgacccccagacccuggagauccucgacaucacccccugcagcuucggcgggguguccgugaucacgccgggcaccaacaccagcaaccaggucgccgugcuguaccaggacgugaacugcaccgagguccccguggccauccacgccgaccagcugacgcccaccuggcggguguacuccaccggcagcaacgucuuccagacccgcgccgggugccucaucggcgcggagcacgugaacaacuccuacgagugcgacauccccaucggggccggcaucugcgccagcuaccagacgcagaccaacuccccgcggcgcgcccggagcguggcgucccagagcaucaucgccuacaccaugucccugggcgccgagaacagcgucgccuacuccaacaacagcaucgccauccccaccaacuucacgaucuccgugaccaccgagauccugcccgugagcaugaccaagacgagcgucgacugcaccauguacaucugcggggacuccaccgagugcagcaaccuccugcugcaguacggcuccuucugcacccagcucaaccgcgcgcugacggggaucgccguggagcaggacaagaacacccaggagguguucgcccaggucaagcagaucuacaagacgcccccgaucaaggacuucggcggguucaacuucagccagauccugcccgaccccuccaagcccagcaagcgguccuucaucgaggaccuccuguucaacaaggugacccuggccgacgccggcuucaucaagcaguacggcgacugccucggggacaucgcggcccgcgaccugaucugcgcccagaaguucaacggccugaccgugcucccgccccugcugaccgacgagaugaucgcccaguacaccagcgcccuccuggcggggaccaucacguccggcuggaccuucggggccggcgccgcccugcagauccccuucgcgaugcagauggccuaccgguucaacggcugcggggucacccagaacgugcucuacgagaaccagaagcugaucgccaaccaguucaacagcgccaucggcaagauccaggacucccugagcuccaccgccagcgcgcucgggaagcugcaggacguggucaaccagaacgcccaggcccugaacacgcucgugaagcagcuguccagcaacuucggcgccaucuccagcgugcugaacgacauccucucccgccuggacaaggucgaggccgaggugcagaucgaccggcugaucaccgggcgccuccagagccugcagaccuacgugacccagcagcugauccgggcggccgagauccgcgccagcgccaaccucgccgcgaccaagauguccgagugcguccugggccagagcaagcggguggacuucugcggcaaggggugccaccugauguccuucccccagagcgccccgcacggcguggucuuccuccacgugacguacguccccgcccaggagaagaacuucaccaccgcccccgcgaucugccacgacgggaaggcccacuucccccgcgagggcguguucguguccaacgggacccacugguucgucacgcagcggaacuucuacgagccgcagaucaucaccaccgacaacaccuucgugagcggcaacugcgacguggucaucggcaucgugaacaacacgguguacgacccccugcagcccgagcuggacuccggcggcgggagcgggggcgggcagaucuacgagggcaagcugaccgccgaggggcuccgcuucggcaucguggccagccgguucaaccacgcgcuggucgaccgccugguggagggggccaucgacgccaucgugcggcacggcgggcgcgaggaggacaucacccucguccgggugcccggcuccugggagaucccgguggccgccggcgagcuggcccgcaaggaggacaucgacgcggucaucgccaucggggugcugauccggggcgccacgccccacuucgacuacaucgccagcgagguguccaaggggcucgcggaccugagccuggagcuccgcaagcccaucaccuucggcgucaucaccgccgacacccuggagcaggccaucgagcgggccgggacgaagcacggcaacaagggcugggaggccgcgcuguccgccaucgagauggccaaccucuucaagagccugcgcugaggacuaguuauaagacugacuagcccgaugggccucccaacgggcccuccuccccuccuugcaccgagauuaauaaaaaaaaaaaaaaaaaaaaaaaaaaaaaaaaaaaaaaaaaaaaaaaaaaaaaaaaaaaaaaaaugcaucccccccccccccccccccccccccccccccaaaggcucuuuucagagccaccagaauu

SEQ ID NO: 12895 - RNA, 4141 nt, Artificial Sequence
  SARS-CoV-2/Wuhan/WIV05/2019__EPI_ISL_402128 spike protein mRNA gc (1-1147)(Q965C_S1003C) LumSynth construct
aggagaaagcuuaccauguucguguuccugguccuccugccccuggugagcucccagugcgugaaccucaccacccgcacgcagcugccgcccgccuacaccaacagcuucacccggggcgucuacuaccccgacaagguguuccgcuccagcgugcugcacuccacccaggaccucuuccugcccuucuucagcaacgucacgugguuccacgccauccacguguccgggaccaacggcaccaagcgguucgacaacccggugcugcccuucaacgacggggucuacuucgcgagcaccgagaaguccaacaucauccgcggcuggaucuucgggacgacccucgacagcaagacccagucccugcugaucgugaacaacgccaccaacguggucaucaaggugugcgaguuccaguucugcaacgaccccuuccucggcguguacuaccacaagaacaacaagagcuggauggaguccgaguuccgggucuacagcuccgccaacaacugcacguucgaguacgugagccagcccuuccugauggaccuggagggcaagcaggggaacuucaagaaccuccgcgaguucguguucaagaacaucgacggcuacuucaagaucuacuccaagcacaccccgaucaaccugguccgggaccugccccagggguucagcgcccucgagccccugguggaccugcccaucggcaucaacaucacccgcuuccagacccuccuggcccugcaccgguccuaccucacgccgggggacagcagcuccggcuggaccgcgggcgccgccgccuacuacgugggguaccugcagccccgcaccuuccugcucaaguacaacgagaacggcaccaucacggacgcggucgacugcgcccuggacccccugagcgagaccaagugcacccucaaguccuucaccguggagaaggggaucuaccagacgagcaacuuccgggugcagcccaccgaguccaucguccgcuucccgaacaucaccaaccugugccccuucggcgagguguucaacgccacccgguucgccagcgucuacgccuggaaccgcaagcggaucuccaacugcguggcggacuacagcgugcuguacaacuccgccagcuucuccacguucaagugcuacggcgucagccccaccaagcucaacgaccugugcuucaccaacguguacgccgacuccuucgugauccgcggggacgagguccggcagaucgcccccggccagaccgggaagaucgccgacuacaacuacaagcugccggacgacuucacgggcugcgugaucgcguggaacagcaacaaccucgacuccaaggucgggggcaacuacaacuaccuguaccgccuguuccgcaagagcaaccucaagcccuucgagcgggacaucuccaccgagaucuaccaggccggcagcacccccugcaacgggguggagggcuucaacugcuacuucccccugcaguccuacggguuccagccgaccaacggcgugggguaccagcccuaccggguggucgugcugagcuucgagcuccugcacgcccccgccacggugugcggccccaagaaguccaccaaccuggucaagaacaagugcgugaacuucaacuucaacggccucaccgggaccggcgugcugaccgagagcaacaagaaguuccugccguuccagcaguucgggcgcgacaucgccgacacgaccgacgcgguccgcgacccccagacccuggagauccucgacaucacccccugcagcuucggcgggguguccgugaucacgccgggcaccaacaccagcaaccaggucgccgugcuguaccaggacgugaacugcaccgagguccccguggccauccacgccgaccagcugacgcccaccuggcggguguacuccaccggcagcaacgucuuccagacccgcgccgggugccucaucggcgcggagcacgugaacaacuccuacgagugcgacauccccaucggggccggcaucugcgccagcuaccagacgcagaccaacuccccgcggcgcgcccggagcguggcgucccagagcaucaucgccuacaccaugucccugggcgccgagaacagcgucgccuacuccaacaacagcaucgccauccccaccaacuucacgaucuccgugaccaccgagauccugcccgugagcaugaccaagacgagcgucgacugcaccauguacaucugcggggacuccaccgagugcagcaaccuccugcugcaguacggcuccuucugcacccagcucaaccgcgcgcugacggggaucgccguggagcaggacaagaacacccaggagguguucgcccaggucaagcagaucuacaagacgcccccgaucaaggacuucggcggguucaacuucagccagauccugcccgaccccuccaagcccagcaagcgguccuucaucgaggaccuccuguucaacaaggugacccuggccgacgccggcuucaucaagcaguacggcgacugccucggggacaucgcggcccgcgaccugaucugcgcccagaaguucaacggccugaccgugcucccgccccugcugaccgacgagaugaucgcccaguacaccagcgcccuccuggcggggaccaucacguccggcuggaccuucggggccggcgccgcccugcagauccccuucgcgaugcagauggccuaccgguucaacggcaucggggucacccagaacgugcucuacgagaaccagaagcugaucgccaaccaguucaacagcgccaucggcaagauccaggacucccugagcuccaccgccagcgcgcucgggaagcugcaggacguggucaaccagaacgcccaggcccugaacacgcucgugaagugccuguccagcaacuucggcgccaucuccagcgugcugaacgacauccucucccgccuggacaaggucgaggccgaggugcagaucgaccggcugaucaccgggcgccuccagugccugcagaccuacgugacccagcagcugauccgggcggccgagauccgcgccagcgccaaccucgccgcgaccaagauguccgagugcguccugggccagagcaagcggguggacuucugcggcaagggguaccaccugauguccuucccccagagcgccccgcacggcguggucuuccuccacgugacguacguccccgcccaggagaagaacuucaccaccgcccccgcgaucugccacgacgggaaggcccacuucccccgcgagggcguguucguguccaacgggacccacugguucgucacgcagcggaacuucuacgagccgcagaucaucaccaccgacaacaccuucgugagcggcaacugcgacguggucaucggcaucgugaacaacacgguguacgacccccugcagcccgagcuggacuccggcggcgggagcgggggcgggcagaucuacgagggcaagcugaccgccgaggggcuccgcuucggcaucguggccagccgguucaaccacgcgcuggucgaccgccugguggagggggccaucgacgccaucgugcggcacggcgggcgcgaggaggacaucacccucguccgggugcccggcuccugggagaucccgguggccgccggcgagcuggcccgcaaggaggacaucgacgcggucaucgccaucggggugcugauccggggcgccacgccccacuucgacuacaucgccagcgagguguccaaggggcucgcggaccugagccuggagcuccgcaagcccaucaccuucggcgucaucaccgccgacacccuggagcaggccaucgagcgggccgggacgaagcacggcaacaagggcugggaggccgcgcuguccgccaucgagauggccaaccucuucaagagccugcgcugaggacuaguuauaagacugacuagcccgaugggccucccaacgggcccuccuccccuccuugcaccgagauuaauaaaaaaaaaaaaaaaaaaaaaaaaaaaaaaaaaaaaaaaaaaaaaaaaaaaaaaaaaaaaaaaaugcaucccccccccccccccccccccccccccccccaaaggcucuuuucagagccaccagaauu

SEQ ID NO: 12896 - RNA, 4141 nt, Artificial Sequence
  SARS-CoV-2/Wuhan/WIV05/2019__EPI_ISL_402128 spike protein mRNA gc (1-1147)(F970C_G999C) LumSynth construct
aggagaaagcuuaccauguucguguuccugguccuccugccccuggugagcucccagugcgugaaccucaccacccgcacgcagcugccgcccgccuacaccaacagcuucacccggggcgucuacuaccccgacaagguguuccgcuccagcgugcugcacuccacccaggaccucuuccugcccuucuucagcaacgucacgugguuccacgccauccacguguccgggaccaacggcaccaagcgguucgacaacccggugcugcccuucaacgacggggucuacuucgcgagcaccgagaaguccaacaucauccgcggcuggaucuucgggacgacccucgacagcaagacccagucccugcugaucgugaacaacgccaccaacguggucaucaaggugugcgaguuccaguucugcaacgaccccuuccucggcguguacuaccacaagaacaacaagagcuggauggaguccgaguuccgggucuacagcuccgccaacaacugcacguucgaguacgugagccagcccuuccugauggaccuggagggcaagcaggggaacuucaagaaccuccgcgaguucguguucaagaacaucgacggcuacuucaagaucuacuccaagcacaccccgaucaaccugguccgggaccugccccagggguucagcgcccucgagccccugguggaccugcccaucggcaucaacaucacccgcuuccagacccuccuggcccugcaccgguccuaccucacgccgggggacagcagcuccggcuggaccgcgggcgccgccgccuacuacgugggguaccugcagccccgcaccuuccugcucaaguacaacgagaacggcaccaucacggacgcggucgacugcgcccuggacccccugagcgagaccaagugcacccucaaguccuucaccguggagaaggggaucuaccagacgagcaacuuccgggugcagcccaccgaguccaucguccgcuucccgaacaucaccaaccugugccccuucggcgagguguucaacgccacccgguucgccagcgucuacgccuggaaccgcaagcggaucuccaacugcguggcggacuacagcgugcuguacaacuccgccagcuucuccacguucaagugcuacggcgucagccccaccaagcucaacgaccugugcuucaccaacguguacgccgacuccuucgugauccgcggggacgagguccggcagaucgcccccggccagaccgggaagaucgccgacuacaacuacaagcugccggacgacuucacgggcugcgugaucgcguggaacagcaacaaccucgacuccaaggucgggggcaacuacaacuaccuguaccgccuguuccgcaagagcaaccucaagcccuucgagcgggacaucuccaccgagaucuaccaggccggcagcacccccugcaacgggguggagggcuucaacugcuacuucccccugcaguccuacggguuccagccgaccaacggcgugggguaccagcccuaccggguggucgugcugagcuucgagcuccugcacgcccccgccacggugugcggccccaagaaguccaccaaccuggucaagaacaagugcgugaacuucaacuucaacggccucaccgggaccggcgugcugaccgagagcaacaagaaguuccugccguuccagcaguucgggcgcgacaucgccgacacgaccgacgcgguccgcgacccccagacccuggagauccucgacaucacccccugcagcuucggcgggguguccgugaucacgccgggcaccaacaccagcaaccaggucgccgugcuguaccaggacgugaacugcaccgagguccccguggccauccacgccgaccagcugacgcccaccuggcggguguacuccaccggcagcaacgucuuccagacccgcgccgggugccucaucggcgcggagcacgugaacaacuccuacgagugcgacauccccaucggggccggcaucugcgccagcuaccagacgcagaccaacuccccgcggcgcgcccggagcguggcgucccagagcaucaucgccuacaccaugucccugggcgccgagaacagcgucgccuacuccaacaacagcaucgccauccccaccaacuucacgaucuccgugaccaccgagauccugcccgugagcaugaccaagacgagcgucgacugcaccauguacaucugcggggacuccaccgagugcagcaaccuccugcugcaguacggcuccuucugcacccagcucaaccgcgcgcugacggggaucgccguggagcaggacaagaacacccaggagguguucgcccaggucaagcagaucuacaagacgcccccgaucaaggacuucggcggguucaacuucagccagauccugcccgaccccuccaagcccagcaagcgguccuucaucgaggaccuccuguucaacaaggugacccuggccgacgccggcuucaucaagcaguacggcgacugccucggggacaucgcggcccgcgaccugaucugcgcccagaaguucaacggccugaccgugcucccgccccugcugaccgacgagaugaucgcccaguacaccagcgcccuccuggcggggaccaucacguccggcuggaccuucggggccggcgccgcccugcagauccccuucgcgaugcagauggccuaccgguucaacggcaucggggucacccagaacgugcucuacgagaaccagaagcugaucgccaaccaguucaacagcgccaucggcaagauccaggacucccugagcuccaccgccagcgcgcucgggaagcugcaggacguggucaaccagaacgcccaggcccugaacacgcucgugaagcagcuguccagcaacugcggcgccaucuccagcgugcugaacgacauccucucccgccuggacaaggucgaggccgaggugcagaucgaccggcugaucaccugucgccuccagagccugcagaccuacgugacccagcagcugauccgggcggccgagauccgcgccagcgccaaccucgccgcgaccaagauguccgagugcguccugggccagagcaagcggguggacuucugcggcaagggguaccaccugauguccuucccccagagcgccccgcacggcguggucuuccuccacgugacguacguccccgcccaggagaagaacuucaccaccgcccccgcgaucugccacgacgggaaggcccacuucccccgcgagggcguguucguguccaacgggacccacugguucgucacgcagcggaacuucuacgagccgcagaucaucaccaccgacaacaccuucgugagcggcaacugcgacguggucaucggcaucgugaacaacacgguguacgacccccugcagcccgagcuggacuccggcggcgggagcgggggcgggcagaucuacgagggcaagcugaccgccgaggggcuccgcuucggcaucguggccagccgguucaaccacgcgcuggucgaccgccugguggagggggccaucgacgccaucgugcggcacggcgggcgcgaggaggacaucacccucguccgggugcccggcuccugggagaucccgguggccgccggcgagcuggcccgcaaggaggacaucgacgcggucaucgccaucggggugcugauccggggcgccacgccccacuucgacuacaucgccagcgagguguccaaggggcucgcggaccugagccuggagcuccgcaagcccaucaccuucggcgucaucaccgccgacacccuggagcaggccaucgagcgggccgggacgaagcacggcaacaagggcugggaggccgcgcuguccgccaucgagauggccaaccucuucaagagccugcgcugaggacuaguuauaagacugacuagcccgaugggccucccaacgggcccuccuccccuccuugcaccgagauuaauaaaaaaaaaaaaaaaaaaaaaaaaaaaaaaaaaaaaaaaaaaaaaaaaaaaaaaaaaaaaaaaaugcaucccccccccccccccccccccccccccccccaaaggcucuuuucagagccaccagaauu

SEQ ID NO: 12897 - RNA, 4141 nt, Artificial Sequence
  SARS-CoV-2/Wuhan/WIV05/2019__EPI_ISL_402128 spike protein mRNA gc (1-1147)(A972C_R995C) LumSynth construct
aggagaaagcuuaccauguucguguuccugguccuccugccccuggugagcucccagugcgugaaccucaccacccgcacgcagcugccgcccgccuacaccaacagcuucacccggggcgucuacuaccccgacaagguguuccgcuccagcgugcugcacuccacccaggaccucuuccugcccuucuucagcaacgucacgugguuccacgccauccacguguccgggaccaacggcaccaagcgguucgacaacccggugcugcccuucaacgacggggucuacuucgcgagcaccgagaaguccaacaucauccgcggcuggaucuucgggacgacccucgacagcaagacccagucccugcugaucgugaacaacgccaccaacguggucaucaaggugugcgaguuccaguucugcaacgaccccuuccucggcguguacuaccacaagaacaacaagagcuggauggaguccgaguuccgggucuacagcuccgccaacaacugcacguucgaguacgugagccagcccuuccugauggaccuggagggcaagcaggggaacuucaagaaccuccgcgaguucguguucaagaacaucgacggcuacuucaagaucuacuccaagcacaccccgaucaaccugguccgggaccugccccagggguucagcgcccucgagccccugguggaccugcccaucggcaucaacaucacccgcuuccagacccuccuggcccugcaccgguccuaccucacgccgggggacagcagcuccggcuggaccgcgggcgccgccgccuacuacgugggguaccugcagccccgcaccuuccugcucaaguacaacgagaacggcaccaucacggacgcggucgacugcgcccuggacccccugagcgagaccaagugcacccucaaguccuucaccguggagaaggggaucuaccagacgagcaacuuccgggugcagcccaccgaguccaucguccgcuucccgaacaucaccaaccugugccccuucggcgagguguucaacgccacccgguucgccagcgucuacgccuggaaccgcaagcggaucuccaacugcguggcggacuacagcgugcuguacaacuccgccagcuucuccacguucaagugcuacggcgucagccccaccaagcucaacgaccugugcuucaccaacguguacgccgacuccuucgugauccgcggggacgagguccggcagaucgcccccggccagaccgggaagaucgccgacuacaacuacaagcugccggacgacuucacgggcugcgugaucgcguggaacagcaacaaccucgacuccaaggucgggggcaacuacaacuaccuguaccgccuguuccgcaagagcaaccucaagcccuucgagcgggacaucuccaccgagaucuaccaggccggcagcacccccugcaacgggguggagggcuucaacugcuacuucccccugcaguccuacggguuccagccgaccaacggcgugggguaccagcccuaccggguggucgugcugagcuucgagcuccugcacgcccccgccacggugugcggccccaagaaguccaccaaccuggucaagaacaagugcgugaacuucaacuucaacggccucaccgggaccggcgugcugaccgagagcaacaagaaguuccugccguuccagcaguucgggcgcgacaucgccgacacgaccgacgcgguccgcgacccccagacccuggagauccucgacaucacccccugcagcuucggcgggguguccgugaucacgccgggcaccaacaccagcaaccaggucgccgugcuguaccaggacgugaacugcaccgagguccccguggccauccacgccgaccagcugacgcccaccuggcggguguacuccaccggcagcaacgucuuccagacccgcgccgggugccucaucggcgcggagcacgugaacaacuccuacgagugcgacauccccaucggggccggcaucugcgccagcuaccagacgcagaccaacuccccgcggcgcgcccggagcguggcgucccagagcaucaucgccuacaccaugucccugggcgccgagaacagcgucgccuacuccaacaacagcaucgccauccccaccaacuucacgaucuccgugaccaccgagauccugcccgugagcaugaccaagacgagcgucgacugcaccauguacaucugcggggacuccaccgagugcagcaaccuccugcugcaguacggcuccuucugcacccagcucaaccgcgcgcugacggggaucgccguggagcaggacaagaacacccaggagguguucgcccaggucaagcagaucuacaagacgcccccgaucaaggacuucggcggguucaacuucagccagauccugcccgaccccuccaagcccagcaagcgguccuucaucgaggaccuccuguucaacaaggugacccuggccgacgccggcuucaucaagcaguacggcgacugccucggggacaucgcggcccgcgaccugaucugcgcccagaaguucaacggccugaccgugcucccgccccugcugaccgacgagaugaucgcccaguacaccagcgcccuccuggcggggaccaucacguccggcuggaccuucggggccggcgccgcccugcagauccccuucgcgaugcagauggccuaccgguucaacggcaucggggucacccagaacgugcucuacgagaaccagaagcugaucgccaaccaguucaacagcgccaucggcaagauccaggacucccugagcuccaccgccagcgcgcucgggaagcugcaggacguggucaaccagaacgcccaggcccugaacacgcucgugaagcagcuguccagcaacuucggcugcaucuccagcgugcugaacgacauccucucccgccuggacaaggucgaggccgaggugcagaucgacugccugaucaccgggcgccuccagagccugcagaccuacgugacccagcagcugauccgggcggccgagauccgcgccagcgccaaccucgccgcgaccaagauguccgagugcguccugggccagagcaagcggguggacuucugcggcaagggguaccaccugauguccuucccccagagcgccccgcacggcguggucuuccuccacgugacguacguccccgcccaggagaagaacuucaccaccgcccccgcgaucugccacgacgggaaggcccacuucccccgcgagggcguguucguguccaacgggacccacugguucgucacgcagcggaacuucuacgagccgcagaucaucaccaccgacaacaccuucgugagcggcaacugcgacguggucaucggcaucgugaacaacacgguguacgacccccugcagcccgagcuggacuccggcggcgggagcgggggcgggcagaucuacgagggcaagcugaccgccgaggggcuccgcuucggcaucguggccagccgguucaaccacgcgcuggucgaccgccugguggagggggccaucgacgccaucgugcggcacggcgggcgcgaggaggacaucacccucguccgggugcccggcuccugggagaucccgguggccgccggcgagcuggcccgcaaggaggacaucgacgcggucaucgccaucggggugcugauccggggcgccacgccccacuucgacuacaucgccagcgagguguccaaggggcucgcggaccugagccuggagcuccgcaagcccaucaccuucggcgucaucaccgccgacacccuggagcaggccaucgagcgggccgggacgaagcacggcaacaagggcugggaggccgcgcuguccgccaucgagauggccaaccucuucaagagccugcgcugaggacuaguuauaagacugacuagcccgaugggccucccaacgggcccuccuccccuccuugcaccgagauuaauaaaaaaaaaaaaaaaaaaaaaaaaaaaaaaaaaaaaaaaaaaaaaaaaaaaaaaaaaaaaaaaaugcaucccccccccccccccccccccccccccccccaaaggcucuuuucagagccaccagaauu

SEQ ID NO: 12898 - RNA, 4141 nt, Artificial Sequence
  SARS-CoV-2/Wuhan/WIV05/2019__EPI_ISL_402128 spike protein mRNA gc (1-1147)(A890C_V1040C) LumSynth construct
aggagaaagcuuaccauguucguguuccugguccuccugccccuggugagcucccagugcgugaaccucaccacccgcacgcagcugccgcccgccuacaccaacagcuucacccggggcgucuacuaccccgacaagguguuccgcuccagcgugcugcacuccacccaggaccucuuccugcccuucuucagcaacgucacgugguuccacgccauccacguguccgggaccaacggcaccaagcgguucgacaacccggugcugcccuucaacgacggggucuacuucgcgagcaccgagaaguccaacaucauccgcggcuggaucuucgggacgacccucgacagcaagacccagucccugcugaucgugaacaacgccaccaacguggucaucaaggugugcgaguuccaguucugcaacgaccccuuccucggcguguacuaccacaagaacaacaagagcuggauggaguccgaguuccgggucuacagcuccgccaacaacugcacguucgaguacgugagccagcccuuccugauggaccuggagggcaagcaggggaacuucaagaaccuccgcgaguucguguucaagaacaucgacggcuacuucaagaucuacuccaagcacaccccgaucaaccugguccgggaccugccccagggguucagcgcccucgagccccugguggaccugcccaucggcaucaacaucacccgcuuccagacccuccuggcccugcaccgguccuaccucacgccgggggacagcagcuccggcuggaccgcgggcgccgccgccuacuacgugggguaccugcagccccgcaccuuccugcucaaguacaacgagaacggcaccaucacggacgcggucgacugcgcccuggacccccugagcgagaccaagugcacccucaaguccuucaccguggagaaggggaucuaccagacgagcaacuuccgggugcagcccaccgaguccaucguccgcuucccgaacaucaccaaccugugccccuucggcgagguguucaacgccacccgguucgccagcgucuacgccuggaaccgcaagcggaucuccaacugcguggcggacuacagcgugcuguacaacuccgccagcuucuccacguucaagugcuacggcgucagccccaccaagcucaacgaccugugcuucaccaacguguacgccgacuccuucgugauccgcggggacgagguccggcagaucgcccccggccagaccgggaagaucgccgacuacaacuacaagcugccggacgacuucacgggcugcgugaucgcguggaacagcaacaaccucgacuccaaggucgggggcaacuacaacuaccuguaccgccuguuccgcaagagcaaccucaagcccuucgagcgggacaucuccaccgagaucuaccaggccggcagcacccccugcaacgggguggagggcuucaacugcuacuucccccugcaguccuacggguuccagccgaccaacggcgugggguaccagcccuaccggguggucgugcugagcuucgagcuccugcacgcccccgccacggugugcggccccaagaaguccaccaaccuggucaagaacaagugcgugaacuucaacuucaacggccucaccgggaccggcgugcugaccgagagcaacaagaaguuccugccguuccagcaguucgggcgcgacaucgccgacacgaccgacgcgguccgcgacccccagacccuggagauccucgacaucacccccugcagcuucggcgggguguccgugaucacgccgggcaccaacaccagcaaccaggucgccgugcuguaccaggacgugaacugcaccgagguccccguggccauccacgccgaccagcugacgcccaccuggcggguguacuccaccggcagcaacgucuuccagacccgcgccgggugccucaucggcgcggagcacgugaacaacuccuacgagugcgacauccccaucggggccggcaucugcgccagcuaccagacgcagaccaacuccccgcggcgcgcccggagcguggcgucccagagcaucaucgccuacaccaugucccugggcgccgagaacagcgucgccuacuccaacaacagcaucgccauccccaccaacuucacgaucuccgugaccaccgagauccugcccgugagcaugaccaagacgagcgucgacugcaccauguacaucugcggggacuccaccgagugcagcaaccuccugcugcaguacggcuccuucugcacccagcucaaccgcgcgcugacggggaucgccguggagcaggacaagaacacccaggagguguucgcccaggucaagcagaucuacaagacgcccccgaucaaggacuucggcggguucaacuucagccagauccugcccgaccccuccaagcccagcaagcgguccuucaucgaggaccuccuguucaacaaggugacccuggccgacgccggcuucaucaagcaguacggcgacugccucggggacaucgcggcccgcgaccugaucugcgcccagaaguucaacggccugaccgugcucccgccccugcugaccgacgagaugaucgcccaguacaccagcgcccuccuggcggggaccaucacguccggcuggaccuucgggugcggcgccgcccugcagauccccuucgcgaugcagauggccuaccgguucaacggcaucggggucacccagaacgugcucuacgagaaccagaagcugaucgccaaccaguucaacagcgccaucggcaagauccaggacucccugagcuccaccgccagcgcgcucgggaagcugcaggacguggucaaccagaacgcccaggcccugaacacgcucgugaagcagcuguccagcaacuucggcgccaucuccagcgugcugaacgacauccucucccgccuggacaaggucgaggccgaggugcagaucgaccggcugaucaccgggcgccuccagagccugcagaccuacgugacccagcagcugauccgggcggccgagauccgcgccagcgccaaccucgccgcgaccaagauguccgagugcguccugggccagagcaagcggugcgacuucugcggcaagggguaccaccugauguccuucccccagagcgccccgcacggcguggucuuccuccacgugacguacguccccgcccaggagaagaacuucaccaccgcccccgcgaucugccacgacgggaaggcccacuucccccgcgagggcguguucguguccaacgggacccacugguucgucacgcagcggaacuucuacgagccgcagaucaucaccaccgacaacaccuucgugagcggcaacugcgacguggucaucggcaucgugaacaacacgguguacgacccccugcagcccgagcuggacuccggcggcgggagcgggggcgggcagaucuacgagggcaagcugaccgccgaggggcuccgcuucggcaucguggccagccgguucaaccacgcgcuggucgaccgccugguggagggggccaucgacgccaucgugcggcacggcgggcgcgaggaggacaucacccucguccgggugcccggcuccugggagaucccgguggccgccggcgagcuggcccgcaaggaggacaucgacgcggucaucgccaucggggugcugauccggggcgccacgccccacuucgacuacaucgccagcgagguguccaaggggcucgcggaccugagccuggagcuccgcaagcccaucaccuucggcgucaucaccgccgacacccuggagcaggccaucgagcgggccgggacgaagcacggcaacaagggcugggaggccgcgcuguccgccaucgagauggccaaccucuucaagagccugcgcugaggacuaguuauaagacugacuagcccgaugggccucccaacgggcccuccuccccuccuugcaccgagauuaauaaaaaaaaaaaaaaaaaaaaaaaaaaaaaaaaaaaaaaaaaaaaaaaaaaaaaaaaaaaaaaaaugcaucccccccccccccccccccccccccccccccaaaggcucuuuucagagccaccagaauu

SEQ ID NO: 12899 - RNA, 4141 nt, Artificial Sequence
  SARS-CoV-2/Wuhan/WIV05/2019__EPI_ISL_402128 spike protein mRNA gc (1-1147)(T874C_S1055C) LumSynth construct
aggagaaagcuuaccauguucguguuccugguccuccugccccuggugagcucccagugcgugaaccucaccacccgcacgcagcugccgcccgccuacaccaacagcuucacccggggcgucuacuaccccgacaagguguuccgcuccagcgugcugcacuccacccaggaccucuuccugcccuucuucagcaacgucacgugguuccacgccauccacguguccgggaccaacggcaccaagcgguucgacaacccggugcugcccuucaacgacggggucuacuucgcgagcaccgagaaguccaacaucauccgcggcuggaucuucgggacgacccucgacagcaagacccagucccugcugaucgugaacaacgccaccaacguggucaucaaggugugcgaguuccaguucugcaacgaccccuuccucggcguguacuaccacaagaacaacaagagcuggauggaguccgaguuccgggucuacagcuccgccaacaacugcacguucgaguacgugagccagcccuuccugauggaccuggagggcaagcaggggaacuucaagaaccuccgcgaguucguguucaagaacaucgacggcuacuucaagaucuacuccaagcacaccccgaucaaccugguccgggaccugccccagggguucagcgcccucgagccccugguggaccugcccaucggcaucaacaucacccgcuuccagacccuccuggcccugcaccgguccuaccucacgccgggggacagcagcuccggcuggaccgcgggcgccgccgccuacuacgugggguaccugcagccccgcaccuuccugcucaaguacaacgagaacggcaccaucacggacgcggucgacugcgcccuggacccccugagcgagaccaagugcacccucaaguccuucaccguggagaaggggaucuaccagacgagcaacuuccgggugcagcccaccgaguccaucguccgcuucccgaacaucaccaaccugugccccuucggcgagguguucaacgccacccgguucgccagcgucuacgccuggaaccgcaagcggaucuccaacugcguggcggacuacagcgugcuguacaacuccgccagcuucuccacguucaagugcuacggcgucagccccaccaagcucaacgaccugugcuucaccaacguguacgccgacuccuucgugauccgcggggacgagguccggcagaucgcccccggccagaccgggaagaucgccgacuacaacuacaagcugccggacgacuucacgggcugcgugaucgcguggaacagcaacaaccucgacuccaaggucgggggcaacuacaacuaccuguaccgccuguuccgcaagagcaaccucaagcccuucgagcgggacaucuccaccgagaucuaccaggccggcagcacccccugcaacgggguggagggcuucaacugcuacuucccccugcaguccuacggguuccagccgaccaacggcgugggguaccagcccuaccggguggucgugcugagcuucgagcuccugcacgcccccgccacggugugcggccccaagaaguccaccaaccuggucaagaacaagugcgugaacuucaacuucaacggccucaccgggaccggcgugcugaccgagagcaacaagaaguuccugccguuccagcaguucgggcgcgacaucgccgacacgaccgacgcgguccgcgacccccagacccuggagauccucgacaucacccccugcagcuucggcgggguguccgugaucacgccgggcaccaacaccagcaaccaggucgccgugcuguaccaggacgugaacugcaccgagguccccguggccauccacgccgaccagcugacgcccaccuggcggguguacuccaccggcagcaacgucuuccagacccgcgccgggugccucaucggcgcggagcacgugaacaacuccuacgagugcgacauccccaucggggccggcaucugcgccagcuaccagacgcagaccaacuccccgcggcgcgcccggagcguggcgucccagagcaucaucgccuacaccaugucccugggcgccgagaacagcgucgccuacuccaacaacagcaucgccauccccaccaacuucacgaucuccgugaccaccgagauccugcccgugagcaugaccaagacgagcgucgacugcaccauguacaucugcggggacuccaccgagugcagcaaccuccugcugcaguacggcuccuucugcacccagcucaaccgcgcgcugacggggaucgccguggagcaggacaagaacacccaggagguguucgcccaggucaagcagaucuacaagacgcccccgaucaaggacuucggcggguucaacuucagccagauccugcccgaccccuccaagcccagcaagcgguccuucaucgaggaccuccuguucaacaaggugacccuggccgacgccggcuucaucaagcaguacggcgacugccucggggacaucgcggcccgcgaccugaucugcgcccagaaguucaacggccugaccgugcucccgccccugcugaccgacgagaugaucgcccaguacugcagcgcccuccuggcggggaccaucacguccggcuggaccuucggggccggcgccgcccugcagauccccuucgcgaugcagauggccuaccgguucaacggcaucggggucacccagaacgugcucuacgagaaccagaagcugaucgccaaccaguucaacagcgccaucggcaagauccaggacucccugagcuccaccgccagcgcgcucgggaagcugcaggacguggucaaccagaacgcccaggcccugaacacgcucgugaagcagcuguccagcaacuucggcgccaucuccagcgugcugaacgacauccucucccgccuggacaaggucgaggccgaggugcagaucgaccggcugaucaccgggcgccuccagagccugcagaccuacgugacccagcagcugauccgggcggccgagauccgcgccagcgccaaccucgccgcgaccaagauguccgagugcguccugggccagagcaagcggguggacuucugcggcaagggguaccaccugauguccuucccccagugcgccccgcacggcguggucuuccuccacgugacguacguccccgcccaggagaagaacuucaccaccgcccccgcgaucugccacgacgggaaggcccacuucccccgcgagggcguguucguguccaacgggacccacugguucgucacgcagcggaacuucuacgagccgcagaucaucaccaccgacaacaccuucgugagcggcaacugcgacguggucaucggcaucgugaacaacacgguguacgacccccugcagcccgagcuggacuccggcggcgggagcgggggcgggcagaucuacgagggcaagcugaccgccgaggggcuccgcuucggcaucguggccagccgguucaaccacgcgcuggucgaccgccugguggagggggccaucgacgccaucgugcggcacggcgggcgcgaggaggacaucacccucguccgggugcccggcuccugggagaucccgguggccgccggcgagcuggcccgcaaggaggacaucgacgcggucaucgccaucggggugcugauccggggcgccacgccccacuucgacuacaucgccagcgagguguccaaggggcucgcggaccugagccuggagcuccgcaagcccaucaccuucggcgucaucaccgccgacacccuggagcaggccaucgagcgggccgggacgaagcacggcaacaagggcugggaggccgcgcuguccgccaucgagauggccaaccucuucaagagccugcgcugaggacuaguuauaagacugacuagcccgaugggccucccaacgggcccuccuccccuccuugcaccgagauuaauaaaaaaaaaaaaaaaaaaaaaaaaaaaaaaaaaaaaaaaaaaaaaaaaaaaaaaaaaaaaaaaaugcaucccccccccccccccccccccccccccccccaaaggcucuuuucagagccaccagaauu

SEQ ID NO: 12900 - RNA, 4165 nt, Artificial Sequence
  SARS-CoV-2/Wuhan/WIV05/2019__EPI_ISL_402128 spike protein mRNA gc (1-1147) Ferritin construct
aggagaaagcuuaccauguucguguuccugguccuccugccccuggugagcucccagugcgugaaccucaccacccgcacgcagcugccgcccgccuacaccaacagcuucacccggggcgucuacuaccccgacaagguguuccgcuccagcgugcugcacuccacccaggaccucuuccugcccuucuucagcaacgucacgugguuccacgccauccacguguccgggaccaacggcaccaagcgguucgacaacccggugcugcccuucaacgacggggucuacuucgcgagcaccgagaaguccaacaucauccgcggcuggaucuucgggacgacccucgacagcaagacccagucccugcugaucgugaacaacgccaccaacguggucaucaaggugugcgaguuccaguucugcaacgaccccuuccucggcguguacuaccacaagaacaacaagagcuggauggaguccgaguuccgggucuacagcuccgccaacaacugcacguucgaguacgugagccagcccuuccugauggaccuggagggcaagcaggggaacuucaagaaccuccgcgaguucguguucaagaacaucgacggcuacuucaagaucuacuccaagcacaccccgaucaaccugguccgggaccugccccagggguucagcgcccucgagccccugguggaccugcccaucggcaucaacaucacccgcuuccagacccuccuggcccugcaccgguccuaccucacgccgggggacagcagcuccggcuggaccgcgggcgccgccgccuacuacgugggguaccugcagccccgcaccuuccugcucaaguacaacgagaacggcaccaucacggacgcggucgacugcgcccuggacccccugagcgagaccaagugcacccucaaguccuucaccguggagaaggggaucuaccagacgagcaacuuccgggugcagcccaccgaguccaucguccgcuucccgaacaucaccaaccugugccccuucggcgagguguucaacgccacccgguucgccagcgucuacgccuggaaccgcaagcggaucuccaacugcguggcggacuacagcgugcuguacaacuccgccagcuucuccacguucaagugcuacggcgucagccccaccaagcucaacgaccugugcuucaccaacguguacgccgacuccuucgugauccgcggggacgagguccggcagaucgcccccggccagaccgggaagaucgccgacuacaacuacaagcugccggacgacuucacgggcugcgugaucgcguggaacagcaacaaccucgacuccaaggucgggggcaacuacaacuaccuguaccgccuguuccgcaagagcaaccucaagcccuucgagcgggacaucuccaccgagaucuaccaggccggcagcacccccugcaacgggguggagggcuucaacugcuacuucccccugcaguccuacggguuccagccgaccaacggcgugggguaccagcccuaccggguggucgugcugagcuucgagcuccugcacgcccccgccacggugugcggccccaagaaguccaccaaccuggucaagaacaagugcgugaacuucaacuucaacggccucaccgggaccggcgugcugaccgagagcaacaagaaguuccugccguuccagcaguucgggcgcgacaucgccgacacgaccgacgcgguccgcgacccccagacccuggagauccucgacaucacccccugcagcuucggcgggguguccgugaucacgccgggcaccaacaccagcaaccaggucgccgugcuguaccaggacgugaacugcaccgagguccccguggccauccacgccgaccagcugacgcccaccuggcggguguacuccaccggcagcaacgucuuccagacccgcgccgggugccucaucggcgcggagcacgugaacaacuccuacgagugcgacauccccaucggggccggcaucugcgccagcuaccagacgcagaccaacuccccgcggcgcgcccggagcguggcgucccagagcaucaucgccuacaccaugucccugggcgccgagaacagcgucgccuacuccaacaacagcaucgccauccccaccaacuucacgaucuccgugaccaccgagauccugcccgugagcaugaccaagacgagcgucgacugcaccauguacaucugcggggacuccaccgagugcagcaaccuccugcugcaguacggcuccuucugcacccagcucaaccgcgcgcugacggggaucgccguggagcaggacaagaacacccaggagguguucgcccaggucaagcagaucuacaagacgcccccgaucaaggacuucggcggguucaacuucagccagauccugcccgaccccuccaagcccagcaagcgguccuucaucgaggaccuccuguucaacaaggugacccuggccgacgccggcuucaucaagcaguacggcgacugccucggggacaucgcggcccgcgaccugaucugcgcccagaaguucaacggccugaccgugcucccgccccugcugaccgacgagaugaucgcccaguacaccagcgcccuccuggcggggaccaucacguccggcuggaccuucggggccggcgccgcccugcagauccccuucgcgaugcagauggccuaccgguucaacggcaucggggucacccagaacgugcucuacgagaaccagaagcugaucgccaaccaguucaacagcgccaucggcaagauccaggacucccugagcuccaccgccagcgcgcucgggaagcugcaggacguggucaaccagaacgcccaggcccugaacacgcucgugaagcagcuguccagcaacuucggcgccaucuccagcgugcugaacgacauccucucccgccuggacaaggucgaggccgaggugcagaucgaccggcugaucaccgggcgccuccagagccugcagaccuacgugacccagcagcugauccgggcggccgagauccgcgccagcgccaaccucgccgcgaccaagauguccgagugcguccugggccagagcaagcggguggacuucugcggcaagggguaccaccugauguccuucccccagagcgccccgcacggcguggucuuccuccacgugacguacguccccgcccaggagaagaacuucaccaccgcccccgcgaucugccacgacgggaaggcccacuucccccgcgagggcguguucguguccaacgggacccacugguucgucacgcagcggaacuucuacgagccgcagaucaucaccaccgacaacaccuucgugagcggcaacugcgacguggucaucggcaucgugaacaacacgguguacgacccccugcagcccgagcuggacuccggcgggggcgggagcgacaucaucaagcuccugaacgagcaggucaacaaggagaugcaguccagcaaccuguacauguccaugagcuccuggugcuacacccacagccucgacggcgccgggcuguuccuguucgaccacgccgcggaggaguacgagcacgccaagaagcucaucaucuuccugaacgagaacaacgugcccgugcagcugaccuccaucagcgccccggagcacaaguucgagggccucacgcagaucuuccagaaggccuacgagcacgagcagcacaucuccgagagcaucaacaacaucguggaccacgccaucaaguccaaggaccacgcgaccuucaacuuccugcagugguacgucgccgagcagcacgaggaggaggugcuguucaaggacauccucgacaagaucgagcugaucgggaacgagaaccacggccuguaccucgccgaccaguacgugaaggggaucgccaagagccgcaaguccugaggacuaguuauaagacugacuagcccgaugggccucccaacgggcccuccuccccuccuugcaccgagauuaauaaaaaaaaaaaaaaaaaaaaaaaaaaaaaaaaaaaaaaaaaaaaaaaaaaaaaaaaaaaaaaaaugcaucccccccccccccccccccccccccccccccaaaggcucuuuucagagccaccagaauu

SEQ ID NO: 12901 - RNA, 4165 nt, Artificial Sequence
  SARS-CoV-2/Wuhan/WIV05/2019__EPI_ISL_402128 spike protein mRNA gc (1-1147)(K986P_V987P) Ferritin construct R9664
aggagaaagcuuaccauguucguguuccugguccuccugccccuggugagcucccagugcgugaaccucaccacccgcacgcagcugccgcccgccuacaccaacagcuucacccggggcgucuacuaccccgacaagguguuccgcuccagcgugcugcacuccacccaggaccucuuccugcccuucuucagcaacgucacgugguuccacgccauccacguguccgggaccaacggcaccaagcgguucgacaacccggugcugcccuucaacgacggggucuacuucgcgagcaccgagaaguccaacaucauccgcggcuggaucuucgggacgacccucgacagcaagacccagucccugcugaucgugaacaacgccaccaacguggucaucaaggugugcgaguuccaguucugcaacgaccccuuccucggcguguacuaccacaagaacaacaagagcuggauggaguccgaguuccgggucuacagcuccgccaacaacugcacguucgaguacgugagccagcccuuccugauggaccuggagggcaagcaggggaacuucaagaaccuccgcgaguucguguucaagaacaucgacggcuacuucaagaucuacuccaagcacaccccgaucaaccugguccgggaccugccccagggguucagcgcccucgagccccugguggaccugcccaucggcaucaacaucacccgcuuccagacccuccuggcccugcaccgguccuaccucacgccgggggacagcagcuccggcuggaccgcgggcgccgccgccuacuacgugggguaccugcagccccgcaccuuccugcucaaguacaacgagaacggcaccaucacggacgcggucgacugcgcccuggacccccugagcgagaccaagugcacccucaaguccuucaccguggagaaggggaucuaccagacgagcaacuuccgggugcagcccaccgaguccaucguccgcuucccgaacaucaccaaccugugccccuucggcgagguguucaacgccacccgguucgccagcgucuacgccuggaaccgcaagcggaucuccaacugcguggcggacuacagcgugcuguacaacuccgccagcuucuccacguucaagugcuacggcgucagccccaccaagcucaacgaccugugcuucaccaacguguacgccgacuccuucgugauccgcggggacgagguccggcagaucgcccccggccagaccgggaagaucgccgacuacaacuacaagcugccggacgacuucacgggcugcgugaucgcguggaacagcaacaaccucgacuccaaggucgggggcaacuacaacuaccuguaccgccuguuccgcaagagcaaccucaagcccuucgagcgggacaucuccaccgagaucuaccaggccggcagcacccccugcaacgggguggagggcuucaacugcuacuucccccugcaguccuacggguuccagccgaccaacggcgugggguaccagcccuaccggguggucgugcugagcuucgagcuccugcacgcccccgccacggugugcggccccaagaaguccaccaaccuggucaagaacaagugcgugaacuucaacuucaacggccucaccgggaccggcgugcugaccgagagcaacaagaaguuccugccguuccagcaguucgggcgcgacaucgccgacacgaccgacgcgguccgcgacccccagacccuggagauccucgacaucacccccugcagcuucggcgggguguccgugaucacgccgggcaccaacaccagcaaccaggucgccgugcuguaccaggacgugaacugcaccgagguccccguggccauccacgccgaccagcugacgcccaccuggcggguguacuccaccggcagcaacgucuuccagacccgcgccgggugccucaucggcgcggagcacgugaacaacuccuacgagugcgacauccccaucggggccggcaucugcgccagcuaccagacgcagaccaacuccccgcggcgcgcccggagcguggcgucccagagcaucaucgccuacaccaugucccugggcgccgagaacagcgucgccuacuccaacaacagcaucgccauccccaccaacuucacgaucuccgugaccaccgagauccugcccgugagcaugaccaagacgagcgucgacugcaccauguacaucugcggggacuccaccgagugcagcaaccuccugcugcaguacggcuccuucugcacccagcucaaccgcgcgcugacggggaucgccguggagcaggacaagaacacccaggagguguucgcccaggucaagcagaucuacaagacgcccccgaucaaggacuucggcggguucaacuucagccagauccugcccgaccccuccaagcccagcaagcgguccuucaucgaggaccuccuguucaacaaggugacccuggccgacgccggcuucaucaagcaguacggcgacugccucggggacaucgcggcccgcgaccugaucugcgcccagaaguucaacggccugaccgugcucccgccccugcugaccgacgagaugaucgcccaguacaccagcgcccuccuggcggggaccaucacguccggcuggaccuucggggccggcgccgcccugcagauccccuucgcgaugcagauggccuaccgguucaacggcaucggggucacccagaacgugcucuacgagaaccagaagcugaucgccaaccaguucaacagcgccaucggcaagauccaggacucccugagcuccaccgccagcgcgcucgggaagcugcaggacguggucaaccagaacgcccaggcccugaacacgcucgugaagcagcuguccagcaacuucggcgccaucuccagcgugcugaacgacauccucucccgccuggacccgcccgaggccgaggugcagaucgaccggcugaucaccgggcgccuccagagccugcagaccuacgugacccagcagcugauccgggcggccgagauccgcgccagcgccaaccucgccgcgaccaagauguccgagugcguccugggccagagcaagcggguggacuucugcggcaagggguaccaccugauguccuucccccagagcgccccgcacggcguggucuuccuccacgugacguacguccccgcccaggagaagaacuucaccaccgcccccgcgaucugccacgacgggaaggcccacuucccccgcgagggcguguucguguccaacgggacccacugguucgucacgcagcggaacuucuacgagccgcagaucaucaccaccgacaacaccuucgugagcggcaacugcgacguggucaucggcaucgugaacaacacgguguacgacccccugcagcccgagcuggacuccggcgggggcgggagcgacaucaucaagcuccugaacgagcaggucaacaaggagaugcaguccagcaaccuguacauguccaugagcuccuggugcuacacccacagccucgacggcgccgggcuguuccuguucgaccacgccgcggaggaguacgagcacgccaagaagcucaucaucuuccugaacgagaacaacgugcccgugcagcugaccuccaucagcgccccggagcacaaguucgagggccucacgcagaucuuccagaaggccuacgagcacgagcagcacaucuccgagagcaucaacaacaucguggaccacgccaucaaguccaaggaccacgcgaccuucaacuuccugcagugguacgucgccgagcagcacgaggaggaggugcuguucaaggacauccucgacaagaucgagcugaucgggaacgagaaccacggccuguaccucgccgaccaguacgugaaggggaucgccaagagccgcaaguccugaggacuaguuauaagacugacuagcccgaugggccucccaacgggcccuccuccccuccuugcaccgagauuaauaaaaaaaaaaaaaaaaaaaaaaaaaaaaaaaaaaaaaaaaaaaaaaaaaaaaaaaaaaaaaaaaugcaucccccccccccccccccccccccccccccccaaaggcucuuuucagagccaccagaauu

SEQ ID NO: 12902 - RNA, 4165 nt, Artificial Sequence
  SARS-CoV-2/Wuhan/WIV05/2019__EPI_ISL_402128 spike protein mRNA gc (1-1147)(K986P_V987P_T887WN_A1020W) Ferritin construct
aggagaaagcuuaccauguucguguuccugguccuccugccccuggugagcucccagugcgugaaccucaccacccgcacgcagcugccgcccgccuacaccaacagcuucacccggggcgucuacuaccccgacaagguguuccgcuccagcgugcugcacuccacccaggaccucuuccugcccuucuucagcaacgucacgugguuccacgccauccacguguccgggaccaacggcaccaagcgguucgacaacccggugcugcccuucaacgacggggucuacuucgcgagcaccgagaaguccaacaucauccgcggcuggaucuucgggacgacccucgacagcaagacccagucccugcugaucgugaacaacgccaccaacguggucaucaaggugugcgaguuccaguucugcaacgaccccuuccucggcguguacuaccacaagaacaacaagagcuggauggaguccgaguuccgggucuacagcuccgccaacaacugcacguucgaguacgugagccagcccuuccugauggaccuggagggcaagcaggggaacuucaagaaccuccgcgaguucguguucaagaacaucgacggcuacuucaagaucuacuccaagcacaccccgaucaaccugguccgggaccugccccagggguucagcgcccucgagccccugguggaccugcccaucggcaucaacaucacccgcuuccagacccuccuggcccugcaccgguccuaccucacgccgggggacagcagcuccggcuggaccgcgggcgccgccgccuacuacgugggguaccugcagccccgcaccuuccugcucaaguacaacgagaacggcaccaucacggacgcggucgacugcgcccuggacccccugagcgagaccaagugcacccucaaguccuucaccguggagaaggggaucuaccagacgagcaacuuccgggugcagcccaccgaguccaucguccgcuucccgaacaucaccaaccugugccccuucggcgagguguucaacgccacccgguucgccagcgucuacgccuggaaccgcaagcggaucuccaacugcguggcggacuacagcgugcuguacaacuccgccagcuucuccacguucaagugcuacggcgucagccccaccaagcucaacgaccugugcuucaccaacguguacgccgacuccuucgugauccgcggggacgagguccggcagaucgcccccggccagaccgggaagaucgccgacuacaacuacaagcugccggacgacuucacgggcugcgugaucgcguggaacagcaacaaccucgacuccaaggucgggggcaacuacaacuaccuguaccgccuguuccgcaagagcaaccucaagcccuucgagcgggacaucuccaccgagaucuaccaggccggcagcacccccugcaacgggguggagggcuucaacugcuacuucccccugcaguccuacggguuccagccgaccaacggcgugggguaccagcccuaccggguggucgugcugagcuucgagcuccugcacgcccccgccacggugugcggccccaagaaguccaccaaccuggucaagaacaagugcgugaacuucaacuucaacggccucaccgggaccggcgugcugaccgagagcaacaagaaguuccugccguuccagcaguucgggcgcgacaucgccgacacgaccgacgcgguccgcgacccccagacccuggagauccucgacaucacccccugcagcuucggcgggguguccgugaucacgccgggcaccaacaccagcaaccaggucgccgugcuguaccaggacgugaacugcaccgagguccccguggccauccacgccgaccagcugacgcccaccuggcggguguacuccaccggcagcaacgucuuccagacccgcgccgggugccucaucggcgcggagcacgugaacaacuccuacgagugcgacauccccaucggggccggcaucugcgccagcuaccagacgcagaccaacuccccgcggcgcgcccggagcguggcgucccagagcaucaucgccuacaccaugucccugggcgccgagaacagcgucgccuacuccaacaacagcaucgccauccccaccaacuucacgaucuccgugaccaccgagauccugcccgugagcaugaccaagacgagcgucgacugcaccauguacaucugcggggacuccaccgagugcagcaaccuccugcugcaguacggcuccuucugcacccagcucaaccgcgcgcugacggggaucgccguggagcaggacaagaacacccaggagguguucgcccaggucaagcagaucuacaagacgcccccgaucaaggacuucggcggguucaacuucagccagauccugcccgaccccuccaagcccagcaagcgguccuucaucgaggaccuccuguucaacaaggugacccuggccgacgccggcuucaucaagcaguacggcgacugccucggggacaucgcggcccgcgaccugaucugcgcccagaaguucaacggccugaccgugcucccgccccugcugaccgacgagaugaucgcccaguacaccagcgcccuccuggcggggaccaucacguccggcuggugguucggggccggcgccgcccugcagauccccuucgcgaugcagauggccuaccgguucaacggcaucggggucacccagaacgugcucuacgagaaccagaagcugaucgccaaccaguucaacagcgccaucggcaagauccaggacucccugagcuccaccgccagcgcgcucgggaagcugcaggacguggucaaccagaacgcccaggcccugaacacgcucgugaagcagcuguccagcaacuucggcgccaucuccagcgugcugaacgacauccucucccgccuggacccgcccgaggccgaggugcagaucgaccggcugaucaccgggcgccuccagagccugcagaccuacgugacccagcagcugauccgggcggccgagauccgcuggagcgccaaccucgccgcgaccaagauguccgagugcguccugggccagagcaagcggguggacuucugcggcaagggguaccaccugauguccuucccccagagcgccccgcacggcguggucuuccuccacgugacguacguccccgcccaggagaagaacuucaccaccgcccccgcgaucugccacgacgggaaggcccacuucccccgcgagggcguguucguguccaacgggacccacugguucgucacgcagcggaacuucuacgagccgcagaucaucaccaccgacaacaccuucgugagcggcaacugcgacguggucaucggcaucgugaacaacacgguguacgacccccugcagcccgagcuggacuccggcgggggcgggagcgacaucaucaagcuccugaacgagcaggucaacaaggagaugcaguccagcaaccuguacauguccaugagcuccuggugcuacacccacagccucgacggcgccgggcuguuccuguucgaccacgccgcggaggaguacgagcacgccaagaagcucaucaucuuccugaacgagaacaacgugcccgugcagcugaccuccaucagcgccccggagcacaaguucgagggccucacgcagaucuuccagaaggccuacgagcacgagcagcacaucuccgagagcaucaacaacaucguggaccacgccaucaaguccaaggaccacgcgaccuucaacuuccugcagugguacgucgccgagcagcacgaggaggaggugcuguucaaggacauccucgacaagaucgagcugaucgggaacgagaaccacggccuguaccucgccgaccaguacgugaaggggaucgccaagagccgcaaguccugaggacuaguuauaagacugacuagcccgaugggccucccaacgggcccuccuccccuccuugcaccgagauuaauaaaaaaaaaaaaaaaaaaaaaaaaaaaaaaaaaaaaaaaaaaaaaaaaaaaaaaaaaaaaaaaaugcaucccccccccccccccccccccccccccccccaaaggcucuuuucagagccaccagaauu

SEQ ID NO: 12903 - RNA, 4165 nt, Artificial Sequence
  SARS-CoV-2/Wuhan/WIV05/2019__EPI_ISL_402128 spike protein mRNA gc (1-1147)(K986P_V987P_P1069F) Ferritin construct
aggagaaagcuuaccauguucguguuccugguccuccugccccuggugagcucccagugcgugaaccucaccacccgcacgcagcugccgcccgccuacaccaacagcuucacccggggcgucuacuaccccgacaagguguuccgcuccagcgugcugcacuccacccaggaccucuuccugcccuucuucagcaacgucacgugguuccacgccauccacguguccgggaccaacggcaccaagcgguucgacaacccggugcugcccuucaacgacggggucuacuucgcgagcaccgagaaguccaacaucauccgcggcuggaucuucgggacgacccucgacagcaagacccagucccugcugaucgugaacaacgccaccaacguggucaucaaggugugcgaguuccaguucugcaacgaccccuuccucggcguguacuaccacaagaacaacaagagcuggauggaguccgaguuccgggucuacagcuccgccaacaacugcacguucgaguacgugagccagcccuuccugauggaccuggagggcaagcaggggaacuucaagaaccuccgcgaguucguguucaagaacaucgacggcuacuucaagaucuacuccaagcacaccccgaucaaccugguccgggaccugccccagggguucagcgcccucgagccccugguggaccugcccaucggcaucaacaucacccgcuuccagacccuccuggcccugcaccgguccuaccucacgccgggggacagcagcuccggcuggaccgcgggcgccgccgccuacuacgugggguaccugcagccccgcaccuuccugcucaaguacaacgagaacggcaccaucacggacgcggucgacugcgcccuggacccccugagcgagaccaagugcacccucaaguccuucaccguggagaaggggaucuaccagacgagcaacuuccgggugcagcccaccgaguccaucguccgcuucccgaacaucaccaaccugugccccuucggcgagguguucaacgccacccgguucgccagcgucuacgccuggaaccgcaagcggaucuccaacugcguggcggacuacagcgugcuguacaacuccgccagcuucuccacguucaagugcuacggcgucagccccaccaagcucaacgaccugugcuucaccaacguguacgccgacuccuucgugauccgcggggacgagguccggcagaucgcccccggccagaccgggaagaucgccgacuacaacuacaagcugccggacgacuucacgggcugcgugaucgcguggaacagcaacaaccucgacuccaaggucgggggcaacuacaacuaccuguaccgccuguuccgcaagagcaaccucaagcccuucgagcgggacaucuccaccgagaucuaccaggccggcagcacccccugcaacgggguggagggcuucaacugcuacuucccccugcaguccuacggguuccagccgaccaacggcgugggguaccagcccuaccggguggucgugcugagcuucgagcuccugcacgcccccgccacggugugcggccccaagaaguccaccaaccuggucaagaacaagugcgugaacuucaacuucaacggccucaccgggaccggcgugcugaccgagagcaacaagaaguuccugccguuccagcaguucgggcgcgacaucgccgacacgaccgacgcgguccgcgacccccagacccuggagauccucgacaucacccccugcagcuucggcgggguguccgugaucacgccgggcaccaacaccagcaaccaggucgccgugcuguaccaggacgugaacugcaccgagguccccguggccauccacgccgaccagcugacgcccaccuggcggguguacuccaccggcagcaacgucuuccagacccgcgccgggugccucaucggcgcggagcacgugaacaacuccuacgagugcgacauccccaucggggccggcaucugcgccagcuaccagacgcagaccaacuccccgcggcgcgcccggagcguggcgucccagagcaucaucgccuacaccaugucccugggcgccgagaacagcgucgccuacuccaacaacagcaucgccauccccaccaacuucacgaucuccgugaccaccgagauccugcccgugagcaugaccaagacgagcgucgacugcaccauguacaucugcggggacuccaccgagugcagcaaccuccugcugcaguacggcuccuucugcacccagcucaaccgcgcgcugacggggaucgccguggagcaggacaagaacacccaggagguguucgcccaggucaagcagaucuacaagacgcccccgaucaaggacuucggcggguucaacuucagccagauccugcccgaccccuccaagcccagcaagcgguccuucaucgaggaccuccuguucaacaaggugacccuggccgacgccggcuucaucaagcaguacggcgacugccucggggacaucgcggcccgcgaccugaucugcgcccagaaguucaacggccugaccgugcucccgccccugcugaccgacgagaugaucgcccaguacaccagcgcccuccuggcggggaccaucacguccggcuggaccuucggggccggcgccgcccugcagauccccuucgcgaugcagauggccuaccgguucaacggcaucggggucacccagaacgugcucuacgagaaccagaagcugaucgccaaccaguucaacagcgccaucggcaagauccaggacucccugagcuccaccgccagcgcgcucgggaagcugcaggacguggucaaccagaacgcccaggcccugaacacgcucgugaagcagcuguccagcaacuucggcgccaucuccagcgugcugaacgacauccucucccgccuggacccgcccgaggccgaggugcagaucgaccggcugaucaccgggcgccuccagagccugcagaccuacgugacccagcagcugauccgggcggccgagauccgcgccagcgccaaccucgccgcgaccaagauguccgagugcguccugggccagagcaagcggguggacuucugcggcaagggguaccaccugauguccuucccccagagcgccccgcacggcguggucuuccuccacgugacguacgucuucgcccaggagaagaacuucaccaccgcccccgcgaucugccacgacgggaaggcccacuucccccgcgagggcguguucguguccaacgggacccacugguucgucacgcagcggaacuucuacgagccgcagaucaucaccaccgacaacaccuucgugagcggcaacugcgacguggucaucggcaucgugaacaacacgguguacgacccccugcagcccgagcuggacuccggcgggggcgggagcgacaucaucaagcuccugaacgagcaggucaacaaggagaugcaguccagcaaccuguacauguccaugagcuccuggugcuacacccacagccucgacggcgccgggcuguuccuguucgaccacgccgcggaggaguacgagcacgccaagaagcucaucaucuuccugaacgagaacaacgugcccgugcagcugaccuccaucagcgccccggagcacaaguucgagggccucacgcagaucuuccagaaggccuacgagcacgagcagcacaucuccgagagcaucaacaacaucguggaccacgccaucaaguccaaggaccacgcgaccuucaacuuccugcagugguacgucgccgagcagcacgaggaggaggugcuguucaaggacauccucgacaagaucgagcugaucgggaacgagaaccacggccuguaccucgccgaccaguacgugaaggggaucgccaagagccgcaaguccugaggacuaguuauaagacugacuagcccgaugggccucccaacgggcccuccuccccuccuugcaccgagauuaauaaaaaaaaaaaaaaaaaaaaaaaaaaaaaaaaaaaaaaaaaaaaaaaaaaaaaaaaaaaaaaaaugcaucccccccccccccccccccccccccccccccaaaggcucuuuucagagccaccagaauu

SEQ ID NO: 12904 - RNA, 4165 nt, Artificial Sequence
  SARS-CoV-2/Wuhan/WIV05/2019__EPI_ISL_402128 spike protein mRNA gc (1-1147)(K986P_V987P_ H1048Q_H1064N_ H1083N_H1101N) Ferritin construct
aggagaaagcuuaccauguucguguuccugguccuccugccccuggugagcucccagugcgugaaccucaccacccgcacgcagcugccgcccgccuacaccaacagcuucacccggggcgucuacuaccccgacaagguguuccgcuccagcgugcugcacuccacccaggaccucuuccugcccuucuucagcaacgucacgugguuccacgccauccacguguccgggaccaacggcaccaagcgguucgacaacccggugcugcccuucaacgacggggucuacuucgcgagcaccgagaaguccaacaucauccgcggcuggaucuucgggacgacccucgacagcaagacccagucccugcugaucgugaacaacgccaccaacguggucaucaaggugugcgaguuccaguucugcaacgaccccuuccucggcguguacuaccacaagaacaacaagagcuggauggaguccgaguuccgggucuacagcuccgccaacaacugcacguucgaguacgugagccagcccuuccugauggaccuggagggcaagcaggggaacuucaagaaccuccgcgaguucguguucaagaacaucgacggcuacuucaagaucuacuccaagcacaccccgaucaaccugguccgggaccugccccagggguucagcgcccucgagccccugguggaccugcccaucggcaucaacaucacccgcuuccagacccuccuggcccugcaccgguccuaccucacgccgggggacagcagcuccggcuggaccgcgggcgccgccgccuacuacgugggguaccugcagccccgcaccuuccugcucaaguacaacgagaacggcaccaucacggacgcggucgacugcgcccuggacccccugagcgagaccaagugcacccucaaguccuucaccguggagaaggggaucuaccagacgagcaacuuccgggugcagcccaccgaguccaucguccgcuucccgaacaucaccaaccugugccccuucggcgagguguucaacgccacccgguucgccagcgucuacgccuggaaccgcaagcggaucuccaacugcguggcggacuacagcgugcuguacaacuccgccagcuucuccacguucaagugcuacggcgucagccccaccaagcucaacgaccugugcuucaccaacguguacgccgacuccuucgugauccgcggggacgagguccggcagaucgcccccggccagaccgggaagaucgccgacuacaacuacaagcugccggacgacuucacgggcugcgugaucgcguggaacagcaacaaccucgacuccaaggucgggggcaacuacaacuaccuguaccgccuguuccgcaagagcaaccucaagcccuucgagcgggacaucuccaccgagaucuaccaggccggcagcacccccugcaacgggguggagggcuucaacugcuacuucccccugcaguccuacggguuccagccgaccaacggcgugggguaccagcccuaccggguggucgugcugagcuucgagcuccugcacgcccccgccacggugugcggccccaagaaguccaccaaccuggucaagaacaagugcgugaacuucaacuucaacggccucaccgggaccggcgugcugaccgagagcaacaagaaguuccugccguuccagcaguucgggcgcgacaucgccgacacgaccgacgcgguccgcgacccccagacccuggagauccucgacaucacccccugcagcuucggcgggguguccgugaucacgccgggcaccaacaccagcaaccaggucgccgugcuguaccaggacgugaacugcaccgagguccccguggccauccacgccgaccagcugacgcccaccuggcggguguacuccaccggcagcaacgucuuccagacccgcgccgggugccucaucggcgcggagcacgugaacaacuccuacgagugcgacauccccaucggggccggcaucugcgccagcuaccagacgcagaccaacuccccgcggcgcgcccggagcguggcgucccagagcaucaucgccuacaccaugucccugggcgccgagaacagcgucgccuacuccaacaacagcaucgccauccccaccaacuucacgaucuccgugaccaccgagauccugcccgugagcaugaccaagacgagcgucgacugcaccauguacaucugcggggacuccaccgagugcagcaaccuccugcugcaguacggcuccuucugcacccagcucaaccgcgcgcugacggggaucgccguggagcaggacaagaacacccaggagguguucgcccaggucaagcagaucuacaagacgcccccgaucaaggacuucggcggguucaacuucagccagauccugcccgaccccuccaagcccagcaagcgguccuucaucgaggaccuccuguucaacaaggugacccuggccgacgccggcuucaucaagcaguacggcgacugccucggggacaucgcggcccgcgaccugaucugcgcccagaaguucaacggccugaccgugcucccgccccugcugaccgacgagaugaucgcccaguacaccagcgcccuccuggcggggaccaucacguccggcuggaccuucggggccggcgccgcccugcagauccccuucgcgaugcagauggccuaccgguucaacggcaucggggucacccagaacgugcucuacgagaaccagaagcugaucgccaaccaguucaacagcgccaucggcaagauccaggacucccugagcuccaccgccagcgcgcucgggaagcugcaggacguggucaaccagaacgcccaggcccugaacacgcucgugaagcagcuguccagcaacuucggcgccaucuccagcgugcugaacgacauccucucccgccuggacccgcccgaggccgaggugcagaucgaccggcugaucaccgggcgccuccagagccugcagaccuacgugacccagcagcugauccgggcggccgagauccgcgccagcgccaaccucgccgcgaccaagauguccgagugcguccugggccagagcaagcggguggacuucugcggcaagggguaccagcugauguccuucccccagagcgccccgcacggcguggucuuccucaacgugacguacguccccgcccaggagaagaacuucaccaccgcccccgcgaucugcaacgacgggaaggcccacuucccccgcgagggcguguucguguccaacgggaccaacugguucgucacgcagcggaacuucuacgagccgcagaucaucaccaccgacaacaccuucgugagcggcaacugcgacguggucaucggcaucgugaacaacacgguguacgacccccugcagcccgagcuggacuccggcgggggcgggagcgacaucaucaagcuccugaacgagcaggucaacaaggagaugcaguccagcaaccuguacauguccaugagcuccuggugcuacacccacagccucgacggcgccgggcuguuccuguucgaccacgccgcggaggaguacgagcacgccaagaagcucaucaucuuccugaacgagaacaacgugcccgugcagcugaccuccaucagcgccccggagcacaaguucgagggccucacgcagaucuuccagaaggccuacgagcacgagcagcacaucuccgagagcaucaacaacaucguggaccacgccaucaaguccaaggaccacgcgaccuucaacuuccugcagugguacgucgccgagcagcacgaggaggaggugcuguucaaggacauccucgacaagaucgagcugaucgggaacgagaaccacggccuguaccucgccgaccaguacgugaaggggaucgccaagagccgcaaguccugaggacuaguuauaagacugacuagcccgaugggccucccaacgggcccuccuccccuccuugcaccgagauuaauaaaaaaaaaaaaaaaaaaaaaaaaaaaaaaaaaaaaaaaaaaaaaaaaaaaaaaaaaaaaaaaaugcaucccccccccccccccccccccccccccccccaaaggcucuuuucagagccaccagaauu

SEQ ID NO: 12905 - RNA, 4165 nt, Artificial Sequence
  SARS-CoV-2/Wuhan/WIV05/2019__EPI_ISL_402128 spike protein mRNA gc (1-1147)(I712C_T1077C) Ferritin construct
aggagaaagcuuaccauguucguguuccugguccuccugccccuggugagcucccagugcgugaaccucaccacccgcacgcagcugccgcccgccuacaccaacagcuucacccggggcgucuacuaccccgacaagguguuccgcuccagcgugcugcacuccacccaggaccucuuccugcccuucuucagcaacgucacgugguuccacgccauccacguguccgggaccaacggcaccaagcgguucgacaacccggugcugcccuucaacgacggggucuacuucgcgagcaccgagaaguccaacaucauccgcggcuggaucuucgggacgacccucgacagcaagacccagucccugcugaucgugaacaacgccaccaacguggucaucaaggugugcgaguuccaguucugcaacgaccccuuccucggcguguacuaccacaagaacaacaagagcuggauggaguccgaguuccgggucuacagcuccgccaacaacugcacguucgaguacgugagccagcccuuccugauggaccuggagggcaagcaggggaacuucaagaaccuccgcgaguucguguucaagaacaucgacggcuacuucaagaucuacuccaagcacaccccgaucaaccugguccgggaccugccccagggguucagcgcccucgagccccugguggaccugcccaucggcaucaacaucacccgcuuccagacccuccuggcccugcaccgguccuaccucacgccgggggacagcagcuccggcuggaccgcgggcgccgccgccuacuacgugggguaccugcagccccgcaccuuccugcucaaguacaacgagaacggcaccaucacggacgcggucgacugcgcccuggacccccugagcgagaccaagugcacccucaaguccuucaccguggagaaggggaucuaccagacgagcaacuuccgggugcagcccaccgaguccaucguccgcuucccgaacaucaccaaccugugccccuucggcgagguguucaacgccacccgguucgccagcgucuacgccuggaaccgcaagcggaucuccaacugcguggcggacuacagcgugcuguacaacuccgccagcuucuccacguucaagugcuacggcgucagccccaccaagcucaacgaccugugcuucaccaacguguacgccgacuccuucgugauccgcggggacgagguccggcagaucgcccccggccagaccgggaagaucgccgacuacaacuacaagcugccggacgacuucacgggcugcgugaucgcguggaacagcaacaaccucgacuccaaggucgggggcaacuacaacuaccuguaccgccuguuccgcaagagcaaccucaagcccuucgagcgggacaucuccaccgagaucuaccaggccggcagcacccccugcaacgggguggagggcuucaacugcuacuucccccugcaguccuacggguuccagccgaccaacggcgugggguaccagcccuaccggguggucgugcugagcuucgagcuccugcacgcccccgccacggugugcggccccaagaaguccaccaaccuggucaagaacaagugcgugaacuucaacuucaacggccucaccgggaccggcgugcugaccgagagcaacaagaaguuccugccguuccagcaguucgggcgcgacaucgccgacacgaccgacgcgguccgcgacccccagacccuggagauccucgacaucacccccugcagcuucggcgggguguccgugaucacgccgggcaccaacaccagcaaccaggucgccgugcuguaccaggacgugaacugcaccgagguccccguggccauccacgccgaccagcugacgcccaccuggcggguguacuccaccggcagcaacgucuuccagacccgcgccgggugccucaucggcgcggagcacgugaacaacuccuacgagugcgacauccccaucggggccggcaucugcgccagcuaccagacgcagaccaacuccccgcggcgcgcccggagcguggcgucccagagcaucaucgccuacaccaugucccugggcgccgagaacagcgucgccuacuccaacaacagcugcgccauccccaccaacuucacgaucuccgugaccaccgagauccugcccgugagcaugaccaagacgagcgucgacugcaccauguacaucugcggggacuccaccgagugcagcaaccuccugcugcaguacggcuccuucugcacccagcucaaccgcgcgcugacggggaucgccguggagcaggacaagaacacccaggagguguucgcccaggucaagcagaucuacaagacgcccccgaucaaggacuucggcggguucaacuucagccagauccugcccgaccccuccaagcccagcaagcgguccuucaucgaggaccuccuguucaacaaggugacccuggccgacgccggcuucaucaagcaguacggcgacugccucggggacaucgcggcccgcgaccugaucugcgcccagaaguucaacggccugaccgugcucccgccccugcugaccgacgagaugaucgcccaguacaccagcgcccuccuggcggggaccaucacguccggcuggaccuucggggccggcgccgcccugcagauccccuucgcgaugcagauggccuaccgguucaacggcaucggggucacccagaacgugcucuacgagaaccagaagcugaucgccaaccaguucaacagcgccaucggcaagauccaggacucccugagcuccaccgccagcgcgcucgggaagcugcaggacguggucaaccagaacgcccaggcccugaacacgcucgugaagcagcuguccagcaacuucggcgccaucuccagcgugcugaacgacauccucucccgccuggacaaggucgaggccgaggugcagaucgaccggcugaucaccgggcgccuccagagccugcagaccuacgugacccagcagcugauccgggcggccgagauccgcgccagcgccaaccucgccgcgaccaagauguccgagugcguccugggccagagcaagcggguggacuucugcggcaagggguaccaccugauguccuucccccagagcgccccgcacggcguggucuuccuccacgugacguacguccccgcccaggagaagaacuucaccugcgcccccgcgaucugccacgacgggaaggcccacuucccccgcgagggcguguucguguccaacgggacccacugguucgucacgcagcggaacuucuacgagccgcagaucaucaccaccgacaacaccuucgugagcggcaacugcgacguggucaucggcaucgugaacaacacgguguacgacccccugcagcccgagcuggacuccggcgggggcgggagcgacaucaucaagcuccugaacgagcaggucaacaaggagaugcaguccagcaaccuguacauguccaugagcuccuggugcuacacccacagccucgacggcgccgggcuguuccuguucgaccacgccgcggaggaguacgagcacgccaagaagcucaucaucuuccugaacgagaacaacgugcccgugcagcugaccuccaucagcgccccggagcacaaguucgagggccucacgcagaucuuccagaaggccuacgagcacgagcagcacaucuccgagagcaucaacaacaucguggaccacgccaucaaguccaaggaccacgcgaccuucaacuuccugcagugguacgucgccgagcagcacgaggaggaggugcuguucaaggacauccucgacaagaucgagcugaucgggaacgagaaccacggccuguaccucgccgaccaguacgugaaggggaucgccaagagccgcaaguccugaggacuaguuauaagacugacuagcccgaugggccucccaacgggcccuccuccccuccuugcaccgagauuaauaaaaaaaaaaaaaaaaaaaaaaaaaaaaaaaaaaaaaaaaaaaaaaaaaaaaaaaaaaaaaaaaugcaucccccccccccccccccccccccccccccccaaaggcucuuuucagagccaccagaauu

SEQ ID NO: 12906 - RNA, 4165 nt, Artificial Sequence
  SARS-CoV-2/Wuhan/WIV05/2019__EPI_ISL_402128 spike protein mRNA gc (1-1147)(I714C_Y1110C) Ferritin construct
aggagaaagcuuaccauguucguguuccugguccuccugccccuggugagcucccagugcgugaaccucaccacccgcacgcagcugccgcccgccuacaccaacagcuucacccggggcgucuacuaccccgacaagguguuccgcuccagcgugcugcacuccacccaggaccucuuccugcccuucuucagcaacgucacgugguuccacgccauccacguguccgggaccaacggcaccaagcgguucgacaacccggugcugcccuucaacgacggggucuacuucgcgagcaccgagaaguccaacaucauccgcggcuggaucuucgggacgacccucgacagcaagacccagucccugcugaucgugaacaacgccaccaacguggucaucaaggugugcgaguuccaguucugcaacgaccccuuccucggcguguacuaccacaagaacaacaagagcuggauggaguccgaguuccgggucuacagcuccgccaacaacugcacguucgaguacgugagccagcccuuccugauggaccuggagggcaagcaggggaacuucaagaaccuccgcgaguucguguucaagaacaucgacggcuacuucaagaucuacuccaagcacaccccgaucaaccugguccgggaccugccccagggguucagcgcccucgagccccugguggaccugcccaucggcaucaacaucacccgcuuccagacccuccuggcccugcaccgguccuaccucacgccgggggacagcagcuccggcuggaccgcgggcgccgccgccuacuacgugggguaccugcagccccgcaccuuccugcucaaguacaacgagaacggcaccaucacggacgcggucgacugcgcccuggacccccugagcgagaccaagugcacccucaaguccuucaccguggagaaggggaucuaccagacgagcaacuuccgggugcagcccaccgaguccaucguccgcuucccgaacaucaccaaccugugccccuucggcgagguguucaacgccacccgguucgccagcgucuacgccuggaaccgcaagcggaucuccaacugcguggcggacuacagcgugcuguacaacuccgccagcuucuccacguucaagugcuacggcgucagccccaccaagcucaacgaccugugcuucaccaacguguacgccgacuccuucgugauccgcggggacgagguccggcagaucgcccccggccagaccgggaagaucgccgacuacaacuacaagcugccggacgacuucacgggcugcgugaucgcguggaacagcaacaaccucgacuccaaggucgggggcaacuacaacuaccuguaccgccuguuccgcaagagcaaccucaagcccuucgagcgggacaucuccaccgagaucuaccaggccggcagcacccccugcaacgggguggagggcuucaacugcuacuucccccugcaguccuacggguuccagccgaccaacggcgugggguaccagcccuaccggguggucgugcugagcuucgagcuccugcacgcccccgccacggugugcggccccaagaaguccaccaaccuggucaagaacaagugcgugaacuucaacuucaacggccucaccgggaccggcgugcugaccgagagcaacaagaaguuccugccguuccagcaguucgggcgcgacaucgccgacacgaccgacgcgguccgcgacccccagacccuggagauccucgacaucacccccugcagcuucggcgggguguccgugaucacgccgggcaccaacaccagcaaccaggucgccgugcuguaccaggacgugaacugcaccgagguccccguggccauccacgccgaccagcugacgcccaccuggcggguguacuccaccggcagcaacgucuuccagacccgcgccgggugccucaucggcgcggagcacgugaacaacuccuacgagugcgacauccccaucggggccggcaucugcgccagcuaccagacgcagaccaacuccccgcggcgcgcccggagcguggcgucccagagcaucaucgccuacaccaugucccugggcgccgagaacagcgucgccuacuccaacaacagcaucgccugccccaccaacuucacgaucuccgugaccaccgagauccugcccgugagcaugaccaagacgagcgucgacugcaccauguacaucugcggggacuccaccgagugcagcaaccuccugcugcaguacggcuccuucugcacccagcucaaccgcgcgcugacggggaucgccguggagcaggacaagaacacccaggagguguucgcccaggucaagcagaucuacaagacgcccccgaucaaggacuucggcggguucaacuucagccagauccugcccgaccccuccaagcccagcaagcgguccuucaucgaggaccuccuguucaacaaggugacccuggccgacgccggcuucaucaagcaguacggcgacugccucggggacaucgcggcccgcgaccugaucugcgcccagaaguucaacggccugaccgugcucccgccccugcugaccgacgagaugaucgcccaguacaccagcgcccuccuggcggggaccaucacguccggcuggaccuucggggccggcgccgcccugcagauccccuucgcgaugcagauggccuaccgguucaacggcaucggggucacccagaacgugcucuacgagaaccagaagcugaucgccaaccaguucaacagcgccaucggcaagauccaggacucccugagcuccaccgccagcgcgcucgggaagcugcaggacguggucaaccagaacgcccaggcccugaacacgcucgugaagcagcuguccagcaacuucggcgccaucuccagcgugcugaacgacauccucucccgccuggacaaggucgaggccgaggugcagaucgaccggcugaucaccgggcgccuccagagccugcagaccuacgugacccagcagcugauccgggcggccgagauccgcgccagcgccaaccucgccgcgaccaagauguccgagugcguccugggccagagcaagcggguggacuucugcggcaagggguaccaccugauguccuucccccagagcgccccgcacggcguggucuuccuccacgugacguacguccccgcccaggagaagaacuucaccaccgcccccgcgaucugccacgacgggaaggcccacuucccccgcgagggcguguucguguccaacgggacccacugguucgucacgcagcggaacuucugcgagccgcagaucaucaccaccgacaacaccuucgugagcggcaacugcgacguggucaucggcaucgugaacaacacgguguacgacccccugcagcccgagcuggacuccggcgggggcgggagcgacaucaucaagcuccugaacgagcaggucaacaaggagaugcaguccagcaaccuguacauguccaugagcuccuggugcuacacccacagccucgacggcgccgggcuguuccuguucgaccacgccgcggaggaguacgagcacgccaagaagcucaucaucuuccugaacgagaacaacgugcccgugcagcugaccuccaucagcgccccggagcacaaguucgagggccucacgcagaucuuccagaaggccuacgagcacgagcagcacaucuccgagagcaucaacaacaucguggaccacgccaucaaguccaaggaccacgcgaccuucaacuuccugcagugguacgucgccgagcagcacgaggaggaggugcuguucaaggacauccucgacaagaucgagcugaucgggaacgagaaccacggccuguaccucgccgaccaguacgugaaggggaucgccaagagccgcaaguccugaggacuaguuauaagacugacuagcccgaugggccucccaacgggcccuccuccccuccuugcaccgagauuaauaaaaaaaaaaaaaaaaaaaaaaaaaaaaaaaaaaaaaaaaaaaaaaaaaaaaaaaaaaaaaaaaugcaucccccccccccccccccccccccccccccccaaaggcucuuuucagagccaccagaauu

SEQ ID NO: 12907 - RNA, 4165 nt, Artificial Sequence
  SARS-CoV-2/Wuhan/WIV05/2019__EPI_ISL_402128 spike protein mRNA gc (1-1147)(P715C_P1069C) Ferritin construct
aggagaaagcuuaccauguucguguuccugguccuccugccccuggugagcucccagugcgugaaccucaccacccgcacgcagcugccgcccgccuacaccaacagcuucacccggggcgucuacuaccccgacaagguguuccgcuccagcgugcugcacuccacccaggaccucuuccugcccuucuucagcaacgucacgugguuccacgccauccacguguccgggaccaacggcaccaagcgguucgacaacccggugcugcccuucaacgacggggucuacuucgcgagcaccgagaaguccaacaucauccgcggcuggaucuucgggacgacccucgacagcaagacccagucccugcugaucgugaacaacgccaccaacguggucaucaaggugugcgaguuccaguucugcaacgaccccuuccucggcguguacuaccacaagaacaacaagagcuggauggaguccgaguuccgggucuacagcuccgccaacaacugcacguucgaguacgugagccagcccuuccugauggaccuggagggcaagcaggggaacuucaagaaccuccgcgaguucguguucaagaacaucgacggcuacuucaagaucuacuccaagcacaccccgaucaaccugguccgggaccugccccagggguucagcgcccucgagccccugguggaccugcccaucggcaucaacaucacccgcuuccagacccuccuggcccugcaccgguccuaccucacgccgggggacagcagcuccggcuggaccgcgggcgccgccgccuacuacgugggguaccugcagccccgcaccuuccugcucaaguacaacgagaacggcaccaucacggacgcggucgacugcgcccuggacccccugagcgagaccaagugcacccucaaguccuucaccguggagaaggggaucuaccagacgagcaacuuccgggugcagcccaccgaguccaucguccgcuucccgaacaucaccaaccugugccccuucggcgagguguucaacgccacccgguucgccagcgucuacgccuggaaccgcaagcggaucuccaacugcguggcggacuacagcgugcuguacaacuccgccagcuucuccacguucaagugcuacggcgucagccccaccaagcucaacgaccugugcuucaccaacguguacgccgacuccuucgugauccgcggggacgagguccggcagaucgcccccggccagaccgggaagaucgccgacuacaacuacaagcugccggacgacuucacgggcugcgugaucgcguggaacagcaacaaccucgacuccaaggucgggggcaacuacaacuaccuguaccgccuguuccgcaagagcaaccucaagcccuucgagcgggacaucuccaccgagaucuaccaggccggcagcacccccugcaacgggguggagggcuucaacugcuacuucccccugcaguccuacggguuccagccgaccaacggcgugggguaccagcccuaccggguggucgugcugagcuucgagcuccugcacgcccccgccacggugugcggccccaagaaguccaccaaccuggucaagaacaagugcgugaacuucaacuucaacggccucaccgggaccggcgugcugaccgagagcaacaagaaguuccugccguuccagcaguucgggcgcgacaucgccgacacgaccgacgcgguccgcgacccccagacccuggagauccucgacaucacccccugcagcuucggcgggguguccgugaucacgccgggcaccaacaccagcaaccaggucgccgugcuguaccaggacgugaacugcaccgagguccccguggccauccacgccgaccagcugacgcccaccuggcggguguacuccaccggcagcaacgucuuccagacccgcgccgggugccucaucggcgcggagcacgugaacaacuccuacgagugcgacauccccaucggggccggcaucugcgccagcuaccagacgcagaccaacuccccgcggcgcgcccggagcguggcgucccagagcaucaucgccuacaccaugucccugggcgccgagaacagcgucgccuacuccaacaacagcaucgccaucugcaccaacuucacgaucuccgugaccaccgagauccugcccgugagcaugaccaagacgagcgucgacugcaccauguacaucugcggggacuccaccgagugcagcaaccuccugcugcaguacggcuccuucugcacccagcucaaccgcgcgcugacggggaucgccguggagcaggacaagaacacccaggagguguucgcccaggucaagcagaucuacaagacgcccccgaucaaggacuucggcggguucaacuucagccagauccugcccgaccccuccaagcccagcaagcgguccuucaucgaggaccuccuguucaacaaggugacccuggccgacgccggcuucaucaagcaguacggcgacugccucggggacaucgcggcccgcgaccugaucugcgcccagaaguucaacggccugaccgugcucccgccccugcugaccgacgagaugaucgcccaguacaccagcgcccuccuggcggggaccaucacguccggcuggaccuucggggccggcgccgcccugcagauccccuucgcgaugcagauggccuaccgguucaacggcaucggggucacccagaacgugcucuacgagaaccagaagcugaucgccaaccaguucaacagcgccaucggcaagauccaggacucccugagcuccaccgccagcgcgcucgggaagcugcaggacguggucaaccagaacgcccaggcccugaacacgcucgugaagcagcuguccagcaacuucggcgccaucuccagcgugcugaacgacauccucucccgccuggacaaggucgaggccgaggugcagaucgaccggcugaucaccgggcgccuccagagccugcagaccuacgugacccagcagcugauccgggcggccgagauccgcgccagcgccaaccucgccgcgaccaagauguccgagugcguccugggccagagcaagcggguggacuucugcggcaagggguaccaccugauguccuucccccagagcgccccgcacggcguggucuuccuccacgugacguacgucugcgcccaggagaagaacuucaccaccgcccccgcgaucugccacgacgggaaggcccacuucccccgcgagggcguguucguguccaacgggacccacugguucgucacgcagcggaacuucuacgagccgcagaucaucaccaccgacaacaccuucgugagcggcaacugcgacguggucaucggcaucgugaacaacacgguguacgacccccugcagcccgagcuggacuccggcgggggcgggagcgacaucaucaagcuccugaacgagcaggucaacaaggagaugcaguccagcaaccuguacauguccaugagcuccuggugcuacacccacagccucgacggcgccgggcuguuccuguucgaccacgccgcggaggaguacgagcacgccaagaagcucaucaucuuccugaacgagaacaacgugcccgugcagcugaccuccaucagcgccccggagcacaaguucgagggccucacgcagaucuuccagaaggccuacgagcacgagcagcacaucuccgagagcaucaacaacaucguggaccacgccaucaaguccaaggaccacgcgaccuucaacuuccugcagugguacgucgccgagcagcacgaggaggaggugcuguucaaggacauccucgacaagaucgagcugaucgggaacgagaaccacggccuguaccucgccgaccaguacgugaaggggaucgccaagagccgcaaguccugaggacuaguuauaagacugacuagcccgaugggccucccaacgggcccuccuccccuccuugcaccgagauuaauaaaaaaaaaaaaaaaaaaaaaaaaaaaaaaaaaaaaaaaaaaaaaaaaaaaaaaaaaaaaaaaaugcaucccccccccccccccccccccccccccccccaaaggcucuuuucagagccaccagaauu

SEQ ID NO: 12908 - RNA, 4165 nt, Artificial Sequence
  SARS-CoV-2/Wuhan/WIV05/2019__EPI_ISL_402128 spike protein mRNA gc (1-1147)(G889C_L1034C) Ferritin construct
aggagaaagcuuaccauguucguguuccugguccuccugccccuggugagcucccagugcgugaaccucaccacccgcacgcagcugccgcccgccuacaccaacagcuucacccggggcgucuacuaccccgacaagguguuccgcuccagcgugcugcacuccacccaggaccucuuccugcccuucuucagcaacgucacgugguuccacgccauccacguguccgggaccaacggcaccaagcgguucgacaacccggugcugcccuucaacgacggggucuacuucgcgagcaccgagaaguccaacaucauccgcggcuggaucuucgggacgacccucgacagcaagacccagucccugcugaucgugaacaacgccaccaacguggucaucaaggugugcgaguuccaguucugcaacgaccccuuccucggcguguacuaccacaagaacaacaagagcuggauggaguccgaguuccgggucuacagcuccgccaacaacugcacguucgaguacgugagccagcccuuccugauggaccuggagggcaagcaggggaacuucaagaaccuccgcgaguucguguucaagaacaucgacggcuacuucaagaucuacuccaagcacaccccgaucaaccugguccgggaccugccccagggguucagcgcccucgagccccugguggaccugcccaucggcaucaacaucacccgcuuccagacccuccuggcccugcaccgguccuaccucacgccgggggacagcagcuccggcuggaccgcgggcgccgccgccuacuacgugggguaccugcagccccgcaccuuccugcucaaguacaacgagaacggcaccaucacggacgcggucgacugcgcccuggacccccugagcgagaccaagugcacccucaaguccuucaccguggagaaggggaucuaccagacgagcaacuuccgggugcagcccaccgaguccaucguccgcuucccgaacaucaccaaccugugccccuucggcgagguguucaacgccacccgguucgccagcgucuacgccuggaaccgcaagcggaucuccaacugcguggcggacuacagcgugcuguacaacuccgccagcuucuccacguucaagugcuacggcgucagccccaccaagcucaacgaccugugcuucaccaacguguacgccgacuccuucgugauccgcggggacgagguccggcagaucgcccccggccagaccgggaagaucgccgacuacaacuacaagcugccggacgacuucacgggcugcgugaucgcguggaacagcaacaaccucgacuccaaggucgggggcaacuacaacuaccuguaccgccuguuccgcaagagcaaccucaagcccuucgagcgggacaucuccaccgagaucuaccaggccggcagcacccccugcaacgggguggagggcuucaacugcuacuucccccugcaguccuacggguuccagccgaccaacggcgugggguaccagcccuaccggguggucgugcugagcuucgagcuccugcacgcccccgccacggugugcggccccaagaaguccaccaaccuggucaagaacaagugcgugaacuucaacuucaacggccucaccgggaccggcgugcugaccgagagcaacaagaaguuccugccguuccagcaguucgggcgcgacaucgccgacacgaccgacgcgguccgcgacccccagacccuggagauccucgacaucacccccugcagcuucggcgggguguccgugaucacgccgggcaccaacaccagcaaccaggucgccgugcuguaccaggacgugaacugcaccgagguccccguggccauccacgccgaccagcugacgcccaccuggcggguguacuccaccggcagcaacgucuuccagacccgcgccgggugccucaucggcgcggagcacgugaacaacuccuacgagugcgacauccccaucggggccggcaucugcgccagcuaccagacgcagaccaacuccccgcggcgcgcccggagcguggcgucccagagcaucaucgccuacaccaugucccugggcgccgagaacagcgucgccuacuccaacaacagcaucgccauccccaccaacuucacgaucuccgugaccaccgagauccugcccgugagcaugaccaagacgagcgucgacugcaccauguacaucugcggggacuccaccgagugcagcaaccuccugcugcaguacggcuccuucugcacccagcucaaccgcgcgcugacggggaucgccguggagcaggacaagaacacccaggagguguucgcccaggucaagcagaucuacaagacgcccccgaucaaggacuucggcggguucaacuucagccagauccugcccgaccccuccaagcccagcaagcgguccuucaucgaggaccuccuguucaacaaggugacccuggccgacgccggcuucaucaagcaguacggcgacugccucggggacaucgcggcccgcgaccugaucugcgcccagaaguucaacggccugaccgugcucccgccccugcugaccgacgagaugaucgcccaguacaccagcgcccuccuggcggggaccaucacguccggcuggaccuucugcgccggcgccgcccugcagauccccuucgcgaugcagauggccuaccgguucaacggcaucggggucacccagaacgugcucuacgagaaccagaagcugaucgccaaccaguucaacagcgccaucggcaagauccaggacucccugagcuccaccgccagcgcgcucgggaagcugcaggacguggucaaccagaacgcccaggcccugaacacgcucgugaagcagcuguccagcaacuucggcgccaucuccagcgugcugaacgacauccucucccgccuggacaaggucgaggccgaggugcagaucgaccggcugaucaccgggcgccuccagagccugcagaccuacgugacccagcagcugauccgggcggccgagauccgcgccagcgccaaccucgccgcgaccaagauguccgagugcgucugcggccagagcaagcggguggacuucugcggcaagggguaccaccugauguccuucccccagagcgccccgcacggcguggucuuccuccacgugacguacguccccgcccaggagaagaacuucaccaccgcccccgcgaucugccacgacgggaaggcccacuucccccgcgagggcguguucguguccaacgggacccacugguucgucacgcagcggaacuucuacgagccgcagaucaucaccaccgacaacaccuucgugagcggcaacugcgacguggucaucggcaucgugaacaacacgguguacgacccccugcagcccgagcuggacuccggcgggggcgggagcgacaucaucaagcuccugaacgagcaggucaacaaggagaugcaguccagcaaccuguacauguccaugagcuccuggugcuacacccacagccucgacggcgccgggcuguuccuguucgaccacgccgcggaggaguacgagcacgccaagaagcucaucaucuuccugaacgagaacaacgugcccgugcagcugaccuccaucagcgccccggagcacaaguucgagggccucacgcagaucuuccagaaggccuacgagcacgagcagcacaucuccgagagcaucaacaacaucguggaccacgccaucaaguccaaggaccacgcgaccuucaacuuccugcagugguacgucgccgagcagcacgaggaggaggugcuguucaaggacauccucgacaagaucgagcugaucgggaacgagaaccacggccuguaccucgccgaccaguacgugaaggggaucgccaagagccgcaaguccugaggacuaguuauaagacugacuagcccgaugggccucccaacgggcccuccuccccuccuugcaccgagauuaauaaaaaaaaaaaaaaaaaaaaaaaaaaaaaaaaaaaaaaaaaaaaaaaaaaaaaaaaaaaaaaaaugcaucccccccccccccccccccccccccccccccaaaggcucuuuucagagccaccagaauu

SEQ ID NO: 12909 - RNA, 4165 nt, Artificial Sequence
  SARS-CoV-2/Wuhan/WIV05/2019__EPI_ISL_402128 spike protein mRNA gc (1-1147)(I909C_Y1047C) Ferritin construct
aggagaaagcuuaccauguucguguuccugguccuccugccccuggugagcucccagugcgugaaccucaccacccgcacgcagcugccgcccgccuacaccaacagcuucacccggggcgucuacuaccccgacaagguguuccgcuccagcgugcugcacuccacccaggaccucuuccugcccuucuucagcaacgucacgugguuccacgccauccacguguccgggaccaacggcaccaagcgguucgacaacccggugcugcccuucaacgacggggucuacuucgcgagcaccgagaaguccaacaucauccgcggcuggaucuucgggacgacccucgacagcaagacccagucccugcugaucgugaacaacgccaccaacguggucaucaaggugugcgaguuccaguucugcaacgaccccuuccucggcguguacuaccacaagaacaacaagagcuggauggaguccgaguuccgggucuacagcuccgccaacaacugcacguucgaguacgugagccagcccuuccugauggaccuggagggcaagcaggggaacuucaagaaccuccgcgaguucguguucaagaacaucgacggcuacuucaagaucuacuccaagcacaccccgaucaaccugguccgggaccugccccagggguucagcgcccucgagccccugguggaccugcccaucggcaucaacaucacccgcuuccagacccuccuggcccugcaccgguccuaccucacgccgggggacagcagcuccggcuggaccgcgggcgccgccgccuacuacgugggguaccugcagccccgcaccuuccugcucaaguacaacgagaacggcaccaucacggacgcggucgacugcgcccuggacccccugagcgagaccaagugcacccucaaguccuucaccguggagaaggggaucuaccagacgagcaacuuccgggugcagcccaccgaguccaucguccgcuucccgaacaucaccaaccugugccccuucggcgagguguucaacgccacccgguucgccagcgucuacgccuggaaccgcaagcggaucuccaacugcguggcggacuacagcgugcuguacaacuccgccagcuucuccacguucaagugcuacggcgucagccccaccaagcucaacgaccugugcuucaccaacguguacgccgacuccuucgugauccgcggggacgagguccggcagaucgcccccggccagaccgggaagaucgccgacuacaacuacaagcugccggacgacuucacgggcugcgugaucgcguggaacagcaacaaccucgacuccaaggucgggggcaacuacaacuaccuguaccgccuguuccgcaagagcaaccucaagcccuucgagcgggacaucuccaccgagaucuaccaggccggcagcacccccugcaacgggguggagggcuucaacugcuacuucccccugcaguccuacggguuccagccgaccaacggcgugggguaccagcccuaccggguggucgugcugagcuucgagcuccugcacgcccccgccacggugugcggccccaagaaguccaccaaccuggucaagaacaagugcgugaacuucaacuucaacggccucaccgggaccggcgugcugaccgagagcaacaagaaguuccugccguuccagcaguucgggcgcgacaucgccgacacgaccgacgcgguccgcgacccccagacccuggagauccucgacaucacccccugcagcuucggcgggguguccgugaucacgccgggcaccaacaccagcaaccaggucgccgugcuguaccaggacgugaacugcaccgagguccccguggccauccacgccgaccagcugacgcccaccuggcggguguacuccaccggcagcaacgucuuccagacccgcgccgggugccucaucggcgcggagcacgugaacaacuccuacgagugcgacauccccaucggggccggcaucugcgccagcuaccagacgcagaccaacuccccgcggcgcgcccggagcguggcgucccagagcaucaucgccuacaccaugucccugggcgccgagaacagcgucgccuacuccaacaacagcaucgccauccccaccaacuucacgaucuccgugaccaccgagauccugcccgugagcaugaccaagacgagcgucgacugcaccauguacaucugcggggacuccaccgagugcagcaaccuccugcugcaguacggcuccuucugcacccagcucaaccgcgcgcugacggggaucgccguggagcaggacaagaacacccaggagguguucgcccaggucaagcagaucuacaagacgcccccgaucaaggacuucggcggguucaacuucagccagauccugcccgaccccuccaagcccagcaagcgguccuucaucgaggaccuccuguucaacaaggugacccuggccgacgccggcuucaucaagcaguacggcgacugccucggggacaucgcggcccgcgaccugaucugcgcccagaaguucaacggccugaccgugcucccgccccugcugaccgacgagaugaucgcccaguacaccagcgcccuccuggcggggaccaucacguccggcuggaccuucggggccggcgccgcccugcagauccccuucgcgaugcagauggccuaccgguucaacggcugcggggucacccagaacgugcucuacgagaaccagaagcugaucgccaaccaguucaacagcgccaucggcaagauccaggacucccugagcuccaccgccagcgcgcucgggaagcugcaggacguggucaaccagaacgcccaggcccugaacacgcucgugaagcagcuguccagcaacuucggcgccaucuccagcgugcugaacgacauccucucccgccuggacaaggucgaggccgaggugcagaucgaccggcugaucaccgggcgccuccagagccugcagaccuacgugacccagcagcugauccgggcggccgagauccgcgccagcgccaaccucgccgcgaccaagauguccgagugcguccugggccagagcaagcggguggacuucugcggcaaggggugccaccugauguccuucccccagagcgccccgcacggcguggucuuccuccacgugacguacguccccgcccaggagaagaacuucaccaccgcccccgcgaucugccacgacgggaaggcccacuucccccgcgagggcguguucguguccaacgggacccacugguucgucacgcagcggaacuucuacgagccgcagaucaucaccaccgacaacaccuucgugagcggcaacugcgacguggucaucggcaucgugaacaacacgguguacgacccccugcagcccgagcuggacuccggcgggggcgggagcgacaucaucaagcuccugaacgagcaggucaacaaggagaugcaguccagcaaccuguacauguccaugagcuccuggugcuacacccacagccucgacggcgccgggcuguuccuguucgaccacgccgcggaggaguacgagcacgccaagaagcucaucaucuuccugaacgagaacaacgugcccgugcagcugaccuccaucagcgccccggagcacaaguucgagggccucacgcagaucuuccagaaggccuacgagcacgagcagcacaucuccgagagcaucaacaacaucguggaccacgccaucaaguccaaggaccacgcgaccuucaacuuccugcagugguacgucgccgagcagcacgaggaggaggugcuguucaaggacauccucgacaagaucgagcugaucgggaacgagaaccacggccuguaccucgccgaccaguacgugaaggggaucgccaagagccgcaaguccugaggacuaguuauaagacugacuagcccgaugggccucccaacgggcccuccuccccuccuugcaccgagauuaauaaaaaaaaaaaaaaaaaaaaaaaaaaaaaaaaaaaaaaaaaaaaaaaaaaaaaaaaaaaaaaaaugcaucccccccccccccccccccccccccccccccaaaggcucuuuucagagccaccagaauu

SEQ ID NO: 12910 - RNA, 4165 nt, Artificial Sequence
  SARS-CoV-2/Wuhan/WIV05/2019__EPI_ISL_402128 spike protein mRNA gc (1-1147)(Q965C_S1003C) Ferritin construct
aggagaaagcuuaccauguucguguuccugguccuccugccccuggugagcucccagugcgugaaccucaccacccgcacgcagcugccgcccgccuacaccaacagcuucacccggggcgucuacuaccccgacaagguguuccgcuccagcgugcugcacuccacccaggaccucuuccugcccuucuucagcaacgucacgugguuccacgccauccacguguccgggaccaacggcaccaagcgguucgacaacccggugcugcccuucaacgacggggucuacuucgcgagcaccgagaaguccaacaucauccgcggcuggaucuucgggacgacccucgacagcaagacccagucccugcugaucgugaacaacgccaccaacguggucaucaaggugugcgaguuccaguucugcaacgaccccuuccucggcguguacuaccacaagaacaacaagagcuggauggaguccgaguuccgggucuacagcuccgccaacaacugcacguucgaguacgugagccagcccuuccugauggaccuggagggcaagcaggggaacuucaagaaccuccgcgaguucguguucaagaacaucgacggcuacuucaagaucuacuccaagcacaccccgaucaaccugguccgggaccugccccagggguucagcgcccucgagccccugguggaccugcccaucggcaucaacaucacccgcuuccagacccuccuggcccugcaccgguccuaccucacgccgggggacagcagcuccggcuggaccgcgggcgccgccgccuacuacgugggguaccugcagccccgcaccuuccugcucaaguacaacgagaacggcaccaucacggacgcggucgacugcgcccuggacccccugagcgagaccaagugcacccucaaguccuucaccguggagaaggggaucuaccagacgagcaacuuccgggugcagcccaccgaguccaucguccgcuucccgaacaucaccaaccugugccccuucggcgagguguucaacgccacccgguucgccagcgucuacgccuggaaccgcaagcggaucuccaacugcguggcggacuacagcgugcuguacaacuccgccagcuucuccacguucaagugcuacggcgucagccccaccaagcucaacgaccugugcuucaccaacguguacgccgacuccuucgugauccgcggggacgagguccggcagaucgcccccggccagaccgggaagaucgccgacuacaacuacaagcugccggacgacuucacgggcugcgugaucgcguggaacagcaacaaccucgacuccaaggucgggggcaacuacaacuaccuguaccgccuguuccgcaagagcaaccucaagcccuucgagcgggacaucuccaccgagaucuaccaggccggcagcacccccugcaacgggguggagggcuucaacugcuacuucccccugcaguccuacggguuccagccgaccaacggcgugggguaccagcccuaccggguggucgugcugagcuucgagcuccugcacgcccccgccacggugugcggccccaagaaguccaccaaccuggucaagaacaagugcgugaacuucaacuucaacggccucaccgggaccggcgugcugaccgagagcaacaagaaguuccugccguuccagcaguucgggcgcgacaucgccgacacgaccgacgcgguccgcgacccccagacccuggagauccucgacaucacccccugcagcuucggcgggguguccgugaucacgccgggcaccaacaccagcaaccaggucgccgugcuguaccaggacgugaacugcaccgagguccccguggccauccacgccgaccagcugacgcccaccuggcggguguacuccaccggcagcaacgucuuccagacccgcgccgggugccucaucggcgcggagcacgugaacaacuccuacgagugcgacauccccaucggggccggcaucugcgccagcuaccagacgcagaccaacuccccgcggcgcgcccggagcguggcgucccagagcaucaucgccuacaccaugucccugggcgccgagaacagcgucgccuacuccaacaacagcaucgccauccccaccaacuucacgaucuccgugaccaccgagauccugcccgugagcaugaccaagacgagcgucgacugcaccauguacaucugcggggacuccaccgagugcagcaaccuccugcugcaguacggcuccuucugcacccagcucaaccgcgcgcugacggggaucgccguggagcaggacaagaacacccaggagguguucgcccaggucaagcagaucuacaagacgcccccgaucaaggacuucggcggguucaacuucagccagauccugcccgaccccuccaagcccagcaagcgguccuucaucgaggaccuccuguucaacaaggugacccuggccgacgccggcuucaucaagcaguacggcgacugccucggggacaucgcggcccgcgaccugaucugcgcccagaaguucaacggccugaccgugcucccgccccugcugaccgacgagaugaucgcccaguacaccagcgcccuccuggcggggaccaucacguccggcuggaccuucggggccggcgccgcccugcagauccccuucgcgaugcagauggccuaccgguucaacggcaucggggucacccagaacgugcucuacgagaaccagaagcugaucgccaaccaguucaacagcgccaucggcaagauccaggacucccugagcuccaccgccagcgcgcucgggaagcugcaggacguggucaaccagaacgcccaggcccugaacacgcucgugaagugccuguccagcaacuucggcgccaucuccagcgugcugaacgacauccucucccgccuggacaaggucgaggccgaggugcagaucgaccggcugaucaccgggcgccuccagugccugcagaccuacgugacccagcagcugauccgggcggccgagauccgcgccagcgccaaccucgccgcgaccaagauguccgagugcguccugggccagagcaagcggguggacuucugcggcaagggguaccaccugauguccuucccccagagcgccccgcacggcguggucuuccuccacgugacguacguccccgcccaggagaagaacuucaccaccgcccccgcgaucugccacgacgggaaggcccacuucccccgcgagggcguguucguguccaacgggacccacugguucgucacgcagcggaacuucuacgagccgcagaucaucaccaccgacaacaccuucgugagcggcaacugcgacguggucaucggcaucgugaacaacacgguguacgacccccugcagcccgagcuggacuccggcgggggcgggagcgacaucaucaagcuccugaacgagcaggucaacaaggagaugcaguccagcaaccuguacauguccaugagcuccuggugcuacacccacagccucgacggcgccgggcuguuccuguucgaccacgccgcggaggaguacgagcacgccaagaagcucaucaucuuccugaacgagaacaacgugcccgugcagcugaccuccaucagcgccccggagcacaaguucgagggccucacgcagaucuuccagaaggccuacgagcacgagcagcacaucuccgagagcaucaacaacaucguggaccacgccaucaaguccaaggaccacgcgaccuucaacuuccugcagugguacgucgccgagcagcacgaggaggaggugcuguucaaggacauccucgacaagaucgagcugaucgggaacgagaaccacggccuguaccucgccgaccaguacgugaaggggaucgccaagagccgcaaguccugaggacuaguuauaagacugacuagcccgaugggccucccaacgggcccuccuccccuccuugcaccgagauuaauaaaaaaaaaaaaaaaaaaaaaaaaaaaaaaaaaaaaaaaaaaaaaaaaaaaaaaaaaaaaaaaaugcaucccccccccccccccccccccccccccccccaaaggcucuuuucagagccaccagaauu

SEQ ID NO: 12911 - RNA, 4165 nt, Artificial Sequence
  SARS-CoV-2/Wuhan/WIV05/2019__EPI_ISL_402128 spike protein mRNA gc (1-1147)(F970C_G999C) Ferritin construct
aggagaaagcuuaccauguucguguuccugguccuccugccccuggugagcucccagugcgugaaccucaccacccgcacgcagcugccgcccgccuacaccaacagcuucacccggggcgucuacuaccccgacaagguguuccgcuccagcgugcugcacuccacccaggaccucuuccugcccuucuucagcaacgucacgugguuccacgccauccacguguccgggaccaacggcaccaagcgguucgacaacccggugcugcccuucaacgacggggucuacuucgcgagcaccgagaaguccaacaucauccgcggcuggaucuucgggacgacccucgacagcaagacccagucccugcugaucgugaacaacgccaccaacguggucaucaaggugugcgaguuccaguucugcaacgaccccuuccucggcguguacuaccacaagaacaacaagagcuggauggaguccgaguuccgggucuacagcuccgccaacaacugcacguucgaguacgugagccagcccuuccugauggaccuggagggcaagcaggggaacuucaagaaccuccgcgaguucguguucaagaacaucgacggcuacuucaagaucuacuccaagcacaccccgaucaaccugguccgggaccugccccagggguucagcgcccucgagccccugguggaccugcccaucggcaucaacaucacccgcuuccagacccuccuggcccugcaccgguccuaccucacgccgggggacagcagcuccggcuggaccgcgggcgccgccgccuacuacgugggguaccugcagccccgcaccuuccugcucaaguacaacgagaacggcaccaucacggacgcggucgacugcgcccuggacccccugagcgagaccaagugcacccucaaguccuucaccguggagaaggggaucuaccagacgagcaacuuccgggugcagcccaccgaguccaucguccgcuucccgaacaucaccaaccugugccccuucggcgagguguucaacgccacccgguucgccagcgucuacgccuggaaccgcaagcggaucuccaacugcguggcggacuacagcgugcuguacaacuccgccagcuucuccacguucaagugcuacggcgucagccccaccaagcucaacgaccugugcuucaccaacguguacgccgacuccuucgugauccgcggggacgagguccggcagaucgcccccggccagaccgggaagaucgccgacuacaacuacaagcugccggacgacuucacgggcugcgugaucgcguggaacagcaacaaccucgacuccaaggucgggggcaacuacaacuaccuguaccgccuguuccgcaagagcaaccucaagcccuucgagcgggacaucuccaccgagaucuaccaggccggcagcacccccugcaacgggguggagggcuucaacugcuacuucccccugcaguccuacggguuccagccgaccaacggcgugggguaccagcccuaccggguggucgugcugagcuucgagcuccugcacgcccccgccacggugugcggccccaagaaguccaccaaccuggucaagaacaagugcgugaacuucaacuucaacggccucaccgggaccggcgugcugaccgagagcaacaagaaguuccugccguuccagcaguucgggcgcgacaucgccgacacgaccgacgcgguccgcgacccccagacccuggagauccucgacaucacccccugcagcuucggcgggguguccgugaucacgccgggcaccaacaccagcaaccaggucgccgugcuguaccaggacgugaacugcaccgagguccccguggccauccacgccgaccagcugacgcccaccuggcggguguacuccaccggcagcaacgucuuccagacccgcgccgggugccucaucggcgcggagcacgugaacaacuccuacgagugcgacauccccaucggggccggcaucugcgccagcuaccagacgcagaccaacuccccgcggcgcgcccggagcguggcgucccagagcaucaucgccuacaccaugucccugggcgccgagaacagcgucgccuacuccaacaacagcaucgccauccccaccaacuucacgaucuccgugaccaccgagauccugcccgugagcaugaccaagacgagcgucgacugcaccauguacaucugcggggacuccaccgagugcagcaaccuccugcugcaguacggcuccuucugcacccagcucaaccgcgcgcugacggggaucgccguggagcaggacaagaacacccaggagguguucgcccaggucaagcagaucuacaagacgcccccgaucaaggacuucggcggguucaacuucagccagauccugcccgaccccuccaagcccagcaagcgguccuucaucgaggaccuccuguucaacaaggugacccuggccgacgccggcuucaucaagcaguacggcgacugccucggggacaucgcggcccgcgaccugaucugcgcccagaaguucaacggccugaccgugcucccgccccugcugaccgacgagaugaucgcccaguacaccagcgcccuccuggcggggaccaucacguccggcuggaccuucggggccggcgccgcccugcagauccccuucgcgaugcagauggccuaccgguucaacggcaucggggucacccagaacgugcucuacgagaaccagaagcugaucgccaaccaguucaacagcgccaucggcaagauccaggacucccugagcuccaccgccagcgcgcucgggaagcugcaggacguggucaaccagaacgcccaggcccugaacacgcucgugaagcagcuguccagcaacugcggcgccaucuccagcgugcugaacgacauccucucccgccuggacaaggucgaggccgaggugcagaucgaccggcugaucaccugucgccuccagagccugcagaccuacgugacccagcagcugauccgggcggccgagauccgcgccagcgccaaccucgccgcgaccaagauguccgagugcguccugggccagagcaagcggguggacuucugcggcaagggguaccaccugauguccuucccccagagcgccccgcacggcguggucuuccuccacgugacguacguccccgcccaggagaagaacuucaccaccgcccccgcgaucugccacgacgggaaggcccacuucccccgcgagggcguguucguguccaacgggacccacugguucgucacgcagcggaacuucuacgagccgcagaucaucaccaccgacaacaccuucgugagcggcaacugcgacguggucaucggcaucgugaacaacacgguguacgacccccugcagcccgagcuggacuccggcgggggcgggagcgacaucaucaagcuccugaacgagcaggucaacaaggagaugcaguccagcaaccuguacauguccaugagcuccuggugcuacacccacagccucgacggcgccgggcuguuccuguucgaccacgccgcggaggaguacgagcacgccaagaagcucaucaucuuccugaacgagaacaacgugcccgugcagcugaccuccaucagcgccccggagcacaaguucgagggccucacgcagaucuuccagaaggccuacgagcacgagcagcacaucuccgagagcaucaacaacaucguggaccacgccaucaaguccaaggaccacgcgaccuucaacuuccugcagugguacgucgccgagcagcacgaggaggaggugcuguucaaggacauccucgacaagaucgagcugaucgggaacgagaaccacggccuguaccucgccgaccaguacgugaaggggaucgccaagagccgcaaguccugaggacuaguuauaagacugacuagcccgaugggccucccaacgggcccuccuccccuccuugcaccgagauuaauaaaaaaaaaaaaaaaaaaaaaaaaaaaaaaaaaaaaaaaaaaaaaaaaaaaaaaaaaaaaaaaaugcaucccccccccccccccccccccccccccccccaaaggcucuuuucagagccaccagaauu

SEQ ID NO: 12912 - RNA, 4165 nt, Artificial Sequence
  SARS-CoV-2/Wuhan/WIV05/2019__EPI_ISL_402128 spike protein mRNA gc (1-1147)(A972C_R995C) Ferritin construct
aggagaaagcuuaccauguucguguuccugguccuccugccccuggugagcucccagugcgugaaccucaccacccgcacgcagcugccgcccgccuacaccaacagcuucacccggggcgucuacuaccccgacaagguguuccgcuccagcgugcugcacuccacccaggaccucuuccugcccuucuucagcaacgucacgugguuccacgccauccacguguccgggaccaacggcaccaagcgguucgacaacccggugcugcccuucaacgacggggucuacuucgcgagcaccgagaaguccaacaucauccgcggcuggaucuucgggacgacccucgacagcaagacccagucccugcugaucgugaacaacgccaccaacguggucaucaaggugugcgaguuccaguucugcaacgaccccuuccucggcguguacuaccacaagaacaacaagagcuggauggaguccgaguuccgggucuacagcuccgccaacaacugcacguucgaguacgugagccagcccuuccugauggaccuggagggcaagcaggggaacuucaagaaccuccgcgaguucguguucaagaacaucgacggcuacuucaagaucuacuccaagcacaccccgaucaaccugguccgggaccugccccagggguucagcgcccucgagccccugguggaccugcccaucggcaucaacaucacccgcuuccagacccuccuggcccugcaccgguccuaccucacgccgggggacagcagcuccggcuggaccgcgggcgccgccgccuacuacgugggguaccugcagccccgcaccuuccugcucaaguacaacgagaacggcaccaucacggacgcggucgacugcgcccuggacccccugagcgagaccaagugcacccucaaguccuucaccguggagaaggggaucuaccagacgagcaacuuccgggugcagcccaccgaguccaucguccgcuucccgaacaucaccaaccugugccccuucggcgagguguucaacgccacccgguucgccagcgucuacgccuggaaccgcaagcggaucuccaacugcguggcggacuacagcgugcuguacaacuccgccagcuucuccacguucaagugcuacggcgucagccccaccaagcucaacgaccugugcuucaccaacguguacgccgacuccuucgugauccgcggggacgagguccggcagaucgcccccggccagaccgggaagaucgccgacuacaacuacaagcugccggacgacuucacgggcugcgugaucgcguggaacagcaacaaccucgacuccaaggucgggggcaacuacaacuaccuguaccgccuguuccgcaagagcaaccucaagcccuucgagcgggacaucuccaccgagaucuaccaggccggcagcacccccugcaacgggguggagggcuucaacugcuacuucccccugcaguccuacggguuccagccgaccaacggcgugggguaccagcccuaccggguggucgugcugagcuucgagcuccugcacgcccccgccacggugugcggccccaagaaguccaccaaccuggucaagaacaagugcgugaacuucaacuucaacggccucaccgggaccggcgugcugaccgagagcaacaagaaguuccugccguuccagcaguucgggcgcgacaucgccgacacgaccgacgcgguccgcgacccccagacccuggagauccucgacaucacccccugcagcuucggcgggguguccgugaucacgccgggcaccaacaccagcaaccaggucgccgugcuguaccaggacgugaacugcaccgagguccccguggccauccacgccgaccagcugacgcccaccuggcggguguacuccaccggcagcaacgucuuccagacccgcgccgggugccucaucggcgcggagcacgugaacaacuccuacgagugcgacauccccaucggggccggcaucugcgccagcuaccagacgcagaccaacuccccgcggcgcgcccggagcguggcgucccagagcaucaucgccuacaccaugucccugggcgccgagaacagcgucgccuacuccaacaacagcaucgccauccccaccaacuucacgaucuccgugaccaccgagauccugcccgugagcaugaccaagacgagcgucgacugcaccauguacaucugcggggacuccaccgagugcagcaaccuccugcugcaguacggcuccuucugcacccagcucaaccgcgcgcugacggggaucgccguggagcaggacaagaacacccaggagguguucgcccaggucaagcagaucuacaagacgcccccgaucaaggacuucggcggguucaacuucagccagauccugcccgaccccuccaagcccagcaagcgguccuucaucgaggaccuccuguucaacaaggugacccuggccgacgccggcuucaucaagcaguacggcgacugccucggggacaucgcggcccgcgaccugaucugcgcccagaaguucaacggccugaccgugcucccgccccugcugaccgacgagaugaucgcccaguacaccagcgcccuccuggcggggaccaucacguccggcuggaccuucggggccggcgccgcccugcagauccccuucgcgaugcagauggccuaccgguucaacggcaucggggucacccagaacgugcucuacgagaaccagaagcugaucgccaaccaguucaacagcgccaucggcaagauccaggacucccugagcuccaccgccagcgcgcucgggaagcugcaggacguggucaaccagaacgcccaggcccugaacacgcucgugaagcagcuguccagcaacuucggcugcaucuccagcgugcugaacgacauccucucccgccuggacaaggucgaggccgaggugcagaucgacugccugaucaccgggcgccuccagagccugcagaccuacgugacccagcagcugauccgggcggccgagauccgcgccagcgccaaccucgccgcgaccaagauguccgagugcguccugggccagagcaagcggguggacuucugcggcaagggguaccaccugauguccuucccccagagcgccccgcacggcguggucuuccuccacgugacguacguccccgcccaggagaagaacuucaccaccgcccccgcgaucugccacgacgggaaggcccacuucccccgcgagggcguguucguguccaacgggacccacugguucgucacgcagcggaacuucuacgagccgcagaucaucaccaccgacaacaccuucgugagcggcaacugcgacguggucaucggcaucgugaacaacacgguguacgacccccugcagcccgagcuggacuccggcgggggcgggagcgacaucaucaagcuccugaacgagcaggucaacaaggagaugcaguccagcaaccuguacauguccaugagcuccuggugcuacacccacagccucgacggcgccgggcuguuccuguucgaccacgccgcggaggaguacgagcacgccaagaagcucaucaucuuccugaacgagaacaacgugcccgugcagcugaccuccaucagcgccccggagcacaaguucgagggccucacgcagaucuuccagaaggccuacgagcacgagcagcacaucuccgagagcaucaacaacaucguggaccacgccaucaaguccaaggaccacgcgaccuucaacuuccugcagugguacgucgccgagcagcacgaggaggaggugcuguucaaggacauccucgacaagaucgagcugaucgggaacgagaaccacggccuguaccucgccgaccaguacgugaaggggaucgccaagagccgcaaguccugaggacuaguuauaagacugacuagcccgaugggccucccaacgggcccuccuccccuccuugcaccgagauuaauaaaaaaaaaaaaaaaaaaaaaaaaaaaaaaaaaaaaaaaaaaaaaaaaaaaaaaaaaaaaaaaaugcaucccccccccccccccccccccccccccccccaaaggcucuuuucagagccaccagaauu

SEQ ID NO: 12913 - RNA, 4165 nt, Artificial Sequence
  SARS-CoV-2/Wuhan/WIV05/2019__EPI_ISL_402128 spike protein mRNA gc (1-1147)(A890C_V1040C) Ferritin construct
aggagaaagcuuaccauguucguguuccugguccuccugccccuggugagcucccagugcgugaaccucaccacccgcacgcagcugccgcccgccuacaccaacagcuucacccggggcgucuacuaccccgacaagguguuccgcuccagcgugcugcacuccacccaggaccucuuccugcccuucuucagcaacgucacgugguuccacgccauccacguguccgggaccaacggcaccaagcgguucgacaacccggugcugcccuucaacgacggggucuacuucgcgagcaccgagaaguccaacaucauccgcggcuggaucuucgggacgacccucgacagcaagacccagucccugcugaucgugaacaacgccaccaacguggucaucaaggugugcgaguuccaguucugcaacgaccccuuccucggcguguacuaccacaagaacaacaagagcuggauggaguccgaguuccgggucuacagcuccgccaacaacugcacguucgaguacgugagccagcccuuccugauggaccuggagggcaagcaggggaacuucaagaaccuccgcgaguucguguucaagaacaucgacggcuacuucaagaucuacuccaagcacaccccgaucaaccugguccgggaccugccccagggguucagcgcccucgagccccugguggaccugcccaucggcaucaacaucacccgcuuccagacccuccuggcccugcaccgguccuaccucacgccgggggacagcagcuccggcuggaccgcgggcgccgccgccuacuacgugggguaccugcagccccgcaccuuccugcucaaguacaacgagaacggcaccaucacggacgcggucgacugcgcccuggacccccugagcgagaccaagugcacccucaaguccuucaccguggagaaggggaucuaccagacgagcaacuuccgggugcagcccaccgaguccaucguccgcuucccgaacaucaccaaccugugccccuucggcgagguguucaacgccacccgguucgccagcgucuacgccuggaaccgcaagcggaucuccaacugcguggcggacuacagcgugcuguacaacuccgccagcuucuccacguucaagugcuacggcgucagccccaccaagcucaacgaccugugcuucaccaacguguacgccgacuccuucgugauccgcggggacgagguccggcagaucgcccccggccagaccgggaagaucgccgacuacaacuacaagcugccggacgacuucacgggcugcgugaucgcguggaacagcaacaaccucgacuccaaggucgggggcaacuacaacuaccuguaccgccuguuccgcaagagcaaccucaagcccuucgagcgggacaucuccaccgagaucuaccaggccggcagcacccccugcaacgggguggagggcuucaacugcuacuucccccugcaguccuacggguuccagccgaccaacggcgugggguaccagcccuaccggguggucgugcugagcuucgagcuccugcacgcccccgccacggugugcggccccaagaaguccaccaaccuggucaagaacaagugcgugaacuucaacuucaacggccucaccgggaccggcgugcugaccgagagcaacaagaaguuccugccguuccagcaguucgggcgcgacaucgccgacacgaccgacgcgguccgcgacccccagacccuggagauccucgacaucacccccugcagcuucggcgggguguccgugaucacgccgggcaccaacaccagcaaccaggucgccgugcuguaccaggacgugaacugcaccgagguccccguggccauccacgccgaccagcugacgcccaccuggcggguguacuccaccggcagcaacgucuuccagacccgcgccgggugccucaucggcgcggagcacgugaacaacuccuacgagugcgacauccccaucggggccggcaucugcgccagcuaccagacgcagaccaacuccccgcggcgcgcccggagcguggcgucccagagcaucaucgccuacaccaugucccugggcgccgagaacagcgucgccuacuccaacaacagcaucgccauccccaccaacuucacgaucuccgugaccaccgagauccugcccgugagcaugaccaagacgagcgucgacugcaccauguacaucugcggggacuccaccgagugcagcaaccuccugcugcaguacggcuccuucugcacccagcucaaccgcgcgcugacggggaucgccguggagcaggacaagaacacccaggagguguucgcccaggucaagcagaucuacaagacgcccccgaucaaggacuucggcggguucaacuucagccagauccugcccgaccccuccaagcccagcaagcgguccuucaucgaggaccuccuguucaacaaggugacccuggccgacgccggcuucaucaagcaguacggcgacugccucggggacaucgcggcccgcgaccugaucugcgcccagaaguucaacggccugaccgugcucccgccccugcugaccgacgagaugaucgcccaguacaccagcgcccuccuggcggggaccaucacguccggcuggaccuucgggugcggcgccgcccugcagauccccuucgcgaugcagauggccuaccgguucaacggcaucggggucacccagaacgugcucuacgagaaccagaagcugaucgccaaccaguucaacagcgccaucggcaagauccaggacucccugagcuccaccgccagcgcgcucgggaagcugcaggacguggucaaccagaacgcccaggcccugaacacgcucgugaagcagcuguccagcaacuucggcgccaucuccagcgugcugaacgacauccucucccgccuggacaaggucgaggccgaggugcagaucgaccggcugaucaccgggcgccuccagagccugcagaccuacgugacccagcagcugauccgggcggccgagauccgcgccagcgccaaccucgccgcgaccaagauguccgagugcguccugggccagagcaagcggugcgacuucugcggcaagggguaccaccugauguccuucccccagagcgccccgcacggcguggucuuccuccacgugacguacguccccgcccaggagaagaacuucaccaccgcccccgcgaucugccacgacgggaaggcccacuucccccgcgagggcguguucguguccaacgggacccacugguucgucacgcagcggaacuucuacgagccgcagaucaucaccaccgacaacaccuucgugagcggcaacugcgacguggucaucggcaucgugaacaacacgguguacgacccccugcagcccgagcuggacuccggcgggggcgggagcgacaucaucaagcuccugaacgagcaggucaacaaggagaugcaguccagcaaccuguacauguccaugagcuccuggugcuacacccacagccucgacggcgccgggcuguuccuguucgaccacgccgcggaggaguacgagcacgccaagaagcucaucaucuuccugaacgagaacaacgugcccgugcagcugaccuccaucagcgccccggagcacaaguucgagggccucacgcagaucuuccagaaggccuacgagcacgagcagcacaucuccgagagcaucaacaacaucguggaccacgccaucaaguccaaggaccacgcgaccuucaacuuccugcagugguacgucgccgagcagcacgaggaggaggugcuguucaaggacauccucgacaagaucgagcugaucgggaacgagaaccacggccuguaccucgccgaccaguacgugaaggggaucgccaagagccgcaaguccugaggacuaguuauaagacugacuagcccgaugggccucccaacgggcccuccuccccuccuugcaccgagauuaauaaaaaaaaaaaaaaaaaaaaaaaaaaaaaaaaaaaaaaaaaaaaaaaaaaaaaaaaaaaaaaaaugcaucccccccccccccccccccccccccccccccaaaggcucuuuucagagccaccagaauu

SEQ ID NO: 12914 - RNA, 4165 nt, Artificial Sequence
  SARS-CoV-2/Wuhan/WIV05/2019__EPI_ISL_402128 spike protein mRNA gc (1-1147)(T874C_S1055C) Ferritin construct
aggagaaagcuuaccauguucguguuccugguccuccugccccuggugagcucccagugcgugaaccucaccacccgcacgcagcugccgcccgccuacaccaacagcuucacccggggcgucuacuaccccgacaagguguuccgcuccagcgugcugcacuccacccaggaccucuuccugcccuucuucagcaacgucacgugguuccacgccauccacguguccgggaccaacggcaccaagcgguucgacaacccggugcugcccuucaacgacggggucuacuucgcgagcaccgagaaguccaacaucauccgcggcuggaucuucgggacgacccucgacagcaagacccagucccugcugaucgugaacaacgccaccaacguggucaucaaggugugcgaguuccaguucugcaacgaccccuuccucggcguguacuaccacaagaacaacaagagcuggauggaguccgaguuccgggucuacagcuccgccaacaacugcacguucgaguacgugagccagcccuuccugauggaccuggagggcaagcaggggaacuucaagaaccuccgcgaguucguguucaagaacaucgacggcuacuucaagaucuacuccaagcacaccccgaucaaccugguccgggaccugccccagggguucagcgcccucgagccccugguggaccugcccaucggcaucaacaucacccgcuuccagacccuccuggcccugcaccgguccuaccucacgccgggggacagcagcuccggcuggaccgcgggcgccgccgccuacuacgugggguaccugcagccccgcaccuuccugcucaaguacaacgagaacggcaccaucacggacgcggucgacugcgcccuggacccccugagcgagaccaagugcacccucaaguccuucaccguggagaaggggaucuaccagacgagcaacuuccgggugcagcccaccgaguccaucguccgcuucccgaacaucaccaaccugugccccuucggcgagguguucaacgccacccgguucgccagcgucuacgccuggaaccgcaagcggaucuccaacugcguggcggacuacagcgugcuguacaacuccgccagcuucuccacguucaagugcuacggcgucagccccaccaagcucaacgaccugugcuucaccaacguguacgccgacuccuucgugauccgcggggacgagguccggcagaucgcccccggccagaccgggaagaucgccgacuacaacuacaagcugccggacgacuucacgggcugcgugaucgcguggaacagcaacaaccucgacuccaaggucgggggcaacuacaacuaccuguaccgccuguuccgcaagagcaaccucaagcccuucgagcgggacaucuccaccgagaucuaccaggccggcagcacccccugcaacgggguggagggcuucaacugcuacuucccccugcaguccuacggguuccagccgaccaacggcgugggguaccagcccuaccggguggucgugcugagcuucgagcuccugcacgcccccgccacggugugcggccccaagaaguccaccaaccuggucaagaacaagugcgugaacuucaacuucaacggccucaccgggaccggcgugcugaccgagagcaacaagaaguuccugccguuccagcaguucgggcgcgacaucgccgacacgaccgacgcgguccgcgacccccagacccuggagauccucgacaucacccccugcagcuucggcgggguguccgugaucacgccgggcaccaacaccagcaaccaggucgccgugcuguaccaggacgugaacugcaccgagguccccguggccauccacgccgaccagcugacgcccaccuggcggguguacuccaccggcagcaacgucuuccagacccgcgccgggugccucaucggcgcggagcacgugaacaacuccuacgagugcgacauccccaucggggccggcaucugcgccagcuaccagacgcagaccaacuccccgcggcgcgcccggagcguggcgucccagagcaucaucgccuacaccaugucccugggcgccgagaacagcgucgccuacuccaacaacagcaucgccauccccaccaacuucacgaucuccgugaccaccgagauccugcccgugagcaugaccaagacgagcgucgacugcaccauguacaucugcggggacuccaccgagugcagcaaccuccugcugcaguacggcuccuucugcacccagcucaaccgcgcgcugacggggaucgccguggagcaggacaagaacacccaggagguguucgcccaggucaagcagaucuacaagacgcccccgaucaaggacuucggcggguucaacuucagccagauccugcccgaccccuccaagcccagcaagcgguccuucaucgaggaccuccuguucaacaaggugacccuggccgacgccggcuucaucaagcaguacggcgacugccucggggacaucgcggcccgcgaccugaucugcgcccagaaguucaacggccugaccgugcucccgccccugcugaccgacgagaugaucgcccaguacugcagcgcccuccuggcggggaccaucacguccggcuggaccuucggggccggcgccgcccugcagauccccuucgcgaugcagauggccuaccgguucaacggcaucggggucacccagaacgugcucuacgagaaccagaagcugaucgccaaccaguucaacagcgccaucggcaagauccaggacucccugagcuccaccgccagcgcgcucgggaagcugcaggacguggucaaccagaacgcccaggcccugaacacgcucgugaagcagcuguccagcaacuucggcgccaucuccagcgugcugaacgacauccucucccgccuggacaaggucgaggccgaggugcagaucgaccggcugaucaccgggcgccuccagagccugcagaccuacgugacccagcagcugauccgggcggccgagauccgcgccagcgccaaccucgccgcgaccaagauguccgagugcguccugggccagagcaagcggguggacuucugcggcaagggguaccaccugauguccuucccccagugcgccccgcacggcguggucuuccuccacgugacguacguccccgcccaggagaagaacuucaccaccgcccccgcgaucugccacgacgggaaggcccacuucccccgcgagggcguguucguguccaacgggacccacugguucgucacgcagcggaacuucuacgagccgcagaucaucaccaccgacaacaccuucgugagcggcaacugcgacguggucaucggcaucgugaacaacacgguguacgacccccugcagcccgagcuggacuccggcgggggcgggagcgacaucaucaagcuccugaacgagcaggucaacaaggagaugcaguccagcaaccuguacauguccaugagcuccuggugcuacacccacagccucgacggcgccgggcuguuccuguucgaccacgccgcggaggaguacgagcacgccaagaagcucaucaucuuccugaacgagaacaacgugcccgugcagcugaccuccaucagcgccccggagcacaaguucgagggccucacgcagaucuuccagaaggccuacgagcacgagcagcacaucuccgagagcaucaacaacaucguggaccacgccaucaaguccaaggaccacgcgaccuucaacuuccugcagugguacgucgccgagcagcacgaggaggaggugcuguucaaggacauccucgacaagaucgagcugaucgggaacgagaaccacggccuguaccucgccgaccaguacgugaaggggaucgccaagagccgcaaguccugaggacuaguuauaagacugacuagcccgaugggccucccaacgggcccuccuccccuccuugcaccgagauuaauaaaaaaaaaaaaaaaaaaaaaaaaaaaaaaaaaaaaaaaaaaaaaaaaaaaaaaaaaaaaaaaaugcaucccccccccccccccccccccccccccccccaaaggcucuuuucagagccaccagaauu

SEQ ID NO: 12915 - RNA, 3751 nt, Artificial Sequence
  SARS-CoV-2/Wuhan/WIV05/2019__EPI_ISL_402128 spike protein mRNA gc (1-1147) Foldon construct
aggagaaagcuuaccauguucguguuccugguccuccugccccuggugagcucccagugcgugaaccucaccacccgcacgcagcugccgcccgccuacaccaacagcuucacccggggcgucuacuaccccgacaagguguuccgcuccagcgugcugcacuccacccaggaccucuuccugcccuucuucagcaacgucacgugguuccacgccauccacguguccgggaccaacggcaccaagcgguucgacaacccggugcugcccuucaacgacggggucuacuucgcgagcaccgagaaguccaacaucauccgcggcuggaucuucgggacgacccucgacagcaagacccagucccugcugaucgugaacaacgccaccaacguggucaucaaggugugcgaguuccaguucugcaacgaccccuuccucggcguguacuaccacaagaacaacaagagcuggauggaguccgaguuccgggucuacagcuccgccaacaacugcacguucgaguacgugagccagcccuuccugauggaccuggagggcaagcaggggaacuucaagaaccuccgcgaguucguguucaagaacaucgacggcuacuucaagaucuacuccaagcacaccccgaucaaccugguccgggaccugccccagggguucagcgcccucgagccccugguggaccugcccaucggcaucaacaucacccgcuuccagacccuccuggcccugcaccgguccuaccucacgccgggggacagcagcuccggcuggaccgcgggcgccgccgccuacuacgugggguaccugcagccccgcaccuuccugcucaaguacaacgagaacggcaccaucacggacgcggucgacugcgcccuggacccccugagcgagaccaagugcacccucaaguccuucaccguggagaaggggaucuaccagacgagcaacuuccgggugcagcccaccgaguccaucguccgcuucccgaacaucaccaaccugugccccuucggcgagguguucaacgccacccgguucgccagcgucuacgccuggaaccgcaagcggaucuccaacugcguggcggacuacagcgugcuguacaacuccgccagcuucuccacguucaagugcuacggcgucagccccaccaagcucaacgaccugugcuucaccaacguguacgccgacuccuucgugauccgcggggacgagguccggcagaucgcccccggccagaccgggaagaucgccgacuacaacuacaagcugccggacgacuucacgggcugcgugaucgcguggaacagcaacaaccucgacuccaaggucgggggcaacuacaacuaccuguaccgccuguuccgcaagagcaaccucaagcccuucgagcgggacaucuccaccgagaucuaccaggccggcagcacccccugcaacgggguggagggcuucaacugcuacuucccccugcaguccuacggguuccagccgaccaacggcgugggguaccagcccuaccggguggucgugcugagcuucgagcuccugcacgcccccgccacggugugcggccccaagaaguccaccaaccuggucaagaacaagugcgugaacuucaacuucaacggccucaccgggaccggcgugcugaccgagagcaacaagaaguuccugccguuccagcaguucgggcgcgacaucgccgacacgaccgacgcgguccgcgacccccagacccuggagauccucgacaucacccccugcagcuucggcgggguguccgugaucacgccgggcaccaacaccagcaaccaggucgccgugcuguaccaggacgugaacugcaccgagguccccguggccauccacgccgaccagcugacgcccaccuggcggguguacuccaccggcagcaacgucuuccagacccgcgccgggugccucaucggcgcggagcacgugaacaacuccuacgagugcgacauccccaucggggccggcaucugcgccagcuaccagacgcagaccaacuccccgcggcgcgcccggagcguggcgucccagagcaucaucgccuacaccaugucccugggcgccgagaacagcgucgccuacuccaacaacagcaucgccauccccaccaacuucacgaucuccgugaccaccgagauccugcccgugagcaugaccaagacgagcgucgacugcaccauguacaucugcggggacuccaccgagugcagcaaccuccugcugcaguacggcuccuucugcacccagcucaaccgcgcgcugacggggaucgccguggagcaggacaagaacacccaggagguguucgcccaggucaagcagaucuacaagacgcccccgaucaaggacuucggcggguucaacuucagccagauccugcccgaccccuccaagcccagcaagcgguccuucaucgaggaccuccuguucaacaaggugacccuggccgacgccggcuucaucaagcaguacggcgacugccucggggacaucgcggcccgcgaccugaucugcgcccagaaguucaacggccugaccgugcucccgccccugcugaccgacgagaugaucgcccaguacaccagcgcccuccuggcggggaccaucacguccggcuggaccuucggggccggcgccgcccugcagauccccuucgcgaugcagauggccuaccgguucaacggcaucggggucacccagaacgugcucuacgagaaccagaagcugaucgccaaccaguucaacagcgccaucggcaagauccaggacucccugagcuccaccgccagcgcgcucgggaagcugcaggacguggucaaccagaacgcccaggcccugaacacgcucgugaagcagcuguccagcaacuucggcgccaucuccagcgugcugaacgacauccucucccgccuggacaaggucgaggccgaggugcagaucgaccggcugaucaccgggcgccuccagagccugcagaccuacgugacccagcagcugauccgggcggccgagauccgcgccagcgccaaccucgccgcgaccaagauguccgagugcguccugggccagagcaagcggguggacuucugcggcaagggguaccaccugauguccuucccccagagcgccccgcacggcguggucuuccuccacgugacguacguccccgcccaggagaagaacuucaccaccgcccccgcgaucugccacgacgggaaggcccacuucccccgcgagggcguguucguguccaacgggacccacugguucgucacgcagcggaacuucuacgagccgcagaucaucaccaccgacaacaccuucgugagcggcaacugcgacguggucaucggcaucgugaacaacacgguguacgacccccugcagcccgagcuggacuccggcgggagcggcuacauccccgaggccccgcgcgacgggcaggccuacgugcggaaggacggcgaguggguccugcucagcaccuuccugugaggacuaguuauaagacugacuagcccgaugggccucccaacgggcccuccuccccuccuugcaccgagauuaauaaaaaaaaaaaaaaaaaaaaaaaaaaaaaaaaaaaaaaaaaaaaaaaaaaaaaaaaaaaaaaaaugcaucccccccccccccccccccccccccccccccaaaggcucuuuucagagccaccagaauu

SEQ ID NO: 12916 - RNA, 3751 nt, Artificial Sequence
  SARS-CoV-2/Wuhan/WIV05/2019__EPI_ISL_402128 spike protein mRNA gc (1-1147)(K986P_V987P) Foldon construct
aggagaaagcuuaccauguucguguuccugguccuccugccccuggugagcucccagugcgugaaccucaccacccgcacgcagcugccgcccgccuacaccaacagcuucacccggggcgucuacuaccccgacaagguguuccgcuccagcgugcugcacuccacccaggaccucuuccugcccuucuucagcaacgucacgugguuccacgccauccacguguccgggaccaacggcaccaagcgguucgacaacccggugcugcccuucaacgacggggucuacuucgcgagcaccgagaaguccaacaucauccgcggcuggaucuucgggacgacccucgacagcaagacccagucccugcugaucgugaacaacgccaccaacguggucaucaaggugugcgaguuccaguucugcaacgaccccuuccucggcguguacuaccacaagaacaacaagagcuggauggaguccgaguuccgggucuacagcuccgccaacaacugcacguucgaguacgugagccagcccuuccugauggaccuggagggcaagcaggggaacuucaagaaccuccgcgaguucguguucaagaacaucgacggcuacuucaagaucuacuccaagcacaccccgaucaaccugguccgggaccugccccagggguucagcgcccucgagccccugguggaccugcccaucggcaucaacaucacccgcuuccagacccuccuggcccugcaccgguccuaccucacgccgggggacagcagcuccggcuggaccgcgggcgccgccgccuacuacgugggguaccugcagccccgcaccuuccugcucaaguacaacgagaacggcaccaucacggacgcggucgacugcgcccuggacccccugagcgagaccaagugcacccucaaguccuucaccguggagaaggggaucuaccagacgagcaacuuccgggugcagcccaccgaguccaucguccgcuucccgaacaucaccaaccugugccccuucggcgagguguucaacgccacccgguucgccagcgucuacgccuggaaccgcaagcggaucuccaacugcguggcggacuacagcgugcuguacaacuccgccagcuucuccacguucaagugcuacggcgucagccccaccaagcucaacgaccugugcuucaccaacguguacgccgacuccuucgugauccgcggggacgagguccggcagaucgcccccggccagaccgggaagaucgccgacuacaacuacaagcugccggacgacuucacgggcugcgugaucgcguggaacagcaacaaccucgacuccaaggucgggggcaacuacaacuaccuguaccgccuguuccgcaagagcaaccucaagcccuucgagcgggacaucuccaccgagaucuaccaggccggcagcacccccugcaacgggguggagggcuucaacugcuacuucccccugcaguccuacggguuccagccgaccaacggcgugggguaccagcccuaccggguggucgugcugagcuucgagcuccugcacgcccccgccacggugugcggccccaagaaguccaccaaccuggucaagaacaagugcgugaacuucaacuucaacggccucaccgggaccggcgugcugaccgagagcaacaagaaguuccugccguuccagcaguucgggcgcgacaucgccgacacgaccgacgcgguccgcgacccccagacccuggagauccucgacaucacccccugcagcuucggcgggguguccgugaucacgccgggcaccaacaccagcaaccaggucgccgugcuguaccaggacgugaacugcaccgagguccccguggccauccacgccgaccagcugacgcccaccuggcggguguacuccaccggcagcaacgucuuccagacccgcgccgggugccucaucggcgcggagcacgugaacaacuccuacgagugcgacauccccaucggggccggcaucugcgccagcuaccagacgcagaccaacuccccgcggcgcgcccggagcguggcgucccagagcaucaucgccuacaccaugucccugggcgccgagaacagcgucgccuacuccaacaacagcaucgccauccccaccaacuucacgaucuccgugaccaccgagauccugcccgugagcaugaccaagacgagcgucgacugcaccauguacaucugcggggacuccaccgagugcagcaaccuccugcugcaguacggcuccuucugcacccagcucaaccgcgcgcugacggggaucgccguggagcaggacaagaacacccaggagguguucgcccaggucaagcagaucuacaagacgcccccgaucaaggacuucggcggguucaacuucagccagauccugcccgaccccuccaagcccagcaagcgguccuucaucgaggaccuccuguucaacaaggugacccuggccgacgccggcuucaucaagcaguacggcgacugccucggggacaucgcggcccgcgaccugaucugcgcccagaaguucaacggccugaccgugcucccgccccugcugaccgacgagaugaucgcccaguacaccagcgcccuccuggcggggaccaucacguccggcuggaccuucggggccggcgccgcccugcagauccccuucgcgaugcagauggccuaccgguucaacggcaucggggucacccagaacgugcucuacgagaaccagaagcugaucgccaaccaguucaacagcgccaucggcaagauccaggacucccugagcuccaccgccagcgcgcucgggaagcugcaggacguggucaaccagaacgcccaggcccugaacacgcucgugaagcagcuguccagcaacuucggcgccaucuccagcgugcugaacgacauccucucccgccuggacccgcccgaggccgaggugcagaucgaccggcugaucaccgggcgccuccagagccugcagaccuacgugacccagcagcugauccgggcggccgagauccgcgccagcgccaaccucgccgcgaccaagauguccgagugcguccugggccagagcaagcggguggacuucugcggcaagggguaccaccugauguccuucccccagagcgccccgcacggcguggucuuccuccacgugacguacguccccgcccaggagaagaacuucaccaccgcccccgcgaucugccacgacgggaaggcccacuucccccgcgagggcguguucguguccaacgggacccacugguucgucacgcagcggaacuucuacgagccgcagaucaucaccaccgacaacaccuucgugagcggcaacugcgacguggucaucggcaucgugaacaacacgguguacgacccccugcagcccgagcuggacuccggcgggagcggcuacauccccgaggccccgcgcgacgggcaggccuacgugcggaaggacggcgaguggguccugcucagcaccuuccugugaggacuaguuauaagacugacuagcccgaugggccucccaacgggcccuccuccccuccuugcaccgagauuaauaaaaaaaaaaaaaaaaaaaaaaaaaaaaaaaaaaaaaaaaaaaaaaaaaaaaaaaaaaaaaaaaugcaucccccccccccccccccccccccccccccccaaaggcucuuuucagagccaccagaauu

SEQ ID NO: 12917 - RNA, 3751 nt, Artificial Sequence
  SARS-CoV-2/Wuhan/WIV05/2019__EPI_ISL_402128 spike protein mRNA gc (1-1147)(K986P_V987P_T887WN_A1020W) Foldon construct
aggagaaagcuuaccauguucguguuccugguccuccugccccuggugagcucccagugcgugaaccucaccacccgcacgcagcugccgcccgccuacaccaacagcuucacccggggcgucuacuaccccgacaagguguuccgcuccagcgugcugcacuccacccaggaccucuuccugcccuucuucagcaacgucacgugguuccacgccauccacguguccgggaccaacggcaccaagcgguucgacaacccggugcugcccuucaacgacggggucuacuucgcgagcaccgagaaguccaacaucauccgcggcuggaucuucgggacgacccucgacagcaagacccagucccugcugaucgugaacaacgccaccaacguggucaucaaggugugcgaguuccaguucugcaacgaccccuuccucggcguguacuaccacaagaacaacaagagcuggauggaguccgaguuccgggucuacagcuccgccaacaacugcacguucgaguacgugagccagcccuuccugauggaccuggagggcaagcaggggaacuucaagaaccuccgcgaguucguguucaagaacaucgacggcuacuucaagaucuacuccaagcacaccccgaucaaccugguccgggaccugccccagggguucagcgcccucgagccccugguggaccugcccaucggcaucaacaucacccgcuuccagacccuccuggcccugcaccgguccuaccucacgccgggggacagcagcuccggcuggaccgcgggcgccgccgccuacuacgugggguaccugcagccccgcaccuuccugcucaaguacaacgagaacggcaccaucacggacgcggucgacugcgcccuggacccccugagcgagaccaagugcacccucaaguccuucaccguggagaaggggaucuaccagacgagcaacuuccgggugcagcccaccgaguccaucguccgcuucccgaacaucaccaaccugugccccuucggcgagguguucaacgccacccgguucgccagcgucuacgccuggaaccgcaagcggaucuccaacugcguggcggacuacagcgugcuguacaacuccgccagcuucuccacguucaagugcuacggcgucagccccaccaagcucaacgaccugugcuucaccaacguguacgccgacuccuucgugauccgcggggacgagguccggcagaucgcccccggccagaccgggaagaucgccgacuacaacuacaagcugccggacgacuucacgggcugcgugaucgcguggaacagcaacaaccucgacuccaaggucgggggcaacuacaacuaccuguaccgccuguuccgcaagagcaaccucaagcccuucgagcgggacaucuccaccgagaucuaccaggccggcagcacccccugcaacgggguggagggcuucaacugcuacuucccccugcaguccuacggguuccagccgaccaacggcgugggguaccagcccuaccggguggucgugcugagcuucgagcuccugcacgcccccgccacggugugcggccccaagaaguccaccaaccuggucaagaacaagugcgugaacuucaacuucaacggccucaccgggaccggcgugcugaccgagagcaacaagaaguuccugccguuccagcaguucgggcgcgacaucgccgacacgaccgacgcgguccgcgacccccagacccuggagauccucgacaucacccccugcagcuucggcgggguguccgugaucacgccgggcaccaacaccagcaaccaggucgccgugcuguaccaggacgugaacugcaccgagguccccguggccauccacgccgaccagcugacgcccaccuggcggguguacuccaccggcagcaacgucuuccagacccgcgccgggugccucaucggcgcggagcacgugaacaacuccuacgagugcgacauccccaucggggccggcaucugcgccagcuaccagacgcagaccaacuccccgcggcgcgcccggagcguggcgucccagagcaucaucgccuacaccaugucccugggcgccgagaacagcgucgccuacuccaacaacagcaucgccauccccaccaacuucacgaucuccgugaccaccgagauccugcccgugagcaugaccaagacgagcgucgacugcaccauguacaucugcggggacuccaccgagugcagcaaccuccugcugcaguacggcuccuucugcacccagcucaaccgcgcgcugacggggaucgccguggagcaggacaagaacacccaggagguguucgcccaggucaagcagaucuacaagacgcccccgaucaaggacuucggcggguucaacuucagccagauccugcccgaccccuccaagcccagcaagcgguccuucaucgaggaccuccuguucaacaaggugacccuggccgacgccggcuucaucaagcaguacggcgacugccucggggacaucgcggcccgcgaccugaucugcgcccagaaguucaacggccugaccgugcucccgccccugcugaccgacgagaugaucgcccaguacaccagcgcccuccuggcggggaccaucacguccggcuggugguucggggccggcgccgcccugcagauccccuucgcgaugcagauggccuaccgguucaacggcaucggggucacccagaacgugcucuacgagaaccagaagcugaucgccaaccaguucaacagcgccaucggcaagauccaggacucccugagcuccaccgccagcgcgcucgggaagcugcaggacguggucaaccagaacgcccaggcccugaacacgcucgugaagcagcuguccagcaacuucggcgccaucuccagcgugcugaacgacauccucucccgccuggacccgcccgaggccgaggugcagaucgaccggcugaucaccgggcgccuccagagccugcagaccuacgugacccagcagcugauccgggcggccgagauccgcuggagcgccaaccucgccgcgaccaagauguccgagugcguccugggccagagcaagcggguggacuucugcggcaagggguaccaccugauguccuucccccagagcgccccgcacggcguggucuuccuccacgugacguacguccccgcccaggagaagaacuucaccaccgcccccgcgaucugccacgacgggaaggcccacuucccccgcgagggcguguucguguccaacgggacccacugguucgucacgcagcggaacuucuacgagccgcagaucaucaccaccgacaacaccuucgugagcggcaacugcgacguggucaucggcaucgugaacaacacgguguacgacccccugcagcccgagcuggacuccggcgggagcggcuacauccccgaggccccgcgcgacgggcaggccuacgugcggaaggacggcgaguggguccugcucagcaccuuccugugaggacuaguuauaagacugacuagcccgaugggccucccaacgggcccuccuccccuccuugcaccgagauuaauaaaaaaaaaaaaaaaaaaaaaaaaaaaaaaaaaaaaaaaaaaaaaaaaaaaaaaaaaaaaaaaaugcaucccccccccccccccccccccccccccccccaaaggcucuuuucagagccaccagaauu

SEQ ID NO: 12918 - RNA, 3751 nt, Artificial Sequence
  SARS-CoV-2/Wuhan/WIV05/2019__EPI_ISL_402128 spike protein mRNA gc (1-1147)(K986P_V987P_P1069F) Foldon construct
aggagaaagcuuaccauguucguguuccugguccuccugccccuggugagcucccagugcgugaaccucaccacccgcacgcagcugccgcccgccuacaccaacagcuucacccggggcgucuacuaccccgacaagguguuccgcuccagcgugcugcacuccacccaggaccucuuccugcccuucuucagcaacgucacgugguuccacgccauccacguguccgggaccaacggcaccaagcgguucgacaacccggugcugcccuucaacgacggggucuacuucgcgagcaccgagaaguccaacaucauccgcggcuggaucuucgggacgacccucgacagcaagacccagucccugcugaucgugaacaacgccaccaacguggucaucaaggugugcgaguuccaguucugcaacgaccccuuccucggcguguacuaccacaagaacaacaagagcuggauggaguccgaguuccgggucuacagcuccgccaacaacugcacguucgaguacgugagccagcccuuccugauggaccuggagggcaagcaggggaacuucaagaaccuccgcgaguucguguucaagaacaucgacggcuacuucaagaucuacuccaagcacaccccgaucaaccugguccgggaccugccccagggguucagcgcccucgagccccugguggaccugcccaucggcaucaacaucacccgcuuccagacccuccuggcccugcaccgguccuaccucacgccgggggacagcagcuccggcuggaccgcgggcgccgccgccuacuacgugggguaccugcagccccgcaccuuccugcucaaguacaacgagaacggcaccaucacggacgcggucgacugcgcccuggacccccugagcgagaccaagugcacccucaaguccuucaccguggagaaggggaucuaccagacgagcaacuuccgggugcagcccaccgaguccaucguccgcuucccgaacaucaccaaccugugccccuucggcgagguguucaacgccacccgguucgccagcgucuacgccuggaaccgcaagcggaucuccaacugcguggcggacuacagcgugcuguacaacuccgccagcuucuccacguucaagugcuacggcgucagccccaccaagcucaacgaccugugcuucaccaacguguacgccgacuccuucgugauccgcggggacgagguccggcagaucgcccccggccagaccgggaagaucgccgacuacaacuacaagcugccggacgacuucacgggcugcgugaucgcguggaacagcaacaaccucgacuccaaggucgggggcaacuacaacuaccuguaccgccuguuccgcaagagcaaccucaagcccuucgagcgggacaucuccaccgagaucuaccaggccggcagcacccccugcaacgggguggagggcuucaacugcuacuucccccugcaguccuacggguuccagccgaccaacggcgugggguaccagcccuaccggguggucgugcugagcuucgagcuccugcacgcccccgccacggugugcggccccaagaaguccaccaaccuggucaagaacaagugcgugaacuucaacuucaacggccucaccgggaccggcgugcugaccgagagcaacaagaaguuccugccguuccagcaguucgggcgcgacaucgccgacacgaccgacgcgguccgcgacccccagacccuggagauccucgacaucacccccugcagcuucggcgggguguccgugaucacgccgggcaccaacaccagcaaccaggucgccgugcuguaccaggacgugaacugcaccgagguccccguggccauccacgccgaccagcugacgcccaccuggcggguguacuccaccggcagcaacgucuuccagacccgcgccgggugccucaucggcgcggagcacgugaacaacuccuacgagugcgacauccccaucggggccggcaucugcgccagcuaccagacgcagaccaacuccccgcggcgcgcccggagcguggcgucccagagcaucaucgccuacaccaugucccugggcgccgagaacagcgucgccuacuccaacaacagcaucgccauccccaccaacuucacgaucuccgugaccaccgagauccugcccgugagcaugaccaagacgagcgucgacugcaccauguacaucugcggggacuccaccgagugcagcaaccuccugcugcaguacggcuccuucugcacccagcucaaccgcgcgcugacggggaucgccguggagcaggacaagaacacccaggagguguucgcccaggucaagcagaucuacaagacgcccccgaucaaggacuucggcggguucaacuucagccagauccugcccgaccccuccaagcccagcaagcgguccuucaucgaggaccuccuguucaacaaggugacccuggccgacgccggcuucaucaagcaguacggcgacugccucggggacaucgcggcccgcgaccugaucugcgcccagaaguucaacggccugaccgugcucccgccccugcugaccgacgagaugaucgcccaguacaccagcgcccuccuggcggggaccaucacguccggcuggaccuucggggccggcgccgcccugcagauccccuucgcgaugcagauggccuaccgguucaacggcaucggggucacccagaacgugcucuacgagaaccagaagcugaucgccaaccaguucaacagcgccaucggcaagauccaggacucccugagcuccaccgccagcgcgcucgggaagcugcaggacguggucaaccagaacgcccaggcccugaacacgcucgugaagcagcuguccagcaacuucggcgccaucuccagcgugcugaacgacauccucucccgccuggacccgcccgaggccgaggugcagaucgaccggcugaucaccgggcgccuccagagccugcagaccuacgugacccagcagcugauccgggcggccgagauccgcgccagcgccaaccucgccgcgaccaagauguccgagugcguccugggccagagcaagcggguggacuucugcggcaagggguaccaccugauguccuucccccagagcgccccgcacggcguggucuuccuccacgugacguacgucuucgcccaggagaagaacuucaccaccgcccccgcgaucugccacgacgggaaggcccacuucccccgcgagggcguguucguguccaacgggacccacugguucgucacgcagcggaacuucuacgagccgcagaucaucaccaccgacaacaccuucgugagcggcaacugcgacguggucaucggcaucgugaacaacacgguguacgacccccugcagcccgagcuggacuccggcgggagcggcuacauccccgaggccccgcgcgacgggcaggccuacgugcggaaggacggcgaguggguccugcucagcaccuuccugugaggacuaguuauaagacugacuagcccgaugggccucccaacgggcccuccuccccuccuugcaccgagauuaauaaaaaaaaaaaaaaaaaaaaaaaaaaaaaaaaaaaaaaaaaaaaaaaaaaaaaaaaaaaaaaaaugcaucccccccccccccccccccccccccccccccaaaggcucuuuucagagccaccagaauu

SEQ ID NO: 12919 - RNA, 3751 nt, Artificial Sequence
  SARS-CoV-2/Wuhan/WIV05/2019__EPI_ISL_402128 spike protein mRNA gc (1-1147)(K986P_V987P_ H1048Q_H1064N_ H1083N_H1101N) Foldon construct
aggagaaagcuuaccauguucguguuccugguccuccugccccuggugagcucccagugcgugaaccucaccacccgcacgcagcugccgcccgccuacaccaacagcuucacccggggcgucuacuaccccgacaagguguuccgcuccagcgugcugcacuccacccaggaccucuuccugcccuucuucagcaacgucacgugguuccacgccauccacguguccgggaccaacggcaccaagcgguucgacaacccggugcugcccuucaacgacggggucuacuucgcgagcaccgagaaguccaacaucauccgcggcuggaucuucgggacgacccucgacagcaagacccagucccugcugaucgugaacaacgccaccaacguggucaucaaggugugcgaguuccaguucugcaacgaccccuuccucggcguguacuaccacaagaacaacaagagcuggauggaguccgaguuccgggucuacagcuccgccaacaacugcacguucgaguacgugagccagcccuuccugauggaccuggagggcaagcaggggaacuucaagaaccuccgcgaguucguguucaagaacaucgacggcuacuucaagaucuacuccaagcacaccccgaucaaccugguccgggaccugccccagggguucagcgcccucgagccccugguggaccugcccaucggcaucaacaucacccgcuuccagacccuccuggcccugcaccgguccuaccucacgccgggggacagcagcuccggcuggaccgcgggcgccgccgccuacuacgugggguaccugcagccccgcaccuuccugcucaaguacaacgagaacggcaccaucacggacgcggucgacugcgcccuggacccccugagcgagaccaagugcacccucaaguccuucaccguggagaaggggaucuaccagacgagcaacuuccgggugcagcccaccgaguccaucguccgcuucccgaacaucaccaaccugugccccuucggcgagguguucaacgccacccgguucgccagcgucuacgccuggaaccgcaagcggaucuccaacugcguggcggacuacagcgugcuguacaacuccgccagcuucuccacguucaagugcuacggcgucagccccaccaagcucaacgaccugugcuucaccaacguguacgccgacuccuucgugauccgcggggacgagguccggcagaucgcccccggccagaccgggaagaucgccgacuacaacuacaagcugccggacgacuucacgggcugcgugaucgcguggaacagcaacaaccucgacuccaaggucgggggcaacuacaacuaccuguaccgccuguuccgcaagagcaaccucaagcccuucgagcgggacaucuccaccgagaucuaccaggccggcagcacccccugcaacgggguggagggcuucaacugcuacuucccccugcaguccuacggguuccagccgaccaacggcgugggguaccagcccuaccggguggucgugcugagcuucgagcuccugcacgcccccgccacggugugcggccccaagaaguccaccaaccuggucaagaacaagugcgugaacuucaacuucaacggccucaccgggaccggcgugcugaccgagagcaacaagaaguuccugccguuccagcaguucgggcgcgacaucgccgacacgaccgacgcgguccgcgacccccagacccuggagauccucgacaucacccccugcagcuucggcgggguguccgugaucacgccgggcaccaacaccagcaaccaggucgccgugcuguaccaggacgugaacugcaccgagguccccguggccauccacgccgaccagcugacgcccaccuggcggguguacuccaccggcagcaacgucuuccagacccgcgccgggugccucaucggcgcggagcacgugaacaacuccuacgagugcgacauccccaucggggccggcaucugcgccagcuaccagacgcagaccaacuccccgcggcgcgcccggagcguggcgucccagagcaucaucgccuacaccaugucccugggcgccgagaacagcgucgccuacuccaacaacagcaucgccauccccaccaacuucacgaucuccgugaccaccgagauccugcccgugagcaugaccaagacgagcgucgacugcaccauguacaucugcggggacuccaccgagugcagcaaccuccugcugcaguacggcuccuucugcacccagcucaaccgcgcgcugacggggaucgccguggagcaggacaagaacacccaggagguguucgcccaggucaagcagaucuacaagacgcccccgaucaaggacuucggcggguucaacuucagccagauccugcccgaccccuccaagcccagcaagcgguccuucaucgaggaccuccuguucaacaaggugacccuggccgacgccggcuucaucaagcaguacggcgacugccucggggacaucgcggcccgcgaccugaucugcgcccagaaguucaacggccugaccgugcucccgccccugcugaccgacgagaugaucgcccaguacaccagcgcccuccuggcggggaccaucacguccggcuggaccuucggggccggcgccgcccugcagauccccuucgcgaugcagauggccuaccgguucaacggcaucggggucacccagaacgugcucuacgagaaccagaagcugaucgccaaccaguucaacagcgccaucggcaagauccaggacucccugagcuccaccgccagcgcgcucgggaagcugcaggacguggucaaccagaacgcccaggcccugaacacgcucgugaagcagcuguccagcaacuucggcgccaucuccagcgugcugaacgacauccucucccgccuggacccgcccgaggccgaggugcagaucgaccggcugaucaccgggcgccuccagagccugcagaccuacgugacccagcagcugauccgggcggccgagauccgcgccagcgccaaccucgccgcgaccaagauguccgagugcguccugggccagagcaagcggguggacuucugcggcaagggguaccagcugauguccuucccccagagcgccccgcacggcguggucuuccucaacgugacguacguccccgcccaggagaagaacuucaccaccgcccccgcgaucugcaacgacgggaaggcccacuucccccgcgagggcguguucguguccaacgggaccaacugguucgucacgcagcggaacuucuacgagccgcagaucaucaccaccgacaacaccuucgugagcggcaacugcgacguggucaucggcaucgugaacaacacgguguacgacccccugcagcccgagcuggacuccggcgggagcggcuacauccccgaggccccgcgcgacgggcaggccuacgugcggaaggacggcgaguggguccugcucagcaccuuccugugaggacuaguuauaagacugacuagcccgaugggccucccaacgggcccuccuccccuccuugcaccgagauuaauaaaaaaaaaaaaaaaaaaaaaaaaaaaaaaaaaaaaaaaaaaaaaaaaaaaaaaaaaaaaaaaaugcaucccccccccccccccccccccccccccccccaaaggcucuuuucagagccaccagaauu

SEQ ID NO: 12920 - RNA, 3751 nt, Artificial Sequence
  SARS-CoV-2/Wuhan/WIV05/2019__EPI_ISL_402128 spike protein mRNA gc (1-1147)(I712C_T1077C) Foldon construct
aggagaaagcuuaccauguucguguuccugguccuccugccccuggugagcucccagugcgugaaccucaccacccgcacgcagcugccgcccgccuacaccaacagcuucacccggggcgucuacuaccccgacaagguguuccgcuccagcgugcugcacuccacccaggaccucuuccugcccuucuucagcaacgucacgugguuccacgccauccacguguccgggaccaacggcaccaagcgguucgacaacccggugcugcccuucaacgacggggucuacuucgcgagcaccgagaaguccaacaucauccgcggcuggaucuucgggacgacccucgacagcaagacccagucccugcugaucgugaacaacgccaccaacguggucaucaaggugugcgaguuccaguucugcaacgaccccuuccucggcguguacuaccacaagaacaacaagagcuggauggaguccgaguuccgggucuacagcuccgccaacaacugcacguucgaguacgugagccagcccuuccugauggaccuggagggcaagcaggggaacuucaagaaccuccgcgaguucguguucaagaacaucgacggcuacuucaagaucuacuccaagcacaccccgaucaaccugguccgggaccugccccagggguucagcgcccucgagccccugguggaccugcccaucggcaucaacaucacccgcuuccagacccuccuggcccugcaccgguccuaccucacgccgggggacagcagcuccggcuggaccgcgggcgccgccgccuacuacgugggguaccugcagccccgcaccuuccugcucaaguacaacgagaacggcaccaucacggacgcggucgacugcgcccuggacccccugagcgagaccaagugcacccucaaguccuucaccguggagaaggggaucuaccagacgagcaacuuccgggugcagcccaccgaguccaucguccgcuucccgaacaucaccaaccugugccccuucggcgagguguucaacgccacccgguucgccagcgucuacgccuggaaccgcaagcggaucuccaacugcguggcggacuacagcgugcuguacaacuccgccagcuucuccacguucaagugcuacggcgucagccccaccaagcucaacgaccugugcuucaccaacguguacgccgacuccuucgugauccgcggggacgagguccggcagaucgcccccggccagaccgggaagaucgccgacuacaacuacaagcugccggacgacuucacgggcugcgugaucgcguggaacagcaacaaccucgacuccaaggucgggggcaacuacaacuaccuguaccgccuguuccgcaagagcaaccucaagcccuucgagcgggacaucuccaccgagaucuaccaggccggcagcacccccugcaacgggguggagggcuucaacugcuacuucccccugcaguccuacggguuccagccgaccaacggcgugggguaccagcccuaccggguggucgugcugagcuucgagcuccugcacgcccccgccacggugugcggccccaagaaguccaccaaccuggucaagaacaagugcgugaacuucaacuucaacggccucaccgggaccggcgugcugaccgagagcaacaagaaguuccugccguuccagcaguucgggcgcgacaucgccgacacgaccgacgcgguccgcgacccccagacccuggagauccucgacaucacccccugcagcuucggcgggguguccgugaucacgccgggcaccaacaccagcaaccaggucgccgugcuguaccaggacgugaacugcaccgagguccccguggccauccacgccgaccagcugacgcccaccuggcggguguacuccaccggcagcaacgucuuccagacccgcgccgggugccucaucggcgcggagcacgugaacaacuccuacgagugcgacauccccaucggggccggcaucugcgccagcuaccagacgcagaccaacuccccgcggcgcgcccggagcguggcgucccagagcaucaucgccuacaccaugucccugggcgccgagaacagcgucgccuacuccaacaacagcugcgccauccccaccaacuucacgaucuccgugaccaccgagauccugcccgugagcaugaccaagacgagcgucgacugcaccauguacaucugcggggacuccaccgagugcagcaaccuccugcugcaguacggcuccuucugcacccagcucaaccgcgcgcugacggggaucgccguggagcaggacaagaacacccaggagguguucgcccaggucaagcagaucuacaagacgcccccgaucaaggacuucggcggguucaacuucagccagauccugcccgaccccuccaagcccagcaagcgguccuucaucgaggaccuccuguucaacaaggugacccuggccgacgccggcuucaucaagcaguacggcgacugccucggggacaucgcggcccgcgaccugaucugcgcccagaaguucaacggccugaccgugcucccgccccugcugaccgacgagaugaucgcccaguacaccagcgcccuccuggcggggaccaucacguccggcuggaccuucggggccggcgccgcccugcagauccccuucgcgaugcagauggccuaccgguucaacggcaucggggucacccagaacgugcucuacgagaaccagaagcugaucgccaaccaguucaacagcgccaucggcaagauccaggacucccugagcuccaccgccagcgcgcucgggaagcugcaggacguggucaaccagaacgcccaggcccugaacacgcucgugaagcagcuguccagcaacuucggcgccaucuccagcgugcugaacgacauccucucccgccuggacaaggucgaggccgaggugcagaucgaccggcugaucaccgggcgccuccagagccugcagaccuacgugacccagcagcugauccgggcggccgagauccgcgccagcgccaaccucgccgcgaccaagauguccgagugcguccugggccagagcaagcggguggacuucugcggcaagggguaccaccugauguccuucccccagagcgccccgcacggcguggucuuccuccacgugacguacguccccgcccaggagaagaacuucaccugcgcccccgcgaucugccacgacgggaaggcccacuucccccgcgagggcguguucguguccaacgggacccacugguucgucacgcagcggaacuucuacgagccgcagaucaucaccaccgacaacaccuucgugagcggcaacugcgacguggucaucggcaucgugaacaacacgguguacgacccccugcagcccgagcuggacuccggcgggagcggcuacauccccgaggccccgcgcgacgggcaggccuacgugcggaaggacggcgaguggguccugcucagcaccuuccugugaggacuaguuauaagacugacuagcccgaugggccucccaacgggcccuccuccccuccuugcaccgagauuaauaaaaaaaaaaaaaaaaaaaaaaaaaaaaaaaaaaaaaaaaaaaaaaaaaaaaaaaaaaaaaaaaugcaucccccccccccccccccccccccccccccccaaaggcucuuuucagagccaccagaauu

SEQ ID NO: 12921 - RNA, 3751 nt, Artificial Sequence
  SARS-CoV-2/Wuhan/WIV05/2019__EPI_ISL_402128 spike protein mRNA gc (1-1147)(I714C_Y1110C) Foldon construct
aggagaaagcuuaccauguucguguuccugguccuccugccccuggugagcucccagugcgugaaccucaccacccgcacgcagcugccgcccgccuacaccaacagcuucacccggggcgucuacuaccccgacaagguguuccgcuccagcgugcugcacuccacccaggaccucuuccugcccuucuucagcaacgucacgugguuccacgccauccacguguccgggaccaacggcaccaagcgguucgacaacccggugcugcccuucaacgacggggucuacuucgcgagcaccgagaaguccaacaucauccgcggcuggaucuucgggacgacccucgacagcaagacccagucccugcugaucgugaacaacgccaccaacguggucaucaaggugugcgaguuccaguucugcaacgaccccuuccucggcguguacuaccacaagaacaacaagagcuggauggaguccgaguuccgggucuacagcuccgccaacaacugcacguucgaguacgugagccagcccuuccugauggaccuggagggcaagcaggggaacuucaagaaccuccgcgaguucguguucaagaacaucgacggcuacuucaagaucuacuccaagcacaccccgaucaaccugguccgggaccugccccagggguucagcgcccucgagccccugguggaccugcccaucggcaucaacaucacccgcuuccagacccuccuggcccugcaccgguccuaccucacgccgggggacagcagcuccggcuggaccgcgggcgccgccgccuacuacgugggguaccugcagccccgcaccuuccugcucaaguacaacgagaacggcaccaucacggacgcggucgacugcgcccuggacccccugagcgagaccaagugcacccucaaguccuucaccguggagaaggggaucuaccagacgagcaacuuccgggugcagcccaccgaguccaucguccgcuucccgaacaucaccaaccugugccccuucggcgagguguucaacgccacccgguucgccagcgucuacgccuggaaccgcaagcggaucuccaacugcguggcggacuacagcgugcuguacaacuccgccagcuucuccacguucaagugcuacggcgucagccccaccaagcucaacgaccugugcuucaccaacguguacgccgacuccuucgugauccgcggggacgagguccggcagaucgcccccggccagaccgggaagaucgccgacuacaacuacaagcugccggacgacuucacgggcugcgugaucgcguggaacagcaacaaccucgacuccaaggucgggggcaacuacaacuaccuguaccgccuguuccgcaagagcaaccucaagcccuucgagcgggacaucuccaccgagaucuaccaggccggcagcacccccugcaacgggguggagggcuucaacugcuacuucccccugcaguccuacggguuccagccgaccaacggcgugggguaccagcccuaccggguggucgugcugagcuucgagcuccugcacgcccccgccacggugugcggccccaagaaguccaccaaccuggucaagaacaagugcgugaacuucaacuucaacggccucaccgggaccggcgugcugaccgagagcaacaagaaguuccugccguuccagcaguucgggcgcgacaucgccgacacgaccgacgcgguccgcgacccccagacccuggagauccucgacaucacccccugcagcuucggcgggguguccgugaucacgccgggcaccaacaccagcaaccaggucgccgugcuguaccaggacgugaacugcaccgagguccccguggccauccacgccgaccagcugacgcccaccuggcggguguacuccaccggcagcaacgucuuccagacccgcgccgggugccucaucggcgcggagcacgugaacaacuccuacgagugcgacauccccaucggggccggcaucugcgccagcuaccagacgcagaccaacuccccgcggcgcgcccggagcguggcgucccagagcaucaucgccuacaccaugucccugggcgccgagaacagcgucgccuacuccaacaacagcaucgccugccccaccaacuucacgaucuccgugaccaccgagauccugcccgugagcaugaccaagacgagcgucgacugcaccauguacaucugcggggacuccaccgagugcagcaaccuccugcugcaguacggcuccuucugcacccagcucaaccgcgcgcugacggggaucgccguggagcaggacaagaacacccaggagguguucgcccaggucaagcagaucuacaagacgcccccgaucaaggacuucggcggguucaacuucagccagauccugcccgaccccuccaagcccagcaagcgguccuucaucgaggaccuccuguucaacaaggugacccuggccgacgccggcuucaucaagcaguacggcgacugccucggggacaucgcggcccgcgaccugaucugcgcccagaaguucaacggccugaccgugcucccgccccugcugaccgacgagaugaucgcccaguacaccagcgcccuccuggcggggaccaucacguccggcuggaccuucggggccggcgccgcccugcagauccccuucgcgaugcagauggccuaccgguucaacggcaucggggucacccagaacgugcucuacgagaaccagaagcugaucgccaaccaguucaacagcgccaucggcaagauccaggacucccugagcuccaccgccagcgcgcucgggaagcugcaggacguggucaaccagaacgcccaggcccugaacacgcucgugaagcagcuguccagcaacuucggcgccaucuccagcgugcugaacgacauccucucccgccuggacaaggucgaggccgaggugcagaucgaccggcugaucaccgggcgccuccagagccugcagaccuacgugacccagcagcugauccgggcggccgagauccgcgccagcgccaaccucgccgcgaccaagauguccgagugcguccugggccagagcaagcggguggacuucugcggcaagggguaccaccugauguccuucccccagagcgccccgcacggcguggucuuccuccacgugacguacguccccgcccaggagaagaacuucaccaccgcccccgcgaucugccacgacgggaaggcccacuucccccgcgagggcguguucguguccaacgggacccacugguucgucacgcagcggaacuucugcgagccgcagaucaucaccaccgacaacaccuucgugagcggcaacugcgacguggucaucggcaucgugaacaacacgguguacgacccccugcagcccgagcuggacuccggcgggagcggcuacauccccgaggccccgcgcgacgggcaggccuacgugcggaaggacggcgaguggguccugcucagcaccuuccugugaggacuaguuauaagacugacuagcccgaugggccucccaacgggcccuccuccccuccuugcaccgagauuaauaaaaaaaaaaaaaaaaaaaaaaaaaaaaaaaaaaaaaaaaaaaaaaaaaaaaaaaaaaaaaaaaugcaucccccccccccccccccccccccccccccccaaaggcucuuuucagagccaccagaauu

SEQ ID NO: 12922 - RNA, 3751 nt, Artificial Sequence
  SARS-CoV-2/Wuhan/WIV05/2019__EPI_ISL_402128 spike protein mRNA gc (1-1147)(P715C_P1069C) Foldon construct
aggagaaagcuuaccauguucguguuccugguccuccugccccuggugagcucccagugcgugaaccucaccacccgcacgcagcugccgcccgccuacaccaacagcuucacccggggcgucuacuaccccgacaagguguuccgcuccagcgugcugcacuccacccaggaccucuuccugcccuucuucagcaacgucacgugguuccacgccauccacguguccgggaccaacggcaccaagcgguucgacaacccggugcugcccuucaacgacggggucuacuucgcgagcaccgagaaguccaacaucauccgcggcuggaucuucgggacgacccucgacagcaagacccagucccugcugaucgugaacaacgccaccaacguggucaucaaggugugcgaguuccaguucugcaacgaccccuuccucggcguguacuaccacaagaacaacaagagcuggauggaguccgaguuccgggucuacagcuccgccaacaacugcacguucgaguacgugagccagcccuuccugauggaccuggagggcaagcaggggaacuucaagaaccuccgcgaguucguguucaagaacaucgacggcuacuucaagaucuacuccaagcacaccccgaucaaccugguccgggaccugccccagggguucagcgcccucgagccccugguggaccugcccaucggcaucaacaucacccgcuuccagacccuccuggcccugcaccgguccuaccucacgccgggggacagcagcuccggcuggaccgcgggcgccgccgccuacuacgugggguaccugcagccccgcaccuuccugcucaaguacaacgagaacggcaccaucacggacgcggucgacugcgcccuggacccccugagcgagaccaagugcacccucaaguccuucaccguggagaaggggaucuaccagacgagcaacuuccgggugcagcccaccgaguccaucguccgcuucccgaacaucaccaaccugugccccuucggcgagguguucaacgccacccgguucgccagcgucuacgccuggaaccgcaagcggaucuccaacugcguggcggacuacagcgugcuguacaacuccgccagcuucuccacguucaagugcuacggcgucagccccaccaagcucaacgaccugugcuucaccaacguguacgccgacuccuucgugauccgcggggacgagguccggcagaucgcccccggccagaccgggaagaucgccgacuacaacuacaagcugccggacgacuucacgggcugcgugaucgcguggaacagcaacaaccucgacuccaaggucgggggcaacuacaacuaccuguaccgccuguuccgcaagagcaaccucaagcccuucgagcgggacaucuccaccgagaucuaccaggccggcagcacccccugcaacgggguggagggcuucaacugcuacuucccccugcaguccuacggguuccagccgaccaacggcgugggguaccagcccuaccggguggucgugcugagcuucgagcuccugcacgcccccgccacggugugcggccccaagaaguccaccaaccuggucaagaacaagugcgugaacuucaacuucaacggccucaccgggaccggcgugcugaccgagagcaacaagaaguuccugccguuccagcaguucgggcgcgacaucgccgacacgaccgacgcgguccgcgacccccagacccuggagauccucgacaucacccccugcagcuucggcgggguguccgugaucacgccgggcaccaacaccagcaaccaggucgccgugcuguaccaggacgugaacugcaccgagguccccguggccauccacgccgaccagcugacgcccaccuggcggguguacuccaccggcagcaacgucuuccagacccgcgccgggugccucaucggcgcggagcacgugaacaacuccuacgagugcgacauccccaucggggccggcaucugcgccagcuaccagacgcagaccaacuccccgcggcgcgcccggagcguggcgucccagagcaucaucgccuacaccaugucccugggcgccgagaacagcgucgccuacuccaacaacagcaucgccaucugcaccaacuucacgaucuccgugaccaccgagauccugcccgugagcaugaccaagacgagcgucgacugcaccauguacaucugcggggacuccaccgagugcagcaaccuccugcugcaguacggcuccuucugcacccagcucaaccgcgcgcugacggggaucgccguggagcaggacaagaacacccaggagguguucgcccaggucaagcagaucuacaagacgcccccgaucaaggacuucggcggguucaacuucagccagauccugcccgaccccuccaagcccagcaagcgguccuucaucgaggaccuccuguucaacaaggugacccuggccgacgccggcuucaucaagcaguacggcgacugccucggggacaucgcggcccgcgaccugaucugcgcccagaaguucaacggccugaccgugcucccgccccugcugaccgacgagaugaucgcccaguacaccagcgcccuccuggcggggaccaucacguccggcuggaccuucggggccggcgccgcccugcagauccccuucgcgaugcagauggccuaccgguucaacggcaucggggucacccagaacgugcucuacgagaaccagaagcugaucgccaaccaguucaacagcgccaucggcaagauccaggacucccugagcuccaccgccagcgcgcucgggaagcugcaggacguggucaaccagaacgcccaggcccugaacacgcucgugaagcagcuguccagcaacuucggcgccaucuccagcgugcugaacgacauccucucccgccuggacaaggucgaggccgaggugcagaucgaccggcugaucaccgggcgccuccagagccugcagaccuacgugacccagcagcugauccgggcggccgagauccgcgccagcgccaaccucgccgcgaccaagauguccgagugcguccugggccagagcaagcggguggacuucugcggcaagggguaccaccugauguccuucccccagagcgccccgcacggcguggucuuccuccacgugacguacgucugcgcccaggagaagaacuucaccaccgcccccgcgaucugccacgacgggaaggcccacuucccccgcgagggcguguucguguccaacgggacccacugguucgucacgcagcggaacuucuacgagccgcagaucaucaccaccgacaacaccuucgugagcggcaacugcgacguggucaucggcaucgugaacaacacgguguacgacccccugcagcccgagcuggacuccggcgggagcggcuacauccccgaggccccgcgcgacgggcaggccuacgugcggaaggacggcgaguggguccugcucagcaccuuccugugaggacuaguuauaagacugacuagcccgaugggccucccaacgggcccuccuccccuccuugcaccgagauuaauaaaaaaaaaaaaaaaaaaaaaaaaaaaaaaaaaaaaaaaaaaaaaaaaaaaaaaaaaaaaaaaaugcaucccccccccccccccccccccccccccccccaaaggcucuuuucagagccaccagaauu

SEQ ID NO: 12923 - RNA, 3751 nt, Artificial Sequence
  SARS-CoV-2/Wuhan/WIV05/2019__EPI_ISL_402128 spike protein mRNA gc (1-1147)(G889C_L1034C) Foldon construct
aggagaaagcuuaccauguucguguuccugguccuccugccccuggugagcucccagugcgugaaccucaccacccgcacgcagcugccgcccgccuacaccaacagcuucacccggggcgucuacuaccccgacaagguguuccgcuccagcgugcugcacuccacccaggaccucuuccugcccuucuucagcaacgucacgugguuccacgccauccacguguccgggaccaacggcaccaagcgguucgacaacccggugcugcccuucaacgacggggucuacuucgcgagcaccgagaaguccaacaucauccgcggcuggaucuucgggacgacccucgacagcaagacccagucccugcugaucgugaacaacgccaccaacguggucaucaaggugugcgaguuccaguucugcaacgaccccuuccucggcguguacuaccacaagaacaacaagagcuggauggaguccgaguuccgggucuacagcuccgccaacaacugcacguucgaguacgugagccagcccuuccugauggaccuggagggcaagcaggggaacuucaagaaccuccgcgaguucguguucaagaacaucgacggcuacuucaagaucuacuccaagcacaccccgaucaaccugguccgggaccugccccagggguucagcgcccucgagccccugguggaccugcccaucggcaucaacaucacccgcuuccagacccuccuggcccugcaccgguccuaccucacgccgggggacagcagcuccggcuggaccgcgggcgccgccgccuacuacgugggguaccugcagccccgcaccuuccugcucaaguacaacgagaacggcaccaucacggacgcggucgacugcgcccuggacccccugagcgagaccaagugcacccucaaguccuucaccguggagaaggggaucuaccagacgagcaacuuccgggugcagcccaccgaguccaucguccgcuucccgaacaucaccaaccugugccccuucggcgagguguucaacgccacccgguucgccagcgucuacgccuggaaccgcaagcggaucuccaacugcguggcggacuacagcgugcuguacaacuccgccagcuucuccacguucaagugcuacggcgucagccccaccaagcucaacgaccugugcuucaccaacguguacgccgacuccuucgugauccgcggggacgagguccggcagaucgcccccggccagaccgggaagaucgccgacuacaacuacaagcugccggacgacuucacgggcugcgugaucgcguggaacagcaacaaccucgacuccaaggucgggggcaacuacaacuaccuguaccgccuguuccgcaagagcaaccucaagcccuucgagcgggacaucuccaccgagaucuaccaggccggcagcacccccugcaacgggguggagggcuucaacugcuacuucccccugcaguccuacggguuccagccgaccaacggcgugggguaccagcccuaccggguggucgugcugagcuucgagcuccugcacgcccccgccacggugugcggccccaagaaguccaccaaccuggucaagaacaagugcgugaacuucaacuucaacggccucaccgggaccggcgugcugaccgagagcaacaagaaguuccugccguuccagcaguucgggcgcgacaucgccgacacgaccgacgcgguccgcgacccccagacccuggagauccucgacaucacccccugcagcuucggcgggguguccgugaucacgccgggcaccaacaccagcaaccaggucgccgugcuguaccaggacgugaacugcaccgagguccccguggccauccacgccgaccagcugacgcccaccuggcggguguacuccaccggcagcaacgucuuccagacccgcgccgggugccucaucggcgcggagcacgugaacaacuccuacgagugcgacauccccaucggggccggcaucugcgccagcuaccagacgcagaccaacuccccgcggcgcgcccggagcguggcgucccagagcaucaucgccuacaccaugucccugggcgccgagaacagcgucgccuacuccaacaacagcaucgccauccccaccaacuucacgaucuccgugaccaccgagauccugcccgugagcaugaccaagacgagcgucgacugcaccauguacaucugcggggacuccaccgagugcagcaaccuccugcugcaguacggcuccuucugcacccagcucaaccgcgcgcugacggggaucgccguggagcaggacaagaacacccaggagguguucgcccaggucaagcagaucuacaagacgcccccgaucaaggacuucggcggguucaacuucagccagauccugcccgaccccuccaagcccagcaagcgguccuucaucgaggaccuccuguucaacaaggugacccuggccgacgccggcuucaucaagcaguacggcgacugccucggggacaucgcggcccgcgaccugaucugcgcccagaaguucaacggccugaccgugcucccgccccugcugaccgacgagaugaucgcccaguacaccagcgcccuccuggcggggaccaucacguccggcuggaccuucugcgccggcgccgcccugcagauccccuucgcgaugcagauggccuaccgguucaacggcaucggggucacccagaacgugcucuacgagaaccagaagcugaucgccaaccaguucaacagcgccaucggcaagauccaggacucccugagcuccaccgccagcgcgcucgggaagcugcaggacguggucaaccagaacgcccaggcccugaacacgcucgugaagcagcuguccagcaacuucggcgccaucuccagcgugcugaacgacauccucucccgccuggacaaggucgaggccgaggugcagaucgaccggcugaucaccgggcgccuccagagccugcagaccuacgugacccagcagcugauccgggcggccgagauccgcgccagcgccaaccucgccgcgaccaagauguccgagugcgucugcggccagagcaagcggguggacuucugcggcaagggguaccaccugauguccuucccccagagcgccccgcacggcguggucuuccuccacgugacguacguccccgcccaggagaagaacuucaccaccgcccccgcgaucugccacgacgggaaggcccacuucccccgcgagggcguguucguguccaacgggacccacugguucgucacgcagcggaacuucuacgagccgcagaucaucaccaccgacaacaccuucgugagcggcaacugcgacguggucaucggcaucgugaacaacacgguguacgacccccugcagcccgagcuggacuccggcgggagcggcuacauccccgaggccccgcgcgacgggcaggccuacgugcggaaggacggcgaguggguccugcucagcaccuuccugugaggacuaguuauaagacugacuagcccgaugggccucccaacgggcccuccuccccuccuugcaccgagauuaauaaaaaaaaaaaaaaaaaaaaaaaaaaaaaaaaaaaaaaaaaaaaaaaaaaaaaaaaaaaaaaaaugcaucccccccccccccccccccccccccccccccaaaggcucuuuucagagccaccagaauu

SEQ ID NO: 12924 - RNA, 3751 nt, Artificial Sequence
  SARS-CoV-2/Wuhan/WIV05/2019__EPI_ISL_402128 spike protein mRNA gc (1-1147)(I909C_Y1047C) Foldon construct
aggagaaagcuuaccauguucguguuccugguccuccugccccuggugagcucccagugcgugaaccucaccacccgcacgcagcugccgcccgccuacaccaacagcuucacccggggcgucuacuaccccgacaagguguuccgcuccagcgugcugcacuccacccaggaccucuuccugcccuucuucagcaacgucacgugguuccacgccauccacguguccgggaccaacggcaccaagcgguucgacaacccggugcugcccuucaacgacggggucuacuucgcgagcaccgagaaguccaacaucauccgcggcuggaucuucgggacgacccucgacagcaagacccagucccugcugaucgugaacaacgccaccaacguggucaucaaggugugcgaguuccaguucugcaacgaccccuuccucggcguguacuaccacaagaacaacaagagcuggauggaguccgaguuccgggucuacagcuccgccaacaacugcacguucgaguacgugagccagcccuuccugauggaccuggagggcaagcaggggaacuucaagaaccuccgcgaguucguguucaagaacaucgacggcuacuucaagaucuacuccaagcacaccccgaucaaccugguccgggaccugccccagggguucagcgcccucgagccccugguggaccugcccaucggcaucaacaucacccgcuuccagacccuccuggcccugcaccgguccuaccucacgccgggggacagcagcuccggcuggaccgcgggcgccgccgccuacuacgugggguaccugcagccccgcaccuuccugcucaaguacaacgagaacggcaccaucacggacgcggucgacugcgcccuggacccccugagcgagaccaagugcacccucaaguccuucaccguggagaaggggaucuaccagacgagcaacuuccgggugcagcccaccgaguccaucguccgcuucccgaacaucaccaaccugugccccuucggcgagguguucaacgccacccgguucgccagcgucuacgccuggaaccgcaagcggaucuccaacugcguggcggacuacagcgugcuguacaacuccgccagcuucuccacguucaagugcuacggcgucagccccaccaagcucaacgaccugugcuucaccaacguguacgccgacuccuucgugauccgcggggacgagguccggcagaucgcccccggccagaccgggaagaucgccgacuacaacuacaagcugccggacgacuucacgggcugcgugaucgcguggaacagcaacaaccucgacuccaaggucgggggcaacuacaacuaccuguaccgccuguuccgcaagagcaaccucaagcccuucgagcgggacaucuccaccgagaucuaccaggccggcagcacccccugcaacgggguggagggcuucaacugcuacuucccccugcaguccuacggguuccagccgaccaacggcgugggguaccagcccuaccggguggucgugcugagcuucgagcuccugcacgcccccgccacggugugcggccccaagaaguccaccaaccuggucaagaacaagugcgugaacuucaacuucaacggccucaccgggaccggcgugcugaccgagagcaacaagaaguuccugccguuccagcaguucgggcgcgacaucgccgacacgaccgacgcgguccgcgacccccagacccuggagauccucgacaucacccccugcagcuucggcgggguguccgugaucacgccgggcaccaacaccagcaaccaggucgccgugcuguaccaggacgugaacugcaccgagguccccguggccauccacgccgaccagcugacgcccaccuggcggguguacuccaccggcagcaacgucuuccagacccgcgccgggugccucaucggcgcggagcacgugaacaacuccuacgagugcgacauccccaucggggccggcaucugcgccagcuaccagacgcagaccaacuccccgcggcgcgcccggagcguggcgucccagagcaucaucgccuacaccaugucccugggcgccgagaacagcgucgccuacuccaacaacagcaucgccauccccaccaacuucacgaucuccgugaccaccgagauccugcccgugagcaugaccaagacgagcgucgacugcaccauguacaucugcggggacuccaccgagugcagcaaccuccugcugcaguacggcuccuucugcacccagcucaaccgcgcgcugacggggaucgccguggagcaggacaagaacacccaggagguguucgcccaggucaagcagaucuacaagacgcccccgaucaaggacuucggcggguucaacuucagccagauccugcccgaccccuccaagcccagcaagcgguccuucaucgaggaccuccuguucaacaaggugacccuggccgacgccggcuucaucaagcaguacggcgacugccucggggacaucgcggcccgcgaccugaucugcgcccagaaguucaacggccugaccgugcucccgccccugcugaccgacgagaugaucgcccaguacaccagcgcccuccuggcggggaccaucacguccggcuggaccuucggggccggcgccgcccugcagauccccuucgcgaugcagauggccuaccgguucaacggcugcggggucacccagaacgugcucuacgagaaccagaagcugaucgccaaccaguucaacagcgccaucggcaagauccaggacucccugagcuccaccgccagcgcgcucgggaagcugcaggacguggucaaccagaacgcccaggcccugaacacgcucgugaagcagcuguccagcaacuucggcgccaucuccagcgugcugaacgacauccucucccgccuggacaaggucgaggccgaggugcagaucgaccggcugaucaccgggcgccuccagagccugcagaccuacgugacccagcagcugauccgggcggccgagauccgcgccagcgccaaccucgccgcgaccaagauguccgagugcguccugggccagagcaagcggguggacuucugcggcaaggggugccaccugauguccuucccccagagcgccccgcacggcguggucuuccuccacgugacguacguccccgcccaggagaagaacuucaccaccgcccccgcgaucugccacgacgggaaggcccacuucccccgcgagggcguguucguguccaacgggacccacugguucgucacgcagcggaacuucuacgagccgcagaucaucaccaccgacaacaccuucgugagcggcaacugcgacguggucaucggcaucgugaacaacacgguguacgacccccugcagcccgagcuggacuccggcgggagcggcuacauccccgaggccccgcgcgacgggcaggccuacgugcggaaggacggcgaguggguccugcucagcaccuuccugugaggacuaguuauaagacugacuagcccgaugggccucccaacgggcccuccuccccuccuugcaccgagauuaauaaaaaaaaaaaaaaaaaaaaaaaaaaaaaaaaaaaaaaaaaaaaaaaaaaaaaaaaaaaaaaaaugcaucccccccccccccccccccccccccccccccaaaggcucuuuucagagccaccagaauu

SEQ ID NO: 12925 - RNA, 3751 nt, Artificial Sequence
  SARS-CoV-2/Wuhan/WIV05/2019__EPI_ISL_402128 spike protein mRNA gc (1-1147)(Q965C_S1003C) Foldon construct
aggagaaagcuuaccauguucguguuccugguccuccugccccuggugagcucccagugcgugaaccucaccacccgcacgcagcugccgcccgccuacaccaacagcuucacccggggcgucuacuaccccgacaagguguuccgcuccagcgugcugcacuccacccaggaccucuuccugcccuucuucagcaacgucacgugguuccacgccauccacguguccgggaccaacggcaccaagcgguucgacaacccggugcugcccuucaacgacggggucuacuucgcgagcaccgagaaguccaacaucauccgcggcuggaucuucgggacgacccucgacagcaagacccagucccugcugaucgugaacaacgccaccaacguggucaucaaggugugcgaguuccaguucugcaacgaccccuuccucggcguguacuaccacaagaacaacaagagcuggauggaguccgaguuccgggucuacagcuccgccaacaacugcacguucgaguacgugagccagcccuuccugauggaccuggagggcaagcaggggaacuucaagaaccuccgcgaguucguguucaagaacaucgacggcuacuucaagaucuacuccaagcacaccccgaucaaccugguccgggaccugccccagggguucagcgcccucgagccccugguggaccugcccaucggcaucaacaucacccgcuuccagacccuccuggcccugcaccgguccuaccucacgccgggggacagcagcuccggcuggaccgcgggcgccgccgccuacuacgugggguaccugcagccccgcaccuuccugcucaaguacaacgagaacggcaccaucacggacgcggucgacugcgcccuggacccccugagcgagaccaagugcacccucaaguccuucaccguggagaaggggaucuaccagacgagcaacuuccgggugcagcccaccgaguccaucguccgcuucccgaacaucaccaaccugugccccuucggcgagguguucaacgccacccgguucgccagcgucuacgccuggaaccgcaagcggaucuccaacugcguggcggacuacagcgugcuguacaacuccgccagcuucuccacguucaagugcuacggcgucagccccaccaagcucaacgaccugugcuucaccaacguguacgccgacuccuucgugauccgcggggacgagguccggcagaucgcccccggccagaccgggaagaucgccgacuacaacuacaagcugccggacgacuucacgggcugcgugaucgcguggaacagcaacaaccucgacuccaaggucgggggcaacuacaacuaccuguaccgccuguuccgcaagagcaaccucaagcccuucgagcgggacaucuccaccgagaucuaccaggccggcagcacccccugcaacgggguggagggcuucaacugcuacuucccccugcaguccuacggguuccagccgaccaacggcgugggguaccagcccuaccggguggucgugcugagcuucgagcuccugcacgcccccgccacggugugcggccccaagaaguccaccaaccuggucaagaacaagugcgugaacuucaacuucaacggccucaccgggaccggcgugcugaccgagagcaacaagaaguuccugccguuccagcaguucgggcgcgacaucgccgacacgaccgacgcgguccgcgacccccagacccuggagauccucgacaucacccccugcagcuucggcgggguguccgugaucacgccgggcaccaacaccagcaaccaggucgccgugcuguaccaggacgugaacugcaccgagguccccguggccauccacgccgaccagcugacgcccaccuggcggguguacuccaccggcagcaacgucuuccagacccgcgccgggugccucaucggcgcggagcacgugaacaacuccuacgagugcgacauccccaucggggccggcaucugcgccagcuaccagacgcagaccaacuccccgcggcgcgcccggagcguggcgucccagagcaucaucgccuacaccaugucccugggcgccgagaacagcgucgccuacuccaacaacagcaucgccauccccaccaacuucacgaucuccgugaccaccgagauccugcccgugagcaugaccaagacgagcgucgacugcaccauguacaucugcggggacuccaccgagugcagcaaccuccugcugcaguacggcuccuucugcacccagcucaaccgcgcgcugacggggaucgccguggagcaggacaagaacacccaggagguguucgcccaggucaagcagaucuacaagacgcccccgaucaaggacuucggcggguucaacuucagccagauccugcccgaccccuccaagcccagcaagcgguccuucaucgaggaccuccuguucaacaaggugacccuggccgacgccggcuucaucaagcaguacggcgacugccucggggacaucgcggcccgcgaccugaucugcgcccagaaguucaacggccugaccgugcucccgccccugcugaccgacgagaugaucgcccaguacaccagcgcccuccuggcggggaccaucacguccggcuggaccuucggggccggcgccgcccugcagauccccuucgcgaugcagauggccuaccgguucaacggcaucggggucacccagaacgugcucuacgagaaccagaagcugaucgccaaccaguucaacagcgccaucggcaagauccaggacucccugagcuccaccgccagcgcgcucgggaagcugcaggacguggucaaccagaacgcccaggcccugaacacgcucgugaagugccuguccagcaacuucggcgccaucuccagcgugcugaacgacauccucucccgccuggacaaggucgaggccgaggugcagaucgaccggcugaucaccgggcgccuccagugccugcagaccuacgugacccagcagcugauccgggcggccgagauccgcgccagcgccaaccucgccgcgaccaagauguccgagugcguccugggccagagcaagcggguggacuucugcggcaagggguaccaccugauguccuucccccagagcgccccgcacggcguggucuuccuccacgugacguacguccccgcccaggagaagaacuucaccaccgcccccgcgaucugccacgacgggaaggcccacuucccccgcgagggcguguucguguccaacgggacccacugguucgucacgcagcggaacuucuacgagccgcagaucaucaccaccgacaacaccuucgugagcggcaacugcgacguggucaucggcaucgugaacaacacgguguacgacccccugcagcccgagcuggacuccggcgggagcggcuacauccccgaggccccgcgcgacgggcaggccuacgugcggaaggacggcgaguggguccugcucagcaccuuccugugaggacuaguuauaagacugacuagcccgaugggccucccaacgggcccuccuccccuccuugcaccgagauuaauaaaaaaaaaaaaaaaaaaaaaaaaaaaaaaaaaaaaaaaaaaaaaaaaaaaaaaaaaaaaaaaaugcaucccccccccccccccccccccccccccccccaaaggcucuuuucagagccaccagaauu

SEQ ID NO: 12926 - RNA, 3751 nt, Artificial Sequence
  SARS-CoV-2/Wuhan/WIV05/2019__EPI_ISL_402128 spike protein mRNA gc (1-1147)(F970C_G999C) Foldon construct
aggagaaagcuuaccauguucguguuccugguccuccugccccuggugagcucccagugcgugaaccucaccacccgcacgcagcugccgcccgccuacaccaacagcuucacccggggcgucuacuaccccgacaagguguuccgcuccagcgugcugcacuccacccaggaccucuuccugcccuucuucagcaacgucacgugguuccacgccauccacguguccgggaccaacggcaccaagcgguucgacaacccggugcugcccuucaacgacggggucuacuucgcgagcaccgagaaguccaacaucauccgcggcuggaucuucgggacgacccucgacagcaagacccagucccugcugaucgugaacaacgccaccaacguggucaucaaggugugcgaguuccaguucugcaacgaccccuuccucggcguguacuaccacaagaacaacaagagcuggauggaguccgaguuccgggucuacagcuccgccaacaacugcacguucgaguacgugagccagcccuuccugauggaccuggagggcaagcaggggaacuucaagaaccuccgcgaguucguguucaagaacaucgacggcuacuucaagaucuacuccaagcacaccccgaucaaccugguccgggaccugccccagggguucagcgcccucgagccccugguggaccugcccaucggcaucaacaucacccgcuuccagacccuccuggcccugcaccgguccuaccucacgccgggggacagcagcuccggcuggaccgcgggcgccgccgccuacuacgugggguaccugcagccccgcaccuuccugcucaaguacaacgagaacggcaccaucacggacgcggucgacugcgcccuggacccccugagcgagaccaagugcacccucaaguccuucaccguggagaaggggaucuaccagacgagcaacuuccgggugcagcccaccgaguccaucguccgcuucccgaacaucaccaaccugugccccuucggcgagguguucaacgccacccgguucgccagcgucuacgccuggaaccgcaagcggaucuccaacugcguggcggacuacagcgugcuguacaacuccgccagcuucuccacguucaagugcuacggcgucagccccaccaagcucaacgaccugugcuucaccaacguguacgccgacuccuucgugauccgcggggacgagguccggcagaucgcccccggccagaccgggaagaucgccgacuacaacuacaagcugccggacgacuucacgggcugcgugaucgcguggaacagcaacaaccucgacuccaaggucgggggcaacuacaacuaccuguaccgccuguuccgcaagagcaaccucaagcccuucgagcgggacaucuccaccgagaucuaccaggccggcagcacccccugcaacgggguggagggcuucaacugcuacuucccccugcaguccuacggguuccagccgaccaacggcgugggguaccagcccuaccggguggucgugcugagcuucgagcuccugcacgcccccgccacggugugcggccccaagaaguccaccaaccuggucaagaacaagugcgugaacuucaacuucaacggccucaccgggaccggcgugcugaccgagagcaacaagaaguuccugccguuccagcaguucgggcgcgacaucgccgacacgaccgacgcgguccgcgacccccagacccuggagauccucgacaucacccccugcagcuucggcgggguguccgugaucacgccgggcaccaacaccagcaaccaggucgccgugcuguaccaggacgugaacugcaccgagguccccguggccauccacgccgaccagcugacgcccaccuggcggguguacuccaccggcagcaacgucuuccagacccgcgccgggugccucaucggcgcggagcacgugaacaacuccuacgagugcgacauccccaucggggccggcaucugcgccagcuaccagacgcagaccaacuccccgcggcgcgcccggagcguggcgucccagagcaucaucgccuacaccaugucccugggcgccgagaacagcgucgccuacuccaacaacagcaucgccauccccaccaacuucacgaucuccgugaccaccgagauccugcccgugagcaugaccaagacgagcgucgacugcaccauguacaucugcggggacuccaccgagugcagcaaccuccugcugcaguacggcuccuucugcacccagcucaaccgcgcgcugacggggaucgccguggagcaggacaagaacacccaggagguguucgcccaggucaagcagaucuacaagacgcccccgaucaaggacuucggcggguucaacuucagccagauccugcccgaccccuccaagcccagcaagcgguccuucaucgaggaccuccuguucaacaaggugacccuggccgacgccggcuucaucaagcaguacggcgacugccucggggacaucgcggcccgcgaccugaucugcgcccagaaguucaacggccugaccgugcucccgccccugcugaccgacgagaugaucgcccaguacaccagcgcccuccuggcggggaccaucacguccggcuggaccuucggggccggcgccgcccugcagauccccuucgcgaugcagauggccuaccgguucaacggcaucggggucacccagaacgugcucuacgagaaccagaagcugaucgccaaccaguucaacagcgccaucggcaagauccaggacucccugagcuccaccgccagcgcgcucgggaagcugcaggacguggucaaccagaacgcccaggcccugaacacgcucgugaagcagcuguccagcaacugcggcgccaucuccagcgugcugaacgacauccucucccgccuggacaaggucgaggccgaggugcagaucgaccggcugaucaccugucgccuccagagccugcagaccuacgugacccagcagcugauccgggcggccgagauccgcgccagcgccaaccucgccgcgaccaagauguccgagugcguccugggccagagcaagcggguggacuucugcggcaagggguaccaccugauguccuucccccagagcgccccgcacggcguggucuuccuccacgugacguacguccccgcccaggagaagaacuucaccaccgcccccgcgaucugccacgacgggaaggcccacuucccccgcgagggcguguucguguccaacgggacccacugguucgucacgcagcggaacuucuacgagccgcagaucaucaccaccgacaacaccuucgugagcggcaacugcgacguggucaucggcaucgugaacaacacgguguacgacccccugcagcccgagcuggacuccggcgggagcggcuacauccccgaggccccgcgcgacgggcaggccuacgugcggaaggacggcgaguggguccugcucagcaccuuccugugaggacuaguuauaagacugacuagcccgaugggccucccaacgggcccuccuccccuccuugcaccgagauuaauaaaaaaaaaaaaaaaaaaaaaaaaaaaaaaaaaaaaaaaaaaaaaaaaaaaaaaaaaaaaaaaaugcaucccccccccccccccccccccccccccccccaaaggcucuuuucagagccaccagaauu

SEQ ID NO: 12927 - RNA, 3751 nt, Artificial Sequence
  SARS-CoV-2/Wuhan/WIV05/2019__EPI_ISL_402128 spike protein mRNA gc (1-1147)(A972C_R995C) Foldon construct
aggagaaagcuuaccauguucguguuccugguccuccugccccuggugagcucccagugcgugaaccucaccacccgcacgcagcugccgcccgccuacaccaacagcuucacccggggcgucuacuaccccgacaagguguuccgcuccagcgugcugcacuccacccaggaccucuuccugcccuucuucagcaacgucacgugguuccacgccauccacguguccgggaccaacggcaccaagcgguucgacaacccggugcugcccuucaacgacggggucuacuucgcgagcaccgagaaguccaacaucauccgcggcuggaucuucgggacgacccucgacagcaagacccagucccugcugaucgugaacaacgccaccaacguggucaucaaggugugcgaguuccaguucugcaacgaccccuuccucggcguguacuaccacaagaacaacaagagcuggauggaguccgaguuccgggucuacagcuccgccaacaacugcacguucgaguacgugagccagcccuuccugauggaccuggagggcaagcaggggaacuucaagaaccuccgcgaguucguguucaagaacaucgacggcuacuucaagaucuacuccaagcacaccccgaucaaccugguccgggaccugccccagggguucagcgcccucgagccccugguggaccugcccaucggcaucaacaucacccgcuuccagacccuccuggcccugcaccgguccuaccucacgccgggggacagcagcuccggcuggaccgcgggcgccgccgccuacuacgugggguaccugcagccccgcaccuuccugcucaaguacaacgagaacggcaccaucacggacgcggucgacugcgcccuggacccccugagcgagaccaagugcacccucaaguccuucaccguggagaaggggaucuaccagacgagcaacuuccgggugcagcccaccgaguccaucguccgcuucccgaacaucaccaaccugugccccuucggcgagguguucaacgccacccgguucgccagcgucuacgccuggaaccgcaagcggaucuccaacugcguggcggacuacagcgugcuguacaacuccgccagcuucuccacguucaagugcuacggcgucagccccaccaagcucaacgaccugugcuucaccaacguguacgccgacuccuucgugauccgcggggacgagguccggcagaucgcccccggccagaccgggaagaucgccgacuacaacuacaagcugccggacgacuucacgggcugcgugaucgcguggaacagcaacaaccucgacuccaaggucgggggcaacuacaacuaccuguaccgccuguuccgcaagagcaaccucaagcccuucgagcgggacaucuccaccgagaucuaccaggccggcagcacccccugcaacgggguggagggcuucaacugcuacuucccccugcaguccuacggguuccagccgaccaacggcgugggguaccagcccuaccggguggucgugcugagcuucgagcuccugcacgcccccgccacggugugcggccccaagaaguccaccaaccuggucaagaacaagugcgugaacuucaacuucaacggccucaccgggaccggcgugcugaccgagagcaacaagaaguuccugccguuccagcaguucgggcgcgacaucgccgacacgaccgacgcgguccgcgacccccagacccuggagauccucgacaucacccccugcagcuucggcgggguguccgugaucacgccgggcaccaacaccagcaaccaggucgccgugcuguaccaggacgugaacugcaccgagguccccguggccauccacgccgaccagcugacgcccaccuggcggguguacuccaccggcagcaacgucuuccagacccgcgccgggugccucaucggcgcggagcacgugaacaacuccuacgagugcgacauccccaucggggccggcaucugcgccagcuaccagacgcagaccaacuccccgcggcgcgcccggagcguggcgucccagagcaucaucgccuacaccaugucccugggcgccgagaacagcgucgccuacuccaacaacagcaucgccauccccaccaacuucacgaucuccgugaccaccgagauccugcccgugagcaugaccaagacgagcgucgacugcaccauguacaucugcggggacuccaccgagugcagcaaccuccugcugcaguacggcuccuucugcacccagcucaaccgcgcgcugacggggaucgccguggagcaggacaagaacacccaggagguguucgcccaggucaagcagaucuacaagacgcccccgaucaaggacuucggcggguucaacuucagccagauccugcccgaccccuccaagcccagcaagcgguccuucaucgaggaccuccuguucaacaaggugacccuggccgacgccggcuucaucaagcaguacggcgacugccucggggacaucgcggcccgcgaccugaucugcgcccagaaguucaacggccugaccgugcucccgccccugcugaccgacgagaugaucgcccaguacaccagcgcccuccuggcggggaccaucacguccggcuggaccuucggggccggcgccgcccugcagauccccuucgcgaugcagauggccuaccgguucaacggcaucggggucacccagaacgugcucuacgagaaccagaagcugaucgccaaccaguucaacagcgccaucggcaagauccaggacucccugagcuccaccgccagcgcgcucgggaagcugcaggacguggucaaccagaacgcccaggcccugaacacgcucgugaagcagcuguccagcaacuucggcugcaucuccagcgugcugaacgacauccucucccgccuggacaaggucgaggccgaggugcagaucgacugccugaucaccgggcgccuccagagccugcagaccuacgugacccagcagcugauccgggcggccgagauccgcgccagcgccaaccucgccgcgaccaagauguccgagugcguccugggccagagcaagcggguggacuucugcggcaagggguaccaccugauguccuucccccagagcgccccgcacggcguggucuuccuccacgugacguacguccccgcccaggagaagaacuucaccaccgcccccgcgaucugccacgacgggaaggcccacuucccccgcgagggcguguucguguccaacgggacccacugguucgucacgcagcggaacuucuacgagccgcagaucaucaccaccgacaacaccuucgugagcggcaacugcgacguggucaucggcaucgugaacaacacgguguacgacccccugcagcccgagcuggacuccggcgggagcggcuacauccccgaggccccgcgcgacgggcaggccuacgugcggaaggacggcgaguggguccugcucagcaccuuccugugaggacuaguuauaagacugacuagcccgaugggccucccaacgggcccuccuccccuccuugcaccgagauuaauaaaaaaaaaaaaaaaaaaaaaaaaaaaaaaaaaaaaaaaaaaaaaaaaaaaaaaaaaaaaaaaaugcaucccccccccccccccccccccccccccccccaaaggcucuuuucagagccaccagaauu

SEQ ID NO: 12928 - RNA, 3751 nt, Artificial Sequence
  SARS-CoV-2/Wuhan/WIV05/2019__EPI_ISL_402128 spike protein mRNA gc (1-1147)(A890C_V1040C) Foldon construct
aggagaaagcuuaccauguucguguuccugguccuccugccccuggugagcucccagugcgugaaccucaccacccgcacgcagcugccgcccgccuacaccaacagcuucacccggggcgucuacuaccccgacaagguguuccgcuccagcgugcugcacuccacccaggaccucuuccugcccuucuucagcaacgucacgugguuccacgccauccacguguccgggaccaacggcaccaagcgguucgacaacccggugcugcccuucaacgacggggucuacuucgcgagcaccgagaaguccaacaucauccgcggcuggaucuucgggacgacccucgacagcaagacccagucccugcugaucgugaacaacgccaccaacguggucaucaaggugugcgaguuccaguucugcaacgaccccuuccucggcguguacuaccacaagaacaacaagagcuggauggaguccgaguuccgggucuacagcuccgccaacaacugcacguucgaguacgugagccagcccuuccugauggaccuggagggcaagcaggggaacuucaagaaccuccgcgaguucguguucaagaacaucgacggcuacuucaagaucuacuccaagcacaccccgaucaaccugguccgggaccugccccagggguucagcgcccucgagccccugguggaccugcccaucggcaucaacaucacccgcuuccagacccuccuggcccugcaccgguccuaccucacgccgggggacagcagcuccggcuggaccgcgggcgccgccgccuacuacgugggguaccugcagccccgcaccuuccugcucaaguacaacgagaacggcaccaucacggacgcggucgacugcgcccuggacccccugagcgagaccaagugcacccucaaguccuucaccguggagaaggggaucuaccagacgagcaacuuccgggugcagcccaccgaguccaucguccgcuucccgaacaucaccaaccugugccccuucggcgagguguucaacgccacccgguucgccagcgucuacgccuggaaccgcaagcggaucuccaacugcguggcggacuacagcgugcuguacaacuccgccagcuucuccacguucaagugcuacggcgucagccccaccaagcucaacgaccugugcuucaccaacguguacgccgacuccuucgugauccgcggggacgagguccggcagaucgcccccggccagaccgggaagaucgccgacuacaacuacaagcugccggacgacuucacgggcugcgugaucgcguggaacagcaacaaccucgacuccaaggucgggggcaacuacaacuaccuguaccgccuguuccgcaagagcaaccucaagcccuucgagcgggacaucuccaccgagaucuaccaggccggcagcacccccugcaacgggguggagggcuucaacugcuacuucccccugcaguccuacggguuccagccgaccaacggcgugggguaccagcccuaccggguggucgugcugagcuucgagcuccugcacgcccccgccacggugugcggccccaagaaguccaccaaccuggucaagaacaagugcgugaacuucaacuucaacggccucaccgggaccggcgugcugaccgagagcaacaagaaguuccugccguuccagcaguucgggcgcgacaucgccgacacgaccgacgcgguccgcgacccccagacccuggagauccucgacaucacccccugcagcuucggcgggguguccgugaucacgccgggcaccaacaccagcaaccaggucgccgugcuguaccaggacgugaacugcaccgagguccccguggccauccacgccgaccagcugacgcccaccuggcggguguacuccaccggcagcaacgucuuccagacccgcgccgggugccucaucggcgcggagcacgugaacaacuccuacgagugcgacauccccaucggggccggcaucugcgccagcuaccagacgcagaccaacuccccgcggcgcgcccggagcguggcgucccagagcaucaucgccuacaccaugucccugggcgccgagaacagcgucgccuacuccaacaacagcaucgccauccccaccaacuucacgaucuccgugaccaccgagauccugcccgugagcaugaccaagacgagcgucgacugcaccauguacaucugcggggacuccaccgagugcagcaaccuccugcugcaguacggcuccuucugcacccagcucaaccgcgcgcugacggggaucgccguggagcaggacaagaacacccaggagguguucgcccaggucaagcagaucuacaagacgcccccgaucaaggacuucggcggguucaacuucagccagauccugcccgaccccuccaagcccagcaagcgguccuucaucgaggaccuccuguucaacaaggugacccuggccgacgccggcuucaucaagcaguacggcgacugccucggggacaucgcggcccgcgaccugaucugcgcccagaaguucaacggccugaccgugcucccgccccugcugaccgacgagaugaucgcccaguacaccagcgcccuccuggcggggaccaucacguccggcuggaccuucgggugcggcgccgcccugcagauccccuucgcgaugcagauggccuaccgguucaacggcaucggggucacccagaacgugcucuacgagaaccagaagcugaucgccaaccaguucaacagcgccaucggcaagauccaggacucccugagcuccaccgccagcgcgcucgggaagcugcaggacguggucaaccagaacgcccaggcccugaacacgcucgugaagcagcuguccagcaacuucggcgccaucuccagcgugcugaacgacauccucucccgccuggacaaggucgaggccgaggugcagaucgaccggcugaucaccgggcgccuccagagccugcagaccuacgugacccagcagcugauccgggcggccgagauccgcgccagcgccaaccucgccgcgaccaagauguccgagugcguccugggccagagcaagcggugcgacuucugcggcaagggguaccaccugauguccuucccccagagcgccccgcacggcguggucuuccuccacgugacguacguccccgcccaggagaagaacuucaccaccgcccccgcgaucugccacgacgggaaggcccacuucccccgcgagggcguguucguguccaacgggacccacugguucgucacgcagcggaacuucuacgagccgcagaucaucaccaccgacaacaccuucgugagcggcaacugcgacguggucaucggcaucgugaacaacacgguguacgacccccugcagcccgagcuggacuccggcgggagcggcuacauccccgaggccccgcgcgacgggcaggccuacgugcggaaggacggcgaguggguccugcucagcaccuuccugugaggacuaguuauaagacugacuagcccgaugggccucccaacgggcccuccuccccuccuugcaccgagauuaauaaaaaaaaaaaaaaaaaaaaaaaaaaaaaaaaaaaaaaaaaaaaaaaaaaaaaaaaaaaaaaaaugcaucccccccccccccccccccccccccccccccaaaggcucuuuucagagccaccagaauu

SEQ ID NO: 12929 - RNA, 3751 nt, Artificial Sequence
  SARS-CoV-2/Wuhan/WIV05/2019__EPI_ISL_402128 spike protein mRNA gc (1-1147)(T874C_S1055C) Foldon construct
aggagaaagcuuaccauguucguguuccugguccuccugccccuggugagcucccagugcgugaaccucaccacccgcacgcagcugccgcccgccuacaccaacagcuucacccggggcgucuacuaccccgacaagguguuccgcuccagcgugcugcacuccacccaggaccucuuccugcccuucuucagcaacgucacgugguuccacgccauccacguguccgggaccaacggcaccaagcgguucgacaacccggugcugcccuucaacgacggggucuacuucgcgagcaccgagaaguccaacaucauccgcggcuggaucuucgggacgacccucgacagcaagacccagucccugcugaucgugaacaacgccaccaacguggucaucaaggugugcgaguuccaguucugcaacgaccccuuccucggcguguacuaccacaagaacaacaagagcuggauggaguccgaguuccgggucuacagcuccgccaacaacugcacguucgaguacgugagccagcccuuccugauggaccuggagggcaagcaggggaacuucaagaaccuccgcgaguucguguucaagaacaucgacggcuacuucaagaucuacuccaagcacaccccgaucaaccugguccgggaccugccccagggguucagcgcccucgagccccugguggaccugcccaucggcaucaacaucacccgcuuccagacccuccuggcccugcaccgguccuaccucacgccgggggacagcagcuccggcuggaccgcgggcgccgccgccuacuacgugggguaccugcagccccgcaccuuccugcucaaguacaacgagaacggcaccaucacggacgcggucgacugcgcccuggacccccugagcgagaccaagugcacccucaaguccuucaccguggagaaggggaucuaccagacgagcaacuuccgggugcagcccaccgaguccaucguccgcuucccgaacaucaccaaccugugccccuucggcgagguguucaacgccacccgguucgccagcgucuacgccuggaaccgcaagcggaucuccaacugcguggcggacuacagcgugcuguacaacuccgccagcuucuccacguucaagugcuacggcgucagccccaccaagcucaacgaccugugcuucaccaacguguacgccgacuccuucgugauccgcggggacgagguccggcagaucgcccccggccagaccgggaagaucgccgacuacaacuacaagcugccggacgacuucacgggcugcgugaucgcguggaacagcaacaaccucgacuccaaggucgggggcaacuacaacuaccuguaccgccuguuccgcaagagcaaccucaagcccuucgagcgggacaucuccaccgagaucuaccaggccggcagcacccccugcaacgggguggagggcuucaacugcuacuucccccugcaguccuacggguuccagccgaccaacggcgugggguaccagcccuaccggguggucgugcugagcuucgagcuccugcacgcccccgccacggugugcggccccaagaaguccaccaaccuggucaagaacaagugcgugaacuucaacuucaacggccucaccgggaccggcgugcugaccgagagcaacaagaaguuccugccguuccagcaguucgggcgcgacaucgccgacacgaccgacgcgguccgcgacccccagacccuggagauccucgacaucacccccugcagcuucggcgggguguccgugaucacgccgggcaccaacaccagcaaccaggucgccgugcuguaccaggacgugaacugcaccgagguccccguggccauccacgccgaccagcugacgcccaccuggcggguguacuccaccggcagcaacgucuuccagacccgcgccgggugccucaucggcgcggagcacgugaacaacuccuacgagugcgacauccccaucggggccggcaucugcgccagcuaccagacgcagaccaacuccccgcggcgcgcccggagcguggcgucccagagcaucaucgccuacaccaugucccugggcgccgagaacagcgucgccuacuccaacaacagcaucgccauccccaccaacuucacgaucuccgugaccaccgagauccugcccgugagcaugaccaagacgagcgucgacugcaccauguacaucugcggggacuccaccgagugcagcaaccuccugcugcaguacggcuccuucugcacccagcucaaccgcgcgcugacggggaucgccguggagcaggacaagaacacccaggagguguucgcccaggucaagcagaucuacaagacgcccccgaucaaggacuucggcggguucaacuucagccagauccugcccgaccccuccaagcccagcaagcgguccuucaucgaggaccuccuguucaacaaggugacccuggccgacgccggcuucaucaagcaguacggcgacugccucggggacaucgcggcccgcgaccugaucugcgcccagaaguucaacggccugaccgugcucccgccccugcugaccgacgagaugaucgcccaguacugcagcgcccuccuggcggggaccaucacguccggcuggaccuucggggccggcgccgcccugcagauccccuucgcgaugcagauggccuaccgguucaacggcaucggggucacccagaacgugcucuacgagaaccagaagcugaucgccaaccaguucaacagcgccaucggcaagauccaggacucccugagcuccaccgccagcgcgcucgggaagcugcaggacguggucaaccagaacgcccaggcccugaacacgcucgugaagcagcuguccagcaacuucggcgccaucuccagcgugcugaacgacauccucucccgccuggacaaggucgaggccgaggugcagaucgaccggcugaucaccgggcgccuccagagccugcagaccuacgugacccagcagcugauccgggcggccgagauccgcgccagcgccaaccucgccgcgaccaagauguccgagugcguccugggccagagcaagcggguggacuucugcggcaagggguaccaccugauguccuucccccagugcgccccgcacggcguggucuuccuccacgugacguacguccccgcccaggagaagaacuucaccaccgcccccgcgaucugccacgacgggaaggcccacuucccccgcgagggcguguucguguccaacgggacccacugguucgucacgcagcggaacuucuacgagccgcagaucaucaccaccgacaacaccuucgugagcggcaacugcgacguggucaucggcaucgugaacaacacgguguacgacccccugcagcccgagcuggacuccggcgggagcggcuacauccccgaggccccgcgcgacgggcaggccuacgugcggaaggacggcgaguggguccugcucagcaccuuccugugaggacuaguuauaagacugacuagcccgaugggccucccaacgggcccuccuccccuccuugcaccgagauuaauaaaaaaaaaaaaaaaaaaaaaaaaaaaaaaaaaaaaaaaaaaaaaaaaaaaaaaaaaaaaaaaaugcaucccccccccccccccccccccccccccccccaaaggcucuuuucagagccaccagaauu

SEQ ID NO: 12930 - RNA, 4123 nt, Artificial Sequence
  SARS-CoV-2/Wuhan/WIV05/2019__EPI_ISL_402128 spike protein mRNA gc (1-1147) WhcAg construct
aggagaaagcuuaccauguucguguuccugguccuccugccccuggugagcucccagugcgugaaccucaccacccgcacgcagcugccgcccgccuacaccaacagcuucacccggggcgucuacuaccccgacaagguguuccgcuccagcgugcugcacuccacccaggaccucuuccugcccuucuucagcaacgucacgugguuccacgccauccacguguccgggaccaacggcaccaagcgguucgacaacccggugcugcccuucaacgacggggucuacuucgcgagcaccgagaaguccaacaucauccgcggcuggaucuucgggacgacccucgacagcaagacccagucccugcugaucgugaacaacgccaccaacguggucaucaaggugugcgaguuccaguucugcaacgaccccuuccucggcguguacuaccacaagaacaacaagagcuggauggaguccgaguuccgggucuacagcuccgccaacaacugcacguucgaguacgugagccagcccuuccugauggaccuggagggcaagcaggggaacuucaagaaccuccgcgaguucguguucaagaacaucgacggcuacuucaagaucuacuccaagcacaccccgaucaaccugguccgggaccugccccagggguucagcgcccucgagccccugguggaccugcccaucggcaucaacaucacccgcuuccagacccuccuggcccugcaccgguccuaccucacgccgggggacagcagcuccggcuggaccgcgggcgccgccgccuacuacgugggguaccugcagccccgcaccuuccugcucaaguacaacgagaacggcaccaucacggacgcggucgacugcgcccuggacccccugagcgagaccaagugcacccucaaguccuucaccguggagaaggggaucuaccagacgagcaacuuccgggugcagcccaccgaguccaucguccgcuucccgaacaucaccaaccugugccccuucggcgagguguucaacgccacccgguucgccagcgucuacgccuggaaccgcaagcggaucuccaacugcguggcggacuacagcgugcuguacaacuccgccagcuucuccacguucaagugcuacggcgucagccccaccaagcucaacgaccugugcuucaccaacguguacgccgacuccuucgugauccgcggggacgagguccggcagaucgcccccggccagaccgggaagaucgccgacuacaacuacaagcugccggacgacuucacgggcugcgugaucgcguggaacagcaacaaccucgacuccaaggucgggggcaacuacaacuaccuguaccgccuguuccgcaagagcaaccucaagcccuucgagcgggacaucuccaccgagaucuaccaggccggcagcacccccugcaacgggguggagggcuucaacugcuacuucccccugcaguccuacggguuccagccgaccaacggcgugggguaccagcccuaccggguggucgugcugagcuucgagcuccugcacgcccccgccacggugugcggccccaagaaguccaccaaccuggucaagaacaagugcgugaacuucaacuucaacggccucaccgggaccggcgugcugaccgagagcaacaagaaguuccugccguuccagcaguucgggcgcgacaucgccgacacgaccgacgcgguccgcgacccccagacccuggagauccucgacaucacccccugcagcuucggcgggguguccgugaucacgccgggcaccaacaccagcaaccaggucgccgugcuguaccaggacgugaacugcaccgagguccccguggccauccacgccgaccagcugacgcccaccuggcggguguacuccaccggcagcaacgucuuccagacccgcgccgggugccucaucggcgcggagcacgugaacaacuccuacgagugcgacauccccaucggggccggcaucugcgccagcuaccagacgcagaccaacuccccgcggcgcgcccggagcguggcgucccagagcaucaucgccuacaccaugucccugggcgccgagaacagcgucgccuacuccaacaacagcaucgccauccccaccaacuucacgaucuccgugaccaccgagauccugcccgugagcaugaccaagacgagcgucgacugcaccauguacaucugcggggacuccaccgagugcagcaaccuccugcugcaguacggcuccuucugcacccagcucaaccgcgcgcugacggggaucgccguggagcaggacaagaacacccaggagguguucgcccaggucaagcagaucuacaagacgcccccgaucaaggacuucggcggguucaacuucagccagauccugcccgaccccuccaagcccagcaagcgguccuucaucgaggaccuccuguucaacaaggugacccuggccgacgccggcuucaucaagcaguacggcgacugccucggggacaucgcggcccgcgaccugaucugcgcccagaaguucaacggccugaccgugcucccgccccugcugaccgacgagaugaucgcccaguacaccagcgcccuccuggcggggaccaucacguccggcuggaccuucggggccggcgccgcccugcagauccccuucgcgaugcagauggccuaccgguucaacggcaucggggucacccagaacgugcucuacgagaaccagaagcugaucgccaaccaguucaacagcgccaucggcaagauccaggacucccugagcuccaccgccagcgcgcucgggaagcugcaggacguggucaaccagaacgcccaggcccugaacacgcucgugaagcagcuguccagcaacuucggcgccaucuccagcgugcugaacgacauccucucccgccuggacaaggucgaggccgaggugcagaucgaccggcugaucaccgggcgccuccagagccugcagaccuacgugacccagcagcugauccgggcggccgagauccgcgccagcgccaaccucgccgcgaccaagauguccgagugcguccugggccagagcaagcggguggacuucugcggcaagggguaccaccugauguccuucccccagagcgccccgcacggcguggucuuccuccacgugacguacguccccgcccaggagaagaacuucaccaccgcccccgcgaucugccacgacgggaaggcccacuucccccgcgagggcguguucguguccaacgggacccacugguucgucacgcagcggaacuucuacgagccgcagaucaucaccaccgacaacaccuucgugagcggcaacugcgacguggucaucggcaucgugaacaacacgguguacgacccccugcagcccgagcuggacuccggcgggggcgggagcgacaucgaccccuacaaggaguucggcagcuccuaccagcugcucaacuuccugccccuggacuucuuccccgaccucaacgcccugguggacaccgccaccgcgcuguacgaggaggagcucacggggcgcgagcacugcagcccccaccacaccgccauccggcaggcccuggucugcugggacgagcugaccaagcucaucgccuggauguccagcaacaucaccuccgagcagguccgcacgaucaucgugaaccacgucaacgacaccuggggccugaaggugcggcagagccugugguuccaccucuccugccugaccuucgggcagcacaccgugcaggaguuccuggucagcuucggcguguggauccgcacgcccgccccguaccggccgcccaacgcgccgauccucuccacccugccggagcacaccgugaucugcugaggacuaguuauaagacugacuagcccgaugggccucccaacgggcccuccuccccuccuugcaccgagauuaauaaaaaaaaaaaaaaaaaaaaaaaaaaaaaaaaaaaaaaaaaaaaaaaaaaaaaaaaaaaaaaaaugcaucccccccccccccccccccccccccccccccaaaggcucuuuucagagccaccagaauu

SEQ ID NO: 12931 - RNA, 4123 nt, Artificial Sequence
  SARS-CoV-2/Wuhan/WIV05/2019__EPI_ISL_402128 spike protein mRNA gc (1-1147)(K986P_V987P) WhcAg construct R9663
aggagaaagcuuaccauguucguguuccugguccuccugccccuggugagcucccagugcgugaaccucaccacccgcacgcagcugccgcccgccuacaccaacagcuucacccggggcgucuacuaccccgacaagguguuccgcuccagcgugcugcacuccacccaggaccucuuccugcccuucuucagcaacgucacgugguuccacgccauccacguguccgggaccaacggcaccaagcgguucgacaacccggugcugcccuucaacgacggggucuacuucgcgagcaccgagaaguccaacaucauccgcggcuggaucuucgggacgacccucgacagcaagacccagucccugcugaucgugaacaacgccaccaacguggucaucaaggugugcgaguuccaguucugcaacgaccccuuccucggcguguacuaccacaagaacaacaagagcuggauggaguccgaguuccgggucuacagcuccgccaacaacugcacguucgaguacgugagccagcccuuccugauggaccuggagggcaagcaggggaacuucaagaaccuccgcgaguucguguucaagaacaucgacggcuacuucaagaucuacuccaagcacaccccgaucaaccugguccgggaccugccccagggguucagcgcccucgagccccugguggaccugcccaucggcaucaacaucacccgcuuccagacccuccuggcccugcaccgguccuaccucacgccgggggacagcagcuccggcuggaccgcgggcgccgccgccuacuacgugggguaccugcagccccgcaccuuccugcucaaguacaacgagaacggcaccaucacggacgcggucgacugcgcccuggacccccugagcgagaccaagugcacccucaaguccuucaccguggagaaggggaucuaccagacgagcaacuuccgggugcagcccaccgaguccaucguccgcuucccgaacaucaccaaccugugccccuucggcgagguguucaacgccacccgguucgccagcgucuacgccuggaaccgcaagcggaucuccaacugcguggcggacuacagcgugcuguacaacuccgccagcuucuccacguucaagugcuacggcgucagccccaccaagcucaacgaccugugcuucaccaacguguacgccgacuccuucgugauccgcggggacgagguccggcagaucgcccccggccagaccgggaagaucgccgacuacaacuacaagcugccggacgacuucacgggcugcgugaucgcguggaacagcaacaaccucgacuccaaggucgggggcaacuacaacuaccuguaccgccuguuccgcaagagcaaccucaagcccuucgagcgggacaucuccaccgagaucuaccaggccggcagcacccccugcaacgggguggagggcuucaacugcuacuucccccugcaguccuacggguuccagccgaccaacggcgugggguaccagcccuaccggguggucgugcugagcuucgagcuccugcacgcccccgccacggugugcggccccaagaaguccaccaaccuggucaagaacaagugcgugaacuucaacuucaacggccucaccgggaccggcgugcugaccgagagcaacaagaaguuccugccguuccagcaguucgggcgcgacaucgccgacacgaccgacgcgguccgcgacccccagacccuggagauccucgacaucacccccugcagcuucggcgggguguccgugaucacgccgggcaccaacaccagcaaccaggucgccgugcuguaccaggacgugaacugcaccgagguccccguggccauccacgccgaccagcugacgcccaccuggcggguguacuccaccggcagcaacgucuuccagacccgcgccgggugccucaucggcgcggagcacgugaacaacuccuacgagugcgacauccccaucggggccggcaucugcgccagcuaccagacgcagaccaacuccccgcggcgcgcccggagcguggcgucccagagcaucaucgccuacaccaugucccugggcgccgagaacagcgucgccuacuccaacaacagcaucgccauccccaccaacuucacgaucuccgugaccaccgagauccugcccgugagcaugaccaagacgagcgucgacugcaccauguacaucugcggggacuccaccgagugcagcaaccuccugcugcaguacggcuccuucugcacccagcucaaccgcgcgcugacggggaucgccguggagcaggacaagaacacccaggagguguucgcccaggucaagcagaucuacaagacgcccccgaucaaggacuucggcggguucaacuucagccagauccugcccgaccccuccaagcccagcaagcgguccuucaucgaggaccuccuguucaacaaggugacccuggccgacgccggcuucaucaagcaguacggcgacugccucggggacaucgcggcccgcgaccugaucugcgcccagaaguucaacggccugaccgugcucccgccccugcugaccgacgagaugaucgcccaguacaccagcgcccuccuggcggggaccaucacguccggcuggaccuucggggccggcgccgcccugcagauccccuucgcgaugcagauggccuaccgguucaacggcaucggggucacccagaacgugcucuacgagaaccagaagcugaucgccaaccaguucaacagcgccaucggcaagauccaggacucccugagcuccaccgccagcgcgcucgggaagcugcaggacguggucaaccagaacgcccaggcccugaacacgcucgugaagcagcuguccagcaacuucggcgccaucuccagcgugcugaacgacauccucucccgccuggacccgcccgaggccgaggugcagaucgaccggcugaucaccgggcgccuccagagccugcagaccuacgugacccagcagcugauccgggcggccgagauccgcgccagcgccaaccucgccgcgaccaagauguccgagugcguccugggccagagcaagcggguggacuucugcggcaagggguaccaccugauguccuucccccagagcgccccgcacggcguggucuuccuccacgugacguacguccccgcccaggagaagaacuucaccaccgcccccgcgaucugccacgacgggaaggcccacuucccccgcgagggcguguucguguccaacgggacccacugguucgucacgcagcggaacuucuacgagccgcagaucaucaccaccgacaacaccuucgugagcggcaacugcgacguggucaucggcaucgugaacaacacgguguacgacccccugcagcccgagcuggacuccggcgggggcgggagcgacaucgaccccuacaaggaguucggcagcuccuaccagcugcucaacuuccugccccuggacuucuuccccgaccucaacgcccugguggacaccgccaccgcgcuguacgaggaggagcucacggggcgcgagcacugcagcccccaccacaccgccauccggcaggcccuggucugcugggacgagcugaccaagcucaucgccuggauguccagcaacaucaccuccgagcagguccgcacgaucaucgugaaccacgucaacgacaccuggggccugaaggugcggcagagccugugguuccaccucuccugccugaccuucgggcagcacaccgugcaggaguuccuggucagcuucggcguguggauccgcacgcccgccccguaccggccgcccaacgcgccgauccucuccacccugccggagcacaccgugaucugcugaggacuaguuauaagacugacuagcccgaugggccucccaacgggcccuccuccccuccuugcaccgagauuaauaaaaaaaaaaaaaaaaaaaaaaaaaaaaaaaaaaaaaaaaaaaaaaaaaaaaaaaaaaaaaaaaugcaucccccccccccccccccccccccccccccccaaaggcucuuuucagagccaccagaauu

SEQ ID NO: 12932 - RNA, 4123 nt, Artificial Sequence
  SARS-CoV-2/Wuhan/WIV05/2019__EPI_ISL_402128 spike protein mRNA gc (1-1147)(K986P_V987P_T887WN_A1020W) WhcAg construct
aggagaaagcuuaccauguucguguuccugguccuccugccccuggugagcucccagugcgugaaccucaccacccgcacgcagcugccgcccgccuacaccaacagcuucacccggggcgucuacuaccccgacaagguguuccgcuccagcgugcugcacuccacccaggaccucuuccugcccuucuucagcaacgucacgugguuccacgccauccacguguccgggaccaacggcaccaagcgguucgacaacccggugcugcccuucaacgacggggucuacuucgcgagcaccgagaaguccaacaucauccgcggcuggaucuucgggacgacccucgacagcaagacccagucccugcugaucgugaacaacgccaccaacguggucaucaaggugugcgaguuccaguucugcaacgaccccuuccucggcguguacuaccacaagaacaacaagagcuggauggaguccgaguuccgggucuacagcuccgccaacaacugcacguucgaguacgugagccagcccuuccugauggaccuggagggcaagcaggggaacuucaagaaccuccgcgaguucguguucaagaacaucgacggcuacuucaagaucuacuccaagcacaccccgaucaaccugguccgggaccugccccagggguucagcgcccucgagccccugguggaccugcccaucggcaucaacaucacccgcuuccagacccuccuggcccugcaccgguccuaccucacgccgggggacagcagcuccggcuggaccgcgggcgccgccgccuacuacgugggguaccugcagccccgcaccuuccugcucaaguacaacgagaacggcaccaucacggacgcggucgacugcgcccuggacccccugagcgagaccaagugcacccucaaguccuucaccguggagaaggggaucuaccagacgagcaacuuccgggugcagcccaccgaguccaucguccgcuucccgaacaucaccaaccugugccccuucggcgagguguucaacgccacccgguucgccagcgucuacgccuggaaccgcaagcggaucuccaacugcguggcggacuacagcgugcuguacaacuccgccagcuucuccacguucaagugcuacggcgucagccccaccaagcucaacgaccugugcuucaccaacguguacgccgacuccuucgugauccgcggggacgagguccggcagaucgcccccggccagaccgggaagaucgccgacuacaacuacaagcugccggacgacuucacgggcugcgugaucgcguggaacagcaacaaccucgacuccaaggucgggggcaacuacaacuaccuguaccgccuguuccgcaagagcaaccucaagcccuucgagcgggacaucuccaccgagaucuaccaggccggcagcacccccugcaacgggguggagggcuucaacugcuacuucccccugcaguccuacggguuccagccgaccaacggcgugggguaccagcccuaccggguggucgugcugagcuucgagcuccugcacgcccccgccacggugugcggccccaagaaguccaccaaccuggucaagaacaagugcgugaacuucaacuucaacggccucaccgggaccggcgugcugaccgagagcaacaagaaguuccugccguuccagcaguucgggcgcgacaucgccgacacgaccgacgcgguccgcgacccccagacccuggagauccucgacaucacccccugcagcuucggcgggguguccgugaucacgccgggcaccaacaccagcaaccaggucgccgugcuguaccaggacgugaacugcaccgagguccccguggccauccacgccgaccagcugacgcccaccuggcggguguacuccaccggcagcaacgucuuccagacccgcgccgggugccucaucggcgcggagcacgugaacaacuccuacgagugcgacauccccaucggggccggcaucugcgccagcuaccagacgcagaccaacuccccgcggcgcgcccggagcguggcgucccagagcaucaucgccuacaccaugucccugggcgccgagaacagcgucgccuacuccaacaacagcaucgccauccccaccaacuucacgaucuccgugaccaccgagauccugcccgugagcaugaccaagacgagcgucgacugcaccauguacaucugcggggacuccaccgagugcagcaaccuccugcugcaguacggcuccuucugcacccagcucaaccgcgcgcugacggggaucgccguggagcaggacaagaacacccaggagguguucgcccaggucaagcagaucuacaagacgcccccgaucaaggacuucggcggguucaacuucagccagauccugcccgaccccuccaagcccagcaagcgguccuucaucgaggaccuccuguucaacaaggugacccuggccgacgccggcuucaucaagcaguacggcgacugccucggggacaucgcggcccgcgaccugaucugcgcccagaaguucaacggccugaccgugcucccgccccugcugaccgacgagaugaucgcccaguacaccagcgcccuccuggcggggaccaucacguccggcuggugguucggggccggcgccgcccugcagauccccuucgcgaugcagauggccuaccgguucaacggcaucggggucacccagaacgugcucuacgagaaccagaagcugaucgccaaccaguucaacagcgccaucggcaagauccaggacucccugagcuccaccgccagcgcgcucgggaagcugcaggacguggucaaccagaacgcccaggcccugaacacgcucgugaagcagcuguccagcaacuucggcgccaucuccagcgugcugaacgacauccucucccgccuggacccgcccgaggccgaggugcagaucgaccggcugaucaccgggcgccuccagagccugcagaccuacgugacccagcagcugauccgggcggccgagauccgcuggagcgccaaccucgccgcgaccaagauguccgagugcguccugggccagagcaagcggguggacuucugcggcaagggguaccaccugauguccuucccccagagcgccccgcacggcguggucuuccuccacgugacguacguccccgcccaggagaagaacuucaccaccgcccccgcgaucugccacgacgggaaggcccacuucccccgcgagggcguguucguguccaacgggacccacugguucgucacgcagcggaacuucuacgagccgcagaucaucaccaccgacaacaccuucgugagcggcaacugcgacguggucaucggcaucgugaacaacacgguguacgacccccugcagcccgagcuggacuccggcgggggcgggagcgacaucgaccccuacaaggaguucggcagcuccuaccagcugcucaacuuccugccccuggacuucuuccccgaccucaacgcccugguggacaccgccaccgcgcuguacgaggaggagcucacggggcgcgagcacugcagcccccaccacaccgccauccggcaggcccuggucugcugggacgagcugaccaagcucaucgccuggauguccagcaacaucaccuccgagcagguccgcacgaucaucgugaaccacgucaacgacaccuggggccugaaggugcggcagagccugugguuccaccucuccugccugaccuucgggcagcacaccgugcaggaguuccuggucagcuucggcguguggauccgcacgcccgccccguaccggccgcccaacgcgccgauccucuccacccugccggagcacaccgugaucugcugaggacuaguuauaagacugacuagcccgaugggccucccaacgggcccuccuccccuccuugcaccgagauuaauaaaaaaaaaaaaaaaaaaaaaaaaaaaaaaaaaaaaaaaaaaaaaaaaaaaaaaaaaaaaaaaaugcaucccccccccccccccccccccccccccccccaaaggcucuuuucagagccaccagaauu

SEQ ID NO: 12933 - RNA, 4123 nt, Artificial Sequence
  SARS-CoV-2/Wuhan/WIV05/2019__EPI_ISL_402128 spike protein mRNA gc (1-1147)(K986P_V987P_P1069F) WhcAg construct
aggagaaagcuuaccauguucguguuccugguccuccugccccuggugagcucccagugcgugaaccucaccacccgcacgcagcugccgcccgccuacaccaacagcuucacccggggcgucuacuaccccgacaagguguuccgcuccagcgugcugcacuccacccaggaccucuuccugcccuucuucagcaacgucacgugguuccacgccauccacguguccgggaccaacggcaccaagcgguucgacaacccggugcugcccuucaacgacggggucuacuucgcgagcaccgagaaguccaacaucauccgcggcuggaucuucgggacgacccucgacagcaagacccagucccugcugaucgugaacaacgccaccaacguggucaucaaggugugcgaguuccaguucugcaacgaccccuuccucggcguguacuaccacaagaacaacaagagcuggauggaguccgaguuccgggucuacagcuccgccaacaacugcacguucgaguacgugagccagcccuuccugauggaccuggagggcaagcaggggaacuucaagaaccuccgcgaguucguguucaagaacaucgacggcuacuucaagaucuacuccaagcacaccccgaucaaccugguccgggaccugccccagggguucagcgcccucgagccccugguggaccugcccaucggcaucaacaucacccgcuuccagacccuccuggcccugcaccgguccuaccucacgccgggggacagcagcuccggcuggaccgcgggcgccgccgccuacuacgugggguaccugcagccccgcaccuuccugcucaaguacaacgagaacggcaccaucacggacgcggucgacugcgcccuggacccccugagcgagaccaagugcacccucaaguccuucaccguggagaaggggaucuaccagacgagcaacuuccgggugcagcccaccgaguccaucguccgcuucccgaacaucaccaaccugugccccuucggcgagguguucaacgccacccgguucgccagcgucuacgccuggaaccgcaagcggaucuccaacugcguggcggacuacagcgugcuguacaacuccgccagcuucuccacguucaagugcuacggcgucagccccaccaagcucaacgaccugugcuucaccaacguguacgccgacuccuucgugauccgcggggacgagguccggcagaucgcccccggccagaccgggaagaucgccgacuacaacuacaagcugccggacgacuucacgggcugcgugaucgcguggaacagcaacaaccucgacuccaaggucgggggcaacuacaacuaccuguaccgccuguuccgcaagagcaaccucaagcccuucgagcgggacaucuccaccgagaucuaccaggccggcagcacccccugcaacgggguggagggcuucaacugcuacuucccccugcaguccuacggguuccagccgaccaacggcgugggguaccagcccuaccggguggucgugcugagcuucgagcuccugcacgcccccgccacggugugcggccccaagaaguccaccaaccuggucaagaacaagugcgugaacuucaacuucaacggccucaccgggaccggcgugcugaccgagagcaacaagaaguuccugccguuccagcaguucgggcgcgacaucgccgacacgaccgacgcgguccgcgacccccagacccuggagauccucgacaucacccccugcagcuucggcgggguguccgugaucacgccgggcaccaacaccagcaaccaggucgccgugcuguaccaggacgugaacugcaccgagguccccguggccauccacgccgaccagcugacgcccaccuggcggguguacuccaccggcagcaacgucuuccagacccgcgccgggugccucaucggcgcggagcacgugaacaacuccuacgagugcgacauccccaucggggccggcaucugcgccagcuaccagacgcagaccaacuccccgcggcgcgcccggagcguggcgucccagagcaucaucgccuacaccaugucccugggcgccgagaacagcgucgccuacuccaacaacagcaucgccauccccaccaacuucacgaucuccgugaccaccgagauccugcccgugagcaugaccaagacgagcgucgacugcaccauguacaucugcggggacuccaccgagugcagcaaccuccugcugcaguacggcuccuucugcacccagcucaaccgcgcgcugacggggaucgccguggagcaggacaagaacacccaggagguguucgcccaggucaagcagaucuacaagacgcccccgaucaaggacuucggcggguucaacuucagccagauccugcccgaccccuccaagcccagcaagcgguccuucaucgaggaccuccuguucaacaaggugacccuggccgacgccggcuucaucaagcaguacggcgacugccucggggacaucgcggcccgcgaccugaucugcgcccagaaguucaacggccugaccgugcucccgccccugcugaccgacgagaugaucgcccaguacaccagcgcccuccuggcggggaccaucacguccggcuggaccuucggggccggcgccgcccugcagauccccuucgcgaugcagauggccuaccgguucaacggcaucggggucacccagaacgugcucuacgagaaccagaagcugaucgccaaccaguucaacagcgccaucggcaagauccaggacucccugagcuccaccgccagcgcgcucgggaagcugcaggacguggucaaccagaacgcccaggcccugaacacgcucgugaagcagcuguccagcaacuucggcgccaucuccagcgugcugaacgacauccucucccgccuggacccgcccgaggccgaggugcagaucgaccggcugaucaccgggcgccuccagagccugcagaccuacgugacccagcagcugauccgggcggccgagauccgcgccagcgccaaccucgccgcgaccaagauguccgagugcguccugggccagagcaagcggguggacuucugcggcaagggguaccaccugauguccuucccccagagcgccccgcacggcguggucuuccuccacgugacguacgucuucgcccaggagaagaacuucaccaccgcccccgcgaucugccacgacgggaaggcccacuucccccgcgagggcguguucguguccaacgggacccacugguucgucacgcagcggaacuucuacgagccgcagaucaucaccaccgacaacaccuucgugagcggcaacugcgacguggucaucggcaucgugaacaacacgguguacgacccccugcagcccgagcuggacuccggcgggggcgggagcgacaucgaccccuacaaggaguucggcagcuccuaccagcugcucaacuuccugccccuggacuucuuccccgaccucaacgcccugguggacaccgccaccgcgcuguacgaggaggagcucacggggcgcgagcacugcagcccccaccacaccgccauccggcaggcccuggucugcugggacgagcugaccaagcucaucgccuggauguccagcaacaucaccuccgagcagguccgcacgaucaucgugaaccacgucaacgacaccuggggccugaaggugcggcagagccugugguuccaccucuccugccugaccuucgggcagcacaccgugcaggaguuccuggucagcuucggcguguggauccgcacgcccgccccguaccggccgcccaacgcgccgauccucuccacccugccggagcacaccgugaucugcugaggacuaguuauaagacugacuagcccgaugggccucccaacgggcccuccuccccuccuugcaccgagauuaauaaaaaaaaaaaaaaaaaaaaaaaaaaaaaaaaaaaaaaaaaaaaaaaaaaaaaaaaaaaaaaaaugcaucccccccccccccccccccccccccccccccaaaggcucuuuucagagccaccagaauu

SEQ ID NO: 12934 - RNA, 4123 nt, Artificial Sequence
  SARS-CoV-2/Wuhan/WIV05/2019__EPI_ISL_402128 spike protein mRNA gc (1-1147)(K986P_V987P_ H1048Q_H1064N_ H1083N_H1101N) WhcAg construct
aggagaaagcuuaccauguucguguuccugguccuccugccccuggugagcucccagugcgugaaccucaccacccgcacgcagcugccgcccgccuacaccaacagcuucacccggggcgucuacuaccccgacaagguguuccgcuccagcgugcugcacuccacccaggaccucuuccugcccuucuucagcaacgucacgugguuccacgccauccacguguccgggaccaacggcaccaagcgguucgacaacccggugcugcccuucaacgacggggucuacuucgcgagcaccgagaaguccaacaucauccgcggcuggaucuucgggacgacccucgacagcaagacccagucccugcugaucgugaacaacgccaccaacguggucaucaaggugugcgaguuccaguucugcaacgaccccuuccucggcguguacuaccacaagaacaacaagagcuggauggaguccgaguuccgggucuacagcuccgccaacaacugcacguucgaguacgugagccagcccuuccugauggaccuggagggcaagcaggggaacuucaagaaccuccgcgaguucguguucaagaacaucgacggcuacuucaagaucuacuccaagcacaccccgaucaaccugguccgggaccugccccagggguucagcgcccucgagccccugguggaccugcccaucggcaucaacaucacccgcuuccagacccuccuggcccugcaccgguccuaccucacgccgggggacagcagcuccggcuggaccgcgggcgccgccgccuacuacgugggguaccugcagccccgcaccuuccugcucaaguacaacgagaacggcaccaucacggacgcggucgacugcgcccuggacccccugagcgagaccaagugcacccucaaguccuucaccguggagaaggggaucuaccagacgagcaacuuccgggugcagcccaccgaguccaucguccgcuucccgaacaucaccaaccugugccccuucggcgagguguucaacgccacccgguucgccagcgucuacgccuggaaccgcaagcggaucuccaacugcguggcggacuacagcgugcuguacaacuccgccagcuucuccacguucaagugcuacggcgucagccccaccaagcucaacgaccugugcuucaccaacguguacgccgacuccuucgugauccgcggggacgagguccggcagaucgcccccggccagaccgggaagaucgccgacuacaacuacaagcugccggacgacuucacgggcugcgugaucgcguggaacagcaacaaccucgacuccaaggucgggggcaacuacaacuaccuguaccgccuguuccgcaagagcaaccucaagcccuucgagcgggacaucuccaccgagaucuaccaggccggcagcacccccugcaacgggguggagggcuucaacugcuacuucccccugcaguccuacggguuccagccgaccaacggcgugggguaccagcccuaccggguggucgugcugagcuucgagcuccugcacgcccccgccacggugugcggccccaagaaguccaccaaccuggucaagaacaagugcgugaacuucaacuucaacggccucaccgggaccggcgugcugaccgagagcaacaagaaguuccugccguuccagcaguucgggcgcgacaucgccgacacgaccgacgcgguccgcgacccccagacccuggagauccucgacaucacccccugcagcuucggcgggguguccgugaucacgccgggcaccaacaccagcaaccaggucgccgugcuguaccaggacgugaacugcaccgagguccccguggccauccacgccgaccagcugacgcccaccuggcggguguacuccaccggcagcaacgucuuccagacccgcgccgggugccucaucggcgcggagcacgugaacaacuccuacgagugcgacauccccaucggggccggcaucugcgccagcuaccagacgcagaccaacuccccgcggcgcgcccggagcguggcgucccagagcaucaucgccuacaccaugucccugggcgccgagaacagcgucgccuacuccaacaacagcaucgccauccccaccaacuucacgaucuccgugaccaccgagauccugcccgugagcaugaccaagacgagcgucgacugcaccauguacaucugcggggacuccaccgagugcagcaaccuccugcugcaguacggcuccuucugcacccagcucaaccgcgcgcugacggggaucgccguggagcaggacaagaacacccaggagguguucgcccaggucaagcagaucuacaagacgcccccgaucaaggacuucggcggguucaacuucagccagauccugcccgaccccuccaagcccagcaagcgguccuucaucgaggaccuccuguucaacaaggugacccuggccgacgccggcuucaucaagcaguacggcgacugccucggggacaucgcggcccgcgaccugaucugcgcccagaaguucaacggccugaccgugcucccgccccugcugaccgacgagaugaucgcccaguacaccagcgcccuccuggcggggaccaucacguccggcuggaccuucggggccggcgccgcccugcagauccccuucgcgaugcagauggccuaccgguucaacggcaucggggucacccagaacgugcucuacgagaaccagaagcugaucgccaaccaguucaacagcgccaucggcaagauccaggacucccugagcuccaccgccagcgcgcucgggaagcugcaggacguggucaaccagaacgcccaggcccugaacacgcucgugaagcagcuguccagcaacuucggcgccaucuccagcgugcugaacgacauccucucccgccuggacccgcccgaggccgaggugcagaucgaccggcugaucaccgggcgccuccagagccugcagaccuacgugacccagcagcugauccgggcggccgagauccgcgccagcgccaaccucgccgcgaccaagauguccgagugcguccugggccagagcaagcggguggacuucugcggcaagggguaccagcugauguccuucccccagagcgccccgcacggcguggucuuccucaacgugacguacguccccgcccaggagaagaacuucaccaccgcccccgcgaucugcaacgacgggaaggcccacuucccccgcgagggcguguucguguccaacgggaccaacugguucgucacgcagcggaacuucuacgagccgcagaucaucaccaccgacaacaccuucgugagcggcaacugcgacguggucaucggcaucgugaacaacacgguguacgacccccugcagcccgagcuggacuccggcgggggcgggagcgacaucgaccccuacaaggaguucggcagcuccuaccagcugcucaacuuccugccccuggacuucuuccccgaccucaacgcccugguggacaccgccaccgcgcuguacgaggaggagcucacggggcgcgagcacugcagcccccaccacaccgccauccggcaggcccuggucugcugggacgagcugaccaagcucaucgccuggauguccagcaacaucaccuccgagcagguccgcacgaucaucgugaaccacgucaacgacaccuggggccugaaggugcggcagagccugugguuccaccucuccugccugaccuucgggcagcacaccgugcaggaguuccuggucagcuucggcguguggauccgcacgcccgccccguaccggccgcccaacgcgccgauccucuccacccugccggagcacaccgugaucugcugaggacuaguuauaagacugacuagcccgaugggccucccaacgggcccuccuccccuccuugcaccgagauuaauaaaaaaaaaaaaaaaaaaaaaaaaaaaaaaaaaaaaaaaaaaaaaaaaaaaaaaaaaaaaaaaaugcaucccccccccccccccccccccccccccccccaaaggcucuuuucagagccaccagaauu

SEQ ID NO: 12935 - RNA, 4123 nt, Artificial Sequence
  SARS-CoV-2/Wuhan/WIV05/2019__EPI_ISL_402128 spike protein mRNA gc (1-1147)(I712C_T1077C) WhcAg construct
aggagaaagcuuaccauguucguguuccugguccuccugccccuggugagcucccagugcgugaaccucaccacccgcacgcagcugccgcccgccuacaccaacagcuucacccggggcgucuacuaccccgacaagguguuccgcuccagcgugcugcacuccacccaggaccucuuccugcccuucuucagcaacgucacgugguuccacgccauccacguguccgggaccaacggcaccaagcgguucgacaacccggugcugcccuucaacgacggggucuacuucgcgagcaccgagaaguccaacaucauccgcggcuggaucuucgggacgacccucgacagcaagacccagucccugcugaucgugaacaacgccaccaacguggucaucaaggugugcgaguuccaguucugcaacgaccccuuccucggcguguacuaccacaagaacaacaagagcuggauggaguccgaguuccgggucuacagcuccgccaacaacugcacguucgaguacgugagccagcccuuccugauggaccuggagggcaagcaggggaacuucaagaaccuccgcgaguucguguucaagaacaucgacggcuacuucaagaucuacuccaagcacaccccgaucaaccugguccgggaccugccccagggguucagcgcccucgagccccugguggaccugcccaucggcaucaacaucacccgcuuccagacccuccuggcccugcaccgguccuaccucacgccgggggacagcagcuccggcuggaccgcgggcgccgccgccuacuacgugggguaccugcagccccgcaccuuccugcucaaguacaacgagaacggcaccaucacggacgcggucgacugcgcccuggacccccugagcgagaccaagugcacccucaaguccuucaccguggagaaggggaucuaccagacgagcaacuuccgggugcagcccaccgaguccaucguccgcuucccgaacaucaccaaccugugccccuucggcgagguguucaacgccacccgguucgccagcgucuacgccuggaaccgcaagcggaucuccaacugcguggcggacuacagcgugcuguacaacuccgccagcuucuccacguucaagugcuacggcgucagccccaccaagcucaacgaccugugcuucaccaacguguacgccgacuccuucgugauccgcggggacgagguccggcagaucgcccccggccagaccgggaagaucgccgacuacaacuacaagcugccggacgacuucacgggcugcgugaucgcguggaacagcaacaaccucgacuccaaggucgggggcaacuacaacuaccuguaccgccuguuccgcaagagcaaccucaagcccuucgagcgggacaucuccaccgagaucuaccaggccggcagcacccccugcaacgggguggagggcuucaacugcuacuucccccugcaguccuacggguuccagccgaccaacggcgugggguaccagcccuaccggguggucgugcugagcuucgagcuccugcacgcccccgccacggugugcggccccaagaaguccaccaaccuggucaagaacaagugcgugaacuucaacuucaacggccucaccgggaccggcgugcugaccgagagcaacaagaaguuccugccguuccagcaguucgggcgcgacaucgccgacacgaccgacgcgguccgcgacccccagacccuggagauccucgacaucacccccugcagcuucggcgggguguccgugaucacgccgggcaccaacaccagcaaccaggucgccgugcuguaccaggacgugaacugcaccgagguccccguggccauccacgccgaccagcugacgcccaccuggcggguguacuccaccggcagcaacgucuuccagacccgcgccgggugccucaucggcgcggagcacgugaacaacuccuacgagugcgacauccccaucggggccggcaucugcgccagcuaccagacgcagaccaacuccccgcggcgcgcccggagcguggcgucccagagcaucaucgccuacaccaugucccugggcgccgagaacagcgucgccuacuccaacaacagcugcgccauccccaccaacuucacgaucuccgugaccaccgagauccugcccgugagcaugaccaagacgagcgucgacugcaccauguacaucugcggggacuccaccgagugcagcaaccuccugcugcaguacggcuccuucugcacccagcucaaccgcgcgcugacggggaucgccguggagcaggacaagaacacccaggagguguucgcccaggucaagcagaucuacaagacgcccccgaucaaggacuucggcggguucaacuucagccagauccugcccgaccccuccaagcccagcaagcgguccuucaucgaggaccuccuguucaacaaggugacccuggccgacgccggcuucaucaagcaguacggcgacugccucggggacaucgcggcccgcgaccugaucugcgcccagaaguucaacggccugaccgugcucccgccccugcugaccgacgagaugaucgcccaguacaccagcgcccuccuggcggggaccaucacguccggcuggaccuucggggccggcgccgcccugcagauccccuucgcgaugcagauggccuaccgguucaacggcaucggggucacccagaacgugcucuacgagaaccagaagcugaucgccaaccaguucaacagcgccaucggcaagauccaggacucccugagcuccaccgccagcgcgcucgggaagcugcaggacguggucaaccagaacgcccaggcccugaacacgcucgugaagcagcuguccagcaacuucggcgccaucuccagcgugcugaacgacauccucucccgccuggacaaggucgaggccgaggugcagaucgaccggcugaucaccgggcgccuccagagccugcagaccuacgugacccagcagcugauccgggcggccgagauccgcgccagcgccaaccucgccgcgaccaagauguccgagugcguccugggccagagcaagcggguggacuucugcggcaagggguaccaccugauguccuucccccagagcgccccgcacggcguggucuuccuccacgugacguacguccccgcccaggagaagaacuucaccugcgcccccgcgaucugccacgacgggaaggcccacuucccccgcgagggcguguucguguccaacgggacccacugguucgucacgcagcggaacuucuacgagccgcagaucaucaccaccgacaacaccuucgugagcggcaacugcgacguggucaucggcaucgugaacaacacgguguacgacccccugcagcccgagcuggacuccggcgggggcgggagcgacaucgaccccuacaaggaguucggcagcuccuaccagcugcucaacuuccugccccuggacuucuuccccgaccucaacgcccugguggacaccgccaccgcgcuguacgaggaggagcucacggggcgcgagcacugcagcccccaccacaccgccauccggcaggcccuggucugcugggacgagcugaccaagcucaucgccuggauguccagcaacaucaccuccgagcagguccgcacgaucaucgugaaccacgucaacgacaccuggggccugaaggugcggcagagccugugguuccaccucuccugccugaccuucgggcagcacaccgugcaggaguuccuggucagcuucggcguguggauccgcacgcccgccccguaccggccgcccaacgcgccgauccucuccacccugccggagcacaccgugaucugcugaggacuaguuauaagacugacuagcccgaugggccucccaacgggcccuccuccccuccuugcaccgagauuaauaaaaaaaaaaaaaaaaaaaaaaaaaaaaaaaaaaaaaaaaaaaaaaaaaaaaaaaaaaaaaaaaugcaucccccccccccccccccccccccccccccccaaaggcucuuuucagagccaccagaauu

SEQ ID NO: 12936 - RNA, 4123 nt, Artificial Sequence
  SARS-CoV-2/Wuhan/WIV05/2019__EPI_ISL_402128 spike protein mRNA gc (1-1147)(I714C_Y1110C) WhcAg construct
aggagaaagcuuaccauguucguguuccugguccuccugccccuggugagcucccagugcgugaaccucaccacccgcacgcagcugccgcccgccuacaccaacagcuucacccggggcgucuacuaccccgacaagguguuccgcuccagcgugcugcacuccacccaggaccucuuccugcccuucuucagcaacgucacgugguuccacgccauccacguguccgggaccaacggcaccaagcgguucgacaacccggugcugcccuucaacgacggggucuacuucgcgagcaccgagaaguccaacaucauccgcggcuggaucuucgggacgacccucgacagcaagacccagucccugcugaucgugaacaacgccaccaacguggucaucaaggugugcgaguuccaguucugcaacgaccccuuccucggcguguacuaccacaagaacaacaagagcuggauggaguccgaguuccgggucuacagcuccgccaacaacugcacguucgaguacgugagccagcccuuccugauggaccuggagggcaagcaggggaacuucaagaaccuccgcgaguucguguucaagaacaucgacggcuacuucaagaucuacuccaagcacaccccgaucaaccugguccgggaccugccccagggguucagcgcccucgagccccugguggaccugcccaucggcaucaacaucacccgcuuccagacccuccuggcccugcaccgguccuaccucacgccgggggacagcagcuccggcuggaccgcgggcgccgccgccuacuacgugggguaccugcagccccgcaccuuccugcucaaguacaacgagaacggcaccaucacggacgcggucgacugcgcccuggacccccugagcgagaccaagugcacccucaaguccuucaccguggagaaggggaucuaccagacgagcaacuuccgggugcagcccaccgaguccaucguccgcuucccgaacaucaccaaccugugccccuucggcgagguguucaacgccacccgguucgccagcgucuacgccuggaaccgcaagcggaucuccaacugcguggcggacuacagcgugcuguacaacuccgccagcuucuccacguucaagugcuacggcgucagccccaccaagcucaacgaccugugcuucaccaacguguacgccgacuccuucgugauccgcggggacgagguccggcagaucgcccccggccagaccgggaagaucgccgacuacaacuacaagcugccggacgacuucacgggcugcgugaucgcguggaacagcaacaaccucgacuccaaggucgggggcaacuacaacuaccuguaccgccuguuccgcaagagcaaccucaagcccuucgagcgggacaucuccaccgagaucuaccaggccggcagcacccccugcaacgggguggagggcuucaacugcuacuucccccugcaguccuacggguuccagccgaccaacggcgugggguaccagcccuaccggguggucgugcugagcuucgagcuccugcacgcccccgccacggugugcggccccaagaaguccaccaaccuggucaagaacaagugcgugaacuucaacuucaacggccucaccgggaccggcgugcugaccgagagcaacaagaaguuccugccguuccagcaguucgggcgcgacaucgccgacacgaccgacgcgguccgcgacccccagacccuggagauccucgacaucacccccugcagcuucggcgggguguccgugaucacgccgggcaccaacaccagcaaccaggucgccgugcuguaccaggacgugaacugcaccgagguccccguggccauccacgccgaccagcugacgcccaccuggcggguguacuccaccggcagcaacgucuuccagacccgcgccgggugccucaucggcgcggagcacgugaacaacuccuacgagugcgacauccccaucggggccggcaucugcgccagcuaccagacgcagaccaacuccccgcggcgcgcccggagcguggcgucccagagcaucaucgccuacaccaugucccugggcgccgagaacagcgucgccuacuccaacaacagcaucgccugccccaccaacuucacgaucuccgugaccaccgagauccugcccgugagcaugaccaagacgagcgucgacugcaccauguacaucugcggggacuccaccgagugcagcaaccuccugcugcaguacggcuccuucugcacccagcucaaccgcgcgcugacggggaucgccguggagcaggacaagaacacccaggagguguucgcccaggucaagcagaucuacaagacgcccccgaucaaggacuucggcggguucaacuucagccagauccugcccgaccccuccaagcccagcaagcgguccuucaucgaggaccuccuguucaacaaggugacccuggccgacgccggcuucaucaagcaguacggcgacugccucggggacaucgcggcccgcgaccugaucugcgcccagaaguucaacggccugaccgugcucccgccccugcugaccgacgagaugaucgcccaguacaccagcgcccuccuggcggggaccaucacguccggcuggaccuucggggccggcgccgcccugcagauccccuucgcgaugcagauggccuaccgguucaacggcaucggggucacccagaacgugcucuacgagaaccagaagcugaucgccaaccaguucaacagcgccaucggcaagauccaggacucccugagcuccaccgccagcgcgcucgggaagcugcaggacguggucaaccagaacgcccaggcccugaacacgcucgugaagcagcuguccagcaacuucggcgccaucuccagcgugcugaacgacauccucucccgccuggacaaggucgaggccgaggugcagaucgaccggcugaucaccgggcgccuccagagccugcagaccuacgugacccagcagcugauccgggcggccgagauccgcgccagcgccaaccucgccgcgaccaagauguccgagugcguccugggccagagcaagcggguggacuucugcggcaagggguaccaccugauguccuucccccagagcgccccgcacggcguggucuuccuccacgugacguacguccccgcccaggagaagaacuucaccaccgcccccgcgaucugccacgacgggaaggcccacuucccccgcgagggcguguucguguccaacgggacccacugguucgucacgcagcggaacuucugcgagccgcagaucaucaccaccgacaacaccuucgugagcggcaacugcgacguggucaucggcaucgugaacaacacgguguacgacccccugcagcccgagcuggacuccggcgggggcgggagcgacaucgaccccuacaaggaguucggcagcuccuaccagcugcucaacuuccugccccuggacuucuuccccgaccucaacgcccugguggacaccgccaccgcgcuguacgaggaggagcucacggggcgcgagcacugcagcccccaccacaccgccauccggcaggcccuggucugcugggacgagcugaccaagcucaucgccuggauguccagcaacaucaccuccgagcagguccgcacgaucaucgugaaccacgucaacgacaccuggggccugaaggugcggcagagccugugguuccaccucuccugccugaccuucgggcagcacaccgugcaggaguuccuggucagcuucggcguguggauccgcacgcccgccccguaccggccgcccaacgcgccgauccucuccacccugccggagcacaccgugaucugcugaggacuaguuauaagacugacuagcccgaugggccucccaacgggcccuccuccccuccuugcaccgagauuaauaaaaaaaaaaaaaaaaaaaaaaaaaaaaaaaaaaaaaaaaaaaaaaaaaaaaaaaaaaaaaaaaugcaucccccccccccccccccccccccccccccccaaaggcucuuuucagagccaccagaauu

SEQ ID NO: 12937 - RNA, 4123 nt, Artificial Sequence
  SARS-CoV-2/Wuhan/WIV05/2019__EPI_ISL_402128 spike protein mRNA gc (1-1147)(P715C_P1069C) WhcAg construct
aggagaaagcuuaccauguucguguuccugguccuccugccccuggugagcucccagugcgugaaccucaccacccgcacgcagcugccgcccgccuacaccaacagcuucacccggggcgucuacuaccccgacaagguguuccgcuccagcgugcugcacuccacccaggaccucuuccugcccuucuucagcaacgucacgugguuccacgccauccacguguccgggaccaacggcaccaagcgguucgacaacccggugcugcccuucaacgacggggucuacuucgcgagcaccgagaaguccaacaucauccgcggcuggaucuucgggacgacccucgacagcaagacccagucccugcugaucgugaacaacgccaccaacguggucaucaaggugugcgaguuccaguucugcaacgaccccuuccucggcguguacuaccacaagaacaacaagagcuggauggaguccgaguuccgggucuacagcuccgccaacaacugcacguucgaguacgugagccagcccuuccugauggaccuggagggcaagcaggggaacuucaagaaccuccgcgaguucguguucaagaacaucgacggcuacuucaagaucuacuccaagcacaccccgaucaaccugguccgggaccugccccagggguucagcgcccucgagccccugguggaccugcccaucggcaucaacaucacccgcuuccagacccuccuggcccugcaccgguccuaccucacgccgggggacagcagcuccggcuggaccgcgggcgccgccgccuacuacgugggguaccugcagccccgcaccuuccugcucaaguacaacgagaacggcaccaucacggacgcggucgacugcgcccuggacccccugagcgagaccaagugcacccucaaguccuucaccguggagaaggggaucuaccagacgagcaacuuccgggugcagcccaccgaguccaucguccgcuucccgaacaucaccaaccugugccccuucggcgagguguucaacgccacccgguucgccagcgucuacgccuggaaccgcaagcggaucuccaacugcguggcggacuacagcgugcuguacaacuccgccagcuucuccacguucaagugcuacggcgucagccccaccaagcucaacgaccugugcuucaccaacguguacgccgacuccuucgugauccgcggggacgagguccggcagaucgcccccggccagaccgggaagaucgccgacuacaacuacaagcugccggacgacuucacgggcugcgugaucgcguggaacagcaacaaccucgacuccaaggucgggggcaacuacaacuaccuguaccgccuguuccgcaagagcaaccucaagcccuucgagcgggacaucuccaccgagaucuaccaggccggcagcacccccugcaacgggguggagggcuucaacugcuacuucccccugcaguccuacggguuccagccgaccaacggcgugggguaccagcccuaccggguggucgugcugagcuucgagcuccugcacgcccccgccacggugugcggccccaagaaguccaccaaccuggucaagaacaagugcgugaacuucaacuucaacggccucaccgggaccggcgugcugaccgagagcaacaagaaguuccugccguuccagcaguucgggcgcgacaucgccgacacgaccgacgcgguccgcgacccccagacccuggagauccucgacaucacccccugcagcuucggcgggguguccgugaucacgccgggcaccaacaccagcaaccaggucgccgugcuguaccaggacgugaacugcaccgagguccccguggccauccacgccgaccagcugacgcccaccuggcggguguacuccaccggcagcaacgucuuccagacccgcgccgggugccucaucggcgcggagcacgugaacaacuccuacgagugcgacauccccaucggggccggcaucugcgccagcuaccagacgcagaccaacuccccgcggcgcgcccggagcguggcgucccagagcaucaucgccuacaccaugucccugggcgccgagaacagcgucgccuacuccaacaacagcaucgccaucugcaccaacuucacgaucuccgugaccaccgagauccugcccgugagcaugaccaagacgagcgucgacugcaccauguacaucugcggggacuccaccgagugcagcaaccuccugcugcaguacggcuccuucugcacccagcucaaccgcgcgcugacggggaucgccguggagcaggacaagaacacccaggagguguucgcccaggucaagcagaucuacaagacgcccccgaucaaggacuucggcggguucaacuucagccagauccugcccgaccccuccaagcccagcaagcgguccuucaucgaggaccuccuguucaacaaggugacccuggccgacgccggcuucaucaagcaguacggcgacugccucggggacaucgcggcccgcgaccugaucugcgcccagaaguucaacggccugaccgugcucccgccccugcugaccgacgagaugaucgcccaguacaccagcgcccuccuggcggggaccaucacguccggcuggaccuucggggccggcgccgcccugcagauccccuucgcgaugcagauggccuaccgguucaacggcaucggggucacccagaacgugcucuacgagaaccagaagcugaucgccaaccaguucaacagcgccaucggcaagauccaggacucccugagcuccaccgccagcgcgcucgggaagcugcaggacguggucaaccagaacgcccaggcccugaacacgcucgugaagcagcuguccagcaacuucggcgccaucuccagcgugcugaacgacauccucucccgccuggacaaggucgaggccgaggugcagaucgaccggcugaucaccgggcgccuccagagccugcagaccuacgugacccagcagcugauccgggcggccgagauccgcgccagcgccaaccucgccgcgaccaagauguccgagugcguccugggccagagcaagcggguggacuucugcggcaagggguaccaccugauguccuucccccagagcgccccgcacggcguggucuuccuccacgugacguacgucugcgcccaggagaagaacuucaccaccgcccccgcgaucugccacgacgggaaggcccacuucccccgcgagggcguguucguguccaacgggacccacugguucgucacgcagcggaacuucuacgagccgcagaucaucaccaccgacaacaccuucgugagcggcaacugcgacguggucaucggcaucgugaacaacacgguguacgacccccugcagcccgagcuggacuccggcgggggcgggagcgacaucgaccccuacaaggaguucggcagcuccuaccagcugcucaacuuccugccccuggacuucuuccccgaccucaacgcccugguggacaccgccaccgcgcuguacgaggaggagcucacggggcgcgagcacugcagcccccaccacaccgccauccggcaggcccuggucugcugggacgagcugaccaagcucaucgccuggauguccagcaacaucaccuccgagcagguccgcacgaucaucgugaaccacgucaacgacaccuggggccugaaggugcggcagagccugugguuccaccucuccugccugaccuucgggcagcacaccgugcaggaguuccuggucagcuucggcguguggauccgcacgcccgccccguaccggccgcccaacgcgccgauccucuccacccugccggagcacaccgugaucugcugaggacuaguuauaagacugacuagcccgaugggccucccaacgggcccuccuccccuccuugcaccgagauuaauaaaaaaaaaaaaaaaaaaaaaaaaaaaaaaaaaaaaaaaaaaaaaaaaaaaaaaaaaaaaaaaaugcaucccccccccccccccccccccccccccccccaaaggcucuuuucagagccaccagaauu

SEQ ID NO: 12938 - RNA, 4123 nt, Artificial Sequence
  SARS-CoV-2/Wuhan/WIV05/2019__EPI_ISL_402128 spike protein mRNA gc (1-1147)(G889C_L1034C) WhcAg construct
aggagaaagcuuaccauguucguguuccugguccuccugccccuggugagcucccagugcgugaaccucaccacccgcacgcagcugccgcccgccuacaccaacagcuucacccggggcgucuacuaccccgacaagguguuccgcuccagcgugcugcacuccacccaggaccucuuccugcccuucuucagcaacgucacgugguuccacgccauccacguguccgggaccaacggcaccaagcgguucgacaacccggugcugcccuucaacgacggggucuacuucgcgagcaccgagaaguccaacaucauccgcggcuggaucuucgggacgacccucgacagcaagacccagucccugcugaucgugaacaacgccaccaacguggucaucaaggugugcgaguuccaguucugcaacgaccccuuccucggcguguacuaccacaagaacaacaagagcuggauggaguccgaguuccgggucuacagcuccgccaacaacugcacguucgaguacgugagccagcccuuccugauggaccuggagggcaagcaggggaacuucaagaaccuccgcgaguucguguucaagaacaucgacggcuacuucaagaucuacuccaagcacaccccgaucaaccugguccgggaccugccccagggguucagcgcccucgagccccugguggaccugcccaucggcaucaacaucacccgcuuccagacccuccuggcccugcaccgguccuaccucacgccgggggacagcagcuccggcuggaccgcgggcgccgccgccuacuacgugggguaccugcagccccgcaccuuccugcucaaguacaacgagaacggcaccaucacggacgcggucgacugcgcccuggacccccugagcgagaccaagugcacccucaaguccuucaccguggagaaggggaucuaccagacgagcaacuuccgggugcagcccaccgaguccaucguccgcuucccgaacaucaccaaccugugccccuucggcgagguguucaacgccacccgguucgccagcgucuacgccuggaaccgcaagcggaucuccaacugcguggcggacuacagcgugcuguacaacuccgccagcuucuccacguucaagugcuacggcgucagccccaccaagcucaacgaccugugcuucaccaacguguacgccgacuccuucgugauccgcggggacgagguccggcagaucgcccccggccagaccgggaagaucgccgacuacaacuacaagcugccggacgacuucacgggcugcgugaucgcguggaacagcaacaaccucgacuccaaggucgggggcaacuacaacuaccuguaccgccuguuccgcaagagcaaccucaagcccuucgagcgggacaucuccaccgagaucuaccaggccggcagcacccccugcaacgggguggagggcuucaacugcuacuucccccugcaguccuacggguuccagccgaccaacggcgugggguaccagcccuaccggguggucgugcugagcuucgagcuccugcacgcccccgccacggugugcggccccaagaaguccaccaaccuggucaagaacaagugcgugaacuucaacuucaacggccucaccgggaccggcgugcugaccgagagcaacaagaaguuccugccguuccagcaguucgggcgcgacaucgccgacacgaccgacgcgguccgcgacccccagacccuggagauccucgacaucacccccugcagcuucggcgggguguccgugaucacgccgggcaccaacaccagcaaccaggucgccgugcuguaccaggacgugaacugcaccgagguccccguggccauccacgccgaccagcugacgcccaccuggcggguguacuccaccggcagcaacgucuuccagacccgcgccgggugccucaucggcgcggagcacgugaacaacuccuacgagugcgacauccccaucggggccggcaucugcgccagcuaccagacgcagaccaacuccccgcggcgcgcccggagcguggcgucccagagcaucaucgccuacaccaugucccugggcgccgagaacagcgucgccuacuccaacaacagcaucgccauccccaccaacuucacgaucuccgugaccaccgagauccugcccgugagcaugaccaagacgagcgucgacugcaccauguacaucugcggggacuccaccgagugcagcaaccuccugcugcaguacggcuccuucugcacccagcucaaccgcgcgcugacggggaucgccguggagcaggacaagaacacccaggagguguucgcccaggucaagcagaucuacaagacgcccccgaucaaggacuucggcggguucaacuucagccagauccugcccgaccccuccaagcccagcaagcgguccuucaucgaggaccuccuguucaacaaggugacccuggccgacgccggcuucaucaagcaguacggcgacugccucggggacaucgcggcccgcgaccugaucugcgcccagaaguucaacggccugaccgugcucccgccccugcugaccgacgagaugaucgcccaguacaccagcgcccuccuggcggggaccaucacguccggcuggaccuucugcgccggcgccgcccugcagauccccuucgcgaugcagauggccuaccgguucaacggcaucggggucacccagaacgugcucuacgagaaccagaagcugaucgccaaccaguucaacagcgccaucggcaagauccaggacucccugagcuccaccgccagcgcgcucgggaagcugcaggacguggucaaccagaacgcccaggcccugaacacgcucgugaagcagcuguccagcaacuucggcgccaucuccagcgugcugaacgacauccucucccgccuggacaaggucgaggccgaggugcagaucgaccggcugaucaccgggcgccuccagagccugcagaccuacgugacccagcagcugauccgggcggccgagauccgcgccagcgccaaccucgccgcgaccaagauguccgagugcgucugcggccagagcaagcggguggacuucugcggcaagggguaccaccugauguccuucccccagagcgccccgcacggcguggucuuccuccacgugacguacguccccgcccaggagaagaacuucaccaccgcccccgcgaucugccacgacgggaaggcccacuucccccgcgagggcguguucguguccaacgggacccacugguucgucacgcagcggaacuucuacgagccgcagaucaucaccaccgacaacaccuucgugagcggcaacugcgacguggucaucggcaucgugaacaacacgguguacgacccccugcagcccgagcuggacuccggcgggggcgggagcgacaucgaccccuacaaggaguucggcagcuccuaccagcugcucaacuuccugccccuggacuucuuccccgaccucaacgcccugguggacaccgccaccgcgcuguacgaggaggagcucacggggcgcgagcacugcagcccccaccacaccgccauccggcaggcccuggucugcugggacgagcugaccaagcucaucgccuggauguccagcaacaucaccuccgagcagguccgcacgaucaucgugaaccacgucaacgacaccuggggccugaaggugcggcagagccugugguuccaccucuccugccugaccuucgggcagcacaccgugcaggaguuccuggucagcuucggcguguggauccgcacgcccgccccguaccggccgcccaacgcgccgauccucuccacccugccggagcacaccgugaucugcugaggacuaguuauaagacugacuagcccgaugggccucccaacgggcccuccuccccuccuugcaccgagauuaauaaaaaaaaaaaaaaaaaaaaaaaaaaaaaaaaaaaaaaaaaaaaaaaaaaaaaaaaaaaaaaaaugcaucccccccccccccccccccccccccccccccaaaggcucuuuucagagccaccagaauu

SEQ ID NO: 12939 - RNA, 4123 nt, Artificial Sequence
  SARS-CoV-2/Wuhan/WIV05/2019__EPI_ISL_402128 spike protein mRNA gc (1-1147)(I909C_Y1047C) WhcAg construct
aggagaaagcuuaccauguucguguuccugguccuccugccccuggugagcucccagugcgugaaccucaccacccgcacgcagcugccgcccgccuacaccaacagcuucacccggggcgucuacuaccccgacaagguguuccgcuccagcgugcugcacuccacccaggaccucuuccugcccuucuucagcaacgucacgugguuccacgccauccacguguccgggaccaacggcaccaagcgguucgacaacccggugcugcccuucaacgacggggucuacuucgcgagcaccgagaaguccaacaucauccgcggcuggaucuucgggacgacccucgacagcaagacccagucccugcugaucgugaacaacgccaccaacguggucaucaaggugugcgaguuccaguucugcaacgaccccuuccucggcguguacuaccacaagaacaacaagagcuggauggaguccgaguuccgggucuacagcuccgccaacaacugcacguucgaguacgugagccagcccuuccugauggaccuggagggcaagcaggggaacuucaagaaccuccgcgaguucguguucaagaacaucgacggcuacuucaagaucuacuccaagcacaccccgaucaaccugguccgggaccugccccagggguucagcgcccucgagccccugguggaccugcccaucggcaucaacaucacccgcuuccagacccuccuggcccugcaccgguccuaccucacgccgggggacagcagcuccggcuggaccgcgggcgccgccgccuacuacgugggguaccugcagccccgcaccuuccugcucaaguacaacgagaacggcaccaucacggacgcggucgacugcgcccuggacccccugagcgagaccaagugcacccucaaguccuucaccguggagaaggggaucuaccagacgagcaacuuccgggugcagcccaccgaguccaucguccgcuucccgaacaucaccaaccugugccccuucggcgagguguucaacgccacccgguucgccagcgucuacgccuggaaccgcaagcggaucuccaacugcguggcggacuacagcgugcuguacaacuccgccagcuucuccacguucaagugcuacggcgucagccccaccaagcucaacgaccugugcuucaccaacguguacgccgacuccuucgugauccgcggggacgagguccggcagaucgcccccggccagaccgggaagaucgccgacuacaacuacaagcugccggacgacuucacgggcugcgugaucgcguggaacagcaacaaccucgacuccaaggucgggggcaacuacaacuaccuguaccgccuguuccgcaagagcaaccucaagcccuucgagcgggacaucuccaccgagaucuaccaggccggcagcacccccugcaacgggguggagggcuucaacugcuacuucccccugcaguccuacggguuccagccgaccaacggcgugggguaccagcccuaccggguggucgugcugagcuucgagcuccugcacgcccccgccacggugugcggccccaagaaguccaccaaccuggucaagaacaagugcgugaacuucaacuucaacggccucaccgggaccggcgugcugaccgagagcaacaagaaguuccugccguuccagcaguucgggcgcgacaucgccgacacgaccgacgcgguccgcgacccccagacccuggagauccucgacaucacccccugcagcuucggcgggguguccgugaucacgccgggcaccaacaccagcaaccaggucgccgugcuguaccaggacgugaacugcaccgagguccccguggccauccacgccgaccagcugacgcccaccuggcggguguacuccaccggcagcaacgucuuccagacccgcgccgggugccucaucggcgcggagcacgugaacaacuccuacgagugcgacauccccaucggggccggcaucugcgccagcuaccagacgcagaccaacuccccgcggcgcgcccggagcguggcgucccagagcaucaucgccuacaccaugucccugggcgccgagaacagcgucgccuacuccaacaacagcaucgccauccccaccaacuucacgaucuccgugaccaccgagauccugcccgugagcaugaccaagacgagcgucgacugcaccauguacaucugcggggacuccaccgagugcagcaaccuccugcugcaguacggcuccuucugcacccagcucaaccgcgcgcugacggggaucgccguggagcaggacaagaacacccaggagguguucgcccaggucaagcagaucuacaagacgcccccgaucaaggacuucggcggguucaacuucagccagauccugcccgaccccuccaagcccagcaagcgguccuucaucgaggaccuccuguucaacaaggugacccuggccgacgccggcuucaucaagcaguacggcgacugccucggggacaucgcggcccgcgaccugaucugcgcccagaaguucaacggccugaccgugcucccgccccugcugaccgacgagaugaucgcccaguacaccagcgcccuccuggcggggaccaucacguccggcuggaccuucggggccggcgccgcccugcagauccccuucgcgaugcagauggccuaccgguucaacggcugcggggucacccagaacgugcucuacgagaaccagaagcugaucgccaaccaguucaacagcgccaucggcaagauccaggacucccugagcuccaccgccagcgcgcucgggaagcugcaggacguggucaaccagaacgcccaggcccugaacacgcucgugaagcagcuguccagcaacuucggcgccaucuccagcgugcugaacgacauccucucccgccuggacaaggucgaggccgaggugcagaucgaccggcugaucaccgggcgccuccagagccugcagaccuacgugacccagcagcugauccgggcggccgagauccgcgccagcgccaaccucgccgcgaccaagauguccgagugcguccugggccagagcaagcggguggacuucugcggcaaggggugccaccugauguccuucccccagagcgccccgcacggcguggucuuccuccacgugacguacguccccgcccaggagaagaacuucaccaccgcccccgcgaucugccacgacgggaaggcccacuucccccgcgagggcguguucguguccaacgggacccacugguucgucacgcagcggaacuucuacgagccgcagaucaucaccaccgacaacaccuucgugagcggcaacugcgacguggucaucggcaucgugaacaacacgguguacgacccccugcagcccgagcuggacuccggcgggggcgggagcgacaucgaccccuacaaggaguucggcagcuccuaccagcugcucaacuuccugccccuggacuucuuccccgaccucaacgcccugguggacaccgccaccgcgcuguacgaggaggagcucacggggcgcgagcacugcagcccccaccacaccgccauccggcaggcccuggucugcugggacgagcugaccaagcucaucgccuggauguccagcaacaucaccuccgagcagguccgcacgaucaucgugaaccacgucaacgacaccuggggccugaaggugcggcagagccugugguuccaccucuccugccugaccuucgggcagcacaccgugcaggaguuccuggucagcuucggcguguggauccgcacgcccgccccguaccggccgcccaacgcgccgauccucuccacccugccggagcacaccgugaucugcugaggacuaguuauaagacugacuagcccgaugggccucccaacgggcccuccuccccuccuugcaccgagauuaauaaaaaaaaaaaaaaaaaaaaaaaaaaaaaaaaaaaaaaaaaaaaaaaaaaaaaaaaaaaaaaaaugcaucccccccccccccccccccccccccccccccaaaggcucuuuucagagccaccagaauu

SEQ ID NO: 12940 - RNA, 4123 nt, Artificial Sequence
  SARS-CoV-2/Wuhan/WIV05/2019__EPI_ISL_402128 spike protein mRNA gc (1-1147)(Q965C_S1003C) WhcAg construct
aggagaaagcuuaccauguucguguuccugguccuccugccccuggugagcucccagugcgugaaccucaccacccgcacgcagcugccgcccgccuacaccaacagcuucacccggggcgucuacuaccccgacaagguguuccgcuccagcgugcugcacuccacccaggaccucuuccugcccuucuucagcaacgucacgugguuccacgccauccacguguccgggaccaacggcaccaagcgguucgacaacccggugcugcccuucaacgacggggucuacuucgcgagcaccgagaaguccaacaucauccgcggcuggaucuucgggacgacccucgacagcaagacccagucccugcugaucgugaacaacgccaccaacguggucaucaaggugugcgaguuccaguucugcaacgaccccuuccucggcguguacuaccacaagaacaacaagagcuggauggaguccgaguuccgggucuacagcuccgccaacaacugcacguucgaguacgugagccagcccuuccugauggaccuggagggcaagcaggggaacuucaagaaccuccgcgaguucguguucaagaacaucgacggcuacuucaagaucuacuccaagcacaccccgaucaaccugguccgggaccugccccagggguucagcgcccucgagccccugguggaccugcccaucggcaucaacaucacccgcuuccagacccuccuggcccugcaccgguccuaccucacgccgggggacagcagcuccggcuggaccgcgggcgccgccgccuacuacgugggguaccugcagccccgcaccuuccugcucaaguacaacgagaacggcaccaucacggacgcggucgacugcgcccuggacccccugagcgagaccaagugcacccucaaguccuucaccguggagaaggggaucuaccagacgagcaacuuccgggugcagcccaccgaguccaucguccgcuucccgaacaucaccaaccugugccccuucggcgagguguucaacgccacccgguucgccagcgucuacgccuggaaccgcaagcggaucuccaacugcguggcggacuacagcgugcuguacaacuccgccagcuucuccacguucaagugcuacggcgucagccccaccaagcucaacgaccugugcuucaccaacguguacgccgacuccuucgugauccgcggggacgagguccggcagaucgcccccggccagaccgggaagaucgccgacuacaacuacaagcugccggacgacuucacgggcugcgugaucgcguggaacagcaacaaccucgacuccaaggucgggggcaacuacaacuaccuguaccgccuguuccgcaagagcaaccucaagcccuucgagcgggacaucuccaccgagaucuaccaggccggcagcacccccugcaacgggguggagggcuucaacugcuacuucccccugcaguccuacggguuccagccgaccaacggcgugggguaccagcccuaccggguggucgugcugagcuucgagcuccugcacgcccccgccacggugugcggccccaagaaguccaccaaccuggucaagaacaagugcgugaacuucaacuucaacggccucaccgggaccggcgugcugaccgagagcaacaagaaguuccugccguuccagcaguucgggcgcgacaucgccgacacgaccgacgcgguccgcgacccccagacccuggagauccucgacaucacccccugcagcuucggcgggguguccgugaucacgccgggcaccaacaccagcaaccaggucgccgugcuguaccaggacgugaacugcaccgagguccccguggccauccacgccgaccagcugacgcccaccuggcggguguacuccaccggcagcaacgucuuccagacccgcgccgggugccucaucggcgcggagcacgugaacaacuccuacgagugcgacauccccaucggggccggcaucugcgccagcuaccagacgcagaccaacuccccgcggcgcgcccggagcguggcgucccagagcaucaucgccuacaccaugucccugggcgccgagaacagcgucgccuacuccaacaacagcaucgccauccccaccaacuucacgaucuccgugaccaccgagauccugcccgugagcaugaccaagacgagcgucgacugcaccauguacaucugcggggacuccaccgagugcagcaaccuccugcugcaguacggcuccuucugcacccagcucaaccgcgcgcugacggggaucgccguggagcaggacaagaacacccaggagguguucgcccaggucaagcagaucuacaagacgcccccgaucaaggacuucggcggguucaacuucagccagauccugcccgaccccuccaagcccagcaagcgguccuucaucgaggaccuccuguucaacaaggugacccuggccgacgccggcuucaucaagcaguacggcgacugccucggggacaucgcggcccgcgaccugaucugcgcccagaaguucaacggccugaccgugcucccgccccugcugaccgacgagaugaucgcccaguacaccagcgcccuccuggcggggaccaucacguccggcuggaccuucggggccggcgccgcccugcagauccccuucgcgaugcagauggccuaccgguucaacggcaucggggucacccagaacgugcucuacgagaaccagaagcugaucgccaaccaguucaacagcgccaucggcaagauccaggacucccugagcuccaccgccagcgcgcucgggaagcugcaggacguggucaaccagaacgcccaggcccugaacacgcucgugaagugccuguccagcaacuucggcgccaucuccagcgugcugaacgacauccucucccgccuggacaaggucgaggccgaggugcagaucgaccggcugaucaccgggcgccuccagugccugcagaccuacgugacccagcagcugauccgggcggccgagauccgcgccagcgccaaccucgccgcgaccaagauguccgagugcguccugggccagagcaagcggguggacuucugcggcaagggguaccaccugauguccuucccccagagcgccccgcacggcguggucuuccuccacgugacguacguccccgcccaggagaagaacuucaccaccgcccccgcgaucugccacgacgggaaggcccacuucccccgcgagggcguguucguguccaacgggacccacugguucgucacgcagcggaacuucuacgagccgcagaucaucaccaccgacaacaccuucgugagcggcaacugcgacguggucaucggcaucgugaacaacacgguguacgacccccugcagcccgagcuggacuccggcgggggcgggagcgacaucgaccccuacaaggaguucggcagcuccuaccagcugcucaacuuccugccccuggacuucuuccccgaccucaacgcccugguggacaccgccaccgcgcuguacgaggaggagcucacggggcgcgagcacugcagcccccaccacaccgccauccggcaggcccuggucugcugggacgagcugaccaagcucaucgccuggauguccagcaacaucaccuccgagcagguccgcacgaucaucgugaaccacgucaacgacaccuggggccugaaggugcggcagagccugugguuccaccucuccugccugaccuucgggcagcacaccgugcaggaguuccuggucagcuucggcguguggauccgcacgcccgccccguaccggccgcccaacgcgccgauccucuccacccugccggagcacaccgugaucugcugaggacuaguuauaagacugacuagcccgaugggccucccaacgggcccuccuccccuccuugcaccgagauuaauaaaaaaaaaaaaaaaaaaaaaaaaaaaaaaaaaaaaaaaaaaaaaaaaaaaaaaaaaaaaaaaaugcaucccccccccccccccccccccccccccccccaaaggcucuuuucagagccaccagaauu

SEQ ID NO: 12941 - RNA, 4123 nt, Artificial Sequence
  SARS-CoV-2/Wuhan/WIV05/2019__EPI_ISL_402128 spike protein mRNA gc (1-1147)(F970C_G999C) WhcAg construct
aggagaaagcuuaccauguucguguuccugguccuccugccccuggugagcucccagugcgugaaccucaccacccgcacgcagcugccgcccgccuacaccaacagcuucacccggggcgucuacuaccccgacaagguguuccgcuccagcgugcugcacuccacccaggaccucuuccugcccuucuucagcaacgucacgugguuccacgccauccacguguccgggaccaacggcaccaagcgguucgacaacccggugcugcccuucaacgacggggucuacuucgcgagcaccgagaaguccaacaucauccgcggcuggaucuucgggacgacccucgacagcaagacccagucccugcugaucgugaacaacgccaccaacguggucaucaaggugugcgaguuccaguucugcaacgaccccuuccucggcguguacuaccacaagaacaacaagagcuggauggaguccgaguuccgggucuacagcuccgccaacaacugcacguucgaguacgugagccagcccuuccugauggaccuggagggcaagcaggggaacuucaagaaccuccgcgaguucguguucaagaacaucgacggcuacuucaagaucuacuccaagcacaccccgaucaaccugguccgggaccugccccagggguucagcgcccucgagccccugguggaccugcccaucggcaucaacaucacccgcuuccagacccuccuggcccugcaccgguccuaccucacgccgggggacagcagcuccggcuggaccgcgggcgccgccgccuacuacgugggguaccugcagccccgcaccuuccugcucaaguacaacgagaacggcaccaucacggacgcggucgacugcgcccuggacccccugagcgagaccaagugcacccucaaguccuucaccguggagaaggggaucuaccagacgagcaacuuccgggugcagcccaccgaguccaucguccgcuucccgaacaucaccaaccugugccccuucggcgagguguucaacgccacccgguucgccagcgucuacgccuggaaccgcaagcggaucuccaacugcguggcggacuacagcgugcuguacaacuccgccagcuucuccacguucaagugcuacggcgucagccccaccaagcucaacgaccugugcuucaccaacguguacgccgacuccuucgugauccgcggggacgagguccggcagaucgcccccggccagaccgggaagaucgccgacuacaacuacaagcugccggacgacuucacgggcugcgugaucgcguggaacagcaacaaccucgacuccaaggucgggggcaacuacaacuaccuguaccgccuguuccgcaagagcaaccucaagcccuucgagcgggacaucuccaccgagaucuaccaggccggcagcacccccugcaacgggguggagggcuucaacugcuacuucccccugcaguccuacggguuccagccgaccaacggcgugggguaccagcccuaccggguggucgugcugagcuucgagcuccugcacgcccccgccacggugugcggccccaagaaguccaccaaccuggucaagaacaagugcgugaacuucaacuucaacggccucaccgggaccggcgugcugaccgagagcaacaagaaguuccugccguuccagcaguucgggcgcgacaucgccgacacgaccgacgcgguccgcgacccccagacccuggagauccucgacaucacccccugcagcuucggcgggguguccgugaucacgccgggcaccaacaccagcaaccaggucgccgugcuguaccaggacgugaacugcaccgagguccccguggccauccacgccgaccagcugacgcccaccuggcggguguacuccaccggcagcaacgucuuccagacccgcgccgggugccucaucggcgcggagcacgugaacaacuccuacgagugcgacauccccaucggggccggcaucugcgccagcuaccagacgcagaccaacuccccgcggcgcgcccggagcguggcgucccagagcaucaucgccuacaccaugucccugggcgccgagaacagcgucgccuacuccaacaacagcaucgccauccccaccaacuucacgaucuccgugaccaccgagauccugcccgugagcaugaccaagacgagcgucgacugcaccauguacaucugcggggacuccaccgagugcagcaaccuccugcugcaguacggcuccuucugcacccagcucaaccgcgcgcugacggggaucgccguggagcaggacaagaacacccaggagguguucgcccaggucaagcagaucuacaagacgcccccgaucaaggacuucggcggguucaacuucagccagauccugcccgaccccuccaagcccagcaagcgguccuucaucgaggaccuccuguucaacaaggugacccuggccgacgccggcuucaucaagcaguacggcgacugccucggggacaucgcggcccgcgaccugaucugcgcccagaaguucaacggccugaccgugcucccgccccugcugaccgacgagaugaucgcccaguacaccagcgcccuccuggcggggaccaucacguccggcuggaccuucggggccggcgccgcccugcagauccccuucgcgaugcagauggccuaccgguucaacggcaucggggucacccagaacgugcucuacgagaaccagaagcugaucgccaaccaguucaacagcgccaucggcaagauccaggacucccugagcuccaccgccagcgcgcucgggaagcugcaggacguggucaaccagaacgcccaggcccugaacacgcucgugaagcagcuguccagcaacugcggcgccaucuccagcgugcugaacgacauccucucccgccuggacaaggucgaggccgaggugcagaucgaccggcugaucaccugucgccuccagagccugcagaccuacgugacccagcagcugauccgggcggccgagauccgcgccagcgccaaccucgccgcgaccaagauguccgagugcguccugggccagagcaagcggguggacuucugcggcaagggguaccaccugauguccuucccccagagcgccccgcacggcguggucuuccuccacgugacguacguccccgcccaggagaagaacuucaccaccgcccccgcgaucugccacgacgggaaggcccacuucccccgcgagggcguguucguguccaacgggacccacugguucgucacgcagcggaacuucuacgagccgcagaucaucaccaccgacaacaccuucgugagcggcaacugcgacguggucaucggcaucgugaacaacacgguguacgacccccugcagcccgagcuggacuccggcgggggcgggagcgacaucgaccccuacaaggaguucggcagcuccuaccagcugcucaacuuccugccccuggacuucuuccccgaccucaacgcccugguggacaccgccaccgcgcuguacgaggaggagcucacggggcgcgagcacugcagcccccaccacaccgccauccggcaggcccuggucugcugggacgagcugaccaagcucaucgccuggauguccagcaacaucaccuccgagcagguccgcacgaucaucgugaaccacgucaacgacaccuggggccugaaggugcggcagagccugugguuccaccucuccugccugaccuucgggcagcacaccgugcaggaguuccuggucagcuucggcguguggauccgcacgcccgccccguaccggccgcccaacgcgccgauccucuccacccugccggagcacaccgugaucugcugaggacuaguuauaagacugacuagcccgaugggccucccaacgggcccuccuccccuccuugcaccgagauuaauaaaaaaaaaaaaaaaaaaaaaaaaaaaaaaaaaaaaaaaaaaaaaaaaaaaaaaaaaaaaaaaaugcaucccccccccccccccccccccccccccccccaaaggcucuuuucagagccaccagaauu

SEQ ID NO: 12942 - RNA, 4123 nt, Artificial Sequence
  SARS-CoV-2/Wuhan/WIV05/2019__EPI_ISL_402128 spike protein mRNA gc (1-1147)(A972C_R995C) WhcAg construct
aggagaaagcuuaccauguucguguuccugguccuccugccccuggugagcucccagugcgugaaccucaccacccgcacgcagcugccgcccgccuacaccaacagcuucacccggggcgucuacuaccccgacaagguguuccgcuccagcgugcugcacuccacccaggaccucuuccugcccuucuucagcaacgucacgugguuccacgccauccacguguccgggaccaacggcaccaagcgguucgacaacccggugcugcccuucaacgacggggucuacuucgcgagcaccgagaaguccaacaucauccgcggcuggaucuucgggacgacccucgacagcaagacccagucccugcugaucgugaacaacgccaccaacguggucaucaaggugugcgaguuccaguucugcaacgaccccuuccucggcguguacuaccacaagaacaacaagagcuggauggaguccgaguuccgggucuacagcuccgccaacaacugcacguucgaguacgugagccagcccuuccugauggaccuggagggcaagcaggggaacuucaagaaccuccgcgaguucguguucaagaacaucgacggcuacuucaagaucuacuccaagcacaccccgaucaaccugguccgggaccugccccagggguucagcgcccucgagccccugguggaccugcccaucggcaucaacaucacccgcuuccagacccuccuggcccugcaccgguccuaccucacgccgggggacagcagcuccggcuggaccgcgggcgccgccgccuacuacgugggguaccugcagccccgcaccuuccugcucaaguacaacgagaacggcaccaucacggacgcggucgacugcgcccuggacccccugagcgagaccaagugcacccucaaguccuucaccguggagaaggggaucuaccagacgagcaacuuccgggugcagcccaccgaguccaucguccgcuucccgaacaucaccaaccugugccccuucggcgagguguucaacgccacccgguucgccagcgucuacgccuggaaccgcaagcggaucuccaacugcguggcggacuacagcgugcuguacaacuccgccagcuucuccacguucaagugcuacggcgucagccccaccaagcucaacgaccugugcuucaccaacguguacgccgacuccuucgugauccgcggggacgagguccggcagaucgcccccggccagaccgggaagaucgccgacuacaacuacaagcugccggacgacuucacgggcugcgugaucgcguggaacagcaacaaccucgacuccaaggucgggggcaacuacaacuaccuguaccgccuguuccgcaagagcaaccucaagcccuucgagcgggacaucuccaccgagaucuaccaggccggcagcacccccugcaacgggguggagggcuucaacugcuacuucccccugcaguccuacggguuccagccgaccaacggcgugggguaccagcccuaccggguggucgugcugagcuucgagcuccugcacgcccccgccacggugugcggccccaagaaguccaccaaccuggucaagaacaagugcgugaacuucaacuucaacggccucaccgggaccggcgugcugaccgagagcaacaagaaguuccugccguuccagcaguucgggcgcgacaucgccgacacgaccgacgcgguccgcgacccccagacccuggagauccucgacaucacccccugcagcuucggcgggguguccgugaucacgccgggcaccaacaccagcaaccaggucgccgugcuguaccaggacgugaacugcaccgagguccccguggccauccacgccgaccagcugacgcccaccuggcggguguacuccaccggcagcaacgucuuccagacccgcgccgggugccucaucggcgcggagcacgugaacaacuccuacgagugcgacauccccaucggggccggcaucugcgccagcuaccagacgcagaccaacuccccgcggcgcgcccggagcguggcgucccagagcaucaucgccuacaccaugucccugggcgccgagaacagcgucgccuacuccaacaacagcaucgccauccccaccaacuucacgaucuccgugaccaccgagauccugcccgugagcaugaccaagacgagcgucgacugcaccauguacaucugcggggacuccaccgagugcagcaaccuccugcugcaguacggcuccuucugcacccagcucaaccgcgcgcugacggggaucgccguggagcaggacaagaacacccaggagguguucgcccaggucaagcagaucuacaagacgcccccgaucaaggacuucggcggguucaacuucagccagauccugcccgaccccuccaagcccagcaagcgguccuucaucgaggaccuccuguucaacaaggugacccuggccgacgccggcuucaucaagcaguacggcgacugccucggggacaucgcggcccgcgaccugaucugcgcccagaaguucaacggccugaccgugcucccgccccugcugaccgacgagaugaucgcccaguacaccagcgcccuccuggcggggaccaucacguccggcuggaccuucggggccggcgccgcccugcagauccccuucgcgaugcagauggccuaccgguucaacggcaucggggucacccagaacgugcucuacgagaaccagaagcugaucgccaaccaguucaacagcgccaucggcaagauccaggacucccugagcuccaccgccagcgcgcucgggaagcugcaggacguggucaaccagaacgcccaggcccugaacacgcucgugaagcagcuguccagcaacuucggcugcaucuccagcgugcugaacgacauccucucccgccuggacaaggucgaggccgaggugcagaucgacugccugaucaccgggcgccuccagagccugcagaccuacgugacccagcagcugauccgggcggccgagauccgcgccagcgccaaccucgccgcgaccaagauguccgagugcguccugggccagagcaagcggguggacuucugcggcaagggguaccaccugauguccuucccccagagcgccccgcacggcguggucuuccuccacgugacguacguccccgcccaggagaagaacuucaccaccgcccccgcgaucugccacgacgggaaggcccacuucccccgcgagggcguguucguguccaacgggacccacugguucgucacgcagcggaacuucuacgagccgcagaucaucaccaccgacaacaccuucgugagcggcaacugcgacguggucaucggcaucgugaacaacacgguguacgacccccugcagcccgagcuggacuccggcgggggcgggagcgacaucgaccccuacaaggaguucggcagcuccuaccagcugcucaacuuccugccccuggacuucuuccccgaccucaacgcccugguggacaccgccaccgcgcuguacgaggaggagcucacggggcgcgagcacugcagcccccaccacaccgccauccggcaggcccuggucugcugggacgagcugaccaagcucaucgccuggauguccagcaacaucaccuccgagcagguccgcacgaucaucgugaaccacgucaacgacaccuggggccugaaggugcggcagagccugugguuccaccucuccugccugaccuucgggcagcacaccgugcaggaguuccuggucagcuucggcguguggauccgcacgcccgccccguaccggccgcccaacgcgccgauccucuccacccugccggagcacaccgugaucugcugaggacuaguuauaagacugacuagcccgaugggccucccaacgggcccuccuccccuccuugcaccgagauuaauaaaaaaaaaaaaaaaaaaaaaaaaaaaaaaaaaaaaaaaaaaaaaaaaaaaaaaaaaaaaaaaaugcaucccccccccccccccccccccccccccccccaaaggcucuuuucagagccaccagaauu

SEQ ID NO: 12943 - RNA, 4123 nt, Artificial Sequence
  SARS-CoV-2/Wuhan/WIV05/2019__EPI_ISL_402128 spike protein mRNA gc (1-1147)(A890C_V1040C) WhcAg construct
aggagaaagcuuaccauguucguguuccugguccuccugccccuggugagcucccagugcgugaaccucaccacccgcacgcagcugccgcccgccuacaccaacagcuucacccggggcgucuacuaccccgacaagguguuccgcuccagcgugcugcacuccacccaggaccucuuccugcccuucuucagcaacgucacgugguuccacgccauccacguguccgggaccaacggcaccaagcgguucgacaacccggugcugcccuucaacgacggggucuacuucgcgagcaccgagaaguccaacaucauccgcggcuggaucuucgggacgacccucgacagcaagacccagucccugcugaucgugaacaacgccaccaacguggucaucaaggugugcgaguuccaguucugcaacgaccccuuccucggcguguacuaccacaagaacaacaagagcuggauggaguccgaguuccgggucuacagcuccgccaacaacugcacguucgaguacgugagccagcccuuccugauggaccuggagggcaagcaggggaacuucaagaaccuccgcgaguucguguucaagaacaucgacggcuacuucaagaucuacuccaagcacaccccgaucaaccugguccgggaccugccccagggguucagcgcccucgagccccugguggaccugcccaucggcaucaacaucacccgcuuccagacccuccuggcccugcaccgguccuaccucacgccgggggacagcagcuccggcuggaccgcgggcgccgccgccuacuacgugggguaccugcagccccgcaccuuccugcucaaguacaacgagaacggcaccaucacggacgcggucgacugcgcccuggacccccugagcgagaccaagugcacccucaaguccuucaccguggagaaggggaucuaccagacgagcaacuuccgggugcagcccaccgaguccaucguccgcuucccgaacaucaccaaccugugccccuucggcgagguguucaacgccacccgguucgccagcgucuacgccuggaaccgcaagcggaucuccaacugcguggcggacuacagcgugcuguacaacuccgccagcuucuccacguucaagugcuacggcgucagccccaccaagcucaacgaccugugcuucaccaacguguacgccgacuccuucgugauccgcggggacgagguccggcagaucgcccccggccagaccgggaagaucgccgacuacaacuacaagcugccggacgacuucacgggcugcgugaucgcguggaacagcaacaaccucgacuccaaggucgggggcaacuacaacuaccuguaccgccuguuccgcaagagcaaccucaagcccuucgagcgggacaucuccaccgagaucuaccaggccggcagcacccccugcaacgggguggagggcuucaacugcuacuucccccugcaguccuacggguuccagccgaccaacggcgugggguaccagcccuaccggguggucgugcugagcuucgagcuccugcacgcccccgccacggugugcggccccaagaaguccaccaaccuggucaagaacaagugcgugaacuucaacuucaacggccucaccgggaccggcgugcugaccgagagcaacaagaaguuccugccguuccagcaguucgggcgcgacaucgccgacacgaccgacgcgguccgcgacccccagacccuggagauccucgacaucacccccugcagcuucggcgggguguccgugaucacgccgggcaccaacaccagcaaccaggucgccgugcuguaccaggacgugaacugcaccgagguccccguggccauccacgccgaccagcugacgcccaccuggcggguguacuccaccggcagcaacgucuuccagacccgcgccgggugccucaucggcgcggagcacgugaacaacuccuacgagugcgacauccccaucggggccggcaucugcgccagcuaccagacgcagaccaacuccccgcggcgcgcccggagcguggcgucccagagcaucaucgccuacaccaugucccugggcgccgagaacagcgucgccuacuccaacaacagcaucgccauccccaccaacuucacgaucuccgugaccaccgagauccugcccgugagcaugaccaagacgagcgucgacugcaccauguacaucugcggggacuccaccgagugcagcaaccuccugcugcaguacggcuccuucugcacccagcucaaccgcgcgcugacggggaucgccguggagcaggacaagaacacccaggagguguucgcccaggucaagcagaucuacaagacgcccccgaucaaggacuucggcggguucaacuucagccagauccugcccgaccccuccaagcccagcaagcgguccuucaucgaggaccuccuguucaacaaggugacccuggccgacgccggcuucaucaagcaguacggcgacugccucggggacaucgcggcccgcgaccugaucugcgcccagaaguucaacggccugaccgugcucccgccccugcugaccgacgagaugaucgcccaguacaccagcgcccuccuggcggggaccaucacguccggcuggaccuucgggugcggcgccgcccugcagauccccuucgcgaugcagauggccuaccgguucaacggcaucggggucacccagaacgugcucuacgagaaccagaagcugaucgccaaccaguucaacagcgccaucggcaagauccaggacucccugagcuccaccgccagcgcgcucgggaagcugcaggacguggucaaccagaacgcccaggcccugaacacgcucgugaagcagcuguccagcaacuucggcgccaucuccagcgugcugaacgacauccucucccgccuggacaaggucgaggccgaggugcagaucgaccggcugaucaccgggcgccuccagagccugcagaccuacgugacccagcagcugauccgggcggccgagauccgcgccagcgccaaccucgccgcgaccaagauguccgagugcguccugggccagagcaagcggugcgacuucugcggcaagggguaccaccugauguccuucccccagagcgccccgcacggcguggucuuccuccacgugacguacguccccgcccaggagaagaacuucaccaccgcccccgcgaucugccacgacgggaaggcccacuucccccgcgagggcguguucguguccaacgggacccacugguucgucacgcagcggaacuucuacgagccgcagaucaucaccaccgacaacaccuucgugagcggcaacugcgacguggucaucggcaucgugaacaacacgguguacgacccccugcagcccgagcuggacuccggcgggggcgggagcgacaucgaccccuacaaggaguucggcagcuccuaccagcugcucaacuuccugccccuggacuucuuccccgaccucaacgcccugguggacaccgccaccgcgcuguacgaggaggagcucacggggcgcgagcacugcagcccccaccacaccgccauccggcaggcccuggucugcugggacgagcugaccaagcucaucgccuggauguccagcaacaucaccuccgagcagguccgcacgaucaucgugaaccacgucaacgacaccuggggccugaaggugcggcagagccugugguuccaccucuccugccugaccuucgggcagcacaccgugcaggaguuccuggucagcuucggcguguggauccgcacgcccgccccguaccggccgcccaacgcgccgauccucuccacccugccggagcacaccgugaucugcugaggacuaguuauaagacugacuagcccgaugggccucccaacgggcccuccuccccuccuugcaccgagauuaauaaaaaaaaaaaaaaaaaaaaaaaaaaaaaaaaaaaaaaaaaaaaaaaaaaaaaaaaaaaaaaaaugcaucccccccccccccccccccccccccccccccaaaggcucuuuucagagccaccagaauu

SEQ ID NO: 12944 - RNA, 4123 nt, Artificial Sequence
  SARS-CoV-2/Wuhan/WIV05/2019__EPI_ISL_402128 spike protein mRNA gc (1-1147)(T874C_S1055C) WhcAg construct
aggagaaagcuuaccauguucguguuccugguccuccugccccuggugagcucccagugcgugaaccucaccacccgcacgcagcugccgcccgccuacaccaacagcuucacccggggcgucuacuaccccgacaagguguuccgcuccagcgugcugcacuccacccaggaccucuuccugcccuucuucagcaacgucacgugguuccacgccauccacguguccgggaccaacggcaccaagcgguucgacaacccggugcugcccuucaacgacggggucuacuucgcgagcaccgagaaguccaacaucauccgcggcuggaucuucgggacgacccucgacagcaagacccagucccugcugaucgugaacaacgccaccaacguggucaucaaggugugcgaguuccaguucugcaacgaccccuuccucggcguguacuaccacaagaacaacaagagcuggauggaguccgaguuccgggucuacagcuccgccaacaacugcacguucgaguacgugagccagcccuuccugauggaccuggagggcaagcaggggaacuucaagaaccuccgcgaguucguguucaagaacaucgacggcuacuucaagaucuacuccaagcacaccccgaucaaccugguccgggaccugccccagggguucagcgcccucgagccccugguggaccugcccaucggcaucaacaucacccgcuuccagacccuccuggcccugcaccgguccuaccucacgccgggggacagcagcuccggcuggaccgcgggcgccgccgccuacuacgugggguaccugcagccccgcaccuuccugcucaaguacaacgagaacggcaccaucacggacgcggucgacugcgcccuggacccccugagcgagaccaagugcacccucaaguccuucaccguggagaaggggaucuaccagacgagcaacuuccgggugcagcccaccgaguccaucguccgcuucccgaacaucaccaaccugugccccuucggcgagguguucaacgccacccgguucgccagcgucuacgccuggaaccgcaagcggaucuccaacugcguggcggacuacagcgugcuguacaacuccgccagcuucuccacguucaagugcuacggcgucagccccaccaagcucaacgaccugugcuucaccaacguguacgccgacuccuucgugauccgcggggacgagguccggcagaucgcccccggccagaccgggaagaucgccgacuacaacuacaagcugccggacgacuucacgggcugcgugaucgcguggaacagcaacaaccucgacuccaaggucgggggcaacuacaacuaccuguaccgccuguuccgcaagagcaaccucaagcccuucgagcgggacaucuccaccgagaucuaccaggccggcagcacccccugcaacgggguggagggcuucaacugcuacuucccccugcaguccuacggguuccagccgaccaacggcgugggguaccagcccuaccggguggucgugcugagcuucgagcuccugcacgcccccgccacggugugcggccccaagaaguccaccaaccuggucaagaacaagugcgugaacuucaacuucaacggccucaccgggaccggcgugcugaccgagagcaacaagaaguuccugccguuccagcaguucgggcgcgacaucgccgacacgaccgacgcgguccgcgacccccagacccuggagauccucgacaucacccccugcagcuucggcgggguguccgugaucacgccgggcaccaacaccagcaaccaggucgccgugcuguaccaggacgugaacugcaccgagguccccguggccauccacgccgaccagcugacgcccaccuggcggguguacuccaccggcagcaacgucuuccagacccgcgccgggugccucaucggcgcggagcacgugaacaacuccuacgagugcgacauccccaucggggccggcaucugcgccagcuaccagacgcagaccaacuccccgcggcgcgcccggagcguggcgucccagagcaucaucgccuacaccaugucccugggcgccgagaacagcgucgccuacuccaacaacagcaucgccauccccaccaacuucacgaucuccgugaccaccgagauccugcccgugagcaugaccaagacgagcgucgacugcaccauguacaucugcggggacuccaccgagugcagcaaccuccugcugcaguacggcuccuucugcacccagcucaaccgcgcgcugacggggaucgccguggagcaggacaagaacacccaggagguguucgcccaggucaagcagaucuacaagacgcccccgaucaaggacuucggcggguucaacuucagccagauccugcccgaccccuccaagcccagcaagcgguccuucaucgaggaccuccuguucaacaaggugacccuggccgacgccggcuucaucaagcaguacggcgacugccucggggacaucgcggcccgcgaccugaucugcgcccagaaguucaacggccugaccgugcucccgccccugcugaccgacgagaugaucgcccaguacugcagcgcccuccuggcggggaccaucacguccggcuggaccuucggggccggcgccgcccugcagauccccuucgcgaugcagauggccuaccgguucaacggcaucggggucacccagaacgugcucuacgagaaccagaagcugaucgccaaccaguucaacagcgccaucggcaagauccaggacucccugagcuccaccgccagcgcgcucgggaagcugcaggacguggucaaccagaacgcccaggcccugaacacgcucgugaagcagcuguccagcaacuucggcgccaucuccagcgugcugaacgacauccucucccgccuggacaaggucgaggccgaggugcagaucgaccggcugaucaccgggcgccuccagagccugcagaccuacgugacccagcagcugauccgggcggccgagauccgcgccagcgccaaccucgccgcgaccaagauguccgagugcguccugggccagagcaagcggguggacuucugcggcaagggguaccaccugauguccuucccccagugcgccccgcacggcguggucuuccuccacgugacguacguccccgcccaggagaagaacuucaccaccgcccccgcgaucugccacgacgggaaggcccacuucccccgcgagggcguguucguguccaacgggacccacugguucgucacgcagcggaacuucuacgagccgcagaucaucaccaccgacaacaccuucgugagcggcaacugcgacguggucaucggcaucgugaacaacacgguguacgacccccugcagcccgagcuggacuccggcgggggcgggagcgacaucgaccccuacaaggaguucggcagcuccuaccagcugcucaacuuccugccccuggacuucuuccccgaccucaacgcccugguggacaccgccaccgcgcuguacgaggaggagcucacggggcgcgagcacugcagcccccaccacaccgccauccggcaggcccuggucugcugggacgagcugaccaagcucaucgccuggauguccagcaacaucaccuccgagcagguccgcacgaucaucgugaaccacgucaacgacaccuggggccugaaggugcggcagagccugugguuccaccucuccugccugaccuucgggcagcacaccgugcaggaguuccuggucagcuucggcguguggauccgcacgcccgccccguaccggccgcccaacgcgccgauccucuccacccugccggagcacaccgugaucugcugaggacuaguuauaagacugacuagcccgaugggccucccaacgggcccuccuccccuccuugcaccgagauuaauaaaaaaaaaaaaaaaaaaaaaaaaaaaaaaaaaaaaaaaaaaaaaaaaaaaaaaaaaaaaaaaaugcaucccccccccccccccccccccccccccccccaaaggcucuuuucagagccaccagaauu

SEQ ID NO: 12945 - RNA, 4039 nt, Artificial Sequence
  SARS-CoV-2/Wuhan/WIV05/2019__EPI_ISL_402128 spike protein mRNA human (1-1273)
aggagaaagcuuaccauguucguguuucugguccuccuuccccugguuagcucccagugcgugaacuugaccacaagaacucaauuaccuccagccuacacuaauucuuucaccaggggcguauauuacccggacaagguguuucggucaaguguccugcacagcacacaggaucuauuccuccccuuuuucuccaacgugacuugguuucaugcuauccacguuucugggaccaauggaacaaaacgcuucgacaacccugugcugccauuuaaugauggugucuauuucgcaucgaccgagaagucaaacauuauacgaggcuggaucuuugggacuacacuugacagcaaaacccagagucuguugauugugaauaacgccacgaauguaguuaucaaggugugugaguuccaguuuugcaacgaucccuuccucggagucuacuaucauaaaaauaacaaguccuggauggagucugaguuccguguguacagcuccgcgaauaacuguacuuuugaauaugugucacaaccuuuccugauggaccuggaaggcaagcaggguaauuuuaaaaaccucagagaguucgucuuuaagaacauugauggguacuucaaaaucuacaguaagcacaccccaauaaauuuaguuagggaccugccccagggauuuagcgcucuugagccuuugguggaucugccaaucggcauuaacaucacacgguuccagacucuacucgcccugcaucgcucuuaucuuaccccgggcgacuccucaagcggguggacagcaggagccgcugcauacuauguagguuaccugcaacccagaaccuuuuugcucaaauauaaugaaaacggcacgauuacugaugccguggacugcgcucuggauccuuuaagugagacaaaguguacccugaagucuuucacugucgaaaaagggaucuaccagacauccaauuuuagggugcagccaaccgagagcauaguucgguuccccaacauuacgaaucucugcccuuuuggagagguguucaacgccacccgcuucgcgucggucuaugcauggaaucgaaagagaaucucuaacuguguggccgacuacuccguacuuuacaauucagcuaguuuuagcacauucaaaugcuauggcguuuccccaacuaagcugaacgacuuguguuuuaccaauguguacgccgauucuuucgucauuaggggugacgaagugcggcagaucgcacccgggcaaacaggaaaaaucgcugauuauaacuacaagcuaccggacgauuuuacuggcugcgucauugccuggaauagcaacaaccuggacucaaaagugggcgggaauuauaacuaccucuaucgucuguuccgcaagaguaaucuuaagccuuuugagagagauauauccaccgaaaucuaccaggcgggaagcacacccuguaacgguguugagggcuucaauugcuacuuuccacugcagucuuauggguuccaaccuaccaacggagugggcuaccagcccuauaggguagucguguugucauuugaacuccugcacgccccagcaacuguuugcggucccaaaaagaguacgaauuuagugaaaaacaagugugucaauuucaacuuuaaugggcugacaggcaccggagugcuaacugagagcaacaaaaaguuccucccuuuccagcaguuuggccgggacauugcugauaccacagacgccguacgagauccacaaacccuggagauccuugacauaacuccgugcuccuucgggggagugucuguuauuacacccgguacgaauaccucgaaccaggucgcuguguuguaccaggacgugaauuguacugaagucccuguugccauccacgcagaucagcugacaccaaccuggcgcguguauagcacaggcuccaacguguuucaaacuagagccgggugccucaucggagcugagcauguaaacaauucauacgaaugugacauucccaucggcgcggguauuugcgcaaguuaucagacccagacgaacucuccuaggcgggcccgcagcgucgcuucccagucaauaaucgccuacaccaugagccugggggcagaaaauucuguggccuacuccaacaauaguauugcuaucccaacaaacuucacuaucagcguuaccacagaaauucuucccgugucuaugacuaagaccuccgucgauuguacgauguauauaugcggcgacucaacagaguguaguaaucuguugcuccaauacggcagcuuuugcacccagcugaacagagccuuaacuggaaucgcaguggagcaggauaaaaauacacaggaaguuuucgcgcaagugaagcagauuuauaaaaccccgccuaucaaggacuuugggggauucaacuuuucgcagauucugccagaucccuccaaaccuucuaagaggagcuucaucgaggaccuacucuuuaauaagguaacucuggcugaugccgguuucauaaaacaauacggcgacugucuuggggauaucgcagcccgugacuugauuugcgcucagaaguucaacggacugaccguccugcccccacucuuaacagaugaaaugaucgcccaguauacgucagcacugcuugcuggcaccauuacgagugguuggacauuuggggccggcgcggccuugcagaucccuuucgcuaugcaaauggcauaccgguuuaauggaauaggcgugacccagaacgugcucuaugagaaucagaaacugauugccaaccaguucaacuccgcuaucgggaagauucaagacucucuaagcuccacagccucagcacugggaaaacuccaggacgucguuaaucagaacgcgcaggcccugaauacucuugugaagcaauugagcaguaacuuuggcgcuaucucuuccguacugaaugauauauuaagccgacucgacaagguggaagccgagguccagaucgauagacugauuaccgguaggcuucagucgcugcaaacguacgugacacagcaguugauccgcgcagcugagauucgggccucagcaaaccucgccgcuaccaaaaugucugaaugcguucuggggcagaguaagagaguggacuucuguggaaaaggcuaccaccuaauguccuuuccccaaagcgcgccacauggugucguguuccugcacguuacuuaugugccggcccaggagaagaauuuuaccacagcuccugcaaucugccacgauggcaaagcccauuuccccagggaaggggucuuuguaucuaacggaacucacugguucgugacccagcgcaauuuuuacgagccacagauaauuacaacggacaacaccuucguuagcggcaauugugauguggucaucgggaucgugaacaauacuguauaugacccccuccaaccugagcuggauuccuucaaggaggaacuugacaaauacuuuaagaaccauacaucaccagauguggacuugggagauauuaguggcaucaaugccagcgucguuaacauucagaaggaaauagaccgacugaaugagguggcuaaaaacuuaaacgaaucucucaucgaccugcaggagcuugguaaguaugagcaguacauuaaauggcccugguauaucuggcugggguucauugcaggacuaaucgccauagugauggucaccaucaugcucugcuguaugacuuccugcuguucaugccugaagggcuguugcaguugugguagcugcugcaaauuugaugaagacgauuccgagccuguguugaagggcguuaagcugcacuacacaugaggacuaguuauaagacugacuagcccgaugggccucccaacgggcccuccuccccuccuugcaccgagauuaauaaaaaaaaaaaaaaaaaaaaaaaaaaaaaaaaaaaaaaaaaaaaaaaaaaaaaaaaaaaaaaaaugcaucccccccccccccccccccccccccccccccaaaggcucuuuucagagccaccagaauu

SEQ ID NO: 12946 - RNA, 4027 nt, Artificial Sequence
  SARS-CoV-2/bat/Yunnan/RaTG13/2013__EPI_ISL_402131 spike protein mRNA human (1-1269)
aggagaaagcuuaccauguucguguuucugguccuccuuccccugguuagcucccagugcgugaacuugaccacaagaacucaauuaccuccagccuacaccaauucuucaacgaggggcguauauuacccggacaagguguuccggaguagcguccugcaccuaacacaggaucucuuucugcccuucuuuuccaacgugacuugguuccaugcuauccacguuucugggaccaauggaauuaaacgcuuugacaacccugugcuuccauucaaugauggugucuauuuugcaucgacagagaagucaaacauaauccgaggcuggauuuucgggaccacucuggacagcaaaacacagaguuugcucaucgugaauaacgccaccaauguaguuauuaaggugugugaauuucaguucugcaacgaucccuuucugggagucuacuaucauaaaaauaacaaguccuggauggagucugaguuccguguguacagcuccgcgaauaacuguacguucgaauaugugucacaaccuuuucugauggaccucgaaggcaagcaggguaauuucaaaaacuuaagagaguuugucuucaagaacaucgauggguacuuuaaaauauacaguaagcacacuccaaucaaucugguuagggaccuucccccuggauucagcgcuuuggagccacugguggaucuaccgauuggcaucaacauuacccgguuucagacacuccuggcccuucaucgcucuuaucugacucccggcgacuccucaagcggguggaccgcaggagccgcugcauacuauguagguuacuugcagccuagaacauuccuccugaaauauaaugaaaacggcaccaucacggaugccguggacugcgcuuuagauccacugagugagacuaaguguacacucaagucuuuuaccgucgaaaaagggauauaccaaacuuccaauuucagggugcagcccacagacagcauuguucgguuuccuaacaucaccaaucuuugcccauucggagagguguuuaacgccacgaccuucgcgucggucuaugcauggaaucgcaagcgaauuucuaacuguguggccgacuacuccguacuguacaauucaacaaguuucagcacuuuuaaaugcuauggcguuucccccaccaaguugaacgaucuauguuucacaaauguguacgcugacucuuuugucaucacuggugaugaggugagacagaucgccccggggcagaccggaaaaauugcagacuauaacuacaagcugccugaugacuucacaggcugcgucauagcuuggaauagcaaacacaucgaugccaaggaaggcgggaacuuuaacuaucucuacaggcuguuccggaaggcgaaucuuaaacccuuugagcgugacauuucaaccgaaaucuaucaagccggaaguaagccauguaacggucagacuggccugaauugcuacuacccuuuguaucgcuacggguucuaucccacggauggagugggccaccagccauacagaguugugguacucuccuuugagcuguuaaacgcacccgcuacagucugcgguccuaaaaagagcaccaaucuggugaaaaacaaguguguuaauuucaacuuuaaugggcuaacuggcaccggagugcucacagaaucuaacaagaaauuccugccauuucaacaguucggcagggacauagccgauaccacugacgcuguccgggacccgcagacacuugagauuuuggauaucacgcccugcucauucgggggagugaguguaaucaccccugguacuaaugccagcaaccagguggcaguucuguaucaagacgucaauuguacagaggugccaguggccauucaugcugaucagcucacccccacauggcgagucuacuccacuggcucuaacguuuuucagacccgcgcggggugccugaucggagcagaacacgugaauaacucguaugagugugacauuccuauaggcgccgguaucugcgcuagcuaccagacgcaaaccaacuccagaucaguggccagucagucuauuaucgcauacacaaugagccuuggggccgaaaauuccguagcuuauucaaacaauagcaucgccauuccaacuaacuucaccauaucugucacaacugagauccugcccguguccaugaccaagacgaguguugauuguacaauguacauuugcggcgacagcaccgaauguucuaauuugcuccugcaguauggauccuuuugcacucaguuaaacagggcacugacaggcaucgcgguggagcaagauaaaaauacccaggaggucuucgcucaggugaagcagauuuacaaaacuccgccuaucaaggacuuugggggauucaacuuuucacaaauacuaccagaucccaguaagccuagcaaacggucguucaucgaagaccuccuguuuaauaagguuacccuugccgaugcagguuucauuaaacaguauggcgacuguuugggggauaucgccgcucgcgaccugauuugcgcccagaaguuuaacggacucacagugcugcccccauuacugacggacgagaugaucgcacaauacaccuccgcucuuuuggccggcacuauaacaucugguuggaccuucggggcgggcgccgcucuccagauuccuuucgcaaugcagauggccuauagauuuaauggaaucggcguaacacagaacguccuguacgaaaaucaaaaacuaauugcuaaccaguucaauagcgccaucgggaagauacaggauucacugaguuccacugcaucugcgcucggaaagcugcaggacguggugaaccaaaacgcccaggcucuuaauaccuuggucaaacagcugagcuccaacuuuggcgccaucucaagcguuuuaaaugauauucucaguaggcuggacaagguggaggcagaaguacagaucgaucgucuuauuacgggucggcugcaaucuuugcagacauacgugacccagcaacucauccgagcugccgagauaagagcauccgccaaccuggcugcgacuaaaaugagcgagugcguccuagggcagucgaagaggguggacuucuguggaaaaggcuaucaucugaugucauuuccccagucugccccacacgguguuguguuccuccacgucaccuacgugccggcacaggaaaagaauuuuacaacugcuccugccauuugccaugauggcaaagcccacuucccccgcgaggggguuuuugugaguaacggaacccauugguucgucacacaacggaauuuuuaugaaccacagaucaucacgaccgacaacacuuucguauccggcagcugugaugugguuauugggaucgugaauaacacagucuacgacccccugcagccugagcuugauucuuuuaaggaggaauuggacaaguauuucaaaaaucacaccagcccagauguggaccugggagacauuuccggcauaaacgcuucaguagugaauauccagaaggagauugauagauuaaacgaagucgccaaaaaucucaacgagagucugaucgaccuucaagaacuggguaaguacgagcaguauauuaaauggcccugguacaucuggcuaggguucauagcaggacucaucgcgauuaucaugguuacuauuaugcugugcuguaugacaagcugcuguucuugcuugaagggcuguugcuccugugguucaugcugcaaguuugaugaggacgauagugaaccugugcugaaaggcgugaaguuacauuacaccugaggacuaguuauaagacugacuagcccgaugggccucccaacgggcccuccuccccuccuugcaccgagauuaauaaaaaaaaaaaaaaaaaaaaaaaaaaaaaaaaaaaaaaaaaaaaaaaaaaaaaaaaaaaaaaaaugcaucccccccccccccccccccccccccccccccaaaggcucuuuucagagccaccagaauu

SEQ ID NO: 12947 - RNA, 4039 nt, Artificial Sequence
  SARS-CoV-2/Wuhan/HBCDC-HB-01/2019__EPI_ISL_402132 spike protein mRNA human (1-1273)
aggagaaagcuuaccauguucguguuucugguccuccuuccccugguuagcucccagugcgugaacuugaccacaagaacucaauuaccuccagccuacacuaauucuaucaccaggggcguauauuacccggacaagguguuccggucaaguguccugcacagcacacaggaucuauuucuccccuucuuuuccaacgugacuugguuccaugcuauucacguuucugggaccaauggaacaaaacgcuuugacaacccugugcugccauucaaugauggugucuauuuugcaucgaccgagaagucaaacauaauccgaggcuggauuuucgggacuacacuugacagcaaaacccagagucuguugaucgugaauaacgccacgaauguaguuauuaaggugugugaauuucaguucugcaacgaucccuuucucggagucuacuaucauaaaaauaacaaguccuggauggagucugaguuccguguguacagcuccgcgaauaacuguacuuucgaguaugugucacaaccuuuucugauggaccuggaaggcaagcaggguaauuucaaaaaccucagagaguuugucuucaagaacaucgauggguacuuuaaaauauacaguaagcacaccccaaucaauuuaguuagggaccugccccagggauucagcgcucuugagccuuugguggaucugccaauuggcaucaacauuacacgguuucagacucuacucgcccugcaucgcucuuaucuuaccccgggcgacuccucaagcggguggacagcaggagccgcugcauacuauguagguuaccugcaacccagaaccuucuugcucaaauauaaugaaaacggcacgaucacugaugccguggacugcgcucuggauccuuuaagugagacaaaguguacccugaagucuuuuacugucgaaaaagggauauaccagacauccaauuucagggugcagccaaccgagagcauuguucgguuucccaacaucacgaaucucugcccuuucggagagguguuuaacgccacccgcuucgcgucggucuaugcauggaaucgaaagagaauuucuaacuguguggccgacuacuccguacuuuacaauucagcuaguuucagcacauuuaaaugcuauggcguuuccccaacuaagcugaacgacuuguguuucaccaauguguacgccgauucuuuugucaucaggggugacgaagugcggcagaucgcacccgggcaaacaggaaaaauugcugauuauaacuacaagcuaccggacgauuucacuggcugcgucauagccuggaauagcaacaaccuggacucaaaagugggcgggaauuauaacuaccucuaucgucuguuucgcaagaguaaucuuaagccuuucgagagagauaucuccaccgaaauuuaccaggcgggaagcacacccuguaacgguguugagggcuuuaauugcuacuucccacugcagucuuauggguuucaaccuaccaacggagugggcuaccagcccuauaggguagucguguugucauucgaacuccugcacgccccagcaacuguuugcggucccaaaaagaguacgaauuuagugaaaaacaagugugucaauuuuaacuucaaugggcugacaggcaccggagugcuaacugagagcaacaaaaaguuucucccuuuccagcaguucggccgggacaucgcugauaccacagacgccguacgagauccacaaacccuggagauacuugacauuacuccgugcuccuuugggggagugucuguuaucacacccgguacgaauaccucgaaccaggucgcuguguuguaccaggacgugaauuguacugaagucccuguugccauccacgcagaucagcugacaccaaccuggcgcguguauagcacaggcuccaacguguuccaaacuagagccgggugccucauuggagcugagcauguaaacaauucauacgaaugugacauccccauuggcgcggguauaugcgcaaguuaucagacccagacgaacucuccuaggcgggcccgcagcgucgcuucccagucaaucauugccuacaccaugagccugggggcagaaaauucuguggccuacuccaacaauaguaucgcuaucccaacaaacuuuacuauuagcguuaccacagaaauacuucccgugucuaugacuaagaccuccgucgauuguacgauguauaucugcggcgacucaacagaguguaguaaucuguugcuccaauacggcagcuucugcacccagcugaacagagccuuaacuggaauugcaguggagcaggauaaaaauacacaggaaguuuuugcgcaagugaagcagaucuauaaaaccccgccuauuaaggacuucgggggauuuaacuucucgcagauccugccagaucccuccaaaccuucuaagaggagcuuuauagaggaccuacucuucaauaagguaacucuggcugaugccgguuuuaucaaacaauacggcgacugucuuggggauauugcagcccgugacuugaucugcgcucagaaguucaacggacugaccguccugcccccacucuuaacagaugaaaugauugcccaguauacgucagcacugcuugcuggcaccaucacgagugguuggacauucggggccggcgcggccuugcagauaccuuuugcuaugcaaauggcauaccgguucaauggaauuggcgugacccagaacgugcucuaugagaaucagaaacugaucgccaaccaguuuaacuccgcuauugggaagauccaagacucucuaagcuccacagccucagcacugggaaaacuccaggacgucguuaaucagaacgcgcaggcccugaauacucuugugaagcaauugagcaguaacuucggcgcuauaucuuccguacugaaugauaucuuaagccgacucgacaagguggaagccgagguccagauugauagacugaucaccgguaggcuucagucgcugcaaacguacgugacacagcaguugauucgcgcagcugagauccgggccucagcaaaccucgccgcuaccaaaaugucugaaugcguucuggggcagaguaagagaguggacuuuuguggaaaaggcuaccaccuaauguccuucccccaaagcgcgccacauggugucguguuucugcacguuacuuaugugccggcccaggagaagaauuucaccacagcuccugcaauaugccacgauggcaaagcccauuuucccagggaaggggucuucguaucuaacggaacucacugguuugugacccagcgcaauuucuacgagccacagauuaucacaacggacaacaccuuuguuagcggcaauugugauguggucaucgggauugugaacaauacuguauaugacccccuccaaccugagcuggauuccuucaaggaggaacuugacaaauacuucaagaaccauacaucaccagauguggacuugggagauaucaguggcauuaaugccagcgucguuaacauacagaaggaaaucgaccgacugaaugagguggcuaaaaacuuaaacgaaucucucauugaccugcaggagcuugguaaguaugagcaguacaucaaauggcccugguauauuuggcugggguuuaucgcaggacuaauagccaucgugauggucaccauuaugcucugcuguaugacuuccugcuguucaugccugaagggcuguugcaguugugguagcugcugcaaauucgaugaagacgauuccgagccuguguugaagggcguuaagcugcacuacacaugaggacuaguuauaagacugacuagcccgaugggccucccaacgggcccuccuccccuccuugcaccgagauuaauaaaaaaaaaaaaaaaaaaaaaaaaaaaaaaaaaaaaaaaaaaaaaaaaaaaaaaaaaaaaaaaaugcaucccccccccccccccccccccccccccccccaaaggcucuuuucagagccaccagaauu

SEQ ID NO: 12948 - RNA, 4039 nt, Artificial Sequence
  SARS-CoV-2/Guangdong/20SF028/2020__EPI_ISL_403936 spike protein mRNA human (1-1273)
aggagaaagcuuaccauguucguguuucugguccuccuuccccugguuagcucccagugcgugaacuugaccacaagaacucaauuaccuccagccuacacuaauucuuucaccaggggcguauauuacccggacaagguguuucggucaaguguccuguauagcacacaggaucuauuccuccccuuuuucuccaacgugacuugguuucacgcuauccauguuucugggaccaauggaacaaaacgcuucgacaacccugugcugccauuuaaugauggugucuacuucgcaucgaccgagaagucaaacauuauacgaggcuggaucuuugggacuacacuugacagcaaaacccagagucuguugauugugaauaacgccacgaauguaguuaucaaggugugugaguuccaguuuugcaacgaucccuuccucggagucuauuaccacaaaaauaacaaguccuggauggagucugaguuccguguguauagcuccgcgaauaacuguacuuuugaauacgugucacaaccuuuccugauggaccuggaaggcaagcaggguaauuuuaaaaaccucagagaguucgucuuuaagaacauugauggguacuucaaaaucuauaguaagcauaccccaauaaauuuaguuagggaccugccccagggauuuagcgcucuugagccuuugguggaucugccaaucggcauuaacaucacacgguuccagacucuacucgcccugcaccgcucuuaccuuaccccgggcgacuccucaagcggguggacagcaggagccgcugcauauuacguagguuaucugcaacccagaaccuuuuugcucaaauacaaugaaaacggcacgauuacugaugccguggacugcgcucuggauccuuuaagugagacaaaguguacccugaagucuuucacugucgaaaaagggaucuaucagacauccaauuuuagggugcagccaaccgagagcauaguucgguuccccaacauuacgaaucucugcccuuuuggagagguguucaacgccacccgcuucgcgucggucuacgcauggaaucgaaagagaaucucuaacuguguggccgacuacuccguacuuuauaauucagcuaguuuuagcacauucaaaugcuacggcguuuccccaacuaagcugaacgacuuguguuuuaccaauguguaugccgauucuuucgucauuaggggugacgaagugcggcagaucgcacccgggcaaacaggaaaaaucgcugauuacaacuauaagcuaccggacgauuuuacuggcugcgucauugccuggaauagcaacaaccuggacucaaaagugggcgggaauuacaacuaucucuaccgucuguuccgcaagaguaaucuuaagccuuuugagagagauauauccaccgaaaucuaccaggcgggaagcacacccuguaacgguguugagggcuucaauugcuauuuuccacugcagucuuacggguuccaaccuaccaacggagugggcuaucagcccuacaggguagucguguugucauuugaacuccugcaugccccagcaacuguuugcggucccaaaaagaguacgaauuuagugaaaaacaagugugucaauuucaacuuuaaugggcugacaggcaccggagugcuaacugagagcaacaaaaaguuccucccuuuccagcaguuuggccgggacauugcugauaccacagacgccguacgagauccacaaacccuggagauccuugacauaacuccgugcuccuucgggggagugucuguuauuacacccgguacgaauaccucgaaccaggucgcuguguuguaucaggacgugaauuguacugaagucccuguugccauccacgcagaucagcugacaccaaccuggcgcguguacagcacaggcuccaacguguuucaaacuagagccgggugccucaucggagcugagcacguaaacaauucauaugaaugugacauucccaucggcgcggguauuugcgcaaguuaccagacccagacgaacucuccuaggcgggcccgcagcgucgcuucccagucaauaaucgccuacaccaugagccugggggcagaaaauucuguggccuauuccaacaauaguauugcuaucccaacaaacuucacuaucagcguuaccacagaaauucuucccgugucuaugacuaagaccuccgucgauuguacgauguacauaugcggcgacucaacagaguguaguaaucuguugcuccaauauggcagcuuuugcacccagcugaacagagccuuaacuggaaucgcaguggagcaggauaaaaauacacaggaaguuuucgcgcaagugaagcagauuuacaaaaccccgccuaucaaggacuuugggggauucaacuuuucgcagauucugccagaucccuccaaaccuucuaagaggagcuucaucgaggaccuacucuuuaauaagguaacucuggcugaugccgguuucauaaaacaauauggcgacugucuuggggauaucgcagcccgugacuugauuugcgcucagaaguucaacggacugaccguccugcccccacucuuaacagaugaaaugaucgcccaguacacgucagcacugcuugcuggcaccauuacgagugguuggacauuuggggccggcgcggccuugcagaucccuuucgcuaugcaaauggcauaucgguuuaauggaauaggcgugacccagaacgugcucuacgagaaucagaaacugauugccaaccaguucaacuccgcuaucgggaagauucaagacucucuaagcuccacagccucagcacugggaaaacuccaggacgucguuaaucagaacgcgcaggcccugaauacucuugugaagcaauugagcaguaacuuuggcgcuaucucuuccguacugaaugauauauuaagccgacucgacaagguggaagccgagguccagaucgauagacugauuaccgguaggcuucagucgcugcaaacguacgugacacagcaguugauccgcgcagcugagauucgggccucagcaaaccucgccgcuaccaaaaugucugaaugcguucuggggcagaguaagagaguggacuucuguggaaaaggcuaucaucuaauguccuuuccccaaagcgcgccacacggugucguguuccugcauguuacuuacgugccggcccaggagaagaauuuuaccacagcuccugcaaucugccacgauggcaaagcccacuuccccagggaaggggucuuuguaucuaacggaacucauugguucgugacccagcgcaauuuuuaugagccacagauaauuacaacggacaacaccuucguuagcggcaauugugauguggucaucgggaucgugaacaauacuguauacgacccccuccaaccugagcuggauuccuucaaggaggaacuugacaaauauuuuaagaaccacacaucaccagauguggacuugggagauauuaguggcaucaaugccagcgucguuaacauucagaaggaaauagaccgacugaaugagguggcuaaaaacuuaaacgaaucucucaucgaccugcaggagcuugguaaguacgagcaguauauuaaauggcccugguacaucuggcugggguucauugcaggacuaaucgccauagugauggucaccaucaugcucugcuguaugacuuccugcuguucaugccugaagggcuguugcaguugugguagcugcugcaaauuugaugaagacgauuccgagccuguguugaagggcguuaagcugcauuacacaugaggacuaguuauaagacugacuagcccgaugggccucccaacgggcccuccuccccuccuugcaccgagauuaauaaaaaaaaaaaaaaaaaaaaaaaaaaaaaaaaaaaaaaaaaaaaaaaaaaaaaaaaaaaaaaaaugcaucccccccccccccccccccccccccccccccaaaggcucuuuucagagccaccagaauu

SEQ ID NO: 12949 - RNA, 4039 nt, Artificial Sequence
  SARS-CoV-2/Shenzhen/SZTH-001/2020__EPI_ISL_406592 spike protein mRNA human (1-1273)
aggagaaagcuuaccauguucguguuucugguccuccuuccccugguuagcucccagugcgugaacuugaccacaagaacucaauuaccuccagccuacacuaauucuuucaccaggggcguauauuacccggacaagguguuucggucaaguguccugcacagcacacaggaucuauuccuccccuuuuucuccaacgugacuugguuucaugcuauccacguuucugggaccaauggaacaaaacgcuucgacaacccugugcugccauuuaaugauggugucuauuucgcaucgaccgagaagucaaacauuauacgaggcuggaucuuugggacuacacuugacagcaaaacccagagucuguugauugugaauaacgccacgaauguaguuaucaaggugugugaguuccaguuuugcaacgaucccuuccucggagucuacuaucauaaaaauaacaaguccuggauggagucugaguuccguguguacagcuccgcgaauaacuguacuuuugaauaugugucacaaccuuuccugauggaccuggaaggcaagcaggguaauuuuaaaaaccucagagaguucgucuuuaagaacauugauggguacuucaaaaucuacaguaagcacaccccaauaaauuuaguuagggaccugccccagggauuuagcgcucuugagccuuugguggaucugccaaucggcauuaacaucacacgguuccagacucuacucgcccugcaucgcucuuaucuuaccccgggcgacuccucaagcggguggacagcaggagccgcugcauacuauguagguuaccugcaacccagaaccuuuuugcucaaauauaaugaaaacggcacgauuacugaugccguggacugcgcucuggauccuuuaagugagacaaaguguacccugaagucuuucacugucgaaaaagggaucuaccagacauccaauuuuagggugcagccaaccgagagcauaguucgguuccccaacauuacgaaucucugcccuuuuggagagguguucaacgccacccgcuucgcgucggucuaugcauggaaucgaaagagaaucucuaacuguguggccgacuacuccguacuuuacaauucagcuaguuuuagcacauucaaaugcuauggcguuuccccaacuaagcugaacgacuuguguuuuaccaauguguacgccgauucuuucgucauuaggggugacgaagugcggcagaucgcacccgggcaaacaggaaaaaucgcugauuauaacuacaagcuaccggacgauuuuacuggcugcgucauugccuggaauagcaacaaccuggacucaaaagugggcgggaauuauaacuaccucuaucgucuguuccgcaagaguaaucuuaagccuuuugagagagauauauccaccgaaaucuaccaggcgggaagcacacccuguaacgguguugagggcuucaauugcuacuuuccacugcagucuuauggguuccaaccuaccaacggagugggcuaccagcccuauaggguagucguguugucauuugaacuccugcacgccccagcaacuguuugcggucccaaaaagaguacgaauuuagugaaaaacaagugugucaauuucaacuuuaaugggcugacaggcaccggagugcuaacugagagcaacaaaaaguuccucccuuuccagcaguuuggccgggacauugcugauaccacagacgccguacgagauccacaaacccuggagauccuugacauaacuccgugcuccuucgggggagugucuguuauuacacccgguacgaauaccucgaaccaggucgcuguguuguaccaggacgugaauuguacugaagucccuguugccauccacgcagaucagcugacaccaaccuggcgcguguauagcacaggcuccaacguguuucaaacuagagccgggugccucaucggagcugagcauguaaacaauucauacgaaugugacauucccaucggcgcggguauuugcgcaaguuaucagacccagacgaacucuccuaggcgggcccgcagcgucgcuucccagucaauaaucgccuacaccaugagccugggggcagaaaauucuguggccuacuccaacaauaguauugcuaucccaacaaacuucacuaucagcguuaccacagaaauucuucccgugucuaugacuaagaccuccgucgauuguacgauguauauaugcggcgacucaacagaguguaguaaucuguugcuccaauacggcagcuuuugcacccagcugaacagagccuuaacuggaaucgcaguggagcaggauaaaaauacacaggaaguuuucgcgcaagugaagcagauuuauaaaaccccgccuaucaaggacuuugggggauucaacuuuucgcagauucugccagaucccuccaaaccuucuaagaggagcuucaucgaggaccuacucuuuaauaagguaacucuggcugaugccgguuucauaaaacaauacggcgacugucuuggggauaucgcagcccgugacuugauuugcgcucagaaguucaacggacugaccguccugcccccacucuuaacagaugaaaugaucgcccaguauacgucagcacugcuugcuggcaccauuacgagugguuggacauuuggggccggcgcggccuugcagaucccuuucgcuaugcaaauggcauaccgguuuaauggaauaggcgugacccagaacgugcucuaugagaaucagaaacugauugccaaccaguucaacuccgcuaucgggaagauucaagacucucuaagcuccacagccucagcacugggaaaacuccaggacgucguuaaucagaacgcgcaggcccugaauacucuugugaagcaauugagcaguaacuuuggcgcuaucucuuccguacugaaugauauauuaagccgacucgacaagguggaagccgagguccagaucgauagacugauuaccgguaggcuucagucgcugcaaacguacgugacacagcaguugauccgcgcagcugagauucgggccucagcaaaccucgccgcuaccaaaaugucugaaugcguucuggggcagaguaagagaguggacuucuguggaaaaggcuaccaccuaauguccuuuccccaaagcgcgccacauggugucguguuccugcacguuacuuaugugccggcccaggagaagaauuuuaccacagcuccugcaaucugccacgauggcaaagcccauuuccccagggaaggggucuuuguaucuaacggaacucacugguucgugacccagcgcaauuuuuacgagccacagauaauuacaacggacaacaccuucguuagcggcaauugugaugugcucaucgggaucgucaacaauacuguguaugacccccugcaaccugagcuugauuccuucaaggaagaguuggacaaauacuuuaagaaccauacaucaccagauguagaccugggagauauuaguggcaucaaugccagcguggucaacauucagaaggaaauagaccgauuaaaugagguugcuaaaaaccucaacgaaucucugaucgaccuucaggagcuggguaaguaugagcaguacauuaaauggcccugguauaucuggcuaggguucauugcaggacucaucgccauagugauggugaccaucaugcugugcuguaugacuuccugcuguucaugcuugaagggcuguugcaguugugguagcugcugcaaauuugaugaagacgauuccggcccuguccugaagggggugaaguuacacuacacaugaggacuaguuauaagacugacuagcccgaugggccucccaacgggcccuccuccccuccuugcaccgagauuaauaaaaaaaaaaaaaaaaaaaaaaaaaaaaaaaaaaaaaaaaaaaaaaaaaaaaaaaaaaaaaaaaugcaucccccccccccccccccccccccccccccccaaaggcucuuuucagagccaccagaauu

SEQ ID NO: 12950 - RNA, 4039 nt, Artificial Sequence
  SARS-CoV-2/Shenzhen/SZTH-004/2020__EPI_ISL_406595 spike protein mRNA human (1-1273)
aggagaaagcuuaccauguucguguuucugguccuccuuccccugguuagcucccagugcgugaacuugaccacaagaacucaauuaccuccagccuacacgaauagcuucaccaggggcguauauuacccggacaagguguuucggucaaguguccugcacagcacacaggaucuauuccuccccuuuuucuccaacgugacuugguuucaugcuauccacguuucugggaccaauggaacaaaacgcuucgacaacccugugcugccauuuaaugauggugucuauuucgcaucgaccgagaagucaaacauuauacgaggcuggaucuuugggacuacacuugacagcaaaacccagagucuguugauugugaauaacgccacgaauguaguuaucaaggugugugaguuccaguuuugcaacgaucccuuccucggagucuacuaucauaaaaauaacaaguccuggauggagucugaguuccguguguacagcuccgcgaauaacuguacuuuugaauaugugucacaaccuuuccugauggaccuggaaggcaagcaggguaauuuuaaaaaccucagagaguucgucuuuaagaacauugauggguacuucaaaaucuacaguaagcacaccccaauaaauuuaguuagggaccugccccagggauuuagcgcucuugagccuuugguggaucugccaaucggcauuaacaucacacgguuccagacucuacucgcccugcaucgcucuuaucuuaccccgggcgacuccucaagcggguggacagcaggagccgcugcauacuauguagguuaccugcaacccagaaccuuuuugcucaaauauaaugaaaacggcacgauuacugaugccguggacugcgcucuggauccuuuaagugagacaaaguguacccugaagucuuucacugucgaaaaagggaucuaccagacauccaauuuuagggugcagccaaccgagagcauaguucgguuccccaacauuacgaaucucugcccuuuuggagagguguucaacgccacccgcuucgcgucggucuaugcaugggaccgaaagagaaucucuaauuguguggccuacuacuccguacuuuauaacucagcuaguuuuagcacauucaaaugcuacggcguuuccccaacuaagcugaaugacuuguguuuuaccaacguguaugccgauucuuucgucauuaggggugacgaagugcggcagaucgcacccgggcaaacaggaaaaaucgcugauuacaauuauaagcuaccggacgauuuuacuggcugcgucauugccuggaacagcaauaaccuggacucaaaagugggcgggaacuacaauuaucucuaccgucuguuccgcaagaguaaccuuaagccuuuugagagagauauauccaccgaaaucuaccaggcgggaagcacacccuguaaugguguugagggcuucaacugcuauuuuccacugcagucuuacggguuccaaccuaccaauggagugggcuaucagcccuacaggguagucguguugucauuugaacuccugcacgccccagcaacuguuugcggucccaaaaagaguacgaacuuagugaaaaauaagugugucaacuucaauuuuaacgggcugacaggcaccggagugcuaacugagagcaauaaaaaguuccucccuuuccagcaguuuggccgggacauugcugauaccacagacgccguacgagauccacaaacccuggagauccuugacauaacuccgugcuccuucgggggagugucuguuauuacacccgguacgaacaccucgaaucaggucgcuguguuguaucaggacgugaacuguacugaagucccuguugccauccacgcagaucagcugacaccaaccuggcgcguguacagcacaggcuccaauguguuucaaacuagagccgggugccucaucggagcugagcauguaaacaacucauaugaaugugacauucccaucggcgcggguauuugcgcaaguuaccagacccagacuaauucuccuaggcgggcccgcagcgucgcuucccagucaauaaucgccuacaccaugagccugggggcagagaacucuguggccuauuccaauaacaguauugcuaucccaacaaauuucacuaucagcguuaccacagaaauucuucccgugucuaugacuaagaccuccgucgauuguacgauguacauaugcggcgacucaacagaguguaguaaccuguugcuccaauauggaucuuuuugcacccagcugaauagagccuuaacuggcaucgcaguggagcaggauaaaaacacacaggaaguuuucgcgcaagugaagcagauuuacaaaaccccgccuaucaaggacuuugggggauucaauuuuucgcagauucugccagaucccuccaaaccuucuaagaggagcuucaucgaggaccuacucuuuaacaagguaacucuggcugaugccgguuucauaaaacaauauggcgacugucuuggggauaucgcagcccgugacuugauuugcgcucagaaguucaauggacugaccguccugcccccacucuuaacagaugaaaugaucgcccaguacacgucagcacugcuugcuggcaccauuacgagugguuggacauuuggggccggcgcggccuugcagaucccuuucgcuaugcaaauggcauaucgguuuaacggaauaggcgugacccagaaugugcucuacgagaaccagaaacugauugccaaucaguucaacuccgcuaucgggaagauucaagacucucuaagcuccacagccucagcacugggaaaacuccaggacgucguuaaccagaaugcgcaggcccugaacacucuugugaagcaauugagcaguaauuuuggcgcuaucucuuccguacugaacgauauauuaagccgacucgacaagguggaagccgagguccagaucgauagacugauuaccgguaggcuucagucgcugcaaacguacgugacacagcaguugauccgcgcagcugagauucgggccucagcaaaucucgccgcuaccaaaaugucugaaugcguucuggggcagaguaagagaguggacuucuguggaaaaggcuaucaccuaauguccuuuccccaaagcgcgccacauggugucguguuccugcacguuacuuacgugccggcccaggagaagaacuuuaccacagcuccugcaaucugccacgauggcaaagcccauuuccccagggaaggggucuuuguaucuaauggaacucacugguucgugacccagcgcaacuuuuaugagccacagauaauuacaacggacaauaccuucguuagcggcaacugugauguggucaucgggaucgugaauaacacuguauacgacccccuccaaccugagcuggauuccuucaaggaagaacuugacaaauauuuuaagaaucauacaucaccagauguggacuugggagauauuaguggcaucaacgccagcgucguuaauauucagaaggaaauagaccgacugaacgagguggcuaaaaauuuaaacgaaucucucaucgaccugcaggagcuugguaaguacgagcaguauauuaaauggcccugguacaucuggcugggguucauugcaggacuaaucgccauagugauggucaccaucaugcucugcuguaugacuuccugcuguucaugccugaagggcuguugcaguugugguagcugcugcaaauuugaugaagacgauuccgagccuguguugaagggcguuaagcugcacuacacaugaggacuaguuauaagacugacuagcccgaugggccucccaacgggcccuccuccccuccuugcaccgagauuaauaaaaaaaaaaaaaaaaaaaaaaaaaaaaaaaaaaaaaaaaaaaaaaaaaaaaaaaaaaaaaaaaugcaucccccccccccccccccccccccccccccccaaaggcucuuuucagagccaccagaauu

SEQ ID NO: 12951 - RNA, 4039 nt, Artificial Sequence
  SARS-CoV-2/France/IDF0372/2020__EPI_ISL_406596 spike protein mRNA human (1-1273)
aggagaaagcuuaccauguucguguuucugguccuccuuccccugguuagcucccagugcgugaacuugaccacaagaacucaauuaccuccagccuacacuaauucuuucaccaggggcguauauuacccggacaagguguuucggucaaguguccugcacagcacacaggaucuauuccuccccuuuuucuccaacgugacuugguuucaugcuauccacguuucugggaccaauggaacaaaacgcuucgacaacccugugcugccauuuaaugauggugucuauuucgcaucgaccgagaagucaaacauuauacgaggcuggaucuuugggacuacacuugacagcaaaacccagagucuguugauugugaauaacgccacgaauguaguuaucaaggugugugaguuccaguuuugcaacgaucccuuccucggagucuacuaucauaaaaauaacaaguccuggauggagucugaguuccguguguacagcuccgcgaauaacuguacuuuugaauaugugucacaaccuuuccugauggaccuggaaggcaagcaggguaauuuuaaaaaccucagagaguucgucuuuaagaacauugauggguacuucaaaaucuacaguaagcacaccccaauaaauuuaguuagggaccugccccagggauuuagcgcucuugagccuuugguggaucugccaaucggcauuaacaucacacgguuccagacucuacucgcccugcaucgcucuuaucuuaccccgggcgacuccucaagcggguggacagcaggagccgcugcauacuauguagguuaccugcaacccagaaccuuuuugcucaaauauaaugaaaacggcacgauuacugaugccguggacugcgcucuggauccuuuaagugagacaaaguguacccugaagucuuucacugucgaaaaagggaucuaccagacauccaauuuuagggugcagccaaccgagagcauaguucgguuccccaacauuacgaaucucugcccuuuuggagagguguucaacgccacccgcuucgcgucggucuaugcauggaaucgaaagagaaucucuaacuguguggccgacuacuccuuucuuuacaauucagcuaguuucagcacauuuaaaugcuauggcguauccccaacuaagcugaacgacuuguguuucaccaauguuuacgccgauucuuuugugauuaggggugacgaaguccggcagaucgcacccgggcaaacaggaaaaaucgcugauuauaacuacaagcuaccggacgauuucacuggcugcgugauugccuggaauagcaacaaccuggacucaaaagucggcgggaauuauaacuaccucuaucgucuguuucgcaagaguaaucuuaagccuuucgagagagauauauccaccgaaaucuaccaggcgggaagcacacccuguaacgguguggagggcuuuaauugcuacuucccacugcagucuuauggguuucaaccuaccaacggaguuggcuaccagcccuauagggugguagucuugucauucgaacuccugcacgccccagcaacugugugcggucccaaaaagaguacgaauuuaguuaaaaacaagugugugaauuuuaacuucaaugggcugacaggcaccggaguccuaacugagagcaacaaaaaguuccucccuuuucagcaguucggccgggacauugcugauaccacagacgccgugcgagauccacaaacccuggagauccuugacauaacuccgugcuccuuugggggaguaucugugauuacacccgguacgaauaccucgaaccagguugcugucuuguaccaggacgugaauuguacugaagugccugucgccauccacgcagaucagcugacaccaaccuggcgcguuuauagcacaggcuccaacguguuccaaacuagagccgggugccucaucggagcugagcaugugaacaauucauacgaaugugacauucccaucggcgcggguauuugcgcaaguuaucagacccagacgaacucuccuaggcgggcccgcagcguagcuucccagucaauaaucgccuacaccaugagccugggggcagaaaauucugucgccuacuccaacaauaguauugcuaucccaacaaacuuuacuaucagcgugaccacagaaauucuucccguuucuaugacuaagaccuccguggauuguacgauguauauaugcggcgacucaacagaguguaguaaucuguugcuccaauacggcagcuucugcacccagcugaacagagccuuaacuggaaucgcagucgagcaggauaaaaauacacaggaaguguuugcgcaaguuaagcagauuuauaaaaccccgccuaucaaggacuucgggggauuuaacuucucgcagauucugccagaucccuccaaaccuucuaagaggagcuuuaucgaggaccuacucuucaauaaggugacucuggcugaugccgguuucauaaaacaauacggcgacugucuuggggauaucgcagcccgugacuugauuugcgcucagaaguuuaacggacugaccguacugcccccacucuuaacagaugaaaugaucgcccaguauacgucagcacugcuugcuggcaccauuacgagugguuggacauucggggccggcgcggccuugcagaucccuuuugcuaugcaaauggcauaccgguucaauggaauaggcgucacccagaacgugcucuaugagaaucagaaacugauugccaaccaguuuaacuccgcuaucgggaagauucaagacucucuaagcuccacagccucagcacugggaaaacuccaggacguggucaaucagaacgcgcaggcccugaauacucuuguuaagcaauugagcaguaacuucggcgcuaucucuuccgugcugaaugauauauuaagccgacucgacaagguagaagccgaggugcagaucgauagacugauuaccgguaggcuucagucgcugcaaacguacgucacacagcaguugauccgcgcagcugagauucgggccucagcaaaccucgccgcuaccaaaaugucugaaugcgugcuggggcagaguaagagaguugacuuuuguggaaaaggcuaccaccuaauguccuucccccaaagcgcgccacaugguguggucuuucugcacgugacuuauguuccggcccaggagaagaauuucaccacagcuccugcaaucugccacgauggcaaagcccauuuucccagggaagggguguucgucucuaacggaacucacugguuuguaacccagcgcaauuucuacgagccacagauaauuacaacggacaacaccuucgugagcggcaauugugauguugugaucgggaucgucaacaauacuguguaugacccccuccaaccugagcuggauuccuuuaaggaggaacuugacaaauacuucaagaaccauacaucaccagauguagacuugggagauauuaguggcaucaaugccagcguggucaacauucagaaggaaauagaccgacugaaugagguugcuaaaaacuuaaacgaaucucucaucgaccugcaggagcuugguaaguaugagcaguacauuaaauggcccugguauaucuggcugggguuuauugcaggacuaaucgccauagugauggugaccaucaugcucugcuguaugacuuccugcuguucaugccugaagggcuguugcaguugugguagcugcugcaaauucgaugaagacgauuccgagccugucuugaagggcgugaagcugcacuacacaugaggacuaguuauaagacugacuagcccgaugggccucccaacgggcccuccuccccuccuugcaccgagauuaauaaaaaaaaaaaaaaaaaaaaaaaaaaaaaaaaaaaaaaaaaaaaaaaaaaaaaaaaaaaaaaaaugcaucccccccccccccccccccccccccccccccaaaggcucuuuucagagccaccagaauu

SEQ ID NO: 12952 - RNA, 4039 nt, Artificial Sequence
  SARS-CoV-2/Australia/VIC01/2020__EPI_ISL_406844 spike protein mRNA human (1-1273)
aggagaaagcuuaccauguucguguuucugguccuccuuccccugguuagcucccagugcgugaacuugaccacaagaacucaauuaccuccagccuacaccaauucuuucacgaggggcguauauuacccggacaagguguuucggucaaguguccugcacagcacacaggaucuauuccuccccuuuuucuccaacgugacuugguuucaugcuauccacguuucugggaccaauggaacaaaacgcuucgacaacccugugcugccauuuaaugauggugucuauuucgcaucgaccgagaagucaaacauuauacgaggcuggaucuuugggacuacacuugacagcaaaacccagagucuguugauugugaauaacgccacgaauguaguuaucaaggugugugaguuccaguuuugcaacgaucccuuccucggagucuacuaucauaaaaauaacaaguccuggauggagucugaguuccguguguacagcuccgcgaauaacuguacuuuugaauaugugucacaaccuuuccugauggaccuggaaggcaagcaggguaauuuuaaaaaccucagagaguucgucuuuaagaacauugauggguacuucaaaaucuacaguaagcacaccccaauaaauuuaguuagggaccugccccagggauuuagcgcucuugagccuuugguggaucugccaaucggcauuaacaucacacgguuccagacucuacucgcccugcaucgcagauaucuuaccccgggcgacucuuccucaggguggacagcaggagccgcugcauacuauguagguuaccugcaacccaggaccuuuuugcucaaauauaaugaaaacggcacgauuacugaugccguggacugcgcucuggauccuuuaagcgagacaaaguguacccugaagaguuucacugucgaaaaagggaucuaccagacaucuaauuuucgggugcagccaaccgaguccauaguucgcuuccccaacauuacgaaucucugcccuuuuggagagguguucaacgccacccgauucgcgagcgucuaugcauggaauagaaagaggaucucgaacuguguggccgacuacucuguacuuuacaauuccgcuucauuuaguacauucaaaugcuauggcguuagcccaacuaagcugaacgacuuguguuuuaccaauguguacgccgauuccuucgucauucggggugacgaagugcgucagaucgcacccgggcaaacaggaaaaaucgcugauuauaacuacaagcuaccggacgauuuuacuggcugcgucauugccuggaacucuaauaaccuggacagcaaagugggcgggaauuauaacuaccucuaucgccuguucagaaagucaaaucuuaagccuuuugagagggauauaaguaccgaaaucuaccaggcgggauccacacccuguaacgguguugagggcuucaauugcuacuuuccacugcagagcuauggguuccaaccuaccaacggagugggcuaccagcccuaucggguagucguguugucuuuugaacuccugcacgccccagcaacuguuugcggucccaaaaagucaacgaauuuagugaaaaacaagugugucaauuucaacuuuaaugggcugacaggcaccggagugcuaacugagaguaacaaaaaguuccucccuuuccagcaguuuggccgagacauugcugauaccacagacgccguacgcgauccacaaacccuggagauccuugacauaacuccgugcagcuucgggggaguguccguuauuacacccgguacgaauaccucuaaccaggucgcuguguuguaccaggacgugaauuguacugaagucccuguugccauccacgcagaucagcugacaccaaccuggagaguguauucgacaggcagcaacguguuucaaacuagggccgggugccucaucggagcugagcauguaaacaauuccuacgaaugugacauucccaucggcgcggguauuugcgcaucauaucagacccagacgaacaguccucggcgcgccagaucugucgcuagccaguccauaaucgccuacaccaugucacugggggcagagaauagcguggccuacucuaacaauuccauugcuaucccaacaaacuucacuaucaguguuaccacagaaauucuucccgugagcaugacuaagaccucugucgauuguacgauguauauaugcggcgacuccacagaguguucaaaucuguugcuccaauacggaaguuuuugcacccagcugaacagggccuuaacuggcaucgcaguggagcaggauaaaaauacacaggaaguuuucgcgcaagugaagcagauuuauaaaaccccgccuaucaaggacuuugggggauucaacuuuagccagauucugccagaucccucgaaaccuuccaagcguucuuucaucgaggaccuacucuuuaauaagguaacucuggcugaugccgguuucauaaaacaauacggcgacugucuuggggauaucgcagcccgggacuugauuugcgcucagaaguucaacggacugaccguccucccuccacuguuaacagaugaaaugaucgcccaguauacgagcgcacugcuugcuggcaccauuacuucagguuggacauuuggggccggcgcggccuugcagaucccuuucgcuaugcaaauggcauaccgauuuaauggaauaggcgugacccagaacgugcucuaugagaaucagaaacugauugccaaccaguucaacagugcuaucgggaagauucaagacucccuaucuagcacagccuccgcacugggaaaacuccaggacgucguuaaucagaacgcgcaggcccugaauacucuugugaagcaauugucaagcaacuuuggcgcuaucaguucuguacugaaugauauauuauccagacucgacaagguggaagccgagguccagaucgauaggcugauuaccggucgccuucagagccugcaaacguacgugacacagcaguugauccgggcagcugagauuagagccucggcaaaccucgccgcuaccaaaaugucagaaugcguucuggggcagucuaagaggguggacuucuguggaaaaggcuaccaccuaaugaguuuuccccaauccgcgccacauggugucguguuccugcacguuacuuaugugccggcccaggagaagaauuuuaccacagcacccgcuaucugccacgauggcaaagcccauuucccccgcgaaggggucuuuguaagcaacggaacucacugguucgugacccagcgaaauuuuuacgagccacagauaauuacaacggacaacaccuucguuucuggcaauugugauguggucaucgggaucgugaacaauacuguauaugacccccuccaaccugagcuggauagcuucaaggaagaacuugacaaauacuuuaagaaccauacauccccagauguggacuugggagauauuucaggcaucaaugccagugucguuaacauucagaaggaaauagaccggcugaaugagguggcuaaaaacuuaaacgaaagccucaucgaccugcaggagcuugguaaguaugagcaguacauuaaauggcccugguauaucuggcugggguucauugcaggacuaaucgccauagugauggucaccaucaugcucugcuguaugacuucuugcuguuccugccugaagggcuguugcucaugugguaguugcugcaaauuugaugaagacgauagcgagccuguguugaagggcguuaagcugcacuacacaugaggacuaguuauaagacugacuagcccgaugggccucccaacgggcccuccuccccuccuugcaccgagauuaauaaaaaaaaaaaaaaaaaaaaaaaaaaaaaaaaaaaaaaaaaaaaaaaaaaaaaaaaaaaaaaaaugcaucccccccccccccccccccccccccccccccaaaggcucuuuucagagccaccagaauu

SEQ ID NO: 12953 - RNA, 4039 nt, Artificial Sequence
  SARS-CoV-2/Germany/BavPat1/2020__EPI_ISL_406862 spike protein mRNA human (1-1273)
aggagaaagcuuaccauguucguguuucugguccuccuuccccugguuagcucccagugcgugaacuugaccacaagaacucaauuaccuccagccuacacuaauucuuucaccaggggcguauauuacccggacaagguguuucggucaaguguccugcacagcacacaggaucuauuccuccccuuuuucuccaacgugacuugguuucaugcuauccacguuucugggaccaauggaacaaaacgcuucgacaacccugugcugccauuuaaugauggugucuauuucgcaucgaccgagaagucaaacauuauacgaggcuggaucuuugggacuacacuugacagcaaaacccagagucuguugauugugaauaacgccacgaauguaguuaucaaggugugugaguuccaguuuugcaacgaucccuuccucggagucuacuaucauaaaaauaacaaguccuggauggagucugaguuccguguguacagcuccgcgaauaacuguacuuuugaguaugugucacaaccuuuccugauggaccuggaaggcaagcaggguaauuuuaaaaaccucagagaguucgucuuuaagaacauugauggguacuucaaaaucuacaguaagcacaccccaauaaauuuaguuagggaccugccccagggauuuagcgcucuugagccuuugguggaucugccaaucggcauuaacaucacacgguuccagacucuacucgcccugcaucgcucuuaucuuaccccgggcgacuccucaagcggguggacagcaggagccgcugcauacuauguagguuaccugcaacccagaaccuuuuugcucaaauauaaugaaaacggcacgauuacugaugccguggacugcgcucuggauccuuuaagugagacaaaguguacccugaagucuuucacugucgaaaaagggaucuaccagacauccaauuuuagggugcagccaaccgagagcauaguucgguuccccaacauuacgaaucucugcccuuuuggagagguguucaacgccacccgcuucgcgucggucuaugcauggaaucgaaagagaaucucuaacuguguggccgacuacuccguacuuuacaauucagcuaguuuuagcacauucaaaugcuauggcguuuccccaacuaagcugaacgacuuguguuuuaccaauguguacgccgauucuuucgucauuaggggugacgaagugcggcagaucgcacccgggcaaacaggaaaaaucgcugauuauaacuacaagcuaccggacgauuuuacuggcugcgucauugccuggaauagcaacaaccuggacucaaaagugggcgggaauuauaacuaccucuaucgucuguuccgcaagaguaaucuuaagccuuuugagagagauauauccaccgaaaucuaccaggcgggaagcacacccuguaacgguguugagggcuucaauugcuacuuuccacugcagucuuauggguuccaaccuaccaacggagugggcuaccagcccuauaggguagucguguugucauuugaacuccugcacgccccagcaacuguuugcggucccaaaaagaguacgaauuuagugaaaaacaagugugucaauuucaacuuuaaugggcugacaggcaccggagugcuaacugagagcaacaaaaaguuccucccuuuccagcaguuuggccgggacauugcugauaccacagacgccguacgagauccacaaacccuggagauccuugacauaacuccgugcuccuucgggggagugucuguuauuacacccgguacgaauaccucgaaccaggucgcuguguuguaccagggcgugaauuguacugaagucccuguugccauccacgcagaccagcugacaccaaccuggcgcguguauagcacaggguccaacguguuucaaacuagagccggaugccucaucggcgcugagcauguaaacaauucauacgaaugugauauucccaucggugcggggauuugcgcaaguuaucagacccagacgaacucuccuaggcgggcccgcagcgucgcuucccagucaauaaucgccuacaccaugagccugggcgcagaaaauucuguggccuacuccaacaauaguauugcuaucccaacaaacuucacuaucagcguuaccacagaaauucuucccgugucuaugacuaagaccuccgucgacuguacgauguauauaugcggagauucaacagaguguaguaaucuguugcuccaauacggcagcuuuugcacccagcugaacagagccuuaacugggaucgcaguggagcaggacaaaaauacacaggaaguuuucgcgcaagugaagcagauuuauaaaaccccgccuaucaaggauuuuggagguuucaacuuuucgcagauucugccagaccccuccaaaccuucuaagaggagcuucaucgaggaucuacucuuuaauaagguaacucuggcugacgccggcuucauaaaacaauacggggauugucuuggagacaucgcagcccgugauuugauuugcgcucagaaguucaacggccugaccguccugcccccacucuuaacagacgaaaugaucgcccaguauacgucagcacugcuugcugguaccauuacgaguggguggacauuuggcgccggagcggccuugcagaucccuuucgcuaugcaaauggcauaccgguuuaauggcauaggggugacccagaacgugcucuaugagaaucagaaacugauugccaaccaguucaacuccgcuaucggaaagauucaagauucucuaagcuccacagccucagcacugggcaaacuccaggacgucguuaaucagaacgcgcaggcccugaauacucuugugaagcaauugagcaguaacuuuggugcuaucucuuccguacugaaugacauauuaagccgacucgauaagguggaagccgagguccagaucgacagacugauuaccgggaggcuucagucgcugcaaacguacgugacacagcaguugauccgcgcagcugagauucgggccucagcaaaccucgccgcuaccaaaaugucugaaugcguucugggacagaguaagagaguggauuucuguggcaaagguuaccaccuaauguccuuuccccaaagcgcgccacauggcgucguguuccugcacguuacuuaugugccggcccaggagaagaauuuuaccacagcuccugcaaucugccacgacgggaaagcccauuuccccagggaaggagucuuuguaucuaacggcacucacugguucgugacccagcgcaauuuuuacgagccacagauaauuacaacggauaacaccuucguuagcgggaauugugacguggucaucggaaucgugaacaauacuguauaugauccccuccaaccugagcuggacuccuucaaggaagaacuugauaaauacuuuaagaaccauacaucaccagacguggauuugggcgacauuagugguaucaaugccagcgucguuaacauucagaaggaaauagaucgacugaaugagguggcuaaaaacuuaaacgaaucucucaucgaccugcaggagcuugggaaguaugagcaguacauuaaauggcccugguauaucuggcugggauucauugcaggccuaaucgccauagugauggucaccaucaugcucugcuguaugacuuccugcuguucaugccugaaggguuguugcaguuguggcagcugcugcaaauuugacgaagaugacuccgagccuguguugaaggggguuaagcugcacuacacaugaggacuaguuauaagacugacuagcccgaugggccucccaacgggcccuccuccccuccuugcaccgagauuaauaaaaaaaaaaaaaaaaaaaaaaaaaaaaaaaaaaaaaaaaaaaaaaaaaaaaaaaaaaaaaaaaugcaucccccccccccccccccccccccccccccccaaaggcucuuuucagagccaccagaauu

SEQ ID NO: 12954 - RNA, 4039 nt, Artificial Sequence
  SARS-CoV-2/Wuhan/HBCDC-HB-02/2020__EPI_ISL_412978 spike protein mRNA human (1-1273)
aggagaaagcuuaccauguucguguuucugguccuccuuccccugguuagcucccagugcgugaacuugaccacaagaacucaauuaccuccagccuacacuaauucuuucaccaggggcguauauuacccggacaagguguuucggucaaguguccugcacagcacacaggaucuauuccuccccuuuuucuccaacgugacuugguuucaugcuauccacguuucugggaccaauggaacaaaacgcuucgacaacccugugcugccauuuaaugauggugucuauuucgcaucgaccgagaagucaaacauuauacgaggcuggaucuuugggacuacacuugacagcaaaacccagagucuguugauugugaauaacgccacgaauguaguuaucaaggugugugaguuccaguuuugcaacgaucccuuccucggagucuacuaucauaaaaauaacaaguccuggauggagucugaguuccguguguacagcuccgcgaauaacuguacuuuugaguaugugucacaaccuuuccugauggaccuggaaggcaagcaggguaauuuuaaaaaccucagagaguucgucuuuaagaacauugauggguacuucaaaaucuacaguaagcacaccccaauaaauuuaguuagggaccugccccagggauuuagcgcucuugagccuuugguggaucugccaaucggcauuaacaucacacgguuccagacucuacucgcccugcaucgcucuuaucuuaccccgggcgacuccucaagcggguggacagcaggagccgcugcauacuauguagguuaccugcaacccagaaccuuuuugcucaaauauaaugaaaacggcacgauuacugaugccguggacugcgcucuggauccuuuaagugagacaaaguguacccugaagucuuucacugucgaaaaagggaucuaccagacauccaauuuuagggugcagccaaccgagagcauaguucgguuccccaacauuacgaaucucugcccuuuuggagagguguucaacgccacccgcuucgcgucggucuaugcauggaaucgaaagagaaucucuaacuguguggccgacuacuccguacuuuacaauucagcuaguuuuagcacauucaaaugcuauggcguuuccccaacuaagcugaacgacuuguguuuuaccaauguguacgccgauucuuucgucauuaggggugacgaagugcggcagaucgcacccgggcaaacaggaaaaaucgcugauuauaacuacaagcuaccggacgauuuuacuggcugcgucauugccuggaauagcaacaaccuggacucaaaagugggcgggaauuauaacuaccucuaucgucuguuccgcaagaguaaucuuaagccuuuugagagagauauauccaccgaaaucuaccaggcgggaagcacacccuguaacgguguugagggcuucaauugcuacuuuccacugcagucuuauggguuccaaccuaccaacggagugggcuaccagcccuauaggguagucguguugucauuugaacuccugcacgccccagcaacuguuugcggucccaaaaagaguacgaauuuagugaaaaacaagugugucaauuucaacuuuaaugggcugacaggcaccggagugcuaacugagagcaacaaaaaguuccucccuuuccagcaguuuggccgggacauugcugauaccacagacgccguacgagauccacaaacccuggagauccuugacauaacuccgugcuccuucgggggagugucuguuauuacacccgguacgaauaccucgaaccaggucgcuguguuguaccaggacgugaauuguacugaagucccuguugccauccacgcagaucagcugacaccaaccuggcgcguguauagcacaggcuccaacguguuucaaacuagagccgggugccucaucggagcugagcauguaaacaauucauacgaaugugacauucccaucggcgcggguauuugcgcaaguuaucagacccagacgaacucuccuaggcgggcccgcagcgucgcuucccagucaauaaucgccuacaccaugagccugggggcagaaaauucuguggccuacuccaacaauaguauugcuaucccaacaaacuucacuaucagcguuaccacagaaauucuucccgugucuaugacuaagaccuccgucgauuguacgauguauauaugcggcgacucaacagaguguaguaauuuucuguugcaauacggcagcuucugcacccagcucaacagagcccugacuggaaucgcaguggagcaggauaaaaauacacaggaaguuuuugcgcaagugaagcagauuuauaaaaccccgccuaucaaggacuucgggggauuuaacuucucgcagauuuuaccagaucccuccaaaccuucuaagaggagcuuuaucgaggaccugcuauucaauaagguaacucucgcugaugccgguuucauaaaacaauacggcgacugucugggggauaucgcagcccgugaccuuauuugcgcucagaaguuuaacggauugaccguccugcccccacuccugacagaugaaaugaucgcccaguauacgucagcauuacuggcuggcaccauuacgagugguuggacauucggggccggcgcggcccuucagaucccuuuugcuaugcaaauggcauaccgguucaauggaauaggcgugacccagaacguguuguaugagaaucagaaacucauugccaaccaguuuaacuccgcuaucgggaagauucaagacucucugagcuccacagccucagcacuaggaaaacugcaggacgucguuaaucagaacgcgcaggcccucaauacucuggugaagcaacuuagcaguaacuucggcgcuaucucuuccguauugaaugauauacugagccgauuagacaagguggaagccgagguccagaucgauagacucauuaccgguaggcugcagucgcuucaaacguacgugacacagcagcugauccgcgcagcugagauucgggccucagcaaacuuggccgcuaccaaaaugucugaaugcguucucgggcagaguaagagaguggacuuuuguggaaaaggcuaccaccugauguccuucccccaaagcgcgccacauggugucguguuucuacacguuacuuaugugccggcccaggagaagaauuucaccacagcuccugcaaucugccacgauggcaaagcccauuuucccagggaaggggucuucguaucuaacggaacucacugguuugugacccagcgcaauuucuacgagccacagauaauuacaacggacaacaccuucguuagcggcaauugugauguggucaucgggaucgugaacaauacuguauaugacccccugcaaccugagcucgauuccuuuaaggaagaacuggacaaauacuucaagaaccauacaucaccagauguggaccuuggagauauuaguggcaucaaugccagcgucguuaacauucagaaggaaauagaccgauugaaugagguggcuaaaaaccugaacgaaucuuuaaucgaccuccaggagcuggguaaguaugagcaguacauuaaauggcccugguauaucuggcuuggguuuauugcaggacugaucgccauagugauggucaccaucaugcuaugcuguaugacuuccugcuguucaugccucaagggcuguugcaguugugguagcugcugcaaauucgaugaagacgauuccgagccugugcugaagggcguuaaguugcacuacacaugaggacuaguuauaagacugacuagcccgaugggccucccaacgggcccuccuccccuccuugcaccgagauuaauaaaaaaaaaaaaaaaaaaaaaaaaaaaaaaaaaaaaaaaaaaaaaaaaaaaaaaaaaaaaaaaaugcaucccccccccccccccccccccccccccccccaaaggcucuuuucagagccaccagaauu

SEQ ID NO: 12955 - RNA, 4039 nt, Artificial Sequence
  SARS-CoV-2/Australia/QLD02/2020__EPI_ISL_407896 spike protein mRNA human (1-1273)
aggagaaagcuuaccauguucguguuucugguccuccuuccccugguuagcucccagugcgugaacuugaccacaagaacucaauuaccuccagccuacacuaauucuuucaccaggggcguauauuacccggacaagguguuucggucaaguguccugcacagcacacaggaucuauuccuccccuuuuucuccaacgugacuugguuucaugcuauccacguuucugggaccaauggaacaaaacgcuucgacaacccugugcugccauuuaaugauggugucuauuucgcaucgaccgagaagucaaacauuauacgaggcuggaucuuugggacuacacuugacagcaaaacccagagucuguugauugugaauaacgccacgaauguaguuaucaaggugugugaguuccaguuuugcaacgaucccuuccucggagucuacuaucauaaaaauaacaaguccuggauggagucugaguuccguguguacagcuccgcgaauaacuguacuuuugaauaugugucacaaccuuuccugauggaccuggaaggcaagcaggguaauuuuaaaaaccucagagaguucgucuuuaagaacauugauggguacuucaaaaucuacaguaagcacaccccaauaaauuuaguuagggaccugccccagggauuuagcgcucuugagccuuugguggaucugccaaucggcauuaacaucacacgguuccagacucuacucgcccugcaucgcucuuaucuuaccccgggcgacuccucaagcggguggacagcaggagccgcugcauacuauguagguuaccugcaacccagaaccuuuuugcucaaauauaaugaaaacggcacgauuacugaugccguggacugcgcucuggauccuuuaagugagacaaaguguacccugaagucuuucacugucgaaaaagggaucuaccagacauccaauuuuagggugcagccaaccgagagcauaguucgguuccccaacauuacgaaucucugcccuuuuggagagguguucaacgccacccgcuucgcgucggucuaugcauggaaucgaaagagaaucucuaacuguguggccgacuacuccguacuuuacaauucagcuaguuuuagcacauucaaaugcuauggcguuuccccaacuaagcugaacgacuuguguuuuaccaauguguacgccgauucuuucgucauuaggggugacgaagugcggcagaucgcacccgggcaaacaggaaaaaucgcugauuauaacuacaagcuaccggacgauuuuacuggcugcgucauugccuggaauagcaacaaccuggacucaaaagugggcgggaauuauaacuaccucuaucgucuguuccgcaagaguaaucuuaagccuuuugagagagauauauccaccgaaaucuaccaggcgggaagcacacccuguaacgguguugagggcuucaauugcuacuuuccacugcagucuuauggguuccaaccuaccaacggagugggcuaccagcccuauaggguagucguguugucauuugaacuccugcacgccccagcaacuguuugcggucccaaaaagaguacgaauuuagugaaaaacaagugugucaauuucaacuuuaaugggcugacaggcaccggagugcuaacugagagcaacaaaaaguuccucccuuuccagcaguuuggccgggacauugcugauaccacagacgccguacgagauccacaaacccuggagauccuugacauaacuccgugcuccuucgggggagugucuguuauuacacccgguacgaauaccucgaaccaggucgcuguguuguaccaggacgugaauuguacugaagucccuguugccauccacgcagaucagcugacaccaaccuggcgcguguauagcacaggcuccaacguguuucaaacuagagccgggugccucaucggagcugagcauguaaacaauucauacgaaugugacauucccaucggcgcggguauuugcgcaaguuaucagacccagacgaacucuccuaggcgggcccgcagcgucgcuucccagucaauaaucgccuacaccaugagccugggggcagaaaauucuguggccuacuccaacaauaguauugcuaucccaacaaacuucacuaucagcguuaccacagaaauucuucccgugucuaugacuaagaccuccgucgauuguacgauguauauaugcggcgacucaacagaguguaguaaucuguugcuccaauacggcagcuuuugcacccagcugaacagagccuuaacuggaaucgcaguggagcaggauaaaaauacacaggaaguuuucgcgcaagugaagcagauuuauaaaaccccgccuaucaaggacuuugggggauucaacuuuucgcagauucugccagaucccuccaaaccuucuaagaggagcuucaucgaggaccuacucuuuaauaagguaacucuggcugaugccgguuucauaaaacaauacggcgacugucuuggggauaucgcagcccgugacuugauuugcgcucagaaguucaacggacugaccguccugcccccacucuuaacagaugaaaugaucgcccaguauacgucagcacugcuugcuggcaccauuacgagugguuggacauuuggggccggcgcggccuugcagaucccuuucgcuaugcaaauggcauaccgguuuaauggaauaggcgugacccagaacgugcucuaugagaaucagaaacugauugccaaccaguucaacuccgcuaucgggaagauucaagacucucuaagcuccacagccucagcacugggaaaacuccaggacgucguuaaucagaacgcgcaggcccugaauacucuugugaagcaauugagcaguaacuuuggcgcuaucucuuccguacugaaugauauauuaagccgacucgacaagguggaagccgagguccagaucgauagacugauuaccgguaggcuucagucgcugcaaacguacgugacacagcaguugauccgcgcagcugagauucgggccucagcaaaccucgccgcuaccaaaaugucugaaugcguucuggggcagaguaagagaguggacuucuguggaaaaggcuaccaccuaauguccuuuccccaaagcgcgccacauggugucguguuccugcacguuacuuaugugccggcccaggagaagaauuuuaccacagcuccugcaaucugccacgauggcaaagcccauuuccccagggaaggggucuuuguaucuaacggaacucacugguucgugacccagcgcaauuuuuacgagccacagauaauuacaacggacaacaccuucguuagcggcaauugugauguggucaucgggaucgugaacaauacuguauaugacccccuccaacuggagcuugauuccuucaaggaagaguuggacaaauacuuuaagaaccauacaucaccugauguggaccugggagauauuaguggcaucaaugccagcgucguuaacauucagaaggaaauagaccgauuaaaugagguggcuaaaaaccucaacgaaucucugaucgaccuucaggagcuggguaaguaugagcaguacauuaaauggccaugguauaucuggcuaggguucauugcaggacucaucgccauagugauggucaccaucaugcugugcuguaugacuuccugcuguucaugcuugaagggcuguugcaguugugguagcugcugcaaauuugaugaagacgauuccgagcccgugcugaagggcguuaaguuacacuacacaugaggacuaguuauaagacugacuagcccgaugggccucccaacgggcccuccuccccuccuugcaccgagauuaauaaaaaaaaaaaaaaaaaaaaaaaaaaaaaaaaaaaaaaaaaaaaaaaaaaaaaaaaaaaaaaaaugcaucccccccccccccccccccccccccccccccaaaggcucuuuucagagccaccagaauu

SEQ ID NO: 12956 - RNA, 4039 nt, Artificial Sequence
  SARS-CoV-2/India/1-31/2020__EPI_ISL_413523 spike protein mRNA human (1-1273)
aggagaaagcuuaccauguucguguuucugguccuccuuccccugguuagcucccagugcgugaacuugaccacaagaacucaauuaccuccagccuacacuaauucuuucaccaggggcguauauuacccggacaagguguuucggucaaguguccugcacagcacacaggaucuauuccuccccuuuuucuccaacgugacuugguuucaugcuauccacguuucugggaccaauggaacaaaacgcuucgacaacccugugcugccauuuaaugauggugucuauuucgcaucgaccgagaagucaaacauuauacgaggcuggaucuuugggacuacacuugacagcaaaacccagagucuguugauugugaauaacgccacgaauguaguuaucaaggugugugaguuccaguuuugcaacgaucccuuccucggagucuacuaucauaaaaauaacaaguccuggauggagucugaguuccguguguacagcuccgcgaauaacuguacuuuugaauaugugucacaaccuuuccugauggaccuggaaggcaagcaggguaauuuuaaaaaccucagagaguucgucuuuaagaacauugauggguacuucaaaaucuacaguaagcacaccccaauaaauuuaguuagggaccugccccagggauuuagcgcucuugagccuuugguggaucugccaaucggcauuaacaucacacgguuccagacucuacucgcccugcaucgcucuuaucuuaccccgggcgacuccucaagcggguggacagcaggagccgcugcauacuauguagguuaccugcaacccagaaccuuuuugcucaaauauaaugaaaacggcacgauuacugaugccguggacugcgcucuggauccuuuaagugagacaaaguguacccugaagucuuucacugucgaaaaagggaucuaccagacauccaauuuuagggugcagccaaccgagagcauaguucgguuccccaacauuacgaaucucugcccuuuuggagagguguucaacgccacccgcuucgcgucggucuaugcauggaaucgaaagagaaucucuaacuguguggccgacuacuccguacuuuacaauucagcuaguuuuagcacauucaaaugcuauggcguuuccccaacuaagcugaacgacuuguguuuuaccaauguguacgccgauucuuucgucauuaggggugacgaagugcggcagaucgcacccgggcaaacaggaaaaaucgcugauuauaacuacaagcuaccggacgauuuuacuggcugcgucauugccuggaauagcaacaaccuggacucaaaagugggcgggaauuauaacuaccucuaucgucuguuccgcaagaguaaucuuaagccuuuugagagagauauauccaccgaaaucuaccaggcgggaagcacacccuguaacgguguugagggcuucaauugcuacuuuccacugcagucuuauggguuccaaccuaccaacggagugggcuaccagcccuauaggguagucguguugucauuugaacuccugcacgccccagcaacuguuugcggucccaaaaagaguacgaauuuagugaaaaacaagugugucaauuucaacuuuaaugggcugacaggcaccggagugcuaacugagagcaacaaaaaguuccucccuuuccagcaguuuggccgggacauugcugauaccacagacgccguacgagauccacaaacccuggagauccuugacauaacuccgugcuccuucgggggagugucuguuauuacacccgguacgaauaccucgaaccaggucgcuguguuguaccaggacgugaauuguacugaagucccuguugccauccacgcagaucagcugacaccaaccuggcgcguguauagcacaggcuccaacguguuucaaacuagagccgggugccucaucggagcugagcauguaaacaauucauacgaaugugacauucccaucggcgcggguauuugcgcaaguuaucagacccagacgaacucuccuaggcgggcccgcagcgucgcuucccagucaauaaucgccuacaccaugagccugggggcagaaaauucuguggccuacuccaacaauaguauugcuaucccaacaaacuucacuaucagcguuaccacagaaauucuucccgugucuaugacuaagaccuccgucgauuguacgauguauauaugcggcgacucaacagaguguaguaaucuguugcuccaauacggcagcuuuugcacccagcugaacagagccuuaacuggaaucgcaguggagcaggauaaaaauacacaggaaguuuucgcgcaagugaagcagauuuauaaaaccccgccuaucaaggacuuugggggauucaacuuuucgcagauucugccagaucccuccaaaccuucuaagaggagcuucaucgaggaccuacucuuuaauaagguaacucuggcugaugccgguuucauaaaacaauacggcgacugucuuggggauaucgcagcccgugacuugauuugcgcucagaaguucaacggacugaccguccugcccccacucuuaacagaugaaaugaucgcccaguauacgucagcacugcuugcuggcaccauuacgagugguuggacauuuggggccggcgcggccuugcagaucccuuucgcuaugcaaauggcauaccgguuuaauggaauaggcgugacccagaacgugcucuaugagaaucagaaacugauugccaaccaguucaacuccgucaucgggaagauucaagacucucuaagcuccacagcuucagcccugggaaaacuccaggacguugugaaucagaacgcacaggcgcugaauacucuuguaaagcaauugagcaguaacuuuggcgccaucucuuccgugcugaaugauauauuaagccgacucgacaaggucgaagcugaggugcagaucgauagacugauuaccgguaggcuucagucgcugcaaacguacguuacacagcaguugauccgcgccgcagagauucgggcuucagccaaccucgcagccaccaaaaugucugaaugcgugcuggggcagaguaagagagucgacuucuguggaaaaggcuaccaccuaauguccuuuccccaaagcgcuccacauggugugguuuuccugcacgugacuuaugucccggcgcaggagaagaauuuuaccacagccccugcaaucugccacgauggcaaagcucauuuccccagggaagggguauuugugucuaacggaacucacugguucguuacccagcgcaauuuuuacgagccacagauaauuacaacggacaacaccuucgugagcggcaauugugaugucgugaucgggaucguaaacaauacuguguaugacccccuccaaccugagcuggauuccuucaaggaggaacuugacaaauacuuuaagaaccauacaucaccagaugucgacuugggagauauuaguggcaucaaugccagcguugugaacauucagaaggaaauagaccgacugaaugagguggccaaaaacuuaaacgaaucucucaucgaccugcaggagcuugguaaguaugagcaguacauuaaauggcccugguauaucuggcugggguucauugcuggacuaaucgcaauagucauggugaccaucaugcucugcuguaugacuuccugcuguucaugccugaagggcuguugcaguugugguagcugcugcaaauuugaugaagacgauuccgagccuguuuugaagggcguaaagcugcacuacacaugaggacuaguuauaagacugacuagcccgaugggccucccaacgggcccuccuccccuccuugcaccgagauuaauaaaaaaaaaaaaaaaaaaaaaaaaaaaaaaaaaaaaaaaaaaaaaaaaaaaaaaaaaaaaaaaaugcaucccccccccccccccccccccccccccccccaaaggcucuuuucagagccaccagaauu

SEQ ID NO: 12957 - RNA, 4039 nt, Artificial Sequence
  SARS-CoV-2/Guangdong/GD2020087-P0008/2020__EPI_ISL_413863 spike protein mRNA human (1-1273)
aggagaaagcuuaccauguucguguuucugguccuccuuccccugguuagcucccagugcgugaacuugaccacaagaacucaauuaccuccagccuacacuaauucuuucaccaggggcguauauuacccggacaagguguuucggucaaguguccugcacagcacacaggaucuauuccuccccuuuuucuccaacgugacuugguuucaugcuauccacguuucugggaccaauggaacaaaacgcuucgacaacccugugcugccauuuaaugauggugucuauuucgcaucgaccgagaagucaaacauuauacgaggcuggaucuuugggacuacacuugacagcaaaacccagagucuguugauugugaauaacgccacgaauguaguuaucaaggugugugaguuccaguuuugcaacgaucccuuccucggagucuacuaucauaaaaauaacaaguccuggauggaaucugaguuccguguguacagcuccgcgaauaacuguacuuuugaauaugugucacaaccuuuccugauggaccuggaaggcaagcaggguaauuuuaaaaaccucagagaguucgucuuuaagaacauugauggguacuucaaaaucuacaguaagcacaccccaauaaauuuaguuagggaccugccccagggauuuagcgcucuugagccuuugguggaucugccaaucggcauuaacaucacacgguuccagacucuacucgcccugcaucgcucuuaucuuaccccgggcgacuccucaagcggguggacagcaggagccgcugcauacuauguagguuaccugcaacccagaaccuuuuugcucaaauauaaugaaaacggcacgauuacugaugccguggacugcgcucuggauccuuuaagugagacaaaguguacccugaagucuuucacugucgaaaaagggaucuaccagacauccaauuuuagggugcagccaaccgagagcauaguucgguuccccaacauuacgaaucucugcccuuuuggagagguguucaacgccacccgcuucgcgucggucuaugcauggaaucgaaagagaaucucuaacuguguggccgacuacuccguacuuuacaauucagcuaguuuuagcacauucaaaugcuauggcguuuccccaacuaagcugaacgacuuguguuuuaccaauguguacgccgauucuuucgucauuaggggugacgaagugcgggagaucgcacccgggcagacaggaaaaaucgcugauuauaacuacaagcuaccggacgauuuuacuggcugcgucauugccuggaauagcaacaaccuggacucaaaagugggcgggaauuauaacuaccucuaucgucuguuccgcaagaguaaucuuaagccuuuugaaagagauauauccaccgagaucuaccaagcgggaagcacacccuguaacgguguugaaggcuucaauugcuacuuuccacugcagucuuauggguuccagccuaccaacggagugggcuaccaacccuauaggguagucguguugucauuugagcuccugcacgccccagcaacuguuugcggucccaaaaagaguacgaauuuagugaaaaacaagugugucaauuucaacuuuaaugggcugacaggcaccggagugcuaacugagagcaacaaaaaguuccucccuuuccagcaguuuggccgggacauugcugauaccacagacgccguacgagauccacagacccuggaaauccuugacauaacuccgugcuccuucgggggagugucuguuauuacacccgguacgaauaccucgaaccaagucgcuguguuguaccaggacgugaauuguacugaggucccuguugccauccacgcagaucagcugacaccaaccuggcgcguguauagcacaggcuccaacguguuucagacuagagccgggugccucaucggagcugaacauguaaacaauucauacgagugugacauucccaucggcgcggguauuugcgcaaguuaucaaacccagacgaacucuccuaggcgggcccgcagcgucgcuucccagucaauaaucgccuacaccaugagccugggggcagaaaauucuguggccuacuccaacaauaguauugcuaucccaacaaacuucacuaucagcguuaccacagagauucuucccgugucuaugacuaagaccuccgucgauuguacgauguauauaugcggcgacucaacagaguguaguaaucuguugcuccaguacggcagcuuuugcacccaacugaacagagccuuaacuggaaucgcaguggaacaggauaaaaauacacaggagguuuucgcacaggugaagcaaauuuauaaaaccccgccuaucaaggacuuugggggauucaacuuuucgcagauucugccagaucccuccaaaccuucuaagaggagcuucaucgaagaccuacucuuuaauaagguaacucuggcugaugccgguuucauaaaacaguacggcgacugucuuggggauaucgcagcccgugacuugauuugcgcucaaaaguucaacggacugaccguccugcccccacucuuaacagaugagaugaucgcccaguauacgucagcacugcuugcuggcaccauuacgagugguuggacauuuggggccggcgcggccuugcagaucccuuucgcuaugcagauggcauaccgguuuaauggaauaggcgugacccaaaacgugcucuaugaaaaucagaaacugauugccaaccaguucaacuccgcuaucgggaagauucaggacucucuaagcuccacagccucagcacugggaaaacuccaagacgucguuaaucagaacgcgcaggcccugaauacucuugugaagcaguugagcaguaacuuuggcgcuaucucuuccguacugaaugauauauuaagccgacucgacaagguggaggccgagguccaaaucgauagacugauuaccgguaggcuucagucgcugcagacguacgugacacaacaguugauccgcgcagcugaaauucgggccucagcaaaccucgccgcuaccaaaaugucugagugcguucuggggcagaguaagagaguggacuucuguggaaaaggcuaccaccuaauguccuuuccccagagcgcgccacauggugucguguuccugcacguuacuuaugugccggcccaagaaaagaauuuuaccacagcgccugcuaucugccacgauggcaaagcccauuuccccagggagggggucuuuguaucuaacggaacucacugguucgugacccagcgcaauuuuuacgagccacagauaauuacaacggacaacaccuucguuagcggcaauugugauguggucaucgggaucgugaacaauacuguauaugacccccuccagccugaacuggauuccuucaaggaggaacuugacaaauacuuuaagaaccauacaucaccagauguggacuugggagauauuaguggcaucaaugccagcgucguuaacauucaaaaggagauagaccgacugaaugaaguggcuaaaaacuuaaacgagucucucaucgaccugcaggagcuugguaaguaugaacaguacauuaaauggcccugguauaucuggcugggguucauugcaggacuaaucgccauagugauggucaccaucaugcucugcuguaugacuuccugcuguucaugccugaagggcuguugcaguugugguagcugcugcaaauuugaugaggacgauuccgaaccuguguugaagggcguuaagcugcacuacacaugaggacuaguuauaagacugacuagcccgaugggccucccaacgggcccuccuccccuccuugcaccgagauuaauaaaaaaaaaaaaaaaaaaaaaaaaaaaaaaaaaaaaaaaaaaaaaaaaaaaaaaaaaaaaaaaaugcaucccccccccccccccccccccccccccccccaaaggcucuuuucagagccaccagaauu

SEQ ID NO: 12958 - RNA, 4039 nt, Artificial Sequence
  SARS-CoV-2/Sweden/01/2020__EPI_ISL_411951 spike protein mRNA human (1-1273)
aggagaaagcuuaccauguucguguuucugguccuccuuccccugguuagcucccagugcgugaacuugaccacaagaacucaauuaccuccagccuacacuaauucuuucaccaggggcguauauuacccggacaagguguuucggucaaguguccugcacagcacacaggaucuauuccuccccuuuuucuccaacgugacuugguuucaugcuauccacguuucugggaccaauggaacaaaacgcuucgacaacccugugcugccauuuaaugauggugucuauuucgcaucgaccgagaagucaaacauuauacgaggcuggaucuuugggacuacacuugacagcaaaacccagagucuguugauugugaauaacgccacgaauguaguuaucaaggugugugaguuccaguuuugcaacgaucccuuccucggagucuacuaucauaaaaauaacaaguccuggauggagucugaguuccguguguacagcuccgcgaauaacuguacuuuugaauaugugucacaaccuuuccugauggaccuggaaggcaagcaggguaauuuuaaaaaccucagagaguucgucuuuaagaacauugauggguacuucaaaaucuacaguaagcacaccccaauaaauuuaguuagggaccugccccagggauuuagcgcucuugagccuuugguggaucugccaaucggcauuaacaucacacgguuccagacucuacucgcccugcaucgcucuuaucuuaccccgggcgacuccucaagcggguggacagcaggagccgcugcauacuauguagguuaccugcaacccagaaccuuuuugcucaaauauaaugaaaacggcacgauuacugaugccguggacugcgcucuggauccuuuaagugagacaaaguguacccugaagucuuucacugucgaaaaagggaucuaccagacauccaauuuuagggugcagccaaccgagagcauaguucgguuccccaacauuacgaaucucugcccuuuuggagagguguucaacgccacccgcuucgcgucggucuaugcauggaaucgaaagagaaucucuaacuguguggccgacuacuccguacuuuacaauucagcuaguuuuagcacauucaaaugcuauggcguuuccccaacuaagcugaacgacuuguguuuuaccaauguguacgccgauucuuucgucauuaggggugacgaagugcggcagaucgcacccgggcaaacaggaaaaaucgcugauuauaacuacaagcuaccggacgauuuuacuggcugcgucauugccuggaauagcaacaaccuggacucaaaagugggcgggaauuauaacuaccucuaucgucuguuccgcaagaguaaucuuaagccuuuugagagagauauauccaccgaaaucuaccaggcgggaagcacacccuguaacgguguugagggcuucaauugcuacuuuccacugcagucuuauggguuccaaccuaccaacggagugggcuaccagcccuauaggguagucguguugucauuugaacuccugcacgccccagcaacuguuugcggucccaaaaagaguacgaauuuagugaaaaacaagugugucaauuucaacuuuaaugggcugacaggcaccggagugcuaacugagagcaacaaaaaguuccucccuuuccagcaguuuggccgggacauugcugauaccacagacgccguacgagauccacaaacccuggagauccuugacauaacuccgugcuccuucgggggagugucuguuauuacacccgguacgaauaccucgaaccaggucgcuguguuguaccaggacgugaauuguacugaagucccuguugccauccacgcagaucagcugacaccaaccuggcgcguguauagcacaggcuccaacguguuucaaacuagagccgggugccucaucggagcugagcauguaaacaauucauacgaaugugacauucccaucggcgcggguauuugcgcaaguuaucagacccagacgaacucuccuaggcgggcccgcagcgucgcuucccagucaauaaucgccuacaccaugagccugggggcagaaaauucuguggccuacuccaacaauaguauugcuaucccaacaaacuucacuaucagcguuaccacagaaauucuucccgugucuaugacuaagaccuccgucgauuguacgauguauauaugcggcgacucaacagaguguaguaaucuguugcuccaauacggcagcuuuugcacccagcugaacagagccuuaacuggaaucgcaguggagcaggauaaaaauacacaggaaguuuucgcgcaagugaagcagauuuauaaaaccccgccuaucaaggacugugggggauuuaacuucucgcagauucugccagaucccuccaaaccuucuaagaggagcuuuaucgaggaccuacucuucaauaagguaacucuggcugaugccgguuuuauaaaacaauacggcgacugccuuggggauaucgcagcccgugacuugauuugcgcucagaaguucaacggacugaccguccugcccccacucuuaacagaugaaaugaucgcccaguauacgucagcacugcuugcuggcaccauuacgagugguuggacauucggggccggcgcggccuugcagaucccuuuugcuaugcaaauggcauaccgguucaauggaauaggcgugacccagaacgugcucuaugagaaucagaaacugauugccaaccaguuuaacuccgcuaucgggaagauucaagacucucuaagcuccacagccucagcacugggaaaacuccaggacgucguuaaucagaacgcgcaggcccugaauacucuugugaagcaauugagcaguaacuucggcgcuaucucuuccguacugaaugauauauuaagccgacucgacaagguggaagccgagguccagaucgauagacugauuaccgguaggcuucagucgcugcaaacguacgugacacagcaguugauccgcgcagcugagauucgggccucagcaaaccucgccgcuaccaaaaugucugaauguguucuggggcagaguaagagaguggacuuuugcggaaaaggcuaccaccuaauguccuucccccaaagcgcgccacauggugucguguuucugcacguuacuuaugugccggcccaggagaagaauuucaccacagcuccugcaaucugucacgauggcaaagcccauuuucccagggaaggggucuucguaucuaacggaacucacugguuugugacccagcgcaauuucuacgagccacagauaauuacaacggacaacaccuuuguuagcggcaauugcgauguggucaucgggaucgugaacaauacuguauaugacccccuccaaccugagcuggauuccuucaaggaggaacuugacaaauacuucaagaaccauacaucaccagauguggacuugggagauauuaguggcaucaaugccagcgucguuaacauucagaaggaaauagaccgacugaaugagguggcuaaaaacuuaaacgaaucucucaucgaccugcaggagcuugguaaguaugagcaguacauuaaauggcccugguauaucuggcugggguuuauugcaggacuaaucgccauagugauggucaccaucaugcucuguugcaugacuuccuguugcucaugucugaagggcugcuguaguugcgguagcugcuguaaauucgaugaagacgauuccgagccuguguugaagggcguuaagcugcacuacacaugaggacuaguuauaagacugacuagcccgaugggccucccaacgggcccuccuccccuccuugcaccgagauuaauaaaaaaaaaaaaaaaaaaaaaaaaaaaaaaaaaaaaaaaaaaaaaaaaaaaaaaaaaaaaaaaaugcaucccccccccccccccccccccccccccccccaaaggcucuuuucagagccaccagaauu

SEQ ID NO: 12959 - RNA, 4039 nt, Artificial Sequence
  SARS-CoV-2/Tianmen/HBCDC-HB-07/2020__EPI_ISL_412983 spike protein mRNA human (1-1273)
aggagaaagcuuaccauguucguguuucugguccuccuuccccugguuagcucccagugcgugaacuugaccacaagaacucaauuaccuccagccuacacuaauucuuucaccaggggcguauauuacccggacaagguguuucggucaaguguccugcacagcacacaggaucuauuccuccccuuuuucuccaacgugacuugguuucaugcuauccacguuucugggaccaauggaacaaaacgcuucgacaacccugugcugccauuuaaugauggugucuauuucgcaucgaccgagaagucaaacauuauacgaggcuggaucuuugggacuacacuugacagcaaaacccagagucuguugauugugaauaacgccacgaauguaguuaucaaggugugugaguuccaguuuugcaacgaucccuuccucggagucuacuaucauaaaaauaacaaguccuggauggagucugaguuccguguguacagcuccgcgaauaacuguacuuuugaauaugugucacaaccuuuccugauggaccuggaaggcaagcaggguaauuuuaaaaaccucagagaguucgucuuuaagaacauugauggguacuucaaaaucuacaguaagcacaccccaauaaauuuaguuagggaccugccccagggauuuagcgcucuugagccuuugguggaucugccaaucggcauuaacaucacacgguuccagacucuacucgcccugcaucgcucuuaucuuaccccgggcgacuccucaagcggguggacagcaggagccgcugcauacuauguagguuaccugcaacccagaaccuuuuugcucaaauauaaugaaaacggcacgauuacugaugccguggacugcgcucuggauccuuuaagugagacaaaguguacccugaagucuuucacugucgaaaaagggaucuaccagacauccaauuuuagggugcagccaaccgagagcauaguucgguuccccaacauuacgaaucucugcccuuuuggagagguguucaacgccacccgcuucgcgucggucuaugcauggaaucgaaagagaaucucuaacuguguggccgacuacuccguacuuuacaauucagcuaguuuuagcacauucaaaugcuauggcguuuccccaacuaagcugaacgacuuguguuuuaccaauguguacgccgauucuuucgucauuaggggugacgaagugcggcagaucgcacccgggcaaacaggaaaaaucgcugauuauaacuacaagcuaccggacgauuuuacuggcugcgucauugccuggaauagcaacaaccuggacucaaaagugggcgggaauuauaacuaccucuaucgucuguuccgcaagaguaaucuuaagccuuuugagagagauauauccaccgaaaucuaccaggcgggaagcacacccuguaacgguguugagggcuucaauugcuacuuuccacugcagucuuauggguuccaaccuaccaacggagugggcuaccagcccuauaggguagucguguugucauuugaacuccugcacgccccagcaacuguuugcggucccaaaaagaguacgaauuuagugaaaaacaagugugucaauuucaacuuuaaugggcugacaggcaccggagugcuaacugagagcaacaaaaaguuccucccuuuccagcaguuuggccgggacauugcugauaccacagacgccguacgagauccacaaacccuggagauccuugacauaacuccgugcuccuucgggggagugucuguuauuacacccgguacgaauaccucgaaccaggucgcuguguuguaccaggaccugaauuguacugaagugccugucgccauccacgcagaucagcucacaccaaccuggcgcguuuauagcacaggcuccaacguguuucaaacuagagccgggugccugaucggagcugagcaugugaacaauucauacgaaugugacauucccaucggcgcggguauuugcgcaaguuaucagacccagacgaacucuccuaggcgggcccgcagcguagcuucccagucaauaaucgccuacaccaugagccuuggggcagaaaauucugucgccuacuccaacaauaguauugcuaucccaacaaacuucacuaucagcgugaccacagaaauucugcccguuucuaugacuaagaccuccguggauuguacgauguauauaugcggcgacucaacagaguguaguaauuugcuccugcaauacggcagcuuuugcacccaguuaaacagagcccugacuggaaucgcagucgagcaggauaaaaauacacaggaaguguucgcgcaaguuaagcagauuuauaaaaccccgccuaucaaggacuuugggggauucaacuuuucgcagauucuaccagaucccuccaaaccuucuaagaggagcuucaucgaggaccuccuguuuaauaaggugacucuugcugaugccgguuucauaaaacaauacggcgacuguuugggggauaucgcagcccgugaccugauuugcgcucagaaguucaacggacucaccguacugcccccauuacugacagaugaaaugaucgcccaguauacgucagcacuuuuggcuggcaccauuacgagugguuggacauuuggggccggcgcggcccuccagaucccuuucgcuaugcaaauggcauaccgguuuaauggaauaggcgucacccagaacgugcuguaugagaaucagaaacuaauugccaaccaguucaacuccgcuaucgggaagauucaagacucucugagcuccacagccucagcacucggaaaacugcaggacguggucaaucagaacgcgcaggcccuuaauacuuugguuaagcaacugagcaguaacuuuggcgcuaucucuuccguguuaaaugauauacucagccgacuggacaagguagaagccgaggugcagaucgauagacuuauuaccgguaggcugcagucguugcaaacguacgucacacagcagcucauccgcgcagcugagauucgggccucagcaaaccuggccgcuaccaaaaugucugaaugcgugcuagggcagaguaagagaguugacuucuguggaaaaggcuaccaccugauguccuuuccccaaagcgcgccacaugguguggucuuccuccacgugacuuauguuccggcccaggagaagaauuuuaccacagcuccugcaaucugccacgauggcaaagcccauuuccccagggaagggguguuugucucuaacggaacucacugguucguaacccagcgcaauuuuuacgagccacagauaauuacaacggacaacaccuucgugagcggcaauugugauguugugaucgggaucgucaacaauacuguguaugacccccugcaaccugagcuugauuccuucaaggaagaguuggacaaauacuuuaagaaccauacaucaccagauguagaccugggagauauuaguggcaucaaugccagcguggucaacauucagaaggaaauagaccgauuaaaugagguugcuaaaaaccucaacgaaucucugaucgaccuucaggagcuggguaaguaugagcaguacauuaaauggcccugguauaucuggcuaggguucauugcaggacucaucgccauagugauggugaccaucaugcugugcuguaugacuuccugcuguucaugcuugaagggcuguugcaguugugguagcugcugcaaauuugaugaagacgauuccgagccuguccugaagggcgugaaguuacacuacacaugaggacuaguuauaagacugacuagcccgaugggccucccaacgggcccuccuccccuccuugcaccgagauuaauaaaaaaaaaaaaaaaaaaaaaaaaaaaaaaaaaaaaaaaaaaaaaaaaaaaaaaaaaaaaaaaaugcaucccccccccccccccccccccccccccccccaaaggcucuuuucagagccaccagaauu

SEQ ID NO: 12960 - RNA, 4039 nt, Artificial Sequence
  SARS-CoV-2/Hong Kong/case42_VM20002493/2020__EPI_ISL_414527 spike protein mRNA human (1-1273)
aggagaaagcuuaccauguucguguuucugguccuccuuccccugguuagcucccagugcgugaacuugaccacaagaacucaauuaccuccagccuacacgaauagcuucaccaggggcguauauuacccggacaagguguuucggucaaguguccugcacagcacacaggaucuauuccuccccuuuuucuccaacgugacuugguuucaugcuauccacguuucugggaccaauggaacaaaacgcuucgacaacccugugcugccauuuaaugauggugucuauuucgcaucgaccgagaagucaaacauuauacgaggcuggaucuuugggacuacacuugacagcaaaacccagagucuguugauugugaauaacgccacgaauguaguuaucaaggugugugaguuccaguuuugcaacgaucccuuccucggagucuacuaucauaaaaauaacaaguccuggauggagucugaguuccguguguacagcuccgcgaauaacuguacuuuugaauaugugucacaaccuuuccugauggaccuggaaggcaagcaggguaauuuuaaaaaccucagagaguucgucuuuaagaacauugauggguacuucaaaaucuacaguaagcacaccccaauaaauuuaguuagggaccugccccagggauuuagcgcucuugagccuuugguggaucugccaaucggcauuaacaucacacgguuccagacucuacucgcccugcaucgcucuuaucuuaccccgggcgacuccucaagcggguggacagcaggagccgcugcauacuauguagguuaccugcaacccagaaccuuuuugcucaaauauaaugaaaacggcacgauuacugaugccguggacugcgcucuggauccuuuaagugagacaaaguguacccugaagucuuucacugucgaaaaagggaucuaccagacauccaauuuuagggugcagccaaccgagagcauaguucgguuccccaacauuacgaaucucugcccuuuuggagagguguucaacgccacccgcuucgcgucggucuaugcauggaaucgaaagagaaucucuaacuguguggccgacuacuccguacuuuacaauucagcuaguuuuagcacauucaaaugcuauggcguuuccccaacuaagcugaacgacuuguguuuuaccaauguguacgccgauucuuucgucauuaggggugacgaagugcggcagaucgcacccgggcaaacaggaaaaaucgcugauuauaacuacaagcuaccggacgauuuuacuggcugcgucauugccuggaauagcaacaaccuggacucaaaagugggcgggaauuauaacuaccucuaucgucuguuccgcaagaguaaucuuaagccuuuugagagagauauauccaccgaaaucuaccaggcgggaagcacacccuguaacgguguugagggcuucaauugcuacuuuccacugcagucuuauggguuccaaccuaccaacggagugggcuaccagcccuauaggguagucguguugucauuugaacuccugcacgccccagcaacuguuugcggucccaaaaagaguacgaauuuagugaaaaacaagugugucaauuucaacuuuaaugggcugacaggcaccggagugcuaacugagagcaacaaaaaguuccucccuuuccagcaguuuggccgggacauugcugauaccacagacgccguacgagauccacaaacccuggagauccuugacauaacuccgugcuccuucgggggagugucuguuauuacacccgguacgaauaccucgaaccaggucgcuguguuguaccaggacgugaauuguacugaagucccuguugccauccacgcagaucagcugacaccaaccuggcgcguguauagcacaggcuccaacguguuucaaacuagagccgggugccucaucggagcugagcauguaaacaauucauacgaaugugacauucccaucggcgcggguauuugcgcaaguuaucagacccagacgaacucuccuaggcgggcccgcagcgucgcuucccagucaauaaucgccuacaccaugagccugggggcagaaaauucuguggccuacuccaacaauaguauugcuaucccaacaaacuucgccaucagcguuacuaccgaaauucuucccgugucuaugacaaagacuuccgucgauuguaccauguauauaugcggcgacucaacggaguguaguaaucuguugcuccaauacggaucuuuuugcacacagcugaacagagcauuaaccggcaucgcgguggagcaggauaaaaauacucaggaaguuuucgcucaagugaagcagauuuauaaaacaccgccuaucaaggacuuugggggauucaacuuuucgcagauucugccagaucccuccaaaccuucuaagaggagcuucaucgaggaccuacucuuuaauaagguaacccuggccgaugcagguuucauaaaacaauacggcgacugucuuggggauaucgccgcucgugacuugauuugcgcccagaaguucaacggacugacuguccugcccccacucuuaaccgaugaaaugaucgcacaguauacaucagcucugcuugccggcacgauuaccagugguuggacuuuuggggcgggcgccgcuuugcagaucccuuucgcaaugcaaauggccuaccgguuuaauggaauaggcgugacacagaacgugcucuaugagaaucagaaacugauugcuaaccaguucaacuccgccaucgggaagauucaagacucucuaagcuccaccgcaucagcgcugggaaaacuccaggacgucguuaaucagaacgcccaggcucugaauacacuugugaagcaauugagcaguaacuuuggcgccaucucuuccguacugaaugauauauuaagccgacucgacaagguggaagcagagguccagaucgauagacugauuacugguaggcuucagucgcugcaaaccuacgugacgcagcaguugauccgcgcugccgagauucgggcaucagccaaccucgcugcgacaaaaaugucugaaugcguucuggggcagaguaagagaguggacuucuguggaaaaggcuaccaccuaauguccuuuccccaaagcgccccacauggugucguguuccugcacguuaccuaugugccggcacaggagaagaauuuuacuaccgcuccugccaucugccacgauggcaaagcccauuuccccagggaaggggucuuuguaucuaacggaacacacugguucgugacucagcgcaauuuuuacgagccacagauaauuaccacagacaacacguucguuagcggcaauugugauguggucaucgggaucgugaacaauaccguauaugacccccuccaaccugagcuggauuccuucaaggaggaacuugacaaauacuuuaagaaccauacuucaccagauguggacuugggagauauuaguggcaucaaugcuagcgucguuaacauucagaaggaaauagaccgacugaaugagguggccaaaaacuuaaacgaaucucucaucgaccugcaggagcuugguaaguaugagcaguacauuaaauggcccugguauaucuggcugggguucauugcaggacuaaucgcgauagugauggucacaaucaugcucugcuguaugaccuccugcuguucaugccugaagggcuguugcaguugugguagcugcugcaaauuugaugaagacgauuccgagccuguguugaagggcguuaagcugcacuacacuugaggacuaguuauaagacugacuagcccgaugggccucccaacgggcccuccuccccuccuugcaccgagauuaauaaaaaaaaaaaaaaaaaaaaaaaaaaaaaaaaaaaaaaaaaaaaaaaaaaaaaaaaaaaaaaaaugcaucccccccccccccccccccccccccccccccaaaggcucuuuucagagccaccagaauu

SEQ ID NO: 12961 - RNA, 4039 nt, Artificial Sequence
  SARS-CoV-2/USA/CruiseA-23/2020__EPI_ISL_414482 spike protein mRNA human (1-1273)
aggagaaagcuuaccauguucguguuucugguccuccuuccccugguuagcucccagugcgugaacuugaccacaagaacucaauuaccuccagccuacacuaauucuuucaccaggggcguauauuacccggacaagguguuucggucaaguguccugcacagcacacaggaucuauuccuccccuuuuucuccaacgugacuugguuucaugcuauccacguuucugggaccaauggaacaaaacgcuucgacaacccugugcugccauuuaaugauggugucuauuucgcaucgaccgagaagucaaacauuauacgaggcuggaucuuugggacuacacuugacagcaaaacccagagucuguugauugugaauaacgccacgaauguaguuaucaaggugugugaguuccaguuuugcaacgaucccuuccucggagucuacuaucauaaaaauaacaaguccuggauggagucugaguuccguguguacagcuccgcgaauaacuguacuuuugaguaugugucacaaccuuuccugauggaccuggaagucaagcagggcaauuuuaaaaaccucagagaguucguuuuuaagaacauugaugguuacuucaaaaucuacaguaagcacaccccaauaaauuuagugagggaccugccccagggguuuagcgcucuugagccuuugguagaucugccaaucggaauuaacaucacacgguuccagacucuacucgcccugcaucgcucuuaucuuaccccgggcgacuccucaagcggcuggacagcaggggccgcugcauacuaugugggauaccugcaacccagaaccuuuuugcucaaauauaaugaaaacgguacgauuacugaugccgucgacugcgcucuggauccuuuaagugagacaaaguguacccugaagucuuucacuguggaaaaaggcaucuaccagacauccaauuuuaggguucagccaaccgagagcauagugcgguuccccaacauuacgaaucucugcccuuuuggggaggucuucaacgccacccgcuucgcgucgguguaugcauggaaucgaaagagaaucucuaacuguguagccgacuacuccguucuuuacaauucagcuaguuuuagcacauucaaaugcuauggaguguccccaacuaagcugaacgacuuguguuuuaccaaugucuacgccgauucuuucgugauuaggggcgacgaaguccggcagaucgcacccggucaaacagggaaaaucgcugauuauaacuacaagcuaccggacgauuuuacuggaugcgugauugccuggaauagcaacaaccuggacucaaaaguuggcggcaauuauaacuaccucuaucgucuguuccgcaagaguaaucuuaagccuuuugagagagauauauccaccgaaaucuaccaggcggggagcacacccuguaacggaguggaggguuucaauugcuacuuuccacugcagucuuauggcuuccaaccuaccaacgggguaggauaccagcccuauagggucgugguuuugucauuugaacuccugcacgccccagcaacugugugcggccccaaaaagaguacgaauuuagucaaaaacaagugugugaauuucaacuuuaauggucugacagggaccggcguacuaacugagagcaacaaaaaguuccucccuuuccagcaguuuggacgggacauugcugauaccacagacgccgugcgagauccacaaacccuggagauccuugacauaacuccgugcuccuucggcgggguuucugucauuacacccggaacgaauaccucgaaccagguggcuguguuguaccaggacgucaauuguacugaaguuccuguggccauccacgcagaucagcugacaccaaccuggcgcguguauagcacagguuccaacguauuucaaacuagagccggcugccucaucggggcugagcaugucaacaauucauacgaaugugacauucccaucggagcgggcauuugcgcaaguuaucagacccagacgaacucuccuaggcgggcccgcagcguggcuucccagucaauaaucgccuacaccaugagccugggugcagaaaauucuguugccuacuccaacaauaguauugcuaucccaacaaacuucacuaucagcgugaccacagaaauucuucccgucucuaugacuaagaccuccguggauuguacgauguauauaugcggggacucaacagaguguaguaaucuguugcuccaauacggcagcuuuugcacccagcugaacagagccuuaacuggaaucgcaguugagcaggauaaaaauacacaggaaguguucgcgcaaguaaagcagauuuauaaaaccccgccuaucaaggacuuuggcggguucaacuuuucgcagauucugccagaucccuccaaaccuucuaagaggagcuucaucgaggaccuacucuuuaauaaggucacucuggcugaugccggauucauaaaacaauacggugacugucuuggcgauaucgcagcccgugacuugauuugcgcucagaaguucaacgggcugaccgugcugcccccacucuuaacagaugaaaugaucgcccaguauacgucagcacugcuugcuggaaccauuacgaguggcuggacauuuggugccggggcggccuugcagaucccuuucgcuaugcaaauggcauaccgguuuaauggcauaggagugacccagaacguccucuaugagaaucagaaacugauugccaaccaguucaacuccgcuaucggcaagauucaagacucucuaagcuccacagccucagcacuggggaaacuccaggacguugugaaucagaacgcgcaggcccugaauacucuuguaaagcaauugagcaguaacuuuggagcuaucucuuccgugcugaaugauauauuaagccgacucgacaaggucgaagccgaggugcagaucgauagacugauuaccggcaggcuucagucgcugcaaacguacguuacacagcaguugauccgcgcagcugagauucgggccucagcaaaccucgccgcuaccaaaaugucugaaugcgugcugggucagaguaagagagucgacuucugugggaaaggauaccaccuaauguccuuuccccaaagcgcgccacauggcgugguuuuccugcacgugacuuaugucccggcccaggagaagaauuuuaccacagcuccugcaaucugccacgaugguaaagcccauuuccccagggaaggcguauuugugucuaacgggacucacugguucguuacccagcgcaauuuuuacgagccacagauaauuacaacggacaacaccuucgugagcggaaauugugaugucgugaucggcaucguaaacaauacuguguaugacccccuccaaccugagcuggauuccuucaaggaagaacuugacaaauacuuuaagaaccauacaucaccagaugucgacuugggggauauuaguggaaucaaugccagcguugugaacauucagaaggaaauagaccgacugaaugagguggcuaaaaacuuaaacgaaucucucaucgaccugcaggagcuuggcaaguaugagcaguacauuaaauggcccugguauaucuggcuggguuucauugcagggcuaaucgccauagucauggugaccaucaugcucugcuguaugacuuccugcuguucaugccugaagggauguugcaguuguggcagcugcugcaaauuugaugaagacgauuccgagccuguuuugaaggguguaaagcugcacuacacaugaggacuaguuauaagacugacuagcccgaugggccucccaacgggcccuccuccccuccuugcaccgagauuaauaaaaaaaaaaaaaaaaaaaaaaaaaaaaaaaaaaaaaaaaaaaaaaaaaaaaaaaaaaaaaaaaugcaucccccccccccccccccccccccccccccccaaaggcucuuuucagagccaccagaauu

SEQ ID NO: 12962 - RNA, 4039 nt, Artificial Sequence
  SARS-CoV-2/Hong Kong/case85_VM20002868/2020__EPI_ISL_414519 spike protein mRNA human (1-1273)
aggagaaagcuuaccauguucguguuucugguccucguuccccuugugagcucccagugcguaaaccugaccacaagaacucaauugccuccagccuacacuaauucuuucaccaggggcguguauuacccggacaaggucuuucggucaaguguguuacacagcacacaggaucuguuccuacccuuuuucuccaacguuacuugguuucaugcuauccacgugucugggaccaauggaacaaaacgcuucgacaacccuguccucccauuuaaugaugguguguauuucgcaucgaccgagaagucaaacauuauacgaggcuggaucuuugggacuacacuggacagcaaaacccagagucuucugauuguaaauaacgccacgaauguugugaucaaggucugugaguuccaguuuugcaacgaucccuucuugggaguguacuaucauaaaaauaacaaguccuggauggagucugaguuccguguguacagcuccgcgaauaacuguacuuuugaauaugucucacaaccuuuccucauggaccuggaaggcaagcaggguaauuuuaaaaaccugagagaguucguuuuuaagaacauugauggguacuucaaaaucuacaguaagcacaccccaauaaaucucgugagggacuuaccccagggauuuagcgcucuggagccucuuguagauuugccaaucggcauuaacaucacacgguuccagacucugcuagcccuccaucgcucuuaucugaccccgggcgacuccucaagcggguggacagcaggagccgcugcauacuauguggguuaccuucaacccagaaccuuucuguugaaauauaaugaaaacggcacgauuacugaugccgucgacugcgcucucgauccucugagugagacaaaguguaccuuaaagucuuucacuguggaaaaagggaucuaccagacauccaauuuuaggguucagccaaccgagagcauagugcgguuccccaacauuacgaaucugugcccuuuuggagaggucuucaacgccacccgcuucgcgucgguguaugcauggaaucgaaagagaaucucuaacuguguagccgacuacuccguucucuacaauucagcuaguuuuagcacauucaaaugcuauggcguguccccaacuaaacuuaacgaccuguguuuuaccaaugucuacgccgauucuuucgugauuaggggugacgaaguccggcagaucgcacccgggcaaacaggaaagaucgcugauuauaacuacaaguugccggacgauuuuacuggcugcgugauugccuggaauagcaacaaccuagacucaaaaguuggcgggaauuauaacuaccuguaucgucucuuccgcaagaguaaucugaagccuuuugagagagauauauccaccgaaaucuaccaggcgggaagcacacccuguaacgguguggagggcuucaauugcuacuuuccacuucagucuuauggguuccaaccuaccaacggaguaggcuaccagcccuauagggucgugguucugucauuugaauugcuccacgccccagcaacugugugcggucccaaaaagaguacgaaucuggucaaaaacaagugugugaauuucaacuuuaauggguuaacaggcaccggaguacugacugagagcaacaaaaaguuccuaccuuuccagcaguuuggccgggacauugcugauaccacagacgccgugcgagauccacaaacccucgagauccuggacauaacuccgugcuccuucgggggaguuucugucauuacacccgguacgaauaccucgaaccagguggcugugcuuuaccaggacgucaauuguacugaaguuccuguggccauccacgcagaucaguugacaccaaccuggcgcguguauagcacaggcuccaacguauuucaaacuagagccgggugccugaucggagcugagcaugucaacaauucauacgaaugugacauucccaucggcgcggguauuugcgcaaguuaucagacccagacgaacucuccuaggcgggcccgcagcguggcuucccagucaauaaucgccuacaccaugagccucggggcagaaaauucuguugccuacuccaacaauaguauugcuaucccaacaaacuucacuaucagcgugaccacagaaauucugcccgucucuaugacuaagaccuccguggauuguacgauguauauaugcggcgacucaacagaguguaguaaucuucuguugcaauacggcagcuuuugcacccagcucaacagagcccugacuggaaucgcaguugagcaggauaaaaauacacaggaaguguucgcgcaaguaaagcagauuuauaaaaccccgccuaucaaggacuuugggggauucaacuuuucgcagauuuuaccagaucccuccaaaccuucuaagaggagcuucaucgaggaccugcuauuuaauaaggucacucucgcugaugccgguuucauaaaacaauacggcgacugucugggggauaucgcagcccgugaccuuauuugcgcucagaaguucaacggauugaccgugcugcccccacuccugacagaugaaaugaucgcccaguauacgucagcauuacuggcuggcaccauuacgagugguuggacauuuggggccggcgcggcccuucagaucccuuucgcuaugcaaauggcauaccgguuuaauggaauaggcgugacccagaacgucuuguaugagaaucagaaacucauugccaaccaguucaacuccgcuaucgggaagauucaagacucucugagcuccacagccucagcacuaggaaaacugcaggacguugugaaucagaacgcgcaggcccucaauacucugguaaagcaacuuagcaguaacuuuggcgcuaucucuuccguguugaaugauauacugagccgauuagacaaggucgaagccgaggugcagaucgauagacucauuaccgguaggcugcagucgcuucaaacguacguuacacagcagcugauccgcgcagcugagauucgggccucagcaaacuuggccgcuaccaaaaugucugaaugcgugcucgggcagaguaagagagucgacuucuguggaaaaggcuaccaccugauguccuuuccccaaagcgcgccacauggugugguuuuccuacacgugacuuaugucccggcccaggagaagaauuuuaccacagcuccugcaaucugccacgauggcaaagcccauuuccccagggaagggguauuugugucuaacggaacucacugguucguuacccagcgcaauuuuuacgagccacagauaauuacaacggacaacaccuucgugagcggcaauugugaugucgugaucgggaucguaaacaauacuguguaugacccccugcaaccugagcucgauuccuucaaggaggaacuggacaaauacuuuaagaaccauacaucaccagaugucgaccuuggagauauuaguggcaucaaugccagcguugugaacauucagaaggaaauagaccgauugaaugagguggcuaaaaaccugaacgaaucuuuaaucgaccuccaggagcuggguaaguaugagcaguacauuaaauggcccugguauaucuggcuuggguucauugcaggacugaucgccauagucauggugaccaucaugcuaugcuguaugacuuccugcuguucaugccucaagggcuguugcaguugugguagcugcugcaaauuugaugaagacgauuccgagccuguucugaagggcguaaaguugcacuacacaugaggacuaguuauaagacugacuagcccgaugggccucccaacgggcccuccuccccuccuugcaccgagauuaauaaaaaaaaaaaaaaaaaaaaaaaaaaaaaaaaaaaaaaaaaaaaaaaaaaaaaaaaaaaaaaaaugcaucccccccccccccccccccccccccccccccaaaggcucuuuucagagccaccagaauu

SEQ ID NO: 12963 - RNA, 4039 nt, Artificial Sequence
  SARS-CoV-2/England/200990660/2020__EPI_ISL_414523 spike protein mRNA human (1-1273)
aggagaaagcuuaccauguucguguuucugguccuccuuccccugguuagcucccagugcgugaacuugaccacaagaacucaauuaccuccagccuacacuaauucuuucaccaggggcguauauuacccggacaagguguuucggucaaguguccugcacagcacacaggaucuauuccuccccuuuuucuccaacgugacuugguuucaugcuauccacguuucugggaccaauggaacaaaacgcuucgacaacccugugcugccauuuaaugauggugucuauuucgcaucgaccgagaagucaaacauuauacgaggcuggaucuuugggacuacacuugacagcaaaacccagagucuguugauugugaauaacgccacgaauguaguuaucaaggugugugaguuccaguuuugcaacgaucccuuccucggagucuacuaucauaaaaauaacaaguccuggauggagucugaguuccguguguacagcuccgcgaauaacuguacuuuugaguaugugucacaaccuuuccugauggaccuggaaggcaagcaggguaauuuuaaaaaccucagagaguucgucuuuaagaacauugauggguacuucaaaaucuacaguaagcacaccccaauaaauuuaguuagggaccugccccagggauuuagcgcucuugagccuuugguggaucugccaaucggcauuaacaucacacgguuccagacucuacucgcccugcaucgcucuuaucuuaccccgggcgacuccucaagcggguggacagcaggagccgcugcauacuauguagguuaccugcaacccagaaccuuuuugcucaaauauaaugaaaacggcacgauuacugaugccguggacugcgcucuggauccuuuaagugagacaaaguguacccugaagucuuucacugucgaaaaagggaucuaccagacauccaauuuuagggugcagccaaccgagagcauaguucgguuccccaacauuacgaaucucugcccuuuuggagagguguucaacgccacccgcuucgcgucggucuaugcauggaaucgaaagagaaucucuaacuguguggccgacuacuccguacuuuacaauucagcuaguuuuagcacauucaaaugcuauggcguuuccccaacuaagcugaacgacuuguguuuuaccaauguguacgccgauucuuucgucauuaggggugacgaagugcggcagaucgcacccgggcaaacaggaaaaaucgcugauuauaacuacaagcuaccggacgauuuuacuggcugcgucauugccuggaauagcaacaaccuggacucaaaagugggcgggaauuauaacuaccucuaucgucuguuccgcaagaguaaucuuaagccuuuugagagagauauauccaccgaaaucuaccaggcgggaagcacacccuguaacgguguugagggcuucaauugcuacuuuccacugcagucuuauggguuccaaccuaccaacggagugggcuaccagcccuauaggguagucguguugucauuugaacuccugcacgccccagcaacuguuugcggucccaaaaagaguacgaauuuagugaaaaacaagugugucaauuucaacuuuaaugggcugacaggcaccggagugcuaacugagagcaacaaaaaguuccucccuuuccagcaguuuggccgggacauugcugauaccacagacgccguacgagauccacaaacccuggagauccuugacauaacuccgugcuccuucgggggagugucuguuauuacacccgguacgaauaccucgaaccaggucgcuguguuguaccagggcgugaauuguacugaagucccuguugccauccacgcagaccagcugacaccaaccuggcgcguguauagcacaggguccaacguguuucaaacuagagccggaugccucaucggcgcugagcauguaaacaauucauacgaaugugauauucccaucggugcggggauuugcgcaaguuaucagacccagacgaacucuccuaggcgggcccgcagcgucgcuucccagucaauaaucgccuacaccaugagccugggcgcagaaaauucuguggccuacuccaacaauaguauugcuaucccaacaaacuucacuaucagcguuaccacagaaauucuucccgugucuaugacuaagaccuccgucgacuguacgauguauauaugcggagauucaacagaguguaguaaucuguugcuccaauacggcagcuuuugcacccagcugaacagagccuuaacugggaucgcaguggagcaggacaaaaauacacaggaaguuuucgcgcaagugaagcagauuuauaaaaccccgccuaucaaggauuuuggagguuucaacuuuucgcagauucugccagaccccuccaaaccuucuaagaggagcuucaucgaggaucuacucuuuaauaagguaacucuggcugacgccggcuucauaaaacaauacggggauugucuuggagacaucgcagcccgugauuugauuugcgcucagaaguucaacggccugaccguccugcccccacucuuaacagacgaaaugaucgcccaguauacgucagcacugcuugcugguaccauuacgaguggguggacauuuggcgccggagcggccuugcagaucccuuucgcuaugcaaauggcauaccgguuuaauggcauaggggugacccagaacgugcucuaugagaaucagaaacugauugccaaccaguucaacuccgcuaucggaaagauucaagauucucuaagcuccacagccucagcacugggcaaacuccaggacgucguuaaucagaacgcgcaggcccugaauacucuugugaagcaauugagcaguaacuuuggugcuaucucuuccguacugaaugacauauuaagccgacucgauaagguggaagccgagguccagaucgacagacugauuaccgggaggcuucagucgcugcaaacguacgugacacagcaguugauccgcgcagcugagauucgggccucagcaaaccucgccgcuaccaaaaugucugaaugcguucugggacagaguaagagaguggauuucuguggcaaagguuaccaccuaauguccuuuccccaaagcgcgccacauggcgucguguuccugcacguuacuuaugugccggcccaggagaagaauuuuaccacagcuccugcaaucugccacgacgggaaagcccauuuccccagggaaggagucuuuguaucuaacggcacucacugguucgugacccagcgcaauuuuuacgagccacagauaauuacaacggauaacaccuucguuagcgggaauugugacguggucaucggaaucgugaacaauacuguauaugauccccuccaaccugagcuggacuccuucaaggaagaacuugauaaauacuuuaagaaccauacaucaccagacguggauuugggcgacauuagugguaucaaugccagcgucguuaacauucagaaggaaauagaucgacugaaugagguggcuaaaaacuuaaacgaaucucucaucgaccugcaggagcuugggaaguaugagcaguacauuaaauggcccugguauaucuggcugggauucauugcaggccuaaucgccauagugauggucaccaucaugcucugcuguaugacuuccugcuguucaugccugaaggguuguugcaguuguggcagcugcugcaaauuugacgaagaugacuccgaguuggugcugaaggggguuaaguuacacuacacaugaggacuaguuauaagacugacuagcccgaugggccucccaacgggcccuccuccccuccuugcaccgagauuaauaaaaaaaaaaaaaaaaaaaaaaaaaaaaaaaaaaaaaaaaaaaaaaaaaaaaaaaaaaaaaaaaugcaucccccccccccccccccccccccccccccccaaaggcucuuuucagagccaccagaauu

SEQ ID NO: 12964 - RNA, 4039 nt, Artificial Sequence
  SARS-CoV-2/Australia/NSW09/2020__EPI_ISL_413595 spike protein mRNA human (1-1273)
aggagaaagcuuaccauguucguguuucugguccuccuuccccugguuagcucccagugcgugaacuugaccacaagaacucaauuaccuccagccuacacuaauucuuucaccaggggcguauauuacccggacaagguguuucggucaaguguccugcacagcacacaggaucuauuccuccccuuuuucuccaacgugacuugguuucaugcuauccacguuucugggaccaauggaacaaaacgcuucgacaacccugugcugccauuuaaugauggugucuauuucgcaucgaccgagaagucaaacauuauacgaggcuggaucuuugggacuacacuugacagcaaaacccagagucuguugauugugaauaacgccacgaauguaguuaucaaggugugugaguuccaguuuugcaacgaucccuuccucggagucuacuaucauaaaaauaacaaguccuggauggagucugaguuccguguguacagcuccgcgaauaacuguacuuuugaauaugugucacaaccuuuccugauggaccuggaaggcaagcaggguaauuuuaaaaaccucagagaguucgucuuuaagaacauugauggguacuucaaaaucuacaguaagcacaccccaauaaauuuaguuagggaccugccccagggauuuagcgcucuugagccuuugguggaucugccaaucggcauuaacaucacacgguuccagacucuacucgcccugcaucgcucuuaucuuaccccgggcgacuccucaagcggguggacagcaggagccgcugcauacuauguagguuaccugcaacccagaaccuuuuugcucaaauauaaugaaaacggcacgauuacugaugccguggacugcgcucuggauccuuuaagugagacaaaguguacccugaagucuuucacugucgaaaaagggaucuaccagacauccaauuuuagggugcagccaaccgagagcauaguucgguuccccaacauuacgaaucucugcccuuuuggagagguguucaacgccacccgcuucgcgucggucuaugcauggaaucgaaagagaaucucuaacuguguggccgacuacuccguacuuuacaauucagcuaguuuuagcacauucaaaugcuauggcguuuccccaacuaagcugaacgacuuguguuuuaccaauguguacgccgauucuuucgucauuaggggugacgaagugcggcagaucgcacccgggcaaacaggaaaaaucgcugauuauaacuacaagcuaccggacgauuuuacuggcugcgucauugccuggaauagcaacaaccuggacucaaaagugggcgggaauuauaacuaccucuaucgucuguuccgcaagaguaaucuuaagccuuuugagagagauauauccaccgaaaucuaccaggcgggaagcacacccuguaacgguguugagggcuucaauugcuacuuuccacugcagucuuauggguuccaaccuaccaacggagugggcuaccagcccuauaggguagucguguugucauuugaacuccugcacgccccagcaacuguuugcggucccaaaaagaguacgaauuuagugaaaaacaagugugucaauuucaacuuuaaugggcugacaggcaccggagugcuaacugagagcaacaaaaaguuccucccuuuccagcaguuuggccgggacauugcugauaccacagacgccguacgagauccacaaacccuggagauccuugacauaacuccgugcuccuucgggggagugucuguuauuacacccgguacgaauaccucgaaccaggucgcuguguuguaccaggacgugaauuguacugaagucccuguugccauccacgcagaucagcugacaccaaccuggcgcguguauagcacaggcuccaacguguuucaaacuagagccgggugccucaucggagcugagcauguaaacaauucauacgaaugugacauucccaucggcgcggguauuugcgcaaguuaucagacccagacgaacucuccuaggcgggcccgcagcgucgcuucccagucaauaaucgccuacaccaugagccugggggcagaaaauucuguggccuacuccaacaauaguauugcuaucccaacaaacuucacuaucagcguuaccacagaaauucuucccgugucuaugacuaagaccuccgucgauuguacgauguauauaugcggcgacucaacagaguguaguaaucuguugcuccaauacggcagcuuuugcacccagcugaacagagccuuaacuggaaucgcaguggagcaggauaaaaauacacaggaaguuuucgcgcaagugaagcagauuuauaaaaccccgccuaucaaggacuuugggggauucaacuuuucgcagauucugccagaucccuccaaaccuucuaagaggagcuucaucgaggaccuacucuuuaauaagguaacucuggcugaugccgguuucauaaaacaauacggcgacugucuuggggauaucgcagcccgugacuugauuugcgcucagaaguucaacggacugaccguccuacccccacuguuaacagaugaaaugaucgcccaguauacgucagcacugcuugcuggcaccauuacgagugguuggacauuuggggccggcgcggccuugcagaucccuuucgcuaugcaaauggcauaccgguuuaauggaauaggcgugacccagaacgugcucuaugagaaucagaaacugauugccaaccaguucaacuccgcuaucgggaagauucaagacucucucagcuuuacagccuccgcacugggaaaacuccaggacgucguuaaucagaacgcgcaggcccugaauacucuugugaagcaauugucaagcaacuucggcgcuaucaguucuguacugaaugauauauuaucccgacucgacaagguggaagccgagguccagaucgauagacugauuaccgguaggcuucagagccugcaaacguacgugacacagcaguugauccgcgcagcugagauucgggccucggcaaaccucgccgcuaccaaaaugucagaaugcguucuggggcagucuaagagaguggacuuuuguggaaaaggcuaccaccuaaugaguuucccccaauccgcgccacauggugucguguuucugcacguuacuuaugugccggcccaggagaagaauuucaccacagcuccugcaaucugccacgauggcaaagcccauuuucccagggaaggggucuucguaagcaacggaacucacugguuugugacccagcgcaauuucuacgagccacagauaauuacaacggacaacaccuucguuucuggcaauugugauguggucaucgggaucgugaacaauacuguauaugacccccuccaaccugagcuggauagcuuuaaggaggaacuugacaaauacuucaagaaccauacauccccagauguggacuugggagauauuucaggcaucaaugccagugucguuaacauucagaaggaaauagaccgacugaaugagguggcuaaaaacuuaaacgaaagccucaucgaccugcaggagcuugguaaguaugagcaguacauuaaauggcccugguauaucuggcugggguuuauugcaggacuaaucgccauagugauggucaccaucaugcucugcuguaugacuucuugcuguuccugccugaagggcuguugcucaugugguaguugcugcaaauucgaugaagacgauagcgagccuguguugaagggcguuaagcugcacuacacaugaggacuaguuauaagacugacuagcccgaugggccucccaacgggcccuccuccccuccuugcaccgagauuaauaaaaaaaaaaaaaaaaaaaaaaaaaaaaaaaaaaaaaaaaaaaaaaaaaaaaaaaaaaaaaaaaugcaucccccccccccccccccccccccccccccccaaaggcucuuuucagagccaccagaauu

SEQ ID NO: 12965 - RNA, 4039 nt, Artificial Sequence
  SARS-CoV-2/Australia/NSW10/2020__EPI_ISL_413596 spike protein mRNA human (1-1273)
aggagaaagcuuaccauguucguguuucugguccuccuuccccugguuagcucccagugcgugaacuugaccacaagaacucaauuaccuccagccuacacuaauucuuucaccaggggcguauauuacccggacaagguguuucggucaaguguccugcacagcacacaggaucuauuccuccccuuuuucuccaacgugacuugguuucaugcuauccacguuucugggaccaauggaacaaaacgcuucgacaacccugugcugccauuuaaugauggugucuauuucgcaucgaccgagaagucaaacauuauacgaggcuggaucuuugggacuacacuugacagcaaaacccagagucuguugauugugaauaacgccacgaauguaguuaucaaggugugugaguuccaguuuugcaacgaucccuuccucggagucuacuaucauaaaaauaacaaguccuggauggagucugaguuccguguguacagcuccgcgaauaacuguacuuuugaauaugugucacaaccuuuccugauggaccuggaaggcaagcaggguaauuuuaaaaaccucagagaguucgucuuuaagaacauugauggguacuucaaaaucuacaguaagcacaccccaauaaauuuaguuagggaccugccccagggauuuagcgcucuugagccuuugguggaucugccaaucggcauuaacaucacacgguuccagacucuacucgcccugcaucgcucuuaucuuaccccgggcgacuccucaagcggguggacagcaggagccgcugcauacuauguagguuaccugcaacccagaaccuuuuugcucaaauauaaugaaaacggcacgauuacugaugccguggacugcgcucuggauccuuuaagugagacaaaguguacccugaagucuuucacugucgaaaaagggaucuaccagacauccaauuuuagggugcagccaaccgagagcauaguucgguuccccaacauuacgaaucucugcccuuuuggagagguguucaacgccacccgcuucgcgucggucuaugcauggaaucgaaagagaaucucuaacuguguggccgacuacuccguacuuuacaauucagcuaguuuuagcacauucaaaugcuauggcguuuccccaacuaagcugaacgacuuguguuuuaccaauguguacgccgauucuuucgucauuaggggugacgaagugcggcagaucgcacccgggcaaacaggaaaaaucgcugauuauaacuacaagcuaccggacgauuuuacuggcugcgucauugccuggaauagcaacaaccuggacucaaaagugggcgggaauuauaacuaccucuaucgucuguuccgcaagaguaaucuuaagccuuuugagagagauauauccaccgaaaucuaccaggcgggaagcacacccuguaacgguguugagggcuucaauugcuacuuuccacugcagucuuauggguuccaaccuaccaacggagugggcuaccagcccuauaggguagucguguugucauuugaacuccugcacgccccagcaacuguuugcggucccaaaaagaguacgaauuuagugaaaaacaagugugucaauuucaacuuuaaugggcugacaggcaccggagugcuaacugagagcaacaaaaaguuccucccuuuccagcaguuuggccgggacauugcugauaccacagacgccguacgagauccacaaacccuggagauccuugacauaacuccgugcuccuucgggggagugucuguuauuacacccgguacgaauaccucgaaccaggucgcuguguuguaccaggacgugaauuguacugaagucccuguugccauccacgcagaucagcugacaccaaccuggcgcguguauagcacaggcuccaacguguuucaaacuagagccgggugccucaucggagcugagcauguaaacaauucauacgaaugugacauucccaucggcgcggguauuugcgcaaguuaucagacccagacgaacucuccuaggcgggcccgcagcgucgcuucccagucaauaaucgccuacaccaugagccugggggcagaaaauucuguggccuacuccaacaauaguauugcuaucccaacaaacuucacuaucagcguuaccacagaaauucuucccgugucuaugacuaagaccuccgucgauuguacgauguauauaugcggcgacucaacagaguguaguaaucuguugcuccaauacggcagcuuuugcacccagcugaacagagccuuaacuggaaucgcaguggagcaggauaaaaauacacaggaaguuuucgcgcaagugaagcagauuuauaaaaccccgccuaucaaggacuuugggggauucaacuuuucgcagauucugccagaucccuccaaaccuucuaagaggagcuucaucgaggaccuacucuuuaauaagguaacucuggcugaugccgguuucauaaaacaauacggcgacugucuuggggauaucgcagcccgugacuugauuugcgcucagaaguucaacggacugaccguccugcccccacucuuaacagaugaaaugaucgcccaguauacgucagcacugcuugcuggcaccauuacgagugguuggacauuuggggccggcgcggccuugcagaucccuuucgcuaugcaaauggcauaccgguuuaauggaauaggcgugacccagaacgugcucuaugagaaucagaaacugauugccaaccaguucaacuccgcuaucgggaagauucaagacucucuaagcuccacagccucagcacugggaaaacuccaggacgucguuaaucagaacgcgcaggcccugaauacucuugugaagcaauugagcaguaacuuuggcgcuaucucuuccguacugaaugauauauuaagccgacucgacaagguggaagccgagguccagaucgauagacugauuaccgguaggcuucagucgcugcaaacguacgugacacagcaguugauccgcgcagcugagauucgggccucagcaaaccucgccgcuaccaaaaugucugaaugcguucuggggcagaguaagagaguggacuucuguggaaaaggcuaccaccuaauguccuuuccccaaagcgcgccacauggugucguguuccugcacguuacuuaugugccggcccaggagaagaauuuuaccacagcuccugcaaucugccacgauggcaaagcccauuuccccagggaaggggucuuuguaucuaacggaacucacugguucgugacccagcgcaauuuuuacgagccacagauaauuacaacggacaacaccuucguuagcggcaauugugauguggucaucgggaucgugaacaauacuguauaugacccccuccaaccugagcuggauuccuucaaggaggaacuugacaaauacuuuaagaaccauacaucaccagauguggacuugggagauauuaguggcaucaaugccagcgucguuaacauucagaaggaaauagaccgacugaaugagguggcuaaaaacuuaaacgaaucucucaucgaccugcaggagcuugguaaguaugagcaguacauuaaauggcccugguauaucuggcugggguucauugcaggacuaaucgccauagugauggucaccaucaugcucugcuguaugacuuccugcuguucaugccugaagggcuguugcaguugugguagcugcuuuaaauucgaugaagacgauuccgagccuguguugaagggcguuaagcugcacuacacaugaggacuaguuauaagacugacuagcccgaugggccucccaacgggcccuccuccccuccuugcaccgagauuaauaaaaaaaaaaaaaaaaaaaaaaaaaaaaaaaaaaaaaaaaaaaaaaaaaaaaaaaaaaaaaaaaugcaucccccccccccccccccccccccccccccccaaaggcucuuuucagagccaccagaauu

SEQ ID NO: 12966 - RNA, 4039 nt, Artificial Sequence
  SARS-CoV-2/Switzerland/1000477797/2020__EPI_ISL_413023 spike protein mRNA human (1-1273)
aggagaaagcuuaccauguucguguuucugguccuccuuccccugguuagcucccagugcgugaacuugaccacaagaacucaauuaccuccagccuacacuaauucuuucaccaggggcguauauuacccggacaagguguuucggucaaguguccugcacagcacacaggaucuauuccuccccuuuuucuccaacgugacuugguuucaugcuauccacguuucugggaccaauggaacaaaacgcuucgacaacccugugcugccauuuaaugauggugucuauuucgcaucgaccgagaagucaaacauuauacgaggcuggaucuuugggacuacacuugacagcaaaacccagagucuguugauugugaauaacgccacgaauguaguuaucaaggugugugaguuccaguuuugcaacgaucccuuccucggagucuacuaucauaaaaauaacaaguccuggauggagucugaguuccguguguacagcuccgcgaauaacuguacuuuugaauaugugucacaaccuuuccugauggaccuggaaggcaagcaggguaauuuuaaaaaccucagagaguucgucuuuaagaacauugauggguacuucaauaucuacaguaaacacaccccaauaaacuuaguuagggaccugccccagggauuuagcgcucuugagccuuugguggaucugccaaucggcauuaauaucacacgguuccagacucuacucgcccugcaucgcucuuaucuuaccccgggcgacuccucaagcggguggacagcaggagccgcugcauacuauguagguuaccugcaacccagaaccuuuuugcucaaguauaacgaaaauggcacgauuacugaugccguggacugcgcucuggauccuuuaagugagacaaaauguacccugaagucuuucacugucgaaaaggggaucuaccagacauccaacuuuagggugcagccaaccgagagcauaguucgguuccccaauauuacgaaccucugcccuuuuggagagguguucaaugccacccgcuucgcgucggucuaugcauggaaccgaaaaagaaucucuaauuguguggccgacuacuccguacuuuacaacucagcuaguuuuagcacauucaagugcuauggcguuuccccaacuaaacugaaugacuuguguuuuaccaacguguacgccgauucuuucgucauuaggggugacgaagugcggcagaucgcacccgggcaaacaggaaagaucgcugauuauaauuacaaacuaccggacgauuuuacuggcugcgucauugccuggaacagcaacaaucuggacucaaaggugggcgggaacuauaauuaccucuaucgucuguuccgcaaaaguaaccuuaagccuuuugagagagauauauccaccgaaaucuaccaggcgggaagcacacccuguaaugguguugagggcuucaacugcuacuuuccacugcagucuuauggguuccaaccuaccaauggagugggcuaccagcccuauaggguagucguguugucauuugaacuccugcacgccccagcaacuguuugcggucccaagaaaaguacgaacuuagugaagaauaaaugugucaacuucaauuuuaacgggcugacaggcaccggagugcuaacugagagcaauaagaaauuccucccuuuccagcaguuuggccgggacauugcugauaccacagacgccguacgagauccacaaacccuggagauccuugacauaacuccgugcuccuucgggggagugucuguuauuacacccgguacgaacaccucgaaucaggucgcuguguuguaccagggcgugaacuguacugaagucccuguugccauccacgcagaccagcugacaccaaccuggcgcguguauagcacaggguccaacguguuucaaacuagagccggaugccucaucggcgcugagcauguaaauaacucauacgaaugugauauucccaucggugcggggauuugcgcaaguuaucagacccagaccaauucuccuaggcgggcccgcagcgucgcuucccagucaauaaucgccuacacgaugagccugggcgcagagaacucuguggccuacuccaauaacaguauugcuaucccaacaaauuucacuaucagcguuaccacagaaauucuucccgugucuaugacuaagaccuccgucgacuguacgauguauauaugcggagauucaacagaguguaguaaccuguugcuccaauacggcagcuuuugcacccagcugaauagagccuuaacugggaucgcaguggagcaggacaagaacacacaggaaguuuucgcgcaagugaaacagauuuauaagaccccgccuaucaaagauuuuggagguuucaauuuuucgcagauucugccagaccccuccaagccuucuaaaaggagcuucaucgaggaucuacucuuuaacaagguaacucuggcugacgccggcuucauaaagcaauacggggauugucuuggagacaucgcagcccgugauuugauuugcgcucagaaauucaauggccugaccguccugcccccacucuuaacagacgaaaugaucgcccaguauacgucagcacugcuugcugguaccauuacgaguggguggacauuuggcgccggagcggccuugcagaucccuuucgcuaugcaaauggcauaccgguuuaacggcauaggggugacccagaaugugcucuaugagaaccagaagcugauugccaaccaguucaauuccgcuaucggaaaaauucaagauucucuaagcuccacagccucagcacugggcaagcuccaggacgucguuaaccagaaugcgcaggcccugaacacucuugugaaacaauugagcaguaauuuuggugcuaucucuuccguacugaacgacauauuaagccgacucgauaagguggaagccgagguccagaucgacagacugauuaccgggaggcuucagucgcugcaaacguacgugacacagcaguugauccgcgcagcugagauucgggccucagcaaaucucgccgcuaccaagaugucugaaugcguucugggacagaguaaaagaguggauuucuguggcaaggguuaccaccuaauguccuuuccccaaagcgcgccacauggcgucguguuccugcacguuacuuaugugccggcccaggagaaaaacuuuaccacagcuccugcaaucugccacgacgggaaggcccauuuccccagggaaggagucuuuguaucuaauggcacucacugguucgugacccagcgcaacuuuuacgagccacagauaauuacaacggauaauaccuucguuagcgggaacugugacguggucaucggaaucgugaauaacacuguauaugauccccuccaaccugagcuggacuccuucaaagaagaacuugauaaguacuuuaaaaaucauacaucaccagacguggauuugggcgacauuagugguaucaacgccagcgucguuaauauucagaaggaaauagaucgacugaacgagguggcuaagaacuuaaaugaaucucucaucgaccugcaggagcuugggaaauaugagcaguacauuaaguggcccugguauaucuggcugggauucauugcaggccuaaucgccauagugauggucaccaucaugcucugcuguaugacuuccugcuguucaugccugaaagguuguugcaguuguggcagcugcugcaaguuugacgaagaugacuccgagccuguguugaaagggguuaagcugcacuacacaugaggacuaguuauaagacugacuagcccgaugggccucccaacgggcccuccuccccuccuugcaccgagauuaauaaaaaaaaaaaaaaaaaaaaaaaaaaaaaaaaaaaaaaaaaaaaaaaaaaaaaaaaaaaaaaaaugcaucccccccccccccccccccccccccccccccaaaggcucuuuucagagccaccagaauu

SEQ ID NO: 12967 - RNA, 4039 nt, Artificial Sequence
  SARS-CoV-2/Belgium/BA-02291/2020__EPI_ISL_415159 spike protein mRNA human (1-1273)
aggagaaagcuuaccauguucguguuucugguccuccuuccccugguuagcucccagugcgugaacuugaccacaagaacucaauuaccuccagccuacacuaauucuuucaccaggggcguauauuacccggacaagguguuucggucaaguguccugcacagcacacaggaucuauuccuccccuuuuucuccaacgugacuugguuucaugcuauccacguuucugggaccaauggaacaaaacgcuucgacaacccugugcugccauuuaaugauggugucuauuucgcaucgaccgagaagucaaacauuauacgaggcuggaucuuugggacuacacuugacagcaaaacccagagucuguugauugugaauaacgccacgaauguaguuaucaaggugugugaguuccaguuuugcaacgaucccuuccucggagucuacuaucauaaaaauaacaaguccuggauggagucugaguuccguguguacagcuccgcgaauaacuguacuuuugaguaugugucacaaccuuuccugauggaccuggaaggcaagcaggguaauuuuaaaaaccucagagaguucgucuuuaagaacauugauggguacuucaaaaucuacaguaagcacaccccaauaaauuuaguuagggaccugccccagggauuuagcgcucuugagccuuugguggaucugccaaucggcauuaacaucacacgguuccagacucuacucgcccugcaucgcucuuaucuuaccccgggcgacuccucaagcggguggacagcaggagccgcugcauacuauguagguuaccugcaacccagaaccuuuuugcucaaauauaaugaaaacggcacgauuacugaugccguggacugcgcucuggauccuuuaagugagacaaaguguacccugaagucuuucacugucgaaaaagggaucuaccagacauccaauuuuagggugcagccaaccgagagcauaguucgguuccccaacauuacgaaucucugcccuuuuggagagguguucaacgccacccgcuucgcgucggucuaugcauggaaucgaaagagaaucucuaacuguguggccgacuacuccguacuuuacaauucagcuaguuuuagcacauucaaaugcuauggcguuuccccaacuaagcugaacgacuuguguuuuaccaauguguacgccgauucuuucgucauuaggggugacgaagugcggcagaucgcacccgggcaaacaggaaaaaucgcugauuauaacuacaagcuaccggacgauuuuacuggcugcgucauugccuggaauagcaacaaccuggacucaaaagugggcgggaauuauaacuaccucuaucgucuguuccgcagaaguaaucuuaagccuuuugagagggauauauccaccgaaaucuaccaggcgggaagcacacccuguaacgguguugagggcuucaauugcuacuuuccacugcagucuuauggguuccaaccuaccaacggagugggcuaccagcccuaucggguagucguguugucauuugaacuccugccagcccccgcaacuguuugcgguccuaagaaaaguacgaauuuagugaagaacaaaugugucaauuucaacuuuaaugggcugacaggcaccggagugcuaacugagagcaacaagaaauuccucccauuccagcaguuuggccgagacauugcugauaccacagacgccguacgcgauccgcaaacccuggagauccuugacauaacucccugcuccuucgggggagugucuguuauuacaccugguacgaauaccucgaaccaggucgcuguguuguaccagggcgugaauuguacugaagucccaguugccauccacgcagaccagcugacacccaccuggagaguguauagcacaggguccaacguguuucaaacuagggccggaugccucaucggcgcugagcacguaaacaauucauacgaaugugauauuccuaucggugcggggauuugcgcaaguuaucagacccagacgaacucuccacggcgcgccagaagcgucgcuucccagucaauaaucgccuacaccaugagccugggcgcagaaaauucuguggccuacuccaacaauaguauugcuauccccacaaacuucacuaucagcguuaccacagaaauucuuccggugucuaugacuaagaccuccgucgacuguacgauguauauaugcggagauucaacagaguguaguaaucuguugcuccaauacggcagcuuuugcacccagcugaacagggccuuaacugggaucgcaguggagcaggacaagaauacacaggaaguuuucgcgcaagugaaacagauuuauaagaccccuccaaucaaagauuuuggagguuucaacuuuucgcagauucugcccgacccuuccaagcccucuaaacguagcuucaucgaggaucuacucuuuaauaagguaacucuggcugacgccggcuucauaaagcaauacggggauugucuuggagacaucgcagcccgggauuugauuugcgcucagaaauucaacggccugaccguccucccaccucuguuaacagacgaaaugaucgcccaguauacgucagcacugcuugcugguaccauuacgaguggguggacauuuggcgccggagcggccuugcagauccccuucgcuaugcaaauggcauaccgauuuaauggcauaggggugacccagaacgugcucuaugagaaucagaagcugauugccaaccaguucaacuccgcuaucggaaaaauucaagauucucuaagcuccgccgcaccagcgcugggcaagcuccaggacgucguuaaucagaacgcccaggcucugaauacacuugugaaacaauugucaagcaacuuuggugccaucaguucuguacugaaugacauauuauccagacucgauaagguggaagcagagguccagaucgacaggcugauuacugggcgccuucagagccugcaaaccuacgugacgcagcaguugauccgggcugccgagauuagagcaucggccaaccucgcugcgacaaagaugucagaaugcguucugggacagucuaaaaggguggauuucuguggcaaggguuaccaucuaaugaguuuuccgcaauccgccccucacggcgucguguuccugcauguuaccuaugugcccgcacaggagaaaaauuuuacuaccgcuccagccaucugccacgacgggaaggcccacuucccccgcgaaggagucuuuguaagcaacggcacacauugguucgugacucagcgaaauuuuuacgagccucagauaauuaccacagauaacacguucguuucugggaauugugacguggucaucggaaucgugaacaauaccguauaugauccacuccaacccgagcuggacagcuucaaagaagaacuugauaaguacuuuaaaaaccacacuuccccugacguggauuugggcgacauuucagguaucaaugcuagugucguuaacauucagaaggaaauagaucggcugaaugagguggcaaagaacuuaaacgaaagccucaucgaccugcaggagcuugggaaauaugagcaguacauuaaguggccgugguauaucuggcugggauucauugccggccuaaucgcgauagugauggucacaaucaugcucugcuguaugaccucuugcuguuccugccugaaagguuguugcucauguggcaguugcugcaaguuugacgaagaugacagcgagccaguguugaaagggguuaagcugcauuacacuugaggacuaguuauaagacugacuagcccgaugggccucccaacgggcccuccuccccuccuugcaccgagauuaauaaaaaaaaaaaaaaaaaaaaaaaaaaaaaaaaaaaaaaaaaaaaaaaaaaaaaaaaaaaaaaaaugcaucccccccccccccccccccccccccccccccaaaggcucuuuucagagccaccagaauu

SEQ ID NO: 12968 - RNA, 4039 nt, Artificial Sequence
  SARS-CoV-2/USA/WA8-UW5/2020__EPI_ISL_413486 spike protein mRNA human (1-1273)
aggagaaagcuuaccauguucguguuucugguccuccuuccccugguuagcucccagugcgugaacuugaccacaagaacucaauuaccuccagccuacacuaauucuuucaccaggggcguauauuacccggacaagguguuucggucaaguguccugcacagcacacaggaucuauuccuccccuuuuucuccaacgugacuugguuucaugcuauccacguuucugggaccaauggaacaaaacgcuucgacaacccugugcugccauuuaaugauggugucuauuucgcaucgaccgagaagucaaacauuauacgaggcuggaucuuugggacuacacuugacagcaaaacccagagucuguugauugugaauaacgccacgaauguaguuaucaaggugugugaguuccaguuuugcaacgaucccuuccucggagucuacuaucauaaaaauaacaaguccuggauggagucugaguuccguguguacagcuccgcgaauaacuguacuuuugaauaugugucacaaccuuuccugauggaccuggaaggcaagcaggguaauuuuaaaaaccucagagaguucgucuuuaagaacauugauggguacuucaaaaucuacaguaagcacaccccaauaaauuuaguuagggaccugccccagggauuuagcgcucuugagccuuugguggaucugccaaucggcauuaacaucacacgguuccagacucuacucgcccugcaucgcucuuaucuuaccccgggcgacuccucaagcggguggacagcaggagccgcugcauacuauguagguuaccugcaacccagaaccuuuuugcucaaauauaaugaaaacggcacgauuacugaugccguggacugcgcucuggauccuuuaagugagacaaaguguacccugaagucuuucacugucgaaaaagggaucuaccagacauccaauuuuagggugcagccaaccgagagcauaguucgguuccccaacauuacgaaucucugcccuuuuggagagguguucaacgccacccgcuucgcgucggucuaugcauggaaucgaaagagaaucucuaacuguguggccgacuacuccguacuuuacaauucagcuaguuuuagcacauucaaaugcuauggcguuuccccaacuaagcugaacgacuuguguuuuaccaauguguacgccgauucuuucgucauuaggggugacgaagugcggcagaucgcacccgggcaaacaggaaaaaucgcugauuauaacuacaagcuaccggacgauuuuacuggcugcgucauugccuggaauagcaacaaccuggacucaaaagugggcgggaauuauaacuaccucuaucgucuguuccgcaagaguaaucuuaagccuuuugagagagauauauccaccgaaaucuaccaggcgggaagcacacccuguaacgguguugagggcuucaauugcuacuuuccacugcagucuuauggguuccaaccuaccaacggagugggcuaccagcccuauaggguagucguguugucauuugaacuccugcacgccccagcaacuguuugcggucccaaaaagaguacgaauuuagugaaaaacaagugugucaauuucaacuuuaaugggcugacaggcaccggagugcuaacugagagcaacaaaaaguuccucccuuuccagcaguuuggccgggacauugcugauaccacagacgccguacgagauccacaaacccuggagauccuugacauaacuccgugcuccuucgggggagugucuguuauuacacccgguacgaauaccucgaaccaggucgcuguguuguaccaggacgugaauuguacugaagucccuguugccauccacgcagaucagcugacaccaaccuggcgcguguauagcacaggcuccaacguguuucaaacuagagccgggugccucaucggagcugaguacguaaacaauucauaugaaugugacauucccaucggcgcggguauuugcgcaaguuaccagacccagacgaacucuccuaggcgggcccgcagcgucgcuucccagucaauaaucgccuacaccaugagccugggggcagaaaauucuguggccuauuccaacaauaguauugcuaucccaacaaacuucacuaucagcguuaccacagaaauucuucccgugucuaugacuaagaccuccgucgauuguacgauguacauaugcggcgacucaacagaguguaguaaucuguugcuccaauauggcagcuuuugcacccagcugaacagagccuuaacuggaaucgcaguggagcaggauaaaaauacacaggaaguuuucgcgcaagugaagcagauuuacaaaaccccgccuaucaaggacuuugggggauucaacuuuucgcagauucugccagaucccuccaaaccuucuaagaggagcuucaucgaggaccuacucuuuaauaagguaacucuggcugaugccgguuucauaaaacaauauggcgacugucuuggggauaucgcagcccgugacuugauuugcgcucagaaguucaacggacugaccguccugcccccacucuuaacagaugaaaugaucgcccaguacacgucagcacugcuugcuggcaccauuacgagugguuggacauuuggggccggcgcggccuugcagaucccuuucgcuaugcaaauggcauaucgguuuaauggaauaggcgugacccagaacgugcucuacgagaaucagaaacugauugccaaccaguucaacuccgcuaucgggaagauucaagacucucuaagcuccacagccucagcacugggaaaacuccaggacgucguuaaucagaacgcgcaggcccugaauacucuugugaagcaauugagcaguaacuuuggcgcuaucucuuccguacugaaugauauauuaagccgacucgacaagguggaagccgagguccagaucgauagacugauuaccgguaggcuucagucgcugcaaacguacgugacacagcaguugauccgcgcagcugagauucgggccucagcaaaccucgccgcuaccaaaaugucugaaugcguucuggggcagaguaagagaguggacuucuguggaaaaggcuaucaucuaauguccuuuccccaaagcgcgccacacggugucguguuccugcauguuacuuacgugccggcccaggagaagaauuuuaccacagcuccugcaaucugccacgauggcaaagcccacuuccccagggaaggggucuuuguaucuaacggaacucauugguucgugacccagcgcaauuuuuaugagccacagauaauuacaacggacaacaccuucguuagcggcaauugugauguggucaucgggaucgugaacaauacuguauacgacccccuccaaccugagcuggauuccuucaaggaggaacuugacaaauauuuuaagaaccacacaucaccagauguggacuugggagauauuaguggcaucaaugccagcgucguuaacauucagaaggaaauagaccgacugaaugagguggcuaaaaacuuaaacgaaucucucaucgaccugcaggagcuugguaaguacgagcaguauauuaaauggcccugguacaucuggcugggguucauugcaggacuaaucgccauagugauggucaccaucaugcucugcuguaugacuuccugcuguucaugccugaagggcuguugcaguugugguagcugcugcaaauuugaugaagacgauuccgagccuguguugaagggcguuaagcugcauuacacaugaggacuaguuauaagacugacuagcccgaugggccucccaacgggcccuccuccccuccuugcaccgagauuaauaaaaaaaaaaaaaaaaaaaaaaaaaaaaaaaaaaaaaaaaaaaaaaaaaaaaaaaaaaaaaaaaugcaucccccccccccccccccccccccccccccccaaaggcucuuuucagagccaccagaauu

SEQ ID NO: 12969 - RNA, 4039 nt, Artificial Sequence
  SARS-CoV-2/England/20102000506/2020__EPI_ISL_415147 spike protein mRNA human (1-1273)
aggagaaagcuuaccauguucguguuucugguccuccuuccccugguuagcucccagugcgugaacuugaccacaagaacucaauuaccuccagccuacacuaauucuuucaccaggggcguauauuacccggacaagguguuucggucaaguguccugcacagcacacaggaucuauuccuccccuuuuucuccaacgugacuugguuucaugcuauccacguuucugggaccaauggaacaaaacgcuucgacaacccugugcugccauuuaaugauggugucuauuucgcaucgaccgagaagucaaacauuauacgaggcuggaucuuugggacuacacuugacagcaaaacccagagucuguugauugugaauaacgccacgaauguaguuaucaaggugugugaguuccaguuuugcaacgaucccuuccucggagucuacuaucauaaaaauaacaaguccuggauggagucugaguuccguguguacagcuccgcgaauaacuguacuuuugaguaugugucacaaccuuuccugauggaccuggaaggcaagcaggguaauuuuaaaaaccucagagaguucgucuuuaagaacauugauggguacuucaaaaucuacaguaagcacaccccaauaaauuuaguuagggaccugccccagggauuuagcgcucuugagccuuugguggaucugccaaucggcauuaacaucacacgguuccagacucuacucgcccugcaucgcucuuaucuuaccccgggcgacuccucaagcggguggacagcaggagccgcugcauacuauguagguuaccugcaacccagaaccuuuuugcucaaauauaaugaaaacggcacgauuacugaugccguggacugcgcucuggauccuuuaagugagacaaaguguacccugaagucuuucacugucgaaaaagggaucuaccagacauccaauuuuagggugcagccaaccgagagcauaguucgguuccccaacauuacgaaucucugcccuuuuggagagguguucaacgccacccgcuucgcgucggucuaugcauggaaucgaaagagaaucucuaacuguguggccgacuacuccguacuuuacaauucagcuaguuuuagcacauucaaaugcuauggcguuuccccaacuaagcugaacgacuuguguuuuaccaauguguacgccgauucuuucgucauuaggggugacgaagugcggcagaucgcacccgggcaaacaggaaaaaucgcugauuauaacuacaagcuaccggacgauuuuacuggcugcgucauugccuggaauagcaacaaccuggacucaaaagugggcgggaauuauaacuaccucuaucgucuguuccgcaagaguaaucuuaagccuuuugagagagauauauccaccgaaaucuaccaggcgggaagcacacccuguaacgguguugagggcuucaauugcuacuuuccacugcagucuuauggguuccaaccuaccaacggagugggcuaccagcccuauaggguagucguguugucauuugaacuccugcacgccccagcaacuguuugcggucccaaaaagaguacgaauuuagugaaaaacaagugugucaauuucaacuuuaaugggcugacaggcaccggagugcuaacugagagcaacaaaaaguuccucccuuuccagcaguuuggccgggacauugcugauaccacagacgccguacgagauccacaaacccuggagauccuugacauaacuccgugcuccuucgggggagugucuguuauuacacccgguacgaauaccucgaaccaggucgcuguguuguaccagggcgugaauuguacugaagucccuguugccauccacgcagaccagcugacaccaaccuggcgcguguauagcacaggguccaacguguuucaaacuagagccggaugccucaucggcgcugagcauguaaacaauucauacgaaugugauauucccaucggugcggggauuugcgcaaguuaucagacccagacgaacucuccuaggcgggcccgcagcgucgcuucccagucaauaaucgccuacaccaugagccugggcgcagaaaauucuguggccuacuccaacaauaguauugcuaucccaacaaacuucacuaucagcguuaccacagaaauucuucccgugucuaugacuaagaccuccgucgacuguacgauguauauaugcggagauucaacagaguguaguaaucuguugcuccaauacggcagcuuuugcacccagcugaacagagccuuaacugggaucgcaguggagcaggacaaaaauacacaggaaguuuucgcgcaagugaagcagauuuauaaaaccccgccuaucaaggauuuuggagguuucaacuuuucgcagauucugccagaccccuccaaaccuucuaagaggagcuucaucgaggaucuacucuuuaauaagguaacucuggcugacgccggcuucauaaaacaauacggguauugucuuggagauaucgcagcccgugacuugauuugcgcucagaaguucaacggccugaccguccugcccccacucuuaacagaugaaaugaucgcccaguacacgucagcacugcuugcugguaccauuacgaguggguggacauuuggcgccggagcggccuugcagaucccuuucgcuaugcaaauggcauaucgguuuaauggcauaggggugacccagaacgugcucuacgagaaucagaaacugauugccaaccaguucaacuccgcuaucggaaagauucaagacucucuaagcuccacagccucagcacugggcaaacuccaggaugucguuaaucagaacgcgcaggcccugaauacucuugugaagcaauugagcaguaacuuuggugcuaucucuuccguacugaaugacauauuaagccgacucgacaagguggaagccgagguccagaucgauagacugauuaccgggaggcuucagucgcugcaaacguacgugacacagcaguugauccgcgcagcugagauucgggccucagcaaaccucgccgcuaccaaaaugucugaaugcguucugggacagaguaagagaguggacuucuguggcaaagguuaucaccuaauguccuuuccccaaagcgcgccacauggcgucguguuccugcacguuacuuacgugccggcccaggagaagaauuuuaccacagcuccugcaaucugccacgaugggaaagcccauuuccccagggaaggagucuuuguaucuaacggcacucacugguucgugacccagcgcaauuuuuaugagccacagauaauuacaacggacaacaccuucguuagcgggaauugugauguggucaucggaaucgugaacaauacuguauacgacccccuccaaccugagcuggauuccuucaaggaagaacuugacaaauauuuuaagaaccauacaucaccagauguggacuugggcgauauuagugguaucaaugccagcgucguuaacauucagaaggaaauagaccgacugaaugagguggcuaaaaacuuaaacgaaucucucaucgaucugcaggagcuugggaaguacgagcaguauauuaaauggcccugguacaucuggcugggauucauugcaggccuaaucgccauagugauggucaccaucaugcucugcuguaugacuuccugcuguucaugccugaaggguuguugcaguuguggcagcugcugcaaauuugacgaagacgauuccgagccuguguugaaggggguuaagcugcacuacacaugaggacuaguuauaagacugacuagcccgaugggccucccaacgggcccuccuccccuccuugcaccgagauuaauaaaaaaaaaaaaaaaaaaaaaaaaaaaaaaaaaaaaaaaaaaaaaaaaaaaaaaaaaaaaaaaaugcaucccccccccccccccccccccccccccccccaaaggcucuuuucagagccaccagaauu

SEQ ID NO: 12970 - RNA, 4039 nt, Artificial Sequence
  SARS-CoV-2/Belgium/VAG-03013/2020__EPI_ISL_415155 spike protein mRNA human (1-1273)
aggagaaagcuuaccauguucguguuucugguccuccuuccccugguuagcucccagugcgugaacuugaccacaagaacucaauuaccuccagccuacacuaauucuuucaccaggggcguauauuacccggacaagguguuucggucaaguguccugcacagcacacaggaucuauuccuccccuuuuucuccaacgugacuugguuucaugcuauccacguuucugggaccaauggaacaaaacgcuucgacaacccugugcugccauuuaaugauggugucuauuucgcaucgaccgagaagucaaacauuauacgaggcuggaucuuugggacuacacuugacagcaaaacccagagucuguugauugugaauaacgccacgaauguaguuaucaaggugugugaguuccaguuuugcaacgaucccuuccucggagucuacuaucauaaaaauaacaaguccuggauggagucugaguuccguguguacagcuccgcgaauaacuguacuuuugaguaugugucacaaccuuuccugauggaccuggaaggcaagcaggguaauuuuaaaaaccucagagaguucgucuuuaagaacauugauggguacuucaaaaucuacaguaagcacaccccaauaaauuuaguuagggaccugccccagggauuuagcgcucuugagccuuugguggaucugccaaucggcauuaacaucacacgguuccagacucuacucgcccugcaucgcucuuaucuuaccccgggcgacuccucaagcggguggacagcaggagccgcugcauacuauguagguuaccugcaacccagaaccuuuuugcucaaauauaaugaaaacggcacgauuacugaugccguggacugcgcucuggauccuuuaagugagacaaaguguacccugaagucuuucacugucgaaaaagggaucuaccagacauccaauuuuagggugcagccaaccgagagcauaguucgguuccccaacauuacgaaucucugcccuuuuggagagguguucaacgccacccgcuucgcgucggucuaugcauggaaucgaaagagaaucucuaacuguguggccgacuacuccguacuuuacaauucagcuaguuuuagcacauucaaaugcuauggcguuuccccaacuaagcugaacgacuuguguuuuaccaauguguacgccgauucuuucgucauuaggggugacgaagugcggcagaucgcacccgggcaaacaggaaaaaucgcugauuauaacuacaagcuaccggacgauuuuacuggcugcgucauugccuggaauagcaacaaccuggacucaaaagugggcgggaauuauaacuaccucuaucgucuguuccgcaagaguaaucuuaagccuuuugagagagauauauccaccgaaaucuaccaggcgggaagcacacccuguaacgguguugagggcuucaauugcuacuuuccacugcagucuuauggguuccaaccuaccaacggagugggcuaccagcccuauaggguagucguguugucauuugaacuccugcacgccccagcaacuguuugcggucccaaaaagaguacgaauuuagugaaaaacaagugugucaauuucaacuuuaaugggcugacaggcaccggagugcuaacugagagcaacaaaaaguuccucccuuuccagcaguuuggccgggacauugcugauaccacagacgccguacgagauccacaaacccuggagauccuugacauaacuccgugcuccuucgggggagugucuguuauuacacccgguacgaauaccucgaaccaggucgcuguguuguaccagggcgugaauuguacugaagucccuguugccauccacgcagaccagcugacaccaaccuggcgcguguauagcacaggguccaacguguuucaaacuagagccggaugccucaucggcgcugagcauguaaacaauucauacgaaugugauauucccaucggugcggggauuugcgcaaguuaucagacccagacgaacucuccuaggcgggcccgcagcgucgcuucccagucaauaaucgccuacaccaugagccugggcgcagaaaauucuguggccuacuccaacaauaguauugcuaucccaacaaacuucacuaucagcguuaccacagaaauucuucccgugucuaugacuaagaccuccgucgacuguacgauguauauaugcggagauucaacagaguguaguaaucuguugcuccaauacggcagcuuuugcacccagcugaacagagccuuaacugggaucgcaguggagcaggacaaaaauacacaggaaguuuucgcgcaagugaagcagauuuauaaaaccccgccuaucaaggauuuuggagguuucaacuuuucgcagauucugccagaccccuccaaaccuucuaagaggagcuucaucgaggaucuacucuuuaauaagguaacucuggcugacgccggcuucauaaaacaauacggggauugucuuggagacaucgcagcccgugauuugauuugcgcucagaaguucaacggccugaccguccugcccccacucuuaacagacgaaaugaucgcccaguauacgucagcacugcuugcugguaccauuacgaguggguggacauuuggcgccggagcggccuugcagaucccuuucgcuaugcaaauggcauaccgguuuaauggcauaggggugacccagaacgugcucuaugagaaucagaaacugauugccaaccaguucaacuccgcuaucggaaagauucaagauucucuaagcuccacagccacugcacugggcaaacuccaggacgucguuaaucagaacgcgcaggcccugaauacccuugugaagcaauugucaagcaacuuuggugcuaucaguucuguacugaaugacauauuaucccgacucgauaagguggaagccgagguccagaucgacagacugauuacggggaggcuucagagccugcaaacauacgugacccagcaguugauccgcgcagcugagauucgggccucggcaaaccucgccgcuacuaaaaugucagaaugcguucugggacagucuaagagaguggauuucuguggcaaagguuaccaccuaaugaguuuuccccaauccgcgccacauggcgucguguuccugcacguuaccuaugugccggcccaggagaagaauuuuacaacugcuccugcaaucugccacgacgggaaagcccauuuccccagggaaggagucuuuguaagcaacggcacccacugguucgugacacagcgcaauuuuuacgagccacagauaauuacgaccgauaacacuuucguuucugggaauugugacguggucaucggaaucgugaacaauacaguauaugauccccuccaaccugagcuggacagcuucaaggaagaacuugauaaauacuuuaagaaccauaccuccccagacguggauuugggcgacauuucagguaucaaugccagugucguuaacauucagaaggaaauagaucgacugaaugagguggcuaaaaacuuaaacgaaagccucaucgaccugcaggagcuugggaaguaugagcaguacauuaaauggcccugguauaucuggcugggauucauugcaggccuaaucgccauagugauggucacuaucaugcucugcuguaugacaucuugcuguuccugccugaaggguuguugcucauguggcaguugcugcaaauuugacgaagaugacagcgagccuguguugaaggggguuaagcugcacuacaccugaggacuaguuauaagacugacuagcccgaugggccucccaacgggcccuccuccccuccuugcaccgagauuaauaaaaaaaaaaaaaaaaaaaaaaaaaaaaaaaaaaaaaaaaaaaaaaaaaaaaaaaaaaaaaaaaugcaucccccccccccccccccccccccccccccccaaaggcucuuuucagagccaccagaauu

SEQ ID NO: 12971 - RNA, 4039 nt, Artificial Sequence
  SARS-CoV-2/Belgium/BC-03016/2020__EPI_ISL_415157 spike protein mRNA human (1-1273)
aggagaaagcuuaccauguucguguuucugguccuccuuccccugguuagcucccagugcgugaacuugaccacaagaacucaauuaccuccagccuacacuaauucuuucaccaggggcguauauuacccggacaagguguuucggucaaguguccugcacagcacacaggaucuauuccuccccuuuuucuccaacgugacuugguuucaugcuauccacguuucugggaccaauggaacaaaacgcuucgacaacccugugcugccauuuaaugauggugucuauuucgcaucgaccgagaagucaaacauuauacgaggcuggaucuuugggacuacacuugacagcaaaacccagagucuguugauugugaauaacgccacgaauguaguuaucaaggugugugaguuccaguuuugcaacgaucccuuccucggagucuacuaucauaaaaauaacaaguccuggauggagucugaguuccguguguacagcuccgcgaauaacuguacuuuugaguaugugucacaaccuuuccugauggaccuggaaggcaagcaggguaauuuuaaaaaccucagagaguucgucuuuaagaacauugauggguacuucaaaaucuacaguaagcacaccccaauaaauuuaguuagggaccugccccagggauuuagcgcucuugagccuuugguggaucugccaaucggcauuaacaucacacgguuccagacucuacucgcccugcaucgcucuuaucuuaccccgggcgacuccucaagcggguggacagcaggagccgcugcauacuauguagguuaccugcaacccagaaccuuuuugcucaaauauaaugaaaacggcacgauuacugaugccguggacugcgcucuggauccuuuaagugagacaaaguguacccugaagucuuucacugucgaaaaagggaucuaccagacauccaauuuuagggugcagccaaccgagagcauaguucgguuccccaacauuacgaaucucugcccuuuuggagagguguucaacgccacccgcuucgcgucggucuaugcauggaaucgaaagagaaucucuaacuguguggccgacuacuccguacuuuacaauucagcuaguuuuagcacauucaaaugcuauggcguuuccccaacuaagcugaacgacuuguguuuuaccaauguguacgccgauucuuucgucauuaggggugacgaagugcggcagaucgcacccgggcaaacaggaaaaaucgcugauuauaacuacaagcuaccggacgauuuuacuggcugcgucauugccuggaauagcaacaaccuggacucaaaagugggcgggaauuauaacuaccucuaucgucuguuccgcaagaguaaucuuaagccuuuugagagagauauauccaccgaaaucuaccaggcgggaagcacacccuguaacgguguugagggcuucaauugcuacuuuccacugcagucuuauggguuccaaccuaccaacggagugggcuaccagcccuauaggguagucguguugucauuugaacuccugcacgccccagcaacuguuugcggucccaaaaagaguacgaauuuagugaaaaacaagugugucaauuucaacuuuaaugggcugacaggcaccggagugcuaacugagagcaacaaaaaguuccucccuuuccagcaguuuggccgggacauugcugauaccacagacgccguacgagauccacaaacccuggagauccuugacauaacuccgugcuccuucgggggagugucuguuauuacacccgguacgaauaccucgaaccaggucgcuguguuguaccagggcgugaauuguacugaagucccuguugccauccacgcagaccagcugacaccaaccuggcgcguguauagcacaggguccaacguguuucaaacuagagccggaugccucaucggcgcugagcauguaaacaauucauacgaaugugauauucccaucggugcggggauuugcgcaaguuaucagacccagacgaacucuccuaggcgggcccgcagcgucgcuucccagucaauaaucgccuacaccaugagccugggcgcagaaaauucuguggccuacuccaacaauaguauugcuaucccaacaaacuucacuaucagcguuaccacagaaauucuucccgugucuaugacuaagaccuccgucgacuguacgauguauauaugcggagauucaacagaguguaguaaucuguugcuccaauacggcagcuuuugcacccagcugaacagagccuuaacugggaucgcaguggagcaggacaaaaauacacaggaaguuuucgcgcaagugaagcagauuuauaaaaccccgccuaucaaggauuuuggagguuucaacuuuucgcagauucugccagaccccuccaaaccuucuaagaggagcuucaucgaggaucuacucuuuaauaagguaacucuggcugacgccggcuucauaaaacaauacggggauugucuuggagacaucgcagcccgugauuugauuugcgcucagaaguucaacggccugaccguccugcccccacucuuaacagacgaaaugaucgcccaguauacgucagcacugcuugcugguaccauuacgaguggguggacauuuggcgccggagcggccuugcagaucccuuucgcuaugcaaauggcauaccgguuuaauggcauaggggugacccagaacgugcucuaugagaaucagaaacugauugccaaccaguucaacuccgcuaucggaaagauucaagauucucuaagcuccacagcccccgcacugggcaaacuccaggacgucguuaaucagaacgcgcaggcccugaauacucuugugaagcaauugucaagcaacuuuggugcuaucaguucuguacugaaugacauauuaucccgacucgauaagguggaagccgagguccagaucgacagacugauuaccgggaggcuucagagccugcaaacguacgugacacagcaguugauccgcgcagcugagauucgggccucggcaaaccucgccgcuaccaaaaugucagaaugcguucugggacagucuaagagaguggauuucuguggcaaagguuaccaccuaaugaguuuuccacaauccgcgccgcauggcgucguguuccugcacguuacuuaugugccugcccaggagaagaauuuuaccacagcacccgcuaucugccacgacgggaaagcccauuucccaagggaaggagucuuuguaagcaacggcacucacugguucgugacccagcgcaauuuuuacgagccccagauaauuacaacggauaacaccuucguuucugggaauugugacguggucaucggaaucgugaacaauacuguauaugauccucuccaaccagagcuggacagcuucaaggaagaacuugauaaauacuuuaagaaccauacaucccccgacguggauuugggcgacauuucagguaucaaugccagugucguuaacauucagaaggaaauagaucgacugaaugagguggcuaaaaacuuaaacgaaagccucaucgaccugcaggagcuugggaaguaugagcaguacauuaaauggccuugguauaucuggcugggauucauugcaggccuaaucgccauagugauggucaccaucaugcucugcuguaugacuucuugcuguuccugccugaaggguuguugcucauguggcaguugcugcaaauuugacgaagaugacagcgagccgguguugaaggggguuaagcugcacuacacaugaggacuaguuauaagacugacuagcccgaugggccucccaacgggcccuccuccccuccuugcaccgagauuaauaaaaaaaaaaaaaaaaaaaaaaaaaaaaaaaaaaaaaaaaaaaaaaaaaaaaaaaaaaaaaaaaugcaucccccccccccccccccccccccccccccccaaaggcucuuuucagagccaccagaauu

SEQ ID NO: 12972 - RNA, 4039 nt, Artificial Sequence
  SARS-CoV-2/Germany/BavPat3/2020__EPI_ISL_414521 spike protein mRNA human (1-1273)
aggagaaagcuuaccauguucguguuucugguccuccuuccccugguuagcucccagugcgugaacuugaccacaagaacucaauuaccuccagccuacacuaauucuuucaccaggggcguauauuacccggacaagguguuucggucaaguguccugcacagcacacaggaucuauuccuccccuuuuucuccaacgugacuugguuucaugcuauccacguuucugggaccaauggaacaaaacgcuucgacaacccugugcugccauuuaaugauggugucuauuucgcaucgaccgagaagucaaacauuauacgaggcuggaucuuugggacuacacuugacagcaaaacccagagucuguugauugugaauaacgccacgaauguaguuaucaaggugugugaguuccaguuuugcaacgaucccuuccucggagucuacuaucauaaaaauaacaaguccuggauggagucugaguuccguguguacagcuccgcgaauaacuguacuuuugaauaugugucacaaccuuuccugauggaccuggaaggcaagcaggguaauuuuaaaaaccucagagaguucgucuuuaagaacauugauggguacuucaaaaucuacaguaagcacaccccaauaaauuuaguuagggaccugccccagggauuuagcgcucuugagccuuugguggaucugccaaucggcauuaacaucacacgguuccagacucuacucgcccugcaucgcucuuaucuuaccccgggcgacuccucaagcggguggacagcaggagccgcugcauacuauguagguuaccugcaacccagaaccuuuuugcucaaauauaaugaaaacggcacgauuacugaugccguggacugcgcucuggauccuuuaagugagacaaaguguacccugaagucuuucacugucgaaaaagggaucuaccagacauccaauuuuagggugcagccaaccgagagcauaguucgguuccccaacauuacgaaucucugcccuuuuggagagguguucaacgccacccgcuucgcgucggucuaugcauggaaucgaaagagaaucucuaacuguguggccgacuacuccguacuuuacaauucagcuaguuuuagcacauucaaaugcuauggcguuuccccaacuaagcugaacgacuuguguuuuaccaauguguacgccgauucuuucgucauuaggggugacgaagugcggcagaucgcacccgggcaaacaggaaaaaucgcugauuauaacuacaagcuaccggacgauuuuacuggcugcgucauugccuggaauagcaacaaccuggacucaaaagugggcgggaauuauaacuaccucuaucgucuguuccgcaagaguaaucuuaagccuuuugagagagauauauccaccgaaaucuaccaggcgggaagcacacccuguaacgguguugagggcuucaauugcuacuuuccacugcagucuuauggguuccaaccuaccaacggagugggcuaccagcccuauaggguagucguguugucauuugaacuccugcacgccccagcaacuguuugcggucccaaaaagaguacgaauuuagugaaaaacaagugugucaauuucaacuuuaaugggcugacaggcaccggagugcuaacugagagcaacaaaaaguuccucccuuuccagcaguuuggccgggacauugcugauaccacagacgccguacgagauccacaaacccuggagauccuugacauaacuccgugcuccuucgggggagugucuguuauuacacccgguacgaauaccucgaaccaggucgcuguguuguaccaggacgugaauuguacugaagucccuguugccauccacgcagaucagcugacaccaaccuggcgcguguauagcacaggcuccaacguguuucaaacuagagccgggugccucaucggagcugagcauguaaacaauucauacgaaugugacauucccaucggcgcggguauuugcgcaaguuaucagacccagacgaacucuccuaggcgggcccgcagcgucgcuucccagucaauaaucgccuacaccaugagccugggggcagaaaauucuguggccuacuccaacaauaguauugcuaucccaacaaacuucacuaucagcguuaccacagaaauucuucccgugucuaugacuaagaccuccgucgauuguacgauguauauaugcggcgacucaacagaguguaguaaucuguugcuccaauacggcagcuuuugcacccagcugaacagagccuuaacuggaaucgcaguggagcaggauaaaaauacacagcaaguuuucgcacaggugaagcagauuuauaaaaccccgccuaucaaggacuuugggggauucaacuuuucgcaaauucugccagaucccuccaaaccuucuaagaggagcuucaucgaagaccuacucuuuaauaagguaacucuggcugaugccgguuucauaaaacaguacggcgacugucuuggggauaucgcagcccgugacuugauuugcgcucagaaguucaacggacugaccguccugcccccacucuuaacagaugagaugaucgcccaguauacgucagcacugcuugcuggcaccauuacgagugguuggacauuuggggccggcgcggccuugcaaaucccuuucgcuaugcagauggcauaccgguuuaauggaauaggcgugacccagaacgugcucuaugaaaaucagaaacugauugccaaccaauucaacuccgcuaucgggaagauucaggacucucuaagcuccacagccucagcacugggaaaacuccaggacgucguuaaucagaacgcgcaagcccugaauacucuugugaagcaguugagcaguaacuuuggcgcuaucucuuccguacugaaugauauauuaagccgacucgacaagguggaggccgaaguccagaucgauagacugauuaccgguaggcuucaaucgcugcagacguacgugacacagcaguugauccgcgcagcugagauucgggccucagcaaaccucgccgcuaccaaaaugucugagugcguucuggggcaaaguaagagaguggacuucuguggaaaaggcuaccaccuaauguccuuuccccagagcgcgccacauggugucguguuccugcacguuacuuaugugccggcccaggaaaagaauuuuaccacagcgccugcuaucugccacgauggcaaagcccauuuccccagggagggggucuuuguaucuaacggaacucacugguucgugacccagcgcaauuuuuacgaaccacaaauaauuacaacggacaacaccuucguuagcggcaauugugauguggucaucgggaucgugaacaauacuguauaugacccccuccagccugagcuggauuccuucaaggaggaacuugacaaauacuuuaagaaccauacaucaccagauguggacuugggagauauuaguggcaucaaugccagcgucguuaacauucagaaggagauagaccgacugaaugaaguggcuaaaaacuuaaacgagucucucaucgaccugcaggaacuugguaaguaugagcaauacauuaaauggcccugguauaucuggcugggguucauugcaggacuaaucgccauagugauggucaccaucaugcucugcuguaugacuuccugcuguucaugccugaagggcuguugcaguugugguagcugcugcaaauuugaugaggacgauuccgaaccuguguugaagggcguuaagcugcacuacacaugaggacuaguuauaagacugacuagcccgaugggccucccaacgggcccuccuccccuccuugcaccgagauuaauaaaaaaaaaaaaaaaaaaaaaaaaaaaaaaaaaaaaaaaaaaaaaaaaaaaaaaaaaaaaaaaaugcaucccccccccccccccccccccccccccccccaaaggcucuuuucagagccaccagaauu

SEQ ID NO: 12973 - RNA, 4039 nt, Artificial Sequence
  SARS-CoV-2/France/HF1805/2020__EPI_ISL_414628 spike protein mRNA human (1-1273)
aggagaaagcuuaccauguucguguuucugguccuccuuccccugguuagcucccagugcgugaacuugaccacaagaacucaauuaccuccagccuacacuaauucuuucaccaggggcguauauuacccggacaagguguuucggucaaguguccugcacagcacacaggaucuauuccuccccuuuuucuccaacgugacuugguuucaugcuauccacguuucugggaccaauggaacaaaacgcuucgacaacccugugcugccauuuaaugauggugucuauuucgcaucgaccgagaagucaaacauuauacgaggcuggaucuuugggacuacacuugacagcaaaacccagagucuguugauugugaauaacgccacgaauguaguuaucaaggugugugaguuccaguuuugcaacgaucccuuccucggagucuacuaucauaaaaauaacaaguccuggauggagucugaguuccguguguacagcuccgcgaauaacuguacuuuugaguaugugucacaaccuuuccugauggaccuggaaggcaagcaggguaauuuuaaaaaccucagagaguucgucuuuaagaacauugauggguacuucaaaaucuacaguaagcacaccccaauaaauuuaguuagggaccugccccagggauuuagcgcucuugagccuuugguggaucugccaaucggcauuaacaucacacgguuccagacucuacucgcccugcaucgcucuuaucuuaccccgggcgacuccucaagcggguggacagcaggagccgcugcauacuauguagguuaccugcaacccagaaccuuuuugcucaaauauaaugaaaacggcacgauuacugaugccguggacugcgcucuggauccuuuaagugagacaaaguguacccugaagucuuucacugucgaaaaagggaucuaccagacauccaauuuuagggugcagccaaccgagagcauaguucgguuccccaacauuacgaaucucugcccuuuuggagagguguucaacgccacccgcuucgcgucggucuaugcauggaaucgaaagagaaucucuaacuguguggccgacuacuccguacuuuacaauucagcuaguuuuagcacauucaaaugcuauggcguuuccccaacuaagcugaacgacuuguguuuuaccaauguguacgccgauucuuucgucauuaggggugacgaagugcggcagaucgcacccgggcaaacaggaaaaaucgcugauuauaacuacaagcuaccggacgauuuuacuggcugcgucauugccuggaauagcaacaaccuggacucaaaagugggcgggaauuauaacuaccucuaucgucuguuccgcaagaguaaucuuaagccuuuugagagagauauauccaccgaaaucuaccaggcgggaagcacacccuguaacgguguugagggcuucaauugcuacuuuccacugcagucuuauggguuccaaccuaccaacggagugggcuaccagcccuauaggguagucguguugucauuugaacuccugcacgccccagcaacuguuugcggucccaaaaagaguacgaauuuagugaaaaacaagugugucaauuucaacuuuaaugggcugacaggcaccggagugcuaacugagagcaacaaaaaguuccucccuuuccagcaguuuggccgggacauugcugauaccacagacgccguacgagauccacaaacccuggagauccuugacauaacuccgugcuccuucgggggagugucuguuauuacacccgguacgaauaccucgaaccaggucgcuguguuguaccagggcgugaauuguacugaagucccuguugccauccacgcagaccagcugacaccaaccuggcgcguguauagcacaggguccaacguguuucaaacuagagccggaugccucaucggcgcugagcauguaaacaauucauacgaaugugauauucccaucggugcggggauuugcgcaaguuaucagacccagacgaacucuccuaggcgggcccgcagcgucgcuucccagucaauaaucgccuacaccaugagccugggcgcagaaaauucuguggccuacuccaacaauaguauugcuaucccaacaaacuucacuaucagcguuaccacagaaauucuucccgugucuaugacuaagaccuccgucgacuguacgauguauauaugcggagauucaacagaguguaguaaucuguugcuccaauacggcagcuuuugcacccagcugaacagagccuuaacugggaucgcaguggagcaggacaaaaauacacaggaaguuuucgcgcaagugaagcagauuuauaaaaccccgccuaucaaggauuuuggagguuucaacuuuucgcagauucugccagaccccuccaaaccuucuaagaggagcuucaucgaggaucuacucuuuaauaagguaacucuggcugacgccggcuucauaaaacaauacggggauugucuuggagacaucgcagcccgugauuugauuugcgcucagaaguucaacggccugaccguccugcccccacucuuaacagacgaaaugaucgcccaguauacgucagcacugcuugcugguaccauuacgaguggguggacauuuggcgccggagcggccuugcagaucccuuucgcuaugcaaauggcauaccgguuuaauggcauaggggugacccagaacgugcucuaugagaaucagaaacugauugccaaccaguucaacuccgcuaucggaaagauucaagauucucuaagcuccacagccucagcacugggcaaacuccaggacgucguuaaucagaacgcgcaggcccugaauacucuugugaagcaauugagcaguaacuuuggugcuaucucuuccguacugaaugacauauuaagccgacucgauaagguggaagccgagguccagaucgacagacugauuaccgggaggcuucagucgcugcaaacguacgugacacagcaguugauccgcgcagcugagauucgggccucagcaaaccucgccgcuaccaaaaugucugaaugcguucugggacagaguaagagaguggauuucuguggcaaagguuaccaccuaauguccuuuccccaaagcgcgccacauggcgucguguuccugcacguuacuuaugugccggcccaggagaagaauuuuaccacagcuccugcaaucugccacgacgggaaagcccauuuccccagggaaggagucuuuguaucuaacggcacucacugguucgugacccagcgcaauuuuuacgagccacagauaauuacaacggauaacaccuucguuagcgggaauugugacguggucaucggagugguaaacaauacuguguaugauccccuccaaccugagcuggacuccuucaaggaagaacuugauaaauacuuuaagaaccauacaucaccagacgucgauuugggcgacaucagugguauuaaugccagcguugugaacauccagaaggaaauugaucgacugaaugagguggcuaaaaacuuaaacgaaucucucauagaccugcaggagcuugggaaguaugagcaguacaucaaauggcccugguauauuuggcugggauucaucgcaggccuaauugccaucgucauggugaccauaaugcucugcuguaugacuuccugcuguucaugccugaaggguuguugcaguuguggcagcugcugcaaauuugacgaagaugacuccgagccuguuuugaaggggguaaagcugcacuacacaugaggacuaguuauaagacugacuagcccgaugggccucccaacgggcccuccuccccuccuugcaccgagauuaauaaaaaaaaaaaaaaaaaaaaaaaaaaaaaaaaaaaaaaaaaaaaaaaaaaaaaaaaaaaaaaaaugcaucccccccccccccccccccccccccccccccaaaggcucuuuucagagccaccagaauu

SEQ ID NO: 12974 - RNA, 4039 nt, Artificial Sequence
  SARS-CoV-2/Netherlands/ZuidHolland_9/2020__EPI_ISL_414445 spike protein mRNA human (1-1273)
aggagaaagcuuaccauguucguguuucugguccuccuuccccugguuagcucccagugcgugaacuugaccacaagaacucaauuaccuccagccuacacuaauucuuucaccaggggcguauauuacccggacaagguguuucggucaaguguccugcacagcacacaggaucuauuccuccccuuuuucuccaacgugacuugguuucaugcuauccacguuucugggaccaauggaacaaaacgcuucgacaacccugugcugccauuuaaugauggugucuauuucgcaucgaccgagaagucaaacauuauacgaggcuggaucuuugggacuacacuugacagcaaaacccagagucuguugauugugaauaacgccacgaauguaguuaucaaggugugugaguuccaguuuugcaacgaucccuuccucggagucuacuaucauaaaaauaacaaguccuggauggagucugaguuccguguguacagcuccgcgaauaacuguacuuuugaguaugugucacaaccuuuccugauggaccuggaaggcaagcaggguaauuuuaaaaaccucagagaguucgucuuuaagaacauugauggguacuucaaaaucuacaguaagcacaccccaauaaauuuaguuagggaccugccccagggauuuagcgcucuugagccuuugguggaucugccaaucggcauuaacaucacacgguuccagacucuacucgcccugcaucgcucuuaucuuaccccgggcgacuccucaagcggguggacagcaggagccgcugcauacuauguagguuaccugcaacccagaaccuuuuugcucaaauauaaugaaaacggcacgauuacugaugccguggacugcgcucuggauccuuuaagugagacaaaguguacccugaagucuuucacugucgaaaaagggaucuaccagacauccaauuuuagggugcagccaaccgagagcauaguucgguuccccaacauuacgaaucucugcccuuuuggagagguguucaacgccacccgcuucgcgucggucuaugcauggaaucgaaagagaaucucuaacuguguggccgacuacuccguacuuuacaauucagcuaguuuuagcacauucaaaugcuauggcguuuccccaacuaagcugaacgacuuguguuuuaccaauguguacgccgauucuuucgucauuaggggugacgaagugcggcagaucgcacccgggcaaacaggaaaaaucgcugauuauaacuacaagcuaccggacgauuuuacuggcugcgucauugccuggaauagcaacaaccuggacucaaaagugggcgggaauuauaacuaccucuaucgucuguuccgcaagaguaaucuuaagccuuuugagagagauauauccaccgaaaucuaccaggcgggaagcacacccuguaacgguguugagggcuucaauugcuacuuuccacugcagucuuauggguuccaaccuaccaacggagugggcuaccagcccuauaggguagucguguugucauuugaacuccugcacgccccagcaacuguuugcggucccaaaaagaguacgaauuuagugaaaaacaagugugucaauuucaacuuuaaugggcugacaggcaccggagugcuaacugagagcaacaaaaaguuccucccuuuccagcaguuuggccgggacauugcugauaccacagacgccguacgagauccacaaacccuggagauccuugacauaacuccgugcuccuucgggggagugucuguuauuacacccgguacgaauaccucgaaccaggucgcuguguuguaccagggcgugaauuguacugaagucccuguugccauccacgcagaccagcugacaccaaccuggcgcguguauagcacaggguccaacguguuucaaacuagagccggaugccucaucggcgcugagcauguaaacaauucauacgaaugugauauucccaucggugcggggauuugcgcaaguuaucagacccagacgaacucuccuaggcgggcccgcagcgucgcuucccagucaauaaucgccuacaccaugagccugggcgcagaaaauucuguggccuacuccaacaauaguauugcuaucccaacaaacuucacuaucagcguuaccacagaaauucuucccgugucuaugacuaagaccuccgucgacuguacgauguauauaugcggagauucaacagaguguaguaaucuguugcuccaauacggcagcuuuugcacccagcugaacagagccuuaacugggaucgcaguggagcaggacaaaaauacacaggaaguuuucgcgcaagugaagcagauuuauaaaaccccgccuaucaaggauuuuggagguuucaacuuuucgcagauucugccagaccccuccaaaccuucuaagaggagcuucaucgaggaucuacucuuuaauaagguaacucuggcugacgccggcuucauaaaacaauacggggauugucuuggagacaucgcagcccgugauuugauuugcguccagaaguucaacggccugaccgugcugcccccacucuuaacagacgaaaugaucgcucaguauacgucagcccugcuugcagguaccauuacgaguggguggacauuuggcgcuggagccgcguugcagaucccuuucgccaugcaaauggcuuaccgguuuaauggcauaggggugacccagaacguccucuaugagaaucagaaacugauugcaaaccaguucaacuccgccaucggaaagauucaagauucucuaagcuccacagcuucagcccugggcaaacuccaggacguugugaaucagaacgcacaggcgcugaauacucuuguaaagcaauugagcaguaacuuuggugccaucucuuccgugcugaaugacauauuaagccgacucgauaaggucgaagcugaggugcagaucgacagacugauuaccgggaggcuucagucgcugcaaacguacguuacacagcaguugauccgcgccgcagagauucgggcuucagccaaccucgcagccaccaaaaugucugaaugcgugcugggacagaguaagagagucgauuucuguggcaaagguuaccaccuaauguccuuuccccaaagcgcuccacauggcgugguuuuccugcacgugacuuaugucccggcgcaggagaagaauuuuaccacagccccugcaaucugccacgacgggaaagcucauuuccccagggaaggaguauuugugucuaacggcacucacugguucguuacccagcgcaauuuuuacgagccacagauaauuacaacggauaacaccuucgugagcgggaauugugacgucgugaucggaaucguaaacaauacuguguaugauccccuccaaccugagcuggacuccuucaaggaagaacuugauaaauacuuuaagaaccauacaucaccagacgucgauuugggcgacauuagugguaucaaugccagcguugugaacauucagaaggaaauagaucgacugaaugagguggccaaaaacuuaaacgaaucucucaucgaccugcaggagcuugggaaguaugagcaguacauuaaauggcccugguauaucuggcugggauucauugcuggccuaaucgcaauagucauggugaccaucaugcucugcuguaugacuuccugcuguucaugccugaaggguuguugcaguuguggcagcugcugcaaauuugacgaagaugacuccgagccuguuuugaaggggguaaagcugcacuacacaugaggacuaguuauaagacugacuagcccgaugggccucccaacgggcccuccuccccuccuugcaccgagauuaauaaaaaaaaaaaaaaaaaaaaaaaaaaaaaaaaaaaaaaaaaaaaaaaaaaaaaaaaaaaaaaaaugcaucccccccccccccccccccccccccccccccaaaggcucuuuucagagccaccagaauu

SEQ ID NO: 12975 - RNA, 4039 nt, Artificial Sequence
  SARS-CoV-2/Finland/FIN03032020A/2020__EPI_ISL_413602 spike protein mRNA human (1-1273)
aggagaaagcuuaccauguucguguuucugguccuccuuccccugguuagcucccagugcgugaacuugaccacaagaacucaauuaccuccagccuacaccaauucuuucacgaggggcguauauuacccggacaagguguuucggucaaguguccugcacagcacacaggaucuauuccuccccuuuuucuccaacgugacuugguuucaugcuauccacguuucugggaccaauggaacaaaacgcuucgacaacccugugcugccauuuaaugauggugucuauuucgcaucgaccgagaagucaaacauuauacgaggcuggaucuuugggacuacacuugacagcaaaacccagagucuguugauugugaauaacgccacgaauguaguuaucaaggugugugaguuccaguuuugcaacgaucccuuccucggagucuacuaucauaaaaauaacaaguccuggauggagucugaguuccguguguacagcuccgcgaauaacuguacuuuugaguaugugucacaaccuuuccugauggaccuggaaggcaagcaggguaauuuuaaaaaccucagagaguucgucuuuaagaacauugauggguacuucaaaaucuacaguaagcacaccccaauaaauuuaguuagggaccugccccagggauuuagcgcucuugagccuuugguggaucugccaaucggcauuaacaucacacgguuccagacucuacucgcccugcaucgcucuuaucuuaccccgggcgacuccucaagcggguggacagcaggagccgcugcauacuauguagguuaccugcaacccagaaccuuuuugcucaaauauaaugaaaacggcacgauuacugaugccguggacugcgcucuggauccuuuaagugagacaaaguguacccugaagucuuucacugucgaaaaagggaucuaccagacauccaauuuuagggugcagccaaccgagagcauaguucgguuccccaacauuacgaaucucugcccuuuuggagagguguucaacgccacccgcuucgcgucggucuaugcauggaaucgaaagagaaucucuaacuguguggccgacuacuccguacuuuacaauucagcuaguuuuagcacauucaaaugcuauggcguuuccccaacuaagcugaacgacuuguguuuuaccaauguguacgccgauucuuucgucauuaggggugacgaagugcggcagaucgcacccgggcaaacaggaaaaaucgcugauuauaacuacaagcuaccggacgauuuuacuggcugcgucauuagcuggaacucaaauaaccuggacaguaaagugggcgggaauuauaacuaccucuaucgucuguuccgcaaguccaaucuuaagccuuuugagagagauauaagcaccgaaaucuaccaggccggaucuacacccuguaacgguguugagggcuucaauugcuacuuuccacugcagucauauggguuccaaccuaccaacggagugggcuaccagcccuauaggguagucguguugaguuuugaacuccugcacgcgccagccacuguuugcggucccaaaaagagcacgaauuuagugaaaaacaagugugucaauuucaacuuuaaugggcugacaggcaccggagugcuaacugaguccaacaaaaaguuccucccuuuccagcaguuuggccgggacauugcagauaccacagacgcuguacgagauccacaaacccuggagauccuugacauaacuccgugcucuuucgggggagugucgguuauuacacccgguacgaauaccagcaaccaggucgccguguuguaccagggcgugaauuguacugaagucccuguugcuauccacgccgaccagcugacaccaaccuggcgcguguauuccacagggucaaacguguuucaaacuagagcaggaugccucaucggcgccgagcauguaaacaauaguuacgaaugugauauucccaucggugcugggauuugcgcgucuuaucagacccagacgaacagcccuaggcgggcacgcuccgucgccucacagagcauaaucgcuuacaccaugucucugggcgccgaaaauuccguggcauacaguaacaauagcauugccaucccaacaaacuucacuaucucuguuaccacagaaauucuucccguguccaugacuaagaccucagucgacuguacgauguauauaugcggagauaguacagaguguagcaaucuguugcuccaauacggcucguuuugcacccagcugaacagagcuuuaacugggaucgccguggagcaggacaaaaauacacaggaaguuuucgcacaagugaagcagauuuauaaaaccccgccuaucaaggauuuuggagguuucaacuuuucccagauucugccagaccccucuaaaccuagcaagaggucauucaucgaggaucuacucuuuaauaagguaacucuggcggacgcuggcuucauaaaacaauacggggauugucuuggagacaucgccgcacgugauuugauuugcgcccagaaguucaacggccugaccguccugcccccacucuuaacagacgaaaugaucgcucaguauacgagugcccugcuugcagguaccauuacuuccggguggacauuuggcgcuggagccgcguugcagaucccuuucgccaugcaaauggcuuaccgguuuaauggcauaggggugacccagaacgugcucuaugagaaucagaaacugauugcaaaccaguucaacucugccaucggaaagauucaagauagccuauccucaacagcuagcgcccugggcaaacuccaggacgucguuaaucagaacgcacaggcgcugaauacucuugugaagcaauugaguucuaacuuuggugccaucuccagcguacugaaugacauauuaucgcgacucgauaagguggaagcugagguccagaucgacagacugauuaccgggaggcuucagucacugcaaacguacgugacacagcaguugauccgcgccgcagagauucgggcuucugccaaccucgcagccaccaaaaugagugaaugcguucugggacaguccaagagaguggauuucuguggcaaagguuaccaccuaaugagcuuuccccaaucugcuccacauggcgucguguuccugcacguuacuuaugugccggcgcaggagaagaauuuuaccacagccccugcaaucugccacgacgggaaagcucauuuccccagggaaggagucuuuguaagcaacggcacucacugguucgugacccagcgcaauuuuuacgagccacagauaauuacaacggauaacaccuucguuuccgggaauugugacguggucaucggaaucgugaacaauacuguauaugauccccuccaaccugagcuggacucauucaaggaagaacuugauaaauacuuuaagaaccauacaaguccagacguggauuugggcgacauuagcgguaucaaugccucugucguuaacauucagaaggaaauagaucgacugaaugagguggccaaaaacuuaaacgaaucccucaucgaccugcaggagcuugggaaguaugagcaguacauuaaauggcccugguauaucuggcugggauucauugcuggccuaaucgcaauagugauggucaccaucaugcucugcuguaugacuucaugcuguaguugccugaaggguuguugcagcuguggcuccugcugcaaauuugacgaagaugacucugagccuguguugaaggggguuaagcugcacuacacaugaggacuaguuauaagacugacuagcccgaugggccucccaacgggcccuccuccccuccuugcaccgagauuaauaaaaaaaaaaaaaaaaaaaaaaaaaaaaaaaaaaaaaaaaaaaaaaaaaaaaaaaaaaaaaaaaugcaucccccccccccccccccccccccccccccccaaaggcucuuuucagagccaccagaauu

SEQ ID NO: 12976 - RNA, 4039 nt, Artificial Sequence
  SARS-CoV-2/France/GE1977/2020__EPI_ISL_414632 spike protein mRNA human (1-1273)
aggagaaagcuuaccauguucguguuucugguccuccuuccccugguuagcucccagugcgugaacuugaccacaagaacucaauuaccuccagccuacacuaauucuuucaccaggggcguauauuacccggacaagguguuucggucaaguguccugcacagcacacaggaucuauuccuccccuuuuucuccaacgugacuugguuucaugcuauccacguuucugggaccaauggaacaaaacgcuucgacaacccugugcugccauuuaaugauggugucuauuucgcaucgaccgagaagucaaacauuauacgaggcuggaucuuugggacuacacuugacagcaaaacccagagucuguugauugugaauaacgccacgaauguaguuaucaaggugugugaguuccaguuuugcaacgaucccuuccucggagucuacuaucauaaaaauaacaaguccuggauggagucugaguuccguguguacagcuccgcgaauaacuguacuuuugaguaugugucacaaccuuuccugauggaccuggaaggcaagcaggguaauuuuaaaaaccucagagaguucgucuuuaagaacauugauggguacuucaaaaucuacaguaagcacaccccaauaaauuuaguuagggaccugccccagggauuuagcgcucuugagccuuugguggaucugccaaucggcauuaacaucacacgguuccagacucuacucgcccugcaucgcucuuaucuuaccccgggcgacuccucaagcggguggacagcaggagccgcugcauacuauguagguuaccugcaacccagaaccuuuuugcucaaauauaaugaaaacggcacgauuacugaugccguggacugcgcucuggauccuuuaagugagacaaaguguacccugaagucuuucacugucgaaaaagggaucuaccagacauccaauuuuagggugcagccaaccgagagcauaguucgguuccccaacauuacgaaucucugcccuuuuggagagguguucaacgccacccgcuucgcgucggucuaugcauggaaucgaaagagaaucucuaacuguguggccgacuacuccguacuuuacaauucagcuaguuuuagcacauucaaaugcuauggcguuuccccaacuaagcugaacgacuuguguuuuaccaauguguacgccgauucuuucgucauuaggggugacgaagugcggcagaucgcacccgggcaaacaggaaaaaucgcugauuauaacuacaagcuaccggacgauuuuacuggcugcgucauugccuggaauagcaacaaccuggacucaaaagugggcgggaauuauaacuaccucuaucgucuguuccgcaagaguaaucuuaagccuuuugagagagauauauccaccgaaaucuaccaggcgggaagcacacccuguaacgguguugagggcuucaauugcuacuuuccacugcagucuuauggguuccaaccuaccaacggagugggcuaccagcccuauaggguagucguguugucauuugaacuccugcacgccccagcaacuguuugcggucccaaaaagaguacgaauuuagugaaaaacaagugugucaauuucaacuuuaaugggcugacaggcaccggagugcuaacugagagcaacaaaaaguuccucccuuuccagcaguuuggccgggacauugcugauaccacagacgccguacgagauccacaaacccuggagauccuugacauaacuccgugcuccuucgggggagugucuguuauuacacccgguacgaauaccucgaaccaggucgcuguguuguaccagggcgugaauuguacugaagucccuguugccauccacgcagaccagcugacaccaaccuggcgcguguauagcacaggguccaacguguuucaaacuagagccggaugccucaucggcgcugagcauguaaacaauucauacgaaugugauauucccaucggugcggggauuugcgcaaguuaucagacccagacgaacucuccuaggcgggcccgcagcgucgcuucccagucaauaaucgccuacaccaugagccugggcgcagaaaauucuguggccuacuccaacaauaguauugcuaucccaacaaacuucacuaucagcguuaccacagaaauucuucccgugucuaugacuaagaccuccgucgacuguacgauguauauaugcggagauucaacagaguguaguaaucuguugcuccaauacggcagcuuuugcacccagcugaacagagccuuaacugggaucgcaguggagcaggacaaaaauacacaggaaguuuucgcgcaagugaagcagauuuauaaaaccccgccuaucaaggauuuuggagguuucaacuuuucgcagauucugccagaccccuccaaaccuucuaagaggagcuucaucgaggaucuacucuuuaauaagguaacucuggcugacgccggcuucauaaaacaauacggggauugucuuggagacaucgcagcccgugauuugauuugcgcucagaaguucaacggccugaccguccugcccccacucuuaacagacgaaaugaucgcccaguauacgucagcacugcuugcugguaccauuacgaguggguggacauuuggcgccggagcggccuugcagaucccuuucgcuaugcaaauggcauaccgguuuaauggcauaggggugacccagaacgugcucuaugagaaucagaaacugauugccaaccaguucaacuccgcuaucggaaagauucaagauucucuauuuagcacagccuccgcacugggcaaacuccaggacgucguuaaucagaacgcgcaggcccugaauacucuugugaagcaauugucaagcaacuucggugcuaucaguucuguacugaaugacauauuaucccgacucgauaagguggaagccgagguccagaucgacagacugauuaccgggaggcuucagagccugcaaacguacgugacacagcaguugauccgcgcagcugagauucgggccucggcaaaccucgccgcuaccaaaaugucagaaugcguucugggacagucuaagagaguggauuuuuguggcaaagguuaccaccuaaugaguuucccccaauccgcgccacauggcgucguguuucugcacguuacuuaugugccggcccaggagaagaauuucaccacagcuccugcaaucugccacgacgggaaagcccauuuucccagggaaggagucuucguaagcaacggcacucacugguuugugacccagcgcaauuucuacgagccacagauaauuacaacggauaacaccuucguuucugggaauugugacguggucaucggaaucgugaacaauacuguauaugauccccuccaaccugagcuggacagcuuuaaggaagaacuugauaaauacuucaagaaccauacauccccagacguggauuugggcgacauuucagguaucaaugccagugucguuaacauucagaaggaaauagaucgacugaaugagguggcuaaaaacuuaaacgaaagccucaucgaccugcaggagcuugggaaguaugagcaguacauuaaauggcccugguauaucuggcugggauuuauugcaggccuaaucgccauagugauggucaccaucaugcucugcuguaugacuucuugcuguuccugccugaaggguuguugcucauguggcaguugcugcaaauucgacgaagaugacagcgagccuguguugaaggggguuaagcugcacuacacaugaggacuaguuauaagacugacuagcccgaugggccucccaacgggcccuccuccccuccuugcaccgagauuaauaaaaaaaaaaaaaaaaaaaaaaaaaaaaaaaaaaaaaaaaaaaaaaaaaaaaaaaaaaaaaaaaugcaucccccccccccccccccccccccccccccccaaaggcucuuuucagagccaccagaauu

SEQ ID NO: 12977 - RNA, 4039 nt, Artificial Sequence
  SARS-CoV-2/Finland/FIN-313/2020__EPI_ISL_414641 spike protein mRNA human (1-1273)
aggagaaagcuuaccauguucguguuucugguccuccuuccccugguuagcucccagugcgugaacuugaccacaagaacucaauuaccuccagccuacacuaauucuuucaccaggggcguauauuacccggacaagguguuucggucaaguguccugcacagcacacaggaucuauuccuccccuuuuucuccaacgugacuugguuucaugcuauccacguuucugggaccaauggaacaaaacgcuucgacaacccugugcugccauuuaaugauggugucuauuucgcaucgaccgagaagucaaacauuauacgaggcuggaucuuugggacuacacuugacagcaaaacccagagucuguugauugugaauaacgccacgaauguaguuaucaaggugugugaguuccaguuuugcaacgaucccuuccucggagucuacuaucauaaaaauaacaaguccuggauggagucugaguuccguguguacagcuccgcgaauaacuguacuuuugaguaugugucacaaccuuuccugauggaccuggaaggcaagcaggguaauuuuaaaaaccucagagaguucgucuuuaagaacauugauggguacuucaaaaucuacaguaagcacaccccaauaaauuuaguuagggaccugccccagggauuuagcgcucuugagccuuugguggaucugccaaucggcauuaacaucacacgguucaaaacucuacucgcccugcaucgcucuuaucuuaccccgggcgacuccucaagcggguggacagcaggagccgcugcauacuauguagguuaccugcagcccagaaccuuuuugcucaaguauaaugaaaacggcacgauuacugaugccguggacugcgcucuggauccuuuaagugagacaaaguguacccugaaaucuuucacugucgaaaaggggaucuaccaaacauccaauuuuagggugcagccaaccgagagcauaguucgguuccccaacauuacgaaucucugcccuuuuggagagguguucaacgccacccgcuucgcgucggucuaugcauggaaucgaaaaagaaucucuaacuguguggccgacuacuccguacuuuacaauucagcuaguuuuagcacauucaagugcuauggcguuuccccaacuaaacugaacgacuuguguuuuaccaauguguacgccgauucuuucgucauuaggggugacgaagugcggcagaucgcacccgggcagacaggaaagaucgcugauuauaacuacaaacuaccggacgauuuuacuggcugcgucauugccuggaauagcaacaaccuggacucaaaggugggcgggaauuauaacuaccucuaucgucuguuccgcaagaguaaucuuaaaccuuuugagagagauauauccaccgaaaucuaccaagcgggaagcacacccuguaacgguguugagggcuucaauugcuacuuuccacugcagucuuauggguuccagccuaccaacggagugggcuaccaacccuauaggguagucguguugucauuugaacuccugcacgccccagcaacuguuugcggucccaagaaaaguacgaauuuagugaagaacaaaugugucaauuucaacuuuaaugggcugacaggcaccggagugcuaacugagagcaacaagaaguuccucccuuuccagcaguuuggccgggacauugcugauaccacagacgccguacgagauccacagacccuggagauccuugacauaacuccgugcuccuucgggggagugucuguuauuacacccgguacgaauaccucgaaccaagucgcuguguuguaccagggcgugaauuguacugaagucccuguugccauccacgcagaccagcugacaccaaccuggcgcguguauagcacaggguccaacguguuucagacuagagccggaugccucaucggcgcugagcauguaaacaauucauacgaaugugauauucccaucggugcggggauuugcgcaaguuaucaaacccagacgaacucuccuaggcgggcccgcagcgucgcuucccagucaauaaucgccuacaccaugagccugggcgcagaaaauucuguggccuacuccaacaauaguauugcuaucccaacaaacuucacuaucagcguuaccacagaaauucuucccgugucuaugacuaaaaccuccgucgacuguacgauguauauaugcggagauucaacagaguguaguaaucuguugcuccaguacggcagcuuuugcacccaacugaacagagccuuaacugggaucgcaguggagcaggacaagaauacacaggaaguuuucgcacaggugaaacaaauuuauaagaccccgccuaucaaagauuuuggagguuucaacuuuucgcagauucugccagaccccuccaagccuucuaagaggagcuucaucgaggaucuacucuuuaauaaaguaacucuggcugacgccggcuucauaaagcaguacggggauugucuuggagacaucgcagcccgugauuugauuugcgcucaaaaauucaacggccugaccguccugcccccacucuuaacagacgaaaugaucgcccaguauacgucagcacugcuugcugguaccauuacgaguggguggacauuuggcgccggagcggccuugcagaucccuuucgcuaugcagauggcauaccgguuuaauggcauaggggugacccaaaacgugcucuaugagaaucagaagcugauugccaaccaguucaacuccgcuaucggaaaaauucaggauucucuaagcuccacagccucagcacugggcaagcuccaagacgucguuaaucagaacgcgcaggcccugaauacucuugugaagcaguugagcaguaacuuuggugcuaucucuuccguacugaaugacauauuaagccgacucgauaaaguggaagccgagguccaaaucgacagacugauuaccgggaggcuucagucgcugcagacguacgugacacaacaguugauccgcgcagcugagauucgggccucagcaaaccucgccgcuaccaagaugucugaaugcguucugggacagaguaaaagaguggauuucuguggcaaggguuaccaccuaauguccuuuccccagagcgcgccacauggcgucguguuccugcacguuacuuaugugccggcccaagagaaaaauuuuaccacagcgccugcuaucugccacgacgggaaggcccauuuccccagggaaggagucuuuguaucuaacggcacucacugguucgugacccagcgcaauuuuuacgagccacagauaauuacaacggauaacaccuucguuagcgggaauugugacguggucaucggaaucgugaacaauacuguauaugauccccuccagccugagcuggacuccuucaaagaagaacuugauaaguacuuuaagaaccauacaucaccagacguggauuugggcgacauuagugguaucaaugccagcgucguuaacauucaaaaagaaauagaucgacugaaugagguggcuaagaacuuaaacgaaucucucaucgaccugcaggagcuugggaaauaugagcaguacauuaaguggcccugguauaucuggcugggauucauugcaggccuaaucgccauagugauggucaccaucaugcucugcuguaugacuuccugcuguucaugccugaaagguuguugcaguuguggcagcugcugcaaguuugacgaagaugacuccgagccuguguugaaggggguuaaacugcacuacacaugaggacuaguuauaagacugacuagcccgaugggccucccaacgggcccuccuccccuccuugcaccgagauuaauaaaaaaaaaaaaaaaaaaaaaaaaaaaaaaaaaaaaaaaaaaaaaaaaaaaaaaaaaaaaaaaaugcaucccccccccccccccccccccccccccccccaaaggcucuuuucagagccaccagaauu

SEQ ID NO: 12978 - RNA, 4039 nt, Artificial Sequence
  SARS-CoV-2/Netherlands/ZuidHolland_2/2020__EPI_ISL_414556 spike protein mRNA human (1-1273)
aggagaaagcuuaccauguucguguuucugguccuccuuccccugguuagcucccagugcgugaacuugaccacaagaacucaauuaccuccagccuacacuaauucuuucaccaggggcguauauuacccggacaagguguuucggucaaguguccugcacagcacacaggaucuauuccuccccuuuuucuccaacgugacuugguuucaugcuauccacguuucugggaccaauggaacaaaacgcuucgacaacccugugcugccauuuaaugauggugucuauuucgcaucgaccgagaagucaaacauuauacgaggcuggaucuuugggacuacacuugacagcaaaacccagagucuguugauugugaauaacgccacgaauguaguuaucaaggugugugaguuccaguuuugcaacgaucccuuccucggagucuacuaucauaaaaauaacaaguccuggauggagucugaguuccguguguacagcuccgcgaauaacuguacuuuugaauaugugucacaaccuuuccugauggaccuggaaggcaagcaggguaauuuuaaaaaccucagagaguucgucuuuaagaacauugauggguacuucaaaaucuacaguaagcacaccccaauaaauuuaguuagggaccugccccagggauuuagcgcucuugagccuuugguggaucugccaaucggcauuaacaucacacgguuccagacucuacucgcccugcaucgcucuuaucuuaccccgggcgacuccucaagcggguggacagcaggagccgcugcauacuauguagguuaccugcaacccagaaccuuuuugcucaaauauaaugaaaacggcacgauuacugaugccguggacugcgcucuggauccuuuaagugagacaaaguguacccugaagucuuucacugucgaaaaagggaucuaccagacauccaauuuuagggugcagccaaccgagagcauaguucgguuccccaacauuacgaaucucugcccuuuuggagagguguucaacgccacccgcuucgcgucggucuaugcauggaaucgaaagagaaucucuaacuguguggccgacuacuccguacuuuacaauucagcuaguuuuagcacauucaaaugcuauggcguuuccccaacuaagcugaacgacuuguguuuuaccaauguguacgccgauucuuucgucauuaggggugacgaagugcggcagaucgcacccgggcaaacaggaaaaaucgcugauuauaacuacaagcuaccggacgauuuuacuggcugcgucauugccuggaauagcaacaaccuggacucaaaagugggcgggaauuauaacuaccucuaucgucuguuccgcaagaguaaucuuaagccuuuugagagagauauauccaccgaaaucuaccaggcgggaagcacacccuguaacgguguugagggcuucaauugcuacuuuccacugcagucuuauggguuccaaccuaccaacggagugggcuaccagcccuauaggguagucguguugucauuugaacuccugcacgccccagcaacuguuugcggucccaaaaagaguacgaauuuagugaaaaacaagugugucaauuucaacuuuaaugggcugacaggcaccggagugcuaacugagagcaacaaaaaguuccucccuuuccagcaguuuggccgggacauugcugauaccacagacgccguacgagauccacaaacccuggagauccuugacauaacuccgugcuccuucgggggagugucuguuauuacacccgguacgaauaccucgaaccaggucgcuguguuguaccagggcgugaauuguacugaagucccuguugccauccacgcagaccagcugacaccaaccuggcgcguguauagcacaggguccaacguguuucaaacuagagccggaugccucaucggcgcugagcauguaaacaauucauacgaaugugauauucccaucggugcggggauuugcgcaaguuaucagacccagacgaacucuccuaggcgggcccgcagcgucgcuucccagucaauaaucgccuacaccaugagccugggcgcagaaaauucuguggccuacuccaacaauaguauugcuaucccaacaaacuucacuaucagcguuaccacagaaauucuucccgugucuaugacuaagaccuccgucgacuguacgauguauauaugcggagauucaacagaguguaguaaucuguugcuccaauacggcagcuuuugcacccagcugaacagagccuuaacugggaucgcacuggagcaggacaaaaauacacaggaaguguucgcgcaaguuaagcagauuuauaaaaccccgccuaucaaggauuuuggagguuucaacuuuucgcagauucuaccagaccccuccaaaccuucuaagaggagcuucaucgaggaucuccuguuuaauaaggugacucuugcugacgccggcuucauaaaacaauacggggauuguuugggagacaucgcagcccgugaucugauuugcgcucagaaguucaacggccucaccguacugcccccauuacugacagacgaaaugaucgcccaguauacgucagcacuuuuggcugguaccauuacgaguggguggacauuuggcgccggagcggcccuccagaucccuuucgcuaugcaaauggcauaccgguuuaauggcauaggggucacccagaacgugcuguaugagaaucagaaacuaauugccaaccaguucaacuccgcuaucggaaagauucaagauucucugagcuccacagccucagcacucggcaaacugcaggacguggucaaucagaacgcgcaggcccuuaauacuuugguuaagcaacugagcaguaacuuuggugcuaucucuuccguguuaaaugacauacucagccgacuggauaagguagaagccgaggugcagaucgacagacuuauuaccgggaggcugcagucguugcaaacguacgucacacagcagcucauccgcgcagcugagauucgggccucagcaaaccuggccgcuaccaaaaugucugaaugcgugcuaggacagaguaagagaguugauuucuguggcaaagguuaccaccugauguccuuuccccaaagcgcgccacauggcguggucuuccuccacgugacuuauguuccggcccaggagaagaauuuuaccacagcuccugcaaucugccacgacgggaaagcccauuuccccagggaaggaguguuugucucuaacggcacucacugguucguaacccagcgcaauuuuuacgagccacagauaauuacaacggauaacaccuucgugagcgggaauugugacguugugaucggaaucgucaacaauacuguguaugauccccugcaaccugagcuugacuccuucaaggaagaguuggauaaauacuuuaagaaccauacaucaccagacguagaucugggcgacauuagugguaucaaugccagcguggucaacauucagaaggaaauagaucgauuaaaugagguugcuaaaaaccucaacgaaucucugaucgaccuucaggagcuggggaaguaugagcaguacauuaaauggcccugguauaucuggcuaggauucauugcaggccucaucgccauagugauggugaccaucaugcugugcuguaugacuuccugcuguucaugcuugaaggguuguugcaguuguggcagcugcugcaaauuugacgaagaugacuccgagccuguccugaagggggugaaguuacacuacacaugaggacuaguuauaagacugacuagcccgaugggccucccaacgggcccuccuccccuccuugcaccgagauuaauaaaaaaaaaaaaaaaaaaaaaaaaaaaaaaaaaaaaaaaaaaaaaaaaaaaaaaaaaaaaaaaaugcaucccccccccccccccccccccccccccccccaaaggcucuuuucagagccaccagaauu

SEQ ID NO: 12979 - RNA, 4039 nt, Artificial Sequence
  SARS-CoV-2/USA/WA-UW31/2020__EPI_ISL_414618 spike protein mRNA human (1-1273)
aggagaaagcuuaccauguucguguuucugguccuccuuccccugguuagcucccagugcgugaacuugaccacaagaacucaauuaccuccagccuacacuaauucuuucaccaggggcguauauuacccggacaagguguuucggucaaguguccugcacagcacacaggaucuauuccuccccuuuuucuccaacgugacuugguuucaugcuauccacguuucugggaccaauggaacaaaacgcuucgacaacccugugcugccauuuaaugauggugucuauuucgcaucgaccgagaagucaaacauuauacgaggcuggaucuuugggacuacacuugacagcaaaacccagagucuguugauugugaauaacgccacgaauguaguuaucaaggugugugaguuccaguuuugcaacgaucccuuccucggagucuacuaucauaaaaauaacaaguccuggauggagucugaguuccguguguacagcuccgcgaauaacuguacuuuugaauaugugucacaaccuuuccugauggaccuggaaggcaagcaggguaauuuuaaaaaccucagagaguucgucuuuaagaacauugauggguacuucaaaaucuacaguaagcacaccccaauaaauuuaguuagggaccugccccagggauuuagcgcucuugagccuuugguggaucugccaaucggcauuaacaucacacgguuccagacucuacucgcccugcaucgcucuuaucuuaccccgggcgacuccucaagcggguggacagcaggagccgcugcauacuauguagguuaccugcaacccagaaccuuuuugcucaaauauaaugaaaacggcacgauuacugaugccguggacugcgcucuggauccuuuaagugagacaaaguguacccugaagucuuucacugucgaaaaagggaucuaccagacauccaauuuuagggugcagccaaccgagagcauaguucgguuccccaacauuacgaaucucugcccuuuuggagagguguucaacgccacccgcuucgcgucggucuaugcauggaaucgaaagagaaucucuaacuguguggccgacuacuccguacuuuacaauucagcuaguuuuagcacauucaaaugcuauggcguuuccccaacuaagcugaacgacuuguguuuuaccaauguguacgccgauucuuucgucauuaggggugacgaagugcggcagaucgcacccgggcaaacaggaaaaaucgcugauuauaacuacaagcuaccggacgauuuuacuggcugcgucauugccuggaauagcaacaaccuggacucaaaagugggcgggaauuauaacuaccucuaucgucuguuccgcaagaguaaucuuaagccuuuugagagagauauauccaccgaaaucuaccaggcgggaagcacacccuguaacggugccgagggcuucaauugcuacuuuccacugcagucuuauggguuccaaccuaccaacggaguuggcuaccagcccuauagggugguagucuugucauuugaacuccugcacgcaccagcuacugugugcggucccaaaaagaguacgaauuuaguuaaaaacaagugugugaauuucaacuuuaaugggcugacaggcaccggaguccuaacugagagcaacaaaaaguuccucccuuuccagcaguuuggccgggacauugccgauaccacagacgcugugcgagauccacaaacccuggagauccuugacauaacuccgugcuccuucgggggaguaucugugauuacacccgguacgaauaccucgaaccagguugccgucuuguaccaggacgugaauuguacugaagugccugucgcaauccacgccgaucagcugacaccaaccuggcgcguuuauagcacaggcuccaacguguuucaaacuagagcugggugccucaucggagcggagcaugugaacaauucauacgaaugugacauucccaucggcgcagguauuugcgccaguuaucagacccagacgaacucuccuaggcgggcucgcagcguagccucccagucaauaaucgcauacaccaugagccugggggccgaaaauucugucgcuuacuccaacaauaguauugccaucccaacaaacuucacuaucagcgugaccacagaaauucuucccguuucuaugacuaagaccuccguggauuguacgauguauauaugcggcgacucaacagaguguaguaaucuguugcuccaauacggcagcuuuugcacccagcugaacagagcauuaacuggaaucgcggucgagcaggauaaaaauacacaggaaguguucgcucaaguuaagcagauuuauaaaaccccgccuaucaaggacuuugggggauucaacuuuucgcagauucugccagaucccuccaaaccuucuaagaggagcuucaucgaggaccuacucuuuaauaaggugacucuggccgaugcagguuucauaaaacaauacggcgacugucuuggggauaucgccgcucgugacuugauuugcgcccagaaguucaacggacugaccguacugcccccacucuuaacagaugaaaugaucgcacaguauacgucagcucugcuugccggcaccauuacgagugguuggacauuuggggcgggcgccgcuuugcagaucccuuucgcaaugcaaauggccuaccgguuuaauggaauaggcgucacccagaacgugcucuaugagaaucagaaacugauugcuaaccaguucaacuccgccaucgggaagauucaagacucucuaagcuccacagcaucagcgcugggaaaacuccaggacguggucaaucagaacgcccaggcucugaauacucuuguuaagcaauugagcaguaacuuuggcgccaucucuuccgugcugaaugauauauuaagccgacucgacaagguagaagcagaggugcagaucgauagacugauuaccgguaggcuucagucgcugcaaacguacgucacacagcaguugauccgcgcugccgagauucgggcaucagccaaccucgcugcgaccaaaaugucugaaugcgugcuggggcagaguaagagaguugacuucuguggaaaaggcuaccaccuaauguccuuuccccaaagcgccccacaugguguggucuuccugcacgugacuuauguuccggcacaggagaagaauuuuaccacagcuccugccaucugccacgauggcaaagcccauuuccccagggaagggguguuugucucuaacggaacucacugguucguaacccagcgcaauuuuuacgagccacagauaauuacaacggacaacaccuucgugagcggcaauugugauguugugaucgggaucgucaacaauacuguguaugacccccuccaaccugagcuggauuccuucaaggaggaacuugacaaauacuuuaagaaccauacaucaccagauguagacuugggagauauuaguggcaucaaugcuagcguggucaacauucagaaggaaauagaccgacugaaugagguugccaaaaacuuaaacgaaucucucaucgaccugcaggagcuugguaaguaugagcaguacauuaaauggcccugguauaucuggcugggguucauugcaggacuaaucgcgauagugauggugaccaucaugcucugcuguaugacuuccugcuguucaugccugaagggcuguugcaguugugguagcugcugcaaauuugaugaagacgauuccgagccugucuugaagggcgugaagcugcacuacacaugaggacuaguuauaagacugacuagcccgaugggccucccaacgggcccuccuccccuccuugcaccgagauuaauaaaaaaaaaaaaaaaaaaaaaaaaaaaaaaaaaaaaaaaaaaaaaaaaaaaaaaaaaaaaaaaaugcaucccccccccccccccccccccccccccccccaaaggcucuuuucagagccaccagaauu

SEQ ID NO: 12980 - RNA, 4039 nt, Artificial Sequence
  SARS-CoV-2/South Korea/SNU01/2020__EPI_ISL_411929 spike protein mRNA human (1-1273)
aggagaaagcuuaccauguucguguuucugguccuccuuccccugguuagcucccagugcgugaacuugaccacaagaacucaauuaccuccagccuacaccaauucuuucacgaggggcguauauuacccggacaagguguuucggucaaguguccugcacagcacacaggaucuauuccuccccuuuuucuccaacgugacuugguuucaugcuauccacguuucugggaccaauggaacaaaacgcuucgacaacccugugcugccauuuaaugauggugucuauuucgcaucgaccgagaagucaaacauuauacgaggcuggaucuuugggacuacacuugacagcaaaacccagagucuguugauugugaauaacgccacgaauguaguuaucaaggugugugaguuccaguuuugcaacgaucccuuccucggagucuacuaucauaaaaauaacaaguccuggauggagucugaguuccguguguacagcuccgcgaauaacuguacuuuugaauaugugucacaaccuuuccugauggaccuggaaggcaagcaggguaauuuuaaaaaccucagagaguucgucuuuaagaacauugauggguacuucaaaaucuacaguaagcacaccccaauaaauuuaguuagggaccugccccagggauuuugggcucuugagccuuugguggaucugccaaucggcauuaacaucacacgguuccagacucuacucgcccugcaucgcagcuaucuuaccccgggcgacucuuccucaggguggacagcaggagccgcugcauacuauguagguuaccugcaacccagaaccuuuuugcucaaauauaaugaaaacggcacgauuacugaugccguggacugcgcucuggauccuuuaagcgagacaaaguguacccugaagaguuucacugucgaaaaagggaucuaccagacaucuaauuuuagggugcagccaaccgaguccauaguucgguuccccaacauuacgaaucucugcccuuuuggagagguguucaacgccacccgcuucgcgagcgucuaugcauggaaucgaaagagaaucucgaacuguguggccgacuacucuguacuuuacaauuccgcuucauuuaguacauucaaaugcuauggcguuagcccaacuaagcugaacgacuuguguuuuaccaauguguacgccgauuccuucgucauuaggggugacgaagugcggcagaucgcacccgggcaaacaggaaaaaucgcugauuauaacuacaagcuaccggacgauuuuacuggcugcgucauugccuggaacucuaauaaccuggacagcaaagugggcgggaauuauaacuaccucuaucgucuguuccgcaagucaaaucuuaagccuuuugagagagauauaaguaccgaaaucuaccaggcgggauccacacccuguaacgguguugagggcuucaauugcuacuuuccacugcagagcuauggguuccaaccuaccaacggagugggcuaccagcccuauaggguagucguguugucuuuugaacuccugcacgccccagcaacuguuugcggucccaaaaagucaacgaauuuagugaaaaacaagugugucaauuucaacuuuaaugggcugacaggcaccggagugcuaacugagaguaacaaaaaguuccucccuuuccagcaguuuggccgggacauugcugauaccacagacgccguacgagauccacaaacccuggagauccuugacauaacuccgugcagcuucgggggaguguccguuauuacacccgguacgaauaccucuaaccaggucgcuguguuguaccaggacgugaauuguacugaagucccuguugccauccacgcagaucagcugacaccaaccuggcgcguguauucgacaggcagcaacguguuucaaacuagagccgggugccucaucggagcugagcauguaaacaauuccuacgaaugugacauucccaucggcgcggguauuugcgcaucauaucagacccagacgaacaguccuaggcgggcccgcucugucgcuagccaguccauaaucgccuacaccaugucacugggggcagagaauagcguggccuacucuaacaauuccauugcuaucccaacaaacuucacuaucaguguuaccacagaaauucuucccgugagcaugacuaagaccucugucgauuguacgauguauauaugcggcgacuccacagaguguucaaaucuguugcuccaauacggaaguuuuugcacccagcugaacagagccuuaacuggcaucgcaguggagcaggauaaaaauacacaggaaguuuucgcgcaagugaagcagauuuauaaaaccccgccuaucaaggacuuugggggauucaacuuuagccagauucugccagaucccucgaaaccuuccaagaggucuuucaucgaggaccuacucuuuaauaagguaacucuggcugaugccgguuucauaaaacaauacggcgacugucuuggggauaucgcagcccgugacuugauuugcgcucagaaguucaacggacugaccguccucccuccacuguuaacagaugaaaugaucgcccaguauacgagcgcacugcuugcuggcaccauuacuucagguuggacauuuggggccggcgcggccuugcagaucccuuucgcuaugcaaauggcauaccgguuuaauggaauaggcgugacccagaacgugcucuaugagaaucagaaacugauugccaaccaguucaacagugcuaucgggaagauucaagacucccuaucuagcacagccuccgcacugggaaaacuccaggacgucguuaaucagaacgcgcaggcccugaauacucuugugaagcaauugucaagcaacuuuggcgcuaucaguucuguacugaaugauauauuaucccgacucgacaagguggaagccgagguccagaucgauagacugauuaccgguaggcuucagagccugcaaacguacgugacacagcaguugauccgcgcagcugagauucgggccucggcaaaccucgccgcuaccaaaaugucagaaugcguucuggggcagucuaagagaguggacuucuguggaaaaggcuaccaccuaaugaguuuuccccaauccgcgccacauggugucguguuccugcacguuacuuaugugccggcccaggagaagaauuuuaccacagcacccgcuaucugccacgauggcaaagcccauuuccccagggaaggggucuuuguaagcaacggaacucacugguucgugacccagcgcaauuuuuacgagccacagauaauuacaacggacaacaccuucguuucuggcaauugugauguggucaucgggaucgugaacaauacuguauaugacccccuccaaccugagcuggauagcuucaaggaagaacuugacaaauacuuuaagaaccauacauccccagauguggacuugggagauauuucaggcaucaaugccagugucguuaacauucagaaggaaauagaccgacugaaugagguggcuaaaaacuuaaacgaaagccucaucgaccugcaggagcuugguaaguaugagcaguacauuaaauggcccugguauaucuggcugggguucauugcaggacuaaucgccauagugauggucaccaucaugcucugcuguaugacuucuugcuguuccugccugaagggcuguugcucaugugguaguugcugcaaauuugaugaagacgauagcgagccuguguugaagggcguuaagcugcacuacacaugaggacuaguuauaagacugacuagcccgaugggccucccaacgggcccuccuccccuccuugcaccgagauuaauaaaaaaaaaaaaaaaaaaaaaaaaaaaaaaaaaaaaaaaaaaaaaaaaaaaaaaaaaaaaaaaaugcaucccccccccccccccccccccccccccccccaaaggcucuuuucagagccaccagaauu

SEQ ID NO: 12981 - RNA, 4039 nt, Artificial Sequence
  SARS-CoV-2/China/WF0004/2020__EPI_ISL_413694 spike protein mRNA human (1-1273)
aggagaaagcuuaccauguucguguuucugguccuccuuccccugguuagcucccagugcgugaacuugaccacaagaacucaauuaccuccagccuacacgaauagcuucaccaggggcguauauuacccggacaagguguuucggucaaguguccugcacagcacacaggaucuauuccuccccuuuuucuccaacgugacuugguuucaugcuauccacguuucugggaccaauggaacaaaacgcuucgacaacccugugcugccauuuaaugauggugucuauuucgcaucgaccgagaagucaaacauuauacgaggcuggaucuuugggacuacacuugacagcaaaacccagagucuguugauugugaauaacgccacgaauguaguuaucaaggugugugaguuccaguuuugcaacgaucccuuccucggagucuacuaucauaaaaauaacaaguccuggacugagucugaguuccguguguacagcuccgcgaauaacuguaccuuugaguaugugucacaaccuuuccugauggaccuggaaggcaagcaggguaauuuuaaaaaccucagagaguucgucuuuaagaacauugauggguacuucaaaaucuacaguaagcacacaccaauaaauuuaguuagggaccugccccagggauuuagcgcucuugagccuuugguggaucugccaaucggcauuaacaucacucgguuccagacccuacucgcccugcaucgcucuuaucuuacaccgggcgacuccucaagcggguggaccgcaggagccgcugcauacuauguagguuaccugcaacccagaacguuuuugcucaaauauaaugaaaacggcacuauuacagaugccguggacugcgcucuggauccuuuaagugagaccaaguguacucugaagucuuucacagucgaaaaagggaucuaccagaccuccaauuuuagggugcagccaacggagagcauaguucgguuccccaacauuaccaaucucugcccuuuuggagagguguucaacgccacacgcuucgcgucggucuaugcauggaaucgaaagagaaucucuaacuguguggccgacuacuccguacuuuacaauucagcuaguuuuagcacuuucaaaugcuauggcguuuccccaaccaagcugaacgacuuguguuuuacaaauguguacgccgauucuuucgucauuaggggugacgaagugcggcagaucgcacccgggcaaacuggaaaaaucgcugauuauaacuacaagcuaccggacgauuuuaccggcugcgucauugccuggaauagcaacaaccuggacucaaaagugggcgggaauuauaacuaccucuaucgucuguuccgcaagaguaaucuuaagccuuuugagagagauauauccacagaaaucuaccaggcgggaagcacccccuguaacgguguugagggcuucaauugcuacuuuccacugcagucuuauggguuccaaccuacuaacggagugggcuaccagcccuauaggguagucguguugucauuugaacuccugcacgccccagcaacgguuugcggucccaaaaagaguacaaauuuagugaaaaacaagugugucaauuucaacuuuaaugggcugaccggcacuggagugcuaaccgagagcaacaaaaaguuccucccuuuccagcaguuuggccgggacauugcugauacaaccgacgccguacgagauccacaaacucuggagauccuugacauaacaccgugcuccuucgggggagugucuguuauuacgcccgguaccaauacuucgaaccaggucgcuguguuguaccaggacgugaauuguacagaagucccuguugccauccacgcagaucagcugaccccaacauggcgcguguauagcacuggcuccaacguguuucaaaccagagccgggugccucaucggagcugagcauguaaacaauucauacgaaugugacauucccaucggcgcggguauuugcgcaaguuaucagacgcagaccaacucuccuaggcgggcccgcagcgucgcuucccagucaauaaucgccuacacaaugagccugggggcagaaaauucuguggccuacuccaacaauaguauugcuaucccaacuaacuucaccaucagcguuacaacugaaauucuucccgugucuaugaccaagacguccgucgauuguacaauguauauaugcggcgacucaaccgaguguaguaaucuguugcuccaauacggaucuuuuugcacucagcugaacagagccuuaacaggcaucgcaguggagcaggauaaaaauacccaggaaguuuucgcgcaagugaagcagauuuauaaaacuccgccuaucaaggacuuugggggauucaacuuuucgcagauucugccagaucccuccaaaccuucuaagaggagcuucaucgaggaccuacucuuuaauaagguaacccuggcugaugccgguuucauaaaacaauacggcgacugucuuggggauaucgcagcccgugacuugauuugcgcucagaaguucaacggacugacaguccugcccccacucuuaacggaugaaaugaucgcccaguauaccucagcacugcuugcuggcacuauuacaagugguuggaccuuuggggccggcgcggccuugcagaucccuuucgcuaugcaaauggcauaccgguuuaauggaauaggcgugacacagaacgugcucuaugagaaucagaaacugauugccaaccaguucaacuccgcuaucgggaagauucaagacucucuaagcuccacugccucagcacugggaaaacuccaggacgucguuaaucagaacgcgcaggcccugaauacccuugugaagcaauugagcaguaacuuuggcgcuaucucuuccguacugaaugauauauuaagccgacucgacaagguggaagccgagguccagaucgauagacugauuacggguaggcuucagucgcugcaaacauacgugacccagcaguugauccgcgcagcugagauucgggccucagcaaaccucgccgcuacuaaaaugucugaaugcguucuggggcagaguaagagauucgacuuuuguggaaaaggcuaccaccuaauguccuucccccaaagcgcgccacaugguguggucuuucugcacgugaccuauguuccggcccaggagaagaauuucacaacugcuccugcaaucugccacgauggcaaagcccauuuucccagggaagggguguucgucucuaacggaacccacugguuuguaacacagcgcaauuucuacgagccacagauaauuacgaccgacaacacuuucgugagcggcaauugugauguugugaucgggaucgucaacaauacaguguaugacccccuccaaccugagcuggauuccuuuaaggaagaacuugacaaauacuucaagaaccauaccucaccagauguagacuugggagauauuaguggcaucaaugccagcguggucaacauucagaaggaaauagaccgacugaaugagguugcuaaaaacuuaaacgaaucucucaucgaccugcaggagcuugguaaguaugagcaguacauuaaauggcccugguauaucuggcugggguuuauugcaggacuaaucgccauagugauggugacuaucaugcucugcuguaugacauccugcuguucaugccugaagggcuguugcaguugugguagcugcugcaaauucgaugaagacgauuccgagccugucuugaagggcgugaagcugcacuacaccugaggacuaguuauaagacugacuagcccgaugggccucccaacgggcccuccuccccuccuugcaccgagauuaauaaaaaaaaaaaaaaaaaaaaaaaaaaaaaaaaaaaaaaaaaaaaaaaaaaaaaaaaaaaaaaaaugcaucccccccccccccccccccccccccccccccaaaggcucuuuucagagccaccagaauu

SEQ ID NO: 12982 - RNA, 4039 nt, Artificial Sequence
  SARS-CoV-2/China/WF0028/2020__EPI_ISL_413791 spike protein mRNA human (1-1273)
aggagaaagcuuaccauguucguguuucugguccuccuuccccugguuagcucccagugcgugaacuugaccacaagaacucaauuaccuccagccuacacuaauucuuucaccaggggcguauauuacccggacaagguguuucggucaaguguccugcacagcacacaggaucuauuccuccccuuuuucuccaacgugacuugguuucaugcuauccacguuucugggaccaauggaacaaaacgcuucgacaacccugugcugccauuuaaugauggugucuauuucgcaucgaccgagaagucaaacauuauacgaggcuggaucuuugggacuacacuugacagcaaaacccagagucuguugauugugaauaacgccacgaauguaguuaucaaggugugugaguuccaguuuugcaacgaucccuuccucggagucuacuaucauaaaaauaacaaguccuggauggagucugaguuccguguguacagcuccgcgaauaacuguacuuuugaauaugugucacaaccuuuccugauggaccuggaaggcaagcaggguaauuuuaaaaaccucagagaguucgucuuuaagaacauugauggguacuucaaaaucuacaguaagcacaccccaauaaauuuaguuagggaccugccccagggauuuagcgcucuugagccuuugguggaucugccaaucggcauuaacaucacacgguuccagacucuacucgcccugcaucgcucuuaucuuaccccgggcgacuccucaagcggguggacagcaggagccgcugcauacuauguagguuaccugcaacccagaaccuuuuugcucaaauauaaugaaaacggcacgauuacugaugccguggacugcgcucuggauccuuuaagugagacaaaguguacccugaagucuuucacugucgaaaaagggaucuaccagacauccaauuuuagggugcagccaaccgagagcauaguucgguuccccaacauuacgaaucucugcccuuuuggagagguguucaacgccacccgcuucgcgucggucuaugcauggaaucgaaagagaaucucuaacuguguggccgacuacuccguacuuuacaauucagcuaguuuuagcacauucaaaugcuauggcguuuccccaacuaagcugaacgacuuguguuuuaccaauguguacgccgauucuuucgucauuaggggugacgaagugcggcagaucgcacccgggcaaacaggaaaaaucgcugauuauaacuacaagcuaccggacgauuuuacuggcugcgucauugccuggaauagcaacaaccuggacucaaaagugggcgggaauuauaacuaccucuaucgucuguuccgcaagaguaaucuuaagccuuuugagagagauauauccaccgaaaucuaccaggcgggaagcacacccuguaacgguguugagggcuucaauugcuacuuuccacugcagucuuauggguuccaaccuaccaacggagugggcuaccagcccuauaggguagucguguugucauuugaacuccugcacgccccagcaacuguuugcggucccaaaaagaguacgaauuuagugaaaaacaagugugucaauuucaacuuuaaugggcugacaggcaccggagugcuaacugagagcaacaaaaaguuccucccuuuccagcaguuuggccgggacauugcugauaccacagacgccguacgagauccacaaacccuggagauccuugacauaacuccgugcuccuucgggggagugucuguuauuacacccgguacgaauaccucgaaccaggucgcuguguuguaccaggacgugaauuguacugaagucccuguugccauccacgcagaucagcugacaccaaccuggcgcguguauagcacaggcuccaacguguuucaaacuagagccgggugccucaucggagcugagcauguaaacaauucauacgaaugugacauucccaucggcgcggguauuugcgcaaguuaucagacccagacgaacucuccuaggcgggcccgcagcgucgcuucccagucaauaaucgccuacaccaugagccugggggcagaaaauucuguggccuacuccaacaauaguauugcuaucccaacaaacuucacuaucagcguuaccacagaaauucuucccgugucuaugacuaagaccuccgucgauuguacgauguauauaugcggcgacucaacagaguguaguaaucuguugcuccaauacggcagcuuuugcacccagcugaacagagccuuaacuggaaucgcaguggagcaggauaaaaauacacaggaaguuuucgcgcaagugaagcagauuuauaaaaccccgccuaucaaggacuuugggggauucaacuuuucgcagauucugccagaucccuccaaaccuucuaagaggagcuucaucgaggaccuacucuuuaauaagguaacucuggcugaugccgguuucauaaaacaauacggcgacugucuuggggauaucgcagcccgugacuugauuugcgcucagaaguucaacggacugaccguccugcccccacucuuaacagaugaaaugaucgcccaguauacgucagcacugcuugcuggcaccauuacgagugguuggacauuuggggccggcgcggccuugcagaucccuuucgcuaugcaaauggcauaccgguuuaauggaauaggcgugacccagaacgugcucuaugagaaucagaaacugauugccaaccaguucaacuccgcuaucgggaagauucaagacucucuaagcuccacagccucagcacugggaaaacuccaggacgucguuaaucagaacgcgcaggcccugaauacucuugugaagcaauugagcaguaacuuuggcgcuaucucuuccguacugaaugauauauuaagccgacucgacaagguggaagccgagguccagaucgauagacugauuaccgguaggcuucagucgcugcaaacguacgugacacagcaguugauccgcgcagcugagauucgggccucagcaaaccucgccgcuaccaaaaugucugaaugcguucuggggcagaguaagagaguggacuucuguggaaaaggcuaccaccuaauguccuuuccccaaagcgcgccacauggugucguguuccugcacguuacuuaugugccggcccaggagaagaauuuuaccacagcuccugcaaucugccacgauggcaaagcccauuuccccagggaaggggucuuuguaucuaacggaacucacugguucgugacccagcgcaauuuuuacgagccacagauaauuacaacggacaacaccuucguuagcggcaauugugauguggucaucgggaucgugaacaauacuguauaugacccccuccaaccugagcuggaauccuucaaggaggaacuugauaaauacuuuaagaaccauacaucaccagacguggauuugggagacauuaguggcaucaaugccagcgucguuaacauucagaaggagauagaucgacugaaugaaguggcuaaaaacuuaaacgagucucucaucgaccugcaggagcuugguaaguaugaacaguacauuaaauggcccugguauaucuggcugggguucauugcaggacuaaucgccauagugauggucaccaucaugcucugcuguaugacuuccugcuguucaugccugaagggcuguugcaguugugguagcugcugcaaauuugacgaggaugacuccgaaccuguguugaagggcguuaagcugcacuacacaugaggacuaguuauaagacugacuagcccgaugggccucccaacgggcccuccuccccuccuugcaccgagauuaauaaaaaaaaaaaaaaaaaaaaaaaaaaaaaaaaaaaaaaaaaaaaaaaaaaaaaaaaaaaaaaaaugcaucccccccccccccccccccccccccccccccaaaggcucuuuucagagccaccagaauu

SEQ ID NO: 12983 - RNA, 4039 nt, Artificial Sequence
  SARS-CoV-2/2019-nCoV/USA-CruiseA-18/2020__MT159716.1 spike protein mRNA human (1-1273)
aggagaaagcuuaccauguucguguuucugguccuccuuccccugguuagcucccagugcgugaacuugaccacaagaacucaauuaccuccagccuacacuaauucuuucaccaggggcguauauuacccggacaagguguuucggucaaguguccugcacagcacacaggaucuauuccuccccuuuuucuccaacgugacuugguuucaugcuauccacguuucugggaccaauggaacaaaacgcuucgacaacccugugcugccauuuaaugauggugucuauuucgcaucgaccgagaagucaaacauuauacgaggcuggaucuuugggacuacacuugacagcaaaacccagagucuguugauugugaauaacgccacgaauguaguuaucaaggugugugaguuccaguuuugcaacgaucccuuccucggagucuacuaucauaaaaauaacaaguccuggauggagucugaacugcguguguacagcuccgcgaauaacuguacuuucgaguaugugucacaaccuuuucugauggaccucgaaggcaagcaggguaauuucaaaaacuuaagagaguuugucuucaagaacauugauggguacuuuaaaaucuacaguaagcacaccccaauaaaucugguuagggaccuuccccagggauucagcgcuuuggagccucugguggaucuaccaaucggcauuaacaucacacgguuucagacucuccuggcccuucaucgcucuuaucugaccccgggcgacuccucaagcggguggacagcaggagccgcugcauacuauguagguuacuugcaacccagaaccuuccuccugaaauauaaugaaaacggcacgauuacugaugccguggacugcgcuuuagauccucugagugagacaaaguguacccucaagucuuuuacugucgaaaaagggaucuaccagacauccaauuucagggugcagccaaccgagagcauaguucgguuucccaacauuacgaaucuuugcccuuucggagagguguuuaacgccacccgcuucgcgucggucuaugcauggaaucgaaagagaaucucuaacuguguggccgacuacuccguacuguacaauucagcuaguuucagcacauuuaaaugcuauggcguuuccccaacuaaguugaacgaccuauguuucaccaauguguacgccgauucuuuugucauuaggggugacgaagugcggcagaucgcacccgggcaaacaggaaaaaucgcugauuauaacuacaagcugccggacgauuucacuggcugcgucauugccuggaauagcaacaaccucgacucaaaagugggcgggaauuauaacuaccuguaucgucuuuuucgcaagaguaaucugaagccuuucgagagagauauauccaccgaaaucuaccaggcgggaagcacacccuguaacgguguugagggcuuuaauugcuacuucccauugcagucuuauggguuucaaccuaccaacggagugggcuaccagcccuauaggguagucgugcucucauucgaacuguuacacgccccagcaacuguuugcggucccaaaaagaguacgaaucuggugaaaaacaagugugucaauuuuaacuucaaugggcuaacaggcaccggagugcucacugagagcaacaaaaaguuucugccuuuccagcaguucggccgggacauugcugauaccacagacgccguacgagauccacaaacccuugagaucuuggacauaacuccgugcuccuuugggggagugucuguuauuacacccgguacgaauaccucgaaccaggucgcugugcuguaccaggacgugaauuguacugaagucccuguugccauccacgcagaucagcucacaccaaccuggcgcguguauagcacaggcuccaacguguuccaaacuagagccgggugccugaucggagcugagcauguaaacaauucauacgaaugugacauucccaucggcgcggguauuugcgcaaguuaucagacccagacgaacucuccuaggcgggcccgcagcgucgcuucccagucaauaaucgccuacaccaugagccuuggggcagaaaauucuguggccuacuccaacaauaguauugcuaucccaacaaacuuuacuaucagcguuaccacagaaauucugcccgugucuaugacuaagaccuccgucgauuguacgauguauauaugcggcgacucaacagaguguaguaauuugcuccugcaauacggcagcuucugcacccaguuaaacagagcccugacuggaaucgcaguggagcaggauaaaaauacacaggaaguuuuugcgcaagugaagcagauuuauaaaaccccgccuaucaaggacuucgggggauuuaacuucucgcagauucuaccagaucccuccaaaccuucuaagaggagcuuuaucgaggaccuccuguucaauaagguaacucuugcugaugccgguuuuauaaaacaauacggcgacuguuugggggauaucgcagcccgugaccugauuugcgcucagaaguucaacggacucaccguccugcccccauuacugacagaugaaaugaucgcccaguauacgucagcacuuuuggcuggcaccauuacgagugguuggacauucggggccggcgcggcccuccagaucccuuuugcuaugcaaauggcauaccgguucaauggaauaggcgugacccagaacgugcuguaugagaaucagaaacuaauugccaaccaguuuaacuccgcuaucgggaagauucaagacucucugagcuccacagccucagcacucggaaaacugcaggacgucguuaaucagaacgcgcaggcccuuaauacuuuggugaagcaacugagcaguaacuucggcgcuaucucuuccguauuaaaugauauacucagccgacuggacaagguggaagccgagguccagaucgauagacuuauuaccgguaggcugcagucguugcaaacguacgugacacagcagcucauccgcgcagcugagauucgggccucagcaaaccuggccgcuaccaaaaugucugaaugcguucuagggcagaguaagagaguggacuuuuguggaaaaggcuaccaccugauguccuucccccaaagcgcgccacauggugucguguuucuccacguuacuuaugugccggcccaggagaagaauuucaccacagcuccugcaaucugccacgauggcaaagcccauuuucccagggaaggggucuucguaucuaacggaacucacugguuugugacccagcgcaauuucuacgagccacagauaauuacaacggacaacaccuuuguuagcggcaauugugauguggucaucgggaucgugaacaauacuguauaugacccccugcaaccugagcuugauuccuucaaggaagaguuggacaaauacuucaagaaccauacaucaccagauguggaccugggagauauuaguggcaucaaugccagcgucguuaacauucagaaggaaauagaccgauuaaaugagguggcuaaaaaccucaacgaaucucugaucgaccuucaggagcuggguaaguaugagcaguacauuaaauggcccugguauaucuggcuaggguuuauugcaggacucaucgccauagugauggucaccaucaugcugugcuguaugacuuccugcuguucaugcuugaagggcuguugcaguugugguagcugcugcaaauucgaugaagacgauuccgagccugugcugaagggcguuaaguuacacuacacaugaggacuaguuauaagacugacuagcccgaugggccucccaacgggcccuccuccccuccuugcaccgagauuaauaaaaaaaaaaaaaaaaaaaaaaaaaaaaaaaaaaaaaaaaaaaaaaaaaaaaaaaaaaaaaaaaugcaucccccccccccccccccccccccccccccccaaaggcucuuuucagagccaccagaauu

SEQ ID NO: 12984 - RNA, 4039 nt, Artificial Sequence
  SARS-CoV-2/SARS-CoV-2/Yunnan-01/human/2020/CHN__MT049951.1 spike protein mRNA human (1-1273)
aggagaaagcuuaccauguucguguuucugguccuccuuccccugguuagcucccagugcgugaacuugaccacaagaacucaauuaccuccagccaauacgaacucuuucaccaggggcguauacuauccggacaagguguuucggucaaguguccugcacagcacacaggaucuauuccuccccuuuuucuccaaugugacuugguuucaugcuauccacguuucugggaccaacggaacaaaacgcuucgacaauccugugcugccauuuaacgauggugucuacuucgcaucgaccgagaagucaaauauuauacgaggcuggaucuuugggacuacacuugacagcaaaacccagagucuguugauugugaacaaugccacgaacguaguuaucaaggugugugaguuccaguuuugcaaugaucccuuccucggagucuauuaccauaaaaacaauaaguccuggauggagucugaguuccguguguauagcuccgcgaacaauuguacuuuugaauacgugucacaaccuuuccugauggaccuggaaggcaagcaggguaacuuuaaaaaccucagagaguucgucuuuaagaauauugauggguauuucaaaaucuacaguaagcacaccccaauaaacuuaguuagggaccugccccagggauuuagcgcucuugagccuuugguggaucugccaaucggcauuaauaucacacgguuccagacucuacucgcccugcaucgcucuuaccuuaccccgggcgacuccucaagcggguggacagcaggagccgcugcauauuacguagguuaucugcaacccagaaccuuuuugcucaaauacaacgaaaauggcacgauuacugaugccguggacugcgcucuggauccuuuaagugagacaaaguguacccugaagucuuucacugucgaaaaagggaucuaucagacauccaacuuuagggugcagccaaccgagagcauaguucgguuccccaauauuacgaaccucugcccuuuuggagagguguucaaugccacccgcuucgcgucggucuacgcauggaaccgaaagagaaucucuaauuguguggccgacuauuccguacuuuacaacucagcuaguuuuagcacauucaaaugcuacggcguuuccccaacuaagcugaaugacuuguguuuuaccaacguguaugccgauucuuucgucauuaggggugacgaagugcggcagaucgcacccgggcaaacaggaaaaaucgcugauuacaauuauaagcuaccggacgauuuuacuggcugcgucauugccuggaacagcaacaaucuggacucaaaagugggcgggaacuacaauuaucucuaccgucuguuccgcaagaguaaccuuaagccuuuugagagagauauauccaccgaaaucuaucaggcgggaagcacacccuguaaugguguugagggcuucaacugcuacuuuccacugcagucuuacggguuccaaccuaccaauggagugggcuaucagcccuacaggguagucguguugucauuugaacuccugcacgccccagcaacuguuugcggucccaaaaagaguacgaacuuagugaaaaauaagugugucaacuucaauuuuaacgggcugacaggcaccggagugcuaacugagagcaauaaaaaguuccucccuuuccagcaguuuggccgggacauugcugauaccacagacgccguacgagauccacaaacccuggagauccuugacauaacuccgugcuccuucgggggagugucuguuauuacacccgguacgaacaccucgaaucaggucgcuguguuguaucaggacgugaacuguacugaagucccuguugccauccacgcagaucagcugacaccaaccuggcgcguguacagcacaggcuccaacguguuucaaacuagagccgggugccucaucggagcugagcauguaaauaacucauaugaaugugacauucccaucggcgcggguauuugcgcaaguuaccagacccagacuaauucuccuaggcgggcccgcagcgucgcuucccagucaauaaucgccuauaccaugagccugggggcagagaacucuguggccuacuccaauaacaguauugcuaucccaacaaauuucacuaucagcguuaccacagaaauucuucccgugucuaugacuaagaccuccgucgauuguacgauguacauaugcggcgacucaacagaguguaguaaccuguugcuccaauauggcagcuuuugcacccagcugaauagagccuuaacuggaaucgcaguggagcaggauaaaaacacacaggaaguuuucgcgcaagugaagcagauuuacaaaaccccgccuaucaaggacuuugggggauucaauuuuucgcagauucugccagaucccuccaaaccuucuaagaggagcuucaucgaggaccuacucuuuaacaagguaacucuggcugaugccgguuucauaaaacaauauggcgacugucuuggggauaucgcagcccgugacuugauuugcgcucagaaguucaauggacugaccguccugcccccacucuuaacagaugaaaugaucgcccaguacacgucagcacugcuugcuggcaccauuacgagugguuggacauuuggggccggcgcggccuugcagaucccuuucgcuaugcaaauggcauaucgguuuaacggaauaggcgugacccagaaugugcucuacgagaaccagaaacugauugccaaccaguucaauuccgcuaucgggaagauucaagacucucuaagcuccacagccucagcacugggaaaacuccaggacgucguuaaccagaaugcgcaggcccugaacacucuugugaagcaauugagcaguaauuuuggcgcuaucucuuccguacugaacgauauauuaagccgacucgacaagguggaagccgagguccagaucgauagacugauuaccgguaggcuucagucgcugcaaacguaugugacacagcaguugauccgcgcagcugagauucgggccucagcaaaucucgccgcuaccaaaaugucugaaugcguucuggggcagaguaagagaguggacuucuguggaaaaggcuaccaccuaauguccuuuccccaaagcgcgccacauggugucguguuccugcacguuacuuacgugccggcccaggagaagaacuuuaccacagcuccugcaaucugccacgauggcaaagcccauuuccccagggaaggggucuuuguaucuaauggaacucacugguucgugacccagcgcaacuuuuaugagccacagauaauuacaacggacaauaccuucguuagcggcaacugugauguggucaucgggaucgugaauaacacuguauacgacccccuccaaccugagcuggauuccuucaaggaagaacuugacaaauauuuuaagaaucauacaucaccagauguggacuugggagauauuaguggcaucaacgccagcgucguuaauauucagaaggaaauagaccgacugaacgagguggcuaaaaacuuaaaugaaucucucaucgaccugcaggagcuugguaaguacgagcaguauauuaaauggcccugguacaucuggcugggguucauugcaggacuaaucgccauagugauggucaccaucaugcucugcuguaugacuuccugcuguucaugccugaagggcuguugcaguugugguagcugcugcaaauuugaugaagacgauuccgagccuguguugaagggcguuaagcugcacuauacaugaggacuaguuauaagacugacuagcccgaugggccucccaacgggcccuccuccccuccuugcaccgagauuaauaaaaaaaaaaaaaaaaaaaaaaaaaaaaaaaaaaaaaaaaaaaaaaaaaaaaaaaaaaaaaaaaugcaucccccccccccccccccccccccccccccccaaaggcucuuuucagagccaccagaauu

SEQ ID NO: 12985 - RNA, 4039 nt, Artificial Sequence
  SARS-CoV-2/USA/WA-UW292/2020__EPI_ISL_418077 spike protein mRNA human (1-1273)
aggagaaagcuuaccauguucguguuucugguccuccuuccccugguuagcucccagugcgugaacuugaccacaagaacucaauuaccuccagccuacaccaauucuuucacgaggggcguauauuacccggacaagguguuucggucaaguguccugcacagcacacaggaucuauuccuccccuuuuucuccaacgugacuugguuucaugcuauccacguuucugggaccaauggaacaaaacgcuucgacaacccugugcugccauuuaaugauggugucuauuucgcaucgaccgagaagucaaacauuauacgaggcuggaucuuugggacuacacuugacagcaaaacccagagucuguugauugugaauaacgccacgaauguaguuaucaaggugugugaguuccaguuuugcaacgaucccuuccucggagucuacuaucauaaaaauaacaaguccuggauggagucugaguuccguguguacagcuccgcgaauaacuguacuuuugaguaugugucacaaccuuuccugauggaccuggaaggcaagcaggguaauuuuaaaaaccucagagaguucgucuuuaagaacauugauggguacuucaaaaucuacaguaagcacaccccaauaaauuuaguuagggaccugccccagggauuuagcgcucuugagccuuugguggaucugccaaucggcauuaacaucacacgguuccagacucuacucgcccugcaucgcucuuaucuuaccccgggcgacuccucaagcggguggacagcaggagccgcugcauacuauguagguuaccugcaacccagaaccuuuuugcucaaauauaaugaaaacggcacgauuacugaugccguggacugcgcucuggauccuuuaagugagacaaaguguacccugaagucuuucacugucgaaaaagggaucuaccagacauccaauuuuagggugcagccaaccgagagcauaguucgguuccccaacauuacgaaucucugcccuuuuggagagguguucaacgccacccgcuucgcgucggucuaugcauggaaucgaaagagaaucucuaacuguguggccgacuacuccguacuuuacaauucagcuaguuuuagcacauucaaaugcuauggcguuuccccaacuaagcugaacgacuuguguuuuaccaauguguacgccgauucuuucgucauuaggggugacgaagugcggcagaucgcacccgggcaaacaggaaaaaucgcugauuauaacuacaagcuaccggacgauuuuacuggcugcgucauugccuggaauagcaacaaccuggacucaaaagugggcgggaauuauaacuaccucuaucgucuguuccgcaagaguaaucuuaagccuuuugagagagauauauccaccgaaaucuaccaggcgagcucuacacccuguaacggaguugaggguuucaauugcuacuuuccacugcagucauauggcuuccaaccuaccaacggggugggauaccagcccuauaggguagucguguugaguuuugaacuccugcacgccccagcaacuguuugcggccccaaaaagagcacgaauuuagugaaaaacaagugugucaauuucaacuuuaauggucugacagggaccggcgugcuaacugaguccaacaaaaaguuccucccuuuccagcaguuuggacgggacauugcugauaccacagacgccguacgagauccacaaacccuggagauccuugacauaacuccgugcucuuucggcggggugucgguuauuacacccggaacgaauaccagcaaccaggucgcuguguuguaccaggacgugaauuguacugaagucccuguugccauccacgcagaucagcugacaccaaccuggcgcguguauuccacagguucaaacguguuucaaacuagagccggcugccucaucggggcugagcauguaaacaauaguuacgaaugugacauucccaucggagcgggcauuugcgcaucuuaucagacccagacgaacagcccuaggcgggcccgcuccgucgcuucacagagcauaaucgccuacaccaugucucugggugcagaaaauuccguggccuacaguaacaauagcauugcuaucccaacaaacuucacuaucucuguuaccacagaaauucuucccguguccaugacuaagaccucagucgauuguacgauguauauaugcggggacaguacagaguguagcaaucuguugcuccaauacggcucguuuugcacccagcugaacagagccuuaacuggaaucgcaguggagcaggauaaaaauacacaggaaguuuucgcgcaagugaagcagauuuauaaaaccccgccuaucaaggacuuuggcggguucaacuuuucccagauucugccagaucccucuaaaccuagcaagaggucauucaucgaggaccuacucuuuaauaagguaacucuggcugaugccggauucauaaaacaauacggugacugucuuggcgauaucgcagcccgugacuugauuugcgcucagaaguucaacgggcugaccguccucccuccacuguuaacagaugaaaugaucgcccaguauacgagugcacugcuugcuggaaccauuacuuccggcuggacauuuggugccggggcggccuugcagaucccuuucgcuaugcaaauggcauaccgguuuaauggcauaggagugacccagaacgugcucuaugagaaucagaaacugauugccaaccaguucaacucugcuaucggcaagauucaagacagccuauccucaacagccagcgcacuggggaaacuccaggacgucguuaaucagaacgcgcaggcccugaauacucuugugaagcaauugaguucuaacuuuggagcuaucuccagcguacugaaugauauauuaucgcgacucgacaagguggaagccgagguccagaucgauagacugauuaccggcaggcuucagucacugcaaacguacgugacacagcaguugauccgcgcagcugagauucgggccucugcaaaccucgccgcuaccaaaaugagugaaugcguucugggucaguccaagagaguggacuucugugggaaaggauaccaccuaaugagcuuuccccaaucugcgccacauggcgucguguuccugcacguuacuuaugugccggcccaggagaagaauuuuaccacagcacccgcuaucugccacgaugguaaagcccauuuccccagggaaggcgucuuuguaagcaacgggacucacugguucgugacccagcgcaauuuuuacgagccacagauaauuacaacggacaacaccuucguuuccggaaauugugauguggucaucggcaucgugaacaauacuguauaugacccccuccaaccugagcuggauucauucaaggaagaacuugacaaauacuuuaagaaccauacaaguccagauguggacuugggggauauuagcggaaucaaugccucugucguuaacauucagaaggaaauagaccgacugaaugagguggcuaaaaacuuaaacgaaucccucaucgaccugcaggagcuuggcaaguaugagcaguacauuaaauggcccugguauaucuggcuggguuucauugcagggcuaaucgccauagugauggucaccaucaugcucugcuguaugacuucaugcuguaguugccugaagggauguugcagcuguggcuccugcugcaaauuugaugaagacgauucugagccuguguugaaggguguuaagcugcacuacacaugaggacuaguuauaagacugacuagcccgaugggccucccaacgggcccuccuccccuccuugcaccgagauuaauaaaaaaaaaaaaaaaaaaaaaaaaaaaaaaaaaaaaaaaaaaaaaaaaaaaaaaaaaaaaaaaaugcaucccccccccccccccccccccccccccccccaaaggcucuuuucagagccaccagaauu

SEQ ID NO: 12986 - RNA, 4039 nt, Artificial Sequence
  SARS-CoV-2/Iceland/192/2020__EPI_ISL_417819 spike protein mRNA human (1-1273)
aggagaaagcuuaccauguucguguuuuucguccugcucccccuuguuagcucccagugcgugaaccugaccacaagaacucaauugccuccagccuacacuaauucuuuuaccaggggcguauauuacccggacaagguguuccggucaagugucuuacacagcacacaggaucuguuucuacccuucuuuuccaacgugacuugguuccaugcuauccacguuucugggaccaauggaacaaaacgcuuugacaacccugugcucccauucaaugauggugucuauuuugcaucgaccgagaagucaaacauuauacgaggcuggaucuucgggacuacacuggacagcaaaacccagagucuucugauugugaauaacgccacgaauguaguuaucaaggugugugaauuucaguucugcaacgaucccuucuugggagucuacuaucauaaaaauaacaaguccuggauggagucugaauuucguguguacagcuccgcgaauaacuguacuuucgaguaugugucacaaccuuuucucauggaccuggaaggcaagcaggguaauuucaaaaaccugagagaguuugucuucaagaacauugauggguacuuuaaaaucuacaguaagcacaccccaauaaaucucguuagggacuuaccccagggauucagcgcucuggagccucuuguggauuugccaaucggcauuaacaucacacgguuucagacucugcuagcccuccaucgcucuuaucugaccccgggcgacuccucaagcggguggacagcaggagccgcugcauacuauguagguuaccuucaacccagaaccuuccuguugaaauauaaugaaaacggcacgauuacugaugccguggacugcgcucucgauccucugagugagacaaaguguaccuuaaagucuuuuacugucgaaaaagggaucuaccagacauccaauuucagggugcagccaaccgagagcauaguucgguuucccaacauuacgaaucugugcccuuucggagagguguucaacgccacccgcuuugcgucggucuaugcauggaaucgaaagagaaucucuaacuguguggccgacuacuccguacucuacaauucagcuaguuucagcacauuuaaaugcuauggcguuuccccaacuaaacuuaacgaccuguguuucaccaauguguacgccgauucuuuugucauuaggggugacgaagugcggcagaucgcacccgggcaaacaggaaagaucgcugauuauaacuacaaguugccggacgauuucacuggcugcgucauugccuggaauagcaacaaccuagacucaaaagugggcgggaauuauaacuaccuguaucgucucuuucgcaagaguaaucugaagccuuucgagagagauauauccaccgaaaucuaccaggcgggaagcacacccuguaacgguguugagggcuuuaauugcuacuucccacuucagucuuauggguuucaaccuaccaacggagugggcuaccagcccuauaggguagucgugcugucauucgaauugcuccacgccccagcaacuguuugcggucccaaaaagaguacgaaucuggugaaaaacaagugugucaauuuuaacuucaauggguuaacaggcaccggagugcugacugagagcaacaaaaaguuccuaccuuuucagcaguucggccgggacauugcugauaccacagacgccguacgagauccacaaacccucgagauccuggacauaacuccgugcuccuuugggggagugucuguuauuacacccgguacgaauaccucgaaccaggucgcugugcuuuaccagggcgugaauuguacugaagucccuguugccauccacgcagaccaguugacaccaaccuggcgcguguauagcacaggguccaacguguuccaaacuagagccggaugccugaucggcgcugagcauguaaacaauucauacgaaugugauauucccaucggugcggggauuugcgcaaguuaucagacccagacgaacucuccuaggcgggcccgcagcgucgcuucccagucaauaaucgccuacaccaugagccucggcgcagaaaauucuguggccuacuccaacaauaguauugcuaucccaacaaacuuuacuaucagcguuaccacagaaauucugcccgugucuaugacuaagaccuccgucgacuguacgauguauauaugcggagauucaacagaguguaguaaucuucuguugcaauacggcagcuucugcacccagcucaacagagcccugacugggaucgcaguggagcaggacaaaaauacacaggaaguuuuugcgcaagugaagcagauuuauaaaaccccgccuaucaaggauuucggagguuuuaacuucucgcagauuuuaccagaccccuccaaaccuucuaagaggagcuuuaucgaggaucugcuauucaauaagguaacucucgcugacgccggcuucauaaaacaauacggggauugucugggagacaucgcagcccgugaucuuauuugcgcucagaaguuuaacggcuugaccguccugcccccacuccugacagacgaaaugaucgcccaguauacgucagcauuacuggcugguaccauuacgaguggguggacauucggcgccggagcggcccuucagaucccuuuugcuaugcaaauggcauaccgguucaauggcauaggggugacccagaacguguuguaugagaaucagaaacucauugccaaccaguuuaacuccgcuaucggaaagauucaagauucucugagcuccacagccucagcacuaggcaaacugcaggacgucguuaaucagaacgcgcaggcccucaauacucuggugaagcaacuuagcaguaacuucggugcuaucucuuccguauugaaugacauacugagccgauuagauaagguggaagccgagguccagaucgacagacucauuaccgggaggcugcagucgcuucaaacguacgugacacagcagcugauccgcgcagcugagauucgggccucagcaaacuuggccgcuaccaaaaugucugaaugcguucucggacagaguaagagaguggauuuuuguggcaaagguuaccaccugauguccuucccccaaagcgcgccacauggcgucguguuucuacacguuacuuaugugccggcccaggagaagaauuucaccacagcuccugcaaucugccacgacgggaaagcccauuuucccagggaaggagucuucguaucuaacggcacucacugguuugugacccagcgcaauuucuacgagccacagauaauuacaacggauaacaccuucguuagcgggaauugugacguggucaucggaaucgugaacaauacuguauaugauccccugcaaccugagcucgacuccuuuaaggaggagcuggauaaauacuucaagaaccauacaucaccagacguggaucuuggcgacauuagugguaucaaugccagcgucguuaacauucagaaggaaauagaucgauugaaugagguggcuaaaaaccugaacgaaucuuuaaucgaccuccaggagcuggggaaguaugagcaguacauuaaauggcccugguauaucuggcuuggauuuauugcaggccugaucgccauagugauggucaccaucaugcuaugcuguaugacuuccugcuguucaugccucaaggguuguugcaguuguggcagcugcugcaaauucgacgaagaugacuccgagccugugcugaaggggguuaaguugcacuacacaugaggacuaguuauaagacugacuagcccgaugggccucccaacgggcccuccuccccuccuugcaccgagauuaauaaaaaaaaaaaaaaaaaaaaaaaaaaaaaaaaaaaaaaaaaaaaaaaaaaaaaaaaaaaaaaaaugcaucccccccccccccccccccccccccccccccaaaggcucuuuucagagccaccagaauu

SEQ ID NO: 12987 - RNA, 4039 nt, Artificial Sequence
  SARS-CoV-2/Belgium/ULG-6939/2020__EPI_ISL_417020 spike protein mRNA human (1-1273)
aggagaaagcuuaccauguucguguuucugguccuccuuccccugguuagcucccagugcgugaacuugaccacaagaacucaauuaccuccagccuacacuaauucuuucaccaggggcguauauuacccggacaagguguuucggucaaguguccugcacagcacacaggaucuauuccuccccuuuuucuccaacgugacuugguuucaugcuauccacguuucugggaccaauggaacaaaacgcuucgacaacccugugcugccauuuaaugauggugucuauuucgcaucgaccgagaagucaaacauuauacgaggcuggaucuuugggacuacacuugacagcaaaacccagagucuguugauugugaauaacgccacgaauguaguuaucaaggugugugaguuccaguuuugcaacgaucccuuccucggagucuacuaucauaaaaauaacaaguccuggauggagucugaguuccguguguacagcuccgcgaauaacuguacuuuugaguaugugucacaaccuuuccugauggaccuggaaggcaagcaggguaauuuuaaaaaccucagagaguucgucuuuaagaacauugauggguacuucaaaaucuacaguaagcacaccccaauaaauuuaguuagggaccugccccagggauuuagcgcucuugagccuuugguggaucugccaaucggcauuaacaucacacgguuccagacucuacucgcccugcaucgcucuuaucuuaccccgggcgacuccucaagcggguggacagcaggagccgcugcauacuauguagguuaccugcaacccagaaccuuuuugcucaaauauaaugaaaacggcacgauuacugaugccguggacugcgcucuggauccuuuaagugagacaaaguguacccugaagucuuucacugucgaaaaagggaucuaccagacauccaauuuuagggugcagccaaccgagagcauaguucgguuccccaacauuacgaaucucugcccuuuuggagagguguucaacgccacccgcuucgcgucggucuaugcauggaaucgaaagagaaucucuaacuguguggccgacuacuccguacuuuacaauucagcuaguuuuagcacauucaaaugcuauggcguuuccccaacuaagcugaacgacuuguguuuuaccaauguguacgccgauucuuucgucauuaggggugacgaagugcggcagaucgcacccgggcaaacaggaaaaaucgcugauuauaacuacaagcuaccggacgauuuuacuggcugcgucauugccuggaauagcaacaaccuggacucaaaagugggcgggaauuauaacuaccucuaucgucuguuccgcaagaguaaucuuaagccuuuugagagagauauauccaccgaaaucuaccaggcgggaagcacacccuguaacgguguugagggcuucaauugcuacuuuccacugcagucuuauggguuccaaccuaccaacggagugggcuaccagcccuauaggguagucguguugucauuugaacuccugcacgccccagcaacuguuugcggucccaaaaagaguacgaauuuagugaaaaacaagugugucaauuucaacuuuaaugggcugacaggcaccggagugcuaacugagagcaacaaaaaguuccucccuuuccagcaguuuggccgggacauugcugauaccacagacgccguacgagauccacaaacccuggagauccuugacauaacuccgugcuccuucgggggagugucuguuauuacacccgguacgaauaccucgaaccaggucgcuguguuguaccagggcgugaauuguacugaagucccuguugccauccacgcagaccagcugacaccaaccuggcgcguguauagcacaggguccaacguguuucaaacuagagccggaugccucaucggcgcugagcauguaaacaauucauacgaaugugauauucccaucggugcggggauuugcgcaaguuaucagacccagacgaacucuccuaggcgggcccgcagcgucgcuucccagucaauaaucgccuacaccaugagccugggcgcagaaaauucugugguuuacuccaacaauaguauugccaucccaacaaacuucacuaucagcgugaccacagaaauucuucccgucucuaugacuaagaccuccguggacuguacgauguauauaugcggagauucaacagaguguaguaaucuguugcuccaauacggcagcuuuugcacccagcugaacagagcuuuaacugggaucgccguugagcaggacaaaaauacacaggaaguguucgcacaaguaaagcagauuuauaaaaccccgccuaucaaggauuuuggagguuucaacuuuucgcagauucugccagaccccuccaaaccuucuaagaggagcuucaucgaggaucuacucuuuaauaaggucacucuggcggacgcuggcuucauaaaacaauacggggauugucuuggagacaucgccgcacgugauuugauuugcgcccagaaguucaacggccugaccgugcugcccccacucuuaacagacgaaaugaucgcucaguauacgucagcccugcuugcagguaccauuacgaguggguggacauuuggcgcuggagccgcguugcagaucccuuucgccaugcaaauggcuuaccgguuuaauggcauaggggugacccagaacguccucuaugagaaucagaaacugauugcaaaccaguucaacuccgccaucggaaagauucaagauucucuaagcuccacagcuucagcccugggcaaacuccaggacguugugaaucagaacgcacaggcgcugaauacucuuguaaagcaauugagcaguaacuuuggugccaucucuuccgugcugaaugacauauuaagccgacucgauaaggucgaagcugaggugcagaucgacagacugauuaccgggaggcuucagucgcugcaaacguacguuacacagcaguugauccgcgccgcagagauucgggcuucagccaaccucgcagccaccaaaaugucugaaugcgugcugggacagaguaagagagucgauuucuguggcaaagguuaccaccuaauguccuuuccccaaagcgcuccacauggcgugguuuuccugcacgugacuuaugucccggcgcaggagaagaauuuuaccacagccccugcaaucugccacgacgggaaagcucauuuccccagggaaggaguauuugugucuaacggcacucacugguucguuacccagcgcaauuuuuacgagccacagauaauuacaacggauaacaccuucgugagcgggaauugugacgucgugaucggaaucguaaacaauacuguguaugauccccuccaaccugagcuggacuccuucaaggaagaacuugauaaauacuuuaagaaccauacaucaccagacgucgauuugggcgacauuagugguaucaaugccagcguugugaacauucagaaggaaauagaucgacugaaugagguggccaaaaacuuaaacgaaucucucaucgaccugcaggagcuugggaaguaugagcaguacauuaaauggcccugguauaucuggcugggauucauugcuggccuaaucgcaauagucauggugaccaucaugcucugcuguaugacuuccugcuguucaugccugaaggguuguugcaguuguggcagcugcugcaaauuugacgaagaugacuccgagccuguuuugaaggggguaaagcugcacuacacaugaggacuaguuauaagacugacuagcccgaugggccucccaacgggcccuccuccccuccuugcaccgagauuaauaaaaaaaaaaaaaaaaaaaaaaaaaaaaaaaaaaaaaaaaaaaaaaaaaaaaaaaaaaaaaaaaugcaucccccccccccccccccccccccccccccccaaaggcucuuuucagagccaccagaauu

SEQ ID NO: 12988 - RNA, 4039 nt, Artificial Sequence
  SARS-CoV-2/France/HF2496/2020__EPI_ISL_418231 spike protein mRNA human (1-1273)
aggagaaagcuuaccauguucguguuucugguccuccuuccccugguuagcucccagugcgugaacuugaccacaagaacucaauuaccuccagccuacacuaauucuuucaccaggggcguauauuacccggacaagguguuucggucaaguguccugcacagcacacaggaucuauuccuccccuuuuucuccaacgugacuugguuucaugcuauccacguuucugggaccaauggaacaaaacgcuucgacaacccugugcugccauuuaaugauggugucuauuucgcaucgaccgagaagucaaacauuauacgaggcuggaucuuugggacuacacuugacagcaaaacccagagucuguugauugugaauaacgccacgaauguaguuaucaaggugugugaguuccaguuuugcaacgaucccuuccucggagucuacuaucauaaaaauaacaaguccuggauggagucugaguuccguguguacagcuccgcgaauaacuguacuuuugaguaugugucacaaccuuuccugauggaccuggaaggcaagcaggguaauuuuaaaaaccucagagaguucgucuuuaagaacauugauggguacuucaaaaucuacaguaagcacaccccaauaaauuuaguuagggaccugccccagggauuuagcgcucuugagccuuugguggaucugccaaucggcauuaacaucacacgguuccagacucuacucgcccugcaucgcucuuaucuuaccccgggcgacuccucaagcggguggacagcaggagccgcugcauacuauguagguuaccugcaacccagaaccuuuuugcucaaauauaaugaaaacggcacgauuacugaugccguggacugcgcucuggauccuuuaagugagacaaaguguacccugaagucuuucacugucgaaaaagggaucuaccagacauccaauuuuagggugcagccaaccgagagcauaguucgguuccccaacauuacgaaucucugcccuuuuggagagguguucaacgccacccgcuucgcgucggucuaugcauggaaucgaaagagaaucucuaacuguguggccgacuacuccguacuuuacaauucagcuaguuuuagcacauucaaaugcuauggcguuuccccaacuaagcugaacgacuuguguuuuaccaauguguacgccgauucuuucgucauuaggggugacgaagugcggcagaucgcacccgggcaaacaggaaaaaucgcugauuauaacuacaagcuaccggacgauuuuacuggcugcgucauugccuggaauagcaacaaccuggacucaaaagugggcgggaauuauaacuaccucuaucgucuguuccgcaagaguaaucuuaagccuuuugagagagauauauccaccgaaaucuaccaggcgggaagcacacccuguaacgguguugagggcuucaauugcuacuuuccacugcagucuuauggguuccaaccuaccaacggagugggcuaccagcccuauaggguagucguguugucauuugaacuccugcacgccccagcaacuguuugcggucccaaaaagaguacgaauuuagugaaaaacaagugugucaauuucaacuuuaaugggcugacaggcaccggagugcuaacugagagcaacaaaaaguuccucccuuuccagcaguuuggccgggacauugcugauaccacagacgccguacgagauccacaaacccuggagauccuugacauaacuccgugcuccuucgggggagugucuguuauuacacccgguacgaauaccucgaaccaggucgcuguguuguaccagggcgugaauuguacugaagucccuguugccauccacgcagaccagcugacaccaaccuggcgcguguauagcacaggguccaacguguuucaaacuagagccggaugccucaucggcgcugagcauguaaacaauucauacgaaugugauauucccaucggugcggggauuugcgcaaguuaucagacccagacgaacucuccuaggcgggcccgcagcgucgcuucccagucaauaaucgccuacaccaugagccugggcgcagaaaauucuguggccuacuccaacaauaguauugcuaucccaacaaacuucacuaucagcguuaccacagaaauucuucccgugucuaugacuaagaccuccgucgacuguacgauguauauaugcggagauucaacagaguguaguaaucuguugcuccaauacggcagcuuuugcacccagcugaacagagccuuaacugggaucgcaguggagcaggacaaaaauacacaggaaguuuucgcgcaagugaagcagauuuauaaaaccccgccuaucaaggauuuuggagguuucaacuuuucgcagauucugccagaccccuccaaaccuucuaagaggagcuucaucgaggaucuacucuuuaauaagguaacucuggcugacgccggcuucauaaaacaauacggggauugucuuggagacaucgucgcacgugauuugauuugcgcccagaaguucaacggccugaccgugcugcccccacucuuaacagacgaaaugaucgcucaguauacgucagcccugcuugcagguaccauuacgaguggguggacauuuggcgcuggagccgcguugcagaucccuuucgccaugcaaauggcuuaccgguuuaauggcauaggggugacccagaacguccucuaugagaaucagaaacugauugcaaaccaguucaacuccgccaucggaaagauucaagauucucuaagcuccacagcuucagcccugggcaaacuccaggacguugugaaucagaacgcacaggcgcugaauacucuuguaaagcaauugagcaguaacuuuggugccaucucuuccgugcugaaugacauauuaagccgacucgauaaggucgaagcugaggugcagaucgacagacugauuaccgggaggcuucagucgcugcaaacguacguuacacagcaguugauccgcgccgcagagauucgggcuucagccaaccucgcagccaccaaaaugucugaaugcgugcugggacagaguaagagagucgauuucuguggcaaagguuaccaccuaauguccuuuccccaaagcgcuccacauggcgugguuuuccugcacgugacuuaugucccggcgcaggagaagaauuuuaccacagccccugcaaucugccacgacgggaaagcucauuuccccagggaaggaguauuugugucuaacggcacucacugguucguuacccagcgcaauuuuuacgagccacagauaauuacaacggauaacaccuucgugagcgggaauugugacgucgugaucggaaucguaaacaauacuguguaugauccccuccaaccugagcuggacuccuucaaggaagaacuugauaaauacuuuaagaaccauacaucaccagacgucgauuugggcgacauuagugguaucaaugccagcguugugaacauucagaaggaaauagaucgacugaaugagguggccaaaaacuuaaacgaaucucucaucgaccugcaggagcuugggaaguaugagcaguacauuaaauggcccugguauaucuggcugggauucauugcuggccuaaucgcaauagucauggugaccaucaugcucugcuguaugacuuccugcuguucaugccugaaggguuguugcaguuguggcagcugcugcaaauuugacgaagaugacuccgagccuguuuugaaggggguaaagcugcacuacacaugaggacuaguuauaagacugacuagcccgaugggccucccaacgggcccuccuccccuccuugcaccgagauuaauaaaaaaaaaaaaaaaaaaaaaaaaaaaaaaaaaaaaaaaaaaaaaaaaaaaaaaaaaaaaaaaaugcaucccccccccccccccccccccccccccccccaaaggcucuuuucagagccaccagaauu

SEQ ID NO: 12989 - RNA, 4039 nt, Artificial Sequence
  SARS-CoV-2/USA/WA-UW291/2020__EPI_ISL_418076 spike protein mRNA human (1-1273)
aggagaaagcuuaccauguucguguuucugguccuccuuccccugguuagcucccagugcgugaacuugaccacaagaacucaauuaccuccagccuacacuaauucuuucaccaggggcguauauuacccggacaagguguuucggucaaguguccugcacagcacacaggaucuauuccuccccuuuuucuccaacgugacuugguuucaugcuauccacguuucugggaccaauggaacaaaacgcuucgacaacccugugcugccauuuaaugauggugucuauuucgcaucgaccgagaagucaaacauuauacgaggcuggaucuuugggacuacacuugacagcaaaacccagagucuguugauugugaauaacgccacgaauguaguuaucaaggugugugaguuccaguuuugcaacgaucccuuccucggagucuacuaucauaaaaauaacaaguccuggauggagucugaguuccguguguacagcuccgcgaauaacuguacuuuugaguaugugucacaaccuuuccugauggaccuggaaggcaagcaggguaauuuuaaaaaccucagagaguucgucuuuaagaacauugauggguacuucaaaaucuacaguaagcacaccccaauaaauuuaguuagggaccugccccagggauuuagcgcucuugagccuuugguggaucugccaaucggcauuaacaucacacgguuccagacucuacucgcccugcaucgcucuuaucuuaccccgggcgacuccucaagcggguggacagcaggagccgcugcauacuauguagguuaccugcaacccagaaccuuuuugcucaaauauaaugaaaacggcacgauuacugaugccguggacugcgcucuggauccuuuaagugagacaaaguguacccugaagucuuucacugucgaaaaagggaucuaccagacauccaauuuuagggugcagccaaccgagagcauaguucgguuccccaacauuacgaaucucugcccuuuuggagagguguucaacgccacccgcuucgcgucggucuaugcauggaaucgaaagagaaucucuaacuguguggccgacuacuccguacuuuacaauucagcuaguuuuagcacauucaaaugcuauggcguuuccccaacuaagcugaacgacuuguguuuuaccaauguguacgccgauucuuucgucauuaggggugacgaagugcggcagaucgcacccgggcaaacaggaaaaaucgcugauuauaacuacaagcuaccggacgauuuuacuggcugcgucauugccuggaauagcaacaaccuggacucaaaagugggcgggaauuauaacuaccucuaucgucuguuccgcaagaguaaucuuaagccuuuugagagagauauauccaccgaaaucuaccaggcgggaagcacacccuguaacgguguugagggcuucaauugcuacuuuccacugcagucuuauggguuccaaccuaccaacggagugggcuaccagcccuauaggguagucguguugucauuugaacuccugcacgccccagcaacuguuugcggucccaaaaagaguacgaauuuagugaaaaacaagugugucaauuucaacuuuaaugggcugacaggcaccggagugcuaacugagagcaacaaaaaguuccucccuuuccagcaguuuggccgggacauugcugauaccacagacgccguacgagauccacaaacccuggagauccuugacauaacuccgugcuccuucgggggagugucuguuauuacacccgguacgaauaccucgaaccaggucgcuguguuguaccagggcgugaauuguacugaagucccuguugccauccacgcagaccagcugacaccaaccuggcgcguguauagcacaggguccaacguguuucaaacuagagccggaugccucaucggcgcugagcauguaaacaauucauacgaaugugauauucccaucggugcggggauuugcgcaaguuaucagacccagacgaacucuccuaggcgggcccgcagcgucgcuucccagucaauaaucgccuacaccaugagccugggcgcagaaaauucuguggccuacuccaacaauaguauugcuaucccaacaaacuucacuaucagcguuaccacagaaauucuucccgugucuaugacuaagaccuccgucgacuguacgauguauauaugcggagauucaacagaguguaguaaucuguugcuccaauacggcagcuuuugcacccagcugaacagagccuuaacugggaucgcaguggagcaggacaaaaauacacaggaaguuuucgcgcaagugaagcagauuuauaaaaccccgccuaucaaggauuuuggagguuucaacuuuucgcagauucugccagaccccuccaaaccuucuaagaggagcuucaucgaggaucuacucuuuaauaagguaacucuggcugacgccggcuucauaaaacaauacggggauugucuuggagacaucgcagcccgugauuugauuugcgcucagaaguucaacggccugaccguccugcccccacucuuaacagacgaaaugaucgcccaguauacgucagcacugcuugcugguaccauuacgaguggguggacauuuggcgccggagcggccuugcagaucccuuucgcuaugcaaauggcauaccgguuuaauggcauaggggugacccagaacgugcucuaugagaaucagaaacugauugccaaccaguucaacuccgcuaucggaaagauucaauacucucuaagcuccacagccucagcacugggcaaacuccaggaugucguuaaucagaacgcgcaggcccugaauacucuugugaagcaauugagcaguaacuuuggugcuaucucuuccguacugaaugacauauuaagccgacucgacaagguggaagccgagguccagaucgauagacugauuaccgggaggcuucagucgcugcaaacguacgugacacagcaguugauccgcgcagcugagauucgggccucagcaaaccucgccgcuaccaaaaugucugaaugcguucugggacagaguaagagaguggacuucuguggcaaagguuaucaccuaauguccuuuccccaaagcgcgccacauggcgucguguuccugcacguuacuuacgugccggcccaggagaagaauuuuaccacagcuccugcaaucugccacgaugggaaagcccauuuccccagggaaggagucuuuguaucuaacggcacucacugguucgugacccagcgcaauuuuuaugagccacagauaauuacaacggacaacaccuucguuagcgggaauugugauguggucaucggaaucgugaacaauacuguauacgacccccuccaaccugagcuggauuccuucaaggaagaacuugacaaauauuuuaagaaccauacaucaccagauguggacuugggcgauauuagugguaucaaugccagcgucguuaacauucagaaggaaauagaccgacugaaugagguggcuaaaaacuuaaacgaaucucucaucgaucugcaggagcuugggaaguacgagcaguauauuaaauggcccugguacaucuggcugggauucauugcaggccuaaucgccauagugauggucaccaucaugcucugcuguaugacuuccugcuguucaugccugaaggguuguugcaguuguggcagcugcugcaaauuugacgaagacgauuccgagccuguguugaaggggguuaagcugcacuacacaugaggacuaguuauaagacugacuagcccgaugggccucccaacgggcccuccuccccuccuugcaccgagauuaauaaaaaaaaaaaaaaaaaaaaaaaaaaaaaaaaaaaaaaaaaaaaaaaaaaaaaaaaaaaaaaaaugcaucccccccccccccccccccccccccccccccaaaggcucuuuucagagccaccagaauu

SEQ ID NO: 12990 - RNA, 4039 nt, Artificial Sequence
  SARS-CoV-2/Portugal/PT0034/2020__EPI_ISL_418019 spike protein mRNA human (1-1273)
aggagaaagcuuaccauguucguguuucugguccuccuuccccugguuagcucccagugcgugaacuugaccacaagaacucaauuaccuccagccuacacuaauucuuucaccaggggcguauauuacccggacaagguguuucggucaaguguccugcacagcacacaggaucuauuccuccccuuuuucuccaacgugacuugguuucaugcuauccacguuucugggaccaauggaacaaaacgcuucgacaacccugugcugccauuuaaugauggugucuauuucgcaucgaccgagaagucaaacauuauacgaggcuggaucuuugggacuacacuugacagcaaaacccagagucuguugauugugaauaacgccacgaauguaguuaucaaggugugugaguuccaguuuugcaacgaucccuuccucggagucuacuaucauaaaaauaacaaguccuggauggagucugaguuccguguguacagcuccgcgaauaacuguacuuuugaguaugugucacaaccuuuccugauggaccuggaaggcaagcaggguaauuuuaaaaaccucagagaguucgucuuuaagaacauugauggguacuucaaaaucuacaguaagcacaccccaauaaauuuaguuagggaccugccccagggauuuagcgcucuugagccuuugguggaucugccaaucggcauuaacaucacacgguuccagacucuacucgcccugcaucgcucuuaucuuaccccgggcgacuccucaagcggguggacagcaggagccgcugcauacuauguagguuaccugcaacccagaaccuuuuugcucaaauauaaugaaaacggcacgauuacugaugccguggacugcgcucuggauccuuuaagugagacaaaguguacccugaagucuuucacugucgaaaaagggaucuaccagacauccaauuuuagggugcagccaaccgagagcauaguucgguuccccaacauuacgaaucucugcccuuuuggagagguguucaacgccacccgcuucgcgucggucuaugcauggaaucgaaagagaaucucuaacuguguggccgacuacuccguacuuuacaauucagcuaguuuuagcacauucaaaugcuauggcguuuccccaacuaagcugaacgacuuguguuuuaccaauguguacgccgauucuuucgucauuaggggugacgaagugcggcagaucgcacccgggcaaacaggaaaaaucgcugauuauaacuacaagcuaccggacgauuuuacuggcugcgucauugccuggaauagcaacaaccuggacucaaaagugggcgggaauuauaacuaccucuaucgucuguuccgcaagaguaaucuuaagccuuuugagagagauauauccaccgaaaucuaccaggcgggaagcacacccuguaacgguguugagggcuucaauugcuacuuuccacugcagucuuauggguuccaaccuaccaacggagugggcuaccagcccuauaggguagucguguugucauuugaacuccugcacgccccagcaacuguuugcggucccaaaaagaguacgaauuuagugaaaaacaagugugucaauuucaacuuuaaugggcugacaggcaccggagugcuaacugagagcaacaaaaaguuccucccuuuccagcaguuuggccgggacauugcugauaccacagacgccguacgagauccacaaacccuggagauccuugacauaacuccgugcuccuucgggggagugucuguuauuacacccgguacgaauaccucgaaccaggucgcuguguuguaccagggcgugaauuguacugaagucccuguugccauccacgcagaccagcugacaccaaccuggcgcguguauagcacaggguccaacguguuucaaacuagagccggaugccucaucggcgcugagcauguaaacaauucauacgaaugugauauucccaucggugcggggauuugcgcaaguuaucagacccagacgaacucuccuaggcgggcccgcagcgucgcuucccagucaauaaucgccuacaccaugagccugggcgcagaaaauucuguggccuacuccaacaauaguauugcuaucccaacaaacuucacuaucagcguuaccacagaaauucuucccgugucuaugacuaagaccuccgucgacuguacgauguauauaugcggagauucaacagaguguaguaaucuguugcuccaauacggcagcuuuugcacccagcugaacagagccuuaacugggaucgcaguggagcaggacaaaaauacacaggaaguuuucgcgcaagugaagcagauuuauaaaaccccgccuaucaaggauuuuggagguuucaacuuuucgcagauucugccagaccccuccaaaccuucuaagaggagcuucaucgaggaucuacucuuuaauaagguaacucuggcugacgccggcuucauaaaacaauacggggauugucuuggagacaucgcagcccgugauuugauuugcgcucagaaguucaacggccugaccguccugcccccacucuuaacagacgaaaugaucgcccaguauacgucagcacugcuugcugguaccauuacgaguggguggacauuuggcgccggagcggccuugcagaucccuuucgcuaugcaaauggcauaccgguuuaauggcauaggggugacccagaacgugcucuaugagaaucagaaacugauugccaaccaguucaacuccgcuaucggaaagauucaagauucucuaagcuccacagccucagcacugggcaaacuccaggacgucguuaaucagaacgcgcaggcccugaauacucuugugaagcaauugagcaguaacuuuggugcuaucucuuccguacugaaugacauauuaagccgacucgauaagguggaagccgagguccagaucgacagacugauuaccgggaggcuucagucgcugcaaacguacgugacacagcaguugauccgcgcagcugagauucgggccucagcaaaccucgccgcuaccaaaaugucugaaugcguucugggacagaguaagagaguggauuucuguggcaaagguuaccaccuaauguccuuuccccaaagcgcgccacauggcgucguguuccugcacguuacuuaugugccggcccaggagaagaauuuuaccacagcuccugcaaucugccacgacgggaaagcccauuuccccagggaaggagucuuuguaucuaacggcacucacugguucgugacccagcgcaauuuuuacgagccacagauaauuacaacggauaacaccuucguuagcgggaauugugacguggucaucggaaucgugaacaauacuguauaugauccccuccaaccugagcuggacuccuucaaggaagaacuugauaaauacuuuaagaaccauacaucaccagacguggauuugggcgacauuagugguaucaaugccagcgucguuaacauucagaaggaaauagaucgacugaaugagguggcuaaaaacuuaaacgaaucucucaucgaccugcaggagcuugggaaguaugagcaguacauuaaauggcccugguauaucuggcugggauucauugcaggccuaaucgccauagugauggucaccaucaugcucugcuguauuacuuccugcuguucaugccugaaggguuguugcaguuguggcagcugcugcaaauuugacgaagaugacuccgagccuguguugaaggggguuaagcugcacuacacaugaggacuaguuauaagacugacuagcccgaugggccucccaacgggcccuccuccccuccuugcaccgagauuaauaaaaaaaaaaaaaaaaaaaaaaaaaaaaaaaaaaaaaaaaaaaaaaaaaaaaaaaaaaaaaaaaugcaucccccccccccccccccccccccccccccccaaaggcucuuuucagagccaccagaauu

SEQ ID NO: 12991 - RNA, 4039 nt, Artificial Sequence
  SARS-CoV-2/Iceland/202/2020__EPI_ISL_417750 spike protein mRNA human (1-1273)
aggagaaagcuuaccauguucguguuucugguccuccuuccccugguuagcucccagugcgugaacuugaccacaagaacucaauuaccuccagccuacacuaauucuuucaccaggggcguauauuacccggacaagguguuucggucaaguguccugcacagcacacaggaucuauuccuccccuuuuucuccaacgugacuugguuucaugcuauccacguuucugggaccaauggaacaaaacgcuucgacaacccugugcugccauuuaaugauggugucuauuucgcaucgaccgagaagucaaacauuauacgaggcuggaucuuugggacuacacuugacagcaaaacccagagucuguugauugugaauaacgccacgaauguaguuaucaaggugugugaguuccaguuuugcaacgaucccuuccucggagucuacuaucauaaaaauaacaaguccuggauggagucugaguuccguguguacagcuccgcgaauaacuguacuuuugaauaugugucacaaccuuuccugauggaccuggaaggcaagcaggguaauuuuaaaaaccucagagaguucgucuuuaagaacauugauggguacuucaaaaucuacaguaagcacaccccaauaaauuuaguuagggaccugccccagggauuuagcgcucuugagccuuugguggaucugccaaucggcauuaacaucacacgguuccagacucuacucgcccugcaucgcucuuaucuuaccccgggcgacuccucaagcggguggacagcaggagccgcugcauacuauguagguuaccugcaacccagaaccuuuuugcucaaauauaaugaaaacggcacgauuacugaugccguggacugcgcucuggauccuuuaagugagacaaaguguacccugaagucuuucacugucgaaaaagggaucuaccagacauccaauuuuagggugcagccaaccgagagcauaguucgguuccccaacauuacgaaucucugcccuuuuggagagguguucaacgccacccgcuucgcgucggucuaugcauggaaucgaaagagaaucucuaacuguguggccgacuacuccguacuuuacaauucagcuaguuuuagcacauucaaaugcuauggcguuuccccaacuaagcugaacgacuuguguuuuaccaauguguacgccgauucuuucgucauuaggggugacgaagugcggcagaucgcacccgggcaaacaggaaaaaucgcugauuauaacuacaagcuaccggacgauuuuacuggcugcgucauugccuggaauagcaacaaccuggacucaaaagugggcgggaauuauaacuaccucuaucgucuguuccgcaagaguaaucuuaagccuuuugagagagauauauccaccgaaaucuaccaggcgggaagcacacccuguaacgguguugagggcuucaauugcuacuuuccacugcagucuuauggguuccaaccuaccaacggagugggcuaccagcccuauaggguagucguguugucauuugaacuccugcacgccccagcaacuguuugcggucccaaaaagaguacgaauuuagugaaaaacaagugugucaauuucaacuuuaaugggcugacaggcaccggagugcuaacugagagcaacaaaaaguuccucccuuuccagcaguuuggccgggacauugcugauaccacagacgccguacgagauccacaaacccuggagauccuugacauaacuccgugcuccuucgggggagugucuguuauuacacccgguacgaauaccucgaaccaggucgcuguguuguaccaggacgugaauuguacugaagucccuguugccauccacgcagaucagcugacaccaaccuggcgcguguauagcacaggcuccaacguguuucaaacuagagccgggugccucaucggagcugagcauguaaacaauucauacgaaugugacauucccaucggcgcggguauuugcgcaaguuaucagacccagacgaacucuccuaggcgggcccgcagcgucgcuucccagucaauaaucgccuacaccaugagccugggggcagaaaauucuguggccuacuccaacaauaguauugcuaucccaacaaacuucacuaucagcguuaccacagaaauucuucccgugucuaugacuaagaccuccgucgauuguacgauguauauaugcggcgacucaacagaguguaguaaucuguugcuccaauacggcagcuuuugcacccagcugaacagagccuuaacuggaaucgcaguggagcaggauaaaaauacacaggaaguuuucgcgcaagugaagcagauuuauaaaaccccgccuaucaaggacuuugggggauucaacuuuucgcagauucugccagaucccuccaaaccuucuaagaggagcuucaucgaggaccuacucuuuaauaagguaacucuggcugaugccgguuucauaaaacaauacggcgacugucuuggggauaucgcagcccgugacuugauuugcgcucagaaguucaacggacugaccguccugcccccacucuuaacagaugaaaugaucgcccaguauacgucagcacugcuugcuggcaccauuacgagugguuggacauuuggggccggcgcggccuugcagaucccuuucgcuaugcaaauggcauaccgguuuaauggaauaggcgugacccagaacgugcucuaugagaaucagaaacugauugccaaccaguucaacuccgcuaucgggaagauucaagacucucuaagcuccacagccucagcacugggaaaacuccaggacgucguuaaucagaacgcgcaggcccugaauacucuugugaagcaauugagcaguaacuuuggcgcuaucucuuccguacugaaugauauauuaagccgacucgacaagguggaagccgagguccagaucgauagacugauuaccgguaggcuucagucgcugcaaacguacgugacacagcaguugauccgcgcagcugagauucgggccucagcaaaccucgccgcuaccaaaaugucugaaugcguucuggggcagaguaagagaguggacuucuguggaaaaggcuaccaccuaauguccuuuccccaaagcgcgccacauggugucguguuccugcacguuacuuaugugccggcccaggagaagaauuuuaccacagcuccugcaaucugccacgauggcaaagcccauuuccccagggaaggggucuuuguaucuaacggaacucacugguucgugacccagcgcaauuuuuacgagccacagauaauuacaacggacaacaccuucguuagcggcaauugugauguggucaucgggaucgugaacaauacuguauaugacccccuccaaccugagcuggauuccuucaaggaggaacuugacaaauacuuuaagaaccauacaucaccagauguggacuugggagauauucccggcaucaaugccagugucguuaacauucagaaggaaauagaccgacugaaugagguggcuaaaaacuuaaacgaaagccucaucgaccugcaggagcuugguaaguaugagcaguacauuaaauggccuugguauaucuggcugggguucauugcaggacuaaucgccauagugauggucaccaucaugcucugcuguaugacuucuugcuguuccugccugaagggcuguugcucaugugguaguugcugcaaauuugaugaagacgauagcgagccgguguugaagggcguuaagcugcacuacacaugaggacuaguuauaagacugacuagcccgaugggccucccaacgggcccuccuccccuccuugcaccgagauuaauaaaaaaaaaaaaaaaaaaaaaaaaaaaaaaaaaaaaaaaaaaaaaaaaaaaaaaaaaaaaaaaaugcaucccccccccccccccccccccccccccccccaaaggcucuuuucagagccaccagaauu

SEQ ID NO: 12992 - RNA, 4039 nt, Artificial Sequence
  SARS-CoV-2/USA/WA-UW261/2020__EPI_ISL_418046 spike protein mRNA human (1-1273)
aggagaaagcuuaccauguucguguuucugguccuccuuccccugguuagcucccagugcgugaacuugaccacaagaacucaauuaccuccagccuacacgaauagcuucaccaggggcguauauuacccggacaagguguuucggucaaguguccugcacagcacacaggaucuauuccuccccuuuuucuccaacgugacuugguuucaugcuauccacguuucugggaccaauggaacaaaacgcuucgacaacccugugcugccauuuaaugauggugucuauuucgcaucgaccgagaagucaaacauuauacgaggcuggaucuuugggacuacacuugacagcaaaacccagagucuguugauugugaauaacgccacgaauguaguuaucaaggugugugaguuccaguuuugcaacgaucccuuccucggagucuacuaucauaaaaauaacaaguccuggauggagucugaguuccguguguacagcuccgcgaauaacuguacuuuugaguaugugucacaaccuuuccugauggaccuggaaggcaagcaggguaauuuuaaaaaccucagagaguucgucuuuaagaacauugauggguacuucaaaaucuacaguaagcacaccccaauaaauuuaguuagggaccugccccagggauuuagcgcucuugagccuuugguggaucugccaaucggcauuaacaucacacgguuccagacucuacucgcccugcaucgcucuuaucuuaccccgggcgacuccucaagcggguggacagcaggagccgcugcauacuauguagguuaccugcaacccagaaccuuuuugcucaaauauaaugaaaacggcacgauuacugaugccguggacugcgcucuggauccuuuaagugagacaaaguguacccugaagucuuucacugucgaaaaagggaucuaccagacauccaauuuuagggugcagccaaccgagagcauaguucgguuccccaacauuacgaaucucugcccuuuuggagagguguucaacgccacccgcuucacaucggucuaugcguggaaucgaaagagaaucucuaacuguguggcagacuacuccguacuuuacaauucagccaguuuuagcacuuucaaaugcuauggcguuuccccaaccaagcugaacgacuuguguuuuacaaauguguacgcugauucuuucgucauuaggggugacgaagugcggcagaucgcccccgggcaaacuggaaaaaucgcagauuauaacuacaagcuaccggacgauuuuaccggcugcgucauugcuuggaauagcaacaaccuggacucaaaagugggcgggaauuauaacuaccucuaucgucuguuccgcaagaguaaucuuaagccuuuugagagagauauauccacagaaaucuaccaggccggaagcacccccuguaacgguguugagggcuucaauugcuacuuuccacugcagucuuauggguuccaaccuacuaacggagugggcuaccagcccuauaggguagucguguugucauuugaacuccugcacgcgccagccacgguuugcggucccaaaaagaguacaaauuuagugaaaaacaagugugucaauuucaacuuuaaugggcugaccggcacuggagugcuaaccgagagcaacaaaaaguuccucccuuuccagcaguuuggccgggacauugcagauacaaccgacgcuguacgagauccacaaacucuggagauccuugacauaacaccgugcuccuucgggggagugucuguuauuacgcccgguaccaauacuucgaaccaggucgccguguuguaccaggacgugaauuguacagaagucccuguugcuauccacgccgaucagcugaccccaacauggcgcguguauagcacuggcuccaacguguuucaaaccagagcagggugccucaucggagccgagcauguaaacaauucauacgaaugugacauucccaucggcgcugguauuugcgcgaguuaucagacgcagaccaacucuccuaggcgggcacgcagcgucgccucccagucaauaaucgcuuacacaaugagccugggggccgaaaauucuguggcauacuccaacaauaguauugccaucccaacuaacuucaccaucagcguuacaacugaaauucuucccgugucuaugaccaagacguccgucgauuguacaauguauauaugcggcgacucaaccgaguguaguaaucuguugcuccaauacggaucuuuuugcacucagcugaacagagcuuuaacaggcaucgccguggagcaggauaaaaauacccaggaaguuuucgcacaagugaagcagauuuauaaaacuccgccuaucaaggacuuugggggauucaacuuuucgcagauucugccagaucccuccaaaccuucuaagaggagcuucaucgaggaccuacucuuuaauaagguaacccuggcggaugcugguuucauaaaacaauacggcgacugucuuggggauaucgccgcacgugacuugauuugcgcccagaaguucaacggacugacaguccugcccccacucuuaacggaugaaaugaucgcucaguauaccucagcccugcuugcaggcacuauuacaagugguuggaccuuuggggcuggcgccgcguugcagaucccuuucgccaugcaaauggcuuaccgguuuaauggaauaggcgugacacagaacgugcucuaugagaaucagaaacugauugcaaaccaguucaacuccgccaucgggaagauucaagacucucuaagcuccacugcuucagcccugggaaaacuccaggacgucguuaaucagaacgcacaggcgcugaauacccuugugaagcaauugagcaguaacuuuggcgccaucucuuccguacugaaugauauauuaagccgacucgacaagguggaagcugagguccagaucgauagacugauuacggguaggcuucagucgcugcaaacauacgugacccagcaguugauccgcgccgcagagauucgggcuucagccaaccucgcagccacuaaaaugucugaaugcguucuggggcagaguaagagaguggacuucuguggaaaaggcuaccaccuaauguccuuuccccaaagcgcuccacauggugucguguuccugcacguuaccuaugugccggcgcaggagaagaauuuuacaacugccccugcaaucugccacgauggcaaagcucauuuccccagggaaggggucuuuguaucuaacggaacccacugguucgugacacagcgcaauuuuuacgagccacagauaauuacgaccgacaacacuuucguuagcggcaauugugauguggucaucgggaucgugaacaauacaguauaugacccccuccaaccugagcuggauuccuucaaggaagaacuugacaaauacuuuaagaaccauaccucaccagauguggacuugggagauauuaguggcaucaaugccagcgucguuaacauucagaaggaaauagaccgacugaaugagguggccaaaaacuuaaacgaaucucucaucgaccugcaggagcuugguaaguaugagcaguacauuaaauggcccugguauaucuggcugggguucauugcuggacuaaucgcaauagugauggucacuaucaugcucugcuguaugacauccugcuguucaugccugaagggcuguugcaguugugguagcugcugcaaauuugaugaagacgauuccgagccuguguugaagggcguuaagcugcacuacaccugaggacuaguuauaagacugacuagcccgaugggccucccaacgggcccuccuccccuccuugcaccgagauuaauaaaaaaaaaaaaaaaaaaaaaaaaaaaaaaaaaaaaaaaaaaaaaaaaaaaaaaaaaaaaaaaaugcaucccccccccccccccccccccccccccccccaaaggcucuuuucagagccaccagaauu

SEQ ID NO: 12993 - RNA, 4039 nt, Artificial Sequence
  SARS-CoV-2/Portugal/PT0035/2020__EPI_ISL_418020 spike protein mRNA human (1-1273)
aggagaaagcuuaccauguucguguuucugguccuccuuccccugguuagcucccagugcgugaacuugaccacaagaacucaauuaccuccagccuacacgaauagcuucaccaggggcguauauuacccggacaagguguuucggucaaguguccugcacagcacacaggaucuauuccuccccuuuuucuccaacgugacuugguuucaugcuauccacguuucugggaccaauggaacaaaacgcuucgacaacccugugcugccauuuaaugauggugucuauuucgcaucgaccgagaagucaaacauuauacgaggcuggaucuuugggacuacacuugacagcaaaacccagagucuguugauugugaauaacgccacgaauguaguuaucaaggugugugaguuccaguuuugcaacgaucccuuccucggagucuacuaucauaaaaauaacaaguccuggauggagucugaguuccguguguacagcuccgcgaauaacuguacuuuugaguaugugucacaaccuuuccugauggaccuggaaggcaagcaggguaauuuuaaaaaccucagagaguucgucuuuaagaacauugauggguacuucaaaaucuacaguaagcacaccccaauaaauuuaguuagggaccugccccagggauuuagcgcucuugagccuuugguggaucugccaaucggcauuaacaucacacgguuccagacucuacucgcccugcaucgcucuuaucuuaccccgggcgacuccucaagcggguggacagcaggagccgcugcauacuauguagguuaccugcaacccagaaccuuuuugcucaaauauaaugaaaacggcacgauuacugaugccguggacugcgcucuggauccuuuaagugagacaaaguguacccugaagucuuucacugucgaaaaagggaucuaccagacauccaauuuuagggugcagccaaccgagagcauaguucgguuccccaacauuacgaaucucugcccuuuuggagagguguucaacgccacccgcuucgcgucggucuaugcauggaaucgaaagagaaucucuaacuguguggccgacuacuccguacuuuacaauucagcuaguuuuagcacauucaaaugcuauggcguuuccccaacuaagcugaacgacuuguguuuuaccaauguguacgccgauucuuucgucauuaggggugacgaagugcggcagaucgcacccgggcaaacaggaaaaaucgcugauuauaacuacaagcuaccggacgauuuuacuggcugcgucauugccuggaauagcaacaaccuggacucaaaagugggcgggaauuauaacuaccucuaucgucuguuccgcaagaguaaucuuaagccuuuugagagagauauauccaccgaaaucuaccaggcgggaagcacacccuguaacgguguugagggcuucaauugcuacuuuccacugcagucuuauggguuccaaccuaccaacggagugggcuaccagcccuauaggguagucguguugucauuugaacuccugcacgccccagcaacuguuugcggucccaaaaagaguacgaauuuagugaaaaacaagugugucaauuucaacuuuaaugggcugacaggcaccggagugcuaacugagagcaacaaaaaguuccucccuuuccagcaguuuggccgggacauugcugauaccacagacgccguacgagauccacaaacccuggagauccuugacauaacuccgugcuccuucgggggagugucuguuauuacacccgguacgaauaccucgaaccaggucgcuguguuguaccaggacgugaauuguacugaagucccuguugccauccacgcagaucagcugacaccaaccuggcgcguguauagcacaggcuccaacguguuucaaacuagagccgggugccucaucggagcugagcauguaaacaauucauacgaaugugacauucccaucggcgcggguauuugcgcaaguuaucagacccagacgaacucuccuaggcgggcccgcagcgucgcuucccagucaauaaucgccuacaccaugagccugggggcagaaaauucuguggccuacuccaacaauaguauugcuaucccaacaaacuucacuaucagcguuaccacagaaauucuucccgugucuaugacuaagaccuccgucgauuguacgauguauauaugcggcgacucaacagaguguaguaaucuguugcuccaauacggaucuuuuugcacccagcugaacagagccuuaacuggcaucgcaguggagcaggauaaaaauacacaggaaguuuucgcgcaagugaagcagauuuauaaaaccccgccuaucaaggacuuugggggauucaacuuuucgcagauucugccagaucccuccaaaccuucuaagaggagcuucaucgaggaccuacucuuuaauaagguaacucuggcugaugccgguuucauaaaacaauacggcgacugucuuggggauaucucagcacgugacuugauuugcgcccagaaguucaacggacugaccguccugcccccacucuuaacagaugaaaugaucgcucaguauacgagugcccugcuugcaggcaccauuacuuccgguuggacauuuggggcuggcgccgcguugcagaucccuuucgccaugcaaauggcuuaccgguuuaauggaauaggcgugacccagaacgugcucuaugagaaucagaaacugauugcaaaccaguucaacucugccaucgggaagauucaagacagccuauccucaacagcuagcgcccugggaaaacuccaggacgucguuaaucagaacgcacaggcgcugaauacucuugugaagcaauugaguucuaacuuuggcgccaucuccagcguacugaaugauauauuaucgcgacucgacaagguggaagcugagguccagaucgauagacugauuaccgguaggcuucagucacugcaaacguacgugacacagcaguugauccgcgccgcagagauucgggcuucugccaaccucgcagccaccaaaaugagugaaugcguucuggggcaguccaagagaguggacuucuguggaaaaggcuaccaccuaaugagcuuuccccaaucugcuccacauggugucguguuccugcacguuacuuaugugccggcgcaggagaagaauuuuaccacagccccugcaaucugccacgauggcaaagcucauuuccccagggaaggggucuuuguaagcaacggaacucacugguucgugacccagcgcaauuuuuacgagccacagauaauuacaacggacaacaccuucguuuccggcaauugugauguggucaucgggaucgugaacaauacuguauaugacccccuccaaccugagcuggauucauucaaggaagaacuugacaaauacuuuaagaaccauacaaguccagauguggacuugggagauauuagcggcaucaaugccucugucguuaacauucagaaggaaauagaccgacugaaugagguggccaaaaacuuaaacgaaucccucaucgaccugcaggagcuugguaaguaugagcaguacauuaaauggcccugguauaucuggcugggguucauugcuggacuaaucgcaauagugauggucaccaucaugcucugcuguaugacuucaugcuguaguugccugaagggcuguugcagcugugguuccugcugcaaauuugaugaagacgauucugagccuguguugaagggcguuaagcugcacuacacaugaggacuaguuauaagacugacuagcccgaugggccucccaacgggcccuccuccccuccuugcaccgagauuaauaaaaaaaaaaaaaaaaaaaaaaaaaaaaaaaaaaaaaaaaaaaaaaaaaaaaaaaaaaaaaaaaugcaucccccccccccccccccccccccccccccccaaaggcucuuuucagagccaccagaauu

SEQ ID NO: 12994 - RNA, 4039 nt, Artificial Sequence
  SARS-CoV-2/USA/NY-NYUMC7/2020__EPI_ISL_418192 spike protein mRNA human (1-1273)
aggagaaagcuuaccauguucguguuucugguccuccuuccccugguuagcucccagugcgugaacuugaccacaagaacucaauuaccuccagccuacacuaauucuuucaccaggggcguauauuacccggacaagguguuucggucaaguguccugcacagcacacaggaucuauuccuccccuuuuucuccaacgugacuugguuucaugcuauccacguuucugggaccaauggaacaaaacgcuucgacaacccugugcugccauuuaaugauggugucuauuucgcaucgaccgagaagucaaacauuauacgaggcuggaucuuugggacuacacuugacagcaaaacccagagucuguugauugugaauaacgccacgaauguaguuaucaaggugugugaguuccaguuuugcaacgaucccuuccucggagucuaccaucacaaaaauaacaaguccuggauggagucugaguuccguguguauagcuccgcgaauaacuguacuuuugaguacgugucacaaccuuuccugauggaccuggaaggcaagcaggguaauuuuaaaaaccucagagaguucgucuuuaagaacauugauggguauuucaaaaucuacaguaagcauaccccaauaaauuuaguuagggaccugccccagggauuuagcgcucuugagccuuugguggaucugccaaucggcauuaacaucacacgguuccagacucuacucgcccugcaccgcucuuaccuuaccccgggcgacuccucaagcggguggacagcaggagccgcugcauauuacguagguuaucugcaacccagaaccuuuuugcucaaauacaaugaaaacggcacgauuacugaugccguggacugcgcucuggauccuuuaagugagacaaaguguacccugaagucuuucacugucgaaaaagggaucuaucagacauccaauuuuagggugcagccaaccgagagcauaguucgguuccccaacauuacgaaucucugcccuuuuggagagguguucaacgccacccgcuucgcgucggucuacgcauggaaucgaaagagaaucucuaacuguguggccgacuauuccguacuuuacaauucagcuaguuuuagcacauucaaaugcuacggcguuuccccaacuaagcugaacgacuuguguuuuaccaauguguaugccgauucuuucgucauuaggggugacgaagugcggcagaucgcacccgggcaaacaggaaaaaucgcugauuacaacuauaagcuaccggacgauuuuacuggcugcgucauugccuggaauagcaacaaccuggacucaaaagugggcgggaauuacaacuaucucuaccgucuguuccgcaagaguaaucuuaagccuuuugagagagauauauccaccgaaaucuaucaggcgggaagcacacccuguaacgguguugagggcuucaauugcuacuuuccacugcagucuuacggguuccaaccuaccaacggagugggcuaucagcccuacaggguagucguguugucauuugaacuccugcacgccccagcaacuguuugcggucccaaaaagaguacgaauuuagugaaaaacaagugugucaauuucaacuuuaaugggcugacaggcaccggagugcuaacugagagcaacaaaaaguuccucccuuuccagcaguuuggccgggacauugcugauaccacagacgccguacgagauccacaaacccuggagauccuugacauaacuccgugcuccuucgggggagugucuguuauuacacccgguacgaauaccucgaaccaggucgcuguguuguaucagggcgugaauuguacugaagucccuguugccauccaugcagaccagcugacaccaaccuggcgcguguacagcacaggguccaacguguuucaaacuagagccggaugccucaucggcgcugagcacguaaacaauucauaugaaugugauauucccaucggugcggggauuugcgcaaguuaccagacccagacgaacucuccuaggcgggcccgcagcgucgcuucccagucaauaaucgccuauaccaugagccugggcgcagaaaauucuguggccuacuccaacaauaguauugcuaucccaacaaacuucacuaucagcguuaccacagaaauucuucccgugucuaugacuaagaccuccgucgacuguacgauguacauaugcggagauucaacagaguguaguaaucuguugcuccaauauggcagcuuuugcacccagcugaacagagccuuaacugggaucgcaguggagcaggacaaaaauacacaggaaguuuucgcgcaagugaagcagauuuacaaaaccccgccuaucaaggauuuuggagguuucaacuuuucgcagauucugccagaccccuccaaaccuucuaagaggagcuucaucgaggaucuacucuuuaauaagguaacucuggcugacgccggcuucauaaaacaauauggggauugucuuggagacaucgcagcccgugauuugauuugcgcucagaaguucaacggccugaccguccugcccccacucuuaacagacgaaaugaucgcccaguacacgucagcacugcuugcugguaccauuacgaguggguggacauuuggcgccggagcggccuugcagaucccuuucgcuaugcaaauggcauaucgguuuaauggcauaggggugacccagaacgugcucuacgagaaucagaaacugauugccaaccaguucaacuccgcuaucggaaagauucaagauucucuaagcuccacagccucagcacugggcaaacuccaggacgucguuaaucagaacgcgcaggcccugaauacucuugugaagcaauugagcaguaacuuuggugcuaucucuuccguacugaaugacauauuaagccgacucgauaagguggaagccgagguccagaucgacagacugauuaccgggaggcuucagucgcugcaaacguaugugacacagcaguugauccgcgcagcugagauucgggccucagcaaaccucgccgcuaccaaaaugucugaaugcguucugggacagaguaagagaguggauuucuguggcaaagguuaccaucuaauguccuuuccccaaagcgcgccacacggcgucguguuccugcacguuacuuacgugccggcccaggagaagaauuuuaccacagcuccugcaaucugccaugacgggaaagcccacuuccccagggaaggagucuuuguaucuaacggcacucauugguucgugacccagcgcaauuuuuaugagccacagauaauuacaacggauaacaccuucguuagcgggaauugugacguggucaucggaaucgugaacaauacuguauacgauccccuccaaccugagcuggacuccuucaaggaagaacuugauaaauauuuuaagaaccacacaucaccagacguggauuugggcgacauuagugguaucaaugccagcgucguuaacauucagaaggaaauagaucgacugaaugagguggcuaaaaacuuaaacgaaucucucaucgaccugcaggagcuugggaaguacgagcaguauauuaaauggcccugguacaucuggcugggauucauugcaggccuaaucgccauagugauggucaccaucaugcucugcuguaugacuuccugcuguucaugccugaaggguuguugcaguuguggcagcugcugcaaauuugacgaagaugacuccgagccuguguugaaggggguuaagcugcauuauacaugaggacuaguuauaagacugacuagcccgaugggccucccaacgggcccuccuccccuccuugcaccgagauuaauaaaaaaaaaaaaaaaaaaaaaaaaaaaaaaaaaaaaaaaaaaaaaaaaaaaaaaaaaaaaaaaaugcaucccccccccccccccccccccccccccccccaaaggcucuuuucagagccaccagaauu

SEQ ID NO: 12995 - RNA, 4039 nt, Artificial Sequence
  SARS-CoV-2/Iceland/189/2020__EPI_ISL_417709 spike protein mRNA human (1-1273)
aggagaaagcuuaccauguucguguuucugguccuccuuccccugguuagcucccagugcgugaacuugaccacaagaacucaauuaccuccagccuacaccaauucuuucacgaggggcguauauuacccggacaagguguuucggucaaguguccugcacagcacacaggaucuauuccuccccuuuuucuccaacgugacuugguuucaugcuauccacguuucugggaccaauggaacaaaacgcuucgacaacccugugcugccauuuaaugauggugucuauuucgcaucgaccgagaagucaaacauuauacgaggcuggaucuuugggacuacacuugacagcaaaacccagagucuguugauugugaauaacgccacgaauguaguuaucaaggugugugaguuccaguuuugcaacgaucccuuccucggagucuacuaucauaaaaauaacaaguccuggauggagucugaguuccguguguacagcuccgcgaauaacuguacuuuugaguaugugucacaaccuuuccugauggaccuggaaggcaagcaggguaauuuuaaaaaccucagagaguucgucuuuaagaacauugauggguacuucaaaaucuacaguaagcacaccccaauaaauuuaguuagggaccugccccagggauuuagcgcucuugagccuuugguggaucugccaaucggcauuaacaucacacgguuccagacucuacucgcccugcaucgcucuuaucuuaccccgggcgacuccucaagcggguggacagcaggagccgcugcauacuauguagguuaccugcaacccagaaccuuuuugcucaaauauaaugaaaacggcacgauuacugaugccguggacugcgcucuggauccuuuaagugagacaaaguguacccugaagucuuucacugucgaaaaagggaucuaccagacauccaauuuuagggugcagccaaccgagagcauaguucgguuccccaacauuacgaaucucugcccuuuuggagagguguucaacgccacccgcuucgcgucggucuaugcauggaaucgaaagagaaucucuaacuguguggccgacuacuccguacuuuacaauucagcuaguuuuagcacauucaaaugcuauggcguuuccccaacuaagcugaacgacuuguguuuuaccaauguguacgccgauucuuucgucauuaggggugacgaagugcggcagaucgcacccgggcaaacaggaaaaaucgcugauuauaacuacaagcuaccggacgauuuuacuggcugcgucauugccuggaauagcaacaaccuggacucaaaagugggcgggaauuauaacuaccucuaucgucuguuccgcaagaguaaucuuaagccuuuugagagagauauauccaccgaaaucuaccaggcgggaagcacacccuguaacgguguugagggcuucaauugcuacuuuccacugcagucuuauggguuccaaccuaccaacggagugggcuaccagcccuauaggguagucguguugucauuugaacuccugcacgccccagcaacuguuugcggucccaaaaagaguacgaauuuagugaaaaacaagugugucaauuucaacuuuaaugggcugacaggcaccggagugcuaacugagagcaacaaaaaguuccucccuuuccagcaguuuggccgggacauugcugauaccacagacgccguacgagauccacaaacccuggagauccuugacauaacuccgugcuccuucgggggagugucuguuauuacacccgguacgaauaccucgaaccaggucgcuguguuguaccagggcgugaauuguacugaagucccuguugccauccacgcagaccagcugacaccaaccuggcgcguguauagcacaggguccaacguguuucaaacuagagccggaugccucaucggcgcugagcauguaaacaauucauacgaaugugauauucccaucggugcggggauuugcgcaaguuaucagacccagacgaacucuccuaggcgggcccgcagcgucgcuucccagucaauaaucgccuacaccaugagccugggcgcagaaaauucuguggccuacuccaacaauaguauugcuaucccaacaaacuucacuaucagcguuaccacagaaauucuucccgugucuaugacuaagaccuccgucgacuguacgauguauauaugcggagauucaacagaguguaguaaucuguugcuccaauacggcagcuuuugcacccagcugaacagagccuuaacugggaucgcaguggagcaggacaaaaauacacaggaaguuuucgcgcaagugaagcagauuuauaaaaccccgccuaucaaggauuuuggagguuucaacuuuucgcagauucugccagaccccuccaaaccuucuaagaggagcuucaucgaggaucuacucuuuaauaagguaacucuggcugacgccggcuucaccaaacaauacggggauugucuuggagacauagcagcccgugauuugaucugcgcucagaaguucaacggccugacaguccucccuccacuguuaacggacgaaaugauugcccaguauaccucagcacugcuugcugguacuaucacaaguggguggaccuuuggcgccggagcggccuugcagauuccuuucgcuaugcaaauggcauaccgguuuaauggcaucggggugacacagaacgugcucuaugagaaucagaaacugauagccaaccaguucaacuccgcuauuggaaagauccaagauucucuaagcuccacugccucagcacugggcaaacuccaggacgucguuaaucagaacgcgcaggcccugaauacccuugugaagcaauugagcaguaacuuuggugcuauuucuuccguacugaaugacaucuuaagccgacucgauaagguggaagccgagguccagauagacagacugaucacggggaggcuucagucgcugcaaacauacgugacccagcaguugauucgcgcagcugagauccgggccucagcaaaccucgccgcuacuaaaaugucugaaugcguucugggacagaguaagagaguggauuucuguggcaaagguuaccaccuaauguccuuuccccaaagcgcgccacauggcgucguguuccugcacguuaccuaugugccggcccaggagaagaauuuuacaacugcacccgcuauuugccacgacgggaaagcccauuuccccagggaaggagucuuuguaucuaacggcacccacugguucgugacacagcgcaauuuuuacgagccacagaucauaacgaccgauaacacuuucguuagcgggaauugugacguggucauuggaaucgugaacaauacaguauaugauccccuccaaccugagcuggacuccuucaaggaagaacuugauaaauacuuuaagaaccauaccucaccagacguggauuugggcgacaucagugguauuaaugccagcgucguuaacauccagaaggaaauugaucgacugaaugagguggcuaaaaacuuaaacgaaucucucauagaccugcaggagcuugggaaguaugagcaguacaucaaauggcccugguauauuuggcugggauucaucgcaggccuaauugccaucgugauggucacuauaaugcucugcuguaugacauccugcuguucaugccugaaggguuguugcaguuguggcagcugcugcaaauuugacgaagaugacuccgagccuguguugaaggggguuaagcugcacuacaccugaggacuaguuauaagacugacuagcccgaugggccucccaacgggcccuccuccccuccuugcaccgagauuaauaaaaaaaaaaaaaaaaaaaaaaaaaaaaaaaaaaaaaaaaaaaaaaaaaaaaaaaaaaaaaaaaugcaucccccccccccccccccccccccccccccccaaaggcucuuuucagagccaccagaauu

SEQ ID NO: 12996 - RNA, 4039 nt, Artificial Sequence
  SARS-CoV-2/Australia/NSW56/2020__EPI_ISL_417408 spike protein mRNA human (1-1273)
aggagaaagcuuaccauguucguguuucugguccuccuuccccugguuagcucccagugcgugaacuugaccacaagaacucaauuaccuccagccuacacgaauagcuucaccaggggcguauauuacccggacaagguguuucggucaaguguccugcacagcacacaggaucuauuccuccccuuuuucuccaacgugacuugguuucaugcuauccacguuucugggaccaauggaacaaaacgcuucgacaacccugugcugccauuuaaugauggugucuauuucgcaucgaccgagaagucaaacauuauacgaggcuggaucuuugggacuacacuugacagcaaaacccagagucuguugauugugaauaacgccacgaauguaguuaucaaggugugugaguuccaguuuugcaacgaucccuuccucggagucuacuaucauaaaaauaacaaguccuggauggagucugaguuccguguguacagcuccgcgaauaacuguacuuuugaguaugugucacaaccuuuccugauggaccuggaaggcaagcaggguaauuuuaaaaaccucagagaguucgucuuuaagaacauugauggguacuucaaaaucuacaguaagcacaccccaauaaauuuaguuagggaccugccccagggauuuagcgcucuugagccuuugguggaucugccaaucggcauuaacaucacacgguuccagacucuacucgcccugcaucgcucuuaucuuaccccgggcgacuccucaagcggguggacagcaggagccgcugcauacuauguagguuaccugcaacccagaaccuuuuugcucaaauauaaugaaaacggcacgauuacugaugccguggacugcgcucuggauccuuuaagugagacaaaguguacccugaagucuuucacugucgaaaaagggaucuaccagacauccaauuuuagggugcagccaaccgagagcauaguucgguuccccaacauuacgaaucucugcccuuuuggagagguguucaacgccacccgcuucgcgucggucuaugcauggaaucgaaagagaaucucuaacuguguggccgacuacuccguacuuuacaauucagcuaguuuuagcacauucaaaugcuauggcguuuccccaacuaagcugaacgacuuguguuuuaccaauguguacgccgauucuuucgucauuaggggugacgaagugcggcagaucgcacccgggcaaacaggaaaaaucgcugauuauaacuacaagcuaccggacgauuuuacuggcugcgucauugccuggaauagcaacaaccuggacucaaaagugggcgggaauuauaacuaccucuaucgucuguuccgcaagaguaaucuuaagccuuuugagagagauauauccaccgaaaucuaccaggcgggaagcacacccuguaacgguguugagggcuucaauugcuacuuuccacugcagucuuauggguuccaaccuaccaacggagugggcuaccagcccuauaggguagucguguugucauuugaacuccugcacgccccagcaacuguuugcggucccaaaaagaguacgaauuuagugaaaaacaagugugucaauuucaacuuuaaugggcugacaggcaccggagugcuaacugagagcaacaaaaaguuccucccuuuccagcaguuuggccgggacauugcugauaccacagacgccguacgagauccacaaacccuggagauccuugacauaacuccgugcuccuucgggggagugucuguuauuacacccgguacgaauaccucgaaccaggucgcuguguuguaccaggacgugaauuguacugaagucccuguugccauccacgcagaucagcugacaccaaccuggcgcguguauagcacaggcuccaacguguuucaaacuagagccgggugccucaucggagcugagcauguaaacaauucauacgaaugugacauucccaucggcgcggguauuugcgcaaguuaucagacccagacgaacucuccuaggcgggcccgcagcgucgcuucccagucaauaaucgccuacaccaugagccugggggcagaaaauucuguggccuacuccaacaauaguauugcuaucccaacaaacuucacuaucagcguuaccacagaaauucuucccgugucuaugacuaagaccuccgucgauuguacgauguauauaugcggcgacucaacagaguguaguaaucuguugcuccaauacggaucuuuuugcacccagcugaacagagccuuaacuggcaucgcaguggagcaggauaaaaauacacaggaaguuuucgcgcaagugaagcagauuuauaaaaccccgccuaucaaggacuuugggggauucaacuuuucgcagauucugccagauuccucuaaacccagcaagaggucauucaucgaggaccuacucuuuaauaagguaacucuggcugaugccgguuucauaaaacaauacggcgacugucuuggggauaucgcagcccgugacuugauuugcgcucagaaguucaacggacugaccguccucccuccccuguuaacagaugaaaugaucgcccaguauacgagugcacugcuugcuggcaccauuacuuccgguuggacauuuggggccggcgcggccuugcagaucccauucgcuaugcaaauggcauaccgguuuaauggaauaggcgugacccagaacgugcucuaugagaaucagaaacugauugccaaccaguucaacucugcuaucgggaagauucaagacagccuauccucaacagccagcgcacugggaaaacuccaggacgucguuaaucagaacgcgcaggcccugaauacucuugugaagcaauugaguucuaacuuuggcgcuaucuccagcguacugaaugauauauuaucgcgacucgacaagguggaagccgagguccagaucgauagacugauuaccgguaggcuucagucacugcaaacguacgugacacagcaguugauccgcgcagcugagauucgggccucugcaaaccucgccgcuaccaaaaugagugaaugcguucuggggcaguccaagagaguggacuucuguggaaaaggcuaccaccuaaugagcuuuccucaaucugcgccccauggugucguguuccugcacguuacuuaugugccagcccaggagaagaauuuuaccacagcaccggcuaucugccacgauggcaaagcccauuucccuagggaaggggucuuuguaagcaacggaacucacugguucgugacccagcgcaauuuuuacgagccccagauaauuacaacggacaacaccuucguuuccggcaauugugauguggucaucgggaucgugaacaauacuguauaugacccacuccaacccgagcuggauucauucaaggaagaacuugacaaauacuuuaagaaccauacaaguccugauguggacuugggagauauuagcggcaucaaugccucugucguuaacauucagaaggaaauagaccgacugaaugagguggcuaaaaacuuaaacgaaucccucaucgaccugcaggagcuugguaaguaugagcaguacauuaaauggccaugguauaucuggcugggguucauugcaggacuaaucgccauagugauggucaccaucaugcucugcuguaugacuucaugcuguaguugccugaagggcuguugcagcugugguuccugcugcaaauuugaugaagacgauucugagcccguguugaagggcguuaagcugcacuacacaugaggacuaguuauaagacugacuagcccgaugggccucccaacgggcccuccuccccuccuugcaccgagauuaauaaaaaaaaaaaaaaaaaaaaaaaaaaaaaaaaaaaaaaaaaaaaaaaaaaaaaaaaaaaaaaaaugcaucccccccccccccccccccccccccccccccaaaggcucuuuucagagccaccagaauu

SEQ ID NO: 12997 - RNA, 4039 nt, Artificial Sequence
  SARS-CoV-2/Iceland/280/2020__EPI_ISL_417608 spike protein mRNA human (1-1273)
aggagaaagcuuaccauguucguguuucugguccuccuuccccugguuagcucccagugcgugaacuugaccacaagaacucaauuaccuccagccuacacuaauucuuucaccaggggcguauauuacccggacaagguguuucggucaaguguccugcacagcacacaggaucuauuccuccccuuuuucuccaacgugacuugguuucaugcuauccacguuucugggaccaauggaacaaaacgcuucgacaacccugugcugccauuuaaugauggugucuauuucgcaucgaccgagaagucaaacauuauacgaggcuggaucuuugggacuacacuugacagcaaaacccagagucuguugauugugaauaacgccacgaauguaguuaucaaggugugugaguuccaguuuugcaacgaucccuuccucggagucuacuaucauaaaaauaacaaguccuggauggagucugaguuccguguguacagcuccgcgaauaacuguacuuuugaguaugugucacaaccuuuccugauggaccuggaaggcaagcaggguaauuuuaaaaaccucagagaguucgucuuuaagaacauugauggguacuucaaaaucuacaguaagcacaccccaauaaauuuaguuagggaccugccccagggauuuagcgcucuugagccuuugguggaucugccaaucggcauuaacaucacacgguuccagacucuacucgcccugcaucgcucuuaucuuaccccgggcgacuccucaagcggguggacagcaggagccgcugcauacuauguagguuaccugcaacccagaaccuuuuugcucaaauauaaugaaaacggcacgauuacugaugccguggacugcgcucuggauccuuuaagugagacaaaguguacccugaagucuuucacugucgaaaaagggaucuaccagacauccaauuuuagggugcagccaaccgagagcauaguucgguuccccaacauuacgaaucucugcccuuuuggagagguguucaacgccacccgcuucgcgucggucuaugcauggaaucgaaagagaaucucuaacuguguggccgacuacuccguacuuuacaauucagcuaguuuuagcacauucaaaugcuauggcguuuccccaacuaagcugaacgacuuguguuuuaccaauguguacgccgauucuuucgucauuaggggugacgaagugcggcagaucgcacccgggcaaacaggaaaaaucgcugauuauaacuacaagcuaccggacgauuuuacuggcugcgucauugccuggaauagcaacaaccuggacucaaaagugggcgggaauuauaacuaccucuaucgucuguuccgcaagaguaaucuuaagccuuuugagagagauauauccaccgaaaucuaccaggcgggaagcacacccuguaacgguguugagggcuucaauugcuacuuuccacugcagucuuauggguuccaaccuaccaacggagugggcuaccagcccuauaggguagucguguugucauuugaacuccugcacgccccagcaacuguuugcggucccaaaaagaguacgaauuuagugaaaaacaagugugucaauuucaacuuuaaugggcugacaggcaccggagugcuaacugagagcaacaaaaaguuccucccuuuccagcaguuuggccgggacauugcugauaccacagacgccguacgagauccacaaacccuggagauccuugacauaacuccgugcuccuucgggggagugucuguuauuacacccgguacgaauaccucgaaccaggucgcuguguuguaccagggcgugaauuguacugaagucccuguugccauccacgcagaccagcugacaccaaccuggcgcguguauagcacaggguccaacguguuucaaacuagagccggaugccucaucggcgcugagcauguaaacaauucauacgaaugugauauucccaucggugcggggauuugcgcaaguuaucacacccagacgaacucuccuaggcgggcccgcagcgucgcuucccagucaauaaucgccuacaccaugagccugggcgcagaaaauucuguggccuacuccaacaauaguauugcuaucccaacaaacuucacuaucagcguuaccacagaaauucuucccgugucuaugacuaagaccuccgucgacuguacgauguauauaugcggagauucaacagaguguaguaaucuguugcuccaguacggcagcuuuugcacccaacugaacagagccuuaacugggaucgcaguggagcaggacaaaaauacacaggaaguuuucgcacaggugaagcaaauuuauaaaaccccgccuaucaaggauuuuggagguuucaacuuuucgcagauucugccagaccccuccaaaccuucuaagaggagcuucaucgaggaucuacucuuuaauaagguaacucuggcugacgccggcuucauaaaacaguacggggauugucuuggagacaucgcagcccgugauuugauuugcgcucaaaaguucaacggccugaccguccugcccccacucuuaacagacgaaaugaucgcccaguauacgucagcacugcuugcugguaccauuacgaguggguggacauuuggcgccggagcggccuugcagaucccuuucgcuaugcagauggcauaccgguuuaauggcauaggggugacccaaaacgugcucuaugagaaucagaaacugauugccaaccaguucaacuccgcuaucggaaagauucaggauucucuaagcuccacagccucagcacugggcaaacuccaagacgucguuaaucagaacgcgcaggcccugaauacucuugugaagcaguugagcaguaacuuuggugcuaucucuuccguacugaaugacauauuaagccgacucgauaagguggaagccgagguccaaaucgacagacugauuaccgggaggcuucagucgcugcagacguacgugacacaacaguugauccgcgcagcugagauucgggccucagcaaaccucgccgcuaccaaaaugucugaaugcguucugggacagaguaagagaguggauuucuguggcaaagguuaccaucuaauguccuuuccccagagcgcgccacacggcgucguguuccugcacguuacuuaugugccggcccaagagaagaauuuuaccacagcgccugcuaucugccaugacgggaaagcccacuuccccagggaaggagucuuuguaucuaacggcacucauugguucgugacccagcgcaauuuuuacgagccacagauaauuacaacggauaacaccuucguuagcgggaauugugacguggucaucggaaucgugaacaauacuguauaugauccccuccagccugagcuggacuccuucaaggaagaacuugauaaauacuuuaagaaccacacaucaccagacguggauuugggcgacauuagugguaucaaugccagcgucguuaacauucaaaaggaaauagaucgacugaaugagguggcuaaaaacuuaaacgaaucucucaucgaccugcaggagcuugggaaguaugagcaguacauuaaauggcccugguauaucuggcugggauucauugcaggccuaaucgccauagugauggucaccaucaugcucugcuguaugacuuccugcuguucaugccugaaggguuguugcaguuguggcagcugcugcaaauuugacgaagaugacuccgagccuguguugaaggggguuaagcugcauuacacaugaggacuaguuauaagacugacuagcccgaugggccucccaacgggcccuccuccccuccuugcaccgagauuaauaaaaaaaaaaaaaaaaaaaaaaaaaaaaaaaaaaaaaaaaaaaaaaaaaaaaaaaaaaaaaaaaugcaucccccccccccccccccccccccccccccccaaaggcucuuuucagagccaccagaauu

SEQ ID NO: 12998 - RNA, 4039 nt, Artificial Sequence
  SARS-CoV-2/Iceland/247/2020__EPI_ISL_417575 spike protein mRNA human (1-1273)
aggagaaagcuuaccauguucguguuucugguccuccuuccccugguuagcucccagugcgugaacuugaccacaagaacucaauuaccuccagccuacacuaauucuuucaccaggggcguauauuacccggacaagguguuucggucaaguguccugcacagcacacaggaucuauuccuccccuuuuucuccaacgugacuugguuucaugcuauccacguuucugggaccaauggaacaaaacgcuucgacaacccugugcugccauuuaaugauggugucuauuucgcaucgaccgagaagucaaacauuauacgaggcuggaucuuugggacuacacuugacagcaaaacccagagucuguugauugugaauaacgccacgaauguaguuaucaaggugugugaguuccaguuuugcaacgaucccuuccucggagucuacuaucauaaaaauaacaaguccuggauggagucugaguuccguguguacagcuccgcgaauaacuguacuuuugaguaugugucacaaccuuuccugauggaccuggaaggcaagcaggguaauuuuaaaaaccucagagaguucgucuuuaagaacauugauggguacuucaaaaucuacaguaagcacaccccaauaaauuuaguuagggaccugccccagggauuuagcgcucuugagccuuugguggaucugccaaucggcauuaacaucacacgguuccagacucuacucgcccugcaucgcucuuaucuuaccccgggcgacuccucaagcggguggacagcaggagccgcugcauacuauguagguuaccugcaacccagaaccuuuuugcucaaauauaaugaaaacggcacgauuacugaugccguggacugcgcucuggauccuuuaagugagacaaaguguacccugaagucuuucacugucgaaaaagggaucuaccagacauccaauuuuagggugcagccaaccgagagcauaguucgguuccccaacauuacgaaucucugcccuuuuggagagguguucaacgccacccgcuucgcgucggucuaugcauggaaucgaaagagaaucucuaacuguguggccgacuacuccguacuuuacaauucagcuaguuuuagcacauucaaaugcuauggcguuuccccaacuaagcugaacgacuuguguuuuaccaauguguacgccgauucuuucgucauuaggggugacgaagugcggcagaucgcacccgggcaaacaggaaaaaucgcugauuauaacuacaagcuaccggacgauuuuacuggcugcgucauugccuggaauagcaacaaccuggacucaaaagugggcgggaauuauaacuaccucuaucgucuguuccgcaagaguaaucuuaagccuuuugagagagauauauccaccgaaaucuaccaggcgggaagcacacccuguaacgguguugagggcuucaauugcuacuuuccacugcagucuuauggguuccaaccuaccaacggagugggcuaccagcccuauaggguagucguguugucauuugaacuccugcacgccccagcaacuguuugcggucccaaaaagaguacgaauuuagugaaaaacaagugugucaauuucaacuuuaaugggcugacaggcaccggagugcuaacugagagcaacaaaaaguuccucccuuuccagcaguuuggccgggacauugcugauaccacagacgccguacgagauccacaaacccuggagauccuugacauaacuccgugcuccuucgggggagugucuguuauuacacccgguacgaauaccucgaaccaggucgcuguguuguaccagggcgugaauuguacugaagucccuguugccauccacgcagaccagcugacaccaaccuggcgcguguauagcacaggguccaacguguuucaaacuagagccggaugccucaucggcgcugagcauguaaacaauucauacgaaugugauauucccaucggugcggggauuugcgcaaguuaucagacccagacgaacucuccuaggcgggcccgcagcgucgcuucccagucaauaaucgccuacaccaugagccugggcgcagaaaauucuguggccuacuccaacaauaguauugcuaucccaacaaacuucacuaucagcguuaccacagaaauucuucccgugucuaugacuaagaccuccgucgacuguacgauguauauaugcggagauucaacagaguguaguaaucuguugcuccaauacggcagcuuuugcacccagcugaacagagccuuaacugggaucgcaguggagcaggacaaaaauacacaggaaguuuucgcgcaagugaagcagauuuauaaaaccccgccuaucaaggauuuuggagguuucaacuuuucgcagauucugccagaccccuccaaaccuucuaagaggagcuucaucgaggaucuacucuuuaauaagguaacucuggcugacgccggcuucauaaaacaauacggggauugucuuggagacaucgcagcccgugauuugauuugcgcucagaaguucaacggccugaccguccugcccccacucuuaacagacgaaaugaucgcccaguauacgucagcacugcuugcugguaccauuacgaguggguggacauuuggcgccggagcggccuugcagaucccuuucgcuaugcaaauggcauaccgguuuaauggcauaggggugacccagaacgugcucuaugagaaucagaaacugauugccaaccaguucaacuccgcuaucggaaagauucaagauucucuaagcuccacagccucagcacugggcaaacuccaggacgucguuaaucagaacgcgcaggcccugaauacucuugugaagcaauugagcaguaacuuuggugcuaucucuuccguacugaaugacauauuaagccgacucgauaagguggaagccgagguccagaucgacagacugauuaccgggaggcuucagucgcugcaaacguacgugacacagcaguugauccgcgcagcugagauucgggccucagcaaaccucgccgcuaccaaaaugucugaaugcguucugggacagaguaagagaguggauuucuguggcaaagguuaccaccuaauguccuuuccccaaagcgcgccacauggcgucguguuccugcacguuacuuaugugccggcccaggagaagaauuuuaccacagcuccugcaaucugccacgacgggaaagcccauuuccccagggaaggagucuuuguaucuaacggcacucacugguucgugacccagcgcaauuuuuacgagccacagauaauuacaacggauaacaccuucguuagcgggaauugugacguggucaucggaaucgugaacaauacuguauaugauccccuccaaccugagcuggacuccuucaaggaagaacuugauaaauacuuuaagaaccauacaucaccagacguggauuugggcgacauuagugguaucaaugccagcgucguuaacauucagaaggaaauagaucgacugaaugagguggcuaaaaacuuaaacgaaucucucaucgaccugcaggagcuugggaaguaugagcaguacauuaaauggcccugguauaucuggcugggauucauugcaggccuaaucgccauagugaucgucaccauuaugcucugcuguaugacuuccugcuguucaugccugaaggguuguugcaguuguggcagcugcugcaaauuugacgaagaugacuccgagccuguguugaaggggguuaagcugcacuacacaugaggacuaguuauaagacugacuagcccgaugggccucccaacgggcccuccuccccuccuugcaccgagauuaauaaaaaaaaaaaaaaaaaaaaaaaaaaaaaaaaaaaaaaaaaaaaaaaaaaaaaaaaaaaaaaaaugcaucccccccccccccccccccccccccccccccaaaggcucuuuucagagccaccagaauu

SEQ ID NO: 12999 - RNA, 4039 nt, Artificial Sequence
  SARS-CoV-2/Iceland/238/2020__EPI_ISL_417566 spike protein mRNA human (1-1273)
aggagaaagcuuaccauguucguguuucugguccuccuuccccugguuagcucccagugcgugaacuugaccacaagaacucaauuaccuccagccuacacuaauucuuucaccaggggcguauauuacccggacaagguguuucggucaaguguccugcacagcacacaggaucuauuccuccccuuuuucuccaacgugacuugguuucaugcuauccacguuucugggaccaauggaacaaaacgcuucgacaacccugugcugccauuuaaugauggugucuauuucgcaucgaccgagaagucaaacauuauacgaggcuggaucuuugggacuacacuugacagcaaaacccagagucuguugauugugaauaacgccacgaauguaguuaucaaggugugugaguuccaguuuugcaacgaucccuuccucggagucuacuaucauaaaaauaacaaguccuggauggagucugaguuccguguguacagcuccgcgaauaacuguacuuuugaguaugugucacaaccuuuccugauggaccuggaaggcaagcaggguaauuuuaaaaaccucagagaguucgucuuuaagaacauugauggguacuucaaaaucuacaguaagcacaccccaauaaauuuaguuagggaccugccccagggauuuagcgcucuugagccuuugguggaucugccaaucggcauuaacaucacacgguuccagacucuacucgcccugcaucgcucuuaucuuaccccgggcgacuccucaagcggguggacagcaggagccgcugcauacuauguagguuaccugcaacccagaaccuuuuugcucaaauauaaugaaaacggcacgauuacugaugccguggacugcgcucuggauccuuuaagugagacaaaguguacccugaagucuuucacugucgaaaaagggaucuaccagacauccaauuuuagggugcagccaaccgagagcauaguucgguuccccaacauuacgaaucucugcccuuuuggagagguguucaacgccacccgcuucgcgucggucuaugcauggaaucgaaagagaaucucuaacuguguggccgacuacuccguacuuuacaauucagcuaguuuuagcacauucaaaugcuauggcguuuccccaacuaagcugaacgacuuguguuuuaccaauguguacgccgauucuuucgucauuaggggugacgaagugcggcagaucgcacccgggcaaacaggaaaaaucgcugauuauaacuacaagcuaccggacgauuuuacuggcugcgucauugccuggaauagcaacaaccuggacucaaaagugggcgggaauuauaacuaccucuaucgucuguuccgcaagaguaaucuuaagccuuuugagagagauauauccaccgaaaucuaccaggcgggaagcacacccuguaacgguguugagggcuucaauugcuacuuuccacugcagucuuauggguuccaaccuaccaacggagugggcuaccagcccuauaggguagucguguugucauuugaacuccugcacgccccagcaacuguuugcggucccaaaaagaguacgaauuuagugaaaaacaagugugucaauuucaacuuuaaugggcugacaggcaccggagugcuaacugagagcaacaaaaaguuccucccuuuccagcaguuuggccgggacauugcugauaccacagacgccguacgagauccacaaacccuggagauccuugacauaacuccgugcuccuucgggggagugucuguuauuacacccgguacgaauaccucgaaccaggucgcuguguuguaccagggcgugaauuguacugaagucccuguugccauccacgcagaccagcugacaccaaccuggcgcguguauagcacaggguccaacguguuucaaacuagagccggaugccucaucggcgcugagcauguaaacaauucauacgaaugugauauucccaucggugcggggauuugcgcaaguuaucagacccagacgaacucuccuaggcgggcccgcagcgucgcuucccagucaauaaucgccuacaccaugagccugggcgcagaaaauucuguggccuacuccaacaauaguauugcuaucccaacaaacuucacuaucagcguuaccacagaaauucuucccgugucuaugacuaagaccuccgucgacuguacgauguauauaugcggagauucaacagaguguaguaaucuguugcuccaauacggcagcuuuugcacccagcugaacagagccuuaacugggaucgcaguggagcaggacaaaaauacacaggaaguuuucgcgcaagugaagcagauuuauaaaaccccgccuaucaaggauuuuggagguuucaacuuuucgcagauucugccagaccccuccaaaccuucuaagaggagcuucaucgaggaucuacucuuuaauaagguaacucuggcugacgucggcuucauaaaacaauacggggauugucuuggagacaucgccgcacgugauuugauuugcgcccagaaguucaacggccugaccgugcugcccccacucuuaacagacgaaaugaucgcucaguauacgucagcccugcuugcagguaccauuacgaguggguggacauuuggcgcuggagccgcguugcagaucccuuucgccaugcaaauggcuuaccgguuuaauggcauaggggugacccagaacguccucuaugagaaucagaaacugauugcaaaccaguucaacuccgccaucggaaagauucaagauucucuaagcuccacagcuucagcccugggcaaacuccaggacguugugaaucagaacgcacaggcgcugaauacucuuguaaagcaauugagcaguaacuuuggugccaucucuuccgugcugaaugacauauuaagccgacucgauaaggucgaagcugaggugcagaucgacagacugauuaccgggaggcuucagucgcugcaaacguacguuacacagcaguugauccgcgccgcagagauucgggcuucagccaaccucgcagccaccaaaaugucugaaugcgugcugggacagaguaagagagucgauuucuguggcaaagguuaccaccuaauguccuuuccccaaagcgcuccacauggcgugguuuuccugcacgugacuuaugucccggcgcaggagaagaauuuuaccacagccccugcaaucugccacgacgggaaagcucauuuccccagggaaggaguauuugugucuaacggcacucacugguucguuacccagcgcaauuuuuacgagccacagauaauuacaacggauaacaccuucgugagcgggaauugugacgucgugaucggaaucguaaacaauacuguguaugauccccuccaaccugagcuggacuccuucaaggaagaacuugauaaauacuuuaagaaccauacaucaccagacgucgauuugggcgacauuagugguaucaaugccagcguugugaacauucagaaggaaauagaucgacugaaugagguggccaaaaacuuaaacgaaucucucaucgaccugcaggagcuugggaaguaugagcaguacauuaaauggcccugguauaucuggcugggauucauugcuggccuaaucgcaauagucauggugaccaucaugcucugcuguaugacuuccugcuguucaugccugaaggguuguugcaguuguggcagcugcugcaaauuugacgaagaugacuccgagccuguuuugaaggggguaaagcugcacuacacaugaggacuaguuauaagacugacuagcccgaugggccucccaacgggcccuccuccccuccuugcaccgagauuaauaaaaaaaaaaaaaaaaaaaaaaaaaaaaaaaaaaaaaaaaaaaaaaaaaaaaaaaaaaaaaaaaugcaucccccccccccccccccccccccccccccccaaaggcucuuuucagagccaccagaauu

SEQ ID NO: 13000 - RNA, 4039 nt, Artificial Sequence
  SARS-CoV-2/Greece/16/2020__EPI_ISL_418265 spike protein mRNA human (1-1273)
aggagaaagcuuaccauguucguguuucugguccuccuuccccugguuagcucccagugcgugaacuugaccacaagaacucaauuaccuccagccuacacuaauucuuucaccaggggcguauauuacccggacaagguguuucggucaaguguccugcacagcacacaggaucuauuccuccccuuuuucuccaacgugacuugguuucaugcuauccacguuucugggaccaauggaacaaaacgcuucgacaacccugugcugccauuuaaugauggugucuauuucgcaucgaccgagaagucaaacauuauacgaggcuggaucuuugggacuacacuugacagcaaaacccagagucuguugauugugaauaacgccacgaauguaguuaucaaggugugugaguuccaguuuugcaacgaucccuuccucggagucuacuaucauaaaaauaacaaguccuggauggagucugaguuccguguguacagcuccgcgaauaacuguacuuuugaauaugugucacaaccuuuccugauggaccuggaaggcaagcaggguaauuuuaaaaaccucagagaguucgucuuuaagaacguugauggguacuucaaaauuuacaguaagcacaccccaaucaauuuagugagggaccugccccagggauuuagcgcucuugagccuuugguagaucugccaauaggcaucaacauuacacgguuccagacucuacucgcccugcaucgcucuuaucuuaccccgggcgacuccucaagcggguggacagcaggagccgcugcauacuauguggguuaccugcaacccagaaccuuuuugcucaaauauaaugaaaacggcacgaucacugaugccgucgacugcgcucuggauccuuuaagugagacaaaguguacccugaagucuuucacuguggaaaaagggauuuaccagacauccaauuuuaggguucagccaaccgagagcaucgugcgguuccccaacauaacgaaucucugcccuuuuggagaggucuucaacgccacccgcuucgcgucgguguaugcauggaaucgaaagagaauuucuaacuguguagccgacuacuccguucuuuacaauucagcuaguuuuagcacauucaaaugcuauggcguguccccaacuaagcugaacgacuuguguuuuaccaaugucuacgccgauucuuucgugaucaggggugacgaaguccggcagauugcacccgggcaaacaggaaaaaucgcugauuauaacuacaagcuaccggacgauuuuacuggcugcgugaucgccuggaauagcaacaaccuggacucaaaaguuggcgggaauuauaacuaccucuaucgucuguuccgcaagaguaaucuuaagccuuuugagagagauauuuccaccgaaauauaccaggcgggaagcacacccuguaacgguguggagggcuucaauugcuacuuuccacugcagucuuauggguuccaaccuaccaacggaguaggcuaccagcccuauagggucgugguuuugucauuugaacuccugcacgccccagcaacugugugcggucccaaaaagaguacgaauuuagucaaaaacaagugugugaauuucaacuuuaaugggcugacaggcaccggaguacuaacugagagcaacaaaaaguuccucccuuuccagcaguuuggccgggacaucgcugauaccacagacgccgugcgagauccacaaacccuggagauucuugacaucacuccgugcuccuucgggggaguuucugucauaacacccgguacgaauaccucgaaccagguggcuguguuguaccaggacgucaauuguacugaaguuccuguggccauucacgcagaucagcugacaccaaccuggcgcguguauagcacaggcuccaacguauuucaaacuagagccgggugccucaucggagcugagcaugucaacaauucauacgaaugugacauccccauuggcgcggguaucugcgcaaguuaucagacccagacgaacucuccuaggcgggcccgcagcguggcuucccagucaauuauagccuacaccaugagccugggggcagaaaauucuguugccuacuccaacaauaguaucgcuauuccaacaaacuucacuaucagcgugaccacagaaauccuucccgucucuaugacuaagaccuccguggauuguacgauguauauuugcggcgacucaacagaguguaguaaucuguugcuccaauacggcagcuuuugcacccagcugaacagagccuuaacuggaauagcaguugagcaggauaaaaauacacaggaaguguucgcgcaaguaaagcagaucuauaaaaccccgccuauuaaggacuuugggggauucaacuuuucgcagauccugccagaucccuccaaaccuucuaagaggagcuucauugaggaccuacucuuuaauaaggucacucuggcugaugccgguuucaucaaacaauacggcgacugucuuggggauauagcagcccgugacuugaucugcgcucagaaguucaacggacugaccgugcugcccccacucuuaacagaugaaaugauugcccaguauacgucagcacugcuugcuggcaccaucacgagugguuggacauuuggggccggcgcggccuugcagauuccuuucgcuaugcaaauggcauaccgguuuaauggaaucggcgugacccagaacguccucuaugagaaucagaaacugauagccaaccaguucaacuccgcuauugggaagauccaagacucucuaagcuccacagccucagcacugggaaaacuccaggacguugugaaucagaacgcgcaggcccugaauacucuuguaaagcaauugagcaguaacuuuggcgcuauuucuuccgugcugaaugauaucuuaagccgacucgacaaggucgaagccgaggugcagauagauagacugaucaccgguaggcuucagucgcugcaaacguacguuacacagcaguugauucgcgcagcugagauccgggccucagcaaaccucgccgcuaccaaaaugucugaaugcgugcuggggcagaguaagagagucgacuucuguggaaaaggcuaccaccuaauguccuuuccccaaagcgcgccacauggugugguuuuccugcacgugacuuaugucccggcccaggagaagaauuuuaccacagcuccugcaauuugccacgauggcaaagcccauuuccccagggaagggguauuugugucuaacggaacucacugguucguuacccagcgcaauuuuuacgagccacagaucauaacaacggacaacaccuucgugagcggcaauugugaugucgugauugggaucguaaacaauacuguguaugacccccuccaaccugagcuggauuccuucaaggaggaacuugacaaauacuuuaagaaccauacaucaccagaugucgacuugggagauaucaguggcauuaaugccagcguugugaacauccagaaggaaauugaccgacugaaugagguggcuaaaaacuuaaacgaaucucucauagaccugcaggagcuugguaaguaugagcaguacaucaaauggcccugguauauuuggcugggguucaucgcaggacuaauugccaucgucauggugaccauaaugcucugcuguaugacuuccugcuguucaugccugaagggcuguugcaguugugguagcugcugcaaauuugaugaagacgauuccgagccuguuuugaagggcguaaagcugcacuacacaugaggacuaguuauaagacugacuagcccgaugggccucccaacgggcccuccuccccuccuugcaccgagauuaauaaaaaaaaaaaaaaaaaaaaaaaaaaaaaaaaaaaaaaaaaaaaaaaaaaaaaaaaaaaaaaaaugcaucccccccccccccccccccccccccccccccaaaggcucuuuucagagccaccagaauu

SEQ ID NO: 13001 - RNA, 4039 nt, Artificial Sequence
  SARS-CoV-2/Iceland/319/2020__EPI_ISL_417648 spike protein mRNA human (1-1273)
aggagaaagcuuaccauguucguguuucugguccuccuuccccugguuagcucccagugcgugaacuugaccacaagaacucaauuaccuccagccuacacuaauucuuucaccaggggcguauauuacccggacaagguguuucggucaaguguccugcacagcacacaggaucuauuccuccccuuuuucuccaacgugacuugguuucaugcuauccacguuucugggaccaauggaacaaaacgcuucgacaacccugugcugccauuuaaugauggugucuauuucgcaucgaccgagaagucaaacauuauacgaggcuggaucuuugggacuacacuugacagcaaaacccagagucuguugauugugaauaacgccacgaauguaguuaucaaggugugugaguuccaguuuugcaacgaucccuuccucggagucuacuaucauaaaaauaacaaguccuggauggagucugaguuccguguguacagcuccgcgaauaacuguacuuuugaguaugugucacaaccuuuccugauugaccuggaaggcaagcaggguaauuuuaaaaaccucagagaguucgucuuuaagaacaucgauggguacuucaaaauauacaguaagcacaccccaaucaauuuaguuagggaccugccccagggauuuagcgcucuugagccuuugguggaucugccaauuggcaucaacauuacacgguuccagacucuacucgcccugcaucgcucuuaucuuaccccgggcgacuccucaagcggguggacagcaggagccgcugcauacuauguagguuaccugcaacccagaaccuuuuugcucaaauauaaugaaaacggcacgaucacugaugccguggacugcgcucuggauccuuuaagugagacaaaguguacccugaagucuuucacugucgaaaaagggauauaccagacauccaauuuuagggugcagccaaccgagagcauuguucgguuccccaacaucacgaaucucugcccuuuuggagagguguucaacgccacccgcuucgcgucggucuaugcauggaaucgaaagagaauuucuaacuguguggccgacuacuccguacuuuacaauucagcuaguuuuagcacauucaaaugcuauggcguuuccccaacuaagcugaacgacuuguguuuuaccaauguguacgccgauucuuucgucaucaggggugacgaagugcggcagaucgcacccgggcaaacaggaaaaauugcugauuauaacuacaagcuaccggacgauuuuacuggcugcgucauagccuggaauagcaacaaccuggacucaaaagugggcgggaauuauaacuaccucuaucgucuguuccgcaagaguaaucuuaagccuuuugagagagauaucuccaccgaaauuuaccaggcgggaagcacacccuguaacgguguugagggcuucaauugcuacuuuccacugcagucuuauggguuccaaccuaccaacggagugggcuaccagcccuauaggguagucguguugucauuugaacuccugcacgccccagcaacuguuugcggucccaaaaagaguacgaauuuagugaaaaacaagugugucaauuucaacuuuaaugggcugacaggcaccggagugcuaacugagagcaacaaaaaguuccucccuuuccagcaguuuggccgggacaucgcugauaccacagacgccguacgagauccacaaacccuggagauacuugacauuacuccgugcuccuucgggggagugucuguuaucacacccgguacgaauaccucgaaccaggucgcuguguuguaccagggcgugaauuguacugaagucccuguugccauccacgcagaccagcugacaccaaccuggcgcguguauagcacaggguccaacguguuucaaacuagagccggaugccucauuggcgcugagcauguaaacaauucauacgaaugugauauccccauuggugcggggauaugcgcaaguuaucagacccagacgaacucuccuaggcgggcccgcagcgucgcuucccagucaaucauugccuacaccaugagccugggcgcagaaaauucuguggccuacuccaacaauaguaucgcuaucccaacaaacuucacuauuagcguuaccacagaaauacuucccgugucuaugacuaagaccuccgucgacuguacgauguauaucugcggagauucaacagaguguaguaaucuguugcuccaauacggcagcuuuugcacccagcugaacagagccuuaacugggauugcaguggagcaggacaaaaauacacaggaaguuuucgcgcaagugaagcagaucuauaaaaccccgccuauuaaggauuuuggagguuucaacuuuucgcagauccugccagaccccuccaaaccuucuaagaggagcuucauagaggaucuacucuuuaauaagguaacucuggcugacgccggcuucaucaaacaauacggggauugucuuggagacauugcagcccgugauuugaucugcgcucagaaguucaacggccugaccguccugcccccacucuuaacagacgaaaugauugcccaguauacgucagcacugcuugcugguaccaucacgaguggguggacauuuggcgccggagcggccuugcagauaccuuucgcuaugcaaauggcauaccgguuuaauggcauuggggugacccagaacgugcucuaugagaaucagaaacugaucgccaaccaguucaacuccgcuauuggaaagauccaagauucucuaagcuccacagccucagcacugggcaaacuccaggacgucguuaaucagaacgcgcaggcccugaauacucuugugaagcaauugagcaguaacuuuggugcuauaucuuccguacugaaugacaucuuaagccgacucgauaagguggaagccgagguccagauugacagacugaucaccgggaggcuucagucgcugcaaacguacgugacacagcaguugauucgcgcagcugagauccgggccucagcaaaccucgccgcuaccaaaaugucugaaugcguucugggacagaguaagagaguggauuucuguggcaaagguuaccaccuaauguccuuuccccaaagcgcgccacauggcgucguguuccugcacguuacuuaugugccggcccaggagaagaauuuuaccacagcuccugcaauaugccacgacgggaaagcccauuuccccagggaaggagucuuuguaucuaacggcacucacugguucgugacccagcgcaauuuuuacgagccacagauuaucacaacggauaacaccuucguuagcgggaauugugacguggucaucggaauugugaacaauacuguauaugauccccuccaaccugagcuggacuccuucaaggaagaacuugauaaauacuuuaagaaccauacaucaccagacguggauuugggcgacaucagugguauuaaugccagcgucguuaacauacagaaggaaaucgaucgacugaaugagguggcuaaaaacuuaaacgaaucucucauugaccugcaggagcuugggaaguaugagcaguacaucaaauggcccugguauauuuggcugggauucaucgcaggccuaauagccaucgugauggucaccauuaugcucugcuguaugacuuccugcuguucaugccugaaggguuguugcaguuguggcagcugcugcaaauuugacgaagaugacuccgagccuguguugaaggggguuaagcugcacuacacaugaggacuaguuauaagacugacuagcccgaugggccucccaacgggcccuccuccccuccuugcaccgagauuaauaaaaaaaaaaaaaaaaaaaaaaaaaaaaaaaaaaaaaaaaaaaaaaaaaaaaaaaaaaaaaaaaugcaucccccccccccccccccccccccccccccccaaaggcucuuuucagagccaccagaauu

SEQ ID NO: 13002 - RNA, 4039 nt, Artificial Sequence
  SARS-CoV-2/Congo/94/2020__EPI_ISL_417947 spike protein mRNA human (1-1273)
aggagaaagcuuaccauguucguguuucugguccuccuuccccugguuagcucccagugcgugaacuugaccacaagaacucaauuaccuccagccuacacuaauucuuucaccaggggcguauauuacccggacaagguguuucggucaaguguccugcacagcacacaggaucuauuccuccccuuuuucuccaacgugacuugguuucaugcuauccacguuucugggaccaauggaacaaaacgcuucgacaacccugugcugccauuuaaugauggugucuauuucgcaucgaccgagaagucaaacauuauacgaggcuggaucuuugggacuacacuugacagcaaaacccagagucuguugauugugaauaacgccacgaauguaguuaucaaggugugugaguuccaguuuugcaacgaucccuuccucggagucuacuaucauaaaaauaacaaguccuggauggagucugaguuccguguguacagcuccgcgaauaacuguacuuuugaguaugugucacaaccuuuccugauggaccuggaaggcaagcaggguaauuuuaaaaaccucagagaguucgucuuuaagaacauugauggguacuucaaaaucuacaguaagcacaccccaauaaauuuaguuagggaccugccccagggauuuagcgcucuugagccuuugguggaucugccaaucggcauuaacaucacacgguuccagacucuacucgcccugcaucgcucuuaucuuaccccgggcgacuccucaagcggguggacagcaggagccgcugcauacuauguagguuaccugcaacccagaaccuuuuugcucaaauauaaugaaaacggcacgauuacugaugccguggacugcgcucuggauccuuuaagugagacaaaguguacccugaagucuuucacugucgaaaaagggaucuaccagacauccaauuuuagggugcagccaaccgagagcauaguucgguuccccaacauuacgaaucucugcccuuuuggagagguguucaacgccacccgcuucgcgucggucuaugcauggaaucgaaagagaaucucuaacuguguggccgacuacuccguacuuuacaauucagcuaguuuuagcacauucaaaugcuauggcguuuccccaacuaagcugaacgacuuguguuuuaccaauguguacgccgauucuuucgucauuaggggugacgaagugcggcagaucgcacccgggcaaacaggaaaaaucgcugauuauaacuacaagcuaccggacgauuuuacuggcugcgucauugccuggaauagcaacaaccuggacucaaaagugggcgggaauuauaacuaccucuaucgucuguuccgcaagaguaaucuuaagccuuuugagagagauauauccaccgaaaucuaccaggcgggaagcacacccuguaacgguguugagggcuucaauugcuacuuuccacugcagucuuauggguuccaaccuaccaacggagugggcuaccagcccuauaggguagucguguugucauuugaacuccugcacgccccagcaacuguuugcggucccaaaaagaguacgaauuuagugaaaaacaagugugucaauuucaacuuuaaugggcugacaggcaccggagugcuaacugagagcaacaaaaaguuccucccuuuccagcaguuuggccgggacauugcugauaccacagacgccguacgagauccacaaacccuggagauccuugacauaacuccgugcuccuucgggggagugucuguuauuacacccgguacgaauaccucgaaccaggucgcuguguuguaccagggcgugaauuguacugaagucccuguugccauccacgcagaccagcugacaccaaccuggcgcguguauagcacaggguccaacguguuucaaacuagagccggaugccucaucggcgcugagcauguaaacaauucauacgaaugugauauucccaucggugcggggauuugcgcaaguuaucagacccagacgaacucuccuaggcgggcccgcagcgucgcuucccagucaauaaucgccuacaccaugagccugggcgcagaaaauucuguggccuacuccaacaauaguauugcuaucccaacaaacuucacuaucagcguuaccacagaaauucuucccgugucuaugacuaagaccuccgucgacuguacgauguauauaugcggagauucaacagaguguaguaaucuguugcuccaauacggcagcuuuugcacccagcugaacagagccuuaacugggaucgcaguggagcaggacaaaaauacacaggaaguuuucgcgcaagugaagcagauuuauaaaaccccgccuaucaaggauuuuggagguuucaacuuuucgcagauucugccagaccccuccaaaccuucuaagaggagcuucaucgaggauauacuauuuaauaagguaacucucgcugacgccggcuucaucaaacaauacggggauugucugggagacauugcagcccgugaucuuaucugcgcucagaaguucaacggcuugaccguccugcccccacuccugacagacgaaaugauugcccaguauacgucagcauuacuggcugguaccaucacgaguggguggacauuuggcgccggagcggcccuucagauaccuuucgcuaugcaaauggcauaccgguuuaauggcauuggggugacccagaacguguuguaugagaaucagaaacucaucgccaaccaguucaacuccgcuauuggaaagauccaagauucucugagcuccacagccucagcacuaggcaaacugcaggacgucguuaaucagaacgcgcaggcccucaauacucuggugaagcaacuuagcaguaacuuuggugcuauaucuuccguauugaaugacauccugagccgauuagauaagguggaagccgagguccagauugacagacucaucaccgggaggcugcagucgcuucaaacguacgugacacagcagcugauucgcgcagcugagauccgggccucagcaaacuuggccgcuaccaaaaugucugaaugcguucucggacagaguaagagaguggauuucuguggcaaagguuaccaccugauguccuuuccccaaagcgcgccacauggcgucguguuccuacacguuacuuaugugccggcccaggagaagaauuuuaccacagcuccugcaauaugccacgacgggaaagcccauuuccccagggaaggagucuuuguaucuaacggcacucacugguucgugacccagcgcaauuuuuacgagccacagauuaucacaacggauaacaccuucguuagcgggaauugugacguggucaucggaauugugaacaauacuguauaugauccccugcaaccugagcucgacuccuucaaggaagaacuggauaaauacuuuaagaaccauacaucaccagacguggaucuuggcgacaucagugguauuaaugccagcgucguuaacauacagaaggaaaucgaucgauugaaugagguggcuaaaaaccugaacgaaucuuuaauugaccuccaggagcuggggaaguaugagcaguacaucaaauggcccugguauauuuggcuuggauucaucgcaggccugauagccaucgugauggucaccauuaugcuaugcuguaugacuuccugcuguucaugccucaaggguuguugcaguuguggcagcugcugcaaauuugacgaagaugacuccgagccugugcugaaggggguuaaguugcacuacacaugaggacuaguuauaagacugacuagcccgaugggccucccaacgggcccuccuccccuccuugcaccgagauuaauaaaaaaaaaaaaaaaaaaaaaaaaaaaaaaaaaaaaaaaaaaaaaaaaaaaaaaaaaaaaaaaaugcaucccccccccccccccccccccccccccccccaaaggcucuuuucagagccaccagaauu

SEQ ID NO: 13003 - RNA, 4039 nt, Artificial Sequence
  SARS-CoV-2/Congo/158/2020__EPI_ISL_417950 spike protein mRNA human (1-1273)
aggagaaagcuuaccauguucguguuucugguccuccuuccccugguuagcucccagugcgugaacuugaccacaagaacucaauuaccuccagccuacacuaauucuuucaccaggggcguauauuacccggacaagguguuucggucaaguguccugcacagcacacaggaucuauuccuccccuuuuucuccaacgugacuugguuucaugcuauccacguuucugggaccaauggaacaaaacgcuucgacaacccugugcugccauuuaaugauggugucuauuucgcaucgaccgagaagucaaacauuauacgaggcuggaucuuugggacuacacuugacagcaaaacccagagucuguugauugugaauaacgccacgaauguaguuaucaaggugugugaguuccaguuuugcaacgaucccuuccucggagucuacuaucauaaaaauaacaaguccuggauggagucugaguuccguguguacagcuccgcgaauaacuguacuuuugaauaugugucacaaccuuuccugauggaccuggaaggcaagcaggguaauuuuaaaaaccucagagaguucgucuuuaagaacauugauggguacuucaaaaucuacaguaagcacaccccaauaaauuuaguuagggaccugccccagggauuuagcgcucuugagccuuugguggaucugccaaucggcauuaacaucacacgguuccagacucuacucgcccugcaucgcucuuaucuuaccccgggcgacuccucaagcggguggacagcaggagccgcugcauacuauguagguuaccugcaacccagaaccuuuuugcucaaauauaaugaaaacggcacgauuacugaugccguggacugcgcucuggauccuuuaagugagacaaaguguacccugaagucuuucacugucgaaaaagggaucuaccagacauccaauuuuagggugcagccaaccgagagcauaguucgguuccccaacauuacgaaucucugcccuuuuggagagguguucaacgccacccgcuucgcgucggucuaugcauggaaucgaaagagaaucucuaacuguguggccgacuacuccguacuuuacaauucagcuaguuuuagcacauucaaaugcuauggcguuuccccaacuaagcugaacgacuuguguuuuaccaauguguacgccgauucuuucgucauuaggggugacgaagugcggcagaucgcacccgggcaaacaggaaaaaucgcugauuauaacuacaagcuaccggacgauuuuacuggcugcgucauugccuggaauagcaacaaccuggacucaaaagugggcgggaauuauaacuaccucuaucgucuguuccgcaagaguaaucuuaagccuuuugagagagauauauccaccgaaaucuaccaggcgggaagcacacccuguaacgguguugagggcuucaauugcuacuuuccacugcagucuuauggguuccaaccuaccaacggagugggcuaccagcccuauaggguagucguguugucauuugaacuccugcacgccccagcaacuguuugcggucccaaaaagaguacgaauuuagugaaaaacaagugugucaauuucaacuuuaaugggcugacaggcaccggagugcuaacugagagcaacaaaaaguuccucccuuuccagcaguuuggccgggacauugcugauaccacagacgccguacgagauccacaaacccuggagauccuugacauaacuccgugcuccuucgggggagugucuguuauuacacccgguacgaauaccucgaaccaggucgcuguguuguaccaggacgugaauuguacugaagucccuguugccauccacgcagaucagcugacaccaaccuggcgcguguauagcacaggcuccaacguguuucaaacuagagccgggugccucaucggagcugagcauguaaacaauucauacgaaugugacauucccaucggcgcggguauuugcgcaaguuaucagacccagacgaacucuccuaggcgggcccgcagcgucgcuucccagucaauaaucgccuacaccaugagccugggggcagaaaauucuguggccuacuccaacaauaguauugcuaucccaacaaacuucacuaucagcguuaccacagaaauucuucccgugucuaugacuaagaccuccgucgauuguacgauguauauaugcggcgacucaacagaguguaguaaucuguugcuccaauacggcagcuuuugcacccagcugaacagagccuuaacuggaaucgcaguggagcaggauaaaaauacacaggaaguuuucgcgcaagugaagcagauuuauaaaaccccgccuaucaaggacuuugggggauucaacuuuucgcagauucugccagaucccuccaaaccuucuaagaggagcuucaucgaggaccuacucuuuaauaagguaacucuggcugaugccgguuucauaaaacaauacggcgacugucuuggggauaucgcagcccgugacuugauuugcgcucagaaguucaacggacugaccguccugcccccacucuuaacagaugaaaugaucgcccaguauacgucagcacugcuugcuggcaccauuacgagugguuggacauuuggggccggcgcggccuugcagaucccuuucgcuaugcaaauggcauaccgguuuaauggaauaggcgugacccagaacgugcucuaugagaaucagaaacugauugccaaccaguucaacuccgcuaucgggaagauucaagacucucuaagcuccacagccucagcacugggaaaacuccaggacgucguuaaucagaacgcgcaggcccugaauacucuugugaagcaauugagcaguaacuuuggcgcuaucucuuccguacugaaugauauauuaagccgacucgacaagguggaagccgagguccagaucgauagacugauuaccgguaggcuucagucgcugcaaacguacgugacacagcaguugauccgcgcagcugagauucgggccucagcaaaccucgccgcuaccaaaaugucugaaugcguucuggggcagaguaagagaguggacuucuguggaaaaggcuaccaccuaauguccuuuccccaaagcgcgccacauggugucguguuccugcacguuacuuaugugccggcccaggagaagaauuuuaccacagcuccugcaaucugccacgauggcaaagcccauuuccccagggaaggggucuuuguaucuaacggaacucacugguucgugacccagcgcaauuuuuacgagccacagauaauuacaacggacaacaccuuccucagcggcaauugugauguugugaucgggaucgucaacaauacuguguaugacccccugcaaccugagcuugauuccuucaaggaagaguuggacaaauacuuuaagaaccauacaucaccagauguagaccugggagauauuaguggcaucaaugccagcguggucaacauucagaaggaaauagaccgauuaaaugagguugcuaaaaaccucaacgaaucucugaucgaccuucaggagcuggguaaguaugagcaguacauuaaauggcccugguauaucuggcuaggguucauugcaggacucaucgccauagugauggugaccaucaugcugugcuguaugacuuccugcuguucaugcuugaagggcuguugcaguugugguagcugcugcaaauuugaugaagacgauuccgagccuguccugaagggcgugaaguuacacuacacaugaggacuaguuauaagacugacuagcccgaugggccucccaacgggcccuccuccccuccuugcaccgagauuaauaaaaaaaaaaaaaaaaaaaaaaaaaaaaaaaaaaaaaaaaaaaaaaaaaaaaaaaaaaaaaaaaugcaucccccccccccccccccccccccccccccccaaaggcucuuuucagagccaccagaauu

SEQ ID NO: 13004 - RNA, 4039 nt, Artificial Sequence
  SARS-CoV-2/USA/UT-00034/2020__EPI_ISL_417977 spike protein mRNA human (1-1273)
aggagaaagcuuaccauguucguguuucugguccuccuuccccugguuagcucccagugcgugaacuugaccacaagaacucaauuaccuccagccuacacuaauucuuucaccaggggcguauauuacccggacaagguguuucggucaaguguccugcacagcacacaggaucuauuccuccccuuuuucuccaacgugacuugguuucaugcuauccacguuucugggaccaauggaacaaaacgcuucgacaacccugugcugccauuuaaugauggugucuauuucgcaucgaccgagaagucaaacauuauacgaggcuggaucuuugggacuacacuugacagcaaaacccagagucuguugauugugaauaacgccacgaauguaguuaucaaggugugugaguuccaguuuugcaacgaucccuuccucggagucuacuauuacaaaaauaacaaguccuggauggagucugaguuccguguguauagcuccgcgaauaacuguacuuuugaguacgugucacaaccuuuccugauggaccuggaaggcaagcaggguaauuuuaaaaaccucagagaguucgucuuuaagaacauugauggguacuucaaaaucuauaguaagcauaccccaauaaauuuaguuagggaccugccccagggauuuagcgcucuugagccuuugguggaucugccaaucggcauuaacaucacacgguuccagacucuacucgcccugcaccgcucuuaccuuaccccgggcgacuccucaagcggguggacagcaggagccgcugcauauuacguagguuaucugcaacccagaaccuuuuugcucaaauacaaugaaaacggcacgauuacugaugccguggacugcgcucuggauccuuuaagugagacaaaguguacccugaagucuuucacugucgaaaaagggaucuaucagacauccaauuuuagggugcagccaaccgagagcauaguucgguuccccaacauuacgaaucucugcccuuuuggagagguguucaacgccacccgcuucgcgucggucuacgcauggaaucgaaagagaaucucuaacuguguggccgacuacuccguacuuuauaauucagcuaguuuuagcacauucaaaugcuacggcguuuccccaacuaagcugaacgacuuguguuuuaccaauguguaugccgauucuuucgucauuaggggugacgaagugcggcagaucgcacccgggcaaacaggaaaaaucgcugauuacaacuauaagcuaccggacgauuuuacuggcugcgucauugccuggaauagcaacaaccuggacucaaaagugggcgggaauuacaacuaucucuaccgucuguuccgcaagaguaaucuuaagccuuuugagagagauauauccaccgaaaucuaccaggcgggaagcacacccuguaacgguguugagggcuucaauugcuauuuuccacugcagucuuacggguuccaaccuaccaacggagugggcuaucagcccuacaggguagucguguugucauuugaacuccugcaugccccagcaacuguuugcggucccaaaaagaguacgaauuuagugaaaaacaagugugucaauuucaacuuuaaugggcugacaggcaccggagugcuaacugagagcaacaaaaaguuccucccuuuccagcaguuuggccgggacauugcugauaccacagacgccguacgagauccacaaacccuggagauccuugacauaacuccgugcuccuucgggggagugucuguuauuacacccgguacgaauaccucgaaccaggucgcuguguuguaucagggcgugaauuguacugaagucccuguugccauccacgcagaccagcugacaccaaccuggcgcguguacagcacaggguccaacguguuucaaacuagagccggaugccucaucggcgcugagcacguaaacaauucauaugaaugugauauucccaucggugcggggauuugcgcaaguuaccagacccagacgaacucuccuaggcgggcccgcagcgucgcuucccagucaauaaucgccuacaccaugagccugggcgcagaaaauucuguggccuauuccaacaauaguauugcuaucccaacaaacuucacuaucagcguuaccacagaaauucuucccgugucuaugacuaagaccuccgucgacuguacgauguacauaugcggagauucaacagaguguaguaaucuguugcuccaauauggcagcuuuugcacccagcugaacagagccuuaacugggaucgcaguggagcaggacaaaaauacacaggaaguuuucgcgcaagugaagcagauuuacaaaaccccgccuaucaaggauuuuggagguuucaacuuuucgcagauucugccagaccccuccaaaccuucuaagaggagcuucaucgaggaucuacucuuuaauaagguaacucuggcugacgccggcuucauaaaacaauauggggauugucuuggagacaucgcagcccgugauuugauuugcgcucagaaguucaacggccugaccguccugcccccacucuuaacagacgaaaugaucgcccaguacacgucagcacugcuugcugguaccauuacgaguggguggacauuuggcgccggagcggccuugcagaucccuuucgcuaugcaaauggcauaucgguuuaauggcauaggggugacccagaacgugcucuacgagaaucagaaacugauugccaaccaguucaacuccgcuaucggaaagauucaagauucucuaagcuccacagccucagcacugggcaaacuccaggacgucguuaaucagaacgcgcaggcccugaauacucuugugaagcaauugagcaguaacuuuggugcuaucucuuccguacugaaugacauauuaagccgacucgauaagguggaagccgagguccagaucgacagacugauuaccgggaggcuucagucgcugcaaacguacgugacacagcaguugauccgcgcagcugagauucgggccucagcaaaccucgccgcuaccaaaaugucugaaugcguucugggacagaguaagagaguggauuucuguggcaaagguuaucaucuaauguccuuuccccaaagcgcgccacacggcgucguguuccugcauguuacuuacgugccggcccaggagaagaauuuuaccacagcuccugcaaucugccacgacgggaaagcccacuuccccagggaaggagucuuuguaucuaacggcacucauugguucgugacccagcgcaauuuuuaugagccacagauaauuacaacggauaacaccuucguuagcgggaauugugacguggucaucggaaucgugaacaauacuguauacgauccccuccaaccugagcuggacuccuucaaggaagaacuugauaaauauuuuaagaaccacacaucaccagacguggauuugggcgacauuagugguaucaaugccagcgucguuaacauucagaaggaaauagaucgacugaaugagguggcuaaaaacuuaaacgaaucucucaucgaccugcaggagcuugggaaguacgagcaguauauuaaauggcccugguacaucuggcugggauucauugcaggccuaaucgccauagugauggucaccaucaugcucugcuguaugacuuccugcuguucaugccugaaggguuguugcaguuguggcagcugcugcaaauuugacgaagaugacuccgagccuguguugaaggggguuaagcugcauuacacaugaggacuaguuauaagacugacuagcccgaugggccucccaacgggcccuccuccccuccuugcaccgagauuaauaaaaaaaaaaaaaaaaaaaaaaaaaaaaaaaaaaaaaaaaaaaaaaaaaaaaaaaaaaaaaaaaugcaucccccccccccccccccccccccccccccccaaaggcucuuuucagagccaccagaauu

SEQ ID NO: 13005 - RNA, 4039 nt, Artificial Sequence
  SARS-CoV-2/USA/UT-00033/2020__EPI_ISL_417976 spike protein mRNA human (1-1273)
aggagaaagcuuaccauguucguguuucugguccuccuuccccugguuagcucccagugcgugaacuugaccacaagaacucaauuaccuccagccuacacuaauucuuucaccaggggcguauauuacccggacaagguguuucggucaaguguccugcacagcacacaggaucuauuccuccccuuuuucuccaacgugacuugguuucaugcuauccacguuucugggaccaauggaacaaaacgcuucgacaacccugugcugccauuuaaugauggugucuauuucgcaucgaccgagaagucaaacauuauacgaggcuggaucuuugggacuacacuugacagcaaaacccagagucuguugauugugaauaacgccacgaauguaguuaucaaggugugugaguuccaguuuugcaacgaucccuuccucggagucuacuaucauaaaaauaacaaguccuggauggagucugaguuccguguguacagcuccgcgaauaacuguacuuuugaauaugugucacaaccuuuccugauggaccuggaaggcaagcaggguaauuuuaaaaaccucagagaguucgucuuuaagaacauugauggguacuucaaaaucuacaguaagcacaccccaauaaauuuaguuagggaccugccccagggauuuagcgcucuugagccuuugguggaucugccaaucggcauuaacaucacacgguuccagacucuacucgcccugcaucgcucuuaucuuaccccgggcgacuccucaagcgggcugacagcaggagccgcugcauacuauguagguuacuugcaacccagaaccuuucuccugaaauauaaugaaaacggcacgauuacugaugccguggacugcgcuuuagauccucugagugagacaaaguguacccucaagucuuucacugucgaaaaagggaucuaccagacauccaauuuuagggugcagccaaccgagagcauaguucgguuccccaacauuacgaaucuuugcccuuuuggagagguguucaacgccacccgcuucgcgucggucuaugcauggaaucgaaagagaaucucuaacuguguggccgacuacuccguacuguacaauucagcuaguuuuagcacauucaaaugcuauggcguuuccccaacuaaguugaacgaccuauguuuuaccaauguguacgccgauucuuucgucauuaggggugacgaagugcggcagaucgcacccgggcaaacaggaaaaaucgcugauuauaacuacaagcugccggacgauuuuacuggcugcgucauugccuggaauagcaacaaccucgacucaaaagugggcgggaauuauaacuaccuguaucgucuuuuccgcaagaguaaucugaagccuuuugagagagauauauccaccgaaaucuaccaggcgggaagcacacccuguaacgguguugagggcuucaauugcuacuuuccauugcagucuuauggguuccaaccuaccaacggagugggcuaccagcccuauaggguagucgugcucucauuugaacuguuacacgccccagcaacuguuugcggucccaaaaagaguacgaaucuggugaaaaacaagugugucaauuucaacuuuaaugggcuaacaggcaccggagugcucacugagagcaacaaaaaguuccugccuuuccagcaguuuggccgggacauugcugauaccacagacgccguacgagauccacaaacccuugagaucuuggacauaacuccgugcuccuucgggggagugucuguuauuacacccgguacgaauaccucgaaccaggucgcugugcuguaccagggcgugaauuguacugaagucccuguugccauccacgcagaccagcucacaccaaccuggcgcguguauagcacaggguccaacguguuucaaacuagagccggaugccugaucggcgcugagcauguaaacaauucauacgaaugugauauucccaucggugcggggauuugcgcaaguuaucagacccagacgaacucuccuaggcgggcccgcagcgucgcuucccagucaauaaucgccuacaccaugagccuuggcgcagaaaauucuguggccuacuccaacaauaguauugcuaucccaacaaacuucacuaucagcguuaccacagaaauucugcccgugucuaugacuaagaccuccgucgacuguacgauguauauaugcggagauucaacagaguguaguaauuugcuccugcaauacggcagcuuuugcacccaguuaaacagagcccugacugggaucgcaguggagcaggacaaaaauacacaggaaguuuucgcgcaagugaagcagauuuauaaaaccccgccuaucaaggauuuuggagguuucaacuuuucgcagauucuaccagaccccuccaaaccuucuaagaggagcuucaucgaggaucuccuguuuaauaagguaacucuugcugacgccggcuucauaaaacaauacggggauuguuugggagacaucgcagcccgugaucugauuugcgcucagaaguucaacggccucaccguccugcccccauuacugacagacgaaaugaucgcccaguauacgucagcacuuuuggcugguaccauuacgaguggguggacauuuggcgccggagcggcccuccagaucccuuucgcuaugcaaauggcauaccgguuuaauggcauaggggugacccagaacgugcuguaugagaaucagaaacuaauugccaaccaguucaacuccgcuaucggaaagauucaagauucucugagcuccacagccucagcacucggcaaacugcaggacgucguuaaucagaacgcgcaggcccuuaauacuuuggugaagcaacugagcaguaacuuuggugcuaucucuuccguauuaaaugacauacucagccgacuggauaagguggaagccgagguccagaucgacagacuuauuaccgggaggcugcagucguugcaaacguacgugacacagcagcucauccgcgcagcugagauucgggccucagcaaaccuggccgcuaccaaaaugucugaaugcguucuaggacagaguaagagaguggauuucuguggcaaagguuaccaccugauguccuuuccccaaagcgcgccacauggcgucguguuccuccacguuacuuaugugccggcccaggagaagaauuuuaccacagcuccugcaaucugccacgacgggaaagcccauuuccccagggaaggagucuuuguaucuaacggcacucacugguucgugacccagcgcaauuuuuacgagccacagauaauuacaacggauaacaccuucguuagcgggaauugugacguggucaucggaaucgugaacaauacuguauaugauccccugcaaccugagcuugacuccuucaaggaagaguuggauaaauacuuuaagaaccauacaucaccagacguggaucugggcgacauuagugguaucaaugccagcgucguuaacauucagaaggaaauagaucgauuaaaugagguggcuaaaaaccucaacgaaucucugaucgaccuucaggagcuggggaaguaugagcaguacauuaaauggcccugguauaucuggcuaggauucauugcaggccucaucgccauagugauggucaccaucaugcugugcuguaugacuuccugcuguucaugcuugaaggguuguugcaguuguggcagcugcugcaaauuugacgaagaugacuccgagccugugcugaaggggguuaaguuacacuacacaugaggacuaguuauaagacugacuagcccgaugggccucccaacgggcccuccuccccuccuugcaccgagauuaauaaaaaaaaaaaaaaaaaaaaaaaaaaaaaaaaaaaaaaaaaaaaaaaaaaaaaaaaaaaaaaaaugcaucccccccccccccccccccccccccccccccaaaggcucuuuucagagccaccagaauu

SEQ ID NO: 13006 - RNA, 4039 nt, Artificial Sequence
  SARS-CoV-2/USA/WI-13/2020__EPI_ISL_417516 spike protein mRNA human (1-1273)
aggagaaagcuuaccauguucguguuucugguccuccuuccccugguuagcucccagugcgugaacuugaccacaagaacucaauuaccuccagccuacacuaauucuuucaccaggggcguauauuacccggacaagguguuucggucaaguguccugcacagcacacaggaucuauuccuccccuuuuucuccaacgugacuugguuucaugcuauccacguuucugggaccaauggaacaaaacgcuucgacaacccugugcugccauuuaaugauggugucuauuucgcaucgaccgagaagucaaacauuauacgaggcuggaucuuugggacuacacuugacagcaaaacccagagucuguugauugugaauaacgccacgaauguaguuaucaaggugugugaguuccaguuuugcaacgaucccuuccucggagucuacuaucauaaaaauaacaaguccuggauggagucugaguuccguguguacagcuccgcgaauaacuguacuuuugaauaugugucacaaccuuuccugauggaccuggaaggcaagcaggguaauuuuaaaaaccucagagaguucgucuuuaagaacauugauggguacuucaaaaucuacaguaagcacaccccaauaaauuuaguuagggaccugccccagggauuuagcgcucuugagccuuugguggaucugccaaucggcauuaacaucacacgguuccagacucuacucgcccugcaucgcucuuaucuuaccccgggcgacuccucaagcggguggacagcaggagccgcugcauacuauguagguuaccugcaacccagaaccuuuuugcucaaauauaaugaaaacggcacgauuacugaugccguggacugcgcucuggauccuuuaagugagacaaaguguacccugaagucuuucacugucgaaaaagggaucuaccagacauccaauuuuagggugcucccaaccgagagcauaguucgguuccccaacauuacgaaucuuugcccuuuuggagagguguucaacgccacccgcuucgcgucggucuaugcauggaaucgaaagagaaucucuaacuguguggccgacuacuccguacuguacaauucagcuaguuuuagcacauucaaaugcuauggcguuuccccaacuaaguugaacgaccuauguuuuaccaauguguacgccgauucuuucgucauuaggggugacgaagugcggcagaucgcacccgggcagacaggaaaaaucgcugauuauaacuacaagcugccggacgauuuuacuggcugcgucauugccuggaauagcaacaaccucgacucaaaagugggcgggaauuauaacuaccuguaucgucuuuuccgcaagaguaaucugaagccuuuugagagagauauauccaccgaaaucuaccaagcgggaagcacacccuguaacgguguugagggcuucaauugcuacuuuccauugcagucuuauggguuccagccuaccaacggagugggcuaccaacccuauaggguagucgugcucucauuugaacuguuacacgccccagcaacuguuugcggucccaaaaagaguacgaaucuggugaaaaacaagugugucaauuucaacuuuaaugggcuaacaggcaccggagugcucacugagagcaacaaaaaguuccugccuuuccagcaguuuggccgggacauugcugauaccacagacgccguacgagauccacagacccuugagaucuuggacauaacuccgugcuccuucgggggagugucuguuauuacacccgguacgaauaccucgaaccaagucgcugugcuguaccagggcgugaauuguacugaagucccuguugccauccacgcagaccagcucacaccaaccuggcgcguguauagcacaggguccaacguguuucagacuagagccggaugccugaucggcgcugagcauguaaacaauucauacgaaugugauauucccaucggugcggggauuugcgcaaguuaucaaacccagacgaacucuccuaggcgggcccgcagcgucgcuucccagucaauaaucgccuacaccaugagccuuggcgcagaaaauucuguggccuacuccaacaauaguauugcuaucccaacaaacuucacuaucagcguuaccacagaaauucugcccgugucuaugacuaagaccuccgucgacuguacgauguauauaugcggagauucaacagaguguaguaauuugcuccugcaguacggcagcuuuugcacccaauuaaacagagcccugacugggaucgcaguggagcaggacaaaaauacacaggaaguuuucgcacaggugaagcaaauuuauaaaaccccgccuaucaaggauuuuggagguuucaacuuuucgcagauucuaccagaccccuccaaaccuucuaagaggagcuucaucgaggaucuccuguuuaauaagguaacucuugcugacgccggcuucauaaaacaguacggggauuguuugggagacaucgcagcccgugaucugauuugcgcucaaaaguucaacggccucaccguccugcccccauuacugacagacgaaaugaucgcccaguauacgucagcacuuuuggcugguaccauuacgaguggguggacauuuggcgccggagcggcccuccagaucccuuucgcuaugcagauggcauaccgguuuaauggcauaggggugacccaaaacgugcuguaugagaaucagaaacuaauugccaaccaguucaacuccgcuaucggaaagauucaggauucucugagcuccacagccucagcacucggcaaacugcaagacgucguuaaucagaacgcgcaggcccuuaauacuuuggugaagcagcugagcaguaacuuuggugcuaucucuuccguauuaaaugacauacucagccgacuggauaagguggaagccgagguccaaaucgacagacuuauuaccgggaggcugcagucguugcagacguacgugacacaacagcucauccgcgcagcugagauucgggccucagcaaaccuggccgcuaccaaaaugucugaaugcguucuaggacagaguaagagaguggauuucuguggcaaagguuaccaccugauguccuuuccccagagcgcgccacauggcgucguguuccuccacguuacuuaugugccggcccaagagaagaauuuuaccacagcgccugcuaucugccacgacgggaaagcccauuuccccagggaaggagucuuuguaucuaacggcacucacugguucgugacccagcgcaauuuuuacgagccacagauaauuacaacggauaacaccuucguuagcgggaauugugacguggucaucggaaucgugaacaauacuguauaugauccccugcagccugagcuugacuccuucaaggaagaguuggauaaauacuuuaagaaccauacaucaccagacguggaucugggcgacauuagugguaucaaugccagcgucguuaacauucaaaaggaaauagaucgauuaaaugagguggcuaaaaaccucaacgaaucucugaucgaccuucaggagcuggggaaguaugagcaguacauuaaauggcccugguauaucuggcuaggauucauugcaggccucaucgccauagugauggucaccaucaugcugugcuguaugacuuccugcuguucaugcuugaaggguuguugcaguuguggcagcugcugcaaauuugacgaagaugacuccgagccugugcugaaggggguuaaguuacacuacacaugaggacuaguuauaagacugacuagcccgaugggccucccaacgggcccuccuccccuccuugcaccgagauuaauaaaaaaaaaaaaaaaaaaaaaaaaaaaaaaaaaaaaaaaaaaaaaaaaaaaaaaaaaaaaaaaaugcaucccccccccccccccccccccccccccccccaaaggcucuuuucagagccaccagaauu

SEQ ID NO: 13007 - RNA, 4036 nt, Artificial Sequence
  SARS-CoV-2/India/1-27/2020__EPI_ISL_413522 spike protein mRNA human (1-1272)
aggagaaagcuuaccauguucguguuucugguccuccuuccccugguuagcucccagugcgugaacuugaccacaagaacucaauuaccuccagccuacacgaauagcuucaccaggggcguauauuacccggacaagguguuucggucaaguguccugcacagcacacaggaucuauuccuccccuuuuucuccaacgugacuugguuucaugcuauccacguuucugggaccaauggaacaaaacgcuucgacaacccugugcugccauuuaaugauggugucuauuucgcaucgaccgagaagucaaacauuauacgaggcuggaucuuugggacuacacuugacagcaaaacccagagucuguugauugugaauaacgccacgaauguaguuaucaaggugugugaguuccaguuuugcaacgaucccuuccucggagucuaccauaaaaauaacaaguccuggauggagucugaguuccguguguauagcuccgcgaauaacuguacuuuugaauacgugucacaaccuuuccugauggaccuggaaggcaagcaggguaauuuuaaaaaccucagagaguucgucuuuaagaacauugauggguauuucaaaaucuacaguaagcacaccccaauaaauuuaguuagggaccugccccagggauuuagcgcucuugagccuuugguggaucugccaaucggcauuaacaucacacgguuccagacucuacucgcccugcaucgcucuuaccuuaccccgggcgacuccucaagcggguggacagcaggagccgcugcauauuacguagguuaucugcaacccagaaccuuuuugcucaaauacaaugaaaacggcacgauuacugaugccguggacugcgcucuggauccuuuaagugagacaaaguguacccugaagucuuucacugucgaaaaagggaucuaucagacauccaauuuuagggugcagccaaccgagagcauaguucgguuccccaacauuacgaaucucugcccuuuuggagagguguucaacgccacccgcuucgcgucggucuacgcauggaaucgaaagagaaucucuaacuguguggccgacuauuccguacuuuacaauucagcuaguuuuagcacauucaaaugcuacggcguuuccccaacuaagcugaacgacuuguguuuuaccaauguguaugccgauucuuucgucauuaggggugacgaagugauccagaucgcacccgggcaaacaggaaaaauugcugauuacaacuauaagcuaccggacgauuuuacuggcugcgucauagccuggaauagcaacaaccuggacucaaaagugggcgggaauuacaacuaucucuaccggcuguuccguaagaguaaucuuaagccuuuugagcgcgauaucuccaccgaaauuuaucaggcgggaagcacacccuguaacgguguugagggcuucaauugcuacuuuccacugcagucuuacggguuccaaccuaccaacggagugggcuaucagcccuacagaguagucguguugucauuugaacuccugcacgccccagcaacuguuugcggucccaaaaagaguacgaauuuagugaaaaacaagugugucaauuucaacuuuaaugggcugacaggcaccggagugcuaacugagagcaacaaaaaguuccucccuuuccagcaguuuggcagggacaucgcugauaccacagacgccguacgggauccacaaacccuggagauacuugacauuacuccgugcuccuucgggggagugucuguuaucacacccgguacgaauaccucgaaccaggucgcuguguuguaucaggacgugaauuguacugaagucccuguugccauccacgcagaucagcugacaccaaccuggcgaguguacagcacaggcuccaacguguuucaaacucgcgccgggugccucauuggagcugagcauguaaacaauucauaugaaugugacauccccauuggcgcggguauaugcgcaaguuaccagacccagacgaacucuccuagaagggcccggagcgucgcuucccagucaaucauugccuauaccaugagccugggggcagaaaauucuguggccuacuccaacaauaguaucgcuaucccaacaaacuucacuauuagcguuaccacagaaauacuucccgugucuaugacuaagaccuccgucgauuguacgauguacaucugcggcgacucaacagaguguaguaaucuguugcuccaauauggaucuuuuugcacccagcugaaccgcgccuuaacuggcauugcaguggagcaggauaaaaauacacaggaaguuuucgcgcaagugaagcagaucuacaaaaccccgccuauuaaggacuuugggggauucaacuuuucgcagauccugccagaucccuccaaaccuucuaagagaaguuucauagaggaccuacucuuuaauaagguaacucuggcugaugccgguuucaucaaacaauauggcgacugucuuggggauauugcagccagggacuugaucugcgcucagaaguucaacggacugaccguccugcccccacucuuaacagaugaaaugauugcccaguacacgucagcacugcuugcuggcaccaucacuagcgguuggacauuuggggccggcgcggccuugcagauaccuuucgcuaugcaaauggcauaucguuuuaauggaauuggcgugacccagaacgugcucuacgagaaucagaaacugaucgccaaccaguucaacuccgcuauugggaagauccaagacucucuaagcuccacagccucagcacugggaaaacuccaggacgucguuaaucagaacgcgcaggcccugaauacucuugugaagcaauugagcaguaacuuuggcgcuauaucuuccguacugaaugauaucuuaagccggcucgacaagguggaagccgagguccagauugaucgacugaucaccgguagacuucagucgcugcaaacguaugugacacagcaguugauuagggcagcugagauccgcgccucagcaaaccucgccgcuaccaaaaugucugaaugcguucuggggcagaguaagcggguggacuucuguggaaaaggcuaccaccuaauguccuuuccccaaagcgcgccacauggugucguguuccugcacguuacuuacgugccggcccaggagaagaauuuuaccacagcuccugcaauaugccacgauggcaaagcccauuuccccagagaaggggucuuuguaucuaacggaacucacugguucgugacccagaggaauuuuuaugagccacagauuaucacaacggacaacaccuucguuagcggcaauugugauguggucaucgggauugugaacaauacuguauacgacccccuccaaccugagcuggauuccuucaaggaggaacuugacaaauauuuuaagaaccauacaucaccagauguggacuugggagauaucaguggcauuaaugccagcgucguuaacauacagaaggaaaucgaccgccugaaugagguggcuaaaaacuuaaacgaaucucucauugaccugcaggagcuugguaaguacgagcaguauaucaaauggcccugguacauuuggcugggguucaucgcaggacuaauagccaucgugauggucaccauuaugcucugcuguaugacuuccugcuguucaugccugaagggcuguugcaguugugguagcugcugcaaauuugaugaagacgauuccgagccuguguugaagggcguuaagcugcacuauacaugaggacuaguuauaagacugacuagcccgaugggccucccaacgggcccuccuccccuccuugcaccgagauuaauaaaaaaaaaaaaaaaaaaaaaaaaaaaaaaaaaaaaaaaaaaaaaaaaaaaaaaaaaaaaaaaaugcaucccccccccccccccccccccccccccccccaaaggcucuuuucagagccaccagaauu

SEQ ID NO: 13008 - RNA, 4021 nt, Artificial Sequence
  SARS-CoV-2/pangolin/Guangxi/P4L/2017__EPI_ISL_410538 spike protein mRNA human (1-1267)
aggagaaagcuuaccauguucguguuucuguucguccucccccuuguuagcucccagugcgugaaccugaccacaagaacuggcaucccuccaggguacacgaauagcucaaccaggggaguauauuacccggacaagguguuucggaguagcauuuugcacuuaacacaagaucuguuccuacccuuuuucuccaacgucacuugguuuaauaccauaaacuaucaggguggcuucaaaaaguuugacaauccugugcucccauucaacgaugggguuuacuuugccucuacagagaaaucgaauaucauucgcggauggaucuucggcaccacucuggacgcucgaacacagucacuucugauugugaacaaugcaaccaacgucgugaucaagguaugugaauuucaguucugcacggaucccuucuuggguguuuauuaccauaauaacaauaaaacuuggguggagaacgaauuucgugucuauagcagugccaauaacuguaccuucgaguacauaucccaaccuuuucucauggaccuggaagggaagcagggaaacuucaagaaucugagagaguuuguguucaaaaacguggauggcuacuuuaagaucuauucuaaacacacaccaauugaccucgucagggauuuaccccggggcuucgcggcucuggagccucuuguugacuugccaaucgggauuaauaucacucgcuuucagacccugcuagcccuccauagaagcuaccugacaccgggaaaccuugaauccgguuggaccacgggcgcagccgcuuauuacgugggguaucugcagcaaaggacuuucuugcucucauacaaucagaacggaacaauaaccgaugcaguagacugcagucuggaucccuuaagcgagacuaaguguacacugaaaucucucaccguggaaaagggcauuuaucagacguccaauuuucggguccagccuaccaucucaauugugcgcuucccaaacaucacaaaucuuugccccuuuggugagguuuucaacgccagcaaguucgcuaguguguacgccuggaaucgaaaaagaaucucuaacugugucgcggacuacuccgugcuguauaauagcacuucguuuucuaccuucaagugcuacgggguauccccuacaaaauugaacgaccuauguuuuacuaauguuuaugcagauucauucguggucaagggagacgaggugaggcaaauugccccaggccagaccggcgucauagcugauuacaacuauaaacugcccgacgauuuuacagggugcgugaucgccuggaacaguguuaagcaggacgcacucaccggagguaauuacggcuaucuguaccggcuuuuccguaaaagcaagcugaagccguuugaacgcgauauuuccacugagaucuaccaagcugggucuacgccuuguaacggacaggugggcuugaauugcuauuacccccucgaaagauaugguuuccacccaacaaccgggguaaacuaccagccuuuuagggucgugguucugagcuucgaguuacugaauggccccgccacugugugcggaccaaaacuaucaaccacacucgucaaggacaaaugugugaacuuuaauuucaacggccugaccgggacuggaguacuuacaacgaguaagaaacaguuuuugcccuuccaacaguucggucgggauauauccgacaccacugaugcggugcgagacccucagacacuggaaauucucgacaucaccccaugcagcuuuggcgggguuucugucaucacaccgggaacuaauaccucaaaccagguggccgugcuguaucaagaugucaauuguacggagguucccauggcaauucaugcugagcagcuuaccccugccuggcgcguguacagugcuggcgccaacguguuccagacaagagcagguugccugguaggggccgaacacgucaauaacagcuaugagugugacaucccagugggcgcuggaauuugcgcguccuaccacucuaugucgagcuugagguccguuaaucagcggucaauaaucgcauacacuaugagucucggcgccgaaaacucuguggcuuauagcaacaauuccauugccauccccaccaacuuuacaaucucagucacuaccgagauucugccugugagcaugacgaagacaucuguugauuguaccauguacauaugcggggacuccaucgaauguaguaauuuacugcuacaauauggaucuuucugcacucagcucaaccgcgcacugacagguauugccguggagcaggauaagaauacccaggagguauuugcucaagucaaacagaucuacaagacuccacccauuaaagacuucggcggguuuaacuucucucagauccuuccggauccuuccaagccaucaaaaagaaguuuuauagaagacuugcuguucaauaaggugacccucgccgaugcaggauuuaucaagcaauauggcgacugucugggugauauugcggcuagggacuuaaucugcgcccagaaauucaacgggcugacagugcuucccccuuugcucacggaugagaugauugcacaguacaccagcgcccugcuagcuggcacuaucacaucgggauggaccuucggcgccggggcagcucugcagauacccuuugccaugcaaauggcguaucguuucaauggaauuggcgucacacagaacguucucuacgaaaaucagaagcugaucgccaaccaguuuaauuccgcuauugguaaaauccaagacucucuuagcucaacugcaagugccuuggggaagcugcaggacgugguaaaccagaaugcucaggccuuaaacacccucgugaaacaacuguccucuaacuucggagcaauaagcuccguccuuaaugauauccugucacgguuggacaagguggaggcggaaguucagauugaucgacucaucacgggcagacugcagagccuacaaacauacgugacccagcagcugauuagggccgcugagauccgcgccagugcaaaccucgcugccacuaagaugucugagugcguccugggucaguccaaacggguggacuuuuguggcaagggguaucaucuuaugagcuucccacaaucggcaccucacggaguuguguuuuugcaugucaccuacguacccgcccaggagaaaaauuucacaacugcuccagcgauaugccacgagggcaaggcccacuuuccgagagaagggguguucguuucaaacggaacccauugguuuauuacacagaggaauuucuaugagccucagaucaucacgaccgauaacacuuuugugucuggcaguugugacgucgugauugguaucguaaauaacacaguguacgauccccugcaaccagaguuagacuccuucaaagaagaacucgauaaguauuucaaaaaucacaccagccccgacgucgaucugggggacauuucuggaauaaacgcaagcguugugaauauccagaaggaaauugaucgccuuaacgagguggcuaagaaucugaacgaauccccuaucgaccuacaggagcucggcaaauacgagcaguauauuaaguggccaugguacaucuggcuggguuuuauagccggcuugaucgccauuaucauggucacuauuaugcugugcuguaugacaucaugcuguaguugcuuaaaaggguguugcagcuguggaucuugcugcaaguucgacgaagaugacuccgagcccgugcucaaaggcguuaagcugcauuacaccugaggacuaguuauaagacugacuagcccgaugggccucccaacgggcccuccuccccuccuugcaccgagauuaauaaaaaaaaaaaaaaaaaaaaaaaaaaaaaaaaaaaaaaaaaaaaaaaaaaaaaaaaaaaaaaaaugcaucccccccccccccccccccccccccccccccaaaggcucuuuucagagccaccagaauu

SEQ ID NO: 13009 - RNA, 4021 nt, Artificial Sequence
  SARS-CoV-2/pangolin/Guangxi/P5L/2017__EPI_ISL_410540 spike protein mRNA human (1-1267)
aggagaaagcuuaccauguucguguuucuguucguccucccccuuguuagcucccagugcgugaaccugaccacaagaacuggcaucccuccaggguacacgaauagcucaaccaggggaguauauuacccggacaagguguuucggaguagcauuuugcacuuaacacaagaucuguuccuacccuuuuucuccaacgucacuugguuuaauaccauaaacuaucaggguggcuucaaaaaguuugacaauccugugcucccauucaacgaugggguuuacuuugccucuacagagaaaucgaauaucauucgcggauggaucuucggcaccacucuggacgcucgaacacagucacuucugauugugaacaaugcaaccaacgucgugaucaagguaugugaauuucaguucugcacggaucccuucuuggguguuuauuaccauaauaacaauaaaacuuggguggagaacgaauuucgugucuauagcagugccaauaacuguaccuucgaguacauaucccaaccuuuucucauggaccuggaagggaagcagggaaacuucaagaaucugagagaguuuguguucaaaaacguggauggcuacuuuaagaucuauucuaaacacacaccaauugaccucgucagggauuuaccccggggcuucgcggcucuggagccucuuguugacuugccaaucgggauuaauaucacucgcuuucagacccugcuagcccuccauagaagcuaccugacaccgggaaaacuugaauccgguuggaccacgggcgcagccgcuuauuacgugggguaucugcagcaaaggacuuucuugcucucauacaaccagaauggaacaauaaccgaugcaguagacugcagucuggaucccuuaagcgagacuaaguguacacugaagucucucaccguggaaaagggcauuuaucagacguccaacuuucggguccagccuaccaucucaauugugcgcuucccaaauaucacaaaccuuugccccuuuggugagguuuucaaugccagcaaauucgcuaguguguacgccuggaaccgaaagagaaucucuaauugugucgcggacuacuccgugcuguauaacagcacuucguuuucuaccuucaaaugcuacgggguauccccuacaaaguugaaugaccuauguuuuacuaacguuuaugcagauucauucguggucaaaggagacgaggugaggcaaauugccccaggccagaccggcgucauagcugauuacaauuauaagcugcccgacgauuuuacagggugcgugaucgccuggaacaguguuaaacaggacgcacucaccggagguaacuacggcuaucuguaccggcuuuuccguaagagcaagcugaaaccguuugaacgcgauauuuccacugagaucuaccaagcugggucuacgccuuguaauggacaggugggcuugaacugcuauuacccccucgaaagauaugguuuccacccaacaaccgggguaaauuaccagccuuuuagggucgugguucugagcuucgaguuacugaacggccccgccacugugugcggaccaaagcuaucaaccacacucgucaaagacaagugugugaauuuuaacuucaauggccugaccgggacuggaguacuuacaacgaguaaaaagcaguuuuugcccuuccaacaguucggucgggauauauccgacaccacugaugcggugcgagacccucagacacuggaaauucucgacaucaccccaugcagcuuuggcgggguuucugucaucacaccgggaacuaacaccucaaaucagguggccgugcuguaucaagaugucaacuguacggagguucccauggcaauucaugcugagcagcuuaccccugccuggcgcguguacagugcuggcgccaauguguuccagacaagagcagguugccugguaggggccgaacacgucaacaauagcuaugagugugacaucccagugggcgcuggaauuugcgcguccuaccacucuaugucgagcuuuagguccguuaaccagcggucaauaaucgcauacacuaugaguuugggcgccgaaaauucuguggcuuauagcaacaacuccauugccauccccaccaauuucacaaucucagucacuaccgagauucucccugugagcaugacgaagacaucuguugauuguaccauguacauaugcggggacuccaucgaauguaguaaccuguuacugcaauauggaucuuuuugcacucagcuaaaucgcgcacucacagguauugccguggagcaggauaaaaacacccaggagguauucgcucaagucaagcagaucuacaaaacuccacccauuaaggacuuuggcggguucaauuuuucucagauccugccggauccuuccaaaccaucaaagagaaguuucauagaagaccuuuuguuuaacaaggugacccuggccgaugcaggauucaucaaacaauauggcgacugucucggugauauugcggcuagggaccugaucugcgcccagaaguucaauggguuaacagugcugcccccucuuuugacggaugagaugauugcacaguacaccagcgcccuccuggcuggcacuaucacaucgggauggaccuuuggcgccggggcagcucuacagauacccuucgccaugcaaauggcguaucguuuuaacggaauuggcgucacacagaauguucuguacgaaaaccagaaacucaucgccaaucaguucaacuccgcuauugguaagauccaagacucucugagcucaacugcaagugcccuugggaaauugcaggacgugguaaaucagaacgcucaggcccugaauaccuuagugaagcaacucuccucuaacuuuggagcaauaagcuccguccugaacgauauccuuucacggcuggacaagguggaggcggaaguucagauugaucgauugaucacgggcagacuccagagccugcaaacauacgugacccagcagcuaauuagggccgcugagauccgcgccagugcaaaucuggcugccacuaaaaugucugagugcguccucggucaguccaagcggguggacuucuguggcaaaggguaucaucugaugagcuuuccacaaucggcaccucacggaguuguguuccuucaugucaccuacguacccgcccaggaaaagaacuuuacaacugcuccagcgauaugccacgagggcaaagcccacuucccgagagaagggguguuuguuucaaauggaacccauugguucauuacacagaggaacuuuuaugagccucagaucaucacgaccgauaauacuuucgugucuggcaguugugacgucgugauugguaucguaaacaauacaguguacgaucccuugcaaccagagcuggacuccuucaaggaagaguuagauaaauauuuuaagaaccacaccagccccgacgucgaucucggggacauuucuggaauaaaugcaagcguugugaacauccagaaggaaauugaucgccugaaugagguggcuaaaaaccuuaaugaaucccugaucgaccuacaggagcucggcaaguacgagcaguauauuaaauggccuugguacaucuggcuggguuucauagccggcuugaucgccauuaucauggucacuauuaugcugugcuguaugacaucaugcuguaguugcuuaaagggguguugcagcuguggaucuugcugcaaauuugacgaagaugacuccgagccagugcucaagggcguuaagcugcauuacaccugaggacuaguuauaagacugacuagcccgaugggccucccaacgggcccuccuccccuccuugcaccgagauuaauaaaaaaaaaaaaaaaaaaaaaaaaaaaaaaaaaaaaaaaaaaaaaaaaaaaaaaaaaaaaaaaaugcaucccccccccccccccccccccccccccccccaaaggcucuuuucagagccaccagaauu

SEQ ID NO: 13010 - RNA, 4021 nt, Artificial Sequence
  SARS-CoV-2/pangolin/Guangxi/P5E/2017__EPI_ISL_410541 spike protein mRNA human (1-1267)
aggagaaagcuuaccauguucguguuucuguucguccucccccuuguuagcucccagugcgugaaccugaccacaagaacuggcaucccuccaggguacacaaauucuucaaccaggggaguauauuacccggacaagguguuucggaguagcauuuugcacuuaacacaagaucuguuccuacccuuuuucuccaacgucacuugguuuaauaccauaacauaucaggguggcucuaaaaaguucgacaacccugugcucccauuuaaugaugggguuuacuucgccucgaccgagaaaucaaacaucauucgcggauggaucuuuggcacuacacuggacgcucgaacccagagccuucugauugugaauaacgcaacgaaugucgugaucaagguaugugaguuccaguuuugcacugaucccuucuuggguguuuauuaccauaacaauaacaaaaccuggguggaaaaugaguuccgugucuauaguuccgccaacaauuguacauuugaauacauaucucaaccuuuccucauggaccuggaagggaagcagggaaacuuuaagaaccugagagaguucguguuuaaaaauguggauggcuacuucaagaucuauagcaaacacacuccaauugaccucgucagggauuuaccccggggcuuugcggcucuggagccucuuguugacuugccaaucgggauuaacaucacccgcuuccagacacugcuagcccuccauagauccuaccugaccccgggaaaacuugaaucagguuggacgacuggcgcagccgcuuauuacgugggguaucugcagcaaaggacauuuuugcucaguuacaaucagaacggaaccauaacugaugcaguagacugcagccuggaucccuuaucugagacaaaguguacccugaagucccucacgguggaaaagggcauuuaucagaccucaaauuuccggguccagccuacaaucagcauugugcgcuuuccaaacaucacuaaucuuugccccuucggugagguuuuuaacgccaguaaauucgcuucuguguacgccuggaaucgaaagagaaucuccaacugugucgcggacuacagcgugcuguauaauucgaccucuuucuccacauuuaaaugcuacgggguaucaccuacuaaguugaacgaccuauguuucaccaauguuuaugcagauaguuuuguggucaaaggagacgaggugaggcaaauugccccaggccagacaggcgucauagcugauuacaacuauaagcugcccgacgauuucaccgggugcgugaucgccuggaauagcguuaaacaggacgcacucacuggagauaacuacgguuaucuguaccggcuuuuucguaaguccaagcugaaaccguucgaacgcgacauuucuacggagaucuaccaagcuggcagcacaccuuguaacggacaggugggguugaauugcuauuacccccucgaaagauauggcuuucacccaaccacugguguaaacuaccagccuuucagggucgugguucugucauuugaguuacugaaugggcccgccaccgugugcggcccaaagcuaaguacaacccucgucaaagauaagugugugaacuucaauuuuaacggacugacuggcacagggguacuuacgaccuccaaaaagcaguucuugcccuuucaacaguucggacgggacauaagcgauacuacagacgcggugcgagacccucagacccuggaaauucucgauaucacaccaugcucuuucgguggcguuucagucaucacuccggggaccaauacgaguaaccagguggccgugcuguaucaagacgucaauuguaccgagguucccauggcaauucaugcugagcagcuuacgccugccuggcgcguguacagcgcuggagccaacguguuucagacuagagcaggcugccugguaggugccgaacacgucaauaacuccuaugagugugauaucccagugggggcuggcauuugcgcgucuuaccacucgaugagcuccuucaggucaguuaaucagcggaguauaaucgcauacaccaugucuuugggagccgaaaacagcguggcuuauuccaauaacucaauugccauccccacaaacuuuacuaucagcgucaccacggagauucucccugugucuaugacaaagaccuccguugacuguacuauguacauaugcggcgauaguaucgaauguagcaaucuguuacugcaauaugggucuuucugcacacagcuaaaccgcgcacucaccggaauugccguggagcaggacaaaaauacucaggagguauuugcucaagucaagcagaucuacaaaaccccacccauuaaggauuucgguggcuuuaacuucucccagauccugccggacccuucaaaaccaaguaagaggagcuuuauagaagaucuuuuguucaauaaggugacacuggccgacgcaggguuuaucaaacaauauggagauugucucggcgacauugcggcuagagaucugaucugcgcccagaaguucaacgguuuaacggugcugcccccucuuuugaccgacgagaugauugcacaguacacuucggcccuccuggcugggacaaucaccuccggcuggacauucggagccggcgcagcucuacagauacccuuugccaugcaaauggcguaucguuucaaugggauuggagucacucagaacguucuguacgaaaaucagaaacucaucgccaaccaguuuaauucugcuauuggcaagauccaagacagccugucaaguaccgcauccgcccuugguaaauugcaggaugugguaaaccagaaugcucaggcccugaacacguuagugaagcaacucucuagcaauuucggggcaauauccucaguccugaacgacauccuuagccggcuggauaagguggaggcggaaguucagauugaccgauugaucacaggaagacuccagagucugcaaaccuacgugacucagcagcuaauuagggccgcugagauccgcgccucugcaaaccuggcugccaccaaaauguccgagugcguccucggccagagcaagcggguggauuuuugugguaaaggcuaucaucugaugucguucccacaaucagcaccucacgggguuguguuucuucaugucacauacguacccgcccaggaaaagaauuucacuaccgcuccagcgauaugccacgagggaaaagcccacuuuccgagagaaggcguguucguuucuaacgggacacauugguuuauuacgcagaggaauuucuaugagccucagaucaucaccacugacaacacauuugugaguggauccugugaugucgugauuggcaucguaaauaacaccguguacgaccccuugcaaccagagcuggauagcuucaaggaagaguuagacaaauauuucaagaaucacacuucucccgaugucgaccucggugauauuagcgggauaaacgcauccguugugaauauccagaaggaaauugaccgccugaacgagguggcuaaaaaucuuaacgaaucacugaucgaccuacaggagcucggaaaguacgagcaguauauuaaauggccuugguacaucuggcugggcuuuauagccgguuugaucgccauuaucauggucacaauuaugcugugcuguaugaccaguugcuguagcugcuuaaagggcuguugcucuuguggguccugcugcaaauucgaugaagacgauucagagccagugcucaagggaguuaagcugcauuacacgugaggacuaguuauaagacugacuagcccgaugggccucccaacgggcccuccuccccuccuugcaccgagauuaauaaaaaaaaaaaaaaaaaaaaaaaaaaaaaaaaaaaaaaaaaaaaaaaaaaaaaaaaaaaaaaaaugcaucccccccccccccccccccccccccccccccaaaggcucuuuucagagccaccagaauu

SEQ ID NO: 13011 - RNA, 4015 nt, Artificial Sequence
  SARS-CoV-2/pangolin/Guangxi/P1E/2017__EPI_ISL_410539 spike protein mRNA human (1-1265)
aggagaaagcuuaccauguucguguuucuguucguccucccccuuguuagcucccagugcgugaaccugaccacaagaacuggcauccaaccuggguacaccaauucuucaacgaggggaguauauuacccagacaagguguuucggaguagcauuuugcacuuaacacaggaucuguuccuaccguuuuucuccaacgucacuugguuuaauaccauaaacuaucaggguggcuucaagaaguuugacaaucccgugcucccuuucaacgaugggguuuacuuugccucuacagagaaaucgaauaucauucgcggauggaucuucggcaccacucuggacgcucgaacacagucacuucugauugugaacaaugcaaccaacgucgugaucaagguaugugaauuucaauucugcacggauccauucuuggguguuuauuaccauaauaacaauaaaacuuggguggagaacgaauuucgugucuauagcagugccaauaacuguaccuucgaguacauaucccagcccuuucucauggaccuggaagggaagcagggaaacuucaagaaucugagagaguuuguguucaaaaacguggauggcuacuuuaagaucuauucuaaacacacaccuauugaccucgucagggauuuaccacggggcuucgcggcucuggagccccuuguugacuugccuaucgggauuaauaucacucgcuuucagacccugcuagcccuccauagaagcuaccugacaccaggaaaacuugaauccgguuggaccacgggcgcagccgcuuauuacgugggguaucugcaacagaggacuuucuugcucucauacaaccagaauggaacaauaaccgaugcaguagacugcagucuggauccguuaagcgagacuaaguguacacugaagucucucaccguggaaaagggcauuuaucagacguccaacuuucggguccaacccaccaucucaauugugcgcuucccuaauaucacaaaccuuugcccauuuggugagguuuucaaugccagcaaauucgcuaguguguacgccuggaaccgaaagagaaucucuaauugugucgcggacuacuccgugcuguauaacagcacuucguuuucuaccuucaaaugcuacgggguaucccccacaaaguugaaugaccuauguuuuacuaacguuuaugcagauucauucguggucaaaggagacgaggugaggcagauugccccuggccagaccggcgucauagcugauuacaauuauaagcugccagacgauuuuacagggugcgugaucgccuggaacaguguuaaacaagacgcacucaccggagguaacuaccuguaucggcuuuuccguaagagcaagcugaaacccuuugaacgcgauauuuccacugagaucuaccaggcuggcucuacgccguguaauggacaggugggguugaacugcuacuauccucucgaaagauacggcuuccaccccacaaccgguguaaauuaucagccauuuagggucgugguucugagcuucgaguuacugaacgggccugccacugugugcggccccaagcuaucaaccacacucgucaaagacaagugugugaauuuuaacuucaauggacugaccggcacugggguacuuacaacgaguaaaaagcaauuuuugccauuccagcaguucggacgggauauauccgacaccacugaugcggugcgagacccccagacacuggaaauucucgacaucaccccuugcagcuuugguggcguuucugucaucacaccagggacuaacaccucaaaucaaguggccgugcuguaccaggaugucaacuguacggagguuccgauggcaauucaugcugagcagcuuacccccgccuggcgcguguauagugcuggagccaauguguuccagacaagagcaggcugccugguaggugccgaacacgucaacaauagcuacgagugugacaucccugugggggcuggcauuugcgcguccuaucacucuaugucgagcuugagguccguuaaccaacggucaauaaucgcauacacuaugagucucggagccgaaaauucuguggcuuacagcaacaacuccauugccaucccaaccaauuuuacaaucucagucacuaccgagauucugcccgugagcaugacgaagacaucuguugauuguaccauguauauaugcggcgacuccaucgaauguaguaacuuacugcuacaguacgggagcuucugcacucagcucaaucgcgcacugacaggaauugccguggagcaggauaaaaacacccaagagguauuugcucaggucaagcagaucuauaaaacuccuccaauuaaggacuucgguggcuuuaauuucucucaaauccuucccgauccguccaaaccuucaaagagaaguuuuauagaagacuugcuguucaacaaggugacccucgccgaugcaggguuuaucaaacaguacggagacugucugggcgauauugcggcuagggacuuaaucugcgcccagaaguucaauggucugacagugcuuccacccuugcucacggaugagaugauugcacaguauaccagcgcccugcuagcugggacuaucacaucgggcuggaccuucggagccggcgcagcucugcaaauaccuuuugccaugcagauggcguaccguuucaacgggauuggagucacacagaauguucucuaugaaaaccagaaacugaucgccaaucaauuuaacuccgcuauuggcaagauccaggacucucuuagcucaacugcaagugccuuggguaaacugcaggacgugguaaaucagaacgcucaagccuuaaauacccucgugaagcagcuguccucuaacuucggggcaauaagcuccguccuuaacgauauccugucacgguuggacaagguggaggcggaaguucagauugaucgacucaucacgggaagacugcaaagccuacagacauacgugacccagcagcugauuagggccgcugagauccgcgccagugcaaaucucgcugccacuaaaaugucugagugcguccugggccaauccaagcggguggacuuuugugguaaaggcuaccaucuuaugagcuucccccagucggcaccacacgggguuguguuuuugcaugucaccuauguaccugcccaggaaaagaacuucacaacugcucccgcgauaugccacgagggaaaagcccacuuuccaagagaaggcguguucguuucaaaugggacccauugguuuauuacacagaggaacuucuacgagccgcaaaucaucacgaccgauaauacuuuugugucuggaaguugugacgucgugauuggcaucguaaacaauacaguguaugauccucugcagcccgaguuagacuccuucaaggaggaacucgauaaauacuucaagaaccacaccagcccagacgucgaucugggugacauuucugggauaaaugcaagcguugugaacauccagaaggaaauugaucgccuuaaugagguggcuaaaaaccugaaugaaucccuaaucgaccuccaggagcugggaaaguaugagcaauacauuaaauggcccugguauaucugguugggcuuuauagccggucugaucgccauuaucauggucacuauuauguuaugcuguaugacaucaugcuguaguugccucaagggcuguugcagcugugggucuugcugcaaauucgacgaagaugacuccgagccugugcugaagggaguuaaacuucauuacaccugaggacuaguuauaagacugacuagcccgaugggccucccaacgggcccuccuccccuccuugcaccgagauuaauaaaaaaaaaaaaaaaaaaaaaaaaaaaaaaaaaaaaaaaaaaaaaaaaaaaaaaaaaaaaaaaaugcaucccccccccccccccccccccccccccccccaaaggcucuuuucagagccaccagaauu

SEQ ID NO: 13012 - RNA, 4039 nt, Artificial Sequence
  SARS-CoV-2/Wuhan/WIV05/2019__EPI_ISL_402128 spike protein mRNA gc mod (1-1273)
aggagaaagcuuaccauguucguguuucuggugcugcugccccugguguccagccagugugugaaccugaccaccagaacacagcugccuccagccuacaccaacagcuucaccagaggcguguacuaccccgacaagguguucagauccagcgugcugcacucuacccaggaccuguuccugccuuucuucagcaacgugaccugguuccacgccauccacguguccggcaccaauggcaccaagagauucgacaaccccgugcugcccuucaacgacgggguguacuuugccagcaccgagaaguccaacaucaucagaggcuggaucuucggcaccacacuggacagcaagacccagagccugcugaucgugaacaacgccaccaacguggucaucaaagugugcgaguuccaguucugcaacgaccccuuccugggcgucuacuaccacaagaacaacaagagcuggauggaaagcgaguuccggguguacagcagcgccaacaacugcaccuucgaguacgugucccagccuuuccugauggaccuggaaggcaagcagggcaacuucaagaaccugcgcgaguucguguucaagaacaucgacggcuacuucaaaaucuacagcaagcacaccccuaucaaccucgugcgggaucugccucagggcuucucugcucuggaaccccugguggaucugcccaucggcaucaacaucacccgguuucagacacugcuggcccugcacagaagcuaccugacaccuggcgauagcagcagcggauggacagcuggugccgccgcuuacuaugugggcuaccugcagccuagaaccuuccugcugaaguacaacgagaacggcaccaucaccgacgccguggauugugcucuggauccucugagcgagacaaagugcacccugaaguccuucaccguggaaaagggcaucuaccagaccagcaacuuccgggugcagcccaccgaauccaucgugcgguuccccaauaucaccaaucugugccccuucggcgagguguucaaugccaccagauucgccucuguguacgccuggaaccggaagcggaucagcaauugcguggccgacuacuccgugcuguacaacuccgccagcuucagcaccuucaagugcuacggcguguccccuaccaagcugaacgaccugugcuucacaaacguguacgccgacagcuucgugauccggggagaugaagugcggcagauugccccuggacagacaggcaagaucgccgacuacaacuacaagcugcccgacgacuucaccggcugugugauugccuggaacagcaacaaccuggacuccaaagucggcggcaacuacaauuaccuguaccggcuguuccggaaguccaaucugaagcccuucgagcgggacaucagcaccgaaaucuaucaggccggcagcaccccuugcaacggcguggaaggcuucaacugcuacuucccacugcaguccuacggcuuucagcccacaaauggcgugggcuaucagcccuacagagugguggugcugagcuucgaacugcugcaugcuccugccacagugugcggcccuaagaaaagcaccaaucucgugaagaacaaaugcgugaacuucaacuucaacggccugaccggcaccggcgugcugacagagagcaacaagaaguuccugccauuccagcaguuuggccgggauaucgccgauaccacagacgccguuagagauccccagacacuggaaauccuggacaucaccccaugcagcuucggcggagugucugugaucaccccuggcaccaacaccagcaaucagguggcagugcuguaccaggacgugaacuguaccgaagugcccguggccauucacgccgaucagcugacaccuacauggcggguguacuccaccggcagcaauguguuucagaccagagccggcugucugaucggagccgagcacgugaacaauagcuacgagugcgacauccccaucggcgcuggcaucugugccagcuaccagacacagacaaacagccccagacgggcuagaagcguggccagccagagcaucauugccuacacaaugucucugggcgccgagaacagcguggccuacuccaacaacucuaucgcuauccccaccaacuucaccaucagcgugaccaccgagauccugccuguguccaugaccaagaccagcguggacugcaccauguacaucugcggcgauuccaccgagugcuccaaccugcugcugcaguacggcagcuucugcacccagcugaauagagcccugacagggaucgccguggaacaggacaagaacacccaagagguguucgcccaagugaagcaaaucuacaagaccccuccuaucaaggacuucggcggcuucaauuucagccagauucugcccgauccuagcaagcccagcaagcggagcuucaucgaggaccugcuguucaacaaagugacacuggccgacgccggcuucaucaagcaguauggcgauugucugggcgacauugccgccagggaucugauuugcgcccagaaguuuaacggacugacagugcugccuccucugcugaccgaugagaugaucgcccaguacacaucugcccugcuggccggcacaaucacaagcggcuggacauuuggagcuggcgccgcucugcagauccccuuugcuaugcagauggccuaccgguucaacggcaucggagugacccagaaugugcuguacgagaaccagaagcugaucgccaaccaguucaacagcgccaucggcaagauccaggacagccugagcagcacagcaagcgcccugggaaagcugcaggacguggucaaccagaaugcccaggcacugaacacccuggucaagcagcuguccuccaacuucggcgccaucagcucugugcugaacgauauccugagcagacuggacaaggucgaggccgaggugcagaucgacagacugaucacaggcagacugcagagccuccagacauacgugacccagcagcugaucagagccgccgagauuagagccucugccaaucuggccgccaccaagaugucugagugugugcugggccagagcaagagaguggacuuuugcggcaagggcuaccaccugaugagcuucccucagucugccccucacggcgugguguuucugcacgugacauaugugcccgcucaagagaagaauuucaccaccgcuccagccaucugccacgacggcaaagcccacuuuccuagagaaggcguguucguguccaacggcacccauugguucgugacacagcggaacuucuacgagccccagaucaucaccaccgacaacaccuucgugucuggcaacugcgacguugugaucggcauugugaacaauaccguguacgacccucugcagcccgagcuggacagcuucaaagaggaacuggacaaguacuuuaagaaccacacaagccccgacguggaccugggcgauaucagcggaaucaaugccagcgucgugaacauccagaaagagaucgaccggcugaacgagguggccaagaaucugaacgagagccugaucgaccugcaagaacuggggaaguacgagcaguacaucaaguggcccugguacaucuggcugggcuuuaucgccggacugauugccaucgugauggucacaaucaugcuguguugcaugaccagcugcuguagcugccugaagggcuguuguagcuguggcagcugcugcaaguucgacgaggacgauucugagcccgugcugaagggcgugaaacugcacuacaccugaggacuaguuauaagacugacuagcccgaugggccucccaacgggcccuccuccccuccuugcaccgagauuaauaaaaaaaaaaaaaaaaaaaaaaaaaaaaaaaaaaaaaaaaaaaaaaaaaaaaaaaaaaaaaaaaugcaucccccccccccccccccccccccccccccccaaaggcucuuuucagagccaccagaauu

SEQ ID NO: 13013 - RNA, 4039 nt, Artificial Sequence; identical to SEQ ID NO: 165
  SARS-CoV-2/Wuhan/WIV05/2019__EPI_ISL_402128 spike protein mRNA gc mod (1-1273)(K986P_V987P) R9519

SEQ ID NO: 13014 - RNA, 4039 nt, Artificial Sequence
  SARS-CoV-2/Wuhan/WIV05/2019__EPI_ISL_402128 spike protein mRNA gc mod (1-1273)(K986P_V987P_T887WN_A1020W)
aggagaaagcuuaccauguucguguuucuggugcugcugccccugguguccagccagugugugaaccugaccaccagaacacagcugccuccagccuacaccaacagcuucaccagaggcguguacuaccccgacaagguguucagauccagcgugcugcacucuacccaggaccuguuccugccuuucuucagcaacgugaccugguuccacgccauccacguguccggcaccaauggcaccaagagauucgacaaccccgugcugcccuucaacgacgggguguacuuugccagcaccgagaaguccaacaucaucagaggcuggaucuucggcaccacacuggacagcaagacccagagccugcugaucgugaacaacgccaccaacguggucaucaaagugugcgaguuccaguucugcaacgaccccuuccugggcgucuacuaccacaagaacaacaagagcuggauggaaagcgaguuccggguguacagcagcgccaacaacugcaccuucgaguacgugucccagccuuuccugauggaccuggaaggcaagcagggcaacuucaagaaccugcgcgaguucguguucaagaacaucgacggcuacuucaaaaucuacagcaagcacaccccuaucaaccucgugcgggaucugccucagggcuucucugcucuggaaccccugguggaucugcccaucggcaucaacaucacccgguuucagacacugcuggcccugcacagaagcuaccugacaccuggcgauagcagcagcggauggacagcuggugccgccgcuuacuaugugggcuaccugcagccuagaaccuuccugcugaaguacaacgagaacggcaccaucaccgacgccguggauugugcucuggauccucugagcgagacaaagugcacccugaaguccuucaccguggaaaagggcaucuaccagaccagcaacuuccgggugcagcccaccgaauccaucgugcgguuccccaauaucaccaaucugugccccuucggcgagguguucaaugccaccagauucgccucuguguacgccuggaaccggaagcggaucagcaauugcguggccgacuacuccgugcuguacaacuccgccagcuucagcaccuucaagugcuacggcguguccccuaccaagcugaacgaccugugcuucacaaacguguacgccgacagcuucgugauccggggagaugaagugcggcagauugccccuggacagacaggcaagaucgccgacuacaacuacaagcugcccgacgacuucaccggcugugugauugccuggaacagcaacaaccuggacuccaaagucggcggcaacuacaauuaccuguaccggcuguuccggaaguccaaucugaagcccuucgagcgggacaucagcaccgaaaucuaucaggccggcagcaccccuugcaacggcguggaaggcuucaacugcuacuucccacugcaguccuacggcuuucagcccacaaauggcgugggcuaucagcccuacagagugguggugcugagcuucgaacugcugcaugcuccugccacagugugcggcccuaagaaaagcaccaaucucgugaagaacaaaugcgugaacuucaacuucaacggccugaccggcaccggcgugcugacagagagcaacaagaaguuccugccauuccagcaguuuggccgggauaucgccgauaccacagacgccguuagagauccccagacacuggaaauccuggacaucaccccaugcagcuucggcggagugucugugaucaccccuggcaccaacaccagcaaucagguggcagugcuguaccaggacgugaacuguaccgaagugcccguggccauucacgccgaucagcugacaccuacauggcggguguacuccaccggcagcaauguguuucagaccagagccggcugucugaucggagccgagcacgugaacaauagcuacgagugcgacauccccaucggcgcuggcaucugugccagcuaccagacacagacaaacagccccagacgggcuagaagcguggccagccagagcaucauugccuacacaaugucucugggcgccgagaacagcguggccuacuccaacaacucuaucgcuauccccaccaacuucaccaucagcgugaccaccgagauccugccuguguccaugaccaagaccagcguggacugcaccauguacaucugcggcgauuccaccgagugcuccaaccugcugcugcaguacggcagcuucugcacccagcugaauagagcccugacagggaucgccguggaacaggacaagaacacccaagagguguucgcccaagugaagcaaaucuacaagaccccuccuaucaaggacuucggcggcuucaauuucagccagauucugcccgauccuagcaagcccagcaagcggagcuucaucgaggaccugcuguucaacaaagugacacuggccgacgccggcuucaucaagcaguauggcgauugucugggcgacauugccgccagggaucugauuugcgcccagaaguuuaacggacugacagugcugccuccucugcugaccgaugagaugaucgcccaguacacaucugcccugcuggccggcacaaucacaagcggcuggugguuuggagcuggcgccgcucugcagauccccuuugcuaugcagauggccuaccgguucaacggcaucggagugacccagaaugugcuguacgagaaccagaagcugaucgccaaccaguucaacagcgccaucggcaagauccaggacagccugagcagcacagcaagcgcccugggaaagcugcaggacguggucaaccagaaugcccaggcacugaacacccuggucaagcagcuguccuccaacuucggcgccaucagcucugugcugaacgauauccugagcagacuggacccuccugaggccgaggugcagaucgacagacugaucacaggcagacugcagagccuccagacauacgugacccagcagcugaucagagccgccgagauuagauggucugccaaucuggccgccaccaagaugucugagugugugcugggccagagcaagagaguggacuuuugcggcaagggcuaccaccugaugagcuucccucagucugccccucacggcgugguguuucugcacgugacauaugugcccgcucaagagaagaauuucaccaccgcuccagccaucugccacgacggcaaagcccacuuuccuagagaaggcguguucguguccaacggcacccauugguucgugacacagcggaacuucuacgagccccagaucaucaccaccgacaacaccuucgugucuggcaacugcgacguugugaucggcauugugaacaauaccguguacgacccucugcagcccgagcuggacagcuucaaagaggaacuggacaaguacuuuaagaaccacacaagccccgacguggaccugggcgauaucagcggaaucaaugccagcgucgugaacauccagaaagagaucgaccggcugaacgagguggccaagaaucugaacgagagccugaucgaccugcaagaacuggggaaguacgagcaguacaucaaguggcccugguacaucuggcugggcuuuaucgccggacugauugccaucgugauggucacaaucaugcuguguugcaugaccagcugcuguagcugccugaagggcuguuguagcuguggcagcugcugcaaguucgacgaggacgauucugagcccgugcugaagggcgugaaacugcacuacaccugaggacuaguuauaagacugacuagcccgaugggccucccaacgggcccuccuccccuccuugcaccgagauuaauaaaaaaaaaaaaaaaaaaaaaaaaaaaaaaaaaaaaaaaaaaaaaaaaaaaaaaaaaaaaaaaaugcaucccccccccccccccccccccccccccccccaaaggcucuuuucagagccaccagaauu

SEQ ID NO: 13015 - RNA, 4039 nt, Artificial Sequence
  SARS-CoV-2/Wuhan/WIV05/2019__EPI_ISL_402128 spike protein mRNA gc mod (1-1273)(K986P_V987P_P1069F)
aggagaaagcuuaccauguucguguuucuggugcugcugccccugguguccagccagugugugaaccugaccaccagaacacagcugccuccagccuacaccaacagcuucaccagaggcguguacuaccccgacaagguguucagauccagcgugcugcacucuacccaggaccuguuccugccuuucuucagcaacgugaccugguuccacgccauccacguguccggcaccaauggcaccaagagauucgacaaccccgugcugcccuucaacgacgggguguacuuugccagcaccgagaaguccaacaucaucagaggcuggaucuucggcaccacacuggacagcaagacccagagccugcugaucgugaacaacgccaccaacguggucaucaaagugugcgaguuccaguucugcaacgaccccuuccugggcgucuacuaccacaagaacaacaagagcuggauggaaagcgaguuccggguguacagcagcgccaacaacugcaccuucgaguacgugucccagccuuuccugauggaccuggaaggcaagcagggcaacuucaagaaccugcgcgaguucguguucaagaacaucgacggcuacuucaaaaucuacagcaagcacaccccuaucaaccucgugcgggaucugccucagggcuucucugcucuggaaccccugguggaucugcccaucggcaucaacaucacccgguuucagacacugcuggcccugcacagaagcuaccugacaccuggcgauagcagcagcggauggacagcuggugccgccgcuuacuaugugggcuaccugcagccuagaaccuuccugcugaaguacaacgagaacggcaccaucaccgacgccguggauugugcucuggauccucugagcgagacaaagugcacccugaaguccuucaccguggaaaagggcaucuaccagaccagcaacuuccgggugcagcccaccgaauccaucgugcgguuccccaauaucaccaaucugugccccuucggcgagguguucaaugccaccagauucgccucuguguacgccuggaaccggaagcggaucagcaauugcguggccgacuacuccgugcuguacaacuccgccagcuucagcaccuucaagugcuacggcguguccccuaccaagcugaacgaccugugcuucacaaacguguacgccgacagcuucgugauccggggagaugaagugcggcagauugccccuggacagacaggcaagaucgccgacuacaacuacaagcugcccgacgacuucaccggcugugugauugccuggaacagcaacaaccuggacuccaaagucggcggcaacuacaauuaccuguaccggcuguuccggaaguccaaucugaagcccuucgagcgggacaucagcaccgaaaucuaucaggccggcagcaccccuugcaacggcguggaaggcuucaacugcuacuucccacugcaguccuacggcuuucagcccacaaauggcgugggcuaucagcccuacagagugguggugcugagcuucgaacugcugcaugcuccugccacagugugcggcccuaagaaaagcaccaaucucgugaagaacaaaugcgugaacuucaacuucaacggccugaccggcaccggcgugcugacagagagcaacaagaaguuccugccauuccagcaguuuggccgggauaucgccgauaccacagacgccguuagagauccccagacacuggaaauccuggacaucaccccaugcagcuucggcggagugucugugaucaccccuggcaccaacaccagcaaucagguggcagugcuguaccaggacgugaacuguaccgaagugcccguggccauucacgccgaucagcugacaccuacauggcggguguacuccaccggcagcaauguguuucagaccagagccggcugucugaucggagccgagcacgugaacaauagcuacgagugcgacauccccaucggcgcuggcaucugugccagcuaccagacacagacaaacagccccagacgggcuagaagcguggccagccagagcaucauugccuacacaaugucucugggcgccgagaacagcguggccuacuccaacaacucuaucgcuauccccaccaacuucaccaucagcgugaccaccgagauccugccuguguccaugaccaagaccagcguggacugcaccauguacaucugcggcgauuccaccgagugcuccaaccugcugcugcaguacggcagcuucugcacccagcugaauagagcccugacagggaucgccguggaacaggacaagaacacccaagagguguucgcccaagugaagcaaaucuacaagaccccuccuaucaaggacuucggcggcuucaauuucagccagauucugcccgauccuagcaagcccagcaagcggagcuucaucgaggaccugcuguucaacaaagugacacuggccgacgccggcuucaucaagcaguauggcgauugucugggcgacauugccgccagggaucugauuugcgcccagaaguuuaacggacugacagugcugccuccucugcugaccgaugagaugaucgcccaguacacaucugcccugcuggccggcacaaucacaagcggcuggacauuuggagcuggcgccgcucugcagauccccuuugcuaugcagauggccuaccgguucaacggcaucggagugacccagaaugugcuguacgagaaccagaagcugaucgccaaccaguucaacagcgccaucggcaagauccaggacagccugagcagcacagcaagcgcccugggaaagcugcaggacguggucaaccagaaugcccaggcacugaacacccuggucaagcagcuguccuccaacuucggcgccaucagcucugugcugaacgauauccugagcagacuggacccuccugaggccgaggugcagaucgacagacugaucacaggcagacugcagagccuccagacauacgugacccagcagcugaucagagccgccgagauuagagccucugccaaucuggccgccaccaagaugucugagugugugcugggccagagcaagagaguggacuuuugcggcaagggcuaccaccugaugagcuucccucagucugccccucacggcgugguguuucugcacgugacauauguguucgcucaagagaagaauuucaccaccgcuccagccaucugccacgacggcaaagcccacuuuccuagagaaggcguguucguguccaacggcacccauugguucgugacacagcggaacuucuacgagccccagaucaucaccaccgacaacaccuucgugucuggcaacugcgacguugugaucggcauugugaacaauaccguguacgacccucugcagcccgagcuggacagcuucaaagaggaacuggacaaguacuuuaagaaccacacaagccccgacguggaccugggcgauaucagcggaaucaaugccagcgucgugaacauccagaaagagaucgaccggcugaacgagguggccaagaaucugaacgagagccugaucgaccugcaagaacuggggaaguacgagcaguacaucaaguggcccugguacaucuggcugggcuuuaucgccggacugauugccaucgugauggucacaaucaugcuguguugcaugaccagcugcuguagcugccugaagggcuguuguagcuguggcagcugcugcaaguucgacgaggacgauucugagcccgugcugaagggcgugaaacugcacuacaccugaggacuaguuauaagacugacuagcccgaugggccucccaacgggcccuccuccccuccuugcaccgagauuaauaaaaaaaaaaaaaaaaaaaaaaaaaaaaaaaaaaaaaaaaaaaaaaaaaaaaaaaaaaaaaaaaugcaucccccccccccccccccccccccccccccccaaaggcucuuuucagagccaccagaauu

SEQ ID NO: 13016 - RNA, 4039 nt, Artificial Sequence
  SARS-CoV-2/Wuhan/WIV05/2019__EPI_ISL_402128 spike protein mRNA gc mod (1-1273)(K986P_V987P_ H1048Q_H1064N_ H1083N_H1101N)
aggagaaagcuuaccauguucguguuucuggugcugcugccccugguguccagccagugugugaaccugaccaccagaacacagcugccuccagccuacaccaacagcuucaccagaggcguguacuaccccgacaagguguucagauccagcgugcugcacucuacccaggaccuguuccugccuuucuucagcaacgugaccugguuccacgccauccacguguccggcaccaauggcaccaagagauucgacaaccccgugcugcccuucaacgacgggguguacuuugccagcaccgagaaguccaacaucaucagaggcuggaucuucggcaccacacuggacagcaagacccagagccugcugaucgugaacaacgccaccaacguggucaucaaagugugcgaguuccaguucugcaacgaccccuuccugggcgucuacuaccacaagaacaacaagagcuggauggaaagcgaguuccggguguacagcagcgccaacaacugcaccuucgaguacgugucccagccuuuccugauggaccuggaaggcaagcagggcaacuucaagaaccugcgcgaguucguguucaagaacaucgacggcuacuucaaaaucuacagcaagcacaccccuaucaaccucgugcgggaucugccucagggcuucucugcucuggaaccccugguggaucugcccaucggcaucaacaucacccgguuucagacacugcuggcccugcacagaagcuaccugacaccuggcgauagcagcagcggauggacagcuggugccgccgcuuacuaugugggcuaccugcagccuagaaccuuccugcugaaguacaacgagaacggcaccaucaccgacgccguggauugugcucuggauccucugagcgagacaaagugcacccugaaguccuucaccguggaaaagggcaucuaccagaccagcaacuuccgggugcagcccaccgaauccaucgugcgguuccccaauaucaccaaucugugccccuucggcgagguguucaaugccaccagauucgccucuguguacgccuggaaccggaagcggaucagcaauugcguggccgacuacuccgugcuguacaacuccgccagcuucagcaccuucaagugcuacggcguguccccuaccaagcugaacgaccugugcuucacaaacguguacgccgacagcuucgugauccggggagaugaagugcggcagauugccccuggacagacaggcaagaucgccgacuacaacuacaagcugcccgacgacuucaccggcugugugauugccuggaacagcaacaaccuggacuccaaagucggcggcaacuacaauuaccuguaccggcuguuccggaaguccaaucugaagcccuucgagcgggacaucagcaccgaaaucuaucaggccggcagcaccccuugcaacggcguggaaggcuucaacugcuacuucccacugcaguccuacggcuuucagcccacaaauggcgugggcuaucagcccuacagagugguggugcugagcuucgaacugcugcaugcuccugccacagugugcggcccuaagaaaagcaccaaucucgugaagaacaaaugcgugaacuucaacuucaacggccugaccggcaccggcgugcugacagagagcaacaagaaguuccugccauuccagcaguuuggccgggauaucgccgauaccacagacgccguuagagauccccagacacuggaaauccuggacaucaccccaugcagcuucggcggagugucugugaucaccccuggcaccaacaccagcaaucagguggcagugcuguaccaggacgugaacuguaccgaagugcccguggccauucacgccgaucagcugacaccuacauggcggguguacuccaccggcagcaauguguuucagaccagagccggcugucugaucggagccgagcacgugaacaauagcuacgagugcgacauccccaucggcgcuggcaucugugccagcuaccagacacagacaaacagccccagacgggcuagaagcguggccagccagagcaucauugccuacacaaugucucugggcgccgagaacagcguggccuacuccaacaacucuaucgcuauccccaccaacuucaccaucagcgugaccaccgagauccugccuguguccaugaccaagaccagcguggacugcaccauguacaucugcggcgauuccaccgagugcuccaaccugcugcugcaguacggcagcuucugcacccagcugaauagagcccugacagggaucgccguggaacaggacaagaacacccaagagguguucgcccaagugaagcaaaucuacaagaccccuccuaucaaggacuucggcggcuucaauuucagccagauucugcccgauccuagcaagcccagcaagcggagcuucaucgaggaccugcuguucaacaaagugacacuggccgacgccggcuucaucaagcaguauggcgauugucugggcgacauugccgccagggaucugauuugcgcccagaaguuuaacggacugacagugcugccuccucugcugaccgaugagaugaucgcccaguacacaucugcccugcuggccggcacaaucacaagcggcuggacauuuggagcuggcgccgcucugcagauccccuuugcuaugcagauggccuaccgguucaacggcaucggagugacccagaaugugcuguacgagaaccagaagcugaucgccaaccaguucaacagcgccaucggcaagauccaggacagccugagcagcacagcaagcgcccugggaaagcugcaggacguggucaaccagaaugcccaggcacugaacacccuggucaagcagcuguccuccaacuucggcgccaucagcucugugcugaacgauauccugagcagacuggacccuccugaggccgaggugcagaucgacagacugaucacaggcagacugcagagccuccagacauacgugacccagcagcugaucagagccgccgagauuagagccucugccaaucuggccgccaccaagaugucugagugugugcugggccagagcaagagaguggacuuuugcggcaagggcuaccagcugaugagcuucccucagucugccccucacggcgugguguuucugaacgugacauaugugcccgcucaagagaagaauuucaccaccgcuccagccaucugcaacgacggcaaagcccacuuuccuagagaaggcguguucguguccaacggcaccaacugguucgugacacagcggaacuucuacgagccccagaucaucaccaccgacaacaccuucgugucuggcaacugcgacguugugaucggcauugugaacaauaccguguacgacccucugcagcccgagcuggacagcuucaaagaggaacuggacaaguacuuuaagaaccacacaagccccgacguggaccugggcgauaucagcggaaucaaugccagcgucgugaacauccagaaagagaucgaccggcugaacgagguggccaagaaucugaacgagagccugaucgaccugcaagaacuggggaaguacgagcaguacaucaaguggcccugguacaucuggcugggcuuuaucgccggacugauugccaucgugauggucacaaucaugcuguguugcaugaccagcugcuguagcugccugaagggcuguuguagcuguggcagcugcugcaaguucgacgaggacgauucugagcccgugcugaagggcgugaaacugcacuacaccugaggacuaguuauaagacugacuagcccgaugggccucccaacgggcccuccuccccuccuugcaccgagauuaauaaaaaaaaaaaaaaaaaaaaaaaaaaaaaaaaaaaaaaaaaaaaaaaaaaaaaaaaaaaaaaaaugcaucccccccccccccccccccccccccccccccaaaggcucuuuucagagccaccagaauu

SEQ ID NO: 13017 - RNA, 4039 nt, Artificial Sequence
  SARS-CoV-2/Wuhan/WIV05/2019__EPI_ISL_402128 spike protein mRNA gc mod (1-1273)(I712C_T1077C)
aggagaaagcuuaccauguucguguuucuggugcugcugccccugguguccagccagugugugaaccugaccaccagaacacagcugccuccagccuacaccaacagcuucaccagaggcguguacuaccccgacaagguguucagauccagcgugcugcacucuacccaggaccuguuccugccuuucuucagcaacgugaccugguuccacgccauccacguguccggcaccaauggcaccaagagauucgacaaccccgugcugcccuucaacgacgggguguacuuugccagcaccgagaaguccaacaucaucagaggcuggaucuucggcaccacacuggacagcaagacccagagccugcugaucgugaacaacgccaccaacguggucaucaaagugugcgaguuccaguucugcaacgaccccuuccugggcgucuacuaccacaagaacaacaagagcuggauggaaagcgaguuccggguguacagcagcgccaacaacugcaccuucgaguacgugucccagccuuuccugauggaccuggaaggcaagcagggcaacuucaagaaccugcgcgaguucguguucaagaacaucgacggcuacuucaaaaucuacagcaagcacaccccuaucaaccucgugcgggaucugccucagggcuucucugcucuggaaccccugguggaucugcccaucggcaucaacaucacccgguuucagacacugcuggcccugcacagaagcuaccugacaccuggcgauagcagcagcggauggacagcuggugccgccgcuuacuaugugggcuaccugcagccuagaaccuuccugcugaaguacaacgagaacggcaccaucaccgacgccguggauugugcucuggauccucugagcgagacaaagugcacccugaaguccuucaccguggaaaagggcaucuaccagaccagcaacuuccgggugcagcccaccgaauccaucgugcgguuccccaauaucaccaaucugugccccuucggcgagguguucaaugccaccagauucgccucuguguacgccuggaaccggaagcggaucagcaauugcguggccgacuacuccgugcuguacaacuccgccagcuucagcaccuucaagugcuacggcguguccccuaccaagcugaacgaccugugcuucacaaacguguacgccgacagcuucgugauccggggagaugaagugcggcagauugccccuggacagacaggcaagaucgccgacuacaacuacaagcugcccgacgacuucaccggcugugugauugccuggaacagcaacaaccuggacuccaaagucggcggcaacuacaauuaccuguaccggcuguuccggaaguccaaucugaagcccuucgagcgggacaucagcaccgaaaucuaucaggccggcagcaccccuugcaacggcguggaaggcuucaacugcuacuucccacugcaguccuacggcuuucagcccacaaauggcgugggcuaucagcccuacagagugguggugcugagcuucgaacugcugcaugcuccugccacagugugcggcccuaagaaaagcaccaaucucgugaagaacaaaugcgugaacuucaacuucaacggccugaccggcaccggcgugcugacagagagcaacaagaaguuccugccauuccagcaguuuggccgggauaucgccgauaccacagacgccguuagagauccccagacacuggaaauccuggacaucaccccaugcagcuucggcggagugucugugaucaccccuggcaccaacaccagcaaucagguggcagugcuguaccaggacgugaacuguaccgaagugcccguggccauucacgccgaucagcugacaccuacauggcggguguacuccaccggcagcaauguguuucagaccagagccggcugucugaucggagccgagcacgugaacaauagcuacgagugcgacauccccaucggcgcuggcaucugugccagcuaccagacacagacaaacagccccagacgggcuagaagcguggccagccagagcaucauugccuacacaaugucucugggcgccgagaacagcguggccuacuccaacaacucuugcgcuauccccaccaacuucaccaucagcgugaccaccgagauccugccuguguccaugaccaagaccagcguggacugcaccauguacaucugcggcgauuccaccgagugcuccaaccugcugcugcaguacggcagcuucugcacccagcugaauagagcccugacagggaucgccguggaacaggacaagaacacccaagagguguucgcccaagugaagcaaaucuacaagaccccuccuaucaaggacuucggcggcuucaauuucagccagauucugcccgauccuagcaagcccagcaagcggagcuucaucgaggaccugcuguucaacaaagugacacuggccgacgccggcuucaucaagcaguauggcgauugucugggcgacauugccgccagggaucugauuugcgcccagaaguuuaacggacugacagugcugccuccucugcugaccgaugagaugaucgcccaguacacaucugcccugcuggccggcacaaucacaagcggcuggacauuuggagcuggcgccgcucugcagauccccuuugcuaugcagauggccuaccgguucaacggcaucggagugacccagaaugugcuguacgagaaccagaagcugaucgccaaccaguucaacagcgccaucggcaagauccaggacagccugagcagcacagcaagcgcccugggaaagcugcaggacguggucaaccagaaugcccaggcacugaacacccuggucaagcagcuguccuccaacuucggcgccaucagcucugugcugaacgauauccugagcagacuggacaaggucgaggccgaggugcagaucgacagacugaucacaggcagacugcagagccuccagacauacgugacccagcagcugaucagagccgccgagauuagagccucugccaaucuggccgccaccaagaugucugagugugugcugggccagagcaagagaguggacuuuugcggcaagggcuaccaccugaugagcuucccucagucugccccucacggcgugguguuucugcacgugacauaugugcccgcucaagagaagaauuucaccugugcuccagccaucugccacgacggcaaagcccacuuuccuagagaaggcguguucguguccaacggcacccauugguucgugacacagcggaacuucuacgagccccagaucaucaccaccgacaacaccuucgugucuggcaacugcgacguugugaucggcauugugaacaauaccguguacgacccucugcagcccgagcuggacagcuucaaagaggaacuggacaaguacuuuaagaaccacacaagccccgacguggaccugggcgauaucagcggaaucaaugccagcgucgugaacauccagaaagagaucgaccggcugaacgagguggccaagaaucugaacgagagccugaucgaccugcaagaacuggggaaguacgagcaguacaucaaguggcccugguacaucuggcugggcuuuaucgccggacugauugccaucgugauggucacaaucaugcuguguugcaugaccagcugcuguagcugccugaagggcuguuguagcuguggcagcugcugcaaguucgacgaggacgauucugagcccgugcugaagggcgugaaacugcacuacaccugaggacuaguuauaagacugacuagcccgaugggccucccaacgggcccuccuccccuccuugcaccgagauuaauaaaaaaaaaaaaaaaaaaaaaaaaaaaaaaaaaaaaaaaaaaaaaaaaaaaaaaaaaaaaaaaaugcaucccccccccccccccccccccccccccccccaaaggcucuuuucagagccaccagaauu

SEQ ID NO: 13018 - RNA, 4039 nt, Artificial Sequence
  SARS-CoV-2/Wuhan/WIV05/2019__EPI_ISL_402128 spike protein mRNA gc mod (1-1273)(I714C_Y1110C)
aggagaaagcuuaccauguucguguuucuggugcugcugccccugguguccagccagugugugaaccugaccaccagaacacagcugccuccagccuacaccaacagcuucaccagaggcguguacuaccccgacaagguguucagauccagcgugcugcacucuacccaggaccuguuccugccuuucuucagcaacgugaccugguuccacgccauccacguguccggcaccaauggcaccaagagauucgacaaccccgugcugcccuucaacgacgggguguacuuugccagcaccgagaaguccaacaucaucagaggcuggaucuucggcaccacacuggacagcaagacccagagccugcugaucgugaacaacgccaccaacguggucaucaaagugugcgaguuccaguucugcaacgaccccuuccugggcgucuacuaccacaagaacaacaagagcuggauggaaagcgaguuccggguguacagcagcgccaacaacugcaccuucgaguacgugucccagccuuuccugauggaccuggaaggcaagcagggcaacuucaagaaccugcgcgaguucguguucaagaacaucgacggcuacuucaaaaucuacagcaagcacaccccuaucaaccucgugcgggaucugccucagggcuucucugcucuggaaccccugguggaucugcccaucggcaucaacaucacccgguuucagacacugcuggcccugcacagaagcuaccugacaccuggcgauagcagcagcggauggacagcuggugccgccgcuuacuaugugggcuaccugcagccuagaaccuuccugcugaaguacaacgagaacggcaccaucaccgacgccguggauugugcucuggauccucugagcgagacaaagugcacccugaaguccuucaccguggaaaagggcaucuaccagaccagcaacuuccgggugcagcccaccgaauccaucgugcgguuccccaauaucaccaaucugugccccuucggcgagguguucaaugccaccagauucgccucuguguacgccuggaaccggaagcggaucagcaauugcguggccgacuacuccgugcuguacaacuccgccagcuucagcaccuucaagugcuacggcguguccccuaccaagcugaacgaccugugcuucacaaacguguacgccgacagcuucgugauccggggagaugaagugcggcagauugccccuggacagacaggcaagaucgccgacuacaacuacaagcugcccgacgacuucaccggcugugugauugccuggaacagcaacaaccuggacuccaaagucggcggcaacuacaauuaccuguaccggcuguuccggaaguccaaucugaagcccuucgagcgggacaucagcaccgaaaucuaucaggccggcagcaccccuugcaacggcguggaaggcuucaacugcuacuucccacugcaguccuacggcuuucagcccacaaauggcgugggcuaucagcccuacagagugguggugcugagcuucgaacugcugcaugcuccugccacagugugcggcccuaagaaaagcaccaaucucgugaagaacaaaugcgugaacuucaacuucaacggccugaccggcaccggcgugcugacagagagcaacaagaaguuccugccauuccagcaguuuggccgggauaucgccgauaccacagacgccguuagagauccccagacacuggaaauccuggacaucaccccaugcagcuucggcggagugucugugaucaccccuggcaccaacaccagcaaucagguggcagugcuguaccaggacgugaacuguaccgaagugcccguggccauucacgccgaucagcugacaccuacauggcggguguacuccaccggcagcaauguguuucagaccagagccggcugucugaucggagccgagcacgugaacaauagcuacgagugcgacauccccaucggcgcuggcaucugugccagcuaccagacacagacaaacagccccagacgggcuagaagcguggccagccagagcaucauugccuacacaaugucucugggcgccgagaacagcguggccuacuccaacaacucuaucgcuugccccaccaacuucaccaucagcgugaccaccgagauccugccuguguccaugaccaagaccagcguggacugcaccauguacaucugcggcgauuccaccgagugcuccaaccugcugcugcaguacggcagcuucugcacccagcugaauagagcccugacagggaucgccguggaacaggacaagaacacccaagagguguucgcccaagugaagcaaaucuacaagaccccuccuaucaaggacuucggcggcuucaauuucagccagauucugcccgauccuagcaagcccagcaagcggagcuucaucgaggaccugcuguucaacaaagugacacuggccgacgccggcuucaucaagcaguauggcgauugucugggcgacauugccgccagggaucugauuugcgcccagaaguuuaacggacugacagugcugccuccucugcugaccgaugagaugaucgcccaguacacaucugcccugcuggccggcacaaucacaagcggcuggacauuuggagcuggcgccgcucugcagauccccuuugcuaugcagauggccuaccgguucaacggcaucggagugacccagaaugugcuguacgagaaccagaagcugaucgccaaccaguucaacagcgccaucggcaagauccaggacagccugagcagcacagcaagcgcccugggaaagcugcaggacguggucaaccagaaugcccaggcacugaacacccuggucaagcagcuguccuccaacuucggcgccaucagcucugugcugaacgauauccugagcagacuggacaaggucgaggccgaggugcagaucgacagacugaucacaggcagacugcagagccuccagacauacgugacccagcagcugaucagagccgccgagauuagagccucugccaaucuggccgccaccaagaugucugagugugugcugggccagagcaagagaguggacuuuugcggcaagggcuaccaccugaugagcuucccucagucugccccucacggcgugguguuucugcacgugacauaugugcccgcucaagagaagaauuucaccaccgcuccagccaucugccacgacggcaaagcccacuuuccuagagaaggcguguucguguccaacggcacccauugguucgugacacagcggaacuucugugagccccagaucaucaccaccgacaacaccuucgugucuggcaacugcgacguugugaucggcauugugaacaauaccguguacgacccucugcagcccgagcuggacagcuucaaagaggaacuggacaaguacuuuaagaaccacacaagccccgacguggaccugggcgauaucagcggaaucaaugccagcgucgugaacauccagaaagagaucgaccggcugaacgagguggccaagaaucugaacgagagccugaucgaccugcaagaacuggggaaguacgagcaguacaucaaguggcccugguacaucuggcugggcuuuaucgccggacugauugccaucgugauggucacaaucaugcuguguugcaugaccagcugcuguagcugccugaagggcuguuguagcuguggcagcugcugcaaguucgacgaggacgauucugagcccgugcugaagggcgugaaacugcacuacaccugaggacuaguuauaagacugacuagcccgaugggccucccaacgggcccuccuccccuccuugcaccgagauuaauaaaaaaaaaaaaaaaaaaaaaaaaaaaaaaaaaaaaaaaaaaaaaaaaaaaaaaaaaaaaaaaaugcaucccccccccccccccccccccccccccccccaaaggcucuuuucagagccaccagaauu

SEQ ID NO: 13019 - RNA, 4039 nt, Artificial Sequence
  SARS-CoV-2/Wuhan/WIV05/2019__EPI_ISL_402128 spike protein mRNA gc mod (1-1273)(P715C_P1069C)
aggagaaagcuuaccauguucguguuucuggugcugcugccccugguguccagccagugugugaaccugaccaccagaacacagcugccuccagccuacaccaacagcuucaccagaggcguguacuaccccgacaagguguucagauccagcgugcugcacucuacccaggaccuguuccugccuuucuucagcaacgugaccugguuccacgccauccacguguccggcaccaauggcaccaagagauucgacaaccccgugcugcccuucaacgacgggguguacuuugccagcaccgagaaguccaacaucaucagaggcuggaucuucggcaccacacuggacagcaagacccagagccugcugaucgugaacaacgccaccaacguggucaucaaagugugcgaguuccaguucugcaacgaccccuuccugggcgucuacuaccacaagaacaacaagagcuggauggaaagcgaguuccggguguacagcagcgccaacaacugcaccuucgaguacgugucccagccuuuccugauggaccuggaaggcaagcagggcaacuucaagaaccugcgcgaguucguguucaagaacaucgacggcuacuucaaaaucuacagcaagcacaccccuaucaaccucgugcgggaucugccucagggcuucucugcucuggaaccccugguggaucugcccaucggcaucaacaucacccgguuucagacacugcuggcccugcacagaagcuaccugacaccuggcgauagcagcagcggauggacagcuggugccgccgcuuacuaugugggcuaccugcagccuagaaccuuccugcugaaguacaacgagaacggcaccaucaccgacgccguggauugugcucuggauccucugagcgagacaaagugcacccugaaguccuucaccguggaaaagggcaucuaccagaccagcaacuuccgggugcagcccaccgaauccaucgugcgguuccccaauaucaccaaucugugccccuucggcgagguguucaaugccaccagauucgccucuguguacgccuggaaccggaagcggaucagcaauugcguggccgacuacuccgugcuguacaacuccgccagcuucagcaccuucaagugcuacggcguguccccuaccaagcugaacgaccugugcuucacaaacguguacgccgacagcuucgugauccggggagaugaagugcggcagauugccccuggacagacaggcaagaucgccgacuacaacuacaagcugcccgacgacuucaccggcugugugauugccuggaacagcaacaaccuggacuccaaagucggcggcaacuacaauuaccuguaccggcuguuccggaaguccaaucugaagcccuucgagcgggacaucagcaccgaaaucuaucaggccggcagcaccccuugcaacggcguggaaggcuucaacugcuacuucccacugcaguccuacggcuuucagcccacaaauggcgugggcuaucagcccuacagagugguggugcugagcuucgaacugcugcaugcuccugccacagugugcggcccuaagaaaagcaccaaucucgugaagaacaaaugcgugaacuucaacuucaacggccugaccggcaccggcgugcugacagagagcaacaagaaguuccugccauuccagcaguuuggccgggauaucgccgauaccacagacgccguuagagauccccagacacuggaaauccuggacaucaccccaugcagcuucggcggagugucugugaucaccccuggcaccaacaccagcaaucagguggcagugcuguaccaggacgugaacuguaccgaagugcccguggccauucacgccgaucagcugacaccuacauggcggguguacuccaccggcagcaauguguuucagaccagagccggcugucugaucggagccgagcacgugaacaauagcuacgagugcgacauccccaucggcgcuggcaucugugccagcuaccagacacagacaaacagccccagacgggcuagaagcguggccagccagagcaucauugccuacacaaugucucugggcgccgagaacagcguggccuacuccaacaacucuaucgcuaucugcaccaacuucaccaucagcgugaccaccgagauccugccuguguccaugaccaagaccagcguggacugcaccauguacaucugcggcgauuccaccgagugcuccaaccugcugcugcaguacggcagcuucugcacccagcugaauagagcccugacagggaucgccguggaacaggacaagaacacccaagagguguucgcccaagugaagcaaaucuacaagaccccuccuaucaaggacuucggcggcuucaauuucagccagauucugcccgauccuagcaagcccagcaagcggagcuucaucgaggaccugcuguucaacaaagugacacuggccgacgccggcuucaucaagcaguauggcgauugucugggcgacauugccgccagggaucugauuugcgcccagaaguuuaacggacugacagugcugccuccucugcugaccgaugagaugaucgcccaguacacaucugcccugcuggccggcacaaucacaagcggcuggacauuuggagcuggcgccgcucugcagauccccuuugcuaugcagauggccuaccgguucaacggcaucggagugacccagaaugugcuguacgagaaccagaagcugaucgccaaccaguucaacagcgccaucggcaagauccaggacagccugagcagcacagcaagcgcccugggaaagcugcaggacguggucaaccagaaugcccaggcacugaacacccuggucaagcagcuguccuccaacuucggcgccaucagcucugugcugaacgauauccugagcagacuggacaaggucgaggccgaggugcagaucgacagacugaucacaggcagacugcagagccuccagacauacgugacccagcagcugaucagagccgccgagauuagagccucugccaaucuggccgccaccaagaugucugagugugugcugggccagagcaagagaguggacuuuugcggcaagggcuaccaccugaugagcuucccucagucugccccucacggcgugguguuucugcacgugacauaugugugugcucaagagaagaauuucaccaccgcuccagccaucugccacgacggcaaagcccacuuuccuagagaaggcguguucguguccaacggcacccauugguucgugacacagcggaacuucuacgagccccagaucaucaccaccgacaacaccuucgugucuggcaacugcgacguugugaucggcauugugaacaauaccguguacgacccucugcagcccgagcuggacagcuucaaagaggaacuggacaaguacuuuaagaaccacacaagccccgacguggaccugggcgauaucagcggaaucaaugccagcgucgugaacauccagaaagagaucgaccggcugaacgagguggccaagaaucugaacgagagccugaucgaccugcaagaacuggggaaguacgagcaguacaucaaguggcccugguacaucuggcugggcuuuaucgccggacugauugccaucgugauggucacaaucaugcuguguugcaugaccagcugcuguagcugccugaagggcuguuguagcuguggcagcugcugcaaguucgacgaggacgauucugagcccgugcugaagggcgugaaacugcacuacaccugaggacuaguuauaagacugacuagcccgaugggccucccaacgggcccuccuccccuccuugcaccgagauuaauaaaaaaaaaaaaaaaaaaaaaaaaaaaaaaaaaaaaaaaaaaaaaaaaaaaaaaaaaaaaaaaaugcaucccccccccccccccccccccccccccccccaaaggcucuuuucagagccaccagaauu

SEQ ID NO: 13020 - RNA, 4039 nt, Artificial Sequence
  SARS-CoV-2/Wuhan/WIV05/2019__EPI_ISL_402128 spike protein mRNA gc mod (1-1273)(G889C_L1034C)
aggagaaagcuuaccauguucguguuucuggugcugcugccccugguguccagccagugugugaaccugaccaccagaacacagcugccuccagccuacaccaacagcuucaccagaggcguguacuaccccgacaagguguucagauccagcgugcugcacucuacccaggaccuguuccugccuuucuucagcaacgugaccugguuccacgccauccacguguccggcaccaauggcaccaagagauucgacaaccccgugcugcccuucaacgacgggguguacuuugccagcaccgagaaguccaacaucaucagaggcuggaucuucggcaccacacuggacagcaagacccagagccugcugaucgugaacaacgccaccaacguggucaucaaagugugcgaguuccaguucugcaacgaccccuuccugggcgucuacuaccacaagaacaacaagagcuggauggaaagcgaguuccggguguacagcagcgccaacaacugcaccuucgaguacgugucccagccuuuccugauggaccuggaaggcaagcagggcaacuucaagaaccugcgcgaguucguguucaagaacaucgacggcuacuucaaaaucuacagcaagcacaccccuaucaaccucgugcgggaucugccucagggcuucucugcucuggaaccccugguggaucugcccaucggcaucaacaucacccgguuucagacacugcuggcccugcacagaagcuaccugacaccuggcgauagcagcagcggauggacagcuggugccgccgcuuacuaugugggcuaccugcagccuagaaccuuccugcugaaguacaacgagaacggcaccaucaccgacgccguggauugugcucuggauccucugagcgagacaaagugcacccugaaguccuucaccguggaaaagggcaucuaccagaccagcaacuuccgggugcagcccaccgaauccaucgugcgguuccccaauaucaccaaucugugccccuucggcgagguguucaaugccaccagauucgccucuguguacgccuggaaccggaagcggaucagcaauugcguggccgacuacuccgugcuguacaacuccgccagcuucagcaccuucaagugcuacggcguguccccuaccaagcugaacgaccugugcuucacaaacguguacgccgacagcuucgugauccggggagaugaagugcggcagauugccccuggacagacaggcaagaucgccgacuacaacuacaagcugcccgacgacuucaccggcugugugauugccuggaacagcaacaaccuggacuccaaagucggcggcaacuacaauuaccuguaccggcuguuccggaaguccaaucugaagcccuucgagcgggacaucagcaccgaaaucuaucaggccggcagcaccccuugcaacggcguggaaggcuucaacugcuacuucccacugcaguccuacggcuuucagcccacaaauggcgugggcuaucagcccuacagagugguggugcugagcuucgaacugcugcaugcuccugccacagugugcggcccuaagaaaagcaccaaucucgugaagaacaaaugcgugaacuucaacuucaacggccugaccggcaccggcgugcugacagagagcaacaagaaguuccugccauuccagcaguuuggccgggauaucgccgauaccacagacgccguuagagauccccagacacuggaaauccuggacaucaccccaugcagcuucggcggagugucugugaucaccccuggcaccaacaccagcaaucagguggcagugcuguaccaggacgugaacuguaccgaagugcccguggccauucacgccgaucagcugacaccuacauggcggguguacuccaccggcagcaauguguuucagaccagagccggcugucugaucggagccgagcacgugaacaauagcuacgagugcgacauccccaucggcgcuggcaucugugccagcuaccagacacagacaaacagccccagacgggcuagaagcguggccagccagagcaucauugccuacacaaugucucugggcgccgagaacagcguggccuacuccaacaacucuaucgcuauccccaccaacuucaccaucagcgugaccaccgagauccugccuguguccaugaccaagaccagcguggacugcaccauguacaucugcggcgauuccaccgagugcuccaaccugcugcugcaguacggcagcuucugcacccagcugaauagagcccugacagggaucgccguggaacaggacaagaacacccaagagguguucgcccaagugaagcaaaucuacaagaccccuccuaucaaggacuucggcggcuucaauuucagccagauucugcccgauccuagcaagcccagcaagcggagcuucaucgaggaccugcuguucaacaaagugacacuggccgacgccggcuucaucaagcaguauggcgauugucugggcgacauugccgccagggaucugauuugcgcccagaaguuuaacggacugacagugcugccuccucugcugaccgaugagaugaucgcccaguacacaucugcccugcuggccggcacaaucacaagcggcuggacauuuugcgcuggcgccgcucugcagauccccuuugcuaugcagauggccuaccgguucaacggcaucggagugacccagaaugugcuguacgagaaccagaagcugaucgccaaccaguucaacagcgccaucggcaagauccaggacagccugagcagcacagcaagcgcccugggaaagcugcaggacguggucaaccagaaugcccaggcacugaacacccuggucaagcagcuguccuccaacuucggcgccaucagcucugugcugaacgauauccugagcagacuggacaaggucgaggccgaggugcagaucgacagacugaucacaggcagacugcagagccuccagacauacgugacccagcagcugaucagagccgccgagauuagagccucugccaaucuggccgccaccaagaugucugaguguguguguggccagagcaagagaguggacuuuugcggcaagggcuaccaccugaugagcuucccucagucugccccucacggcgugguguuucugcacgugacauaugugcccgcucaagagaagaauuucaccaccgcuccagccaucugccacgacggcaaagcccacuuuccuagagaaggcguguucguguccaacggcacccauugguucgugacacagcggaacuucuacgagccccagaucaucaccaccgacaacaccuucgugucuggcaacugcgacguugugaucggcauugugaacaauaccguguacgacccucugcagcccgagcuggacagcuucaaagaggaacuggacaaguacuuuaagaaccacacaagccccgacguggaccugggcgauaucagcggaaucaaugccagcgucgugaacauccagaaagagaucgaccggcugaacgagguggccaagaaucugaacgagagccugaucgaccugcaagaacuggggaaguacgagcaguacaucaaguggcccugguacaucuggcugggcuuuaucgccggacugauugccaucgugauggucacaaucaugcuguguugcaugaccagcugcuguagcugccugaagggcuguuguagcuguggcagcugcugcaaguucgacgaggacgauucugagcccgugcugaagggcgugaaacugcacuacaccugaggacuaguuauaagacugacuagcccgaugggccucccaacgggcccuccuccccuccuugcaccgagauuaauaaaaaaaaaaaaaaaaaaaaaaaaaaaaaaaaaaaaaaaaaaaaaaaaaaaaaaaaaaaaaaaaugcaucccccccccccccccccccccccccccccccaaaggcucuuuucagagccaccagaauu

SEQ ID NO: 13021 - RNA, 4039 nt, Artificial Sequence
  SARS-CoV-2/Wuhan/WIV05/2019__EPI_ISL_402128 spike protein mRNA gc mod (1-1273)(I909C_Y1047C)
aggagaaagcuuaccauguucguguuucuggugcugcugccccugguguccagccagugugugaaccugaccaccagaacacagcugccuccagccuacaccaacagcuucaccagaggcguguacuaccccgacaagguguucagauccagcgugcugcacucuacccaggaccuguuccugccuuucuucagcaacgugaccugguuccacgccauccacguguccggcaccaauggcaccaagagauucgacaaccccgugcugcccuucaacgacgggguguacuuugccagcaccgagaaguccaacaucaucagaggcuggaucuucggcaccacacuggacagcaagacccagagccugcugaucgugaacaacgccaccaacguggucaucaaagugugcgaguuccaguucugcaacgaccccuuccugggcgucuacuaccacaagaacaacaagagcuggauggaaagcgaguuccggguguacagcagcgccaacaacugcaccuucgaguacgugucccagccuuuccugauggaccuggaaggcaagcagggcaacuucaagaaccugcgcgaguucguguucaagaacaucgacggcuacuucaaaaucuacagcaagcacaccccuaucaaccucgugcgggaucugccucagggcuucucugcucuggaaccccugguggaucugcccaucggcaucaacaucacccgguuucagacacugcuggcccugcacagaagcuaccugacaccuggcgauagcagcagcggauggacagcuggugccgccgcuuacuaugugggcuaccugcagccuagaaccuuccugcugaaguacaacgagaacggcaccaucaccgacgccguggauugugcucuggauccucugagcgagacaaagugcacccugaaguccuucaccguggaaaagggcaucuaccagaccagcaacuuccgggugcagcccaccgaauccaucgugcgguuccccaauaucaccaaucugugccccuucggcgagguguucaaugccaccagauucgccucuguguacgccuggaaccggaagcggaucagcaauugcguggccgacuacuccgugcuguacaacuccgccagcuucagcaccuucaagugcuacggcguguccccuaccaagcugaacgaccugugcuucacaaacguguacgccgacagcuucgugauccggggagaugaagugcggcagauugccccuggacagacaggcaagaucgccgacuacaacuacaagcugcccgacgacuucaccggcugugugauugccuggaacagcaacaaccuggacuccaaagucggcggcaacuacaauuaccuguaccggcuguuccggaaguccaaucugaagcccuucgagcgggacaucagcaccgaaaucuaucaggccggcagcaccccuugcaacggcguggaaggcuucaacugcuacuucccacugcaguccuacggcuuucagcccacaaauggcgugggcuaucagcccuacagagugguggugcugagcuucgaacugcugcaugcuccugccacagugugcggcccuaagaaaagcaccaaucucgugaagaacaaaugcgugaacuucaacuucaacggccugaccggcaccggcgugcugacagagagcaacaagaaguuccugccauuccagcaguuuggccgggauaucgccgauaccacagacgccguuagagauccccagacacuggaaauccuggacaucaccccaugcagcuucggcggagugucugugaucaccccuggcaccaacaccagcaaucagguggcagugcuguaccaggacgugaacuguaccgaagugcccguggccauucacgccgaucagcugacaccuacauggcggguguacuccaccggcagcaauguguuucagaccagagccggcugucugaucggagccgagcacgugaacaauagcuacgagugcgacauccccaucggcgcuggcaucugugccagcuaccagacacagacaaacagccccagacgggcuagaagcguggccagccagagcaucauugccuacacaaugucucugggcgccgagaacagcguggccuacuccaacaacucuaucgcuauccccaccaacuucaccaucagcgugaccaccgagauccugccuguguccaugaccaagaccagcguggacugcaccauguacaucugcggcgauuccaccgagugcuccaaccugcugcugcaguacggcagcuucugcacccagcugaauagagcccugacagggaucgccguggaacaggacaagaacacccaagagguguucgcccaagugaagcaaaucuacaagaccccuccuaucaaggacuucggcggcuucaauuucagccagauucugcccgauccuagcaagcccagcaagcggagcuucaucgaggaccugcuguucaacaaagugacacuggccgacgccggcuucaucaagcaguauggcgauugucugggcgacauugccgccagggaucugauuugcgcccagaaguuuaacggacugacagugcugccuccucugcugaccgaugagaugaucgcccaguacacaucugcccugcuggccggcacaaucacaagcggcuggacauuuggagcuggcgccgcucugcagauccccuuugcuaugcagauggccuaccgguucaacggcugcggagugacccagaaugugcuguacgagaaccagaagcugaucgccaaccaguucaacagcgccaucggcaagauccaggacagccugagcagcacagcaagcgcccugggaaagcugcaggacguggucaaccagaaugcccaggcacugaacacccuggucaagcagcuguccuccaacuucggcgccaucagcucugugcugaacgauauccugagcagacuggacaaggucgaggccgaggugcagaucgacagacugaucacaggcagacugcagagccuccagacauacgugacccagcagcugaucagagccgccgagauuagagccucugccaaucuggccgccaccaagaugucugagugugugcugggccagagcaagagaguggacuuuugcggcaagggcugucaccugaugagcuucccucagucugccccucacggcgugguguuucugcacgugacauaugugcccgcucaagagaagaauuucaccaccgcuccagccaucugccacgacggcaaagcccacuuuccuagagaaggcguguucguguccaacggcacccauugguucgugacacagcggaacuucuacgagccccagaucaucaccaccgacaacaccuucgugucuggcaacugcgacguugugaucggcauugugaacaauaccguguacgacccucugcagcccgagcuggacagcuucaaagaggaacuggacaaguacuuuaagaaccacacaagccccgacguggaccugggcgauaucagcggaaucaaugccagcgucgugaacauccagaaagagaucgaccggcugaacgagguggccaagaaucugaacgagagccugaucgaccugcaagaacuggggaaguacgagcaguacaucaaguggcccugguacaucuggcugggcuuuaucgccggacugauugccaucgugauggucacaaucaugcuguguugcaugaccagcugcuguagcugccugaagggcuguuguagcuguggcagcugcugcaaguucgacgaggacgauucugagcccgugcugaagggcgugaaacugcacuacaccugaggacuaguuauaagacugacuagcccgaugggccucccaacgggcccuccuccccuccuugcaccgagauuaauaaaaaaaaaaaaaaaaaaaaaaaaaaaaaaaaaaaaaaaaaaaaaaaaaaaaaaaaaaaaaaaaugcaucccccccccccccccccccccccccccccccaaaggcucuuuucagagccaccagaauu

SEQ ID NO: 13022 - RNA, 4039 nt, Artificial Sequence
  SARS-CoV-2/Wuhan/WIV05/2019__EPI_ISL_402128 spike protein mRNA gc mod (1-1273)(Q965C_S1003C)
aggagaaagcuuaccauguucguguuucuggugcugcugccccugguguccagccagugugugaaccugaccaccagaacacagcugccuccagccuacaccaacagcuucaccagaggcguguacuaccccgacaagguguucagauccagcgugcugcacucuacccaggaccuguuccugccuuucuucagcaacgugaccugguuccacgccauccacguguccggcaccaauggcaccaagagauucgacaaccccgugcugcccuucaacgacgggguguacuuugccagcaccgagaaguccaacaucaucagaggcuggaucuucggcaccacacuggacagcaagacccagagccugcugaucgugaacaacgccaccaacguggucaucaaagugugcgaguuccaguucugcaacgaccccuuccugggcgucuacuaccacaagaacaacaagagcuggauggaaagcgaguuccggguguacagcagcgccaacaacugcaccuucgaguacgugucccagccuuuccugauggaccuggaaggcaagcagggcaacuucaagaaccugcgcgaguucguguucaagaacaucgacggcuacuucaaaaucuacagcaagcacaccccuaucaaccucgugcgggaucugccucagggcuucucugcucuggaaccccugguggaucugcccaucggcaucaacaucacccgguuucagacacugcuggcccugcacagaagcuaccugacaccuggcgauagcagcagcggauggacagcuggugccgccgcuuacuaugugggcuaccugcagccuagaaccuuccugcugaaguacaacgagaacggcaccaucaccgacgccguggauugugcucuggauccucugagcgagacaaagugcacccugaaguccuucaccguggaaaagggcaucuaccagaccagcaacuuccgggugcagcccaccgaauccaucgugcgguuccccaauaucaccaaucugugccccuucggcgagguguucaaugccaccagauucgccucuguguacgccuggaaccggaagcggaucagcaauugcguggccgacuacuccgugcuguacaacuccgccagcuucagcaccuucaagugcuacggcguguccccuaccaagcugaacgaccugugcuucacaaacguguacgccgacagcuucgugauccggggagaugaagugcggcagauugccccuggacagacaggcaagaucgccgacuacaacuacaagcugcccgacgacuucaccggcugugugauugccuggaacagcaacaaccuggacuccaaagucggcggcaacuacaauuaccuguaccggcuguuccggaaguccaaucugaagcccuucgagcgggacaucagcaccgaaaucuaucaggccggcagcaccccuugcaacggcguggaaggcuucaacugcuacuucccacugcaguccuacggcuuucagcccacaaauggcgugggcuaucagcccuacagagugguggugcugagcuucgaacugcugcaugcuccugccacagugugcggcccuaagaaaagcaccaaucucgugaagaacaaaugcgugaacuucaacuucaacggccugaccggcaccggcgugcugacagagagcaacaagaaguuccugccauuccagcaguuuggccgggauaucgccgauaccacagacgccguuagagauccccagacacuggaaauccuggacaucaccccaugcagcuucggcggagugucugugaucaccccuggcaccaacaccagcaaucagguggcagugcuguaccaggacgugaacuguaccgaagugcccguggccauucacgccgaucagcugacaccuacauggcggguguacuccaccggcagcaauguguuucagaccagagccggcugucugaucggagccgagcacgugaacaauagcuacgagugcgacauccccaucggcgcuggcaucugugccagcuaccagacacagacaaacagccccagacgggcuagaagcguggccagccagagcaucauugccuacacaaugucucugggcgccgagaacagcguggccuacuccaacaacucuaucgcuauccccaccaacuucaccaucagcgugaccaccgagauccugccuguguccaugaccaagaccagcguggacugcaccauguacaucugcggcgauuccaccgagugcuccaaccugcugcugcaguacggcagcuucugcacccagcugaauagagcccugacagggaucgccguggaacaggacaagaacacccaagagguguucgcccaagugaagcaaaucuacaagaccccuccuaucaaggacuucggcggcuucaauuucagccagauucugcccgauccuagcaagcccagcaagcggagcuucaucgaggaccugcuguucaacaaagugacacuggccgacgccggcuucaucaagcaguauggcgauugucugggcgacauugccgccagggaucugauuugcgcccagaaguuuaacggacugacagugcugccuccucugcugaccgaugagaugaucgcccaguacacaucugcccugcuggccggcacaaucacaagcggcuggacauuuggagcuggcgccgcucugcagauccccuuugcuaugcagauggccuaccgguucaacggcaucggagugacccagaaugugcuguacgagaaccagaagcugaucgccaaccaguucaacagcgccaucggcaagauccaggacagccugagcagcacagcaagcgcccugggaaagcugcaggacguggucaaccagaaugcccaggcacugaacacccuggucaagugccuguccuccaacuucggcgccaucagcucugugcugaacgauauccugagcagacuggacaaggucgaggccgaggugcagaucgacagacugaucacaggcagacugcagugucuccagacauacgugacccagcagcugaucagagccgccgagauuagagccucugccaaucuggccgccaccaagaugucugagugugugcugggccagagcaagagaguggacuuuugcggcaagggcuaccaccugaugagcuucccucagucugccccucacggcgugguguuucugcacgugacauaugugcccgcucaagagaagaauuucaccaccgcuccagccaucugccacgacggcaaagcccacuuuccuagagaaggcguguucguguccaacggcacccauugguucgugacacagcggaacuucuacgagccccagaucaucaccaccgacaacaccuucgugucuggcaacugcgacguugugaucggcauugugaacaauaccguguacgacccucugcagcccgagcuggacagcuucaaagaggaacuggacaaguacuuuaagaaccacacaagccccgacguggaccugggcgauaucagcggaaucaaugccagcgucgugaacauccagaaagagaucgaccggcugaacgagguggccaagaaucugaacgagagccugaucgaccugcaagaacuggggaaguacgagcaguacaucaaguggcccugguacaucuggcugggcuuuaucgccggacugauugccaucgugauggucacaaucaugcuguguugcaugaccagcugcuguagcugccugaagggcuguuguagcuguggcagcugcugcaaguucgacgaggacgauucugagcccgugcugaagggcgugaaacugcacuacaccugaggacuaguuauaagacugacuagcccgaugggccucccaacgggcccuccuccccuccuugcaccgagauuaauaaaaaaaaaaaaaaaaaaaaaaaaaaaaaaaaaaaaaaaaaaaaaaaaaaaaaaaaaaaaaaaaugcaucccccccccccccccccccccccccccccccaaaggcucuuuucagagccaccagaauu

SEQ ID NO: 13023 - RNA, 4039 nt, Artificial Sequence
  SARS-CoV-2/Wuhan/WIV05/2019__EPI_ISL_402128 spike protein mRNA gc mod (1-1273)(F970C_G999C)
aggagaaagcuuaccauguucguguuucuggugcugcugccccugguguccagccagugugugaaccugaccaccagaacacagcugccuccagccuacaccaacagcuucaccagaggcguguacuaccccgacaagguguucagauccagcgugcugcacucuacccaggaccuguuccugccuuucuucagcaacgugaccugguuccacgccauccacguguccggcaccaauggcaccaagagauucgacaaccccgugcugcccuucaacgacgggguguacuuugccagcaccgagaaguccaacaucaucagaggcuggaucuucggcaccacacuggacagcaagacccagagccugcugaucgugaacaacgccaccaacguggucaucaaagugugcgaguuccaguucugcaacgaccccuuccugggcgucuacuaccacaagaacaacaagagcuggauggaaagcgaguuccggguguacagcagcgccaacaacugcaccuucgaguacgugucccagccuuuccugauggaccuggaaggcaagcagggcaacuucaagaaccugcgcgaguucguguucaagaacaucgacggcuacuucaaaaucuacagcaagcacaccccuaucaaccucgugcgggaucugccucagggcuucucugcucuggaaccccugguggaucugcccaucggcaucaacaucacccgguuucagacacugcuggcccugcacagaagcuaccugacaccuggcgauagcagcagcggauggacagcuggugccgccgcuuacuaugugggcuaccugcagccuagaaccuuccugcugaaguacaacgagaacggcaccaucaccgacgccguggauugugcucuggauccucugagcgagacaaagugcacccugaaguccuucaccguggaaaagggcaucuaccagaccagcaacuuccgggugcagcccaccgaauccaucgugcgguuccccaauaucaccaaucugugccccuucggcgagguguucaaugccaccagauucgccucuguguacgccuggaaccggaagcggaucagcaauugcguggccgacuacuccgugcuguacaacuccgccagcuucagcaccuucaagugcuacggcguguccccuaccaagcugaacgaccugugcuucacaaacguguacgccgacagcuucgugauccggggagaugaagugcggcagauugccccuggacagacaggcaagaucgccgacuacaacuacaagcugcccgacgacuucaccggcugugugauugccuggaacagcaacaaccuggacuccaaagucggcggcaacuacaauuaccuguaccggcuguuccggaaguccaaucugaagcccuucgagcgggacaucagcaccgaaaucuaucaggccggcagcaccccuugcaacggcguggaaggcuucaacugcuacuucccacugcaguccuacggcuuucagcccacaaauggcgugggcuaucagcccuacagagugguggugcugagcuucgaacugcugcaugcuccugccacagugugcggcccuaagaaaagcaccaaucucgugaagaacaaaugcgugaacuucaacuucaacggccugaccggcaccggcgugcugacagagagcaacaagaaguuccugccauuccagcaguuuggccgggauaucgccgauaccacagacgccguuagagauccccagacacuggaaauccuggacaucaccccaugcagcuucggcggagugucugugaucaccccuggcaccaacaccagcaaucagguggcagugcuguaccaggacgugaacuguaccgaagugcccguggccauucacgccgaucagcugacaccuacauggcggguguacuccaccggcagcaauguguuucagaccagagccggcugucugaucggagccgagcacgugaacaauagcuacgagugcgacauccccaucggcgcuggcaucugugccagcuaccagacacagacaaacagccccagacgggcuagaagcguggccagccagagcaucauugccuacacaaugucucugggcgccgagaacagcguggccuacuccaacaacucuaucgcuauccccaccaacuucaccaucagcgugaccaccgagauccugccuguguccaugaccaagaccagcguggacugcaccauguacaucugcggcgauuccaccgagugcuccaaccugcugcugcaguacggcagcuucugcacccagcugaauagagcccugacagggaucgccguggaacaggacaagaacacccaagagguguucgcccaagugaagcaaaucuacaagaccccuccuaucaaggacuucggcggcuucaauuucagccagauucugcccgauccuagcaagcccagcaagcggagcuucaucgaggaccugcuguucaacaaagugacacuggccgacgccggcuucaucaagcaguauggcgauugucugggcgacauugccgccagggaucugauuugcgcccagaaguuuaacggacugacagugcugccuccucugcugaccgaugagaugaucgcccaguacacaucugcccugcuggccggcacaaucacaagcggcuggacauuuggagcuggcgccgcucugcagauccccuuugcuaugcagauggccuaccgguucaacggcaucggagugacccagaaugugcuguacgagaaccagaagcugaucgccaaccaguucaacagcgccaucggcaagauccaggacagccugagcagcacagcaagcgcccugggaaagcugcaggacguggucaaccagaaugcccaggcacugaacacccuggucaagcagcuguccuccaacugcggcgccaucagcucugugcugaacgauauccugagcagacuggacaaggucgaggccgaggugcagaucgacagacugaucacauguagacugcagagccuccagacauacgugacccagcagcugaucagagccgccgagauuagagccucugccaaucuggccgccaccaagaugucugagugugugcugggccagagcaagagaguggacuuuugcggcaagggcuaccaccugaugagcuucccucagucugccccucacggcgugguguuucugcacgugacauaugugcccgcucaagagaagaauuucaccaccgcuccagccaucugccacgacggcaaagcccacuuuccuagagaaggcguguucguguccaacggcacccauugguucgugacacagcggaacuucuacgagccccagaucaucaccaccgacaacaccuucgugucuggcaacugcgacguugugaucggcauugugaacaauaccguguacgacccucugcagcccgagcuggacagcuucaaagaggaacuggacaaguacuuuaagaaccacacaagccccgacguggaccugggcgauaucagcggaaucaaugccagcgucgugaacauccagaaagagaucgaccggcugaacgagguggccaagaaucugaacgagagccugaucgaccugcaagaacuggggaaguacgagcaguacaucaaguggcccugguacaucuggcugggcuuuaucgccggacugauugccaucgugauggucacaaucaugcuguguugcaugaccagcugcuguagcugccugaagggcuguuguagcuguggcagcugcugcaaguucgacgaggacgauucugagcccgugcugaagggcgugaaacugcacuacaccugaggacuaguuauaagacugacuagcccgaugggccucccaacgggcccuccuccccuccuugcaccgagauuaauaaaaaaaaaaaaaaaaaaaaaaaaaaaaaaaaaaaaaaaaaaaaaaaaaaaaaaaaaaaaaaaaugcaucccccccccccccccccccccccccccccccaaaggcucuuuucagagccaccagaauu

SEQ ID NO: 13024 - RNA, 4039 nt, Artificial Sequence
  SARS-CoV-2/Wuhan/WIV05/2019__EPI_ISL_402128 spike protein mRNA gc mod (1-1273)(A972C_R995C)
aggagaaagcuuaccauguucguguuucuggugcugcugccccugguguccagccagugugugaaccugaccaccagaacacagcugccuccagccuacaccaacagcuucaccagaggcguguacuaccccgacaagguguucagauccagcgugcugcacucuacccaggaccuguuccugccuuucuucagcaacgugaccugguuccacgccauccacguguccggcaccaauggcaccaagagauucgacaaccccgugcugcccuucaacgacgggguguacuuugccagcaccgagaaguccaacaucaucagaggcuggaucuucggcaccacacuggacagcaagacccagagccugcugaucgugaacaacgccaccaacguggucaucaaagugugcgaguuccaguucugcaacgaccccuuccugggcgucuacuaccacaagaacaacaagagcuggauggaaagcgaguuccggguguacagcagcgccaacaacugcaccuucgaguacgugucccagccuuuccugauggaccuggaaggcaagcagggcaacuucaagaaccugcgcgaguucguguucaagaacaucgacggcuacuucaaaaucuacagcaagcacaccccuaucaaccucgugcgggaucugccucagggcuucucugcucuggaaccccugguggaucugcccaucggcaucaacaucacccgguuucagacacugcuggcccugcacagaagcuaccugacaccuggcgauagcagcagcggauggacagcuggugccgccgcuuacuaugugggcuaccugcagccuagaaccuuccugcugaaguacaacgagaacggcaccaucaccgacgccguggauugugcucuggauccucugagcgagacaaagugcacccugaaguccuucaccguggaaaagggcaucuaccagaccagcaacuuccgggugcagcccaccgaauccaucgugcgguuccccaauaucaccaaucugugccccuucggcgagguguucaaugccaccagauucgccucuguguacgccuggaaccggaagcggaucagcaauugcguggccgacuacuccgugcuguacaacuccgccagcuucagcaccuucaagugcuacggcguguccccuaccaagcugaacgaccugugcuucacaaacguguacgccgacagcuucgugauccggggagaugaagugcggcagauugccccuggacagacaggcaagaucgccgacuacaacuacaagcugcccgacgacuucaccggcugugugauugccuggaacagcaacaaccuggacuccaaagucggcggcaacuacaauuaccuguaccggcuguuccggaaguccaaucugaagcccuucgagcgggacaucagcaccgaaaucuaucaggccggcagcaccccuugcaacggcguggaaggcuucaacugcuacuucccacugcaguccuacggcuuucagcccacaaauggcgugggcuaucagcccuacagagugguggugcugagcuucgaacugcugcaugcuccugccacagugugcggcccuaagaaaagcaccaaucucgugaagaacaaaugcgugaacuucaacuucaacggccugaccggcaccggcgugcugacagagagcaacaagaaguuccugccauuccagcaguuuggccgggauaucgccgauaccacagacgccguuagagauccccagacacuggaaauccuggacaucaccccaugcagcuucggcggagugucugugaucaccccuggcaccaacaccagcaaucagguggcagugcuguaccaggacgugaacuguaccgaagugcccguggccauucacgccgaucagcugacaccuacauggcggguguacuccaccggcagcaauguguuucagaccagagccggcugucugaucggagccgagcacgugaacaauagcuacgagugcgacauccccaucggcgcuggcaucugugccagcuaccagacacagacaaacagccccagacgggcuagaagcguggccagccagagcaucauugccuacacaaugucucugggcgccgagaacagcguggccuacuccaacaacucuaucgcuauccccaccaacuucaccaucagcgugaccaccgagauccugccuguguccaugaccaagaccagcguggacugcaccauguacaucugcggcgauuccaccgagugcuccaaccugcugcugcaguacggcagcuucugcacccagcugaauagagcccugacagggaucgccguggaacaggacaagaacacccaagagguguucgcccaagugaagcaaaucuacaagaccccuccuaucaaggacuucggcggcuucaauuucagccagauucugcccgauccuagcaagcccagcaagcggagcuucaucgaggaccugcuguucaacaaagugacacuggccgacgccggcuucaucaagcaguauggcgauugucugggcgacauugccgccagggaucugauuugcgcccagaaguuuaacggacugacagugcugccuccucugcugaccgaugagaugaucgcccaguacacaucugcccugcuggccggcacaaucacaagcggcuggacauuuggagcuggcgccgcucugcagauccccuuugcuaugcagauggccuaccgguucaacggcaucggagugacccagaaugugcuguacgagaaccagaagcugaucgccaaccaguucaacagcgccaucggcaagauccaggacagccugagcagcacagcaagcgcccugggaaagcugcaggacguggucaaccagaaugcccaggcacugaacacccuggucaagcagcuguccuccaacuucggcugcaucagcucugugcugaacgauauccugagcagacuggacaaggucgaggccgaggugcagaucgacugucugaucacaggcagacugcagagccuccagacauacgugacccagcagcugaucagagccgccgagauuagagccucugccaaucuggccgccaccaagaugucugagugugugcugggccagagcaagagaguggacuuuugcggcaagggcuaccaccugaugagcuucccucagucugccccucacggcgugguguuucugcacgugacauaugugcccgcucaagagaagaauuucaccaccgcuccagccaucugccacgacggcaaagcccacuuuccuagagaaggcguguucguguccaacggcacccauugguucgugacacagcggaacuucuacgagccccagaucaucaccaccgacaacaccuucgugucuggcaacugcgacguugugaucggcauugugaacaauaccguguacgacccucugcagcccgagcuggacagcuucaaagaggaacuggacaaguacuuuaagaaccacacaagccccgacguggaccugggcgauaucagcggaaucaaugccagcgucgugaacauccagaaagagaucgaccggcugaacgagguggccaagaaucugaacgagagccugaucgaccugcaagaacuggggaaguacgagcaguacaucaaguggcccugguacaucuggcugggcuuuaucgccggacugauugccaucgugauggucacaaucaugcuguguugcaugaccagcugcuguagcugccugaagggcuguuguagcuguggcagcugcugcaaguucgacgaggacgauucugagcccgugcugaagggcgugaaacugcacuacaccugaggacuaguuauaagacugacuagcccgaugggccucccaacgggcccuccuccccuccuugcaccgagauuaauaaaaaaaaaaaaaaaaaaaaaaaaaaaaaaaaaaaaaaaaaaaaaaaaaaaaaaaaaaaaaaaaugcaucccccccccccccccccccccccccccccccaaaggcucuuuucagagccaccagaauu

SEQ ID NO: 13025 - RNA, 4039 nt, Artificial Sequence
  SARS-CoV-2/Wuhan/WIV05/2019__EPI_ISL_402128 spike protein mRNA gc mod (1-1273)(A890C_V1040C)
aggagaaagcuuaccauguucguguuucuggugcugcugccccugguguccagccagugugugaaccugaccaccagaacacagcugccuccagccuacaccaacagcuucaccagaggcguguacuaccccgacaagguguucagauccagcgugcugcacucuacccaggaccuguuccugccuuucuucagcaacgugaccugguuccacgccauccacguguccggcaccaauggcaccaagagauucgacaaccccgugcugcccuucaacgacgggguguacuuugccagcaccgagaaguccaacaucaucagaggcuggaucuucggcaccacacuggacagcaagacccagagccugcugaucgugaacaacgccaccaacguggucaucaaagugugcgaguuccaguucugcaacgaccccuuccugggcgucuacuaccacaagaacaacaagagcuggauggaaagcgaguuccggguguacagcagcgccaacaacugcaccuucgaguacgugucccagccuuuccugauggaccuggaaggcaagcagggcaacuucaagaaccugcgcgaguucguguucaagaacaucgacggcuacuucaaaaucuacagcaagcacaccccuaucaaccucgugcgggaucugccucagggcuucucugcucuggaaccccugguggaucugcccaucggcaucaacaucacccgguuucagacacugcuggcccugcacagaagcuaccugacaccuggcgauagcagcagcggauggacagcuggugccgccgcuuacuaugugggcuaccugcagccuagaaccuuccugcugaaguacaacgagaacggcaccaucaccgacgccguggauugugcucuggauccucugagcgagacaaagugcacccugaaguccuucaccguggaaaagggcaucuaccagaccagcaacuuccgggugcagcccaccgaauccaucgugcgguuccccaauaucaccaaucugugccccuucggcgagguguucaaugccaccagauucgccucuguguacgccuggaaccggaagcggaucagcaauugcguggccgacuacuccgugcuguacaacuccgccagcuucagcaccuucaagugcuacggcguguccccuaccaagcugaacgaccugugcuucacaaacguguacgccgacagcuucgugauccggggagaugaagugcggcagauugccccuggacagacaggcaagaucgccgacuacaacuacaagcugcccgacgacuucaccggcugugugauugccuggaacagcaacaaccuggacuccaaagucggcggcaacuacaauuaccuguaccggcuguuccggaaguccaaucugaagcccuucgagcgggacaucagcaccgaaaucuaucaggccggcagcaccccuugcaacggcguggaaggcuucaacugcuacuucccacugcaguccuacggcuuucagcccacaaauggcgugggcuaucagcccuacagagugguggugcugagcuucgaacugcugcaugcuccugccacagugugcggcccuaagaaaagcaccaaucucgugaagaacaaaugcgugaacuucaacuucaacggccugaccggcaccggcgugcugacagagagcaacaagaaguuccugccauuccagcaguuuggccgggauaucgccgauaccacagacgccguuagagauccccagacacuggaaauccuggacaucaccccaugcagcuucggcggagugucugugaucaccccuggcaccaacaccagcaaucagguggcagugcuguaccaggacgugaacuguaccgaagugcccguggccauucacgccgaucagcugacaccuacauggcggguguacuccaccggcagcaauguguuucagaccagagccggcugucugaucggagccgagcacgugaacaauagcuacgagugcgacauccccaucggcgcuggcaucugugccagcuaccagacacagacaaacagccccagacgggcuagaagcguggccagccagagcaucauugccuacacaaugucucugggcgccgagaacagcguggccuacuccaacaacucuaucgcuauccccaccaacuucaccaucagcgugaccaccgagauccugccuguguccaugaccaagaccagcguggacugcaccauguacaucugcggcgauuccaccgagugcuccaaccugcugcugcaguacggcagcuucugcacccagcugaauagagcccugacagggaucgccguggaacaggacaagaacacccaagagguguucgcccaagugaagcaaaucuacaagaccccuccuaucaaggacuucggcggcuucaauuucagccagauucugcccgauccuagcaagcccagcaagcggagcuucaucgaggaccugcuguucaacaaagugacacuggccgacgccggcuucaucaagcaguauggcgauugucugggcgacauugccgccagggaucugauuugcgcccagaaguuuaacggacugacagugcugccuccucugcugaccgaugagaugaucgcccaguacacaucugcccugcuggccggcacaaucacaagcggcuggacauuuggaugcggcgccgcucugcagauccccuuugcuaugcagauggccuaccgguucaacggcaucggagugacccagaaugugcuguacgagaaccagaagcugaucgccaaccaguucaacagcgccaucggcaagauccaggacagccugagcagcacagcaagcgcccugggaaagcugcaggacguggucaaccagaaugcccaggcacugaacacccuggucaagcagcuguccuccaacuucggcgccaucagcucugugcugaacgauauccugagcagacuggacaaggucgaggccgaggugcagaucgacagacugaucacaggcagacugcagagccuccagacauacgugacccagcagcugaucagagccgccgagauuagagccucugccaaucuggccgccaccaagaugucugagugugugcugggccagagcaagagaugugacuuuugcggcaagggcuaccaccugaugagcuucccucagucugccccucacggcgugguguuucugcacgugacauaugugcccgcucaagagaagaauuucaccaccgcuccagccaucugccacgacggcaaagcccacuuuccuagagaaggcguguucguguccaacggcacccauugguucgugacacagcggaacuucuacgagccccagaucaucaccaccgacaacaccuucgugucuggcaacugcgacguugugaucggcauugugaacaauaccguguacgacccucugcagcccgagcuggacagcuucaaagaggaacuggacaaguacuuuaagaaccacacaagccccgacguggaccugggcgauaucagcggaaucaaugccagcgucgugaacauccagaaagagaucgaccggcugaacgagguggccaagaaucugaacgagagccugaucgaccugcaagaacuggggaaguacgagcaguacaucaaguggcccugguacaucuggcugggcuuuaucgccggacugauugccaucgugauggucacaaucaugcuguguugcaugaccagcugcuguagcugccugaagggcuguuguagcuguggcagcugcugcaaguucgacgaggacgauucugagcccgugcugaagggcgugaaacugcacuacaccugaggacuaguuauaagacugacuagcccgaugggccucccaacgggcccuccuccccuccuugcaccgagauuaauaaaaaaaaaaaaaaaaaaaaaaaaaaaaaaaaaaaaaaaaaaaaaaaaaaaaaaaaaaaaaaaaugcaucccccccccccccccccccccccccccccccaaaggcucuuuucagagccaccagaauu

SEQ ID NO: 13026 - RNA, 4039 nt, Artificial Sequence
  SARS-CoV-2/Wuhan/WIV05/2019__EPI_ISL_402128 spike protein mRNA gc mod (1-1273)(T874C_S1055C)
aggagaaagcuuaccauguucguguuucuggugcugcugccccugguguccagccagugugugaaccugaccaccagaacacagcugccuccagccuacaccaacagcuucaccagaggcguguacuaccccgacaagguguucagauccagcgugcugcacucuacccaggaccuguuccugccuuucuucagcaacgugaccugguuccacgccauccacguguccggcaccaauggcaccaagagauucgacaaccccgugcugcccuucaacgacgggguguacuuugccagcaccgagaaguccaacaucaucagaggcuggaucuucggcaccacacuggacagcaagacccagagccugcugaucgugaacaacgccaccaacguggucaucaaagugugcgaguuccaguucugcaacgaccccuuccugggcgucuacuaccacaagaacaacaagagcuggauggaaagcgaguuccggguguacagcagcgccaacaacugcaccuucgaguacgugucccagccuuuccugauggaccuggaaggcaagcagggcaacuucaagaaccugcgcgaguucguguucaagaacaucgacggcuacuucaaaaucuacagcaagcacaccccuaucaaccucgugcgggaucugccucagggcuucucugcucuggaaccccugguggaucugcccaucggcaucaacaucacccgguuucagacacugcuggcccugcacagaagcuaccugacaccuggcgauagcagcagcggauggacagcuggugccgccgcuuacuaugugggcuaccugcagccuagaaccuuccugcugaaguacaacgagaacggcaccaucaccgacgccguggauugugcucuggauccucugagcgagacaaagugcacccugaaguccuucaccguggaaaagggcaucuaccagaccagcaacuuccgggugcagcccaccgaauccaucgugcgguuccccaauaucaccaaucugugccccuucggcgagguguucaaugccaccagauucgccucuguguacgccuggaaccggaagcggaucagcaauugcguggccgacuacuccgugcuguacaacuccgccagcuucagcaccuucaagugcuacggcguguccccuaccaagcugaacgaccugugcuucacaaacguguacgccgacagcuucgugauccggggagaugaagugcggcagauugccccuggacagacaggcaagaucgccgacuacaacuacaagcugcccgacgacuucaccggcugugugauugccuggaacagcaacaaccuggacuccaaagucggcggcaacuacaauuaccuguaccggcuguuccggaaguccaaucugaagcccuucgagcgggacaucagcaccgaaaucuaucaggccggcagcaccccuugcaacggcguggaaggcuucaacugcuacuucccacugcaguccuacggcuuucagcccacaaauggcgugggcuaucagcccuacagagugguggugcugagcuucgaacugcugcaugcuccugccacagugugcggcccuaagaaaagcaccaaucucgugaagaacaaaugcgugaacuucaacuucaacggccugaccggcaccggcgugcugacagagagcaacaagaaguuccugccauuccagcaguuuggccgggauaucgccgauaccacagacgccguuagagauccccagacacuggaaauccuggacaucaccccaugcagcuucggcggagugucugugaucaccccuggcaccaacaccagcaaucagguggcagugcuguaccaggacgugaacuguaccgaagugcccguggccauucacgccgaucagcugacaccuacauggcggguguacuccaccggcagcaauguguuucagaccagagccggcugucugaucggagccgagcacgugaacaauagcuacgagugcgacauccccaucggcgcuggcaucugugccagcuaccagacacagacaaacagccccagacgggcuagaagcguggccagccagagcaucauugccuacacaaugucucugggcgccgagaacagcguggccuacuccaacaacucuaucgcuauccccaccaacuucaccaucagcgugaccaccgagauccugccuguguccaugaccaagaccagcguggacugcaccauguacaucugcggcgauuccaccgagugcuccaaccugcugcugcaguacggcagcuucugcacccagcugaauagagcccugacagggaucgccguggaacaggacaagaacacccaagagguguucgcccaagugaagcaaaucuacaagaccccuccuaucaaggacuucggcggcuucaauuucagccagauucugcccgauccuagcaagcccagcaagcggagcuucaucgaggaccugcuguucaacaaagugacacuggccgacgccggcuucaucaagcaguauggcgauugucugggcgacauugccgccagggaucugauuugcgcccagaaguuuaacggacugacagugcugccuccucugcugaccgaugagaugaucgcccaguacugcucugcccugcuggccggcacaaucacaagcggcuggacauuuggagcuggcgccgcucugcagauccccuuugcuaugcagauggccuaccgguucaacggcaucggagugacccagaaugugcuguacgagaaccagaagcugaucgccaaccaguucaacagcgccaucggcaagauccaggacagccugagcagcacagcaagcgcccugggaaagcugcaggacguggucaaccagaaugcccaggcacugaacacccuggucaagcagcuguccuccaacuucggcgccaucagcucugugcugaacgauauccugagcagacuggacaaggucgaggccgaggugcagaucgacagacugaucacaggcagacugcagagccuccagacauacgugacccagcagcugaucagagccgccgagauuagagccucugccaaucuggccgccaccaagaugucugagugugugcugggccagagcaagagaguggacuuuugcggcaagggcuaccaccugaugagcuucccucagugcgccccucacggcgugguguuucugcacgugacauaugugcccgcucaagagaagaauuucaccaccgcuccagccaucugccacgacggcaaagcccacuuuccuagagaaggcguguucguguccaacggcacccauugguucgugacacagcggaacuucuacgagccccagaucaucaccaccgacaacaccuucgugucuggcaacugcgacguugugaucggcauugugaacaauaccguguacgacccucugcagcccgagcuggacagcuucaaagaggaacuggacaaguacuuuaagaaccacacaagccccgacguggaccugggcgauaucagcggaaucaaugccagcgucgugaacauccagaaagagaucgaccggcugaacgagguggccaagaaucugaacgagagccugaucgaccugcaagaacuggggaaguacgagcaguacaucaaguggcccugguacaucuggcugggcuuuaucgccggacugauugccaucgugauggucacaaucaugcuguguugcaugaccagcugcuguagcugccugaagggcuguuguagcuguggcagcugcugcaaguucgacgaggacgauucugagcccgugcugaagggcgugaaacugcacuacaccugaggacuaguuauaagacugacuagcccgaugggccucccaacgggcccuccuccccuccuugcaccgagauuaauaaaaaaaaaaaaaaaaaaaaaaaaaaaaaaaaaaaaaaaaaaaaaaaaaaaaaaaaaaaaaaaaugcaucccccccccccccccccccccccccccccccaaaggcucuuuucagagccaccagaauu

SEQ ID NO: 13027 - RNA, 2263 nt, Artificial Sequence; identical to SEQ ID NO: 168
  SARS-CoV-2/Wuhan/WIV05/2019__EPI_ISL_402128 spike protein mRNA gc mod (1-681) R9518

SEQ ID NO: 13028 - RNA, 4333 nt, Artificial Sequence
  SARS-CoV-2/Wuhan/WIV05/2019__EPI_ISL_402128 spike protein mRNA gc mod (1-1211) LumSynth construct
aggagaaagcuuaccauguucguguuucuggugcugcugccccugguguccagccagugugugaaccugaccaccagaacacagcugccuccagccuacaccaacagcuucaccagaggcguguacuaccccgacaagguguucagauccagcgugcugcacucuacccaggaccuguuccugccuuucuucagcaacgugaccugguuccacgccauccacguguccggcaccaauggcaccaagagauucgacaaccccgugcugcccuucaacgacgggguguacuuugccagcaccgagaaguccaacaucaucagaggcuggaucuucggcaccacacuggacagcaagacccagagccugcugaucgugaacaacgccaccaacguggucaucaaagugugcgaguuccaguucugcaacgaccccuuccugggcgucuacuaccacaagaacaacaagagcuggauggaaagcgaguuccggguguacagcagcgccaacaacugcaccuucgaguacgugucccagccuuuccugauggaccuggaaggcaagcagggcaacuucaagaaccugcgcgaguucguguucaagaacaucgacggcuacuucaaaaucuacagcaagcacaccccuaucaaccucgugcgggaucugccucagggcuucucugcucuggaaccccugguggaucugcccaucggcaucaacaucacccgguuucagacacugcuggcccugcacagaagcuaccugacaccuggcgauagcagcagcggauggacagcuggugccgccgcuuacuaugugggcuaccugcagccuagaaccuuccugcugaaguacaacgagaacggcaccaucaccgacgccguggauugugcucuggauccucugagcgagacaaagugcacccugaaguccuucaccguggaaaagggcaucuaccagaccagcaacuuccgggugcagcccaccgaauccaucgugcgguuccccaauaucaccaaucugugccccuucggcgagguguucaaugccaccagauucgccucuguguacgccuggaaccggaagcggaucagcaauugcguggccgacuacuccgugcuguacaacuccgccagcuucagcaccuucaagugcuacggcguguccccuaccaagcugaacgaccugugcuucacaaacguguacgccgacagcuucgugauccggggagaugaagugcggcagauugccccuggacagacaggcaagaucgccgacuacaacuacaagcugcccgacgacuucaccggcugugugauugccuggaacagcaacaaccuggacuccaaagucggcggcaacuacaauuaccuguaccggcuguuccggaaguccaaucugaagcccuucgagcgggacaucagcaccgaaaucuaucaggccggcagcaccccuugcaacggcguggaaggcuucaacugcuacuucccacugcaguccuacggcuuucagcccacaaauggcgugggcuaucagcccuacagagugguggugcugagcuucgaacugcugcaugcuccugccacagugugcggcccuaagaaaagcaccaaucucgugaagaacaaaugcgugaacuucaacuucaacggccugaccggcaccggcgugcugacagagagcaacaagaaguuccugccauuccagcaguuuggccgggauaucgccgauaccacagacgccguuagagauccccagacacuggaaauccuggacaucaccccaugcagcuucggcggagugucugugaucaccccuggcaccaacaccagcaaucagguggcagugcuguaccaggacgugaacuguaccgaagugcccguggccauucacgccgaucagcugacaccuacauggcggguguacuccaccggcagcaauguguuucagaccagagccggcugucugaucggagccgagcacgugaacaauagcuacgagugcgacauccccaucggcgcuggcaucugugccagcuaccagacacagacaaacagccccagacgggcuagaagcguggccagccagagcaucauugccuacacaaugucucugggcgccgagaacagcguggccuacuccaacaacucuaucgcuauccccaccaacuucaccaucagcgugaccaccgagauccugccuguguccaugaccaagaccagcguggacugcaccauguacaucugcggcgauuccaccgagugcuccaaccugcugcugcaguacggcagcuucugcacccagcugaauagagcccugacagggaucgccguggaacaggacaagaacacccaagagguguucgcccaagugaagcaaaucuacaagaccccuccuaucaaggacuucggcggcuucaauuucagccagauucugcccgauccuagcaagcccagcaagcggagcuucaucgaggaccugcuguucaacaaagugacacuggccgacgccggcuucaucaagcaguauggcgauugucugggcgacauugccgccagggaucugauuugcgcccagaaguuuaacggacugacagugcugccuccucugcugaccgaugagaugaucgcccaguacacaucugcccugcuggccggcacaaucacaagcggcuggacauuuggagcuggcgccgcucugcagauccccuuugcuaugcagauggccuaccgguucaacggcaucggagugacccagaaugugcuguacgagaaccagaagcugaucgccaaccaguucaacagcgccaucggcaagauccaggacagccugagcagcacagcaagcgcccugggaaagcugcaggacguggucaaccagaaugcccaggcacugaacacccuggucaagcagcuguccuccaacuucggcgccaucagcucugugcugaacgauauccugagcagacuggacaaggucgaggccgaggugcagaucgacagacugaucacaggcagacugcagagccuccagacauacgugacccagcagcugaucagagccgccgagauuagagccucugccaaucuggccgccaccaagaugucugagugugugcugggccagagcaagagaguggacuuuugcggcaagggcuaccaccugaugagcuucccucagucugccccucacggcgugguguuucugcacgugacauaugugcccgcucaagagaagaauuucaccaccgcuccagccaucugccacgacggcaaagcccacuuuccuagagaaggcguguucguguccaacggcacccauugguucgugacacagcggaacuucuacgagccccagaucaucaccaccgacaacaccuucgugucuggcaacugcgacguugugaucggcauugugaacaauaccguguacgacccucugcagcccgagcuggacagcuucaaagaggaacuggacaaguacuuuaagaaccacacaagccccgacguggaccugggcgauaucagcggaaucaaugccagcgucgugaacauccagaaagagaucgaccggcugaacgagguggccaagaaucugaacgagagccugaucgaccugcaagaacuggggaaguacgagcaguacaucaagggcggaggaucuggcggaggacagaucuacgagggcaagcugacagccgagggccugagauuuggaaucguggccagccgguucaaucacgcccugguggauagacugguggaaggcgccaucgaugccauugucagacacggcggcagagaagaggacaucacccucguuagagugcccggcucuugggagauuccuguggcugcuggcgagcuggcccggaaagaagauaucgacgccguuaucgccaucggcgugcugaucagaggcgccacaccucacuucgacuauaucgccagcgagguguccaaaggccuggccgaucugagccuggaacugagaaagcccaucaccuucggcgugaucaccgcugacacacuggaacaggccauugagagagccggcaccaagcacggcaacaaaggaugggaagccgcucuguccgccaucgagauggccaaccuguucaagagccugcggugaggacuaguuauaagacugacuagcccgaugggccucccaacgggcccuccuccccuccuugcaccgagauuaauaaaaaaaaaaaaaaaaaaaaaaaaaaaaaaaaaaaaaaaaaaaaaaaaaaaaaaaaaaaaaaaaugcaucccccccccccccccccccccccccccccccaaaggcucuuuucagagccaccagaauu

SEQ ID NO: 13029 - RNA, 4333 nt, Artificial Sequence
  SARS-CoV-2/Wuhan/WIV05/2019__EPI_ISL_402128 spike protein mRNA gc mod (1-1211)(K986P_V987P) LumSynth construct
aggagaaagcuuaccauguucguguuucuggugcugcugccccugguguccagccagugugugaaccugaccaccagaacacagcugccuccagccuacaccaacagcuucaccagaggcguguacuaccccgacaagguguucagauccagcgugcugcacucuacccaggaccuguuccugccuuucuucagcaacgugaccugguuccacgccauccacguguccggcaccaauggcaccaagagauucgacaaccccgugcugcccuucaacgacgggguguacuuugccagcaccgagaaguccaacaucaucagaggcuggaucuucggcaccacacuggacagcaagacccagagccugcugaucgugaacaacgccaccaacguggucaucaaagugugcgaguuccaguucugcaacgaccccuuccugggcgucuacuaccacaagaacaacaagagcuggauggaaagcgaguuccggguguacagcagcgccaacaacugcaccuucgaguacgugucccagccuuuccugauggaccuggaaggcaagcagggcaacuucaagaaccugcgcgaguucguguucaagaacaucgacggcuacuucaaaaucuacagcaagcacaccccuaucaaccucgugcgggaucugccucagggcuucucugcucuggaaccccugguggaucugcccaucggcaucaacaucacccgguuucagacacugcuggcccugcacagaagcuaccugacaccuggcgauagcagcagcggauggacagcuggugccgccgcuuacuaugugggcuaccugcagccuagaaccuuccugcugaaguacaacgagaacggcaccaucaccgacgccguggauugugcucuggauccucugagcgagacaaagugcacccugaaguccuucaccguggaaaagggcaucuaccagaccagcaacuuccgggugcagcccaccgaauccaucgugcgguuccccaauaucaccaaucugugccccuucggcgagguguucaaugccaccagauucgccucuguguacgccuggaaccggaagcggaucagcaauugcguggccgacuacuccgugcuguacaacuccgccagcuucagcaccuucaagugcuacggcguguccccuaccaagcugaacgaccugugcuucacaaacguguacgccgacagcuucgugauccggggagaugaagugcggcagauugccccuggacagacaggcaagaucgccgacuacaacuacaagcugcccgacgacuucaccggcugugugauugccuggaacagcaacaaccuggacuccaaagucggcggcaacuacaauuaccuguaccggcuguuccggaaguccaaucugaagcccuucgagcgggacaucagcaccgaaaucuaucaggccggcagcaccccuugcaacggcguggaaggcuucaacugcuacuucccacugcaguccuacggcuuucagcccacaaauggcgugggcuaucagcccuacagagugguggugcugagcuucgaacugcugcaugcuccugccacagugugcggcccuaagaaaagcaccaaucucgugaagaacaaaugcgugaacuucaacuucaacggccugaccggcaccggcgugcugacagagagcaacaagaaguuccugccauuccagcaguuuggccgggauaucgccgauaccacagacgccguuagagauccccagacacuggaaauccuggacaucaccccaugcagcuucggcggagugucugugaucaccccuggcaccaacaccagcaaucagguggcagugcuguaccaggacgugaacuguaccgaagugcccguggccauucacgccgaucagcugacaccuacauggcggguguacuccaccggcagcaauguguuucagaccagagccggcugucugaucggagccgagcacgugaacaauagcuacgagugcgacauccccaucggcgcuggcaucugugccagcuaccagacacagacaaacagccccagacgggcuagaagcguggccagccagagcaucauugccuacacaaugucucugggcgccgagaacagcguggccuacuccaacaacucuaucgcuauccccaccaacuucaccaucagcgugaccaccgagauccugccuguguccaugaccaagaccagcguggacugcaccauguacaucugcggcgauuccaccgagugcuccaaccugcugcugcaguacggcagcuucugcacccagcugaauagagcccugacagggaucgccguggaacaggacaagaacacccaagagguguucgcccaagugaagcaaaucuacaagaccccuccuaucaaggacuucggcggcuucaauuucagccagauucugcccgauccuagcaagcccagcaagcggagcuucaucgaggaccugcuguucaacaaagugacacuggccgacgccggcuucaucaagcaguauggcgauugucugggcgacauugccgccagggaucugauuugcgcccagaaguuuaacggacugacagugcugccuccucugcugaccgaugagaugaucgcccaguacacaucugcccugcuggccggcacaaucacaagcggcuggacauuuggagcuggcgccgcucugcagauccccuuugcuaugcagauggccuaccgguucaacggcaucggagugacccagaaugugcuguacgagaaccagaagcugaucgccaaccaguucaacagcgccaucggcaagauccaggacagccugagcagcacagcaagcgcccugggaaagcugcaggacguggucaaccagaaugcccaggcacugaacacccuggucaagcagcuguccuccaacuucggcgccaucagcucugugcugaacgauauccugagcagacuggacccuccugaggccgaggugcagaucgacagacugaucacaggcagacugcagagccuccagacauacgugacccagcagcugaucagagccgccgagauuagagccucugccaaucuggccgccaccaagaugucugagugugugcugggccagagcaagagaguggacuuuugcggcaagggcuaccaccugaugagcuucccucagucugccccucacggcgugguguuucugcacgugacauaugugcccgcucaagagaagaauuucaccaccgcuccagccaucugccacgacggcaaagcccacuuuccuagagaaggcguguucguguccaacggcacccauugguucgugacacagcggaacuucuacgagccccagaucaucaccaccgacaacaccuucgugucuggcaacugcgacguugugaucggcauugugaacaauaccguguacgacccucugcagcccgagcuggacagcuucaaagaggaacuggacaaguacuuuaagaaccacacaagccccgacguggaccugggcgauaucagcggaaucaaugccagcgucgugaacauccagaaagagaucgaccggcugaacgagguggccaagaaucugaacgagagccugaucgaccugcaagaacuggggaaguacgagcaguacaucaagggcggaggaucuggcggaggacagaucuacgagggcaagcugacagccgagggccugagauuuggaaucguggccagccgguucaaucacgcccugguggauagacugguggaaggcgccaucgaugccauugucagacacggcggcagagaagaggacaucacccucguuagagugcccggcucuugggagauuccuguggcugcuggcgagcuggcccggaaagaagauaucgacgccguuaucgccaucggcgugcugaucagaggcgccacaccucacuucgacuauaucgccagcgagguguccaaaggccuggccgaucugagccuggaacugagaaagcccaucaccuucggcgugaucaccgcugacacacuggaacaggccauugagagagccggcaccaagcacggcaacaaaggaugggaagccgcucuguccgccaucgagauggccaaccuguucaagagccugcggugaggacuaguuauaagacugacuagcccgaugggccucccaacgggcccuccuccccuccuugcaccgagauuaauaaaaaaaaaaaaaaaaaaaaaaaaaaaaaaaaaaaaaaaaaaaaaaaaaaaaaaaaaaaaaaaaugcaucccccccccccccccccccccccccccccccaaaggcucuuuucagagccaccagaauu

SEQ ID NO: 13030 - RNA, 4333 nt, Artificial Sequence
  SARS-CoV-2/Wuhan/WIV05/2019__EPI_ISL_402128 spike protein mRNA gc mod (1-1211)(K986P_V987P_T887WN_A1020W) LumSynth construct
aggagaaagcuuaccauguucguguuucuggugcugcugccccugguguccagccagugugugaaccugaccaccagaacacagcugccuccagccuacaccaacagcuucaccagaggcguguacuaccccgacaagguguucagauccagcgugcugcacucuacccaggaccuguuccugccuuucuucagcaacgugaccugguuccacgccauccacguguccggcaccaauggcaccaagagauucgacaaccccgugcugcccuucaacgacgggguguacuuugccagcaccgagaaguccaacaucaucagaggcuggaucuucggcaccacacuggacagcaagacccagagccugcugaucgugaacaacgccaccaacguggucaucaaagugugcgaguuccaguucugcaacgaccccuuccugggcgucuacuaccacaagaacaacaagagcuggauggaaagcgaguuccggguguacagcagcgccaacaacugcaccuucgaguacgugucccagccuuuccugauggaccuggaaggcaagcagggcaacuucaagaaccugcgcgaguucguguucaagaacaucgacggcuacuucaaaaucuacagcaagcacaccccuaucaaccucgugcgggaucugccucagggcuucucugcucuggaaccccugguggaucugcccaucggcaucaacaucacccgguuucagacacugcuggcccugcacagaagcuaccugacaccuggcgauagcagcagcggauggacagcuggugccgccgcuuacuaugugggcuaccugcagccuagaaccuuccugcugaaguacaacgagaacggcaccaucaccgacgccguggauugugcucuggauccucugagcgagacaaagugcacccugaaguccuucaccguggaaaagggcaucuaccagaccagcaacuuccgggugcagcccaccgaauccaucgugcgguuccccaauaucaccaaucugugccccuucggcgagguguucaaugccaccagauucgccucuguguacgccuggaaccggaagcggaucagcaauugcguggccgacuacuccgugcuguacaacuccgccagcuucagcaccuucaagugcuacggcguguccccuaccaagcugaacgaccugugcuucacaaacguguacgccgacagcuucgugauccggggagaugaagugcggcagauugccccuggacagacaggcaagaucgccgacuacaacuacaagcugcccgacgacuucaccggcugugugauugccuggaacagcaacaaccuggacuccaaagucggcggcaacuacaauuaccuguaccggcuguuccggaaguccaaucugaagcccuucgagcgggacaucagcaccgaaaucuaucaggccggcagcaccccuugcaacggcguggaaggcuucaacugcuacuucccacugcaguccuacggcuuucagcccacaaauggcgugggcuaucagcccuacagagugguggugcugagcuucgaacugcugcaugcuccugccacagugugcggcccuaagaaaagcaccaaucucgugaagaacaaaugcgugaacuucaacuucaacggccugaccggcaccggcgugcugacagagagcaacaagaaguuccugccauuccagcaguuuggccgggauaucgccgauaccacagacgccguuagagauccccagacacuggaaauccuggacaucaccccaugcagcuucggcggagugucugugaucaccccuggcaccaacaccagcaaucagguggcagugcuguaccaggacgugaacuguaccgaagugcccguggccauucacgccgaucagcugacaccuacauggcggguguacuccaccggcagcaauguguuucagaccagagccggcugucugaucggagccgagcacgugaacaauagcuacgagugcgacauccccaucggcgcuggcaucugugccagcuaccagacacagacaaacagccccagacgggcuagaagcguggccagccagagcaucauugccuacacaaugucucugggcgccgagaacagcguggccuacuccaacaacucuaucgcuauccccaccaacuucaccaucagcgugaccaccgagauccugccuguguccaugaccaagaccagcguggacugcaccauguacaucugcggcgauuccaccgagugcuccaaccugcugcugcaguacggcagcuucugcacccagcugaauagagcccugacagggaucgccguggaacaggacaagaacacccaagagguguucgcccaagugaagcaaaucuacaagaccccuccuaucaaggacuucggcggcuucaauuucagccagauucugcccgauccuagcaagcccagcaagcggagcuucaucgaggaccugcuguucaacaaagugacacuggccgacgccggcuucaucaagcaguauggcgauugucugggcgacauugccgccagggaucugauuugcgcccagaaguuuaacggacugacagugcugccuccucugcugaccgaugagaugaucgcccaguacacaucugcccugcuggccggcacaaucacaagcggcuggugguuuggagcuggcgccgcucugcagauccccuuugcuaugcagauggccuaccgguucaacggcaucggagugacccagaaugugcuguacgagaaccagaagcugaucgccaaccaguucaacagcgccaucggcaagauccaggacagccugagcagcacagcaagcgcccugggaaagcugcaggacguggucaaccagaaugcccaggcacugaacacccuggucaagcagcuguccuccaacuucggcgccaucagcucugugcugaacgauauccugagcagacuggacccuccugaggccgaggugcagaucgacagacugaucacaggcagacugcagagccuccagacauacgugacccagcagcugaucagagccgccgagauuagauggucugccaaucuggccgccaccaagaugucugagugugugcugggccagagcaagagaguggacuuuugcggcaagggcuaccaccugaugagcuucccucagucugccccucacggcgugguguuucugcacgugacauaugugcccgcucaagagaagaauuucaccaccgcuccagccaucugccacgacggcaaagcccacuuuccuagagaaggcguguucguguccaacggcacccauugguucgugacacagcggaacuucuacgagccccagaucaucaccaccgacaacaccuucgugucuggcaacugcgacguugugaucggcauugugaacaauaccguguacgacccucugcagcccgagcuggacagcuucaaagaggaacuggacaaguacuuuaagaaccacacaagccccgacguggaccugggcgauaucagcggaaucaaugccagcgucgugaacauccagaaagagaucgaccggcugaacgagguggccaagaaucugaacgagagccugaucgaccugcaagaacuggggaaguacgagcaguacaucaagggcggaggaucuggcggaggacagaucuacgagggcaagcugacagccgagggccugagauuuggaaucguggccagccgguucaaucacgcccugguggauagacugguggaaggcgccaucgaugccauugucagacacggcggcagagaagaggacaucacccucguuagagugcccggcucuugggagauuccuguggcugcuggcgagcuggcccggaaagaagauaucgacgccguuaucgccaucggcgugcugaucagaggcgccacaccucacuucgacuauaucgccagcgagguguccaaaggccuggccgaucugagccuggaacugagaaagcccaucaccuucggcgugaucaccgcugacacacuggaacaggccauugagagagccggcaccaagcacggcaacaaaggaugggaagccgcucuguccgccaucgagauggccaaccuguucaagagccugcggugaggacuaguuauaagacugacuagcccgaugggccucccaacgggcccuccuccccuccuugcaccgagauuaauaaaaaaaaaaaaaaaaaaaaaaaaaaaaaaaaaaaaaaaaaaaaaaaaaaaaaaaaaaaaaaaaugcaucccccccccccccccccccccccccccccccaaaggcucuuuucagagccaccagaauu

SEQ ID NO: 13031 - RNA, 4333 nt, Artificial Sequence
  SARS-CoV-2/Wuhan/WIV05/2019__EPI_ISL_402128 spike protein mRNA gc mod (1-1211)(K986P_V987P_P1069F) LumSynth construct
aggagaaagcuuaccauguucguguuucuggugcugcugccccugguguccagccagugugugaaccugaccaccagaacacagcugccuccagccuacaccaacagcuucaccagaggcguguacuaccccgacaagguguucagauccagcgugcugcacucuacccaggaccuguuccugccuuucuucagcaacgugaccugguuccacgccauccacguguccggcaccaauggcaccaagagauucgacaaccccgugcugcccuucaacgacgggguguacuuugccagcaccgagaaguccaacaucaucagaggcuggaucuucggcaccacacuggacagcaagacccagagccugcugaucgugaacaacgccaccaacguggucaucaaagugugcgaguuccaguucugcaacgaccccuuccugggcgucuacuaccacaagaacaacaagagcuggauggaaagcgaguuccggguguacagcagcgccaacaacugcaccuucgaguacgugucccagccuuuccugauggaccuggaaggcaagcagggcaacuucaagaaccugcgcgaguucguguucaagaacaucgacggcuacuucaaaaucuacagcaagcacaccccuaucaaccucgugcgggaucugccucagggcuucucugcucuggaaccccugguggaucugcccaucggcaucaacaucacccgguuucagacacugcuggcccugcacagaagcuaccugacaccuggcgauagcagcagcggauggacagcuggugccgccgcuuacuaugugggcuaccugcagccuagaaccuuccugcugaaguacaacgagaacggcaccaucaccgacgccguggauugugcucuggauccucugagcgagacaaagugcacccugaaguccuucaccguggaaaagggcaucuaccagaccagcaacuuccgggugcagcccaccgaauccaucgugcgguuccccaauaucaccaaucugugccccuucggcgagguguucaaugccaccagauucgccucuguguacgccuggaaccggaagcggaucagcaauugcguggccgacuacuccgugcuguacaacuccgccagcuucagcaccuucaagugcuacggcguguccccuaccaagcugaacgaccugugcuucacaaacguguacgccgacagcuucgugauccggggagaugaagugcggcagauugccccuggacagacaggcaagaucgccgacuacaacuacaagcugcccgacgacuucaccggcugugugauugccuggaacagcaacaaccuggacuccaaagucggcggcaacuacaauuaccuguaccggcuguuccggaaguccaaucugaagcccuucgagcgggacaucagcaccgaaaucuaucaggccggcagcaccccuugcaacggcguggaaggcuucaacugcuacuucccacugcaguccuacggcuuucagcccacaaauggcgugggcuaucagcccuacagagugguggugcugagcuucgaacugcugcaugcuccugccacagugugcggcccuaagaaaagcaccaaucucgugaagaacaaaugcgugaacuucaacuucaacggccugaccggcaccggcgugcugacagagagcaacaagaaguuccugccauuccagcaguuuggccgggauaucgccgauaccacagacgccguuagagauccccagacacuggaaauccuggacaucaccccaugcagcuucggcggagugucugugaucaccccuggcaccaacaccagcaaucagguggcagugcuguaccaggacgugaacuguaccgaagugcccguggccauucacgccgaucagcugacaccuacauggcggguguacuccaccggcagcaauguguuucagaccagagccggcugucugaucggagccgagcacgugaacaauagcuacgagugcgacauccccaucggcgcuggcaucugugccagcuaccagacacagacaaacagccccagacgggcuagaagcguggccagccagagcaucauugccuacacaaugucucugggcgccgagaacagcguggccuacuccaacaacucuaucgcuauccccaccaacuucaccaucagcgugaccaccgagauccugccuguguccaugaccaagaccagcguggacugcaccauguacaucugcggcgauuccaccgagugcuccaaccugcugcugcaguacggcagcuucugcacccagcugaauagagcccugacagggaucgccguggaacaggacaagaacacccaagagguguucgcccaagugaagcaaaucuacaagaccccuccuaucaaggacuucggcggcuucaauuucagccagauucugcccgauccuagcaagcccagcaagcggagcuucaucgaggaccugcuguucaacaaagugacacuggccgacgccggcuucaucaagcaguauggcgauugucugggcgacauugccgccagggaucugauuugcgcccagaaguuuaacggacugacagugcugccuccucugcugaccgaugagaugaucgcccaguacacaucugcccugcuggccggcacaaucacaagcggcuggacauuuggagcuggcgccgcucugcagauccccuuugcuaugcagauggccuaccgguucaacggcaucggagugacccagaaugugcuguacgagaaccagaagcugaucgccaaccaguucaacagcgccaucggcaagauccaggacagccugagcagcacagcaagcgcccugggaaagcugcaggacguggucaaccagaaugcccaggcacugaacacccuggucaagcagcuguccuccaacuucggcgccaucagcucugugcugaacgauauccugagcagacuggacccuccugaggccgaggugcagaucgacagacugaucacaggcagacugcagagccuccagacauacgugacccagcagcugaucagagccgccgagauuagagccucugccaaucuggccgccaccaagaugucugagugugugcugggccagagcaagagaguggacuuuugcggcaagggcuaccaccugaugagcuucccucagucugccccucacggcgugguguuucugcacgugacauauguguucgcucaagagaagaauuucaccaccgcuccagccaucugccacgacggcaaagcccacuuuccuagagaaggcguguucguguccaacggcacccauugguucgugacacagcggaacuucuacgagccccagaucaucaccaccgacaacaccuucgugucuggcaacugcgacguugugaucggcauugugaacaauaccguguacgacccucugcagcccgagcuggacagcuucaaagaggaacuggacaaguacuuuaagaaccacacaagccccgacguggaccugggcgauaucagcggaaucaaugccagcgucgugaacauccagaaagagaucgaccggcugaacgagguggccaagaaucugaacgagagccugaucgaccugcaagaacuggggaaguacgagcaguacaucaagggcggaggaucuggcggaggacagaucuacgagggcaagcugacagccgagggccugagauuuggaaucguggccagccgguucaaucacgcccugguggauagacugguggaaggcgccaucgaugccauugucagacacggcggcagagaagaggacaucacccucguuagagugcccggcucuugggagauuccuguggcugcuggcgagcuggcccggaaagaagauaucgacgccguuaucgccaucggcgugcugaucagaggcgccacaccucacuucgacuauaucgccagcgagguguccaaaggccuggccgaucugagccuggaacugagaaagcccaucaccuucggcgugaucaccgcugacacacuggaacaggccauugagagagccggcaccaagcacggcaacaaaggaugggaagccgcucuguccgccaucgagauggccaaccuguucaagagccugcggugaggacuaguuauaagacugacuagcccgaugggccucccaacgggcccuccuccccuccuugcaccgagauuaauaaaaaaaaaaaaaaaaaaaaaaaaaaaaaaaaaaaaaaaaaaaaaaaaaaaaaaaaaaaaaaaaugcaucccccccccccccccccccccccccccccccaaaggcucuuuucagagccaccagaauu

SEQ ID NO: 13032 - RNA, 4333 nt, Artificial Sequence
  SARS-CoV-2/Wuhan/WIV05/2019__EPI_ISL_402128 spike protein mRNA gc mod (1-1211)(K986P_V987P_ H1048Q_H1064N_ H1083N_H1101N) LumSynth construct
aggagaaagcuuaccauguucguguuucuggugcugcugccccugguguccagccagugugugaaccugaccaccagaacacagcugccuccagccuacaccaacagcuucaccagaggcguguacuaccccgacaagguguucagauccagcgugcugcacucuacccaggaccuguuccugccuuucuucagcaacgugaccugguuccacgccauccacguguccggcaccaauggcaccaagagauucgacaaccccgugcugcccuucaacgacgggguguacuuugccagcaccgagaaguccaacaucaucagaggcuggaucuucggcaccacacuggacagcaagacccagagccugcugaucgugaacaacgccaccaacguggucaucaaagugugcgaguuccaguucugcaacgaccccuuccugggcgucuacuaccacaagaacaacaagagcuggauggaaagcgaguuccggguguacagcagcgccaacaacugcaccuucgaguacgugucccagccuuuccugauggaccuggaaggcaagcagggcaacuucaagaaccugcgcgaguucguguucaagaacaucgacggcuacuucaaaaucuacagcaagcacaccccuaucaaccucgugcgggaucugccucagggcuucucugcucuggaaccccugguggaucugcccaucggcaucaacaucacccgguuucagacacugcuggcccugcacagaagcuaccugacaccuggcgauagcagcagcggauggacagcuggugccgccgcuuacuaugugggcuaccugcagccuagaaccuuccugcugaaguacaacgagaacggcaccaucaccgacgccguggauugugcucuggauccucugagcgagacaaagugcacccugaaguccuucaccguggaaaagggcaucuaccagaccagcaacuuccgggugcagcccaccgaauccaucgugcgguuccccaauaucaccaaucugugccccuucggcgagguguucaaugccaccagauucgccucuguguacgccuggaaccggaagcggaucagcaauugcguggccgacuacuccgugcuguacaacuccgccagcuucagcaccuucaagugcuacggcguguccccuaccaagcugaacgaccugugcuucacaaacguguacgccgacagcuucgugauccggggagaugaagugcggcagauugccccuggacagacaggcaagaucgccgacuacaacuacaagcugcccgacgacuucaccggcugugugauugccuggaacagcaacaaccuggacuccaaagucggcggcaacuacaauuaccuguaccggcuguuccggaaguccaaucugaagcccuucgagcgggacaucagcaccgaaaucuaucaggccggcagcaccccuugcaacggcguggaaggcuucaacugcuacuucccacugcaguccuacggcuuucagcccacaaauggcgugggcuaucagcccuacagagugguggugcugagcuucgaacugcugcaugcuccugccacagugugcggcccuaagaaaagcaccaaucucgugaagaacaaaugcgugaacuucaacuucaacggccugaccggcaccggcgugcugacagagagcaacaagaaguuccugccauuccagcaguuuggccgggauaucgccgauaccacagacgccguuagagauccccagacacuggaaauccuggacaucaccccaugcagcuucggcggagugucugugaucaccccuggcaccaacaccagcaaucagguggcagugcuguaccaggacgugaacuguaccgaagugcccguggccauucacgccgaucagcugacaccuacauggcggguguacuccaccggcagcaauguguuucagaccagagccggcugucugaucggagccgagcacgugaacaauagcuacgagugcgacauccccaucggcgcuggcaucugugccagcuaccagacacagacaaacagccccagacgggcuagaagcguggccagccagagcaucauugccuacacaaugucucugggcgccgagaacagcguggccuacuccaacaacucuaucgcuauccccaccaacuucaccaucagcgugaccaccgagauccugccuguguccaugaccaagaccagcguggacugcaccauguacaucugcggcgauuccaccgagugcuccaaccugcugcugcaguacggcagcuucugcacccagcugaauagagcccugacagggaucgccguggaacaggacaagaacacccaagagguguucgcccaagugaagcaaaucuacaagaccccuccuaucaaggacuucggcggcuucaauuucagccagauucugcccgauccuagcaagcccagcaagcggagcuucaucgaggaccugcuguucaacaaagugacacuggccgacgccggcuucaucaagcaguauggcgauugucugggcgacauugccgccagggaucugauuugcgcccagaaguuuaacggacugacagugcugccuccucugcugaccgaugagaugaucgcccaguacacaucugcccugcuggccggcacaaucacaagcggcuggacauuuggagcuggcgccgcucugcagauccccuuugcuaugcagauggccuaccgguucaacggcaucggagugacccagaaugugcuguacgagaaccagaagcugaucgccaaccaguucaacagcgccaucggcaagauccaggacagccugagcagcacagcaagcgcccugggaaagcugcaggacguggucaaccagaaugcccaggcacugaacacccuggucaagcagcuguccuccaacuucggcgccaucagcucugugcugaacgauauccugagcagacuggacccuccugaggccgaggugcagaucgacagacugaucacaggcagacugcagagccuccagacauacgugacccagcagcugaucagagccgccgagauuagagccucugccaaucuggccgccaccaagaugucugagugugugcugggccagagcaagagaguggacuuuugcggcaagggcuaccagcugaugagcuucccucagucugccccucacggcgugguguuucugaacgugacauaugugcccgcucaagagaagaauuucaccaccgcuccagccaucugcaacgacggcaaagcccacuuuccuagagaaggcguguucguguccaacggcaccaacugguucgugacacagcggaacuucuacgagccccagaucaucaccaccgacaacaccuucgugucuggcaacugcgacguugugaucggcauugugaacaauaccguguacgacccucugcagcccgagcuggacagcuucaaagaggaacuggacaaguacuuuaagaaccacacaagccccgacguggaccugggcgauaucagcggaaucaaugccagcgucgugaacauccagaaagagaucgaccggcugaacgagguggccaagaaucugaacgagagccugaucgaccugcaagaacuggggaaguacgagcaguacaucaagggcggaggaucuggcggaggacagaucuacgagggcaagcugacagccgagggccugagauuuggaaucguggccagccgguucaaucacgcccugguggauagacugguggaaggcgccaucgaugccauugucagacacggcggcagagaagaggacaucacccucguuagagugcccggcucuugggagauuccuguggcugcuggcgagcuggcccggaaagaagauaucgacgccguuaucgccaucggcgugcugaucagaggcgccacaccucacuucgacuauaucgccagcgagguguccaaaggccuggccgaucugagccuggaacugagaaagcccaucaccuucggcgugaucaccgcugacacacuggaacaggccauugagagagccggcaccaagcacggcaacaaaggaugggaagccgcucuguccgccaucgagauggccaaccuguucaagagccugcggugaggacuaguuauaagacugacuagcccgaugggccucccaacgggcccuccuccccuccuugcaccgagauuaauaaaaaaaaaaaaaaaaaaaaaaaaaaaaaaaaaaaaaaaaaaaaaaaaaaaaaaaaaaaaaaaaugcaucccccccccccccccccccccccccccccccaaaggcucuuuucagagccaccagaauu

SEQ ID NO: 13033 - RNA, 4333 nt, Artificial Sequence
  SARS-CoV-2/Wuhan/WIV05/2019__EPI_ISL_402128 spike protein mRNA gc mod (1-1211)(I712C_T1077C) LumSynth construct
aggagaaagcuuaccauguucguguuucuggugcugcugccccugguguccagccagugugugaaccugaccaccagaacacagcugccuccagccuacaccaacagcuucaccagaggcguguacuaccccgacaagguguucagauccagcgugcugcacucuacccaggaccuguuccugccuuucuucagcaacgugaccugguuccacgccauccacguguccggcaccaauggcaccaagagauucgacaaccccgugcugcccuucaacgacgggguguacuuugccagcaccgagaaguccaacaucaucagaggcuggaucuucggcaccacacuggacagcaagacccagagccugcugaucgugaacaacgccaccaacguggucaucaaagugugcgaguuccaguucugcaacgaccccuuccugggcgucuacuaccacaagaacaacaagagcuggauggaaagcgaguuccggguguacagcagcgccaacaacugcaccuucgaguacgugucccagccuuuccugauggaccuggaaggcaagcagggcaacuucaagaaccugcgcgaguucguguucaagaacaucgacggcuacuucaaaaucuacagcaagcacaccccuaucaaccucgugcgggaucugccucagggcuucucugcucuggaaccccugguggaucugcccaucggcaucaacaucacccgguuucagacacugcuggcccugcacagaagcuaccugacaccuggcgauagcagcagcggauggacagcuggugccgccgcuuacuaugugggcuaccugcagccuagaaccuuccugcugaaguacaacgagaacggcaccaucaccgacgccguggauugugcucuggauccucugagcgagacaaagugcacccugaaguccuucaccguggaaaagggcaucuaccagaccagcaacuuccgggugcagcccaccgaauccaucgugcgguuccccaauaucaccaaucugugccccuucggcgagguguucaaugccaccagauucgccucuguguacgccuggaaccggaagcggaucagcaauugcguggccgacuacuccgugcuguacaacuccgccagcuucagcaccuucaagugcuacggcguguccccuaccaagcugaacgaccugugcuucacaaacguguacgccgacagcuucgugauccggggagaugaagugcggcagauugccccuggacagacaggcaagaucgccgacuacaacuacaagcugcccgacgacuucaccggcugugugauugccuggaacagcaacaaccuggacuccaaagucggcggcaacuacaauuaccuguaccggcuguuccggaaguccaaucugaagcccuucgagcgggacaucagcaccgaaaucuaucaggccggcagcaccccuugcaacggcguggaaggcuucaacugcuacuucccacugcaguccuacggcuuucagcccacaaauggcgugggcuaucagcccuacagagugguggugcugagcuucgaacugcugcaugcuccugccacagugugcggcccuaagaaaagcaccaaucucgugaagaacaaaugcgugaacuucaacuucaacggccugaccggcaccggcgugcugacagagagcaacaagaaguuccugccauuccagcaguuuggccgggauaucgccgauaccacagacgccguuagagauccccagacacuggaaauccuggacaucaccccaugcagcuucggcggagugucugugaucaccccuggcaccaacaccagcaaucagguggcagugcuguaccaggacgugaacuguaccgaagugcccguggccauucacgccgaucagcugacaccuacauggcggguguacuccaccggcagcaauguguuucagaccagagccggcugucugaucggagccgagcacgugaacaauagcuacgagugcgacauccccaucggcgcuggcaucugugccagcuaccagacacagacaaacagccccagacgggcuagaagcguggccagccagagcaucauugccuacacaaugucucugggcgccgagaacagcguggccuacuccaacaacucuugcgcuauccccaccaacuucaccaucagcgugaccaccgagauccugccuguguccaugaccaagaccagcguggacugcaccauguacaucugcggcgauuccaccgagugcuccaaccugcugcugcaguacggcagcuucugcacccagcugaauagagcccugacagggaucgccguggaacaggacaagaacacccaagagguguucgcccaagugaagcaaaucuacaagaccccuccuaucaaggacuucggcggcuucaauuucagccagauucugcccgauccuagcaagcccagcaagcggagcuucaucgaggaccugcuguucaacaaagugacacuggccgacgccggcuucaucaagcaguauggcgauugucugggcgacauugccgccagggaucugauuugcgcccagaaguuuaacggacugacagugcugccuccucugcugaccgaugagaugaucgcccaguacacaucugcccugcuggccggcacaaucacaagcggcuggacauuuggagcuggcgccgcucugcagauccccuuugcuaugcagauggccuaccgguucaacggcaucggagugacccagaaugugcuguacgagaaccagaagcugaucgccaaccaguucaacagcgccaucggcaagauccaggacagccugagcagcacagcaagcgcccugggaaagcugcaggacguggucaaccagaaugcccaggcacugaacacccuggucaagcagcuguccuccaacuucggcgccaucagcucugugcugaacgauauccugagcagacuggacaaggucgaggccgaggugcagaucgacagacugaucacaggcagacugcagagccuccagacauacgugacccagcagcugaucagagccgccgagauuagagccucugccaaucuggccgccaccaagaugucugagugugugcugggccagagcaagagaguggacuuuugcggcaagggcuaccaccugaugagcuucccucagucugccccucacggcgugguguuucugcacgugacauaugugcccgcucaagagaagaauuucaccugugcuccagccaucugccacgacggcaaagcccacuuuccuagagaaggcguguucguguccaacggcacccauugguucgugacacagcggaacuucuacgagccccagaucaucaccaccgacaacaccuucgugucuggcaacugcgacguugugaucggcauugugaacaauaccguguacgacccucugcagcccgagcuggacagcuucaaagaggaacuggacaaguacuuuaagaaccacacaagccccgacguggaccugggcgauaucagcggaaucaaugccagcgucgugaacauccagaaagagaucgaccggcugaacgagguggccaagaaucugaacgagagccugaucgaccugcaagaacuggggaaguacgagcaguacaucaagggcggaggaucuggcggaggacagaucuacgagggcaagcugacagccgagggccugagauuuggaaucguggccagccgguucaaucacgcccugguggauagacugguggaaggcgccaucgaugccauugucagacacggcggcagagaagaggacaucacccucguuagagugcccggcucuugggagauuccuguggcugcuggcgagcuggcccggaaagaagauaucgacgccguuaucgccaucggcgugcugaucagaggcgccacaccucacuucgacuauaucgccagcgagguguccaaaggccuggccgaucugagccuggaacugagaaagcccaucaccuucggcgugaucaccgcugacacacuggaacaggccauugagagagccggcaccaagcacggcaacaaaggaugggaagccgcucuguccgccaucgagauggccaaccuguucaagagccugcggugaggacuaguuauaagacugacuagcccgaugggccucccaacgggcccuccuccccuccuugcaccgagauuaauaaaaaaaaaaaaaaaaaaaaaaaaaaaaaaaaaaaaaaaaaaaaaaaaaaaaaaaaaaaaaaaaugcaucccccccccccccccccccccccccccccccaaaggcucuuuucagagccaccagaauu

SEQ ID NO: 13034 - RNA, 4333 nt, Artificial Sequence
  SARS-CoV-2/Wuhan/WIV05/2019__EPI_ISL_402128 spike protein mRNA gc mod (1-1211)(I714C_Y1110C) LumSynth construct
aggagaaagcuuaccauguucguguuucuggugcugcugccccugguguccagccagugugugaaccugaccaccagaacacagcugccuccagccuacaccaacagcuucaccagaggcguguacuaccccgacaagguguucagauccagcgugcugcacucuacccaggaccuguuccugccuuucuucagcaacgugaccugguuccacgccauccacguguccggcaccaauggcaccaagagauucgacaaccccgugcugcccuucaacgacgggguguacuuugccagcaccgagaaguccaacaucaucagaggcuggaucuucggcaccacacuggacagcaagacccagagccugcugaucgugaacaacgccaccaacguggucaucaaagugugcgaguuccaguucugcaacgaccccuuccugggcgucuacuaccacaagaacaacaagagcuggauggaaagcgaguuccggguguacagcagcgccaacaacugcaccuucgaguacgugucccagccuuuccugauggaccuggaaggcaagcagggcaacuucaagaaccugcgcgaguucguguucaagaacaucgacggcuacuucaaaaucuacagcaagcacaccccuaucaaccucgugcgggaucugccucagggcuucucugcucuggaaccccugguggaucugcccaucggcaucaacaucacccgguuucagacacugcuggcccugcacagaagcuaccugacaccuggcgauagcagcagcggauggacagcuggugccgccgcuuacuaugugggcuaccugcagccuagaaccuuccugcugaaguacaacgagaacggcaccaucaccgacgccguggauugugcucuggauccucugagcgagacaaagugcacccugaaguccuucaccguggaaaagggcaucuaccagaccagcaacuuccgggugcagcccaccgaauccaucgugcgguuccccaauaucaccaaucugugccccuucggcgagguguucaaugccaccagauucgccucuguguacgccuggaaccggaagcggaucagcaauugcguggccgacuacuccgugcuguacaacuccgccagcuucagcaccuucaagugcuacggcguguccccuaccaagcugaacgaccugugcuucacaaacguguacgccgacagcuucgugauccggggagaugaagugcggcagauugccccuggacagacaggcaagaucgccgacuacaacuacaagcugcccgacgacuucaccggcugugugauugccuggaacagcaacaaccuggacuccaaagucggcggcaacuacaauuaccuguaccggcuguuccggaaguccaaucugaagcccuucgagcgggacaucagcaccgaaaucuaucaggccggcagcaccccuugcaacggcguggaaggcuucaacugcuacuucccacugcaguccuacggcuuucagcccacaaauggcgugggcuaucagcccuacagagugguggugcugagcuucgaacugcugcaugcuccugccacagugugcggcccuaagaaaagcaccaaucucgugaagaacaaaugcgugaacuucaacuucaacggccugaccggcaccggcgugcugacagagagcaacaagaaguuccugccauuccagcaguuuggccgggauaucgccgauaccacagacgccguuagagauccccagacacuggaaauccuggacaucaccccaugcagcuucggcggagugucugugaucaccccuggcaccaacaccagcaaucagguggcagugcuguaccaggacgugaacuguaccgaagugcccguggccauucacgccgaucagcugacaccuacauggcggguguacuccaccggcagcaauguguuucagaccagagccggcugucugaucggagccgagcacgugaacaauagcuacgagugcgacauccccaucggcgcuggcaucugugccagcuaccagacacagacaaacagccccagacgggcuagaagcguggccagccagagcaucauugccuacacaaugucucugggcgccgagaacagcguggccuacuccaacaacucuaucgcuugccccaccaacuucaccaucagcgugaccaccgagauccugccuguguccaugaccaagaccagcguggacugcaccauguacaucugcggcgauuccaccgagugcuccaaccugcugcugcaguacggcagcuucugcacccagcugaauagagcccugacagggaucgccguggaacaggacaagaacacccaagagguguucgcccaagugaagcaaaucuacaagaccccuccuaucaaggacuucggcggcuucaauuucagccagauucugcccgauccuagcaagcccagcaagcggagcuucaucgaggaccugcuguucaacaaagugacacuggccgacgccggcuucaucaagcaguauggcgauugucugggcgacauugccgccagggaucugauuugcgcccagaaguuuaacggacugacagugcugccuccucugcugaccgaugagaugaucgcccaguacacaucugcccugcuggccggcacaaucacaagcggcuggacauuuggagcuggcgccgcucugcagauccccuuugcuaugcagauggccuaccgguucaacggcaucggagugacccagaaugugcuguacgagaaccagaagcugaucgccaaccaguucaacagcgccaucggcaagauccaggacagccugagcagcacagcaagcgcccugggaaagcugcaggacguggucaaccagaaugcccaggcacugaacacccuggucaagcagcuguccuccaacuucggcgccaucagcucugugcugaacgauauccugagcagacuggacaaggucgaggccgaggugcagaucgacagacugaucacaggcagacugcagagccuccagacauacgugacccagcagcugaucagagccgccgagauuagagccucugccaaucuggccgccaccaagaugucugagugugugcugggccagagcaagagaguggacuuuugcggcaagggcuaccaccugaugagcuucccucagucugccccucacggcgugguguuucugcacgugacauaugugcccgcucaagagaagaauuucaccaccgcuccagccaucugccacgacggcaaagcccacuuuccuagagaaggcguguucguguccaacggcacccauugguucgugacacagcggaacuucugugagccccagaucaucaccaccgacaacaccuucgugucuggcaacugcgacguugugaucggcauugugaacaauaccguguacgacccucugcagcccgagcuggacagcuucaaagaggaacuggacaaguacuuuaagaaccacacaagccccgacguggaccugggcgauaucagcggaaucaaugccagcgucgugaacauccagaaagagaucgaccggcugaacgagguggccaagaaucugaacgagagccugaucgaccugcaagaacuggggaaguacgagcaguacaucaagggcggaggaucuggcggaggacagaucuacgagggcaagcugacagccgagggccugagauuuggaaucguggccagccgguucaaucacgcccugguggauagacugguggaaggcgccaucgaugccauugucagacacggcggcagagaagaggacaucacccucguuagagugcccggcucuugggagauuccuguggcugcuggcgagcuggcccggaaagaagauaucgacgccguuaucgccaucggcgugcugaucagaggcgccacaccucacuucgacuauaucgccagcgagguguccaaaggccuggccgaucugagccuggaacugagaaagcccaucaccuucggcgugaucaccgcugacacacuggaacaggccauugagagagccggcaccaagcacggcaacaaaggaugggaagccgcucuguccgccaucgagauggccaaccuguucaagagccugcggugaggacuaguuauaagacugacuagcccgaugggccucccaacgggcccuccuccccuccuugcaccgagauuaauaaaaaaaaaaaaaaaaaaaaaaaaaaaaaaaaaaaaaaaaaaaaaaaaaaaaaaaaaaaaaaaaugcaucccccccccccccccccccccccccccccccaaaggcucuuuucagagccaccagaauu

SEQ ID NO: 13035 - RNA, 4333 nt, Artificial Sequence
  SARS-CoV-2/Wuhan/WIV05/2019__EPI_ISL_402128 spike protein mRNA gc mod (1-1211)(P715C_P1069C) LumSynth construct
aggagaaagcuuaccauguucguguuucuggugcugcugccccugguguccagccagugugugaaccugaccaccagaacacagcugccuccagccuacaccaacagcuucaccagaggcguguacuaccccgacaagguguucagauccagcgugcugcacucuacccaggaccuguuccugccuuucuucagcaacgugaccugguuccacgccauccacguguccggcaccaauggcaccaagagauucgacaaccccgugcugcccuucaacgacgggguguacuuugccagcaccgagaaguccaacaucaucagaggcuggaucuucggcaccacacuggacagcaagacccagagccugcugaucgugaacaacgccaccaacguggucaucaaagugugcgaguuccaguucugcaacgaccccuuccugggcgucuacuaccacaagaacaacaagagcuggauggaaagcgaguuccggguguacagcagcgccaacaacugcaccuucgaguacgugucccagccuuuccugauggaccuggaaggcaagcagggcaacuucaagaaccugcgcgaguucguguucaagaacaucgacggcuacuucaaaaucuacagcaagcacaccccuaucaaccucgugcgggaucugccucagggcuucucugcucuggaaccccugguggaucugcccaucggcaucaacaucacccgguuucagacacugcuggcccugcacagaagcuaccugacaccuggcgauagcagcagcggauggacagcuggugccgccgcuuacuaugugggcuaccugcagccuagaaccuuccugcugaaguacaacgagaacggcaccaucaccgacgccguggauugugcucuggauccucugagcgagacaaagugcacccugaaguccuucaccguggaaaagggcaucuaccagaccagcaacuuccgggugcagcccaccgaauccaucgugcgguuccccaauaucaccaaucugugccccuucggcgagguguucaaugccaccagauucgccucuguguacgccuggaaccggaagcggaucagcaauugcguggccgacuacuccgugcuguacaacuccgccagcuucagcaccuucaagugcuacggcguguccccuaccaagcugaacgaccugugcuucacaaacguguacgccgacagcuucgugauccggggagaugaagugcggcagauugccccuggacagacaggcaagaucgccgacuacaacuacaagcugcccgacgacuucaccggcugugugauugccuggaacagcaacaaccuggacuccaaagucggcggcaacuacaauuaccuguaccggcuguuccggaaguccaaucugaagcccuucgagcgggacaucagcaccgaaaucuaucaggccggcagcaccccuugcaacggcguggaaggcuucaacugcuacuucccacugcaguccuacggcuuucagcccacaaauggcgugggcuaucagcccuacagagugguggugcugagcuucgaacugcugcaugcuccugccacagugugcggcccuaagaaaagcaccaaucucgugaagaacaaaugcgugaacuucaacuucaacggccugaccggcaccggcgugcugacagagagcaacaagaaguuccugccauuccagcaguuuggccgggauaucgccgauaccacagacgccguuagagauccccagacacuggaaauccuggacaucaccccaugcagcuucggcggagugucugugaucaccccuggcaccaacaccagcaaucagguggcagugcuguaccaggacgugaacuguaccgaagugcccguggccauucacgccgaucagcugacaccuacauggcggguguacuccaccggcagcaauguguuucagaccagagccggcugucugaucggagccgagcacgugaacaauagcuacgagugcgacauccccaucggcgcuggcaucugugccagcuaccagacacagacaaacagccccagacgggcuagaagcguggccagccagagcaucauugccuacacaaugucucugggcgccgagaacagcguggccuacuccaacaacucuaucgcuaucugcaccaacuucaccaucagcgugaccaccgagauccugccuguguccaugaccaagaccagcguggacugcaccauguacaucugcggcgauuccaccgagugcuccaaccugcugcugcaguacggcagcuucugcacccagcugaauagagcccugacagggaucgccguggaacaggacaagaacacccaagagguguucgcccaagugaagcaaaucuacaagaccccuccuaucaaggacuucggcggcuucaauuucagccagauucugcccgauccuagcaagcccagcaagcggagcuucaucgaggaccugcuguucaacaaagugacacuggccgacgccggcuucaucaagcaguauggcgauugucugggcgacauugccgccagggaucugauuugcgcccagaaguuuaacggacugacagugcugccuccucugcugaccgaugagaugaucgcccaguacacaucugcccugcuggccggcacaaucacaagcggcuggacauuuggagcuggcgccgcucugcagauccccuuugcuaugcagauggccuaccgguucaacggcaucggagugacccagaaugugcuguacgagaaccagaagcugaucgccaaccaguucaacagcgccaucggcaagauccaggacagccugagcagcacagcaagcgcccugggaaagcugcaggacguggucaaccagaaugcccaggcacugaacacccuggucaagcagcuguccuccaacuucggcgccaucagcucugugcugaacgauauccugagcagacuggacaaggucgaggccgaggugcagaucgacagacugaucacaggcagacugcagagccuccagacauacgugacccagcagcugaucagagccgccgagauuagagccucugccaaucuggccgccaccaagaugucugagugugugcugggccagagcaagagaguggacuuuugcggcaagggcuaccaccugaugagcuucccucagucugccccucacggcgugguguuucugcacgugacauaugugugugcucaagagaagaauuucaccaccgcuccagccaucugccacgacggcaaagcccacuuuccuagagaaggcguguucguguccaacggcacccauugguucgugacacagcggaacuucuacgagccccagaucaucaccaccgacaacaccuucgugucuggcaacugcgacguugugaucggcauugugaacaauaccguguacgacccucugcagcccgagcuggacagcuucaaagaggaacuggacaaguacuuuaagaaccacacaagccccgacguggaccugggcgauaucagcggaaucaaugccagcgucgugaacauccagaaagagaucgaccggcugaacgagguggccaagaaucugaacgagagccugaucgaccugcaagaacuggggaaguacgagcaguacaucaagggcggaggaucuggcggaggacagaucuacgagggcaagcugacagccgagggccugagauuuggaaucguggccagccgguucaaucacgcccugguggauagacugguggaaggcgccaucgaugccauugucagacacggcggcagagaagaggacaucacccucguuagagugcccggcucuugggagauuccuguggcugcuggcgagcuggcccggaaagaagauaucgacgccguuaucgccaucggcgugcugaucagaggcgccacaccucacuucgacuauaucgccagcgagguguccaaaggccuggccgaucugagccuggaacugagaaagcccaucaccuucggcgugaucaccgcugacacacuggaacaggccauugagagagccggcaccaagcacggcaacaaaggaugggaagccgcucuguccgccaucgagauggccaaccuguucaagagccugcggugaggacuaguuauaagacugacuagcccgaugggccucccaacgggcccuccuccccuccuugcaccgagauuaauaaaaaaaaaaaaaaaaaaaaaaaaaaaaaaaaaaaaaaaaaaaaaaaaaaaaaaaaaaaaaaaaugcaucccccccccccccccccccccccccccccccaaaggcucuuuucagagccaccagaauu

SEQ ID NO: 13036 - RNA, 4333 nt, Artificial Sequence
  SARS-CoV-2/Wuhan/WIV05/2019__EPI_ISL_402128 spike protein mRNA gc mod (1-1211)(G889C_L1034C) LumSynth construct
aggagaaagcuuaccauguucguguuucuggugcugcugccccugguguccagccagugugugaaccugaccaccagaacacagcugccuccagccuacaccaacagcuucaccagaggcguguacuaccccgacaagguguucagauccagcgugcugcacucuacccaggaccuguuccugccuuucuucagcaacgugaccugguuccacgccauccacguguccggcaccaauggcaccaagagauucgacaaccccgugcugcccuucaacgacgggguguacuuugccagcaccgagaaguccaacaucaucagaggcuggaucuucggcaccacacuggacagcaagacccagagccugcugaucgugaacaacgccaccaacguggucaucaaagugugcgaguuccaguucugcaacgaccccuuccugggcgucuacuaccacaagaacaacaagagcuggauggaaagcgaguuccggguguacagcagcgccaacaacugcaccuucgaguacgugucccagccuuuccugauggaccuggaaggcaagcagggcaacuucaagaaccugcgcgaguucguguucaagaacaucgacggcuacuucaaaaucuacagcaagcacaccccuaucaaccucgugcgggaucugccucagggcuucucugcucuggaaccccugguggaucugcccaucggcaucaacaucacccgguuucagacacugcuggcccugcacagaagcuaccugacaccuggcgauagcagcagcggauggacagcuggugccgccgcuuacuaugugggcuaccugcagccuagaaccuuccugcugaaguacaacgagaacggcaccaucaccgacgccguggauugugcucuggauccucugagcgagacaaagugcacccugaaguccuucaccguggaaaagggcaucuaccagaccagcaacuuccgggugcagcccaccgaauccaucgugcgguuccccaauaucaccaaucugugccccuucggcgagguguucaaugccaccagauucgccucuguguacgccuggaaccggaagcggaucagcaauugcguggccgacuacuccgugcuguacaacuccgccagcuucagcaccuucaagugcuacggcguguccccuaccaagcugaacgaccugugcuucacaaacguguacgccgacagcuucgugauccggggagaugaagugcggcagauugccccuggacagacaggcaagaucgccgacuacaacuacaagcugcccgacgacuucaccggcugugugauugccuggaacagcaacaaccuggacuccaaagucggcggcaacuacaauuaccuguaccggcuguuccggaaguccaaucugaagcccuucgagcgggacaucagcaccgaaaucuaucaggccggcagcaccccuugcaacggcguggaaggcuucaacugcuacuucccacugcaguccuacggcuuucagcccacaaauggcgugggcuaucagcccuacagagugguggugcugagcuucgaacugcugcaugcuccugccacagugugcggcccuaagaaaagcaccaaucucgugaagaacaaaugcgugaacuucaacuucaacggccugaccggcaccggcgugcugacagagagcaacaagaaguuccugccauuccagcaguuuggccgggauaucgccgauaccacagacgccguuagagauccccagacacuggaaauccuggacaucaccccaugcagcuucggcggagugucugugaucaccccuggcaccaacaccagcaaucagguggcagugcuguaccaggacgugaacuguaccgaagugcccguggccauucacgccgaucagcugacaccuacauggcggguguacuccaccggcagcaauguguuucagaccagagccggcugucugaucggagccgagcacgugaacaauagcuacgagugcgacauccccaucggcgcuggcaucugugccagcuaccagacacagacaaacagccccagacgggcuagaagcguggccagccagagcaucauugccuacacaaugucucugggcgccgagaacagcguggccuacuccaacaacucuaucgcuauccccaccaacuucaccaucagcgugaccaccgagauccugccuguguccaugaccaagaccagcguggacugcaccauguacaucugcggcgauuccaccgagugcuccaaccugcugcugcaguacggcagcuucugcacccagcugaauagagcccugacagggaucgccguggaacaggacaagaacacccaagagguguucgcccaagugaagcaaaucuacaagaccccuccuaucaaggacuucggcggcuucaauuucagccagauucugcccgauccuagcaagcccagcaagcggagcuucaucgaggaccugcuguucaacaaagugacacuggccgacgccggcuucaucaagcaguauggcgauugucugggcgacauugccgccagggaucugauuugcgcccagaaguuuaacggacugacagugcugccuccucugcugaccgaugagaugaucgcccaguacacaucugcccugcuggccggcacaaucacaagcggcuggacauuuugcgcuggcgccgcucugcagauccccuuugcuaugcagauggccuaccgguucaacggcaucggagugacccagaaugugcuguacgagaaccagaagcugaucgccaaccaguucaacagcgccaucggcaagauccaggacagccugagcagcacagcaagcgcccugggaaagcugcaggacguggucaaccagaaugcccaggcacugaacacccuggucaagcagcuguccuccaacuucggcgccaucagcucugugcugaacgauauccugagcagacuggacaaggucgaggccgaggugcagaucgacagacugaucacaggcagacugcagagccuccagacauacgugacccagcagcugaucagagccgccgagauuagagccucugccaaucuggccgccaccaagaugucugaguguguguguggccagagcaagagaguggacuuuugcggcaagggcuaccaccugaugagcuucccucagucugccccucacggcgugguguuucugcacgugacauaugugcccgcucaagagaagaauuucaccaccgcuccagccaucugccacgacggcaaagcccacuuuccuagagaaggcguguucguguccaacggcacccauugguucgugacacagcggaacuucuacgagccccagaucaucaccaccgacaacaccuucgugucuggcaacugcgacguugugaucggcauugugaacaauaccguguacgacccucugcagcccgagcuggacagcuucaaagaggaacuggacaaguacuuuaagaaccacacaagccccgacguggaccugggcgauaucagcggaaucaaugccagcgucgugaacauccagaaagagaucgaccggcugaacgagguggccaagaaucugaacgagagccugaucgaccugcaagaacuggggaaguacgagcaguacaucaagggcggaggaucuggcggaggacagaucuacgagggcaagcugacagccgagggccugagauuuggaaucguggccagccgguucaaucacgcccugguggauagacugguggaaggcgccaucgaugccauugucagacacggcggcagagaagaggacaucacccucguuagagugcccggcucuugggagauuccuguggcugcuggcgagcuggcccggaaagaagauaucgacgccguuaucgccaucggcgugcugaucagaggcgccacaccucacuucgacuauaucgccagcgagguguccaaaggccuggccgaucugagccuggaacugagaaagcccaucaccuucggcgugaucaccgcugacacacuggaacaggccauugagagagccggcaccaagcacggcaacaaaggaugggaagccgcucuguccgccaucgagauggccaaccuguucaagagccugcggugaggacuaguuauaagacugacuagcccgaugggccucccaacgggcccuccuccccuccuugcaccgagauuaauaaaaaaaaaaaaaaaaaaaaaaaaaaaaaaaaaaaaaaaaaaaaaaaaaaaaaaaaaaaaaaaaugcaucccccccccccccccccccccccccccccccaaaggcucuuuucagagccaccagaauu

SEQ ID NO: 13037 - RNA, 4333 nt, Artificial Sequence
  SARS-CoV-2/Wuhan/WIV05/2019__EPI_ISL_402128 spike protein mRNA gc mod (1-1211)(I909C_Y1047C) LumSynth construct
aggagaaagcuuaccauguucguguuucuggugcugcugccccugguguccagccagugugugaaccugaccaccagaacacagcugccuccagccuacaccaacagcuucaccagaggcguguacuaccccgacaagguguucagauccagcgugcugcacucuacccaggaccuguuccugccuuucuucagcaacgugaccugguuccacgccauccacguguccggcaccaauggcaccaagagauucgacaaccccgugcugcccuucaacgacgggguguacuuugccagcaccgagaaguccaacaucaucagaggcuggaucuucggcaccacacuggacagcaagacccagagccugcugaucgugaacaacgccaccaacguggucaucaaagugugcgaguuccaguucugcaacgaccccuuccugggcgucuacuaccacaagaacaacaagagcuggauggaaagcgaguuccggguguacagcagcgccaacaacugcaccuucgaguacgugucccagccuuuccugauggaccuggaaggcaagcagggcaacuucaagaaccugcgcgaguucguguucaagaacaucgacggcuacuucaaaaucuacagcaagcacaccccuaucaaccucgugcgggaucugccucagggcuucucugcucuggaaccccugguggaucugcccaucggcaucaacaucacccgguuucagacacugcuggcccugcacagaagcuaccugacaccuggcgauagcagcagcggauggacagcuggugccgccgcuuacuaugugggcuaccugcagccuagaaccuuccugcugaaguacaacgagaacggcaccaucaccgacgccguggauugugcucuggauccucugagcgagacaaagugcacccugaaguccuucaccguggaaaagggcaucuaccagaccagcaacuuccgggugcagcccaccgaauccaucgugcgguuccccaauaucaccaaucugugccccuucggcgagguguucaaugccaccagauucgccucuguguacgccuggaaccggaagcggaucagcaauugcguggccgacuacuccgugcuguacaacuccgccagcuucagcaccuucaagugcuacggcguguccccuaccaagcugaacgaccugugcuucacaaacguguacgccgacagcuucgugauccggggagaugaagugcggcagauugccccuggacagacaggcaagaucgccgacuacaacuacaagcugcccgacgacuucaccggcugugugauugccuggaacagcaacaaccuggacuccaaagucggcggcaacuacaauuaccuguaccggcuguuccggaaguccaaucugaagcccuucgagcgggacaucagcaccgaaaucuaucaggccggcagcaccccuugcaacggcguggaaggcuucaacugcuacuucccacugcaguccuacggcuuucagcccacaaauggcgugggcuaucagcccuacagagugguggugcugagcuucgaacugcugcaugcuccugccacagugugcggcccuaagaaaagcaccaaucucgugaagaacaaaugcgugaacuucaacuucaacggccugaccggcaccggcgugcugacagagagcaacaagaaguuccugccauuccagcaguuuggccgggauaucgccgauaccacagacgccguuagagauccccagacacuggaaauccuggacaucaccccaugcagcuucggcggagugucugugaucaccccuggcaccaacaccagcaaucagguggcagugcuguaccaggacgugaacuguaccgaagugcccguggccauucacgccgaucagcugacaccuacauggcggguguacuccaccggcagcaauguguuucagaccagagccggcugucugaucggagccgagcacgugaacaauagcuacgagugcgacauccccaucggcgcuggcaucugugccagcuaccagacacagacaaacagccccagacgggcuagaagcguggccagccagagcaucauugccuacacaaugucucugggcgccgagaacagcguggccuacuccaacaacucuaucgcuauccccaccaacuucaccaucagcgugaccaccgagauccugccuguguccaugaccaagaccagcguggacugcaccauguacaucugcggcgauuccaccgagugcuccaaccugcugcugcaguacggcagcuucugcacccagcugaauagagcccugacagggaucgccguggaacaggacaagaacacccaagagguguucgcccaagugaagcaaaucuacaagaccccuccuaucaaggacuucggcggcuucaauuucagccagauucugcccgauccuagcaagcccagcaagcggagcuucaucgaggaccugcuguucaacaaagugacacuggccgacgccggcuucaucaagcaguauggcgauugucugggcgacauugccgccagggaucugauuugcgcccagaaguuuaacggacugacagugcugccuccucugcugaccgaugagaugaucgcccaguacacaucugcccugcuggccggcacaaucacaagcggcuggacauuuggagcuggcgccgcucugcagauccccuuugcuaugcagauggccuaccgguucaacggcugcggagugacccagaaugugcuguacgagaaccagaagcugaucgccaaccaguucaacagcgccaucggcaagauccaggacagccugagcagcacagcaagcgcccugggaaagcugcaggacguggucaaccagaaugcccaggcacugaacacccuggucaagcagcuguccuccaacuucggcgccaucagcucugugcugaacgauauccugagcagacuggacaaggucgaggccgaggugcagaucgacagacugaucacaggcagacugcagagccuccagacauacgugacccagcagcugaucagagccgccgagauuagagccucugccaaucuggccgccaccaagaugucugagugugugcugggccagagcaagagaguggacuuuugcggcaagggcugucaccugaugagcuucccucagucugccccucacggcgugguguuucugcacgugacauaugugcccgcucaagagaagaauuucaccaccgcuccagccaucugccacgacggcaaagcccacuuuccuagagaaggcguguucguguccaacggcacccauugguucgugacacagcggaacuucuacgagccccagaucaucaccaccgacaacaccuucgugucuggcaacugcgacguugugaucggcauugugaacaauaccguguacgacccucugcagcccgagcuggacagcuucaaagaggaacuggacaaguacuuuaagaaccacacaagccccgacguggaccugggcgauaucagcggaaucaaugccagcgucgugaacauccagaaagagaucgaccggcugaacgagguggccaagaaucugaacgagagccugaucgaccugcaagaacuggggaaguacgagcaguacaucaagggcggaggaucuggcggaggacagaucuacgagggcaagcugacagccgagggccugagauuuggaaucguggccagccgguucaaucacgcccugguggauagacugguggaaggcgccaucgaugccauugucagacacggcggcagagaagaggacaucacccucguuagagugcccggcucuugggagauuccuguggcugcuggcgagcuggcccggaaagaagauaucgacgccguuaucgccaucggcgugcugaucagaggcgccacaccucacuucgacuauaucgccagcgagguguccaaaggccuggccgaucugagccuggaacugagaaagcccaucaccuucggcgugaucaccgcugacacacuggaacaggccauugagagagccggcaccaagcacggcaacaaaggaugggaagccgcucuguccgccaucgagauggccaaccuguucaagagccugcggugaggacuaguuauaagacugacuagcccgaugggccucccaacgggcccuccuccccuccuugcaccgagauuaauaaaaaaaaaaaaaaaaaaaaaaaaaaaaaaaaaaaaaaaaaaaaaaaaaaaaaaaaaaaaaaaaugcaucccccccccccccccccccccccccccccccaaaggcucuuuucagagccaccagaauu

SEQ ID NO: 13038 - RNA, 4333 nt, Artificial Sequence
  SARS-CoV-2/Wuhan/WIV05/2019__EPI_ISL_402128 spike protein mRNA gc mod (1-1211)(Q965C_S1003C) LumSynth construct
aggagaaagcuuaccauguucguguuucuggugcugcugccccugguguccagccagugugugaaccugaccaccagaacacagcugccuccagccuacaccaacagcuucaccagaggcguguacuaccccgacaagguguucagauccagcgugcugcacucuacccaggaccuguuccugccuuucuucagcaacgugaccugguuccacgccauccacguguccggcaccaauggcaccaagagauucgacaaccccgugcugcccuucaacgacgggguguacuuugccagcaccgagaaguccaacaucaucagaggcuggaucuucggcaccacacuggacagcaagacccagagccugcugaucgugaacaacgccaccaacguggucaucaaagugugcgaguuccaguucugcaacgaccccuuccugggcgucuacuaccacaagaacaacaagagcuggauggaaagcgaguuccggguguacagcagcgccaacaacugcaccuucgaguacgugucccagccuuuccugauggaccuggaaggcaagcagggcaacuucaagaaccugcgcgaguucguguucaagaacaucgacggcuacuucaaaaucuacagcaagcacaccccuaucaaccucgugcgggaucugccucagggcuucucugcucuggaaccccugguggaucugcccaucggcaucaacaucacccgguuucagacacugcuggcccugcacagaagcuaccugacaccuggcgauagcagcagcggauggacagcuggugccgccgcuuacuaugugggcuaccugcagccuagaaccuuccugcugaaguacaacgagaacggcaccaucaccgacgccguggauugugcucuggauccucugagcgagacaaagugcacccugaaguccuucaccguggaaaagggcaucuaccagaccagcaacuuccgggugcagcccaccgaauccaucgugcgguuccccaauaucaccaaucugugccccuucggcgagguguucaaugccaccagauucgccucuguguacgccuggaaccggaagcggaucagcaauugcguggccgacuacuccgugcuguacaacuccgccagcuucagcaccuucaagugcuacggcguguccccuaccaagcugaacgaccugugcuucacaaacguguacgccgacagcuucgugauccggggagaugaagugcggcagauugccccuggacagacaggcaagaucgccgacuacaacuacaagcugcccgacgacuucaccggcugugugauugccuggaacagcaacaaccuggacuccaaagucggcggcaacuacaauuaccuguaccggcuguuccggaaguccaaucugaagcccuucgagcgggacaucagcaccgaaaucuaucaggccggcagcaccccuugcaacggcguggaaggcuucaacugcuacuucccacugcaguccuacggcuuucagcccacaaauggcgugggcuaucagcccuacagagugguggugcugagcuucgaacugcugcaugcuccugccacagugugcggcccuaagaaaagcaccaaucucgugaagaacaaaugcgugaacuucaacuucaacggccugaccggcaccggcgugcugacagagagcaacaagaaguuccugccauuccagcaguuuggccgggauaucgccgauaccacagacgccguuagagauccccagacacuggaaauccuggacaucaccccaugcagcuucggcggagugucugugaucaccccuggcaccaacaccagcaaucagguggcagugcuguaccaggacgugaacuguaccgaagugcccguggccauucacgccgaucagcugacaccuacauggcggguguacuccaccggcagcaauguguuucagaccagagccggcugucugaucggagccgagcacgugaacaauagcuacgagugcgacauccccaucggcgcuggcaucugugccagcuaccagacacagacaaacagccccagacgggcuagaagcguggccagccagagcaucauugccuacacaaugucucugggcgccgagaacagcguggccuacuccaacaacucuaucgcuauccccaccaacuucaccaucagcgugaccaccgagauccugccuguguccaugaccaagaccagcguggacugcaccauguacaucugcggcgauuccaccgagugcuccaaccugcugcugcaguacggcagcuucugcacccagcugaauagagcccugacagggaucgccguggaacaggacaagaacacccaagagguguucgcccaagugaagcaaaucuacaagaccccuccuaucaaggacuucggcggcuucaauuucagccagauucugcccgauccuagcaagcccagcaagcggagcuucaucgaggaccugcuguucaacaaagugacacuggccgacgccggcuucaucaagcaguauggcgauugucugggcgacauugccgccagggaucugauuugcgcccagaaguuuaacggacugacagugcugccuccucugcugaccgaugagaugaucgcccaguacacaucugcccugcuggccggcacaaucacaagcggcuggacauuuggagcuggcgccgcucugcagauccccuuugcuaugcagauggccuaccgguucaacggcaucggagugacccagaaugugcuguacgagaaccagaagcugaucgccaaccaguucaacagcgccaucggcaagauccaggacagccugagcagcacagcaagcgcccugggaaagcugcaggacguggucaaccagaaugcccaggcacugaacacccuggucaagugccuguccuccaacuucggcgccaucagcucugugcugaacgauauccugagcagacuggacaaggucgaggccgaggugcagaucgacagacugaucacaggcagacugcagugucuccagacauacgugacccagcagcugaucagagccgccgagauuagagccucugccaaucuggccgccaccaagaugucugagugugugcugggccagagcaagagaguggacuuuugcggcaagggcuaccaccugaugagcuucccucagucugccccucacggcgugguguuucugcacgugacauaugugcccgcucaagagaagaauuucaccaccgcuccagccaucugccacgacggcaaagcccacuuuccuagagaaggcguguucguguccaacggcacccauugguucgugacacagcggaacuucuacgagccccagaucaucaccaccgacaacaccuucgugucuggcaacugcgacguugugaucggcauugugaacaauaccguguacgacccucugcagcccgagcuggacagcuucaaagaggaacuggacaaguacuuuaagaaccacacaagccccgacguggaccugggcgauaucagcggaaucaaugccagcgucgugaacauccagaaagagaucgaccggcugaacgagguggccaagaaucugaacgagagccugaucgaccugcaagaacuggggaaguacgagcaguacaucaagggcggaggaucuggcggaggacagaucuacgagggcaagcugacagccgagggccugagauuuggaaucguggccagccgguucaaucacgcccugguggauagacugguggaaggcgccaucgaugccauugucagacacggcggcagagaagaggacaucacccucguuagagugcccggcucuugggagauuccuguggcugcuggcgagcuggcccggaaagaagauaucgacgccguuaucgccaucggcgugcugaucagaggcgccacaccucacuucgacuauaucgccagcgagguguccaaaggccuggccgaucugagccuggaacugagaaagcccaucaccuucggcgugaucaccgcugacacacuggaacaggccauugagagagccggcaccaagcacggcaacaaaggaugggaagccgcucuguccgccaucgagauggccaaccuguucaagagccugcggugaggacuaguuauaagacugacuagcccgaugggccucccaacgggcccuccuccccuccuugcaccgagauuaauaaaaaaaaaaaaaaaaaaaaaaaaaaaaaaaaaaaaaaaaaaaaaaaaaaaaaaaaaaaaaaaaugcaucccccccccccccccccccccccccccccccaaaggcucuuuucagagccaccagaauu

SEQ ID NO: 13039 - RNA, 4333 nt, Artificial Sequence
  SARS-CoV-2/Wuhan/WIV05/2019__EPI_ISL_402128 spike protein mRNA gc mod (1-1211)(F970C_G999C) LumSynth construct
aggagaaagcuuaccauguucguguuucuggugcugcugccccugguguccagccagugugugaaccugaccaccagaacacagcugccuccagccuacaccaacagcuucaccagaggcguguacuaccccgacaagguguucagauccagcgugcugcacucuacccaggaccuguuccugccuuucuucagcaacgugaccugguuccacgccauccacguguccggcaccaauggcaccaagagauucgacaaccccgugcugcccuucaacgacgggguguacuuugccagcaccgagaaguccaacaucaucagaggcuggaucuucggcaccacacuggacagcaagacccagagccugcugaucgugaacaacgccaccaacguggucaucaaagugugcgaguuccaguucugcaacgaccccuuccugggcgucuacuaccacaagaacaacaagagcuggauggaaagcgaguuccggguguacagcagcgccaacaacugcaccuucgaguacgugucccagccuuuccugauggaccuggaaggcaagcagggcaacuucaagaaccugcgcgaguucguguucaagaacaucgacggcuacuucaaaaucuacagcaagcacaccccuaucaaccucgugcgggaucugccucagggcuucucugcucuggaaccccugguggaucugcccaucggcaucaacaucacccgguuucagacacugcuggcccugcacagaagcuaccugacaccuggcgauagcagcagcggauggacagcuggugccgccgcuuacuaugugggcuaccugcagccuagaaccuuccugcugaaguacaacgagaacggcaccaucaccgacgccguggauugugcucuggauccucugagcgagacaaagugcacccugaaguccuucaccguggaaaagggcaucuaccagaccagcaacuuccgggugcagcccaccgaauccaucgugcgguuccccaauaucaccaaucugugccccuucggcgagguguucaaugccaccagauucgccucuguguacgccuggaaccggaagcggaucagcaauugcguggccgacuacuccgugcuguacaacuccgccagcuucagcaccuucaagugcuacggcguguccccuaccaagcugaacgaccugugcuucacaaacguguacgccgacagcuucgugauccggggagaugaagugcggcagauugccccuggacagacaggcaagaucgccgacuacaacuacaagcugcccgacgacuucaccggcugugugauugccuggaacagcaacaaccuggacuccaaagucggcggcaacuacaauuaccuguaccggcuguuccggaaguccaaucugaagcccuucgagcgggacaucagcaccgaaaucuaucaggccggcagcaccccuugcaacggcguggaaggcuucaacugcuacuucccacugcaguccuacggcuuucagcccacaaauggcgugggcuaucagcccuacagagugguggugcugagcuucgaacugcugcaugcuccugccacagugugcggcccuaagaaaagcaccaaucucgugaagaacaaaugcgugaacuucaacuucaacggccugaccggcaccggcgugcugacagagagcaacaagaaguuccugccauuccagcaguuuggccgggauaucgccgauaccacagacgccguuagagauccccagacacuggaaauccuggacaucaccccaugcagcuucggcggagugucugugaucaccccuggcaccaacaccagcaaucagguggcagugcuguaccaggacgugaacuguaccgaagugcccguggccauucacgccgaucagcugacaccuacauggcggguguacuccaccggcagcaauguguuucagaccagagccggcugucugaucggagccgagcacgugaacaauagcuacgagugcgacauccccaucggcgcuggcaucugugccagcuaccagacacagacaaacagccccagacgggcuagaagcguggccagccagagcaucauugccuacacaaugucucugggcgccgagaacagcguggccuacuccaacaacucuaucgcuauccccaccaacuucaccaucagcgugaccaccgagauccugccuguguccaugaccaagaccagcguggacugcaccauguacaucugcggcgauuccaccgagugcuccaaccugcugcugcaguacggcagcuucugcacccagcugaauagagcccugacagggaucgccguggaacaggacaagaacacccaagagguguucgcccaagugaagcaaaucuacaagaccccuccuaucaaggacuucggcggcuucaauuucagccagauucugcccgauccuagcaagcccagcaagcggagcuucaucgaggaccugcuguucaacaaagugacacuggccgacgccggcuucaucaagcaguauggcgauugucugggcgacauugccgccagggaucugauuugcgcccagaaguuuaacggacugacagugcugccuccucugcugaccgaugagaugaucgcccaguacacaucugcccugcuggccggcacaaucacaagcggcuggacauuuggagcuggcgccgcucugcagauccccuuugcuaugcagauggccuaccgguucaacggcaucggagugacccagaaugugcuguacgagaaccagaagcugaucgccaaccaguucaacagcgccaucggcaagauccaggacagccugagcagcacagcaagcgcccugggaaagcugcaggacguggucaaccagaaugcccaggcacugaacacccuggucaagcagcuguccuccaacugcggcgccaucagcucugugcugaacgauauccugagcagacuggacaaggucgaggccgaggugcagaucgacagacugaucacauguagacugcagagccuccagacauacgugacccagcagcugaucagagccgccgagauuagagccucugccaaucuggccgccaccaagaugucugagugugugcugggccagagcaagagaguggacuuuugcggcaagggcuaccaccugaugagcuucccucagucugccccucacggcgugguguuucugcacgugacauaugugcccgcucaagagaagaauuucaccaccgcuccagccaucugccacgacggcaaagcccacuuuccuagagaaggcguguucguguccaacggcacccauugguucgugacacagcggaacuucuacgagccccagaucaucaccaccgacaacaccuucgugucuggcaacugcgacguugugaucggcauugugaacaauaccguguacgacccucugcagcccgagcuggacagcuucaaagaggaacuggacaaguacuuuaagaaccacacaagccccgacguggaccugggcgauaucagcggaaucaaugccagcgucgugaacauccagaaagagaucgaccggcugaacgagguggccaagaaucugaacgagagccugaucgaccugcaagaacuggggaaguacgagcaguacaucaagggcggaggaucuggcggaggacagaucuacgagggcaagcugacagccgagggccugagauuuggaaucguggccagccgguucaaucacgcccugguggauagacugguggaaggcgccaucgaugccauugucagacacggcggcagagaagaggacaucacccucguuagagugcccggcucuugggagauuccuguggcugcuggcgagcuggcccggaaagaagauaucgacgccguuaucgccaucggcgugcugaucagaggcgccacaccucacuucgacuauaucgccagcgagguguccaaaggccuggccgaucugagccuggaacugagaaagcccaucaccuucggcgugaucaccgcugacacacuggaacaggccauugagagagccggcaccaagcacggcaacaaaggaugggaagccgcucuguccgccaucgagauggccaaccuguucaagagccugcggugaggacuaguuauaagacugacuagcccgaugggccucccaacgggcccuccuccccuccuugcaccgagauuaauaaaaaaaaaaaaaaaaaaaaaaaaaaaaaaaaaaaaaaaaaaaaaaaaaaaaaaaaaaaaaaaaugcaucccccccccccccccccccccccccccccccaaaggcucuuuucagagccaccagaauu

SEQ ID NO: 13040 - RNA, 4333 nt, Artificial Sequence
  SARS-CoV-2/Wuhan/WIV05/2019__EPI_ISL_402128 spike protein mRNA gc mod (1-1211)(A972C_R995C) LumSynth construct
aggagaaagcuuaccauguucguguuucuggugcugcugccccugguguccagccagugugugaaccugaccaccagaacacagcugccuccagccuacaccaacagcuucaccagaggcguguacuaccccgacaagguguucagauccagcgugcugcacucuacccaggaccuguuccugccuuucuucagcaacgugaccugguuccacgccauccacguguccggcaccaauggcaccaagagauucgacaaccccgugcugcccuucaacgacgggguguacuuugccagcaccgagaaguccaacaucaucagaggcuggaucuucggcaccacacuggacagcaagacccagagccugcugaucgugaacaacgccaccaacguggucaucaaagugugcgaguuccaguucugcaacgaccccuuccugggcgucuacuaccacaagaacaacaagagcuggauggaaagcgaguuccggguguacagcagcgccaacaacugcaccuucgaguacgugucccagccuuuccugauggaccuggaaggcaagcagggcaacuucaagaaccugcgcgaguucguguucaagaacaucgacggcuacuucaaaaucuacagcaagcacaccccuaucaaccucgugcgggaucugccucagggcuucucugcucuggaaccccugguggaucugcccaucggcaucaacaucacccgguuucagacacugcuggcccugcacagaagcuaccugacaccuggcgauagcagcagcggauggacagcuggugccgccgcuuacuaugugggcuaccugcagccuagaaccuuccugcugaaguacaacgagaacggcaccaucaccgacgccguggauugugcucuggauccucugagcgagacaaagugcacccugaaguccuucaccguggaaaagggcaucuaccagaccagcaacuuccgggugcagcccaccgaauccaucgugcgguuccccaauaucaccaaucugugccccuucggcgagguguucaaugccaccagauucgccucuguguacgccuggaaccggaagcggaucagcaauugcguggccgacuacuccgugcuguacaacuccgccagcuucagcaccuucaagugcuacggcguguccccuaccaagcugaacgaccugugcuucacaaacguguacgccgacagcuucgugauccggggagaugaagugcggcagauugccccuggacagacaggcaagaucgccgacuacaacuacaagcugcccgacgacuucaccggcugugugauugccuggaacagcaacaaccuggacuccaaagucggcggcaacuacaauuaccuguaccggcuguuccggaaguccaaucugaagcccuucgagcgggacaucagcaccgaaaucuaucaggccggcagcaccccuugcaacggcguggaaggcuucaacugcuacuucccacugcaguccuacggcuuucagcccacaaauggcgugggcuaucagcccuacagagugguggugcugagcuucgaacugcugcaugcuccugccacagugugcggcccuaagaaaagcaccaaucucgugaagaacaaaugcgugaacuucaacuucaacggccugaccggcaccggcgugcugacagagagcaacaagaaguuccugccauuccagcaguuuggccgggauaucgccgauaccacagacgccguuagagauccccagacacuggaaauccuggacaucaccccaugcagcuucggcggagugucugugaucaccccuggcaccaacaccagcaaucagguggcagugcuguaccaggacgugaacuguaccgaagugcccguggccauucacgccgaucagcugacaccuacauggcggguguacuccaccggcagcaauguguuucagaccagagccggcugucugaucggagccgagcacgugaacaauagcuacgagugcgacauccccaucggcgcuggcaucugugccagcuaccagacacagacaaacagccccagacgggcuagaagcguggccagccagagcaucauugccuacacaaugucucugggcgccgagaacagcguggccuacuccaacaacucuaucgcuauccccaccaacuucaccaucagcgugaccaccgagauccugccuguguccaugaccaagaccagcguggacugcaccauguacaucugcggcgauuccaccgagugcuccaaccugcugcugcaguacggcagcuucugcacccagcugaauagagcccugacagggaucgccguggaacaggacaagaacacccaagagguguucgcccaagugaagcaaaucuacaagaccccuccuaucaaggacuucggcggcuucaauuucagccagauucugcccgauccuagcaagcccagcaagcggagcuucaucgaggaccugcuguucaacaaagugacacuggccgacgccggcuucaucaagcaguauggcgauugucugggcgacauugccgccagggaucugauuugcgcccagaaguuuaacggacugacagugcugccuccucugcugaccgaugagaugaucgcccaguacacaucugcccugcuggccggcacaaucacaagcggcuggacauuuggagcuggcgccgcucugcagauccccuuugcuaugcagauggccuaccgguucaacggcaucggagugacccagaaugugcuguacgagaaccagaagcugaucgccaaccaguucaacagcgccaucggcaagauccaggacagccugagcagcacagcaagcgcccugggaaagcugcaggacguggucaaccagaaugcccaggcacugaacacccuggucaagcagcuguccuccaacuucggcugcaucagcucugugcugaacgauauccugagcagacuggacaaggucgaggccgaggugcagaucgacugucugaucacaggcagacugcagagccuccagacauacgugacccagcagcugaucagagccgccgagauuagagccucugccaaucuggccgccaccaagaugucugagugugugcugggccagagcaagagaguggacuuuugcggcaagggcuaccaccugaugagcuucccucagucugccccucacggcgugguguuucugcacgugacauaugugcccgcucaagagaagaauuucaccaccgcuccagccaucugccacgacggcaaagcccacuuuccuagagaaggcguguucguguccaacggcacccauugguucgugacacagcggaacuucuacgagccccagaucaucaccaccgacaacaccuucgugucuggcaacugcgacguugugaucggcauugugaacaauaccguguacgacccucugcagcccgagcuggacagcuucaaagaggaacuggacaaguacuuuaagaaccacacaagccccgacguggaccugggcgauaucagcggaaucaaugccagcgucgugaacauccagaaagagaucgaccggcugaacgagguggccaagaaucugaacgagagccugaucgaccugcaagaacuggggaaguacgagcaguacaucaagggcggaggaucuggcggaggacagaucuacgagggcaagcugacagccgagggccugagauuuggaaucguggccagccgguucaaucacgcccugguggauagacugguggaaggcgccaucgaugccauugucagacacggcggcagagaagaggacaucacccucguuagagugcccggcucuugggagauuccuguggcugcuggcgagcuggcccggaaagaagauaucgacgccguuaucgccaucggcgugcugaucagaggcgccacaccucacuucgacuauaucgccagcgagguguccaaaggccuggccgaucugagccuggaacugagaaagcccaucaccuucggcgugaucaccgcugacacacuggaacaggccauugagagagccggcaccaagcacggcaacaaaggaugggaagccgcucuguccgccaucgagauggccaaccuguucaagagccugcggugaggacuaguuauaagacugacuagcccgaugggccucccaacgggcccuccuccccuccuugcaccgagauuaauaaaaaaaaaaaaaaaaaaaaaaaaaaaaaaaaaaaaaaaaaaaaaaaaaaaaaaaaaaaaaaaaugcaucccccccccccccccccccccccccccccccaaaggcucuuuucagagccaccagaauu

SEQ ID NO: 13041 - RNA, 4333 nt, Artificial Sequence
  SARS-CoV-2/Wuhan/WIV05/2019__EPI_ISL_402128 spike protein mRNA gc mod (1-1211)(A890C_V1040C) LumSynth construct
aggagaaagcuuaccauguucguguuucuggugcugcugccccugguguccagccagugugugaaccugaccaccagaacacagcugccuccagccuacaccaacagcuucaccagaggcguguacuaccccgacaagguguucagauccagcgugcugcacucuacccaggaccuguuccugccuuucuucagcaacgugaccugguuccacgccauccacguguccggcaccaauggcaccaagagauucgacaaccccgugcugcccuucaacgacgggguguacuuugccagcaccgagaaguccaacaucaucagaggcuggaucuucggcaccacacuggacagcaagacccagagccugcugaucgugaacaacgccaccaacguggucaucaaagugugcgaguuccaguucugcaacgaccccuuccugggcgucuacuaccacaagaacaacaagagcuggauggaaagcgaguuccggguguacagcagcgccaacaacugcaccuucgaguacgugucccagccuuuccugauggaccuggaaggcaagcagggcaacuucaagaaccugcgcgaguucguguucaagaacaucgacggcuacuucaaaaucuacagcaagcacaccccuaucaaccucgugcgggaucugccucagggcuucucugcucuggaaccccugguggaucugcccaucggcaucaacaucacccgguuucagacacugcuggcccugcacagaagcuaccugacaccuggcgauagcagcagcggauggacagcuggugccgccgcuuacuaugugggcuaccugcagccuagaaccuuccugcugaaguacaacgagaacggcaccaucaccgacgccguggauugugcucuggauccucugagcgagacaaagugcacccugaaguccuucaccguggaaaagggcaucuaccagaccagcaacuuccgggugcagcccaccgaauccaucgugcgguuccccaauaucaccaaucugugccccuucggcgagguguucaaugccaccagauucgccucuguguacgccuggaaccggaagcggaucagcaauugcguggccgacuacuccgugcuguacaacuccgccagcuucagcaccuucaagugcuacggcguguccccuaccaagcugaacgaccugugcuucacaaacguguacgccgacagcuucgugauccggggagaugaagugcggcagauugccccuggacagacaggcaagaucgccgacuacaacuacaagcugcccgacgacuucaccggcugugugauugccuggaacagcaacaaccuggacuccaaagucggcggcaacuacaauuaccuguaccggcuguuccggaaguccaaucugaagcccuucgagcgggacaucagcaccgaaaucuaucaggccggcagcaccccuugcaacggcguggaaggcuucaacugcuacuucccacugcaguccuacggcuuucagcccacaaauggcgugggcuaucagcccuacagagugguggugcugagcuucgaacugcugcaugcuccugccacagugugcggcccuaagaaaagcaccaaucucgugaagaacaaaugcgugaacuucaacuucaacggccugaccggcaccggcgugcugacagagagcaacaagaaguuccugccauuccagcaguuuggccgggauaucgccgauaccacagacgccguuagagauccccagacacuggaaauccuggacaucaccccaugcagcuucggcggagugucugugaucaccccuggcaccaacaccagcaaucagguggcagugcuguaccaggacgugaacuguaccgaagugcccguggccauucacgccgaucagcugacaccuacauggcggguguacuccaccggcagcaauguguuucagaccagagccggcugucugaucggagccgagcacgugaacaauagcuacgagugcgacauccccaucggcgcuggcaucugugccagcuaccagacacagacaaacagccccagacgggcuagaagcguggccagccagagcaucauugccuacacaaugucucugggcgccgagaacagcguggccuacuccaacaacucuaucgcuauccccaccaacuucaccaucagcgugaccaccgagauccugccuguguccaugaccaagaccagcguggacugcaccauguacaucugcggcgauuccaccgagugcuccaaccugcugcugcaguacggcagcuucugcacccagcugaauagagcccugacagggaucgccguggaacaggacaagaacacccaagagguguucgcccaagugaagcaaaucuacaagaccccuccuaucaaggacuucggcggcuucaauuucagccagauucugcccgauccuagcaagcccagcaagcggagcuucaucgaggaccugcuguucaacaaagugacacuggccgacgccggcuucaucaagcaguauggcgauugucugggcgacauugccgccagggaucugauuugcgcccagaaguuuaacggacugacagugcugccuccucugcugaccgaugagaugaucgcccaguacacaucugcccugcuggccggcacaaucacaagcggcuggacauuuggaugcggcgccgcucugcagauccccuuugcuaugcagauggccuaccgguucaacggcaucggagugacccagaaugugcuguacgagaaccagaagcugaucgccaaccaguucaacagcgccaucggcaagauccaggacagccugagcagcacagcaagcgcccugggaaagcugcaggacguggucaaccagaaugcccaggcacugaacacccuggucaagcagcuguccuccaacuucggcgccaucagcucugugcugaacgauauccugagcagacuggacaaggucgaggccgaggugcagaucgacagacugaucacaggcagacugcagagccuccagacauacgugacccagcagcugaucagagccgccgagauuagagccucugccaaucuggccgccaccaagaugucugagugugugcugggccagagcaagagaugugacuuuugcggcaagggcuaccaccugaugagcuucccucagucugccccucacggcgugguguuucugcacgugacauaugugcccgcucaagagaagaauuucaccaccgcuccagccaucugccacgacggcaaagcccacuuuccuagagaaggcguguucguguccaacggcacccauugguucgugacacagcggaacuucuacgagccccagaucaucaccaccgacaacaccuucgugucuggcaacugcgacguugugaucggcauugugaacaauaccguguacgacccucugcagcccgagcuggacagcuucaaagaggaacuggacaaguacuuuaagaaccacacaagccccgacguggaccugggcgauaucagcggaaucaaugccagcgucgugaacauccagaaagagaucgaccggcugaacgagguggccaagaaucugaacgagagccugaucgaccugcaagaacuggggaaguacgagcaguacaucaagggcggaggaucuggcggaggacagaucuacgagggcaagcugacagccgagggccugagauuuggaaucguggccagccgguucaaucacgcccugguggauagacugguggaaggcgccaucgaugccauugucagacacggcggcagagaagaggacaucacccucguuagagugcccggcucuugggagauuccuguggcugcuggcgagcuggcccggaaagaagauaucgacgccguuaucgccaucggcgugcugaucagaggcgccacaccucacuucgacuauaucgccagcgagguguccaaaggccuggccgaucugagccuggaacugagaaagcccaucaccuucggcgugaucaccgcugacacacuggaacaggccauugagagagccggcaccaagcacggcaacaaaggaugggaagccgcucuguccgccaucgagauggccaaccuguucaagagccugcggugaggacuaguuauaagacugacuagcccgaugggccucccaacgggcccuccuccccuccuugcaccgagauuaauaaaaaaaaaaaaaaaaaaaaaaaaaaaaaaaaaaaaaaaaaaaaaaaaaaaaaaaaaaaaaaaaugcaucccccccccccccccccccccccccccccccaaaggcucuuuucagagccaccagaauu

SEQ ID NO: 13042 - RNA, 4333 nt, Artificial Sequence
  SARS-CoV-2/Wuhan/WIV05/2019__EPI_ISL_402128 spike protein mRNA gc mod (1-1211)(T874C_S1055C) LumSynth construct
aggagaaagcuuaccauguucguguuucuggugcugcugccccugguguccagccagugugugaaccugaccaccagaacacagcugccuccagccuacaccaacagcuucaccagaggcguguacuaccccgacaagguguucagauccagcgugcugcacucuacccaggaccuguuccugccuuucuucagcaacgugaccugguuccacgccauccacguguccggcaccaauggcaccaagagauucgacaaccccgugcugcccuucaacgacgggguguacuuugccagcaccgagaaguccaacaucaucagaggcuggaucuucggcaccacacuggacagcaagacccagagccugcugaucgugaacaacgccaccaacguggucaucaaagugugcgaguuccaguucugcaacgaccccuuccugggcgucuacuaccacaagaacaacaagagcuggauggaaagcgaguuccggguguacagcagcgccaacaacugcaccuucgaguacgugucccagccuuuccugauggaccuggaaggcaagcagggcaacuucaagaaccugcgcgaguucguguucaagaacaucgacggcuacuucaaaaucuacagcaagcacaccccuaucaaccucgugcgggaucugccucagggcuucucugcucuggaaccccugguggaucugcccaucggcaucaacaucacccgguuucagacacugcuggcccugcacagaagcuaccugacaccuggcgauagcagcagcggauggacagcuggugccgccgcuuacuaugugggcuaccugcagccuagaaccuuccugcugaaguacaacgagaacggcaccaucaccgacgccguggauugugcucuggauccucugagcgagacaaagugcacccugaaguccuucaccguggaaaagggcaucuaccagaccagcaacuuccgggugcagcccaccgaauccaucgugcgguuccccaauaucaccaaucugugccccuucggcgagguguucaaugccaccagauucgccucuguguacgccuggaaccggaagcggaucagcaauugcguggccgacuacuccgugcuguacaacuccgccagcuucagcaccuucaagugcuacggcguguccccuaccaagcugaacgaccugugcuucacaaacguguacgccgacagcuucgugauccggggagaugaagugcggcagauugccccuggacagacaggcaagaucgccgacuacaacuacaagcugcccgacgacuucaccggcugugugauugccuggaacagcaacaaccuggacuccaaagucggcggcaacuacaauuaccuguaccggcuguuccggaaguccaaucugaagcccuucgagcgggacaucagcaccgaaaucuaucaggccggcagcaccccuugcaacggcguggaaggcuucaacugcuacuucccacugcaguccuacggcuuucagcccacaaauggcgugggcuaucagcccuacagagugguggugcugagcuucgaacugcugcaugcuccugccacagugugcggcccuaagaaaagcaccaaucucgugaagaacaaaugcgugaacuucaacuucaacggccugaccggcaccggcgugcugacagagagcaacaagaaguuccugccauuccagcaguuuggccgggauaucgccgauaccacagacgccguuagagauccccagacacuggaaauccuggacaucaccccaugcagcuucggcggagugucugugaucaccccuggcaccaacaccagcaaucagguggcagugcuguaccaggacgugaacuguaccgaagugcccguggccauucacgccgaucagcugacaccuacauggcggguguacuccaccggcagcaauguguuucagaccagagccggcugucugaucggagccgagcacgugaacaauagcuacgagugcgacauccccaucggcgcuggcaucugugccagcuaccagacacagacaaacagccccagacgggcuagaagcguggccagccagagcaucauugccuacacaaugucucugggcgccgagaacagcguggccuacuccaacaacucuaucgcuauccccaccaacuucaccaucagcgugaccaccgagauccugccuguguccaugaccaagaccagcguggacugcaccauguacaucugcggcgauuccaccgagugcuccaaccugcugcugcaguacggcagcuucugcacccagcugaauagagcccugacagggaucgccguggaacaggacaagaacacccaagagguguucgcccaagugaagcaaaucuacaagaccccuccuaucaaggacuucggcggcuucaauuucagccagauucugcccgauccuagcaagcccagcaagcggagcuucaucgaggaccugcuguucaacaaagugacacuggccgacgccggcuucaucaagcaguauggcgauugucugggcgacauugccgccagggaucugauuugcgcccagaaguuuaacggacugacagugcugccuccucugcugaccgaugagaugaucgcccaguacugcucugcccugcuggccggcacaaucacaagcggcuggacauuuggagcuggcgccgcucugcagauccccuuugcuaugcagauggccuaccgguucaacggcaucggagugacccagaaugugcuguacgagaaccagaagcugaucgccaaccaguucaacagcgccaucggcaagauccaggacagccugagcagcacagcaagcgcccugggaaagcugcaggacguggucaaccagaaugcccaggcacugaacacccuggucaagcagcuguccuccaacuucggcgccaucagcucugugcugaacgauauccugagcagacuggacaaggucgaggccgaggugcagaucgacagacugaucacaggcagacugcagagccuccagacauacgugacccagcagcugaucagagccgccgagauuagagccucugccaaucuggccgccaccaagaugucugagugugugcugggccagagcaagagaguggacuuuugcggcaagggcuaccaccugaugagcuucccucagugcgccccucacggcgugguguuucugcacgugacauaugugcccgcucaagagaagaauuucaccaccgcuccagccaucugccacgacggcaaagcccacuuuccuagagaaggcguguucguguccaacggcacccauugguucgugacacagcggaacuucuacgagccccagaucaucaccaccgacaacaccuucgugucuggcaacugcgacguugugaucggcauugugaacaauaccguguacgacccucugcagcccgagcuggacagcuucaaagaggaacuggacaaguacuuuaagaaccacacaagccccgacguggaccugggcgauaucagcggaaucaaugccagcgucgugaacauccagaaagagaucgaccggcugaacgagguggccaagaaucugaacgagagccugaucgaccugcaagaacuggggaaguacgagcaguacaucaagggcggaggaucuggcggaggacagaucuacgagggcaagcugacagccgagggccugagauuuggaaucguggccagccgguucaaucacgcccugguggauagacugguggaaggcgccaucgaugccauugucagacacggcggcagagaagaggacaucacccucguuagagugcccggcucuugggagauuccuguggcugcuggcgagcuggcccggaaagaagauaucgacgccguuaucgccaucggcgugcugaucagaggcgccacaccucacuucgacuauaucgccagcgagguguccaaaggccuggccgaucugagccuggaacugagaaagcccaucaccuucggcgugaucaccgcugacacacuggaacaggccauugagagagccggcaccaagcacggcaacaaaggaugggaagccgcucuguccgccaucgagauggccaaccuguucaagagccugcggugaggacuaguuauaagacugacuagcccgaugggccucccaacgggcccuccuccccuccuugcaccgagauuaauaaaaaaaaaaaaaaaaaaaaaaaaaaaaaaaaaaaaaaaaaaaaaaaaaaaaaaaaaaaaaaaaugcaucccccccccccccccccccccccccccccccaaaggcucuuuucagagccaccagaauu

SEQ ID NO: 13043 - RNA, 4357 nt, Artificial Sequence
  SARS-CoV-2/Wuhan/WIV05/2019__EPI_ISL_402128 spike protein mRNA gc mod (1-1211) Ferritin construct
aggagaaagcuuaccauguucguguuucuggugcugcugccccugguguccagccagugugugaaccugaccaccagaacacagcugccuccagccuacaccaacagcuucaccagaggcguguacuaccccgacaagguguucagauccagcgugcugcacucuacccaggaccuguuccugccuuucuucagcaacgugaccugguuccacgccauccacguguccggcaccaauggcaccaagagauucgacaaccccgugcugcccuucaacgacgggguguacuuugccagcaccgagaaguccaacaucaucagaggcuggaucuucggcaccacacuggacagcaagacccagagccugcugaucgugaacaacgccaccaacguggucaucaaagugugcgaguuccaguucugcaacgaccccuuccugggcgucuacuaccacaagaacaacaagagcuggauggaaagcgaguuccggguguacagcagcgccaacaacugcaccuucgaguacgugucccagccuuuccugauggaccuggaaggcaagcagggcaacuucaagaaccugcgcgaguucguguucaagaacaucgacggcuacuucaaaaucuacagcaagcacaccccuaucaaccucgugcgggaucugccucagggcuucucugcucuggaaccccugguggaucugcccaucggcaucaacaucacccgguuucagacacugcuggcccugcacagaagcuaccugacaccuggcgauagcagcagcggauggacagcuggugccgccgcuuacuaugugggcuaccugcagccuagaaccuuccugcugaaguacaacgagaacggcaccaucaccgacgccguggauugugcucuggauccucugagcgagacaaagugcacccugaaguccuucaccguggaaaagggcaucuaccagaccagcaacuuccgggugcagcccaccgaauccaucgugcgguuccccaauaucaccaaucugugccccuucggcgagguguucaaugccaccagauucgccucuguguacgccuggaaccggaagcggaucagcaauugcguggccgacuacuccgugcuguacaacuccgccagcuucagcaccuucaagugcuacggcguguccccuaccaagcugaacgaccugugcuucacaaacguguacgccgacagcuucgugauccggggagaugaagugcggcagauugccccuggacagacaggcaagaucgccgacuacaacuacaagcugcccgacgacuucaccggcugugugauugccuggaacagcaacaaccuggacuccaaagucggcggcaacuacaauuaccuguaccggcuguuccggaaguccaaucugaagcccuucgagcgggacaucagcaccgaaaucuaucaggccggcagcaccccuugcaacggcguggaaggcuucaacugcuacuucccacugcaguccuacggcuuucagcccacaaauggcgugggcuaucagcccuacagagugguggugcugagcuucgaacugcugcaugcuccugccacagugugcggcccuaagaaaagcaccaaucucgugaagaacaaaugcgugaacuucaacuucaacggccugaccggcaccggcgugcugacagagagcaacaagaaguuccugccauuccagcaguuuggccgggauaucgccgauaccacagacgccguuagagauccccagacacuggaaauccuggacaucaccccaugcagcuucggcggagugucugugaucaccccuggcaccaacaccagcaaucagguggcagugcuguaccaggacgugaacuguaccgaagugcccguggccauucacgccgaucagcugacaccuacauggcggguguacuccaccggcagcaauguguuucagaccagagccggcugucugaucggagccgagcacgugaacaauagcuacgagugcgacauccccaucggcgcuggcaucugugccagcuaccagacacagacaaacagccccagacgggcuagaagcguggccagccagagcaucauugccuacacaaugucucugggcgccgagaacagcguggccuacuccaacaacucuaucgcuauccccaccaacuucaccaucagcgugaccaccgagauccugccuguguccaugaccaagaccagcguggacugcaccauguacaucugcggcgauuccaccgagugcuccaaccugcugcugcaguacggcagcuucugcacccagcugaauagagcccugacagggaucgccguggaacaggacaagaacacccaagagguguucgcccaagugaagcaaaucuacaagaccccuccuaucaaggacuucggcggcuucaauuucagccagauucugcccgauccuagcaagcccagcaagcggagcuucaucgaggaccugcuguucaacaaagugacacuggccgacgccggcuucaucaagcaguauggcgauugucugggcgacauugccgccagggaucugauuugcgcccagaaguuuaacggacugacagugcugccuccucugcugaccgaugagaugaucgcccaguacacaucugcccugcuggccggcacaaucacaagcggcuggacauuuggagcuggcgccgcucugcagauccccuuugcuaugcagauggccuaccgguucaacggcaucggagugacccagaaugugcuguacgagaaccagaagcugaucgccaaccaguucaacagcgccaucggcaagauccaggacagccugagcagcacagcaagcgcccugggaaagcugcaggacguggucaaccagaaugcccaggcacugaacacccuggucaagcagcuguccuccaacuucggcgccaucagcucugugcugaacgauauccugagcagacuggacaaggucgaggccgaggugcagaucgacagacugaucacaggcagacugcagagccuccagacauacgugacccagcagcugaucagagccgccgagauuagagccucugccaaucuggccgccaccaagaugucugagugugugcugggccagagcaagagaguggacuuuugcggcaagggcuaccaccugaugagcuucccucagucugccccucacggcgugguguuucugcacgugacauaugugcccgcucaagagaagaauuucaccaccgcuccagccaucugccacgacggcaaagcccacuuuccuagagaaggcguguucguguccaacggcacccauugguucgugacacagcggaacuucuacgagccccagaucaucaccaccgacaacaccuucgugucuggcaacugcgacguugugaucggcauugugaacaauaccguguacgacccucugcagcccgagcuggacagcuucaaagaggaacuggacaaguacuuuaagaaccacacaagccccgacguggaccugggcgauaucagcggaaucaaugccagcgucgugaacauccagaaagagaucgaccggcugaacgagguggccaagaaucugaacgagagccugaucgaccugcaagaacuggggaaguacgagcaguacaucaagggaggcggaggaucugacaucaucaagcugcugaacgagcaagugaacaaagagaugcagagcagcaaccuguacaugagcaugagcagcuggugcuacacccacagccuugauggcgccggacuguuccuguuugaucacgccgccgaggaauacgagcacgccaagaagcugaucaucuuccugaacgagaacaacgugcccgugcagcugaccagcauuucugccccugagcacaaguucgagggccugacacagaucuuccagaaggccuacgaacacgagcagcacaucagcgagagcaucaacaacaucguggaccacgccauuaagagcaaggaucacgccaccuucaacuuucugcagugguacguggccgaacagcacgaggaagaggugcuguucaaggacauccuggacaagaucgagcugaucggcaacgagaaccacggccuguaucuggccgaccaguacgugaagggaaucgccaagagcagaaagagcugaggacuaguuauaagacugacuagcccgaugggccucccaacgggcccuccuccccuccuugcaccgagauuaauaaaaaaaaaaaaaaaaaaaaaaaaaaaaaaaaaaaaaaaaaaaaaaaaaaaaaaaaaaaaaaaaugcaucccccccccccccccccccccccccccccccaaaggcucuuuucagagccaccagaauu

SEQ ID NO: 13044 - RNA, 4357 nt, Artificial Sequence
  SARS-CoV-2/Wuhan/WIV05/2019__EPI_ISL_402128 spike protein mRNA gc mod (1-1211)(K986P_V987P) Ferritin construct
aggagaaagcuuaccauguucguguuucuggugcugcugccccugguguccagccagugugugaaccugaccaccagaacacagcugccuccagccuacaccaacagcuucaccagaggcguguacuaccccgacaagguguucagauccagcgugcugcacucuacccaggaccuguuccugccuuucuucagcaacgugaccugguuccacgccauccacguguccggcaccaauggcaccaagagauucgacaaccccgugcugcccuucaacgacgggguguacuuugccagcaccgagaaguccaacaucaucagaggcuggaucuucggcaccacacuggacagcaagacccagagccugcugaucgugaacaacgccaccaacguggucaucaaagugugcgaguuccaguucugcaacgaccccuuccugggcgucuacuaccacaagaacaacaagagcuggauggaaagcgaguuccggguguacagcagcgccaacaacugcaccuucgaguacgugucccagccuuuccugauggaccuggaaggcaagcagggcaacuucaagaaccugcgcgaguucguguucaagaacaucgacggcuacuucaaaaucuacagcaagcacaccccuaucaaccucgugcgggaucugccucagggcuucucugcucuggaaccccugguggaucugcccaucggcaucaacaucacccgguuucagacacugcuggcccugcacagaagcuaccugacaccuggcgauagcagcagcggauggacagcuggugccgccgcuuacuaugugggcuaccugcagccuagaaccuuccugcugaaguacaacgagaacggcaccaucaccgacgccguggauugugcucuggauccucugagcgagacaaagugcacccugaaguccuucaccguggaaaagggcaucuaccagaccagcaacuuccgggugcagcccaccgaauccaucgugcgguuccccaauaucaccaaucugugccccuucggcgagguguucaaugccaccagauucgccucuguguacgccuggaaccggaagcggaucagcaauugcguggccgacuacuccgugcuguacaacuccgccagcuucagcaccuucaagugcuacggcguguccccuaccaagcugaacgaccugugcuucacaaacguguacgccgacagcuucgugauccggggagaugaagugcggcagauugccccuggacagacaggcaagaucgccgacuacaacuacaagcugcccgacgacuucaccggcugugugauugccuggaacagcaacaaccuggacuccaaagucggcggcaacuacaauuaccuguaccggcuguuccggaaguccaaucugaagcccuucgagcgggacaucagcaccgaaaucuaucaggccggcagcaccccuugcaacggcguggaaggcuucaacugcuacuucccacugcaguccuacggcuuucagcccacaaauggcgugggcuaucagcccuacagagugguggugcugagcuucgaacugcugcaugcuccugccacagugugcggcccuaagaaaagcaccaaucucgugaagaacaaaugcgugaacuucaacuucaacggccugaccggcaccggcgugcugacagagagcaacaagaaguuccugccauuccagcaguuuggccgggauaucgccgauaccacagacgccguuagagauccccagacacuggaaauccuggacaucaccccaugcagcuucggcggagugucugugaucaccccuggcaccaacaccagcaaucagguggcagugcuguaccaggacgugaacuguaccgaagugcccguggccauucacgccgaucagcugacaccuacauggcggguguacuccaccggcagcaauguguuucagaccagagccggcugucugaucggagccgagcacgugaacaauagcuacgagugcgacauccccaucggcgcuggcaucugugccagcuaccagacacagacaaacagccccagacgggcuagaagcguggccagccagagcaucauugccuacacaaugucucugggcgccgagaacagcguggccuacuccaacaacucuaucgcuauccccaccaacuucaccaucagcgugaccaccgagauccugccuguguccaugaccaagaccagcguggacugcaccauguacaucugcggcgauuccaccgagugcuccaaccugcugcugcaguacggcagcuucugcacccagcugaauagagcccugacagggaucgccguggaacaggacaagaacacccaagagguguucgcccaagugaagcaaaucuacaagaccccuccuaucaaggacuucggcggcuucaauuucagccagauucugcccgauccuagcaagcccagcaagcggagcuucaucgaggaccugcuguucaacaaagugacacuggccgacgccggcuucaucaagcaguauggcgauugucugggcgacauugccgccagggaucugauuugcgcccagaaguuuaacggacugacagugcugccuccucugcugaccgaugagaugaucgcccaguacacaucugcccugcuggccggcacaaucacaagcggcuggacauuuggagcuggcgccgcucugcagauccccuuugcuaugcagauggccuaccgguucaacggcaucggagugacccagaaugugcuguacgagaaccagaagcugaucgccaaccaguucaacagcgccaucggcaagauccaggacagccugagcagcacagcaagcgcccugggaaagcugcaggacguggucaaccagaaugcccaggcacugaacacccuggucaagcagcuguccuccaacuucggcgccaucagcucugugcugaacgauauccugagcagacuggacccuccugaggccgaggugcagaucgacagacugaucacaggcagacugcagagccuccagacauacgugacccagcagcugaucagagccgccgagauuagagccucugccaaucuggccgccaccaagaugucugagugugugcugggccagagcaagagaguggacuuuugcggcaagggcuaccaccugaugagcuucccucagucugccccucacggcgugguguuucugcacgugacauaugugcccgcucaagagaagaauuucaccaccgcuccagccaucugccacgacggcaaagcccacuuuccuagagaaggcguguucguguccaacggcacccauugguucgugacacagcggaacuucuacgagccccagaucaucaccaccgacaacaccuucgugucuggcaacugcgacguugugaucggcauugugaacaauaccguguacgacccucugcagcccgagcuggacagcuucaaagaggaacuggacaaguacuuuaagaaccacacaagccccgacguggaccugggcgauaucagcggaaucaaugccagcgucgugaacauccagaaagagaucgaccggcugaacgagguggccaagaaucugaacgagagccugaucgaccugcaagaacuggggaaguacgagcaguacaucaagggaggcggaggaucugacaucaucaagcugcugaacgagcaagugaacaaagagaugcagagcagcaaccuguacaugagcaugagcagcuggugcuacacccacagccuugauggcgccggacuguuccuguuugaucacgccgccgaggaauacgagcacgccaagaagcugaucaucuuccugaacgagaacaacgugcccgugcagcugaccagcauuucugccccugagcacaaguucgagggccugacacagaucuuccagaaggccuacgaacacgagcagcacaucagcgagagcaucaacaacaucguggaccacgccauuaagagcaaggaucacgccaccuucaacuuucugcagugguacguggccgaacagcacgaggaagaggugcuguucaaggacauccuggacaagaucgagcugaucggcaacgagaaccacggccuguaucuggccgaccaguacgugaagggaaucgccaagagcagaaagagcugaggacuaguuauaagacugacuagcccgaugggccucccaacgggcccuccuccccuccuugcaccgagauuaauaaaaaaaaaaaaaaaaaaaaaaaaaaaaaaaaaaaaaaaaaaaaaaaaaaaaaaaaaaaaaaaaugcaucccccccccccccccccccccccccccccccaaaggcucuuuucagagccaccagaauu

SEQ ID NO: 13045 - RNA, 4357 nt, Artificial Sequence
  SARS-CoV-2/Wuhan/WIV05/2019__EPI_ISL_402128 spike protein mRNA gc mod (1-1211)(K986P_V987P_T887WN_A1020W) Ferritin construct
aggagaaagcuuaccauguucguguuucuggugcugcugccccugguguccagccagugugugaaccugaccaccagaacacagcugccuccagccuacaccaacagcuucaccagaggcguguacuaccccgacaagguguucagauccagcgugcugcacucuacccaggaccuguuccugccuuucuucagcaacgugaccugguuccacgccauccacguguccggcaccaauggcaccaagagauucgacaaccccgugcugcccuucaacgacgggguguacuuugccagcaccgagaaguccaacaucaucagaggcuggaucuucggcaccacacuggacagcaagacccagagccugcugaucgugaacaacgccaccaacguggucaucaaagugugcgaguuccaguucugcaacgaccccuuccugggcgucuacuaccacaagaacaacaagagcuggauggaaagcgaguuccggguguacagcagcgccaacaacugcaccuucgaguacgugucccagccuuuccugauggaccuggaaggcaagcagggcaacuucaagaaccugcgcgaguucguguucaagaacaucgacggcuacuucaaaaucuacagcaagcacaccccuaucaaccucgugcgggaucugccucagggcuucucugcucuggaaccccugguggaucugcccaucggcaucaacaucacccgguuucagacacugcuggcccugcacagaagcuaccugacaccuggcgauagcagcagcggauggacagcuggugccgccgcuuacuaugugggcuaccugcagccuagaaccuuccugcugaaguacaacgagaacggcaccaucaccgacgccguggauugugcucuggauccucugagcgagacaaagugcacccugaaguccuucaccguggaaaagggcaucuaccagaccagcaacuuccgggugcagcccaccgaauccaucgugcgguuccccaauaucaccaaucugugccccuucggcgagguguucaaugccaccagauucgccucuguguacgccuggaaccggaagcggaucagcaauugcguggccgacuacuccgugcuguacaacuccgccagcuucagcaccuucaagugcuacggcguguccccuaccaagcugaacgaccugugcuucacaaacguguacgccgacagcuucgugauccggggagaugaagugcggcagauugccccuggacagacaggcaagaucgccgacuacaacuacaagcugcccgacgacuucaccggcugugugauugccuggaacagcaacaaccuggacuccaaagucggcggcaacuacaauuaccuguaccggcuguuccggaaguccaaucugaagcccuucgagcgggacaucagcaccgaaaucuaucaggccggcagcaccccuugcaacggcguggaaggcuucaacugcuacuucccacugcaguccuacggcuuucagcccacaaauggcgugggcuaucagcccuacagagugguggugcugagcuucgaacugcugcaugcuccugccacagugugcggcccuaagaaaagcaccaaucucgugaagaacaaaugcgugaacuucaacuucaacggccugaccggcaccggcgugcugacagagagcaacaagaaguuccugccauuccagcaguuuggccgggauaucgccgauaccacagacgccguuagagauccccagacacuggaaauccuggacaucaccccaugcagcuucggcggagugucugugaucaccccuggcaccaacaccagcaaucagguggcagugcuguaccaggacgugaacuguaccgaagugcccguggccauucacgccgaucagcugacaccuacauggcggguguacuccaccggcagcaauguguuucagaccagagccggcugucugaucggagccgagcacgugaacaauagcuacgagugcgacauccccaucggcgcuggcaucugugccagcuaccagacacagacaaacagccccagacgggcuagaagcguggccagccagagcaucauugccuacacaaugucucugggcgccgagaacagcguggccuacuccaacaacucuaucgcuauccccaccaacuucaccaucagcgugaccaccgagauccugccuguguccaugaccaagaccagcguggacugcaccauguacaucugcggcgauuccaccgagugcuccaaccugcugcugcaguacggcagcuucugcacccagcugaauagagcccugacagggaucgccguggaacaggacaagaacacccaagagguguucgcccaagugaagcaaaucuacaagaccccuccuaucaaggacuucggcggcuucaauuucagccagauucugcccgauccuagcaagcccagcaagcggagcuucaucgaggaccugcuguucaacaaagugacacuggccgacgccggcuucaucaagcaguauggcgauugucugggcgacauugccgccagggaucugauuugcgcccagaaguuuaacggacugacagugcugccuccucugcugaccgaugagaugaucgcccaguacacaucugcccugcuggccggcacaaucacaagcggcuggugguuuggagcuggcgccgcucugcagauccccuuugcuaugcagauggccuaccgguucaacggcaucggagugacccagaaugugcuguacgagaaccagaagcugaucgccaaccaguucaacagcgccaucggcaagauccaggacagccugagcagcacagcaagcgcccugggaaagcugcaggacguggucaaccagaaugcccaggcacugaacacccuggucaagcagcuguccuccaacuucggcgccaucagcucugugcugaacgauauccugagcagacuggacccuccugaggccgaggugcagaucgacagacugaucacaggcagacugcagagccuccagacauacgugacccagcagcugaucagagccgccgagauuagauggucugccaaucuggccgccaccaagaugucugagugugugcugggccagagcaagagaguggacuuuugcggcaagggcuaccaccugaugagcuucccucagucugccccucacggcgugguguuucugcacgugacauaugugcccgcucaagagaagaauuucaccaccgcuccagccaucugccacgacggcaaagcccacuuuccuagagaaggcguguucguguccaacggcacccauugguucgugacacagcggaacuucuacgagccccagaucaucaccaccgacaacaccuucgugucuggcaacugcgacguugugaucggcauugugaacaauaccguguacgacccucugcagcccgagcuggacagcuucaaagaggaacuggacaaguacuuuaagaaccacacaagccccgacguggaccugggcgauaucagcggaaucaaugccagcgucgugaacauccagaaagagaucgaccggcugaacgagguggccaagaaucugaacgagagccugaucgaccugcaagaacuggggaaguacgagcaguacaucaagggaggcggaggaucugacaucaucaagcugcugaacgagcaagugaacaaagagaugcagagcagcaaccuguacaugagcaugagcagcuggugcuacacccacagccuugauggcgccggacuguuccuguuugaucacgccgccgaggaauacgagcacgccaagaagcugaucaucuuccugaacgagaacaacgugcccgugcagcugaccagcauuucugccccugagcacaaguucgagggccugacacagaucuuccagaaggccuacgaacacgagcagcacaucagcgagagcaucaacaacaucguggaccacgccauuaagagcaaggaucacgccaccuucaacuuucugcagugguacguggccgaacagcacgaggaagaggugcuguucaaggacauccuggacaagaucgagcugaucggcaacgagaaccacggccuguaucuggccgaccaguacgugaagggaaucgccaagagcagaaagagcugaggacuaguuauaagacugacuagcccgaugggccucccaacgggcccuccuccccuccuugcaccgagauuaauaaaaaaaaaaaaaaaaaaaaaaaaaaaaaaaaaaaaaaaaaaaaaaaaaaaaaaaaaaaaaaaaugcaucccccccccccccccccccccccccccccccaaaggcucuuuucagagccaccagaauu

SEQ ID NO: 13046 - RNA, 4357 nt, Artificial Sequence
  SARS-CoV-2/Wuhan/WIV05/2019__EPI_ISL_402128 spike protein mRNA gc mod (1-1211)(K986P_V987P_P1069F) Ferritin construct
aggagaaagcuuaccauguucguguuucuggugcugcugccccugguguccagccagugugugaaccugaccaccagaacacagcugccuccagccuacaccaacagcuucaccagaggcguguacuaccccgacaagguguucagauccagcgugcugcacucuacccaggaccuguuccugccuuucuucagcaacgugaccugguuccacgccauccacguguccggcaccaauggcaccaagagauucgacaaccccgugcugcccuucaacgacgggguguacuuugccagcaccgagaaguccaacaucaucagaggcuggaucuucggcaccacacuggacagcaagacccagagccugcugaucgugaacaacgccaccaacguggucaucaaagugugcgaguuccaguucugcaacgaccccuuccugggcgucuacuaccacaagaacaacaagagcuggauggaaagcgaguuccggguguacagcagcgccaacaacugcaccuucgaguacgugucccagccuuuccugauggaccuggaaggcaagcagggcaacuucaagaaccugcgcgaguucguguucaagaacaucgacggcuacuucaaaaucuacagcaagcacaccccuaucaaccucgugcgggaucugccucagggcuucucugcucuggaaccccugguggaucugcccaucggcaucaacaucacccgguuucagacacugcuggcccugcacagaagcuaccugacaccuggcgauagcagcagcggauggacagcuggugccgccgcuuacuaugugggcuaccugcagccuagaaccuuccugcugaaguacaacgagaacggcaccaucaccgacgccguggauugugcucuggauccucugagcgagacaaagugcacccugaaguccuucaccguggaaaagggcaucuaccagaccagcaacuuccgggugcagcccaccgaauccaucgugcgguuccccaauaucaccaaucugugccccuucggcgagguguucaaugccaccagauucgccucuguguacgccuggaaccggaagcggaucagcaauugcguggccgacuacuccgugcuguacaacuccgccagcuucagcaccuucaagugcuacggcguguccccuaccaagcugaacgaccugugcuucacaaacguguacgccgacagcuucgugauccggggagaugaagugcggcagauugccccuggacagacaggcaagaucgccgacuacaacuacaagcugcccgacgacuucaccggcugugugauugccuggaacagcaacaaccuggacuccaaagucggcggcaacuacaauuaccuguaccggcuguuccggaaguccaaucugaagcccuucgagcgggacaucagcaccgaaaucuaucaggccggcagcaccccuugcaacggcguggaaggcuucaacugcuacuucccacugcaguccuacggcuuucagcccacaaauggcgugggcuaucagcccuacagagugguggugcugagcuucgaacugcugcaugcuccugccacagugugcggcccuaagaaaagcaccaaucucgugaagaacaaaugcgugaacuucaacuucaacggccugaccggcaccggcgugcugacagagagcaacaagaaguuccugccauuccagcaguuuggccgggauaucgccgauaccacagacgccguuagagauccccagacacuggaaauccuggacaucaccccaugcagcuucggcggagugucugugaucaccccuggcaccaacaccagcaaucagguggcagugcuguaccaggacgugaacuguaccgaagugcccguggccauucacgccgaucagcugacaccuacauggcggguguacuccaccggcagcaauguguuucagaccagagccggcugucugaucggagccgagcacgugaacaauagcuacgagugcgacauccccaucggcgcuggcaucugugccagcuaccagacacagacaaacagccccagacgggcuagaagcguggccagccagagcaucauugccuacacaaugucucugggcgccgagaacagcguggccuacuccaacaacucuaucgcuauccccaccaacuucaccaucagcgugaccaccgagauccugccuguguccaugaccaagaccagcguggacugcaccauguacaucugcggcgauuccaccgagugcuccaaccugcugcugcaguacggcagcuucugcacccagcugaauagagcccugacagggaucgccguggaacaggacaagaacacccaagagguguucgcccaagugaagcaaaucuacaagaccccuccuaucaaggacuucggcggcuucaauuucagccagauucugcccgauccuagcaagcccagcaagcggagcuucaucgaggaccugcuguucaacaaagugacacuggccgacgccggcuucaucaagcaguauggcgauugucugggcgacauugccgccagggaucugauuugcgcccagaaguuuaacggacugacagugcugccuccucugcugaccgaugagaugaucgcccaguacacaucugcccugcuggccggcacaaucacaagcggcuggacauuuggagcuggcgccgcucugcagauccccuuugcuaugcagauggccuaccgguucaacggcaucggagugacccagaaugugcuguacgagaaccagaagcugaucgccaaccaguucaacagcgccaucggcaagauccaggacagccugagcagcacagcaagcgcccugggaaagcugcaggacguggucaaccagaaugcccaggcacugaacacccuggucaagcagcuguccuccaacuucggcgccaucagcucugugcugaacgauauccugagcagacuggacccuccugaggccgaggugcagaucgacagacugaucacaggcagacugcagagccuccagacauacgugacccagcagcugaucagagccgccgagauuagagccucugccaaucuggccgccaccaagaugucugagugugugcugggccagagcaagagaguggacuuuugcggcaagggcuaccaccugaugagcuucccucagucugccccucacggcgugguguuucugcacgugacauauguguucgcucaagagaagaauuucaccaccgcuccagccaucugccacgacggcaaagcccacuuuccuagagaaggcguguucguguccaacggcacccauugguucgugacacagcggaacuucuacgagccccagaucaucaccaccgacaacaccuucgugucuggcaacugcgacguugugaucggcauugugaacaauaccguguacgacccucugcagcccgagcuggacagcuucaaagaggaacuggacaaguacuuuaagaaccacacaagccccgacguggaccugggcgauaucagcggaaucaaugccagcgucgugaacauccagaaagagaucgaccggcugaacgagguggccaagaaucugaacgagagccugaucgaccugcaagaacuggggaaguacgagcaguacaucaagggaggcggaggaucugacaucaucaagcugcugaacgagcaagugaacaaagagaugcagagcagcaaccuguacaugagcaugagcagcuggugcuacacccacagccuugauggcgccggacuguuccuguuugaucacgccgccgaggaauacgagcacgccaagaagcugaucaucuuccugaacgagaacaacgugcccgugcagcugaccagcauuucugccccugagcacaaguucgagggccugacacagaucuuccagaaggccuacgaacacgagcagcacaucagcgagagcaucaacaacaucguggaccacgccauuaagagcaaggaucacgccaccuucaacuuucugcagugguacguggccgaacagcacgaggaagaggugcuguucaaggacauccuggacaagaucgagcugaucggcaacgagaaccacggccuguaucuggccgaccaguacgugaagggaaucgccaagagcagaaagagcugaggacuaguuauaagacugacuagcccgaugggccucccaacgggcccuccuccccuccuugcaccgagauuaauaaaaaaaaaaaaaaaaaaaaaaaaaaaaaaaaaaaaaaaaaaaaaaaaaaaaaaaaaaaaaaaaugcaucccccccccccccccccccccccccccccccaaaggcucuuuucagagccaccagaauu

SEQ ID NO: 13047 - RNA, 4357 nt, Artificial Sequence
  SARS-CoV-2/Wuhan/WIV05/2019__EPI_ISL_402128 spike protein mRNA gc mod (1-1211)(K986P_V987P_ H1048Q_H1064N_ H1083N_H1101N) Ferritin construct
aggagaaagcuuaccauguucguguuucuggugcugcugccccugguguccagccagugugugaaccugaccaccagaacacagcugccuccagccuacaccaacagcuucaccagaggcguguacuaccccgacaagguguucagauccagcgugcugcacucuacccaggaccuguuccugccuuucuucagcaacgugaccugguuccacgccauccacguguccggcaccaauggcaccaagagauucgacaaccccgugcugcccuucaacgacgggguguacuuugccagcaccgagaaguccaacaucaucagaggcuggaucuucggcaccacacuggacagcaagacccagagccugcugaucgugaacaacgccaccaacguggucaucaaagugugcgaguuccaguucugcaacgaccccuuccugggcgucuacuaccacaagaacaacaagagcuggauggaaagcgaguuccggguguacagcagcgccaacaacugcaccuucgaguacgugucccagccuuuccugauggaccuggaaggcaagcagggcaacuucaagaaccugcgcgaguucguguucaagaacaucgacggcuacuucaaaaucuacagcaagcacaccccuaucaaccucgugcgggaucugccucagggcuucucugcucuggaaccccugguggaucugcccaucggcaucaacaucacccgguuucagacacugcuggcccugcacagaagcuaccugacaccuggcgauagcagcagcggauggacagcuggugccgccgcuuacuaugugggcuaccugcagccuagaaccuuccugcugaaguacaacgagaacggcaccaucaccgacgccguggauugugcucuggauccucugagcgagacaaagugcacccugaaguccuucaccguggaaaagggcaucuaccagaccagcaacuuccgggugcagcccaccgaauccaucgugcgguuccccaauaucaccaaucugugccccuucggcgagguguucaaugccaccagauucgccucuguguacgccuggaaccggaagcggaucagcaauugcguggccgacuacuccgugcuguacaacuccgccagcuucagcaccuucaagugcuacggcguguccccuaccaagcugaacgaccugugcuucacaaacguguacgccgacagcuucgugauccggggagaugaagugcggcagauugccccuggacagacaggcaagaucgccgacuacaacuacaagcugcccgacgacuucaccggcugugugauugccuggaacagcaacaaccuggacuccaaagucggcggcaacuacaauuaccuguaccggcuguuccggaaguccaaucugaagcccuucgagcgggacaucagcaccgaaaucuaucaggccggcagcaccccuugcaacggcguggaaggcuucaacugcuacuucccacugcaguccuacggcuuucagcccacaaauggcgugggcuaucagcccuacagagugguggugcugagcuucgaacugcugcaugcuccugccacagugugcggcccuaagaaaagcaccaaucucgugaagaacaaaugcgugaacuucaacuucaacggccugaccggcaccggcgugcugacagagagcaacaagaaguuccugccauuccagcaguuuggccgggauaucgccgauaccacagacgccguuagagauccccagacacuggaaauccuggacaucaccccaugcagcuucggcggagugucugugaucaccccuggcaccaacaccagcaaucagguggcagugcuguaccaggacgugaacuguaccgaagugcccguggccauucacgccgaucagcugacaccuacauggcggguguacuccaccggcagcaauguguuucagaccagagccggcugucugaucggagccgagcacgugaacaauagcuacgagugcgacauccccaucggcgcuggcaucugugccagcuaccagacacagacaaacagccccagacgggcuagaagcguggccagccagagcaucauugccuacacaaugucucugggcgccgagaacagcguggccuacuccaacaacucuaucgcuauccccaccaacuucaccaucagcgugaccaccgagauccugccuguguccaugaccaagaccagcguggacugcaccauguacaucugcggcgauuccaccgagugcuccaaccugcugcugcaguacggcagcuucugcacccagcugaauagagcccugacagggaucgccguggaacaggacaagaacacccaagagguguucgcccaagugaagcaaaucuacaagaccccuccuaucaaggacuucggcggcuucaauuucagccagauucugcccgauccuagcaagcccagcaagcggagcuucaucgaggaccugcuguucaacaaagugacacuggccgacgccggcuucaucaagcaguauggcgauugucugggcgacauugccgccagggaucugauuugcgcccagaaguuuaacggacugacagugcugccuccucugcugaccgaugagaugaucgcccaguacacaucugcccugcuggccggcacaaucacaagcggcuggacauuuggagcuggcgccgcucugcagauccccuuugcuaugcagauggccuaccgguucaacggcaucggagugacccagaaugugcuguacgagaaccagaagcugaucgccaaccaguucaacagcgccaucggcaagauccaggacagccugagcagcacagcaagcgcccugggaaagcugcaggacguggucaaccagaaugcccaggcacugaacacccuggucaagcagcuguccuccaacuucggcgccaucagcucugugcugaacgauauccugagcagacuggacccuccugaggccgaggugcagaucgacagacugaucacaggcagacugcagagccuccagacauacgugacccagcagcugaucagagccgccgagauuagagccucugccaaucuggccgccaccaagaugucugagugugugcugggccagagcaagagaguggacuuuugcggcaagggcuaccagcugaugagcuucccucagucugccccucacggcgugguguuucugaacgugacauaugugcccgcucaagagaagaauuucaccaccgcuccagccaucugcaacgacggcaaagcccacuuuccuagagaaggcguguucguguccaacggcaccaacugguucgugacacagcggaacuucuacgagccccagaucaucaccaccgacaacaccuucgugucuggcaacugcgacguugugaucggcauugugaacaauaccguguacgacccucugcagcccgagcuggacagcuucaaagaggaacuggacaaguacuuuaagaaccacacaagccccgacguggaccugggcgauaucagcggaaucaaugccagcgucgugaacauccagaaagagaucgaccggcugaacgagguggccaagaaucugaacgagagccugaucgaccugcaagaacuggggaaguacgagcaguacaucaagggaggcggaggaucugacaucaucaagcugcugaacgagcaagugaacaaagagaugcagagcagcaaccuguacaugagcaugagcagcuggugcuacacccacagccuugauggcgccggacuguuccuguuugaucacgccgccgaggaauacgagcacgccaagaagcugaucaucuuccugaacgagaacaacgugcccgugcagcugaccagcauuucugccccugagcacaaguucgagggccugacacagaucuuccagaaggccuacgaacacgagcagcacaucagcgagagcaucaacaacaucguggaccacgccauuaagagcaaggaucacgccaccuucaacuuucugcagugguacguggccgaacagcacgaggaagaggugcuguucaaggacauccuggacaagaucgagcugaucggcaacgagaaccacggccuguaucuggccgaccaguacgugaagggaaucgccaagagcagaaagagcugaggacuaguuauaagacugacuagcccgaugggccucccaacgggcccuccuccccuccuugcaccgagauuaauaaaaaaaaaaaaaaaaaaaaaaaaaaaaaaaaaaaaaaaaaaaaaaaaaaaaaaaaaaaaaaaaugcaucccccccccccccccccccccccccccccccaaaggcucuuuucagagccaccagaauu

SEQ ID NO: 13048 - RNA, 4357 nt, Artificial Sequence
  SARS-CoV-2/Wuhan/WIV05/2019__EPI_ISL_402128 spike protein mRNA gc mod (1-1211)(I712C_T1077C) Ferritin construct
aggagaaagcuuaccauguucguguuucuggugcugcugccccugguguccagccagugugugaaccugaccaccagaacacagcugccuccagccuacaccaacagcuucaccagaggcguguacuaccccgacaagguguucagauccagcgugcugcacucuacccaggaccuguuccugccuuucuucagcaacgugaccugguuccacgccauccacguguccggcaccaauggcaccaagagauucgacaaccccgugcugcccuucaacgacgggguguacuuugccagcaccgagaaguccaacaucaucagaggcuggaucuucggcaccacacuggacagcaagacccagagccugcugaucgugaacaacgccaccaacguggucaucaaagugugcgaguuccaguucugcaacgaccccuuccugggcgucuacuaccacaagaacaacaagagcuggauggaaagcgaguuccggguguacagcagcgccaacaacugcaccuucgaguacgugucccagccuuuccugauggaccuggaaggcaagcagggcaacuucaagaaccugcgcgaguucguguucaagaacaucgacggcuacuucaaaaucuacagcaagcacaccccuaucaaccucgugcgggaucugccucagggcuucucugcucuggaaccccugguggaucugcccaucggcaucaacaucacccgguuucagacacugcuggcccugcacagaagcuaccugacaccuggcgauagcagcagcggauggacagcuggugccgccgcuuacuaugugggcuaccugcagccuagaaccuuccugcugaaguacaacgagaacggcaccaucaccgacgccguggauugugcucuggauccucugagcgagacaaagugcacccugaaguccuucaccguggaaaagggcaucuaccagaccagcaacuuccgggugcagcccaccgaauccaucgugcgguuccccaauaucaccaaucugugccccuucggcgagguguucaaugccaccagauucgccucuguguacgccuggaaccggaagcggaucagcaauugcguggccgacuacuccgugcuguacaacuccgccagcuucagcaccuucaagugcuacggcguguccccuaccaagcugaacgaccugugcuucacaaacguguacgccgacagcuucgugauccggggagaugaagugcggcagauugccccuggacagacaggcaagaucgccgacuacaacuacaagcugcccgacgacuucaccggcugugugauugccuggaacagcaacaaccuggacuccaaagucggcggcaacuacaauuaccuguaccggcuguuccggaaguccaaucugaagcccuucgagcgggacaucagcaccgaaaucuaucaggccggcagcaccccuugcaacggcguggaaggcuucaacugcuacuucccacugcaguccuacggcuuucagcccacaaauggcgugggcuaucagcccuacagagugguggugcugagcuucgaacugcugcaugcuccugccacagugugcggcccuaagaaaagcaccaaucucgugaagaacaaaugcgugaacuucaacuucaacggccugaccggcaccggcgugcugacagagagcaacaagaaguuccugccauuccagcaguuuggccgggauaucgccgauaccacagacgccguuagagauccccagacacuggaaauccuggacaucaccccaugcagcuucggcggagugucugugaucaccccuggcaccaacaccagcaaucagguggcagugcuguaccaggacgugaacuguaccgaagugcccguggccauucacgccgaucagcugacaccuacauggcggguguacuccaccggcagcaauguguuucagaccagagccggcugucugaucggagccgagcacgugaacaauagcuacgagugcgacauccccaucggcgcuggcaucugugccagcuaccagacacagacaaacagccccagacgggcuagaagcguggccagccagagcaucauugccuacacaaugucucugggcgccgagaacagcguggccuacuccaacaacucuugcgcuauccccaccaacuucaccaucagcgugaccaccgagauccugccuguguccaugaccaagaccagcguggacugcaccauguacaucugcggcgauuccaccgagugcuccaaccugcugcugcaguacggcagcuucugcacccagcugaauagagcccugacagggaucgccguggaacaggacaagaacacccaagagguguucgcccaagugaagcaaaucuacaagaccccuccuaucaaggacuucggcggcuucaauuucagccagauucugcccgauccuagcaagcccagcaagcggagcuucaucgaggaccugcuguucaacaaagugacacuggccgacgccggcuucaucaagcaguauggcgauugucugggcgacauugccgccagggaucugauuugcgcccagaaguuuaacggacugacagugcugccuccucugcugaccgaugagaugaucgcccaguacacaucugcccugcuggccggcacaaucacaagcggcuggacauuuggagcuggcgccgcucugcagauccccuuugcuaugcagauggccuaccgguucaacggcaucggagugacccagaaugugcuguacgagaaccagaagcugaucgccaaccaguucaacagcgccaucggcaagauccaggacagccugagcagcacagcaagcgcccugggaaagcugcaggacguggucaaccagaaugcccaggcacugaacacccuggucaagcagcuguccuccaacuucggcgccaucagcucugugcugaacgauauccugagcagacuggacaaggucgaggccgaggugcagaucgacagacugaucacaggcagacugcagagccuccagacauacgugacccagcagcugaucagagccgccgagauuagagccucugccaaucuggccgccaccaagaugucugagugugugcugggccagagcaagagaguggacuuuugcggcaagggcuaccaccugaugagcuucccucagucugccccucacggcgugguguuucugcacgugacauaugugcccgcucaagagaagaauuucaccugugcuccagccaucugccacgacggcaaagcccacuuuccuagagaaggcguguucguguccaacggcacccauugguucgugacacagcggaacuucuacgagccccagaucaucaccaccgacaacaccuucgugucuggcaacugcgacguugugaucggcauugugaacaauaccguguacgacccucugcagcccgagcuggacagcuucaaagaggaacuggacaaguacuuuaagaaccacacaagccccgacguggaccugggcgauaucagcggaaucaaugccagcgucgugaacauccagaaagagaucgaccggcugaacgagguggccaagaaucugaacgagagccugaucgaccugcaagaacuggggaaguacgagcaguacaucaagggaggcggaggaucugacaucaucaagcugcugaacgagcaagugaacaaagagaugcagagcagcaaccuguacaugagcaugagcagcuggugcuacacccacagccuugauggcgccggacuguuccuguuugaucacgccgccgaggaauacgagcacgccaagaagcugaucaucuuccugaacgagaacaacgugcccgugcagcugaccagcauuucugccccugagcacaaguucgagggccugacacagaucuuccagaaggccuacgaacacgagcagcacaucagcgagagcaucaacaacaucguggaccacgccauuaagagcaaggaucacgccaccuucaacuuucugcagugguacguggccgaacagcacgaggaagaggugcuguucaaggacauccuggacaagaucgagcugaucggcaacgagaaccacggccuguaucuggccgaccaguacgugaagggaaucgccaagagcagaaagagcugaggacuaguuauaagacugacuagcccgaugggccucccaacgggcccuccuccccuccuugcaccgagauuaauaaaaaaaaaaaaaaaaaaaaaaaaaaaaaaaaaaaaaaaaaaaaaaaaaaaaaaaaaaaaaaaaugcaucccccccccccccccccccccccccccccccaaaggcucuuuucagagccaccagaauu

SEQ ID NO: 13049 - RNA, 4357 nt, Artificial Sequence
  SARS-CoV-2/Wuhan/WIV05/2019__EPI_ISL_402128 spike protein mRNA gc mod (1-1211)(I714C_Y1110C) Ferritin construct
aggagaaagcuuaccauguucguguuucuggugcugcugccccugguguccagccagugugugaaccugaccaccagaacacagcugccuccagccuacaccaacagcuucaccagaggcguguacuaccccgacaagguguucagauccagcgugcugcacucuacccaggaccuguuccugccuuucuucagcaacgugaccugguuccacgccauccacguguccggcaccaauggcaccaagagauucgacaaccccgugcugcccuucaacgacgggguguacuuugccagcaccgagaaguccaacaucaucagaggcuggaucuucggcaccacacuggacagcaagacccagagccugcugaucgugaacaacgccaccaacguggucaucaaagugugcgaguuccaguucugcaacgaccccuuccugggcgucuacuaccacaagaacaacaagagcuggauggaaagcgaguuccggguguacagcagcgccaacaacugcaccuucgaguacgugucccagccuuuccugauggaccuggaaggcaagcagggcaacuucaagaaccugcgcgaguucguguucaagaacaucgacggcuacuucaaaaucuacagcaagcacaccccuaucaaccucgugcgggaucugccucagggcuucucugcucuggaaccccugguggaucugcccaucggcaucaacaucacccgguuucagacacugcuggcccugcacagaagcuaccugacaccuggcgauagcagcagcggauggacagcuggugccgccgcuuacuaugugggcuaccugcagccuagaaccuuccugcugaaguacaacgagaacggcaccaucaccgacgccguggauugugcucuggauccucugagcgagacaaagugcacccugaaguccuucaccguggaaaagggcaucuaccagaccagcaacuuccgggugcagcccaccgaauccaucgugcgguuccccaauaucaccaaucugugccccuucggcgagguguucaaugccaccagauucgccucuguguacgccuggaaccggaagcggaucagcaauugcguggccgacuacuccgugcuguacaacuccgccagcuucagcaccuucaagugcuacggcguguccccuaccaagcugaacgaccugugcuucacaaacguguacgccgacagcuucgugauccggggagaugaagugcggcagauugccccuggacagacaggcaagaucgccgacuacaacuacaagcugcccgacgacuucaccggcugugugauugccuggaacagcaacaaccuggacuccaaagucggcggcaacuacaauuaccuguaccggcuguuccggaaguccaaucugaagcccuucgagcgggacaucagcaccgaaaucuaucaggccggcagcaccccuugcaacggcguggaaggcuucaacugcuacuucccacugcaguccuacggcuuucagcccacaaauggcgugggcuaucagcccuacagagugguggugcugagcuucgaacugcugcaugcuccugccacagugugcggcccuaagaaaagcaccaaucucgugaagaacaaaugcgugaacuucaacuucaacggccugaccggcaccggcgugcugacagagagcaacaagaaguuccugccauuccagcaguuuggccgggauaucgccgauaccacagacgccguuagagauccccagacacuggaaauccuggacaucaccccaugcagcuucggcggagugucugugaucaccccuggcaccaacaccagcaaucagguggcagugcuguaccaggacgugaacuguaccgaagugcccguggccauucacgccgaucagcugacaccuacauggcggguguacuccaccggcagcaauguguuucagaccagagccggcugucugaucggagccgagcacgugaacaauagcuacgagugcgacauccccaucggcgcuggcaucugugccagcuaccagacacagacaaacagccccagacgggcuagaagcguggccagccagagcaucauugccuacacaaugucucugggcgccgagaacagcguggccuacuccaacaacucuaucgcuugccccaccaacuucaccaucagcgugaccaccgagauccugccuguguccaugaccaagaccagcguggacugcaccauguacaucugcggcgauuccaccgagugcuccaaccugcugcugcaguacggcagcuucugcacccagcugaauagagcccugacagggaucgccguggaacaggacaagaacacccaagagguguucgcccaagugaagcaaaucuacaagaccccuccuaucaaggacuucggcggcuucaauuucagccagauucugcccgauccuagcaagcccagcaagcggagcuucaucgaggaccugcuguucaacaaagugacacuggccgacgccggcuucaucaagcaguauggcgauugucugggcgacauugccgccagggaucugauuugcgcccagaaguuuaacggacugacagugcugccuccucugcugaccgaugagaugaucgcccaguacacaucugcccugcuggccggcacaaucacaagcggcuggacauuuggagcuggcgccgcucugcagauccccuuugcuaugcagauggccuaccgguucaacggcaucggagugacccagaaugugcuguacgagaaccagaagcugaucgccaaccaguucaacagcgccaucggcaagauccaggacagccugagcagcacagcaagcgcccugggaaagcugcaggacguggucaaccagaaugcccaggcacugaacacccuggucaagcagcuguccuccaacuucggcgccaucagcucugugcugaacgauauccugagcagacuggacaaggucgaggccgaggugcagaucgacagacugaucacaggcagacugcagagccuccagacauacgugacccagcagcugaucagagccgccgagauuagagccucugccaaucuggccgccaccaagaugucugagugugugcugggccagagcaagagaguggacuuuugcggcaagggcuaccaccugaugagcuucccucagucugccccucacggcgugguguuucugcacgugacauaugugcccgcucaagagaagaauuucaccaccgcuccagccaucugccacgacggcaaagcccacuuuccuagagaaggcguguucguguccaacggcacccauugguucgugacacagcggaacuucugugagccccagaucaucaccaccgacaacaccuucgugucuggcaacugcgacguugugaucggcauugugaacaauaccguguacgacccucugcagcccgagcuggacagcuucaaagaggaacuggacaaguacuuuaagaaccacacaagccccgacguggaccugggcgauaucagcggaaucaaugccagcgucgugaacauccagaaagagaucgaccggcugaacgagguggccaagaaucugaacgagagccugaucgaccugcaagaacuggggaaguacgagcaguacaucaagggaggcggaggaucugacaucaucaagcugcugaacgagcaagugaacaaagagaugcagagcagcaaccuguacaugagcaugagcagcuggugcuacacccacagccuugauggcgccggacuguuccuguuugaucacgccgccgaggaauacgagcacgccaagaagcugaucaucuuccugaacgagaacaacgugcccgugcagcugaccagcauuucugccccugagcacaaguucgagggccugacacagaucuuccagaaggccuacgaacacgagcagcacaucagcgagagcaucaacaacaucguggaccacgccauuaagagcaaggaucacgccaccuucaacuuucugcagugguacguggccgaacagcacgaggaagaggugcuguucaaggacauccuggacaagaucgagcugaucggcaacgagaaccacggccuguaucuggccgaccaguacgugaagggaaucgccaagagcagaaagagcugaggacuaguuauaagacugacuagcccgaugggccucccaacgggcccuccuccccuccuugcaccgagauuaauaaaaaaaaaaaaaaaaaaaaaaaaaaaaaaaaaaaaaaaaaaaaaaaaaaaaaaaaaaaaaaaaugcaucccccccccccccccccccccccccccccccaaaggcucuuuucagagccaccagaauu

SEQ ID NO: 13050 - RNA, 4357 nt, Artificial Sequence
  SARS-CoV-2/Wuhan/WIV05/2019__EPI_ISL_402128 spike protein mRNA gc mod (1-1211)(P715C_P1069C) Ferritin construct
aggagaaagcuuaccauguucguguuucuggugcugcugccccugguguccagccagugugugaaccugaccaccagaacacagcugccuccagccuacaccaacagcuucaccagaggcguguacuaccccgacaagguguucagauccagcgugcugcacucuacccaggaccuguuccugccuuucuucagcaacgugaccugguuccacgccauccacguguccggcaccaauggcaccaagagauucgacaaccccgugcugcccuucaacgacgggguguacuuugccagcaccgagaaguccaacaucaucagaggcuggaucuucggcaccacacuggacagcaagacccagagccugcugaucgugaacaacgccaccaacguggucaucaaagugugcgaguuccaguucugcaacgaccccuuccugggcgucuacuaccacaagaacaacaagagcuggauggaaagcgaguuccggguguacagcagcgccaacaacugcaccuucgaguacgugucccagccuuuccugauggaccuggaaggcaagcagggcaacuucaagaaccugcgcgaguucguguucaagaacaucgacggcuacuucaaaaucuacagcaagcacaccccuaucaaccucgugcgggaucugccucagggcuucucugcucuggaaccccugguggaucugcccaucggcaucaacaucacccgguuucagacacugcuggcccugcacagaagcuaccugacaccuggcgauagcagcagcggauggacagcuggugccgccgcuuacuaugugggcuaccugcagccuagaaccuuccugcugaaguacaacgagaacggcaccaucaccgacgccguggauugugcucuggauccucugagcgagacaaagugcacccugaaguccuucaccguggaaaagggcaucuaccagaccagcaacuuccgggugcagcccaccgaauccaucgugcgguuccccaauaucaccaaucugugccccuucggcgagguguucaaugccaccagauucgccucuguguacgccuggaaccggaagcggaucagcaauugcguggccgacuacuccgugcuguacaacuccgccagcuucagcaccuucaagugcuacggcguguccccuaccaagcugaacgaccugugcuucacaaacguguacgccgacagcuucgugauccggggagaugaagugcggcagauugccccuggacagacaggcaagaucgccgacuacaacuacaagcugcccgacgacuucaccggcugugugauugccuggaacagcaacaaccuggacuccaaagucggcggcaacuacaauuaccuguaccggcuguuccggaaguccaaucugaagcccuucgagcgggacaucagcaccgaaaucuaucaggccggcagcaccccuugcaacggcguggaaggcuucaacugcuacuucccacugcaguccuacggcuuucagcccacaaauggcgugggcuaucagcccuacagagugguggugcugagcuucgaacugcugcaugcuccugccacagugugcggcccuaagaaaagcaccaaucucgugaagaacaaaugcgugaacuucaacuucaacggccugaccggcaccggcgugcugacagagagcaacaagaaguuccugccauuccagcaguuuggccgggauaucgccgauaccacagacgccguuagagauccccagacacuggaaauccuggacaucaccccaugcagcuucggcggagugucugugaucaccccuggcaccaacaccagcaaucagguggcagugcuguaccaggacgugaacuguaccgaagugcccguggccauucacgccgaucagcugacaccuacauggcggguguacuccaccggcagcaauguguuucagaccagagccggcugucugaucggagccgagcacgugaacaauagcuacgagugcgacauccccaucggcgcuggcaucugugccagcuaccagacacagacaaacagccccagacgggcuagaagcguggccagccagagcaucauugccuacacaaugucucugggcgccgagaacagcguggccuacuccaacaacucuaucgcuaucugcaccaacuucaccaucagcgugaccaccgagauccugccuguguccaugaccaagaccagcguggacugcaccauguacaucugcggcgauuccaccgagugcuccaaccugcugcugcaguacggcagcuucugcacccagcugaauagagcccugacagggaucgccguggaacaggacaagaacacccaagagguguucgcccaagugaagcaaaucuacaagaccccuccuaucaaggacuucggcggcuucaauuucagccagauucugcccgauccuagcaagcccagcaagcggagcuucaucgaggaccugcuguucaacaaagugacacuggccgacgccggcuucaucaagcaguauggcgauugucugggcgacauugccgccagggaucugauuugcgcccagaaguuuaacggacugacagugcugccuccucugcugaccgaugagaugaucgcccaguacacaucugcccugcuggccggcacaaucacaagcggcuggacauuuggagcuggcgccgcucugcagauccccuuugcuaugcagauggccuaccgguucaacggcaucggagugacccagaaugugcuguacgagaaccagaagcugaucgccaaccaguucaacagcgccaucggcaagauccaggacagccugagcagcacagcaagcgcccugggaaagcugcaggacguggucaaccagaaugcccaggcacugaacacccuggucaagcagcuguccuccaacuucggcgccaucagcucugugcugaacgauauccugagcagacuggacaaggucgaggccgaggugcagaucgacagacugaucacaggcagacugcagagccuccagacauacgugacccagcagcugaucagagccgccgagauuagagccucugccaaucuggccgccaccaagaugucugagugugugcugggccagagcaagagaguggacuuuugcggcaagggcuaccaccugaugagcuucccucagucugccccucacggcgugguguuucugcacgugacauaugugugugcucaagagaagaauuucaccaccgcuccagccaucugccacgacggcaaagcccacuuuccuagagaaggcguguucguguccaacggcacccauugguucgugacacagcggaacuucuacgagccccagaucaucaccaccgacaacaccuucgugucuggcaacugcgacguugugaucggcauugugaacaauaccguguacgacccucugcagcccgagcuggacagcuucaaagaggaacuggacaaguacuuuaagaaccacacaagccccgacguggaccugggcgauaucagcggaaucaaugccagcgucgugaacauccagaaagagaucgaccggcugaacgagguggccaagaaucugaacgagagccugaucgaccugcaagaacuggggaaguacgagcaguacaucaagggaggcggaggaucugacaucaucaagcugcugaacgagcaagugaacaaagagaugcagagcagcaaccuguacaugagcaugagcagcuggugcuacacccacagccuugauggcgccggacuguuccuguuugaucacgccgccgaggaauacgagcacgccaagaagcugaucaucuuccugaacgagaacaacgugcccgugcagcugaccagcauuucugccccugagcacaaguucgagggccugacacagaucuuccagaaggccuacgaacacgagcagcacaucagcgagagcaucaacaacaucguggaccacgccauuaagagcaaggaucacgccaccuucaacuuucugcagugguacguggccgaacagcacgaggaagaggugcuguucaaggacauccuggacaagaucgagcugaucggcaacgagaaccacggccuguaucuggccgaccaguacgugaagggaaucgccaagagcagaaagagcugaggacuaguuauaagacugacuagcccgaugggccucccaacgggcccuccuccccuccuugcaccgagauuaauaaaaaaaaaaaaaaaaaaaaaaaaaaaaaaaaaaaaaaaaaaaaaaaaaaaaaaaaaaaaaaaaugcaucccccccccccccccccccccccccccccccaaaggcucuuuucagagccaccagaauu

SEQ ID NO: 13051 - RNA, 4357 nt, Artificial Sequence
  SARS-CoV-2/Wuhan/WIV05/2019__EPI_ISL_402128 spike protein mRNA gc mod (1-1211)(G889C_L1034C) Ferritin construct
aggagaaagcuuaccauguucguguuucuggugcugcugccccugguguccagccagugugugaaccugaccaccagaacacagcugccuccagccuacaccaacagcuucaccagaggcguguacuaccccgacaagguguucagauccagcgugcugcacucuacccaggaccuguuccugccuuucuucagcaacgugaccugguuccacgccauccacguguccggcaccaauggcaccaagagauucgacaaccccgugcugcccuucaacgacgggguguacuuugccagcaccgagaaguccaacaucaucagaggcuggaucuucggcaccacacuggacagcaagacccagagccugcugaucgugaacaacgccaccaacguggucaucaaagugugcgaguuccaguucugcaacgaccccuuccugggcgucuacuaccacaagaacaacaagagcuggauggaaagcgaguuccggguguacagcagcgccaacaacugcaccuucgaguacgugucccagccuuuccugauggaccuggaaggcaagcagggcaacuucaagaaccugcgcgaguucguguucaagaacaucgacggcuacuucaaaaucuacagcaagcacaccccuaucaaccucgugcgggaucugccucagggcuucucugcucuggaaccccugguggaucugcccaucggcaucaacaucacccgguuucagacacugcuggcccugcacagaagcuaccugacaccuggcgauagcagcagcggauggacagcuggugccgccgcuuacuaugugggcuaccugcagccuagaaccuuccugcugaaguacaacgagaacggcaccaucaccgacgccguggauugugcucuggauccucugagcgagacaaagugcacccugaaguccuucaccguggaaaagggcaucuaccagaccagcaacuuccgggugcagcccaccgaauccaucgugcgguuccccaauaucaccaaucugugccccuucggcgagguguucaaugccaccagauucgccucuguguacgccuggaaccggaagcggaucagcaauugcguggccgacuacuccgugcuguacaacuccgccagcuucagcaccuucaagugcuacggcguguccccuaccaagcugaacgaccugugcuucacaaacguguacgccgacagcuucgugauccggggagaugaagugcggcagauugccccuggacagacaggcaagaucgccgacuacaacuacaagcugcccgacgacuucaccggcugugugauugccuggaacagcaacaaccuggacuccaaagucggcggcaacuacaauuaccuguaccggcuguuccggaaguccaaucugaagcccuucgagcgggacaucagcaccgaaaucuaucaggccggcagcaccccuugcaacggcguggaaggcuucaacugcuacuucccacugcaguccuacggcuuucagcccacaaauggcgugggcuaucagcccuacagagugguggugcugagcuucgaacugcugcaugcuccugccacagugugcggcccuaagaaaagcaccaaucucgugaagaacaaaugcgugaacuucaacuucaacggccugaccggcaccggcgugcugacagagagcaacaagaaguuccugccauuccagcaguuuggccgggauaucgccgauaccacagacgccguuagagauccccagacacuggaaauccuggacaucaccccaugcagcuucggcggagugucugugaucaccccuggcaccaacaccagcaaucagguggcagugcuguaccaggacgugaacuguaccgaagugcccguggccauucacgccgaucagcugacaccuacauggcggguguacuccaccggcagcaauguguuucagaccagagccggcugucugaucggagccgagcacgugaacaauagcuacgagugcgacauccccaucggcgcuggcaucugugccagcuaccagacacagacaaacagccccagacgggcuagaagcguggccagccagagcaucauugccuacacaaugucucugggcgccgagaacagcguggccuacuccaacaacucuaucgcuauccccaccaacuucaccaucagcgugaccaccgagauccugccuguguccaugaccaagaccagcguggacugcaccauguacaucugcggcgauuccaccgagugcuccaaccugcugcugcaguacggcagcuucugcacccagcugaauagagcccugacagggaucgccguggaacaggacaagaacacccaagagguguucgcccaagugaagcaaaucuacaagaccccuccuaucaaggacuucggcggcuucaauuucagccagauucugcccgauccuagcaagcccagcaagcggagcuucaucgaggaccugcuguucaacaaagugacacuggccgacgccggcuucaucaagcaguauggcgauugucugggcgacauugccgccagggaucugauuugcgcccagaaguuuaacggacugacagugcugccuccucugcugaccgaugagaugaucgcccaguacacaucugcccugcuggccggcacaaucacaagcggcuggacauuuugcgcuggcgccgcucugcagauccccuuugcuaugcagauggccuaccgguucaacggcaucggagugacccagaaugugcuguacgagaaccagaagcugaucgccaaccaguucaacagcgccaucggcaagauccaggacagccugagcagcacagcaagcgcccugggaaagcugcaggacguggucaaccagaaugcccaggcacugaacacccuggucaagcagcuguccuccaacuucggcgccaucagcucugugcugaacgauauccugagcagacuggacaaggucgaggccgaggugcagaucgacagacugaucacaggcagacugcagagccuccagacauacgugacccagcagcugaucagagccgccgagauuagagccucugccaaucuggccgccaccaagaugucugaguguguguguggccagagcaagagaguggacuuuugcggcaagggcuaccaccugaugagcuucccucagucugccccucacggcgugguguuucugcacgugacauaugugcccgcucaagagaagaauuucaccaccgcuccagccaucugccacgacggcaaagcccacuuuccuagagaaggcguguucguguccaacggcacccauugguucgugacacagcggaacuucuacgagccccagaucaucaccaccgacaacaccuucgugucuggcaacugcgacguugugaucggcauugugaacaauaccguguacgacccucugcagcccgagcuggacagcuucaaagaggaacuggacaaguacuuuaagaaccacacaagccccgacguggaccugggcgauaucagcggaaucaaugccagcgucgugaacauccagaaagagaucgaccggcugaacgagguggccaagaaucugaacgagagccugaucgaccugcaagaacuggggaaguacgagcaguacaucaagggaggcggaggaucugacaucaucaagcugcugaacgagcaagugaacaaagagaugcagagcagcaaccuguacaugagcaugagcagcuggugcuacacccacagccuugauggcgccggacuguuccuguuugaucacgccgccgaggaauacgagcacgccaagaagcugaucaucuuccugaacgagaacaacgugcccgugcagcugaccagcauuucugccccugagcacaaguucgagggccugacacagaucuuccagaaggccuacgaacacgagcagcacaucagcgagagcaucaacaacaucguggaccacgccauuaagagcaaggaucacgccaccuucaacuuucugcagugguacguggccgaacagcacgaggaagaggugcuguucaaggacauccuggacaagaucgagcugaucggcaacgagaaccacggccuguaucuggccgaccaguacgugaagggaaucgccaagagcagaaagagcugaggacuaguuauaagacugacuagcccgaugggccucccaacgggcccuccuccccuccuugcaccgagauuaauaaaaaaaaaaaaaaaaaaaaaaaaaaaaaaaaaaaaaaaaaaaaaaaaaaaaaaaaaaaaaaaaugcaucccccccccccccccccccccccccccccccaaaggcucuuuucagagccaccagaauu

SEQ ID NO: 13052 - RNA, 4357 nt, Artificial Sequence
  SARS-CoV-2/Wuhan/WIV05/2019__EPI_ISL_402128 spike protein mRNA gc mod (1-1211)(I909C_Y1047C) Ferritin construct
aggagaaagcuuaccauguucguguuucuggugcugcugccccugguguccagccagugugugaaccugaccaccagaacacagcugccuccagccuacaccaacagcuucaccagaggcguguacuaccccgacaagguguucagauccagcgugcugcacucuacccaggaccuguuccugccuuucuucagcaacgugaccugguuccacgccauccacguguccggcaccaauggcaccaagagauucgacaaccccgugcugcccuucaacgacgggguguacuuugccagcaccgagaaguccaacaucaucagaggcuggaucuucggcaccacacuggacagcaagacccagagccugcugaucgugaacaacgccaccaacguggucaucaaagugugcgaguuccaguucugcaacgaccccuuccugggcgucuacuaccacaagaacaacaagagcuggauggaaagcgaguuccggguguacagcagcgccaacaacugcaccuucgaguacgugucccagccuuuccugauggaccuggaaggcaagcagggcaacuucaagaaccugcgcgaguucguguucaagaacaucgacggcuacuucaaaaucuacagcaagcacaccccuaucaaccucgugcgggaucugccucagggcuucucugcucuggaaccccugguggaucugcccaucggcaucaacaucacccgguuucagacacugcuggcccugcacagaagcuaccugacaccuggcgauagcagcagcggauggacagcuggugccgccgcuuacuaugugggcuaccugcagccuagaaccuuccugcugaaguacaacgagaacggcaccaucaccgacgccguggauugugcucuggauccucugagcgagacaaagugcacccugaaguccuucaccguggaaaagggcaucuaccagaccagcaacuuccgggugcagcccaccgaauccaucgugcgguuccccaauaucaccaaucugugccccuucggcgagguguucaaugccaccagauucgccucuguguacgccuggaaccggaagcggaucagcaauugcguggccgacuacuccgugcuguacaacuccgccagcuucagcaccuucaagugcuacggcguguccccuaccaagcugaacgaccugugcuucacaaacguguacgccgacagcuucgugauccggggagaugaagugcggcagauugccccuggacagacaggcaagaucgccgacuacaacuacaagcugcccgacgacuucaccggcugugugauugccuggaacagcaacaaccuggacuccaaagucggcggcaacuacaauuaccuguaccggcuguuccggaaguccaaucugaagcccuucgagcgggacaucagcaccgaaaucuaucaggccggcagcaccccuugcaacggcguggaaggcuucaacugcuacuucccacugcaguccuacggcuuucagcccacaaauggcgugggcuaucagcccuacagagugguggugcugagcuucgaacugcugcaugcuccugccacagugugcggcccuaagaaaagcaccaaucucgugaagaacaaaugcgugaacuucaacuucaacggccugaccggcaccggcgugcugacagagagcaacaagaaguuccugccauuccagcaguuuggccgggauaucgccgauaccacagacgccguuagagauccccagacacuggaaauccuggacaucaccccaugcagcuucggcggagugucugugaucaccccuggcaccaacaccagcaaucagguggcagugcuguaccaggacgugaacuguaccgaagugcccguggccauucacgccgaucagcugacaccuacauggcggguguacuccaccggcagcaauguguuucagaccagagccggcugucugaucggagccgagcacgugaacaauagcuacgagugcgacauccccaucggcgcuggcaucugugccagcuaccagacacagacaaacagccccagacgggcuagaagcguggccagccagagcaucauugccuacacaaugucucugggcgccgagaacagcguggccuacuccaacaacucuaucgcuauccccaccaacuucaccaucagcgugaccaccgagauccugccuguguccaugaccaagaccagcguggacugcaccauguacaucugcggcgauuccaccgagugcuccaaccugcugcugcaguacggcagcuucugcacccagcugaauagagcccugacagggaucgccguggaacaggacaagaacacccaagagguguucgcccaagugaagcaaaucuacaagaccccuccuaucaaggacuucggcggcuucaauuucagccagauucugcccgauccuagcaagcccagcaagcggagcuucaucgaggaccugcuguucaacaaagugacacuggccgacgccggcuucaucaagcaguauggcgauugucugggcgacauugccgccagggaucugauuugcgcccagaaguuuaacggacugacagugcugccuccucugcugaccgaugagaugaucgcccaguacacaucugcccugcuggccggcacaaucacaagcggcuggacauuuggagcuggcgccgcucugcagauccccuuugcuaugcagauggccuaccgguucaacggcugcggagugacccagaaugugcuguacgagaaccagaagcugaucgccaaccaguucaacagcgccaucggcaagauccaggacagccugagcagcacagcaagcgcccugggaaagcugcaggacguggucaaccagaaugcccaggcacugaacacccuggucaagcagcuguccuccaacuucggcgccaucagcucugugcugaacgauauccugagcagacuggacaaggucgaggccgaggugcagaucgacagacugaucacaggcagacugcagagccuccagacauacgugacccagcagcugaucagagccgccgagauuagagccucugccaaucuggccgccaccaagaugucugagugugugcugggccagagcaagagaguggacuuuugcggcaagggcugucaccugaugagcuucccucagucugccccucacggcgugguguuucugcacgugacauaugugcccgcucaagagaagaauuucaccaccgcuccagccaucugccacgacggcaaagcccacuuuccuagagaaggcguguucguguccaacggcacccauugguucgugacacagcggaacuucuacgagccccagaucaucaccaccgacaacaccuucgugucuggcaacugcgacguugugaucggcauugugaacaauaccguguacgacccucugcagcccgagcuggacagcuucaaagaggaacuggacaaguacuuuaagaaccacacaagccccgacguggaccugggcgauaucagcggaaucaaugccagcgucgugaacauccagaaagagaucgaccggcugaacgagguggccaagaaucugaacgagagccugaucgaccugcaagaacuggggaaguacgagcaguacaucaagggaggcggaggaucugacaucaucaagcugcugaacgagcaagugaacaaagagaugcagagcagcaaccuguacaugagcaugagcagcuggugcuacacccacagccuugauggcgccggacuguuccuguuugaucacgccgccgaggaauacgagcacgccaagaagcugaucaucuuccugaacgagaacaacgugcccgugcagcugaccagcauuucugccccugagcacaaguucgagggccugacacagaucuuccagaaggccuacgaacacgagcagcacaucagcgagagcaucaacaacaucguggaccacgccauuaagagcaaggaucacgccaccuucaacuuucugcagugguacguggccgaacagcacgaggaagaggugcuguucaaggacauccuggacaagaucgagcugaucggcaacgagaaccacggccuguaucuggccgaccaguacgugaagggaaucgccaagagcagaaagagcugaggacuaguuauaagacugacuagcccgaugggccucccaacgggcccuccuccccuccuugcaccgagauuaauaaaaaaaaaaaaaaaaaaaaaaaaaaaaaaaaaaaaaaaaaaaaaaaaaaaaaaaaaaaaaaaaugcaucccccccccccccccccccccccccccccccaaaggcucuuuucagagccaccagaauu

SEQ ID NO: 13053 - RNA, 4357 nt, Artificial Sequence
  SARS-CoV-2/Wuhan/WIV05/2019__EPI_ISL_402128 spike protein mRNA gc mod (1-1211)(Q965C_S1003C) Ferritin construct
aggagaaagcuuaccauguucguguuucuggugcugcugccccugguguccagccagugugugaaccugaccaccagaacacagcugccuccagccuacaccaacagcuucaccagaggcguguacuaccccgacaagguguucagauccagcgugcugcacucuacccaggaccuguuccugccuuucuucagcaacgugaccugguuccacgccauccacguguccggcaccaauggcaccaagagauucgacaaccccgugcugcccuucaacgacgggguguacuuugccagcaccgagaaguccaacaucaucagaggcuggaucuucggcaccacacuggacagcaagacccagagccugcugaucgugaacaacgccaccaacguggucaucaaagugugcgaguuccaguucugcaacgaccccuuccugggcgucuacuaccacaagaacaacaagagcuggauggaaagcgaguuccggguguacagcagcgccaacaacugcaccuucgaguacgugucccagccuuuccugauggaccuggaaggcaagcagggcaacuucaagaaccugcgcgaguucguguucaagaacaucgacggcuacuucaaaaucuacagcaagcacaccccuaucaaccucgugcgggaucugccucagggcuucucugcucuggaaccccugguggaucugcccaucggcaucaacaucacccgguuucagacacugcuggcccugcacagaagcuaccugacaccuggcgauagcagcagcggauggacagcuggugccgccgcuuacuaugugggcuaccugcagccuagaaccuuccugcugaaguacaacgagaacggcaccaucaccgacgccguggauugugcucuggauccucugagcgagacaaagugcacccugaaguccuucaccguggaaaagggcaucuaccagaccagcaacuuccgggugcagcccaccgaauccaucgugcgguuccccaauaucaccaaucugugccccuucggcgagguguucaaugccaccagauucgccucuguguacgccuggaaccggaagcggaucagcaauugcguggccgacuacuccgugcuguacaacuccgccagcuucagcaccuucaagugcuacggcguguccccuaccaagcugaacgaccugugcuucacaaacguguacgccgacagcuucgugauccggggagaugaagugcggcagauugccccuggacagacaggcaagaucgccgacuacaacuacaagcugcccgacgacuucaccggcugugugauugccuggaacagcaacaaccuggacuccaaagucggcggcaacuacaauuaccuguaccggcuguuccggaaguccaaucugaagcccuucgagcgggacaucagcaccgaaaucuaucaggccggcagcaccccuugcaacggcguggaaggcuucaacugcuacuucccacugcaguccuacggcuuucagcccacaaauggcgugggcuaucagcccuacagagugguggugcugagcuucgaacugcugcaugcuccugccacagugugcggcccuaagaaaagcaccaaucucgugaagaacaaaugcgugaacuucaacuucaacggccugaccggcaccggcgugcugacagagagcaacaagaaguuccugccauuccagcaguuuggccgggauaucgccgauaccacagacgccguuagagauccccagacacuggaaauccuggacaucaccccaugcagcuucggcggagugucugugaucaccccuggcaccaacaccagcaaucagguggcagugcuguaccaggacgugaacuguaccgaagugcccguggccauucacgccgaucagcugacaccuacauggcggguguacuccaccggcagcaauguguuucagaccagagccggcugucugaucggagccgagcacgugaacaauagcuacgagugcgacauccccaucggcgcuggcaucugugccagcuaccagacacagacaaacagccccagacgggcuagaagcguggccagccagagcaucauugccuacacaaugucucugggcgccgagaacagcguggccuacuccaacaacucuaucgcuauccccaccaacuucaccaucagcgugaccaccgagauccugccuguguccaugaccaagaccagcguggacugcaccauguacaucugcggcgauuccaccgagugcuccaaccugcugcugcaguacggcagcuucugcacccagcugaauagagcccugacagggaucgccguggaacaggacaagaacacccaagagguguucgcccaagugaagcaaaucuacaagaccccuccuaucaaggacuucggcggcuucaauuucagccagauucugcccgauccuagcaagcccagcaagcggagcuucaucgaggaccugcuguucaacaaagugacacuggccgacgccggcuucaucaagcaguauggcgauugucugggcgacauugccgccagggaucugauuugcgcccagaaguuuaacggacugacagugcugccuccucugcugaccgaugagaugaucgcccaguacacaucugcccugcuggccggcacaaucacaagcggcuggacauuuggagcuggcgccgcucugcagauccccuuugcuaugcagauggccuaccgguucaacggcaucggagugacccagaaugugcuguacgagaaccagaagcugaucgccaaccaguucaacagcgccaucggcaagauccaggacagccugagcagcacagcaagcgcccugggaaagcugcaggacguggucaaccagaaugcccaggcacugaacacccuggucaagugccuguccuccaacuucggcgccaucagcucugugcugaacgauauccugagcagacuggacaaggucgaggccgaggugcagaucgacagacugaucacaggcagacugcagugucuccagacauacgugacccagcagcugaucagagccgccgagauuagagccucugccaaucuggccgccaccaagaugucugagugugugcugggccagagcaagagaguggacuuuugcggcaagggcuaccaccugaugagcuucccucagucugccccucacggcgugguguuucugcacgugacauaugugcccgcucaagagaagaauuucaccaccgcuccagccaucugccacgacggcaaagcccacuuuccuagagaaggcguguucguguccaacggcacccauugguucgugacacagcggaacuucuacgagccccagaucaucaccaccgacaacaccuucgugucuggcaacugcgacguugugaucggcauugugaacaauaccguguacgacccucugcagcccgagcuggacagcuucaaagaggaacuggacaaguacuuuaagaaccacacaagccccgacguggaccugggcgauaucagcggaaucaaugccagcgucgugaacauccagaaagagaucgaccggcugaacgagguggccaagaaucugaacgagagccugaucgaccugcaagaacuggggaaguacgagcaguacaucaagggaggcggaggaucugacaucaucaagcugcugaacgagcaagugaacaaagagaugcagagcagcaaccuguacaugagcaugagcagcuggugcuacacccacagccuugauggcgccggacuguuccuguuugaucacgccgccgaggaauacgagcacgccaagaagcugaucaucuuccugaacgagaacaacgugcccgugcagcugaccagcauuucugccccugagcacaaguucgagggccugacacagaucuuccagaaggccuacgaacacgagcagcacaucagcgagagcaucaacaacaucguggaccacgccauuaagagcaaggaucacgccaccuucaacuuucugcagugguacguggccgaacagcacgaggaagaggugcuguucaaggacauccuggacaagaucgagcugaucggcaacgagaaccacggccuguaucuggccgaccaguacgugaagggaaucgccaagagcagaaagagcugaggacuaguuauaagacugacuagcccgaugggccucccaacgggcccuccuccccuccuugcaccgagauuaauaaaaaaaaaaaaaaaaaaaaaaaaaaaaaaaaaaaaaaaaaaaaaaaaaaaaaaaaaaaaaaaaugcaucccccccccccccccccccccccccccccccaaaggcucuuuucagagccaccagaauu

SEQ ID NO: 13054 - RNA, 4357 nt, Artificial Sequence
  SARS-CoV-2/Wuhan/WIV05/2019__EPI_ISL_402128 spike protein mRNA gc mod (1-1211)(F970C_G999C) Ferritin construct
aggagaaagcuuaccauguucguguuucuggugcugcugccccugguguccagccagugugugaaccugaccaccagaacacagcugccuccagccuacaccaacagcuucaccagaggcguguacuaccccgacaagguguucagauccagcgugcugcacucuacccaggaccuguuccugccuuucuucagcaacgugaccugguuccacgccauccacguguccggcaccaauggcaccaagagauucgacaaccccgugcugcccuucaacgacgggguguacuuugccagcaccgagaaguccaacaucaucagaggcuggaucuucggcaccacacuggacagcaagacccagagccugcugaucgugaacaacgccaccaacguggucaucaaagugugcgaguuccaguucugcaacgaccccuuccugggcgucuacuaccacaagaacaacaagagcuggauggaaagcgaguuccggguguacagcagcgccaacaacugcaccuucgaguacgugucccagccuuuccugauggaccuggaaggcaagcagggcaacuucaagaaccugcgcgaguucguguucaagaacaucgacggcuacuucaaaaucuacagcaagcacaccccuaucaaccucgugcgggaucugccucagggcuucucugcucuggaaccccugguggaucugcccaucggcaucaacaucacccgguuucagacacugcuggcccugcacagaagcuaccugacaccuggcgauagcagcagcggauggacagcuggugccgccgcuuacuaugugggcuaccugcagccuagaaccuuccugcugaaguacaacgagaacggcaccaucaccgacgccguggauugugcucuggauccucugagcgagacaaagugcacccugaaguccuucaccguggaaaagggcaucuaccagaccagcaacuuccgggugcagcccaccgaauccaucgugcgguuccccaauaucaccaaucugugccccuucggcgagguguucaaugccaccagauucgccucuguguacgccuggaaccggaagcggaucagcaauugcguggccgacuacuccgugcuguacaacuccgccagcuucagcaccuucaagugcuacggcguguccccuaccaagcugaacgaccugugcuucacaaacguguacgccgacagcuucgugauccggggagaugaagugcggcagauugccccuggacagacaggcaagaucgccgacuacaacuacaagcugcccgacgacuucaccggcugugugauugccuggaacagcaacaaccuggacuccaaagucggcggcaacuacaauuaccuguaccggcuguuccggaaguccaaucugaagcccuucgagcgggacaucagcaccgaaaucuaucaggccggcagcaccccuugcaacggcguggaaggcuucaacugcuacuucccacugcaguccuacggcuuucagcccacaaauggcgugggcuaucagcccuacagagugguggugcugagcuucgaacugcugcaugcuccugccacagugugcggcccuaagaaaagcaccaaucucgugaagaacaaaugcgugaacuucaacuucaacggccugaccggcaccggcgugcugacagagagcaacaagaaguuccugccauuccagcaguuuggccgggauaucgccgauaccacagacgccguuagagauccccagacacuggaaauccuggacaucaccccaugcagcuucggcggagugucugugaucaccccuggcaccaacaccagcaaucagguggcagugcuguaccaggacgugaacuguaccgaagugcccguggccauucacgccgaucagcugacaccuacauggcggguguacuccaccggcagcaauguguuucagaccagagccggcugucugaucggagccgagcacgugaacaauagcuacgagugcgacauccccaucggcgcuggcaucugugccagcuaccagacacagacaaacagccccagacgggcuagaagcguggccagccagagcaucauugccuacacaaugucucugggcgccgagaacagcguggccuacuccaacaacucuaucgcuauccccaccaacuucaccaucagcgugaccaccgagauccugccuguguccaugaccaagaccagcguggacugcaccauguacaucugcggcgauuccaccgagugcuccaaccugcugcugcaguacggcagcuucugcacccagcugaauagagcccugacagggaucgccguggaacaggacaagaacacccaagagguguucgcccaagugaagcaaaucuacaagaccccuccuaucaaggacuucggcggcuucaauuucagccagauucugcccgauccuagcaagcccagcaagcggagcuucaucgaggaccugcuguucaacaaagugacacuggccgacgccggcuucaucaagcaguauggcgauugucugggcgacauugccgccagggaucugauuugcgcccagaaguuuaacggacugacagugcugccuccucugcugaccgaugagaugaucgcccaguacacaucugcccugcuggccggcacaaucacaagcggcuggacauuuggagcuggcgccgcucugcagauccccuuugcuaugcagauggccuaccgguucaacggcaucggagugacccagaaugugcuguacgagaaccagaagcugaucgccaaccaguucaacagcgccaucggcaagauccaggacagccugagcagcacagcaagcgcccugggaaagcugcaggacguggucaaccagaaugcccaggcacugaacacccuggucaagcagcuguccuccaacugcggcgccaucagcucugugcugaacgauauccugagcagacuggacaaggucgaggccgaggugcagaucgacagacugaucacauguagacugcagagccuccagacauacgugacccagcagcugaucagagccgccgagauuagagccucugccaaucuggccgccaccaagaugucugagugugugcugggccagagcaagagaguggacuuuugcggcaagggcuaccaccugaugagcuucccucagucugccccucacggcgugguguuucugcacgugacauaugugcccgcucaagagaagaauuucaccaccgcuccagccaucugccacgacggcaaagcccacuuuccuagagaaggcguguucguguccaacggcacccauugguucgugacacagcggaacuucuacgagccccagaucaucaccaccgacaacaccuucgugucuggcaacugcgacguugugaucggcauugugaacaauaccguguacgacccucugcagcccgagcuggacagcuucaaagaggaacuggacaaguacuuuaagaaccacacaagccccgacguggaccugggcgauaucagcggaaucaaugccagcgucgugaacauccagaaagagaucgaccggcugaacgagguggccaagaaucugaacgagagccugaucgaccugcaagaacuggggaaguacgagcaguacaucaagggaggcggaggaucugacaucaucaagcugcugaacgagcaagugaacaaagagaugcagagcagcaaccuguacaugagcaugagcagcuggugcuacacccacagccuugauggcgccggacuguuccuguuugaucacgccgccgaggaauacgagcacgccaagaagcugaucaucuuccugaacgagaacaacgugcccgugcagcugaccagcauuucugccccugagcacaaguucgagggccugacacagaucuuccagaaggccuacgaacacgagcagcacaucagcgagagcaucaacaacaucguggaccacgccauuaagagcaaggaucacgccaccuucaacuuucugcagugguacguggccgaacagcacgaggaagaggugcuguucaaggacauccuggacaagaucgagcugaucggcaacgagaaccacggccuguaucuggccgaccaguacgugaagggaaucgccaagagcagaaagagcugaggacuaguuauaagacugacuagcccgaugggccucccaacgggcccuccuccccuccuugcaccgagauuaauaaaaaaaaaaaaaaaaaaaaaaaaaaaaaaaaaaaaaaaaaaaaaaaaaaaaaaaaaaaaaaaaugcaucccccccccccccccccccccccccccccccaaaggcucuuuucagagccaccagaauu

SEQ ID NO: 13055 - RNA, 4357 nt, Artificial Sequence
  SARS-CoV-2/Wuhan/WIV05/2019__EPI_ISL_402128 spike protein mRNA gc mod (1-1211)(A972C_R995C) Ferritin construct
aggagaaagcuuaccauguucguguuucuggugcugcugccccugguguccagccagugugugaaccugaccaccagaacacagcugccuccagccuacaccaacagcuucaccagaggcguguacuaccccgacaagguguucagauccagcgugcugcacucuacccaggaccuguuccugccuuucuucagcaacgugaccugguuccacgccauccacguguccggcaccaauggcaccaagagauucgacaaccccgugcugcccuucaacgacgggguguacuuugccagcaccgagaaguccaacaucaucagaggcuggaucuucggcaccacacuggacagcaagacccagagccugcugaucgugaacaacgccaccaacguggucaucaaagugugcgaguuccaguucugcaacgaccccuuccugggcgucuacuaccacaagaacaacaagagcuggauggaaagcgaguuccggguguacagcagcgccaacaacugcaccuucgaguacgugucccagccuuuccugauggaccuggaaggcaagcagggcaacuucaagaaccugcgcgaguucguguucaagaacaucgacggcuacuucaaaaucuacagcaagcacaccccuaucaaccucgugcgggaucugccucagggcuucucugcucuggaaccccugguggaucugcccaucggcaucaacaucacccgguuucagacacugcuggcccugcacagaagcuaccugacaccuggcgauagcagcagcggauggacagcuggugccgccgcuuacuaugugggcuaccugcagccuagaaccuuccugcugaaguacaacgagaacggcaccaucaccgacgccguggauugugcucuggauccucugagcgagacaaagugcacccugaaguccuucaccguggaaaagggcaucuaccagaccagcaacuuccgggugcagcccaccgaauccaucgugcgguuccccaauaucaccaaucugugccccuucggcgagguguucaaugccaccagauucgccucuguguacgccuggaaccggaagcggaucagcaauugcguggccgacuacuccgugcuguacaacuccgccagcuucagcaccuucaagugcuacggcguguccccuaccaagcugaacgaccugugcuucacaaacguguacgccgacagcuucgugauccggggagaugaagugcggcagauugccccuggacagacaggcaagaucgccgacuacaacuacaagcugcccgacgacuucaccggcugugugauugccuggaacagcaacaaccuggacuccaaagucggcggcaacuacaauuaccuguaccggcuguuccggaaguccaaucugaagcccuucgagcgggacaucagcaccgaaaucuaucaggccggcagcaccccuugcaacggcguggaaggcuucaacugcuacuucccacugcaguccuacggcuuucagcccacaaauggcgugggcuaucagcccuacagagugguggugcugagcuucgaacugcugcaugcuccugccacagugugcggcccuaagaaaagcaccaaucucgugaagaacaaaugcgugaacuucaacuucaacggccugaccggcaccggcgugcugacagagagcaacaagaaguuccugccauuccagcaguuuggccgggauaucgccgauaccacagacgccguuagagauccccagacacuggaaauccuggacaucaccccaugcagcuucggcggagugucugugaucaccccuggcaccaacaccagcaaucagguggcagugcuguaccaggacgugaacuguaccgaagugcccguggccauucacgccgaucagcugacaccuacauggcggguguacuccaccggcagcaauguguuucagaccagagccggcugucugaucggagccgagcacgugaacaauagcuacgagugcgacauccccaucggcgcuggcaucugugccagcuaccagacacagacaaacagccccagacgggcuagaagcguggccagccagagcaucauugccuacacaaugucucugggcgccgagaacagcguggccuacuccaacaacucuaucgcuauccccaccaacuucaccaucagcgugaccaccgagauccugccuguguccaugaccaagaccagcguggacugcaccauguacaucugcggcgauuccaccgagugcuccaaccugcugcugcaguacggcagcuucugcacccagcugaauagagcccugacagggaucgccguggaacaggacaagaacacccaagagguguucgcccaagugaagcaaaucuacaagaccccuccuaucaaggacuucggcggcuucaauuucagccagauucugcccgauccuagcaagcccagcaagcggagcuucaucgaggaccugcuguucaacaaagugacacuggccgacgccggcuucaucaagcaguauggcgauugucugggcgacauugccgccagggaucugauuugcgcccagaaguuuaacggacugacagugcugccuccucugcugaccgaugagaugaucgcccaguacacaucugcccugcuggccggcacaaucacaagcggcuggacauuuggagcuggcgccgcucugcagauccccuuugcuaugcagauggccuaccgguucaacggcaucggagugacccagaaugugcuguacgagaaccagaagcugaucgccaaccaguucaacagcgccaucggcaagauccaggacagccugagcagcacagcaagcgcccugggaaagcugcaggacguggucaaccagaaugcccaggcacugaacacccuggucaagcagcuguccuccaacuucggcugcaucagcucugugcugaacgauauccugagcagacuggacaaggucgaggccgaggugcagaucgacugucugaucacaggcagacugcagagccuccagacauacgugacccagcagcugaucagagccgccgagauuagagccucugccaaucuggccgccaccaagaugucugagugugugcugggccagagcaagagaguggacuuuugcggcaagggcuaccaccugaugagcuucccucagucugccccucacggcgugguguuucugcacgugacauaugugcccgcucaagagaagaauuucaccaccgcuccagccaucugccacgacggcaaagcccacuuuccuagagaaggcguguucguguccaacggcacccauugguucgugacacagcggaacuucuacgagccccagaucaucaccaccgacaacaccuucgugucuggcaacugcgacguugugaucggcauugugaacaauaccguguacgacccucugcagcccgagcuggacagcuucaaagaggaacuggacaaguacuuuaagaaccacacaagccccgacguggaccugggcgauaucagcggaaucaaugccagcgucgugaacauccagaaagagaucgaccggcugaacgagguggccaagaaucugaacgagagccugaucgaccugcaagaacuggggaaguacgagcaguacaucaagggaggcggaggaucugacaucaucaagcugcugaacgagcaagugaacaaagagaugcagagcagcaaccuguacaugagcaugagcagcuggugcuacacccacagccuugauggcgccggacuguuccuguuugaucacgccgccgaggaauacgagcacgccaagaagcugaucaucuuccugaacgagaacaacgugcccgugcagcugaccagcauuucugccccugagcacaaguucgagggccugacacagaucuuccagaaggccuacgaacacgagcagcacaucagcgagagcaucaacaacaucguggaccacgccauuaagagcaaggaucacgccaccuucaacuuucugcagugguacguggccgaacagcacgaggaagaggugcuguucaaggacauccuggacaagaucgagcugaucggcaacgagaaccacggccuguaucuggccgaccaguacgugaagggaaucgccaagagcagaaagagcugaggacuaguuauaagacugacuagcccgaugggccucccaacgggcccuccuccccuccuugcaccgagauuaauaaaaaaaaaaaaaaaaaaaaaaaaaaaaaaaaaaaaaaaaaaaaaaaaaaaaaaaaaaaaaaaaugcaucccccccccccccccccccccccccccccccaaaggcucuuuucagagccaccagaauu

SEQ ID NO: 13056 - RNA, 4357 nt, Artificial Sequence
  SARS-CoV-2/Wuhan/WIV05/2019__EPI_ISL_402128 spike protein mRNA gc mod (1-1211)(A890C_V1040C) Ferritin construct
aggagaaagcuuaccauguucguguuucuggugcugcugccccugguguccagccagugugugaaccugaccaccagaacacagcugccuccagccuacaccaacagcuucaccagaggcguguacuaccccgacaagguguucagauccagcgugcugcacucuacccaggaccuguuccugccuuucuucagcaacgugaccugguuccacgccauccacguguccggcaccaauggcaccaagagauucgacaaccccgugcugcccuucaacgacgggguguacuuugccagcaccgagaaguccaacaucaucagaggcuggaucuucggcaccacacuggacagcaagacccagagccugcugaucgugaacaacgccaccaacguggucaucaaagugugcgaguuccaguucugcaacgaccccuuccugggcgucuacuaccacaagaacaacaagagcuggauggaaagcgaguuccggguguacagcagcgccaacaacugcaccuucgaguacgugucccagccuuuccugauggaccuggaaggcaagcagggcaacuucaagaaccugcgcgaguucguguucaagaacaucgacggcuacuucaaaaucuacagcaagcacaccccuaucaaccucgugcgggaucugccucagggcuucucugcucuggaaccccugguggaucugcccaucggcaucaacaucacccgguuucagacacugcuggcccugcacagaagcuaccugacaccuggcgauagcagcagcggauggacagcuggugccgccgcuuacuaugugggcuaccugcagccuagaaccuuccugcugaaguacaacgagaacggcaccaucaccgacgccguggauugugcucuggauccucugagcgagacaaagugcacccugaaguccuucaccguggaaaagggcaucuaccagaccagcaacuuccgggugcagcccaccgaauccaucgugcgguuccccaauaucaccaaucugugccccuucggcgagguguucaaugccaccagauucgccucuguguacgccuggaaccggaagcggaucagcaauugcguggccgacuacuccgugcuguacaacuccgccagcuucagcaccuucaagugcuacggcguguccccuaccaagcugaacgaccugugcuucacaaacguguacgccgacagcuucgugauccggggagaugaagugcggcagauugccccuggacagacaggcaagaucgccgacuacaacuacaagcugcccgacgacuucaccggcugugugauugccuggaacagcaacaaccuggacuccaaagucggcggcaacuacaauuaccuguaccggcuguuccggaaguccaaucugaagcccuucgagcgggacaucagcaccgaaaucuaucaggccggcagcaccccuugcaacggcguggaaggcuucaacugcuacuucccacugcaguccuacggcuuucagcccacaaauggcgugggcuaucagcccuacagagugguggugcugagcuucgaacugcugcaugcuccugccacagugugcggcccuaagaaaagcaccaaucucgugaagaacaaaugcgugaacuucaacuucaacggccugaccggcaccggcgugcugacagagagcaacaagaaguuccugccauuccagcaguuuggccgggauaucgccgauaccacagacgccguuagagauccccagacacuggaaauccuggacaucaccccaugcagcuucggcggagugucugugaucaccccuggcaccaacaccagcaaucagguggcagugcuguaccaggacgugaacuguaccgaagugcccguggccauucacgccgaucagcugacaccuacauggcggguguacuccaccggcagcaauguguuucagaccagagccggcugucugaucggagccgagcacgugaacaauagcuacgagugcgacauccccaucggcgcuggcaucugugccagcuaccagacacagacaaacagccccagacgggcuagaagcguggccagccagagcaucauugccuacacaaugucucugggcgccgagaacagcguggccuacuccaacaacucuaucgcuauccccaccaacuucaccaucagcgugaccaccgagauccugccuguguccaugaccaagaccagcguggacugcaccauguacaucugcggcgauuccaccgagugcuccaaccugcugcugcaguacggcagcuucugcacccagcugaauagagcccugacagggaucgccguggaacaggacaagaacacccaagagguguucgcccaagugaagcaaaucuacaagaccccuccuaucaaggacuucggcggcuucaauuucagccagauucugcccgauccuagcaagcccagcaagcggagcuucaucgaggaccugcuguucaacaaagugacacuggccgacgccggcuucaucaagcaguauggcgauugucugggcgacauugccgccagggaucugauuugcgcccagaaguuuaacggacugacagugcugccuccucugcugaccgaugagaugaucgcccaguacacaucugcccugcuggccggcacaaucacaagcggcuggacauuuggaugcggcgccgcucugcagauccccuuugcuaugcagauggccuaccgguucaacggcaucggagugacccagaaugugcuguacgagaaccagaagcugaucgccaaccaguucaacagcgccaucggcaagauccaggacagccugagcagcacagcaagcgcccugggaaagcugcaggacguggucaaccagaaugcccaggcacugaacacccuggucaagcagcuguccuccaacuucggcgccaucagcucugugcugaacgauauccugagcagacuggacaaggucgaggccgaggugcagaucgacagacugaucacaggcagacugcagagccuccagacauacgugacccagcagcugaucagagccgccgagauuagagccucugccaaucuggccgccaccaagaugucugagugugugcugggccagagcaagagaugugacuuuugcggcaagggcuaccaccugaugagcuucccucagucugccccucacggcgugguguuucugcacgugacauaugugcccgcucaagagaagaauuucaccaccgcuccagccaucugccacgacggcaaagcccacuuuccuagagaaggcguguucguguccaacggcacccauugguucgugacacagcggaacuucuacgagccccagaucaucaccaccgacaacaccuucgugucuggcaacugcgacguugugaucggcauugugaacaauaccguguacgacccucugcagcccgagcuggacagcuucaaagaggaacuggacaaguacuuuaagaaccacacaagccccgacguggaccugggcgauaucagcggaaucaaugccagcgucgugaacauccagaaagagaucgaccggcugaacgagguggccaagaaucugaacgagagccugaucgaccugcaagaacuggggaaguacgagcaguacaucaagggaggcggaggaucugacaucaucaagcugcugaacgagcaagugaacaaagagaugcagagcagcaaccuguacaugagcaugagcagcuggugcuacacccacagccuugauggcgccggacuguuccuguuugaucacgccgccgaggaauacgagcacgccaagaagcugaucaucuuccugaacgagaacaacgugcccgugcagcugaccagcauuucugccccugagcacaaguucgagggccugacacagaucuuccagaaggccuacgaacacgagcagcacaucagcgagagcaucaacaacaucguggaccacgccauuaagagcaaggaucacgccaccuucaacuuucugcagugguacguggccgaacagcacgaggaagaggugcuguucaaggacauccuggacaagaucgagcugaucggcaacgagaaccacggccuguaucuggccgaccaguacgugaagggaaucgccaagagcagaaagagcugaggacuaguuauaagacugacuagcccgaugggccucccaacgggcccuccuccccuccuugcaccgagauuaauaaaaaaaaaaaaaaaaaaaaaaaaaaaaaaaaaaaaaaaaaaaaaaaaaaaaaaaaaaaaaaaaugcaucccccccccccccccccccccccccccccccaaaggcucuuuucagagccaccagaauu

SEQ ID NO: 13057 - RNA, 4357 nt, Artificial Sequence
  SARS-CoV-2/Wuhan/WIV05/2019__EPI_ISL_402128 spike protein mRNA gc mod (1-1211)(T874C_S1055C) Ferritin construct
aggagaaagcuuaccauguucguguuucuggugcugcugccccugguguccagccagugugugaaccugaccaccagaacacagcugccuccagccuacaccaacagcuucaccagaggcguguacuaccccgacaagguguucagauccagcgugcugcacucuacccaggaccuguuccugccuuucuucagcaacgugaccugguuccacgccauccacguguccggcaccaauggcaccaagagauucgacaaccccgugcugcccuucaacgacgggguguacuuugccagcaccgagaaguccaacaucaucagaggcuggaucuucggcaccacacuggacagcaagacccagagccugcugaucgugaacaacgccaccaacguggucaucaaagugugcgaguuccaguucugcaacgaccccuuccugggcgucuacuaccacaagaacaacaagagcuggauggaaagcgaguuccggguguacagcagcgccaacaacugcaccuucgaguacgugucccagccuuuccugauggaccuggaaggcaagcagggcaacuucaagaaccugcgcgaguucguguucaagaacaucgacggcuacuucaaaaucuacagcaagcacaccccuaucaaccucgugcgggaucugccucagggcuucucugcucuggaaccccugguggaucugcccaucggcaucaacaucacccgguuucagacacugcuggcccugcacagaagcuaccugacaccuggcgauagcagcagcggauggacagcuggugccgccgcuuacuaugugggcuaccugcagccuagaaccuuccugcugaaguacaacgagaacggcaccaucaccgacgccguggauugugcucuggauccucugagcgagacaaagugcacccugaaguccuucaccguggaaaagggcaucuaccagaccagcaacuuccgggugcagcccaccgaauccaucgugcgguuccccaauaucaccaaucugugccccuucggcgagguguucaaugccaccagauucgccucuguguacgccuggaaccggaagcggaucagcaauugcguggccgacuacuccgugcuguacaacuccgccagcuucagcaccuucaagugcuacggcguguccccuaccaagcugaacgaccugugcuucacaaacguguacgccgacagcuucgugauccggggagaugaagugcggcagauugccccuggacagacaggcaagaucgccgacuacaacuacaagcugcccgacgacuucaccggcugugugauugccuggaacagcaacaaccuggacuccaaagucggcggcaacuacaauuaccuguaccggcuguuccggaaguccaaucugaagcccuucgagcgggacaucagcaccgaaaucuaucaggccggcagcaccccuugcaacggcguggaaggcuucaacugcuacuucccacugcaguccuacggcuuucagcccacaaauggcgugggcuaucagcccuacagagugguggugcugagcuucgaacugcugcaugcuccugccacagugugcggcccuaagaaaagcaccaaucucgugaagaacaaaugcgugaacuucaacuucaacggccugaccggcaccggcgugcugacagagagcaacaagaaguuccugccauuccagcaguuuggccgggauaucgccgauaccacagacgccguuagagauccccagacacuggaaauccuggacaucaccccaugcagcuucggcggagugucugugaucaccccuggcaccaacaccagcaaucagguggcagugcuguaccaggacgugaacuguaccgaagugcccguggccauucacgccgaucagcugacaccuacauggcggguguacuccaccggcagcaauguguuucagaccagagccggcugucugaucggagccgagcacgugaacaauagcuacgagugcgacauccccaucggcgcuggcaucugugccagcuaccagacacagacaaacagccccagacgggcuagaagcguggccagccagagcaucauugccuacacaaugucucugggcgccgagaacagcguggccuacuccaacaacucuaucgcuauccccaccaacuucaccaucagcgugaccaccgagauccugccuguguccaugaccaagaccagcguggacugcaccauguacaucugcggcgauuccaccgagugcuccaaccugcugcugcaguacggcagcuucugcacccagcugaauagagcccugacagggaucgccguggaacaggacaagaacacccaagagguguucgcccaagugaagcaaaucuacaagaccccuccuaucaaggacuucggcggcuucaauuucagccagauucugcccgauccuagcaagcccagcaagcggagcuucaucgaggaccugcuguucaacaaagugacacuggccgacgccggcuucaucaagcaguauggcgauugucugggcgacauugccgccagggaucugauuugcgcccagaaguuuaacggacugacagugcugccuccucugcugaccgaugagaugaucgcccaguacugcucugcccugcuggccggcacaaucacaagcggcuggacauuuggagcuggcgccgcucugcagauccccuuugcuaugcagauggccuaccgguucaacggcaucggagugacccagaaugugcuguacgagaaccagaagcugaucgccaaccaguucaacagcgccaucggcaagauccaggacagccugagcagcacagcaagcgcccugggaaagcugcaggacguggucaaccagaaugcccaggcacugaacacccuggucaagcagcuguccuccaacuucggcgccaucagcucugugcugaacgauauccugagcagacuggacaaggucgaggccgaggugcagaucgacagacugaucacaggcagacugcagagccuccagacauacgugacccagcagcugaucagagccgccgagauuagagccucugccaaucuggccgccaccaagaugucugagugugugcugggccagagcaagagaguggacuuuugcggcaagggcuaccaccugaugagcuucccucagugcgccccucacggcgugguguuucugcacgugacauaugugcccgcucaagagaagaauuucaccaccgcuccagccaucugccacgacggcaaagcccacuuuccuagagaaggcguguucguguccaacggcacccauugguucgugacacagcggaacuucuacgagccccagaucaucaccaccgacaacaccuucgugucuggcaacugcgacguugugaucggcauugugaacaauaccguguacgacccucugcagcccgagcuggacagcuucaaagaggaacuggacaaguacuuuaagaaccacacaagccccgacguggaccugggcgauaucagcggaaucaaugccagcgucgugaacauccagaaagagaucgaccggcugaacgagguggccaagaaucugaacgagagccugaucgaccugcaagaacuggggaaguacgagcaguacaucaagggaggcggaggaucugacaucaucaagcugcugaacgagcaagugaacaaagagaugcagagcagcaaccuguacaugagcaugagcagcuggugcuacacccacagccuugauggcgccggacuguuccuguuugaucacgccgccgaggaauacgagcacgccaagaagcugaucaucuuccugaacgagaacaacgugcccgugcagcugaccagcauuucugccccugagcacaaguucgagggccugacacagaucuuccagaaggccuacgaacacgagcagcacaucagcgagagcaucaacaacaucguggaccacgccauuaagagcaaggaucacgccaccuucaacuuucugcagugguacguggccgaacagcacgaggaagaggugcuguucaaggacauccuggacaagaucgagcugaucggcaacgagaaccacggccuguaucuggccgaccaguacgugaagggaaucgccaagagcagaaagagcugaggacuaguuauaagacugacuagcccgaugggccucccaacgggcccuccuccccuccuugcaccgagauuaauaaaaaaaaaaaaaaaaaaaaaaaaaaaaaaaaaaaaaaaaaaaaaaaaaaaaaaaaaaaaaaaaugcaucccccccccccccccccccccccccccccccaaaggcucuuuucagagccaccagaauu

SEQ ID NO: 13058 - RNA, 3943 nt, Artificial Sequence
  SARS-CoV-2/Wuhan/WIV05/2019__EPI_ISL_402128 spike protein mRNA gc mod (1-1211) Foldon construct
aggagaaagcuuaccauguucguguuucuggugcugcugccccugguguccagccagugugugaaccugaccaccagaacacagcugccuccagccuacaccaacagcuucaccagaggcguguacuaccccgacaagguguucagauccagcgugcugcacucuacccaggaccuguuccugccuuucuucagcaacgugaccugguuccacgccauccacguguccggcaccaauggcaccaagagauucgacaaccccgugcugcccuucaacgacgggguguacuuugccagcaccgagaaguccaacaucaucagaggcuggaucuucggcaccacacuggacagcaagacccagagccugcugaucgugaacaacgccaccaacguggucaucaaagugugcgaguuccaguucugcaacgaccccuuccugggcgucuacuaccacaagaacaacaagagcuggauggaaagcgaguuccggguguacagcagcgccaacaacugcaccuucgaguacgugucccagccuuuccugauggaccuggaaggcaagcagggcaacuucaagaaccugcgcgaguucguguucaagaacaucgacggcuacuucaaaaucuacagcaagcacaccccuaucaaccucgugcgggaucugccucagggcuucucugcucuggaaccccugguggaucugcccaucggcaucaacaucacccgguuucagacacugcuggcccugcacagaagcuaccugacaccuggcgauagcagcagcggauggacagcuggugccgccgcuuacuaugugggcuaccugcagccuagaaccuuccugcugaaguacaacgagaacggcaccaucaccgacgccguggauugugcucuggauccucugagcgagacaaagugcacccugaaguccuucaccguggaaaagggcaucuaccagaccagcaacuuccgggugcagcccaccgaauccaucgugcgguuccccaauaucaccaaucugugccccuucggcgagguguucaaugccaccagauucgccucuguguacgccuggaaccggaagcggaucagcaauugcguggccgacuacuccgugcuguacaacuccgccagcuucagcaccuucaagugcuacggcguguccccuaccaagcugaacgaccugugcuucacaaacguguacgccgacagcuucgugauccggggagaugaagugcggcagauugccccuggacagacaggcaagaucgccgacuacaacuacaagcugcccgacgacuucaccggcugugugauugccuggaacagcaacaaccuggacuccaaagucggcggcaacuacaauuaccuguaccggcuguuccggaaguccaaucugaagcccuucgagcgggacaucagcaccgaaaucuaucaggccggcagcaccccuugcaacggcguggaaggcuucaacugcuacuucccacugcaguccuacggcuuucagcccacaaauggcgugggcuaucagcccuacagagugguggugcugagcuucgaacugcugcaugcuccugccacagugugcggcccuaagaaaagcaccaaucucgugaagaacaaaugcgugaacuucaacuucaacggccugaccggcaccggcgugcugacagagagcaacaagaaguuccugccauuccagcaguuuggccgggauaucgccgauaccacagacgccguuagagauccccagacacuggaaauccuggacaucaccccaugcagcuucggcggagugucugugaucaccccuggcaccaacaccagcaaucagguggcagugcuguaccaggacgugaacuguaccgaagugcccguggccauucacgccgaucagcugacaccuacauggcggguguacuccaccggcagcaauguguuucagaccagagccggcugucugaucggagccgagcacgugaacaauagcuacgagugcgacauccccaucggcgcuggcaucugugccagcuaccagacacagacaaacagccccagacgggcuagaagcguggccagccagagcaucauugccuacacaaugucucugggcgccgagaacagcguggccuacuccaacaacucuaucgcuauccccaccaacuucaccaucagcgugaccaccgagauccugccuguguccaugaccaagaccagcguggacugcaccauguacaucugcggcgauuccaccgagugcuccaaccugcugcugcaguacggcagcuucugcacccagcugaauagagcccugacagggaucgccguggaacaggacaagaacacccaagagguguucgcccaagugaagcaaaucuacaagaccccuccuaucaaggacuucggcggcuucaauuucagccagauucugcccgauccuagcaagcccagcaagcggagcuucaucgaggaccugcuguucaacaaagugacacuggccgacgccggcuucaucaagcaguauggcgauugucugggcgacauugccgccagggaucugauuugcgcccagaaguuuaacggacugacagugcugccuccucugcugaccgaugagaugaucgcccaguacacaucugcccugcuggccggcacaaucacaagcggcuggacauuuggagcuggcgccgcucugcagauccccuuugcuaugcagauggccuaccgguucaacggcaucggagugacccagaaugugcuguacgagaaccagaagcugaucgccaaccaguucaacagcgccaucggcaagauccaggacagccugagcagcacagcaagcgcccugggaaagcugcaggacguggucaaccagaaugcccaggcacugaacacccuggucaagcagcuguccuccaacuucggcgccaucagcucugugcugaacgauauccugagcagacuggacaaggucgaggccgaggugcagaucgacagacugaucacaggcagacugcagagccuccagacauacgugacccagcagcugaucagagccgccgagauuagagccucugccaaucuggccgccaccaagaugucugagugugugcugggccagagcaagagaguggacuuuugcggcaagggcuaccaccugaugagcuucccucagucugccccucacggcgugguguuucugcacgugacauaugugcccgcucaagagaagaauuucaccaccgcuccagccaucugccacgacggcaaagcccacuuuccuagagaaggcguguucguguccaacggcacccauugguucgugacacagcggaacuucuacgagccccagaucaucaccaccgacaacaccuucgugucuggcaacugcgacguugugaucggcauugugaacaauaccguguacgacccucugcagcccgagcuggacagcuucaaagaggaacuggacaaguacuuuaagaaccacacaagccccgacguggaccugggcgauaucagcggaaucaaugccagcgucgugaacauccagaaagagaucgaccggcugaacgagguggccaagaaucugaacgagagccugaucgaccugcaagaacuggggaaguacgagcaguacaucaagggaggaucuggcuauauccccgaggcuccuagagauggccaggccuauguucggaaggauggcgaaugggugcugcugagcaccuuccuuugaggacuaguuauaagacugacuagcccgaugggccucccaacgggcccuccuccccuccuugcaccgagauuaauaaaaaaaaaaaaaaaaaaaaaaaaaaaaaaaaaaaaaaaaaaaaaaaaaaaaaaaaaaaaaaaaugcaucccccccccccccccccccccccccccccccaaaggcucuuuucagagccaccagaauu

SEQ ID NO: 13059 - RNA, 3943 nt, Artificial Sequence
  SARS-CoV-2/Wuhan/WIV05/2019__EPI_ISL_402128 spike protein mRNA gc mod (1-1211)(K986P_V987P) Foldon construct
aggagaaagcuuaccauguucguguuucuggugcugcugccccugguguccagccagugugugaaccugaccaccagaacacagcugccuccagccuacaccaacagcuucaccagaggcguguacuaccccgacaagguguucagauccagcgugcugcacucuacccaggaccuguuccugccuuucuucagcaacgugaccugguuccacgccauccacguguccggcaccaauggcaccaagagauucgacaaccccgugcugcccuucaacgacgggguguacuuugccagcaccgagaaguccaacaucaucagaggcuggaucuucggcaccacacuggacagcaagacccagagccugcugaucgugaacaacgccaccaacguggucaucaaagugugcgaguuccaguucugcaacgaccccuuccugggcgucuacuaccacaagaacaacaagagcuggauggaaagcgaguuccggguguacagcagcgccaacaacugcaccuucgaguacgugucccagccuuuccugauggaccuggaaggcaagcagggcaacuucaagaaccugcgcgaguucguguucaagaacaucgacggcuacuucaaaaucuacagcaagcacaccccuaucaaccucgugcgggaucugccucagggcuucucugcucuggaaccccugguggaucugcccaucggcaucaacaucacccgguuucagacacugcuggcccugcacagaagcuaccugacaccuggcgauagcagcagcggauggacagcuggugccgccgcuuacuaugugggcuaccugcagccuagaaccuuccugcugaaguacaacgagaacggcaccaucaccgacgccguggauugugcucuggauccucugagcgagacaaagugcacccugaaguccuucaccguggaaaagggcaucuaccagaccagcaacuuccgggugcagcccaccgaauccaucgugcgguuccccaauaucaccaaucugugccccuucggcgagguguucaaugccaccagauucgccucuguguacgccuggaaccggaagcggaucagcaauugcguggccgacuacuccgugcuguacaacuccgccagcuucagcaccuucaagugcuacggcguguccccuaccaagcugaacgaccugugcuucacaaacguguacgccgacagcuucgugauccggggagaugaagugcggcagauugccccuggacagacaggcaagaucgccgacuacaacuacaagcugcccgacgacuucaccggcugugugauugccuggaacagcaacaaccuggacuccaaagucggcggcaacuacaauuaccuguaccggcuguuccggaaguccaaucugaagcccuucgagcgggacaucagcaccgaaaucuaucaggccggcagcaccccuugcaacggcguggaaggcuucaacugcuacuucccacugcaguccuacggcuuucagcccacaaauggcgugggcuaucagcccuacagagugguggugcugagcuucgaacugcugcaugcuccugccacagugugcggcccuaagaaaagcaccaaucucgugaagaacaaaugcgugaacuucaacuucaacggccugaccggcaccggcgugcugacagagagcaacaagaaguuccugccauuccagcaguuuggccgggauaucgccgauaccacagacgccguuagagauccccagacacuggaaauccuggacaucaccccaugcagcuucggcggagugucugugaucaccccuggcaccaacaccagcaaucagguggcagugcuguaccaggacgugaacuguaccgaagugcccguggccauucacgccgaucagcugacaccuacauggcggguguacuccaccggcagcaauguguuucagaccagagccggcugucugaucggagccgagcacgugaacaauagcuacgagugcgacauccccaucggcgcuggcaucugugccagcuaccagacacagacaaacagccccagacgggcuagaagcguggccagccagagcaucauugccuacacaaugucucugggcgccgagaacagcguggccuacuccaacaacucuaucgcuauccccaccaacuucaccaucagcgugaccaccgagauccugccuguguccaugaccaagaccagcguggacugcaccauguacaucugcggcgauuccaccgagugcuccaaccugcugcugcaguacggcagcuucugcacccagcugaauagagcccugacagggaucgccguggaacaggacaagaacacccaagagguguucgcccaagugaagcaaaucuacaagaccccuccuaucaaggacuucggcggcuucaauuucagccagauucugcccgauccuagcaagcccagcaagcggagcuucaucgaggaccugcuguucaacaaagugacacuggccgacgccggcuucaucaagcaguauggcgauugucugggcgacauugccgccagggaucugauuugcgcccagaaguuuaacggacugacagugcugccuccucugcugaccgaugagaugaucgcccaguacacaucugcccugcuggccggcacaaucacaagcggcuggacauuuggagcuggcgccgcucugcagauccccuuugcuaugcagauggccuaccgguucaacggcaucggagugacccagaaugugcuguacgagaaccagaagcugaucgccaaccaguucaacagcgccaucggcaagauccaggacagccugagcagcacagcaagcgcccugggaaagcugcaggacguggucaaccagaaugcccaggcacugaacacccuggucaagcagcuguccuccaacuucggcgccaucagcucugugcugaacgauauccugagcagacuggacccuccugaggccgaggugcagaucgacagacugaucacaggcagacugcagagccuccagacauacgugacccagcagcugaucagagccgccgagauuagagccucugccaaucuggccgccaccaagaugucugagugugugcugggccagagcaagagaguggacuuuugcggcaagggcuaccaccugaugagcuucccucagucugccccucacggcgugguguuucugcacgugacauaugugcccgcucaagagaagaauuucaccaccgcuccagccaucugccacgacggcaaagcccacuuuccuagagaaggcguguucguguccaacggcacccauugguucgugacacagcggaacuucuacgagccccagaucaucaccaccgacaacaccuucgugucuggcaacugcgacguugugaucggcauugugaacaauaccguguacgacccucugcagcccgagcuggacagcuucaaagaggaacuggacaaguacuuuaagaaccacacaagccccgacguggaccugggcgauaucagcggaaucaaugccagcgucgugaacauccagaaagagaucgaccggcugaacgagguggccaagaaucugaacgagagccugaucgaccugcaagaacuggggaaguacgagcaguacaucaagggaggaucuggcuauauccccgaggcuccuagagauggccaggccuauguucggaaggauggcgaaugggugcugcugagcaccuuccuuugaggacuaguuauaagacugacuagcccgaugggccucccaacgggcccuccuccccuccuugcaccgagauuaauaaaaaaaaaaaaaaaaaaaaaaaaaaaaaaaaaaaaaaaaaaaaaaaaaaaaaaaaaaaaaaaaugcaucccccccccccccccccccccccccccccccaaaggcucuuuucagagccaccagaauu

SEQ ID NO: 13060 - RNA, 3943 nt, Artificial Sequence
  SARS-CoV-2/Wuhan/WIV05/2019__EPI_ISL_402128 spike protein mRNA gc mod (1-1211)(K986P_V987P_T887WN_A1020W) Foldon construct
aggagaaagcuuaccauguucguguuucuggugcugcugccccugguguccagccagugugugaaccugaccaccagaacacagcugccuccagccuacaccaacagcuucaccagaggcguguacuaccccgacaagguguucagauccagcgugcugcacucuacccaggaccuguuccugccuuucuucagcaacgugaccugguuccacgccauccacguguccggcaccaauggcaccaagagauucgacaaccccgugcugcccuucaacgacgggguguacuuugccagcaccgagaaguccaacaucaucagaggcuggaucuucggcaccacacuggacagcaagacccagagccugcugaucgugaacaacgccaccaacguggucaucaaagugugcgaguuccaguucugcaacgaccccuuccugggcgucuacuaccacaagaacaacaagagcuggauggaaagcgaguuccggguguacagcagcgccaacaacugcaccuucgaguacgugucccagccuuuccugauggaccuggaaggcaagcagggcaacuucaagaaccugcgcgaguucguguucaagaacaucgacggcuacuucaaaaucuacagcaagcacaccccuaucaaccucgugcgggaucugccucagggcuucucugcucuggaaccccugguggaucugcccaucggcaucaacaucacccgguuucagacacugcuggcccugcacagaagcuaccugacaccuggcgauagcagcagcggauggacagcuggugccgccgcuuacuaugugggcuaccugcagccuagaaccuuccugcugaaguacaacgagaacggcaccaucaccgacgccguggauugugcucuggauccucugagcgagacaaagugcacccugaaguccuucaccguggaaaagggcaucuaccagaccagcaacuuccgggugcagcccaccgaauccaucgugcgguuccccaauaucaccaaucugugccccuucggcgagguguucaaugccaccagauucgccucuguguacgccuggaaccggaagcggaucagcaauugcguggccgacuacuccgugcuguacaacuccgccagcuucagcaccuucaagugcuacggcguguccccuaccaagcugaacgaccugugcuucacaaacguguacgccgacagcuucgugauccggggagaugaagugcggcagauugccccuggacagacaggcaagaucgccgacuacaacuacaagcugcccgacgacuucaccggcugugugauugccuggaacagcaacaaccuggacuccaaagucggcggcaacuacaauuaccuguaccggcuguuccggaaguccaaucugaagcccuucgagcgggacaucagcaccgaaaucuaucaggccggcagcaccccuugcaacggcguggaaggcuucaacugcuacuucccacugcaguccuacggcuuucagcccacaaauggcgugggcuaucagcccuacagagugguggugcugagcuucgaacugcugcaugcuccugccacagugugcggcccuaagaaaagcaccaaucucgugaagaacaaaugcgugaacuucaacuucaacggccugaccggcaccggcgugcugacagagagcaacaagaaguuccugccauuccagcaguuuggccgggauaucgccgauaccacagacgccguuagagauccccagacacuggaaauccuggacaucaccccaugcagcuucggcggagugucugugaucaccccuggcaccaacaccagcaaucagguggcagugcuguaccaggacgugaacuguaccgaagugcccguggccauucacgccgaucagcugacaccuacauggcggguguacuccaccggcagcaauguguuucagaccagagccggcugucugaucggagccgagcacgugaacaauagcuacgagugcgacauccccaucggcgcuggcaucugugccagcuaccagacacagacaaacagccccagacgggcuagaagcguggccagccagagcaucauugccuacacaaugucucugggcgccgagaacagcguggccuacuccaacaacucuaucgcuauccccaccaacuucaccaucagcgugaccaccgagauccugccuguguccaugaccaagaccagcguggacugcaccauguacaucugcggcgauuccaccgagugcuccaaccugcugcugcaguacggcagcuucugcacccagcugaauagagcccugacagggaucgccguggaacaggacaagaacacccaagagguguucgcccaagugaagcaaaucuacaagaccccuccuaucaaggacuucggcggcuucaauuucagccagauucugcccgauccuagcaagcccagcaagcggagcuucaucgaggaccugcuguucaacaaagugacacuggccgacgccggcuucaucaagcaguauggcgauugucugggcgacauugccgccagggaucugauuugcgcccagaaguuuaacggacugacagugcugccuccucugcugaccgaugagaugaucgcccaguacacaucugcccugcuggccggcacaaucacaagcggcuggugguuuggagcuggcgccgcucugcagauccccuuugcuaugcagauggccuaccgguucaacggcaucggagugacccagaaugugcuguacgagaaccagaagcugaucgccaaccaguucaacagcgccaucggcaagauccaggacagccugagcagcacagcaagcgcccugggaaagcugcaggacguggucaaccagaaugcccaggcacugaacacccuggucaagcagcuguccuccaacuucggcgccaucagcucugugcugaacgauauccugagcagacuggacccuccugaggccgaggugcagaucgacagacugaucacaggcagacugcagagccuccagacauacgugacccagcagcugaucagagccgccgagauuagauggucugccaaucuggccgccaccaagaugucugagugugugcugggccagagcaagagaguggacuuuugcggcaagggcuaccaccugaugagcuucccucagucugccccucacggcgugguguuucugcacgugacauaugugcccgcucaagagaagaauuucaccaccgcuccagccaucugccacgacggcaaagcccacuuuccuagagaaggcguguucguguccaacggcacccauugguucgugacacagcggaacuucuacgagccccagaucaucaccaccgacaacaccuucgugucuggcaacugcgacguugugaucggcauugugaacaauaccguguacgacccucugcagcccgagcuggacagcuucaaagaggaacuggacaaguacuuuaagaaccacacaagccccgacguggaccugggcgauaucagcggaaucaaugccagcgucgugaacauccagaaagagaucgaccggcugaacgagguggccaagaaucugaacgagagccugaucgaccugcaagaacuggggaaguacgagcaguacaucaagggaggaucuggcuauauccccgaggcuccuagagauggccaggccuauguucggaaggauggcgaaugggugcugcugagcaccuuccuuugaggacuaguuauaagacugacuagcccgaugggccucccaacgggcccuccuccccuccuugcaccgagauuaauaaaaaaaaaaaaaaaaaaaaaaaaaaaaaaaaaaaaaaaaaaaaaaaaaaaaaaaaaaaaaaaaugcaucccccccccccccccccccccccccccccccaaaggcucuuuucagagccaccagaauu

SEQ ID NO: 13061 - RNA, 3943 nt, Artificial Sequence
  SARS-CoV-2/Wuhan/WIV05/2019__EPI_ISL_402128 spike protein mRNA gc mod (1-1211)(K986P_V987P_P1069F) Foldon construct
aggagaaagcuuaccauguucguguuucuggugcugcugccccugguguccagccagugugugaaccugaccaccagaacacagcugccuccagccuacaccaacagcuucaccagaggcguguacuaccccgacaagguguucagauccagcgugcugcacucuacccaggaccuguuccugccuuucuucagcaacgugaccugguuccacgccauccacguguccggcaccaauggcaccaagagauucgacaaccccgugcugcccuucaacgacgggguguacuuugccagcaccgagaaguccaacaucaucagaggcuggaucuucggcaccacacuggacagcaagacccagagccugcugaucgugaacaacgccaccaacguggucaucaaagugugcgaguuccaguucugcaacgaccccuuccugggcgucuacuaccacaagaacaacaagagcuggauggaaagcgaguuccggguguacagcagcgccaacaacugcaccuucgaguacgugucccagccuuuccugauggaccuggaaggcaagcagggcaacuucaagaaccugcgcgaguucguguucaagaacaucgacggcuacuucaaaaucuacagcaagcacaccccuaucaaccucgugcgggaucugccucagggcuucucugcucuggaaccccugguggaucugcccaucggcaucaacaucacccgguuucagacacugcuggcccugcacagaagcuaccugacaccuggcgauagcagcagcggauggacagcuggugccgccgcuuacuaugugggcuaccugcagccuagaaccuuccugcugaaguacaacgagaacggcaccaucaccgacgccguggauugugcucuggauccucugagcgagacaaagugcacccugaaguccuucaccguggaaaagggcaucuaccagaccagcaacuuccgggugcagcccaccgaauccaucgugcgguuccccaauaucaccaaucugugccccuucggcgagguguucaaugccaccagauucgccucuguguacgccuggaaccggaagcggaucagcaauugcguggccgacuacuccgugcuguacaacuccgccagcuucagcaccuucaagugcuacggcguguccccuaccaagcugaacgaccugugcuucacaaacguguacgccgacagcuucgugauccggggagaugaagugcggcagauugccccuggacagacaggcaagaucgccgacuacaacuacaagcugcccgacgacuucaccggcugugugauugccuggaacagcaacaaccuggacuccaaagucggcggcaacuacaauuaccuguaccggcuguuccggaaguccaaucugaagcccuucgagcgggacaucagcaccgaaaucuaucaggccggcagcaccccuugcaacggcguggaaggcuucaacugcuacuucccacugcaguccuacggcuuucagcccacaaauggcgugggcuaucagcccuacagagugguggugcugagcuucgaacugcugcaugcuccugccacagugugcggcccuaagaaaagcaccaaucucgugaagaacaaaugcgugaacuucaacuucaacggccugaccggcaccggcgugcugacagagagcaacaagaaguuccugccauuccagcaguuuggccgggauaucgccgauaccacagacgccguuagagauccccagacacuggaaauccuggacaucaccccaugcagcuucggcggagugucugugaucaccccuggcaccaacaccagcaaucagguggcagugcuguaccaggacgugaacuguaccgaagugcccguggccauucacgccgaucagcugacaccuacauggcggguguacuccaccggcagcaauguguuucagaccagagccggcugucugaucggagccgagcacgugaacaauagcuacgagugcgacauccccaucggcgcuggcaucugugccagcuaccagacacagacaaacagccccagacgggcuagaagcguggccagccagagcaucauugccuacacaaugucucugggcgccgagaacagcguggccuacuccaacaacucuaucgcuauccccaccaacuucaccaucagcgugaccaccgagauccugccuguguccaugaccaagaccagcguggacugcaccauguacaucugcggcgauuccaccgagugcuccaaccugcugcugcaguacggcagcuucugcacccagcugaauagagcccugacagggaucgccguggaacaggacaagaacacccaagagguguucgcccaagugaagcaaaucuacaagaccccuccuaucaaggacuucggcggcuucaauuucagccagauucugcccgauccuagcaagcccagcaagcggagcuucaucgaggaccugcuguucaacaaagugacacuggccgacgccggcuucaucaagcaguauggcgauugucugggcgacauugccgccagggaucugauuugcgcccagaaguuuaacggacugacagugcugccuccucugcugaccgaugagaugaucgcccaguacacaucugcccugcuggccggcacaaucacaagcggcuggacauuuggagcuggcgccgcucugcagauccccuuugcuaugcagauggccuaccgguucaacggcaucggagugacccagaaugugcuguacgagaaccagaagcugaucgccaaccaguucaacagcgccaucggcaagauccaggacagccugagcagcacagcaagcgcccugggaaagcugcaggacguggucaaccagaaugcccaggcacugaacacccuggucaagcagcuguccuccaacuucggcgccaucagcucugugcugaacgauauccugagcagacuggacccuccugaggccgaggugcagaucgacagacugaucacaggcagacugcagagccuccagacauacgugacccagcagcugaucagagccgccgagauuagagccucugccaaucuggccgccaccaagaugucugagugugugcugggccagagcaagagaguggacuuuugcggcaagggcuaccaccugaugagcuucccucagucugccccucacggcgugguguuucugcacgugacauauguguucgcucaagagaagaauuucaccaccgcuccagccaucugccacgacggcaaagcccacuuuccuagagaaggcguguucguguccaacggcacccauugguucgugacacagcggaacuucuacgagccccagaucaucaccaccgacaacaccuucgugucuggcaacugcgacguugugaucggcauugugaacaauaccguguacgacccucugcagcccgagcuggacagcuucaaagaggaacuggacaaguacuuuaagaaccacacaagccccgacguggaccugggcgauaucagcggaaucaaugccagcgucgugaacauccagaaagagaucgaccggcugaacgagguggccaagaaucugaacgagagccugaucgaccugcaagaacuggggaaguacgagcaguacaucaagggaggaucuggcuauauccccgaggcuccuagagauggccaggccuauguucggaaggauggcgaaugggugcugcugagcaccuuccuuugaggacuaguuauaagacugacuagcccgaugggccucccaacgggcccuccuccccuccuugcaccgagauuaauaaaaaaaaaaaaaaaaaaaaaaaaaaaaaaaaaaaaaaaaaaaaaaaaaaaaaaaaaaaaaaaaugcaucccccccccccccccccccccccccccccccaaaggcucuuuucagagccaccagaauu

SEQ ID NO: 13062 - RNA, 3943 nt, Artificial Sequence
  SARS-CoV-2/Wuhan/WIV05/2019__EPI_ISL_402128 spike protein mRNA gc mod (1-1211)(K986P_V987P_ H1048Q_H1064N_ H1083N_H1101N) Foldon construct
aggagaaagcuuaccauguucguguuucuggugcugcugccccugguguccagccagugugugaaccugaccaccagaacacagcugccuccagccuacaccaacagcuucaccagaggcguguacuaccccgacaagguguucagauccagcgugcugcacucuacccaggaccuguuccugccuuucuucagcaacgugaccugguuccacgccauccacguguccggcaccaauggcaccaagagauucgacaaccccgugcugcccuucaacgacgggguguacuuugccagcaccgagaaguccaacaucaucagaggcuggaucuucggcaccacacuggacagcaagacccagagccugcugaucgugaacaacgccaccaacguggucaucaaagugugcgaguuccaguucugcaacgaccccuuccugggcgucuacuaccacaagaacaacaagagcuggauggaaagcgaguuccggguguacagcagcgccaacaacugcaccuucgaguacgugucccagccuuuccugauggaccuggaaggcaagcagggcaacuucaagaaccugcgcgaguucguguucaagaacaucgacggcuacuucaaaaucuacagcaagcacaccccuaucaaccucgugcgggaucugccucagggcuucucugcucuggaaccccugguggaucugcccaucggcaucaacaucacccgguuucagacacugcuggcccugcacagaagcuaccugacaccuggcgauagcagcagcggauggacagcuggugccgccgcuuacuaugugggcuaccugcagccuagaaccuuccugcugaaguacaacgagaacggcaccaucaccgacgccguggauugugcucuggauccucugagcgagacaaagugcacccugaaguccuucaccguggaaaagggcaucuaccagaccagcaacuuccgggugcagcccaccgaauccaucgugcgguuccccaauaucaccaaucugugccccuucggcgagguguucaaugccaccagauucgccucuguguacgccuggaaccggaagcggaucagcaauugcguggccgacuacuccgugcuguacaacuccgccagcuucagcaccuucaagugcuacggcguguccccuaccaagcugaacgaccugugcuucacaaacguguacgccgacagcuucgugauccggggagaugaagugcggcagauugccccuggacagacaggcaagaucgccgacuacaacuacaagcugcccgacgacuucaccggcugugugauugccuggaacagcaacaaccuggacuccaaagucggcggcaacuacaauuaccuguaccggcuguuccggaaguccaaucugaagcccuucgagcgggacaucagcaccgaaaucuaucaggccggcagcaccccuugcaacggcguggaaggcuucaacugcuacuucccacugcaguccuacggcuuucagcccacaaauggcgugggcuaucagcccuacagagugguggugcugagcuucgaacugcugcaugcuccugccacagugugcggcccuaagaaaagcaccaaucucgugaagaacaaaugcgugaacuucaacuucaacggccugaccggcaccggcgugcugacagagagcaacaagaaguuccugccauuccagcaguuuggccgggauaucgccgauaccacagacgccguuagagauccccagacacuggaaauccuggacaucaccccaugcagcuucggcggagugucugugaucaccccuggcaccaacaccagcaaucagguggcagugcuguaccaggacgugaacuguaccgaagugcccguggccauucacgccgaucagcugacaccuacauggcggguguacuccaccggcagcaauguguuucagaccagagccggcugucugaucggagccgagcacgugaacaauagcuacgagugcgacauccccaucggcgcuggcaucugugccagcuaccagacacagacaaacagccccagacgggcuagaagcguggccagccagagcaucauugccuacacaaugucucugggcgccgagaacagcguggccuacuccaacaacucuaucgcuauccccaccaacuucaccaucagcgugaccaccgagauccugccuguguccaugaccaagaccagcguggacugcaccauguacaucugcggcgauuccaccgagugcuccaaccugcugcugcaguacggcagcuucugcacccagcugaauagagcccugacagggaucgccguggaacaggacaagaacacccaagagguguucgcccaagugaagcaaaucuacaagaccccuccuaucaaggacuucggcggcuucaauuucagccagauucugcccgauccuagcaagcccagcaagcggagcuucaucgaggaccugcuguucaacaaagugacacuggccgacgccggcuucaucaagcaguauggcgauugucugggcgacauugccgccagggaucugauuugcgcccagaaguuuaacggacugacagugcugccuccucugcugaccgaugagaugaucgcccaguacacaucugcccugcuggccggcacaaucacaagcggcuggacauuuggagcuggcgccgcucugcagauccccuuugcuaugcagauggccuaccgguucaacggcaucggagugacccagaaugugcuguacgagaaccagaagcugaucgccaaccaguucaacagcgccaucggcaagauccaggacagccugagcagcacagcaagcgcccugggaaagcugcaggacguggucaaccagaaugcccaggcacugaacacccuggucaagcagcuguccuccaacuucggcgccaucagcucugugcugaacgauauccugagcagacuggacccuccugaggccgaggugcagaucgacagacugaucacaggcagacugcagagccuccagacauacgugacccagcagcugaucagagccgccgagauuagagccucugccaaucuggccgccaccaagaugucugagugugugcugggccagagcaagagaguggacuuuugcggcaagggcuaccagcugaugagcuucccucagucugccccucacggcgugguguuucugaacgugacauaugugcccgcucaagagaagaauuucaccaccgcuccagccaucugcaacgacggcaaagcccacuuuccuagagaaggcguguucguguccaacggcaccaacugguucgugacacagcggaacuucuacgagccccagaucaucaccaccgacaacaccuucgugucuggcaacugcgacguugugaucggcauugugaacaauaccguguacgacccucugcagcccgagcuggacagcuucaaagaggaacuggacaaguacuuuaagaaccacacaagccccgacguggaccugggcgauaucagcggaaucaaugccagcgucgugaacauccagaaagagaucgaccggcugaacgagguggccaagaaucugaacgagagccugaucgaccugcaagaacuggggaaguacgagcaguacaucaagggaggaucuggcuauauccccgaggcuccuagagauggccaggccuauguucggaaggauggcgaaugggugcugcugagcaccuuccuuugaggacuaguuauaagacugacuagcccgaugggccucccaacgggcccuccuccccuccuugcaccgagauuaauaaaaaaaaaaaaaaaaaaaaaaaaaaaaaaaaaaaaaaaaaaaaaaaaaaaaaaaaaaaaaaaaugcaucccccccccccccccccccccccccccccccaaaggcucuuuucagagccaccagaauu

SEQ ID NO: 13063 - RNA, 3943 nt, Artificial Sequence
  SARS-CoV-2/Wuhan/WIV05/2019__EPI_ISL_402128 spike protein mRNA gc mod (1-1211)(I712C_T1077C) Foldon construct
aggagaaagcuuaccauguucguguuucuggugcugcugccccugguguccagccagugugugaaccugaccaccagaacacagcugccuccagccuacaccaacagcuucaccagaggcguguacuaccccgacaagguguucagauccagcgugcugcacucuacccaggaccuguuccugccuuucuucagcaacgugaccugguuccacgccauccacguguccggcaccaauggcaccaagagauucgacaaccccgugcugcccuucaacgacgggguguacuuugccagcaccgagaaguccaacaucaucagaggcuggaucuucggcaccacacuggacagcaagacccagagccugcugaucgugaacaacgccaccaacguggucaucaaagugugcgaguuccaguucugcaacgaccccuuccugggcgucuacuaccacaagaacaacaagagcuggauggaaagcgaguuccggguguacagcagcgccaacaacugcaccuucgaguacgugucccagccuuuccugauggaccuggaaggcaagcagggcaacuucaagaaccugcgcgaguucguguucaagaacaucgacggcuacuucaaaaucuacagcaagcacaccccuaucaaccucgugcgggaucugccucagggcuucucugcucuggaaccccugguggaucugcccaucggcaucaacaucacccgguuucagacacugcuggcccugcacagaagcuaccugacaccuggcgauagcagcagcggauggacagcuggugccgccgcuuacuaugugggcuaccugcagccuagaaccuuccugcugaaguacaacgagaacggcaccaucaccgacgccguggauugugcucuggauccucugagcgagacaaagugcacccugaaguccuucaccguggaaaagggcaucuaccagaccagcaacuuccgggugcagcccaccgaauccaucgugcgguuccccaauaucaccaaucugugccccuucggcgagguguucaaugccaccagauucgccucuguguacgccuggaaccggaagcggaucagcaauugcguggccgacuacuccgugcuguacaacuccgccagcuucagcaccuucaagugcuacggcguguccccuaccaagcugaacgaccugugcuucacaaacguguacgccgacagcuucgugauccggggagaugaagugcggcagauugccccuggacagacaggcaagaucgccgacuacaacuacaagcugcccgacgacuucaccggcugugugauugccuggaacagcaacaaccuggacuccaaagucggcggcaacuacaauuaccuguaccggcuguuccggaaguccaaucugaagcccuucgagcgggacaucagcaccgaaaucuaucaggccggcagcaccccuugcaacggcguggaaggcuucaacugcuacuucccacugcaguccuacggcuuucagcccacaaauggcgugggcuaucagcccuacagagugguggugcugagcuucgaacugcugcaugcuccugccacagugugcggcccuaagaaaagcaccaaucucgugaagaacaaaugcgugaacuucaacuucaacggccugaccggcaccggcgugcugacagagagcaacaagaaguuccugccauuccagcaguuuggccgggauaucgccgauaccacagacgccguuagagauccccagacacuggaaauccuggacaucaccccaugcagcuucggcggagugucugugaucaccccuggcaccaacaccagcaaucagguggcagugcuguaccaggacgugaacuguaccgaagugcccguggccauucacgccgaucagcugacaccuacauggcggguguacuccaccggcagcaauguguuucagaccagagccggcugucugaucggagccgagcacgugaacaauagcuacgagugcgacauccccaucggcgcuggcaucugugccagcuaccagacacagacaaacagccccagacgggcuagaagcguggccagccagagcaucauugccuacacaaugucucugggcgccgagaacagcguggccuacuccaacaacucuugcgcuauccccaccaacuucaccaucagcgugaccaccgagauccugccuguguccaugaccaagaccagcguggacugcaccauguacaucugcggcgauuccaccgagugcuccaaccugcugcugcaguacggcagcuucugcacccagcugaauagagcccugacagggaucgccguggaacaggacaagaacacccaagagguguucgcccaagugaagcaaaucuacaagaccccuccuaucaaggacuucggcggcuucaauuucagccagauucugcccgauccuagcaagcccagcaagcggagcuucaucgaggaccugcuguucaacaaagugacacuggccgacgccggcuucaucaagcaguauggcgauugucugggcgacauugccgccagggaucugauuugcgcccagaaguuuaacggacugacagugcugccuccucugcugaccgaugagaugaucgcccaguacacaucugcccugcuggccggcacaaucacaagcggcuggacauuuggagcuggcgccgcucugcagauccccuuugcuaugcagauggccuaccgguucaacggcaucggagugacccagaaugugcuguacgagaaccagaagcugaucgccaaccaguucaacagcgccaucggcaagauccaggacagccugagcagcacagcaagcgcccugggaaagcugcaggacguggucaaccagaaugcccaggcacugaacacccuggucaagcagcuguccuccaacuucggcgccaucagcucugugcugaacgauauccugagcagacuggacaaggucgaggccgaggugcagaucgacagacugaucacaggcagacugcagagccuccagacauacgugacccagcagcugaucagagccgccgagauuagagccucugccaaucuggccgccaccaagaugucugagugugugcugggccagagcaagagaguggacuuuugcggcaagggcuaccaccugaugagcuucccucagucugccccucacggcgugguguuucugcacgugacauaugugcccgcucaagagaagaauuucaccugugcuccagccaucugccacgacggcaaagcccacuuuccuagagaaggcguguucguguccaacggcacccauugguucgugacacagcggaacuucuacgagccccagaucaucaccaccgacaacaccuucgugucuggcaacugcgacguugugaucggcauugugaacaauaccguguacgacccucugcagcccgagcuggacagcuucaaagaggaacuggacaaguacuuuaagaaccacacaagccccgacguggaccugggcgauaucagcggaaucaaugccagcgucgugaacauccagaaagagaucgaccggcugaacgagguggccaagaaucugaacgagagccugaucgaccugcaagaacuggggaaguacgagcaguacaucaagggaggaucuggcuauauccccgaggcuccuagagauggccaggccuauguucggaaggauggcgaaugggugcugcugagcaccuuccuuugaggacuaguuauaagacugacuagcccgaugggccucccaacgggcccuccuccccuccuugcaccgagauuaauaaaaaaaaaaaaaaaaaaaaaaaaaaaaaaaaaaaaaaaaaaaaaaaaaaaaaaaaaaaaaaaaugcaucccccccccccccccccccccccccccccccaaaggcucuuuucagagccaccagaauu

SEQ ID NO: 13064 - RNA, 3943 nt, Artificial Sequence
  SARS-CoV-2/Wuhan/WIV05/2019__EPI_ISL_402128 spike protein mRNA gc mod (1-1211)(I714C_Y1110C) Foldon construct
aggagaaagcuuaccauguucguguuucuggugcugcugccccugguguccagccagugugugaaccugaccaccagaacacagcugccuccagccuacaccaacagcuucaccagaggcguguacuaccccgacaagguguucagauccagcgugcugcacucuacccaggaccuguuccugccuuucuucagcaacgugaccugguuccacgccauccacguguccggcaccaauggcaccaagagauucgacaaccccgugcugcccuucaacgacgggguguacuuugccagcaccgagaaguccaacaucaucagaggcuggaucuucggcaccacacuggacagcaagacccagagccugcugaucgugaacaacgccaccaacguggucaucaaagugugcgaguuccaguucugcaacgaccccuuccugggcgucuacuaccacaagaacaacaagagcuggauggaaagcgaguuccggguguacagcagcgccaacaacugcaccuucgaguacgugucccagccuuuccugauggaccuggaaggcaagcagggcaacuucaagaaccugcgcgaguucguguucaagaacaucgacggcuacuucaaaaucuacagcaagcacaccccuaucaaccucgugcgggaucugccucagggcuucucugcucuggaaccccugguggaucugcccaucggcaucaacaucacccgguuucagacacugcuggcccugcacagaagcuaccugacaccuggcgauagcagcagcggauggacagcuggugccgccgcuuacuaugugggcuaccugcagccuagaaccuuccugcugaaguacaacgagaacggcaccaucaccgacgccguggauugugcucuggauccucugagcgagacaaagugcacccugaaguccuucaccguggaaaagggcaucuaccagaccagcaacuuccgggugcagcccaccgaauccaucgugcgguuccccaauaucaccaaucugugccccuucggcgagguguucaaugccaccagauucgccucuguguacgccuggaaccggaagcggaucagcaauugcguggccgacuacuccgugcuguacaacuccgccagcuucagcaccuucaagugcuacggcguguccccuaccaagcugaacgaccugugcuucacaaacguguacgccgacagcuucgugauccggggagaugaagugcggcagauugccccuggacagacaggcaagaucgccgacuacaacuacaagcugcccgacgacuucaccggcugugugauugccuggaacagcaacaaccuggacuccaaagucggcggcaacuacaauuaccuguaccggcuguuccggaaguccaaucugaagcccuucgagcgggacaucagcaccgaaaucuaucaggccggcagcaccccuugcaacggcguggaaggcuucaacugcuacuucccacugcaguccuacggcuuucagcccacaaauggcgugggcuaucagcccuacagagugguggugcugagcuucgaacugcugcaugcuccugccacagugugcggcccuaagaaaagcaccaaucucgugaagaacaaaugcgugaacuucaacuucaacggccugaccggcaccggcgugcugacagagagcaacaagaaguuccugccauuccagcaguuuggccgggauaucgccgauaccacagacgccguuagagauccccagacacuggaaauccuggacaucaccccaugcagcuucggcggagugucugugaucaccccuggcaccaacaccagcaaucagguggcagugcuguaccaggacgugaacuguaccgaagugcccguggccauucacgccgaucagcugacaccuacauggcggguguacuccaccggcagcaauguguuucagaccagagccggcugucugaucggagccgagcacgugaacaauagcuacgagugcgacauccccaucggcgcuggcaucugugccagcuaccagacacagacaaacagccccagacgggcuagaagcguggccagccagagcaucauugccuacacaaugucucugggcgccgagaacagcguggccuacuccaacaacucuaucgcuugccccaccaacuucaccaucagcgugaccaccgagauccugccuguguccaugaccaagaccagcguggacugcaccauguacaucugcggcgauuccaccgagugcuccaaccugcugcugcaguacggcagcuucugcacccagcugaauagagcccugacagggaucgccguggaacaggacaagaacacccaagagguguucgcccaagugaagcaaaucuacaagaccccuccuaucaaggacuucggcggcuucaauuucagccagauucugcccgauccuagcaagcccagcaagcggagcuucaucgaggaccugcuguucaacaaagugacacuggccgacgccggcuucaucaagcaguauggcgauugucugggcgacauugccgccagggaucugauuugcgcccagaaguuuaacggacugacagugcugccuccucugcugaccgaugagaugaucgcccaguacacaucugcccugcuggccggcacaaucacaagcggcuggacauuuggagcuggcgccgcucugcagauccccuuugcuaugcagauggccuaccgguucaacggcaucggagugacccagaaugugcuguacgagaaccagaagcugaucgccaaccaguucaacagcgccaucggcaagauccaggacagccugagcagcacagcaagcgcccugggaaagcugcaggacguggucaaccagaaugcccaggcacugaacacccuggucaagcagcuguccuccaacuucggcgccaucagcucugugcugaacgauauccugagcagacuggacaaggucgaggccgaggugcagaucgacagacugaucacaggcagacugcagagccuccagacauacgugacccagcagcugaucagagccgccgagauuagagccucugccaaucuggccgccaccaagaugucugagugugugcugggccagagcaagagaguggacuuuugcggcaagggcuaccaccugaugagcuucccucagucugccccucacggcgugguguuucugcacgugacauaugugcccgcucaagagaagaauuucaccaccgcuccagccaucugccacgacggcaaagcccacuuuccuagagaaggcguguucguguccaacggcacccauugguucgugacacagcggaacuucugugagccccagaucaucaccaccgacaacaccuucgugucuggcaacugcgacguugugaucggcauugugaacaauaccguguacgacccucugcagcccgagcuggacagcuucaaagaggaacuggacaaguacuuuaagaaccacacaagccccgacguggaccugggcgauaucagcggaaucaaugccagcgucgugaacauccagaaagagaucgaccggcugaacgagguggccaagaaucugaacgagagccugaucgaccugcaagaacuggggaaguacgagcaguacaucaagggaggaucuggcuauauccccgaggcuccuagagauggccaggccuauguucggaaggauggcgaaugggugcugcugagcaccuuccuuugaggacuaguuauaagacugacuagcccgaugggccucccaacgggcccuccuccccuccuugcaccgagauuaauaaaaaaaaaaaaaaaaaaaaaaaaaaaaaaaaaaaaaaaaaaaaaaaaaaaaaaaaaaaaaaaaugcaucccccccccccccccccccccccccccccccaaaggcucuuuucagagccaccagaauu

SEQ ID NO: 13065 - RNA, 3943 nt, Artificial Sequence
  SARS-CoV-2/Wuhan/WIV05/2019__EPI_ISL_402128 spike protein mRNA gc mod (1-1211)(P715C_P1069C) Foldon construct
aggagaaagcuuaccauguucguguuucuggugcugcugccccugguguccagccagugugugaaccugaccaccagaacacagcugccuccagccuacaccaacagcuucaccagaggcguguacuaccccgacaagguguucagauccagcgugcugcacucuacccaggaccuguuccugccuuucuucagcaacgugaccugguuccacgccauccacguguccggcaccaauggcaccaagagauucgacaaccccgugcugcccuucaacgacgggguguacuuugccagcaccgagaaguccaacaucaucagaggcuggaucuucggcaccacacuggacagcaagacccagagccugcugaucgugaacaacgccaccaacguggucaucaaagugugcgaguuccaguucugcaacgaccccuuccugggcgucuacuaccacaagaacaacaagagcuggauggaaagcgaguuccggguguacagcagcgccaacaacugcaccuucgaguacgugucccagccuuuccugauggaccuggaaggcaagcagggcaacuucaagaaccugcgcgaguucguguucaagaacaucgacggcuacuucaaaaucuacagcaagcacaccccuaucaaccucgugcgggaucugccucagggcuucucugcucuggaaccccugguggaucugcccaucggcaucaacaucacccgguuucagacacugcuggcccugcacagaagcuaccugacaccuggcgauagcagcagcggauggacagcuggugccgccgcuuacuaugugggcuaccugcagccuagaaccuuccugcugaaguacaacgagaacggcaccaucaccgacgccguggauugugcucuggauccucugagcgagacaaagugcacccugaaguccuucaccguggaaaagggcaucuaccagaccagcaacuuccgggugcagcccaccgaauccaucgugcgguuccccaauaucaccaaucugugccccuucggcgagguguucaaugccaccagauucgccucuguguacgccuggaaccggaagcggaucagcaauugcguggccgacuacuccgugcuguacaacuccgccagcuucagcaccuucaagugcuacggcguguccccuaccaagcugaacgaccugugcuucacaaacguguacgccgacagcuucgugauccggggagaugaagugcggcagauugccccuggacagacaggcaagaucgccgacuacaacuacaagcugcccgacgacuucaccggcugugugauugccuggaacagcaacaaccuggacuccaaagucggcggcaacuacaauuaccuguaccggcuguuccggaaguccaaucugaagcccuucgagcgggacaucagcaccgaaaucuaucaggccggcagcaccccuugcaacggcguggaaggcuucaacugcuacuucccacugcaguccuacggcuuucagcccacaaauggcgugggcuaucagcccuacagagugguggugcugagcuucgaacugcugcaugcuccugccacagugugcggcccuaagaaaagcaccaaucucgugaagaacaaaugcgugaacuucaacuucaacggccugaccggcaccggcgugcugacagagagcaacaagaaguuccugccauuccagcaguuuggccgggauaucgccgauaccacagacgccguuagagauccccagacacuggaaauccuggacaucaccccaugcagcuucggcggagugucugugaucaccccuggcaccaacaccagcaaucagguggcagugcuguaccaggacgugaacuguaccgaagugcccguggccauucacgccgaucagcugacaccuacauggcggguguacuccaccggcagcaauguguuucagaccagagccggcugucugaucggagccgagcacgugaacaauagcuacgagugcgacauccccaucggcgcuggcaucugugccagcuaccagacacagacaaacagccccagacgggcuagaagcguggccagccagagcaucauugccuacacaaugucucugggcgccgagaacagcguggccuacuccaacaacucuaucgcuaucugcaccaacuucaccaucagcgugaccaccgagauccugccuguguccaugaccaagaccagcguggacugcaccauguacaucugcggcgauuccaccgagugcuccaaccugcugcugcaguacggcagcuucugcacccagcugaauagagcccugacagggaucgccguggaacaggacaagaacacccaagagguguucgcccaagugaagcaaaucuacaagaccccuccuaucaaggacuucggcggcuucaauuucagccagauucugcccgauccuagcaagcccagcaagcggagcuucaucgaggaccugcuguucaacaaagugacacuggccgacgccggcuucaucaagcaguauggcgauugucugggcgacauugccgccagggaucugauuugcgcccagaaguuuaacggacugacagugcugccuccucugcugaccgaugagaugaucgcccaguacacaucugcccugcuggccggcacaaucacaagcggcuggacauuuggagcuggcgccgcucugcagauccccuuugcuaugcagauggccuaccgguucaacggcaucggagugacccagaaugugcuguacgagaaccagaagcugaucgccaaccaguucaacagcgccaucggcaagauccaggacagccugagcagcacagcaagcgcccugggaaagcugcaggacguggucaaccagaaugcccaggcacugaacacccuggucaagcagcuguccuccaacuucggcgccaucagcucugugcugaacgauauccugagcagacuggacaaggucgaggccgaggugcagaucgacagacugaucacaggcagacugcagagccuccagacauacgugacccagcagcugaucagagccgccgagauuagagccucugccaaucuggccgccaccaagaugucugagugugugcugggccagagcaagagaguggacuuuugcggcaagggcuaccaccugaugagcuucccucagucugccccucacggcgugguguuucugcacgugacauaugugugugcucaagagaagaauuucaccaccgcuccagccaucugccacgacggcaaagcccacuuuccuagagaaggcguguucguguccaacggcacccauugguucgugacacagcggaacuucuacgagccccagaucaucaccaccgacaacaccuucgugucuggcaacugcgacguugugaucggcauugugaacaauaccguguacgacccucugcagcccgagcuggacagcuucaaagaggaacuggacaaguacuuuaagaaccacacaagccccgacguggaccugggcgauaucagcggaaucaaugccagcgucgugaacauccagaaagagaucgaccggcugaacgagguggccaagaaucugaacgagagccugaucgaccugcaagaacuggggaaguacgagcaguacaucaagggaggaucuggcuauauccccgaggcuccuagagauggccaggccuauguucggaaggauggcgaaugggugcugcugagcaccuuccuuugaggacuaguuauaagacugacuagcccgaugggccucccaacgggcccuccuccccuccuugcaccgagauuaauaaaaaaaaaaaaaaaaaaaaaaaaaaaaaaaaaaaaaaaaaaaaaaaaaaaaaaaaaaaaaaaaugcaucccccccccccccccccccccccccccccccaaaggcucuuuucagagccaccagaauu

SEQ ID NO: 13066 - RNA, 3943 nt, Artificial Sequence
  SARS-CoV-2/Wuhan/WIV05/2019__EPI_ISL_402128 spike protein mRNA gc mod (1-1211)(G889C_L1034C) Foldon construct
aggagaaagcuuaccauguucguguuucuggugcugcugccccugguguccagccagugugugaaccugaccaccagaacacagcugccuccagccuacaccaacagcuucaccagaggcguguacuaccccgacaagguguucagauccagcgugcugcacucuacccaggaccuguuccugccuuucuucagcaacgugaccugguuccacgccauccacguguccggcaccaauggcaccaagagauucgacaaccccgugcugcccuucaacgacgggguguacuuugccagcaccgagaaguccaacaucaucagaggcuggaucuucggcaccacacuggacagcaagacccagagccugcugaucgugaacaacgccaccaacguggucaucaaagugugcgaguuccaguucugcaacgaccccuuccugggcgucuacuaccacaagaacaacaagagcuggauggaaagcgaguuccggguguacagcagcgccaacaacugcaccuucgaguacgugucccagccuuuccugauggaccuggaaggcaagcagggcaacuucaagaaccugcgcgaguucguguucaagaacaucgacggcuacuucaaaaucuacagcaagcacaccccuaucaaccucgugcgggaucugccucagggcuucucugcucuggaaccccugguggaucugcccaucggcaucaacaucacccgguuucagacacugcuggcccugcacagaagcuaccugacaccuggcgauagcagcagcggauggacagcuggugccgccgcuuacuaugugggcuaccugcagccuagaaccuuccugcugaaguacaacgagaacggcaccaucaccgacgccguggauugugcucuggauccucugagcgagacaaagugcacccugaaguccuucaccguggaaaagggcaucuaccagaccagcaacuuccgggugcagcccaccgaauccaucgugcgguuccccaauaucaccaaucugugccccuucggcgagguguucaaugccaccagauucgccucuguguacgccuggaaccggaagcggaucagcaauugcguggccgacuacuccgugcuguacaacuccgccagcuucagcaccuucaagugcuacggcguguccccuaccaagcugaacgaccugugcuucacaaacguguacgccgacagcuucgugauccggggagaugaagugcggcagauugccccuggacagacaggcaagaucgccgacuacaacuacaagcugcccgacgacuucaccggcugugugauugccuggaacagcaacaaccuggacuccaaagucggcggcaacuacaauuaccuguaccggcuguuccggaaguccaaucugaagcccuucgagcgggacaucagcaccgaaaucuaucaggccggcagcaccccuugcaacggcguggaaggcuucaacugcuacuucccacugcaguccuacggcuuucagcccacaaauggcgugggcuaucagcccuacagagugguggugcugagcuucgaacugcugcaugcuccugccacagugugcggcccuaagaaaagcaccaaucucgugaagaacaaaugcgugaacuucaacuucaacggccugaccggcaccggcgugcugacagagagcaacaagaaguuccugccauuccagcaguuuggccgggauaucgccgauaccacagacgccguuagagauccccagacacuggaaauccuggacaucaccccaugcagcuucggcggagugucugugaucaccccuggcaccaacaccagcaaucagguggcagugcuguaccaggacgugaacuguaccgaagugcccguggccauucacgccgaucagcugacaccuacauggcggguguacuccaccggcagcaauguguuucagaccagagccggcugucugaucggagccgagcacgugaacaauagcuacgagugcgacauccccaucggcgcuggcaucugugccagcuaccagacacagacaaacagccccagacgggcuagaagcguggccagccagagcaucauugccuacacaaugucucugggcgccgagaacagcguggccuacuccaacaacucuaucgcuauccccaccaacuucaccaucagcgugaccaccgagauccugccuguguccaugaccaagaccagcguggacugcaccauguacaucugcggcgauuccaccgagugcuccaaccugcugcugcaguacggcagcuucugcacccagcugaauagagcccugacagggaucgccguggaacaggacaagaacacccaagagguguucgcccaagugaagcaaaucuacaagaccccuccuaucaaggacuucggcggcuucaauuucagccagauucugcccgauccuagcaagcccagcaagcggagcuucaucgaggaccugcuguucaacaaagugacacuggccgacgccggcuucaucaagcaguauggcgauugucugggcgacauugccgccagggaucugauuugcgcccagaaguuuaacggacugacagugcugccuccucugcugaccgaugagaugaucgcccaguacacaucugcccugcuggccggcacaaucacaagcggcuggacauuuugcgcuggcgccgcucugcagauccccuuugcuaugcagauggccuaccgguucaacggcaucggagugacccagaaugugcuguacgagaaccagaagcugaucgccaaccaguucaacagcgccaucggcaagauccaggacagccugagcagcacagcaagcgcccugggaaagcugcaggacguggucaaccagaaugcccaggcacugaacacccuggucaagcagcuguccuccaacuucggcgccaucagcucugugcugaacgauauccugagcagacuggacaaggucgaggccgaggugcagaucgacagacugaucacaggcagacugcagagccuccagacauacgugacccagcagcugaucagagccgccgagauuagagccucugccaaucuggccgccaccaagaugucugaguguguguguggccagagcaagagaguggacuuuugcggcaagggcuaccaccugaugagcuucccucagucugccccucacggcgugguguuucugcacgugacauaugugcccgcucaagagaagaauuucaccaccgcuccagccaucugccacgacggcaaagcccacuuuccuagagaaggcguguucguguccaacggcacccauugguucgugacacagcggaacuucuacgagccccagaucaucaccaccgacaacaccuucgugucuggcaacugcgacguugugaucggcauugugaacaauaccguguacgacccucugcagcccgagcuggacagcuucaaagaggaacuggacaaguacuuuaagaaccacacaagccccgacguggaccugggcgauaucagcggaaucaaugccagcgucgugaacauccagaaagagaucgaccggcugaacgagguggccaagaaucugaacgagagccugaucgaccugcaagaacuggggaaguacgagcaguacaucaagggaggaucuggcuauauccccgaggcuccuagagauggccaggccuauguucggaaggauggcgaaugggugcugcugagcaccuuccuuugaggacuaguuauaagacugacuagcccgaugggccucccaacgggcccuccuccccuccuugcaccgagauuaauaaaaaaaaaaaaaaaaaaaaaaaaaaaaaaaaaaaaaaaaaaaaaaaaaaaaaaaaaaaaaaaaugcaucccccccccccccccccccccccccccccccaaaggcucuuuucagagccaccagaauu

SEQ ID NO: 13067 - RNA, 3943 nt, Artificial Sequence
  SARS-CoV-2/Wuhan/WIV05/2019__EPI_ISL_402128 spike protein mRNA gc mod (1-1211)(I909C_Y1047C) Foldon construct
aggagaaagcuuaccauguucguguuucuggugcugcugccccugguguccagccagugugugaaccugaccaccagaacacagcugccuccagccuacaccaacagcuucaccagaggcguguacuaccccgacaagguguucagauccagcgugcugcacucuacccaggaccuguuccugccuuucuucagcaacgugaccugguuccacgccauccacguguccggcaccaauggcaccaagagauucgacaaccccgugcugcccuucaacgacgggguguacuuugccagcaccgagaaguccaacaucaucagaggcuggaucuucggcaccacacuggacagcaagacccagagccugcugaucgugaacaacgccaccaacguggucaucaaagugugcgaguuccaguucugcaacgaccccuuccugggcgucuacuaccacaagaacaacaagagcuggauggaaagcgaguuccggguguacagcagcgccaacaacugcaccuucgaguacgugucccagccuuuccugauggaccuggaaggcaagcagggcaacuucaagaaccugcgcgaguucguguucaagaacaucgacggcuacuucaaaaucuacagcaagcacaccccuaucaaccucgugcgggaucugccucagggcuucucugcucuggaaccccugguggaucugcccaucggcaucaacaucacccgguuucagacacugcuggcccugcacagaagcuaccugacaccuggcgauagcagcagcggauggacagcuggugccgccgcuuacuaugugggcuaccugcagccuagaaccuuccugcugaaguacaacgagaacggcaccaucaccgacgccguggauugugcucuggauccucugagcgagacaaagugcacccugaaguccuucaccguggaaaagggcaucuaccagaccagcaacuuccgggugcagcccaccgaauccaucgugcgguuccccaauaucaccaaucugugccccuucggcgagguguucaaugccaccagauucgccucuguguacgccuggaaccggaagcggaucagcaauugcguggccgacuacuccgugcuguacaacuccgccagcuucagcaccuucaagugcuacggcguguccccuaccaagcugaacgaccugugcuucacaaacguguacgccgacagcuucgugauccggggagaugaagugcggcagauugccccuggacagacaggcaagaucgccgacuacaacuacaagcugcccgacgacuucaccggcugugugauugccuggaacagcaacaaccuggacuccaaagucggcggcaacuacaauuaccuguaccggcuguuccggaaguccaaucugaagcccuucgagcgggacaucagcaccgaaaucuaucaggccggcagcaccccuugcaacggcguggaaggcuucaacugcuacuucccacugcaguccuacggcuuucagcccacaaauggcgugggcuaucagcccuacagagugguggugcugagcuucgaacugcugcaugcuccugccacagugugcggcccuaagaaaagcaccaaucucgugaagaacaaaugcgugaacuucaacuucaacggccugaccggcaccggcgugcugacagagagcaacaagaaguuccugccauuccagcaguuuggccgggauaucgccgauaccacagacgccguuagagauccccagacacuggaaauccuggacaucaccccaugcagcuucggcggagugucugugaucaccccuggcaccaacaccagcaaucagguggcagugcuguaccaggacgugaacuguaccgaagugcccguggccauucacgccgaucagcugacaccuacauggcggguguacuccaccggcagcaauguguuucagaccagagccggcugucugaucggagccgagcacgugaacaauagcuacgagugcgacauccccaucggcgcuggcaucugugccagcuaccagacacagacaaacagccccagacgggcuagaagcguggccagccagagcaucauugccuacacaaugucucugggcgccgagaacagcguggccuacuccaacaacucuaucgcuauccccaccaacuucaccaucagcgugaccaccgagauccugccuguguccaugaccaagaccagcguggacugcaccauguacaucugcggcgauuccaccgagugcuccaaccugcugcugcaguacggcagcuucugcacccagcugaauagagcccugacagggaucgccguggaacaggacaagaacacccaagagguguucgcccaagugaagcaaaucuacaagaccccuccuaucaaggacuucggcggcuucaauuucagccagauucugcccgauccuagcaagcccagcaagcggagcuucaucgaggaccugcuguucaacaaagugacacuggccgacgccggcuucaucaagcaguauggcgauugucugggcgacauugccgccagggaucugauuugcgcccagaaguuuaacggacugacagugcugccuccucugcugaccgaugagaugaucgcccaguacacaucugcccugcuggccggcacaaucacaagcggcuggacauuuggagcuggcgccgcucugcagauccccuuugcuaugcagauggccuaccgguucaacggcugcggagugacccagaaugugcuguacgagaaccagaagcugaucgccaaccaguucaacagcgccaucggcaagauccaggacagccugagcagcacagcaagcgcccugggaaagcugcaggacguggucaaccagaaugcccaggcacugaacacccuggucaagcagcuguccuccaacuucggcgccaucagcucugugcugaacgauauccugagcagacuggacaaggucgaggccgaggugcagaucgacagacugaucacaggcagacugcagagccuccagacauacgugacccagcagcugaucagagccgccgagauuagagccucugccaaucuggccgccaccaagaugucugagugugugcugggccagagcaagagaguggacuuuugcggcaagggcugucaccugaugagcuucccucagucugccccucacggcgugguguuucugcacgugacauaugugcccgcucaagagaagaauuucaccaccgcuccagccaucugccacgacggcaaagcccacuuuccuagagaaggcguguucguguccaacggcacccauugguucgugacacagcggaacuucuacgagccccagaucaucaccaccgacaacaccuucgugucuggcaacugcgacguugugaucggcauugugaacaauaccguguacgacccucugcagcccgagcuggacagcuucaaagaggaacuggacaaguacuuuaagaaccacacaagccccgacguggaccugggcgauaucagcggaaucaaugccagcgucgugaacauccagaaagagaucgaccggcugaacgagguggccaagaaucugaacgagagccugaucgaccugcaagaacuggggaaguacgagcaguacaucaagggaggaucuggcuauauccccgaggcuccuagagauggccaggccuauguucggaaggauggcgaaugggugcugcugagcaccuuccuuugaggacuaguuauaagacugacuagcccgaugggccucccaacgggcccuccuccccuccuugcaccgagauuaauaaaaaaaaaaaaaaaaaaaaaaaaaaaaaaaaaaaaaaaaaaaaaaaaaaaaaaaaaaaaaaaaugcaucccccccccccccccccccccccccccccccaaaggcucuuuucagagccaccagaauu

SEQ ID NO: 13068 - RNA, 3943 nt, Artificial Sequence
  SARS-CoV-2/Wuhan/WIV05/2019__EPI_ISL_402128 spike protein mRNA gc mod (1-1211)(Q965C_S1003C) Foldon construct
aggagaaagcuuaccauguucguguuucuggugcugcugccccugguguccagccagugugugaaccugaccaccagaacacagcugccuccagccuacaccaacagcuucaccagaggcguguacuaccccgacaagguguucagauccagcgugcugcacucuacccaggaccuguuccugccuuucuucagcaacgugaccugguuccacgccauccacguguccggcaccaauggcaccaagagauucgacaaccccgugcugcccuucaacgacgggguguacuuugccagcaccgagaaguccaacaucaucagaggcuggaucuucggcaccacacuggacagcaagacccagagccugcugaucgugaacaacgccaccaacguggucaucaaagugugcgaguuccaguucugcaacgaccccuuccugggcgucuacuaccacaagaacaacaagagcuggauggaaagcgaguuccggguguacagcagcgccaacaacugcaccuucgaguacgugucccagccuuuccugauggaccuggaaggcaagcagggcaacuucaagaaccugcgcgaguucguguucaagaacaucgacggcuacuucaaaaucuacagcaagcacaccccuaucaaccucgugcgggaucugccucagggcuucucugcucuggaaccccugguggaucugcccaucggcaucaacaucacccgguuucagacacugcuggcccugcacagaagcuaccugacaccuggcgauagcagcagcggauggacagcuggugccgccgcuuacuaugugggcuaccugcagccuagaaccuuccugcugaaguacaacgagaacggcaccaucaccgacgccguggauugugcucuggauccucugagcgagacaaagugcacccugaaguccuucaccguggaaaagggcaucuaccagaccagcaacuuccgggugcagcccaccgaauccaucgugcgguuccccaauaucaccaaucugugccccuucggcgagguguucaaugccaccagauucgccucuguguacgccuggaaccggaagcggaucagcaauugcguggccgacuacuccgugcuguacaacuccgccagcuucagcaccuucaagugcuacggcguguccccuaccaagcugaacgaccugugcuucacaaacguguacgccgacagcuucgugauccggggagaugaagugcggcagauugccccuggacagacaggcaagaucgccgacuacaacuacaagcugcccgacgacuucaccggcugugugauugccuggaacagcaacaaccuggacuccaaagucggcggcaacuacaauuaccuguaccggcuguuccggaaguccaaucugaagcccuucgagcgggacaucagcaccgaaaucuaucaggccggcagcaccccuugcaacggcguggaaggcuucaacugcuacuucccacugcaguccuacggcuuucagcccacaaauggcgugggcuaucagcccuacagagugguggugcugagcuucgaacugcugcaugcuccugccacagugugcggcccuaagaaaagcaccaaucucgugaagaacaaaugcgugaacuucaacuucaacggccugaccggcaccggcgugcugacagagagcaacaagaaguuccugccauuccagcaguuuggccgggauaucgccgauaccacagacgccguuagagauccccagacacuggaaauccuggacaucaccccaugcagcuucggcggagugucugugaucaccccuggcaccaacaccagcaaucagguggcagugcuguaccaggacgugaacuguaccgaagugcccguggccauucacgccgaucagcugacaccuacauggcggguguacuccaccggcagcaauguguuucagaccagagccggcugucugaucggagccgagcacgugaacaauagcuacgagugcgacauccccaucggcgcuggcaucugugccagcuaccagacacagacaaacagccccagacgggcuagaagcguggccagccagagcaucauugccuacacaaugucucugggcgccgagaacagcguggccuacuccaacaacucuaucgcuauccccaccaacuucaccaucagcgugaccaccgagauccugccuguguccaugaccaagaccagcguggacugcaccauguacaucugcggcgauuccaccgagugcuccaaccugcugcugcaguacggcagcuucugcacccagcugaauagagcccugacagggaucgccguggaacaggacaagaacacccaagagguguucgcccaagugaagcaaaucuacaagaccccuccuaucaaggacuucggcggcuucaauuucagccagauucugcccgauccuagcaagcccagcaagcggagcuucaucgaggaccugcuguucaacaaagugacacuggccgacgccggcuucaucaagcaguauggcgauugucugggcgacauugccgccagggaucugauuugcgcccagaaguuuaacggacugacagugcugccuccucugcugaccgaugagaugaucgcccaguacacaucugcccugcuggccggcacaaucacaagcggcuggacauuuggagcuggcgccgcucugcagauccccuuugcuaugcagauggccuaccgguucaacggcaucggagugacccagaaugugcuguacgagaaccagaagcugaucgccaaccaguucaacagcgccaucggcaagauccaggacagccugagcagcacagcaagcgcccugggaaagcugcaggacguggucaaccagaaugcccaggcacugaacacccuggucaagugccuguccuccaacuucggcgccaucagcucugugcugaacgauauccugagcagacuggacaaggucgaggccgaggugcagaucgacagacugaucacaggcagacugcagugucuccagacauacgugacccagcagcugaucagagccgccgagauuagagccucugccaaucuggccgccaccaagaugucugagugugugcugggccagagcaagagaguggacuuuugcggcaagggcuaccaccugaugagcuucccucagucugccccucacggcgugguguuucugcacgugacauaugugcccgcucaagagaagaauuucaccaccgcuccagccaucugccacgacggcaaagcccacuuuccuagagaaggcguguucguguccaacggcacccauugguucgugacacagcggaacuucuacgagccccagaucaucaccaccgacaacaccuucgugucuggcaacugcgacguugugaucggcauugugaacaauaccguguacgacccucugcagcccgagcuggacagcuucaaagaggaacuggacaaguacuuuaagaaccacacaagccccgacguggaccugggcgauaucagcggaaucaaugccagcgucgugaacauccagaaagagaucgaccggcugaacgagguggccaagaaucugaacgagagccugaucgaccugcaagaacuggggaaguacgagcaguacaucaagggaggaucuggcuauauccccgaggcuccuagagauggccaggccuauguucggaaggauggcgaaugggugcugcugagcaccuuccuuugaggacuaguuauaagacugacuagcccgaugggccucccaacgggcccuccuccccuccuugcaccgagauuaauaaaaaaaaaaaaaaaaaaaaaaaaaaaaaaaaaaaaaaaaaaaaaaaaaaaaaaaaaaaaaaaaugcaucccccccccccccccccccccccccccccccaaaggcucuuuucagagccaccagaauu

SEQ ID NO: 13069 - RNA, 3943 nt, Artificial Sequence
  SARS-CoV-2/Wuhan/WIV05/2019__EPI_ISL_402128 spike protein mRNA gc mod (1-1211)(F970C_G999C) Foldon construct
aggagaaagcuuaccauguucguguuucuggugcugcugccccugguguccagccagugugugaaccugaccaccagaacacagcugccuccagccuacaccaacagcuucaccagaggcguguacuaccccgacaagguguucagauccagcgugcugcacucuacccaggaccuguuccugccuuucuucagcaacgugaccugguuccacgccauccacguguccggcaccaauggcaccaagagauucgacaaccccgugcugcccuucaacgacgggguguacuuugccagcaccgagaaguccaacaucaucagaggcuggaucuucggcaccacacuggacagcaagacccagagccugcugaucgugaacaacgccaccaacguggucaucaaagugugcgaguuccaguucugcaacgaccccuuccugggcgucuacuaccacaagaacaacaagagcuggauggaaagcgaguuccggguguacagcagcgccaacaacugcaccuucgaguacgugucccagccuuuccugauggaccuggaaggcaagcagggcaacuucaagaaccugcgcgaguucguguucaagaacaucgacggcuacuucaaaaucuacagcaagcacaccccuaucaaccucgugcgggaucugccucagggcuucucugcucuggaaccccugguggaucugcccaucggcaucaacaucacccgguuucagacacugcuggcccugcacagaagcuaccugacaccuggcgauagcagcagcggauggacagcuggugccgccgcuuacuaugugggcuaccugcagccuagaaccuuccugcugaaguacaacgagaacggcaccaucaccgacgccguggauugugcucuggauccucugagcgagacaaagugcacccugaaguccuucaccguggaaaagggcaucuaccagaccagcaacuuccgggugcagcccaccgaauccaucgugcgguuccccaauaucaccaaucugugccccuucggcgagguguucaaugccaccagauucgccucuguguacgccuggaaccggaagcggaucagcaauugcguggccgacuacuccgugcuguacaacuccgccagcuucagcaccuucaagugcuacggcguguccccuaccaagcugaacgaccugugcuucacaaacguguacgccgacagcuucgugauccggggagaugaagugcggcagauugccccuggacagacaggcaagaucgccgacuacaacuacaagcugcccgacgacuucaccggcugugugauugccuggaacagcaacaaccuggacuccaaagucggcggcaacuacaauuaccuguaccggcuguuccggaaguccaaucugaagcccuucgagcgggacaucagcaccgaaaucuaucaggccggcagcaccccuugcaacggcguggaaggcuucaacugcuacuucccacugcaguccuacggcuuucagcccacaaauggcgugggcuaucagcccuacagagugguggugcugagcuucgaacugcugcaugcuccugccacagugugcggcccuaagaaaagcaccaaucucgugaagaacaaaugcgugaacuucaacuucaacggccugaccggcaccggcgugcugacagagagcaacaagaaguuccugccauuccagcaguuuggccgggauaucgccgauaccacagacgccguuagagauccccagacacuggaaauccuggacaucaccccaugcagcuucggcggagugucugugaucaccccuggcaccaacaccagcaaucagguggcagugcuguaccaggacgugaacuguaccgaagugcccguggccauucacgccgaucagcugacaccuacauggcggguguacuccaccggcagcaauguguuucagaccagagccggcugucugaucggagccgagcacgugaacaauagcuacgagugcgacauccccaucggcgcuggcaucugugccagcuaccagacacagacaaacagccccagacgggcuagaagcguggccagccagagcaucauugccuacacaaugucucugggcgccgagaacagcguggccuacuccaacaacucuaucgcuauccccaccaacuucaccaucagcgugaccaccgagauccugccuguguccaugaccaagaccagcguggacugcaccauguacaucugcggcgauuccaccgagugcuccaaccugcugcugcaguacggcagcuucugcacccagcugaauagagcccugacagggaucgccguggaacaggacaagaacacccaagagguguucgcccaagugaagcaaaucuacaagaccccuccuaucaaggacuucggcggcuucaauuucagccagauucugcccgauccuagcaagcccagcaagcggagcuucaucgaggaccugcuguucaacaaagugacacuggccgacgccggcuucaucaagcaguauggcgauugucugggcgacauugccgccagggaucugauuugcgcccagaaguuuaacggacugacagugcugccuccucugcugaccgaugagaugaucgcccaguacacaucugcccugcuggccggcacaaucacaagcggcuggacauuuggagcuggcgccgcucugcagauccccuuugcuaugcagauggccuaccgguucaacggcaucggagugacccagaaugugcuguacgagaaccagaagcugaucgccaaccaguucaacagcgccaucggcaagauccaggacagccugagcagcacagcaagcgcccugggaaagcugcaggacguggucaaccagaaugcccaggcacugaacacccuggucaagcagcuguccuccaacugcggcgccaucagcucugugcugaacgauauccugagcagacuggacaaggucgaggccgaggugcagaucgacagacugaucacauguagacugcagagccuccagacauacgugacccagcagcugaucagagccgccgagauuagagccucugccaaucuggccgccaccaagaugucugagugugugcugggccagagcaagagaguggacuuuugcggcaagggcuaccaccugaugagcuucccucagucugccccucacggcgugguguuucugcacgugacauaugugcccgcucaagagaagaauuucaccaccgcuccagccaucugccacgacggcaaagcccacuuuccuagagaaggcguguucguguccaacggcacccauugguucgugacacagcggaacuucuacgagccccagaucaucaccaccgacaacaccuucgugucuggcaacugcgacguugugaucggcauugugaacaauaccguguacgacccucugcagcccgagcuggacagcuucaaagaggaacuggacaaguacuuuaagaaccacacaagccccgacguggaccugggcgauaucagcggaaucaaugccagcgucgugaacauccagaaagagaucgaccggcugaacgagguggccaagaaucugaacgagagccugaucgaccugcaagaacuggggaaguacgagcaguacaucaagggaggaucuggcuauauccccgaggcuccuagagauggccaggccuauguucggaaggauggcgaaugggugcugcugagcaccuuccuuugaggacuaguuauaagacugacuagcccgaugggccucccaacgggcccuccuccccuccuugcaccgagauuaauaaaaaaaaaaaaaaaaaaaaaaaaaaaaaaaaaaaaaaaaaaaaaaaaaaaaaaaaaaaaaaaaugcaucccccccccccccccccccccccccccccccaaaggcucuuuucagagccaccagaauu

SEQ ID NO: 13070 - RNA, 3943 nt, Artificial Sequence
  SARS-CoV-2/Wuhan/WIV05/2019__EPI_ISL_402128 spike protein mRNA gc mod (1-1211)(A972C_R995C) Foldon construct
aggagaaagcuuaccauguucguguuucuggugcugcugccccugguguccagccagugugugaaccugaccaccagaacacagcugccuccagccuacaccaacagcuucaccagaggcguguacuaccccgacaagguguucagauccagcgugcugcacucuacccaggaccuguuccugccuuucuucagcaacgugaccugguuccacgccauccacguguccggcaccaauggcaccaagagauucgacaaccccgugcugcccuucaacgacgggguguacuuugccagcaccgagaaguccaacaucaucagaggcuggaucuucggcaccacacuggacagcaagacccagagccugcugaucgugaacaacgccaccaacguggucaucaaagugugcgaguuccaguucugcaacgaccccuuccugggcgucuacuaccacaagaacaacaagagcuggauggaaagcgaguuccggguguacagcagcgccaacaacugcaccuucgaguacgugucccagccuuuccugauggaccuggaaggcaagcagggcaacuucaagaaccugcgcgaguucguguucaagaacaucgacggcuacuucaaaaucuacagcaagcacaccccuaucaaccucgugcgggaucugccucagggcuucucugcucuggaaccccugguggaucugcccaucggcaucaacaucacccgguuucagacacugcuggcccugcacagaagcuaccugacaccuggcgauagcagcagcggauggacagcuggugccgccgcuuacuaugugggcuaccugcagccuagaaccuuccugcugaaguacaacgagaacggcaccaucaccgacgccguggauugugcucuggauccucugagcgagacaaagugcacccugaaguccuucaccguggaaaagggcaucuaccagaccagcaacuuccgggugcagcccaccgaauccaucgugcgguuccccaauaucaccaaucugugccccuucggcgagguguucaaugccaccagauucgccucuguguacgccuggaaccggaagcggaucagcaauugcguggccgacuacuccgugcuguacaacuccgccagcuucagcaccuucaagugcuacggcguguccccuaccaagcugaacgaccugugcuucacaaacguguacgccgacagcuucgugauccggggagaugaagugcggcagauugccccuggacagacaggcaagaucgccgacuacaacuacaagcugcccgacgacuucaccggcugugugauugccuggaacagcaacaaccuggacuccaaagucggcggcaacuacaauuaccuguaccggcuguuccggaaguccaaucugaagcccuucgagcgggacaucagcaccgaaaucuaucaggccggcagcaccccuugcaacggcguggaaggcuucaacugcuacuucccacugcaguccuacggcuuucagcccacaaauggcgugggcuaucagcccuacagagugguggugcugagcuucgaacugcugcaugcuccugccacagugugcggcccuaagaaaagcaccaaucucgugaagaacaaaugcgugaacuucaacuucaacggccugaccggcaccggcgugcugacagagagcaacaagaaguuccugccauuccagcaguuuggccgggauaucgccgauaccacagacgccguuagagauccccagacacuggaaauccuggacaucaccccaugcagcuucggcggagugucugugaucaccccuggcaccaacaccagcaaucagguggcagugcuguaccaggacgugaacuguaccgaagugcccguggccauucacgccgaucagcugacaccuacauggcggguguacuccaccggcagcaauguguuucagaccagagccggcugucugaucggagccgagcacgugaacaauagcuacgagugcgacauccccaucggcgcuggcaucugugccagcuaccagacacagacaaacagccccagacgggcuagaagcguggccagccagagcaucauugccuacacaaugucucugggcgccgagaacagcguggccuacuccaacaacucuaucgcuauccccaccaacuucaccaucagcgugaccaccgagauccugccuguguccaugaccaagaccagcguggacugcaccauguacaucugcggcgauuccaccgagugcuccaaccugcugcugcaguacggcagcuucugcacccagcugaauagagcccugacagggaucgccguggaacaggacaagaacacccaagagguguucgcccaagugaagcaaaucuacaagaccccuccuaucaaggacuucggcggcuucaauuucagccagauucugcccgauccuagcaagcccagcaagcggagcuucaucgaggaccugcuguucaacaaagugacacuggccgacgccggcuucaucaagcaguauggcgauugucugggcgacauugccgccagggaucugauuugcgcccagaaguuuaacggacugacagugcugccuccucugcugaccgaugagaugaucgcccaguacacaucugcccugcuggccggcacaaucacaagcggcuggacauuuggagcuggcgccgcucugcagauccccuuugcuaugcagauggccuaccgguucaacggcaucggagugacccagaaugugcuguacgagaaccagaagcugaucgccaaccaguucaacagcgccaucggcaagauccaggacagccugagcagcacagcaagcgcccugggaaagcugcaggacguggucaaccagaaugcccaggcacugaacacccuggucaagcagcuguccuccaacuucggcugcaucagcucugugcugaacgauauccugagcagacuggacaaggucgaggccgaggugcagaucgacugucugaucacaggcagacugcagagccuccagacauacgugacccagcagcugaucagagccgccgagauuagagccucugccaaucuggccgccaccaagaugucugagugugugcugggccagagcaagagaguggacuuuugcggcaagggcuaccaccugaugagcuucccucagucugccccucacggcgugguguuucugcacgugacauaugugcccgcucaagagaagaauuucaccaccgcuccagccaucugccacgacggcaaagcccacuuuccuagagaaggcguguucguguccaacggcacccauugguucgugacacagcggaacuucuacgagccccagaucaucaccaccgacaacaccuucgugucuggcaacugcgacguugugaucggcauugugaacaauaccguguacgacccucugcagcccgagcuggacagcuucaaagaggaacuggacaaguacuuuaagaaccacacaagccccgacguggaccugggcgauaucagcggaaucaaugccagcgucgugaacauccagaaagagaucgaccggcugaacgagguggccaagaaucugaacgagagccugaucgaccugcaagaacuggggaaguacgagcaguacaucaagggaggaucuggcuauauccccgaggcuccuagagauggccaggccuauguucggaaggauggcgaaugggugcugcugagcaccuuccuuugaggacuaguuauaagacugacuagcccgaugggccucccaacgggcccuccuccccuccuugcaccgagauuaauaaaaaaaaaaaaaaaaaaaaaaaaaaaaaaaaaaaaaaaaaaaaaaaaaaaaaaaaaaaaaaaaugcaucccccccccccccccccccccccccccccccaaaggcucuuuucagagccaccagaauu

SEQ ID NO: 13071 - RNA, 3943 nt, Artificial Sequence
  SARS-CoV-2/Wuhan/WIV05/2019__EPI_ISL_402128 spike protein mRNA gc mod (1-1211)(A890C_V1040C) Foldon construct
aggagaaagcuuaccauguucguguuucuggugcugcugccccugguguccagccagugugugaaccugaccaccagaacacagcugccuccagccuacaccaacagcuucaccagaggcguguacuaccccgacaagguguucagauccagcgugcugcacucuacccaggaccuguuccugccuuucuucagcaacgugaccugguuccacgccauccacguguccggcaccaauggcaccaagagauucgacaaccccgugcugcccuucaacgacgggguguacuuugccagcaccgagaaguccaacaucaucagaggcuggaucuucggcaccacacuggacagcaagacccagagccugcugaucgugaacaacgccaccaacguggucaucaaagugugcgaguuccaguucugcaacgaccccuuccugggcgucuacuaccacaagaacaacaagagcuggauggaaagcgaguuccggguguacagcagcgccaacaacugcaccuucgaguacgugucccagccuuuccugauggaccuggaaggcaagcagggcaacuucaagaaccugcgcgaguucguguucaagaacaucgacggcuacuucaaaaucuacagcaagcacaccccuaucaaccucgugcgggaucugccucagggcuucucugcucuggaaccccugguggaucugcccaucggcaucaacaucacccgguuucagacacugcuggcccugcacagaagcuaccugacaccuggcgauagcagcagcggauggacagcuggugccgccgcuuacuaugugggcuaccugcagccuagaaccuuccugcugaaguacaacgagaacggcaccaucaccgacgccguggauugugcucuggauccucugagcgagacaaagugcacccugaaguccuucaccguggaaaagggcaucuaccagaccagcaacuuccgggugcagcccaccgaauccaucgugcgguuccccaauaucaccaaucugugccccuucggcgagguguucaaugccaccagauucgccucuguguacgccuggaaccggaagcggaucagcaauugcguggccgacuacuccgugcuguacaacuccgccagcuucagcaccuucaagugcuacggcguguccccuaccaagcugaacgaccugugcuucacaaacguguacgccgacagcuucgugauccggggagaugaagugcggcagauugccccuggacagacaggcaagaucgccgacuacaacuacaagcugcccgacgacuucaccggcugugugauugccuggaacagcaacaaccuggacuccaaagucggcggcaacuacaauuaccuguaccggcuguuccggaaguccaaucugaagcccuucgagcgggacaucagcaccgaaaucuaucaggccggcagcaccccuugcaacggcguggaaggcuucaacugcuacuucccacugcaguccuacggcuuucagcccacaaauggcgugggcuaucagcccuacagagugguggugcugagcuucgaacugcugcaugcuccugccacagugugcggcccuaagaaaagcaccaaucucgugaagaacaaaugcgugaacuucaacuucaacggccugaccggcaccggcgugcugacagagagcaacaagaaguuccugccauuccagcaguuuggccgggauaucgccgauaccacagacgccguuagagauccccagacacuggaaauccuggacaucaccccaugcagcuucggcggagugucugugaucaccccuggcaccaacaccagcaaucagguggcagugcuguaccaggacgugaacuguaccgaagugcccguggccauucacgccgaucagcugacaccuacauggcggguguacuccaccggcagcaauguguuucagaccagagccggcugucugaucggagccgagcacgugaacaauagcuacgagugcgacauccccaucggcgcuggcaucugugccagcuaccagacacagacaaacagccccagacgggcuagaagcguggccagccagagcaucauugccuacacaaugucucugggcgccgagaacagcguggccuacuccaacaacucuaucgcuauccccaccaacuucaccaucagcgugaccaccgagauccugccuguguccaugaccaagaccagcguggacugcaccauguacaucugcggcgauuccaccgagugcuccaaccugcugcugcaguacggcagcuucugcacccagcugaauagagcccugacagggaucgccguggaacaggacaagaacacccaagagguguucgcccaagugaagcaaaucuacaagaccccuccuaucaaggacuucggcggcuucaauuucagccagauucugcccgauccuagcaagcccagcaagcggagcuucaucgaggaccugcuguucaacaaagugacacuggccgacgccggcuucaucaagcaguauggcgauugucugggcgacauugccgccagggaucugauuugcgcccagaaguuuaacggacugacagugcugccuccucugcugaccgaugagaugaucgcccaguacacaucugcccugcuggccggcacaaucacaagcggcuggacauuuggaugcggcgccgcucugcagauccccuuugcuaugcagauggccuaccgguucaacggcaucggagugacccagaaugugcuguacgagaaccagaagcugaucgccaaccaguucaacagcgccaucggcaagauccaggacagccugagcagcacagcaagcgcccugggaaagcugcaggacguggucaaccagaaugcccaggcacugaacacccuggucaagcagcuguccuccaacuucggcgccaucagcucugugcugaacgauauccugagcagacuggacaaggucgaggccgaggugcagaucgacagacugaucacaggcagacugcagagccuccagacauacgugacccagcagcugaucagagccgccgagauuagagccucugccaaucuggccgccaccaagaugucugagugugugcugggccagagcaagagaugugacuuuugcggcaagggcuaccaccugaugagcuucccucagucugccccucacggcgugguguuucugcacgugacauaugugcccgcucaagagaagaauuucaccaccgcuccagccaucugccacgacggcaaagcccacuuuccuagagaaggcguguucguguccaacggcacccauugguucgugacacagcggaacuucuacgagccccagaucaucaccaccgacaacaccuucgugucuggcaacugcgacguugugaucggcauugugaacaauaccguguacgacccucugcagcccgagcuggacagcuucaaagaggaacuggacaaguacuuuaagaaccacacaagccccgacguggaccugggcgauaucagcggaaucaaugccagcgucgugaacauccagaaagagaucgaccggcugaacgagguggccaagaaucugaacgagagccugaucgaccugcaagaacuggggaaguacgagcaguacaucaagggaggaucuggcuauauccccgaggcuccuagagauggccaggccuauguucggaaggauggcgaaugggugcugcugagcaccuuccuuugaggacuaguuauaagacugacuagcccgaugggccucccaacgggcccuccuccccuccuugcaccgagauuaauaaaaaaaaaaaaaaaaaaaaaaaaaaaaaaaaaaaaaaaaaaaaaaaaaaaaaaaaaaaaaaaaugcaucccccccccccccccccccccccccccccccaaaggcucuuuucagagccaccagaauu

SEQ ID NO: 13072 - RNA, 3943 nt, Artificial Sequence
  SARS-CoV-2/Wuhan/WIV05/2019__EPI_ISL_402128 spike protein mRNA gc mod (1-1211)(T874C_S1055C) Foldon construct
aggagaaagcuuaccauguucguguuucuggugcugcugccccugguguccagccagugugugaaccugaccaccagaacacagcugccuccagccuacaccaacagcuucaccagaggcguguacuaccccgacaagguguucagauccagcgugcugcacucuacccaggaccuguuccugccuuucuucagcaacgugaccugguuccacgccauccacguguccggcaccaauggcaccaagagauucgacaaccccgugcugcccuucaacgacgggguguacuuugccagcaccgagaaguccaacaucaucagaggcuggaucuucggcaccacacuggacagcaagacccagagccugcugaucgugaacaacgccaccaacguggucaucaaagugugcgaguuccaguucugcaacgaccccuuccugggcgucuacuaccacaagaacaacaagagcuggauggaaagcgaguuccggguguacagcagcgccaacaacugcaccuucgaguacgugucccagccuuuccugauggaccuggaaggcaagcagggcaacuucaagaaccugcgcgaguucguguucaagaacaucgacggcuacuucaaaaucuacagcaagcacaccccuaucaaccucgugcgggaucugccucagggcuucucugcucuggaaccccugguggaucugcccaucggcaucaacaucacccgguuucagacacugcuggcccugcacagaagcuaccugacaccuggcgauagcagcagcggauggacagcuggugccgccgcuuacuaugugggcuaccugcagccuagaaccuuccugcugaaguacaacgagaacggcaccaucaccgacgccguggauugugcucuggauccucugagcgagacaaagugcacccugaaguccuucaccguggaaaagggcaucuaccagaccagcaacuuccgggugcagcccaccgaauccaucgugcgguuccccaauaucaccaaucugugccccuucggcgagguguucaaugccaccagauucgccucuguguacgccuggaaccggaagcggaucagcaauugcguggccgacuacuccgugcuguacaacuccgccagcuucagcaccuucaagugcuacggcguguccccuaccaagcugaacgaccugugcuucacaaacguguacgccgacagcuucgugauccggggagaugaagugcggcagauugccccuggacagacaggcaagaucgccgacuacaacuacaagcugcccgacgacuucaccggcugugugauugccuggaacagcaacaaccuggacuccaaagucggcggcaacuacaauuaccuguaccggcuguuccggaaguccaaucugaagcccuucgagcgggacaucagcaccgaaaucuaucaggccggcagcaccccuugcaacggcguggaaggcuucaacugcuacuucccacugcaguccuacggcuuucagcccacaaauggcgugggcuaucagcccuacagagugguggugcugagcuucgaacugcugcaugcuccugccacagugugcggcccuaagaaaagcaccaaucucgugaagaacaaaugcgugaacuucaacuucaacggccugaccggcaccggcgugcugacagagagcaacaagaaguuccugccauuccagcaguuuggccgggauaucgccgauaccacagacgccguuagagauccccagacacuggaaauccuggacaucaccccaugcagcuucggcggagugucugugaucaccccuggcaccaacaccagcaaucagguggcagugcuguaccaggacgugaacuguaccgaagugcccguggccauucacgccgaucagcugacaccuacauggcggguguacuccaccggcagcaauguguuucagaccagagccggcugucugaucggagccgagcacgugaacaauagcuacgagugcgacauccccaucggcgcuggcaucugugccagcuaccagacacagacaaacagccccagacgggcuagaagcguggccagccagagcaucauugccuacacaaugucucugggcgccgagaacagcguggccuacuccaacaacucuaucgcuauccccaccaacuucaccaucagcgugaccaccgagauccugccuguguccaugaccaagaccagcguggacugcaccauguacaucugcggcgauuccaccgagugcuccaaccugcugcugcaguacggcagcuucugcacccagcugaauagagcccugacagggaucgccguggaacaggacaagaacacccaagagguguucgcccaagugaagcaaaucuacaagaccccuccuaucaaggacuucggcggcuucaauuucagccagauucugcccgauccuagcaagcccagcaagcggagcuucaucgaggaccugcuguucaacaaagugacacuggccgacgccggcuucaucaagcaguauggcgauugucugggcgacauugccgccagggaucugauuugcgcccagaaguuuaacggacugacagugcugccuccucugcugaccgaugagaugaucgcccaguacugcucugcccugcuggccggcacaaucacaagcggcuggacauuuggagcuggcgccgcucugcagauccccuuugcuaugcagauggccuaccgguucaacggcaucggagugacccagaaugugcuguacgagaaccagaagcugaucgccaaccaguucaacagcgccaucggcaagauccaggacagccugagcagcacagcaagcgcccugggaaagcugcaggacguggucaaccagaaugcccaggcacugaacacccuggucaagcagcuguccuccaacuucggcgccaucagcucugugcugaacgauauccugagcagacuggacaaggucgaggccgaggugcagaucgacagacugaucacaggcagacugcagagccuccagacauacgugacccagcagcugaucagagccgccgagauuagagccucugccaaucuggccgccaccaagaugucugagugugugcugggccagagcaagagaguggacuuuugcggcaagggcuaccaccugaugagcuucccucagugcgccccucacggcgugguguuucugcacgugacauaugugcccgcucaagagaagaauuucaccaccgcuccagccaucugccacgacggcaaagcccacuuuccuagagaaggcguguucguguccaacggcacccauugguucgugacacagcggaacuucuacgagccccagaucaucaccaccgacaacaccuucgugucuggcaacugcgacguugugaucggcauugugaacaauaccguguacgacccucugcagcccgagcuggacagcuucaaagaggaacuggacaaguacuuuaagaaccacacaagccccgacguggaccugggcgauaucagcggaaucaaugccagcgucgugaacauccagaaagagaucgaccggcugaacgagguggccaagaaucugaacgagagccugaucgaccugcaagaacuggggaaguacgagcaguacaucaagggaggaucuggcuauauccccgaggcuccuagagauggccaggccuauguucggaaggauggcgaaugggugcugcugagcaccuuccuuugaggacuaguuauaagacugacuagcccgaugggccucccaacgggcccuccuccccuccuugcaccgagauuaauaaaaaaaaaaaaaaaaaaaaaaaaaaaaaaaaaaaaaaaaaaaaaaaaaaaaaaaaaaaaaaaaugcaucccccccccccccccccccccccccccccccaaaggcucuuuucagagccaccagaauu

SEQ ID NO: 13073 - RNA, 4315 nt, Artificial Sequence
  SARS-CoV-2/Wuhan/WIV05/2019__EPI_ISL_402128 spike protein mRNA gc mod (1-1211) WhcAg construct
aggagaaagcuuaccauguucguguuucuggugcugcugccccugguguccagccagugugugaaccugaccaccagaacacagcugccuccagccuacaccaacagcuucaccagaggcguguacuaccccgacaagguguucagauccagcgugcugcacucuacccaggaccuguuccugccuuucuucagcaacgugaccugguuccacgccauccacguguccggcaccaauggcaccaagagauucgacaaccccgugcugcccuucaacgacgggguguacuuugccagcaccgagaaguccaacaucaucagaggcuggaucuucggcaccacacuggacagcaagacccagagccugcugaucgugaacaacgccaccaacguggucaucaaagugugcgaguuccaguucugcaacgaccccuuccugggcgucuacuaccacaagaacaacaagagcuggauggaaagcgaguuccggguguacagcagcgccaacaacugcaccuucgaguacgugucccagccuuuccugauggaccuggaaggcaagcagggcaacuucaagaaccugcgcgaguucguguucaagaacaucgacggcuacuucaaaaucuacagcaagcacaccccuaucaaccucgugcgggaucugccucagggcuucucugcucuggaaccccugguggaucugcccaucggcaucaacaucacccgguuucagacacugcuggcccugcacagaagcuaccugacaccuggcgauagcagcagcggauggacagcuggugccgccgcuuacuaugugggcuaccugcagccuagaaccuuccugcugaaguacaacgagaacggcaccaucaccgacgccguggauugugcucuggauccucugagcgagacaaagugcacccugaaguccuucaccguggaaaagggcaucuaccagaccagcaacuuccgggugcagcccaccgaauccaucgugcgguuccccaauaucaccaaucugugccccuucggcgagguguucaaugccaccagauucgccucuguguacgccuggaaccggaagcggaucagcaauugcguggccgacuacuccgugcuguacaacuccgccagcuucagcaccuucaagugcuacggcguguccccuaccaagcugaacgaccugugcuucacaaacguguacgccgacagcuucgugauccggggagaugaagugcggcagauugccccuggacagacaggcaagaucgccgacuacaacuacaagcugcccgacgacuucaccggcugugugauugccuggaacagcaacaaccuggacuccaaagucggcggcaacuacaauuaccuguaccggcuguuccggaaguccaaucugaagcccuucgagcgggacaucagcaccgaaaucuaucaggccggcagcaccccuugcaacggcguggaaggcuucaacugcuacuucccacugcaguccuacggcuuucagcccacaaauggcgugggcuaucagcccuacagagugguggugcugagcuucgaacugcugcaugcuccugccacagugugcggcccuaagaaaagcaccaaucucgugaagaacaaaugcgugaacuucaacuucaacggccugaccggcaccggcgugcugacagagagcaacaagaaguuccugccauuccagcaguuuggccgggauaucgccgauaccacagacgccguuagagauccccagacacuggaaauccuggacaucaccccaugcagcuucggcggagugucugugaucaccccuggcaccaacaccagcaaucagguggcagugcuguaccaggacgugaacuguaccgaagugcccguggccauucacgccgaucagcugacaccuacauggcggguguacuccaccggcagcaauguguuucagaccagagccggcugucugaucggagccgagcacgugaacaauagcuacgagugcgacauccccaucggcgcuggcaucugugccagcuaccagacacagacaaacagccccagacgggcuagaagcguggccagccagagcaucauugccuacacaaugucucugggcgccgagaacagcguggccuacuccaacaacucuaucgcuauccccaccaacuucaccaucagcgugaccaccgagauccugccuguguccaugaccaagaccagcguggacugcaccauguacaucugcggcgauuccaccgagugcuccaaccugcugcugcaguacggcagcuucugcacccagcugaauagagcccugacagggaucgccguggaacaggacaagaacacccaagagguguucgcccaagugaagcaaaucuacaagaccccuccuaucaaggacuucggcggcuucaauuucagccagauucugcccgauccuagcaagcccagcaagcggagcuucaucgaggaccugcuguucaacaaagugacacuggccgacgccggcuucaucaagcaguauggcgauugucugggcgacauugccgccagggaucugauuugcgcccagaaguuuaacggacugacagugcugccuccucugcugaccgaugagaugaucgcccaguacacaucugcccugcuggccggcacaaucacaagcggcuggacauuuggagcuggcgccgcucugcagauccccuuugcuaugcagauggccuaccgguucaacggcaucggagugacccagaaugugcuguacgagaaccagaagcugaucgccaaccaguucaacagcgccaucggcaagauccaggacagccugagcagcacagcaagcgcccugggaaagcugcaggacguggucaaccagaaugcccaggcacugaacacccuggucaagcagcuguccuccaacuucggcgccaucagcucugugcugaacgauauccugagcagacuggacaaggucgaggccgaggugcagaucgacagacugaucacaggcagacugcagagccuccagacauacgugacccagcagcugaucagagccgccgagauuagagccucugccaaucuggccgccaccaagaugucugagugugugcugggccagagcaagagaguggacuuuugcggcaagggcuaccaccugaugagcuucccucagucugccccucacggcgugguguuucugcacgugacauaugugcccgcucaagagaagaauuucaccaccgcuccagccaucugccacgacggcaaagcccacuuuccuagagaaggcguguucguguccaacggcacccauugguucgugacacagcggaacuucuacgagccccagaucaucaccaccgacaacaccuucgugucuggcaacugcgacguugugaucggcauugugaacaauaccguguacgacccucugcagcccgagcuggacagcuucaaagaggaacuggacaaguacuuuaagaaccacacaagccccgacguggaccugggcgauaucagcggaaucaaugccagcgucgugaacauccagaaagagaucgaccggcugaacgagguggccaagaaucugaacgagagccugaucgaccugcaagaacuggggaaguacgagcaguacaucaagggaggcggaggaucugacaucgaccccuacaaagaguucggcagcagcuaccagcugcugaacuuccugccucuggacuucuuccccgaccugaacgcccugguggauacagccacagcucuguacgaggaagaacugaccggcagagagcacugcagcccucaccacacagccauuagacaggcccucgugugcugggacgagcugacaaaacugaucgccuggaugagcagcaacaucaccagcgagcaagugcggaccaucaucgugaaccacgugaacgauaccuggggccugaaagugcggcagagccugugguuucaccugagcugucugaccuucggccagcacaccgugcaagaguuucugguguccuucggcguguggaucagaaccccugcuccauacagaccuccaaacgcucccauccugagcacccugccugagcacacagugaucuguugaggacuaguuauaagacugacuagcccgaugggccucccaacgggcccuccuccccuccuugcaccgagauuaauaaaaaaaaaaaaaaaaaaaaaaaaaaaaaaaaaaaaaaaaaaaaaaaaaaaaaaaaaaaaaaaaugcaucccccccccccccccccccccccccccccccaaaggcucuuuucagagccaccagaauu

SEQ ID NO: 13074 - RNA, 4315 nt, Artificial Sequence
  SARS-CoV-2/Wuhan/WIV05/2019__EPI_ISL_402128 spike protein mRNA gc mod (1-1211)(K986P_V987P) WhcAg construct
aggagaaagcuuaccauguucguguuucuggugcugcugccccugguguccagccagugugugaaccugaccaccagaacacagcugccuccagccuacaccaacagcuucaccagaggcguguacuaccccgacaagguguucagauccagcgugcugcacucuacccaggaccuguuccugccuuucuucagcaacgugaccugguuccacgccauccacguguccggcaccaauggcaccaagagauucgacaaccccgugcugcccuucaacgacgggguguacuuugccagcaccgagaaguccaacaucaucagaggcuggaucuucggcaccacacuggacagcaagacccagagccugcugaucgugaacaacgccaccaacguggucaucaaagugugcgaguuccaguucugcaacgaccccuuccugggcgucuacuaccacaagaacaacaagagcuggauggaaagcgaguuccggguguacagcagcgccaacaacugcaccuucgaguacgugucccagccuuuccugauggaccuggaaggcaagcagggcaacuucaagaaccugcgcgaguucguguucaagaacaucgacggcuacuucaaaaucuacagcaagcacaccccuaucaaccucgugcgggaucugccucagggcuucucugcucuggaaccccugguggaucugcccaucggcaucaacaucacccgguuucagacacugcuggcccugcacagaagcuaccugacaccuggcgauagcagcagcggauggacagcuggugccgccgcuuacuaugugggcuaccugcagccuagaaccuuccugcugaaguacaacgagaacggcaccaucaccgacgccguggauugugcucuggauccucugagcgagacaaagugcacccugaaguccuucaccguggaaaagggcaucuaccagaccagcaacuuccgggugcagcccaccgaauccaucgugcgguuccccaauaucaccaaucugugccccuucggcgagguguucaaugccaccagauucgccucuguguacgccuggaaccggaagcggaucagcaauugcguggccgacuacuccgugcuguacaacuccgccagcuucagcaccuucaagugcuacggcguguccccuaccaagcugaacgaccugugcuucacaaacguguacgccgacagcuucgugauccggggagaugaagugcggcagauugccccuggacagacaggcaagaucgccgacuacaacuacaagcugcccgacgacuucaccggcugugugauugccuggaacagcaacaaccuggacuccaaagucggcggcaacuacaauuaccuguaccggcuguuccggaaguccaaucugaagcccuucgagcgggacaucagcaccgaaaucuaucaggccggcagcaccccuugcaacggcguggaaggcuucaacugcuacuucccacugcaguccuacggcuuucagcccacaaauggcgugggcuaucagcccuacagagugguggugcugagcuucgaacugcugcaugcuccugccacagugugcggcccuaagaaaagcaccaaucucgugaagaacaaaugcgugaacuucaacuucaacggccugaccggcaccggcgugcugacagagagcaacaagaaguuccugccauuccagcaguuuggccgggauaucgccgauaccacagacgccguuagagauccccagacacuggaaauccuggacaucaccccaugcagcuucggcggagugucugugaucaccccuggcaccaacaccagcaaucagguggcagugcuguaccaggacgugaacuguaccgaagugcccguggccauucacgccgaucagcugacaccuacauggcggguguacuccaccggcagcaauguguuucagaccagagccggcugucugaucggagccgagcacgugaacaauagcuacgagugcgacauccccaucggcgcuggcaucugugccagcuaccagacacagacaaacagccccagacgggcuagaagcguggccagccagagcaucauugccuacacaaugucucugggcgccgagaacagcguggccuacuccaacaacucuaucgcuauccccaccaacuucaccaucagcgugaccaccgagauccugccuguguccaugaccaagaccagcguggacugcaccauguacaucugcggcgauuccaccgagugcuccaaccugcugcugcaguacggcagcuucugcacccagcugaauagagcccugacagggaucgccguggaacaggacaagaacacccaagagguguucgcccaagugaagcaaaucuacaagaccccuccuaucaaggacuucggcggcuucaauuucagccagauucugcccgauccuagcaagcccagcaagcggagcuucaucgaggaccugcuguucaacaaagugacacuggccgacgccggcuucaucaagcaguauggcgauugucugggcgacauugccgccagggaucugauuugcgcccagaaguuuaacggacugacagugcugccuccucugcugaccgaugagaugaucgcccaguacacaucugcccugcuggccggcacaaucacaagcggcuggacauuuggagcuggcgccgcucugcagauccccuuugcuaugcagauggccuaccgguucaacggcaucggagugacccagaaugugcuguacgagaaccagaagcugaucgccaaccaguucaacagcgccaucggcaagauccaggacagccugagcagcacagcaagcgcccugggaaagcugcaggacguggucaaccagaaugcccaggcacugaacacccuggucaagcagcuguccuccaacuucggcgccaucagcucugugcugaacgauauccugagcagacuggacccuccugaggccgaggugcagaucgacagacugaucacaggcagacugcagagccuccagacauacgugacccagcagcugaucagagccgccgagauuagagccucugccaaucuggccgccaccaagaugucugagugugugcugggccagagcaagagaguggacuuuugcggcaagggcuaccaccugaugagcuucccucagucugccccucacggcgugguguuucugcacgugacauaugugcccgcucaagagaagaauuucaccaccgcuccagccaucugccacgacggcaaagcccacuuuccuagagaaggcguguucguguccaacggcacccauugguucgugacacagcggaacuucuacgagccccagaucaucaccaccgacaacaccuucgugucuggcaacugcgacguugugaucggcauugugaacaauaccguguacgacccucugcagcccgagcuggacagcuucaaagaggaacuggacaaguacuuuaagaaccacacaagccccgacguggaccugggcgauaucagcggaaucaaugccagcgucgugaacauccagaaagagaucgaccggcugaacgagguggccaagaaucugaacgagagccugaucgaccugcaagaacuggggaaguacgagcaguacaucaagggaggcggaggaucugacaucgaccccuacaaagaguucggcagcagcuaccagcugcugaacuuccugccucuggacuucuuccccgaccugaacgcccugguggauacagccacagcucuguacgaggaagaacugaccggcagagagcacugcagcccucaccacacagccauuagacaggcccucgugugcugggacgagcugacaaaacugaucgccuggaugagcagcaacaucaccagcgagcaagugcggaccaucaucgugaaccacgugaacgauaccuggggccugaaagugcggcagagccugugguuucaccugagcugucugaccuucggccagcacaccgugcaagaguuucugguguccuucggcguguggaucagaaccccugcuccauacagaccuccaaacgcucccauccugagcacccugccugagcacacagugaucuguugaggacuaguuauaagacugacuagcccgaugggccucccaacgggcccuccuccccuccuugcaccgagauuaauaaaaaaaaaaaaaaaaaaaaaaaaaaaaaaaaaaaaaaaaaaaaaaaaaaaaaaaaaaaaaaaaugcaucccccccccccccccccccccccccccccccaaaggcucuuuucagagccaccagaauu

SEQ ID NO: 13075 - RNA, 4315 nt, Artificial Sequence
  SARS-CoV-2/Wuhan/WIV05/2019__EPI_ISL_402128 spike protein mRNA gc mod (1-1211)(K986P_V987P_T887WN_A1020W) WhcAg construct
aggagaaagcuuaccauguucguguuucuggugcugcugccccugguguccagccagugugugaaccugaccaccagaacacagcugccuccagccuacaccaacagcuucaccagaggcguguacuaccccgacaagguguucagauccagcgugcugcacucuacccaggaccuguuccugccuuucuucagcaacgugaccugguuccacgccauccacguguccggcaccaauggcaccaagagauucgacaaccccgugcugcccuucaacgacgggguguacuuugccagcaccgagaaguccaacaucaucagaggcuggaucuucggcaccacacuggacagcaagacccagagccugcugaucgugaacaacgccaccaacguggucaucaaagugugcgaguuccaguucugcaacgaccccuuccugggcgucuacuaccacaagaacaacaagagcuggauggaaagcgaguuccggguguacagcagcgccaacaacugcaccuucgaguacgugucccagccuuuccugauggaccuggaaggcaagcagggcaacuucaagaaccugcgcgaguucguguucaagaacaucgacggcuacuucaaaaucuacagcaagcacaccccuaucaaccucgugcgggaucugccucagggcuucucugcucuggaaccccugguggaucugcccaucggcaucaacaucacccgguuucagacacugcuggcccugcacagaagcuaccugacaccuggcgauagcagcagcggauggacagcuggugccgccgcuuacuaugugggcuaccugcagccuagaaccuuccugcugaaguacaacgagaacggcaccaucaccgacgccguggauugugcucuggauccucugagcgagacaaagugcacccugaaguccuucaccguggaaaagggcaucuaccagaccagcaacuuccgggugcagcccaccgaauccaucgugcgguuccccaauaucaccaaucugugccccuucggcgagguguucaaugccaccagauucgccucuguguacgccuggaaccggaagcggaucagcaauugcguggccgacuacuccgugcuguacaacuccgccagcuucagcaccuucaagugcuacggcguguccccuaccaagcugaacgaccugugcuucacaaacguguacgccgacagcuucgugauccggggagaugaagugcggcagauugccccuggacagacaggcaagaucgccgacuacaacuacaagcugcccgacgacuucaccggcugugugauugccuggaacagcaacaaccuggacuccaaagucggcggcaacuacaauuaccuguaccggcuguuccggaaguccaaucugaagcccuucgagcgggacaucagcaccgaaaucuaucaggccggcagcaccccuugcaacggcguggaaggcuucaacugcuacuucccacugcaguccuacggcuuucagcccacaaauggcgugggcuaucagcccuacagagugguggugcugagcuucgaacugcugcaugcuccugccacagugugcggcccuaagaaaagcaccaaucucgugaagaacaaaugcgugaacuucaacuucaacggccugaccggcaccggcgugcugacagagagcaacaagaaguuccugccauuccagcaguuuggccgggauaucgccgauaccacagacgccguuagagauccccagacacuggaaauccuggacaucaccccaugcagcuucggcggagugucugugaucaccccuggcaccaacaccagcaaucagguggcagugcuguaccaggacgugaacuguaccgaagugcccguggccauucacgccgaucagcugacaccuacauggcggguguacuccaccggcagcaauguguuucagaccagagccggcugucugaucggagccgagcacgugaacaauagcuacgagugcgacauccccaucggcgcuggcaucugugccagcuaccagacacagacaaacagccccagacgggcuagaagcguggccagccagagcaucauugccuacacaaugucucugggcgccgagaacagcguggccuacuccaacaacucuaucgcuauccccaccaacuucaccaucagcgugaccaccgagauccugccuguguccaugaccaagaccagcguggacugcaccauguacaucugcggcgauuccaccgagugcuccaaccugcugcugcaguacggcagcuucugcacccagcugaauagagcccugacagggaucgccguggaacaggacaagaacacccaagagguguucgcccaagugaagcaaaucuacaagaccccuccuaucaaggacuucggcggcuucaauuucagccagauucugcccgauccuagcaagcccagcaagcggagcuucaucgaggaccugcuguucaacaaagugacacuggccgacgccggcuucaucaagcaguauggcgauugucugggcgacauugccgccagggaucugauuugcgcccagaaguuuaacggacugacagugcugccuccucugcugaccgaugagaugaucgcccaguacacaucugcccugcuggccggcacaaucacaagcggcuggugguuuggagcuggcgccgcucugcagauccccuuugcuaugcagauggccuaccgguucaacggcaucggagugacccagaaugugcuguacgagaaccagaagcugaucgccaaccaguucaacagcgccaucggcaagauccaggacagccugagcagcacagcaagcgcccugggaaagcugcaggacguggucaaccagaaugcccaggcacugaacacccuggucaagcagcuguccuccaacuucggcgccaucagcucugugcugaacgauauccugagcagacuggacccuccugaggccgaggugcagaucgacagacugaucacaggcagacugcagagccuccagacauacgugacccagcagcugaucagagccgccgagauuagauggucugccaaucuggccgccaccaagaugucugagugugugcugggccagagcaagagaguggacuuuugcggcaagggcuaccaccugaugagcuucccucagucugccccucacggcgugguguuucugcacgugacauaugugcccgcucaagagaagaauuucaccaccgcuccagccaucugccacgacggcaaagcccacuuuccuagagaaggcguguucguguccaacggcacccauugguucgugacacagcggaacuucuacgagccccagaucaucaccaccgacaacaccuucgugucuggcaacugcgacguugugaucggcauugugaacaauaccguguacgacccucugcagcccgagcuggacagcuucaaagaggaacuggacaaguacuuuaagaaccacacaagccccgacguggaccugggcgauaucagcggaaucaaugccagcgucgugaacauccagaaagagaucgaccggcugaacgagguggccaagaaucugaacgagagccugaucgaccugcaagaacuggggaaguacgagcaguacaucaagggaggcggaggaucugacaucgaccccuacaaagaguucggcagcagcuaccagcugcugaacuuccugccucuggacuucuuccccgaccugaacgcccugguggauacagccacagcucuguacgaggaagaacugaccggcagagagcacugcagcccucaccacacagccauuagacaggcccucgugugcugggacgagcugacaaaacugaucgccuggaugagcagcaacaucaccagcgagcaagugcggaccaucaucgugaaccacgugaacgauaccuggggccugaaagugcggcagagccugugguuucaccugagcugucugaccuucggccagcacaccgugcaagaguuucugguguccuucggcguguggaucagaaccccugcuccauacagaccuccaaacgcucccauccugagcacccugccugagcacacagugaucuguugaggacuaguuauaagacugacuagcccgaugggccucccaacgggcccuccuccccuccuugcaccgagauuaauaaaaaaaaaaaaaaaaaaaaaaaaaaaaaaaaaaaaaaaaaaaaaaaaaaaaaaaaaaaaaaaaugcaucccccccccccccccccccccccccccccccaaaggcucuuuucagagccaccagaauu

SEQ ID NO: 13076 - RNA, 4315 nt, Artificial Sequence
  SARS-CoV-2/Wuhan/WIV05/2019__EPI_ISL_402128 spike protein mRNA gc mod (1-1211)(K986P_V987P_P1069F) WhcAg construct
aggagaaagcuuaccauguucguguuucuggugcugcugccccugguguccagccagugugugaaccugaccaccagaacacagcugccuccagccuacaccaacagcuucaccagaggcguguacuaccccgacaagguguucagauccagcgugcugcacucuacccaggaccuguuccugccuuucuucagcaacgugaccugguuccacgccauccacguguccggcaccaauggcaccaagagauucgacaaccccgugcugcccuucaacgacgggguguacuuugccagcaccgagaaguccaacaucaucagaggcuggaucuucggcaccacacuggacagcaagacccagagccugcugaucgugaacaacgccaccaacguggucaucaaagugugcgaguuccaguucugcaacgaccccuuccugggcgucuacuaccacaagaacaacaagagcuggauggaaagcgaguuccggguguacagcagcgccaacaacugcaccuucgaguacgugucccagccuuuccugauggaccuggaaggcaagcagggcaacuucaagaaccugcgcgaguucguguucaagaacaucgacggcuacuucaaaaucuacagcaagcacaccccuaucaaccucgugcgggaucugccucagggcuucucugcucuggaaccccugguggaucugcccaucggcaucaacaucacccgguuucagacacugcuggcccugcacagaagcuaccugacaccuggcgauagcagcagcggauggacagcuggugccgccgcuuacuaugugggcuaccugcagccuagaaccuuccugcugaaguacaacgagaacggcaccaucaccgacgccguggauugugcucuggauccucugagcgagacaaagugcacccugaaguccuucaccguggaaaagggcaucuaccagaccagcaacuuccgggugcagcccaccgaauccaucgugcgguuccccaauaucaccaaucugugccccuucggcgagguguucaaugccaccagauucgccucuguguacgccuggaaccggaagcggaucagcaauugcguggccgacuacuccgugcuguacaacuccgccagcuucagcaccuucaagugcuacggcguguccccuaccaagcugaacgaccugugcuucacaaacguguacgccgacagcuucgugauccggggagaugaagugcggcagauugccccuggacagacaggcaagaucgccgacuacaacuacaagcugcccgacgacuucaccggcugugugauugccuggaacagcaacaaccuggacuccaaagucggcggcaacuacaauuaccuguaccggcuguuccggaaguccaaucugaagcccuucgagcgggacaucagcaccgaaaucuaucaggccggcagcaccccuugcaacggcguggaaggcuucaacugcuacuucccacugcaguccuacggcuuucagcccacaaauggcgugggcuaucagcccuacagagugguggugcugagcuucgaacugcugcaugcuccugccacagugugcggcccuaagaaaagcaccaaucucgugaagaacaaaugcgugaacuucaacuucaacggccugaccggcaccggcgugcugacagagagcaacaagaaguuccugccauuccagcaguuuggccgggauaucgccgauaccacagacgccguuagagauccccagacacuggaaauccuggacaucaccccaugcagcuucggcggagugucugugaucaccccuggcaccaacaccagcaaucagguggcagugcuguaccaggacgugaacuguaccgaagugcccguggccauucacgccgaucagcugacaccuacauggcggguguacuccaccggcagcaauguguuucagaccagagccggcugucugaucggagccgagcacgugaacaauagcuacgagugcgacauccccaucggcgcuggcaucugugccagcuaccagacacagacaaacagccccagacgggcuagaagcguggccagccagagcaucauugccuacacaaugucucugggcgccgagaacagcguggccuacuccaacaacucuaucgcuauccccaccaacuucaccaucagcgugaccaccgagauccugccuguguccaugaccaagaccagcguggacugcaccauguacaucugcggcgauuccaccgagugcuccaaccugcugcugcaguacggcagcuucugcacccagcugaauagagcccugacagggaucgccguggaacaggacaagaacacccaagagguguucgcccaagugaagcaaaucuacaagaccccuccuaucaaggacuucggcggcuucaauuucagccagauucugcccgauccuagcaagcccagcaagcggagcuucaucgaggaccugcuguucaacaaagugacacuggccgacgccggcuucaucaagcaguauggcgauugucugggcgacauugccgccagggaucugauuugcgcccagaaguuuaacggacugacagugcugccuccucugcugaccgaugagaugaucgcccaguacacaucugcccugcuggccggcacaaucacaagcggcuggacauuuggagcuggcgccgcucugcagauccccuuugcuaugcagauggccuaccgguucaacggcaucggagugacccagaaugugcuguacgagaaccagaagcugaucgccaaccaguucaacagcgccaucggcaagauccaggacagccugagcagcacagcaagcgcccugggaaagcugcaggacguggucaaccagaaugcccaggcacugaacacccuggucaagcagcuguccuccaacuucggcgccaucagcucugugcugaacgauauccugagcagacuggacccuccugaggccgaggugcagaucgacagacugaucacaggcagacugcagagccuccagacauacgugacccagcagcugaucagagccgccgagauuagagccucugccaaucuggccgccaccaagaugucugagugugugcugggccagagcaagagaguggacuuuugcggcaagggcuaccaccugaugagcuucccucagucugccccucacggcgugguguuucugcacgugacauauguguucgcucaagagaagaauuucaccaccgcuccagccaucugccacgacggcaaagcccacuuuccuagagaaggcguguucguguccaacggcacccauugguucgugacacagcggaacuucuacgagccccagaucaucaccaccgacaacaccuucgugucuggcaacugcgacguugugaucggcauugugaacaauaccguguacgacccucugcagcccgagcuggacagcuucaaagaggaacuggacaaguacuuuaagaaccacacaagccccgacguggaccugggcgauaucagcggaaucaaugccagcgucgugaacauccagaaagagaucgaccggcugaacgagguggccaagaaucugaacgagagccugaucgaccugcaagaacuggggaaguacgagcaguacaucaagggaggcggaggaucugacaucgaccccuacaaagaguucggcagcagcuaccagcugcugaacuuccugccucuggacuucuuccccgaccugaacgcccugguggauacagccacagcucuguacgaggaagaacugaccggcagagagcacugcagcccucaccacacagccauuagacaggcccucgugugcugggacgagcugacaaaacugaucgccuggaugagcagcaacaucaccagcgagcaagugcggaccaucaucgugaaccacgugaacgauaccuggggccugaaagugcggcagagccugugguuucaccugagcugucugaccuucggccagcacaccgugcaagaguuucugguguccuucggcguguggaucagaaccccugcuccauacagaccuccaaacgcucccauccugagcacccugccugagcacacagugaucuguugaggacuaguuauaagacugacuagcccgaugggccucccaacgggcccuccuccccuccuugcaccgagauuaauaaaaaaaaaaaaaaaaaaaaaaaaaaaaaaaaaaaaaaaaaaaaaaaaaaaaaaaaaaaaaaaaugcaucccccccccccccccccccccccccccccccaaaggcucuuuucagagccaccagaauu

SEQ ID NO: 13077 - RNA, 4315 nt, Artificial Sequence
  SARS-CoV-2/Wuhan/WIV05/2019__EPI_ISL_402128 spike protein mRNA gc mod (1-1211)(K986P_V987P_ H1048Q_H1064N_ H1083N_H1101N) WhcAg construct
aggagaaagcuuaccauguucguguuucuggugcugcugccccugguguccagccagugugugaaccugaccaccagaacacagcugccuccagccuacaccaacagcuucaccagaggcguguacuaccccgacaagguguucagauccagcgugcugcacucuacccaggaccuguuccugccuuucuucagcaacgugaccugguuccacgccauccacguguccggcaccaauggcaccaagagauucgacaaccccgugcugcccuucaacgacgggguguacuuugccagcaccgagaaguccaacaucaucagaggcuggaucuucggcaccacacuggacagcaagacccagagccugcugaucgugaacaacgccaccaacguggucaucaaagugugcgaguuccaguucugcaacgaccccuuccugggcgucuacuaccacaagaacaacaagagcuggauggaaagcgaguuccggguguacagcagcgccaacaacugcaccuucgaguacgugucccagccuuuccugauggaccuggaaggcaagcagggcaacuucaagaaccugcgcgaguucguguucaagaacaucgacggcuacuucaaaaucuacagcaagcacaccccuaucaaccucgugcgggaucugccucagggcuucucugcucuggaaccccugguggaucugcccaucggcaucaacaucacccgguuucagacacugcuggcccugcacagaagcuaccugacaccuggcgauagcagcagcggauggacagcuggugccgccgcuuacuaugugggcuaccugcagccuagaaccuuccugcugaaguacaacgagaacggcaccaucaccgacgccguggauugugcucuggauccucugagcgagacaaagugcacccugaaguccuucaccguggaaaagggcaucuaccagaccagcaacuuccgggugcagcccaccgaauccaucgugcgguuccccaauaucaccaaucugugccccuucggcgagguguucaaugccaccagauucgccucuguguacgccuggaaccggaagcggaucagcaauugcguggccgacuacuccgugcuguacaacuccgccagcuucagcaccuucaagugcuacggcguguccccuaccaagcugaacgaccugugcuucacaaacguguacgccgacagcuucgugauccggggagaugaagugcggcagauugccccuggacagacaggcaagaucgccgacuacaacuacaagcugcccgacgacuucaccggcugugugauugccuggaacagcaacaaccuggacuccaaagucggcggcaacuacaauuaccuguaccggcuguuccggaaguccaaucugaagcccuucgagcgggacaucagcaccgaaaucuaucaggccggcagcaccccuugcaacggcguggaaggcuucaacugcuacuucccacugcaguccuacggcuuucagcccacaaauggcgugggcuaucagcccuacagagugguggugcugagcuucgaacugcugcaugcuccugccacagugugcggcccuaagaaaagcaccaaucucgugaagaacaaaugcgugaacuucaacuucaacggccugaccggcaccggcgugcugacagagagcaacaagaaguuccugccauuccagcaguuuggccgggauaucgccgauaccacagacgccguuagagauccccagacacuggaaauccuggacaucaccccaugcagcuucggcggagugucugugaucaccccuggcaccaacaccagcaaucagguggcagugcuguaccaggacgugaacuguaccgaagugcccguggccauucacgccgaucagcugacaccuacauggcggguguacuccaccggcagcaauguguuucagaccagagccggcugucugaucggagccgagcacgugaacaauagcuacgagugcgacauccccaucggcgcuggcaucugugccagcuaccagacacagacaaacagccccagacgggcuagaagcguggccagccagagcaucauugccuacacaaugucucugggcgccgagaacagcguggccuacuccaacaacucuaucgcuauccccaccaacuucaccaucagcgugaccaccgagauccugccuguguccaugaccaagaccagcguggacugcaccauguacaucugcggcgauuccaccgagugcuccaaccugcugcugcaguacggcagcuucugcacccagcugaauagagcccugacagggaucgccguggaacaggacaagaacacccaagagguguucgcccaagugaagcaaaucuacaagaccccuccuaucaaggacuucggcggcuucaauuucagccagauucugcccgauccuagcaagcccagcaagcggagcuucaucgaggaccugcuguucaacaaagugacacuggccgacgccggcuucaucaagcaguauggcgauugucugggcgacauugccgccagggaucugauuugcgcccagaaguuuaacggacugacagugcugccuccucugcugaccgaugagaugaucgcccaguacacaucugcccugcuggccggcacaaucacaagcggcuggacauuuggagcuggcgccgcucugcagauccccuuugcuaugcagauggccuaccgguucaacggcaucggagugacccagaaugugcuguacgagaaccagaagcugaucgccaaccaguucaacagcgccaucggcaagauccaggacagccugagcagcacagcaagcgcccugggaaagcugcaggacguggucaaccagaaugcccaggcacugaacacccuggucaagcagcuguccuccaacuucggcgccaucagcucugugcugaacgauauccugagcagacuggacccuccugaggccgaggugcagaucgacagacugaucacaggcagacugcagagccuccagacauacgugacccagcagcugaucagagccgccgagauuagagccucugccaaucuggccgccaccaagaugucugagugugugcugggccagagcaagagaguggacuuuugcggcaagggcuaccagcugaugagcuucccucagucugccccucacggcgugguguuucugaacgugacauaugugcccgcucaagagaagaauuucaccaccgcuccagccaucugcaacgacggcaaagcccacuuuccuagagaaggcguguucguguccaacggcaccaacugguucgugacacagcggaacuucuacgagccccagaucaucaccaccgacaacaccuucgugucuggcaacugcgacguugugaucggcauugugaacaauaccguguacgacccucugcagcccgagcuggacagcuucaaagaggaacuggacaaguacuuuaagaaccacacaagccccgacguggaccugggcgauaucagcggaaucaaugccagcgucgugaacauccagaaagagaucgaccggcugaacgagguggccaagaaucugaacgagagccugaucgaccugcaagaacuggggaaguacgagcaguacaucaagggaggcggaggaucugacaucgaccccuacaaagaguucggcagcagcuaccagcugcugaacuuccugccucuggacuucuuccccgaccugaacgcccugguggauacagccacagcucuguacgaggaagaacugaccggcagagagcacugcagcccucaccacacagccauuagacaggcccucgugugcugggacgagcugacaaaacugaucgccuggaugagcagcaacaucaccagcgagcaagugcggaccaucaucgugaaccacgugaacgauaccuggggccugaaagugcggcagagccugugguuucaccugagcugucugaccuucggccagcacaccgugcaagaguuucugguguccuucggcguguggaucagaaccccugcuccauacagaccuccaaacgcucccauccugagcacccugccugagcacacagugaucuguugaggacuaguuauaagacugacuagcccgaugggccucccaacgggcccuccuccccuccuugcaccgagauuaauaaaaaaaaaaaaaaaaaaaaaaaaaaaaaaaaaaaaaaaaaaaaaaaaaaaaaaaaaaaaaaaaugcaucccccccccccccccccccccccccccccccaaaggcucuuuucagagccaccagaauu

SEQ ID NO: 13078 - RNA, 4315 nt, Artificial Sequence
  SARS-CoV-2/Wuhan/WIV05/2019__EPI_ISL_402128 spike protein mRNA gc mod (1-1211)(I712C_T1077C) WhcAg construct
aggagaaagcuuaccauguucguguuucuggugcugcugccccugguguccagccagugugugaaccugaccaccagaacacagcugccuccagccuacaccaacagcuucaccagaggcguguacuaccccgacaagguguucagauccagcgugcugcacucuacccaggaccuguuccugccuuucuucagcaacgugaccugguuccacgccauccacguguccggcaccaauggcaccaagagauucgacaaccccgugcugcccuucaacgacgggguguacuuugccagcaccgagaaguccaacaucaucagaggcuggaucuucggcaccacacuggacagcaagacccagagccugcugaucgugaacaacgccaccaacguggucaucaaagugugcgaguuccaguucugcaacgaccccuuccugggcgucuacuaccacaagaacaacaagagcuggauggaaagcgaguuccggguguacagcagcgccaacaacugcaccuucgaguacgugucccagccuuuccugauggaccuggaaggcaagcagggcaacuucaagaaccugcgcgaguucguguucaagaacaucgacggcuacuucaaaaucuacagcaagcacaccccuaucaaccucgugcgggaucugccucagggcuucucugcucuggaaccccugguggaucugcccaucggcaucaacaucacccgguuucagacacugcuggcccugcacagaagcuaccugacaccuggcgauagcagcagcggauggacagcuggugccgccgcuuacuaugugggcuaccugcagccuagaaccuuccugcugaaguacaacgagaacggcaccaucaccgacgccguggauugugcucuggauccucugagcgagacaaagugcacccugaaguccuucaccguggaaaagggcaucuaccagaccagcaacuuccgggugcagcccaccgaauccaucgugcgguuccccaauaucaccaaucugugccccuucggcgagguguucaaugccaccagauucgccucuguguacgccuggaaccggaagcggaucagcaauugcguggccgacuacuccgugcuguacaacuccgccagcuucagcaccuucaagugcuacggcguguccccuaccaagcugaacgaccugugcuucacaaacguguacgccgacagcuucgugauccggggagaugaagugcggcagauugccccuggacagacaggcaagaucgccgacuacaacuacaagcugcccgacgacuucaccggcugugugauugccuggaacagcaacaaccuggacuccaaagucggcggcaacuacaauuaccuguaccggcuguuccggaaguccaaucugaagcccuucgagcgggacaucagcaccgaaaucuaucaggccggcagcaccccuugcaacggcguggaaggcuucaacugcuacuucccacugcaguccuacggcuuucagcccacaaauggcgugggcuaucagcccuacagagugguggugcugagcuucgaacugcugcaugcuccugccacagugugcggcccuaagaaaagcaccaaucucgugaagaacaaaugcgugaacuucaacuucaacggccugaccggcaccggcgugcugacagagagcaacaagaaguuccugccauuccagcaguuuggccgggauaucgccgauaccacagacgccguuagagauccccagacacuggaaauccuggacaucaccccaugcagcuucggcggagugucugugaucaccccuggcaccaacaccagcaaucagguggcagugcuguaccaggacgugaacuguaccgaagugcccguggccauucacgccgaucagcugacaccuacauggcggguguacuccaccggcagcaauguguuucagaccagagccggcugucugaucggagccgagcacgugaacaauagcuacgagugcgacauccccaucggcgcuggcaucugugccagcuaccagacacagacaaacagccccagacgggcuagaagcguggccagccagagcaucauugccuacacaaugucucugggcgccgagaacagcguggccuacuccaacaacucuugcgcuauccccaccaacuucaccaucagcgugaccaccgagauccugccuguguccaugaccaagaccagcguggacugcaccauguacaucugcggcgauuccaccgagugcuccaaccugcugcugcaguacggcagcuucugcacccagcugaauagagcccugacagggaucgccguggaacaggacaagaacacccaagagguguucgcccaagugaagcaaaucuacaagaccccuccuaucaaggacuucggcggcuucaauuucagccagauucugcccgauccuagcaagcccagcaagcggagcuucaucgaggaccugcuguucaacaaagugacacuggccgacgccggcuucaucaagcaguauggcgauugucugggcgacauugccgccagggaucugauuugcgcccagaaguuuaacggacugacagugcugccuccucugcugaccgaugagaugaucgcccaguacacaucugcccugcuggccggcacaaucacaagcggcuggacauuuggagcuggcgccgcucugcagauccccuuugcuaugcagauggccuaccgguucaacggcaucggagugacccagaaugugcuguacgagaaccagaagcugaucgccaaccaguucaacagcgccaucggcaagauccaggacagccugagcagcacagcaagcgcccugggaaagcugcaggacguggucaaccagaaugcccaggcacugaacacccuggucaagcagcuguccuccaacuucggcgccaucagcucugugcugaacgauauccugagcagacuggacaaggucgaggccgaggugcagaucgacagacugaucacaggcagacugcagagccuccagacauacgugacccagcagcugaucagagccgccgagauuagagccucugccaaucuggccgccaccaagaugucugagugugugcugggccagagcaagagaguggacuuuugcggcaagggcuaccaccugaugagcuucccucagucugccccucacggcgugguguuucugcacgugacauaugugcccgcucaagagaagaauuucaccugugcuccagccaucugccacgacggcaaagcccacuuuccuagagaaggcguguucguguccaacggcacccauugguucgugacacagcggaacuucuacgagccccagaucaucaccaccgacaacaccuucgugucuggcaacugcgacguugugaucggcauugugaacaauaccguguacgacccucugcagcccgagcuggacagcuucaaagaggaacuggacaaguacuuuaagaaccacacaagccccgacguggaccugggcgauaucagcggaaucaaugccagcgucgugaacauccagaaagagaucgaccggcugaacgagguggccaagaaucugaacgagagccugaucgaccugcaagaacuggggaaguacgagcaguacaucaagggaggcggaggaucugacaucgaccccuacaaagaguucggcagcagcuaccagcugcugaacuuccugccucuggacuucuuccccgaccugaacgcccugguggauacagccacagcucuguacgaggaagaacugaccggcagagagcacugcagcccucaccacacagccauuagacaggcccucgugugcugggacgagcugacaaaacugaucgccuggaugagcagcaacaucaccagcgagcaagugcggaccaucaucgugaaccacgugaacgauaccuggggccugaaagugcggcagagccugugguuucaccugagcugucugaccuucggccagcacaccgugcaagaguuucugguguccuucggcguguggaucagaaccccugcuccauacagaccuccaaacgcucccauccugagcacccugccugagcacacagugaucuguugaggacuaguuauaagacugacuagcccgaugggccucccaacgggcccuccuccccuccuugcaccgagauuaauaaaaaaaaaaaaaaaaaaaaaaaaaaaaaaaaaaaaaaaaaaaaaaaaaaaaaaaaaaaaaaaaugcaucccccccccccccccccccccccccccccccaaaggcucuuuucagagccaccagaauu

SEQ ID NO: 13079 - RNA, 4315 nt, Artificial Sequence
  SARS-CoV-2/Wuhan/WIV05/2019__EPI_ISL_402128 spike protein mRNA gc mod (1-1211)(I714C_Y1110C) WhcAg construct
aggagaaagcuuaccauguucguguuucuggugcugcugccccugguguccagccagugugugaaccugaccaccagaacacagcugccuccagccuacaccaacagcuucaccagaggcguguacuaccccgacaagguguucagauccagcgugcugcacucuacccaggaccuguuccugccuuucuucagcaacgugaccugguuccacgccauccacguguccggcaccaauggcaccaagagauucgacaaccccgugcugcccuucaacgacgggguguacuuugccagcaccgagaaguccaacaucaucagaggcuggaucuucggcaccacacuggacagcaagacccagagccugcugaucgugaacaacgccaccaacguggucaucaaagugugcgaguuccaguucugcaacgaccccuuccugggcgucuacuaccacaagaacaacaagagcuggauggaaagcgaguuccggguguacagcagcgccaacaacugcaccuucgaguacgugucccagccuuuccugauggaccuggaaggcaagcagggcaacuucaagaaccugcgcgaguucguguucaagaacaucgacggcuacuucaaaaucuacagcaagcacaccccuaucaaccucgugcgggaucugccucagggcuucucugcucuggaaccccugguggaucugcccaucggcaucaacaucacccgguuucagacacugcuggcccugcacagaagcuaccugacaccuggcgauagcagcagcggauggacagcuggugccgccgcuuacuaugugggcuaccugcagccuagaaccuuccugcugaaguacaacgagaacggcaccaucaccgacgccguggauugugcucuggauccucugagcgagacaaagugcacccugaaguccuucaccguggaaaagggcaucuaccagaccagcaacuuccgggugcagcccaccgaauccaucgugcgguuccccaauaucaccaaucugugccccuucggcgagguguucaaugccaccagauucgccucuguguacgccuggaaccggaagcggaucagcaauugcguggccgacuacuccgugcuguacaacuccgccagcuucagcaccuucaagugcuacggcguguccccuaccaagcugaacgaccugugcuucacaaacguguacgccgacagcuucgugauccggggagaugaagugcggcagauugccccuggacagacaggcaagaucgccgacuacaacuacaagcugcccgacgacuucaccggcugugugauugccuggaacagcaacaaccuggacuccaaagucggcggcaacuacaauuaccuguaccggcuguuccggaaguccaaucugaagcccuucgagcgggacaucagcaccgaaaucuaucaggccggcagcaccccuugcaacggcguggaaggcuucaacugcuacuucccacugcaguccuacggcuuucagcccacaaauggcgugggcuaucagcccuacagagugguggugcugagcuucgaacugcugcaugcuccugccacagugugcggcccuaagaaaagcaccaaucucgugaagaacaaaugcgugaacuucaacuucaacggccugaccggcaccggcgugcugacagagagcaacaagaaguuccugccauuccagcaguuuggccgggauaucgccgauaccacagacgccguuagagauccccagacacuggaaauccuggacaucaccccaugcagcuucggcggagugucugugaucaccccuggcaccaacaccagcaaucagguggcagugcuguaccaggacgugaacuguaccgaagugcccguggccauucacgccgaucagcugacaccuacauggcggguguacuccaccggcagcaauguguuucagaccagagccggcugucugaucggagccgagcacgugaacaauagcuacgagugcgacauccccaucggcgcuggcaucugugccagcuaccagacacagacaaacagccccagacgggcuagaagcguggccagccagagcaucauugccuacacaaugucucugggcgccgagaacagcguggccuacuccaacaacucuaucgcuugccccaccaacuucaccaucagcgugaccaccgagauccugccuguguccaugaccaagaccagcguggacugcaccauguacaucugcggcgauuccaccgagugcuccaaccugcugcugcaguacggcagcuucugcacccagcugaauagagcccugacagggaucgccguggaacaggacaagaacacccaagagguguucgcccaagugaagcaaaucuacaagaccccuccuaucaaggacuucggcggcuucaauuucagccagauucugcccgauccuagcaagcccagcaagcggagcuucaucgaggaccugcuguucaacaaagugacacuggccgacgccggcuucaucaagcaguauggcgauugucugggcgacauugccgccagggaucugauuugcgcccagaaguuuaacggacugacagugcugccuccucugcugaccgaugagaugaucgcccaguacacaucugcccugcuggccggcacaaucacaagcggcuggacauuuggagcuggcgccgcucugcagauccccuuugcuaugcagauggccuaccgguucaacggcaucggagugacccagaaugugcuguacgagaaccagaagcugaucgccaaccaguucaacagcgccaucggcaagauccaggacagccugagcagcacagcaagcgcccugggaaagcugcaggacguggucaaccagaaugcccaggcacugaacacccuggucaagcagcuguccuccaacuucggcgccaucagcucugugcugaacgauauccugagcagacuggacaaggucgaggccgaggugcagaucgacagacugaucacaggcagacugcagagccuccagacauacgugacccagcagcugaucagagccgccgagauuagagccucugccaaucuggccgccaccaagaugucugagugugugcugggccagagcaagagaguggacuuuugcggcaagggcuaccaccugaugagcuucccucagucugccccucacggcgugguguuucugcacgugacauaugugcccgcucaagagaagaauuucaccaccgcuccagccaucugccacgacggcaaagcccacuuuccuagagaaggcguguucguguccaacggcacccauugguucgugacacagcggaacuucugugagccccagaucaucaccaccgacaacaccuucgugucuggcaacugcgacguugugaucggcauugugaacaauaccguguacgacccucugcagcccgagcuggacagcuucaaagaggaacuggacaaguacuuuaagaaccacacaagccccgacguggaccugggcgauaucagcggaaucaaugccagcgucgugaacauccagaaagagaucgaccggcugaacgagguggccaagaaucugaacgagagccugaucgaccugcaagaacuggggaaguacgagcaguacaucaagggaggcggaggaucugacaucgaccccuacaaagaguucggcagcagcuaccagcugcugaacuuccugccucuggacuucuuccccgaccugaacgcccugguggauacagccacagcucuguacgaggaagaacugaccggcagagagcacugcagcccucaccacacagccauuagacaggcccucgugugcugggacgagcugacaaaacugaucgccuggaugagcagcaacaucaccagcgagcaagugcggaccaucaucgugaaccacgugaacgauaccuggggccugaaagugcggcagagccugugguuucaccugagcugucugaccuucggccagcacaccgugcaagaguuucugguguccuucggcguguggaucagaaccccugcuccauacagaccuccaaacgcucccauccugagcacccugccugagcacacagugaucuguugaggacuaguuauaagacugacuagcccgaugggccucccaacgggcccuccuccccuccuugcaccgagauuaauaaaaaaaaaaaaaaaaaaaaaaaaaaaaaaaaaaaaaaaaaaaaaaaaaaaaaaaaaaaaaaaaugcaucccccccccccccccccccccccccccccccaaaggcucuuuucagagccaccagaauu

SEQ ID NO: 13080 - RNA, 4315 nt, Artificial Sequence
  SARS-CoV-2/Wuhan/WIV05/2019__EPI_ISL_402128 spike protein mRNA gc mod (1-1211)(P715C_P1069C) WhcAg construct
aggagaaagcuuaccauguucguguuucuggugcugcugccccugguguccagccagugugugaaccugaccaccagaacacagcugccuccagccuacaccaacagcuucaccagaggcguguacuaccccgacaagguguucagauccagcgugcugcacucuacccaggaccuguuccugccuuucuucagcaacgugaccugguuccacgccauccacguguccggcaccaauggcaccaagagauucgacaaccccgugcugcccuucaacgacgggguguacuuugccagcaccgagaaguccaacaucaucagaggcuggaucuucggcaccacacuggacagcaagacccagagccugcugaucgugaacaacgccaccaacguggucaucaaagugugcgaguuccaguucugcaacgaccccuuccugggcgucuacuaccacaagaacaacaagagcuggauggaaagcgaguuccggguguacagcagcgccaacaacugcaccuucgaguacgugucccagccuuuccugauggaccuggaaggcaagcagggcaacuucaagaaccugcgcgaguucguguucaagaacaucgacggcuacuucaaaaucuacagcaagcacaccccuaucaaccucgugcgggaucugccucagggcuucucugcucuggaaccccugguggaucugcccaucggcaucaacaucacccgguuucagacacugcuggcccugcacagaagcuaccugacaccuggcgauagcagcagcggauggacagcuggugccgccgcuuacuaugugggcuaccugcagccuagaaccuuccugcugaaguacaacgagaacggcaccaucaccgacgccguggauugugcucuggauccucugagcgagacaaagugcacccugaaguccuucaccguggaaaagggcaucuaccagaccagcaacuuccgggugcagcccaccgaauccaucgugcgguuccccaauaucaccaaucugugccccuucggcgagguguucaaugccaccagauucgccucuguguacgccuggaaccggaagcggaucagcaauugcguggccgacuacuccgugcuguacaacuccgccagcuucagcaccuucaagugcuacggcguguccccuaccaagcugaacgaccugugcuucacaaacguguacgccgacagcuucgugauccggggagaugaagugcggcagauugccccuggacagacaggcaagaucgccgacuacaacuacaagcugcccgacgacuucaccggcugugugauugccuggaacagcaacaaccuggacuccaaagucggcggcaacuacaauuaccuguaccggcuguuccggaaguccaaucugaagcccuucgagcgggacaucagcaccgaaaucuaucaggccggcagcaccccuugcaacggcguggaaggcuucaacugcuacuucccacugcaguccuacggcuuucagcccacaaauggcgugggcuaucagcccuacagagugguggugcugagcuucgaacugcugcaugcuccugccacagugugcggcccuaagaaaagcaccaaucucgugaagaacaaaugcgugaacuucaacuucaacggccugaccggcaccggcgugcugacagagagcaacaagaaguuccugccauuccagcaguuuggccgggauaucgccgauaccacagacgccguuagagauccccagacacuggaaauccuggacaucaccccaugcagcuucggcggagugucugugaucaccccuggcaccaacaccagcaaucagguggcagugcuguaccaggacgugaacuguaccgaagugcccguggccauucacgccgaucagcugacaccuacauggcggguguacuccaccggcagcaauguguuucagaccagagccggcugucugaucggagccgagcacgugaacaauagcuacgagugcgacauccccaucggcgcuggcaucugugccagcuaccagacacagacaaacagccccagacgggcuagaagcguggccagccagagcaucauugccuacacaaugucucugggcgccgagaacagcguggccuacuccaacaacucuaucgcuaucugcaccaacuucaccaucagcgugaccaccgagauccugccuguguccaugaccaagaccagcguggacugcaccauguacaucugcggcgauuccaccgagugcuccaaccugcugcugcaguacggcagcuucugcacccagcugaauagagcccugacagggaucgccguggaacaggacaagaacacccaagagguguucgcccaagugaagcaaaucuacaagaccccuccuaucaaggacuucggcggcuucaauuucagccagauucugcccgauccuagcaagcccagcaagcggagcuucaucgaggaccugcuguucaacaaagugacacuggccgacgccggcuucaucaagcaguauggcgauugucugggcgacauugccgccagggaucugauuugcgcccagaaguuuaacggacugacagugcugccuccucugcugaccgaugagaugaucgcccaguacacaucugcccugcuggccggcacaaucacaagcggcuggacauuuggagcuggcgccgcucugcagauccccuuugcuaugcagauggccuaccgguucaacggcaucggagugacccagaaugugcuguacgagaaccagaagcugaucgccaaccaguucaacagcgccaucggcaagauccaggacagccugagcagcacagcaagcgcccugggaaagcugcaggacguggucaaccagaaugcccaggcacugaacacccuggucaagcagcuguccuccaacuucggcgccaucagcucugugcugaacgauauccugagcagacuggacaaggucgaggccgaggugcagaucgacagacugaucacaggcagacugcagagccuccagacauacgugacccagcagcugaucagagccgccgagauuagagccucugccaaucuggccgccaccaagaugucugagugugugcugggccagagcaagagaguggacuuuugcggcaagggcuaccaccugaugagcuucccucagucugccccucacggcgugguguuucugcacgugacauaugugugugcucaagagaagaauuucaccaccgcuccagccaucugccacgacggcaaagcccacuuuccuagagaaggcguguucguguccaacggcacccauugguucgugacacagcggaacuucuacgagccccagaucaucaccaccgacaacaccuucgugucuggcaacugcgacguugugaucggcauugugaacaauaccguguacgacccucugcagcccgagcuggacagcuucaaagaggaacuggacaaguacuuuaagaaccacacaagccccgacguggaccugggcgauaucagcggaaucaaugccagcgucgugaacauccagaaagagaucgaccggcugaacgagguggccaagaaucugaacgagagccugaucgaccugcaagaacuggggaaguacgagcaguacaucaagggaggcggaggaucugacaucgaccccuacaaagaguucggcagcagcuaccagcugcugaacuuccugccucuggacuucuuccccgaccugaacgcccugguggauacagccacagcucuguacgaggaagaacugaccggcagagagcacugcagcccucaccacacagccauuagacaggcccucgugugcugggacgagcugacaaaacugaucgccuggaugagcagcaacaucaccagcgagcaagugcggaccaucaucgugaaccacgugaacgauaccuggggccugaaagugcggcagagccugugguuucaccugagcugucugaccuucggccagcacaccgugcaagaguuucugguguccuucggcguguggaucagaaccccugcuccauacagaccuccaaacgcucccauccugagcacccugccugagcacacagugaucuguugaggacuaguuauaagacugacuagcccgaugggccucccaacgggcccuccuccccuccuugcaccgagauuaauaaaaaaaaaaaaaaaaaaaaaaaaaaaaaaaaaaaaaaaaaaaaaaaaaaaaaaaaaaaaaaaaugcaucccccccccccccccccccccccccccccccaaaggcucuuuucagagccaccagaauu

SEQ ID NO: 13081 - RNA, 4315 nt, Artificial Sequence
  SARS-CoV-2/Wuhan/WIV05/2019__EPI_ISL_402128 spike protein mRNA gc mod (1-1211)(G889C_L1034C) WhcAg construct
aggagaaagcuuaccauguucguguuucuggugcugcugccccugguguccagccagugugugaaccugaccaccagaacacagcugccuccagccuacaccaacagcuucaccagaggcguguacuaccccgacaagguguucagauccagcgugcugcacucuacccaggaccuguuccugccuuucuucagcaacgugaccugguuccacgccauccacguguccggcaccaauggcaccaagagauucgacaaccccgugcugcccuucaacgacgggguguacuuugccagcaccgagaaguccaacaucaucagaggcuggaucuucggcaccacacuggacagcaagacccagagccugcugaucgugaacaacgccaccaacguggucaucaaagugugcgaguuccaguucugcaacgaccccuuccugggcgucuacuaccacaagaacaacaagagcuggauggaaagcgaguuccggguguacagcagcgccaacaacugcaccuucgaguacgugucccagccuuuccugauggaccuggaaggcaagcagggcaacuucaagaaccugcgcgaguucguguucaagaacaucgacggcuacuucaaaaucuacagcaagcacaccccuaucaaccucgugcgggaucugccucagggcuucucugcucuggaaccccugguggaucugcccaucggcaucaacaucacccgguuucagacacugcuggcccugcacagaagcuaccugacaccuggcgauagcagcagcggauggacagcuggugccgccgcuuacuaugugggcuaccugcagccuagaaccuuccugcugaaguacaacgagaacggcaccaucaccgacgccguggauugugcucuggauccucugagcgagacaaagugcacccugaaguccuucaccguggaaaagggcaucuaccagaccagcaacuuccgggugcagcccaccgaauccaucgugcgguuccccaauaucaccaaucugugccccuucggcgagguguucaaugccaccagauucgccucuguguacgccuggaaccggaagcggaucagcaauugcguggccgacuacuccgugcuguacaacuccgccagcuucagcaccuucaagugcuacggcguguccccuaccaagcugaacgaccugugcuucacaaacguguacgccgacagcuucgugauccggggagaugaagugcggcagauugccccuggacagacaggcaagaucgccgacuacaacuacaagcugcccgacgacuucaccggcugugugauugccuggaacagcaacaaccuggacuccaaagucggcggcaacuacaauuaccuguaccggcuguuccggaaguccaaucugaagcccuucgagcgggacaucagcaccgaaaucuaucaggccggcagcaccccuugcaacggcguggaaggcuucaacugcuacuucccacugcaguccuacggcuuucagcccacaaauggcgugggcuaucagcccuacagagugguggugcugagcuucgaacugcugcaugcuccugccacagugugcggcccuaagaaaagcaccaaucucgugaagaacaaaugcgugaacuucaacuucaacggccugaccggcaccggcgugcugacagagagcaacaagaaguuccugccauuccagcaguuuggccgggauaucgccgauaccacagacgccguuagagauccccagacacuggaaauccuggacaucaccccaugcagcuucggcggagugucugugaucaccccuggcaccaacaccagcaaucagguggcagugcuguaccaggacgugaacuguaccgaagugcccguggccauucacgccgaucagcugacaccuacauggcggguguacuccaccggcagcaauguguuucagaccagagccggcugucugaucggagccgagcacgugaacaauagcuacgagugcgacauccccaucggcgcuggcaucugugccagcuaccagacacagacaaacagccccagacgggcuagaagcguggccagccagagcaucauugccuacacaaugucucugggcgccgagaacagcguggccuacuccaacaacucuaucgcuauccccaccaacuucaccaucagcgugaccaccgagauccugccuguguccaugaccaagaccagcguggacugcaccauguacaucugcggcgauuccaccgagugcuccaaccugcugcugcaguacggcagcuucugcacccagcugaauagagcccugacagggaucgccguggaacaggacaagaacacccaagagguguucgcccaagugaagcaaaucuacaagaccccuccuaucaaggacuucggcggcuucaauuucagccagauucugcccgauccuagcaagcccagcaagcggagcuucaucgaggaccugcuguucaacaaagugacacuggccgacgccggcuucaucaagcaguauggcgauugucugggcgacauugccgccagggaucugauuugcgcccagaaguuuaacggacugacagugcugccuccucugcugaccgaugagaugaucgcccaguacacaucugcccugcuggccggcacaaucacaagcggcuggacauuuugcgcuggcgccgcucugcagauccccuuugcuaugcagauggccuaccgguucaacggcaucggagugacccagaaugugcuguacgagaaccagaagcugaucgccaaccaguucaacagcgccaucggcaagauccaggacagccugagcagcacagcaagcgcccugggaaagcugcaggacguggucaaccagaaugcccaggcacugaacacccuggucaagcagcuguccuccaacuucggcgccaucagcucugugcugaacgauauccugagcagacuggacaaggucgaggccgaggugcagaucgacagacugaucacaggcagacugcagagccuccagacauacgugacccagcagcugaucagagccgccgagauuagagccucugccaaucuggccgccaccaagaugucugaguguguguguggccagagcaagagaguggacuuuugcggcaagggcuaccaccugaugagcuucccucagucugccccucacggcgugguguuucugcacgugacauaugugcccgcucaagagaagaauuucaccaccgcuccagccaucugccacgacggcaaagcccacuuuccuagagaaggcguguucguguccaacggcacccauugguucgugacacagcggaacuucuacgagccccagaucaucaccaccgacaacaccuucgugucuggcaacugcgacguugugaucggcauugugaacaauaccguguacgacccucugcagcccgagcuggacagcuucaaagaggaacuggacaaguacuuuaagaaccacacaagccccgacguggaccugggcgauaucagcggaaucaaugccagcgucgugaacauccagaaagagaucgaccggcugaacgagguggccaagaaucugaacgagagccugaucgaccugcaagaacuggggaaguacgagcaguacaucaagggaggcggaggaucugacaucgaccccuacaaagaguucggcagcagcuaccagcugcugaacuuccugccucuggacuucuuccccgaccugaacgcccugguggauacagccacagcucuguacgaggaagaacugaccggcagagagcacugcagcccucaccacacagccauuagacaggcccucgugugcugggacgagcugacaaaacugaucgccuggaugagcagcaacaucaccagcgagcaagugcggaccaucaucgugaaccacgugaacgauaccuggggccugaaagugcggcagagccugugguuucaccugagcugucugaccuucggccagcacaccgugcaagaguuucugguguccuucggcguguggaucagaaccccugcuccauacagaccuccaaacgcucccauccugagcacccugccugagcacacagugaucuguugaggacuaguuauaagacugacuagcccgaugggccucccaacgggcccuccuccccuccuugcaccgagauuaauaaaaaaaaaaaaaaaaaaaaaaaaaaaaaaaaaaaaaaaaaaaaaaaaaaaaaaaaaaaaaaaaugcaucccccccccccccccccccccccccccccccaaaggcucuuuucagagccaccagaauu

SEQ ID NO: 13082 - RNA, 4315 nt, Artificial Sequence
  SARS-CoV-2/Wuhan/WIV05/2019__EPI_ISL_402128 spike protein mRNA gc mod (1-1211)(I909C_Y1047C) WhcAg construct
aggagaaagcuuaccauguucguguuucuggugcugcugccccugguguccagccagugugugaaccugaccaccagaacacagcugccuccagccuacaccaacagcuucaccagaggcguguacuaccccgacaagguguucagauccagcgugcugcacucuacccaggaccuguuccugccuuucuucagcaacgugaccugguuccacgccauccacguguccggcaccaauggcaccaagagauucgacaaccccgugcugcccuucaacgacgggguguacuuugccagcaccgagaaguccaacaucaucagaggcuggaucuucggcaccacacuggacagcaagacccagagccugcugaucgugaacaacgccaccaacguggucaucaaagugugcgaguuccaguucugcaacgaccccuuccugggcgucuacuaccacaagaacaacaagagcuggauggaaagcgaguuccggguguacagcagcgccaacaacugcaccuucgaguacgugucccagccuuuccugauggaccuggaaggcaagcagggcaacuucaagaaccugcgcgaguucguguucaagaacaucgacggcuacuucaaaaucuacagcaagcacaccccuaucaaccucgugcgggaucugccucagggcuucucugcucuggaaccccugguggaucugcccaucggcaucaacaucacccgguuucagacacugcuggcccugcacagaagcuaccugacaccuggcgauagcagcagcggauggacagcuggugccgccgcuuacuaugugggcuaccugcagccuagaaccuuccugcugaaguacaacgagaacggcaccaucaccgacgccguggauugugcucuggauccucugagcgagacaaagugcacccugaaguccuucaccguggaaaagggcaucuaccagaccagcaacuuccgggugcagcccaccgaauccaucgugcgguuccccaauaucaccaaucugugccccuucggcgagguguucaaugccaccagauucgccucuguguacgccuggaaccggaagcggaucagcaauugcguggccgacuacuccgugcuguacaacuccgccagcuucagcaccuucaagugcuacggcguguccccuaccaagcugaacgaccugugcuucacaaacguguacgccgacagcuucgugauccggggagaugaagugcggcagauugccccuggacagacaggcaagaucgccgacuacaacuacaagcugcccgacgacuucaccggcugugugauugccuggaacagcaacaaccuggacuccaaagucggcggcaacuacaauuaccuguaccggcuguuccggaaguccaaucugaagcccuucgagcgggacaucagcaccgaaaucuaucaggccggcagcaccccuugcaacggcguggaaggcuucaacugcuacuucccacugcaguccuacggcuuucagcccacaaauggcgugggcuaucagcccuacagagugguggugcugagcuucgaacugcugcaugcuccugccacagugugcggcccuaagaaaagcaccaaucucgugaagaacaaaugcgugaacuucaacuucaacggccugaccggcaccggcgugcugacagagagcaacaagaaguuccugccauuccagcaguuuggccgggauaucgccgauaccacagacgccguuagagauccccagacacuggaaauccuggacaucaccccaugcagcuucggcggagugucugugaucaccccuggcaccaacaccagcaaucagguggcagugcuguaccaggacgugaacuguaccgaagugcccguggccauucacgccgaucagcugacaccuacauggcggguguacuccaccggcagcaauguguuucagaccagagccggcugucugaucggagccgagcacgugaacaauagcuacgagugcgacauccccaucggcgcuggcaucugugccagcuaccagacacagacaaacagccccagacgggcuagaagcguggccagccagagcaucauugccuacacaaugucucugggcgccgagaacagcguggccuacuccaacaacucuaucgcuauccccaccaacuucaccaucagcgugaccaccgagauccugccuguguccaugaccaagaccagcguggacugcaccauguacaucugcggcgauuccaccgagugcuccaaccugcugcugcaguacggcagcuucugcacccagcugaauagagcccugacagggaucgccguggaacaggacaagaacacccaagagguguucgcccaagugaagcaaaucuacaagaccccuccuaucaaggacuucggcggcuucaauuucagccagauucugcccgauccuagcaagcccagcaagcggagcuucaucgaggaccugcuguucaacaaagugacacuggccgacgccggcuucaucaagcaguauggcgauugucugggcgacauugccgccagggaucugauuugcgcccagaaguuuaacggacugacagugcugccuccucugcugaccgaugagaugaucgcccaguacacaucugcccugcuggccggcacaaucacaagcggcuggacauuuggagcuggcgccgcucugcagauccccuuugcuaugcagauggccuaccgguucaacggcugcggagugacccagaaugugcuguacgagaaccagaagcugaucgccaaccaguucaacagcgccaucggcaagauccaggacagccugagcagcacagcaagcgcccugggaaagcugcaggacguggucaaccagaaugcccaggcacugaacacccuggucaagcagcuguccuccaacuucggcgccaucagcucugugcugaacgauauccugagcagacuggacaaggucgaggccgaggugcagaucgacagacugaucacaggcagacugcagagccuccagacauacgugacccagcagcugaucagagccgccgagauuagagccucugccaaucuggccgccaccaagaugucugagugugugcugggccagagcaagagaguggacuuuugcggcaagggcugucaccugaugagcuucccucagucugccccucacggcgugguguuucugcacgugacauaugugcccgcucaagagaagaauuucaccaccgcuccagccaucugccacgacggcaaagcccacuuuccuagagaaggcguguucguguccaacggcacccauugguucgugacacagcggaacuucuacgagccccagaucaucaccaccgacaacaccuucgugucuggcaacugcgacguugugaucggcauugugaacaauaccguguacgacccucugcagcccgagcuggacagcuucaaagaggaacuggacaaguacuuuaagaaccacacaagccccgacguggaccugggcgauaucagcggaaucaaugccagcgucgugaacauccagaaagagaucgaccggcugaacgagguggccaagaaucugaacgagagccugaucgaccugcaagaacuggggaaguacgagcaguacaucaagggaggcggaggaucugacaucgaccccuacaaagaguucggcagcagcuaccagcugcugaacuuccugccucuggacuucuuccccgaccugaacgcccugguggauacagccacagcucuguacgaggaagaacugaccggcagagagcacugcagcccucaccacacagccauuagacaggcccucgugugcugggacgagcugacaaaacugaucgccuggaugagcagcaacaucaccagcgagcaagugcggaccaucaucgugaaccacgugaacgauaccuggggccugaaagugcggcagagccugugguuucaccugagcugucugaccuucggccagcacaccgugcaagaguuucugguguccuucggcguguggaucagaaccccugcuccauacagaccuccaaacgcucccauccugagcacccugccugagcacacagugaucuguugaggacuaguuauaagacugacuagcccgaugggccucccaacgggcccuccuccccuccuugcaccgagauuaauaaaaaaaaaaaaaaaaaaaaaaaaaaaaaaaaaaaaaaaaaaaaaaaaaaaaaaaaaaaaaaaaugcaucccccccccccccccccccccccccccccccaaaggcucuuuucagagccaccagaauu

SEQ ID NO: 13083 - RNA, 4315 nt, Artificial Sequence
  SARS-CoV-2/Wuhan/WIV05/2019__EPI_ISL_402128 spike protein mRNA gc mod (1-1211)(Q965C_S1003C) WhcAg construct
aggagaaagcuuaccauguucguguuucuggugcugcugccccugguguccagccagugugugaaccugaccaccagaacacagcugccuccagccuacaccaacagcuucaccagaggcguguacuaccccgacaagguguucagauccagcgugcugcacucuacccaggaccuguuccugccuuucuucagcaacgugaccugguuccacgccauccacguguccggcaccaauggcaccaagagauucgacaaccccgugcugcccuucaacgacgggguguacuuugccagcaccgagaaguccaacaucaucagaggcuggaucuucggcaccacacuggacagcaagacccagagccugcugaucgugaacaacgccaccaacguggucaucaaagugugcgaguuccaguucugcaacgaccccuuccugggcgucuacuaccacaagaacaacaagagcuggauggaaagcgaguuccggguguacagcagcgccaacaacugcaccuucgaguacgugucccagccuuuccugauggaccuggaaggcaagcagggcaacuucaagaaccugcgcgaguucguguucaagaacaucgacggcuacuucaaaaucuacagcaagcacaccccuaucaaccucgugcgggaucugccucagggcuucucugcucuggaaccccugguggaucugcccaucggcaucaacaucacccgguuucagacacugcuggcccugcacagaagcuaccugacaccuggcgauagcagcagcggauggacagcuggugccgccgcuuacuaugugggcuaccugcagccuagaaccuuccugcugaaguacaacgagaacggcaccaucaccgacgccguggauugugcucuggauccucugagcgagacaaagugcacccugaaguccuucaccguggaaaagggcaucuaccagaccagcaacuuccgggugcagcccaccgaauccaucgugcgguuccccaauaucaccaaucugugccccuucggcgagguguucaaugccaccagauucgccucuguguacgccuggaaccggaagcggaucagcaauugcguggccgacuacuccgugcuguacaacuccgccagcuucagcaccuucaagugcuacggcguguccccuaccaagcugaacgaccugugcuucacaaacguguacgccgacagcuucgugauccggggagaugaagugcggcagauugccccuggacagacaggcaagaucgccgacuacaacuacaagcugcccgacgacuucaccggcugugugauugccuggaacagcaacaaccuggacuccaaagucggcggcaacuacaauuaccuguaccggcuguuccggaaguccaaucugaagcccuucgagcgggacaucagcaccgaaaucuaucaggccggcagcaccccuugcaacggcguggaaggcuucaacugcuacuucccacugcaguccuacggcuuucagcccacaaauggcgugggcuaucagcccuacagagugguggugcugagcuucgaacugcugcaugcuccugccacagugugcggcccuaagaaaagcaccaaucucgugaagaacaaaugcgugaacuucaacuucaacggccugaccggcaccggcgugcugacagagagcaacaagaaguuccugccauuccagcaguuuggccgggauaucgccgauaccacagacgccguuagagauccccagacacuggaaauccuggacaucaccccaugcagcuucggcggagugucugugaucaccccuggcaccaacaccagcaaucagguggcagugcuguaccaggacgugaacuguaccgaagugcccguggccauucacgccgaucagcugacaccuacauggcggguguacuccaccggcagcaauguguuucagaccagagccggcugucugaucggagccgagcacgugaacaauagcuacgagugcgacauccccaucggcgcuggcaucugugccagcuaccagacacagacaaacagccccagacgggcuagaagcguggccagccagagcaucauugccuacacaaugucucugggcgccgagaacagcguggccuacuccaacaacucuaucgcuauccccaccaacuucaccaucagcgugaccaccgagauccugccuguguccaugaccaagaccagcguggacugcaccauguacaucugcggcgauuccaccgagugcuccaaccugcugcugcaguacggcagcuucugcacccagcugaauagagcccugacagggaucgccguggaacaggacaagaacacccaagagguguucgcccaagugaagcaaaucuacaagaccccuccuaucaaggacuucggcggcuucaauuucagccagauucugcccgauccuagcaagcccagcaagcggagcuucaucgaggaccugcuguucaacaaagugacacuggccgacgccggcuucaucaagcaguauggcgauugucugggcgacauugccgccagggaucugauuugcgcccagaaguuuaacggacugacagugcugccuccucugcugaccgaugagaugaucgcccaguacacaucugcccugcuggccggcacaaucacaagcggcuggacauuuggagcuggcgccgcucugcagauccccuuugcuaugcagauggccuaccgguucaacggcaucggagugacccagaaugugcuguacgagaaccagaagcugaucgccaaccaguucaacagcgccaucggcaagauccaggacagccugagcagcacagcaagcgcccugggaaagcugcaggacguggucaaccagaaugcccaggcacugaacacccuggucaagugccuguccuccaacuucggcgccaucagcucugugcugaacgauauccugagcagacuggacaaggucgaggccgaggugcagaucgacagacugaucacaggcagacugcagugucuccagacauacgugacccagcagcugaucagagccgccgagauuagagccucugccaaucuggccgccaccaagaugucugagugugugcugggccagagcaagagaguggacuuuugcggcaagggcuaccaccugaugagcuucccucagucugccccucacggcgugguguuucugcacgugacauaugugcccgcucaagagaagaauuucaccaccgcuccagccaucugccacgacggcaaagcccacuuuccuagagaaggcguguucguguccaacggcacccauugguucgugacacagcggaacuucuacgagccccagaucaucaccaccgacaacaccuucgugucuggcaacugcgacguugugaucggcauugugaacaauaccguguacgacccucugcagcccgagcuggacagcuucaaagaggaacuggacaaguacuuuaagaaccacacaagccccgacguggaccugggcgauaucagcggaaucaaugccagcgucgugaacauccagaaagagaucgaccggcugaacgagguggccaagaaucugaacgagagccugaucgaccugcaagaacuggggaaguacgagcaguacaucaagggaggcggaggaucugacaucgaccccuacaaagaguucggcagcagcuaccagcugcugaacuuccugccucuggacuucuuccccgaccugaacgcccugguggauacagccacagcucuguacgaggaagaacugaccggcagagagcacugcagcccucaccacacagccauuagacaggcccucgugugcugggacgagcugacaaaacugaucgccuggaugagcagcaacaucaccagcgagcaagugcggaccaucaucgugaaccacgugaacgauaccuggggccugaaagugcggcagagccugugguuucaccugagcugucugaccuucggccagcacaccgugcaagaguuucugguguccuucggcguguggaucagaaccccugcuccauacagaccuccaaacgcucccauccugagcacccugccugagcacacagugaucuguugaggacuaguuauaagacugacuagcccgaugggccucccaacgggcccuccuccccuccuugcaccgagauuaauaaaaaaaaaaaaaaaaaaaaaaaaaaaaaaaaaaaaaaaaaaaaaaaaaaaaaaaaaaaaaaaaugcaucccccccccccccccccccccccccccccccaaaggcucuuuucagagccaccagaauu

SEQ ID NO: 13084 - RNA, 4315 nt, Artificial Sequence
  SARS-CoV-2/Wuhan/WIV05/2019__EPI_ISL_402128 spike protein mRNA gc mod (1-1211)(F970C_G999C) WhcAg construct
aggagaaagcuuaccauguucguguuucuggugcugcugccccugguguccagccagugugugaaccugaccaccagaacacagcugccuccagccuacaccaacagcuucaccagaggcguguacuaccccgacaagguguucagauccagcgugcugcacucuacccaggaccuguuccugccuuucuucagcaacgugaccugguuccacgccauccacguguccggcaccaauggcaccaagagauucgacaaccccgugcugcccuucaacgacgggguguacuuugccagcaccgagaaguccaacaucaucagaggcuggaucuucggcaccacacuggacagcaagacccagagccugcugaucgugaacaacgccaccaacguggucaucaaagugugcgaguuccaguucugcaacgaccccuuccugggcgucuacuaccacaagaacaacaagagcuggauggaaagcgaguuccggguguacagcagcgccaacaacugcaccuucgaguacgugucccagccuuuccugauggaccuggaaggcaagcagggcaacuucaagaaccugcgcgaguucguguucaagaacaucgacggcuacuucaaaaucuacagcaagcacaccccuaucaaccucgugcgggaucugccucagggcuucucugcucuggaaccccugguggaucugcccaucggcaucaacaucacccgguuucagacacugcuggcccugcacagaagcuaccugacaccuggcgauagcagcagcggauggacagcuggugccgccgcuuacuaugugggcuaccugcagccuagaaccuuccugcugaaguacaacgagaacggcaccaucaccgacgccguggauugugcucuggauccucugagcgagacaaagugcacccugaaguccuucaccguggaaaagggcaucuaccagaccagcaacuuccgggugcagcccaccgaauccaucgugcgguuccccaauaucaccaaucugugccccuucggcgagguguucaaugccaccagauucgccucuguguacgccuggaaccggaagcggaucagcaauugcguggccgacuacuccgugcuguacaacuccgccagcuucagcaccuucaagugcuacggcguguccccuaccaagcugaacgaccugugcuucacaaacguguacgccgacagcuucgugauccggggagaugaagugcggcagauugccccuggacagacaggcaagaucgccgacuacaacuacaagcugcccgacgacuucaccggcugugugauugccuggaacagcaacaaccuggacuccaaagucggcggcaacuacaauuaccuguaccggcuguuccggaaguccaaucugaagcccuucgagcgggacaucagcaccgaaaucuaucaggccggcagcaccccuugcaacggcguggaaggcuucaacugcuacuucccacugcaguccuacggcuuucagcccacaaauggcgugggcuaucagcccuacagagugguggugcugagcuucgaacugcugcaugcuccugccacagugugcggcccuaagaaaagcaccaaucucgugaagaacaaaugcgugaacuucaacuucaacggccugaccggcaccggcgugcugacagagagcaacaagaaguuccugccauuccagcaguuuggccgggauaucgccgauaccacagacgccguuagagauccccagacacuggaaauccuggacaucaccccaugcagcuucggcggagugucugugaucaccccuggcaccaacaccagcaaucagguggcagugcuguaccaggacgugaacuguaccgaagugcccguggccauucacgccgaucagcugacaccuacauggcggguguacuccaccggcagcaauguguuucagaccagagccggcugucugaucggagccgagcacgugaacaauagcuacgagugcgacauccccaucggcgcuggcaucugugccagcuaccagacacagacaaacagccccagacgggcuagaagcguggccagccagagcaucauugccuacacaaugucucugggcgccgagaacagcguggccuacuccaacaacucuaucgcuauccccaccaacuucaccaucagcgugaccaccgagauccugccuguguccaugaccaagaccagcguggacugcaccauguacaucugcggcgauuccaccgagugcuccaaccugcugcugcaguacggcagcuucugcacccagcugaauagagcccugacagggaucgccguggaacaggacaagaacacccaagagguguucgcccaagugaagcaaaucuacaagaccccuccuaucaaggacuucggcggcuucaauuucagccagauucugcccgauccuagcaagcccagcaagcggagcuucaucgaggaccugcuguucaacaaagugacacuggccgacgccggcuucaucaagcaguauggcgauugucugggcgacauugccgccagggaucugauuugcgcccagaaguuuaacggacugacagugcugccuccucugcugaccgaugagaugaucgcccaguacacaucugcccugcuggccggcacaaucacaagcggcuggacauuuggagcuggcgccgcucugcagauccccuuugcuaugcagauggccuaccgguucaacggcaucggagugacccagaaugugcuguacgagaaccagaagcugaucgccaaccaguucaacagcgccaucggcaagauccaggacagccugagcagcacagcaagcgcccugggaaagcugcaggacguggucaaccagaaugcccaggcacugaacacccuggucaagcagcuguccuccaacugcggcgccaucagcucugugcugaacgauauccugagcagacuggacaaggucgaggccgaggugcagaucgacagacugaucacauguagacugcagagccuccagacauacgugacccagcagcugaucagagccgccgagauuagagccucugccaaucuggccgccaccaagaugucugagugugugcugggccagagcaagagaguggacuuuugcggcaagggcuaccaccugaugagcuucccucagucugccccucacggcgugguguuucugcacgugacauaugugcccgcucaagagaagaauuucaccaccgcuccagccaucugccacgacggcaaagcccacuuuccuagagaaggcguguucguguccaacggcacccauugguucgugacacagcggaacuucuacgagccccagaucaucaccaccgacaacaccuucgugucuggcaacugcgacguugugaucggcauugugaacaauaccguguacgacccucugcagcccgagcuggacagcuucaaagaggaacuggacaaguacuuuaagaaccacacaagccccgacguggaccugggcgauaucagcggaaucaaugccagcgucgugaacauccagaaagagaucgaccggcugaacgagguggccaagaaucugaacgagagccugaucgaccugcaagaacuggggaaguacgagcaguacaucaagggaggcggaggaucugacaucgaccccuacaaagaguucggcagcagcuaccagcugcugaacuuccugccucuggacuucuuccccgaccugaacgcccugguggauacagccacagcucuguacgaggaagaacugaccggcagagagcacugcagcccucaccacacagccauuagacaggcccucgugugcugggacgagcugacaaaacugaucgccuggaugagcagcaacaucaccagcgagcaagugcggaccaucaucgugaaccacgugaacgauaccuggggccugaaagugcggcagagccugugguuucaccugagcugucugaccuucggccagcacaccgugcaagaguuucugguguccuucggcguguggaucagaaccccugcuccauacagaccuccaaacgcucccauccugagcacccugccugagcacacagugaucuguugaggacuaguuauaagacugacuagcccgaugggccucccaacgggcccuccuccccuccuugcaccgagauuaauaaaaaaaaaaaaaaaaaaaaaaaaaaaaaaaaaaaaaaaaaaaaaaaaaaaaaaaaaaaaaaaaugcaucccccccccccccccccccccccccccccccaaaggcucuuuucagagccaccagaauu

SEQ ID NO: 13085 - RNA, 4315 nt, Artificial Sequence
  SARS-CoV-2/Wuhan/WIV05/2019__EPI_ISL_402128 spike protein mRNA gc mod (1-1211)(A972C_R995C) WhcAg construct
aggagaaagcuuaccauguucguguuucuggugcugcugccccugguguccagccagugugugaaccugaccaccagaacacagcugccuccagccuacaccaacagcuucaccagaggcguguacuaccccgacaagguguucagauccagcgugcugcacucuacccaggaccuguuccugccuuucuucagcaacgugaccugguuccacgccauccacguguccggcaccaauggcaccaagagauucgacaaccccgugcugcccuucaacgacgggguguacuuugccagcaccgagaaguccaacaucaucagaggcuggaucuucggcaccacacuggacagcaagacccagagccugcugaucgugaacaacgccaccaacguggucaucaaagugugcgaguuccaguucugcaacgaccccuuccugggcgucuacuaccacaagaacaacaagagcuggauggaaagcgaguuccggguguacagcagcgccaacaacugcaccuucgaguacgugucccagccuuuccugauggaccuggaaggcaagcagggcaacuucaagaaccugcgcgaguucguguucaagaacaucgacggcuacuucaaaaucuacagcaagcacaccccuaucaaccucgugcgggaucugccucagggcuucucugcucuggaaccccugguggaucugcccaucggcaucaacaucacccgguuucagacacugcuggcccugcacagaagcuaccugacaccuggcgauagcagcagcggauggacagcuggugccgccgcuuacuaugugggcuaccugcagccuagaaccuuccugcugaaguacaacgagaacggcaccaucaccgacgccguggauugugcucuggauccucugagcgagacaaagugcacccugaaguccuucaccguggaaaagggcaucuaccagaccagcaacuuccgggugcagcccaccgaauccaucgugcgguuccccaauaucaccaaucugugccccuucggcgagguguucaaugccaccagauucgccucuguguacgccuggaaccggaagcggaucagcaauugcguggccgacuacuccgugcuguacaacuccgccagcuucagcaccuucaagugcuacggcguguccccuaccaagcugaacgaccugugcuucacaaacguguacgccgacagcuucgugauccggggagaugaagugcggcagauugccccuggacagacaggcaagaucgccgacuacaacuacaagcugcccgacgacuucaccggcugugugauugccuggaacagcaacaaccuggacuccaaagucggcggcaacuacaauuaccuguaccggcuguuccggaaguccaaucugaagcccuucgagcgggacaucagcaccgaaaucuaucaggccggcagcaccccuugcaacggcguggaaggcuucaacugcuacuucccacugcaguccuacggcuuucagcccacaaauggcgugggcuaucagcccuacagagugguggugcugagcuucgaacugcugcaugcuccugccacagugugcggcccuaagaaaagcaccaaucucgugaagaacaaaugcgugaacuucaacuucaacggccugaccggcaccggcgugcugacagagagcaacaagaaguuccugccauuccagcaguuuggccgggauaucgccgauaccacagacgccguuagagauccccagacacuggaaauccuggacaucaccccaugcagcuucggcggagugucugugaucaccccuggcaccaacaccagcaaucagguggcagugcuguaccaggacgugaacuguaccgaagugcccguggccauucacgccgaucagcugacaccuacauggcggguguacuccaccggcagcaauguguuucagaccagagccggcugucugaucggagccgagcacgugaacaauagcuacgagugcgacauccccaucggcgcuggcaucugugccagcuaccagacacagacaaacagccccagacgggcuagaagcguggccagccagagcaucauugccuacacaaugucucugggcgccgagaacagcguggccuacuccaacaacucuaucgcuauccccaccaacuucaccaucagcgugaccaccgagauccugccuguguccaugaccaagaccagcguggacugcaccauguacaucugcggcgauuccaccgagugcuccaaccugcugcugcaguacggcagcuucugcacccagcugaauagagcccugacagggaucgccguggaacaggacaagaacacccaagagguguucgcccaagugaagcaaaucuacaagaccccuccuaucaaggacuucggcggcuucaauuucagccagauucugcccgauccuagcaagcccagcaagcggagcuucaucgaggaccugcuguucaacaaagugacacuggccgacgccggcuucaucaagcaguauggcgauugucugggcgacauugccgccagggaucugauuugcgcccagaaguuuaacggacugacagugcugccuccucugcugaccgaugagaugaucgcccaguacacaucugcccugcuggccggcacaaucacaagcggcuggacauuuggagcuggcgccgcucugcagauccccuuugcuaugcagauggccuaccgguucaacggcaucggagugacccagaaugugcuguacgagaaccagaagcugaucgccaaccaguucaacagcgccaucggcaagauccaggacagccugagcagcacagcaagcgcccugggaaagcugcaggacguggucaaccagaaugcccaggcacugaacacccuggucaagcagcuguccuccaacuucggcugcaucagcucugugcugaacgauauccugagcagacuggacaaggucgaggccgaggugcagaucgacugucugaucacaggcagacugcagagccuccagacauacgugacccagcagcugaucagagccgccgagauuagagccucugccaaucuggccgccaccaagaugucugagugugugcugggccagagcaagagaguggacuuuugcggcaagggcuaccaccugaugagcuucccucagucugccccucacggcgugguguuucugcacgugacauaugugcccgcucaagagaagaauuucaccaccgcuccagccaucugccacgacggcaaagcccacuuuccuagagaaggcguguucguguccaacggcacccauugguucgugacacagcggaacuucuacgagccccagaucaucaccaccgacaacaccuucgugucuggcaacugcgacguugugaucggcauugugaacaauaccguguacgacccucugcagcccgagcuggacagcuucaaagaggaacuggacaaguacuuuaagaaccacacaagccccgacguggaccugggcgauaucagcggaaucaaugccagcgucgugaacauccagaaagagaucgaccggcugaacgagguggccaagaaucugaacgagagccugaucgaccugcaagaacuggggaaguacgagcaguacaucaagggaggcggaggaucugacaucgaccccuacaaagaguucggcagcagcuaccagcugcugaacuuccugccucuggacuucuuccccgaccugaacgcccugguggauacagccacagcucuguacgaggaagaacugaccggcagagagcacugcagcccucaccacacagccauuagacaggcccucgugugcugggacgagcugacaaaacugaucgccuggaugagcagcaacaucaccagcgagcaagugcggaccaucaucgugaaccacgugaacgauaccuggggccugaaagugcggcagagccugugguuucaccugagcugucugaccuucggccagcacaccgugcaagaguuucugguguccuucggcguguggaucagaaccccugcuccauacagaccuccaaacgcucccauccugagcacccugccugagcacacagugaucuguugaggacuaguuauaagacugacuagcccgaugggccucccaacgggcccuccuccccuccuugcaccgagauuaauaaaaaaaaaaaaaaaaaaaaaaaaaaaaaaaaaaaaaaaaaaaaaaaaaaaaaaaaaaaaaaaaugcaucccccccccccccccccccccccccccccccaaaggcucuuuucagagccaccagaauu

SEQ ID NO: 13086 - RNA, 4315 nt, Artificial Sequence
  SARS-CoV-2/Wuhan/WIV05/2019__EPI_ISL_402128 spike protein mRNA gc mod (1-1211)(A890C_V1040C) WhcAg construct
aggagaaagcuuaccauguucguguuucuggugcugcugccccugguguccagccagugugugaaccugaccaccagaacacagcugccuccagccuacaccaacagcuucaccagaggcguguacuaccccgacaagguguucagauccagcgugcugcacucuacccaggaccuguuccugccuuucuucagcaacgugaccugguuccacgccauccacguguccggcaccaauggcaccaagagauucgacaaccccgugcugcccuucaacgacgggguguacuuugccagcaccgagaaguccaacaucaucagaggcuggaucuucggcaccacacuggacagcaagacccagagccugcugaucgugaacaacgccaccaacguggucaucaaagugugcgaguuccaguucugcaacgaccccuuccugggcgucuacuaccacaagaacaacaagagcuggauggaaagcgaguuccggguguacagcagcgccaacaacugcaccuucgaguacgugucccagccuuuccugauggaccuggaaggcaagcagggcaacuucaagaaccugcgcgaguucguguucaagaacaucgacggcuacuucaaaaucuacagcaagcacaccccuaucaaccucgugcgggaucugccucagggcuucucugcucuggaaccccugguggaucugcccaucggcaucaacaucacccgguuucagacacugcuggcccugcacagaagcuaccugacaccuggcgauagcagcagcggauggacagcuggugccgccgcuuacuaugugggcuaccugcagccuagaaccuuccugcugaaguacaacgagaacggcaccaucaccgacgccguggauugugcucuggauccucugagcgagacaaagugcacccugaaguccuucaccguggaaaagggcaucuaccagaccagcaacuuccgggugcagcccaccgaauccaucgugcgguuccccaauaucaccaaucugugccccuucggcgagguguucaaugccaccagauucgccucuguguacgccuggaaccggaagcggaucagcaauugcguggccgacuacuccgugcuguacaacuccgccagcuucagcaccuucaagugcuacggcguguccccuaccaagcugaacgaccugugcuucacaaacguguacgccgacagcuucgugauccggggagaugaagugcggcagauugccccuggacagacaggcaagaucgccgacuacaacuacaagcugcccgacgacuucaccggcugugugauugccuggaacagcaacaaccuggacuccaaagucggcggcaacuacaauuaccuguaccggcuguuccggaaguccaaucugaagcccuucgagcgggacaucagcaccgaaaucuaucaggccggcagcaccccuugcaacggcguggaaggcuucaacugcuacuucccacugcaguccuacggcuuucagcccacaaauggcgugggcuaucagcccuacagagugguggugcugagcuucgaacugcugcaugcuccugccacagugugcggcccuaagaaaagcaccaaucucgugaagaacaaaugcgugaacuucaacuucaacggccugaccggcaccggcgugcugacagagagcaacaagaaguuccugccauuccagcaguuuggccgggauaucgccgauaccacagacgccguuagagauccccagacacuggaaauccuggacaucaccccaugcagcuucggcggagugucugugaucaccccuggcaccaacaccagcaaucagguggcagugcuguaccaggacgugaacuguaccgaagugcccguggccauucacgccgaucagcugacaccuacauggcggguguacuccaccggcagcaauguguuucagaccagagccggcugucugaucggagccgagcacgugaacaauagcuacgagugcgacauccccaucggcgcuggcaucugugccagcuaccagacacagacaaacagccccagacgggcuagaagcguggccagccagagcaucauugccuacacaaugucucugggcgccgagaacagcguggccuacuccaacaacucuaucgcuauccccaccaacuucaccaucagcgugaccaccgagauccugccuguguccaugaccaagaccagcguggacugcaccauguacaucugcggcgauuccaccgagugcuccaaccugcugcugcaguacggcagcuucugcacccagcugaauagagcccugacagggaucgccguggaacaggacaagaacacccaagagguguucgcccaagugaagcaaaucuacaagaccccuccuaucaaggacuucggcggcuucaauuucagccagauucugcccgauccuagcaagcccagcaagcggagcuucaucgaggaccugcuguucaacaaagugacacuggccgacgccggcuucaucaagcaguauggcgauugucugggcgacauugccgccagggaucugauuugcgcccagaaguuuaacggacugacagugcugccuccucugcugaccgaugagaugaucgcccaguacacaucugcccugcuggccggcacaaucacaagcggcuggacauuuggaugcggcgccgcucugcagauccccuuugcuaugcagauggccuaccgguucaacggcaucggagugacccagaaugugcuguacgagaaccagaagcugaucgccaaccaguucaacagcgccaucggcaagauccaggacagccugagcagcacagcaagcgcccugggaaagcugcaggacguggucaaccagaaugcccaggcacugaacacccuggucaagcagcuguccuccaacuucggcgccaucagcucugugcugaacgauauccugagcagacuggacaaggucgaggccgaggugcagaucgacagacugaucacaggcagacugcagagccuccagacauacgugacccagcagcugaucagagccgccgagauuagagccucugccaaucuggccgccaccaagaugucugagugugugcugggccagagcaagagaugugacuuuugcggcaagggcuaccaccugaugagcuucccucagucugccccucacggcgugguguuucugcacgugacauaugugcccgcucaagagaagaauuucaccaccgcuccagccaucugccacgacggcaaagcccacuuuccuagagaaggcguguucguguccaacggcacccauugguucgugacacagcggaacuucuacgagccccagaucaucaccaccgacaacaccuucgugucuggcaacugcgacguugugaucggcauugugaacaauaccguguacgacccucugcagcccgagcuggacagcuucaaagaggaacuggacaaguacuuuaagaaccacacaagccccgacguggaccugggcgauaucagcggaaucaaugccagcgucgugaacauccagaaagagaucgaccggcugaacgagguggccaagaaucugaacgagagccugaucgaccugcaagaacuggggaaguacgagcaguacaucaagggaggcggaggaucugacaucgaccccuacaaagaguucggcagcagcuaccagcugcugaacuuccugccucuggacuucuuccccgaccugaacgcccugguggauacagccacagcucuguacgaggaagaacugaccggcagagagcacugcagcccucaccacacagccauuagacaggcccucgugugcugggacgagcugacaaaacugaucgccuggaugagcagcaacaucaccagcgagcaagugcggaccaucaucgugaaccacgugaacgauaccuggggccugaaagugcggcagagccugugguuucaccugagcugucugaccuucggccagcacaccgugcaagaguuucugguguccuucggcguguggaucagaaccccugcuccauacagaccuccaaacgcucccauccugagcacccugccugagcacacagugaucuguugaggacuaguuauaagacugacuagcccgaugggccucccaacgggcccuccuccccuccuugcaccgagauuaauaaaaaaaaaaaaaaaaaaaaaaaaaaaaaaaaaaaaaaaaaaaaaaaaaaaaaaaaaaaaaaaaugcaucccccccccccccccccccccccccccccccaaaggcucuuuucagagccaccagaauu

SEQ ID NO: 13087 - RNA, 4315 nt, Artificial Sequence
  SARS-CoV-2/Wuhan/WIV05/2019__EPI_ISL_402128 spike protein mRNA gc mod (1-1211)(T874C_S1055C) WhcAg construct
aggagaaagcuuaccauguucguguuucuggugcugcugccccugguguccagccagugugugaaccugaccaccagaacacagcugccuccagccuacaccaacagcuucaccagaggcguguacuaccccgacaagguguucagauccagcgugcugcacucuacccaggaccuguuccugccuuucuucagcaacgugaccugguuccacgccauccacguguccggcaccaauggcaccaagagauucgacaaccccgugcugcccuucaacgacgggguguacuuugccagcaccgagaaguccaacaucaucagaggcuggaucuucggcaccacacuggacagcaagacccagagccugcugaucgugaacaacgccaccaacguggucaucaaagugugcgaguuccaguucugcaacgaccccuuccugggcgucuacuaccacaagaacaacaagagcuggauggaaagcgaguuccggguguacagcagcgccaacaacugcaccuucgaguacgugucccagccuuuccugauggaccuggaaggcaagcagggcaacuucaagaaccugcgcgaguucguguucaagaacaucgacggcuacuucaaaaucuacagcaagcacaccccuaucaaccucgugcgggaucugccucagggcuucucugcucuggaaccccugguggaucugcccaucggcaucaacaucacccgguuucagacacugcuggcccugcacagaagcuaccugacaccuggcgauagcagcagcggauggacagcuggugccgccgcuuacuaugugggcuaccugcagccuagaaccuuccugcugaaguacaacgagaacggcaccaucaccgacgccguggauugugcucuggauccucugagcgagacaaagugcacccugaaguccuucaccguggaaaagggcaucuaccagaccagcaacuuccgggugcagcccaccgaauccaucgugcgguuccccaauaucaccaaucugugccccuucggcgagguguucaaugccaccagauucgccucuguguacgccuggaaccggaagcggaucagcaauugcguggccgacuacuccgugcuguacaacuccgccagcuucagcaccuucaagugcuacggcguguccccuaccaagcugaacgaccugugcuucacaaacguguacgccgacagcuucgugauccggggagaugaagugcggcagauugccccuggacagacaggcaagaucgccgacuacaacuacaagcugcccgacgacuucaccggcugugugauugccuggaacagcaacaaccuggacuccaaagucggcggcaacuacaauuaccuguaccggcuguuccggaaguccaaucugaagcccuucgagcgggacaucagcaccgaaaucuaucaggccggcagcaccccuugcaacggcguggaaggcuucaacugcuacuucccacugcaguccuacggcuuucagcccacaaauggcgugggcuaucagcccuacagagugguggugcugagcuucgaacugcugcaugcuccugccacagugugcggcccuaagaaaagcaccaaucucgugaagaacaaaugcgugaacuucaacuucaacggccugaccggcaccggcgugcugacagagagcaacaagaaguuccugccauuccagcaguuuggccgggauaucgccgauaccacagacgccguuagagauccccagacacuggaaauccuggacaucaccccaugcagcuucggcggagugucugugaucaccccuggcaccaacaccagcaaucagguggcagugcuguaccaggacgugaacuguaccgaagugcccguggccauucacgccgaucagcugacaccuacauggcggguguacuccaccggcagcaauguguuucagaccagagccggcugucugaucggagccgagcacgugaacaauagcuacgagugcgacauccccaucggcgcuggcaucugugccagcuaccagacacagacaaacagccccagacgggcuagaagcguggccagccagagcaucauugccuacacaaugucucugggcgccgagaacagcguggccuacuccaacaacucuaucgcuauccccaccaacuucaccaucagcgugaccaccgagauccugccuguguccaugaccaagaccagcguggacugcaccauguacaucugcggcgauuccaccgagugcuccaaccugcugcugcaguacggcagcuucugcacccagcugaauagagcccugacagggaucgccguggaacaggacaagaacacccaagagguguucgcccaagugaagcaaaucuacaagaccccuccuaucaaggacuucggcggcuucaauuucagccagauucugcccgauccuagcaagcccagcaagcggagcuucaucgaggaccugcuguucaacaaagugacacuggccgacgccggcuucaucaagcaguauggcgauugucugggcgacauugccgccagggaucugauuugcgcccagaaguuuaacggacugacagugcugccuccucugcugaccgaugagaugaucgcccaguacugcucugcccugcuggccggcacaaucacaagcggcuggacauuuggagcuggcgccgcucugcagauccccuuugcuaugcagauggccuaccgguucaacggcaucggagugacccagaaugugcuguacgagaaccagaagcugaucgccaaccaguucaacagcgccaucggcaagauccaggacagccugagcagcacagcaagcgcccugggaaagcugcaggacguggucaaccagaaugcccaggcacugaacacccuggucaagcagcuguccuccaacuucggcgccaucagcucugugcugaacgauauccugagcagacuggacaaggucgaggccgaggugcagaucgacagacugaucacaggcagacugcagagccuccagacauacgugacccagcagcugaucagagccgccgagauuagagccucugccaaucuggccgccaccaagaugucugagugugugcugggccagagcaagagaguggacuuuugcggcaagggcuaccaccugaugagcuucccucagugcgccccucacggcgugguguuucugcacgugacauaugugcccgcucaagagaagaauuucaccaccgcuccagccaucugccacgacggcaaagcccacuuuccuagagaaggcguguucguguccaacggcacccauugguucgugacacagcggaacuucuacgagccccagaucaucaccaccgacaacaccuucgugucuggcaacugcgacguugugaucggcauugugaacaauaccguguacgacccucugcagcccgagcuggacagcuucaaagaggaacuggacaaguacuuuaagaaccacacaagccccgacguggaccugggcgauaucagcggaaucaaugccagcgucgugaacauccagaaagagaucgaccggcugaacgagguggccaagaaucugaacgagagccugaucgaccugcaagaacuggggaaguacgagcaguacaucaagggaggcggaggaucugacaucgaccccuacaaagaguucggcagcagcuaccagcugcugaacuuccugccucuggacuucuuccccgaccugaacgcccugguggauacagccacagcucuguacgaggaagaacugaccggcagagagcacugcagcccucaccacacagccauuagacaggcccucgugugcugggacgagcugacaaaacugaucgccuggaugagcagcaacaucaccagcgagcaagugcggaccaucaucgugaaccacgugaacgauaccuggggccugaaagugcggcagagccugugguuucaccugagcugucugaccuucggccagcacaccgugcaagaguuucugguguccuucggcguguggaucagaaccccugcuccauacagaccuccaaacgcucccauccugagcacccugccugagcacacagugaucuguugaggacuaguuauaagacugacuagcccgaugggccucccaacgggcccuccuccccuccuugcaccgagauuaauaaaaaaaaaaaaaaaaaaaaaaaaaaaaaaaaaaaaaaaaaaaaaaaaaaaaaaaaaaaaaaaaugcaucccccccccccccccccccccccccccccccaaaggcucuuuucagagccaccagaauu

SEQ ID NO: 13088 - RNA, 4141 nt, Artificial Sequence
  SARS-CoV-2/Wuhan/WIV05/2019__EPI_ISL_402128 spike protein mRNA gc mod (1-1147) LumSynth construct
aggagaaagcuuaccauguucguguuucuggugcugcugccccugguguccagccagugugugaaccugaccaccagaacacagcugccuccagccuacaccaacagcuucaccagaggcguguacuaccccgacaagguguucagauccagcgugcugcacucuacccaggaccuguuccugccuuucuucagcaacgugaccugguuccacgccauccacguguccggcaccaauggcaccaagagauucgacaaccccgugcugcccuucaacgacgggguguacuuugccagcaccgagaaguccaacaucaucagaggcuggaucuucggcaccacacuggacagcaagacccagagccugcugaucgugaacaacgccaccaacguggucaucaaagugugcgaguuccaguucugcaacgaccccuuccugggcgucuacuaccacaagaacaacaagagcuggauggaaagcgaguuccggguguacagcagcgccaacaacugcaccuucgaguacgugucccagccuuuccugauggaccuggaaggcaagcagggcaacuucaagaaccugcgcgaguucguguucaagaacaucgacggcuacuucaaaaucuacagcaagcacaccccuaucaaccucgugcgggaucugccucagggcuucucugcucuggaaccccugguggaucugcccaucggcaucaacaucacccgguuucagacacugcuggcccugcacagaagcuaccugacaccuggcgauagcagcagcggauggacagcuggugccgccgcuuacuaugugggcuaccugcagccuagaaccuuccugcugaaguacaacgagaacggcaccaucaccgacgccguggauugugcucuggauccucugagcgagacaaagugcacccugaaguccuucaccguggaaaagggcaucuaccagaccagcaacuuccgggugcagcccaccgaauccaucgugcgguuccccaauaucaccaaucugugccccuucggcgagguguucaaugccaccagauucgccucuguguacgccuggaaccggaagcggaucagcaauugcguggccgacuacuccgugcuguacaacuccgccagcuucagcaccuucaagugcuacggcguguccccuaccaagcugaacgaccugugcuucacaaacguguacgccgacagcuucgugauccggggagaugaagugcggcagauugccccuggacagacaggcaagaucgccgacuacaacuacaagcugcccgacgacuucaccggcugugugauugccuggaacagcaacaaccuggacuccaaagucggcggcaacuacaauuaccuguaccggcuguuccggaaguccaaucugaagcccuucgagcgggacaucagcaccgaaaucuaucaggccggcagcaccccuugcaacggcguggaaggcuucaacugcuacuucccacugcaguccuacggcuuucagcccacaaauggcgugggcuaucagcccuacagagugguggugcugagcuucgaacugcugcaugcuccugccacagugugcggcccuaagaaaagcaccaaucucgugaagaacaaaugcgugaacuucaacuucaacggccugaccggcaccggcgugcugacagagagcaacaagaaguuccugccauuccagcaguuuggccgggauaucgccgauaccacagacgccguuagagauccccagacacuggaaauccuggacaucaccccaugcagcuucggcggagugucugugaucaccccuggcaccaacaccagcaaucagguggcagugcuguaccaggacgugaacuguaccgaagugcccguggccauucacgccgaucagcugacaccuacauggcggguguacuccaccggcagcaauguguuucagaccagagccggcugucugaucggagccgagcacgugaacaauagcuacgagugcgacauccccaucggcgcuggcaucugugccagcuaccagacacagacaaacagccccagacgggcuagaagcguggccagccagagcaucauugccuacacaaugucucugggcgccgagaacagcguggccuacuccaacaacucuaucgcuauccccaccaacuucaccaucagcgugaccaccgagauccugccuguguccaugaccaagaccagcguggacugcaccauguacaucugcggcgauuccaccgagugcuccaaccugcugcugcaguacggcagcuucugcacccagcugaauagagcccugacagggaucgccguggaacaggacaagaacacccaagagguguucgcccaagugaagcaaaucuacaagaccccuccuaucaaggacuucggcggcuucaauuucagccagauucugcccgauccuagcaagcccagcaagcggagcuucaucgaggaccugcuguucaacaaagugacacuggccgacgccggcuucaucaagcaguauggcgauugucugggcgacauugccgccagggaucugauuugcgcccagaaguuuaacggacugacagugcugccuccucugcugaccgaugagaugaucgcccaguacacaucugcccugcuggccggcacaaucacaagcggcuggacauuuggagcuggcgccgcucugcagauccccuuugcuaugcagauggccuaccgguucaacggcaucggagugacccagaaugugcuguacgagaaccagaagcugaucgccaaccaguucaacagcgccaucggcaagauccaggacagccugagcagcacagcaagcgcccugggaaagcugcaggacguggucaaccagaaugcccaggcacugaacacccuggucaagcagcuguccuccaacuucggcgccaucagcucugugcugaacgauauccugagcagacuggacaaggucgaggccgaggugcagaucgacagacugaucacaggcagacugcagagccuccagacauacgugacccagcagcugaucagagccgccgagauuagagccucugccaaucuggccgccaccaagaugucugagugugugcugggccagagcaagagaguggacuuuugcggcaagggcuaccaccugaugagcuucccucagucugccccucacggcgugguguuucugcacgugacauaugugcccgcucaagagaagaauuucaccaccgcuccagccaucugccacgacggcaaagcccacuuuccuagagaaggcguguucguguccaacggcacccauugguucgugacacagcggaacuucuacgagccccagaucaucaccaccgacaacaccuucgugucuggcaacugcgacguugugaucggcauugugaacaauaccguguacgacccucugcagcccgagcuggacagcggcggaggaucuggcggaggacagaucuacgagggcaagcugacagccgagggccugagauuuggaaucguggccagccgguucaaucacgcccugguggauagacugguggaaggcgccaucgaugccauugucagacacggcggcagagaagaggacaucacccucguuagagugcccggcucuugggagauuccuguggcugcuggcgagcuggcccggaaagaagauaucgacgccguuaucgccaucggcgugcugaucagaggcgccacaccucacuucgacuauaucgccagcgagguguccaaaggccuggccgaucugagccuggaacugagaaagcccaucaccuucggcgugaucaccgcugacacacuggaacaggccauugagagagccggcaccaagcacggcaacaaaggaugggaagccgcucuguccgccaucgagauggccaaccuguucaagagccugcggugaggacuaguuauaagacugacuagcccgaugggccucccaacgggcccuccuccccuccuugcaccgagauuaauaaaaaaaaaaaaaaaaaaaaaaaaaaaaaaaaaaaaaaaaaaaaaaaaaaaaaaaaaaaaaaaaugcaucccccccccccccccccccccccccccccccaaaggcucuuuucagagccaccagaauu

SEQ ID NO: 13089 - RNA, 4141 nt, Artificial Sequence
  SARS-CoV-2/Wuhan/WIV05/2019__EPI_ISL_402128 spike protein mRNA gc mod (1-1147)(K986P_V987P) LumSynth construct
aggagaaagcuuaccauguucguguuucuggugcugcugccccugguguccagccagugugugaaccugaccaccagaacacagcugccuccagccuacaccaacagcuucaccagaggcguguacuaccccgacaagguguucagauccagcgugcugcacucuacccaggaccuguuccugccuuucuucagcaacgugaccugguuccacgccauccacguguccggcaccaauggcaccaagagauucgacaaccccgugcugcccuucaacgacgggguguacuuugccagcaccgagaaguccaacaucaucagaggcuggaucuucggcaccacacuggacagcaagacccagagccugcugaucgugaacaacgccaccaacguggucaucaaagugugcgaguuccaguucugcaacgaccccuuccugggcgucuacuaccacaagaacaacaagagcuggauggaaagcgaguuccggguguacagcagcgccaacaacugcaccuucgaguacgugucccagccuuuccugauggaccuggaaggcaagcagggcaacuucaagaaccugcgcgaguucguguucaagaacaucgacggcuacuucaaaaucuacagcaagcacaccccuaucaaccucgugcgggaucugccucagggcuucucugcucuggaaccccugguggaucugcccaucggcaucaacaucacccgguuucagacacugcuggcccugcacagaagcuaccugacaccuggcgauagcagcagcggauggacagcuggugccgccgcuuacuaugugggcuaccugcagccuagaaccuuccugcugaaguacaacgagaacggcaccaucaccgacgccguggauugugcucuggauccucugagcgagacaaagugcacccugaaguccuucaccguggaaaagggcaucuaccagaccagcaacuuccgggugcagcccaccgaauccaucgugcgguuccccaauaucaccaaucugugccccuucggcgagguguucaaugccaccagauucgccucuguguacgccuggaaccggaagcggaucagcaauugcguggccgacuacuccgugcuguacaacuccgccagcuucagcaccuucaagugcuacggcguguccccuaccaagcugaacgaccugugcuucacaaacguguacgccgacagcuucgugauccggggagaugaagugcggcagauugccccuggacagacaggcaagaucgccgacuacaacuacaagcugcccgacgacuucaccggcugugugauugccuggaacagcaacaaccuggacuccaaagucggcggcaacuacaauuaccuguaccggcuguuccggaaguccaaucugaagcccuucgagcgggacaucagcaccgaaaucuaucaggccggcagcaccccuugcaacggcguggaaggcuucaacugcuacuucccacugcaguccuacggcuuucagcccacaaauggcgugggcuaucagcccuacagagugguggugcugagcuucgaacugcugcaugcuccugccacagugugcggcccuaagaaaagcaccaaucucgugaagaacaaaugcgugaacuucaacuucaacggccugaccggcaccggcgugcugacagagagcaacaagaaguuccugccauuccagcaguuuggccgggauaucgccgauaccacagacgccguuagagauccccagacacuggaaauccuggacaucaccccaugcagcuucggcggagugucugugaucaccccuggcaccaacaccagcaaucagguggcagugcuguaccaggacgugaacuguaccgaagugcccguggccauucacgccgaucagcugacaccuacauggcggguguacuccaccggcagcaauguguuucagaccagagccggcugucugaucggagccgagcacgugaacaauagcuacgagugcgacauccccaucggcgcuggcaucugugccagcuaccagacacagacaaacagccccagacgggcuagaagcguggccagccagagcaucauugccuacacaaugucucugggcgccgagaacagcguggccuacuccaacaacucuaucgcuauccccaccaacuucaccaucagcgugaccaccgagauccugccuguguccaugaccaagaccagcguggacugcaccauguacaucugcggcgauuccaccgagugcuccaaccugcugcugcaguacggcagcuucugcacccagcugaauagagcccugacagggaucgccguggaacaggacaagaacacccaagagguguucgcccaagugaagcaaaucuacaagaccccuccuaucaaggacuucggcggcuucaauuucagccagauucugcccgauccuagcaagcccagcaagcggagcuucaucgaggaccugcuguucaacaaagugacacuggccgacgccggcuucaucaagcaguauggcgauugucugggcgacauugccgccagggaucugauuugcgcccagaaguuuaacggacugacagugcugccuccucugcugaccgaugagaugaucgcccaguacacaucugcccugcuggccggcacaaucacaagcggcuggacauuuggagcuggcgccgcucugcagauccccuuugcuaugcagauggccuaccgguucaacggcaucggagugacccagaaugugcuguacgagaaccagaagcugaucgccaaccaguucaacagcgccaucggcaagauccaggacagccugagcagcacagcaagcgcccugggaaagcugcaggacguggucaaccagaaugcccaggcacugaacacccuggucaagcagcuguccuccaacuucggcgccaucagcucugugcugaacgauauccugagcagacuggacccuccugaggccgaggugcagaucgacagacugaucacaggcagacugcagagccuccagacauacgugacccagcagcugaucagagccgccgagauuagagccucugccaaucuggccgccaccaagaugucugagugugugcugggccagagcaagagaguggacuuuugcggcaagggcuaccaccugaugagcuucccucagucugccccucacggcgugguguuucugcacgugacauaugugcccgcucaagagaagaauuucaccaccgcuccagccaucugccacgacggcaaagcccacuuuccuagagaaggcguguucguguccaacggcacccauugguucgugacacagcggaacuucuacgagccccagaucaucaccaccgacaacaccuucgugucuggcaacugcgacguugugaucggcauugugaacaauaccguguacgacccucugcagcccgagcuggacagcggcggaggaucuggcggaggacagaucuacgagggcaagcugacagccgagggccugagauuuggaaucguggccagccgguucaaucacgcccugguggauagacugguggaaggcgccaucgaugccauugucagacacggcggcagagaagaggacaucacccucguuagagugcccggcucuugggagauuccuguggcugcuggcgagcuggcccggaaagaagauaucgacgccguuaucgccaucggcgugcugaucagaggcgccacaccucacuucgacuauaucgccagcgagguguccaaaggccuggccgaucugagccuggaacugagaaagcccaucaccuucggcgugaucaccgcugacacacuggaacaggccauugagagagccggcaccaagcacggcaacaaaggaugggaagccgcucuguccgccaucgagauggccaaccuguucaagagccugcggugaggacuaguuauaagacugacuagcccgaugggccucccaacgggcccuccuccccuccuugcaccgagauuaauaaaaaaaaaaaaaaaaaaaaaaaaaaaaaaaaaaaaaaaaaaaaaaaaaaaaaaaaaaaaaaaaugcaucccccccccccccccccccccccccccccccaaaggcucuuuucagagccaccagaauu

SEQ ID NO: 13090 - RNA, 4141 nt, Artificial Sequence
  SARS-CoV-2/Wuhan/WIV05/2019__EPI_ISL_402128 spike protein mRNA gc mod (1-1147)(K986P_V987P_T887WN_A1020W) LumSynth construct
aggagaaagcuuaccauguucguguuucuggugcugcugccccugguguccagccagugugugaaccugaccaccagaacacagcugccuccagccuacaccaacagcuucaccagaggcguguacuaccccgacaagguguucagauccagcgugcugcacucuacccaggaccuguuccugccuuucuucagcaacgugaccugguuccacgccauccacguguccggcaccaauggcaccaagagauucgacaaccccgugcugcccuucaacgacgggguguacuuugccagcaccgagaaguccaacaucaucagaggcuggaucuucggcaccacacuggacagcaagacccagagccugcugaucgugaacaacgccaccaacguggucaucaaagugugcgaguuccaguucugcaacgaccccuuccugggcgucuacuaccacaagaacaacaagagcuggauggaaagcgaguuccggguguacagcagcgccaacaacugcaccuucgaguacgugucccagccuuuccugauggaccuggaaggcaagcagggcaacuucaagaaccugcgcgaguucguguucaagaacaucgacggcuacuucaaaaucuacagcaagcacaccccuaucaaccucgugcgggaucugccucagggcuucucugcucuggaaccccugguggaucugcccaucggcaucaacaucacccgguuucagacacugcuggcccugcacagaagcuaccugacaccuggcgauagcagcagcggauggacagcuggugccgccgcuuacuaugugggcuaccugcagccuagaaccuuccugcugaaguacaacgagaacggcaccaucaccgacgccguggauugugcucuggauccucugagcgagacaaagugcacccugaaguccuucaccguggaaaagggcaucuaccagaccagcaacuuccgggugcagcccaccgaauccaucgugcgguuccccaauaucaccaaucugugccccuucggcgagguguucaaugccaccagauucgccucuguguacgccuggaaccggaagcggaucagcaauugcguggccgacuacuccgugcuguacaacuccgccagcuucagcaccuucaagugcuacggcguguccccuaccaagcugaacgaccugugcuucacaaacguguacgccgacagcuucgugauccggggagaugaagugcggcagauugccccuggacagacaggcaagaucgccgacuacaacuacaagcugcccgacgacuucaccggcugugugauugccuggaacagcaacaaccuggacuccaaagucggcggcaacuacaauuaccuguaccggcuguuccggaaguccaaucugaagcccuucgagcgggacaucagcaccgaaaucuaucaggccggcagcaccccuugcaacggcguggaaggcuucaacugcuacuucccacugcaguccuacggcuuucagcccacaaauggcgugggcuaucagcccuacagagugguggugcugagcuucgaacugcugcaugcuccugccacagugugcggcccuaagaaaagcaccaaucucgugaagaacaaaugcgugaacuucaacuucaacggccugaccggcaccggcgugcugacagagagcaacaagaaguuccugccauuccagcaguuuggccgggauaucgccgauaccacagacgccguuagagauccccagacacuggaaauccuggacaucaccccaugcagcuucggcggagugucugugaucaccccuggcaccaacaccagcaaucagguggcagugcuguaccaggacgugaacuguaccgaagugcccguggccauucacgccgaucagcugacaccuacauggcggguguacuccaccggcagcaauguguuucagaccagagccggcugucugaucggagccgagcacgugaacaauagcuacgagugcgacauccccaucggcgcuggcaucugugccagcuaccagacacagacaaacagccccagacgggcuagaagcguggccagccagagcaucauugccuacacaaugucucugggcgccgagaacagcguggccuacuccaacaacucuaucgcuauccccaccaacuucaccaucagcgugaccaccgagauccugccuguguccaugaccaagaccagcguggacugcaccauguacaucugcggcgauuccaccgagugcuccaaccugcugcugcaguacggcagcuucugcacccagcugaauagagcccugacagggaucgccguggaacaggacaagaacacccaagagguguucgcccaagugaagcaaaucuacaagaccccuccuaucaaggacuucggcggcuucaauuucagccagauucugcccgauccuagcaagcccagcaagcggagcuucaucgaggaccugcuguucaacaaagugacacuggccgacgccggcuucaucaagcaguauggcgauugucugggcgacauugccgccagggaucugauuugcgcccagaaguuuaacggacugacagugcugccuccucugcugaccgaugagaugaucgcccaguacacaucugcccugcuggccggcacaaucacaagcggcuggugguuuggagcuggcgccgcucugcagauccccuuugcuaugcagauggccuaccgguucaacggcaucggagugacccagaaugugcuguacgagaaccagaagcugaucgccaaccaguucaacagcgccaucggcaagauccaggacagccugagcagcacagcaagcgcccugggaaagcugcaggacguggucaaccagaaugcccaggcacugaacacccuggucaagcagcuguccuccaacuucggcgccaucagcucugugcugaacgauauccugagcagacuggacccuccugaggccgaggugcagaucgacagacugaucacaggcagacugcagagccuccagacauacgugacccagcagcugaucagagccgccgagauuagauggucugccaaucuggccgccaccaagaugucugagugugugcugggccagagcaagagaguggacuuuugcggcaagggcuaccaccugaugagcuucccucagucugccccucacggcgugguguuucugcacgugacauaugugcccgcucaagagaagaauuucaccaccgcuccagccaucugccacgacggcaaagcccacuuuccuagagaaggcguguucguguccaacggcacccauugguucgugacacagcggaacuucuacgagccccagaucaucaccaccgacaacaccuucgugucuggcaacugcgacguugugaucggcauugugaacaauaccguguacgacccucugcagcccgagcuggacagcggcggaggaucuggcggaggacagaucuacgagggcaagcugacagccgagggccugagauuuggaaucguggccagccgguucaaucacgcccugguggauagacugguggaaggcgccaucgaugccauugucagacacggcggcagagaagaggacaucacccucguuagagugcccggcucuugggagauuccuguggcugcuggcgagcuggcccggaaagaagauaucgacgccguuaucgccaucggcgugcugaucagaggcgccacaccucacuucgacuauaucgccagcgagguguccaaaggccuggccgaucugagccuggaacugagaaagcccaucaccuucggcgugaucaccgcugacacacuggaacaggccauugagagagccggcaccaagcacggcaacaaaggaugggaagccgcucuguccgccaucgagauggccaaccuguucaagagccugcggugaggacuaguuauaagacugacuagcccgaugggccucccaacgggcccuccuccccuccuugcaccgagauuaauaaaaaaaaaaaaaaaaaaaaaaaaaaaaaaaaaaaaaaaaaaaaaaaaaaaaaaaaaaaaaaaaugcaucccccccccccccccccccccccccccccccaaaggcucuuuucagagccaccagaauu

SEQ ID NO: 13091 - RNA, 4141 nt, Artificial Sequence
  SARS-CoV-2/Wuhan/WIV05/2019__EPI_ISL_402128 spike protein mRNA gc mod (1-1147)(K986P_V987P_P1069F) LumSynth construct
aggagaaagcuuaccauguucguguuucuggugcugcugccccugguguccagccagugugugaaccugaccaccagaacacagcugccuccagccuacaccaacagcuucaccagaggcguguacuaccccgacaagguguucagauccagcgugcugcacucuacccaggaccuguuccugccuuucuucagcaacgugaccugguuccacgccauccacguguccggcaccaauggcaccaagagauucgacaaccccgugcugcccuucaacgacgggguguacuuugccagcaccgagaaguccaacaucaucagaggcuggaucuucggcaccacacuggacagcaagacccagagccugcugaucgugaacaacgccaccaacguggucaucaaagugugcgaguuccaguucugcaacgaccccuuccugggcgucuacuaccacaagaacaacaagagcuggauggaaagcgaguuccggguguacagcagcgccaacaacugcaccuucgaguacgugucccagccuuuccugauggaccuggaaggcaagcagggcaacuucaagaaccugcgcgaguucguguucaagaacaucgacggcuacuucaaaaucuacagcaagcacaccccuaucaaccucgugcgggaucugccucagggcuucucugcucuggaaccccugguggaucugcccaucggcaucaacaucacccgguuucagacacugcuggcccugcacagaagcuaccugacaccuggcgauagcagcagcggauggacagcuggugccgccgcuuacuaugugggcuaccugcagccuagaaccuuccugcugaaguacaacgagaacggcaccaucaccgacgccguggauugugcucuggauccucugagcgagacaaagugcacccugaaguccuucaccguggaaaagggcaucuaccagaccagcaacuuccgggugcagcccaccgaauccaucgugcgguuccccaauaucaccaaucugugccccuucggcgagguguucaaugccaccagauucgccucuguguacgccuggaaccggaagcggaucagcaauugcguggccgacuacuccgugcuguacaacuccgccagcuucagcaccuucaagugcuacggcguguccccuaccaagcugaacgaccugugcuucacaaacguguacgccgacagcuucgugauccggggagaugaagugcggcagauugccccuggacagacaggcaagaucgccgacuacaacuacaagcugcccgacgacuucaccggcugugugauugccuggaacagcaacaaccuggacuccaaagucggcggcaacuacaauuaccuguaccggcuguuccggaaguccaaucugaagcccuucgagcgggacaucagcaccgaaaucuaucaggccggcagcaccccuugcaacggcguggaaggcuucaacugcuacuucccacugcaguccuacggcuuucagcccacaaauggcgugggcuaucagcccuacagagugguggugcugagcuucgaacugcugcaugcuccugccacagugugcggcccuaagaaaagcaccaaucucgugaagaacaaaugcgugaacuucaacuucaacggccugaccggcaccggcgugcugacagagagcaacaagaaguuccugccauuccagcaguuuggccgggauaucgccgauaccacagacgccguuagagauccccagacacuggaaauccuggacaucaccccaugcagcuucggcggagugucugugaucaccccuggcaccaacaccagcaaucagguggcagugcuguaccaggacgugaacuguaccgaagugcccguggccauucacgccgaucagcugacaccuacauggcggguguacuccaccggcagcaauguguuucagaccagagccggcugucugaucggagccgagcacgugaacaauagcuacgagugcgacauccccaucggcgcuggcaucugugccagcuaccagacacagacaaacagccccagacgggcuagaagcguggccagccagagcaucauugccuacacaaugucucugggcgccgagaacagcguggccuacuccaacaacucuaucgcuauccccaccaacuucaccaucagcgugaccaccgagauccugccuguguccaugaccaagaccagcguggacugcaccauguacaucugcggcgauuccaccgagugcuccaaccugcugcugcaguacggcagcuucugcacccagcugaauagagcccugacagggaucgccguggaacaggacaagaacacccaagagguguucgcccaagugaagcaaaucuacaagaccccuccuaucaaggacuucggcggcuucaauuucagccagauucugcccgauccuagcaagcccagcaagcggagcuucaucgaggaccugcuguucaacaaagugacacuggccgacgccggcuucaucaagcaguauggcgauugucugggcgacauugccgccagggaucugauuugcgcccagaaguuuaacggacugacagugcugccuccucugcugaccgaugagaugaucgcccaguacacaucugcccugcuggccggcacaaucacaagcggcuggacauuuggagcuggcgccgcucugcagauccccuuugcuaugcagauggccuaccgguucaacggcaucggagugacccagaaugugcuguacgagaaccagaagcugaucgccaaccaguucaacagcgccaucggcaagauccaggacagccugagcagcacagcaagcgcccugggaaagcugcaggacguggucaaccagaaugcccaggcacugaacacccuggucaagcagcuguccuccaacuucggcgccaucagcucugugcugaacgauauccugagcagacuggacccuccugaggccgaggugcagaucgacagacugaucacaggcagacugcagagccuccagacauacgugacccagcagcugaucagagccgccgagauuagagccucugccaaucuggccgccaccaagaugucugagugugugcugggccagagcaagagaguggacuuuugcggcaagggcuaccaccugaugagcuucccucagucugccccucacggcgugguguuucugcacgugacauauguguucgcucaagagaagaauuucaccaccgcuccagccaucugccacgacggcaaagcccacuuuccuagagaaggcguguucguguccaacggcacccauugguucgugacacagcggaacuucuacgagccccagaucaucaccaccgacaacaccuucgugucuggcaacugcgacguugugaucggcauugugaacaauaccguguacgacccucugcagcccgagcuggacagcggcggaggaucuggcggaggacagaucuacgagggcaagcugacagccgagggccugagauuuggaaucguggccagccgguucaaucacgcccugguggauagacugguggaaggcgccaucgaugccauugucagacacggcggcagagaagaggacaucacccucguuagagugcccggcucuugggagauuccuguggcugcuggcgagcuggcccggaaagaagauaucgacgccguuaucgccaucggcgugcugaucagaggcgccacaccucacuucgacuauaucgccagcgagguguccaaaggccuggccgaucugagccuggaacugagaaagcccaucaccuucggcgugaucaccgcugacacacuggaacaggccauugagagagccggcaccaagcacggcaacaaaggaugggaagccgcucuguccgccaucgagauggccaaccuguucaagagccugcggugaggacuaguuauaagacugacuagcccgaugggccucccaacgggcccuccuccccuccuugcaccgagauuaauaaaaaaaaaaaaaaaaaaaaaaaaaaaaaaaaaaaaaaaaaaaaaaaaaaaaaaaaaaaaaaaaugcaucccccccccccccccccccccccccccccccaaaggcucuuuucagagccaccagaauu

SEQ ID NO: 13092 - RNA, 4141 nt, Artificial Sequence
  SARS-CoV-2/Wuhan/WIV05/2019__EPI_ISL_402128 spike protein mRNA gc mod (1-1147)(K986P_V987P_ H1048Q_H1064N_ H1083N_H1101N) LumSynth construct
aggagaaagcuuaccauguucguguuucuggugcugcugccccugguguccagccagugugugaaccugaccaccagaacacagcugccuccagccuacaccaacagcuucaccagaggcguguacuaccccgacaagguguucagauccagcgugcugcacucuacccaggaccuguuccugccuuucuucagcaacgugaccugguuccacgccauccacguguccggcaccaauggcaccaagagauucgacaaccccgugcugcccuucaacgacgggguguacuuugccagcaccgagaaguccaacaucaucagaggcuggaucuucggcaccacacuggacagcaagacccagagccugcugaucgugaacaacgccaccaacguggucaucaaagugugcgaguuccaguucugcaacgaccccuuccugggcgucuacuaccacaagaacaacaagagcuggauggaaagcgaguuccggguguacagcagcgccaacaacugcaccuucgaguacgugucccagccuuuccugauggaccuggaaggcaagcagggcaacuucaagaaccugcgcgaguucguguucaagaacaucgacggcuacuucaaaaucuacagcaagcacaccccuaucaaccucgugcgggaucugccucagggcuucucugcucuggaaccccugguggaucugcccaucggcaucaacaucacccgguuucagacacugcuggcccugcacagaagcuaccugacaccuggcgauagcagcagcggauggacagcuggugccgccgcuuacuaugugggcuaccugcagccuagaaccuuccugcugaaguacaacgagaacggcaccaucaccgacgccguggauugugcucuggauccucugagcgagacaaagugcacccugaaguccuucaccguggaaaagggcaucuaccagaccagcaacuuccgggugcagcccaccgaauccaucgugcgguuccccaauaucaccaaucugugccccuucggcgagguguucaaugccaccagauucgccucuguguacgccuggaaccggaagcggaucagcaauugcguggccgacuacuccgugcuguacaacuccgccagcuucagcaccuucaagugcuacggcguguccccuaccaagcugaacgaccugugcuucacaaacguguacgccgacagcuucgugauccggggagaugaagugcggcagauugccccuggacagacaggcaagaucgccgacuacaacuacaagcugcccgacgacuucaccggcugugugauugccuggaacagcaacaaccuggacuccaaagucggcggcaacuacaauuaccuguaccggcuguuccggaaguccaaucugaagcccuucgagcgggacaucagcaccgaaaucuaucaggccggcagcaccccuugcaacggcguggaaggcuucaacugcuacuucccacugcaguccuacggcuuucagcccacaaauggcgugggcuaucagcccuacagagugguggugcugagcuucgaacugcugcaugcuccugccacagugugcggcccuaagaaaagcaccaaucucgugaagaacaaaugcgugaacuucaacuucaacggccugaccggcaccggcgugcugacagagagcaacaagaaguuccugccauuccagcaguuuggccgggauaucgccgauaccacagacgccguuagagauccccagacacuggaaauccuggacaucaccccaugcagcuucggcggagugucugugaucaccccuggcaccaacaccagcaaucagguggcagugcuguaccaggacgugaacuguaccgaagugcccguggccauucacgccgaucagcugacaccuacauggcggguguacuccaccggcagcaauguguuucagaccagagccggcugucugaucggagccgagcacgugaacaauagcuacgagugcgacauccccaucggcgcuggcaucugugccagcuaccagacacagacaaacagccccagacgggcuagaagcguggccagccagagcaucauugccuacacaaugucucugggcgccgagaacagcguggccuacuccaacaacucuaucgcuauccccaccaacuucaccaucagcgugaccaccgagauccugccuguguccaugaccaagaccagcguggacugcaccauguacaucugcggcgauuccaccgagugcuccaaccugcugcugcaguacggcagcuucugcacccagcugaauagagcccugacagggaucgccguggaacaggacaagaacacccaagagguguucgcccaagugaagcaaaucuacaagaccccuccuaucaaggacuucggcggcuucaauuucagccagauucugcccgauccuagcaagcccagcaagcggagcuucaucgaggaccugcuguucaacaaagugacacuggccgacgccggcuucaucaagcaguauggcgauugucugggcgacauugccgccagggaucugauuugcgcccagaaguuuaacggacugacagugcugccuccucugcugaccgaugagaugaucgcccaguacacaucugcccugcuggccggcacaaucacaagcggcuggacauuuggagcuggcgccgcucugcagauccccuuugcuaugcagauggccuaccgguucaacggcaucggagugacccagaaugugcuguacgagaaccagaagcugaucgccaaccaguucaacagcgccaucggcaagauccaggacagccugagcagcacagcaagcgcccugggaaagcugcaggacguggucaaccagaaugcccaggcacugaacacccuggucaagcagcuguccuccaacuucggcgccaucagcucugugcugaacgauauccugagcagacuggacccuccugaggccgaggugcagaucgacagacugaucacaggcagacugcagagccuccagacauacgugacccagcagcugaucagagccgccgagauuagagccucugccaaucuggccgccaccaagaugucugagugugugcugggccagagcaagagaguggacuuuugcggcaagggcuaccagcugaugagcuucccucagucugccccucacggcgugguguuucugaacgugacauaugugcccgcucaagagaagaauuucaccaccgcuccagccaucugcaacgacggcaaagcccacuuuccuagagaaggcguguucguguccaacggcaccaacugguucgugacacagcggaacuucuacgagccccagaucaucaccaccgacaacaccuucgugucuggcaacugcgacguugugaucggcauugugaacaauaccguguacgacccucugcagcccgagcuggacagcggcggaggaucuggcggaggacagaucuacgagggcaagcugacagccgagggccugagauuuggaaucguggccagccgguucaaucacgcccugguggauagacugguggaaggcgccaucgaugccauugucagacacggcggcagagaagaggacaucacccucguuagagugcccggcucuugggagauuccuguggcugcuggcgagcuggcccggaaagaagauaucgacgccguuaucgccaucggcgugcugaucagaggcgccacaccucacuucgacuauaucgccagcgagguguccaaaggccuggccgaucugagccuggaacugagaaagcccaucaccuucggcgugaucaccgcugacacacuggaacaggccauugagagagccggcaccaagcacggcaacaaaggaugggaagccgcucuguccgccaucgagauggccaaccuguucaagagccugcggugaggacuaguuauaagacugacuagcccgaugggccucccaacgggcccuccuccccuccuugcaccgagauuaauaaaaaaaaaaaaaaaaaaaaaaaaaaaaaaaaaaaaaaaaaaaaaaaaaaaaaaaaaaaaaaaaugcaucccccccccccccccccccccccccccccccaaaggcucuuuucagagccaccagaauu

SEQ ID NO: 13093 - RNA, 4141 nt, Artificial Sequence
  SARS-CoV-2/Wuhan/WIV05/2019__EPI_ISL_402128 spike protein mRNA gc mod (1-1147)(I712C_T1077C) LumSynth construct
aggagaaagcuuaccauguucguguuucuggugcugcugccccugguguccagccagugugugaaccugaccaccagaacacagcugccuccagccuacaccaacagcuucaccagaggcguguacuaccccgacaagguguucagauccagcgugcugcacucuacccaggaccuguuccugccuuucuucagcaacgugaccugguuccacgccauccacguguccggcaccaauggcaccaagagauucgacaaccccgugcugcccuucaacgacgggguguacuuugccagcaccgagaaguccaacaucaucagaggcuggaucuucggcaccacacuggacagcaagacccagagccugcugaucgugaacaacgccaccaacguggucaucaaagugugcgaguuccaguucugcaacgaccccuuccugggcgucuacuaccacaagaacaacaagagcuggauggaaagcgaguuccggguguacagcagcgccaacaacugcaccuucgaguacgugucccagccuuuccugauggaccuggaaggcaagcagggcaacuucaagaaccugcgcgaguucguguucaagaacaucgacggcuacuucaaaaucuacagcaagcacaccccuaucaaccucgugcgggaucugccucagggcuucucugcucuggaaccccugguggaucugcccaucggcaucaacaucacccgguuucagacacugcuggcccugcacagaagcuaccugacaccuggcgauagcagcagcggauggacagcuggugccgccgcuuacuaugugggcuaccugcagccuagaaccuuccugcugaaguacaacgagaacggcaccaucaccgacgccguggauugugcucuggauccucugagcgagacaaagugcacccugaaguccuucaccguggaaaagggcaucuaccagaccagcaacuuccgggugcagcccaccgaauccaucgugcgguuccccaauaucaccaaucugugccccuucggcgagguguucaaugccaccagauucgccucuguguacgccuggaaccggaagcggaucagcaauugcguggccgacuacuccgugcuguacaacuccgccagcuucagcaccuucaagugcuacggcguguccccuaccaagcugaacgaccugugcuucacaaacguguacgccgacagcuucgugauccggggagaugaagugcggcagauugccccuggacagacaggcaagaucgccgacuacaacuacaagcugcccgacgacuucaccggcugugugauugccuggaacagcaacaaccuggacuccaaagucggcggcaacuacaauuaccuguaccggcuguuccggaaguccaaucugaagcccuucgagcgggacaucagcaccgaaaucuaucaggccggcagcaccccuugcaacggcguggaaggcuucaacugcuacuucccacugcaguccuacggcuuucagcccacaaauggcgugggcuaucagcccuacagagugguggugcugagcuucgaacugcugcaugcuccugccacagugugcggcccuaagaaaagcaccaaucucgugaagaacaaaugcgugaacuucaacuucaacggccugaccggcaccggcgugcugacagagagcaacaagaaguuccugccauuccagcaguuuggccgggauaucgccgauaccacagacgccguuagagauccccagacacuggaaauccuggacaucaccccaugcagcuucggcggagugucugugaucaccccuggcaccaacaccagcaaucagguggcagugcuguaccaggacgugaacuguaccgaagugcccguggccauucacgccgaucagcugacaccuacauggcggguguacuccaccggcagcaauguguuucagaccagagccggcugucugaucggagccgagcacgugaacaauagcuacgagugcgacauccccaucggcgcuggcaucugugccagcuaccagacacagacaaacagccccagacgggcuagaagcguggccagccagagcaucauugccuacacaaugucucugggcgccgagaacagcguggccuacuccaacaacucuugcgcuauccccaccaacuucaccaucagcgugaccaccgagauccugccuguguccaugaccaagaccagcguggacugcaccauguacaucugcggcgauuccaccgagugcuccaaccugcugcugcaguacggcagcuucugcacccagcugaauagagcccugacagggaucgccguggaacaggacaagaacacccaagagguguucgcccaagugaagcaaaucuacaagaccccuccuaucaaggacuucggcggcuucaauuucagccagauucugcccgauccuagcaagcccagcaagcggagcuucaucgaggaccugcuguucaacaaagugacacuggccgacgccggcuucaucaagcaguauggcgauugucugggcgacauugccgccagggaucugauuugcgcccagaaguuuaacggacugacagugcugccuccucugcugaccgaugagaugaucgcccaguacacaucugcccugcuggccggcacaaucacaagcggcuggacauuuggagcuggcgccgcucugcagauccccuuugcuaugcagauggccuaccgguucaacggcaucggagugacccagaaugugcuguacgagaaccagaagcugaucgccaaccaguucaacagcgccaucggcaagauccaggacagccugagcagcacagcaagcgcccugggaaagcugcaggacguggucaaccagaaugcccaggcacugaacacccuggucaagcagcuguccuccaacuucggcgccaucagcucugugcugaacgauauccugagcagacuggacaaggucgaggccgaggugcagaucgacagacugaucacaggcagacugcagagccuccagacauacgugacccagcagcugaucagagccgccgagauuagagccucugccaaucuggccgccaccaagaugucugagugugugcugggccagagcaagagaguggacuuuugcggcaagggcuaccaccugaugagcuucccucagucugccccucacggcgugguguuucugcacgugacauaugugcccgcucaagagaagaauuucaccugugcuccagccaucugccacgacggcaaagcccacuuuccuagagaaggcguguucguguccaacggcacccauugguucgugacacagcggaacuucuacgagccccagaucaucaccaccgacaacaccuucgugucuggcaacugcgacguugugaucggcauugugaacaauaccguguacgacccucugcagcccgagcuggacagcggcggaggaucuggcggaggacagaucuacgagggcaagcugacagccgagggccugagauuuggaaucguggccagccgguucaaucacgcccugguggauagacugguggaaggcgccaucgaugccauugucagacacggcggcagagaagaggacaucacccucguuagagugcccggcucuugggagauuccuguggcugcuggcgagcuggcccggaaagaagauaucgacgccguuaucgccaucggcgugcugaucagaggcgccacaccucacuucgacuauaucgccagcgagguguccaaaggccuggccgaucugagccuggaacugagaaagcccaucaccuucggcgugaucaccgcugacacacuggaacaggccauugagagagccggcaccaagcacggcaacaaaggaugggaagccgcucuguccgccaucgagauggccaaccuguucaagagccugcggugaggacuaguuauaagacugacuagcccgaugggccucccaacgggcccuccuccccuccuugcaccgagauuaauaaaaaaaaaaaaaaaaaaaaaaaaaaaaaaaaaaaaaaaaaaaaaaaaaaaaaaaaaaaaaaaaugcaucccccccccccccccccccccccccccccccaaaggcucuuuucagagccaccagaauu

SEQ ID NO: 13094 - RNA, 4141 nt, Artificial Sequence
  SARS-CoV-2/Wuhan/WIV05/2019__EPI_ISL_402128 spike protein mRNA gc mod (1-1147)(I714C_Y1110C) LumSynth construct
aggagaaagcuuaccauguucguguuucuggugcugcugccccugguguccagccagugugugaaccugaccaccagaacacagcugccuccagccuacaccaacagcuucaccagaggcguguacuaccccgacaagguguucagauccagcgugcugcacucuacccaggaccuguuccugccuuucuucagcaacgugaccugguuccacgccauccacguguccggcaccaauggcaccaagagauucgacaaccccgugcugcccuucaacgacgggguguacuuugccagcaccgagaaguccaacaucaucagaggcuggaucuucggcaccacacuggacagcaagacccagagccugcugaucgugaacaacgccaccaacguggucaucaaagugugcgaguuccaguucugcaacgaccccuuccugggcgucuacuaccacaagaacaacaagagcuggauggaaagcgaguuccggguguacagcagcgccaacaacugcaccuucgaguacgugucccagccuuuccugauggaccuggaaggcaagcagggcaacuucaagaaccugcgcgaguucguguucaagaacaucgacggcuacuucaaaaucuacagcaagcacaccccuaucaaccucgugcgggaucugccucagggcuucucugcucuggaaccccugguggaucugcccaucggcaucaacaucacccgguuucagacacugcuggcccugcacagaagcuaccugacaccuggcgauagcagcagcggauggacagcuggugccgccgcuuacuaugugggcuaccugcagccuagaaccuuccugcugaaguacaacgagaacggcaccaucaccgacgccguggauugugcucuggauccucugagcgagacaaagugcacccugaaguccuucaccguggaaaagggcaucuaccagaccagcaacuuccgggugcagcccaccgaauccaucgugcgguuccccaauaucaccaaucugugccccuucggcgagguguucaaugccaccagauucgccucuguguacgccuggaaccggaagcggaucagcaauugcguggccgacuacuccgugcuguacaacuccgccagcuucagcaccuucaagugcuacggcguguccccuaccaagcugaacgaccugugcuucacaaacguguacgccgacagcuucgugauccggggagaugaagugcggcagauugccccuggacagacaggcaagaucgccgacuacaacuacaagcugcccgacgacuucaccggcugugugauugccuggaacagcaacaaccuggacuccaaagucggcggcaacuacaauuaccuguaccggcuguuccggaaguccaaucugaagcccuucgagcgggacaucagcaccgaaaucuaucaggccggcagcaccccuugcaacggcguggaaggcuucaacugcuacuucccacugcaguccuacggcuuucagcccacaaauggcgugggcuaucagcccuacagagugguggugcugagcuucgaacugcugcaugcuccugccacagugugcggcccuaagaaaagcaccaaucucgugaagaacaaaugcgugaacuucaacuucaacggccugaccggcaccggcgugcugacagagagcaacaagaaguuccugccauuccagcaguuuggccgggauaucgccgauaccacagacgccguuagagauccccagacacuggaaauccuggacaucaccccaugcagcuucggcggagugucugugaucaccccuggcaccaacaccagcaaucagguggcagugcuguaccaggacgugaacuguaccgaagugcccguggccauucacgccgaucagcugacaccuacauggcggguguacuccaccggcagcaauguguuucagaccagagccggcugucugaucggagccgagcacgugaacaauagcuacgagugcgacauccccaucggcgcuggcaucugugccagcuaccagacacagacaaacagccccagacgggcuagaagcguggccagccagagcaucauugccuacacaaugucucugggcgccgagaacagcguggccuacuccaacaacucuaucgcuugccccaccaacuucaccaucagcgugaccaccgagauccugccuguguccaugaccaagaccagcguggacugcaccauguacaucugcggcgauuccaccgagugcuccaaccugcugcugcaguacggcagcuucugcacccagcugaauagagcccugacagggaucgccguggaacaggacaagaacacccaagagguguucgcccaagugaagcaaaucuacaagaccccuccuaucaaggacuucggcggcuucaauuucagccagauucugcccgauccuagcaagcccagcaagcggagcuucaucgaggaccugcuguucaacaaagugacacuggccgacgccggcuucaucaagcaguauggcgauugucugggcgacauugccgccagggaucugauuugcgcccagaaguuuaacggacugacagugcugccuccucugcugaccgaugagaugaucgcccaguacacaucugcccugcuggccggcacaaucacaagcggcuggacauuuggagcuggcgccgcucugcagauccccuuugcuaugcagauggccuaccgguucaacggcaucggagugacccagaaugugcuguacgagaaccagaagcugaucgccaaccaguucaacagcgccaucggcaagauccaggacagccugagcagcacagcaagcgcccugggaaagcugcaggacguggucaaccagaaugcccaggcacugaacacccuggucaagcagcuguccuccaacuucggcgccaucagcucugugcugaacgauauccugagcagacuggacaaggucgaggccgaggugcagaucgacagacugaucacaggcagacugcagagccuccagacauacgugacccagcagcugaucagagccgccgagauuagagccucugccaaucuggccgccaccaagaugucugagugugugcugggccagagcaagagaguggacuuuugcggcaagggcuaccaccugaugagcuucccucagucugccccucacggcgugguguuucugcacgugacauaugugcccgcucaagagaagaauuucaccaccgcuccagccaucugccacgacggcaaagcccacuuuccuagagaaggcguguucguguccaacggcacccauugguucgugacacagcggaacuucugugagccccagaucaucaccaccgacaacaccuucgugucuggcaacugcgacguugugaucggcauugugaacaauaccguguacgacccucugcagcccgagcuggacagcggcggaggaucuggcggaggacagaucuacgagggcaagcugacagccgagggccugagauuuggaaucguggccagccgguucaaucacgcccugguggauagacugguggaaggcgccaucgaugccauugucagacacggcggcagagaagaggacaucacccucguuagagugcccggcucuugggagauuccuguggcugcuggcgagcuggcccggaaagaagauaucgacgccguuaucgccaucggcgugcugaucagaggcgccacaccucacuucgacuauaucgccagcgagguguccaaaggccuggccgaucugagccuggaacugagaaagcccaucaccuucggcgugaucaccgcugacacacuggaacaggccauugagagagccggcaccaagcacggcaacaaaggaugggaagccgcucuguccgccaucgagauggccaaccuguucaagagccugcggugaggacuaguuauaagacugacuagcccgaugggccucccaacgggcccuccuccccuccuugcaccgagauuaauaaaaaaaaaaaaaaaaaaaaaaaaaaaaaaaaaaaaaaaaaaaaaaaaaaaaaaaaaaaaaaaaugcaucccccccccccccccccccccccccccccccaaaggcucuuuucagagccaccagaauu

SEQ ID NO: 13095 - RNA, 4141 nt, Artificial Sequence
  SARS-CoV-2/Wuhan/WIV05/2019__EPI_ISL_402128 spike protein mRNA gc mod (1-1147)(P715C_P1069C) LumSynth construct
aggagaaagcuuaccauguucguguuucuggugcugcugccccugguguccagccagugugugaaccugaccaccagaacacagcugccuccagccuacaccaacagcuucaccagaggcguguacuaccccgacaagguguucagauccagcgugcugcacucuacccaggaccuguuccugccuuucuucagcaacgugaccugguuccacgccauccacguguccggcaccaauggcaccaagagauucgacaaccccgugcugcccuucaacgacgggguguacuuugccagcaccgagaaguccaacaucaucagaggcuggaucuucggcaccacacuggacagcaagacccagagccugcugaucgugaacaacgccaccaacguggucaucaaagugugcgaguuccaguucugcaacgaccccuuccugggcgucuacuaccacaagaacaacaagagcuggauggaaagcgaguuccggguguacagcagcgccaacaacugcaccuucgaguacgugucccagccuuuccugauggaccuggaaggcaagcagggcaacuucaagaaccugcgcgaguucguguucaagaacaucgacggcuacuucaaaaucuacagcaagcacaccccuaucaaccucgugcgggaucugccucagggcuucucugcucuggaaccccugguggaucugcccaucggcaucaacaucacccgguuucagacacugcuggcccugcacagaagcuaccugacaccuggcgauagcagcagcggauggacagcuggugccgccgcuuacuaugugggcuaccugcagccuagaaccuuccugcugaaguacaacgagaacggcaccaucaccgacgccguggauugugcucuggauccucugagcgagacaaagugcacccugaaguccuucaccguggaaaagggcaucuaccagaccagcaacuuccgggugcagcccaccgaauccaucgugcgguuccccaauaucaccaaucugugccccuucggcgagguguucaaugccaccagauucgccucuguguacgccuggaaccggaagcggaucagcaauugcguggccgacuacuccgugcuguacaacuccgccagcuucagcaccuucaagugcuacggcguguccccuaccaagcugaacgaccugugcuucacaaacguguacgccgacagcuucgugauccggggagaugaagugcggcagauugccccuggacagacaggcaagaucgccgacuacaacuacaagcugcccgacgacuucaccggcugugugauugccuggaacagcaacaaccuggacuccaaagucggcggcaacuacaauuaccuguaccggcuguuccggaaguccaaucugaagcccuucgagcgggacaucagcaccgaaaucuaucaggccggcagcaccccuugcaacggcguggaaggcuucaacugcuacuucccacugcaguccuacggcuuucagcccacaaauggcgugggcuaucagcccuacagagugguggugcugagcuucgaacugcugcaugcuccugccacagugugcggcccuaagaaaagcaccaaucucgugaagaacaaaugcgugaacuucaacuucaacggccugaccggcaccggcgugcugacagagagcaacaagaaguuccugccauuccagcaguuuggccgggauaucgccgauaccacagacgccguuagagauccccagacacuggaaauccuggacaucaccccaugcagcuucggcggagugucugugaucaccccuggcaccaacaccagcaaucagguggcagugcuguaccaggacgugaacuguaccgaagugcccguggccauucacgccgaucagcugacaccuacauggcggguguacuccaccggcagcaauguguuucagaccagagccggcugucugaucggagccgagcacgugaacaauagcuacgagugcgacauccccaucggcgcuggcaucugugccagcuaccagacacagacaaacagccccagacgggcuagaagcguggccagccagagcaucauugccuacacaaugucucugggcgccgagaacagcguggccuacuccaacaacucuaucgcuaucugcaccaacuucaccaucagcgugaccaccgagauccugccuguguccaugaccaagaccagcguggacugcaccauguacaucugcggcgauuccaccgagugcuccaaccugcugcugcaguacggcagcuucugcacccagcugaauagagcccugacagggaucgccguggaacaggacaagaacacccaagagguguucgcccaagugaagcaaaucuacaagaccccuccuaucaaggacuucggcggcuucaauuucagccagauucugcccgauccuagcaagcccagcaagcggagcuucaucgaggaccugcuguucaacaaagugacacuggccgacgccggcuucaucaagcaguauggcgauugucugggcgacauugccgccagggaucugauuugcgcccagaaguuuaacggacugacagugcugccuccucugcugaccgaugagaugaucgcccaguacacaucugcccugcuggccggcacaaucacaagcggcuggacauuuggagcuggcgccgcucugcagauccccuuugcuaugcagauggccuaccgguucaacggcaucggagugacccagaaugugcuguacgagaaccagaagcugaucgccaaccaguucaacagcgccaucggcaagauccaggacagccugagcagcacagcaagcgcccugggaaagcugcaggacguggucaaccagaaugcccaggcacugaacacccuggucaagcagcuguccuccaacuucggcgccaucagcucugugcugaacgauauccugagcagacuggacaaggucgaggccgaggugcagaucgacagacugaucacaggcagacugcagagccuccagacauacgugacccagcagcugaucagagccgccgagauuagagccucugccaaucuggccgccaccaagaugucugagugugugcugggccagagcaagagaguggacuuuugcggcaagggcuaccaccugaugagcuucccucagucugccccucacggcgugguguuucugcacgugacauaugugugugcucaagagaagaauuucaccaccgcuccagccaucugccacgacggcaaagcccacuuuccuagagaaggcguguucguguccaacggcacccauugguucgugacacagcggaacuucuacgagccccagaucaucaccaccgacaacaccuucgugucuggcaacugcgacguugugaucggcauugugaacaauaccguguacgacccucugcagcccgagcuggacagcggcggaggaucuggcggaggacagaucuacgagggcaagcugacagccgagggccugagauuuggaaucguggccagccgguucaaucacgcccugguggauagacugguggaaggcgccaucgaugccauugucagacacggcggcagagaagaggacaucacccucguuagagugcccggcucuugggagauuccuguggcugcuggcgagcuggcccggaaagaagauaucgacgccguuaucgccaucggcgugcugaucagaggcgccacaccucacuucgacuauaucgccagcgagguguccaaaggccuggccgaucugagccuggaacugagaaagcccaucaccuucggcgugaucaccgcugacacacuggaacaggccauugagagagccggcaccaagcacggcaacaaaggaugggaagccgcucuguccgccaucgagauggccaaccuguucaagagccugcggugaggacuaguuauaagacugacuagcccgaugggccucccaacgggcccuccuccccuccuugcaccgagauuaauaaaaaaaaaaaaaaaaaaaaaaaaaaaaaaaaaaaaaaaaaaaaaaaaaaaaaaaaaaaaaaaaugcaucccccccccccccccccccccccccccccccaaaggcucuuuucagagccaccagaauu

SEQ ID NO: 13096 - RNA, 4141 nt, Artificial Sequence
  SARS-CoV-2/Wuhan/WIV05/2019__EPI_ISL_402128 spike protein mRNA gc mod (1-1147)(G889C_L1034C) LumSynth construct
aggagaaagcuuaccauguucguguuucuggugcugcugccccugguguccagccagugugugaaccugaccaccagaacacagcugccuccagccuacaccaacagcuucaccagaggcguguacuaccccgacaagguguucagauccagcgugcugcacucuacccaggaccuguuccugccuuucuucagcaacgugaccugguuccacgccauccacguguccggcaccaauggcaccaagagauucgacaaccccgugcugcccuucaacgacgggguguacuuugccagcaccgagaaguccaacaucaucagaggcuggaucuucggcaccacacuggacagcaagacccagagccugcugaucgugaacaacgccaccaacguggucaucaaagugugcgaguuccaguucugcaacgaccccuuccugggcgucuacuaccacaagaacaacaagagcuggauggaaagcgaguuccggguguacagcagcgccaacaacugcaccuucgaguacgugucccagccuuuccugauggaccuggaaggcaagcagggcaacuucaagaaccugcgcgaguucguguucaagaacaucgacggcuacuucaaaaucuacagcaagcacaccccuaucaaccucgugcgggaucugccucagggcuucucugcucuggaaccccugguggaucugcccaucggcaucaacaucacccgguuucagacacugcuggcccugcacagaagcuaccugacaccuggcgauagcagcagcggauggacagcuggugccgccgcuuacuaugugggcuaccugcagccuagaaccuuccugcugaaguacaacgagaacggcaccaucaccgacgccguggauugugcucuggauccucugagcgagacaaagugcacccugaaguccuucaccguggaaaagggcaucuaccagaccagcaacuuccgggugcagcccaccgaauccaucgugcgguuccccaauaucaccaaucugugccccuucggcgagguguucaaugccaccagauucgccucuguguacgccuggaaccggaagcggaucagcaauugcguggccgacuacuccgugcuguacaacuccgccagcuucagcaccuucaagugcuacggcguguccccuaccaagcugaacgaccugugcuucacaaacguguacgccgacagcuucgugauccggggagaugaagugcggcagauugccccuggacagacaggcaagaucgccgacuacaacuacaagcugcccgacgacuucaccggcugugugauugccuggaacagcaacaaccuggacuccaaagucggcggcaacuacaauuaccuguaccggcuguuccggaaguccaaucugaagcccuucgagcgggacaucagcaccgaaaucuaucaggccggcagcaccccuugcaacggcguggaaggcuucaacugcuacuucccacugcaguccuacggcuuucagcccacaaauggcgugggcuaucagcccuacagagugguggugcugagcuucgaacugcugcaugcuccugccacagugugcggcccuaagaaaagcaccaaucucgugaagaacaaaugcgugaacuucaacuucaacggccugaccggcaccggcgugcugacagagagcaacaagaaguuccugccauuccagcaguuuggccgggauaucgccgauaccacagacgccguuagagauccccagacacuggaaauccuggacaucaccccaugcagcuucggcggagugucugugaucaccccuggcaccaacaccagcaaucagguggcagugcuguaccaggacgugaacuguaccgaagugcccguggccauucacgccgaucagcugacaccuacauggcggguguacuccaccggcagcaauguguuucagaccagagccggcugucugaucggagccgagcacgugaacaauagcuacgagugcgacauccccaucggcgcuggcaucugugccagcuaccagacacagacaaacagccccagacgggcuagaagcguggccagccagagcaucauugccuacacaaugucucugggcgccgagaacagcguggccuacuccaacaacucuaucgcuauccccaccaacuucaccaucagcgugaccaccgagauccugccuguguccaugaccaagaccagcguggacugcaccauguacaucugcggcgauuccaccgagugcuccaaccugcugcugcaguacggcagcuucugcacccagcugaauagagcccugacagggaucgccguggaacaggacaagaacacccaagagguguucgcccaagugaagcaaaucuacaagaccccuccuaucaaggacuucggcggcuucaauuucagccagauucugcccgauccuagcaagcccagcaagcggagcuucaucgaggaccugcuguucaacaaagugacacuggccgacgccggcuucaucaagcaguauggcgauugucugggcgacauugccgccagggaucugauuugcgcccagaaguuuaacggacugacagugcugccuccucugcugaccgaugagaugaucgcccaguacacaucugcccugcuggccggcacaaucacaagcggcuggacauuuugcgcuggcgccgcucugcagauccccuuugcuaugcagauggccuaccgguucaacggcaucggagugacccagaaugugcuguacgagaaccagaagcugaucgccaaccaguucaacagcgccaucggcaagauccaggacagccugagcagcacagcaagcgcccugggaaagcugcaggacguggucaaccagaaugcccaggcacugaacacccuggucaagcagcuguccuccaacuucggcgccaucagcucugugcugaacgauauccugagcagacuggacaaggucgaggccgaggugcagaucgacagacugaucacaggcagacugcagagccuccagacauacgugacccagcagcugaucagagccgccgagauuagagccucugccaaucuggccgccaccaagaugucugaguguguguguggccagagcaagagaguggacuuuugcggcaagggcuaccaccugaugagcuucccucagucugccccucacggcgugguguuucugcacgugacauaugugcccgcucaagagaagaauuucaccaccgcuccagccaucugccacgacggcaaagcccacuuuccuagagaaggcguguucguguccaacggcacccauugguucgugacacagcggaacuucuacgagccccagaucaucaccaccgacaacaccuucgugucuggcaacugcgacguugugaucggcauugugaacaauaccguguacgacccucugcagcccgagcuggacagcggcggaggaucuggcggaggacagaucuacgagggcaagcugacagccgagggccugagauuuggaaucguggccagccgguucaaucacgcccugguggauagacugguggaaggcgccaucgaugccauugucagacacggcggcagagaagaggacaucacccucguuagagugcccggcucuugggagauuccuguggcugcuggcgagcuggcccggaaagaagauaucgacgccguuaucgccaucggcgugcugaucagaggcgccacaccucacuucgacuauaucgccagcgagguguccaaaggccuggccgaucugagccuggaacugagaaagcccaucaccuucggcgugaucaccgcugacacacuggaacaggccauugagagagccggcaccaagcacggcaacaaaggaugggaagccgcucuguccgccaucgagauggccaaccuguucaagagccugcggugaggacuaguuauaagacugacuagcccgaugggccucccaacgggcccuccuccccuccuugcaccgagauuaauaaaaaaaaaaaaaaaaaaaaaaaaaaaaaaaaaaaaaaaaaaaaaaaaaaaaaaaaaaaaaaaaugcaucccccccccccccccccccccccccccccccaaaggcucuuuucagagccaccagaauu

SEQ ID NO: 13097 - RNA, 4141 nt, Artificial Sequence
  SARS-CoV-2/Wuhan/WIV05/2019__EPI_ISL_402128 spike protein mRNA gc mod (1-1147)(I909C_Y1047C) LumSynth construct
aggagaaagcuuaccauguucguguuucuggugcugcugccccugguguccagccagugugugaaccugaccaccagaacacagcugccuccagccuacaccaacagcuucaccagaggcguguacuaccccgacaagguguucagauccagcgugcugcacucuacccaggaccuguuccugccuuucuucagcaacgugaccugguuccacgccauccacguguccggcaccaauggcaccaagagauucgacaaccccgugcugcccuucaacgacgggguguacuuugccagcaccgagaaguccaacaucaucagaggcuggaucuucggcaccacacuggacagcaagacccagagccugcugaucgugaacaacgccaccaacguggucaucaaagugugcgaguuccaguucugcaacgaccccuuccugggcgucuacuaccacaagaacaacaagagcuggauggaaagcgaguuccggguguacagcagcgccaacaacugcaccuucgaguacgugucccagccuuuccugauggaccuggaaggcaagcagggcaacuucaagaaccugcgcgaguucguguucaagaacaucgacggcuacuucaaaaucuacagcaagcacaccccuaucaaccucgugcgggaucugccucagggcuucucugcucuggaaccccugguggaucugcccaucggcaucaacaucacccgguuucagacacugcuggcccugcacagaagcuaccugacaccuggcgauagcagcagcggauggacagcuggugccgccgcuuacuaugugggcuaccugcagccuagaaccuuccugcugaaguacaacgagaacggcaccaucaccgacgccguggauugugcucuggauccucugagcgagacaaagugcacccugaaguccuucaccguggaaaagggcaucuaccagaccagcaacuuccgggugcagcccaccgaauccaucgugcgguuccccaauaucaccaaucugugccccuucggcgagguguucaaugccaccagauucgccucuguguacgccuggaaccggaagcggaucagcaauugcguggccgacuacuccgugcuguacaacuccgccagcuucagcaccuucaagugcuacggcguguccccuaccaagcugaacgaccugugcuucacaaacguguacgccgacagcuucgugauccggggagaugaagugcggcagauugccccuggacagacaggcaagaucgccgacuacaacuacaagcugcccgacgacuucaccggcugugugauugccuggaacagcaacaaccuggacuccaaagucggcggcaacuacaauuaccuguaccggcuguuccggaaguccaaucugaagcccuucgagcgggacaucagcaccgaaaucuaucaggccggcagcaccccuugcaacggcguggaaggcuucaacugcuacuucccacugcaguccuacggcuuucagcccacaaauggcgugggcuaucagcccuacagagugguggugcugagcuucgaacugcugcaugcuccugccacagugugcggcccuaagaaaagcaccaaucucgugaagaacaaaugcgugaacuucaacuucaacggccugaccggcaccggcgugcugacagagagcaacaagaaguuccugccauuccagcaguuuggccgggauaucgccgauaccacagacgccguuagagauccccagacacuggaaauccuggacaucaccccaugcagcuucggcggagugucugugaucaccccuggcaccaacaccagcaaucagguggcagugcuguaccaggacgugaacuguaccgaagugcccguggccauucacgccgaucagcugacaccuacauggcggguguacuccaccggcagcaauguguuucagaccagagccggcugucugaucggagccgagcacgugaacaauagcuacgagugcgacauccccaucggcgcuggcaucugugccagcuaccagacacagacaaacagccccagacgggcuagaagcguggccagccagagcaucauugccuacacaaugucucugggcgccgagaacagcguggccuacuccaacaacucuaucgcuauccccaccaacuucaccaucagcgugaccaccgagauccugccuguguccaugaccaagaccagcguggacugcaccauguacaucugcggcgauuccaccgagugcuccaaccugcugcugcaguacggcagcuucugcacccagcugaauagagcccugacagggaucgccguggaacaggacaagaacacccaagagguguucgcccaagugaagcaaaucuacaagaccccuccuaucaaggacuucggcggcuucaauuucagccagauucugcccgauccuagcaagcccagcaagcggagcuucaucgaggaccugcuguucaacaaagugacacuggccgacgccggcuucaucaagcaguauggcgauugucugggcgacauugccgccagggaucugauuugcgcccagaaguuuaacggacugacagugcugccuccucugcugaccgaugagaugaucgcccaguacacaucugcccugcuggccggcacaaucacaagcggcuggacauuuggagcuggcgccgcucugcagauccccuuugcuaugcagauggccuaccgguucaacggcugcggagugacccagaaugugcuguacgagaaccagaagcugaucgccaaccaguucaacagcgccaucggcaagauccaggacagccugagcagcacagcaagcgcccugggaaagcugcaggacguggucaaccagaaugcccaggcacugaacacccuggucaagcagcuguccuccaacuucggcgccaucagcucugugcugaacgauauccugagcagacuggacaaggucgaggccgaggugcagaucgacagacugaucacaggcagacugcagagccuccagacauacgugacccagcagcugaucagagccgccgagauuagagccucugccaaucuggccgccaccaagaugucugagugugugcugggccagagcaagagaguggacuuuugcggcaagggcugucaccugaugagcuucccucagucugccccucacggcgugguguuucugcacgugacauaugugcccgcucaagagaagaauuucaccaccgcuccagccaucugccacgacggcaaagcccacuuuccuagagaaggcguguucguguccaacggcacccauugguucgugacacagcggaacuucuacgagccccagaucaucaccaccgacaacaccuucgugucuggcaacugcgacguugugaucggcauugugaacaauaccguguacgacccucugcagcccgagcuggacagcggcggaggaucuggcggaggacagaucuacgagggcaagcugacagccgagggccugagauuuggaaucguggccagccgguucaaucacgcccugguggauagacugguggaaggcgccaucgaugccauugucagacacggcggcagagaagaggacaucacccucguuagagugcccggcucuugggagauuccuguggcugcuggcgagcuggcccggaaagaagauaucgacgccguuaucgccaucggcgugcugaucagaggcgccacaccucacuucgacuauaucgccagcgagguguccaaaggccuggccgaucugagccuggaacugagaaagcccaucaccuucggcgugaucaccgcugacacacuggaacaggccauugagagagccggcaccaagcacggcaacaaaggaugggaagccgcucuguccgccaucgagauggccaaccuguucaagagccugcggugaggacuaguuauaagacugacuagcccgaugggccucccaacgggcccuccuccccuccuugcaccgagauuaauaaaaaaaaaaaaaaaaaaaaaaaaaaaaaaaaaaaaaaaaaaaaaaaaaaaaaaaaaaaaaaaaugcaucccccccccccccccccccccccccccccccaaaggcucuuuucagagccaccagaauu

SEQ ID NO: 13098 - RNA, 4141 nt, Artificial Sequence
  SARS-CoV-2/Wuhan/WIV05/2019__EPI_ISL_402128 spike protein mRNA gc mod (1-1147)(Q965C_S1003C) LumSynth construct
aggagaaagcuuaccauguucguguuucuggugcugcugccccugguguccagccagugugugaaccugaccaccagaacacagcugccuccagccuacaccaacagcuucaccagaggcguguacuaccccgacaagguguucagauccagcgugcugcacucuacccaggaccuguuccugccuuucuucagcaacgugaccugguuccacgccauccacguguccggcaccaauggcaccaagagauucgacaaccccgugcugcccuucaacgacgggguguacuuugccagcaccgagaaguccaacaucaucagaggcuggaucuucggcaccacacuggacagcaagacccagagccugcugaucgugaacaacgccaccaacguggucaucaaagugugcgaguuccaguucugcaacgaccccuuccugggcgucuacuaccacaagaacaacaagagcuggauggaaagcgaguuccggguguacagcagcgccaacaacugcaccuucgaguacgugucccagccuuuccugauggaccuggaaggcaagcagggcaacuucaagaaccugcgcgaguucguguucaagaacaucgacggcuacuucaaaaucuacagcaagcacaccccuaucaaccucgugcgggaucugccucagggcuucucugcucuggaaccccugguggaucugcccaucggcaucaacaucacccgguuucagacacugcuggcccugcacagaagcuaccugacaccuggcgauagcagcagcggauggacagcuggugccgccgcuuacuaugugggcuaccugcagccuagaaccuuccugcugaaguacaacgagaacggcaccaucaccgacgccguggauugugcucuggauccucugagcgagacaaagugcacccugaaguccuucaccguggaaaagggcaucuaccagaccagcaacuuccgggugcagcccaccgaauccaucgugcgguuccccaauaucaccaaucugugccccuucggcgagguguucaaugccaccagauucgccucuguguacgccuggaaccggaagcggaucagcaauugcguggccgacuacuccgugcuguacaacuccgccagcuucagcaccuucaagugcuacggcguguccccuaccaagcugaacgaccugugcuucacaaacguguacgccgacagcuucgugauccggggagaugaagugcggcagauugccccuggacagacaggcaagaucgccgacuacaacuacaagcugcccgacgacuucaccggcugugugauugccuggaacagcaacaaccuggacuccaaagucggcggcaacuacaauuaccuguaccggcuguuccggaaguccaaucugaagcccuucgagcgggacaucagcaccgaaaucuaucaggccggcagcaccccuugcaacggcguggaaggcuucaacugcuacuucccacugcaguccuacggcuuucagcccacaaauggcgugggcuaucagcccuacagagugguggugcugagcuucgaacugcugcaugcuccugccacagugugcggcccuaagaaaagcaccaaucucgugaagaacaaaugcgugaacuucaacuucaacggccugaccggcaccggcgugcugacagagagcaacaagaaguuccugccauuccagcaguuuggccgggauaucgccgauaccacagacgccguuagagauccccagacacuggaaauccuggacaucaccccaugcagcuucggcggagugucugugaucaccccuggcaccaacaccagcaaucagguggcagugcuguaccaggacgugaacuguaccgaagugcccguggccauucacgccgaucagcugacaccuacauggcggguguacuccaccggcagcaauguguuucagaccagagccggcugucugaucggagccgagcacgugaacaauagcuacgagugcgacauccccaucggcgcuggcaucugugccagcuaccagacacagacaaacagccccagacgggcuagaagcguggccagccagagcaucauugccuacacaaugucucugggcgccgagaacagcguggccuacuccaacaacucuaucgcuauccccaccaacuucaccaucagcgugaccaccgagauccugccuguguccaugaccaagaccagcguggacugcaccauguacaucugcggcgauuccaccgagugcuccaaccugcugcugcaguacggcagcuucugcacccagcugaauagagcccugacagggaucgccguggaacaggacaagaacacccaagagguguucgcccaagugaagcaaaucuacaagaccccuccuaucaaggacuucggcggcuucaauuucagccagauucugcccgauccuagcaagcccagcaagcggagcuucaucgaggaccugcuguucaacaaagugacacuggccgacgccggcuucaucaagcaguauggcgauugucugggcgacauugccgccagggaucugauuugcgcccagaaguuuaacggacugacagugcugccuccucugcugaccgaugagaugaucgcccaguacacaucugcccugcuggccggcacaaucacaagcggcuggacauuuggagcuggcgccgcucugcagauccccuuugcuaugcagauggccuaccgguucaacggcaucggagugacccagaaugugcuguacgagaaccagaagcugaucgccaaccaguucaacagcgccaucggcaagauccaggacagccugagcagcacagcaagcgcccugggaaagcugcaggacguggucaaccagaaugcccaggcacugaacacccuggucaagugccuguccuccaacuucggcgccaucagcucugugcugaacgauauccugagcagacuggacaaggucgaggccgaggugcagaucgacagacugaucacaggcagacugcagugucuccagacauacgugacccagcagcugaucagagccgccgagauuagagccucugccaaucuggccgccaccaagaugucugagugugugcugggccagagcaagagaguggacuuuugcggcaagggcuaccaccugaugagcuucccucagucugccccucacggcgugguguuucugcacgugacauaugugcccgcucaagagaagaauuucaccaccgcuccagccaucugccacgacggcaaagcccacuuuccuagagaaggcguguucguguccaacggcacccauugguucgugacacagcggaacuucuacgagccccagaucaucaccaccgacaacaccuucgugucuggcaacugcgacguugugaucggcauugugaacaauaccguguacgacccucugcagcccgagcuggacagcggcggaggaucuggcggaggacagaucuacgagggcaagcugacagccgagggccugagauuuggaaucguggccagccgguucaaucacgcccugguggauagacugguggaaggcgccaucgaugccauugucagacacggcggcagagaagaggacaucacccucguuagagugcccggcucuugggagauuccuguggcugcuggcgagcuggcccggaaagaagauaucgacgccguuaucgccaucggcgugcugaucagaggcgccacaccucacuucgacuauaucgccagcgagguguccaaaggccuggccgaucugagccuggaacugagaaagcccaucaccuucggcgugaucaccgcugacacacuggaacaggccauugagagagccggcaccaagcacggcaacaaaggaugggaagccgcucuguccgccaucgagauggccaaccuguucaagagccugcggugaggacuaguuauaagacugacuagcccgaugggccucccaacgggcccuccuccccuccuugcaccgagauuaauaaaaaaaaaaaaaaaaaaaaaaaaaaaaaaaaaaaaaaaaaaaaaaaaaaaaaaaaaaaaaaaaugcaucccccccccccccccccccccccccccccccaaaggcucuuuucagagccaccagaauu

SEQ ID NO: 13099 - RNA, 4141 nt, Artificial Sequence
  SARS-CoV-2/Wuhan/WIV05/2019__EPI_ISL_402128 spike protein mRNA gc mod (1-1147)(F970C_G999C) LumSynth construct
aggagaaagcuuaccauguucguguuucuggugcugcugccccugguguccagccagugugugaaccugaccaccagaacacagcugccuccagccuacaccaacagcuucaccagaggcguguacuaccccgacaagguguucagauccagcgugcugcacucuacccaggaccuguuccugccuuucuucagcaacgugaccugguuccacgccauccacguguccggcaccaauggcaccaagagauucgacaaccccgugcugcccuucaacgacgggguguacuuugccagcaccgagaaguccaacaucaucagaggcuggaucuucggcaccacacuggacagcaagacccagagccugcugaucgugaacaacgccaccaacguggucaucaaagugugcgaguuccaguucugcaacgaccccuuccugggcgucuacuaccacaagaacaacaagagcuggauggaaagcgaguuccggguguacagcagcgccaacaacugcaccuucgaguacgugucccagccuuuccugauggaccuggaaggcaagcagggcaacuucaagaaccugcgcgaguucguguucaagaacaucgacggcuacuucaaaaucuacagcaagcacaccccuaucaaccucgugcgggaucugccucagggcuucucugcucuggaaccccugguggaucugcccaucggcaucaacaucacccgguuucagacacugcuggcccugcacagaagcuaccugacaccuggcgauagcagcagcggauggacagcuggugccgccgcuuacuaugugggcuaccugcagccuagaaccuuccugcugaaguacaacgagaacggcaccaucaccgacgccguggauugugcucuggauccucugagcgagacaaagugcacccugaaguccuucaccguggaaaagggcaucuaccagaccagcaacuuccgggugcagcccaccgaauccaucgugcgguuccccaauaucaccaaucugugccccuucggcgagguguucaaugccaccagauucgccucuguguacgccuggaaccggaagcggaucagcaauugcguggccgacuacuccgugcuguacaacuccgccagcuucagcaccuucaagugcuacggcguguccccuaccaagcugaacgaccugugcuucacaaacguguacgccgacagcuucgugauccggggagaugaagugcggcagauugccccuggacagacaggcaagaucgccgacuacaacuacaagcugcccgacgacuucaccggcugugugauugccuggaacagcaacaaccuggacuccaaagucggcggcaacuacaauuaccuguaccggcuguuccggaaguccaaucugaagcccuucgagcgggacaucagcaccgaaaucuaucaggccggcagcaccccuugcaacggcguggaaggcuucaacugcuacuucccacugcaguccuacggcuuucagcccacaaauggcgugggcuaucagcccuacagagugguggugcugagcuucgaacugcugcaugcuccugccacagugugcggcccuaagaaaagcaccaaucucgugaagaacaaaugcgugaacuucaacuucaacggccugaccggcaccggcgugcugacagagagcaacaagaaguuccugccauuccagcaguuuggccgggauaucgccgauaccacagacgccguuagagauccccagacacuggaaauccuggacaucaccccaugcagcuucggcggagugucugugaucaccccuggcaccaacaccagcaaucagguggcagugcuguaccaggacgugaacuguaccgaagugcccguggccauucacgccgaucagcugacaccuacauggcggguguacuccaccggcagcaauguguuucagaccagagccggcugucugaucggagccgagcacgugaacaauagcuacgagugcgacauccccaucggcgcuggcaucugugccagcuaccagacacagacaaacagccccagacgggcuagaagcguggccagccagagcaucauugccuacacaaugucucugggcgccgagaacagcguggccuacuccaacaacucuaucgcuauccccaccaacuucaccaucagcgugaccaccgagauccugccuguguccaugaccaagaccagcguggacugcaccauguacaucugcggcgauuccaccgagugcuccaaccugcugcugcaguacggcagcuucugcacccagcugaauagagcccugacagggaucgccguggaacaggacaagaacacccaagagguguucgcccaagugaagcaaaucuacaagaccccuccuaucaaggacuucggcggcuucaauuucagccagauucugcccgauccuagcaagcccagcaagcggagcuucaucgaggaccugcuguucaacaaagugacacuggccgacgccggcuucaucaagcaguauggcgauugucugggcgacauugccgccagggaucugauuugcgcccagaaguuuaacggacugacagugcugccuccucugcugaccgaugagaugaucgcccaguacacaucugcccugcuggccggcacaaucacaagcggcuggacauuuggagcuggcgccgcucugcagauccccuuugcuaugcagauggccuaccgguucaacggcaucggagugacccagaaugugcuguacgagaaccagaagcugaucgccaaccaguucaacagcgccaucggcaagauccaggacagccugagcagcacagcaagcgcccugggaaagcugcaggacguggucaaccagaaugcccaggcacugaacacccuggucaagcagcuguccuccaacugcggcgccaucagcucugugcugaacgauauccugagcagacuggacaaggucgaggccgaggugcagaucgacagacugaucacauguagacugcagagccuccagacauacgugacccagcagcugaucagagccgccgagauuagagccucugccaaucuggccgccaccaagaugucugagugugugcugggccagagcaagagaguggacuuuugcggcaagggcuaccaccugaugagcuucccucagucugccccucacggcgugguguuucugcacgugacauaugugcccgcucaagagaagaauuucaccaccgcuccagccaucugccacgacggcaaagcccacuuuccuagagaaggcguguucguguccaacggcacccauugguucgugacacagcggaacuucuacgagccccagaucaucaccaccgacaacaccuucgugucuggcaacugcgacguugugaucggcauugugaacaauaccguguacgacccucugcagcccgagcuggacagcggcggaggaucuggcggaggacagaucuacgagggcaagcugacagccgagggccugagauuuggaaucguggccagccgguucaaucacgcccugguggauagacugguggaaggcgccaucgaugccauugucagacacggcggcagagaagaggacaucacccucguuagagugcccggcucuugggagauuccuguggcugcuggcgagcuggcccggaaagaagauaucgacgccguuaucgccaucggcgugcugaucagaggcgccacaccucacuucgacuauaucgccagcgagguguccaaaggccuggccgaucugagccuggaacugagaaagcccaucaccuucggcgugaucaccgcugacacacuggaacaggccauugagagagccggcaccaagcacggcaacaaaggaugggaagccgcucuguccgccaucgagauggccaaccuguucaagagccugcggugaggacuaguuauaagacugacuagcccgaugggccucccaacgggcccuccuccccuccuugcaccgagauuaauaaaaaaaaaaaaaaaaaaaaaaaaaaaaaaaaaaaaaaaaaaaaaaaaaaaaaaaaaaaaaaaaugcaucccccccccccccccccccccccccccccccaaaggcucuuuucagagccaccagaauu

SEQ ID NO: 13100 - RNA, 4141 nt, Artificial Sequence
  SARS-CoV-2/Wuhan/WIV05/2019__EPI_ISL_402128 spike protein mRNA gc mod (1-1147)(A972C_R995C) LumSynth construct
aggagaaagcuuaccauguucguguuucuggugcugcugccccugguguccagccagugugugaaccugaccaccagaacacagcugccuccagccuacaccaacagcuucaccagaggcguguacuaccccgacaagguguucagauccagcgugcugcacucuacccaggaccuguuccugccuuucuucagcaacgugaccugguuccacgccauccacguguccggcaccaauggcaccaagagauucgacaaccccgugcugcccuucaacgacgggguguacuuugccagcaccgagaaguccaacaucaucagaggcuggaucuucggcaccacacuggacagcaagacccagagccugcugaucgugaacaacgccaccaacguggucaucaaagugugcgaguuccaguucugcaacgaccccuuccugggcgucuacuaccacaagaacaacaagagcuggauggaaagcgaguuccggguguacagcagcgccaacaacugcaccuucgaguacgugucccagccuuuccugauggaccuggaaggcaagcagggcaacuucaagaaccugcgcgaguucguguucaagaacaucgacggcuacuucaaaaucuacagcaagcacaccccuaucaaccucgugcgggaucugccucagggcuucucugcucuggaaccccugguggaucugcccaucggcaucaacaucacccgguuucagacacugcuggcccugcacagaagcuaccugacaccuggcgauagcagcagcggauggacagcuggugccgccgcuuacuaugugggcuaccugcagccuagaaccuuccugcugaaguacaacgagaacggcaccaucaccgacgccguggauugugcucuggauccucugagcgagacaaagugcacccugaaguccuucaccguggaaaagggcaucuaccagaccagcaacuuccgggugcagcccaccgaauccaucgugcgguuccccaauaucaccaaucugugccccuucggcgagguguucaaugccaccagauucgccucuguguacgccuggaaccggaagcggaucagcaauugcguggccgacuacuccgugcuguacaacuccgccagcuucagcaccuucaagugcuacggcguguccccuaccaagcugaacgaccugugcuucacaaacguguacgccgacagcuucgugauccggggagaugaagugcggcagauugccccuggacagacaggcaagaucgccgacuacaacuacaagcugcccgacgacuucaccggcugugugauugccuggaacagcaacaaccuggacuccaaagucggcggcaacuacaauuaccuguaccggcuguuccggaaguccaaucugaagcccuucgagcgggacaucagcaccgaaaucuaucaggccggcagcaccccuugcaacggcguggaaggcuucaacugcuacuucccacugcaguccuacggcuuucagcccacaaauggcgugggcuaucagcccuacagagugguggugcugagcuucgaacugcugcaugcuccugccacagugugcggcccuaagaaaagcaccaaucucgugaagaacaaaugcgugaacuucaacuucaacggccugaccggcaccggcgugcugacagagagcaacaagaaguuccugccauuccagcaguuuggccgggauaucgccgauaccacagacgccguuagagauccccagacacuggaaauccuggacaucaccccaugcagcuucggcggagugucugugaucaccccuggcaccaacaccagcaaucagguggcagugcuguaccaggacgugaacuguaccgaagugcccguggccauucacgccgaucagcugacaccuacauggcggguguacuccaccggcagcaauguguuucagaccagagccggcugucugaucggagccgagcacgugaacaauagcuacgagugcgacauccccaucggcgcuggcaucugugccagcuaccagacacagacaaacagccccagacgggcuagaagcguggccagccagagcaucauugccuacacaaugucucugggcgccgagaacagcguggccuacuccaacaacucuaucgcuauccccaccaacuucaccaucagcgugaccaccgagauccugccuguguccaugaccaagaccagcguggacugcaccauguacaucugcggcgauuccaccgagugcuccaaccugcugcugcaguacggcagcuucugcacccagcugaauagagcccugacagggaucgccguggaacaggacaagaacacccaagagguguucgcccaagugaagcaaaucuacaagaccccuccuaucaaggacuucggcggcuucaauuucagccagauucugcccgauccuagcaagcccagcaagcggagcuucaucgaggaccugcuguucaacaaagugacacuggccgacgccggcuucaucaagcaguauggcgauugucugggcgacauugccgccagggaucugauuugcgcccagaaguuuaacggacugacagugcugccuccucugcugaccgaugagaugaucgcccaguacacaucugcccugcuggccggcacaaucacaagcggcuggacauuuggagcuggcgccgcucugcagauccccuuugcuaugcagauggccuaccgguucaacggcaucggagugacccagaaugugcuguacgagaaccagaagcugaucgccaaccaguucaacagcgccaucggcaagauccaggacagccugagcagcacagcaagcgcccugggaaagcugcaggacguggucaaccagaaugcccaggcacugaacacccuggucaagcagcuguccuccaacuucggcugcaucagcucugugcugaacgauauccugagcagacuggacaaggucgaggccgaggugcagaucgacugucugaucacaggcagacugcagagccuccagacauacgugacccagcagcugaucagagccgccgagauuagagccucugccaaucuggccgccaccaagaugucugagugugugcugggccagagcaagagaguggacuuuugcggcaagggcuaccaccugaugagcuucccucagucugccccucacggcgugguguuucugcacgugacauaugugcccgcucaagagaagaauuucaccaccgcuccagccaucugccacgacggcaaagcccacuuuccuagagaaggcguguucguguccaacggcacccauugguucgugacacagcggaacuucuacgagccccagaucaucaccaccgacaacaccuucgugucuggcaacugcgacguugugaucggcauugugaacaauaccguguacgacccucugcagcccgagcuggacagcggcggaggaucuggcggaggacagaucuacgagggcaagcugacagccgagggccugagauuuggaaucguggccagccgguucaaucacgcccugguggauagacugguggaaggcgccaucgaugccauugucagacacggcggcagagaagaggacaucacccucguuagagugcccggcucuugggagauuccuguggcugcuggcgagcuggcccggaaagaagauaucgacgccguuaucgccaucggcgugcugaucagaggcgccacaccucacuucgacuauaucgccagcgagguguccaaaggccuggccgaucugagccuggaacugagaaagcccaucaccuucggcgugaucaccgcugacacacuggaacaggccauugagagagccggcaccaagcacggcaacaaaggaugggaagccgcucuguccgccaucgagauggccaaccuguucaagagccugcggugaggacuaguuauaagacugacuagcccgaugggccucccaacgggcccuccuccccuccuugcaccgagauuaauaaaaaaaaaaaaaaaaaaaaaaaaaaaaaaaaaaaaaaaaaaaaaaaaaaaaaaaaaaaaaaaaugcaucccccccccccccccccccccccccccccccaaaggcucuuuucagagccaccagaauu

SEQ ID NO: 13101 - RNA, 4141 nt, Artificial Sequence
  SARS-CoV-2/Wuhan/WIV05/2019__EPI_ISL_402128 spike protein mRNA gc mod (1-1147)(A890C_V1040C) LumSynth construct
aggagaaagcuuaccauguucguguuucuggugcugcugccccugguguccagccagugugugaaccugaccaccagaacacagcugccuccagccuacaccaacagcuucaccagaggcguguacuaccccgacaagguguucagauccagcgugcugcacucuacccaggaccuguuccugccuuucuucagcaacgugaccugguuccacgccauccacguguccggcaccaauggcaccaagagauucgacaaccccgugcugcccuucaacgacgggguguacuuugccagcaccgagaaguccaacaucaucagaggcuggaucuucggcaccacacuggacagcaagacccagagccugcugaucgugaacaacgccaccaacguggucaucaaagugugcgaguuccaguucugcaacgaccccuuccugggcgucuacuaccacaagaacaacaagagcuggauggaaagcgaguuccggguguacagcagcgccaacaacugcaccuucgaguacgugucccagccuuuccugauggaccuggaaggcaagcagggcaacuucaagaaccugcgcgaguucguguucaagaacaucgacggcuacuucaaaaucuacagcaagcacaccccuaucaaccucgugcgggaucugccucagggcuucucugcucuggaaccccugguggaucugcccaucggcaucaacaucacccgguuucagacacugcuggcccugcacagaagcuaccugacaccuggcgauagcagcagcggauggacagcuggugccgccgcuuacuaugugggcuaccugcagccuagaaccuuccugcugaaguacaacgagaacggcaccaucaccgacgccguggauugugcucuggauccucugagcgagacaaagugcacccugaaguccuucaccguggaaaagggcaucuaccagaccagcaacuuccgggugcagcccaccgaauccaucgugcgguuccccaauaucaccaaucugugccccuucggcgagguguucaaugccaccagauucgccucuguguacgccuggaaccggaagcggaucagcaauugcguggccgacuacuccgugcuguacaacuccgccagcuucagcaccuucaagugcuacggcguguccccuaccaagcugaacgaccugugcuucacaaacguguacgccgacagcuucgugauccggggagaugaagugcggcagauugccccuggacagacaggcaagaucgccgacuacaacuacaagcugcccgacgacuucaccggcugugugauugccuggaacagcaacaaccuggacuccaaagucggcggcaacuacaauuaccuguaccggcuguuccggaaguccaaucugaagcccuucgagcgggacaucagcaccgaaaucuaucaggccggcagcaccccuugcaacggcguggaaggcuucaacugcuacuucccacugcaguccuacggcuuucagcccacaaauggcgugggcuaucagcccuacagagugguggugcugagcuucgaacugcugcaugcuccugccacagugugcggcccuaagaaaagcaccaaucucgugaagaacaaaugcgugaacuucaacuucaacggccugaccggcaccggcgugcugacagagagcaacaagaaguuccugccauuccagcaguuuggccgggauaucgccgauaccacagacgccguuagagauccccagacacuggaaauccuggacaucaccccaugcagcuucggcggagugucugugaucaccccuggcaccaacaccagcaaucagguggcagugcuguaccaggacgugaacuguaccgaagugcccguggccauucacgccgaucagcugacaccuacauggcggguguacuccaccggcagcaauguguuucagaccagagccggcugucugaucggagccgagcacgugaacaauagcuacgagugcgacauccccaucggcgcuggcaucugugccagcuaccagacacagacaaacagccccagacgggcuagaagcguggccagccagagcaucauugccuacacaaugucucugggcgccgagaacagcguggccuacuccaacaacucuaucgcuauccccaccaacuucaccaucagcgugaccaccgagauccugccuguguccaugaccaagaccagcguggacugcaccauguacaucugcggcgauuccaccgagugcuccaaccugcugcugcaguacggcagcuucugcacccagcugaauagagcccugacagggaucgccguggaacaggacaagaacacccaagagguguucgcccaagugaagcaaaucuacaagaccccuccuaucaaggacuucggcggcuucaauuucagccagauucugcccgauccuagcaagcccagcaagcggagcuucaucgaggaccugcuguucaacaaagugacacuggccgacgccggcuucaucaagcaguauggcgauugucugggcgacauugccgccagggaucugauuugcgcccagaaguuuaacggacugacagugcugccuccucugcugaccgaugagaugaucgcccaguacacaucugcccugcuggccggcacaaucacaagcggcuggacauuuggaugcggcgccgcucugcagauccccuuugcuaugcagauggccuaccgguucaacggcaucggagugacccagaaugugcuguacgagaaccagaagcugaucgccaaccaguucaacagcgccaucggcaagauccaggacagccugagcagcacagcaagcgcccugggaaagcugcaggacguggucaaccagaaugcccaggcacugaacacccuggucaagcagcuguccuccaacuucggcgccaucagcucugugcugaacgauauccugagcagacuggacaaggucgaggccgaggugcagaucgacagacugaucacaggcagacugcagagccuccagacauacgugacccagcagcugaucagagccgccgagauuagagccucugccaaucuggccgccaccaagaugucugagugugugcugggccagagcaagagaugugacuuuugcggcaagggcuaccaccugaugagcuucccucagucugccccucacggcgugguguuucugcacgugacauaugugcccgcucaagagaagaauuucaccaccgcuccagccaucugccacgacggcaaagcccacuuuccuagagaaggcguguucguguccaacggcacccauugguucgugacacagcggaacuucuacgagccccagaucaucaccaccgacaacaccuucgugucuggcaacugcgacguugugaucggcauugugaacaauaccguguacgacccucugcagcccgagcuggacagcggcggaggaucuggcggaggacagaucuacgagggcaagcugacagccgagggccugagauuuggaaucguggccagccgguucaaucacgcccugguggauagacugguggaaggcgccaucgaugccauugucagacacggcggcagagaagaggacaucacccucguuagagugcccggcucuugggagauuccuguggcugcuggcgagcuggcccggaaagaagauaucgacgccguuaucgccaucggcgugcugaucagaggcgccacaccucacuucgacuauaucgccagcgagguguccaaaggccuggccgaucugagccuggaacugagaaagcccaucaccuucggcgugaucaccgcugacacacuggaacaggccauugagagagccggcaccaagcacggcaacaaaggaugggaagccgcucuguccgccaucgagauggccaaccuguucaagagccugcggugaggacuaguuauaagacugacuagcccgaugggccucccaacgggcccuccuccccuccuugcaccgagauuaauaaaaaaaaaaaaaaaaaaaaaaaaaaaaaaaaaaaaaaaaaaaaaaaaaaaaaaaaaaaaaaaaugcaucccccccccccccccccccccccccccccccaaaggcucuuuucagagccaccagaauu

SEQ ID NO: 13102 - RNA, 4141 nt, Artificial Sequence
  SARS-CoV-2/Wuhan/WIV05/2019__EPI_ISL_402128 spike protein mRNA gc mod (1-1147)(T874C_S1055C) LumSynth construct
aggagaaagcuuaccauguucguguuucuggugcugcugccccugguguccagccagugugugaaccugaccaccagaacacagcugccuccagccuacaccaacagcuucaccagaggcguguacuaccccgacaagguguucagauccagcgugcugcacucuacccaggaccuguuccugccuuucuucagcaacgugaccugguuccacgccauccacguguccggcaccaauggcaccaagagauucgacaaccccgugcugcccuucaacgacgggguguacuuugccagcaccgagaaguccaacaucaucagaggcuggaucuucggcaccacacuggacagcaagacccagagccugcugaucgugaacaacgccaccaacguggucaucaaagugugcgaguuccaguucugcaacgaccccuuccugggcgucuacuaccacaagaacaacaagagcuggauggaaagcgaguuccggguguacagcagcgccaacaacugcaccuucgaguacgugucccagccuuuccugauggaccuggaaggcaagcagggcaacuucaagaaccugcgcgaguucguguucaagaacaucgacggcuacuucaaaaucuacagcaagcacaccccuaucaaccucgugcgggaucugccucagggcuucucugcucuggaaccccugguggaucugcccaucggcaucaacaucacccgguuucagacacugcuggcccugcacagaagcuaccugacaccuggcgauagcagcagcggauggacagcuggugccgccgcuuacuaugugggcuaccugcagccuagaaccuuccugcugaaguacaacgagaacggcaccaucaccgacgccguggauugugcucuggauccucugagcgagacaaagugcacccugaaguccuucaccguggaaaagggcaucuaccagaccagcaacuuccgggugcagcccaccgaauccaucgugcgguuccccaauaucaccaaucugugccccuucggcgagguguucaaugccaccagauucgccucuguguacgccuggaaccggaagcggaucagcaauugcguggccgacuacuccgugcuguacaacuccgccagcuucagcaccuucaagugcuacggcguguccccuaccaagcugaacgaccugugcuucacaaacguguacgccgacagcuucgugauccggggagaugaagugcggcagauugccccuggacagacaggcaagaucgccgacuacaacuacaagcugcccgacgacuucaccggcugugugauugccuggaacagcaacaaccuggacuccaaagucggcggcaacuacaauuaccuguaccggcuguuccggaaguccaaucugaagcccuucgagcgggacaucagcaccgaaaucuaucaggccggcagcaccccuugcaacggcguggaaggcuucaacugcuacuucccacugcaguccuacggcuuucagcccacaaauggcgugggcuaucagcccuacagagugguggugcugagcuucgaacugcugcaugcuccugccacagugugcggcccuaagaaaagcaccaaucucgugaagaacaaaugcgugaacuucaacuucaacggccugaccggcaccggcgugcugacagagagcaacaagaaguuccugccauuccagcaguuuggccgggauaucgccgauaccacagacgccguuagagauccccagacacuggaaauccuggacaucaccccaugcagcuucggcggagugucugugaucaccccuggcaccaacaccagcaaucagguggcagugcuguaccaggacgugaacuguaccgaagugcccguggccauucacgccgaucagcugacaccuacauggcggguguacuccaccggcagcaauguguuucagaccagagccggcugucugaucggagccgagcacgugaacaauagcuacgagugcgacauccccaucggcgcuggcaucugugccagcuaccagacacagacaaacagccccagacgggcuagaagcguggccagccagagcaucauugccuacacaaugucucugggcgccgagaacagcguggccuacuccaacaacucuaucgcuauccccaccaacuucaccaucagcgugaccaccgagauccugccuguguccaugaccaagaccagcguggacugcaccauguacaucugcggcgauuccaccgagugcuccaaccugcugcugcaguacggcagcuucugcacccagcugaauagagcccugacagggaucgccguggaacaggacaagaacacccaagagguguucgcccaagugaagcaaaucuacaagaccccuccuaucaaggacuucggcggcuucaauuucagccagauucugcccgauccuagcaagcccagcaagcggagcuucaucgaggaccugcuguucaacaaagugacacuggccgacgccggcuucaucaagcaguauggcgauugucugggcgacauugccgccagggaucugauuugcgcccagaaguuuaacggacugacagugcugccuccucugcugaccgaugagaugaucgcccaguacugcucugcccugcuggccggcacaaucacaagcggcuggacauuuggagcuggcgccgcucugcagauccccuuugcuaugcagauggccuaccgguucaacggcaucggagugacccagaaugugcuguacgagaaccagaagcugaucgccaaccaguucaacagcgccaucggcaagauccaggacagccugagcagcacagcaagcgcccugggaaagcugcaggacguggucaaccagaaugcccaggcacugaacacccuggucaagcagcuguccuccaacuucggcgccaucagcucugugcugaacgauauccugagcagacuggacaaggucgaggccgaggugcagaucgacagacugaucacaggcagacugcagagccuccagacauacgugacccagcagcugaucagagccgccgagauuagagccucugccaaucuggccgccaccaagaugucugagugugugcugggccagagcaagagaguggacuuuugcggcaagggcuaccaccugaugagcuucccucagugcgccccucacggcgugguguuucugcacgugacauaugugcccgcucaagagaagaauuucaccaccgcuccagccaucugccacgacggcaaagcccacuuuccuagagaaggcguguucguguccaacggcacccauugguucgugacacagcggaacuucuacgagccccagaucaucaccaccgacaacaccuucgugucuggcaacugcgacguugugaucggcauugugaacaauaccguguacgacccucugcagcccgagcuggacagcggcggaggaucuggcggaggacagaucuacgagggcaagcugacagccgagggccugagauuuggaaucguggccagccgguucaaucacgcccugguggauagacugguggaaggcgccaucgaugccauugucagacacggcggcagagaagaggacaucacccucguuagagugcccggcucuugggagauuccuguggcugcuggcgagcuggcccggaaagaagauaucgacgccguuaucgccaucggcgugcugaucagaggcgccacaccucacuucgacuauaucgccagcgagguguccaaaggccuggccgaucugagccuggaacugagaaagcccaucaccuucggcgugaucaccgcugacacacuggaacaggccauugagagagccggcaccaagcacggcaacaaaggaugggaagccgcucuguccgccaucgagauggccaaccuguucaagagccugcggugaggacuaguuauaagacugacuagcccgaugggccucccaacgggcccuccuccccuccuugcaccgagauuaauaaaaaaaaaaaaaaaaaaaaaaaaaaaaaaaaaaaaaaaaaaaaaaaaaaaaaaaaaaaaaaaaugcaucccccccccccccccccccccccccccccccaaaggcucuuuucagagccaccagaauu

SEQ ID NO: 13103 - RNA, 4165 nt, Artificial Sequence
  SARS-CoV-2/Wuhan/WIV05/2019__EPI_ISL_402128 spike protein mRNA gc mod (1-1147) Ferritin construct
aggagaaagcuuaccauguucguguuucuggugcugcugccccugguguccagccagugugugaaccugaccaccagaacacagcugccuccagccuacaccaacagcuucaccagaggcguguacuaccccgacaagguguucagauccagcgugcugcacucuacccaggaccuguuccugccuuucuucagcaacgugaccugguuccacgccauccacguguccggcaccaauggcaccaagagauucgacaaccccgugcugcccuucaacgacgggguguacuuugccagcaccgagaaguccaacaucaucagaggcuggaucuucggcaccacacuggacagcaagacccagagccugcugaucgugaacaacgccaccaacguggucaucaaagugugcgaguuccaguucugcaacgaccccuuccugggcgucuacuaccacaagaacaacaagagcuggauggaaagcgaguuccggguguacagcagcgccaacaacugcaccuucgaguacgugucccagccuuuccugauggaccuggaaggcaagcagggcaacuucaagaaccugcgcgaguucguguucaagaacaucgacggcuacuucaaaaucuacagcaagcacaccccuaucaaccucgugcgggaucugccucagggcuucucugcucuggaaccccugguggaucugcccaucggcaucaacaucacccgguuucagacacugcuggcccugcacagaagcuaccugacaccuggcgauagcagcagcggauggacagcuggugccgccgcuuacuaugugggcuaccugcagccuagaaccuuccugcugaaguacaacgagaacggcaccaucaccgacgccguggauugugcucuggauccucugagcgagacaaagugcacccugaaguccuucaccguggaaaagggcaucuaccagaccagcaacuuccgggugcagcccaccgaauccaucgugcgguuccccaauaucaccaaucugugccccuucggcgagguguucaaugccaccagauucgccucuguguacgccuggaaccggaagcggaucagcaauugcguggccgacuacuccgugcuguacaacuccgccagcuucagcaccuucaagugcuacggcguguccccuaccaagcugaacgaccugugcuucacaaacguguacgccgacagcuucgugauccggggagaugaagugcggcagauugccccuggacagacaggcaagaucgccgacuacaacuacaagcugcccgacgacuucaccggcugugugauugccuggaacagcaacaaccuggacuccaaagucggcggcaacuacaauuaccuguaccggcuguuccggaaguccaaucugaagcccuucgagcgggacaucagcaccgaaaucuaucaggccggcagcaccccuugcaacggcguggaaggcuucaacugcuacuucccacugcaguccuacggcuuucagcccacaaauggcgugggcuaucagcccuacagagugguggugcugagcuucgaacugcugcaugcuccugccacagugugcggcccuaagaaaagcaccaaucucgugaagaacaaaugcgugaacuucaacuucaacggccugaccggcaccggcgugcugacagagagcaacaagaaguuccugccauuccagcaguuuggccgggauaucgccgauaccacagacgccguuagagauccccagacacuggaaauccuggacaucaccccaugcagcuucggcggagugucugugaucaccccuggcaccaacaccagcaaucagguggcagugcuguaccaggacgugaacuguaccgaagugcccguggccauucacgccgaucagcugacaccuacauggcggguguacuccaccggcagcaauguguuucagaccagagccggcugucugaucggagccgagcacgugaacaauagcuacgagugcgacauccccaucggcgcuggcaucugugccagcuaccagacacagacaaacagccccagacgggcuagaagcguggccagccagagcaucauugccuacacaaugucucugggcgccgagaacagcguggccuacuccaacaacucuaucgcuauccccaccaacuucaccaucagcgugaccaccgagauccugccuguguccaugaccaagaccagcguggacugcaccauguacaucugcggcgauuccaccgagugcuccaaccugcugcugcaguacggcagcuucugcacccagcugaauagagcccugacagggaucgccguggaacaggacaagaacacccaagagguguucgcccaagugaagcaaaucuacaagaccccuccuaucaaggacuucggcggcuucaauuucagccagauucugcccgauccuagcaagcccagcaagcggagcuucaucgaggaccugcuguucaacaaagugacacuggccgacgccggcuucaucaagcaguauggcgauugucugggcgacauugccgccagggaucugauuugcgcccagaaguuuaacggacugacagugcugccuccucugcugaccgaugagaugaucgcccaguacacaucugcccugcuggccggcacaaucacaagcggcuggacauuuggagcuggcgccgcucugcagauccccuuugcuaugcagauggccuaccgguucaacggcaucggagugacccagaaugugcuguacgagaaccagaagcugaucgccaaccaguucaacagcgccaucggcaagauccaggacagccugagcagcacagcaagcgcccugggaaagcugcaggacguggucaaccagaaugcccaggcacugaacacccuggucaagcagcuguccuccaacuucggcgccaucagcucugugcugaacgauauccugagcagacuggacaaggucgaggccgaggugcagaucgacagacugaucacaggcagacugcagagccuccagacauacgugacccagcagcugaucagagccgccgagauuagagccucugccaaucuggccgccaccaagaugucugagugugugcugggccagagcaagagaguggacuuuugcggcaagggcuaccaccugaugagcuucccucagucugccccucacggcgugguguuucugcacgugacauaugugcccgcucaagagaagaauuucaccaccgcuccagccaucugccacgacggcaaagcccacuuuccuagagaaggcguguucguguccaacggcacccauugguucgugacacagcggaacuucuacgagccccagaucaucaccaccgacaacaccuucgugucuggcaacugcgacguugugaucggcauugugaacaauaccguguacgacccucugcagcccgagcuggacagcggaggcggaggaucugacaucaucaagcugcugaacgagcaagugaacaaagagaugcagagcagcaaccuguacaugagcaugagcagcuggugcuacacccacagccuugauggcgccggacuguuccuguuugaucacgccgccgaggaauacgagcacgccaagaagcugaucaucuuccugaacgagaacaacgugcccgugcagcugaccagcauuucugccccugagcacaaguucgagggccugacacagaucuuccagaaggccuacgaacacgagcagcacaucagcgagagcaucaacaacaucguggaccacgccauuaagagcaaggaucacgccaccuucaacuuucugcagugguacguggccgaacagcacgaggaagaggugcuguucaaggacauccuggacaagaucgagcugaucggcaacgagaaccacggccuguaucuggccgaccaguacgugaagggaaucgccaagagcagaaagagcugaggacuaguuauaagacugacuagcccgaugggccucccaacgggcccuccuccccuccuugcaccgagauuaauaaaaaaaaaaaaaaaaaaaaaaaaaaaaaaaaaaaaaaaaaaaaaaaaaaaaaaaaaaaaaaaaugcaucccccccccccccccccccccccccccccccaaaggcucuuuucagagccaccagaauu

SEQ ID NO: 13104 - RNA, 4165 nt, Artificial Sequence
  SARS-CoV-2/Wuhan/WIV05/2019__EPI_ISL_402128 spike protein mRNA gc mod (1-1147)(K986P_V987P) Ferritin construct
aggagaaagcuuaccauguucguguuucuggugcugcugccccugguguccagccagugugugaaccugaccaccagaacacagcugccuccagccuacaccaacagcuucaccagaggcguguacuaccccgacaagguguucagauccagcgugcugcacucuacccaggaccuguuccugccuuucuucagcaacgugaccugguuccacgccauccacguguccggcaccaauggcaccaagagauucgacaaccccgugcugcccuucaacgacgggguguacuuugccagcaccgagaaguccaacaucaucagaggcuggaucuucggcaccacacuggacagcaagacccagagccugcugaucgugaacaacgccaccaacguggucaucaaagugugcgaguuccaguucugcaacgaccccuuccugggcgucuacuaccacaagaacaacaagagcuggauggaaagcgaguuccggguguacagcagcgccaacaacugcaccuucgaguacgugucccagccuuuccugauggaccuggaaggcaagcagggcaacuucaagaaccugcgcgaguucguguucaagaacaucgacggcuacuucaaaaucuacagcaagcacaccccuaucaaccucgugcgggaucugccucagggcuucucugcucuggaaccccugguggaucugcccaucggcaucaacaucacccgguuucagacacugcuggcccugcacagaagcuaccugacaccuggcgauagcagcagcggauggacagcuggugccgccgcuuacuaugugggcuaccugcagccuagaaccuuccugcugaaguacaacgagaacggcaccaucaccgacgccguggauugugcucuggauccucugagcgagacaaagugcacccugaaguccuucaccguggaaaagggcaucuaccagaccagcaacuuccgggugcagcccaccgaauccaucgugcgguuccccaauaucaccaaucugugccccuucggcgagguguucaaugccaccagauucgccucuguguacgccuggaaccggaagcggaucagcaauugcguggccgacuacuccgugcuguacaacuccgccagcuucagcaccuucaagugcuacggcguguccccuaccaagcugaacgaccugugcuucacaaacguguacgccgacagcuucgugauccggggagaugaagugcggcagauugccccuggacagacaggcaagaucgccgacuacaacuacaagcugcccgacgacuucaccggcugugugauugccuggaacagcaacaaccuggacuccaaagucggcggcaacuacaauuaccuguaccggcuguuccggaaguccaaucugaagcccuucgagcgggacaucagcaccgaaaucuaucaggccggcagcaccccuugcaacggcguggaaggcuucaacugcuacuucccacugcaguccuacggcuuucagcccacaaauggcgugggcuaucagcccuacagagugguggugcugagcuucgaacugcugcaugcuccugccacagugugcggcccuaagaaaagcaccaaucucgugaagaacaaaugcgugaacuucaacuucaacggccugaccggcaccggcgugcugacagagagcaacaagaaguuccugccauuccagcaguuuggccgggauaucgccgauaccacagacgccguuagagauccccagacacuggaaauccuggacaucaccccaugcagcuucggcggagugucugugaucaccccuggcaccaacaccagcaaucagguggcagugcuguaccaggacgugaacuguaccgaagugcccguggccauucacgccgaucagcugacaccuacauggcggguguacuccaccggcagcaauguguuucagaccagagccggcugucugaucggagccgagcacgugaacaauagcuacgagugcgacauccccaucggcgcuggcaucugugccagcuaccagacacagacaaacagccccagacgggcuagaagcguggccagccagagcaucauugccuacacaaugucucugggcgccgagaacagcguggccuacuccaacaacucuaucgcuauccccaccaacuucaccaucagcgugaccaccgagauccugccuguguccaugaccaagaccagcguggacugcaccauguacaucugcggcgauuccaccgagugcuccaaccugcugcugcaguacggcagcuucugcacccagcugaauagagcccugacagggaucgccguggaacaggacaagaacacccaagagguguucgcccaagugaagcaaaucuacaagaccccuccuaucaaggacuucggcggcuucaauuucagccagauucugcccgauccuagcaagcccagcaagcggagcuucaucgaggaccugcuguucaacaaagugacacuggccgacgccggcuucaucaagcaguauggcgauugucugggcgacauugccgccagggaucugauuugcgcccagaaguuuaacggacugacagugcugccuccucugcugaccgaugagaugaucgcccaguacacaucugcccugcuggccggcacaaucacaagcggcuggacauuuggagcuggcgccgcucugcagauccccuuugcuaugcagauggccuaccgguucaacggcaucggagugacccagaaugugcuguacgagaaccagaagcugaucgccaaccaguucaacagcgccaucggcaagauccaggacagccugagcagcacagcaagcgcccugggaaagcugcaggacguggucaaccagaaugcccaggcacugaacacccuggucaagcagcuguccuccaacuucggcgccaucagcucugugcugaacgauauccugagcagacuggacccuccugaggccgaggugcagaucgacagacugaucacaggcagacugcagagccuccagacauacgugacccagcagcugaucagagccgccgagauuagagccucugccaaucuggccgccaccaagaugucugagugugugcugggccagagcaagagaguggacuuuugcggcaagggcuaccaccugaugagcuucccucagucugccccucacggcgugguguuucugcacgugacauaugugcccgcucaagagaagaauuucaccaccgcuccagccaucugccacgacggcaaagcccacuuuccuagagaaggcguguucguguccaacggcacccauugguucgugacacagcggaacuucuacgagccccagaucaucaccaccgacaacaccuucgugucuggcaacugcgacguugugaucggcauugugaacaauaccguguacgacccucugcagcccgagcuggacagcggaggcggaggaucugacaucaucaagcugcugaacgagcaagugaacaaagagaugcagagcagcaaccuguacaugagcaugagcagcuggugcuacacccacagccuugauggcgccggacuguuccuguuugaucacgccgccgaggaauacgagcacgccaagaagcugaucaucuuccugaacgagaacaacgugcccgugcagcugaccagcauuucugccccugagcacaaguucgagggccugacacagaucuuccagaaggccuacgaacacgagcagcacaucagcgagagcaucaacaacaucguggaccacgccauuaagagcaaggaucacgccaccuucaacuuucugcagugguacguggccgaacagcacgaggaagaggugcuguucaaggacauccuggacaagaucgagcugaucggcaacgagaaccacggccuguaucuggccgaccaguacgugaagggaaucgccaagagcagaaagagcugaggacuaguuauaagacugacuagcccgaugggccucccaacgggcccuccuccccuccuugcaccgagauuaauaaaaaaaaaaaaaaaaaaaaaaaaaaaaaaaaaaaaaaaaaaaaaaaaaaaaaaaaaaaaaaaaugcaucccccccccccccccccccccccccccccccaaaggcucuuuucagagccaccagaauu

SEQ ID NO: 13105 - RNA, 4165 nt, Artificial Sequence
  SARS-CoV-2/Wuhan/WIV05/2019__EPI_ISL_402128 spike protein mRNA gc mod (1-1147)(K986P_V987P_T887WN_A1020W) Ferritin construct
aggagaaagcuuaccauguucguguuucuggugcugcugccccugguguccagccagugugugaaccugaccaccagaacacagcugccuccagccuacaccaacagcuucaccagaggcguguacuaccccgacaagguguucagauccagcgugcugcacucuacccaggaccuguuccugccuuucuucagcaacgugaccugguuccacgccauccacguguccggcaccaauggcaccaagagauucgacaaccccgugcugcccuucaacgacgggguguacuuugccagcaccgagaaguccaacaucaucagaggcuggaucuucggcaccacacuggacagcaagacccagagccugcugaucgugaacaacgccaccaacguggucaucaaagugugcgaguuccaguucugcaacgaccccuuccugggcgucuacuaccacaagaacaacaagagcuggauggaaagcgaguuccggguguacagcagcgccaacaacugcaccuucgaguacgugucccagccuuuccugauggaccuggaaggcaagcagggcaacuucaagaaccugcgcgaguucguguucaagaacaucgacggcuacuucaaaaucuacagcaagcacaccccuaucaaccucgugcgggaucugccucagggcuucucugcucuggaaccccugguggaucugcccaucggcaucaacaucacccgguuucagacacugcuggcccugcacagaagcuaccugacaccuggcgauagcagcagcggauggacagcuggugccgccgcuuacuaugugggcuaccugcagccuagaaccuuccugcugaaguacaacgagaacggcaccaucaccgacgccguggauugugcucuggauccucugagcgagacaaagugcacccugaaguccuucaccguggaaaagggcaucuaccagaccagcaacuuccgggugcagcccaccgaauccaucgugcgguuccccaauaucaccaaucugugccccuucggcgagguguucaaugccaccagauucgccucuguguacgccuggaaccggaagcggaucagcaauugcguggccgacuacuccgugcuguacaacuccgccagcuucagcaccuucaagugcuacggcguguccccuaccaagcugaacgaccugugcuucacaaacguguacgccgacagcuucgugauccggggagaugaagugcggcagauugccccuggacagacaggcaagaucgccgacuacaacuacaagcugcccgacgacuucaccggcugugugauugccuggaacagcaacaaccuggacuccaaagucggcggcaacuacaauuaccuguaccggcuguuccggaaguccaaucugaagcccuucgagcgggacaucagcaccgaaaucuaucaggccggcagcaccccuugcaacggcguggaaggcuucaacugcuacuucccacugcaguccuacggcuuucagcccacaaauggcgugggcuaucagcccuacagagugguggugcugagcuucgaacugcugcaugcuccugccacagugugcggcccuaagaaaagcaccaaucucgugaagaacaaaugcgugaacuucaacuucaacggccugaccggcaccggcgugcugacagagagcaacaagaaguuccugccauuccagcaguuuggccgggauaucgccgauaccacagacgccguuagagauccccagacacuggaaauccuggacaucaccccaugcagcuucggcggagugucugugaucaccccuggcaccaacaccagcaaucagguggcagugcuguaccaggacgugaacuguaccgaagugcccguggccauucacgccgaucagcugacaccuacauggcggguguacuccaccggcagcaauguguuucagaccagagccggcugucugaucggagccgagcacgugaacaauagcuacgagugcgacauccccaucggcgcuggcaucugugccagcuaccagacacagacaaacagccccagacgggcuagaagcguggccagccagagcaucauugccuacacaaugucucugggcgccgagaacagcguggccuacuccaacaacucuaucgcuauccccaccaacuucaccaucagcgugaccaccgagauccugccuguguccaugaccaagaccagcguggacugcaccauguacaucugcggcgauuccaccgagugcuccaaccugcugcugcaguacggcagcuucugcacccagcugaauagagcccugacagggaucgccguggaacaggacaagaacacccaagagguguucgcccaagugaagcaaaucuacaagaccccuccuaucaaggacuucggcggcuucaauuucagccagauucugcccgauccuagcaagcccagcaagcggagcuucaucgaggaccugcuguucaacaaagugacacuggccgacgccggcuucaucaagcaguauggcgauugucugggcgacauugccgccagggaucugauuugcgcccagaaguuuaacggacugacagugcugccuccucugcugaccgaugagaugaucgcccaguacacaucugcccugcuggccggcacaaucacaagcggcuggugguuuggagcuggcgccgcucugcagauccccuuugcuaugcagauggccuaccgguucaacggcaucggagugacccagaaugugcuguacgagaaccagaagcugaucgccaaccaguucaacagcgccaucggcaagauccaggacagccugagcagcacagcaagcgcccugggaaagcugcaggacguggucaaccagaaugcccaggcacugaacacccuggucaagcagcuguccuccaacuucggcgccaucagcucugugcugaacgauauccugagcagacuggacccuccugaggccgaggugcagaucgacagacugaucacaggcagacugcagagccuccagacauacgugacccagcagcugaucagagccgccgagauuagauggucugccaaucuggccgccaccaagaugucugagugugugcugggccagagcaagagaguggacuuuugcggcaagggcuaccaccugaugagcuucccucagucugccccucacggcgugguguuucugcacgugacauaugugcccgcucaagagaagaauuucaccaccgcuccagccaucugccacgacggcaaagcccacuuuccuagagaaggcguguucguguccaacggcacccauugguucgugacacagcggaacuucuacgagccccagaucaucaccaccgacaacaccuucgugucuggcaacugcgacguugugaucggcauugugaacaauaccguguacgacccucugcagcccgagcuggacagcggaggcggaggaucugacaucaucaagcugcugaacgagcaagugaacaaagagaugcagagcagcaaccuguacaugagcaugagcagcuggugcuacacccacagccuugauggcgccggacuguuccuguuugaucacgccgccgaggaauacgagcacgccaagaagcugaucaucuuccugaacgagaacaacgugcccgugcagcugaccagcauuucugccccugagcacaaguucgagggccugacacagaucuuccagaaggccuacgaacacgagcagcacaucagcgagagcaucaacaacaucguggaccacgccauuaagagcaaggaucacgccaccuucaacuuucugcagugguacguggccgaacagcacgaggaagaggugcuguucaaggacauccuggacaagaucgagcugaucggcaacgagaaccacggccuguaucuggccgaccaguacgugaagggaaucgccaagagcagaaagagcugaggacuaguuauaagacugacuagcccgaugggccucccaacgggcccuccuccccuccuugcaccgagauuaauaaaaaaaaaaaaaaaaaaaaaaaaaaaaaaaaaaaaaaaaaaaaaaaaaaaaaaaaaaaaaaaaugcaucccccccccccccccccccccccccccccccaaaggcucuuuucagagccaccagaauu

SEQ ID NO: 13106 - RNA, 4165 nt, Artificial Sequence
  SARS-CoV-2/Wuhan/WIV05/2019__EPI_ISL_402128 spike protein mRNA gc mod (1-1147)(K986P_V987P_P1069F) Ferritin construct
aggagaaagcuuaccauguucguguuucuggugcugcugccccugguguccagccagugugugaaccugaccaccagaacacagcugccuccagccuacaccaacagcuucaccagaggcguguacuaccccgacaagguguucagauccagcgugcugcacucuacccaggaccuguuccugccuuucuucagcaacgugaccugguuccacgccauccacguguccggcaccaauggcaccaagagauucgacaaccccgugcugcccuucaacgacgggguguacuuugccagcaccgagaaguccaacaucaucagaggcuggaucuucggcaccacacuggacagcaagacccagagccugcugaucgugaacaacgccaccaacguggucaucaaagugugcgaguuccaguucugcaacgaccccuuccugggcgucuacuaccacaagaacaacaagagcuggauggaaagcgaguuccggguguacagcagcgccaacaacugcaccuucgaguacgugucccagccuuuccugauggaccuggaaggcaagcagggcaacuucaagaaccugcgcgaguucguguucaagaacaucgacggcuacuucaaaaucuacagcaagcacaccccuaucaaccucgugcgggaucugccucagggcuucucugcucuggaaccccugguggaucugcccaucggcaucaacaucacccgguuucagacacugcuggcccugcacagaagcuaccugacaccuggcgauagcagcagcggauggacagcuggugccgccgcuuacuaugugggcuaccugcagccuagaaccuuccugcugaaguacaacgagaacggcaccaucaccgacgccguggauugugcucuggauccucugagcgagacaaagugcacccugaaguccuucaccguggaaaagggcaucuaccagaccagcaacuuccgggugcagcccaccgaauccaucgugcgguuccccaauaucaccaaucugugccccuucggcgagguguucaaugccaccagauucgccucuguguacgccuggaaccggaagcggaucagcaauugcguggccgacuacuccgugcuguacaacuccgccagcuucagcaccuucaagugcuacggcguguccccuaccaagcugaacgaccugugcuucacaaacguguacgccgacagcuucgugauccggggagaugaagugcggcagauugccccuggacagacaggcaagaucgccgacuacaacuacaagcugcccgacgacuucaccggcugugugauugccuggaacagcaacaaccuggacuccaaagucggcggcaacuacaauuaccuguaccggcuguuccggaaguccaaucugaagcccuucgagcgggacaucagcaccgaaaucuaucaggccggcagcaccccuugcaacggcguggaaggcuucaacugcuacuucccacugcaguccuacggcuuucagcccacaaauggcgugggcuaucagcccuacagagugguggugcugagcuucgaacugcugcaugcuccugccacagugugcggcccuaagaaaagcaccaaucucgugaagaacaaaugcgugaacuucaacuucaacggccugaccggcaccggcgugcugacagagagcaacaagaaguuccugccauuccagcaguuuggccgggauaucgccgauaccacagacgccguuagagauccccagacacuggaaauccuggacaucaccccaugcagcuucggcggagugucugugaucaccccuggcaccaacaccagcaaucagguggcagugcuguaccaggacgugaacuguaccgaagugcccguggccauucacgccgaucagcugacaccuacauggcggguguacuccaccggcagcaauguguuucagaccagagccggcugucugaucggagccgagcacgugaacaauagcuacgagugcgacauccccaucggcgcuggcaucugugccagcuaccagacacagacaaacagccccagacgggcuagaagcguggccagccagagcaucauugccuacacaaugucucugggcgccgagaacagcguggccuacuccaacaacucuaucgcuauccccaccaacuucaccaucagcgugaccaccgagauccugccuguguccaugaccaagaccagcguggacugcaccauguacaucugcggcgauuccaccgagugcuccaaccugcugcugcaguacggcagcuucugcacccagcugaauagagcccugacagggaucgccguggaacaggacaagaacacccaagagguguucgcccaagugaagcaaaucuacaagaccccuccuaucaaggacuucggcggcuucaauuucagccagauucugcccgauccuagcaagcccagcaagcggagcuucaucgaggaccugcuguucaacaaagugacacuggccgacgccggcuucaucaagcaguauggcgauugucugggcgacauugccgccagggaucugauuugcgcccagaaguuuaacggacugacagugcugccuccucugcugaccgaugagaugaucgcccaguacacaucugcccugcuggccggcacaaucacaagcggcuggacauuuggagcuggcgccgcucugcagauccccuuugcuaugcagauggccuaccgguucaacggcaucggagugacccagaaugugcuguacgagaaccagaagcugaucgccaaccaguucaacagcgccaucggcaagauccaggacagccugagcagcacagcaagcgcccugggaaagcugcaggacguggucaaccagaaugcccaggcacugaacacccuggucaagcagcuguccuccaacuucggcgccaucagcucugugcugaacgauauccugagcagacuggacccuccugaggccgaggugcagaucgacagacugaucacaggcagacugcagagccuccagacauacgugacccagcagcugaucagagccgccgagauuagagccucugccaaucuggccgccaccaagaugucugagugugugcugggccagagcaagagaguggacuuuugcggcaagggcuaccaccugaugagcuucccucagucugccccucacggcgugguguuucugcacgugacauauguguucgcucaagagaagaauuucaccaccgcuccagccaucugccacgacggcaaagcccacuuuccuagagaaggcguguucguguccaacggcacccauugguucgugacacagcggaacuucuacgagccccagaucaucaccaccgacaacaccuucgugucuggcaacugcgacguugugaucggcauugugaacaauaccguguacgacccucugcagcccgagcuggacagcggaggcggaggaucugacaucaucaagcugcugaacgagcaagugaacaaagagaugcagagcagcaaccuguacaugagcaugagcagcuggugcuacacccacagccuugauggcgccggacuguuccuguuugaucacgccgccgaggaauacgagcacgccaagaagcugaucaucuuccugaacgagaacaacgugcccgugcagcugaccagcauuucugccccugagcacaaguucgagggccugacacagaucuuccagaaggccuacgaacacgagcagcacaucagcgagagcaucaacaacaucguggaccacgccauuaagagcaaggaucacgccaccuucaacuuucugcagugguacguggccgaacagcacgaggaagaggugcuguucaaggacauccuggacaagaucgagcugaucggcaacgagaaccacggccuguaucuggccgaccaguacgugaagggaaucgccaagagcagaaagagcugaggacuaguuauaagacugacuagcccgaugggccucccaacgggcccuccuccccuccuugcaccgagauuaauaaaaaaaaaaaaaaaaaaaaaaaaaaaaaaaaaaaaaaaaaaaaaaaaaaaaaaaaaaaaaaaaugcaucccccccccccccccccccccccccccccccaaaggcucuuuucagagccaccagaauu

SEQ ID NO: 13107 - RNA, 4165 nt, Artificial Sequence
  SARS-CoV-2/Wuhan/WIV05/2019__EPI_ISL_402128 spike protein mRNA gc mod (1-1147)(K986P_V987P_ H1048Q_H1064N_ H1083N_H1101N) Ferritin construct
aggagaaagcuuaccauguucguguuucuggugcugcugccccugguguccagccagugugugaaccugaccaccagaacacagcugccuccagccuacaccaacagcuucaccagaggcguguacuaccccgacaagguguucagauccagcgugcugcacucuacccaggaccuguuccugccuuucuucagcaacgugaccugguuccacgccauccacguguccggcaccaauggcaccaagagauucgacaaccccgugcugcccuucaacgacgggguguacuuugccagcaccgagaaguccaacaucaucagaggcuggaucuucggcaccacacuggacagcaagacccagagccugcugaucgugaacaacgccaccaacguggucaucaaagugugcgaguuccaguucugcaacgaccccuuccugggcgucuacuaccacaagaacaacaagagcuggauggaaagcgaguuccggguguacagcagcgccaacaacugcaccuucgaguacgugucccagccuuuccugauggaccuggaaggcaagcagggcaacuucaagaaccugcgcgaguucguguucaagaacaucgacggcuacuucaaaaucuacagcaagcacaccccuaucaaccucgugcgggaucugccucagggcuucucugcucuggaaccccugguggaucugcccaucggcaucaacaucacccgguuucagacacugcuggcccugcacagaagcuaccugacaccuggcgauagcagcagcggauggacagcuggugccgccgcuuacuaugugggcuaccugcagccuagaaccuuccugcugaaguacaacgagaacggcaccaucaccgacgccguggauugugcucuggauccucugagcgagacaaagugcacccugaaguccuucaccguggaaaagggcaucuaccagaccagcaacuuccgggugcagcccaccgaauccaucgugcgguuccccaauaucaccaaucugugccccuucggcgagguguucaaugccaccagauucgccucuguguacgccuggaaccggaagcggaucagcaauugcguggccgacuacuccgugcuguacaacuccgccagcuucagcaccuucaagugcuacggcguguccccuaccaagcugaacgaccugugcuucacaaacguguacgccgacagcuucgugauccggggagaugaagugcggcagauugccccuggacagacaggcaagaucgccgacuacaacuacaagcugcccgacgacuucaccggcugugugauugccuggaacagcaacaaccuggacuccaaagucggcggcaacuacaauuaccuguaccggcuguuccggaaguccaaucugaagcccuucgagcgggacaucagcaccgaaaucuaucaggccggcagcaccccuugcaacggcguggaaggcuucaacugcuacuucccacugcaguccuacggcuuucagcccacaaauggcgugggcuaucagcccuacagagugguggugcugagcuucgaacugcugcaugcuccugccacagugugcggcccuaagaaaagcaccaaucucgugaagaacaaaugcgugaacuucaacuucaacggccugaccggcaccggcgugcugacagagagcaacaagaaguuccugccauuccagcaguuuggccgggauaucgccgauaccacagacgccguuagagauccccagacacuggaaauccuggacaucaccccaugcagcuucggcggagugucugugaucaccccuggcaccaacaccagcaaucagguggcagugcuguaccaggacgugaacuguaccgaagugcccguggccauucacgccgaucagcugacaccuacauggcggguguacuccaccggcagcaauguguuucagaccagagccggcugucugaucggagccgagcacgugaacaauagcuacgagugcgacauccccaucggcgcuggcaucugugccagcuaccagacacagacaaacagccccagacgggcuagaagcguggccagccagagcaucauugccuacacaaugucucugggcgccgagaacagcguggccuacuccaacaacucuaucgcuauccccaccaacuucaccaucagcgugaccaccgagauccugccuguguccaugaccaagaccagcguggacugcaccauguacaucugcggcgauuccaccgagugcuccaaccugcugcugcaguacggcagcuucugcacccagcugaauagagcccugacagggaucgccguggaacaggacaagaacacccaagagguguucgcccaagugaagcaaaucuacaagaccccuccuaucaaggacuucggcggcuucaauuucagccagauucugcccgauccuagcaagcccagcaagcggagcuucaucgaggaccugcuguucaacaaagugacacuggccgacgccggcuucaucaagcaguauggcgauugucugggcgacauugccgccagggaucugauuugcgcccagaaguuuaacggacugacagugcugccuccucugcugaccgaugagaugaucgcccaguacacaucugcccugcuggccggcacaaucacaagcggcuggacauuuggagcuggcgccgcucugcagauccccuuugcuaugcagauggccuaccgguucaacggcaucggagugacccagaaugugcuguacgagaaccagaagcugaucgccaaccaguucaacagcgccaucggcaagauccaggacagccugagcagcacagcaagcgcccugggaaagcugcaggacguggucaaccagaaugcccaggcacugaacacccuggucaagcagcuguccuccaacuucggcgccaucagcucugugcugaacgauauccugagcagacuggacccuccugaggccgaggugcagaucgacagacugaucacaggcagacugcagagccuccagacauacgugacccagcagcugaucagagccgccgagauuagagccucugccaaucuggccgccaccaagaugucugagugugugcugggccagagcaagagaguggacuuuugcggcaagggcuaccagcugaugagcuucccucagucugccccucacggcgugguguuucugaacgugacauaugugcccgcucaagagaagaauuucaccaccgcuccagccaucugcaacgacggcaaagcccacuuuccuagagaaggcguguucguguccaacggcaccaacugguucgugacacagcggaacuucuacgagccccagaucaucaccaccgacaacaccuucgugucuggcaacugcgacguugugaucggcauugugaacaauaccguguacgacccucugcagcccgagcuggacagcggaggcggaggaucugacaucaucaagcugcugaacgagcaagugaacaaagagaugcagagcagcaaccuguacaugagcaugagcagcuggugcuacacccacagccuugauggcgccggacuguuccuguuugaucacgccgccgaggaauacgagcacgccaagaagcugaucaucuuccugaacgagaacaacgugcccgugcagcugaccagcauuucugccccugagcacaaguucgagggccugacacagaucuuccagaaggccuacgaacacgagcagcacaucagcgagagcaucaacaacaucguggaccacgccauuaagagcaaggaucacgccaccuucaacuuucugcagugguacguggccgaacagcacgaggaagaggugcuguucaaggacauccuggacaagaucgagcugaucggcaacgagaaccacggccuguaucuggccgaccaguacgugaagggaaucgccaagagcagaaagagcugaggacuaguuauaagacugacuagcccgaugggccucccaacgggcccuccuccccuccuugcaccgagauuaauaaaaaaaaaaaaaaaaaaaaaaaaaaaaaaaaaaaaaaaaaaaaaaaaaaaaaaaaaaaaaaaaugcaucccccccccccccccccccccccccccccccaaaggcucuuuucagagccaccagaauu

SEQ ID NO: 13108 - RNA, 4165 nt, Artificial Sequence
  SARS-CoV-2/Wuhan/WIV05/2019__EPI_ISL_402128 spike protein mRNA gc mod (1-1147)(I712C_T1077C) Ferritin construct
aggagaaagcuuaccauguucguguuucuggugcugcugccccugguguccagccagugugugaaccugaccaccagaacacagcugccuccagccuacaccaacagcuucaccagaggcguguacuaccccgacaagguguucagauccagcgugcugcacucuacccaggaccuguuccugccuuucuucagcaacgugaccugguuccacgccauccacguguccggcaccaauggcaccaagagauucgacaaccccgugcugcccuucaacgacgggguguacuuugccagcaccgagaaguccaacaucaucagaggcuggaucuucggcaccacacuggacagcaagacccagagccugcugaucgugaacaacgccaccaacguggucaucaaagugugcgaguuccaguucugcaacgaccccuuccugggcgucuacuaccacaagaacaacaagagcuggauggaaagcgaguuccggguguacagcagcgccaacaacugcaccuucgaguacgugucccagccuuuccugauggaccuggaaggcaagcagggcaacuucaagaaccugcgcgaguucguguucaagaacaucgacggcuacuucaaaaucuacagcaagcacaccccuaucaaccucgugcgggaucugccucagggcuucucugcucuggaaccccugguggaucugcccaucggcaucaacaucacccgguuucagacacugcuggcccugcacagaagcuaccugacaccuggcgauagcagcagcggauggacagcuggugccgccgcuuacuaugugggcuaccugcagccuagaaccuuccugcugaaguacaacgagaacggcaccaucaccgacgccguggauugugcucuggauccucugagcgagacaaagugcacccugaaguccuucaccguggaaaagggcaucuaccagaccagcaacuuccgggugcagcccaccgaauccaucgugcgguuccccaauaucaccaaucugugccccuucggcgagguguucaaugccaccagauucgccucuguguacgccuggaaccggaagcggaucagcaauugcguggccgacuacuccgugcuguacaacuccgccagcuucagcaccuucaagugcuacggcguguccccuaccaagcugaacgaccugugcuucacaaacguguacgccgacagcuucgugauccggggagaugaagugcggcagauugccccuggacagacaggcaagaucgccgacuacaacuacaagcugcccgacgacuucaccggcugugugauugccuggaacagcaacaaccuggacuccaaagucggcggcaacuacaauuaccuguaccggcuguuccggaaguccaaucugaagcccuucgagcgggacaucagcaccgaaaucuaucaggccggcagcaccccuugcaacggcguggaaggcuucaacugcuacuucccacugcaguccuacggcuuucagcccacaaauggcgugggcuaucagcccuacagagugguggugcugagcuucgaacugcugcaugcuccugccacagugugcggcccuaagaaaagcaccaaucucgugaagaacaaaugcgugaacuucaacuucaacggccugaccggcaccggcgugcugacagagagcaacaagaaguuccugccauuccagcaguuuggccgggauaucgccgauaccacagacgccguuagagauccccagacacuggaaauccuggacaucaccccaugcagcuucggcggagugucugugaucaccccuggcaccaacaccagcaaucagguggcagugcuguaccaggacgugaacuguaccgaagugcccguggccauucacgccgaucagcugacaccuacauggcggguguacuccaccggcagcaauguguuucagaccagagccggcugucugaucggagccgagcacgugaacaauagcuacgagugcgacauccccaucggcgcuggcaucugugccagcuaccagacacagacaaacagccccagacgggcuagaagcguggccagccagagcaucauugccuacacaaugucucugggcgccgagaacagcguggccuacuccaacaacucuugcgcuauccccaccaacuucaccaucagcgugaccaccgagauccugccuguguccaugaccaagaccagcguggacugcaccauguacaucugcggcgauuccaccgagugcuccaaccugcugcugcaguacggcagcuucugcacccagcugaauagagcccugacagggaucgccguggaacaggacaagaacacccaagagguguucgcccaagugaagcaaaucuacaagaccccuccuaucaaggacuucggcggcuucaauuucagccagauucugcccgauccuagcaagcccagcaagcggagcuucaucgaggaccugcuguucaacaaagugacacuggccgacgccggcuucaucaagcaguauggcgauugucugggcgacauugccgccagggaucugauuugcgcccagaaguuuaacggacugacagugcugccuccucugcugaccgaugagaugaucgcccaguacacaucugcccugcuggccggcacaaucacaagcggcuggacauuuggagcuggcgccgcucugcagauccccuuugcuaugcagauggccuaccgguucaacggcaucggagugacccagaaugugcuguacgagaaccagaagcugaucgccaaccaguucaacagcgccaucggcaagauccaggacagccugagcagcacagcaagcgcccugggaaagcugcaggacguggucaaccagaaugcccaggcacugaacacccuggucaagcagcuguccuccaacuucggcgccaucagcucugugcugaacgauauccugagcagacuggacaaggucgaggccgaggugcagaucgacagacugaucacaggcagacugcagagccuccagacauacgugacccagcagcugaucagagccgccgagauuagagccucugccaaucuggccgccaccaagaugucugagugugugcugggccagagcaagagaguggacuuuugcggcaagggcuaccaccugaugagcuucccucagucugccccucacggcgugguguuucugcacgugacauaugugcccgcucaagagaagaauuucaccugugcuccagccaucugccacgacggcaaagcccacuuuccuagagaaggcguguucguguccaacggcacccauugguucgugacacagcggaacuucuacgagccccagaucaucaccaccgacaacaccuucgugucuggcaacugcgacguugugaucggcauugugaacaauaccguguacgacccucugcagcccgagcuggacagcggaggcggaggaucugacaucaucaagcugcugaacgagcaagugaacaaagagaugcagagcagcaaccuguacaugagcaugagcagcuggugcuacacccacagccuugauggcgccggacuguuccuguuugaucacgccgccgaggaauacgagcacgccaagaagcugaucaucuuccugaacgagaacaacgugcccgugcagcugaccagcauuucugccccugagcacaaguucgagggccugacacagaucuuccagaaggccuacgaacacgagcagcacaucagcgagagcaucaacaacaucguggaccacgccauuaagagcaaggaucacgccaccuucaacuuucugcagugguacguggccgaacagcacgaggaagaggugcuguucaaggacauccuggacaagaucgagcugaucggcaacgagaaccacggccuguaucuggccgaccaguacgugaagggaaucgccaagagcagaaagagcugaggacuaguuauaagacugacuagcccgaugggccucccaacgggcccuccuccccuccuugcaccgagauuaauaaaaaaaaaaaaaaaaaaaaaaaaaaaaaaaaaaaaaaaaaaaaaaaaaaaaaaaaaaaaaaaaugcaucccccccccccccccccccccccccccccccaaaggcucuuuucagagccaccagaauu

SEQ ID NO: 13109 - RNA, 4165 nt, Artificial Sequence
  SARS-CoV-2/Wuhan/WIV05/2019__EPI_ISL_402128 spike protein mRNA gc mod (1-1147)(I714C_Y1110C) Ferritin construct
aggagaaagcuuaccauguucguguuucuggugcugcugccccugguguccagccagugugugaaccugaccaccagaacacagcugccuccagccuacaccaacagcuucaccagaggcguguacuaccccgacaagguguucagauccagcgugcugcacucuacccaggaccuguuccugccuuucuucagcaacgugaccugguuccacgccauccacguguccggcaccaauggcaccaagagauucgacaaccccgugcugcccuucaacgacgggguguacuuugccagcaccgagaaguccaacaucaucagaggcuggaucuucggcaccacacuggacagcaagacccagagccugcugaucgugaacaacgccaccaacguggucaucaaagugugcgaguuccaguucugcaacgaccccuuccugggcgucuacuaccacaagaacaacaagagcuggauggaaagcgaguuccggguguacagcagcgccaacaacugcaccuucgaguacgugucccagccuuuccugauggaccuggaaggcaagcagggcaacuucaagaaccugcgcgaguucguguucaagaacaucgacggcuacuucaaaaucuacagcaagcacaccccuaucaaccucgugcgggaucugccucagggcuucucugcucuggaaccccugguggaucugcccaucggcaucaacaucacccgguuucagacacugcuggcccugcacagaagcuaccugacaccuggcgauagcagcagcggauggacagcuggugccgccgcuuacuaugugggcuaccugcagccuagaaccuuccugcugaaguacaacgagaacggcaccaucaccgacgccguggauugugcucuggauccucugagcgagacaaagugcacccugaaguccuucaccguggaaaagggcaucuaccagaccagcaacuuccgggugcagcccaccgaauccaucgugcgguuccccaauaucaccaaucugugccccuucggcgagguguucaaugccaccagauucgccucuguguacgccuggaaccggaagcggaucagcaauugcguggccgacuacuccgugcuguacaacuccgccagcuucagcaccuucaagugcuacggcguguccccuaccaagcugaacgaccugugcuucacaaacguguacgccgacagcuucgugauccggggagaugaagugcggcagauugccccuggacagacaggcaagaucgccgacuacaacuacaagcugcccgacgacuucaccggcugugugauugccuggaacagcaacaaccuggacuccaaagucggcggcaacuacaauuaccuguaccggcuguuccggaaguccaaucugaagcccuucgagcgggacaucagcaccgaaaucuaucaggccggcagcaccccuugcaacggcguggaaggcuucaacugcuacuucccacugcaguccuacggcuuucagcccacaaauggcgugggcuaucagcccuacagagugguggugcugagcuucgaacugcugcaugcuccugccacagugugcggcccuaagaaaagcaccaaucucgugaagaacaaaugcgugaacuucaacuucaacggccugaccggcaccggcgugcugacagagagcaacaagaaguuccugccauuccagcaguuuggccgggauaucgccgauaccacagacgccguuagagauccccagacacuggaaauccuggacaucaccccaugcagcuucggcggagugucugugaucaccccuggcaccaacaccagcaaucagguggcagugcuguaccaggacgugaacuguaccgaagugcccguggccauucacgccgaucagcugacaccuacauggcggguguacuccaccggcagcaauguguuucagaccagagccggcugucugaucggagccgagcacgugaacaauagcuacgagugcgacauccccaucggcgcuggcaucugugccagcuaccagacacagacaaacagccccagacgggcuagaagcguggccagccagagcaucauugccuacacaaugucucugggcgccgagaacagcguggccuacuccaacaacucuaucgcuugccccaccaacuucaccaucagcgugaccaccgagauccugccuguguccaugaccaagaccagcguggacugcaccauguacaucugcggcgauuccaccgagugcuccaaccugcugcugcaguacggcagcuucugcacccagcugaauagagcccugacagggaucgccguggaacaggacaagaacacccaagagguguucgcccaagugaagcaaaucuacaagaccccuccuaucaaggacuucggcggcuucaauuucagccagauucugcccgauccuagcaagcccagcaagcggagcuucaucgaggaccugcuguucaacaaagugacacuggccgacgccggcuucaucaagcaguauggcgauugucugggcgacauugccgccagggaucugauuugcgcccagaaguuuaacggacugacagugcugccuccucugcugaccgaugagaugaucgcccaguacacaucugcccugcuggccggcacaaucacaagcggcuggacauuuggagcuggcgccgcucugcagauccccuuugcuaugcagauggccuaccgguucaacggcaucggagugacccagaaugugcuguacgagaaccagaagcugaucgccaaccaguucaacagcgccaucggcaagauccaggacagccugagcagcacagcaagcgcccugggaaagcugcaggacguggucaaccagaaugcccaggcacugaacacccuggucaagcagcuguccuccaacuucggcgccaucagcucugugcugaacgauauccugagcagacuggacaaggucgaggccgaggugcagaucgacagacugaucacaggcagacugcagagccuccagacauacgugacccagcagcugaucagagccgccgagauuagagccucugccaaucuggccgccaccaagaugucugagugugugcugggccagagcaagagaguggacuuuugcggcaagggcuaccaccugaugagcuucccucagucugccccucacggcgugguguuucugcacgugacauaugugcccgcucaagagaagaauuucaccaccgcuccagccaucugccacgacggcaaagcccacuuuccuagagaaggcguguucguguccaacggcacccauugguucgugacacagcggaacuucugugagccccagaucaucaccaccgacaacaccuucgugucuggcaacugcgacguugugaucggcauugugaacaauaccguguacgacccucugcagcccgagcuggacagcggaggcggaggaucugacaucaucaagcugcugaacgagcaagugaacaaagagaugcagagcagcaaccuguacaugagcaugagcagcuggugcuacacccacagccuugauggcgccggacuguuccuguuugaucacgccgccgaggaauacgagcacgccaagaagcugaucaucuuccugaacgagaacaacgugcccgugcagcugaccagcauuucugccccugagcacaaguucgagggccugacacagaucuuccagaaggccuacgaacacgagcagcacaucagcgagagcaucaacaacaucguggaccacgccauuaagagcaaggaucacgccaccuucaacuuucugcagugguacguggccgaacagcacgaggaagaggugcuguucaaggacauccuggacaagaucgagcugaucggcaacgagaaccacggccuguaucuggccgaccaguacgugaagggaaucgccaagagcagaaagagcugaggacuaguuauaagacugacuagcccgaugggccucccaacgggcccuccuccccuccuugcaccgagauuaauaaaaaaaaaaaaaaaaaaaaaaaaaaaaaaaaaaaaaaaaaaaaaaaaaaaaaaaaaaaaaaaaugcaucccccccccccccccccccccccccccccccaaaggcucuuuucagagccaccagaauu

SEQ ID NO: 13110 - RNA, 4165 nt, Artificial Sequence
  SARS-CoV-2/Wuhan/WIV05/2019__EPI_ISL_402128 spike protein mRNA gc mod (1-1147)(P715C_P1069C) Ferritin construct
aggagaaagcuuaccauguucguguuucuggugcugcugccccugguguccagccagugugugaaccugaccaccagaacacagcugccuccagccuacaccaacagcuucaccagaggcguguacuaccccgacaagguguucagauccagcgugcugcacucuacccaggaccuguuccugccuuucuucagcaacgugaccugguuccacgccauccacguguccggcaccaauggcaccaagagauucgacaaccccgugcugcccuucaacgacgggguguacuuugccagcaccgagaaguccaacaucaucagaggcuggaucuucggcaccacacuggacagcaagacccagagccugcugaucgugaacaacgccaccaacguggucaucaaagugugcgaguuccaguucugcaacgaccccuuccugggcgucuacuaccacaagaacaacaagagcuggauggaaagcgaguuccggguguacagcagcgccaacaacugcaccuucgaguacgugucccagccuuuccugauggaccuggaaggcaagcagggcaacuucaagaaccugcgcgaguucguguucaagaacaucgacggcuacuucaaaaucuacagcaagcacaccccuaucaaccucgugcgggaucugccucagggcuucucugcucuggaaccccugguggaucugcccaucggcaucaacaucacccgguuucagacacugcuggcccugcacagaagcuaccugacaccuggcgauagcagcagcggauggacagcuggugccgccgcuuacuaugugggcuaccugcagccuagaaccuuccugcugaaguacaacgagaacggcaccaucaccgacgccguggauugugcucuggauccucugagcgagacaaagugcacccugaaguccuucaccguggaaaagggcaucuaccagaccagcaacuuccgggugcagcccaccgaauccaucgugcgguuccccaauaucaccaaucugugccccuucggcgagguguucaaugccaccagauucgccucuguguacgccuggaaccggaagcggaucagcaauugcguggccgacuacuccgugcuguacaacuccgccagcuucagcaccuucaagugcuacggcguguccccuaccaagcugaacgaccugugcuucacaaacguguacgccgacagcuucgugauccggggagaugaagugcggcagauugccccuggacagacaggcaagaucgccgacuacaacuacaagcugcccgacgacuucaccggcugugugauugccuggaacagcaacaaccuggacuccaaagucggcggcaacuacaauuaccuguaccggcuguuccggaaguccaaucugaagcccuucgagcgggacaucagcaccgaaaucuaucaggccggcagcaccccuugcaacggcguggaaggcuucaacugcuacuucccacugcaguccuacggcuuucagcccacaaauggcgugggcuaucagcccuacagagugguggugcugagcuucgaacugcugcaugcuccugccacagugugcggcccuaagaaaagcaccaaucucgugaagaacaaaugcgugaacuucaacuucaacggccugaccggcaccggcgugcugacagagagcaacaagaaguuccugccauuccagcaguuuggccgggauaucgccgauaccacagacgccguuagagauccccagacacuggaaauccuggacaucaccccaugcagcuucggcggagugucugugaucaccccuggcaccaacaccagcaaucagguggcagugcuguaccaggacgugaacuguaccgaagugcccguggccauucacgccgaucagcugacaccuacauggcggguguacuccaccggcagcaauguguuucagaccagagccggcugucugaucggagccgagcacgugaacaauagcuacgagugcgacauccccaucggcgcuggcaucugugccagcuaccagacacagacaaacagccccagacgggcuagaagcguggccagccagagcaucauugccuacacaaugucucugggcgccgagaacagcguggccuacuccaacaacucuaucgcuaucugcaccaacuucaccaucagcgugaccaccgagauccugccuguguccaugaccaagaccagcguggacugcaccauguacaucugcggcgauuccaccgagugcuccaaccugcugcugcaguacggcagcuucugcacccagcugaauagagcccugacagggaucgccguggaacaggacaagaacacccaagagguguucgcccaagugaagcaaaucuacaagaccccuccuaucaaggacuucggcggcuucaauuucagccagauucugcccgauccuagcaagcccagcaagcggagcuucaucgaggaccugcuguucaacaaagugacacuggccgacgccggcuucaucaagcaguauggcgauugucugggcgacauugccgccagggaucugauuugcgcccagaaguuuaacggacugacagugcugccuccucugcugaccgaugagaugaucgcccaguacacaucugcccugcuggccggcacaaucacaagcggcuggacauuuggagcuggcgccgcucugcagauccccuuugcuaugcagauggccuaccgguucaacggcaucggagugacccagaaugugcuguacgagaaccagaagcugaucgccaaccaguucaacagcgccaucggcaagauccaggacagccugagcagcacagcaagcgcccugggaaagcugcaggacguggucaaccagaaugcccaggcacugaacacccuggucaagcagcuguccuccaacuucggcgccaucagcucugugcugaacgauauccugagcagacuggacaaggucgaggccgaggugcagaucgacagacugaucacaggcagacugcagagccuccagacauacgugacccagcagcugaucagagccgccgagauuagagccucugccaaucuggccgccaccaagaugucugagugugugcugggccagagcaagagaguggacuuuugcggcaagggcuaccaccugaugagcuucccucagucugccccucacggcgugguguuucugcacgugacauaugugugugcucaagagaagaauuucaccaccgcuccagccaucugccacgacggcaaagcccacuuuccuagagaaggcguguucguguccaacggcacccauugguucgugacacagcggaacuucuacgagccccagaucaucaccaccgacaacaccuucgugucuggcaacugcgacguugugaucggcauugugaacaauaccguguacgacccucugcagcccgagcuggacagcggaggcggaggaucugacaucaucaagcugcugaacgagcaagugaacaaagagaugcagagcagcaaccuguacaugagcaugagcagcuggugcuacacccacagccuugauggcgccggacuguuccuguuugaucacgccgccgaggaauacgagcacgccaagaagcugaucaucuuccugaacgagaacaacgugcccgugcagcugaccagcauuucugccccugagcacaaguucgagggccugacacagaucuuccagaaggccuacgaacacgagcagcacaucagcgagagcaucaacaacaucguggaccacgccauuaagagcaaggaucacgccaccuucaacuuucugcagugguacguggccgaacagcacgaggaagaggugcuguucaaggacauccuggacaagaucgagcugaucggcaacgagaaccacggccuguaucuggccgaccaguacgugaagggaaucgccaagagcagaaagagcugaggacuaguuauaagacugacuagcccgaugggccucccaacgggcccuccuccccuccuugcaccgagauuaauaaaaaaaaaaaaaaaaaaaaaaaaaaaaaaaaaaaaaaaaaaaaaaaaaaaaaaaaaaaaaaaaugcaucccccccccccccccccccccccccccccccaaaggcucuuuucagagccaccagaauu

SEQ ID NO: 13111 - RNA, 4165 nt, Artificial Sequence
  SARS-CoV-2/Wuhan/WIV05/2019__EPI_ISL_402128 spike protein mRNA gc mod (1-1147)(G889C_L1034C) Ferritin construct
aggagaaagcuuaccauguucguguuucuggugcugcugccccugguguccagccagugugugaaccugaccaccagaacacagcugccuccagccuacaccaacagcuucaccagaggcguguacuaccccgacaagguguucagauccagcgugcugcacucuacccaggaccuguuccugccuuucuucagcaacgugaccugguuccacgccauccacguguccggcaccaauggcaccaagagauucgacaaccccgugcugcccuucaacgacgggguguacuuugccagcaccgagaaguccaacaucaucagaggcuggaucuucggcaccacacuggacagcaagacccagagccugcugaucgugaacaacgccaccaacguggucaucaaagugugcgaguuccaguucugcaacgaccccuuccugggcgucuacuaccacaagaacaacaagagcuggauggaaagcgaguuccggguguacagcagcgccaacaacugcaccuucgaguacgugucccagccuuuccugauggaccuggaaggcaagcagggcaacuucaagaaccugcgcgaguucguguucaagaacaucgacggcuacuucaaaaucuacagcaagcacaccccuaucaaccucgugcgggaucugccucagggcuucucugcucuggaaccccugguggaucugcccaucggcaucaacaucacccgguuucagacacugcuggcccugcacagaagcuaccugacaccuggcgauagcagcagcggauggacagcuggugccgccgcuuacuaugugggcuaccugcagccuagaaccuuccugcugaaguacaacgagaacggcaccaucaccgacgccguggauugugcucuggauccucugagcgagacaaagugcacccugaaguccuucaccguggaaaagggcaucuaccagaccagcaacuuccgggugcagcccaccgaauccaucgugcgguuccccaauaucaccaaucugugccccuucggcgagguguucaaugccaccagauucgccucuguguacgccuggaaccggaagcggaucagcaauugcguggccgacuacuccgugcuguacaacuccgccagcuucagcaccuucaagugcuacggcguguccccuaccaagcugaacgaccugugcuucacaaacguguacgccgacagcuucgugauccggggagaugaagugcggcagauugccccuggacagacaggcaagaucgccgacuacaacuacaagcugcccgacgacuucaccggcugugugauugccuggaacagcaacaaccuggacuccaaagucggcggcaacuacaauuaccuguaccggcuguuccggaaguccaaucugaagcccuucgagcgggacaucagcaccgaaaucuaucaggccggcagcaccccuugcaacggcguggaaggcuucaacugcuacuucccacugcaguccuacggcuuucagcccacaaauggcgugggcuaucagcccuacagagugguggugcugagcuucgaacugcugcaugcuccugccacagugugcggcccuaagaaaagcaccaaucucgugaagaacaaaugcgugaacuucaacuucaacggccugaccggcaccggcgugcugacagagagcaacaagaaguuccugccauuccagcaguuuggccgggauaucgccgauaccacagacgccguuagagauccccagacacuggaaauccuggacaucaccccaugcagcuucggcggagugucugugaucaccccuggcaccaacaccagcaaucagguggcagugcuguaccaggacgugaacuguaccgaagugcccguggccauucacgccgaucagcugacaccuacauggcggguguacuccaccggcagcaauguguuucagaccagagccggcugucugaucggagccgagcacgugaacaauagcuacgagugcgacauccccaucggcgcuggcaucugugccagcuaccagacacagacaaacagccccagacgggcuagaagcguggccagccagagcaucauugccuacacaaugucucugggcgccgagaacagcguggccuacuccaacaacucuaucgcuauccccaccaacuucaccaucagcgugaccaccgagauccugccuguguccaugaccaagaccagcguggacugcaccauguacaucugcggcgauuccaccgagugcuccaaccugcugcugcaguacggcagcuucugcacccagcugaauagagcccugacagggaucgccguggaacaggacaagaacacccaagagguguucgcccaagugaagcaaaucuacaagaccccuccuaucaaggacuucggcggcuucaauuucagccagauucugcccgauccuagcaagcccagcaagcggagcuucaucgaggaccugcuguucaacaaagugacacuggccgacgccggcuucaucaagcaguauggcgauugucugggcgacauugccgccagggaucugauuugcgcccagaaguuuaacggacugacagugcugccuccucugcugaccgaugagaugaucgcccaguacacaucugcccugcuggccggcacaaucacaagcggcuggacauuuugcgcuggcgccgcucugcagauccccuuugcuaugcagauggccuaccgguucaacggcaucggagugacccagaaugugcuguacgagaaccagaagcugaucgccaaccaguucaacagcgccaucggcaagauccaggacagccugagcagcacagcaagcgcccugggaaagcugcaggacguggucaaccagaaugcccaggcacugaacacccuggucaagcagcuguccuccaacuucggcgccaucagcucugugcugaacgauauccugagcagacuggacaaggucgaggccgaggugcagaucgacagacugaucacaggcagacugcagagccuccagacauacgugacccagcagcugaucagagccgccgagauuagagccucugccaaucuggccgccaccaagaugucugaguguguguguggccagagcaagagaguggacuuuugcggcaagggcuaccaccugaugagcuucccucagucugccccucacggcgugguguuucugcacgugacauaugugcccgcucaagagaagaauuucaccaccgcuccagccaucugccacgacggcaaagcccacuuuccuagagaaggcguguucguguccaacggcacccauugguucgugacacagcggaacuucuacgagccccagaucaucaccaccgacaacaccuucgugucuggcaacugcgacguugugaucggcauugugaacaauaccguguacgacccucugcagcccgagcuggacagcggaggcggaggaucugacaucaucaagcugcugaacgagcaagugaacaaagagaugcagagcagcaaccuguacaugagcaugagcagcuggugcuacacccacagccuugauggcgccggacuguuccuguuugaucacgccgccgaggaauacgagcacgccaagaagcugaucaucuuccugaacgagaacaacgugcccgugcagcugaccagcauuucugccccugagcacaaguucgagggccugacacagaucuuccagaaggccuacgaacacgagcagcacaucagcgagagcaucaacaacaucguggaccacgccauuaagagcaaggaucacgccaccuucaacuuucugcagugguacguggccgaacagcacgaggaagaggugcuguucaaggacauccuggacaagaucgagcugaucggcaacgagaaccacggccuguaucuggccgaccaguacgugaagggaaucgccaagagcagaaagagcugaggacuaguuauaagacugacuagcccgaugggccucccaacgggcccuccuccccuccuugcaccgagauuaauaaaaaaaaaaaaaaaaaaaaaaaaaaaaaaaaaaaaaaaaaaaaaaaaaaaaaaaaaaaaaaaaugcaucccccccccccccccccccccccccccccccaaaggcucuuuucagagccaccagaauu

SEQ ID NO: 13112 - RNA, 4165 nt, Artificial Sequence
  SARS-CoV-2/Wuhan/WIV05/2019__EPI_ISL_402128 spike protein mRNA gc mod (1-1147)(I909C_Y1047C) Ferritin construct
aggagaaagcuuaccauguucguguuucuggugcugcugccccugguguccagccagugugugaaccugaccaccagaacacagcugccuccagccuacaccaacagcuucaccagaggcguguacuaccccgacaagguguucagauccagcgugcugcacucuacccaggaccuguuccugccuuucuucagcaacgugaccugguuccacgccauccacguguccggcaccaauggcaccaagagauucgacaaccccgugcugcccuucaacgacgggguguacuuugccagcaccgagaaguccaacaucaucagaggcuggaucuucggcaccacacuggacagcaagacccagagccugcugaucgugaacaacgccaccaacguggucaucaaagugugcgaguuccaguucugcaacgaccccuuccugggcgucuacuaccacaagaacaacaagagcuggauggaaagcgaguuccggguguacagcagcgccaacaacugcaccuucgaguacgugucccagccuuuccugauggaccuggaaggcaagcagggcaacuucaagaaccugcgcgaguucguguucaagaacaucgacggcuacuucaaaaucuacagcaagcacaccccuaucaaccucgugcgggaucugccucagggcuucucugcucuggaaccccugguggaucugcccaucggcaucaacaucacccgguuucagacacugcuggcccugcacagaagcuaccugacaccuggcgauagcagcagcggauggacagcuggugccgccgcuuacuaugugggcuaccugcagccuagaaccuuccugcugaaguacaacgagaacggcaccaucaccgacgccguggauugugcucuggauccucugagcgagacaaagugcacccugaaguccuucaccguggaaaagggcaucuaccagaccagcaacuuccgggugcagcccaccgaauccaucgugcgguuccccaauaucaccaaucugugccccuucggcgagguguucaaugccaccagauucgccucuguguacgccuggaaccggaagcggaucagcaauugcguggccgacuacuccgugcuguacaacuccgccagcuucagcaccuucaagugcuacggcguguccccuaccaagcugaacgaccugugcuucacaaacguguacgccgacagcuucgugauccggggagaugaagugcggcagauugccccuggacagacaggcaagaucgccgacuacaacuacaagcugcccgacgacuucaccggcugugugauugccuggaacagcaacaaccuggacuccaaagucggcggcaacuacaauuaccuguaccggcuguuccggaaguccaaucugaagcccuucgagcgggacaucagcaccgaaaucuaucaggccggcagcaccccuugcaacggcguggaaggcuucaacugcuacuucccacugcaguccuacggcuuucagcccacaaauggcgugggcuaucagcccuacagagugguggugcugagcuucgaacugcugcaugcuccugccacagugugcggcccuaagaaaagcaccaaucucgugaagaacaaaugcgugaacuucaacuucaacggccugaccggcaccggcgugcugacagagagcaacaagaaguuccugccauuccagcaguuuggccgggauaucgccgauaccacagacgccguuagagauccccagacacuggaaauccuggacaucaccccaugcagcuucggcggagugucugugaucaccccuggcaccaacaccagcaaucagguggcagugcuguaccaggacgugaacuguaccgaagugcccguggccauucacgccgaucagcugacaccuacauggcggguguacuccaccggcagcaauguguuucagaccagagccggcugucugaucggagccgagcacgugaacaauagcuacgagugcgacauccccaucggcgcuggcaucugugccagcuaccagacacagacaaacagccccagacgggcuagaagcguggccagccagagcaucauugccuacacaaugucucugggcgccgagaacagcguggccuacuccaacaacucuaucgcuauccccaccaacuucaccaucagcgugaccaccgagauccugccuguguccaugaccaagaccagcguggacugcaccauguacaucugcggcgauuccaccgagugcuccaaccugcugcugcaguacggcagcuucugcacccagcugaauagagcccugacagggaucgccguggaacaggacaagaacacccaagagguguucgcccaagugaagcaaaucuacaagaccccuccuaucaaggacuucggcggcuucaauuucagccagauucugcccgauccuagcaagcccagcaagcggagcuucaucgaggaccugcuguucaacaaagugacacuggccgacgccggcuucaucaagcaguauggcgauugucugggcgacauugccgccagggaucugauuugcgcccagaaguuuaacggacugacagugcugccuccucugcugaccgaugagaugaucgcccaguacacaucugcccugcuggccggcacaaucacaagcggcuggacauuuggagcuggcgccgcucugcagauccccuuugcuaugcagauggccuaccgguucaacggcugcggagugacccagaaugugcuguacgagaaccagaagcugaucgccaaccaguucaacagcgccaucggcaagauccaggacagccugagcagcacagcaagcgcccugggaaagcugcaggacguggucaaccagaaugcccaggcacugaacacccuggucaagcagcuguccuccaacuucggcgccaucagcucugugcugaacgauauccugagcagacuggacaaggucgaggccgaggugcagaucgacagacugaucacaggcagacugcagagccuccagacauacgugacccagcagcugaucagagccgccgagauuagagccucugccaaucuggccgccaccaagaugucugagugugugcugggccagagcaagagaguggacuuuugcggcaagggcugucaccugaugagcuucccucagucugccccucacggcgugguguuucugcacgugacauaugugcccgcucaagagaagaauuucaccaccgcuccagccaucugccacgacggcaaagcccacuuuccuagagaaggcguguucguguccaacggcacccauugguucgugacacagcggaacuucuacgagccccagaucaucaccaccgacaacaccuucgugucuggcaacugcgacguugugaucggcauugugaacaauaccguguacgacccucugcagcccgagcuggacagcggaggcggaggaucugacaucaucaagcugcugaacgagcaagugaacaaagagaugcagagcagcaaccuguacaugagcaugagcagcuggugcuacacccacagccuugauggcgccggacuguuccuguuugaucacgccgccgaggaauacgagcacgccaagaagcugaucaucuuccugaacgagaacaacgugcccgugcagcugaccagcauuucugccccugagcacaaguucgagggccugacacagaucuuccagaaggccuacgaacacgagcagcacaucagcgagagcaucaacaacaucguggaccacgccauuaagagcaaggaucacgccaccuucaacuuucugcagugguacguggccgaacagcacgaggaagaggugcuguucaaggacauccuggacaagaucgagcugaucggcaacgagaaccacggccuguaucuggccgaccaguacgugaagggaaucgccaagagcagaaagagcugaggacuaguuauaagacugacuagcccgaugggccucccaacgggcccuccuccccuccuugcaccgagauuaauaaaaaaaaaaaaaaaaaaaaaaaaaaaaaaaaaaaaaaaaaaaaaaaaaaaaaaaaaaaaaaaaugcaucccccccccccccccccccccccccccccccaaaggcucuuuucagagccaccagaauu

SEQ ID NO: 13113 - RNA, 4165 nt, Artificial Sequence
  SARS-CoV-2/Wuhan/WIV05/2019__EPI_ISL_402128 spike protein mRNA gc mod (1-1147)(Q965C_S1003C) Ferritin construct
aggagaaagcuuaccauguucguguuucuggugcugcugccccugguguccagccagugugugaaccugaccaccagaacacagcugccuccagccuacaccaacagcuucaccagaggcguguacuaccccgacaagguguucagauccagcgugcugcacucuacccaggaccuguuccugccuuucuucagcaacgugaccugguuccacgccauccacguguccggcaccaauggcaccaagagauucgacaaccccgugcugcccuucaacgacgggguguacuuugccagcaccgagaaguccaacaucaucagaggcuggaucuucggcaccacacuggacagcaagacccagagccugcugaucgugaacaacgccaccaacguggucaucaaagugugcgaguuccaguucugcaacgaccccuuccugggcgucuacuaccacaagaacaacaagagcuggauggaaagcgaguuccggguguacagcagcgccaacaacugcaccuucgaguacgugucccagccuuuccugauggaccuggaaggcaagcagggcaacuucaagaaccugcgcgaguucguguucaagaacaucgacggcuacuucaaaaucuacagcaagcacaccccuaucaaccucgugcgggaucugccucagggcuucucugcucuggaaccccugguggaucugcccaucggcaucaacaucacccgguuucagacacugcuggcccugcacagaagcuaccugacaccuggcgauagcagcagcggauggacagcuggugccgccgcuuacuaugugggcuaccugcagccuagaaccuuccugcugaaguacaacgagaacggcaccaucaccgacgccguggauugugcucuggauccucugagcgagacaaagugcacccugaaguccuucaccguggaaaagggcaucuaccagaccagcaacuuccgggugcagcccaccgaauccaucgugcgguuccccaauaucaccaaucugugccccuucggcgagguguucaaugccaccagauucgccucuguguacgccuggaaccggaagcggaucagcaauugcguggccgacuacuccgugcuguacaacuccgccagcuucagcaccuucaagugcuacggcguguccccuaccaagcugaacgaccugugcuucacaaacguguacgccgacagcuucgugauccggggagaugaagugcggcagauugccccuggacagacaggcaagaucgccgacuacaacuacaagcugcccgacgacuucaccggcugugugauugccuggaacagcaacaaccuggacuccaaagucggcggcaacuacaauuaccuguaccggcuguuccggaaguccaaucugaagcccuucgagcgggacaucagcaccgaaaucuaucaggccggcagcaccccuugcaacggcguggaaggcuucaacugcuacuucccacugcaguccuacggcuuucagcccacaaauggcgugggcuaucagcccuacagagugguggugcugagcuucgaacugcugcaugcuccugccacagugugcggcccuaagaaaagcaccaaucucgugaagaacaaaugcgugaacuucaacuucaacggccugaccggcaccggcgugcugacagagagcaacaagaaguuccugccauuccagcaguuuggccgggauaucgccgauaccacagacgccguuagagauccccagacacuggaaauccuggacaucaccccaugcagcuucggcggagugucugugaucaccccuggcaccaacaccagcaaucagguggcagugcuguaccaggacgugaacuguaccgaagugcccguggccauucacgccgaucagcugacaccuacauggcggguguacuccaccggcagcaauguguuucagaccagagccggcugucugaucggagccgagcacgugaacaauagcuacgagugcgacauccccaucggcgcuggcaucugugccagcuaccagacacagacaaacagccccagacgggcuagaagcguggccagccagagcaucauugccuacacaaugucucugggcgccgagaacagcguggccuacuccaacaacucuaucgcuauccccaccaacuucaccaucagcgugaccaccgagauccugccuguguccaugaccaagaccagcguggacugcaccauguacaucugcggcgauuccaccgagugcuccaaccugcugcugcaguacggcagcuucugcacccagcugaauagagcccugacagggaucgccguggaacaggacaagaacacccaagagguguucgcccaagugaagcaaaucuacaagaccccuccuaucaaggacuucggcggcuucaauuucagccagauucugcccgauccuagcaagcccagcaagcggagcuucaucgaggaccugcuguucaacaaagugacacuggccgacgccggcuucaucaagcaguauggcgauugucugggcgacauugccgccagggaucugauuugcgcccagaaguuuaacggacugacagugcugccuccucugcugaccgaugagaugaucgcccaguacacaucugcccugcuggccggcacaaucacaagcggcuggacauuuggagcuggcgccgcucugcagauccccuuugcuaugcagauggccuaccgguucaacggcaucggagugacccagaaugugcuguacgagaaccagaagcugaucgccaaccaguucaacagcgccaucggcaagauccaggacagccugagcagcacagcaagcgcccugggaaagcugcaggacguggucaaccagaaugcccaggcacugaacacccuggucaagugccuguccuccaacuucggcgccaucagcucugugcugaacgauauccugagcagacuggacaaggucgaggccgaggugcagaucgacagacugaucacaggcagacugcagugucuccagacauacgugacccagcagcugaucagagccgccgagauuagagccucugccaaucuggccgccaccaagaugucugagugugugcugggccagagcaagagaguggacuuuugcggcaagggcuaccaccugaugagcuucccucagucugccccucacggcgugguguuucugcacgugacauaugugcccgcucaagagaagaauuucaccaccgcuccagccaucugccacgacggcaaagcccacuuuccuagagaaggcguguucguguccaacggcacccauugguucgugacacagcggaacuucuacgagccccagaucaucaccaccgacaacaccuucgugucuggcaacugcgacguugugaucggcauugugaacaauaccguguacgacccucugcagcccgagcuggacagcggaggcggaggaucugacaucaucaagcugcugaacgagcaagugaacaaagagaugcagagcagcaaccuguacaugagcaugagcagcuggugcuacacccacagccuugauggcgccggacuguuccuguuugaucacgccgccgaggaauacgagcacgccaagaagcugaucaucuuccugaacgagaacaacgugcccgugcagcugaccagcauuucugccccugagcacaaguucgagggccugacacagaucuuccagaaggccuacgaacacgagcagcacaucagcgagagcaucaacaacaucguggaccacgccauuaagagcaaggaucacgccaccuucaacuuucugcagugguacguggccgaacagcacgaggaagaggugcuguucaaggacauccuggacaagaucgagcugaucggcaacgagaaccacggccuguaucuggccgaccaguacgugaagggaaucgccaagagcagaaagagcugaggacuaguuauaagacugacuagcccgaugggccucccaacgggcccuccuccccuccuugcaccgagauuaauaaaaaaaaaaaaaaaaaaaaaaaaaaaaaaaaaaaaaaaaaaaaaaaaaaaaaaaaaaaaaaaaugcaucccccccccccccccccccccccccccccccaaaggcucuuuucagagccaccagaauu

SEQ ID NO: 13114 - RNA, 4165 nt, Artificial Sequence
  SARS-CoV-2/Wuhan/WIV05/2019__EPI_ISL_402128 spike protein mRNA gc mod (1-1147)(F970C_G999C) Ferritin construct
aggagaaagcuuaccauguucguguuucuggugcugcugccccugguguccagccagugugugaaccugaccaccagaacacagcugccuccagccuacaccaacagcuucaccagaggcguguacuaccccgacaagguguucagauccagcgugcugcacucuacccaggaccuguuccugccuuucuucagcaacgugaccugguuccacgccauccacguguccggcaccaauggcaccaagagauucgacaaccccgugcugcccuucaacgacgggguguacuuugccagcaccgagaaguccaacaucaucagaggcuggaucuucggcaccacacuggacagcaagacccagagccugcugaucgugaacaacgccaccaacguggucaucaaagugugcgaguuccaguucugcaacgaccccuuccugggcgucuacuaccacaagaacaacaagagcuggauggaaagcgaguuccggguguacagcagcgccaacaacugcaccuucgaguacgugucccagccuuuccugauggaccuggaaggcaagcagggcaacuucaagaaccugcgcgaguucguguucaagaacaucgacggcuacuucaaaaucuacagcaagcacaccccuaucaaccucgugcgggaucugccucagggcuucucugcucuggaaccccugguggaucugcccaucggcaucaacaucacccgguuucagacacugcuggcccugcacagaagcuaccugacaccuggcgauagcagcagcggauggacagcuggugccgccgcuuacuaugugggcuaccugcagccuagaaccuuccugcugaaguacaacgagaacggcaccaucaccgacgccguggauugugcucuggauccucugagcgagacaaagugcacccugaaguccuucaccguggaaaagggcaucuaccagaccagcaacuuccgggugcagcccaccgaauccaucgugcgguuccccaauaucaccaaucugugccccuucggcgagguguucaaugccaccagauucgccucuguguacgccuggaaccggaagcggaucagcaauugcguggccgacuacuccgugcuguacaacuccgccagcuucagcaccuucaagugcuacggcguguccccuaccaagcugaacgaccugugcuucacaaacguguacgccgacagcuucgugauccggggagaugaagugcggcagauugccccuggacagacaggcaagaucgccgacuacaacuacaagcugcccgacgacuucaccggcugugugauugccuggaacagcaacaaccuggacuccaaagucggcggcaacuacaauuaccuguaccggcuguuccggaaguccaaucugaagcccuucgagcgggacaucagcaccgaaaucuaucaggccggcagcaccccuugcaacggcguggaaggcuucaacugcuacuucccacugcaguccuacggcuuucagcccacaaauggcgugggcuaucagcccuacagagugguggugcugagcuucgaacugcugcaugcuccugccacagugugcggcccuaagaaaagcaccaaucucgugaagaacaaaugcgugaacuucaacuucaacggccugaccggcaccggcgugcugacagagagcaacaagaaguuccugccauuccagcaguuuggccgggauaucgccgauaccacagacgccguuagagauccccagacacuggaaauccuggacaucaccccaugcagcuucggcggagugucugugaucaccccuggcaccaacaccagcaaucagguggcagugcuguaccaggacgugaacuguaccgaagugcccguggccauucacgccgaucagcugacaccuacauggcggguguacuccaccggcagcaauguguuucagaccagagccggcugucugaucggagccgagcacgugaacaauagcuacgagugcgacauccccaucggcgcuggcaucugugccagcuaccagacacagacaaacagccccagacgggcuagaagcguggccagccagagcaucauugccuacacaaugucucugggcgccgagaacagcguggccuacuccaacaacucuaucgcuauccccaccaacuucaccaucagcgugaccaccgagauccugccuguguccaugaccaagaccagcguggacugcaccauguacaucugcggcgauuccaccgagugcuccaaccugcugcugcaguacggcagcuucugcacccagcugaauagagcccugacagggaucgccguggaacaggacaagaacacccaagagguguucgcccaagugaagcaaaucuacaagaccccuccuaucaaggacuucggcggcuucaauuucagccagauucugcccgauccuagcaagcccagcaagcggagcuucaucgaggaccugcuguucaacaaagugacacuggccgacgccggcuucaucaagcaguauggcgauugucugggcgacauugccgccagggaucugauuugcgcccagaaguuuaacggacugacagugcugccuccucugcugaccgaugagaugaucgcccaguacacaucugcccugcuggccggcacaaucacaagcggcuggacauuuggagcuggcgccgcucugcagauccccuuugcuaugcagauggccuaccgguucaacggcaucggagugacccagaaugugcuguacgagaaccagaagcugaucgccaaccaguucaacagcgccaucggcaagauccaggacagccugagcagcacagcaagcgcccugggaaagcugcaggacguggucaaccagaaugcccaggcacugaacacccuggucaagcagcuguccuccaacugcggcgccaucagcucugugcugaacgauauccugagcagacuggacaaggucgaggccgaggugcagaucgacagacugaucacauguagacugcagagccuccagacauacgugacccagcagcugaucagagccgccgagauuagagccucugccaaucuggccgccaccaagaugucugagugugugcugggccagagcaagagaguggacuuuugcggcaagggcuaccaccugaugagcuucccucagucugccccucacggcgugguguuucugcacgugacauaugugcccgcucaagagaagaauuucaccaccgcuccagccaucugccacgacggcaaagcccacuuuccuagagaaggcguguucguguccaacggcacccauugguucgugacacagcggaacuucuacgagccccagaucaucaccaccgacaacaccuucgugucuggcaacugcgacguugugaucggcauugugaacaauaccguguacgacccucugcagcccgagcuggacagcggaggcggaggaucugacaucaucaagcugcugaacgagcaagugaacaaagagaugcagagcagcaaccuguacaugagcaugagcagcuggugcuacacccacagccuugauggcgccggacuguuccuguuugaucacgccgccgaggaauacgagcacgccaagaagcugaucaucuuccugaacgagaacaacgugcccgugcagcugaccagcauuucugccccugagcacaaguucgagggccugacacagaucuuccagaaggccuacgaacacgagcagcacaucagcgagagcaucaacaacaucguggaccacgccauuaagagcaaggaucacgccaccuucaacuuucugcagugguacguggccgaacagcacgaggaagaggugcuguucaaggacauccuggacaagaucgagcugaucggcaacgagaaccacggccuguaucuggccgaccaguacgugaagggaaucgccaagagcagaaagagcugaggacuaguuauaagacugacuagcccgaugggccucccaacgggcccuccuccccuccuugcaccgagauuaauaaaaaaaaaaaaaaaaaaaaaaaaaaaaaaaaaaaaaaaaaaaaaaaaaaaaaaaaaaaaaaaaugcaucccccccccccccccccccccccccccccccaaaggcucuuuucagagccaccagaauu

SEQ ID NO: 13115 - RNA, 4165 nt, Artificial Sequence
  SARS-CoV-2/Wuhan/WIV05/2019__EPI_ISL_402128 spike protein mRNA gc mod (1-1147)(A972C_R995C) Ferritin construct
aggagaaagcuuaccauguucguguuucuggugcugcugccccugguguccagccagugugugaaccugaccaccagaacacagcugccuccagccuacaccaacagcuucaccagaggcguguacuaccccgacaagguguucagauccagcgugcugcacucuacccaggaccuguuccugccuuucuucagcaacgugaccugguuccacgccauccacguguccggcaccaauggcaccaagagauucgacaaccccgugcugcccuucaacgacgggguguacuuugccagcaccgagaaguccaacaucaucagaggcuggaucuucggcaccacacuggacagcaagacccagagccugcugaucgugaacaacgccaccaacguggucaucaaagugugcgaguuccaguucugcaacgaccccuuccugggcgucuacuaccacaagaacaacaagagcuggauggaaagcgaguuccggguguacagcagcgccaacaacugcaccuucgaguacgugucccagccuuuccugauggaccuggaaggcaagcagggcaacuucaagaaccugcgcgaguucguguucaagaacaucgacggcuacuucaaaaucuacagcaagcacaccccuaucaaccucgugcgggaucugccucagggcuucucugcucuggaaccccugguggaucugcccaucggcaucaacaucacccgguuucagacacugcuggcccugcacagaagcuaccugacaccuggcgauagcagcagcggauggacagcuggugccgccgcuuacuaugugggcuaccugcagccuagaaccuuccugcugaaguacaacgagaacggcaccaucaccgacgccguggauugugcucuggauccucugagcgagacaaagugcacccugaaguccuucaccguggaaaagggcaucuaccagaccagcaacuuccgggugcagcccaccgaauccaucgugcgguuccccaauaucaccaaucugugccccuucggcgagguguucaaugccaccagauucgccucuguguacgccuggaaccggaagcggaucagcaauugcguggccgacuacuccgugcuguacaacuccgccagcuucagcaccuucaagugcuacggcguguccccuaccaagcugaacgaccugugcuucacaaacguguacgccgacagcuucgugauccggggagaugaagugcggcagauugccccuggacagacaggcaagaucgccgacuacaacuacaagcugcccgacgacuucaccggcugugugauugccuggaacagcaacaaccuggacuccaaagucggcggcaacuacaauuaccuguaccggcuguuccggaaguccaaucugaagcccuucgagcgggacaucagcaccgaaaucuaucaggccggcagcaccccuugcaacggcguggaaggcuucaacugcuacuucccacugcaguccuacggcuuucagcccacaaauggcgugggcuaucagcccuacagagugguggugcugagcuucgaacugcugcaugcuccugccacagugugcggcccuaagaaaagcaccaaucucgugaagaacaaaugcgugaacuucaacuucaacggccugaccggcaccggcgugcugacagagagcaacaagaaguuccugccauuccagcaguuuggccgggauaucgccgauaccacagacgccguuagagauccccagacacuggaaauccuggacaucaccccaugcagcuucggcggagugucugugaucaccccuggcaccaacaccagcaaucagguggcagugcuguaccaggacgugaacuguaccgaagugcccguggccauucacgccgaucagcugacaccuacauggcggguguacuccaccggcagcaauguguuucagaccagagccggcugucugaucggagccgagcacgugaacaauagcuacgagugcgacauccccaucggcgcuggcaucugugccagcuaccagacacagacaaacagccccagacgggcuagaagcguggccagccagagcaucauugccuacacaaugucucugggcgccgagaacagcguggccuacuccaacaacucuaucgcuauccccaccaacuucaccaucagcgugaccaccgagauccugccuguguccaugaccaagaccagcguggacugcaccauguacaucugcggcgauuccaccgagugcuccaaccugcugcugcaguacggcagcuucugcacccagcugaauagagcccugacagggaucgccguggaacaggacaagaacacccaagagguguucgcccaagugaagcaaaucuacaagaccccuccuaucaaggacuucggcggcuucaauuucagccagauucugcccgauccuagcaagcccagcaagcggagcuucaucgaggaccugcuguucaacaaagugacacuggccgacgccggcuucaucaagcaguauggcgauugucugggcgacauugccgccagggaucugauuugcgcccagaaguuuaacggacugacagugcugccuccucugcugaccgaugagaugaucgcccaguacacaucugcccugcuggccggcacaaucacaagcggcuggacauuuggagcuggcgccgcucugcagauccccuuugcuaugcagauggccuaccgguucaacggcaucggagugacccagaaugugcuguacgagaaccagaagcugaucgccaaccaguucaacagcgccaucggcaagauccaggacagccugagcagcacagcaagcgcccugggaaagcugcaggacguggucaaccagaaugcccaggcacugaacacccuggucaagcagcuguccuccaacuucggcugcaucagcucugugcugaacgauauccugagcagacuggacaaggucgaggccgaggugcagaucgacugucugaucacaggcagacugcagagccuccagacauacgugacccagcagcugaucagagccgccgagauuagagccucugccaaucuggccgccaccaagaugucugagugugugcugggccagagcaagagaguggacuuuugcggcaagggcuaccaccugaugagcuucccucagucugccccucacggcgugguguuucugcacgugacauaugugcccgcucaagagaagaauuucaccaccgcuccagccaucugccacgacggcaaagcccacuuuccuagagaaggcguguucguguccaacggcacccauugguucgugacacagcggaacuucuacgagccccagaucaucaccaccgacaacaccuucgugucuggcaacugcgacguugugaucggcauugugaacaauaccguguacgacccucugcagcccgagcuggacagcggaggcggaggaucugacaucaucaagcugcugaacgagcaagugaacaaagagaugcagagcagcaaccuguacaugagcaugagcagcuggugcuacacccacagccuugauggcgccggacuguuccuguuugaucacgccgccgaggaauacgagcacgccaagaagcugaucaucuuccugaacgagaacaacgugcccgugcagcugaccagcauuucugccccugagcacaaguucgagggccugacacagaucuuccagaaggccuacgaacacgagcagcacaucagcgagagcaucaacaacaucguggaccacgccauuaagagcaaggaucacgccaccuucaacuuucugcagugguacguggccgaacagcacgaggaagaggugcuguucaaggacauccuggacaagaucgagcugaucggcaacgagaaccacggccuguaucuggccgaccaguacgugaagggaaucgccaagagcagaaagagcugaggacuaguuauaagacugacuagcccgaugggccucccaacgggcccuccuccccuccuugcaccgagauuaauaaaaaaaaaaaaaaaaaaaaaaaaaaaaaaaaaaaaaaaaaaaaaaaaaaaaaaaaaaaaaaaaugcaucccccccccccccccccccccccccccccccaaaggcucuuuucagagccaccagaauu

SEQ ID NO: 13116 - RNA, 4165 nt, Artificial Sequence
  SARS-CoV-2/Wuhan/WIV05/2019__EPI_ISL_402128 spike protein mRNA gc mod (1-1147)(A890C_V1040C) Ferritin construct
aggagaaagcuuaccauguucguguuucuggugcugcugccccugguguccagccagugugugaaccugaccaccagaacacagcugccuccagccuacaccaacagcuucaccagaggcguguacuaccccgacaagguguucagauccagcgugcugcacucuacccaggaccuguuccugccuuucuucagcaacgugaccugguuccacgccauccacguguccggcaccaauggcaccaagagauucgacaaccccgugcugcccuucaacgacgggguguacuuugccagcaccgagaaguccaacaucaucagaggcuggaucuucggcaccacacuggacagcaagacccagagccugcugaucgugaacaacgccaccaacguggucaucaaagugugcgaguuccaguucugcaacgaccccuuccugggcgucuacuaccacaagaacaacaagagcuggauggaaagcgaguuccggguguacagcagcgccaacaacugcaccuucgaguacgugucccagccuuuccugauggaccuggaaggcaagcagggcaacuucaagaaccugcgcgaguucguguucaagaacaucgacggcuacuucaaaaucuacagcaagcacaccccuaucaaccucgugcgggaucugccucagggcuucucugcucuggaaccccugguggaucugcccaucggcaucaacaucacccgguuucagacacugcuggcccugcacagaagcuaccugacaccuggcgauagcagcagcggauggacagcuggugccgccgcuuacuaugugggcuaccugcagccuagaaccuuccugcugaaguacaacgagaacggcaccaucaccgacgccguggauugugcucuggauccucugagcgagacaaagugcacccugaaguccuucaccguggaaaagggcaucuaccagaccagcaacuuccgggugcagcccaccgaauccaucgugcgguuccccaauaucaccaaucugugccccuucggcgagguguucaaugccaccagauucgccucuguguacgccuggaaccggaagcggaucagcaauugcguggccgacuacuccgugcuguacaacuccgccagcuucagcaccuucaagugcuacggcguguccccuaccaagcugaacgaccugugcuucacaaacguguacgccgacagcuucgugauccggggagaugaagugcggcagauugccccuggacagacaggcaagaucgccgacuacaacuacaagcugcccgacgacuucaccggcugugugauugccuggaacagcaacaaccuggacuccaaagucggcggcaacuacaauuaccuguaccggcuguuccggaaguccaaucugaagcccuucgagcgggacaucagcaccgaaaucuaucaggccggcagcaccccuugcaacggcguggaaggcuucaacugcuacuucccacugcaguccuacggcuuucagcccacaaauggcgugggcuaucagcccuacagagugguggugcugagcuucgaacugcugcaugcuccugccacagugugcggcccuaagaaaagcaccaaucucgugaagaacaaaugcgugaacuucaacuucaacggccugaccggcaccggcgugcugacagagagcaacaagaaguuccugccauuccagcaguuuggccgggauaucgccgauaccacagacgccguuagagauccccagacacuggaaauccuggacaucaccccaugcagcuucggcggagugucugugaucaccccuggcaccaacaccagcaaucagguggcagugcuguaccaggacgugaacuguaccgaagugcccguggccauucacgccgaucagcugacaccuacauggcggguguacuccaccggcagcaauguguuucagaccagagccggcugucugaucggagccgagcacgugaacaauagcuacgagugcgacauccccaucggcgcuggcaucugugccagcuaccagacacagacaaacagccccagacgggcuagaagcguggccagccagagcaucauugccuacacaaugucucugggcgccgagaacagcguggccuacuccaacaacucuaucgcuauccccaccaacuucaccaucagcgugaccaccgagauccugccuguguccaugaccaagaccagcguggacugcaccauguacaucugcggcgauuccaccgagugcuccaaccugcugcugcaguacggcagcuucugcacccagcugaauagagcccugacagggaucgccguggaacaggacaagaacacccaagagguguucgcccaagugaagcaaaucuacaagaccccuccuaucaaggacuucggcggcuucaauuucagccagauucugcccgauccuagcaagcccagcaagcggagcuucaucgaggaccugcuguucaacaaagugacacuggccgacgccggcuucaucaagcaguauggcgauugucugggcgacauugccgccagggaucugauuugcgcccagaaguuuaacggacugacagugcugccuccucugcugaccgaugagaugaucgcccaguacacaucugcccugcuggccggcacaaucacaagcggcuggacauuuggaugcggcgccgcucugcagauccccuuugcuaugcagauggccuaccgguucaacggcaucggagugacccagaaugugcuguacgagaaccagaagcugaucgccaaccaguucaacagcgccaucggcaagauccaggacagccugagcagcacagcaagcgcccugggaaagcugcaggacguggucaaccagaaugcccaggcacugaacacccuggucaagcagcuguccuccaacuucggcgccaucagcucugugcugaacgauauccugagcagacuggacaaggucgaggccgaggugcagaucgacagacugaucacaggcagacugcagagccuccagacauacgugacccagcagcugaucagagccgccgagauuagagccucugccaaucuggccgccaccaagaugucugagugugugcugggccagagcaagagaugugacuuuugcggcaagggcuaccaccugaugagcuucccucagucugccccucacggcgugguguuucugcacgugacauaugugcccgcucaagagaagaauuucaccaccgcuccagccaucugccacgacggcaaagcccacuuuccuagagaaggcguguucguguccaacggcacccauugguucgugacacagcggaacuucuacgagccccagaucaucaccaccgacaacaccuucgugucuggcaacugcgacguugugaucggcauugugaacaauaccguguacgacccucugcagcccgagcuggacagcggaggcggaggaucugacaucaucaagcugcugaacgagcaagugaacaaagagaugcagagcagcaaccuguacaugagcaugagcagcuggugcuacacccacagccuugauggcgccggacuguuccuguuugaucacgccgccgaggaauacgagcacgccaagaagcugaucaucuuccugaacgagaacaacgugcccgugcagcugaccagcauuucugccccugagcacaaguucgagggccugacacagaucuuccagaaggccuacgaacacgagcagcacaucagcgagagcaucaacaacaucguggaccacgccauuaagagcaaggaucacgccaccuucaacuuucugcagugguacguggccgaacagcacgaggaagaggugcuguucaaggacauccuggacaagaucgagcugaucggcaacgagaaccacggccuguaucuggccgaccaguacgugaagggaaucgccaagagcagaaagagcugaggacuaguuauaagacugacuagcccgaugggccucccaacgggcccuccuccccuccuugcaccgagauuaauaaaaaaaaaaaaaaaaaaaaaaaaaaaaaaaaaaaaaaaaaaaaaaaaaaaaaaaaaaaaaaaaugcaucccccccccccccccccccccccccccccccaaaggcucuuuucagagccaccagaauu

SEQ ID NO: 13117 - RNA, 4165 nt, Artificial Sequence
  SARS-CoV-2/Wuhan/WIV05/2019__EPI_ISL_402128 spike protein mRNA gc mod (1-1147)(T874C_S1055C) Ferritin construct
aggagaaagcuuaccauguucguguuucuggugcugcugccccugguguccagccagugugugaaccugaccaccagaacacagcugccuccagccuacaccaacagcuucaccagaggcguguacuaccccgacaagguguucagauccagcgugcugcacucuacccaggaccuguuccugccuuucuucagcaacgugaccugguuccacgccauccacguguccggcaccaauggcaccaagagauucgacaaccccgugcugcccuucaacgacgggguguacuuugccagcaccgagaaguccaacaucaucagaggcuggaucuucggcaccacacuggacagcaagacccagagccugcugaucgugaacaacgccaccaacguggucaucaaagugugcgaguuccaguucugcaacgaccccuuccugggcgucuacuaccacaagaacaacaagagcuggauggaaagcgaguuccggguguacagcagcgccaacaacugcaccuucgaguacgugucccagccuuuccugauggaccuggaaggcaagcagggcaacuucaagaaccugcgcgaguucguguucaagaacaucgacggcuacuucaaaaucuacagcaagcacaccccuaucaaccucgugcgggaucugccucagggcuucucugcucuggaaccccugguggaucugcccaucggcaucaacaucacccgguuucagacacugcuggcccugcacagaagcuaccugacaccuggcgauagcagcagcggauggacagcuggugccgccgcuuacuaugugggcuaccugcagccuagaaccuuccugcugaaguacaacgagaacggcaccaucaccgacgccguggauugugcucuggauccucugagcgagacaaagugcacccugaaguccuucaccguggaaaagggcaucuaccagaccagcaacuuccgggugcagcccaccgaauccaucgugcgguuccccaauaucaccaaucugugccccuucggcgagguguucaaugccaccagauucgccucuguguacgccuggaaccggaagcggaucagcaauugcguggccgacuacuccgugcuguacaacuccgccagcuucagcaccuucaagugcuacggcguguccccuaccaagcugaacgaccugugcuucacaaacguguacgccgacagcuucgugauccggggagaugaagugcggcagauugccccuggacagacaggcaagaucgccgacuacaacuacaagcugcccgacgacuucaccggcugugugauugccuggaacagcaacaaccuggacuccaaagucggcggcaacuacaauuaccuguaccggcuguuccggaaguccaaucugaagcccuucgagcgggacaucagcaccgaaaucuaucaggccggcagcaccccuugcaacggcguggaaggcuucaacugcuacuucccacugcaguccuacggcuuucagcccacaaauggcgugggcuaucagcccuacagagugguggugcugagcuucgaacugcugcaugcuccugccacagugugcggcccuaagaaaagcaccaaucucgugaagaacaaaugcgugaacuucaacuucaacggccugaccggcaccggcgugcugacagagagcaacaagaaguuccugccauuccagcaguuuggccgggauaucgccgauaccacagacgccguuagagauccccagacacuggaaauccuggacaucaccccaugcagcuucggcggagugucugugaucaccccuggcaccaacaccagcaaucagguggcagugcuguaccaggacgugaacuguaccgaagugcccguggccauucacgccgaucagcugacaccuacauggcggguguacuccaccggcagcaauguguuucagaccagagccggcugucugaucggagccgagcacgugaacaauagcuacgagugcgacauccccaucggcgcuggcaucugugccagcuaccagacacagacaaacagccccagacgggcuagaagcguggccagccagagcaucauugccuacacaaugucucugggcgccgagaacagcguggccuacuccaacaacucuaucgcuauccccaccaacuucaccaucagcgugaccaccgagauccugccuguguccaugaccaagaccagcguggacugcaccauguacaucugcggcgauuccaccgagugcuccaaccugcugcugcaguacggcagcuucugcacccagcugaauagagcccugacagggaucgccguggaacaggacaagaacacccaagagguguucgcccaagugaagcaaaucuacaagaccccuccuaucaaggacuucggcggcuucaauuucagccagauucugcccgauccuagcaagcccagcaagcggagcuucaucgaggaccugcuguucaacaaagugacacuggccgacgccggcuucaucaagcaguauggcgauugucugggcgacauugccgccagggaucugauuugcgcccagaaguuuaacggacugacagugcugccuccucugcugaccgaugagaugaucgcccaguacugcucugcccugcuggccggcacaaucacaagcggcuggacauuuggagcuggcgccgcucugcagauccccuuugcuaugcagauggccuaccgguucaacggcaucggagugacccagaaugugcuguacgagaaccagaagcugaucgccaaccaguucaacagcgccaucggcaagauccaggacagccugagcagcacagcaagcgcccugggaaagcugcaggacguggucaaccagaaugcccaggcacugaacacccuggucaagcagcuguccuccaacuucggcgccaucagcucugugcugaacgauauccugagcagacuggacaaggucgaggccgaggugcagaucgacagacugaucacaggcagacugcagagccuccagacauacgugacccagcagcugaucagagccgccgagauuagagccucugccaaucuggccgccaccaagaugucugagugugugcugggccagagcaagagaguggacuuuugcggcaagggcuaccaccugaugagcuucccucagugcgccccucacggcgugguguuucugcacgugacauaugugcccgcucaagagaagaauuucaccaccgcuccagccaucugccacgacggcaaagcccacuuuccuagagaaggcguguucguguccaacggcacccauugguucgugacacagcggaacuucuacgagccccagaucaucaccaccgacaacaccuucgugucuggcaacugcgacguugugaucggcauugugaacaauaccguguacgacccucugcagcccgagcuggacagcggaggcggaggaucugacaucaucaagcugcugaacgagcaagugaacaaagagaugcagagcagcaaccuguacaugagcaugagcagcuggugcuacacccacagccuugauggcgccggacuguuccuguuugaucacgccgccgaggaauacgagcacgccaagaagcugaucaucuuccugaacgagaacaacgugcccgugcagcugaccagcauuucugccccugagcacaaguucgagggccugacacagaucuuccagaaggccuacgaacacgagcagcacaucagcgagagcaucaacaacaucguggaccacgccauuaagagcaaggaucacgccaccuucaacuuucugcagugguacguggccgaacagcacgaggaagaggugcuguucaaggacauccuggacaagaucgagcugaucggcaacgagaaccacggccuguaucuggccgaccaguacgugaagggaaucgccaagagcagaaagagcugaggacuaguuauaagacugacuagcccgaugggccucccaacgggcccuccuccccuccuugcaccgagauuaauaaaaaaaaaaaaaaaaaaaaaaaaaaaaaaaaaaaaaaaaaaaaaaaaaaaaaaaaaaaaaaaaugcaucccccccccccccccccccccccccccccccaaaggcucuuuucagagccaccagaauu

SEQ ID NO: 13118 - RNA, 3751 nt, Artificial Sequence
  SARS-CoV-2/Wuhan/WIV05/2019__EPI_ISL_402128 spike protein mRNA gc mod (1-1147) Foldon construct
aggagaaagcuuaccauguucguguuucuggugcugcugccccugguguccagccagugugugaaccugaccaccagaacacagcugccuccagccuacaccaacagcuucaccagaggcguguacuaccccgacaagguguucagauccagcgugcugcacucuacccaggaccuguuccugccuuucuucagcaacgugaccugguuccacgccauccacguguccggcaccaauggcaccaagagauucgacaaccccgugcugcccuucaacgacgggguguacuuugccagcaccgagaaguccaacaucaucagaggcuggaucuucggcaccacacuggacagcaagacccagagccugcugaucgugaacaacgccaccaacguggucaucaaagugugcgaguuccaguucugcaacgaccccuuccugggcgucuacuaccacaagaacaacaagagcuggauggaaagcgaguuccggguguacagcagcgccaacaacugcaccuucgaguacgugucccagccuuuccugauggaccuggaaggcaagcagggcaacuucaagaaccugcgcgaguucguguucaagaacaucgacggcuacuucaaaaucuacagcaagcacaccccuaucaaccucgugcgggaucugccucagggcuucucugcucuggaaccccugguggaucugcccaucggcaucaacaucacccgguuucagacacugcuggcccugcacagaagcuaccugacaccuggcgauagcagcagcggauggacagcuggugccgccgcuuacuaugugggcuaccugcagccuagaaccuuccugcugaaguacaacgagaacggcaccaucaccgacgccguggauugugcucuggauccucugagcgagacaaagugcacccugaaguccuucaccguggaaaagggcaucuaccagaccagcaacuuccgggugcagcccaccgaauccaucgugcgguuccccaauaucaccaaucugugccccuucggcgagguguucaaugccaccagauucgccucuguguacgccuggaaccggaagcggaucagcaauugcguggccgacuacuccgugcuguacaacuccgccagcuucagcaccuucaagugcuacggcguguccccuaccaagcugaacgaccugugcuucacaaacguguacgccgacagcuucgugauccggggagaugaagugcggcagauugccccuggacagacaggcaagaucgccgacuacaacuacaagcugcccgacgacuucaccggcugugugauugccuggaacagcaacaaccuggacuccaaagucggcggcaacuacaauuaccuguaccggcuguuccggaaguccaaucugaagcccuucgagcgggacaucagcaccgaaaucuaucaggccggcagcaccccuugcaacggcguggaaggcuucaacugcuacuucccacugcaguccuacggcuuucagcccacaaauggcgugggcuaucagcccuacagagugguggugcugagcuucgaacugcugcaugcuccugccacagugugcggcccuaagaaaagcaccaaucucgugaagaacaaaugcgugaacuucaacuucaacggccugaccggcaccggcgugcugacagagagcaacaagaaguuccugccauuccagcaguuuggccgggauaucgccgauaccacagacgccguuagagauccccagacacuggaaauccuggacaucaccccaugcagcuucggcggagugucugugaucaccccuggcaccaacaccagcaaucagguggcagugcuguaccaggacgugaacuguaccgaagugcccguggccauucacgccgaucagcugacaccuacauggcggguguacuccaccggcagcaauguguuucagaccagagccggcugucugaucggagccgagcacgugaacaauagcuacgagugcgacauccccaucggcgcuggcaucugugccagcuaccagacacagacaaacagccccagacgggcuagaagcguggccagccagagcaucauugccuacacaaugucucugggcgccgagaacagcguggccuacuccaacaacucuaucgcuauccccaccaacuucaccaucagcgugaccaccgagauccugccuguguccaugaccaagaccagcguggacugcaccauguacaucugcggcgauuccaccgagugcuccaaccugcugcugcaguacggcagcuucugcacccagcugaauagagcccugacagggaucgccguggaacaggacaagaacacccaagagguguucgcccaagugaagcaaaucuacaagaccccuccuaucaaggacuucggcggcuucaauuucagccagauucugcccgauccuagcaagcccagcaagcggagcuucaucgaggaccugcuguucaacaaagugacacuggccgacgccggcuucaucaagcaguauggcgauugucugggcgacauugccgccagggaucugauuugcgcccagaaguuuaacggacugacagugcugccuccucugcugaccgaugagaugaucgcccaguacacaucugcccugcuggccggcacaaucacaagcggcuggacauuuggagcuggcgccgcucugcagauccccuuugcuaugcagauggccuaccgguucaacggcaucggagugacccagaaugugcuguacgagaaccagaagcugaucgccaaccaguucaacagcgccaucggcaagauccaggacagccugagcagcacagcaagcgcccugggaaagcugcaggacguggucaaccagaaugcccaggcacugaacacccuggucaagcagcuguccuccaacuucggcgccaucagcucugugcugaacgauauccugagcagacuggacaaggucgaggccgaggugcagaucgacagacugaucacaggcagacugcagagccuccagacauacgugacccagcagcugaucagagccgccgagauuagagccucugccaaucuggccgccaccaagaugucugagugugugcugggccagagcaagagaguggacuuuugcggcaagggcuaccaccugaugagcuucccucagucugccccucacggcgugguguuucugcacgugacauaugugcccgcucaagagaagaauuucaccaccgcuccagccaucugccacgacggcaaagcccacuuuccuagagaaggcguguucguguccaacggcacccauugguucgugacacagcggaacuucuacgagccccagaucaucaccaccgacaacaccuucgugucuggcaacugcgacguugugaucggcauugugaacaauaccguguacgacccucugcagcccgagcuggacagcggaggaucuggcuauauccccgaggcuccuagagauggccaggccuauguucggaaggauggcgaaugggugcugcugagcaccuuccuuugaggacuaguuauaagacugacuagcccgaugggccucccaacgggcccuccuccccuccuugcaccgagauuaauaaaaaaaaaaaaaaaaaaaaaaaaaaaaaaaaaaaaaaaaaaaaaaaaaaaaaaaaaaaaaaaaugcaucccccccccccccccccccccccccccccccaaaggcucuuuucagagccaccagaauu

SEQ ID NO: 13119 - RNA, 3751 nt, Artificial Sequence
  SARS-CoV-2/Wuhan/WIV05/2019__EPI_ISL_402128 spike protein mRNA gc mod (1-1147)(K986P_V987P) Foldon construct
aggagaaagcuuaccauguucguguuucuggugcugcugccccugguguccagccagugugugaaccugaccaccagaacacagcugccuccagccuacaccaacagcuucaccagaggcguguacuaccccgacaagguguucagauccagcgugcugcacucuacccaggaccuguuccugccuuucuucagcaacgugaccugguuccacgccauccacguguccggcaccaauggcaccaagagauucgacaaccccgugcugcccuucaacgacgggguguacuuugccagcaccgagaaguccaacaucaucagaggcuggaucuucggcaccacacuggacagcaagacccagagccugcugaucgugaacaacgccaccaacguggucaucaaagugugcgaguuccaguucugcaacgaccccuuccugggcgucuacuaccacaagaacaacaagagcuggauggaaagcgaguuccggguguacagcagcgccaacaacugcaccuucgaguacgugucccagccuuuccugauggaccuggaaggcaagcagggcaacuucaagaaccugcgcgaguucguguucaagaacaucgacggcuacuucaaaaucuacagcaagcacaccccuaucaaccucgugcgggaucugccucagggcuucucugcucuggaaccccugguggaucugcccaucggcaucaacaucacccgguuucagacacugcuggcccugcacagaagcuaccugacaccuggcgauagcagcagcggauggacagcuggugccgccgcuuacuaugugggcuaccugcagccuagaaccuuccugcugaaguacaacgagaacggcaccaucaccgacgccguggauugugcucuggauccucugagcgagacaaagugcacccugaaguccuucaccguggaaaagggcaucuaccagaccagcaacuuccgggugcagcccaccgaauccaucgugcgguuccccaauaucaccaaucugugccccuucggcgagguguucaaugccaccagauucgccucuguguacgccuggaaccggaagcggaucagcaauugcguggccgacuacuccgugcuguacaacuccgccagcuucagcaccuucaagugcuacggcguguccccuaccaagcugaacgaccugugcuucacaaacguguacgccgacagcuucgugauccggggagaugaagugcggcagauugccccuggacagacaggcaagaucgccgacuacaacuacaagcugcccgacgacuucaccggcugugugauugccuggaacagcaacaaccuggacuccaaagucggcggcaacuacaauuaccuguaccggcuguuccggaaguccaaucugaagcccuucgagcgggacaucagcaccgaaaucuaucaggccggcagcaccccuugcaacggcguggaaggcuucaacugcuacuucccacugcaguccuacggcuuucagcccacaaauggcgugggcuaucagcccuacagagugguggugcugagcuucgaacugcugcaugcuccugccacagugugcggcccuaagaaaagcaccaaucucgugaagaacaaaugcgugaacuucaacuucaacggccugaccggcaccggcgugcugacagagagcaacaagaaguuccugccauuccagcaguuuggccgggauaucgccgauaccacagacgccguuagagauccccagacacuggaaauccuggacaucaccccaugcagcuucggcggagugucugugaucaccccuggcaccaacaccagcaaucagguggcagugcuguaccaggacgugaacuguaccgaagugcccguggccauucacgccgaucagcugacaccuacauggcggguguacuccaccggcagcaauguguuucagaccagagccggcugucugaucggagccgagcacgugaacaauagcuacgagugcgacauccccaucggcgcuggcaucugugccagcuaccagacacagacaaacagccccagacgggcuagaagcguggccagccagagcaucauugccuacacaaugucucugggcgccgagaacagcguggccuacuccaacaacucuaucgcuauccccaccaacuucaccaucagcgugaccaccgagauccugccuguguccaugaccaagaccagcguggacugcaccauguacaucugcggcgauuccaccgagugcuccaaccugcugcugcaguacggcagcuucugcacccagcugaauagagcccugacagggaucgccguggaacaggacaagaacacccaagagguguucgcccaagugaagcaaaucuacaagaccccuccuaucaaggacuucggcggcuucaauuucagccagauucugcccgauccuagcaagcccagcaagcggagcuucaucgaggaccugcuguucaacaaagugacacuggccgacgccggcuucaucaagcaguauggcgauugucugggcgacauugccgccagggaucugauuugcgcccagaaguuuaacggacugacagugcugccuccucugcugaccgaugagaugaucgcccaguacacaucugcccugcuggccggcacaaucacaagcggcuggacauuuggagcuggcgccgcucugcagauccccuuugcuaugcagauggccuaccgguucaacggcaucggagugacccagaaugugcuguacgagaaccagaagcugaucgccaaccaguucaacagcgccaucggcaagauccaggacagccugagcagcacagcaagcgcccugggaaagcugcaggacguggucaaccagaaugcccaggcacugaacacccuggucaagcagcuguccuccaacuucggcgccaucagcucugugcugaacgauauccugagcagacuggacccuccugaggccgaggugcagaucgacagacugaucacaggcagacugcagagccuccagacauacgugacccagcagcugaucagagccgccgagauuagagccucugccaaucuggccgccaccaagaugucugagugugugcugggccagagcaagagaguggacuuuugcggcaagggcuaccaccugaugagcuucccucagucugccccucacggcgugguguuucugcacgugacauaugugcccgcucaagagaagaauuucaccaccgcuccagccaucugccacgacggcaaagcccacuuuccuagagaaggcguguucguguccaacggcacccauugguucgugacacagcggaacuucuacgagccccagaucaucaccaccgacaacaccuucgugucuggcaacugcgacguugugaucggcauugugaacaauaccguguacgacccucugcagcccgagcuggacagcggaggaucuggcuauauccccgaggcuccuagagauggccaggccuauguucggaaggauggcgaaugggugcugcugagcaccuuccuuugaggacuaguuauaagacugacuagcccgaugggccucccaacgggcccuccuccccuccuugcaccgagauuaauaaaaaaaaaaaaaaaaaaaaaaaaaaaaaaaaaaaaaaaaaaaaaaaaaaaaaaaaaaaaaaaaugcaucccccccccccccccccccccccccccccccaaaggcucuuuucagagccaccagaauu

SEQ ID NO: 13120 - RNA, 3751 nt, Artificial Sequence
  SARS-CoV-2/Wuhan/WIV05/2019__EPI_ISL_402128 spike protein mRNA gc mod (1-1147)(K986P_V987P_T887WN_A1020W) Foldon construct
aggagaaagcuuaccauguucguguuucuggugcugcugccccugguguccagccagugugugaaccugaccaccagaacacagcugccuccagccuacaccaacagcuucaccagaggcguguacuaccccgacaagguguucagauccagcgugcugcacucuacccaggaccuguuccugccuuucuucagcaacgugaccugguuccacgccauccacguguccggcaccaauggcaccaagagauucgacaaccccgugcugcccuucaacgacgggguguacuuugccagcaccgagaaguccaacaucaucagaggcuggaucuucggcaccacacuggacagcaagacccagagccugcugaucgugaacaacgccaccaacguggucaucaaagugugcgaguuccaguucugcaacgaccccuuccugggcgucuacuaccacaagaacaacaagagcuggauggaaagcgaguuccggguguacagcagcgccaacaacugcaccuucgaguacgugucccagccuuuccugauggaccuggaaggcaagcagggcaacuucaagaaccugcgcgaguucguguucaagaacaucgacggcuacuucaaaaucuacagcaagcacaccccuaucaaccucgugcgggaucugccucagggcuucucugcucuggaaccccugguggaucugcccaucggcaucaacaucacccgguuucagacacugcuggcccugcacagaagcuaccugacaccuggcgauagcagcagcggauggacagcuggugccgccgcuuacuaugugggcuaccugcagccuagaaccuuccugcugaaguacaacgagaacggcaccaucaccgacgccguggauugugcucuggauccucugagcgagacaaagugcacccugaaguccuucaccguggaaaagggcaucuaccagaccagcaacuuccgggugcagcccaccgaauccaucgugcgguuccccaauaucaccaaucugugccccuucggcgagguguucaaugccaccagauucgccucuguguacgccuggaaccggaagcggaucagcaauugcguggccgacuacuccgugcuguacaacuccgccagcuucagcaccuucaagugcuacggcguguccccuaccaagcugaacgaccugugcuucacaaacguguacgccgacagcuucgugauccggggagaugaagugcggcagauugccccuggacagacaggcaagaucgccgacuacaacuacaagcugcccgacgacuucaccggcugugugauugccuggaacagcaacaaccuggacuccaaagucggcggcaacuacaauuaccuguaccggcuguuccggaaguccaaucugaagcccuucgagcgggacaucagcaccgaaaucuaucaggccggcagcaccccuugcaacggcguggaaggcuucaacugcuacuucccacugcaguccuacggcuuucagcccacaaauggcgugggcuaucagcccuacagagugguggugcugagcuucgaacugcugcaugcuccugccacagugugcggcccuaagaaaagcaccaaucucgugaagaacaaaugcgugaacuucaacuucaacggccugaccggcaccggcgugcugacagagagcaacaagaaguuccugccauuccagcaguuuggccgggauaucgccgauaccacagacgccguuagagauccccagacacuggaaauccuggacaucaccccaugcagcuucggcggagugucugugaucaccccuggcaccaacaccagcaaucagguggcagugcuguaccaggacgugaacuguaccgaagugcccguggccauucacgccgaucagcugacaccuacauggcggguguacuccaccggcagcaauguguuucagaccagagccggcugucugaucggagccgagcacgugaacaauagcuacgagugcgacauccccaucggcgcuggcaucugugccagcuaccagacacagacaaacagccccagacgggcuagaagcguggccagccagagcaucauugccuacacaaugucucugggcgccgagaacagcguggccuacuccaacaacucuaucgcuauccccaccaacuucaccaucagcgugaccaccgagauccugccuguguccaugaccaagaccagcguggacugcaccauguacaucugcggcgauuccaccgagugcuccaaccugcugcugcaguacggcagcuucugcacccagcugaauagagcccugacagggaucgccguggaacaggacaagaacacccaagagguguucgcccaagugaagcaaaucuacaagaccccuccuaucaaggacuucggcggcuucaauuucagccagauucugcccgauccuagcaagcccagcaagcggagcuucaucgaggaccugcuguucaacaaagugacacuggccgacgccggcuucaucaagcaguauggcgauugucugggcgacauugccgccagggaucugauuugcgcccagaaguuuaacggacugacagugcugccuccucugcugaccgaugagaugaucgcccaguacacaucugcccugcuggccggcacaaucacaagcggcuggugguuuggagcuggcgccgcucugcagauccccuuugcuaugcagauggccuaccgguucaacggcaucggagugacccagaaugugcuguacgagaaccagaagcugaucgccaaccaguucaacagcgccaucggcaagauccaggacagccugagcagcacagcaagcgcccugggaaagcugcaggacguggucaaccagaaugcccaggcacugaacacccuggucaagcagcuguccuccaacuucggcgccaucagcucugugcugaacgauauccugagcagacuggacccuccugaggccgaggugcagaucgacagacugaucacaggcagacugcagagccuccagacauacgugacccagcagcugaucagagccgccgagauuagauggucugccaaucuggccgccaccaagaugucugagugugugcugggccagagcaagagaguggacuuuugcggcaagggcuaccaccugaugagcuucccucagucugccccucacggcgugguguuucugcacgugacauaugugcccgcucaagagaagaauuucaccaccgcuccagccaucugccacgacggcaaagcccacuuuccuagagaaggcguguucguguccaacggcacccauugguucgugacacagcggaacuucuacgagccccagaucaucaccaccgacaacaccuucgugucuggcaacugcgacguugugaucggcauugugaacaauaccguguacgacccucugcagcccgagcuggacagcggaggaucuggcuauauccccgaggcuccuagagauggccaggccuauguucggaaggauggcgaaugggugcugcugagcaccuuccuuugaggacuaguuauaagacugacuagcccgaugggccucccaacgggcccuccuccccuccuugcaccgagauuaauaaaaaaaaaaaaaaaaaaaaaaaaaaaaaaaaaaaaaaaaaaaaaaaaaaaaaaaaaaaaaaaaugcaucccccccccccccccccccccccccccccccaaaggcucuuuucagagccaccagaauu

SEQ ID NO: 13121 - RNA, 3751 nt, Artificial Sequence
  SARS-CoV-2/Wuhan/WIV05/2019__EPI_ISL_402128 spike protein mRNA gc mod (1-1147)(K986P_V987P_P1069F) Foldon construct
aggagaaagcuuaccauguucguguuucuggugcugcugccccugguguccagccagugugugaaccugaccaccagaacacagcugccuccagccuacaccaacagcuucaccagaggcguguacuaccccgacaagguguucagauccagcgugcugcacucuacccaggaccuguuccugccuuucuucagcaacgugaccugguuccacgccauccacguguccggcaccaauggcaccaagagauucgacaaccccgugcugcccuucaacgacgggguguacuuugccagcaccgagaaguccaacaucaucagaggcuggaucuucggcaccacacuggacagcaagacccagagccugcugaucgugaacaacgccaccaacguggucaucaaagugugcgaguuccaguucugcaacgaccccuuccugggcgucuacuaccacaagaacaacaagagcuggauggaaagcgaguuccggguguacagcagcgccaacaacugcaccuucgaguacgugucccagccuuuccugauggaccuggaaggcaagcagggcaacuucaagaaccugcgcgaguucguguucaagaacaucgacggcuacuucaaaaucuacagcaagcacaccccuaucaaccucgugcgggaucugccucagggcuucucugcucuggaaccccugguggaucugcccaucggcaucaacaucacccgguuucagacacugcuggcccugcacagaagcuaccugacaccuggcgauagcagcagcggauggacagcuggugccgccgcuuacuaugugggcuaccugcagccuagaaccuuccugcugaaguacaacgagaacggcaccaucaccgacgccguggauugugcucuggauccucugagcgagacaaagugcacccugaaguccuucaccguggaaaagggcaucuaccagaccagcaacuuccgggugcagcccaccgaauccaucgugcgguuccccaauaucaccaaucugugccccuucggcgagguguucaaugccaccagauucgccucuguguacgccuggaaccggaagcggaucagcaauugcguggccgacuacuccgugcuguacaacuccgccagcuucagcaccuucaagugcuacggcguguccccuaccaagcugaacgaccugugcuucacaaacguguacgccgacagcuucgugauccggggagaugaagugcggcagauugccccuggacagacaggcaagaucgccgacuacaacuacaagcugcccgacgacuucaccggcugugugauugccuggaacagcaacaaccuggacuccaaagucggcggcaacuacaauuaccuguaccggcuguuccggaaguccaaucugaagcccuucgagcgggacaucagcaccgaaaucuaucaggccggcagcaccccuugcaacggcguggaaggcuucaacugcuacuucccacugcaguccuacggcuuucagcccacaaauggcgugggcuaucagcccuacagagugguggugcugagcuucgaacugcugcaugcuccugccacagugugcggcccuaagaaaagcaccaaucucgugaagaacaaaugcgugaacuucaacuucaacggccugaccggcaccggcgugcugacagagagcaacaagaaguuccugccauuccagcaguuuggccgggauaucgccgauaccacagacgccguuagagauccccagacacuggaaauccuggacaucaccccaugcagcuucggcggagugucugugaucaccccuggcaccaacaccagcaaucagguggcagugcuguaccaggacgugaacuguaccgaagugcccguggccauucacgccgaucagcugacaccuacauggcggguguacuccaccggcagcaauguguuucagaccagagccggcugucugaucggagccgagcacgugaacaauagcuacgagugcgacauccccaucggcgcuggcaucugugccagcuaccagacacagacaaacagccccagacgggcuagaagcguggccagccagagcaucauugccuacacaaugucucugggcgccgagaacagcguggccuacuccaacaacucuaucgcuauccccaccaacuucaccaucagcgugaccaccgagauccugccuguguccaugaccaagaccagcguggacugcaccauguacaucugcggcgauuccaccgagugcuccaaccugcugcugcaguacggcagcuucugcacccagcugaauagagcccugacagggaucgccguggaacaggacaagaacacccaagagguguucgcccaagugaagcaaaucuacaagaccccuccuaucaaggacuucggcggcuucaauuucagccagauucugcccgauccuagcaagcccagcaagcggagcuucaucgaggaccugcuguucaacaaagugacacuggccgacgccggcuucaucaagcaguauggcgauugucugggcgacauugccgccagggaucugauuugcgcccagaaguuuaacggacugacagugcugccuccucugcugaccgaugagaugaucgcccaguacacaucugcccugcuggccggcacaaucacaagcggcuggacauuuggagcuggcgccgcucugcagauccccuuugcuaugcagauggccuaccgguucaacggcaucggagugacccagaaugugcuguacgagaaccagaagcugaucgccaaccaguucaacagcgccaucggcaagauccaggacagccugagcagcacagcaagcgcccugggaaagcugcaggacguggucaaccagaaugcccaggcacugaacacccuggucaagcagcuguccuccaacuucggcgccaucagcucugugcugaacgauauccugagcagacuggacccuccugaggccgaggugcagaucgacagacugaucacaggcagacugcagagccuccagacauacgugacccagcagcugaucagagccgccgagauuagagccucugccaaucuggccgccaccaagaugucugagugugugcugggccagagcaagagaguggacuuuugcggcaagggcuaccaccugaugagcuucccucagucugccccucacggcgugguguuucugcacgugacauauguguucgcucaagagaagaauuucaccaccgcuccagccaucugccacgacggcaaagcccacuuuccuagagaaggcguguucguguccaacggcacccauugguucgugacacagcggaacuucuacgagccccagaucaucaccaccgacaacaccuucgugucuggcaacugcgacguugugaucggcauugugaacaauaccguguacgacccucugcagcccgagcuggacagcggaggaucuggcuauauccccgaggcuccuagagauggccaggccuauguucggaaggauggcgaaugggugcugcugagcaccuuccuuugaggacuaguuauaagacugacuagcccgaugggccucccaacgggcccuccuccccuccuugcaccgagauuaauaaaaaaaaaaaaaaaaaaaaaaaaaaaaaaaaaaaaaaaaaaaaaaaaaaaaaaaaaaaaaaaaugcaucccccccccccccccccccccccccccccccaaaggcucuuuucagagccaccagaauu

SEQ ID NO: 13122 - RNA, 3751 nt, Artificial Sequence
  SARS-CoV-2/Wuhan/WIV05/2019__EPI_ISL_402128 spike protein mRNA gc mod (1-1147)(K986P_V987P_ H1048Q_H1064N_ H1083N_H1101N) Foldon construct
aggagaaagcuuaccauguucguguuucuggugcugcugccccugguguccagccagugugugaaccugaccaccagaacacagcugccuccagccuacaccaacagcuucaccagaggcguguacuaccccgacaagguguucagauccagcgugcugcacucuacccaggaccuguuccugccuuucuucagcaacgugaccugguuccacgccauccacguguccggcaccaauggcaccaagagauucgacaaccccgugcugcccuucaacgacgggguguacuuugccagcaccgagaaguccaacaucaucagaggcuggaucuucggcaccacacuggacagcaagacccagagccugcugaucgugaacaacgccaccaacguggucaucaaagugugcgaguuccaguucugcaacgaccccuuccugggcgucuacuaccacaagaacaacaagagcuggauggaaagcgaguuccggguguacagcagcgccaacaacugcaccuucgaguacgugucccagccuuuccugauggaccuggaaggcaagcagggcaacuucaagaaccugcgcgaguucguguucaagaacaucgacggcuacuucaaaaucuacagcaagcacaccccuaucaaccucgugcgggaucugccucagggcuucucugcucuggaaccccugguggaucugcccaucggcaucaacaucacccgguuucagacacugcuggcccugcacagaagcuaccugacaccuggcgauagcagcagcggauggacagcuggugccgccgcuuacuaugugggcuaccugcagccuagaaccuuccugcugaaguacaacgagaacggcaccaucaccgacgccguggauugugcucuggauccucugagcgagacaaagugcacccugaaguccuucaccguggaaaagggcaucuaccagaccagcaacuuccgggugcagcccaccgaauccaucgugcgguuccccaauaucaccaaucugugccccuucggcgagguguucaaugccaccagauucgccucuguguacgccuggaaccggaagcggaucagcaauugcguggccgacuacuccgugcuguacaacuccgccagcuucagcaccuucaagugcuacggcguguccccuaccaagcugaacgaccugugcuucacaaacguguacgccgacagcuucgugauccggggagaugaagugcggcagauugccccuggacagacaggcaagaucgccgacuacaacuacaagcugcccgacgacuucaccggcugugugauugccuggaacagcaacaaccuggacuccaaagucggcggcaacuacaauuaccuguaccggcuguuccggaaguccaaucugaagcccuucgagcgggacaucagcaccgaaaucuaucaggccggcagcaccccuugcaacggcguggaaggcuucaacugcuacuucccacugcaguccuacggcuuucagcccacaaauggcgugggcuaucagcccuacagagugguggugcugagcuucgaacugcugcaugcuccugccacagugugcggcccuaagaaaagcaccaaucucgugaagaacaaaugcgugaacuucaacuucaacggccugaccggcaccggcgugcugacagagagcaacaagaaguuccugccauuccagcaguuuggccgggauaucgccgauaccacagacgccguuagagauccccagacacuggaaauccuggacaucaccccaugcagcuucggcggagugucugugaucaccccuggcaccaacaccagcaaucagguggcagugcuguaccaggacgugaacuguaccgaagugcccguggccauucacgccgaucagcugacaccuacauggcggguguacuccaccggcagcaauguguuucagaccagagccggcugucugaucggagccgagcacgugaacaauagcuacgagugcgacauccccaucggcgcuggcaucugugccagcuaccagacacagacaaacagccccagacgggcuagaagcguggccagccagagcaucauugccuacacaaugucucugggcgccgagaacagcguggccuacuccaacaacucuaucgcuauccccaccaacuucaccaucagcgugaccaccgagauccugccuguguccaugaccaagaccagcguggacugcaccauguacaucugcggcgauuccaccgagugcuccaaccugcugcugcaguacggcagcuucugcacccagcugaauagagcccugacagggaucgccguggaacaggacaagaacacccaagagguguucgcccaagugaagcaaaucuacaagaccccuccuaucaaggacuucggcggcuucaauuucagccagauucugcccgauccuagcaagcccagcaagcggagcuucaucgaggaccugcuguucaacaaagugacacuggccgacgccggcuucaucaagcaguauggcgauugucugggcgacauugccgccagggaucugauuugcgcccagaaguuuaacggacugacagugcugccuccucugcugaccgaugagaugaucgcccaguacacaucugcccugcuggccggcacaaucacaagcggcuggacauuuggagcuggcgccgcucugcagauccccuuugcuaugcagauggccuaccgguucaacggcaucggagugacccagaaugugcuguacgagaaccagaagcugaucgccaaccaguucaacagcgccaucggcaagauccaggacagccugagcagcacagcaagcgcccugggaaagcugcaggacguggucaaccagaaugcccaggcacugaacacccuggucaagcagcuguccuccaacuucggcgccaucagcucugugcugaacgauauccugagcagacuggacccuccugaggccgaggugcagaucgacagacugaucacaggcagacugcagagccuccagacauacgugacccagcagcugaucagagccgccgagauuagagccucugccaaucuggccgccaccaagaugucugagugugugcugggccagagcaagagaguggacuuuugcggcaagggcuaccagcugaugagcuucccucagucugccccucacggcgugguguuucugaacgugacauaugugcccgcucaagagaagaauuucaccaccgcuccagccaucugcaacgacggcaaagcccacuuuccuagagaaggcguguucguguccaacggcaccaacugguucgugacacagcggaacuucuacgagccccagaucaucaccaccgacaacaccuucgugucuggcaacugcgacguugugaucggcauugugaacaauaccguguacgacccucugcagcccgagcuggacagcggaggaucuggcuauauccccgaggcuccuagagauggccaggccuauguucggaaggauggcgaaugggugcugcugagcaccuuccuuugaggacuaguuauaagacugacuagcccgaugggccucccaacgggcccuccuccccuccuugcaccgagauuaauaaaaaaaaaaaaaaaaaaaaaaaaaaaaaaaaaaaaaaaaaaaaaaaaaaaaaaaaaaaaaaaaugcaucccccccccccccccccccccccccccccccaaaggcucuuuucagagccaccagaauu

SEQ ID NO: 13123 - RNA, 3751 nt, Artificial Sequence
  SARS-CoV-2/Wuhan/WIV05/2019__EPI_ISL_402128 spike protein mRNA gc mod (1-1147)(I712C_T1077C) Foldon construct
aggagaaagcuuaccauguucguguuucuggugcugcugccccugguguccagccagugugugaaccugaccaccagaacacagcugccuccagccuacaccaacagcuucaccagaggcguguacuaccccgacaagguguucagauccagcgugcugcacucuacccaggaccuguuccugccuuucuucagcaacgugaccugguuccacgccauccacguguccggcaccaauggcaccaagagauucgacaaccccgugcugcccuucaacgacgggguguacuuugccagcaccgagaaguccaacaucaucagaggcuggaucuucggcaccacacuggacagcaagacccagagccugcugaucgugaacaacgccaccaacguggucaucaaagugugcgaguuccaguucugcaacgaccccuuccugggcgucuacuaccacaagaacaacaagagcuggauggaaagcgaguuccggguguacagcagcgccaacaacugcaccuucgaguacgugucccagccuuuccugauggaccuggaaggcaagcagggcaacuucaagaaccugcgcgaguucguguucaagaacaucgacggcuacuucaaaaucuacagcaagcacaccccuaucaaccucgugcgggaucugccucagggcuucucugcucuggaaccccugguggaucugcccaucggcaucaacaucacccgguuucagacacugcuggcccugcacagaagcuaccugacaccuggcgauagcagcagcggauggacagcuggugccgccgcuuacuaugugggcuaccugcagccuagaaccuuccugcugaaguacaacgagaacggcaccaucaccgacgccguggauugugcucuggauccucugagcgagacaaagugcacccugaaguccuucaccguggaaaagggcaucuaccagaccagcaacuuccgggugcagcccaccgaauccaucgugcgguuccccaauaucaccaaucugugccccuucggcgagguguucaaugccaccagauucgccucuguguacgccuggaaccggaagcggaucagcaauugcguggccgacuacuccgugcuguacaacuccgccagcuucagcaccuucaagugcuacggcguguccccuaccaagcugaacgaccugugcuucacaaacguguacgccgacagcuucgugauccggggagaugaagugcggcagauugccccuggacagacaggcaagaucgccgacuacaacuacaagcugcccgacgacuucaccggcugugugauugccuggaacagcaacaaccuggacuccaaagucggcggcaacuacaauuaccuguaccggcuguuccggaaguccaaucugaagcccuucgagcgggacaucagcaccgaaaucuaucaggccggcagcaccccuugcaacggcguggaaggcuucaacugcuacuucccacugcaguccuacggcuuucagcccacaaauggcgugggcuaucagcccuacagagugguggugcugagcuucgaacugcugcaugcuccugccacagugugcggcccuaagaaaagcaccaaucucgugaagaacaaaugcgugaacuucaacuucaacggccugaccggcaccggcgugcugacagagagcaacaagaaguuccugccauuccagcaguuuggccgggauaucgccgauaccacagacgccguuagagauccccagacacuggaaauccuggacaucaccccaugcagcuucggcggagugucugugaucaccccuggcaccaacaccagcaaucagguggcagugcuguaccaggacgugaacuguaccgaagugcccguggccauucacgccgaucagcugacaccuacauggcggguguacuccaccggcagcaauguguuucagaccagagccggcugucugaucggagccgagcacgugaacaauagcuacgagugcgacauccccaucggcgcuggcaucugugccagcuaccagacacagacaaacagccccagacgggcuagaagcguggccagccagagcaucauugccuacacaaugucucugggcgccgagaacagcguggccuacuccaacaacucuugcgcuauccccaccaacuucaccaucagcgugaccaccgagauccugccuguguccaugaccaagaccagcguggacugcaccauguacaucugcggcgauuccaccgagugcuccaaccugcugcugcaguacggcagcuucugcacccagcugaauagagcccugacagggaucgccguggaacaggacaagaacacccaagagguguucgcccaagugaagcaaaucuacaagaccccuccuaucaaggacuucggcggcuucaauuucagccagauucugcccgauccuagcaagcccagcaagcggagcuucaucgaggaccugcuguucaacaaagugacacuggccgacgccggcuucaucaagcaguauggcgauugucugggcgacauugccgccagggaucugauuugcgcccagaaguuuaacggacugacagugcugccuccucugcugaccgaugagaugaucgcccaguacacaucugcccugcuggccggcacaaucacaagcggcuggacauuuggagcuggcgccgcucugcagauccccuuugcuaugcagauggccuaccgguucaacggcaucggagugacccagaaugugcuguacgagaaccagaagcugaucgccaaccaguucaacagcgccaucggcaagauccaggacagccugagcagcacagcaagcgcccugggaaagcugcaggacguggucaaccagaaugcccaggcacugaacacccuggucaagcagcuguccuccaacuucggcgccaucagcucugugcugaacgauauccugagcagacuggacaaggucgaggccgaggugcagaucgacagacugaucacaggcagacugcagagccuccagacauacgugacccagcagcugaucagagccgccgagauuagagccucugccaaucuggccgccaccaagaugucugagugugugcugggccagagcaagagaguggacuuuugcggcaagggcuaccaccugaugagcuucccucagucugccccucacggcgugguguuucugcacgugacauaugugcccgcucaagagaagaauuucaccugugcuccagccaucugccacgacggcaaagcccacuuuccuagagaaggcguguucguguccaacggcacccauugguucgugacacagcggaacuucuacgagccccagaucaucaccaccgacaacaccuucgugucuggcaacugcgacguugugaucggcauugugaacaauaccguguacgacccucugcagcccgagcuggacagcggaggaucuggcuauauccccgaggcuccuagagauggccaggccuauguucggaaggauggcgaaugggugcugcugagcaccuuccuuugaggacuaguuauaagacugacuagcccgaugggccucccaacgggcccuccuccccuccuugcaccgagauuaauaaaaaaaaaaaaaaaaaaaaaaaaaaaaaaaaaaaaaaaaaaaaaaaaaaaaaaaaaaaaaaaaugcaucccccccccccccccccccccccccccccccaaaggcucuuuucagagccaccagaauu

SEQ ID NO: 13124 - RNA, 3751 nt, Artificial Sequence
  SARS-CoV-2/Wuhan/WIV05/2019__EPI_ISL_402128 spike protein mRNA gc mod (1-1147)(I714C_Y1110C) Foldon construct
aggagaaagcuuaccauguucguguuucuggugcugcugccccugguguccagccagugugugaaccugaccaccagaacacagcugccuccagccuacaccaacagcuucaccagaggcguguacuaccccgacaagguguucagauccagcgugcugcacucuacccaggaccuguuccugccuuucuucagcaacgugaccugguuccacgccauccacguguccggcaccaauggcaccaagagauucgacaaccccgugcugcccuucaacgacgggguguacuuugccagcaccgagaaguccaacaucaucagaggcuggaucuucggcaccacacuggacagcaagacccagagccugcugaucgugaacaacgccaccaacguggucaucaaagugugcgaguuccaguucugcaacgaccccuuccugggcgucuacuaccacaagaacaacaagagcuggauggaaagcgaguuccggguguacagcagcgccaacaacugcaccuucgaguacgugucccagccuuuccugauggaccuggaaggcaagcagggcaacuucaagaaccugcgcgaguucguguucaagaacaucgacggcuacuucaaaaucuacagcaagcacaccccuaucaaccucgugcgggaucugccucagggcuucucugcucuggaaccccugguggaucugcccaucggcaucaacaucacccgguuucagacacugcuggcccugcacagaagcuaccugacaccuggcgauagcagcagcggauggacagcuggugccgccgcuuacuaugugggcuaccugcagccuagaaccuuccugcugaaguacaacgagaacggcaccaucaccgacgccguggauugugcucuggauccucugagcgagacaaagugcacccugaaguccuucaccguggaaaagggcaucuaccagaccagcaacuuccgggugcagcccaccgaauccaucgugcgguuccccaauaucaccaaucugugccccuucggcgagguguucaaugccaccagauucgccucuguguacgccuggaaccggaagcggaucagcaauugcguggccgacuacuccgugcuguacaacuccgccagcuucagcaccuucaagugcuacggcguguccccuaccaagcugaacgaccugugcuucacaaacguguacgccgacagcuucgugauccggggagaugaagugcggcagauugccccuggacagacaggcaagaucgccgacuacaacuacaagcugcccgacgacuucaccggcugugugauugccuggaacagcaacaaccuggacuccaaagucggcggcaacuacaauuaccuguaccggcuguuccggaaguccaaucugaagcccuucgagcgggacaucagcaccgaaaucuaucaggccggcagcaccccuugcaacggcguggaaggcuucaacugcuacuucccacugcaguccuacggcuuucagcccacaaauggcgugggcuaucagcccuacagagugguggugcugagcuucgaacugcugcaugcuccugccacagugugcggcccuaagaaaagcaccaaucucgugaagaacaaaugcgugaacuucaacuucaacggccugaccggcaccggcgugcugacagagagcaacaagaaguuccugccauuccagcaguuuggccgggauaucgccgauaccacagacgccguuagagauccccagacacuggaaauccuggacaucaccccaugcagcuucggcggagugucugugaucaccccuggcaccaacaccagcaaucagguggcagugcuguaccaggacgugaacuguaccgaagugcccguggccauucacgccgaucagcugacaccuacauggcggguguacuccaccggcagcaauguguuucagaccagagccggcugucugaucggagccgagcacgugaacaauagcuacgagugcgacauccccaucggcgcuggcaucugugccagcuaccagacacagacaaacagccccagacgggcuagaagcguggccagccagagcaucauugccuacacaaugucucugggcgccgagaacagcguggccuacuccaacaacucuaucgcuugccccaccaacuucaccaucagcgugaccaccgagauccugccuguguccaugaccaagaccagcguggacugcaccauguacaucugcggcgauuccaccgagugcuccaaccugcugcugcaguacggcagcuucugcacccagcugaauagagcccugacagggaucgccguggaacaggacaagaacacccaagagguguucgcccaagugaagcaaaucuacaagaccccuccuaucaaggacuucggcggcuucaauuucagccagauucugcccgauccuagcaagcccagcaagcggagcuucaucgaggaccugcuguucaacaaagugacacuggccgacgccggcuucaucaagcaguauggcgauugucugggcgacauugccgccagggaucugauuugcgcccagaaguuuaacggacugacagugcugccuccucugcugaccgaugagaugaucgcccaguacacaucugcccugcuggccggcacaaucacaagcggcuggacauuuggagcuggcgccgcucugcagauccccuuugcuaugcagauggccuaccgguucaacggcaucggagugacccagaaugugcuguacgagaaccagaagcugaucgccaaccaguucaacagcgccaucggcaagauccaggacagccugagcagcacagcaagcgcccugggaaagcugcaggacguggucaaccagaaugcccaggcacugaacacccuggucaagcagcuguccuccaacuucggcgccaucagcucugugcugaacgauauccugagcagacuggacaaggucgaggccgaggugcagaucgacagacugaucacaggcagacugcagagccuccagacauacgugacccagcagcugaucagagccgccgagauuagagccucugccaaucuggccgccaccaagaugucugagugugugcugggccagagcaagagaguggacuuuugcggcaagggcuaccaccugaugagcuucccucagucugccccucacggcgugguguuucugcacgugacauaugugcccgcucaagagaagaauuucaccaccgcuccagccaucugccacgacggcaaagcccacuuuccuagagaaggcguguucguguccaacggcacccauugguucgugacacagcggaacuucugugagccccagaucaucaccaccgacaacaccuucgugucuggcaacugcgacguugugaucggcauugugaacaauaccguguacgacccucugcagcccgagcuggacagcggaggaucuggcuauauccccgaggcuccuagagauggccaggccuauguucggaaggauggcgaaugggugcugcugagcaccuuccuuugaggacuaguuauaagacugacuagcccgaugggccucccaacgggcccuccuccccuccuugcaccgagauuaauaaaaaaaaaaaaaaaaaaaaaaaaaaaaaaaaaaaaaaaaaaaaaaaaaaaaaaaaaaaaaaaaugcaucccccccccccccccccccccccccccccccaaaggcucuuuucagagccaccagaauu

SEQ ID NO: 13125 - RNA, 3751 nt, Artificial Sequence
  SARS-CoV-2/Wuhan/WIV05/2019__EPI_ISL_402128 spike protein mRNA gc mod (1-1147)(P715C_P1069C) Foldon construct
aggagaaagcuuaccauguucguguuucuggugcugcugccccugguguccagccagugugugaaccugaccaccagaacacagcugccuccagccuacaccaacagcuucaccagaggcguguacuaccccgacaagguguucagauccagcgugcugcacucuacccaggaccuguuccugccuuucuucagcaacgugaccugguuccacgccauccacguguccggcaccaauggcaccaagagauucgacaaccccgugcugcccuucaacgacgggguguacuuugccagcaccgagaaguccaacaucaucagaggcuggaucuucggcaccacacuggacagcaagacccagagccugcugaucgugaacaacgccaccaacguggucaucaaagugugcgaguuccaguucugcaacgaccccuuccugggcgucuacuaccacaagaacaacaagagcuggauggaaagcgaguuccggguguacagcagcgccaacaacugcaccuucgaguacgugucccagccuuuccugauggaccuggaaggcaagcagggcaacuucaagaaccugcgcgaguucguguucaagaacaucgacggcuacuucaaaaucuacagcaagcacaccccuaucaaccucgugcgggaucugccucagggcuucucugcucuggaaccccugguggaucugcccaucggcaucaacaucacccgguuucagacacugcuggcccugcacagaagcuaccugacaccuggcgauagcagcagcggauggacagcuggugccgccgcuuacuaugugggcuaccugcagccuagaaccuuccugcugaaguacaacgagaacggcaccaucaccgacgccguggauugugcucuggauccucugagcgagacaaagugcacccugaaguccuucaccguggaaaagggcaucuaccagaccagcaacuuccgggugcagcccaccgaauccaucgugcgguuccccaauaucaccaaucugugccccuucggcgagguguucaaugccaccagauucgccucuguguacgccuggaaccggaagcggaucagcaauugcguggccgacuacuccgugcuguacaacuccgccagcuucagcaccuucaagugcuacggcguguccccuaccaagcugaacgaccugugcuucacaaacguguacgccgacagcuucgugauccggggagaugaagugcggcagauugccccuggacagacaggcaagaucgccgacuacaacuacaagcugcccgacgacuucaccggcugugugauugccuggaacagcaacaaccuggacuccaaagucggcggcaacuacaauuaccuguaccggcuguuccggaaguccaaucugaagcccuucgagcgggacaucagcaccgaaaucuaucaggccggcagcaccccuugcaacggcguggaaggcuucaacugcuacuucccacugcaguccuacggcuuucagcccacaaauggcgugggcuaucagcccuacagagugguggugcugagcuucgaacugcugcaugcuccugccacagugugcggcccuaagaaaagcaccaaucucgugaagaacaaaugcgugaacuucaacuucaacggccugaccggcaccggcgugcugacagagagcaacaagaaguuccugccauuccagcaguuuggccgggauaucgccgauaccacagacgccguuagagauccccagacacuggaaauccuggacaucaccccaugcagcuucggcggagugucugugaucaccccuggcaccaacaccagcaaucagguggcagugcuguaccaggacgugaacuguaccgaagugcccguggccauucacgccgaucagcugacaccuacauggcggguguacuccaccggcagcaauguguuucagaccagagccggcugucugaucggagccgagcacgugaacaauagcuacgagugcgacauccccaucggcgcuggcaucugugccagcuaccagacacagacaaacagccccagacgggcuagaagcguggccagccagagcaucauugccuacacaaugucucugggcgccgagaacagcguggccuacuccaacaacucuaucgcuaucugcaccaacuucaccaucagcgugaccaccgagauccugccuguguccaugaccaagaccagcguggacugcaccauguacaucugcggcgauuccaccgagugcuccaaccugcugcugcaguacggcagcuucugcacccagcugaauagagcccugacagggaucgccguggaacaggacaagaacacccaagagguguucgcccaagugaagcaaaucuacaagaccccuccuaucaaggacuucggcggcuucaauuucagccagauucugcccgauccuagcaagcccagcaagcggagcuucaucgaggaccugcuguucaacaaagugacacuggccgacgccggcuucaucaagcaguauggcgauugucugggcgacauugccgccagggaucugauuugcgcccagaaguuuaacggacugacagugcugccuccucugcugaccgaugagaugaucgcccaguacacaucugcccugcuggccggcacaaucacaagcggcuggacauuuggagcuggcgccgcucugcagauccccuuugcuaugcagauggccuaccgguucaacggcaucggagugacccagaaugugcuguacgagaaccagaagcugaucgccaaccaguucaacagcgccaucggcaagauccaggacagccugagcagcacagcaagcgcccugggaaagcugcaggacguggucaaccagaaugcccaggcacugaacacccuggucaagcagcuguccuccaacuucggcgccaucagcucugugcugaacgauauccugagcagacuggacaaggucgaggccgaggugcagaucgacagacugaucacaggcagacugcagagccuccagacauacgugacccagcagcugaucagagccgccgagauuagagccucugccaaucuggccgccaccaagaugucugagugugugcugggccagagcaagagaguggacuuuugcggcaagggcuaccaccugaugagcuucccucagucugccccucacggcgugguguuucugcacgugacauaugugugugcucaagagaagaauuucaccaccgcuccagccaucugccacgacggcaaagcccacuuuccuagagaaggcguguucguguccaacggcacccauugguucgugacacagcggaacuucuacgagccccagaucaucaccaccgacaacaccuucgugucuggcaacugcgacguugugaucggcauugugaacaauaccguguacgacccucugcagcccgagcuggacagcggaggaucuggcuauauccccgaggcuccuagagauggccaggccuauguucggaaggauggcgaaugggugcugcugagcaccuuccuuugaggacuaguuauaagacugacuagcccgaugggccucccaacgggcccuccuccccuccuugcaccgagauuaauaaaaaaaaaaaaaaaaaaaaaaaaaaaaaaaaaaaaaaaaaaaaaaaaaaaaaaaaaaaaaaaaugcaucccccccccccccccccccccccccccccccaaaggcucuuuucagagccaccagaauu

SEQ ID NO: 13126 - RNA, 3751 nt, Artificial Sequence
  SARS-CoV-2/Wuhan/WIV05/2019__EPI_ISL_402128 spike protein mRNA gc mod (1-1147)(G889C_L1034C) Foldon construct
aggagaaagcuuaccauguucguguuucuggugcugcugccccugguguccagccagugugugaaccugaccaccagaacacagcugccuccagccuacaccaacagcuucaccagaggcguguacuaccccgacaagguguucagauccagcgugcugcacucuacccaggaccuguuccugccuuucuucagcaacgugaccugguuccacgccauccacguguccggcaccaauggcaccaagagauucgacaaccccgugcugcccuucaacgacgggguguacuuugccagcaccgagaaguccaacaucaucagaggcuggaucuucggcaccacacuggacagcaagacccagagccugcugaucgugaacaacgccaccaacguggucaucaaagugugcgaguuccaguucugcaacgaccccuuccugggcgucuacuaccacaagaacaacaagagcuggauggaaagcgaguuccggguguacagcagcgccaacaacugcaccuucgaguacgugucccagccuuuccugauggaccuggaaggcaagcagggcaacuucaagaaccugcgcgaguucguguucaagaacaucgacggcuacuucaaaaucuacagcaagcacaccccuaucaaccucgugcgggaucugccucagggcuucucugcucuggaaccccugguggaucugcccaucggcaucaacaucacccgguuucagacacugcuggcccugcacagaagcuaccugacaccuggcgauagcagcagcggauggacagcuggugccgccgcuuacuaugugggcuaccugcagccuagaaccuuccugcugaaguacaacgagaacggcaccaucaccgacgccguggauugugcucuggauccucugagcgagacaaagugcacccugaaguccuucaccguggaaaagggcaucuaccagaccagcaacuuccgggugcagcccaccgaauccaucgugcgguuccccaauaucaccaaucugugccccuucggcgagguguucaaugccaccagauucgccucuguguacgccuggaaccggaagcggaucagcaauugcguggccgacuacuccgugcuguacaacuccgccagcuucagcaccuucaagugcuacggcguguccccuaccaagcugaacgaccugugcuucacaaacguguacgccgacagcuucgugauccggggagaugaagugcggcagauugccccuggacagacaggcaagaucgccgacuacaacuacaagcugcccgacgacuucaccggcugugugauugccuggaacagcaacaaccuggacuccaaagucggcggcaacuacaauuaccuguaccggcuguuccggaaguccaaucugaagcccuucgagcgggacaucagcaccgaaaucuaucaggccggcagcaccccuugcaacggcguggaaggcuucaacugcuacuucccacugcaguccuacggcuuucagcccacaaauggcgugggcuaucagcccuacagagugguggugcugagcuucgaacugcugcaugcuccugccacagugugcggcccuaagaaaagcaccaaucucgugaagaacaaaugcgugaacuucaacuucaacggccugaccggcaccggcgugcugacagagagcaacaagaaguuccugccauuccagcaguuuggccgggauaucgccgauaccacagacgccguuagagauccccagacacuggaaauccuggacaucaccccaugcagcuucggcggagugucugugaucaccccuggcaccaacaccagcaaucagguggcagugcuguaccaggacgugaacuguaccgaagugcccguggccauucacgccgaucagcugacaccuacauggcggguguacuccaccggcagcaauguguuucagaccagagccggcugucugaucggagccgagcacgugaacaauagcuacgagugcgacauccccaucggcgcuggcaucugugccagcuaccagacacagacaaacagccccagacgggcuagaagcguggccagccagagcaucauugccuacacaaugucucugggcgccgagaacagcguggccuacuccaacaacucuaucgcuauccccaccaacuucaccaucagcgugaccaccgagauccugccuguguccaugaccaagaccagcguggacugcaccauguacaucugcggcgauuccaccgagugcuccaaccugcugcugcaguacggcagcuucugcacccagcugaauagagcccugacagggaucgccguggaacaggacaagaacacccaagagguguucgcccaagugaagcaaaucuacaagaccccuccuaucaaggacuucggcggcuucaauuucagccagauucugcccgauccuagcaagcccagcaagcggagcuucaucgaggaccugcuguucaacaaagugacacuggccgacgccggcuucaucaagcaguauggcgauugucugggcgacauugccgccagggaucugauuugcgcccagaaguuuaacggacugacagugcugccuccucugcugaccgaugagaugaucgcccaguacacaucugcccugcuggccggcacaaucacaagcggcuggacauuuugcgcuggcgccgcucugcagauccccuuugcuaugcagauggccuaccgguucaacggcaucggagugacccagaaugugcuguacgagaaccagaagcugaucgccaaccaguucaacagcgccaucggcaagauccaggacagccugagcagcacagcaagcgcccugggaaagcugcaggacguggucaaccagaaugcccaggcacugaacacccuggucaagcagcuguccuccaacuucggcgccaucagcucugugcugaacgauauccugagcagacuggacaaggucgaggccgaggugcagaucgacagacugaucacaggcagacugcagagccuccagacauacgugacccagcagcugaucagagccgccgagauuagagccucugccaaucuggccgccaccaagaugucugaguguguguguggccagagcaagagaguggacuuuugcggcaagggcuaccaccugaugagcuucccucagucugccccucacggcgugguguuucugcacgugacauaugugcccgcucaagagaagaauuucaccaccgcuccagccaucugccacgacggcaaagcccacuuuccuagagaaggcguguucguguccaacggcacccauugguucgugacacagcggaacuucuacgagccccagaucaucaccaccgacaacaccuucgugucuggcaacugcgacguugugaucggcauugugaacaauaccguguacgacccucugcagcccgagcuggacagcggaggaucuggcuauauccccgaggcuccuagagauggccaggccuauguucggaaggauggcgaaugggugcugcugagcaccuuccuuugaggacuaguuauaagacugacuagcccgaugggccucccaacgggcccuccuccccuccuugcaccgagauuaauaaaaaaaaaaaaaaaaaaaaaaaaaaaaaaaaaaaaaaaaaaaaaaaaaaaaaaaaaaaaaaaaugcaucccccccccccccccccccccccccccccccaaaggcucuuuucagagccaccagaauu

SEQ ID NO: 13127 - RNA, 3751 nt, Artificial Sequence
  SARS-CoV-2/Wuhan/WIV05/2019__EPI_ISL_402128 spike protein mRNA gc mod (1-1147)(I909C_Y1047C) Foldon construct
aggagaaagcuuaccauguucguguuucuggugcugcugccccugguguccagccagugugugaaccugaccaccagaacacagcugccuccagccuacaccaacagcuucaccagaggcguguacuaccccgacaagguguucagauccagcgugcugcacucuacccaggaccuguuccugccuuucuucagcaacgugaccugguuccacgccauccacguguccggcaccaauggcaccaagagauucgacaaccccgugcugcccuucaacgacgggguguacuuugccagcaccgagaaguccaacaucaucagaggcuggaucuucggcaccacacuggacagcaagacccagagccugcugaucgugaacaacgccaccaacguggucaucaaagugugcgaguuccaguucugcaacgaccccuuccugggcgucuacuaccacaagaacaacaagagcuggauggaaagcgaguuccggguguacagcagcgccaacaacugcaccuucgaguacgugucccagccuuuccugauggaccuggaaggcaagcagggcaacuucaagaaccugcgcgaguucguguucaagaacaucgacggcuacuucaaaaucuacagcaagcacaccccuaucaaccucgugcgggaucugccucagggcuucucugcucuggaaccccugguggaucugcccaucggcaucaacaucacccgguuucagacacugcuggcccugcacagaagcuaccugacaccuggcgauagcagcagcggauggacagcuggugccgccgcuuacuaugugggcuaccugcagccuagaaccuuccugcugaaguacaacgagaacggcaccaucaccgacgccguggauugugcucuggauccucugagcgagacaaagugcacccugaaguccuucaccguggaaaagggcaucuaccagaccagcaacuuccgggugcagcccaccgaauccaucgugcgguuccccaauaucaccaaucugugccccuucggcgagguguucaaugccaccagauucgccucuguguacgccuggaaccggaagcggaucagcaauugcguggccgacuacuccgugcuguacaacuccgccagcuucagcaccuucaagugcuacggcguguccccuaccaagcugaacgaccugugcuucacaaacguguacgccgacagcuucgugauccggggagaugaagugcggcagauugccccuggacagacaggcaagaucgccgacuacaacuacaagcugcccgacgacuucaccggcugugugauugccuggaacagcaacaaccuggacuccaaagucggcggcaacuacaauuaccuguaccggcuguuccggaaguccaaucugaagcccuucgagcgggacaucagcaccgaaaucuaucaggccggcagcaccccuugcaacggcguggaaggcuucaacugcuacuucccacugcaguccuacggcuuucagcccacaaauggcgugggcuaucagcccuacagagugguggugcugagcuucgaacugcugcaugcuccugccacagugugcggcccuaagaaaagcaccaaucucgugaagaacaaaugcgugaacuucaacuucaacggccugaccggcaccggcgugcugacagagagcaacaagaaguuccugccauuccagcaguuuggccgggauaucgccgauaccacagacgccguuagagauccccagacacuggaaauccuggacaucaccccaugcagcuucggcggagugucugugaucaccccuggcaccaacaccagcaaucagguggcagugcuguaccaggacgugaacuguaccgaagugcccguggccauucacgccgaucagcugacaccuacauggcggguguacuccaccggcagcaauguguuucagaccagagccggcugucugaucggagccgagcacgugaacaauagcuacgagugcgacauccccaucggcgcuggcaucugugccagcuaccagacacagacaaacagccccagacgggcuagaagcguggccagccagagcaucauugccuacacaaugucucugggcgccgagaacagcguggccuacuccaacaacucuaucgcuauccccaccaacuucaccaucagcgugaccaccgagauccugccuguguccaugaccaagaccagcguggacugcaccauguacaucugcggcgauuccaccgagugcuccaaccugcugcugcaguacggcagcuucugcacccagcugaauagagcccugacagggaucgccguggaacaggacaagaacacccaagagguguucgcccaagugaagcaaaucuacaagaccccuccuaucaaggacuucggcggcuucaauuucagccagauucugcccgauccuagcaagcccagcaagcggagcuucaucgaggaccugcuguucaacaaagugacacuggccgacgccggcuucaucaagcaguauggcgauugucugggcgacauugccgccagggaucugauuugcgcccagaaguuuaacggacugacagugcugccuccucugcugaccgaugagaugaucgcccaguacacaucugcccugcuggccggcacaaucacaagcggcuggacauuuggagcuggcgccgcucugcagauccccuuugcuaugcagauggccuaccgguucaacggcugcggagugacccagaaugugcuguacgagaaccagaagcugaucgccaaccaguucaacagcgccaucggcaagauccaggacagccugagcagcacagcaagcgcccugggaaagcugcaggacguggucaaccagaaugcccaggcacugaacacccuggucaagcagcuguccuccaacuucggcgccaucagcucugugcugaacgauauccugagcagacuggacaaggucgaggccgaggugcagaucgacagacugaucacaggcagacugcagagccuccagacauacgugacccagcagcugaucagagccgccgagauuagagccucugccaaucuggccgccaccaagaugucugagugugugcugggccagagcaagagaguggacuuuugcggcaagggcugucaccugaugagcuucccucagucugccccucacggcgugguguuucugcacgugacauaugugcccgcucaagagaagaauuucaccaccgcuccagccaucugccacgacggcaaagcccacuuuccuagagaaggcguguucguguccaacggcacccauugguucgugacacagcggaacuucuacgagccccagaucaucaccaccgacaacaccuucgugucuggcaacugcgacguugugaucggcauugugaacaauaccguguacgacccucugcagcccgagcuggacagcggaggaucuggcuauauccccgaggcuccuagagauggccaggccuauguucggaaggauggcgaaugggugcugcugagcaccuuccuuugaggacuaguuauaagacugacuagcccgaugggccucccaacgggcccuccuccccuccuugcaccgagauuaauaaaaaaaaaaaaaaaaaaaaaaaaaaaaaaaaaaaaaaaaaaaaaaaaaaaaaaaaaaaaaaaaugcaucccccccccccccccccccccccccccccccaaaggcucuuuucagagccaccagaauu

SEQ ID NO: 13128 - RNA, 3751 nt, Artificial Sequence
  SARS-CoV-2/Wuhan/WIV05/2019__EPI_ISL_402128 spike protein mRNA gc mod (1-1147)(Q965C_S1003C) Foldon construct
aggagaaagcuuaccauguucguguuucuggugcugcugccccugguguccagccagugugugaaccugaccaccagaacacagcugccuccagccuacaccaacagcuucaccagaggcguguacuaccccgacaagguguucagauccagcgugcugcacucuacccaggaccuguuccugccuuucuucagcaacgugaccugguuccacgccauccacguguccggcaccaauggcaccaagagauucgacaaccccgugcugcccuucaacgacgggguguacuuugccagcaccgagaaguccaacaucaucagaggcuggaucuucggcaccacacuggacagcaagacccagagccugcugaucgugaacaacgccaccaacguggucaucaaagugugcgaguuccaguucugcaacgaccccuuccugggcgucuacuaccacaagaacaacaagagcuggauggaaagcgaguuccggguguacagcagcgccaacaacugcaccuucgaguacgugucccagccuuuccugauggaccuggaaggcaagcagggcaacuucaagaaccugcgcgaguucguguucaagaacaucgacggcuacuucaaaaucuacagcaagcacaccccuaucaaccucgugcgggaucugccucagggcuucucugcucuggaaccccugguggaucugcccaucggcaucaacaucacccgguuucagacacugcuggcccugcacagaagcuaccugacaccuggcgauagcagcagcggauggacagcuggugccgccgcuuacuaugugggcuaccugcagccuagaaccuuccugcugaaguacaacgagaacggcaccaucaccgacgccguggauugugcucuggauccucugagcgagacaaagugcacccugaaguccuucaccguggaaaagggcaucuaccagaccagcaacuuccgggugcagcccaccgaauccaucgugcgguuccccaauaucaccaaucugugccccuucggcgagguguucaaugccaccagauucgccucuguguacgccuggaaccggaagcggaucagcaauugcguggccgacuacuccgugcuguacaacuccgccagcuucagcaccuucaagugcuacggcguguccccuaccaagcugaacgaccugugcuucacaaacguguacgccgacagcuucgugauccggggagaugaagugcggcagauugccccuggacagacaggcaagaucgccgacuacaacuacaagcugcccgacgacuucaccggcugugugauugccuggaacagcaacaaccuggacuccaaagucggcggcaacuacaauuaccuguaccggcuguuccggaaguccaaucugaagcccuucgagcgggacaucagcaccgaaaucuaucaggccggcagcaccccuugcaacggcguggaaggcuucaacugcuacuucccacugcaguccuacggcuuucagcccacaaauggcgugggcuaucagcccuacagagugguggugcugagcuucgaacugcugcaugcuccugccacagugugcggcccuaagaaaagcaccaaucucgugaagaacaaaugcgugaacuucaacuucaacggccugaccggcaccggcgugcugacagagagcaacaagaaguuccugccauuccagcaguuuggccgggauaucgccgauaccacagacgccguuagagauccccagacacuggaaauccuggacaucaccccaugcagcuucggcggagugucugugaucaccccuggcaccaacaccagcaaucagguggcagugcuguaccaggacgugaacuguaccgaagugcccguggccauucacgccgaucagcugacaccuacauggcggguguacuccaccggcagcaauguguuucagaccagagccggcugucugaucggagccgagcacgugaacaauagcuacgagugcgacauccccaucggcgcuggcaucugugccagcuaccagacacagacaaacagccccagacgggcuagaagcguggccagccagagcaucauugccuacacaaugucucugggcgccgagaacagcguggccuacuccaacaacucuaucgcuauccccaccaacuucaccaucagcgugaccaccgagauccugccuguguccaugaccaagaccagcguggacugcaccauguacaucugcggcgauuccaccgagugcuccaaccugcugcugcaguacggcagcuucugcacccagcugaauagagcccugacagggaucgccguggaacaggacaagaacacccaagagguguucgcccaagugaagcaaaucuacaagaccccuccuaucaaggacuucggcggcuucaauuucagccagauucugcccgauccuagcaagcccagcaagcggagcuucaucgaggaccugcuguucaacaaagugacacuggccgacgccggcuucaucaagcaguauggcgauugucugggcgacauugccgccagggaucugauuugcgcccagaaguuuaacggacugacagugcugccuccucugcugaccgaugagaugaucgcccaguacacaucugcccugcuggccggcacaaucacaagcggcuggacauuuggagcuggcgccgcucugcagauccccuuugcuaugcagauggccuaccgguucaacggcaucggagugacccagaaugugcuguacgagaaccagaagcugaucgccaaccaguucaacagcgccaucggcaagauccaggacagccugagcagcacagcaagcgcccugggaaagcugcaggacguggucaaccagaaugcccaggcacugaacacccuggucaagugccuguccuccaacuucggcgccaucagcucugugcugaacgauauccugagcagacuggacaaggucgaggccgaggugcagaucgacagacugaucacaggcagacugcagugucuccagacauacgugacccagcagcugaucagagccgccgagauuagagccucugccaaucuggccgccaccaagaugucugagugugugcugggccagagcaagagaguggacuuuugcggcaagggcuaccaccugaugagcuucccucagucugccccucacggcgugguguuucugcacgugacauaugugcccgcucaagagaagaauuucaccaccgcuccagccaucugccacgacggcaaagcccacuuuccuagagaaggcguguucguguccaacggcacccauugguucgugacacagcggaacuucuacgagccccagaucaucaccaccgacaacaccuucgugucuggcaacugcgacguugugaucggcauugugaacaauaccguguacgacccucugcagcccgagcuggacagcggaggaucuggcuauauccccgaggcuccuagagauggccaggccuauguucggaaggauggcgaaugggugcugcugagcaccuuccuuugaggacuaguuauaagacugacuagcccgaugggccucccaacgggcccuccuccccuccuugcaccgagauuaauaaaaaaaaaaaaaaaaaaaaaaaaaaaaaaaaaaaaaaaaaaaaaaaaaaaaaaaaaaaaaaaaugcaucccccccccccccccccccccccccccccccaaaggcucuuuucagagccaccagaauu

SEQ ID NO: 13129 - RNA, 3751 nt, Artificial Sequence
  SARS-CoV-2/Wuhan/WIV05/2019__EPI_ISL_402128 spike protein mRNA gc mod (1-1147)(F970C_G999C) Foldon construct
aggagaaagcuuaccauguucguguuucuggugcugcugccccugguguccagccagugugugaaccugaccaccagaacacagcugccuccagccuacaccaacagcuucaccagaggcguguacuaccccgacaagguguucagauccagcgugcugcacucuacccaggaccuguuccugccuuucuucagcaacgugaccugguuccacgccauccacguguccggcaccaauggcaccaagagauucgacaaccccgugcugcccuucaacgacgggguguacuuugccagcaccgagaaguccaacaucaucagaggcuggaucuucggcaccacacuggacagcaagacccagagccugcugaucgugaacaacgccaccaacguggucaucaaagugugcgaguuccaguucugcaacgaccccuuccugggcgucuacuaccacaagaacaacaagagcuggauggaaagcgaguuccggguguacagcagcgccaacaacugcaccuucgaguacgugucccagccuuuccugauggaccuggaaggcaagcagggcaacuucaagaaccugcgcgaguucguguucaagaacaucgacggcuacuucaaaaucuacagcaagcacaccccuaucaaccucgugcgggaucugccucagggcuucucugcucuggaaccccugguggaucugcccaucggcaucaacaucacccgguuucagacacugcuggcccugcacagaagcuaccugacaccuggcgauagcagcagcggauggacagcuggugccgccgcuuacuaugugggcuaccugcagccuagaaccuuccugcugaaguacaacgagaacggcaccaucaccgacgccguggauugugcucuggauccucugagcgagacaaagugcacccugaaguccuucaccguggaaaagggcaucuaccagaccagcaacuuccgggugcagcccaccgaauccaucgugcgguuccccaauaucaccaaucugugccccuucggcgagguguucaaugccaccagauucgccucuguguacgccuggaaccggaagcggaucagcaauugcguggccgacuacuccgugcuguacaacuccgccagcuucagcaccuucaagugcuacggcguguccccuaccaagcugaacgaccugugcuucacaaacguguacgccgacagcuucgugauccggggagaugaagugcggcagauugccccuggacagacaggcaagaucgccgacuacaacuacaagcugcccgacgacuucaccggcugugugauugccuggaacagcaacaaccuggacuccaaagucggcggcaacuacaauuaccuguaccggcuguuccggaaguccaaucugaagcccuucgagcgggacaucagcaccgaaaucuaucaggccggcagcaccccuugcaacggcguggaaggcuucaacugcuacuucccacugcaguccuacggcuuucagcccacaaauggcgugggcuaucagcccuacagagugguggugcugagcuucgaacugcugcaugcuccugccacagugugcggcccuaagaaaagcaccaaucucgugaagaacaaaugcgugaacuucaacuucaacggccugaccggcaccggcgugcugacagagagcaacaagaaguuccugccauuccagcaguuuggccgggauaucgccgauaccacagacgccguuagagauccccagacacuggaaauccuggacaucaccccaugcagcuucggcggagugucugugaucaccccuggcaccaacaccagcaaucagguggcagugcuguaccaggacgugaacuguaccgaagugcccguggccauucacgccgaucagcugacaccuacauggcggguguacuccaccggcagcaauguguuucagaccagagccggcugucugaucggagccgagcacgugaacaauagcuacgagugcgacauccccaucggcgcuggcaucugugccagcuaccagacacagacaaacagccccagacgggcuagaagcguggccagccagagcaucauugccuacacaaugucucugggcgccgagaacagcguggccuacuccaacaacucuaucgcuauccccaccaacuucaccaucagcgugaccaccgagauccugccuguguccaugaccaagaccagcguggacugcaccauguacaucugcggcgauuccaccgagugcuccaaccugcugcugcaguacggcagcuucugcacccagcugaauagagcccugacagggaucgccguggaacaggacaagaacacccaagagguguucgcccaagugaagcaaaucuacaagaccccuccuaucaaggacuucggcggcuucaauuucagccagauucugcccgauccuagcaagcccagcaagcggagcuucaucgaggaccugcuguucaacaaagugacacuggccgacgccggcuucaucaagcaguauggcgauugucugggcgacauugccgccagggaucugauuugcgcccagaaguuuaacggacugacagugcugccuccucugcugaccgaugagaugaucgcccaguacacaucugcccugcuggccggcacaaucacaagcggcuggacauuuggagcuggcgccgcucugcagauccccuuugcuaugcagauggccuaccgguucaacggcaucggagugacccagaaugugcuguacgagaaccagaagcugaucgccaaccaguucaacagcgccaucggcaagauccaggacagccugagcagcacagcaagcgcccugggaaagcugcaggacguggucaaccagaaugcccaggcacugaacacccuggucaagcagcuguccuccaacugcggcgccaucagcucugugcugaacgauauccugagcagacuggacaaggucgaggccgaggugcagaucgacagacugaucacauguagacugcagagccuccagacauacgugacccagcagcugaucagagccgccgagauuagagccucugccaaucuggccgccaccaagaugucugagugugugcugggccagagcaagagaguggacuuuugcggcaagggcuaccaccugaugagcuucccucagucugccccucacggcgugguguuucugcacgugacauaugugcccgcucaagagaagaauuucaccaccgcuccagccaucugccacgacggcaaagcccacuuuccuagagaaggcguguucguguccaacggcacccauugguucgugacacagcggaacuucuacgagccccagaucaucaccaccgacaacaccuucgugucuggcaacugcgacguugugaucggcauugugaacaauaccguguacgacccucugcagcccgagcuggacagcggaggaucuggcuauauccccgaggcuccuagagauggccaggccuauguucggaaggauggcgaaugggugcugcugagcaccuuccuuugaggacuaguuauaagacugacuagcccgaugggccucccaacgggcccuccuccccuccuugcaccgagauuaauaaaaaaaaaaaaaaaaaaaaaaaaaaaaaaaaaaaaaaaaaaaaaaaaaaaaaaaaaaaaaaaaugcaucccccccccccccccccccccccccccccccaaaggcucuuuucagagccaccagaauu

SEQ ID NO: 13130 - RNA, 3751 nt, Artificial Sequence
  SARS-CoV-2/Wuhan/WIV05/2019__EPI_ISL_402128 spike protein mRNA gc mod (1-1147)(A972C_R995C) Foldon construct
aggagaaagcuuaccauguucguguuucuggugcugcugccccugguguccagccagugugugaaccugaccaccagaacacagcugccuccagccuacaccaacagcuucaccagaggcguguacuaccccgacaagguguucagauccagcgugcugcacucuacccaggaccuguuccugccuuucuucagcaacgugaccugguuccacgccauccacguguccggcaccaauggcaccaagagauucgacaaccccgugcugcccuucaacgacgggguguacuuugccagcaccgagaaguccaacaucaucagaggcuggaucuucggcaccacacuggacagcaagacccagagccugcugaucgugaacaacgccaccaacguggucaucaaagugugcgaguuccaguucugcaacgaccccuuccugggcgucuacuaccacaagaacaacaagagcuggauggaaagcgaguuccggguguacagcagcgccaacaacugcaccuucgaguacgugucccagccuuuccugauggaccuggaaggcaagcagggcaacuucaagaaccugcgcgaguucguguucaagaacaucgacggcuacuucaaaaucuacagcaagcacaccccuaucaaccucgugcgggaucugccucagggcuucucugcucuggaaccccugguggaucugcccaucggcaucaacaucacccgguuucagacacugcuggcccugcacagaagcuaccugacaccuggcgauagcagcagcggauggacagcuggugccgccgcuuacuaugugggcuaccugcagccuagaaccuuccugcugaaguacaacgagaacggcaccaucaccgacgccguggauugugcucuggauccucugagcgagacaaagugcacccugaaguccuucaccguggaaaagggcaucuaccagaccagcaacuuccgggugcagcccaccgaauccaucgugcgguuccccaauaucaccaaucugugccccuucggcgagguguucaaugccaccagauucgccucuguguacgccuggaaccggaagcggaucagcaauugcguggccgacuacuccgugcuguacaacuccgccagcuucagcaccuucaagugcuacggcguguccccuaccaagcugaacgaccugugcuucacaaacguguacgccgacagcuucgugauccggggagaugaagugcggcagauugccccuggacagacaggcaagaucgccgacuacaacuacaagcugcccgacgacuucaccggcugugugauugccuggaacagcaacaaccuggacuccaaagucggcggcaacuacaauuaccuguaccggcuguuccggaaguccaaucugaagcccuucgagcgggacaucagcaccgaaaucuaucaggccggcagcaccccuugcaacggcguggaaggcuucaacugcuacuucccacugcaguccuacggcuuucagcccacaaauggcgugggcuaucagcccuacagagugguggugcugagcuucgaacugcugcaugcuccugccacagugugcggcccuaagaaaagcaccaaucucgugaagaacaaaugcgugaacuucaacuucaacggccugaccggcaccggcgugcugacagagagcaacaagaaguuccugccauuccagcaguuuggccgggauaucgccgauaccacagacgccguuagagauccccagacacuggaaauccuggacaucaccccaugcagcuucggcggagugucugugaucaccccuggcaccaacaccagcaaucagguggcagugcuguaccaggacgugaacuguaccgaagugcccguggccauucacgccgaucagcugacaccuacauggcggguguacuccaccggcagcaauguguuucagaccagagccggcugucugaucggagccgagcacgugaacaauagcuacgagugcgacauccccaucggcgcuggcaucugugccagcuaccagacacagacaaacagccccagacgggcuagaagcguggccagccagagcaucauugccuacacaaugucucugggcgccgagaacagcguggccuacuccaacaacucuaucgcuauccccaccaacuucaccaucagcgugaccaccgagauccugccuguguccaugaccaagaccagcguggacugcaccauguacaucugcggcgauuccaccgagugcuccaaccugcugcugcaguacggcagcuucugcacccagcugaauagagcccugacagggaucgccguggaacaggacaagaacacccaagagguguucgcccaagugaagcaaaucuacaagaccccuccuaucaaggacuucggcggcuucaauuucagccagauucugcccgauccuagcaagcccagcaagcggagcuucaucgaggaccugcuguucaacaaagugacacuggccgacgccggcuucaucaagcaguauggcgauugucugggcgacauugccgccagggaucugauuugcgcccagaaguuuaacggacugacagugcugccuccucugcugaccgaugagaugaucgcccaguacacaucugcccugcuggccggcacaaucacaagcggcuggacauuuggagcuggcgccgcucugcagauccccuuugcuaugcagauggccuaccgguucaacggcaucggagugacccagaaugugcuguacgagaaccagaagcugaucgccaaccaguucaacagcgccaucggcaagauccaggacagccugagcagcacagcaagcgcccugggaaagcugcaggacguggucaaccagaaugcccaggcacugaacacccuggucaagcagcuguccuccaacuucggcugcaucagcucugugcugaacgauauccugagcagacuggacaaggucgaggccgaggugcagaucgacugucugaucacaggcagacugcagagccuccagacauacgugacccagcagcugaucagagccgccgagauuagagccucugccaaucuggccgccaccaagaugucugagugugugcugggccagagcaagagaguggacuuuugcggcaagggcuaccaccugaugagcuucccucagucugccccucacggcgugguguuucugcacgugacauaugugcccgcucaagagaagaauuucaccaccgcuccagccaucugccacgacggcaaagcccacuuuccuagagaaggcguguucguguccaacggcacccauugguucgugacacagcggaacuucuacgagccccagaucaucaccaccgacaacaccuucgugucuggcaacugcgacguugugaucggcauugugaacaauaccguguacgacccucugcagcccgagcuggacagcggaggaucuggcuauauccccgaggcuccuagagauggccaggccuauguucggaaggauggcgaaugggugcugcugagcaccuuccuuugaggacuaguuauaagacugacuagcccgaugggccucccaacgggcccuccuccccuccuugcaccgagauuaauaaaaaaaaaaaaaaaaaaaaaaaaaaaaaaaaaaaaaaaaaaaaaaaaaaaaaaaaaaaaaaaaugcaucccccccccccccccccccccccccccccccaaaggcucuuuucagagccaccagaauu

SEQ ID NO: 13131 - RNA, 3751 nt, Artificial Sequence
  SARS-CoV-2/Wuhan/WIV05/2019__EPI_ISL_402128 spike protein mRNA gc mod (1-1147)(A890C_V1040C) Foldon construct
aggagaaagcuuaccauguucguguuucuggugcugcugccccugguguccagccagugugugaaccugaccaccagaacacagcugccuccagccuacaccaacagcuucaccagaggcguguacuaccccgacaagguguucagauccagcgugcugcacucuacccaggaccuguuccugccuuucuucagcaacgugaccugguuccacgccauccacguguccggcaccaauggcaccaagagauucgacaaccccgugcugcccuucaacgacgggguguacuuugccagcaccgagaaguccaacaucaucagaggcuggaucuucggcaccacacuggacagcaagacccagagccugcugaucgugaacaacgccaccaacguggucaucaaagugugcgaguuccaguucugcaacgaccccuuccugggcgucuacuaccacaagaacaacaagagcuggauggaaagcgaguuccggguguacagcagcgccaacaacugcaccuucgaguacgugucccagccuuuccugauggaccuggaaggcaagcagggcaacuucaagaaccugcgcgaguucguguucaagaacaucgacggcuacuucaaaaucuacagcaagcacaccccuaucaaccucgugcgggaucugccucagggcuucucugcucuggaaccccugguggaucugcccaucggcaucaacaucacccgguuucagacacugcuggcccugcacagaagcuaccugacaccuggcgauagcagcagcggauggacagcuggugccgccgcuuacuaugugggcuaccugcagccuagaaccuuccugcugaaguacaacgagaacggcaccaucaccgacgccguggauugugcucuggauccucugagcgagacaaagugcacccugaaguccuucaccguggaaaagggcaucuaccagaccagcaacuuccgggugcagcccaccgaauccaucgugcgguuccccaauaucaccaaucugugccccuucggcgagguguucaaugccaccagauucgccucuguguacgccuggaaccggaagcggaucagcaauugcguggccgacuacuccgugcuguacaacuccgccagcuucagcaccuucaagugcuacggcguguccccuaccaagcugaacgaccugugcuucacaaacguguacgccgacagcuucgugauccggggagaugaagugcggcagauugccccuggacagacaggcaagaucgccgacuacaacuacaagcugcccgacgacuucaccggcugugugauugccuggaacagcaacaaccuggacuccaaagucggcggcaacuacaauuaccuguaccggcuguuccggaaguccaaucugaagcccuucgagcgggacaucagcaccgaaaucuaucaggccggcagcaccccuugcaacggcguggaaggcuucaacugcuacuucccacugcaguccuacggcuuucagcccacaaauggcgugggcuaucagcccuacagagugguggugcugagcuucgaacugcugcaugcuccugccacagugugcggcccuaagaaaagcaccaaucucgugaagaacaaaugcgugaacuucaacuucaacggccugaccggcaccggcgugcugacagagagcaacaagaaguuccugccauuccagcaguuuggccgggauaucgccgauaccacagacgccguuagagauccccagacacuggaaauccuggacaucaccccaugcagcuucggcggagugucugugaucaccccuggcaccaacaccagcaaucagguggcagugcuguaccaggacgugaacuguaccgaagugcccguggccauucacgccgaucagcugacaccuacauggcggguguacuccaccggcagcaauguguuucagaccagagccggcugucugaucggagccgagcacgugaacaauagcuacgagugcgacauccccaucggcgcuggcaucugugccagcuaccagacacagacaaacagccccagacgggcuagaagcguggccagccagagcaucauugccuacacaaugucucugggcgccgagaacagcguggccuacuccaacaacucuaucgcuauccccaccaacuucaccaucagcgugaccaccgagauccugccuguguccaugaccaagaccagcguggacugcaccauguacaucugcggcgauuccaccgagugcuccaaccugcugcugcaguacggcagcuucugcacccagcugaauagagcccugacagggaucgccguggaacaggacaagaacacccaagagguguucgcccaagugaagcaaaucuacaagaccccuccuaucaaggacuucggcggcuucaauuucagccagauucugcccgauccuagcaagcccagcaagcggagcuucaucgaggaccugcuguucaacaaagugacacuggccgacgccggcuucaucaagcaguauggcgauugucugggcgacauugccgccagggaucugauuugcgcccagaaguuuaacggacugacagugcugccuccucugcugaccgaugagaugaucgcccaguacacaucugcccugcuggccggcacaaucacaagcggcuggacauuuggaugcggcgccgcucugcagauccccuuugcuaugcagauggccuaccgguucaacggcaucggagugacccagaaugugcuguacgagaaccagaagcugaucgccaaccaguucaacagcgccaucggcaagauccaggacagccugagcagcacagcaagcgcccugggaaagcugcaggacguggucaaccagaaugcccaggcacugaacacccuggucaagcagcuguccuccaacuucggcgccaucagcucugugcugaacgauauccugagcagacuggacaaggucgaggccgaggugcagaucgacagacugaucacaggcagacugcagagccuccagacauacgugacccagcagcugaucagagccgccgagauuagagccucugccaaucuggccgccaccaagaugucugagugugugcugggccagagcaagagaugugacuuuugcggcaagggcuaccaccugaugagcuucccucagucugccccucacggcgugguguuucugcacgugacauaugugcccgcucaagagaagaauuucaccaccgcuccagccaucugccacgacggcaaagcccacuuuccuagagaaggcguguucguguccaacggcacccauugguucgugacacagcggaacuucuacgagccccagaucaucaccaccgacaacaccuucgugucuggcaacugcgacguugugaucggcauugugaacaauaccguguacgacccucugcagcccgagcuggacagcggaggaucuggcuauauccccgaggcuccuagagauggccaggccuauguucggaaggauggcgaaugggugcugcugagcaccuuccuuugaggacuaguuauaagacugacuagcccgaugggccucccaacgggcccuccuccccuccuugcaccgagauuaauaaaaaaaaaaaaaaaaaaaaaaaaaaaaaaaaaaaaaaaaaaaaaaaaaaaaaaaaaaaaaaaaugcaucccccccccccccccccccccccccccccccaaaggcucuuuucagagccaccagaauu

SEQ ID NO: 13132 - RNA, 3751 nt, Artificial Sequence
  SARS-CoV-2/Wuhan/WIV05/2019__EPI_ISL_402128 spike protein mRNA gc mod (1-1147)(T874C_S1055C) Foldon construct
aggagaaagcuuaccauguucguguuucuggugcugcugccccugguguccagccagugugugaaccugaccaccagaacacagcugccuccagccuacaccaacagcuucaccagaggcguguacuaccccgacaagguguucagauccagcgugcugcacucuacccaggaccuguuccugccuuucuucagcaacgugaccugguuccacgccauccacguguccggcaccaauggcaccaagagauucgacaaccccgugcugcccuucaacgacgggguguacuuugccagcaccgagaaguccaacaucaucagaggcuggaucuucggcaccacacuggacagcaagacccagagccugcugaucgugaacaacgccaccaacguggucaucaaagugugcgaguuccaguucugcaacgaccccuuccugggcgucuacuaccacaagaacaacaagagcuggauggaaagcgaguuccggguguacagcagcgccaacaacugcaccuucgaguacgugucccagccuuuccugauggaccuggaaggcaagcagggcaacuucaagaaccugcgcgaguucguguucaagaacaucgacggcuacuucaaaaucuacagcaagcacaccccuaucaaccucgugcgggaucugccucagggcuucucugcucuggaaccccugguggaucugcccaucggcaucaacaucacccgguuucagacacugcuggcccugcacagaagcuaccugacaccuggcgauagcagcagcggauggacagcuggugccgccgcuuacuaugugggcuaccugcagccuagaaccuuccugcugaaguacaacgagaacggcaccaucaccgacgccguggauugugcucuggauccucugagcgagacaaagugcacccugaaguccuucaccguggaaaagggcaucuaccagaccagcaacuuccgggugcagcccaccgaauccaucgugcgguuccccaauaucaccaaucugugccccuucggcgagguguucaaugccaccagauucgccucuguguacgccuggaaccggaagcggaucagcaauugcguggccgacuacuccgugcuguacaacuccgccagcuucagcaccuucaagugcuacggcguguccccuaccaagcugaacgaccugugcuucacaaacguguacgccgacagcuucgugauccggggagaugaagugcggcagauugccccuggacagacaggcaagaucgccgacuacaacuacaagcugcccgacgacuucaccggcugugugauugccuggaacagcaacaaccuggacuccaaagucggcggcaacuacaauuaccuguaccggcuguuccggaaguccaaucugaagcccuucgagcgggacaucagcaccgaaaucuaucaggccggcagcaccccuugcaacggcguggaaggcuucaacugcuacuucccacugcaguccuacggcuuucagcccacaaauggcgugggcuaucagcccuacagagugguggugcugagcuucgaacugcugcaugcuccugccacagugugcggcccuaagaaaagcaccaaucucgugaagaacaaaugcgugaacuucaacuucaacggccugaccggcaccggcgugcugacagagagcaacaagaaguuccugccauuccagcaguuuggccgggauaucgccgauaccacagacgccguuagagauccccagacacuggaaauccuggacaucaccccaugcagcuucggcggagugucugugaucaccccuggcaccaacaccagcaaucagguggcagugcuguaccaggacgugaacuguaccgaagugcccguggccauucacgccgaucagcugacaccuacauggcggguguacuccaccggcagcaauguguuucagaccagagccggcugucugaucggagccgagcacgugaacaauagcuacgagugcgacauccccaucggcgcuggcaucugugccagcuaccagacacagacaaacagccccagacgggcuagaagcguggccagccagagcaucauugccuacacaaugucucugggcgccgagaacagcguggccuacuccaacaacucuaucgcuauccccaccaacuucaccaucagcgugaccaccgagauccugccuguguccaugaccaagaccagcguggacugcaccauguacaucugcggcgauuccaccgagugcuccaaccugcugcugcaguacggcagcuucugcacccagcugaauagagcccugacagggaucgccguggaacaggacaagaacacccaagagguguucgcccaagugaagcaaaucuacaagaccccuccuaucaaggacuucggcggcuucaauuucagccagauucugcccgauccuagcaagcccagcaagcggagcuucaucgaggaccugcuguucaacaaagugacacuggccgacgccggcuucaucaagcaguauggcgauugucugggcgacauugccgccagggaucugauuugcgcccagaaguuuaacggacugacagugcugccuccucugcugaccgaugagaugaucgcccaguacugcucugcccugcuggccggcacaaucacaagcggcuggacauuuggagcuggcgccgcucugcagauccccuuugcuaugcagauggccuaccgguucaacggcaucggagugacccagaaugugcuguacgagaaccagaagcugaucgccaaccaguucaacagcgccaucggcaagauccaggacagccugagcagcacagcaagcgcccugggaaagcugcaggacguggucaaccagaaugcccaggcacugaacacccuggucaagcagcuguccuccaacuucggcgccaucagcucugugcugaacgauauccugagcagacuggacaaggucgaggccgaggugcagaucgacagacugaucacaggcagacugcagagccuccagacauacgugacccagcagcugaucagagccgccgagauuagagccucugccaaucuggccgccaccaagaugucugagugugugcugggccagagcaagagaguggacuuuugcggcaagggcuaccaccugaugagcuucccucagugcgccccucacggcgugguguuucugcacgugacauaugugcccgcucaagagaagaauuucaccaccgcuccagccaucugccacgacggcaaagcccacuuuccuagagaaggcguguucguguccaacggcacccauugguucgugacacagcggaacuucuacgagccccagaucaucaccaccgacaacaccuucgugucuggcaacugcgacguugugaucggcauugugaacaauaccguguacgacccucugcagcccgagcuggacagcggaggaucuggcuauauccccgaggcuccuagagauggccaggccuauguucggaaggauggcgaaugggugcugcugagcaccuuccuuugaggacuaguuauaagacugacuagcccgaugggccucccaacgggcccuccuccccuccuugcaccgagauuaauaaaaaaaaaaaaaaaaaaaaaaaaaaaaaaaaaaaaaaaaaaaaaaaaaaaaaaaaaaaaaaaaugcaucccccccccccccccccccccccccccccccaaaggcucuuuucagagccaccagaauu

SEQ ID NO: 13133 - RNA, 4123 nt, Artificial Sequence
  SARS-CoV-2/Wuhan/WIV05/2019__EPI_ISL_402128 spike protein mRNA gc mod (1-1147) WhcAg construct
aggagaaagcuuaccauguucguguuucuggugcugcugccccugguguccagccagugugugaaccugaccaccagaacacagcugccuccagccuacaccaacagcuucaccagaggcguguacuaccccgacaagguguucagauccagcgugcugcacucuacccaggaccuguuccugccuuucuucagcaacgugaccugguuccacgccauccacguguccggcaccaauggcaccaagagauucgacaaccccgugcugcccuucaacgacgggguguacuuugccagcaccgagaaguccaacaucaucagaggcuggaucuucggcaccacacuggacagcaagacccagagccugcugaucgugaacaacgccaccaacguggucaucaaagugugcgaguuccaguucugcaacgaccccuuccugggcgucuacuaccacaagaacaacaagagcuggauggaaagcgaguuccggguguacagcagcgccaacaacugcaccuucgaguacgugucccagccuuuccugauggaccuggaaggcaagcagggcaacuucaagaaccugcgcgaguucguguucaagaacaucgacggcuacuucaaaaucuacagcaagcacaccccuaucaaccucgugcgggaucugccucagggcuucucugcucuggaaccccugguggaucugcccaucggcaucaacaucacccgguuucagacacugcuggcccugcacagaagcuaccugacaccuggcgauagcagcagcggauggacagcuggugccgccgcuuacuaugugggcuaccugcagccuagaaccuuccugcugaaguacaacgagaacggcaccaucaccgacgccguggauugugcucuggauccucugagcgagacaaagugcacccugaaguccuucaccguggaaaagggcaucuaccagaccagcaacuuccgggugcagcccaccgaauccaucgugcgguuccccaauaucaccaaucugugccccuucggcgagguguucaaugccaccagauucgccucuguguacgccuggaaccggaagcggaucagcaauugcguggccgacuacuccgugcuguacaacuccgccagcuucagcaccuucaagugcuacggcguguccccuaccaagcugaacgaccugugcuucacaaacguguacgccgacagcuucgugauccggggagaugaagugcggcagauugccccuggacagacaggcaagaucgccgacuacaacuacaagcugcccgacgacuucaccggcugugugauugccuggaacagcaacaaccuggacuccaaagucggcggcaacuacaauuaccuguaccggcuguuccggaaguccaaucugaagcccuucgagcgggacaucagcaccgaaaucuaucaggccggcagcaccccuugcaacggcguggaaggcuucaacugcuacuucccacugcaguccuacggcuuucagcccacaaauggcgugggcuaucagcccuacagagugguggugcugagcuucgaacugcugcaugcuccugccacagugugcggcccuaagaaaagcaccaaucucgugaagaacaaaugcgugaacuucaacuucaacggccugaccggcaccggcgugcugacagagagcaacaagaaguuccugccauuccagcaguuuggccgggauaucgccgauaccacagacgccguuagagauccccagacacuggaaauccuggacaucaccccaugcagcuucggcggagugucugugaucaccccuggcaccaacaccagcaaucagguggcagugcuguaccaggacgugaacuguaccgaagugcccguggccauucacgccgaucagcugacaccuacauggcggguguacuccaccggcagcaauguguuucagaccagagccggcugucugaucggagccgagcacgugaacaauagcuacgagugcgacauccccaucggcgcuggcaucugugccagcuaccagacacagacaaacagccccagacgggcuagaagcguggccagccagagcaucauugccuacacaaugucucugggcgccgagaacagcguggccuacuccaacaacucuaucgcuauccccaccaacuucaccaucagcgugaccaccgagauccugccuguguccaugaccaagaccagcguggacugcaccauguacaucugcggcgauuccaccgagugcuccaaccugcugcugcaguacggcagcuucugcacccagcugaauagagcccugacagggaucgccguggaacaggacaagaacacccaagagguguucgcccaagugaagcaaaucuacaagaccccuccuaucaaggacuucggcggcuucaauuucagccagauucugcccgauccuagcaagcccagcaagcggagcuucaucgaggaccugcuguucaacaaagugacacuggccgacgccggcuucaucaagcaguauggcgauugucugggcgacauugccgccagggaucugauuugcgcccagaaguuuaacggacugacagugcugccuccucugcugaccgaugagaugaucgcccaguacacaucugcccugcuggccggcacaaucacaagcggcuggacauuuggagcuggcgccgcucugcagauccccuuugcuaugcagauggccuaccgguucaacggcaucggagugacccagaaugugcuguacgagaaccagaagcugaucgccaaccaguucaacagcgccaucggcaagauccaggacagccugagcagcacagcaagcgcccugggaaagcugcaggacguggucaaccagaaugcccaggcacugaacacccuggucaagcagcuguccuccaacuucggcgccaucagcucugugcugaacgauauccugagcagacuggacaaggucgaggccgaggugcagaucgacagacugaucacaggcagacugcagagccuccagacauacgugacccagcagcugaucagagccgccgagauuagagccucugccaaucuggccgccaccaagaugucugagugugugcugggccagagcaagagaguggacuuuugcggcaagggcuaccaccugaugagcuucccucagucugccccucacggcgugguguuucugcacgugacauaugugcccgcucaagagaagaauuucaccaccgcuccagccaucugccacgacggcaaagcccacuuuccuagagaaggcguguucguguccaacggcacccauugguucgugacacagcggaacuucuacgagccccagaucaucaccaccgacaacaccuucgugucuggcaacugcgacguugugaucggcauugugaacaauaccguguacgacccucugcagcccgagcuggacagcggaggcggaggaucugacaucgaccccuacaaagaguucggcagcagcuaccagcugcugaacuuccugccucuggacuucuuccccgaccugaacgcccugguggauacagccacagcucuguacgaggaagaacugaccggcagagagcacugcagcccucaccacacagccauuagacaggcccucgugugcugggacgagcugacaaaacugaucgccuggaugagcagcaacaucaccagcgagcaagugcggaccaucaucgugaaccacgugaacgauaccuggggccugaaagugcggcagagccugugguuucaccugagcugucugaccuucggccagcacaccgugcaagaguuucugguguccuucggcguguggaucagaaccccugcuccauacagaccuccaaacgcucccauccugagcacccugccugagcacacagugaucuguugaggacuaguuauaagacugacuagcccgaugggccucccaacgggcccuccuccccuccuugcaccgagauuaauaaaaaaaaaaaaaaaaaaaaaaaaaaaaaaaaaaaaaaaaaaaaaaaaaaaaaaaaaaaaaaaaugcaucccccccccccccccccccccccccccccccaaaggcucuuuucagagccaccagaauu

SEQ ID NO: 13134 - RNA, 4123 nt, Artificial Sequence
  SARS-CoV-2/Wuhan/WIV05/2019__EPI_ISL_402128 spike protein mRNA gc mod (1-1147)(K986P_V987P) WhcAg construct
aggagaaagcuuaccauguucguguuucuggugcugcugccccugguguccagccagugugugaaccugaccaccagaacacagcugccuccagccuacaccaacagcuucaccagaggcguguacuaccccgacaagguguucagauccagcgugcugcacucuacccaggaccuguuccugccuuucuucagcaacgugaccugguuccacgccauccacguguccggcaccaauggcaccaagagauucgacaaccccgugcugcccuucaacgacgggguguacuuugccagcaccgagaaguccaacaucaucagaggcuggaucuucggcaccacacuggacagcaagacccagagccugcugaucgugaacaacgccaccaacguggucaucaaagugugcgaguuccaguucugcaacgaccccuuccugggcgucuacuaccacaagaacaacaagagcuggauggaaagcgaguuccggguguacagcagcgccaacaacugcaccuucgaguacgugucccagccuuuccugauggaccuggaaggcaagcagggcaacuucaagaaccugcgcgaguucguguucaagaacaucgacggcuacuucaaaaucuacagcaagcacaccccuaucaaccucgugcgggaucugccucagggcuucucugcucuggaaccccugguggaucugcccaucggcaucaacaucacccgguuucagacacugcuggcccugcacagaagcuaccugacaccuggcgauagcagcagcggauggacagcuggugccgccgcuuacuaugugggcuaccugcagccuagaaccuuccugcugaaguacaacgagaacggcaccaucaccgacgccguggauugugcucuggauccucugagcgagacaaagugcacccugaaguccuucaccguggaaaagggcaucuaccagaccagcaacuuccgggugcagcccaccgaauccaucgugcgguuccccaauaucaccaaucugugccccuucggcgagguguucaaugccaccagauucgccucuguguacgccuggaaccggaagcggaucagcaauugcguggccgacuacuccgugcuguacaacuccgccagcuucagcaccuucaagugcuacggcguguccccuaccaagcugaacgaccugugcuucacaaacguguacgccgacagcuucgugauccggggagaugaagugcggcagauugccccuggacagacaggcaagaucgccgacuacaacuacaagcugcccgacgacuucaccggcugugugauugccuggaacagcaacaaccuggacuccaaagucggcggcaacuacaauuaccuguaccggcuguuccggaaguccaaucugaagcccuucgagcgggacaucagcaccgaaaucuaucaggccggcagcaccccuugcaacggcguggaaggcuucaacugcuacuucccacugcaguccuacggcuuucagcccacaaauggcgugggcuaucagcccuacagagugguggugcugagcuucgaacugcugcaugcuccugccacagugugcggcccuaagaaaagcaccaaucucgugaagaacaaaugcgugaacuucaacuucaacggccugaccggcaccggcgugcugacagagagcaacaagaaguuccugccauuccagcaguuuggccgggauaucgccgauaccacagacgccguuagagauccccagacacuggaaauccuggacaucaccccaugcagcuucggcggagugucugugaucaccccuggcaccaacaccagcaaucagguggcagugcuguaccaggacgugaacuguaccgaagugcccguggccauucacgccgaucagcugacaccuacauggcggguguacuccaccggcagcaauguguuucagaccagagccggcugucugaucggagccgagcacgugaacaauagcuacgagugcgacauccccaucggcgcuggcaucugugccagcuaccagacacagacaaacagccccagacgggcuagaagcguggccagccagagcaucauugccuacacaaugucucugggcgccgagaacagcguggccuacuccaacaacucuaucgcuauccccaccaacuucaccaucagcgugaccaccgagauccugccuguguccaugaccaagaccagcguggacugcaccauguacaucugcggcgauuccaccgagugcuccaaccugcugcugcaguacggcagcuucugcacccagcugaauagagcccugacagggaucgccguggaacaggacaagaacacccaagagguguucgcccaagugaagcaaaucuacaagaccccuccuaucaaggacuucggcggcuucaauuucagccagauucugcccgauccuagcaagcccagcaagcggagcuucaucgaggaccugcuguucaacaaagugacacuggccgacgccggcuucaucaagcaguauggcgauugucugggcgacauugccgccagggaucugauuugcgcccagaaguuuaacggacugacagugcugccuccucugcugaccgaugagaugaucgcccaguacacaucugcccugcuggccggcacaaucacaagcggcuggacauuuggagcuggcgccgcucugcagauccccuuugcuaugcagauggccuaccgguucaacggcaucggagugacccagaaugugcuguacgagaaccagaagcugaucgccaaccaguucaacagcgccaucggcaagauccaggacagccugagcagcacagcaagcgcccugggaaagcugcaggacguggucaaccagaaugcccaggcacugaacacccuggucaagcagcuguccuccaacuucggcgccaucagcucugugcugaacgauauccugagcagacuggacccuccugaggccgaggugcagaucgacagacugaucacaggcagacugcagagccuccagacauacgugacccagcagcugaucagagccgccgagauuagagccucugccaaucuggccgccaccaagaugucugagugugugcugggccagagcaagagaguggacuuuugcggcaagggcuaccaccugaugagcuucccucagucugccccucacggcgugguguuucugcacgugacauaugugcccgcucaagagaagaauuucaccaccgcuccagccaucugccacgacggcaaagcccacuuuccuagagaaggcguguucguguccaacggcacccauugguucgugacacagcggaacuucuacgagccccagaucaucaccaccgacaacaccuucgugucuggcaacugcgacguugugaucggcauugugaacaauaccguguacgacccucugcagcccgagcuggacagcggaggcggaggaucugacaucgaccccuacaaagaguucggcagcagcuaccagcugcugaacuuccugccucuggacuucuuccccgaccugaacgcccugguggauacagccacagcucuguacgaggaagaacugaccggcagagagcacugcagcccucaccacacagccauuagacaggcccucgugugcugggacgagcugacaaaacugaucgccuggaugagcagcaacaucaccagcgagcaagugcggaccaucaucgugaaccacgugaacgauaccuggggccugaaagugcggcagagccugugguuucaccugagcugucugaccuucggccagcacaccgugcaagaguuucugguguccuucggcguguggaucagaaccccugcuccauacagaccuccaaacgcucccauccugagcacccugccugagcacacagugaucuguugaggacuaguuauaagacugacuagcccgaugggccucccaacgggcccuccuccccuccuugcaccgagauuaauaaaaaaaaaaaaaaaaaaaaaaaaaaaaaaaaaaaaaaaaaaaaaaaaaaaaaaaaaaaaaaaaugcaucccccccccccccccccccccccccccccccaaaggcucuuuucagagccaccagaauu

SEQ ID NO: 13135 - RNA, 4123 nt, Artificial Sequence
  SARS-CoV-2/Wuhan/WIV05/2019__EPI_ISL_402128 spike protein mRNA gc mod (1-1147)(K986P_V987P_T887WN_A1020W) WhcAg construct
aggagaaagcuuaccauguucguguuucuggugcugcugccccugguguccagccagugugugaaccugaccaccagaacacagcugccuccagccuacaccaacagcuucaccagaggcguguacuaccccgacaagguguucagauccagcgugcugcacucuacccaggaccuguuccugccuuucuucagcaacgugaccugguuccacgccauccacguguccggcaccaauggcaccaagagauucgacaaccccgugcugcccuucaacgacgggguguacuuugccagcaccgagaaguccaacaucaucagaggcuggaucuucggcaccacacuggacagcaagacccagagccugcugaucgugaacaacgccaccaacguggucaucaaagugugcgaguuccaguucugcaacgaccccuuccugggcgucuacuaccacaagaacaacaagagcuggauggaaagcgaguuccggguguacagcagcgccaacaacugcaccuucgaguacgugucccagccuuuccugauggaccuggaaggcaagcagggcaacuucaagaaccugcgcgaguucguguucaagaacaucgacggcuacuucaaaaucuacagcaagcacaccccuaucaaccucgugcgggaucugccucagggcuucucugcucuggaaccccugguggaucugcccaucggcaucaacaucacccgguuucagacacugcuggcccugcacagaagcuaccugacaccuggcgauagcagcagcggauggacagcuggugccgccgcuuacuaugugggcuaccugcagccuagaaccuuccugcugaaguacaacgagaacggcaccaucaccgacgccguggauugugcucuggauccucugagcgagacaaagugcacccugaaguccuucaccguggaaaagggcaucuaccagaccagcaacuuccgggugcagcccaccgaauccaucgugcgguuccccaauaucaccaaucugugccccuucggcgagguguucaaugccaccagauucgccucuguguacgccuggaaccggaagcggaucagcaauugcguggccgacuacuccgugcuguacaacuccgccagcuucagcaccuucaagugcuacggcguguccccuaccaagcugaacgaccugugcuucacaaacguguacgccgacagcuucgugauccggggagaugaagugcggcagauugccccuggacagacaggcaagaucgccgacuacaacuacaagcugcccgacgacuucaccggcugugugauugccuggaacagcaacaaccuggacuccaaagucggcggcaacuacaauuaccuguaccggcuguuccggaaguccaaucugaagcccuucgagcgggacaucagcaccgaaaucuaucaggccggcagcaccccuugcaacggcguggaaggcuucaacugcuacuucccacugcaguccuacggcuuucagcccacaaauggcgugggcuaucagcccuacagagugguggugcugagcuucgaacugcugcaugcuccugccacagugugcggcccuaagaaaagcaccaaucucgugaagaacaaaugcgugaacuucaacuucaacggccugaccggcaccggcgugcugacagagagcaacaagaaguuccugccauuccagcaguuuggccgggauaucgccgauaccacagacgccguuagagauccccagacacuggaaauccuggacaucaccccaugcagcuucggcggagugucugugaucaccccuggcaccaacaccagcaaucagguggcagugcuguaccaggacgugaacuguaccgaagugcccguggccauucacgccgaucagcugacaccuacauggcggguguacuccaccggcagcaauguguuucagaccagagccggcugucugaucggagccgagcacgugaacaauagcuacgagugcgacauccccaucggcgcuggcaucugugccagcuaccagacacagacaaacagccccagacgggcuagaagcguggccagccagagcaucauugccuacacaaugucucugggcgccgagaacagcguggccuacuccaacaacucuaucgcuauccccaccaacuucaccaucagcgugaccaccgagauccugccuguguccaugaccaagaccagcguggacugcaccauguacaucugcggcgauuccaccgagugcuccaaccugcugcugcaguacggcagcuucugcacccagcugaauagagcccugacagggaucgccguggaacaggacaagaacacccaagagguguucgcccaagugaagcaaaucuacaagaccccuccuaucaaggacuucggcggcuucaauuucagccagauucugcccgauccuagcaagcccagcaagcggagcuucaucgaggaccugcuguucaacaaagugacacuggccgacgccggcuucaucaagcaguauggcgauugucugggcgacauugccgccagggaucugauuugcgcccagaaguuuaacggacugacagugcugccuccucugcugaccgaugagaugaucgcccaguacacaucugcccugcuggccggcacaaucacaagcggcuggugguuuggagcuggcgccgcucugcagauccccuuugcuaugcagauggccuaccgguucaacggcaucggagugacccagaaugugcuguacgagaaccagaagcugaucgccaaccaguucaacagcgccaucggcaagauccaggacagccugagcagcacagcaagcgcccugggaaagcugcaggacguggucaaccagaaugcccaggcacugaacacccuggucaagcagcuguccuccaacuucggcgccaucagcucugugcugaacgauauccugagcagacuggacccuccugaggccgaggugcagaucgacagacugaucacaggcagacugcagagccuccagacauacgugacccagcagcugaucagagccgccgagauuagauggucugccaaucuggccgccaccaagaugucugagugugugcugggccagagcaagagaguggacuuuugcggcaagggcuaccaccugaugagcuucccucagucugccccucacggcgugguguuucugcacgugacauaugugcccgcucaagagaagaauuucaccaccgcuccagccaucugccacgacggcaaagcccacuuuccuagagaaggcguguucguguccaacggcacccauugguucgugacacagcggaacuucuacgagccccagaucaucaccaccgacaacaccuucgugucuggcaacugcgacguugugaucggcauugugaacaauaccguguacgacccucugcagcccgagcuggacagcggaggcggaggaucugacaucgaccccuacaaagaguucggcagcagcuaccagcugcugaacuuccugccucuggacuucuuccccgaccugaacgcccugguggauacagccacagcucuguacgaggaagaacugaccggcagagagcacugcagcccucaccacacagccauuagacaggcccucgugugcugggacgagcugacaaaacugaucgccuggaugagcagcaacaucaccagcgagcaagugcggaccaucaucgugaaccacgugaacgauaccuggggccugaaagugcggcagagccugugguuucaccugagcugucugaccuucggccagcacaccgugcaagaguuucugguguccuucggcguguggaucagaaccccugcuccauacagaccuccaaacgcucccauccugagcacccugccugagcacacagugaucuguugaggacuaguuauaagacugacuagcccgaugggccucccaacgggcccuccuccccuccuugcaccgagauuaauaaaaaaaaaaaaaaaaaaaaaaaaaaaaaaaaaaaaaaaaaaaaaaaaaaaaaaaaaaaaaaaaugcaucccccccccccccccccccccccccccccccaaaggcucuuuucagagccaccagaauu

SEQ ID NO: 13136 - RNA, 4123 nt, Artificial Sequence
  SARS-CoV-2/Wuhan/WIV05/2019__EPI_ISL_402128 spike protein mRNA gc mod (1-1147)(K986P_V987P_P1069F) WhcAg construct
aggagaaagcuuaccauguucguguuucuggugcugcugccccugguguccagccagugugugaaccugaccaccagaacacagcugccuccagccuacaccaacagcuucaccagaggcguguacuaccccgacaagguguucagauccagcgugcugcacucuacccaggaccuguuccugccuuucuucagcaacgugaccugguuccacgccauccacguguccggcaccaauggcaccaagagauucgacaaccccgugcugcccuucaacgacgggguguacuuugccagcaccgagaaguccaacaucaucagaggcuggaucuucggcaccacacuggacagcaagacccagagccugcugaucgugaacaacgccaccaacguggucaucaaagugugcgaguuccaguucugcaacgaccccuuccugggcgucuacuaccacaagaacaacaagagcuggauggaaagcgaguuccggguguacagcagcgccaacaacugcaccuucgaguacgugucccagccuuuccugauggaccuggaaggcaagcagggcaacuucaagaaccugcgcgaguucguguucaagaacaucgacggcuacuucaaaaucuacagcaagcacaccccuaucaaccucgugcgggaucugccucagggcuucucugcucuggaaccccugguggaucugcccaucggcaucaacaucacccgguuucagacacugcuggcccugcacagaagcuaccugacaccuggcgauagcagcagcggauggacagcuggugccgccgcuuacuaugugggcuaccugcagccuagaaccuuccugcugaaguacaacgagaacggcaccaucaccgacgccguggauugugcucuggauccucugagcgagacaaagugcacccugaaguccuucaccguggaaaagggcaucuaccagaccagcaacuuccgggugcagcccaccgaauccaucgugcgguuccccaauaucaccaaucugugccccuucggcgagguguucaaugccaccagauucgccucuguguacgccuggaaccggaagcggaucagcaauugcguggccgacuacuccgugcuguacaacuccgccagcuucagcaccuucaagugcuacggcguguccccuaccaagcugaacgaccugugcuucacaaacguguacgccgacagcuucgugauccggggagaugaagugcggcagauugccccuggacagacaggcaagaucgccgacuacaacuacaagcugcccgacgacuucaccggcugugugauugccuggaacagcaacaaccuggacuccaaagucggcggcaacuacaauuaccuguaccggcuguuccggaaguccaaucugaagcccuucgagcgggacaucagcaccgaaaucuaucaggccggcagcaccccuugcaacggcguggaaggcuucaacugcuacuucccacugcaguccuacggcuuucagcccacaaauggcgugggcuaucagcccuacagagugguggugcugagcuucgaacugcugcaugcuccugccacagugugcggcccuaagaaaagcaccaaucucgugaagaacaaaugcgugaacuucaacuucaacggccugaccggcaccggcgugcugacagagagcaacaagaaguuccugccauuccagcaguuuggccgggauaucgccgauaccacagacgccguuagagauccccagacacuggaaauccuggacaucaccccaugcagcuucggcggagugucugugaucaccccuggcaccaacaccagcaaucagguggcagugcuguaccaggacgugaacuguaccgaagugcccguggccauucacgccgaucagcugacaccuacauggcggguguacuccaccggcagcaauguguuucagaccagagccggcugucugaucggagccgagcacgugaacaauagcuacgagugcgacauccccaucggcgcuggcaucugugccagcuaccagacacagacaaacagccccagacgggcuagaagcguggccagccagagcaucauugccuacacaaugucucugggcgccgagaacagcguggccuacuccaacaacucuaucgcuauccccaccaacuucaccaucagcgugaccaccgagauccugccuguguccaugaccaagaccagcguggacugcaccauguacaucugcggcgauuccaccgagugcuccaaccugcugcugcaguacggcagcuucugcacccagcugaauagagcccugacagggaucgccguggaacaggacaagaacacccaagagguguucgcccaagugaagcaaaucuacaagaccccuccuaucaaggacuucggcggcuucaauuucagccagauucugcccgauccuagcaagcccagcaagcggagcuucaucgaggaccugcuguucaacaaagugacacuggccgacgccggcuucaucaagcaguauggcgauugucugggcgacauugccgccagggaucugauuugcgcccagaaguuuaacggacugacagugcugccuccucugcugaccgaugagaugaucgcccaguacacaucugcccugcuggccggcacaaucacaagcggcuggacauuuggagcuggcgccgcucugcagauccccuuugcuaugcagauggccuaccgguucaacggcaucggagugacccagaaugugcuguacgagaaccagaagcugaucgccaaccaguucaacagcgccaucggcaagauccaggacagccugagcagcacagcaagcgcccugggaaagcugcaggacguggucaaccagaaugcccaggcacugaacacccuggucaagcagcuguccuccaacuucggcgccaucagcucugugcugaacgauauccugagcagacuggacccuccugaggccgaggugcagaucgacagacugaucacaggcagacugcagagccuccagacauacgugacccagcagcugaucagagccgccgagauuagagccucugccaaucuggccgccaccaagaugucugagugugugcugggccagagcaagagaguggacuuuugcggcaagggcuaccaccugaugagcuucccucagucugccccucacggcgugguguuucugcacgugacauauguguucgcucaagagaagaauuucaccaccgcuccagccaucugccacgacggcaaagcccacuuuccuagagaaggcguguucguguccaacggcacccauugguucgugacacagcggaacuucuacgagccccagaucaucaccaccgacaacaccuucgugucuggcaacugcgacguugugaucggcauugugaacaauaccguguacgacccucugcagcccgagcuggacagcggaggcggaggaucugacaucgaccccuacaaagaguucggcagcagcuaccagcugcugaacuuccugccucuggacuucuuccccgaccugaacgcccugguggauacagccacagcucuguacgaggaagaacugaccggcagagagcacugcagcccucaccacacagccauuagacaggcccucgugugcugggacgagcugacaaaacugaucgccuggaugagcagcaacaucaccagcgagcaagugcggaccaucaucgugaaccacgugaacgauaccuggggccugaaagugcggcagagccugugguuucaccugagcugucugaccuucggccagcacaccgugcaagaguuucugguguccuucggcguguggaucagaaccccugcuccauacagaccuccaaacgcucccauccugagcacccugccugagcacacagugaucuguugaggacuaguuauaagacugacuagcccgaugggccucccaacgggcccuccuccccuccuugcaccgagauuaauaaaaaaaaaaaaaaaaaaaaaaaaaaaaaaaaaaaaaaaaaaaaaaaaaaaaaaaaaaaaaaaaugcaucccccccccccccccccccccccccccccccaaaggcucuuuucagagccaccagaauu

SEQ ID NO: 13137 - RNA, 4123 nt, Artificial Sequence
  SARS-CoV-2/Wuhan/WIV05/2019__EPI_ISL_402128 spike protein mRNA gc mod (1-1147)(K986P_V987P_ H1048Q_H1064N_ H1083N_H1101N) WhcAg construct
aggagaaagcuuaccauguucguguuucuggugcugcugccccugguguccagccagugugugaaccugaccaccagaacacagcugccuccagccuacaccaacagcuucaccagaggcguguacuaccccgacaagguguucagauccagcgugcugcacucuacccaggaccuguuccugccuuucuucagcaacgugaccugguuccacgccauccacguguccggcaccaauggcaccaagagauucgacaaccccgugcugcccuucaacgacgggguguacuuugccagcaccgagaaguccaacaucaucagaggcuggaucuucggcaccacacuggacagcaagacccagagccugcugaucgugaacaacgccaccaacguggucaucaaagugugcgaguuccaguucugcaacgaccccuuccugggcgucuacuaccacaagaacaacaagagcuggauggaaagcgaguuccggguguacagcagcgccaacaacugcaccuucgaguacgugucccagccuuuccugauggaccuggaaggcaagcagggcaacuucaagaaccugcgcgaguucguguucaagaacaucgacggcuacuucaaaaucuacagcaagcacaccccuaucaaccucgugcgggaucugccucagggcuucucugcucuggaaccccugguggaucugcccaucggcaucaacaucacccgguuucagacacugcuggcccugcacagaagcuaccugacaccuggcgauagcagcagcggauggacagcuggugccgccgcuuacuaugugggcuaccugcagccuagaaccuuccugcugaaguacaacgagaacggcaccaucaccgacgccguggauugugcucuggauccucugagcgagacaaagugcacccugaaguccuucaccguggaaaagggcaucuaccagaccagcaacuuccgggugcagcccaccgaauccaucgugcgguuccccaauaucaccaaucugugccccuucggcgagguguucaaugccaccagauucgccucuguguacgccuggaaccggaagcggaucagcaauugcguggccgacuacuccgugcuguacaacuccgccagcuucagcaccuucaagugcuacggcguguccccuaccaagcugaacgaccugugcuucacaaacguguacgccgacagcuucgugauccggggagaugaagugcggcagauugccccuggacagacaggcaagaucgccgacuacaacuacaagcugcccgacgacuucaccggcugugugauugccuggaacagcaacaaccuggacuccaaagucggcggcaacuacaauuaccuguaccggcuguuccggaaguccaaucugaagcccuucgagcgggacaucagcaccgaaaucuaucaggccggcagcaccccuugcaacggcguggaaggcuucaacugcuacuucccacugcaguccuacggcuuucagcccacaaauggcgugggcuaucagcccuacagagugguggugcugagcuucgaacugcugcaugcuccugccacagugugcggcccuaagaaaagcaccaaucucgugaagaacaaaugcgugaacuucaacuucaacggccugaccggcaccggcgugcugacagagagcaacaagaaguuccugccauuccagcaguuuggccgggauaucgccgauaccacagacgccguuagagauccccagacacuggaaauccuggacaucaccccaugcagcuucggcggagugucugugaucaccccuggcaccaacaccagcaaucagguggcagugcuguaccaggacgugaacuguaccgaagugcccguggccauucacgccgaucagcugacaccuacauggcggguguacuccaccggcagcaauguguuucagaccagagccggcugucugaucggagccgagcacgugaacaauagcuacgagugcgacauccccaucggcgcuggcaucugugccagcuaccagacacagacaaacagccccagacgggcuagaagcguggccagccagagcaucauugccuacacaaugucucugggcgccgagaacagcguggccuacuccaacaacucuaucgcuauccccaccaacuucaccaucagcgugaccaccgagauccugccuguguccaugaccaagaccagcguggacugcaccauguacaucugcggcgauuccaccgagugcuccaaccugcugcugcaguacggcagcuucugcacccagcugaauagagcccugacagggaucgccguggaacaggacaagaacacccaagagguguucgcccaagugaagcaaaucuacaagaccccuccuaucaaggacuucggcggcuucaauuucagccagauucugcccgauccuagcaagcccagcaagcggagcuucaucgaggaccugcuguucaacaaagugacacuggccgacgccggcuucaucaagcaguauggcgauugucugggcgacauugccgccagggaucugauuugcgcccagaaguuuaacggacugacagugcugccuccucugcugaccgaugagaugaucgcccaguacacaucugcccugcuggccggcacaaucacaagcggcuggacauuuggagcuggcgccgcucugcagauccccuuugcuaugcagauggccuaccgguucaacggcaucggagugacccagaaugugcuguacgagaaccagaagcugaucgccaaccaguucaacagcgccaucggcaagauccaggacagccugagcagcacagcaagcgcccugggaaagcugcaggacguggucaaccagaaugcccaggcacugaacacccuggucaagcagcuguccuccaacuucggcgccaucagcucugugcugaacgauauccugagcagacuggacccuccugaggccgaggugcagaucgacagacugaucacaggcagacugcagagccuccagacauacgugacccagcagcugaucagagccgccgagauuagagccucugccaaucuggccgccaccaagaugucugagugugugcugggccagagcaagagaguggacuuuugcggcaagggcuaccagcugaugagcuucccucagucugccccucacggcgugguguuucugaacgugacauaugugcccgcucaagagaagaauuucaccaccgcuccagccaucugcaacgacggcaaagcccacuuuccuagagaaggcguguucguguccaacggcaccaacugguucgugacacagcggaacuucuacgagccccagaucaucaccaccgacaacaccuucgugucuggcaacugcgacguugugaucggcauugugaacaauaccguguacgacccucugcagcccgagcuggacagcggaggcggaggaucugacaucgaccccuacaaagaguucggcagcagcuaccagcugcugaacuuccugccucuggacuucuuccccgaccugaacgcccugguggauacagccacagcucuguacgaggaagaacugaccggcagagagcacugcagcccucaccacacagccauuagacaggcccucgugugcugggacgagcugacaaaacugaucgccuggaugagcagcaacaucaccagcgagcaagugcggaccaucaucgugaaccacgugaacgauaccuggggccugaaagugcggcagagccugugguuucaccugagcugucugaccuucggccagcacaccgugcaagaguuucugguguccuucggcguguggaucagaaccccugcuccauacagaccuccaaacgcucccauccugagcacccugccugagcacacagugaucuguugaggacuaguuauaagacugacuagcccgaugggccucccaacgggcccuccuccccuccuugcaccgagauuaauaaaaaaaaaaaaaaaaaaaaaaaaaaaaaaaaaaaaaaaaaaaaaaaaaaaaaaaaaaaaaaaaugcaucccccccccccccccccccccccccccccccaaaggcucuuuucagagccaccagaauu

SEQ ID NO: 13138 - RNA, 4123 nt, Artificial Sequence
  SARS-CoV-2/Wuhan/WIV05/2019__EPI_ISL_402128 spike protein mRNA gc mod (1-1147)(I712C_T1077C) WhcAg construct
aggagaaagcuuaccauguucguguuucuggugcugcugccccugguguccagccagugugugaaccugaccaccagaacacagcugccuccagccuacaccaacagcuucaccagaggcguguacuaccccgacaagguguucagauccagcgugcugcacucuacccaggaccuguuccugccuuucuucagcaacgugaccugguuccacgccauccacguguccggcaccaauggcaccaagagauucgacaaccccgugcugcccuucaacgacgggguguacuuugccagcaccgagaaguccaacaucaucagaggcuggaucuucggcaccacacuggacagcaagacccagagccugcugaucgugaacaacgccaccaacguggucaucaaagugugcgaguuccaguucugcaacgaccccuuccugggcgucuacuaccacaagaacaacaagagcuggauggaaagcgaguuccggguguacagcagcgccaacaacugcaccuucgaguacgugucccagccuuuccugauggaccuggaaggcaagcagggcaacuucaagaaccugcgcgaguucguguucaagaacaucgacggcuacuucaaaaucuacagcaagcacaccccuaucaaccucgugcgggaucugccucagggcuucucugcucuggaaccccugguggaucugcccaucggcaucaacaucacccgguuucagacacugcuggcccugcacagaagcuaccugacaccuggcgauagcagcagcggauggacagcuggugccgccgcuuacuaugugggcuaccugcagccuagaaccuuccugcugaaguacaacgagaacggcaccaucaccgacgccguggauugugcucuggauccucugagcgagacaaagugcacccugaaguccuucaccguggaaaagggcaucuaccagaccagcaacuuccgggugcagcccaccgaauccaucgugcgguuccccaauaucaccaaucugugccccuucggcgagguguucaaugccaccagauucgccucuguguacgccuggaaccggaagcggaucagcaauugcguggccgacuacuccgugcuguacaacuccgccagcuucagcaccuucaagugcuacggcguguccccuaccaagcugaacgaccugugcuucacaaacguguacgccgacagcuucgugauccggggagaugaagugcggcagauugccccuggacagacaggcaagaucgccgacuacaacuacaagcugcccgacgacuucaccggcugugugauugccuggaacagcaacaaccuggacuccaaagucggcggcaacuacaauuaccuguaccggcuguuccggaaguccaaucugaagcccuucgagcgggacaucagcaccgaaaucuaucaggccggcagcaccccuugcaacggcguggaaggcuucaacugcuacuucccacugcaguccuacggcuuucagcccacaaauggcgugggcuaucagcccuacagagugguggugcugagcuucgaacugcugcaugcuccugccacagugugcggcccuaagaaaagcaccaaucucgugaagaacaaaugcgugaacuucaacuucaacggccugaccggcaccggcgugcugacagagagcaacaagaaguuccugccauuccagcaguuuggccgggauaucgccgauaccacagacgccguuagagauccccagacacuggaaauccuggacaucaccccaugcagcuucggcggagugucugugaucaccccuggcaccaacaccagcaaucagguggcagugcuguaccaggacgugaacuguaccgaagugcccguggccauucacgccgaucagcugacaccuacauggcggguguacuccaccggcagcaauguguuucagaccagagccggcugucugaucggagccgagcacgugaacaauagcuacgagugcgacauccccaucggcgcuggcaucugugccagcuaccagacacagacaaacagccccagacgggcuagaagcguggccagccagagcaucauugccuacacaaugucucugggcgccgagaacagcguggccuacuccaacaacucuugcgcuauccccaccaacuucaccaucagcgugaccaccgagauccugccuguguccaugaccaagaccagcguggacugcaccauguacaucugcggcgauuccaccgagugcuccaaccugcugcugcaguacggcagcuucugcacccagcugaauagagcccugacagggaucgccguggaacaggacaagaacacccaagagguguucgcccaagugaagcaaaucuacaagaccccuccuaucaaggacuucggcggcuucaauuucagccagauucugcccgauccuagcaagcccagcaagcggagcuucaucgaggaccugcuguucaacaaagugacacuggccgacgccggcuucaucaagcaguauggcgauugucugggcgacauugccgccagggaucugauuugcgcccagaaguuuaacggacugacagugcugccuccucugcugaccgaugagaugaucgcccaguacacaucugcccugcuggccggcacaaucacaagcggcuggacauuuggagcuggcgccgcucugcagauccccuuugcuaugcagauggccuaccgguucaacggcaucggagugacccagaaugugcuguacgagaaccagaagcugaucgccaaccaguucaacagcgccaucggcaagauccaggacagccugagcagcacagcaagcgcccugggaaagcugcaggacguggucaaccagaaugcccaggcacugaacacccuggucaagcagcuguccuccaacuucggcgccaucagcucugugcugaacgauauccugagcagacuggacaaggucgaggccgaggugcagaucgacagacugaucacaggcagacugcagagccuccagacauacgugacccagcagcugaucagagccgccgagauuagagccucugccaaucuggccgccaccaagaugucugagugugugcugggccagagcaagagaguggacuuuugcggcaagggcuaccaccugaugagcuucccucagucugccccucacggcgugguguuucugcacgugacauaugugcccgcucaagagaagaauuucaccugugcuccagccaucugccacgacggcaaagcccacuuuccuagagaaggcguguucguguccaacggcacccauugguucgugacacagcggaacuucuacgagccccagaucaucaccaccgacaacaccuucgugucuggcaacugcgacguugugaucggcauugugaacaauaccguguacgacccucugcagcccgagcuggacagcggaggcggaggaucugacaucgaccccuacaaagaguucggcagcagcuaccagcugcugaacuuccugccucuggacuucuuccccgaccugaacgcccugguggauacagccacagcucuguacgaggaagaacugaccggcagagagcacugcagcccucaccacacagccauuagacaggcccucgugugcugggacgagcugacaaaacugaucgccuggaugagcagcaacaucaccagcgagcaagugcggaccaucaucgugaaccacgugaacgauaccuggggccugaaagugcggcagagccugugguuucaccugagcugucugaccuucggccagcacaccgugcaagaguuucugguguccuucggcguguggaucagaaccccugcuccauacagaccuccaaacgcucccauccugagcacccugccugagcacacagugaucuguugaggacuaguuauaagacugacuagcccgaugggccucccaacgggcccuccuccccuccuugcaccgagauuaauaaaaaaaaaaaaaaaaaaaaaaaaaaaaaaaaaaaaaaaaaaaaaaaaaaaaaaaaaaaaaaaaugcaucccccccccccccccccccccccccccccccaaaggcucuuuucagagccaccagaauu

SEQ ID NO: 13139 - RNA, 4123 nt, Artificial Sequence
  SARS-CoV-2/Wuhan/WIV05/2019__EPI_ISL_402128 spike protein mRNA gc mod (1-1147)(I714C_Y1110C) WhcAg construct
aggagaaagcuuaccauguucguguuucuggugcugcugccccugguguccagccagugugugaaccugaccaccagaacacagcugccuccagccuacaccaacagcuucaccagaggcguguacuaccccgacaagguguucagauccagcgugcugcacucuacccaggaccuguuccugccuuucuucagcaacgugaccugguuccacgccauccacguguccggcaccaauggcaccaagagauucgacaaccccgugcugcccuucaacgacgggguguacuuugccagcaccgagaaguccaacaucaucagaggcuggaucuucggcaccacacuggacagcaagacccagagccugcugaucgugaacaacgccaccaacguggucaucaaagugugcgaguuccaguucugcaacgaccccuuccugggcgucuacuaccacaagaacaacaagagcuggauggaaagcgaguuccggguguacagcagcgccaacaacugcaccuucgaguacgugucccagccuuuccugauggaccuggaaggcaagcagggcaacuucaagaaccugcgcgaguucguguucaagaacaucgacggcuacuucaaaaucuacagcaagcacaccccuaucaaccucgugcgggaucugccucagggcuucucugcucuggaaccccugguggaucugcccaucggcaucaacaucacccgguuucagacacugcuggcccugcacagaagcuaccugacaccuggcgauagcagcagcggauggacagcuggugccgccgcuuacuaugugggcuaccugcagccuagaaccuuccugcugaaguacaacgagaacggcaccaucaccgacgccguggauugugcucuggauccucugagcgagacaaagugcacccugaaguccuucaccguggaaaagggcaucuaccagaccagcaacuuccgggugcagcccaccgaauccaucgugcgguuccccaauaucaccaaucugugccccuucggcgagguguucaaugccaccagauucgccucuguguacgccuggaaccggaagcggaucagcaauugcguggccgacuacuccgugcuguacaacuccgccagcuucagcaccuucaagugcuacggcguguccccuaccaagcugaacgaccugugcuucacaaacguguacgccgacagcuucgugauccggggagaugaagugcggcagauugccccuggacagacaggcaagaucgccgacuacaacuacaagcugcccgacgacuucaccggcugugugauugccuggaacagcaacaaccuggacuccaaagucggcggcaacuacaauuaccuguaccggcuguuccggaaguccaaucugaagcccuucgagcgggacaucagcaccgaaaucuaucaggccggcagcaccccuugcaacggcguggaaggcuucaacugcuacuucccacugcaguccuacggcuuucagcccacaaauggcgugggcuaucagcccuacagagugguggugcugagcuucgaacugcugcaugcuccugccacagugugcggcccuaagaaaagcaccaaucucgugaagaacaaaugcgugaacuucaacuucaacggccugaccggcaccggcgugcugacagagagcaacaagaaguuccugccauuccagcaguuuggccgggauaucgccgauaccacagacgccguuagagauccccagacacuggaaauccuggacaucaccccaugcagcuucggcggagugucugugaucaccccuggcaccaacaccagcaaucagguggcagugcuguaccaggacgugaacuguaccgaagugcccguggccauucacgccgaucagcugacaccuacauggcggguguacuccaccggcagcaauguguuucagaccagagccggcugucugaucggagccgagcacgugaacaauagcuacgagugcgacauccccaucggcgcuggcaucugugccagcuaccagacacagacaaacagccccagacgggcuagaagcguggccagccagagcaucauugccuacacaaugucucugggcgccgagaacagcguggccuacuccaacaacucuaucgcuugccccaccaacuucaccaucagcgugaccaccgagauccugccuguguccaugaccaagaccagcguggacugcaccauguacaucugcggcgauuccaccgagugcuccaaccugcugcugcaguacggcagcuucugcacccagcugaauagagcccugacagggaucgccguggaacaggacaagaacacccaagagguguucgcccaagugaagcaaaucuacaagaccccuccuaucaaggacuucggcggcuucaauuucagccagauucugcccgauccuagcaagcccagcaagcggagcuucaucgaggaccugcuguucaacaaagugacacuggccgacgccggcuucaucaagcaguauggcgauugucugggcgacauugccgccagggaucugauuugcgcccagaaguuuaacggacugacagugcugccuccucugcugaccgaugagaugaucgcccaguacacaucugcccugcuggccggcacaaucacaagcggcuggacauuuggagcuggcgccgcucugcagauccccuuugcuaugcagauggccuaccgguucaacggcaucggagugacccagaaugugcuguacgagaaccagaagcugaucgccaaccaguucaacagcgccaucggcaagauccaggacagccugagcagcacagcaagcgcccugggaaagcugcaggacguggucaaccagaaugcccaggcacugaacacccuggucaagcagcuguccuccaacuucggcgccaucagcucugugcugaacgauauccugagcagacuggacaaggucgaggccgaggugcagaucgacagacugaucacaggcagacugcagagccuccagacauacgugacccagcagcugaucagagccgccgagauuagagccucugccaaucuggccgccaccaagaugucugagugugugcugggccagagcaagagaguggacuuuugcggcaagggcuaccaccugaugagcuucccucagucugccccucacggcgugguguuucugcacgugacauaugugcccgcucaagagaagaauuucaccaccgcuccagccaucugccacgacggcaaagcccacuuuccuagagaaggcguguucguguccaacggcacccauugguucgugacacagcggaacuucugugagccccagaucaucaccaccgacaacaccuucgugucuggcaacugcgacguugugaucggcauugugaacaauaccguguacgacccucugcagcccgagcuggacagcggaggcggaggaucugacaucgaccccuacaaagaguucggcagcagcuaccagcugcugaacuuccugccucuggacuucuuccccgaccugaacgcccugguggauacagccacagcucuguacgaggaagaacugaccggcagagagcacugcagcccucaccacacagccauuagacaggcccucgugugcugggacgagcugacaaaacugaucgccuggaugagcagcaacaucaccagcgagcaagugcggaccaucaucgugaaccacgugaacgauaccuggggccugaaagugcggcagagccugugguuucaccugagcugucugaccuucggccagcacaccgugcaagaguuucugguguccuucggcguguggaucagaaccccugcuccauacagaccuccaaacgcucccauccugagcacccugccugagcacacagugaucuguugaggacuaguuauaagacugacuagcccgaugggccucccaacgggcccuccuccccuccuugcaccgagauuaauaaaaaaaaaaaaaaaaaaaaaaaaaaaaaaaaaaaaaaaaaaaaaaaaaaaaaaaaaaaaaaaaugcaucccccccccccccccccccccccccccccccaaaggcucuuuucagagccaccagaauu

SEQ ID NO: 13140 - RNA, 4123 nt, Artificial Sequence
  SARS-CoV-2/Wuhan/WIV05/2019__EPI_ISL_402128 spike protein mRNA gc mod (1-1147)(P715C_P1069C) WhcAg construct
aggagaaagcuuaccauguucguguuucuggugcugcugccccugguguccagccagugugugaaccugaccaccagaacacagcugccuccagccuacaccaacagcuucaccagaggcguguacuaccccgacaagguguucagauccagcgugcugcacucuacccaggaccuguuccugccuuucuucagcaacgugaccugguuccacgccauccacguguccggcaccaauggcaccaagagauucgacaaccccgugcugcccuucaacgacgggguguacuuugccagcaccgagaaguccaacaucaucagaggcuggaucuucggcaccacacuggacagcaagacccagagccugcugaucgugaacaacgccaccaacguggucaucaaagugugcgaguuccaguucugcaacgaccccuuccugggcgucuacuaccacaagaacaacaagagcuggauggaaagcgaguuccggguguacagcagcgccaacaacugcaccuucgaguacgugucccagccuuuccugauggaccuggaaggcaagcagggcaacuucaagaaccugcgcgaguucguguucaagaacaucgacggcuacuucaaaaucuacagcaagcacaccccuaucaaccucgugcgggaucugccucagggcuucucugcucuggaaccccugguggaucugcccaucggcaucaacaucacccgguuucagacacugcuggcccugcacagaagcuaccugacaccuggcgauagcagcagcggauggacagcuggugccgccgcuuacuaugugggcuaccugcagccuagaaccuuccugcugaaguacaacgagaacggcaccaucaccgacgccguggauugugcucuggauccucugagcgagacaaagugcacccugaaguccuucaccguggaaaagggcaucuaccagaccagcaacuuccgggugcagcccaccgaauccaucgugcgguuccccaauaucaccaaucugugccccuucggcgagguguucaaugccaccagauucgccucuguguacgccuggaaccggaagcggaucagcaauugcguggccgacuacuccgugcuguacaacuccgccagcuucagcaccuucaagugcuacggcguguccccuaccaagcugaacgaccugugcuucacaaacguguacgccgacagcuucgugauccggggagaugaagugcggcagauugccccuggacagacaggcaagaucgccgacuacaacuacaagcugcccgacgacuucaccggcugugugauugccuggaacagcaacaaccuggacuccaaagucggcggcaacuacaauuaccuguaccggcuguuccggaaguccaaucugaagcccuucgagcgggacaucagcaccgaaaucuaucaggccggcagcaccccuugcaacggcguggaaggcuucaacugcuacuucccacugcaguccuacggcuuucagcccacaaauggcgugggcuaucagcccuacagagugguggugcugagcuucgaacugcugcaugcuccugccacagugugcggcccuaagaaaagcaccaaucucgugaagaacaaaugcgugaacuucaacuucaacggccugaccggcaccggcgugcugacagagagcaacaagaaguuccugccauuccagcaguuuggccgggauaucgccgauaccacagacgccguuagagauccccagacacuggaaauccuggacaucaccccaugcagcuucggcggagugucugugaucaccccuggcaccaacaccagcaaucagguggcagugcuguaccaggacgugaacuguaccgaagugcccguggccauucacgccgaucagcugacaccuacauggcggguguacuccaccggcagcaauguguuucagaccagagccggcugucugaucggagccgagcacgugaacaauagcuacgagugcgacauccccaucggcgcuggcaucugugccagcuaccagacacagacaaacagccccagacgggcuagaagcguggccagccagagcaucauugccuacacaaugucucugggcgccgagaacagcguggccuacuccaacaacucuaucgcuaucugcaccaacuucaccaucagcgugaccaccgagauccugccuguguccaugaccaagaccagcguggacugcaccauguacaucugcggcgauuccaccgagugcuccaaccugcugcugcaguacggcagcuucugcacccagcugaauagagcccugacagggaucgccguggaacaggacaagaacacccaagagguguucgcccaagugaagcaaaucuacaagaccccuccuaucaaggacuucggcggcuucaauuucagccagauucugcccgauccuagcaagcccagcaagcggagcuucaucgaggaccugcuguucaacaaagugacacuggccgacgccggcuucaucaagcaguauggcgauugucugggcgacauugccgccagggaucugauuugcgcccagaaguuuaacggacugacagugcugccuccucugcugaccgaugagaugaucgcccaguacacaucugcccugcuggccggcacaaucacaagcggcuggacauuuggagcuggcgccgcucugcagauccccuuugcuaugcagauggccuaccgguucaacggcaucggagugacccagaaugugcuguacgagaaccagaagcugaucgccaaccaguucaacagcgccaucggcaagauccaggacagccugagcagcacagcaagcgcccugggaaagcugcaggacguggucaaccagaaugcccaggcacugaacacccuggucaagcagcuguccuccaacuucggcgccaucagcucugugcugaacgauauccugagcagacuggacaaggucgaggccgaggugcagaucgacagacugaucacaggcagacugcagagccuccagacauacgugacccagcagcugaucagagccgccgagauuagagccucugccaaucuggccgccaccaagaugucugagugugugcugggccagagcaagagaguggacuuuugcggcaagggcuaccaccugaugagcuucccucagucugccccucacggcgugguguuucugcacgugacauaugugugugcucaagagaagaauuucaccaccgcuccagccaucugccacgacggcaaagcccacuuuccuagagaaggcguguucguguccaacggcacccauugguucgugacacagcggaacuucuacgagccccagaucaucaccaccgacaacaccuucgugucuggcaacugcgacguugugaucggcauugugaacaauaccguguacgacccucugcagcccgagcuggacagcggaggcggaggaucugacaucgaccccuacaaagaguucggcagcagcuaccagcugcugaacuuccugccucuggacuucuuccccgaccugaacgcccugguggauacagccacagcucuguacgaggaagaacugaccggcagagagcacugcagcccucaccacacagccauuagacaggcccucgugugcugggacgagcugacaaaacugaucgccuggaugagcagcaacaucaccagcgagcaagugcggaccaucaucgugaaccacgugaacgauaccuggggccugaaagugcggcagagccugugguuucaccugagcugucugaccuucggccagcacaccgugcaagaguuucugguguccuucggcguguggaucagaaccccugcuccauacagaccuccaaacgcucccauccugagcacccugccugagcacacagugaucuguugaggacuaguuauaagacugacuagcccgaugggccucccaacgggcccuccuccccuccuugcaccgagauuaauaaaaaaaaaaaaaaaaaaaaaaaaaaaaaaaaaaaaaaaaaaaaaaaaaaaaaaaaaaaaaaaaugcaucccccccccccccccccccccccccccccccaaaggcucuuuucagagccaccagaauu

SEQ ID NO: 13141 - RNA, 4123 nt, Artificial Sequence
  SARS-CoV-2/Wuhan/WIV05/2019__EPI_ISL_402128 spike protein mRNA gc mod (1-1147)(G889C_L1034C) WhcAg construct
aggagaaagcuuaccauguucguguuucuggugcugcugccccugguguccagccagugugugaaccugaccaccagaacacagcugccuccagccuacaccaacagcuucaccagaggcguguacuaccccgacaagguguucagauccagcgugcugcacucuacccaggaccuguuccugccuuucuucagcaacgugaccugguuccacgccauccacguguccggcaccaauggcaccaagagauucgacaaccccgugcugcccuucaacgacgggguguacuuugccagcaccgagaaguccaacaucaucagaggcuggaucuucggcaccacacuggacagcaagacccagagccugcugaucgugaacaacgccaccaacguggucaucaaagugugcgaguuccaguucugcaacgaccccuuccugggcgucuacuaccacaagaacaacaagagcuggauggaaagcgaguuccggguguacagcagcgccaacaacugcaccuucgaguacgugucccagccuuuccugauggaccuggaaggcaagcagggcaacuucaagaaccugcgcgaguucguguucaagaacaucgacggcuacuucaaaaucuacagcaagcacaccccuaucaaccucgugcgggaucugccucagggcuucucugcucuggaaccccugguggaucugcccaucggcaucaacaucacccgguuucagacacugcuggcccugcacagaagcuaccugacaccuggcgauagcagcagcggauggacagcuggugccgccgcuuacuaugugggcuaccugcagccuagaaccuuccugcugaaguacaacgagaacggcaccaucaccgacgccguggauugugcucuggauccucugagcgagacaaagugcacccugaaguccuucaccguggaaaagggcaucuaccagaccagcaacuuccgggugcagcccaccgaauccaucgugcgguuccccaauaucaccaaucugugccccuucggcgagguguucaaugccaccagauucgccucuguguacgccuggaaccggaagcggaucagcaauugcguggccgacuacuccgugcuguacaacuccgccagcuucagcaccuucaagugcuacggcguguccccuaccaagcugaacgaccugugcuucacaaacguguacgccgacagcuucgugauccggggagaugaagugcggcagauugccccuggacagacaggcaagaucgccgacuacaacuacaagcugcccgacgacuucaccggcugugugauugccuggaacagcaacaaccuggacuccaaagucggcggcaacuacaauuaccuguaccggcuguuccggaaguccaaucugaagcccuucgagcgggacaucagcaccgaaaucuaucaggccggcagcaccccuugcaacggcguggaaggcuucaacugcuacuucccacugcaguccuacggcuuucagcccacaaauggcgugggcuaucagcccuacagagugguggugcugagcuucgaacugcugcaugcuccugccacagugugcggcccuaagaaaagcaccaaucucgugaagaacaaaugcgugaacuucaacuucaacggccugaccggcaccggcgugcugacagagagcaacaagaaguuccugccauuccagcaguuuggccgggauaucgccgauaccacagacgccguuagagauccccagacacuggaaauccuggacaucaccccaugcagcuucggcggagugucugugaucaccccuggcaccaacaccagcaaucagguggcagugcuguaccaggacgugaacuguaccgaagugcccguggccauucacgccgaucagcugacaccuacauggcggguguacuccaccggcagcaauguguuucagaccagagccggcugucugaucggagccgagcacgugaacaauagcuacgagugcgacauccccaucggcgcuggcaucugugccagcuaccagacacagacaaacagccccagacgggcuagaagcguggccagccagagcaucauugccuacacaaugucucugggcgccgagaacagcguggccuacuccaacaacucuaucgcuauccccaccaacuucaccaucagcgugaccaccgagauccugccuguguccaugaccaagaccagcguggacugcaccauguacaucugcggcgauuccaccgagugcuccaaccugcugcugcaguacggcagcuucugcacccagcugaauagagcccugacagggaucgccguggaacaggacaagaacacccaagagguguucgcccaagugaagcaaaucuacaagaccccuccuaucaaggacuucggcggcuucaauuucagccagauucugcccgauccuagcaagcccagcaagcggagcuucaucgaggaccugcuguucaacaaagugacacuggccgacgccggcuucaucaagcaguauggcgauugucugggcgacauugccgccagggaucugauuugcgcccagaaguuuaacggacugacagugcugccuccucugcugaccgaugagaugaucgcccaguacacaucugcccugcuggccggcacaaucacaagcggcuggacauuuugcgcuggcgccgcucugcagauccccuuugcuaugcagauggccuaccgguucaacggcaucggagugacccagaaugugcuguacgagaaccagaagcugaucgccaaccaguucaacagcgccaucggcaagauccaggacagccugagcagcacagcaagcgcccugggaaagcugcaggacguggucaaccagaaugcccaggcacugaacacccuggucaagcagcuguccuccaacuucggcgccaucagcucugugcugaacgauauccugagcagacuggacaaggucgaggccgaggugcagaucgacagacugaucacaggcagacugcagagccuccagacauacgugacccagcagcugaucagagccgccgagauuagagccucugccaaucuggccgccaccaagaugucugaguguguguguggccagagcaagagaguggacuuuugcggcaagggcuaccaccugaugagcuucccucagucugccccucacggcgugguguuucugcacgugacauaugugcccgcucaagagaagaauuucaccaccgcuccagccaucugccacgacggcaaagcccacuuuccuagagaaggcguguucguguccaacggcacccauugguucgugacacagcggaacuucuacgagccccagaucaucaccaccgacaacaccuucgugucuggcaacugcgacguugugaucggcauugugaacaauaccguguacgacccucugcagcccgagcuggacagcggaggcggaggaucugacaucgaccccuacaaagaguucggcagcagcuaccagcugcugaacuuccugccucuggacuucuuccccgaccugaacgcccugguggauacagccacagcucuguacgaggaagaacugaccggcagagagcacugcagcccucaccacacagccauuagacaggcccucgugugcugggacgagcugacaaaacugaucgccuggaugagcagcaacaucaccagcgagcaagugcggaccaucaucgugaaccacgugaacgauaccuggggccugaaagugcggcagagccugugguuucaccugagcugucugaccuucggccagcacaccgugcaagaguuucugguguccuucggcguguggaucagaaccccugcuccauacagaccuccaaacgcucccauccugagcacccugccugagcacacagugaucuguugaggacuaguuauaagacugacuagcccgaugggccucccaacgggcccuccuccccuccuugcaccgagauuaauaaaaaaaaaaaaaaaaaaaaaaaaaaaaaaaaaaaaaaaaaaaaaaaaaaaaaaaaaaaaaaaaugcaucccccccccccccccccccccccccccccccaaaggcucuuuucagagccaccagaauu

SEQ ID NO: 13142 - RNA, 4123 nt, Artificial Sequence
  SARS-CoV-2/Wuhan/WIV05/2019__EPI_ISL_402128 spike protein mRNA gc mod (1-1147)(I909C_Y1047C) WhcAg construct
aggagaaagcuuaccauguucguguuucuggugcugcugccccugguguccagccagugugugaaccugaccaccagaacacagcugccuccagccuacaccaacagcuucaccagaggcguguacuaccccgacaagguguucagauccagcgugcugcacucuacccaggaccuguuccugccuuucuucagcaacgugaccugguuccacgccauccacguguccggcaccaauggcaccaagagauucgacaaccccgugcugcccuucaacgacgggguguacuuugccagcaccgagaaguccaacaucaucagaggcuggaucuucggcaccacacuggacagcaagacccagagccugcugaucgugaacaacgccaccaacguggucaucaaagugugcgaguuccaguucugcaacgaccccuuccugggcgucuacuaccacaagaacaacaagagcuggauggaaagcgaguuccggguguacagcagcgccaacaacugcaccuucgaguacgugucccagccuuuccugauggaccuggaaggcaagcagggcaacuucaagaaccugcgcgaguucguguucaagaacaucgacggcuacuucaaaaucuacagcaagcacaccccuaucaaccucgugcgggaucugccucagggcuucucugcucuggaaccccugguggaucugcccaucggcaucaacaucacccgguuucagacacugcuggcccugcacagaagcuaccugacaccuggcgauagcagcagcggauggacagcuggugccgccgcuuacuaugugggcuaccugcagccuagaaccuuccugcugaaguacaacgagaacggcaccaucaccgacgccguggauugugcucuggauccucugagcgagacaaagugcacccugaaguccuucaccguggaaaagggcaucuaccagaccagcaacuuccgggugcagcccaccgaauccaucgugcgguuccccaauaucaccaaucugugccccuucggcgagguguucaaugccaccagauucgccucuguguacgccuggaaccggaagcggaucagcaauugcguggccgacuacuccgugcuguacaacuccgccagcuucagcaccuucaagugcuacggcguguccccuaccaagcugaacgaccugugcuucacaaacguguacgccgacagcuucgugauccggggagaugaagugcggcagauugccccuggacagacaggcaagaucgccgacuacaacuacaagcugcccgacgacuucaccggcugugugauugccuggaacagcaacaaccuggacuccaaagucggcggcaacuacaauuaccuguaccggcuguuccggaaguccaaucugaagcccuucgagcgggacaucagcaccgaaaucuaucaggccggcagcaccccuugcaacggcguggaaggcuucaacugcuacuucccacugcaguccuacggcuuucagcccacaaauggcgugggcuaucagcccuacagagugguggugcugagcuucgaacugcugcaugcuccugccacagugugcggcccuaagaaaagcaccaaucucgugaagaacaaaugcgugaacuucaacuucaacggccugaccggcaccggcgugcugacagagagcaacaagaaguuccugccauuccagcaguuuggccgggauaucgccgauaccacagacgccguuagagauccccagacacuggaaauccuggacaucaccccaugcagcuucggcggagugucugugaucaccccuggcaccaacaccagcaaucagguggcagugcuguaccaggacgugaacuguaccgaagugcccguggccauucacgccgaucagcugacaccuacauggcggguguacuccaccggcagcaauguguuucagaccagagccggcugucugaucggagccgagcacgugaacaauagcuacgagugcgacauccccaucggcgcuggcaucugugccagcuaccagacacagacaaacagccccagacgggcuagaagcguggccagccagagcaucauugccuacacaaugucucugggcgccgagaacagcguggccuacuccaacaacucuaucgcuauccccaccaacuucaccaucagcgugaccaccgagauccugccuguguccaugaccaagaccagcguggacugcaccauguacaucugcggcgauuccaccgagugcuccaaccugcugcugcaguacggcagcuucugcacccagcugaauagagcccugacagggaucgccguggaacaggacaagaacacccaagagguguucgcccaagugaagcaaaucuacaagaccccuccuaucaaggacuucggcggcuucaauuucagccagauucugcccgauccuagcaagcccagcaagcggagcuucaucgaggaccugcuguucaacaaagugacacuggccgacgccggcuucaucaagcaguauggcgauugucugggcgacauugccgccagggaucugauuugcgcccagaaguuuaacggacugacagugcugccuccucugcugaccgaugagaugaucgcccaguacacaucugcccugcuggccggcacaaucacaagcggcuggacauuuggagcuggcgccgcucugcagauccccuuugcuaugcagauggccuaccgguucaacggcugcggagugacccagaaugugcuguacgagaaccagaagcugaucgccaaccaguucaacagcgccaucggcaagauccaggacagccugagcagcacagcaagcgcccugggaaagcugcaggacguggucaaccagaaugcccaggcacugaacacccuggucaagcagcuguccuccaacuucggcgccaucagcucugugcugaacgauauccugagcagacuggacaaggucgaggccgaggugcagaucgacagacugaucacaggcagacugcagagccuccagacauacgugacccagcagcugaucagagccgccgagauuagagccucugccaaucuggccgccaccaagaugucugagugugugcugggccagagcaagagaguggacuuuugcggcaagggcugucaccugaugagcuucccucagucugccccucacggcgugguguuucugcacgugacauaugugcccgcucaagagaagaauuucaccaccgcuccagccaucugccacgacggcaaagcccacuuuccuagagaaggcguguucguguccaacggcacccauugguucgugacacagcggaacuucuacgagccccagaucaucaccaccgacaacaccuucgugucuggcaacugcgacguugugaucggcauugugaacaauaccguguacgacccucugcagcccgagcuggacagcggaggcggaggaucugacaucgaccccuacaaagaguucggcagcagcuaccagcugcugaacuuccugccucuggacuucuuccccgaccugaacgcccugguggauacagccacagcucuguacgaggaagaacugaccggcagagagcacugcagcccucaccacacagccauuagacaggcccucgugugcugggacgagcugacaaaacugaucgccuggaugagcagcaacaucaccagcgagcaagugcggaccaucaucgugaaccacgugaacgauaccuggggccugaaagugcggcagagccugugguuucaccugagcugucugaccuucggccagcacaccgugcaagaguuucugguguccuucggcguguggaucagaaccccugcuccauacagaccuccaaacgcucccauccugagcacccugccugagcacacagugaucuguugaggacuaguuauaagacugacuagcccgaugggccucccaacgggcccuccuccccuccuugcaccgagauuaauaaaaaaaaaaaaaaaaaaaaaaaaaaaaaaaaaaaaaaaaaaaaaaaaaaaaaaaaaaaaaaaaugcaucccccccccccccccccccccccccccccccaaaggcucuuuucagagccaccagaauu

SEQ ID NO: 13143 - RNA, 4123 nt, Artificial Sequence
  SARS-CoV-2/Wuhan/WIV05/2019__EPI_ISL_402128 spike protein mRNA gc mod (1-1147)(Q965C_S1003C) WhcAg construct
aggagaaagcuuaccauguucguguuucuggugcugcugccccugguguccagccagugugugaaccugaccaccagaacacagcugccuccagccuacaccaacagcuucaccagaggcguguacuaccccgacaagguguucagauccagcgugcugcacucuacccaggaccuguuccugccuuucuucagcaacgugaccugguuccacgccauccacguguccggcaccaauggcaccaagagauucgacaaccccgugcugcccuucaacgacgggguguacuuugccagcaccgagaaguccaacaucaucagaggcuggaucuucggcaccacacuggacagcaagacccagagccugcugaucgugaacaacgccaccaacguggucaucaaagugugcgaguuccaguucugcaacgaccccuuccugggcgucuacuaccacaagaacaacaagagcuggauggaaagcgaguuccggguguacagcagcgccaacaacugcaccuucgaguacgugucccagccuuuccugauggaccuggaaggcaagcagggcaacuucaagaaccugcgcgaguucguguucaagaacaucgacggcuacuucaaaaucuacagcaagcacaccccuaucaaccucgugcgggaucugccucagggcuucucugcucuggaaccccugguggaucugcccaucggcaucaacaucacccgguuucagacacugcuggcccugcacagaagcuaccugacaccuggcgauagcagcagcggauggacagcuggugccgccgcuuacuaugugggcuaccugcagccuagaaccuuccugcugaaguacaacgagaacggcaccaucaccgacgccguggauugugcucuggauccucugagcgagacaaagugcacccugaaguccuucaccguggaaaagggcaucuaccagaccagcaacuuccgggugcagcccaccgaauccaucgugcgguuccccaauaucaccaaucugugccccuucggcgagguguucaaugccaccagauucgccucuguguacgccuggaaccggaagcggaucagcaauugcguggccgacuacuccgugcuguacaacuccgccagcuucagcaccuucaagugcuacggcguguccccuaccaagcugaacgaccugugcuucacaaacguguacgccgacagcuucgugauccggggagaugaagugcggcagauugccccuggacagacaggcaagaucgccgacuacaacuacaagcugcccgacgacuucaccggcugugugauugccuggaacagcaacaaccuggacuccaaagucggcggcaacuacaauuaccuguaccggcuguuccggaaguccaaucugaagcccuucgagcgggacaucagcaccgaaaucuaucaggccggcagcaccccuugcaacggcguggaaggcuucaacugcuacuucccacugcaguccuacggcuuucagcccacaaauggcgugggcuaucagcccuacagagugguggugcugagcuucgaacugcugcaugcuccugccacagugugcggcccuaagaaaagcaccaaucucgugaagaacaaaugcgugaacuucaacuucaacggccugaccggcaccggcgugcugacagagagcaacaagaaguuccugccauuccagcaguuuggccgggauaucgccgauaccacagacgccguuagagauccccagacacuggaaauccuggacaucaccccaugcagcuucggcggagugucugugaucaccccuggcaccaacaccagcaaucagguggcagugcuguaccaggacgugaacuguaccgaagugcccguggccauucacgccgaucagcugacaccuacauggcggguguacuccaccggcagcaauguguuucagaccagagccggcugucugaucggagccgagcacgugaacaauagcuacgagugcgacauccccaucggcgcuggcaucugugccagcuaccagacacagacaaacagccccagacgggcuagaagcguggccagccagagcaucauugccuacacaaugucucugggcgccgagaacagcguggccuacuccaacaacucuaucgcuauccccaccaacuucaccaucagcgugaccaccgagauccugccuguguccaugaccaagaccagcguggacugcaccauguacaucugcggcgauuccaccgagugcuccaaccugcugcugcaguacggcagcuucugcacccagcugaauagagcccugacagggaucgccguggaacaggacaagaacacccaagagguguucgcccaagugaagcaaaucuacaagaccccuccuaucaaggacuucggcggcuucaauuucagccagauucugcccgauccuagcaagcccagcaagcggagcuucaucgaggaccugcuguucaacaaagugacacuggccgacgccggcuucaucaagcaguauggcgauugucugggcgacauugccgccagggaucugauuugcgcccagaaguuuaacggacugacagugcugccuccucugcugaccgaugagaugaucgcccaguacacaucugcccugcuggccggcacaaucacaagcggcuggacauuuggagcuggcgccgcucugcagauccccuuugcuaugcagauggccuaccgguucaacggcaucggagugacccagaaugugcuguacgagaaccagaagcugaucgccaaccaguucaacagcgccaucggcaagauccaggacagccugagcagcacagcaagcgcccugggaaagcugcaggacguggucaaccagaaugcccaggcacugaacacccuggucaagugccuguccuccaacuucggcgccaucagcucugugcugaacgauauccugagcagacuggacaaggucgaggccgaggugcagaucgacagacugaucacaggcagacugcagugucuccagacauacgugacccagcagcugaucagagccgccgagauuagagccucugccaaucuggccgccaccaagaugucugagugugugcugggccagagcaagagaguggacuuuugcggcaagggcuaccaccugaugagcuucccucagucugccccucacggcgugguguuucugcacgugacauaugugcccgcucaagagaagaauuucaccaccgcuccagccaucugccacgacggcaaagcccacuuuccuagagaaggcguguucguguccaacggcacccauugguucgugacacagcggaacuucuacgagccccagaucaucaccaccgacaacaccuucgugucuggcaacugcgacguugugaucggcauugugaacaauaccguguacgacccucugcagcccgagcuggacagcggaggcggaggaucugacaucgaccccuacaaagaguucggcagcagcuaccagcugcugaacuuccugccucuggacuucuuccccgaccugaacgcccugguggauacagccacagcucuguacgaggaagaacugaccggcagagagcacugcagcccucaccacacagccauuagacaggcccucgugugcugggacgagcugacaaaacugaucgccuggaugagcagcaacaucaccagcgagcaagugcggaccaucaucgugaaccacgugaacgauaccuggggccugaaagugcggcagagccugugguuucaccugagcugucugaccuucggccagcacaccgugcaagaguuucugguguccuucggcguguggaucagaaccccugcuccauacagaccuccaaacgcucccauccugagcacccugccugagcacacagugaucuguugaggacuaguuauaagacugacuagcccgaugggccucccaacgggcccuccuccccuccuugcaccgagauuaauaaaaaaaaaaaaaaaaaaaaaaaaaaaaaaaaaaaaaaaaaaaaaaaaaaaaaaaaaaaaaaaaugcaucccccccccccccccccccccccccccccccaaaggcucuuuucagagccaccagaauu

SEQ ID NO: 13144 - RNA, 4123 nt, Artificial Sequence
  SARS-CoV-2/Wuhan/WIV05/2019__EPI_ISL_402128 spike protein mRNA gc mod (1-1147)(F970C_G999C) WhcAg construct
aggagaaagcuuaccauguucguguuucuggugcugcugccccugguguccagccagugugugaaccugaccaccagaacacagcugccuccagccuacaccaacagcuucaccagaggcguguacuaccccgacaagguguucagauccagcgugcugcacucuacccaggaccuguuccugccuuucuucagcaacgugaccugguuccacgccauccacguguccggcaccaauggcaccaagagauucgacaaccccgugcugcccuucaacgacgggguguacuuugccagcaccgagaaguccaacaucaucagaggcuggaucuucggcaccacacuggacagcaagacccagagccugcugaucgugaacaacgccaccaacguggucaucaaagugugcgaguuccaguucugcaacgaccccuuccugggcgucuacuaccacaagaacaacaagagcuggauggaaagcgaguuccggguguacagcagcgccaacaacugcaccuucgaguacgugucccagccuuuccugauggaccuggaaggcaagcagggcaacuucaagaaccugcgcgaguucguguucaagaacaucgacggcuacuucaaaaucuacagcaagcacaccccuaucaaccucgugcgggaucugccucagggcuucucugcucuggaaccccugguggaucugcccaucggcaucaacaucacccgguuucagacacugcuggcccugcacagaagcuaccugacaccuggcgauagcagcagcggauggacagcuggugccgccgcuuacuaugugggcuaccugcagccuagaaccuuccugcugaaguacaacgagaacggcaccaucaccgacgccguggauugugcucuggauccucugagcgagacaaagugcacccugaaguccuucaccguggaaaagggcaucuaccagaccagcaacuuccgggugcagcccaccgaauccaucgugcgguuccccaauaucaccaaucugugccccuucggcgagguguucaaugccaccagauucgccucuguguacgccuggaaccggaagcggaucagcaauugcguggccgacuacuccgugcuguacaacuccgccagcuucagcaccuucaagugcuacggcguguccccuaccaagcugaacgaccugugcuucacaaacguguacgccgacagcuucgugauccggggagaugaagugcggcagauugccccuggacagacaggcaagaucgccgacuacaacuacaagcugcccgacgacuucaccggcugugugauugccuggaacagcaacaaccuggacuccaaagucggcggcaacuacaauuaccuguaccggcuguuccggaaguccaaucugaagcccuucgagcgggacaucagcaccgaaaucuaucaggccggcagcaccccuugcaacggcguggaaggcuucaacugcuacuucccacugcaguccuacggcuuucagcccacaaauggcgugggcuaucagcccuacagagugguggugcugagcuucgaacugcugcaugcuccugccacagugugcggcccuaagaaaagcaccaaucucgugaagaacaaaugcgugaacuucaacuucaacggccugaccggcaccggcgugcugacagagagcaacaagaaguuccugccauuccagcaguuuggccgggauaucgccgauaccacagacgccguuagagauccccagacacuggaaauccuggacaucaccccaugcagcuucggcggagugucugugaucaccccuggcaccaacaccagcaaucagguggcagugcuguaccaggacgugaacuguaccgaagugcccguggccauucacgccgaucagcugacaccuacauggcggguguacuccaccggcagcaauguguuucagaccagagccggcugucugaucggagccgagcacgugaacaauagcuacgagugcgacauccccaucggcgcuggcaucugugccagcuaccagacacagacaaacagccccagacgggcuagaagcguggccagccagagcaucauugccuacacaaugucucugggcgccgagaacagcguggccuacuccaacaacucuaucgcuauccccaccaacuucaccaucagcgugaccaccgagauccugccuguguccaugaccaagaccagcguggacugcaccauguacaucugcggcgauuccaccgagugcuccaaccugcugcugcaguacggcagcuucugcacccagcugaauagagcccugacagggaucgccguggaacaggacaagaacacccaagagguguucgcccaagugaagcaaaucuacaagaccccuccuaucaaggacuucggcggcuucaauuucagccagauucugcccgauccuagcaagcccagcaagcggagcuucaucgaggaccugcuguucaacaaagugacacuggccgacgccggcuucaucaagcaguauggcgauugucugggcgacauugccgccagggaucugauuugcgcccagaaguuuaacggacugacagugcugccuccucugcugaccgaugagaugaucgcccaguacacaucugcccugcuggccggcacaaucacaagcggcuggacauuuggagcuggcgccgcucugcagauccccuuugcuaugcagauggccuaccgguucaacggcaucggagugacccagaaugugcuguacgagaaccagaagcugaucgccaaccaguucaacagcgccaucggcaagauccaggacagccugagcagcacagcaagcgcccugggaaagcugcaggacguggucaaccagaaugcccaggcacugaacacccuggucaagcagcuguccuccaacugcggcgccaucagcucugugcugaacgauauccugagcagacuggacaaggucgaggccgaggugcagaucgacagacugaucacauguagacugcagagccuccagacauacgugacccagcagcugaucagagccgccgagauuagagccucugccaaucuggccgccaccaagaugucugagugugugcugggccagagcaagagaguggacuuuugcggcaagggcuaccaccugaugagcuucccucagucugccccucacggcgugguguuucugcacgugacauaugugcccgcucaagagaagaauuucaccaccgcuccagccaucugccacgacggcaaagcccacuuuccuagagaaggcguguucguguccaacggcacccauugguucgugacacagcggaacuucuacgagccccagaucaucaccaccgacaacaccuucgugucuggcaacugcgacguugugaucggcauugugaacaauaccguguacgacccucugcagcccgagcuggacagcggaggcggaggaucugacaucgaccccuacaaagaguucggcagcagcuaccagcugcugaacuuccugccucuggacuucuuccccgaccugaacgcccugguggauacagccacagcucuguacgaggaagaacugaccggcagagagcacugcagcccucaccacacagccauuagacaggcccucgugugcugggacgagcugacaaaacugaucgccuggaugagcagcaacaucaccagcgagcaagugcggaccaucaucgugaaccacgugaacgauaccuggggccugaaagugcggcagagccugugguuucaccugagcugucugaccuucggccagcacaccgugcaagaguuucugguguccuucggcguguggaucagaaccccugcuccauacagaccuccaaacgcucccauccugagcacccugccugagcacacagugaucuguugaggacuaguuauaagacugacuagcccgaugggccucccaacgggcccuccuccccuccuugcaccgagauuaauaaaaaaaaaaaaaaaaaaaaaaaaaaaaaaaaaaaaaaaaaaaaaaaaaaaaaaaaaaaaaaaaugcaucccccccccccccccccccccccccccccccaaaggcucuuuucagagccaccagaauu

SEQ ID NO: 13145 - RNA, 4123 nt, Artificial Sequence
  SARS-CoV-2/Wuhan/WIV05/2019__EPI_ISL_402128 spike protein mRNA gc mod (1-1147)(A972C_R995C) WhcAg construct
aggagaaagcuuaccauguucguguuucuggugcugcugccccugguguccagccagugugugaaccugaccaccagaacacagcugccuccagccuacaccaacagcuucaccagaggcguguacuaccccgacaagguguucagauccagcgugcugcacucuacccaggaccuguuccugccuuucuucagcaacgugaccugguuccacgccauccacguguccggcaccaauggcaccaagagauucgacaaccccgugcugcccuucaacgacgggguguacuuugccagcaccgagaaguccaacaucaucagaggcuggaucuucggcaccacacuggacagcaagacccagagccugcugaucgugaacaacgccaccaacguggucaucaaagugugcgaguuccaguucugcaacgaccccuuccugggcgucuacuaccacaagaacaacaagagcuggauggaaagcgaguuccggguguacagcagcgccaacaacugcaccuucgaguacgugucccagccuuuccugauggaccuggaaggcaagcagggcaacuucaagaaccugcgcgaguucguguucaagaacaucgacggcuacuucaaaaucuacagcaagcacaccccuaucaaccucgugcgggaucugccucagggcuucucugcucuggaaccccugguggaucugcccaucggcaucaacaucacccgguuucagacacugcuggcccugcacagaagcuaccugacaccuggcgauagcagcagcggauggacagcuggugccgccgcuuacuaugugggcuaccugcagccuagaaccuuccugcugaaguacaacgagaacggcaccaucaccgacgccguggauugugcucuggauccucugagcgagacaaagugcacccugaaguccuucaccguggaaaagggcaucuaccagaccagcaacuuccgggugcagcccaccgaauccaucgugcgguuccccaauaucaccaaucugugccccuucggcgagguguucaaugccaccagauucgccucuguguacgccuggaaccggaagcggaucagcaauugcguggccgacuacuccgugcuguacaacuccgccagcuucagcaccuucaagugcuacggcguguccccuaccaagcugaacgaccugugcuucacaaacguguacgccgacagcuucgugauccggggagaugaagugcggcagauugccccuggacagacaggcaagaucgccgacuacaacuacaagcugcccgacgacuucaccggcugugugauugccuggaacagcaacaaccuggacuccaaagucggcggcaacuacaauuaccuguaccggcuguuccggaaguccaaucugaagcccuucgagcgggacaucagcaccgaaaucuaucaggccggcagcaccccuugcaacggcguggaaggcuucaacugcuacuucccacugcaguccuacggcuuucagcccacaaauggcgugggcuaucagcccuacagagugguggugcugagcuucgaacugcugcaugcuccugccacagugugcggcccuaagaaaagcaccaaucucgugaagaacaaaugcgugaacuucaacuucaacggccugaccggcaccggcgugcugacagagagcaacaagaaguuccugccauuccagcaguuuggccgggauaucgccgauaccacagacgccguuagagauccccagacacuggaaauccuggacaucaccccaugcagcuucggcggagugucugugaucaccccuggcaccaacaccagcaaucagguggcagugcuguaccaggacgugaacuguaccgaagugcccguggccauucacgccgaucagcugacaccuacauggcggguguacuccaccggcagcaauguguuucagaccagagccggcugucugaucggagccgagcacgugaacaauagcuacgagugcgacauccccaucggcgcuggcaucugugccagcuaccagacacagacaaacagccccagacgggcuagaagcguggccagccagagcaucauugccuacacaaugucucugggcgccgagaacagcguggccuacuccaacaacucuaucgcuauccccaccaacuucaccaucagcgugaccaccgagauccugccuguguccaugaccaagaccagcguggacugcaccauguacaucugcggcgauuccaccgagugcuccaaccugcugcugcaguacggcagcuucugcacccagcugaauagagcccugacagggaucgccguggaacaggacaagaacacccaagagguguucgcccaagugaagcaaaucuacaagaccccuccuaucaaggacuucggcggcuucaauuucagccagauucugcccgauccuagcaagcccagcaagcggagcuucaucgaggaccugcuguucaacaaagugacacuggccgacgccggcuucaucaagcaguauggcgauugucugggcgacauugccgccagggaucugauuugcgcccagaaguuuaacggacugacagugcugccuccucugcugaccgaugagaugaucgcccaguacacaucugcccugcuggccggcacaaucacaagcggcuggacauuuggagcuggcgccgcucugcagauccccuuugcuaugcagauggccuaccgguucaacggcaucggagugacccagaaugugcuguacgagaaccagaagcugaucgccaaccaguucaacagcgccaucggcaagauccaggacagccugagcagcacagcaagcgcccugggaaagcugcaggacguggucaaccagaaugcccaggcacugaacacccuggucaagcagcuguccuccaacuucggcugcaucagcucugugcugaacgauauccugagcagacuggacaaggucgaggccgaggugcagaucgacugucugaucacaggcagacugcagagccuccagacauacgugacccagcagcugaucagagccgccgagauuagagccucugccaaucuggccgccaccaagaugucugagugugugcugggccagagcaagagaguggacuuuugcggcaagggcuaccaccugaugagcuucccucagucugccccucacggcgugguguuucugcacgugacauaugugcccgcucaagagaagaauuucaccaccgcuccagccaucugccacgacggcaaagcccacuuuccuagagaaggcguguucguguccaacggcacccauugguucgugacacagcggaacuucuacgagccccagaucaucaccaccgacaacaccuucgugucuggcaacugcgacguugugaucggcauugugaacaauaccguguacgacccucugcagcccgagcuggacagcggaggcggaggaucugacaucgaccccuacaaagaguucggcagcagcuaccagcugcugaacuuccugccucuggacuucuuccccgaccugaacgcccugguggauacagccacagcucuguacgaggaagaacugaccggcagagagcacugcagcccucaccacacagccauuagacaggcccucgugugcugggacgagcugacaaaacugaucgccuggaugagcagcaacaucaccagcgagcaagugcggaccaucaucgugaaccacgugaacgauaccuggggccugaaagugcggcagagccugugguuucaccugagcugucugaccuucggccagcacaccgugcaagaguuucugguguccuucggcguguggaucagaaccccugcuccauacagaccuccaaacgcucccauccugagcacccugccugagcacacagugaucuguugaggacuaguuauaagacugacuagcccgaugggccucccaacgggcccuccuccccuccuugcaccgagauuaauaaaaaaaaaaaaaaaaaaaaaaaaaaaaaaaaaaaaaaaaaaaaaaaaaaaaaaaaaaaaaaaaugcaucccccccccccccccccccccccccccccccaaaggcucuuuucagagccaccagaauu

SEQ ID NO: 13146 - RNA, 4123 nt, Artificial Sequence
  SARS-CoV-2/Wuhan/WIV05/2019__EPI_ISL_402128 spike protein mRNA gc mod (1-1147)(A890C_V1040C) WhcAg construct
aggagaaagcuuaccauguucguguuucuggugcugcugccccugguguccagccagugugugaaccugaccaccagaacacagcugccuccagccuacaccaacagcuucaccagaggcguguacuaccccgacaagguguucagauccagcgugcugcacucuacccaggaccuguuccugccuuucuucagcaacgugaccugguuccacgccauccacguguccggcaccaauggcaccaagagauucgacaaccccgugcugcccuucaacgacgggguguacuuugccagcaccgagaaguccaacaucaucagaggcuggaucuucggcaccacacuggacagcaagacccagagccugcugaucgugaacaacgccaccaacguggucaucaaagugugcgaguuccaguucugcaacgaccccuuccugggcgucuacuaccacaagaacaacaagagcuggauggaaagcgaguuccggguguacagcagcgccaacaacugcaccuucgaguacgugucccagccuuuccugauggaccuggaaggcaagcagggcaacuucaagaaccugcgcgaguucguguucaagaacaucgacggcuacuucaaaaucuacagcaagcacaccccuaucaaccucgugcgggaucugccucagggcuucucugcucuggaaccccugguggaucugcccaucggcaucaacaucacccgguuucagacacugcuggcccugcacagaagcuaccugacaccuggcgauagcagcagcggauggacagcuggugccgccgcuuacuaugugggcuaccugcagccuagaaccuuccugcugaaguacaacgagaacggcaccaucaccgacgccguggauugugcucuggauccucugagcgagacaaagugcacccugaaguccuucaccguggaaaagggcaucuaccagaccagcaacuuccgggugcagcccaccgaauccaucgugcgguuccccaauaucaccaaucugugccccuucggcgagguguucaaugccaccagauucgccucuguguacgccuggaaccggaagcggaucagcaauugcguggccgacuacuccgugcuguacaacuccgccagcuucagcaccuucaagugcuacggcguguccccuaccaagcugaacgaccugugcuucacaaacguguacgccgacagcuucgugauccggggagaugaagugcggcagauugccccuggacagacaggcaagaucgccgacuacaacuacaagcugcccgacgacuucaccggcugugugauugccuggaacagcaacaaccuggacuccaaagucggcggcaacuacaauuaccuguaccggcuguuccggaaguccaaucugaagcccuucgagcgggacaucagcaccgaaaucuaucaggccggcagcaccccuugcaacggcguggaaggcuucaacugcuacuucccacugcaguccuacggcuuucagcccacaaauggcgugggcuaucagcccuacagagugguggugcugagcuucgaacugcugcaugcuccugccacagugugcggcccuaagaaaagcaccaaucucgugaagaacaaaugcgugaacuucaacuucaacggccugaccggcaccggcgugcugacagagagcaacaagaaguuccugccauuccagcaguuuggccgggauaucgccgauaccacagacgccguuagagauccccagacacuggaaauccuggacaucaccccaugcagcuucggcggagugucugugaucaccccuggcaccaacaccagcaaucagguggcagugcuguaccaggacgugaacuguaccgaagugcccguggccauucacgccgaucagcugacaccuacauggcggguguacuccaccggcagcaauguguuucagaccagagccggcugucugaucggagccgagcacgugaacaauagcuacgagugcgacauccccaucggcgcuggcaucugugccagcuaccagacacagacaaacagccccagacgggcuagaagcguggccagccagagcaucauugccuacacaaugucucugggcgccgagaacagcguggccuacuccaacaacucuaucgcuauccccaccaacuucaccaucagcgugaccaccgagauccugccuguguccaugaccaagaccagcguggacugcaccauguacaucugcggcgauuccaccgagugcuccaaccugcugcugcaguacggcagcuucugcacccagcugaauagagcccugacagggaucgccguggaacaggacaagaacacccaagagguguucgcccaagugaagcaaaucuacaagaccccuccuaucaaggacuucggcggcuucaauuucagccagauucugcccgauccuagcaagcccagcaagcggagcuucaucgaggaccugcuguucaacaaagugacacuggccgacgccggcuucaucaagcaguauggcgauugucugggcgacauugccgccagggaucugauuugcgcccagaaguuuaacggacugacagugcugccuccucugcugaccgaugagaugaucgcccaguacacaucugcccugcuggccggcacaaucacaagcggcuggacauuuggaugcggcgccgcucugcagauccccuuugcuaugcagauggccuaccgguucaacggcaucggagugacccagaaugugcuguacgagaaccagaagcugaucgccaaccaguucaacagcgccaucggcaagauccaggacagccugagcagcacagcaagcgcccugggaaagcugcaggacguggucaaccagaaugcccaggcacugaacacccuggucaagcagcuguccuccaacuucggcgccaucagcucugugcugaacgauauccugagcagacuggacaaggucgaggccgaggugcagaucgacagacugaucacaggcagacugcagagccuccagacauacgugacccagcagcugaucagagccgccgagauuagagccucugccaaucuggccgccaccaagaugucugagugugugcugggccagagcaagagaugugacuuuugcggcaagggcuaccaccugaugagcuucccucagucugccccucacggcgugguguuucugcacgugacauaugugcccgcucaagagaagaauuucaccaccgcuccagccaucugccacgacggcaaagcccacuuuccuagagaaggcguguucguguccaacggcacccauugguucgugacacagcggaacuucuacgagccccagaucaucaccaccgacaacaccuucgugucuggcaacugcgacguugugaucggcauugugaacaauaccguguacgacccucugcagcccgagcuggacagcggaggcggaggaucugacaucgaccccuacaaagaguucggcagcagcuaccagcugcugaacuuccugccucuggacuucuuccccgaccugaacgcccugguggauacagccacagcucuguacgaggaagaacugaccggcagagagcacugcagcccucaccacacagccauuagacaggcccucgugugcugggacgagcugacaaaacugaucgccuggaugagcagcaacaucaccagcgagcaagugcggaccaucaucgugaaccacgugaacgauaccuggggccugaaagugcggcagagccugugguuucaccugagcugucugaccuucggccagcacaccgugcaagaguuucugguguccuucggcguguggaucagaaccccugcuccauacagaccuccaaacgcucccauccugagcacccugccugagcacacagugaucuguugaggacuaguuauaagacugacuagcccgaugggccucccaacgggcccuccuccccuccuugcaccgagauuaauaaaaaaaaaaaaaaaaaaaaaaaaaaaaaaaaaaaaaaaaaaaaaaaaaaaaaaaaaaaaaaaaugcaucccccccccccccccccccccccccccccccaaaggcucuuuucagagccaccagaauu

SEQ ID NO: 13147 - RNA, 4123 nt, Artificial Sequence
  SARS-CoV-2/Wuhan/WIV05/2019__EPI_ISL_402128 spike protein mRNA gc mod (1-1147)(T874C_S1055C) WhcAg construct
aggagaaagcuuaccauguucguguuucuggugcugcugccccugguguccagccagugugugaaccugaccaccagaacacagcugccuccagccuacaccaacagcuucaccagaggcguguacuaccccgacaagguguucagauccagcgugcugcacucuacccaggaccuguuccugccuuucuucagcaacgugaccugguuccacgccauccacguguccggcaccaauggcaccaagagauucgacaaccccgugcugcccuucaacgacgggguguacuuugccagcaccgagaaguccaacaucaucagaggcuggaucuucggcaccacacuggacagcaagacccagagccugcugaucgugaacaacgccaccaacguggucaucaaagugugcgaguuccaguucugcaacgaccccuuccugggcgucuacuaccacaagaacaacaagagcuggauggaaagcgaguuccggguguacagcagcgccaacaacugcaccuucgaguacgugucccagccuuuccugauggaccuggaaggcaagcagggcaacuucaagaaccugcgcgaguucguguucaagaacaucgacggcuacuucaaaaucuacagcaagcacaccccuaucaaccucgugcgggaucugccucagggcuucucugcucuggaaccccugguggaucugcccaucggcaucaacaucacccgguuucagacacugcuggcccugcacagaagcuaccugacaccuggcgauagcagcagcggauggacagcuggugccgccgcuuacuaugugggcuaccugcagccuagaaccuuccugcugaaguacaacgagaacggcaccaucaccgacgccguggauugugcucuggauccucugagcgagacaaagugcacccugaaguccuucaccguggaaaagggcaucuaccagaccagcaacuuccgggugcagcccaccgaauccaucgugcgguuccccaauaucaccaaucugugccccuucggcgagguguucaaugccaccagauucgccucuguguacgccuggaaccggaagcggaucagcaauugcguggccgacuacuccgugcuguacaacuccgccagcuucagcaccuucaagugcuacggcguguccccuaccaagcugaacgaccugugcuucacaaacguguacgccgacagcuucgugauccggggagaugaagugcggcagauugccccuggacagacaggcaagaucgccgacuacaacuacaagcugcccgacgacuucaccggcugugugauugccuggaacagcaacaaccuggacuccaaagucggcggcaacuacaauuaccuguaccggcuguuccggaaguccaaucugaagcccuucgagcgggacaucagcaccgaaaucuaucaggccggcagcaccccuugcaacggcguggaaggcuucaacugcuacuucccacugcaguccuacggcuuucagcccacaaauggcgugggcuaucagcccuacagagugguggugcugagcuucgaacugcugcaugcuccugccacagugugcggcccuaagaaaagcaccaaucucgugaagaacaaaugcgugaacuucaacuucaacggccugaccggcaccggcgugcugacagagagcaacaagaaguuccugccauuccagcaguuuggccgggauaucgccgauaccacagacgccguuagagauccccagacacuggaaauccuggacaucaccccaugcagcuucggcggagugucugugaucaccccuggcaccaacaccagcaaucagguggcagugcuguaccaggacgugaacuguaccgaagugcccguggccauucacgccgaucagcugacaccuacauggcggguguacuccaccggcagcaauguguuucagaccagagccggcugucugaucggagccgagcacgugaacaauagcuacgagugcgacauccccaucggcgcuggcaucugugccagcuaccagacacagacaaacagccccagacgggcuagaagcguggccagccagagcaucauugccuacacaaugucucugggcgccgagaacagcguggccuacuccaacaacucuaucgcuauccccaccaacuucaccaucagcgugaccaccgagauccugccuguguccaugaccaagaccagcguggacugcaccauguacaucugcggcgauuccaccgagugcuccaaccugcugcugcaguacggcagcuucugcacccagcugaauagagcccugacagggaucgccguggaacaggacaagaacacccaagagguguucgcccaagugaagcaaaucuacaagaccccuccuaucaaggacuucggcggcuucaauuucagccagauucugcccgauccuagcaagcccagcaagcggagcuucaucgaggaccugcuguucaacaaagugacacuggccgacgccggcuucaucaagcaguauggcgauugucugggcgacauugccgccagggaucugauuugcgcccagaaguuuaacggacugacagugcugccuccucugcugaccgaugagaugaucgcccaguacugcucugcccugcuggccggcacaaucacaagcggcuggacauuuggagcuggcgccgcucugcagauccccuuugcuaugcagauggccuaccgguucaacggcaucggagugacccagaaugugcuguacgagaaccagaagcugaucgccaaccaguucaacagcgccaucggcaagauccaggacagccugagcagcacagcaagcgcccugggaaagcugcaggacguggucaaccagaaugcccaggcacugaacacccuggucaagcagcuguccuccaacuucggcgccaucagcucugugcugaacgauauccugagcagacuggacaaggucgaggccgaggugcagaucgacagacugaucacaggcagacugcagagccuccagacauacgugacccagcagcugaucagagccgccgagauuagagccucugccaaucuggccgccaccaagaugucugagugugugcugggccagagcaagagaguggacuuuugcggcaagggcuaccaccugaugagcuucccucagugcgccccucacggcgugguguuucugcacgugacauaugugcccgcucaagagaagaauuucaccaccgcuccagccaucugccacgacggcaaagcccacuuuccuagagaaggcguguucguguccaacggcacccauugguucgugacacagcggaacuucuacgagccccagaucaucaccaccgacaacaccuucgugucuggcaacugcgacguugugaucggcauugugaacaauaccguguacgacccucugcagcccgagcuggacagcggaggcggaggaucugacaucgaccccuacaaagaguucggcagcagcuaccagcugcugaacuuccugccucuggacuucuuccccgaccugaacgcccugguggauacagccacagcucuguacgaggaagaacugaccggcagagagcacugcagcccucaccacacagccauuagacaggcccucgugugcugggacgagcugacaaaacugaucgccuggaugagcagcaacaucaccagcgagcaagugcggaccaucaucgugaaccacgugaacgauaccuggggccugaaagugcggcagagccugugguuucaccugagcugucugaccuucggccagcacaccgugcaagaguuucugguguccuucggcguguggaucagaaccccugcuccauacagaccuccaaacgcucccauccugagcacccugccugagcacacagugaucuguugaggacuaguuauaagacugacuagcccgaugggccucccaacgggcccuccuccccuccuugcaccgagauuaauaaaaaaaaaaaaaaaaaaaaaaaaaaaaaaaaaaaaaaaaaaaaaaaaaaaaaaaaaaaaaaaaugcaucccccccccccccccccccccccccccccccaaaggcucuuuucagagccaccagaauu

SEQ ID NO: 13148 - protein, 3 aa, Artificial Sequence
  Linker GGS
GGS

SEQ ID NO: 13149 - RNA, 9 nt, Artificial Sequence
  Linker GGS CDS gc
ggcgggagc

SEQ ID NO: 13150 - RNA, 9 nt, Artificial Sequence
  Linker GGS CDS human
ggcgggagc

SEQ ID NO: 13151 - RNA, 9 nt, Artificial Sequence
  Linker GGS CDS gc mod
ggaggaucu

SEQ ID NO: 13152 - protein, 5 aa, Artificial Sequence
  Linker GGGGS
GGGGS

SEQ ID NO: 13153 - RNA, 15 nt, Artificial Sequence
  Linker GGGGS CDS gc
ggcgggggcgggagc

SEQ ID NO: 13154 - RNA, 15 nt, Artificial Sequence
  Linker GGGGS CDS human
ggcgggggagguagc

SEQ ID NO: 13155 - RNA, 15 nt, Artificial Sequence
  Linker GGGGS CDS gc mod
ggaggcggaggaucu

SEQ ID NO: 13156 - RNA, 21 nt, Artificial Sequence
  Linker GGGSGGG CDS gc
ggcggcgggagcgggggcggg

SEQ ID NO: 13157 - RNA, 21 nt, Artificial Sequence
  Linker GGGSGGG CDS human
ggcgggggcagcgggggcggg

SEQ ID NO: 13158 - RNA, 21 nt, Artificial Sequence
  Linker GGGSGGG CDS gc mod
ggcggaggaucuggcggagga

SEQ ID NO: 13159 - RNA, 459 nt, Artificial Sequence
  Aa/VF5_ribH(C37A_N102D) Lumazine Synthase (LumSynth) CDS gc
cagaucuacgagggcaagcugaccgccgaggggcuccgcuucggcaucguggccagccgguucaaccacgcgcuggucgaccgccugguggagggggccaucgacgccaucgugcggcacggcgggcgcgaggaggacaucacccucguccgggugcccggcuccugggagaucccgguggccgccggcgagcuggcccgcaaggaggacaucgacgcggucaucgccaucggggugcugauccggggcgccacgccccacuucgacuacaucgccagcgagguguccaaggggcucgcggaccugagccuggagcuccgcaagcccaucaccuucggcgucaucaccgccgacacccuggagcaggccaucgagcgggccgggacgaagcacggcaacaagggcugggaggccgcgcuguccgccaucgagauggccaaccucuucaagagccugcgc

SEQ ID NO: 13160 - RNA, 459 nt, Artificial Sequence
  Aa/VF5_ribH(C37A_N102D) Lumazine Synthase (LumSynth) CDS gc
cagaucuacgagggcaagcugaccgccgaggggcuccgcuucggcaucguggccagccgguucaaccacgcgcuggucgaccgccugguggagggggccaucgacgccaucgugcggcacggcgggcgcgaggaggacaucacccucguccgggugcccggcuccugggagaucccgguggccgccggcgagcuggcgcgcaaggaggacaucgacgccgucaucgccaucggggugcugauccggggcgccacgccccacuucgacuacaucgcgagcgagguguccaaggggcucgccgaccugagccuggagcuccgcaagcccaucaccuucggcgucaucaccgccgacacccuggagcaggccaucgagcgggccgggacgaagcacggcaacaagggcugggaggcggcccuguccgccaucgagauggccaaccucuucaagagccugcgc

SEQ ID NO: 13161 - RNA, 459 nt, Artificial Sequence
  Aa/VF5_ribH(C37A_N102D) Lumazine Synthase (LumSynth) CDS human
cagaucuacgagggcaagcugaccgccgaagggcucagauucggaauuguggcuagcagguuuaaccacgcacuugucgaccggcugguugagggugccauagaugcgaucgugcgccauggcgggcgagaagaggacauuacauugguacgugugcccggauccugggaaaucccugucgcugccggcgaguuagcaagaaaagaggauauugacgccgugaucgcuauagguguucugaucaggggagcaacuccacacuucgauuauauugccucugaagugucaaaggggcuagcugaccucagucuggagcuucggaaaccgaucacguuuggcgucauuaccgccgauacacuggaacaagcgaucgagcgcgcaggcacuaagcaugggaauaaaggaugggaggccgcuuugagcgccauagaaauggcaaaccucuucaagucccugaga

SEQ ID NO: 13162 - RNA, 459 nt, Artificial Sequence
  Aa/VF5_ribH(C37A_N102D) Lumazine Synthase (LumSynth) CDS gc mod
cagaucuacgagggcaagcugacagccgagggccugagauuuggaaucguggccagccgguucaaucacgcccugguggauagacugguggaaggcgccaucgaugccauugucagacacggcggcagagaagaggacaucacccucguuagagugcccggcucuugggagauuccuguggcugcuggcgagcuggcccggaaagaagauaucgacgccguuaucgccaucggcgugcugaucagaggcgccacaccucacuucgacuauaucgccagcgagguguccaaaggccuggccgaucugagccuggaacugagaaagcccaucaccuucggcgugaucaccgcugacacacuggaacaggccauugagagagccggcaccaagcacggcaacaaaggaugggaagccgcucuguccgccaucgagauggccaaccuguucaagagccugcgg

SEQ ID NO: 13163 - RNA, 489 nt, Artificial Sequence
  Hp/J99_pfr(5-167_N19Q) Ferritin CDS gc
gacaucaucaagcuccugaacgagcaggucaacaaggagaugcaguccagcaaccuguacauguccaugagcuccuggugcuacacccacagccucgacggcgccgggcuguuccuguucgaccacgccgcggaggaguacgagcacgccaagaagcucaucaucuuccugaacgagaacaacgugcccgugcagcugaccuccaucagcgccccggagcacaaguucgagggccucacgcagaucuuccagaaggccuacgagcacgagcagcacaucuccgagagcaucaacaacaucguggaccacgccaucaaguccaaggaccacgcgaccuucaacuuccugcagugguacgucgccgagcagcacgaggaggaggugcuguucaaggacauccucgacaagaucgagcugaucgggaacgagaaccacggccuguaccucgccgaccaguacgugaaggggaucgccaagagccgcaagucc

SEQ ID NO: 13164 - RNA, 489 nt, Artificial Sequence
  Hp/J99_pfr(5-167_N19Q) Ferritin CDS gc
gacaucaucaagcuccugaacgagcaggugaacaaggagaugcaguccagcaaccuguacauguccaugagcuccuggugcuacacccacagccucgacggcgccgggcuguuccuguucgaccacgccgcggaggaguacgagcacgccaagaagcucaucaucuuccugaacgagaacaacguccccgugcagcugaccuccaucagcgccccggagcacaaguucgagggccucacgcagaucuuccagaaggccuacgagcacgagcagcacaucuccgagagcaucaacaacaucguggaccacgccaucaaguccaaggaccacgcgaccuucaacuuccugcagugguacgucgccgagcagcacgaggaggaggugcuguucaaggacauccucgacaagaucgagcugaucgggaacgagaaccacggccuguaccucgccgaccaguacgugaaggggaucgccaagagccgcaagucc

SEQ ID NO: 13165 - RNA, 489 nt, Artificial Sequence
  Hp/J99_pfr(5-167_N19Q) Ferritin CDS gc
gacaucaucaagcugcucaacgagcaggucaacaaggagaugcagagcuccaaccuguacaugagcauguccagcuggugcuacacccacucccuggacggcgccggccucuuccuguucgaccacgccgcggaggaguacgagcacgccaagaagcugaucaucuuccucaacgagaacaacgugcccgugcagcugaccagcaucuccgccccggagcacaaguucgaggggcugacgcagaucuuccagaaggccuacgagcacgagcagcacaucagcgaguccaucaacaacaucguggaccacgccaucaagagcaaggaccacgcgaccuucaacuuccuccagugguacgucgccgagcagcacgaggaggaggugcuguucaaggacauccuggacaagaucgagcucaucgggaacgagaaccacggccuguaccuggccgaccaguacgugaaggggaucgccaagucccgcaagagc

SEQ ID NO: 13166 - RNA, 489 nt, Artificial Sequence
  Hp/J99_pfr(5-167_N19Q) Ferritin CDS human
gacaucauuaagcugcucaacgaacaggugaauaaagagaugcaaagcuccaaccuuuacaugucuaugucaaguuggugcuauacccacagccuggauggcgccggguuguucuuauuugaccaugcugcagaggaauacgagcacgccaagaaacugauaaucuuccuaaaugaaaacaauguccccguucagcucacauccauuucugcgccugagcauaaguuugagggacugacucagaucuuccagaaggcuuaugaacacgagcaacauauuucggaaucaaucaacaauauaguggaucacgccaucaaaagcaaggaccacgcaacguuuaacuuccuucagugguacguagccgagcagcaugaggaagaggugcuguuuaaagauauuuuggacaagaucgaacucauugguaaugagaaccacggccuguaucuggcugaucaguacgucaaagggaucgcaaagaguagaaaaucc

SEQ ID NO: 13167 - RNA, 489 nt, Artificial Sequence
  Hp/J99_pfr(5-167_N19Q) Ferritin CDS gc mod
gacaucaucaagcugcugaacgagcaagugaacaaagagaugcagagcagcaaccuguacaugagcaugagcagcuggugcuacacccacagccuugauggcgccggacuguuccuguuugaucacgccgccgaggaauacgagcacgccaagaagcugaucaucuuccugaacgagaacaacgugcccgugcagcugaccagcauuucugccccugagcacaaguucgagggccugacacagaucuuccagaaggccuacgaacacgagcagcacaucagcgagagcaucaacaacaucguggaccacgccauuaagagcaaggaucacgccaccuucaacuuucugcagugguacguggccgaacagcacgaggaagaggugcuguucaaggacauccuggacaagaucgagcugaucggcaacgagaaccacggccuguaucuggccgaccaguacgugaagggaaucgccaagagcagaaagagc

SEQ ID NO: 13168 - RNA, 81 nt, Artificial Sequence
  BPT4_wac(458-484) Foldon CDS gc
ggcuacauccccgaggccccgcgcgacgggcaggccuacgugcggaaggacggcgaguggguccugcucagcaccuuccug

SEQ ID NO: 13169 - RNA, 81 nt, Artificial Sequence
  BPT4_wac(458-484) Foldon CDS human
ggcuacauccccgaggccccuagagacgggcaggcuuaugugaggaaggauggagaauggguccugcucagcaccuuccuu

SEQ ID NO: 13170 - RNA, 81 nt, Artificial Sequence
  BPT4_wac(458-484) Foldon CDS gc mod
ggcuauauccccgaggcuccuagagauggccaggccuauguucggaaggauggcgaaugggugcugcugagcaccuuccuu

SEQ ID NO: 13171 - protein, 149 aa, Artificial Sequence
  WHV_WhBvgp4(1-149_C150) WhcAg VLP
DIDPYKEFGSSYQLLNFLPLDFFPDLNALVDTATALYEEELTGREHCSPHHTAIRQALVCWDELTKLIAWMSSNITSEQVRTIIVNHVNDTWGLKVRQSLWFHLSCLTFGQHTVQEFLVSFGVWIRTPAPYRPPNAPILSTLPEHTVIC

SEQ ID NO: 13172 - RNA, 447 nt, Artificial Sequence
  WHV_WhBvgp4(1-149_C150) WhcAg VLP CDS gc
gacaucgaccccuacaaggaguucggcagcuccuaccagcugcucaacuuccugccccuggacuucuuccccgaccucaacgcccugguggacaccgccaccgcgcuguacgaggaggagcucacggggcgcgagcacugcagcccccaccacaccgccauccggcaggcccuggucugcugggacgagcugaccaagcucaucgccuggauguccagcaacaucaccuccgagcagguccgcacgaucaucgugaaccacgucaacgacaccuggggccugaaggugcggcagagccugugguuccaccucuccugccugaccuucgggcagcacaccgugcaggaguuccuggucagcuucggcguguggauccgcacgcccgccccguaccggccgcccaacgcgccgauccucuccacccugccggagcacaccgugaucugc

SEQ ID NO: 13173 - RNA, 447 nt, Artificial Sequence
  WHV_WhBvgp4(1-149_C150) WhcAg VLP CDS gc
gacaucgaccccuacaaggaguucggcagcuccuaccagcugcucaacuuccugccgcuggacuucuuccccgaccucaacgcccugguggacaccgccaccgcgcuguacgaggaggagcucacggggcgcgagcacugcagcccccaccacaccgccauccggcaggcccuggucugcugggacgagcugaccaagcucaucgccuggauguccagcaacaucaccuccgagcagguccgcacgaucaucgugaaccacgugaacgacaccuggggccugaaggugcggcagagccugugguuccaccucuccugccugaccuucgggcagcacaccgugcaggaguuccuggucagcuucggcguguggauccgcacgcccgccccguaccggccgcccaacgcgcccauccucuccacccugcccgagcacaccgugaucugc

SEQ ID NO: 13174 - RNA, 447 nt, Artificial Sequence
  WHV_WhBvgp4(1-149_C150) WhcAg VLP CDS human
gacaucgaucccuacaaggaguucggcagcuccuaucagcugcucaacuuucuuccucuggacuucuuuccagauuugaaugccuuaguggacaccgcuacagcacuguacgaagaggaacuaacugggagagagcacugcucuccgcaucacacggccauuaggcaagcgcucgucuguugggaugaacugaccaaacuuauagcuuggaugucaaguaacaucacaagcgagcagguucggacuauuaucgugaaucauguaaacgacaccuggggacugaaggugcgccaguccuugugguuccaccucucuugccugacauuuggucagcauaccguccaagaguuccuggugucguuuggcguuuggauucgaacucccgccccuuaucguccacccaaugcaccuauccucucaacauuaccagaacacaccgugauaugu

SEQ ID NO: 13175 - RNA, 447 nt, Artificial Sequence
  WHV_WhBvgp4(1-149_C150) WhcAg VLP CDS gc mod
gacaucgaccccuacaaagaguucggcagcagcuaccagcugcugaacuuccugccucuggacuucuuccccgaccugaacgcccugguggauacagccacagcucuguacgaggaagaacugaccggcagagagcacugcagcccucaccacacagccauuagacaggcccucgugugcugggacgagcugacaaaacugaucgccuggaugagcagcaacaucaccagcgagcaagugcggaccaucaucgugaaccacgugaacgauaccuggggccugaaagugcggcagagccugugguuucaccugagcugucugaccuucggccagcacaccgugcaagaguuucugguguccuucggcguguggaucagaaccccugcuccauacagaccuccaaacgcucccauccugagcacccugccugagcacacagugaucugu

SEQ ID NO: 13176 - protein, 126 aa, Artificial Sequence
  SARS-CoV-2/Wuhan/WIV05/2019__EPI_ISL_402128 spike protein (1148-1273)
FKEELDKYFKNHTSPDVDLGDISGINASVVNIQKEIDRLNEVAKNLNESLIDLQELGKYEQYIKWPWYIWLGFIAGLIAIVMVTIMLCCMTSCCSCLKGCCSCGSCCKFDEDDSEPVLKGVKLHYT

SEQ ID NO: 13177 - protein, 126 aa, Artificial Sequence
  SARS-CoV-2/bat/Yunnan/RaTG13/2013__EPI_ISL_402131 spike protein (1144-1269)
FKEELDKYFKNHTSPDVDLGDISGINASVVNIQKEIDRLNEVAKNLNESLIDLQELGKYEQYIKWPWYIWLGFIAGLIAIIMVTIMLCCMTSCCSCLKGCCSCGSCCKFDEDDSEPVLKGVKLHYT

SEQ ID NO: 13178 - protein, 126 aa, Artificial Sequence; identical to SEQ ID NO: 13176
  SARS-CoV-2/Wuhan/HBCDC-HB-01/2019__EPI_ISL_402132 spike protein (1148-1273)

SEQ ID NO: 13179 - protein, 126 aa, Artificial Sequence; identical to SEQ ID NO: 13176
  SARS-CoV-2/Guangdong/20SF028/2020__EPI_ISL_403936 spike protein (1148-1273)

SEQ ID NO: 13180 - protein, 126 aa, Artificial Sequence
  SARS-CoV-2/Shenzhen/SZTH-001/2020__EPI_ISL_406592 spike protein (1148-1273)
FKEELDKYFKNHTSPDVDLGDISGINASVVNIQKEIDRLNEVAKNLNESLIDLQELGKYEQYIKWPWYIWLGFIAGLIAIVMVTIMLCCMTSCCSCLKGCCSCGSCCKFDEDDSGPVLKGVKLHYT

SEQ ID NO: 13181 - protein, 126 aa, Artificial Sequence; identical to SEQ ID NO: 13176
  SARS-CoV-2/Shenzhen/SZTH-004/2020__EPI_ISL_406595 spike protein (1148-1273)

SEQ ID NO: 13182 - protein, 126 aa, Artificial Sequence; identical to SEQ ID NO: 13176
  SARS-CoV-2/France/IDF0372/2020__EPI_ISL_406596 spike protein (1148-1273)

SEQ ID NO: 13183 - protein, 126 aa, Artificial Sequence; identical to SEQ ID NO: 13176
  SARS-CoV-2/Australia/VIC01/2020__EPI_ISL_406844 spike protein (1148-1273)

SEQ ID NO: 13184 - protein, 126 aa, Artificial Sequence; identical to SEQ ID NO: 13176
  SARS-CoV-2/Germany/BavPat1/2020__EPI_ISL_406862 spike protein (1148-1273)

SEQ ID NO: 13185 - protein, 126 aa, Artificial Sequence; identical to SEQ ID NO: 13176
  SARS-CoV-2/Wuhan/HBCDC-HB-02/2020__EPI_ISL_412978 spike protein (1148-1273)

SEQ ID NO: 13186 - protein, 126 aa, Artificial Sequence; identical to SEQ ID NO: 13176
  SARS-CoV-2/Australia/QLD02/2020__EPI_ISL_407896 spike protein (1148-1273)

SEQ ID NO: 13187 - protein, 126 aa, Artificial Sequence; identical to SEQ ID NO: 13176
  SARS-CoV-2/India/1-31/2020__EPI_ISL_413523 spike protein (1148-1273)

SEQ ID NO: 13188 - protein, 126 aa, Artificial Sequence; identical to SEQ ID NO: 13176
  SARS-CoV-2/Guangdong/GD2020087-P0008/2020__EPI_ISL_413863 spike protein (1148-1273)

SEQ ID NO: 13189 - protein, 126 aa, Artificial Sequence; identical to SEQ ID NO: 13176
  SARS-CoV-2/Sweden/01/2020__EPI_ISL_411951 spike protein (1148-1273)

SEQ ID NO: 13190 - protein, 126 aa, Artificial Sequence; identical to SEQ ID NO: 13176
  SARS-CoV-2/Tianmen/HBCDC-HB-07/2020__EPI_ISL_412983 spike protein (1148-1273)

SEQ ID NO: 13191 - protein, 126 aa, Artificial Sequence; identical to SEQ ID NO: 13176
  SARS-CoV-2/Hong Kong/case42_VM20002493/2020__EPI_ISL_414527 spike protein (1148-1273)

SEQ ID NO: 13192 - protein, 126 aa, Artificial Sequence; identical to SEQ ID NO: 13176
  SARS-CoV-2/USA/CruiseA-23/2020__EPI_ISL_414482 spike protein (1148-1273)

SEQ ID NO: 13193 - protein, 126 aa, Artificial Sequence; identical to SEQ ID NO: 13176
  SARS-CoV-2/Hong Kong/case85_VM20002868/2020__EPI_ISL_414519 spike protein (1148-1273)

SEQ ID NO: 13194 - protein, 126 aa, Artificial Sequence
  SARS-CoV-2/England/200990660/2020__EPI_ISL_414523 spike protein (1148-1273)
FKEELDKYFKNHTSPDVDLGDISGINASVVNIQKEIDRLNEVAKNLNESLIDLQELGKYEQYIKWPWYIWLGFIAGLIAIVMVTIMLCCMTSCCSCLKGCCSCGSCCKFDEDDSELVLKGVKLHYT

SEQ ID NO: 13195 - protein, 126 aa, Artificial Sequence; identical to SEQ ID NO: 13176
  SARS-CoV-2/Australia/NSW09/2020__EPI_ISL_413595 spike protein (1148-1273)

SEQ ID NO: 13196 - protein, 126 aa, Artificial Sequence
  SARS-CoV-2/Australia/NSW10/2020__EPI_ISL_413596 spike protein (1148-1273)
FKEELDKYFKNHTSPDVDLGDISGINASVVNIQKEIDRLNEVAKNLNESLIDLQELGKYEQYIKWPWYIWLGFIAGLIAIVMVTIMLCCMTSCCSCLKGCCSCGSCFKFDEDDSEPVLKGVKLHYT

SEQ ID NO: 13197 - protein, 126 aa, Artificial Sequence; identical to SEQ ID NO: 13176
  SARS-CoV-2/Switzerland/1000477797/2020__EPI_ISL_413023 spike protein (1148-1273)

SEQ ID NO: 13198 - protein, 126 aa, Artificial Sequence; identical to SEQ ID NO: 13176
  SARS-CoV-2/Belgium/BA-02291/2020__EPI_ISL_415159 spike protein (1148-1273)

SEQ ID NO: 13199 - protein, 126 aa, Artificial Sequence; identical to SEQ ID NO: 13176
  SARS-CoV-2/USA/WA8-UW5/2020__EPI_ISL_413486 spike protein (1148-1273)

SEQ ID NO: 13200 - protein, 126 aa, Artificial Sequence; identical to SEQ ID NO: 13176
  SARS-CoV-2/England/20102000506/2020__EPI_ISL_415147 spike protein (1148-1273)

SEQ ID NO: 13201 - protein, 126 aa, Artificial Sequence; identical to SEQ ID NO: 13176
  SARS-CoV-2/Belgium/VAG-03013/2020__EPI_ISL_415155 spike protein (1148-1273)

SEQ ID NO: 13202 - protein, 126 aa, Artificial Sequence; identical to SEQ ID NO: 13176
  SARS-CoV-2/Belgium/BC-03016/2020__EPI_ISL_415157 spike protein (1148-1273)

SEQ ID NO: 13203 - protein, 126 aa, Artificial Sequence; identical to SEQ ID NO: 13176
  SARS-CoV-2/Germany/BavPat3/2020__EPI_ISL_414521 spike protein (1148-1273)

SEQ ID NO: 13204 - protein, 126 aa, Artificial Sequence; identical to SEQ ID NO: 13176
  SARS-CoV-2/France/HF1805/2020__EPI_ISL_414628 spike protein (1148-1273)

SEQ ID NO: 13205 - protein, 126 aa, Artificial Sequence; identical to SEQ ID NO: 13176
  SARS-CoV-2/Netherlands/ZuidHolland_9/2020__EPI_ISL_414445 spike protein (1148-1273)

SEQ ID NO: 13206 - protein, 126 aa, Artificial Sequence; identical to SEQ ID NO: 13176
  SARS-CoV-2/Finland/FIN03032020A/2020__EPI_ISL_413602 spike protein (1148-1273)

SEQ ID NO: 13207 - protein, 126 aa, Artificial Sequence; identical to SEQ ID NO: 13176
  SARS-CoV-2/France/GE1977/2020__EPI_ISL_414632 spike protein (1148-1273)

SEQ ID NO: 13208 - protein, 126 aa, Artificial Sequence; identical to SEQ ID NO: 13176
  SARS-CoV-2/Finland/FIN-313/2020__EPI_ISL_414641 spike protein (1148-1273)

SEQ ID NO: 13209 - protein, 126 aa, Artificial Sequence; identical to SEQ ID NO: 13176
  SARS-CoV-2/Netherlands/ZuidHolland_2/2020__EPI_ISL_414556 spike protein (1148-1273)

SEQ ID NO: 13210 - protein, 126 aa, Artificial Sequence; identical to SEQ ID NO: 13176
  SARS-CoV-2/USA/WA-UW31/2020__EPI_ISL_414618 spike protein (1148-1273)

SEQ ID NO: 13211 - protein, 126 aa, Artificial Sequence; identical to SEQ ID NO: 13176
  SARS-CoV-2/South Korea/SNU01/2020__EPI_ISL_411929 spike protein (1148-1273)

SEQ ID NO: 13212 - protein, 126 aa, Artificial Sequence; identical to SEQ ID NO: 13176
  SARS-CoV-2/China/WF0004/2020__EPI_ISL_413694 spike protein (1148-1273)

SEQ ID NO: 13213 - protein, 126 aa, Artificial Sequence; identical to SEQ ID NO: 13176
  SARS-CoV-2/China/WF0028/2020__EPI_ISL_413791 spike protein (1148-1273)

SEQ ID NO: 13214 - protein, 126 aa, Artificial Sequence; identical to SEQ ID NO: 13176
  SARS-CoV-2/2019-nCoV/USA-CruiseA-18/2020__MT159716.1 spike protein (1148-1273)

SEQ ID NO: 13215 - protein, 126 aa, Artificial Sequence; identical to SEQ ID NO: 13176
  SARS-CoV-2/SARS-CoV-2/Yunnan-01/human/2020/CHN__MT049951.1 spike protein (1148-1273)

SEQ ID NO: 13216 - protein, 126 aa, Artificial Sequence; identical to SEQ ID NO: 13176
  SARS-CoV-2/USA/WA-UW292/2020__EPI_ISL_418077 spike protein (1148-1273)

SEQ ID NO: 13217 - protein, 126 aa, Artificial Sequence; identical to SEQ ID NO: 13176
  SARS-CoV-2/Iceland/192/2020__EPI_ISL_417819 spike protein (1148-1273)

SEQ ID NO: 13218 - protein, 126 aa, Artificial Sequence; identical to SEQ ID NO: 13176
  SARS-CoV-2/Belgium/ULG-6939/2020__EPI_ISL_417020 spike protein (1148-1273)

SEQ ID NO: 13219 - protein, 126 aa, Artificial Sequence; identical to SEQ ID NO: 13176
  SARS-CoV-2/France/HF2496/2020__EPI_ISL_418231 spike protein (1148-1273)

SEQ ID NO: 13220 - protein, 126 aa, Artificial Sequence; identical to SEQ ID NO: 13176
  SARS-CoV-2/USA/WA-UW291/2020__EPI_ISL_418076 spike protein (1148-1273)

SEQ ID NO: 13221 - protein, 126 aa, Artificial Sequence
  SARS-CoV-2/Portugal/PT0034/2020__EPI_ISL_418019 spike protein (1148-1273)
FKEELDKYFKNHTSPDVDLGDISGINASVVNIQKEIDRLNEVAKNLNESLIDLQELGKYEQYIKWPWYIWLGFIAGLIAIVMVTIMLCCITSCCSCLKGCCSCGSCCKFDEDDSEPVLKGVKLHYT

SEQ ID NO: 13222 - protein, 126 aa, Artificial Sequence
  SARS-CoV-2/Iceland/202/2020__EPI_ISL_417750 spike protein (1148-1273)
FKEELDKYFKNHTSPDVDLGDIPGINASVVNIQKEIDRLNEVAKNLNESLIDLQELGKYEQYIKWPWYIWLGFIAGLIAIVMVTIMLCCMTSCCSCLKGCCSCGSCCKFDEDDSEPVLKGVKLHYT

SEQ ID NO: 13223 - protein, 126 aa, Artificial Sequence; identical to SEQ ID NO: 13176
  SARS-CoV-2/USA/WA-UW261/2020__EPI_ISL_418046 spike protein (1148-1273)

SEQ ID NO: 13224 - protein, 126 aa, Artificial Sequence; identical to SEQ ID NO: 13176
  SARS-CoV-2/Portugal/PT0035/2020__EPI_ISL_418020 spike protein (1148-1273)

SEQ ID NO: 13225 - protein, 126 aa, Artificial Sequence; identical to SEQ ID NO: 13176
  SARS-CoV-2/USA/NY-NYUMC7/2020__EPI_ISL_418192 spike protein (1148-1273)

SEQ ID NO: 13226 - protein, 126 aa, Artificial Sequence; identical to SEQ ID NO: 13176
  SARS-CoV-2/Iceland/189/2020__EPI_ISL_417709 spike protein (1148-1273)

SEQ ID NO: 13227 - protein, 126 aa, Artificial Sequence; identical to SEQ ID NO: 13176
  SARS-CoV-2/Australia/NSW56/2020__EPI_ISL_417408 spike protein (1148-1273)

SEQ ID NO: 13228 - protein, 126 aa, Artificial Sequence; identical to SEQ ID NO: 13176
  SARS-CoV-2/Iceland/280/2020__EPI_ISL_417608 spike protein (1148-1273)

SEQ ID NO: 13229 - protein, 126 aa, Artificial Sequence
  SARS-CoV-2/Iceland/247/2020__EPI_ISL_417575 spike protein (1148-1273)
FKEELDKYFKNHTSPDVDLGDISGINASVVNIQKEIDRLNEVAKNLNESLIDLQELGKYEQYIKWPWYIWLGFIAGLIAIVIVTIMLCCMTSCCSCLKGCCSCGSCCKFDEDDSEPVLKGVKLHYT

SEQ ID NO: 13230 - protein, 126 aa, Artificial Sequence; identical to SEQ ID NO: 13176
  SARS-CoV-2/Iceland/238/2020__EPI_ISL_417566 spike protein (1148-1273)

SEQ ID NO: 13231 - protein, 126 aa, Artificial Sequence; identical to SEQ ID NO: 13176
  SARS-CoV-2/Greece/16/2020__EPI_ISL_418265 spike protein (1148-1273)

SEQ ID NO: 13232 - protein, 126 aa, Artificial Sequence; identical to SEQ ID NO: 13176
  SARS-CoV-2/Iceland/319/2020__EPI_ISL_417648 spike protein (1148-1273)

SEQ ID NO: 13233 - protein, 126 aa, Artificial Sequence; identical to SEQ ID NO: 13176
  SARS-CoV-2/Congo/94/2020__EPI_ISL_417947 spike protein (1148-1273)

SEQ ID NO: 13234 - protein, 126 aa, Artificial Sequence; identical to SEQ ID NO: 13176
  SARS-CoV-2/Congo/158/2020__EPI_ISL_417950 spike protein (1148-1273)

SEQ ID NO: 13235 - protein, 126 aa, Artificial Sequence; identical to SEQ ID NO: 13176
  SARS-CoV-2/USA/UT-00034/2020__EPI_ISL_417977 spike protein (1148-1273)

SEQ ID NO: 13236 - protein, 126 aa, Artificial Sequence; identical to SEQ ID NO: 13176
  SARS-CoV-2/USA/UT-00033/2020__EPI_ISL_417976 spike protein (1148-1273)

SEQ ID NO: 13237 - protein, 126 aa, Artificial Sequence; identical to SEQ ID NO: 13176
  SARS-CoV-2/USA/WI-13/2020__EPI_ISL_417516 spike protein (1148-1273)

SEQ ID NO: 13238 - protein, 126 aa, Artificial Sequence; identical to SEQ ID NO: 13176
  SARS-CoV-2/India/1-27/2020__EPI_ISL_413522 spike protein (1147-1272)

SEQ ID NO: 13239 - protein, 126 aa, Artificial Sequence
  SARS-CoV-2/pangolin/Guangxi/P4L/2017__EPI_ISL_410538 spike protein (1142-1267)
FKEELDKYFKNHTSPDVDLGDISGINASVVNIQKEIDRLNEVAKNLNESPIDLQELGKYEQYIKWPWYIWLGFIAGLIAIIMVTIMLCCMTSCCSCLKGCCSCGSCCKFDEDDSEPVLKGVKLHYT

SEQ ID NO: 13240 - protein, 126 aa, Artificial Sequence; identical to SEQ ID NO: 13177
  SARS-CoV-2/pangolin/Guangxi/P5L/2017__EPI_ISL_410540 spike protein (1142-1267)

SEQ ID NO: 13241 - protein, 126 aa, Artificial Sequence; identical to SEQ ID NO: 13177
  SARS-CoV-2/pangolin/Guangxi/P5E/2017__EPI_ISL_410541 spike protein (1142-1267)

SEQ ID NO: 13242 - protein, 126 aa, Artificial Sequence; identical to SEQ ID NO: 13177
  SARS-CoV-2/pangolin/Guangxi/P1E/2017__EPI_ISL_410539 spike protein (1140-1265)

SEQ ID NO: 13243 - protein, 223 aa, Artificial Sequence
  SARS-CoV-2/Wuhan/WIV05/2019__EPI_ISL_402128 spike protein (319-541)
RVQPTESIVRFPNITNLCPFGEVFNATRFASVYAWNRKRISNCVADYSVLYNSASFSTFKCYGVSPTKLNDLCFTNVYADSFVIRGDEVRQIAPGQTGKIADYNYKLPDDFTGCVIAWNSNNLDSKVGGNYNYLYRLFRKSNLKPFERDISTEIYQAGSTPCNGVEGFNCYFPLQSYGFQPTNGVGYQPYRVVVLSFELLHAPATVCGPKKSTNLVKNKCVNF

SEQ ID NO: 13244 - protein, 223 aa, Artificial Sequence
  SARS-CoV-2/bat/Yunnan/RaTG13/2013__EPI_ISL_402131 spike protein (315-537)
RVQPTDSIVRFPNITNLCPFGEVFNATTFASVYAWNRKRISNCVADYSVLYNSTSFSTFKCYGVSPTKLNDLCFTNVYADSFVITGDEVRQIAPGQTGKIADYNYKLPDDFTGCVIAWNSKHIDAKEGGNFNYLYRLFRKANLKPFERDISTEIYQAGSKPCNGQTGLNCYYPLYRYGFYPTDGVGHQPYRVVVLSFELLNAPATVCGPKKSTNLVKNKCVNF

SEQ ID NO: 13245 - protein, 223 aa, Artificial Sequence; identical to SEQ ID NO: 13243
  SARS-CoV-2/Wuhan/HBCDC-HB-01/2019__EPI_ISL_402132 spike protein (319-541)

SEQ ID NO: 13246 - protein, 223 aa, Artificial Sequence; identical to SEQ ID NO: 13243
  SARS-CoV-2/Guangdong/20SF028/2020__EPI_ISL_403936 spike protein (319-541)

SEQ ID NO: 13247 - protein, 223 aa, Artificial Sequence; identical to SEQ ID NO: 13243
  SARS-CoV-2/Shenzhen/SZTH-001/2020__EPI_ISL_406592 spike protein (319-541)

SEQ ID NO: 13248 - protein, 223 aa, Artificial Sequence
  SARS-CoV-2/Shenzhen/SZTH-004/2020__EPI_ISL_406595 spike protein (319-541)
RVQPTESIVRFPNITNLCPFGEVFNATRFASVYAWDRKRISNCVAYYSVLYNSASFSTFKCYGVSPTKLNDLCFTNVYADSFVIRGDEVRQIAPGQTGKIADYNYKLPDDFTGCVIAWNSNNLDSKVGGNYNYLYRLFRKSNLKPFERDISTEIYQAGSTPCNGVEGFNCYFPLQSYGFQPTNGVGYQPYRVVVLSFELLHAPATVCGPKKSTNLVKNKCVNF

SEQ ID NO: 13249 - protein, 223 aa, Artificial Sequence
  SARS-CoV-2/France/IDF0372/2020__EPI_ISL_406596 spike protein (319-541)
RVQPTESIVRFPNITNLCPFGEVFNATRFASVYAWNRKRISNCVADYSFLYNSASFSTFKCYGVSPTKLNDLCFTNVYADSFVIRGDEVRQIAPGQTGKIADYNYKLPDDFTGCVIAWNSNNLDSKVGGNYNYLYRLFRKSNLKPFERDISTEIYQAGSTPCNGVEGFNCYFPLQSYGFQPTNGVGYQPYRVVVLSFELLHAPATVCGPKKSTNLVKNKCVNF

SEQ ID NO: 13250 - protein, 223 aa, Artificial Sequence; identical to SEQ ID NO: 13243
  SARS-CoV-2/Australia/VIC01/2020__EPI_ISL_406844 spike protein (319-541)

SEQ ID NO: 13251 - protein, 223 aa, Artificial Sequence; identical to SEQ ID NO: 13243
  SARS-CoV-2/Germany/BavPat1/2020__EPI_ISL_406862 spike protein (319-541)

SEQ ID NO: 13252 - protein, 223 aa, Artificial Sequence; identical to SEQ ID NO: 13243
  SARS-CoV-2/Wuhan/HBCDC-HB-02/2020__EPI_ISL_412978 spike protein (319-541)

SEQ ID NO: 13253 - protein, 223 aa, Artificial Sequence; identical to SEQ ID NO: 13243
  SARS-CoV-2/Australia/QLD02/2020__EPI_ISL_407896 spike protein (319-541)

SEQ ID NO: 13254 - protein, 223 aa, Artificial Sequence; identical to SEQ ID NO: 13243
  SARS-CoV-2/India/1-31/2020__EPI_ISL_413523 spike protein (319-541)

SEQ ID NO: 13255 - protein, 223 aa, Artificial Sequence
  SARS-CoV-2/Guangdong/GD2020087-P0008/2020__EPI_ISL_413863 spike protein (319-541)
RVQPTESIVRFPNITNLCPFGEVFNATRFASVYAWNRKRISNCVADYSVLYNSASFSTFKCYGVSPTKLNDLCFTNVYADSFVIRGDEVREIAPGQTGKIADYNYKLPDDFTGCVIAWNSNNLDSKVGGNYNYLYRLFRKSNLKPFERDISTEIYQAGSTPCNGVEGFNCYFPLQSYGFQPTNGVGYQPYRVVVLSFELLHAPATVCGPKKSTNLVKNKCVNF

SEQ ID NO: 13256 - protein, 223 aa, Artificial Sequence; identical to SEQ ID NO: 13243
  SARS-CoV-2/Sweden/01/2020__EPI_ISL_411951 spike protein (319-541)

SEQ ID NO: 13257 - protein, 223 aa, Artificial Sequence; identical to SEQ ID NO: 13243
  SARS-CoV-2/Tianmen/HBCDC-HB-07/2020__EPI_ISL_412983 spike protein (319-541)

SEQ ID NO: 13258 - protein, 223 aa, Artificial Sequence; identical to SEQ ID NO: 13243
  SARS-CoV-2/Hong Kong/case42_VM20002493/2020__EPI_ISL_414527 spike protein (319-541)

SEQ ID NO: 13259 - protein, 223 aa, Artificial Sequence; identical to SEQ ID NO: 13243
  SARS-CoV-2/USA/CruiseA-23/2020__EPI_ISL_414482 spike protein (319-541)

SEQ ID NO: 13260 - protein, 223 aa, Artificial Sequence; identical to SEQ ID NO: 13243
  SARS-CoV-2/Hong Kong/case85_VM20002868/2020__EPI_ISL_414519 spike protein (319-541)

SEQ ID NO: 13261 - protein, 223 aa, Artificial Sequence; identical to SEQ ID NO: 13243
  SARS-CoV-2/England/200990660/2020__EPI_ISL_414523 spike protein (319-541)

SEQ ID NO: 13262 - protein, 223 aa, Artificial Sequence; identical to SEQ ID NO: 13243
  SARS-CoV-2/Australia/NSW09/2020__EPI_ISL_413595 spike protein (319-541)

SEQ ID NO: 13263 - protein, 223 aa, Artificial Sequence; identical to SEQ ID NO: 13243
  SARS-CoV-2/Australia/NSW10/2020__EPI_ISL_413596 spike protein (319-541)

SEQ ID NO: 13264 - protein, 223 aa, Artificial Sequence; identical to SEQ ID NO: 13243
  SARS-CoV-2/Switzerland/1000477797/2020__EPI_ISL_413023 spike protein (319-541)

SEQ ID NO: 13265 - protein, 223 aa, Artificial Sequence
  SARS-CoV-2/Belgium/BA-02291/2020__EPI_ISL_415159 spike protein (319-541)
RVQPTESIVRFPNITNLCPFGEVFNATRFASVYAWNRKRISNCVADYSVLYNSASFSTFKCYGVSPTKLNDLCFTNVYADSFVIRGDEVRQIAPGQTGKIADYNYKLPDDFTGCVIAWNSNNLDSKVGGNYNYLYRLFRRSNLKPFERDISTEIYQAGSTPCNGVEGFNCYFPLQSYGFQPTNGVGYQPYRVVVLSFELLPAPATVCGPKKSTNLVKNKCVNF

SEQ ID NO: 13266 - protein, 223 aa, Artificial Sequence; identical to SEQ ID NO: 13243
  SARS-CoV-2/USA/WA8-UW5/2020__EPI_ISL_413486 spike protein (319-541)

SEQ ID NO: 13267 - protein, 223 aa, Artificial Sequence; identical to SEQ ID NO: 13243
  SARS-CoV-2/England/20102000506/2020__EPI_ISL_415147 spike protein (319-541)

SEQ ID NO: 13268 - protein, 223 aa, Artificial Sequence; identical to SEQ ID NO: 13243
  SARS-CoV-2/Belgium/VAG-03013/2020__EPI_ISL_415155 spike protein (319-541)

SEQ ID NO: 13269 - protein, 223 aa, Artificial Sequence; identical to SEQ ID NO: 13243
  SARS-CoV-2/Belgium/BC-03016/2020__EPI_ISL_415157 spike protein (319-541)

SEQ ID NO: 13270 - protein, 223 aa, Artificial Sequence; identical to SEQ ID NO: 13243
  SARS-CoV-2/Germany/BavPat3/2020__EPI_ISL_414521 spike protein (319-541)

SEQ ID NO: 13271 - protein, 223 aa, Artificial Sequence; identical to SEQ ID NO: 13243
  SARS-CoV-2/France/HF1805/2020__EPI_ISL_414628 spike protein (319-541)

SEQ ID NO: 13272 - protein, 223 aa, Artificial Sequence; identical to SEQ ID NO: 13243
  SARS-CoV-2/Netherlands/ZuidHolland_9/2020__EPI_ISL_414445 spike protein (319-541)

SEQ ID NO: 13273 - protein, 223 aa, Artificial Sequence
  SARS-CoV-2/Finland/FIN03032020A/2020__EPI_ISL_413602 spike protein (319-541)
RVQPTESIVRFPNITNLCPFGEVFNATRFASVYAWNRKRISNCVADYSVLYNSASFSTFKCYGVSPTKLNDLCFTNVYADSFVIRGDEVRQIAPGQTGKIADYNYKLPDDFTGCVISWNSNNLDSKVGGNYNYLYRLFRKSNLKPFERDISTEIYQAGSTPCNGVEGFNCYFPLQSYGFQPTNGVGYQPYRVVVLSFELLHAPATVCGPKKSTNLVKNKCVNF

SEQ ID NO: 13274 - protein, 223 aa, Artificial Sequence; identical to SEQ ID NO: 13243
  SARS-CoV-2/France/GE1977/2020__EPI_ISL_414632 spike protein (319-541)

SEQ ID NO: 13275 - protein, 223 aa, Artificial Sequence; identical to SEQ ID NO: 13243
  SARS-CoV-2/Finland/FIN-313/2020__EPI_ISL_414641 spike protein (319-541)

SEQ ID NO: 13276 - protein, 223 aa, Artificial Sequence; identical to SEQ ID NO: 13243
  SARS-CoV-2/Netherlands/ZuidHolland_2/2020__EPI_ISL_414556 spike protein (319-541)

SEQ ID NO: 13277 - protein, 223 aa, Artificial Sequence
  SARS-CoV-2/USA/WA-UW31/2020__EPI_ISL_414618 spike protein (319-541)
RVQPTESIVRFPNITNLCPFGEVFNATRFASVYAWNRKRISNCVADYSVLYNSASFSTFKCYGVSPTKLNDLCFTNVYADSFVIRGDEVRQIAPGQTGKIADYNYKLPDDFTGCVIAWNSNNLDSKVGGNYNYLYRLFRKSNLKPFERDISTEIYQAGSTPCNGAEGFNCYFPLQSYGFQPTNGVGYQPYRVVVLSFELLHAPATVCGPKKSTNLVKNKCVNF

SEQ ID NO: 13278 - protein, 223 aa, Artificial Sequence; identical to SEQ ID NO: 13243
  SARS-CoV-2/South Korea/SNU01/2020__EPI_ISL_411929 spike protein (319-541)

SEQ ID NO: 13279 - protein, 223 aa, Artificial Sequence; identical to SEQ ID NO: 13243
  SARS-CoV-2/China/WF0004/2020__EPI_ISL_413694 spike protein (319-541)

SEQ ID NO: 13280 - protein, 223 aa, Artificial Sequence; identical to SEQ ID NO: 13243
  SARS-CoV-2/China/WF0028/2020__EPI_ISL_413791 spike protein (319-541)

SEQ ID NO: 13281 - protein, 223 aa, Artificial Sequence; identical to SEQ ID NO: 13243
  SARS-CoV-2/2019-nCoV/USA-CruiseA-18/2020__MT159716.1 spike protein (319-541)

SEQ ID NO: 13282 - protein, 223 aa, Artificial Sequence; identical to SEQ ID NO: 13243
  SARS-CoV-2/SARS-CoV-2/Yunnan-01/human/2020/CHN__MT049951.1 spike protein (319-541)

SEQ ID NO: 13283 - protein, 223 aa, Artificial Sequence
  SARS-CoV-2/USA/WA-UW292/2020__EPI_ISL_418077 spike protein (319-541)
RVQPTESIVRFPNITNLCPFGEVFNATRFASVYAWNRKRISNCVADYSVLYNSASFSTFKCYGVSPTKLNDLCFTNVYADSFVIRGDEVRQIAPGQTGKIADYNYKLPDDFTGCVIAWNSNNLDSKVGGNYNYLYRLFRKSNLKPFERDISTEIYQASSTPCNGVEGFNCYFPLQSYGFQPTNGVGYQPYRVVVLSFELLHAPATVCGPKKSTNLVKNKCVNF

SEQ ID NO: 13284 - protein, 223 aa, Artificial Sequence; identical to SEQ ID NO: 13243
  SARS-CoV-2/Iceland/192/2020__EPI_ISL_417819 spike protein (319-541)

SEQ ID NO: 13285 - protein, 223 aa, Artificial Sequence; identical to SEQ ID NO: 13243
  SARS-CoV-2/Belgium/ULG-6939/2020__EPI_ISL_417020 spike protein (319-541)

SEQ ID NO: 13286 - protein, 223 aa, Artificial Sequence; identical to SEQ ID NO: 13243
  SARS-CoV-2/France/HF2496/2020__EPI_ISL_418231 spike protein (319-541)

SEQ ID NO: 13287 - protein, 223 aa, Artificial Sequence; identical to SEQ ID NO: 13243
  SARS-CoV-2/USA/WA-UW291/2020__EPI_ISL_418076 spike protein (319-541)

SEQ ID NO: 13288 - protein, 223 aa, Artificial Sequence; identical to SEQ ID NO: 13243
  SARS-CoV-2/Portugal/PT0034/2020__EPI_ISL_418019 spike protein (319-541)

SEQ ID NO: 13289 - protein, 223 aa, Artificial Sequence; identical to SEQ ID NO: 13243
  SARS-CoV-2/Iceland/202/2020__EPI_ISL_417750 spike protein (319-541)

SEQ ID NO: 13290 - protein, 223 aa, Artificial Sequence
  SARS-CoV-2/USA/WA-UW261/2020__EPI_ISL_418046 spike protein (319-541)
RVQPTESIVRFPNITNLCPFGEVFNATRFTSVYAWNRKRISNCVADYSVLYNSASFSTFKCYGVSPTKLNDLCFTNVYADSFVIRGDEVRQIAPGQTGKIADYNYKLPDDFTGCVIAWNSNNLDSKVGGNYNYLYRLFRKSNLKPFERDISTEIYQAGSTPCNGVEGFNCYFPLQSYGFQPTNGVGYQPYRVVVLSFELLHAPATVCGPKKSTNLVKNKCVNF

SEQ ID NO: 13291 - protein, 223 aa, Artificial Sequence; identical to SEQ ID NO: 13243
  SARS-CoV-2/Portugal/PT0035/2020__EPI_ISL_418020 spike protein (319-541)

SEQ ID NO: 13292 - protein, 223 aa, Artificial Sequence; identical to SEQ ID NO: 13243
  SARS-CoV-2/USA/NY-NYUMC7/2020__EPI_ISL_418192 spike protein (319-541)

SEQ ID NO: 13293 - protein, 223 aa, Artificial Sequence; identical to SEQ ID NO: 13243
  SARS-CoV-2/Iceland/189/2020__EPI_ISL_417709 spike protein (319-541)

SEQ ID NO: 13294 - protein, 223 aa, Artificial Sequence; identical to SEQ ID NO: 13243
  SARS-CoV-2/Australia/NSW56/2020__EPI_ISL_417408 spike protein (319-541)
